United States Patent Application Publication US 2005/0255487 A1 - sequence listing, part 82

SEQ ID NO: 2253704 - RNA, 19 nt, Homo sapiens
  misc_RNA (1)...(19): siRNA sense strand
agcaauggccggagaaagu

SEQ ID NO: 2253705 - RNA, 19 nt, Homo sapiens
  misc_RNA (1)...(19): siRNA sense strand
gauuggaaacccagaacca

SEQ ID NO: 2253706 - RNA, 19 nt, Homo sapiens
  misc_RNA (1)...(19): siRNA sense strand
aggaggaggaaaaggggua

SEQ ID NO: 2253707 - RNA, 19 nt, Homo sapiens
  misc_RNA (1)...(19): siRNA sense strand
ggguacaaggggaagacua

SEQ ID NO: 2253708 - RNA, 19 nt, Homo sapiens
  misc_RNA (1)...(19): siRNA sense strand
aggccagggaagaaaguga

SEQ ID NO: 2253709 - RNA, 19 nt, Homo sapiens
  misc_RNA (1)...(19): siRNA sense strand
agggaggagaggagcugua

SEQ ID NO: 2253710 - RNA, 19 nt, Homo sapiens
  misc_RNA (1)...(19): siRNA sense strand
gaaaagggguacaagggga

SEQ ID NO: 2253711 - RNA, 19 nt, Homo sapiens
  misc_RNA (1)...(19): siRNA sense strand
uggagagggagguaaguga

SEQ ID NO: 2253712 - RNA, 19 nt, Homo sapiens
  misc_RNA (1)...(19): siRNA sense strand
aggagagugaagaggagau

SEQ ID NO: 2253713 - RNA, 19 nt, Homo sapiens
  misc_RNA (1)...(19): siRNA sense strand
gggaagacaaacuggaccu

SEQ ID NO: 2253714 - RNA, 19 nt, Homo sapiens
  misc_RNA (1)...(19): siRNA sense strand
agagagaggaggaagugga

SEQ ID NO: 2253715 - RNA, 19 nt, Homo sapiens
  misc_RNA (1)...(19): siRNA sense strand
ggcagaacuggaagcgcua

SEQ ID NO: 2253716 - RNA, 19 nt, Homo sapiens
  misc_RNA (1)...(19): siRNA sense strand
ccuggaacccuuuaggaga

SEQ ID NO: 2253717 - RNA, 19 nt, Homo sapiens
  misc_RNA (1)...(19): siRNA sense strand
aagaagguggagggaaaua

SEQ ID NO: 2253718 - RNA, 19 nt, Homo sapiens
  misc_RNA (1)...(19): siRNA sense strand
gagaaggagaugcaggagu

SEQ ID NO: 2253719 - RNA, 19 nt, Homo sapiens
  misc_RNA (1)...(19): siRNA sense strand
aagaaagagcagagagagg

SEQ ID NO: 2253720 - RNA, 19 nt, Homo sapiens
  misc_RNA (1)...(19): siRNA sense strand
ggaagagcagaaagaggca

SEQ ID NO: 2253721 - RNA, 19 nt, Homo sapiens
  misc_RNA (1)...(19): siRNA sense strand
agauucagcuucugggaca

SEQ ID NO: 2253722 - RNA, 19 nt, Homo sapiens
  misc_RNA (1)...(19): siRNA sense strand
augacugggagcugggaua

SEQ ID NO: 2253723 - RNA, 19 nt, Homo sapiens
  misc_RNA (1)...(19): siRNA sense strand
ggagugacgaugggagcaa

SEQ ID NO: 2253724 - RNA, 19 nt, Homo sapiens
  misc_RNA (1)...(19): siRNA sense strand
ccgaagagcuaaagcccag

SEQ ID NO: 2253725 - RNA, 19 nt, Homo sapiens
  misc_RNA (1)...(19): siRNA sense strand
gguaaauggaaucgcguuc

SEQ ID NO: 2253726 - RNA, 19 nt, Homo sapiens
  misc_RNA (1)...(19): siRNA sense strand
acgacuggucaaagggaca

SEQ ID NO: 2253727 - RNA, 19 nt, Homo sapiens
  misc_RNA (1)...(19): siRNA sense strand
cugggaaguucaagacagu

SEQ ID NO: 2253728 - RNA, 19 nt, Homo sapiens
  misc_RNA (1)...(19): siRNA sense strand
cuuucuuauugcaggauca

SEQ ID NO: 2253729 - RNA, 19 nt, Homo sapiens
  misc_RNA (1)...(19): siRNA sense strand
gggacaaagaugccagaac

SEQ ID NO: 2253730 - RNA, 19 nt, Homo sapiens
  misc_RNA (1)...(19): siRNA sense strand
auugcaggaucaugggcua

SEQ ID NO: 2253731 - RNA, 19 nt, Homo sapiens
  misc_RNA (1)...(19): siRNA sense strand
ucuacaagcaugagagcaa

SEQ ID NO: 2253732 - RNA, 19 nt, Homo sapiens
  misc_RNA (1)...(19): siRNA sense strand
gaaccuuccuggugggcaa

SEQ ID NO: 2253733 - RNA, 19 nt, Homo sapiens
  misc_RNA (1)...(19): siRNA sense strand
aaucaaaggaggaacaaaa

SEQ ID NO: 2253734 - RNA, 19 nt, Homo sapiens
  misc_RNA (1)...(19): siRNA sense strand
uggccaaagccgauggaau

SEQ ID NO: 2253735 - RNA, 19 nt, Homo sapiens
  misc_RNA (1)...(19): siRNA sense strand
ggugaugaacccugagaca

SEQ ID NO: 2253736 - RNA, 19 nt, Homo sapiens
  misc_RNA (1)...(19): siRNA sense strand
cuaucuaccuccugaccaa

SEQ ID NO: 2253737 - RNA, 19 nt, Homo sapiens
  misc_RNA (1)...(19): siRNA sense strand
uggaagccauggagaccaa

SEQ ID NO: 2253738 - RNA, 19 nt, Homo sapiens
  misc_RNA (1)...(19): siRNA sense strand
gugaggagcacucgggaca

SEQ ID NO: 2253739 - RNA, 19 nt, Homo sapiens
  misc_RNA (1)...(19): siRNA sense strand
gaaaaucaaaggaggaaca

SEQ ID NO: 2253740 - RNA, 19 nt, Homo sapiens
  misc_RNA (1)...(19): siRNA sense strand
cugaagaucacaaagguca

SEQ ID NO: 2253741 - RNA, 19 nt, Homo sapiens
  misc_RNA (1)...(19): siRNA sense strand
agugagagguucuugccua

SEQ ID NO: 2253742 - RNA, 19 nt, Homo sapiens
  misc_RNA (1)...(19): siRNA sense strand
cggaaagagcccaucacuu

SEQ ID NO: 2253743 - RNA, 19 nt, Homo sapiens
  misc_RNA (1)...(19): siRNA sense strand
ucaagaugccagagcacau

SEQ ID NO: 2253744 - RNA, 19 nt, Homo sapiens
  misc_RNA (1)...(19): siRNA sense strand
ccugcuauaucaaggugaa

SEQ ID NO: 2253745 - RNA, 19 nt, Homo sapiens
  misc_RNA (1)...(19): siRNA sense strand
acccaguuccugagagcua

SEQ ID NO: 2253746 - RNA, 19 nt, Homo sapiens
  misc_RNA (1)...(19): siRNA sense strand
gcuauaucaaggugaagau

SEQ ID NO: 2253747 - RNA, 19 nt, Homo sapiens
  misc_RNA (1)...(19): siRNA sense strand
auaucaaggugaagauugu

SEQ ID NO: 2253748 - RNA, 19 nt, Homo sapiens
  misc_RNA (1)...(19): siRNA sense strand
ugaagaucacaaaggucaa

SEQ ID NO: 2253749 - RNA, 19 nt, Homo sapiens
  misc_RNA (1)...(19): siRNA sense strand
ccaucaaggcagaguuugu

SEQ ID NO: 2253750 - RNA, 19 nt, Homo sapiens
  misc_RNA (1)...(19): siRNA sense strand
aagacagaggaaagggaga

SEQ ID NO: 2253751 - RNA, 19 nt, Homo sapiens
  misc_RNA (1)...(19): siRNA sense strand
guguaagcaugacuggcua

SEQ ID NO: 2253752 - RNA, 19 nt, Homo sapiens
  misc_RNA (1)...(19): siRNA sense strand
gaauauuuccacagccaca

SEQ ID NO: 2253753 - RNA, 19 nt, Homo sapiens
  misc_RNA (1)...(19): siRNA sense strand
ccaucuaugccuuugagaa

SEQ ID NO: 2253754 - RNA, 19 nt, Homo sapiens
  misc_RNA (1)...(19): siRNA sense strand
aggcacuguccaaggaaga

SEQ ID NO: 2253755 - RNA, 19 nt, Homo sapiens
  misc_RNA (1)...(19): siRNA sense strand
aggccagcgaagaggguca

SEQ ID NO: 2253756 - RNA, 19 nt, Homo sapiens
  misc_RNA (1)...(19): siRNA sense strand
gacagacagugaugggaga

SEQ ID NO: 2253757 - RNA, 19 nt, Homo sapiens
  misc_RNA (1)...(19): siRNA sense strand
guucaagugcagugggaug

SEQ ID NO: 2253758 - RNA, 19 nt, Homo sapiens
  misc_RNA (1)...(19): siRNA sense strand
ccaugauugcuuucagaau

SEQ ID NO: 2253759 - RNA, 19 nt, Homo sapiens
  misc_RNA (1)...(19): siRNA sense strand
cugcugacccagacagaca

SEQ ID NO: 2253760 - RNA, 19 nt, Homo sapiens
  misc_RNA (1)...(19): siRNA sense strand
gcauguucucuguggacuu

SEQ ID NO: 2253761 - RNA, 19 nt, Homo sapiens
  misc_RNA (1)...(19): siRNA sense strand
caucuaugccuuugagaac

SEQ ID NO: 2253762 - RNA, 19 nt, Homo sapiens
  misc_RNA (1)...(19): siRNA sense strand
ggaacagccguguaagcau

SEQ ID NO: 2253763 - RNA, 19 nt, Homo sapiens
  misc_RNA (1)...(19): siRNA sense strand
aggaguuucuacaggcaga

SEQ ID NO: 2253764 - RNA, 19 nt, Homo sapiens
  misc_RNA (1)...(19): siRNA sense strand
cuggcaaagugaaggucca

SEQ ID NO: 2253765 - RNA, 19 nt, Homo sapiens
  misc_RNA (1)...(19): siRNA sense strand
ccaugaggauccacggguu

SEQ ID NO: 2253766 - RNA, 19 nt, Homo sapiens
  misc_RNA (1)...(19): siRNA sense strand
ucaacuguguagagaggca

SEQ ID NO: 2253767 - RNA, 19 nt, Homo sapiens
  misc_RNA (1)...(19): siRNA sense strand
cagaggaaagggagaucca

SEQ ID NO: 2253768 - RNA, 19 nt, Homo sapiens
  misc_RNA (1)...(19): siRNA sense strand
cuccuaaauucaacccaaa

SEQ ID NO: 2253769 - RNA, 19 nt, Homo sapiens
  misc_RNA (1)...(19): siRNA sense strand
uggggaagcuguauggaau

SEQ ID NO: 2253770 - RNA, 19 nt, Homo sapiens
  misc_RNA (1)...(19): siRNA sense strand
cugccugucuggaguucaa

SEQ ID NO: 2253771 - RNA, 19 nt, Homo sapiens
  misc_RNA (1)...(19): siRNA sense strand
gcagcaggauaaugggauc

SEQ ID NO: 2253772 - RNA, 19 nt, Homo sapiens
  misc_RNA (1)...(19): siRNA sense strand
agacagaggaaagggagau

SEQ ID NO: 2253773 - RNA, 19 nt, Homo sapiens
  misc_RNA (1)...(19): siRNA sense strand
gugccguguuccaugaaau

SEQ ID NO: 2253774 - RNA, 19 nt, Homo sapiens
  misc_RNA (1)...(19): siRNA sense strand
ccuggugaguggacaacau

SEQ ID NO: 2253775 - RNA, 19 nt, Homo sapiens
  misc_RNA (1)...(19): siRNA sense strand
ucuccaagacagaggaaag

SEQ ID NO: 2253776 - RNA, 19 nt, Homo sapiens
  misc_RNA (1)...(19): siRNA sense strand
ggucaagaugccagagcac

SEQ ID NO: 2253777 - RNA, 19 nt, Homo sapiens
  misc_RNA (1)...(19): siRNA sense strand
gcauauguuagcagagaaa

SEQ ID NO: 2253778 - RNA, 19 nt, Homo sapiens
  misc_RNA (1)...(19): siRNA sense strand
gcacagagauauaaaggga

SEQ ID NO: 2253779 - RNA, 19 nt, Homo sapiens
  misc_RNA (1)...(19): siRNA sense strand
cagaauacugccaaggaaa

SEQ ID NO: 2253780 - RNA, 19 nt, Homo sapiens
  misc_RNA (1)...(19): siRNA sense strand
gaaugaacauagaggcaca

SEQ ID NO: 2253781 - RNA, 19 nt, Homo sapiens
  misc_RNA (1)...(19): siRNA sense strand
agagauaaccuuuggccaa

SEQ ID NO: 2253782 - RNA, 19 nt, Homo sapiens
  misc_RNA (1)...(19): siRNA sense strand
ggaugaaaaucaaggaaca

SEQ ID NO: 2253783 - RNA, 19 nt, Homo sapiens
  misc_RNA (1)...(19): siRNA sense strand
ccuacaagacagugugcua

SEQ ID NO: 2253784 - RNA, 19 nt, Homo sapiens
  misc_RNA (1)...(19): siRNA sense strand
ccaccaaagccuaagucua

SEQ ID NO: 2253785 - RNA, 19 nt, Homo sapiens
  misc_RNA (1)...(19): siRNA sense strand
caguagagguagagacuuc

SEQ ID NO: 2253786 - RNA, 19 nt, Homo sapiens
  misc_RNA (1)...(19): siRNA sense strand
cuggaaacauggaaugcaa

SEQ ID NO: 2253787 - RNA, 19 nt, Homo sapiens
  misc_RNA (1)...(19): siRNA sense strand
cauagaacuugcagagcuu

SEQ ID NO: 2253788 - RNA, 19 nt, Homo sapiens
  misc_RNA (1)...(19): siRNA sense strand
gcaacuggaauauggacaa

SEQ ID NO: 2253789 - RNA, 19 nt, Homo sapiens
  misc_RNA (1)...(19): siRNA sense strand
guuaaauggugaacgagau

SEQ ID NO: 2253790 - RNA, 19 nt, Homo sapiens
  misc_RNA (1)...(19): siRNA sense strand
agaagaugaugaaggagau

SEQ ID NO: 2253791 - RNA, 19 nt, Homo sapiens
  misc_RNA (1)...(19): siRNA sense strand
aguaaaucuccaaggaaga

SEQ ID NO: 2253792 - RNA, 19 nt, Homo sapiens
  misc_RNA (1)...(19): siRNA sense strand
ccucaaucuuaaugaacuu

SEQ ID NO: 2253793 - RNA, 19 nt, Homo sapiens
  misc_RNA (1)...(19): siRNA sense strand
cagaaugaacauagaggca

SEQ ID NO: 2253794 - RNA, 19 nt, Homo sapiens
  misc_RNA (1)...(19): siRNA sense strand
acacaaacucccugacaga

SEQ ID NO: 2253795 - RNA, 19 nt, Homo sapiens
  misc_RNA (1)...(19): siRNA sense strand
uagaagaugaugaaggaga

SEQ ID NO: 2253796 - RNA, 19 nt, Homo sapiens
  misc_RNA (1)...(19): siRNA sense strand
caucaauggaacagcuauu

SEQ ID NO: 2253797 - RNA, 19 nt, Homo sapiens
  misc_RNA (1)...(19): siRNA sense strand
gcuaucaauaucugguaaa

SEQ ID NO: 2253798 - RNA, 19 nt, Homo sapiens
  misc_RNA (1)...(19): siRNA sense strand
caaguagaaacgugagaga

SEQ ID NO: 2253799 - RNA, 19 nt, Homo sapiens
  misc_RNA (1)...(19): siRNA sense strand
uagaaacgugagagaagaa

SEQ ID NO: 2253800 - RNA, 19 nt, Homo sapiens
  misc_RNA (1)...(19): siRNA sense strand
aguguuguguuguaagaaa

SEQ ID NO: 2253801 - RNA, 19 nt, Homo sapiens
  misc_RNA (1)...(19): siRNA sense strand
aguagaaacgugagagaag

SEQ ID NO: 2253802 - RNA, 19 nt, Homo sapiens
  misc_RNA (1)...(19): siRNA sense strand
ccauaauuuaccagggcuu

SEQ ID NO: 2253803 - RNA, 19 nt, Homo sapiens
  misc_RNA (1)...(19): siRNA sense strand
cuguaaacacccaaauauu

SEQ ID NO: 2253804 - RNA, 19 nt, Homo sapiens
  misc_RNA (1)...(19): siRNA sense strand
cccaaauauuguugcuuau

SEQ ID NO: 2253805 - RNA, 19 nt, Homo sapiens
  misc_RNA (1)...(19): siRNA sense strand
uugcagcuguugagaggaa

SEQ ID NO: 2253806 - RNA, 19 nt, Homo sapiens
  misc_RNA (1)...(19): siRNA sense strand
aguuaaauggugaacgaga

SEQ ID NO: 2253807 - RNA, 19 nt, Homo sapiens
  misc_RNA (1)...(19): siRNA sense strand
acagaauacugccaaggaa

SEQ ID NO: 2253808 - RNA, 19 nt, Homo sapiens
  misc_RNA (1)...(19): siRNA sense strand
ggcacaaaccuuucaagaa

SEQ ID NO: 2253809 - RNA, 19 nt, Homo sapiens
  misc_RNA (1)...(19): siRNA sense strand
guguuguguuguaagaaau

SEQ ID NO: 2253810 - RNA, 19 nt, Homo sapiens
  misc_RNA (1)...(19): siRNA sense strand
cuugauauuuggugccgaa

SEQ ID NO: 2253811 - RNA, 19 nt, Homo sapiens
  misc_RNA (1)...(19): siRNA sense strand
uugaagaagaauugcauca

SEQ ID NO: 2253812 - RNA, 19 nt, Homo sapiens
  misc_RNA (1)...(19): siRNA sense strand
cuacaauugccaaacggaa

SEQ ID NO: 2253813 - RNA, 19 nt, Homo sapiens
  misc_RNA (1)...(19): siRNA sense strand
ggauaaaaugaaaugguca

SEQ ID NO: 2253814 - RNA, 19 nt, Homo sapiens
  misc_RNA (1)...(19): siRNA sense strand
ucuucaugguuuacagaau

SEQ ID NO: 2253815 - RNA, 19 nt, Homo sapiens
  misc_RNA (1)...(19): siRNA sense strand
gaaauuucagauagcacaa

SEQ ID NO: 2253816 - RNA, 19 nt, Homo sapiens
  misc_RNA (1)...(19): siRNA sense strand
gcaguugugcagcaagaaa

SEQ ID NO: 2253817 - RNA, 19 nt, Homo sapiens
  misc_RNA (1)...(19): siRNA sense strand
gagcuguuggauaaaguaa

SEQ ID NO: 2253818 - RNA, 19 nt, Homo sapiens
  misc_RNA (1)...(19): siRNA sense strand
gaaaggagacagaaccaca

SEQ ID NO: 2253819 - RNA, 19 nt, Homo sapiens
  misc_RNA (1)...(19): siRNA sense strand
uggaauauggacaaggaca

SEQ ID NO: 2253820 - RNA, 19 nt, Homo sapiens
  misc_RNA (1)...(19): siRNA sense strand
agaauacugccaaggaaau

SEQ ID NO: 2253821 - RNA, 19 nt, Homo sapiens
  misc_RNA (1)...(19): siRNA sense strand
aggagaagacuuugcaguu

SEQ ID NO: 2253822 - RNA, 19 nt, Homo sapiens
  misc_RNA (1)...(19): siRNA sense strand
gcaccuacggcgacgucua

SEQ ID NO: 2253823 - RNA, 19 nt, Homo sapiens
  misc_RNA (1)...(19): siRNA sense strand
ugugcaucaucauggauaa

SEQ ID NO: 2253824 - RNA, 19 nt, Homo sapiens
  misc_RNA (1)...(19): siRNA sense strand
ccuuugauuuccagauuga

SEQ ID NO: 2253825 - RNA, 19 nt, Homo sapiens
  misc_RNA (1)...(19): siRNA sense strand
auaccuauguggagcacuu

SEQ ID NO: 2253826 - RNA, 19 nt, Homo sapiens
  misc_RNA (1)...(19): siRNA sense strand
gaauguuaacacuggugaa

SEQ ID NO: 2253827 - RNA, 19 nt, Homo sapiens
  misc_RNA (1)...(19): siRNA sense strand
acccaacuggagagagaua

SEQ ID NO: 2253828 - RNA, 19 nt, Homo sapiens
  misc_RNA (1)...(19): siRNA sense strand
agagauauaaagggagcua

SEQ ID NO: 2253829 - RNA, 19 nt, Homo sapiens
  misc_RNA (1)...(19): siRNA sense strand
ccuuuggccaagugaaauu

SEQ ID NO: 2253830 - RNA, 19 nt, Homo sapiens
  misc_RNA (1)...(19): siRNA sense strand
cgucgcacauuuagaagau

SEQ ID NO: 2253831 - RNA, 19 nt, Homo sapiens
  misc_RNA (1)...(19): siRNA sense strand
gcgagauaagcuuuggauu

SEQ ID NO: 2253832 - RNA, 19 nt, Homo sapiens
  misc_RNA (1)...(19): siRNA sense strand
ccauagaacuugcagagcu

SEQ ID NO: 2253833 - RNA, 19 nt, Homo sapiens
  misc_RNA (1)...(19): siRNA sense strand
cauagaauucacucaacaa

SEQ ID NO: 2253834 - RNA, 19 nt, Homo sapiens
  misc_RNA (1)...(19): siRNA sense strand
ggaauauggacaaggacac

SEQ ID NO: 2253835 - RNA, 19 nt, Homo sapiens
  misc_RNA (1)...(19): siRNA sense strand
ugaugaaggagaugaugau

SEQ ID NO: 2253836 - RNA, 19 nt, Homo sapiens
  misc_RNA (1)...(19): siRNA sense strand
ucuucauaccacaggaaau

SEQ ID NO: 2253837 - RNA, 19 nt, Homo sapiens
  misc_RNA (1)...(19): siRNA sense strand
aggaaaaggaauagcaaaa

SEQ ID NO: 2253838 - RNA, 19 nt, Homo sapiens
  misc_RNA (1)...(19): siRNA sense strand
cagacuugcaggugggaaa

SEQ ID NO: 2253839 - RNA, 19 nt, Homo sapiens
  misc_RNA (1)...(19): siRNA sense strand
cguuauaagggucgguuua

SEQ ID NO: 2253840 - RNA, 19 nt, Homo sapiens
  misc_RNA (1)...(19): siRNA sense strand
uguuaggguuggagauuau

SEQ ID NO: 2253841 - RNA, 19 nt, Homo sapiens
  misc_RNA (1)...(19): siRNA sense strand
acaaggaccagaagagcaa

SEQ ID NO: 2253842 - RNA, 19 nt, Homo sapiens
  misc_RNA (1)...(19): siRNA sense strand
ccgaggagaugaagaaaau

SEQ ID NO: 2253843 - RNA, 19 nt, Homo sapiens
  misc_RNA (1)...(19): siRNA sense strand
cuacaaggguccugccaga

SEQ ID NO: 2253844 - RNA, 19 nt, Homo sapiens
  misc_RNA (1)...(19): siRNA sense strand
guuugaaggcacaguggaa

SEQ ID NO: 2253845 - RNA, 19 nt, Homo sapiens
  misc_RNA (1)...(19): siRNA sense strand
gggaacaaucugugaugau

SEQ ID NO: 2253846 - RNA, 19 nt, Homo sapiens
  misc_RNA (1)...(19): siRNA sense strand
agguauggcaacagcacua

SEQ ID NO: 2253847 - RNA, 19 nt, Homo sapiens
  misc_RNA (1)...(19): siRNA sense strand
ggauggagaaaauaagaaa

SEQ ID NO: 2253848 - RNA, 19 nt, Homo sapiens
  misc_RNA (1)...(19): siRNA sense strand
gcugggaggaaaaggaaua

SEQ ID NO: 2253849 - RNA, 19 nt, Homo sapiens
  misc_RNA (1)...(19): siRNA sense strand
gagcaaugugccagauuca

SEQ ID NO: 2253850 - RNA, 19 nt, Homo sapiens
  misc_RNA (1)...(19): siRNA sense strand
acugauggauggagaaaau

SEQ ID NO: 2253851 - RNA, 19 nt, Homo sapiens
  misc_RNA (1)...(19): siRNA sense strand
gguuagauuacaaggacca

SEQ ID NO: 2253852 - RNA, 19 nt, Homo sapiens
  misc_RNA (1)...(19): siRNA sense strand
ugacacaggacgagccuau

SEQ ID NO: 2253853 - RNA, 19 nt, Homo sapiens
  misc_RNA (1)...(19): siRNA sense strand
gagcuaugcuguuaggguu

SEQ ID NO: 2253854 - RNA, 19 nt, Homo sapiens
  misc_RNA (1)...(19): siRNA sense strand
aaauaagaaagaaggacga

SEQ ID NO: 2253855 - RNA, 19 nt, Homo sapiens
  misc_RNA (1)...(19): siRNA sense strand
gguaacaguaauaaagagu

SEQ ID NO: 2253856 - RNA, 19 nt, Homo sapiens
  misc_RNA (1)...(19): siRNA sense strand
ccauaaagaagaugcugga

SEQ ID NO: 2253857 - RNA, 19 nt, Homo sapiens
  misc_RNA (1)...(19): siRNA sense strand
gaggaaaaggaauagcaaa

SEQ ID NO: 2253858 - RNA, 19 nt, Homo sapiens
  misc_RNA (1)...(19): siRNA sense strand
gggaugaugccgaugcaga

SEQ ID NO: 2253859 - RNA, 19 nt, Homo sapiens
  misc_RNA (1)...(19): siRNA sense strand
gggucgguuuacagggaga

SEQ ID NO: 2253860 - RNA, 19 nt, Homo sapiens
  misc_RNA (1)...(19): siRNA sense strand
aguauaugcaaguggaguu

SEQ ID NO: 2253861 - RNA, 19 nt, Homo sapiens
  misc_RNA (1)...(19): siRNA sense strand
guuucaagagguauggcaa

SEQ ID NO: 2253862 - RNA, 19 nt, Homo sapiens
  misc_RNA (1)...(19): siRNA sense strand
gagaaugcuuugugcugga

SEQ ID NO: 2253863 - RNA, 19 nt, Homo sapiens
  misc_RNA (1)...(19): siRNA sense strand
cugcagacacggaucagua

SEQ ID NO: 2253864 - RNA, 19 nt, Homo sapiens
  misc_RNA (1)...(19): siRNA sense strand
gaaagaaggacgaguggag

SEQ ID NO: 2253865 - RNA, 19 nt, Homo sapiens
  misc_RNA (1)...(19): siRNA sense strand
gcacaggaaaugagagguc

SEQ ID NO: 2253866 - RNA, 19 nt, Homo sapiens
  misc_RNA (1)...(19): siRNA sense strand
gggaacugucugugaugau

SEQ ID NO: 2253867 - RNA, 19 nt, Homo sapiens
  misc_RNA (1)...(19): siRNA sense strand
ccauaugguuggaugacgu

SEQ ID NO: 2253868 - RNA, 19 nt, Homo sapiens
  misc_RNA (1)...(19): siRNA sense strand
agagagaggccacagaaaa

SEQ ID NO: 2253869 - RNA, 19 nt, Homo sapiens
  misc_RNA (1)...(19): siRNA sense strand
ggaaguauaugcaagugga

SEQ ID NO: 2253870 - RNA, 19 nt, Homo sapiens
  misc_RNA (1)...(19): siRNA sense strand
agacugauggauggagaaa

SEQ ID NO: 2253871 - RNA, 19 nt, Homo sapiens
  misc_RNA (1)...(19): siRNA sense strand
cuuacuuuggagaaggaaa

SEQ ID NO: 2253872 - RNA, 19 nt, Homo sapiens
  misc_RNA (1)...(19): siRNA sense strand
cuguuaggguuggagauua

SEQ ID NO: 2253873 - RNA, 19 nt, Homo sapiens
  misc_RNA (1)...(19): siRNA sense strand
ggagaaaauaagaaagaag

SEQ ID NO: 2253874 - RNA, 19 nt, Homo sapiens
  misc_RNA (1)...(19): siRNA sense strand
gguccuuggcugacuguau

SEQ ID NO: 2253875 - RNA, 19 nt, Homo sapiens
  misc_RNA (1)...(19): siRNA sense strand
gcaagauauuggaagacac

SEQ ID NO: 2253876 - RNA, 19 nt, Homo sapiens
  misc_RNA (1)...(19): siRNA sense strand
ccagaagagcaaugugcca

SEQ ID NO: 2253877 - RNA, 19 nt, Homo sapiens
  misc_RNA (1)...(19): siRNA sense strand
ggagagagcuggguggugu

SEQ ID NO: 2253878 - RNA, 19 nt, Homo sapiens
  misc_RNA (1)...(19): siRNA sense strand
aaggcacaguggaaguaua

SEQ ID NO: 2253879 - RNA, 19 nt, Homo sapiens
  misc_RNA (1)...(19): siRNA sense strand
aggcacaguggaaguauau

SEQ ID NO: 2253880 - RNA, 19 nt, Homo sapiens
  misc_RNA (1)...(19): siRNA sense strand
uugccgaggagaugaagaa

SEQ ID NO: 2253881 - RNA, 19 nt, Homo sapiens
  misc_RNA (1)...(19): siRNA sense strand
gaggagaugaagaaaauau

SEQ ID NO: 2253882 - RNA, 19 nt, Homo sapiens
  misc_RNA (1)...(19): siRNA sense strand
caguuauguuggaugaagu

SEQ ID NO: 2253883 - RNA, 19 nt, Homo sapiens
  misc_RNA (1)...(19): siRNA sense strand
ucaauugagcaguguccaa

SEQ ID NO: 2253884 - RNA, 19 nt, Homo sapiens
  misc_RNA (1)...(19): siRNA sense strand
aggaguuugaggaagaaau

SEQ ID NO: 2253885 - RNA, 19 nt, Homo sapiens
  misc_RNA (1)...(19): siRNA sense strand
ugaggaagaaauuggaguu

SEQ ID NO: 2253886 - RNA, 19 nt, Homo sapiens
  misc_RNA (1)...(19): siRNA sense strand
uucaagaacacuacaacaa

SEQ ID NO: 2253887 - RNA, 19 nt, Homo sapiens
  misc_RNA (1)...(19): siRNA sense strand
gagagagcuggguggugua

SEQ ID NO: 2253888 - RNA, 19 nt, Homo sapiens
  misc_RNA (1)...(19): siRNA sense strand
guaaacaagcaucugccaa

SEQ ID NO: 2253889 - RNA, 19 nt, Homo sapiens
  misc_RNA (1)...(19): siRNA sense strand
uuacuuuggagaaggaaaa

SEQ ID NO: 2253890 - RNA, 19 nt, Homo sapiens
  misc_RNA (1)...(19): siRNA sense strand
aggaagaaauuggaguuca

SEQ ID NO: 2253891 - RNA, 19 nt, Homo sapiens
  misc_RNA (1)...(19): siRNA sense strand
aggaaaggaaaccagauuu

SEQ ID NO: 2253892 - RNA, 19 nt, Homo sapiens
  misc_RNA (1)...(19): siRNA sense strand
cagacugauggauggagaa

SEQ ID NO: 2253893 - RNA, 19 nt, Homo sapiens
  misc_RNA (1)...(19): siRNA sense strand
agacacaacugccgccaca

SEQ ID NO: 2253894 - RNA, 19 nt, Homo sapiens
  misc_RNA (1)...(19): siRNA sense strand
gagccaugggucagcguga

SEQ ID NO: 2253895 - RNA, 19 nt, Homo sapiens
  misc_RNA (1)...(19): siRNA sense strand
gccuuuguaccuuggauaa

SEQ ID NO: 2253896 - RNA, 19 nt, Homo sapiens
  misc_RNA (1)...(19): siRNA sense strand
augaagaagcauagacgaa

SEQ ID NO: 2253897 - RNA, 19 nt, Homo sapiens
  misc_RNA (1)...(19): siRNA sense strand
ccacaaccucacagcgaaa

SEQ ID NO: 2253898 - RNA, 19 nt, Homo sapiens
  misc_RNA (1)...(19): siRNA sense strand
cgaaggacuuggugggagu

SEQ ID NO: 2253899 - RNA, 19 nt, Homo sapiens
  misc_RNA (1)...(19): siRNA sense strand
ggaaguacauggaggacgu

SEQ ID NO: 2253900 - RNA, 19 nt, Homo sapiens
  misc_RNA (1)...(19): siRNA sense strand
gcagauaacacuagugcca

SEQ ID NO: 2253901 - RNA, 19 nt, Homo sapiens
  misc_RNA (1)...(19): siRNA sense strand
aaaugaaagcccaagaaau

SEQ ID NO: 2253902 - RNA, 19 nt, Homo sapiens
  misc_RNA (1)...(19): siRNA sense strand
aaguggacaaucagggaaa

SEQ ID NO: 2253903 - RNA, 19 nt, Homo sapiens
  misc_RNA (1)...(19): siRNA sense strand
gauccauggccaaggguga

SEQ ID NO: 2253904 - RNA, 19 nt, Homo sapiens
  misc_RNA (1)...(19): siRNA sense strand
agagaauguccaaggugua

SEQ ID NO: 2253905 - RNA, 19 nt, Homo sapiens
  misc_RNA (1)...(19): siRNA sense strand
ccaaggaaagagaacgaau

SEQ ID NO: 2253906 - RNA, 19 nt, Homo sapiens
  misc_RNA (1)...(19): siRNA sense strand
gccaggaccaagaggagaa

SEQ ID NO: 2253907 - RNA, 19 nt, Homo sapiens
  misc_RNA (1)...(19): siRNA sense strand
gagagaauguccaaggugu

SEQ ID NO: 2253908 - RNA, 19 nt, Homo sapiens
  misc_RNA (1)...(19): siRNA sense strand
agaacgaaucgaaggacuu

SEQ ID NO: 2253909 - RNA, 19 nt, Homo sapiens
  misc_RNA (1)...(19): siRNA sense strand
gugggaguguaaugaacaa

SEQ ID NO: 2253910 - RNA, 19 nt, Homo sapiens
  misc_RNA (1)...(19): siRNA sense strand
gaaucguguaguuuggaaa

SEQ ID NO: 2253911 - RNA, 19 nt, Homo sapiens
  misc_RNA (1)...(19): siRNA sense strand
agcccugacuuuaaggaua

SEQ ID NO: 2253912 - RNA, 19 nt, Homo sapiens
  misc_RNA (1)...(19): siRNA sense strand
ggaggaaguacauggagga

SEQ ID NO: 2253913 - RNA, 19 nt, Homo sapiens
  misc_RNA (1)...(19): siRNA sense strand
ccagaagaaaauuggaaau

SEQ ID NO: 2253914 - RNA, 19 nt, Homo sapiens
  misc_RNA (1)...(19): siRNA sense strand
gagaacgaaucgaaggacu

SEQ ID NO: 2253915 - RNA, 19 nt, Homo sapiens
  misc_RNA (1)...(19): siRNA sense strand
ggcaguagcaagagcacuu

SEQ ID NO: 2253916 - RNA, 19 nt, Homo sapiens
  misc_RNA (1)...(19): siRNA sense strand
gagugauggacuuuggaau

SEQ ID NO: 2253917 - RNA, 19 nt, Homo sapiens
  misc_RNA (1)...(19): siRNA sense strand
gggugaauucuaaggacca

SEQ ID NO: 2253918 - RNA, 19 nt, Homo sapiens
  misc_RNA (1)...(19): siRNA sense strand
ggaccauaagccagaacuu

SEQ ID NO: 2253919 - RNA, 19 nt, Homo sapiens
  misc_RNA (1)...(19): siRNA sense strand
gaggaggauccauggccaa

SEQ ID NO: 2253920 - RNA, 19 nt, Homo sapiens
  misc_RNA (1)...(19): siRNA sense strand
uggcuuaagucgaaguagu

SEQ ID NO: 2253921 - RNA, 19 nt, Homo sapiens
  misc_RNA (1)...(19): siRNA sense strand
agagguuucagcugagaua

SEQ ID NO: 2253922 - RNA, 19 nt, Homo sapiens
  misc_RNA (1)...(19): siRNA sense strand
agucaagaaaccuguguga

SEQ ID NO: 2253923 - RNA, 19 nt, Homo sapiens
  misc_RNA (1)...(19): siRNA sense strand
gaugucaacuccuggccaa

SEQ ID NO: 2253924 - RNA, 19 nt, Homo sapiens
  misc_RNA (1)...(19): siRNA sense strand
ucacaauggaccuguuaga

SEQ ID NO: 2253925 - RNA, 19 nt, Homo sapiens
  misc_RNA (1)...(19): siRNA sense strand
cuucaucaacacaggaaaa

SEQ ID NO: 2253926 - RNA, 19 nt, Homo sapiens
  misc_RNA (1)...(19): siRNA sense strand
gaagaugaguuauaccuga

SEQ ID NO: 2253927 - RNA, 19 nt, Homo sapiens
  misc_RNA (1)...(19): siRNA sense strand
uagaaggagcacaguuauu

SEQ ID NO: 2253928 - RNA, 19 nt, Homo sapiens
  misc_RNA (1)...(19): siRNA sense strand
uggaagaaacuggcggaau

SEQ ID NO: 2253929 - RNA, 19 nt, Homo sapiens
  misc_RNA (1)...(19): siRNA sense strand
ucaagucacuggaggagga

SEQ ID NO: 2253930 - RNA, 19 nt, Homo sapiens
  misc_RNA (1)...(19): siRNA sense strand
cggcgaagucucggggaaa

SEQ ID NO: 2253931 - RNA, 19 nt, Homo sapiens
  misc_RNA (1)...(19): siRNA sense strand
acgaaauggcuuaagucga

SEQ ID NO: 2253932 - RNA, 19 nt, Homo sapiens
  misc_RNA (1)...(19): siRNA sense strand
agcccaagaaauugaaaga

SEQ ID NO: 2253933 - RNA, 19 nt, Homo sapiens
  misc_RNA (1)...(19): siRNA sense strand
cuuaggggccagaagaaaa

SEQ ID NO: 2253934 - RNA, 19 nt, Homo sapiens
  misc_RNA (1)...(19): siRNA sense strand
cucaaaagauccagaacca

SEQ ID NO: 2253935 - RNA, 19 nt, Homo sapiens
  misc_RNA (1)...(19): siRNA sense strand
uccagaaccacuugaagaa

SEQ ID NO: 2253936 - RNA, 19 nt, Homo sapiens
  misc_RNA (1)...(19): siRNA sense strand
cuugaagagcacagagaga

SEQ ID NO: 2253937 - RNA, 19 nt, Homo sapiens
  misc_RNA (1)...(19): siRNA sense strand
agguggaggcucagggaga

SEQ ID NO: 2253938 - RNA, 19 nt, Homo sapiens
  misc_RNA (1)...(19): siRNA sense strand
guggauuguuagagaugau

SEQ ID NO: 2253939 - RNA, 19 nt, Homo sapiens
  misc_RNA (1)...(19): siRNA sense strand
cagaccagguggaggcuca

SEQ ID NO: 2253940 - RNA, 19 nt, Homo sapiens
  misc_RNA (1)...(19): siRNA sense strand
uuguuagagaugauggaaa

SEQ ID NO: 2253941 - RNA, 19 nt, Homo sapiens
  misc_RNA (1)...(19): siRNA sense strand
ugauggaaacagaugagaa

SEQ ID NO: 2253942 - RNA, 19 nt, Homo sapiens
  misc_RNA (1)...(19): siRNA sense strand
cagaugagaaagaaggcuu

SEQ ID NO: 2253943 - RNA, 19 nt, Homo sapiens
  misc_RNA (1)...(19): siRNA sense strand
ccacagaagaaaugcugca

SEQ ID NO: 2253944 - RNA, 19 nt, Homo sapiens
  misc_RNA (1)...(19): siRNA sense strand
ucuucagguaaguguguua

SEQ ID NO: 2253945 - RNA, 19 nt, Homo sapiens
  misc_RNA (1)...(19): siRNA sense strand
gguucuaaggcucuggaau

SEQ ID NO: 2253946 - RNA, 19 nt, Homo sapiens
  misc_RNA (1)...(19): siRNA sense strand
cuugaagagcacagagaga

SEQ ID NO: 2253947 - RNA, 19 nt, Homo sapiens
  misc_RNA (1)...(19): siRNA sense strand
agguggaggcucagggaga

SEQ ID NO: 2253948 - RNA, 19 nt, Homo sapiens
  misc_RNA (1)...(19): siRNA sense strand
guggauuguuagagaugau

SEQ ID NO: 2253949 - RNA, 19 nt, Homo sapiens
  misc_RNA (1)...(19): siRNA sense strand
cagaccagguggaggcuca

SEQ ID NO: 2253950 - RNA, 19 nt, Homo sapiens
  misc_RNA (1)...(19): siRNA sense strand
uuguuagagaugauggaaa

SEQ ID NO: 2253951 - RNA, 19 nt, Homo sapiens
  misc_RNA (1)...(19): siRNA sense strand
ugauggaaacagaugagaa

SEQ ID NO: 2253952 - RNA, 19 nt, Homo sapiens
  misc_RNA (1)...(19): siRNA sense strand
cagaugagaaagaaggcuu

SEQ ID NO: 2253953 - RNA, 19 nt, Homo sapiens
  misc_RNA (1)...(19): siRNA sense strand
ccacagaagaaaugcugca

SEQ ID NO: 2253954 - RNA, 19 nt, Homo sapiens
  misc_RNA (1)...(19): siRNA sense strand
ucuucagguaaguguguua

SEQ ID NO: 2253955 - RNA, 19 nt, Homo sapiens
  misc_RNA (1)...(19): siRNA sense strand
gguucuaaggcucuggaau

SEQ ID NO: 2253956 - RNA, 19 nt, Homo sapiens
  misc_RNA (1)...(19): siRNA sense strand
gggcagaacuugagggaca

SEQ ID NO: 2253957 - RNA, 19 nt, Homo sapiens
  misc_RNA (1)...(19): siRNA sense strand
gccagaagcccaaggagca

SEQ ID NO: 2253958 - RNA, 19 nt, Homo sapiens
  misc_RNA (1)...(19): siRNA sense strand
ugacacugcugcauggaga

SEQ ID NO: 2253959 - RNA, 19 nt, Homo sapiens
  misc_RNA (1)...(19): siRNA sense strand
acagaguuaagcugauaaa

SEQ ID NO: 2253960 - RNA, 19 nt, Homo sapiens
  misc_RNA (1)...(19): siRNA sense strand
uaaaugagagcguggacga

SEQ ID NO: 2253961 - RNA, 19 nt, Homo sapiens
  misc_RNA (1)...(19): siRNA sense strand
gcagacacgccaaccgcaa

SEQ ID NO: 2253962 - RNA, 19 nt, Homo sapiens
  misc_RNA (1)...(19): siRNA sense strand
gggcagaacuugagggaca

SEQ ID NO: 2253963 - RNA, 19 nt, Homo sapiens
  misc_RNA (1)...(19): siRNA sense strand
gccagaagcccaaggagca

SEQ ID NO: 2253964 - RNA, 19 nt, Homo sapiens
  misc_RNA (1)...(19): siRNA sense strand
ugacacugcugcauggaga

SEQ ID NO: 2253965 - RNA, 19 nt, Homo sapiens
  misc_RNA (1)...(19): siRNA sense strand
acagaguuaagcugauaaa

SEQ ID NO: 2253966 - RNA, 19 nt, Homo sapiens
  misc_RNA (1)...(19): siRNA sense strand
uaaaugagagcguggacga

SEQ ID NO: 2253967 - RNA, 19 nt, Homo sapiens
  misc_RNA (1)...(19): siRNA sense strand
gcagacacgccaaccgcaa

SEQ ID NO: 2253968 - RNA, 19 nt, Homo sapiens
  misc_RNA (1)...(19): siRNA sense strand
gcagacacgccaaccgcaa

SEQ ID NO: 2253969 - RNA, 19 nt, Homo sapiens
  misc_RNA (1)...(19): siRNA sense strand
gggcagaacuugagggaca

SEQ ID NO: 2253970 - RNA, 19 nt, Homo sapiens
  misc_RNA (1)...(19): siRNA sense strand
gccagaagcccaaggagca

SEQ ID NO: 2253971 - RNA, 19 nt, Homo sapiens
  misc_RNA (1)...(19): siRNA sense strand
ugacacugcugcauggaga

SEQ ID NO: 2253972 - RNA, 19 nt, Homo sapiens
  misc_RNA (1)...(19): siRNA sense strand
acagaguuaagcugauaaa

SEQ ID NO: 2253973 - RNA, 19 nt, Homo sapiens
  misc_RNA (1)...(19): siRNA sense strand
uaaaugagagcguggacga

SEQ ID NO: 2253974 - RNA, 19 nt, Homo sapiens
  misc_RNA (1)...(19): siRNA sense strand
gcagacacgccaaccgcaa

SEQ ID NO: 2253975 - RNA, 19 nt, Homo sapiens
  misc_RNA (1)...(19): siRNA sense strand
ggaucgaagacuaaagaaa

SEQ ID NO: 2253976 - RNA, 19 nt, Homo sapiens
  misc_RNA (1)...(19): siRNA sense strand
cuucaaagagcuaggcaaa

SEQ ID NO: 2253977 - RNA, 19 nt, Homo sapiens
  misc_RNA (1)...(19): siRNA sense strand
acugagauccagagagaaa

SEQ ID NO: 2253978 - RNA, 19 nt, Homo sapiens
  misc_RNA (1)...(19): siRNA sense strand
gguugaauuaugacagaaa

SEQ ID NO: 2253979 - RNA, 19 nt, Homo sapiens
  misc_RNA (1)...(19): siRNA sense strand
cagaaaagaacuagaaaga

SEQ ID NO: 2253980 - RNA, 19 nt, Homo sapiens
  misc_RNA (1)...(19): siRNA sense strand
gaugaugaugacagagaaa

SEQ ID NO: 2253981 - RNA, 19 nt, Homo sapiens
  misc_RNA (1)...(19): siRNA sense strand
aagcagagacagcaagaaa

SEQ ID NO: 2253982 - RNA, 19 nt, Homo sapiens
  misc_RNA (1)...(19): siRNA sense strand
caacaaagaaaucaggcua

SEQ ID NO: 2253983 - RNA, 19 nt, Homo sapiens
  misc_RNA (1)...(19): siRNA sense strand
ccaugaugcuucaggaaca

SEQ ID NO: 2253984 - RNA, 19 nt, Homo sapiens
  misc_RNA (1)...(19): siRNA sense strand
uaagaaugacggugguaaa

SEQ ID NO: 2253985 - RNA, 19 nt, Homo sapiens
  misc_RNA (1)...(19): siRNA sense strand
aaaugaaugaggagcauaa

SEQ ID NO: 2253986 - RNA, 19 nt, Homo sapiens
  misc_RNA (1)...(19): siRNA sense strand
cugaagagagacauggaaa

SEQ ID NO: 2253987 - RNA, 19 nt, Homo sapiens
  misc_RNA (1)...(19): siRNA sense strand
agagaagaaucaagaacuu

SEQ ID NO: 2253988 - RNA, 19 nt, Homo sapiens
  misc_RNA (1)...(19): siRNA sense strand
ggaaagaauggcugcucua

SEQ ID NO: 2253989 - RNA, 19 nt, Homo sapiens
  misc_RNA (1)...(19): siRNA sense strand
aggaaacaucggagaaaga

SEQ ID NO: 2253990 - RNA, 19 nt, Homo sapiens
  misc_RNA (1)...(19): siRNA sense strand
ggaacaggaagcagagaca

SEQ ID NO: 2253991 - RNA, 19 nt, Homo sapiens
  misc_RNA (1)...(19): siRNA sense strand
ggaagauauggaagaaaga

SEQ ID NO: 2253992 - RNA, 19 nt, Homo sapiens
  misc_RNA (1)...(19): siRNA sense strand
gauacaagcaauuggacuu

SEQ ID NO: 2253993 - RNA, 19 nt, Homo sapiens
  misc_RNA (1)...(19): siRNA sense strand
aaccaaggcugaagagaga

SEQ ID NO: 2253994 - RNA, 19 nt, Homo sapiens
  misc_RNA (1)...(19): siRNA sense strand
agaaacaacacaagacuau

SEQ ID NO: 2253995 - RNA, 19 nt, Homo sapiens
  misc_RNA (1)...(19): siRNA sense strand
ucaacagauuggaguacua

SEQ ID NO: 2253996 - RNA, 19 nt, Homo sapiens
  misc_RNA (1)...(19): siRNA sense strand
aggaaagauuagcagaaga

SEQ ID NO: 2253997 - RNA, 19 nt, Homo sapiens
  misc_RNA (1)...(19): siRNA sense strand
acuagaaagaagacgggaa

SEQ ID NO: 2253998 - RNA, 19 nt, Homo sapiens
  misc_RNA (1)...(19): siRNA sense strand
ggugaauaugcuagaugaa

SEQ ID NO: 2253999 - RNA, 19 nt, Homo sapiens
  misc_RNA (1)...(19): siRNA sense strand
gcugaaagaaacaacacaa

SEQ ID NO: 2254000 - RNA, 19 nt, Homo sapiens
  misc_RNA (1)...(19): siRNA sense strand
gaacaaaaguugcagcaga

SEQ ID NO: 2254001 - RNA, 19 nt, Homo sapiens
  misc_RNA (1)...(19): siRNA sense strand
aauaagaagaccaaggaga

SEQ ID NO: 2254002 - RNA, 19 nt, Homo sapiens
  misc_RNA (1)...(19): siRNA sense strand
ccgaguuauucgcuggaua

SEQ ID NO: 2254003 - RNA, 19 nt, Homo sapiens
  misc_RNA (1)...(19): siRNA sense strand
aauuggacuucgagaauau

SEQ ID NO: 2254004 - RNA, 19 nt, Homo sapiens
  misc_RNA (1)...(19): siRNA sense strand
augaaauggcccagaugaa

SEQ ID NO: 2254005 - RNA, 19 nt, Homo sapiens
  misc_RNA (1)...(19): siRNA sense strand
gcggcagauggaagagaaa

SEQ ID NO: 2254006 - RNA, 19 nt, Homo sapiens
  misc_RNA (1)...(19): siRNA sense strand
caaugaacgccuacaacua

SEQ ID NO: 2254007 - RNA, 19 nt, Homo sapiens
  misc_RNA (1)...(19): siRNA sense strand
gaucgaagacuaaagaaaa

SEQ ID NO: 2254008 - RNA, 19 nt, Homo sapiens
  misc_RNA (1)...(19): siRNA sense strand
ugaagagagacauggaaau

SEQ ID NO: 2254009 - RNA, 19 nt, Homo sapiens
  misc_RNA (1)...(19): siRNA sense strand
agaagaaaucucugaacuu

SEQ ID NO: 2254010 - RNA, 19 nt, Homo sapiens
  misc_RNA (1)...(19): siRNA sense strand
acuuaaagcugaaagaaac

SEQ ID NO: 2254011 - RNA, 19 nt, Homo sapiens
  misc_RNA (1)...(19): siRNA sense strand
agagcuaggcaaagagaga

SEQ ID NO: 2254012 - RNA, 19 nt, Homo sapiens
  misc_RNA (1)...(19): siRNA sense strand
uugaagaagcucggagaaa

SEQ ID NO: 2254013 - RNA, 19 nt, Homo sapiens
  misc_RNA (1)...(19): siRNA sense strand
ggugaaaucucuuggggau

SEQ ID NO: 2254014 - RNA, 19 nt, Homo sapiens
  misc_RNA (1)...(19): siRNA sense strand
gagacucacuccagagaca

SEQ ID NO: 2254015 - RNA, 19 nt, Homo sapiens
  misc_RNA (1)...(19): siRNA sense strand
cagaacaucuugaagggau

SEQ ID NO: 2254016 - RNA, 19 nt, Homo sapiens
  misc_RNA (1)...(19): siRNA sense strand
ugaugaugacagagaaaca

SEQ ID NO: 2254017 - RNA, 19 nt, Homo sapiens
  misc_RNA (1)...(19): siRNA sense strand
aggcaaacucggaacucaa

SEQ ID NO: 2254018 - RNA, 19 nt, Homo sapiens
  misc_RNA (1)...(19): siRNA sense strand
cgaaagaaucugaggaagg

SEQ ID NO: 2254019 - RNA, 19 nt, Homo sapiens
  misc_RNA (1)...(19): siRNA sense strand
ucagagaauugcagcccua

SEQ ID NO: 2254020 - RNA, 19 nt, Homo sapiens
  misc_RNA (1)...(19): siRNA sense strand
uugaagaacguaugagaca

SEQ ID NO: 2254021 - RNA, 19 nt, Homo sapiens
  misc_RNA (1)...(19): siRNA sense strand
agcuaggcaaagagagaaa

SEQ ID NO: 2254022 - RNA, 19 nt, Homo sapiens
  misc_RNA (1)...(19): siRNA sense strand
acacagaacacccaggcaa

SEQ ID NO: 2254023 - RNA, 19 nt, Homo sapiens
  misc_RNA (1)...(19): siRNA sense strand
acucaugaagaaauggaaa

SEQ ID NO: 2254024 - RNA, 19 nt, Homo sapiens
  misc_RNA (1)...(19): siRNA sense strand
cugaaaggcgacuggauga

SEQ ID NO: 2254025 - RNA, 19 nt, Homo sapiens
  misc_RNA (1)...(19): siRNA sense strand
ugaaugaggagcauaacaa

SEQ ID NO: 2254026 - RNA, 19 nt, Homo sapiens
  misc_RNA (1)...(19): siRNA sense strand
ugagacauuuagaggguca

SEQ ID NO: 2254027 - RNA, 19 nt, Homo sapiens
  misc_RNA (1)...(19): siRNA sense strand
uaaggaaagauuagcagaa

SEQ ID NO: 2254028 - RNA, 19 nt, Homo sapiens
  misc_RNA (1)...(19): siRNA sense strand
gaaacaucggagaaagauu

SEQ ID NO: 2254029 - RNA, 19 nt, Homo sapiens
  misc_RNA (1)...(19): siRNA sense strand
ggucgagaggacaaagcaa

SEQ ID NO: 2254030 - RNA, 19 nt, Homo sapiens
  misc_RNA (1)...(19): siRNA sense strand
gagaaauuggaaucagcaa

SEQ ID NO: 2254031 - RNA, 19 nt, Homo sapiens
  misc_RNA (1)...(19): siRNA sense strand
uggaaauauugaagaacgu

SEQ ID NO: 2254032 - RNA, 19 nt, Homo sapiens
  misc_RNA (1)...(19): siRNA sense strand
agauugcaguuguggaaga

SEQ ID NO: 2254033 - RNA, 19 nt, Homo sapiens
  misc_RNA (1)...(19): siRNA sense strand
cgggcaaggcaaagagaaa

SEQ ID NO: 2254034 - RNA, 19 nt, Homo sapiens
  misc_RNA (1)...(19): siRNA sense strand
gcaaagaagcauuaggaca

SEQ ID NO: 2254035 - RNA, 19 nt, Homo sapiens
  misc_RNA (1)...(19): siRNA sense strand
aagcacaguuggaggagaa

SEQ ID NO: 2254036 - RNA, 19 nt, Homo sapiens
  misc_RNA (1)...(19): siRNA sense strand
acacagagauccagcguga

SEQ ID NO: 2254037 - RNA, 19 nt, Homo sapiens
  misc_RNA (1)...(19): siRNA sense strand
caguggaagucuagacaau

SEQ ID NO: 2254038 - RNA, 19 nt, Homo sapiens
  misc_RNA (1)...(19): siRNA sense strand
ucgacagacugaagauaaa

SEQ ID NO: 2254039 - RNA, 19 nt, Homo sapiens
  misc_RNA (1)...(19): siRNA sense strand
agaaagucagagugaaaua

SEQ ID NO: 2254040 - RNA, 19 nt, Homo sapiens
  misc_RNA (1)...(19): siRNA sense strand
cugaaagcagaaaggaaua

SEQ ID NO: 2254041 - RNA, 19 nt, Homo sapiens
  misc_RNA (1)...(19): siRNA sense strand
ugacagaacuggaagagga

SEQ ID NO: 2254042 - RNA, 19 nt, Homo sapiens
  misc_RNA (1)...(19): siRNA sense strand
aagauauggaagagagaau

SEQ ID NO: 2254043 - RNA, 19 nt, Homo sapiens
  misc_RNA (1)...(19): siRNA sense strand
acaccaagcacgaguggaa

SEQ ID NO: 2254044 - RNA, 19 nt, Homo sapiens
  misc_RNA (1)...(19): siRNA sense strand
ggaagauauggaagagaga

SEQ ID NO: 2254045 - RNA, 19 nt, Homo sapiens
  misc_RNA (1)...(19): siRNA sense strand
cuugauacacugagagaga

SEQ ID NO: 2254046 - RNA, 19 nt, Homo sapiens
  misc_RNA (1)...(19): siRNA sense strand
uggaauuggcagagcaaaa

SEQ ID NO: 2254047 - RNA, 19 nt, Homo sapiens
  misc_RNA (1)...(19): siRNA sense strand
gguuaaauuaugaccggaa

SEQ ID NO: 2254048 - RNA, 19 nt, Homo sapiens
  misc_RNA (1)...(19): siRNA sense strand
ugauagaagguuugaugaa

SEQ ID NO: 2254049 - RNA, 19 nt, Homo sapiens
  misc_RNA (1)...(19): siRNA sense strand
acugaaagcagaaaggaau

SEQ ID NO: 2254050 - RNA, 19 nt, Homo sapiens
  misc_RNA (1)...(19): siRNA sense strand
ugaaaauggucgacaguuu

SEQ ID NO: 2254051 - RNA, 19 nt, Homo sapiens
  misc_RNA (1)...(19): siRNA sense strand
gcgaaguggaagugcugaa

SEQ ID NO: 2254052 - RNA, 19 nt, Homo sapiens
  misc_RNA (1)...(19): siRNA sense strand
acgaguagcacuugaaaga

SEQ ID NO: 2254053 - RNA, 19 nt, Homo sapiens
  misc_RNA (1)...(19): siRNA sense strand
cuuuaagccacgaggaaga

SEQ ID NO: 2254054 - RNA, 19 nt, Homo sapiens
  misc_RNA (1)...(19): siRNA sense strand
acauaaaccaugaacaaga

SEQ ID NO: 2254055 - RNA, 19 nt, Homo sapiens
  misc_RNA (1)...(19): siRNA sense strand
aagcuagugucuuggcaaa

SEQ ID NO: 2254056 - RNA, 19 nt, Homo sapiens
  misc_RNA (1)...(19): siRNA sense strand
uugaaagggaagaagaaau

SEQ ID NO: 2254057 - RNA, 19 nt, Homo sapiens
  misc_RNA (1)...(19): siRNA sense strand
uggaggagguggaggccau

SEQ ID NO: 2254058 - RNA, 19 nt, Homo sapiens
  misc_RNA (1)...(19): siRNA sense strand
gggcugaacuagaccacau

SEQ ID NO: 2254059 - RNA, 19 nt, Homo sapiens
  misc_RNA (1)...(19): siRNA sense strand
gguuagaccggcugcacaa

SEQ ID NO: 2254060 - RNA, 19 nt, Homo sapiens
  misc_RNA (1)...(19): siRNA sense strand
guuuguuagaagaggaauu

SEQ ID NO: 2254061 - RNA, 19 nt, Homo sapiens
  misc_RNA (1)...(19): siRNA sense strand
auggagugcuggacauaaa

SEQ ID NO: 2254062 - RNA, 19 nt, Homo sapiens
  misc_RNA (1)...(19): siRNA sense strand
ccagagaagagguacgaga

SEQ ID NO: 2254063 - RNA, 19 nt, Homo sapiens
  misc_RNA (1)...(19): siRNA sense strand
ggugaagaugacagggaca

SEQ ID NO: 2254064 - RNA, 19 nt, Homo sapiens
  misc_RNA (1)...(19): siRNA sense strand
ugaccguggugaagagaca

SEQ ID NO: 2254065 - RNA, 19 nt, Homo sapiens
  misc_RNA (1)...(19): siRNA sense strand
gggaagaagaaauugcuga

SEQ ID NO: 2254066 - RNA, 19 nt, Homo sapiens
  misc_RNA (1)...(19): siRNA sense strand
gcagaaaggaauaacacca

SEQ ID NO: 2254067 - RNA, 19 nt, Homo sapiens
  misc_RNA (1)...(19): siRNA sense strand
cugaagagagacacggcaa

SEQ ID NO: 2254068 - RNA, 19 nt, Homo sapiens
  misc_RNA (1)...(19): siRNA sense strand
auagaagguuugaugaaga

SEQ ID NO: 2254069 - RNA, 19 nt, Homo sapiens
  misc_RNA (1)...(19): siRNA sense strand
aagaaacacaacacgauaa

SEQ ID NO: 2254070 - RNA, 19 nt, Homo sapiens
  misc_RNA (1)...(19): siRNA sense strand
aagcacgaguggaaagaga

SEQ ID NO: 2254071 - RNA, 19 nt, Homo sapiens
  misc_RNA (1)...(19): siRNA sense strand
agucaagggaacagagcca

SEQ ID NO: 2254072 - RNA, 19 nt, Homo sapiens
  misc_RNA (1)...(19): siRNA sense strand
uuccaaggcugaagagaga

SEQ ID NO: 2254073 - RNA, 19 nt, Homo sapiens
  misc_RNA (1)...(19): siRNA sense strand
ccacacacaaagagcuaau

SEQ ID NO: 2254074 - RNA, 19 nt, Homo sapiens
  misc_RNA (1)...(19): siRNA sense strand
cuaaaguaauugagcucca

SEQ ID NO: 2254075 - RNA, 19 nt, Homo sapiens
  misc_RNA (1)...(19): siRNA sense strand
acacaaaauugcaacgaga

SEQ ID NO: 2254076 - RNA, 19 nt, Homo sapiens
  misc_RNA (1)...(19): siRNA sense strand
cacaagcauucgagaguga

SEQ ID NO: 2254077 - RNA, 19 nt, Homo sapiens
  misc_RNA (1)...(19): siRNA sense strand
gcgauuacgaguagcacuu

SEQ ID NO: 2254078 - RNA, 19 nt, Homo sapiens
  misc_RNA (1)...(19): siRNA sense strand
aggauggucccgugagcaa

SEQ ID NO: 2254079 - RNA, 19 nt, Homo sapiens
  misc_RNA (1)...(19): siRNA sense strand
gccuuaaagaauaugcaaa

SEQ ID NO: 2254080 - RNA, 19 nt, Homo sapiens
  misc_RNA (1)...(19): siRNA sense strand
cagauggagugcuggacau

SEQ ID NO: 2254081 - RNA, 19 nt, Homo sapiens
  misc_RNA (1)...(19): siRNA sense strand
ucaagggaacagagccaaa

SEQ ID NO: 2254082 - RNA, 19 nt, Homo sapiens
  misc_RNA (1)...(19): siRNA sense strand
gagacuaagaggugcuuca

SEQ ID NO: 2254083 - RNA, 19 nt, Homo sapiens
  misc_RNA (1)...(19): siRNA sense strand
gaaagaacuggaaagaaaa

SEQ ID NO: 2254084 - RNA, 19 nt, Homo sapiens
  misc_RNA (1)...(19): siRNA sense strand
ccugcaaacuuccggguga

SEQ ID NO: 2254085 - RNA, 19 nt, Homo sapiens
  misc_RNA (1)...(19): siRNA sense strand
uuguuuggcaagaaagaaa

SEQ ID NO: 2254086 - RNA, 19 nt, Homo sapiens
  misc_RNA (1)...(19): siRNA sense strand
aguuggaggagaagaauca

SEQ ID NO: 2254087 - RNA, 19 nt, Homo sapiens
  misc_RNA (1)...(19): siRNA sense strand
ccggaaagaacuggaaaga

SEQ ID NO: 2254088 - RNA, 19 nt, Homo sapiens
  misc_RNA (1)...(19): siRNA sense strand
cggaaagaacuggaaagaa

SEQ ID NO: 2254089 - RNA, 19 nt, Homo sapiens
  misc_RNA (1)...(19): siRNA sense strand
gggaacagagccaaaugaa

SEQ ID NO: 2254090 - RNA, 19 nt, Homo sapiens
  misc_RNA (1)...(19): siRNA sense strand
gauauggaagagagaauca

SEQ ID NO: 2254091 - RNA, 19 nt, Homo sapiens
  misc_RNA (1)...(19): siRNA sense strand
cugcagcgggcaaggcaaa

SEQ ID NO: 2254092 - RNA, 19 nt, Homo sapiens
  misc_RNA (1)...(19): siRNA sense strand
gcuucaacuucaucuuaaa

SEQ ID NO: 2254093 - RNA, 19 nt, Homo sapiens
  misc_RNA (1)...(19): siRNA sense strand
cgggcaaggcaaagagaaa

SEQ ID NO: 2254094 - RNA, 19 nt, Homo sapiens
  misc_RNA (1)...(19): siRNA sense strand
gcaaagaagcauuaggaca

SEQ ID NO: 2254095 - RNA, 19 nt, Homo sapiens
  misc_RNA (1)...(19): siRNA sense strand
aagcacaguuggaggagaa

SEQ ID NO: 2254096 - RNA, 19 nt, Homo sapiens
  misc_RNA (1)...(19): siRNA sense strand
acacagagauccagcguga

SEQ ID NO: 2254097 - RNA, 19 nt, Homo sapiens
  misc_RNA (1)...(19): siRNA sense strand
caguggaagucuagacaau

SEQ ID NO: 2254098 - RNA, 19 nt, Homo sapiens
  misc_RNA (1)...(19): siRNA sense strand
ucgacagacugaagauaaa

SEQ ID NO: 2254099 - RNA, 19 nt, Homo sapiens
  misc_RNA (1)...(19): siRNA sense strand
agaaagucagagugaaaua

SEQ ID NO: 2254100 - RNA, 19 nt, Homo sapiens
  misc_RNA (1)...(19): siRNA sense strand
cugaaagcagaaaggaaua

SEQ ID NO: 2254101 - RNA, 19 nt, Homo sapiens
  misc_RNA (1)...(19): siRNA sense strand
ugacagaacuggaagagga

SEQ ID NO: 2254102 - RNA, 19 nt, Homo sapiens
  misc_RNA (1)...(19): siRNA sense strand
aagauauggaagagagaau

SEQ ID NO: 2254103 - RNA, 19 nt, Homo sapiens
  misc_RNA (1)...(19): siRNA sense strand
acaccaagcacgaguggaa

SEQ ID NO: 2254104 - RNA, 19 nt, Homo sapiens
  misc_RNA (1)...(19): siRNA sense strand
ggaagauauggaagagaga

SEQ ID NO: 2254105 - RNA, 19 nt, Homo sapiens
  misc_RNA (1)...(19): siRNA sense strand
cuugauacacugagagaga

SEQ ID NO: 2254106 - RNA, 19 nt, Homo sapiens
  misc_RNA (1)...(19): siRNA sense strand
uggaauuggcagagcaaaa

SEQ ID NO: 2254107 - RNA, 19 nt, Homo sapiens
  misc_RNA (1)...(19): siRNA sense strand
gguuaaauuaugaccggaa

SEQ ID NO: 2254108 - RNA, 19 nt, Homo sapiens
  misc_RNA (1)...(19): siRNA sense strand
ugauagaagguuugaugaa

SEQ ID NO: 2254109 - RNA, 19 nt, Homo sapiens
  misc_RNA (1)...(19): siRNA sense strand
acugaaagcagaaaggaau

SEQ ID NO: 2254110 - RNA, 19 nt, Homo sapiens
  misc_RNA (1)...(19): siRNA sense strand
ugaaaauggucgacaguuu

SEQ ID NO: 2254111 - RNA, 19 nt, Homo sapiens
  misc_RNA (1)...(19): siRNA sense strand
gcgaaguggaagugcugaa

SEQ ID NO: 2254112 - RNA, 19 nt, Homo sapiens
  misc_RNA (1)...(19): siRNA sense strand
acgaguagcacuugaaaga

SEQ ID NO: 2254113 - RNA, 19 nt, Homo sapiens
  misc_RNA (1)...(19): siRNA sense strand
cuuuaagccacgaggaaga

SEQ ID NO: 2254114 - RNA, 19 nt, Homo sapiens
  misc_RNA (1)...(19): siRNA sense strand
acauaaaccaugaacaaga

SEQ ID NO: 2254115 - RNA, 19 nt, Homo sapiens
  misc_RNA (1)...(19): siRNA sense strand
aagcuagugucuuggcaaa

SEQ ID NO: 2254116 - RNA, 19 nt, Homo sapiens
  misc_RNA (1)...(19): siRNA sense strand
uugaaagggaagaagaaau

SEQ ID NO: 2254117 - RNA, 19 nt, Homo sapiens
  misc_RNA (1)...(19): siRNA sense strand
uggaggagguggaggccau

SEQ ID NO: 2254118 - RNA, 19 nt, Homo sapiens
  misc_RNA (1)...(19): siRNA sense strand
gggcugaacuagaccacau

SEQ ID NO: 2254119 - RNA, 19 nt, Homo sapiens
  misc_RNA (1)...(19): siRNA sense strand
gguuagaccggcugcacaa

SEQ ID NO: 2254120 - RNA, 19 nt, Homo sapiens
  misc_RNA (1)...(19): siRNA sense strand
guuuguuagaagaggaauu

SEQ ID NO: 2254121 - RNA, 19 nt, Homo sapiens
  misc_RNA (1)...(19): siRNA sense strand
auggagugcuggacauaaa

SEQ ID NO: 2254122 - RNA, 19 nt, Homo sapiens
  misc_RNA (1)...(19): siRNA sense strand
ccagagaagagguacgaga

SEQ ID NO: 2254123 - RNA, 19 nt, Homo sapiens
  misc_RNA (1)...(19): siRNA sense strand
ggugaagaugacagggaca

SEQ ID NO: 2254124 - RNA, 19 nt, Homo sapiens
  misc_RNA (1)...(19): siRNA sense strand
ugaccguggugaagagaca

SEQ ID NO: 2254125 - RNA, 19 nt, Homo sapiens
  misc_RNA (1)...(19): siRNA sense strand
gggaagaagaaauugcuga

SEQ ID NO: 2254126 - RNA, 19 nt, Homo sapiens
  misc_RNA (1)...(19): siRNA sense strand
gcagaaaggaauaacacca

SEQ ID NO: 2254127 - RNA, 19 nt, Homo sapiens
  misc_RNA (1)...(19): siRNA sense strand
cugaagagagacacggcaa

SEQ ID NO: 2254128 - RNA, 19 nt, Homo sapiens
  misc_RNA (1)...(19): siRNA sense strand
auagaagguuugaugaaga

SEQ ID NO: 2254129 - RNA, 19 nt, Homo sapiens
  misc_RNA (1)...(19): siRNA sense strand
aagaaacacaacacgauaa

SEQ ID NO: 2254130 - RNA, 19 nt, Homo sapiens
  misc_RNA (1)...(19): siRNA sense strand
aagcacgaguggaaagaga

SEQ ID NO: 2254131 - RNA, 19 nt, Homo sapiens
  misc_RNA (1)...(19): siRNA sense strand
agucaagggaacagagcca

SEQ ID NO: 2254132 - RNA, 19 nt, Homo sapiens
  misc_RNA (1)...(19): siRNA sense strand
uuccaaggcugaagagaga

SEQ ID NO: 2254133 - RNA, 19 nt, Homo sapiens
  misc_RNA (1)...(19): siRNA sense strand
ccacacacaaagagcuaau

SEQ ID NO: 2254134 - RNA, 19 nt, Homo sapiens
  misc_RNA (1)...(19): siRNA sense strand
cuaaaguaauugagcucca

SEQ ID NO: 2254135 - RNA, 19 nt, Homo sapiens
  misc_RNA (1)...(19): siRNA sense strand
acacaaaauugcaacgaga

SEQ ID NO: 2254136 - RNA, 19 nt, Homo sapiens
  misc_RNA (1)...(19): siRNA sense strand
cacaagcauucgagaguga

SEQ ID NO: 2254137 - RNA, 19 nt, Homo sapiens
  misc_RNA (1)...(19): siRNA sense strand
gcgauuacgaguagcacuu

SEQ ID NO: 2254138 - RNA, 19 nt, Homo sapiens
  misc_RNA (1)...(19): siRNA sense strand
aggauggucccgugagcaa

SEQ ID NO: 2254139 - RNA, 19 nt, Homo sapiens
  misc_RNA (1)...(19): siRNA sense strand
gccuuaaagaauaugcaaa

SEQ ID NO: 2254140 - RNA, 19 nt, Homo sapiens
  misc_RNA (1)...(19): siRNA sense strand
cagauggagugcuggacau

SEQ ID NO: 2254141 - RNA, 19 nt, Homo sapiens
  misc_RNA (1)...(19): siRNA sense strand
ucaagggaacagagccaaa

SEQ ID NO: 2254142 - RNA, 19 nt, Homo sapiens
  misc_RNA (1)...(19): siRNA sense strand
gagacuaagaggugcuuca

SEQ ID NO: 2254143 - RNA, 19 nt, Homo sapiens
  misc_RNA (1)...(19): siRNA sense strand
gaaagaacuggaaagaaaa

SEQ ID NO: 2254144 - RNA, 19 nt, Homo sapiens
  misc_RNA (1)...(19): siRNA sense strand
ccugcaaacuuccggguga

SEQ ID NO: 2254145 - RNA, 19 nt, Homo sapiens
  misc_RNA (1)...(19): siRNA sense strand
uuguuuggcaagaaagaaa

SEQ ID NO: 2254146 - RNA, 19 nt, Homo sapiens
  misc_RNA (1)...(19): siRNA sense strand
aguuggaggagaagaauca

SEQ ID NO: 2254147 - RNA, 19 nt, Homo sapiens
  misc_RNA (1)...(19): siRNA sense strand
ccggaaagaacuggaaaga

SEQ ID NO: 2254148 - RNA, 19 nt, Homo sapiens
  misc_RNA (1)...(19): siRNA sense strand
cggaaagaacuggaaagaa

SEQ ID NO: 2254149 - RNA, 19 nt, Homo sapiens
  misc_RNA (1)...(19): siRNA sense strand
gggaacagagccaaaugaa

SEQ ID NO: 2254150 - RNA, 19 nt, Homo sapiens
  misc_RNA (1)...(19): siRNA sense strand
gauauggaagagagaauca

SEQ ID NO: 2254151 - RNA, 19 nt, Homo sapiens
  misc_RNA (1)...(19): siRNA sense strand
cugcagcgggcaaggcaaa

SEQ ID NO: 2254152 - RNA, 19 nt, Homo sapiens
  misc_RNA (1)...(19): siRNA sense strand
gcuucaacuucaucuuaaa

SEQ ID NO: 2254153 - RNA, 19 nt, Homo sapiens
  misc_RNA (1)...(19): siRNA sense strand
gcaaauacgccaugcgaga

SEQ ID NO: 2254154 - RNA, 19 nt, Homo sapiens
  misc_RNA (1)...(19): siRNA sense strand
gcaagaagaucaaugggau

SEQ ID NO: 2254155 - RNA, 19 nt, Homo sapiens
  misc_RNA (1)...(19): siRNA sense strand
acaaggagcucauaggcaa

SEQ ID NO: 2254156 - RNA, 19 nt, Homo sapiens
  misc_RNA (1)...(19): siRNA sense strand
gaucaacagacgugccaaa

SEQ ID NO: 2254157 - RNA, 19 nt, Homo sapiens
  misc_RNA (1)...(19): siRNA sense strand
cagcaaagacucugagcca

SEQ ID NO: 2254158 - RNA, 19 nt, Homo sapiens
  misc_RNA (1)...(19): siRNA sense strand
gugcaacagccuugaggaa

SEQ ID NO: 2254159 - RNA, 19 nt, Homo sapiens
  misc_RNA (1)...(19): siRNA sense strand
gugagggaucauuggguaa

SEQ ID NO: 2254160 - RNA, 19 nt, Homo sapiens
  misc_RNA (1)...(19): siRNA sense strand
uggcaagucuacagaugaa

SEQ ID NO: 2254161 - RNA, 19 nt, Homo sapiens
  misc_RNA (1)...(19): siRNA sense strand
gcuagaaagauguaggcuu

SEQ ID NO: 2254162 - RNA, 19 nt, Homo sapiens
  misc_RNA (1)...(19): siRNA sense strand
uguaucagguauuggaaau

SEQ ID NO: 2254163 - RNA, 19 nt, Homo sapiens
  misc_RNA (1)...(19): siRNA sense strand
uggaugacuuacuaggaaa

SEQ ID NO: 2254164 - RNA, 19 nt, Homo sapiens
  misc_RNA (1)...(19): siRNA sense strand
gcauagucagcuugggcaa

SEQ ID NO: 2254165 - RNA, 19 nt, Homo sapiens
  misc_RNA (1)...(19): siRNA sense strand
ccacaaauuauguagacuu

SEQ ID NO: 2254166 - RNA, 19 nt, Homo sapiens
  misc_RNA (1)...(19): siRNA sense strand
acaacaaagugaagaugga

SEQ ID NO: 2254167 - RNA, 19 nt, Homo sapiens
  misc_RNA (1)...(19): siRNA sense strand
acagcaagacgguggagaa

SEQ ID NO: 2254168 - RNA, 19 nt, Homo sapiens
  misc_RNA (1)...(19): siRNA sense strand
cuucacuaguucugcguaa

SEQ ID NO: 2254169 - RNA, 19 nt, Homo sapiens
  misc_RNA (1)...(19): siRNA sense strand
agaacaaaauagacggcua

SEQ ID NO: 2254170 - RNA, 19 nt, Homo sapiens
  misc_RNA (1)...(19): siRNA sense strand
aaauacugguguaagcaaa

SEQ ID NO: 2254171 - RNA, 19 nt, Homo sapiens
  misc_RNA (1)...(19): siRNA sense strand
uguugcgacuguugagaaa

SEQ ID NO: 2254172 - RNA, 19 nt, Homo sapiens
  misc_RNA (1)...(19): siRNA sense strand
acucauggguguacgauca

SEQ ID NO: 2254173 - RNA, 19 nt, Homo sapiens
  misc_RNA (1)...(19): siRNA sense strand
cucaagaaguucaacacaa

SEQ ID NO: 2254174 - RNA, 19 nt, Homo sapiens
  misc_RNA (1)...(19): siRNA sense strand
cugagaauggauaacgaua

SEQ ID NO: 2254175 - RNA, 19 nt, Homo sapiens
  misc_RNA (1)...(19): siRNA sense strand
aagaugacuccaacagaaa

SEQ ID NO: 2254176 - RNA, 19 nt, Homo sapiens
  misc_RNA (1)...(19): siRNA sense strand
cuagaaagauguaggcuug

SEQ ID NO: 2254177 - RNA, 19 nt, Homo sapiens
  misc_RNA (1)...(19): siRNA sense strand
ccaugaaagugagggauca

SEQ ID NO: 2254178 - RNA, 19 nt, Homo sapiens
  misc_RNA (1)...(19): siRNA sense strand
ggaaaucuacaaaggacau

SEQ ID NO: 2254179 - RNA, 19 nt, Homo sapiens
  misc_RNA (1)...(19): siRNA sense strand
caaggagcucauaggcaaa

SEQ ID NO: 2254180 - RNA, 19 nt, Homo sapiens
  misc_RNA (1)...(19): siRNA sense strand
cuugaauacauuauggcaa

SEQ ID NO: 2254181 - RNA, 19 nt, Homo sapiens
  misc_RNA (1)...(19): siRNA sense strand
uauacaauaccgagugcaa

SEQ ID NO: 2254182 - RNA, 19 nt, Homo sapiens
  misc_RNA (1)...(19): siRNA sense strand
ugaacgaauuggaugacuu

SEQ ID NO: 2254183 - RNA, 19 nt, Homo sapiens
  misc_RNA (1)...(19): siRNA sense strand
caggacagagccagaacaa

SEQ ID NO: 2254184 - RNA, 19 nt, Homo sapiens
  misc_RNA (1)...(19): siRNA sense strand
ccgagaacuggaaguggaa

SEQ ID NO: 2254185 - RNA, 19 nt, Homo sapiens
  misc_RNA (1)...(19): siRNA sense strand
auguaggcuuggagcagaa

SEQ ID NO: 2254186 - RNA, 19 nt, Homo sapiens
  misc_RNA (1)...(19): siRNA sense strand
cgacaguggauaccaggaa

SEQ ID NO: 2254187 - RNA, 19 nt, Homo sapiens
  misc_RNA (1)...(19): siRNA sense strand
gugacaacaaagugaagau

SEQ ID NO: 2254188 - RNA, 19 nt, Homo sapiens
  misc_RNA (1)...(19): siRNA sense strand
cugaaaucgaccacaaauu

SEQ ID NO: 2254189 - RNA, 19 nt, Homo sapiens
  misc_RNA (1)...(19): siRNA sense strand
gauuguugccagucagcua

SEQ ID NO: 2254190 - RNA, 19 nt, Homo sapiens
  misc_RNA (1)...(19): siRNA sense strand
acuggaaguuugcagcaua

SEQ ID NO: 2254191 - RNA, 19 nt, Homo sapiens
  misc_RNA (1)...(19): siRNA sense strand
ggacagcagcaguaugaca

SEQ ID NO: 2254192 - RNA, 19 nt, Homo sapiens
  misc_RNA (1)...(19): siRNA sense strand
gcaaagacucugagccaag

SEQ ID NO: 2254193 - RNA, 19 nt, Homo sapiens
  misc_RNA (1)...(19): siRNA sense strand
cuaccuacgcggagcccua

SEQ ID NO: 2254194 - RNA, 19 nt, Homo sapiens
  misc_RNA (1)...(19): siRNA sense strand
ggagcuuguuacaggaguu

SEQ ID NO: 2254195 - RNA, 19 nt, Homo sapiens
  misc_RNA (1)...(19): siRNA sense strand
gcauauuccuccaccacau

SEQ ID NO: 2254196 - RNA, 19 nt, Homo sapiens
  misc_RNA (1)...(19): siRNA sense strand
guguaucagguauuggaaa

SEQ ID NO: 2254197 - RNA, 19 nt, Homo sapiens
  misc_RNA (1)...(19): siRNA sense strand
cuuaacaaacacugugauu

SEQ ID NO: 2254198 - RNA, 19 nt, Homo sapiens
  misc_RNA (1)...(19): siRNA sense strand
cuggaaguuugcagcauau

SEQ ID NO: 2254199 - RNA, 19 nt, Homo sapiens
  misc_RNA (1)...(19): siRNA sense strand
gagcagaaucaccaagcau

SEQ ID NO: 2254200 - RNA, 19 nt, Homo sapiens
  misc_RNA (1)...(19): siRNA sense strand
ccucaugugaugcuguaaa

SEQ ID NO: 2254201 - RNA, 19 nt, Homo sapiens
  misc_RNA (1)...(19): siRNA sense strand
gggaagaagcucggaagca

SEQ ID NO: 2254202 - RNA, 19 nt, Homo sapiens
  misc_RNA (1)...(19): siRNA sense strand
gaaaagagucucccagcaa

SEQ ID NO: 2254203 - RNA, 19 nt, Homo sapiens
  misc_RNA (1)...(19): siRNA sense strand
ggguugagaugcuguggca

SEQ ID NO: 2254204 - RNA, 19 nt, Homo sapiens
  misc_RNA (1)...(19): siRNA sense strand
ggguggaaucagaaccauu

SEQ ID NO: 2254205 - RNA, 19 nt, Homo sapiens
  misc_RNA (1)...(19): siRNA sense strand
cgggccaugagaagaguua

SEQ ID NO: 2254206 - RNA, 19 nt, Homo sapiens
  misc_RNA (1)...(19): siRNA sense strand
caguaugacauuuaugaga

SEQ ID NO: 2254207 - RNA, 19 nt, Homo sapiens
  misc_RNA (1)...(19): siRNA sense strand
cuuauagagcagaacagua

SEQ ID NO: 2254208 - RNA, 19 nt, Homo sapiens
  misc_RNA (1)...(19): siRNA sense strand
aucuauugaugcagaagua

SEQ ID NO: 2254209 - RNA, 19 nt, Homo sapiens
  misc_RNA (1)...(19): siRNA sense strand
gcacgaggucaccagcaaa

SEQ ID NO: 2254210 - RNA, 19 nt, Homo sapiens
  misc_RNA (1)...(19): siRNA sense strand
ugucgacauuggagcgaga

SEQ ID NO: 2254211 - RNA, 19 nt, Homo sapiens
  misc_RNA (1)...(19): siRNA sense strand
gugccaaauacugguguaa

SEQ ID NO: 2254212 - RNA, 19 nt, Homo sapiens
  misc_RNA (1)...(19): siRNA sense strand
cagcauucauucauaggau

SEQ ID NO: 2254213 - RNA, 19 nt, Homo sapiens
  misc_RNA (1)...(19): siRNA sense strand
uggaaaucuacaaaggaca

SEQ ID NO: 2254214 - RNA, 19 nt, Homo sapiens
  misc_RNA (1)...(19): siRNA sense strand
cugaguugccugaggucau

SEQ ID NO: 2254215 - RNA, 19 nt, Homo sapiens
  misc_RNA (1)...(19): siRNA sense strand
gcgugugcacccugaggaa

SEQ ID NO: 2254216 - RNA, 19 nt, Homo sapiens
  misc_RNA (1)...(19): siRNA sense strand
ggaugacuuacuaggaaaa

SEQ ID NO: 2254217 - RNA, 19 nt, Homo sapiens
  misc_RNA (1)...(19): siRNA sense strand
gaacauaaccaaaggcagg

SEQ ID NO: 2254218 - RNA, 19 nt, Homo sapiens
  misc_RNA (1)...(19): siRNA sense strand
cugcguaacacgacagguu

SEQ ID NO: 2254219 - RNA, 19 nt, Homo sapiens
  misc_RNA (1)...(19): siRNA sense strand
cauccgauuacgacagcaa

SEQ ID NO: 2254220 - RNA, 19 nt, Homo sapiens
  misc_RNA (1)...(19): siRNA sense strand
agugagggaucauugggua

SEQ ID NO: 2254221 - RNA, 19 nt, Homo sapiens
  misc_RNA (1)...(19): siRNA sense strand
gguauuggaaaucuacaaa

SEQ ID NO: 2254222 - RNA, 19 nt, Homo sapiens
  misc_RNA (1)...(19): siRNA sense strand
ccuuacauaccaaagaaau

SEQ ID NO: 2254223 - RNA, 19 nt, Homo sapiens
  misc_RNA (1)...(19): siRNA sense strand
ggauaagguacuugaagaa

SEQ ID NO: 2254224 - RNA, 19 nt, Homo sapiens
  misc_RNA (1)...(19): siRNA sense strand
agaaaagaacagugggaaa

SEQ ID NO: 2254225 - RNA, 19 nt, Homo sapiens
  misc_RNA (1)...(19): siRNA sense strand
ugaagagaauagagacaau

SEQ ID NO: 2254226 - RNA, 19 nt, Homo sapiens
  misc_RNA (1)...(19): siRNA sense strand
cgaagguaccauagaagaa

SEQ ID NO: 2254227 - RNA, 19 nt, Homo sapiens
  misc_RNA (1)...(19): siRNA sense strand
gcaauguguaaguggcaaa

SEQ ID NO: 2254228 - RNA, 19 nt, Homo sapiens
  misc_RNA (1)...(19): siRNA sense strand
agaaaguugccuaggaaau

SEQ ID NO: 2254229 - RNA, 19 nt, Homo sapiens
  misc_RNA (1)...(19): siRNA sense strand
guggcaaaaugaagggaaa

SEQ ID NO: 2254230 - RNA, 19 nt, Homo sapiens
  misc_RNA (1)...(19): siRNA sense strand
ggauguugguacuggguca

SEQ ID NO: 2254231 - RNA, 19 nt, Homo sapiens
  misc_RNA (1)...(19): siRNA sense strand
aguaaauguuucucagcua

SEQ ID NO: 2254232 - RNA, 19 nt, Homo sapiens
  misc_RNA (1)...(19): siRNA sense strand
cgaaaugcuaagaugaaau

SEQ ID NO: 2254233 - RNA, 19 nt, Homo sapiens
  misc_RNA (1)...(19): siRNA sense strand
cacagauagugaagagaau

SEQ ID NO: 2254234 - RNA, 19 nt, Homo sapiens
  misc_RNA (1)...(19): siRNA sense strand
agugaagagaauagagaca

SEQ ID NO: 2254235 - RNA, 19 nt, Homo sapiens
  misc_RNA (1)...(19): siRNA sense strand
ugaagaagcagaagcucaa

SEQ ID NO: 2254236 - RNA, 19 nt, Homo sapiens
  misc_RNA (1)...(19): siRNA sense strand
ucacaaugucgcaggaaca

SEQ ID NO: 2254237 - RNA, 19 nt, Homo sapiens
  misc_RNA (1)...(19): siRNA sense strand
caaggaaaccggagaaacu

SEQ ID NO: 2254238 - RNA, 19 nt, Homo sapiens
  misc_RNA (1)...(19): siRNA sense strand
caaagaacagaaaggaaga

SEQ ID NO: 2254239 - RNA, 19 nt, Homo sapiens
  misc_RNA (1)...(19): siRNA sense strand
auucuaagcaacauggaaa

SEQ ID NO: 2254240 - RNA, 19 nt, Homo sapiens
  misc_RNA (1)...(19): siRNA sense strand
gaaucagaaaguuuggaua

SEQ ID NO: 2254241 - RNA, 19 nt, Homo sapiens
  misc_RNA (1)...(19): siRNA sense strand
augcuaaacuaccuggaaa

SEQ ID NO: 2254242 - RNA, 19 nt, Homo sapiens
  misc_RNA (1)...(19): siRNA sense strand
cagcggaaucagaaaguuu

SEQ ID NO: 2254243 - RNA, 19 nt, Homo sapiens
  misc_RNA (1)...(19): siRNA sense strand
cgacgaaaugcuaagauga

SEQ ID NO: 2254244 - RNA, 19 nt, Homo sapiens
  misc_RNA (1)...(19): siRNA sense strand
ggauggacacuaaaggaau

SEQ ID NO: 2254245 - RNA, 19 nt, Homo sapiens
  misc_RNA (1)...(19): siRNA sense strand
caccgauggauguggauaa

SEQ ID NO: 2254246 - RNA, 19 nt, Homo sapiens
  misc_RNA (1)...(19): siRNA sense strand
gaaugggaaagaugugaaa

SEQ ID NO: 2254247 - RNA, 19 nt, Homo sapiens
  misc_RNA (1)...(19): siRNA sense strand
agaugagaauggugagcga

SEQ ID NO: 2254248 - RNA, 19 nt, Homo sapiens
  misc_RNA (1)...(19): siRNA sense strand
ucagaauugaugagagaca

SEQ ID NO: 2254249 - RNA, 19 nt, Homo sapiens
  misc_RNA (1)...(19): siRNA sense strand
acacagauagugaagagaa

SEQ ID NO: 2254250 - RNA, 19 nt, Homo sapiens
  misc_RNA (1)...(19): siRNA sense strand
cugcaguggccacaggaaa

SEQ ID NO: 2254251 - RNA, 19 nt, Homo sapiens
  misc_RNA (1)...(19): siRNA sense strand
gggcggugaaguuagauua

SEQ ID NO: 2254252 - RNA, 19 nt, Homo sapiens
  misc_RNA (1)...(19): siRNA sense strand
cggugaaguuagauuacau

SEQ ID NO: 2254253 - RNA, 19 nt, Homo sapiens
  misc_RNA (1)...(19): siRNA sense strand
caucaaggaaaccggagaa

SEQ ID NO: 2254254 - RNA, 19 nt, Homo sapiens
  misc_RNA (1)...(19): siRNA sense strand
gggacguucaucaaggaaa

SEQ ID NO: 2254255 - RNA, 19 nt, Homo sapiens
  misc_RNA (1)...(19): siRNA sense strand
gcuaagucuugauaaguca

SEQ ID NO: 2254256 - RNA, 19 nt, Homo sapiens
  misc_RNA (1)...(19): siRNA sense strand
gaaggaaagugaacccgaa

SEQ ID NO: 2254257 - RNA, 19 nt, Homo sapiens
  misc_RNA (1)...(19): siRNA sense strand
aagcagaggacagaagaaa

SEQ ID NO: 2254258 - RNA, 19 nt, Homo sapiens
  misc_RNA (1)...(19): siRNA sense strand
acagaaaggaagaucccua

SEQ ID NO: 2254259 - RNA, 19 nt, Homo sapiens
  misc_RNA (1)...(19): siRNA sense strand
auugaggagaugagaagaa

SEQ ID NO: 2254260 - RNA, 19 nt, Homo sapiens
  misc_RNA (1)...(19): siRNA sense strand
acgaaaugcuaagaugaaa

SEQ ID NO: 2254261 - RNA, 19 nt, Homo sapiens
  misc_RNA (1)...(19): siRNA sense strand
cacgaagaugggagugaaa

SEQ ID NO: 2254262 - RNA, 19 nt, Homo sapiens
  misc_RNA (1)...(19): siRNA sense strand
gcacugagaucguugccau

SEQ ID NO: 2254263 - RNA, 19 nt, Homo sapiens
  misc_RNA (1)...(19): siRNA sense strand
aagaaaguugccuaggaaa

SEQ ID NO: 2254264 - RNA, 19 nt, Homo sapiens
  misc_RNA (1)...(19): siRNA sense strand
cauuugagaaggaaaguga

SEQ ID NO: 2254265 - RNA, 19 nt, Homo sapiens
  misc_RNA (1)...(19): siRNA sense strand
cacaguaacuauucgggua

SEQ ID NO: 2254266 - RNA, 19 nt, Homo sapiens
  misc_RNA (1)...(19): siRNA sense strand
gguacuugaagaagcagaa

SEQ ID NO: 2254267 - RNA, 19 nt, Homo sapiens
  misc_RNA (1)...(19): siRNA sense strand
cuguuggagauguguauaa

SEQ ID NO: 2254268 - RNA, 19 nt, Homo sapiens
  misc_RNA (1)...(19): siRNA sense strand
agaauugaugagagacauu

SEQ ID NO: 2254269 - RNA, 19 nt, Homo sapiens
  misc_RNA (1)...(19): siRNA sense strand
guacacaguauuugaacca

SEQ ID NO: 2254270 - RNA, 19 nt, Homo sapiens
  misc_RNA (1)...(19): siRNA sense strand
caccagaagugcagcaagu

SEQ ID NO: 2254271 - RNA, 19 nt, Homo sapiens
  misc_RNA (1)...(19): siRNA sense strand
auuugaaggaggagagagu

SEQ ID NO: 2254272 - RNA, 19 nt, Homo sapiens
  misc_RNA (1)...(19): siRNA sense strand
cagaaaggaagaucccuaa

SEQ ID NO: 2254273 - RNA, 19 nt, Homo sapiens
  misc_RNA (1)...(19): siRNA sense strand
cugugcaaguugucagcaa

SEQ ID NO: 2254274 - RNA, 19 nt, Homo sapiens
  misc_RNA (1)...(19): siRNA sense strand
aaauaguugucaagacuca

SEQ ID NO: 2254275 - RNA, 19 nt, Homo sapiens
  misc_RNA (1)...(19): siRNA sense strand
ggacguucaucaaggaaac

SEQ ID NO: 2254276 - RNA, 19 nt, Homo sapiens
  misc_RNA (1)...(19): siRNA sense strand
ccuccauuugagaaggaaa

SEQ ID NO: 2254277 - RNA, 19 nt, Homo sapiens
  misc_RNA (1)...(19): siRNA sense strand
aaccaaacaucaaagaaca

SEQ ID NO: 2254278 - RNA, 19 nt, Homo sapiens
  misc_RNA (1)...(19): siRNA sense strand
cugaggugcuggaucacaa

SEQ ID NO: 2254279 - RNA, 19 nt, Homo sapiens
  misc_RNA (1)...(19): siRNA sense strand
aaugaagaaugcagaaacu

SEQ ID NO: 2254280 - RNA, 19 nt, Homo sapiens
  misc_RNA (1)...(19): siRNA sense strand
uggaagaugagaaugguga

SEQ ID NO: 2254281 - RNA, 19 nt, Homo sapiens
  misc_RNA (1)...(19): siRNA sense strand
uugaagaagcagaagcuca

SEQ ID NO: 2254282 - RNA, 19 nt, Homo sapiens
  misc_RNA (1)...(19): siRNA sense strand
gcuucaagaccgaggagaa

SEQ ID NO: 2254283 - RNA, 19 nt, Homo sapiens
  misc_RNA (1)...(19): siRNA sense strand
gggucuuccuagagaauau

SEQ ID NO: 2254284 - RNA, 19 nt, Homo sapiens
  misc_RNA (1)...(19): siRNA sense strand
gcucaagguggauggucaa

SEQ ID NO: 2254285 - RNA, 19 nt, Homo sapiens
  misc_RNA (1)...(19): siRNA sense strand
caaccaagcuccagccuca

SEQ ID NO: 2254286 - RNA, 19 nt, Homo sapiens
  misc_RNA (1)...(19): siRNA sense strand
ucuacaacguuacgggaga

SEQ ID NO: 2254287 - RNA, 19 nt, Homo sapiens
  misc_RNA (1)...(19): siRNA sense strand
guggguugcuugagggcca

SEQ ID NO: 2254288 - RNA, 19 nt, Homo sapiens
  misc_RNA (1)...(19): siRNA sense strand
cugcaaaaucaucgcuaua

SEQ ID NO: 2254289 - RNA, 19 nt, Homo sapiens
  misc_RNA (1)...(19): siRNA sense strand
gcuaugauacuccgggcua

SEQ ID NO: 2254290 - RNA, 19 nt, Homo sapiens
  misc_RNA (1)...(19): siRNA sense strand
cggcauaagcgggugguca

SEQ ID NO: 2254291 - RNA, 19 nt, Homo sapiens
  misc_RNA (1)...(19): siRNA sense strand
agucagugcccuugccaau

SEQ ID NO: 2254292 - RNA, 19 nt, Homo sapiens
  misc_RNA (1)...(19): siRNA sense strand
cugcagagcuuaagagacg

SEQ ID NO: 2254293 - RNA, 19 nt, Homo sapiens
  misc_RNA (1)...(19): siRNA sense strand
gcgcuauaaccuacaguca

SEQ ID NO: 2254294 - RNA, 19 nt, Homo sapiens
  misc_RNA (1)...(19): siRNA sense strand
ggaggaagucagugcccuu

SEQ ID NO: 2254295 - RNA, 19 nt, Homo sapiens
  misc_RNA (1)...(19): siRNA sense strand
acugcgaacugacgggcua

SEQ ID NO: 2254296 - RNA, 19 nt, Homo sapiens
  misc_RNA (1)...(19): siRNA sense strand
gcugcuauggcgaucgaaa

SEQ ID NO: 2254297 - RNA, 19 nt, Homo sapiens
  misc_RNA (1)...(19): siRNA sense strand
cugaaaucaacgugaagca

SEQ ID NO: 2254298 - RNA, 19 nt, Homo sapiens
  misc_RNA (1)...(19): siRNA sense strand
uuaucggcucagugggaaa

SEQ ID NO: 2254299 - RNA, 19 nt, Homo sapiens
  misc_RNA (1)...(19): siRNA sense strand
ugggaauguuggugcucuu

SEQ ID NO: 2254300 - RNA, 19 nt, Homo sapiens
  misc_RNA (1)...(19): siRNA sense strand
cauacaaggccgacauacu

SEQ ID NO: 2254301 - RNA, 19 nt, Homo sapiens
  misc_RNA (1)...(19): siRNA sense strand
guggagaacugacaaggga

SEQ ID NO: 2254302 - RNA, 19 nt, Homo sapiens
  misc_RNA (1)...(19): siRNA sense strand
ggagaacugacaagggacu

SEQ ID NO: 2254303 - RNA, 19 nt, Homo sapiens
  misc_RNA (1)...(19): siRNA sense strand
ugcucaagguggaugguca

SEQ ID NO: 2254304 - RNA, 19 nt, Homo sapiens
  misc_RNA (1)...(19): siRNA sense strand
cugaauaccuggaugccua

SEQ ID NO: 2254305 - RNA, 19 nt, Homo sapiens
  misc_RNA (1)...(19): siRNA sense strand
guuucuauuccaaggacaa

SEQ ID NO: 2254306 - RNA, 19 nt, Homo sapiens
  misc_RNA (1)...(19): siRNA sense strand
cugcuguccaagaaggaaa

SEQ ID NO: 2254307 - RNA, 19 nt, Homo sapiens
  misc_RNA (1)...(19): siRNA sense strand
caugcucacucgugggcaa

SEQ ID NO: 2254308 - RNA, 19 nt, Homo sapiens
  misc_RNA (1)...(19): siRNA sense strand
aggagaaccaggaggcagu

SEQ ID NO: 2254309 - RNA, 19 nt, Homo sapiens
  misc_RNA (1)...(19): siRNA sense strand
aggaagagaggcugggaug

SEQ ID NO: 2254310 - RNA, 19 nt, Homo sapiens
  misc_RNA (1)...(19): siRNA sense strand
gugagaaaguggaggugca

SEQ ID NO: 2254311 - RNA, 19 nt, Homo sapiens
  misc_RNA (1)...(19): siRNA sense strand
ggacuuggaacauggguga

SEQ ID NO: 2254312 - RNA, 19 nt, Homo sapiens
  misc_RNA (1)...(19): siRNA sense strand
ugaaggagcugcaggccau

SEQ ID NO: 2254313 - RNA, 19 nt, Homo sapiens
  misc_RNA (1)...(19): siRNA sense strand
uggagaucauggaggccua

SEQ ID NO: 2254314 - RNA, 19 nt, Homo sapiens
  misc_RNA (1)...(19): siRNA sense strand
ccauuauccacgagauuga

SEQ ID NO: 2254315 - RNA, 19 nt, Homo sapiens
  misc_RNA (1)...(19): siRNA sense strand
gcacauaaucgaaggucug

SEQ ID NO: 2254316 - RNA, 19 nt, Homo sapiens
  misc_RNA (1)...(19): siRNA sense strand
aagaaaggauggaggcggu

SEQ ID NO: 2254317 - RNA, 19 nt, Homo sapiens
  misc_RNA (1)...(19): siRNA sense strand
caauacagguccuuccgaa

SEQ ID NO: 2254318 - RNA, 19 nt, Homo sapiens
  misc_RNA (1)...(19): siRNA sense strand
gcgagcaggcugaguacca

SEQ ID NO: 2254319 - RNA, 19 nt, Homo sapiens
  misc_RNA (1)...(19): siRNA sense strand
cugccugggacuuggaaca

SEQ ID NO: 2254320 - RNA, 19 nt, Homo sapiens
  misc_RNA (1)...(19): siRNA sense strand
aauacagguccuuccgaaa

SEQ ID NO: 2254321 - RNA, 19 nt, Homo sapiens
  misc_RNA (1)...(19): siRNA sense strand
gugagaaaguggaggugca

SEQ ID NO: 2254322 - RNA, 19 nt, Homo sapiens
  misc_RNA (1)...(19): siRNA sense strand
ggacuuggaacauggguga

SEQ ID NO: 2254323 - RNA, 19 nt, Homo sapiens
  misc_RNA (1)...(19): siRNA sense strand
ugaaggagcugcaggccau

SEQ ID NO: 2254324 - RNA, 19 nt, Homo sapiens
  misc_RNA (1)...(19): siRNA sense strand
uggagaucauggaggccua

SEQ ID NO: 2254325 - RNA, 19 nt, Homo sapiens
  misc_RNA (1)...(19): siRNA sense strand
ccauuauccacgagauuga

SEQ ID NO: 2254326 - RNA, 19 nt, Homo sapiens
  misc_RNA (1)...(19): siRNA sense strand
gcacauaaucgaaggucug

SEQ ID NO: 2254327 - RNA, 19 nt, Homo sapiens
  misc_RNA (1)...(19): siRNA sense strand
aagaaaggauggaggcggu

SEQ ID NO: 2254328 - RNA, 19 nt, Homo sapiens
  misc_RNA (1)...(19): siRNA sense strand
caauacagguccuuccgaa

SEQ ID NO: 2254329 - RNA, 19 nt, Homo sapiens
  misc_RNA (1)...(19): siRNA sense strand
gcgagcaggcugaguacca

SEQ ID NO: 2254330 - RNA, 19 nt, Homo sapiens
  misc_RNA (1)...(19): siRNA sense strand
cugccugggacuuggaaca

SEQ ID NO: 2254331 - RNA, 19 nt, Homo sapiens
  misc_RNA (1)...(19): siRNA sense strand
aauacagguccuuccgaaa

SEQ ID NO: 2254332 - RNA, 19 nt, Homo sapiens
  misc_RNA (1)...(19): siRNA sense strand
acgaagacugguagggaaa

SEQ ID NO: 2254333 - RNA, 19 nt, Homo sapiens
  misc_RNA (1)...(19): siRNA sense strand
ggacaauacuacaaagcca

SEQ ID NO: 2254334 - RNA, 19 nt, Homo sapiens
  misc_RNA (1)...(19): siRNA sense strand
cuggagaacagaaaggaaa

SEQ ID NO: 2254335 - RNA, 19 nt, Homo sapiens
  misc_RNA (1)...(19): siRNA sense strand
gugacuaccaacugggaaa

SEQ ID NO: 2254336 - RNA, 19 nt, Homo sapiens
  misc_RNA (1)...(19): siRNA sense strand
auuuagacaucgaggaaaa

SEQ ID NO: 2254337 - RNA, 19 nt, Homo sapiens
  misc_RNA (1)...(19): siRNA sense strand
gagaagagaaguuggagca

SEQ ID NO: 2254338 - RNA, 19 nt, Homo sapiens
  misc_RNA (1)...(19): siRNA sense strand
ccucagagagagagcccaa

SEQ ID NO: 2254339 - RNA, 19 nt, Homo sapiens
  misc_RNA (1)...(19): siRNA sense strand
ggcuagaucuggauggaga

SEQ ID NO: 2254340 - RNA, 19 nt, Homo sapiens
  misc_RNA (1)...(19): siRNA sense strand
cugagagaaauuagaacua

SEQ ID NO: 2254341 - RNA, 19 nt, Homo sapiens
  misc_RNA (1)...(19): siRNA sense strand
gcgggagggacgagaaaca

SEQ ID NO: 2254342 - RNA, 19 nt, Homo sapiens
  misc_RNA (1)...(19): siRNA sense strand
gggagggacgagaaacaaa

SEQ ID NO: 2254343 - RNA, 19 nt, Homo sapiens
  misc_RNA (1)...(19): siRNA sense strand
aggaagaaguggugagagc

SEQ ID NO: 2254344 - RNA, 19 nt, Homo sapiens
  misc_RNA (1)...(19): siRNA sense strand
agaaaaucccugaggaaga

SEQ ID NO: 2254345 - RNA, 19 nt, Homo sapiens
  misc_RNA (1)...(19): siRNA sense strand
cgaagagggcaguguccua

SEQ ID NO: 2254346 - RNA, 19 nt, Homo sapiens
  misc_RNA (1)...(19): siRNA sense strand
uguuagagacagaugguga

SEQ ID NO: 2254347 - RNA, 19 nt, Homo sapiens
  misc_RNA (1)...(19): siRNA sense strand
gaacaaggaaacaggacgu

SEQ ID NO: 2254348 - RNA, 19 nt, Homo sapiens
  misc_RNA (1)...(19): siRNA sense strand
caauaaagguggaaugugc

SEQ ID NO: 2254349 - RNA, 19 nt, Homo sapiens
  misc_RNA (1)...(19): siRNA sense strand
uaagaaaaucccugaggaa

SEQ ID NO: 2254350 - RNA, 19 nt, Homo sapiens
  misc_RNA (1)...(19): siRNA sense strand
acacacaaacagacugaau

SEQ ID NO: 2254351 - RNA, 19 nt, Homo sapiens
  misc_RNA (1)...(19): siRNA sense strand
ugacauuguggaugcacua

SEQ ID NO: 2254352 - RNA, 19 nt, Homo sapiens
  misc_RNA (1)...(19): siRNA sense strand
cagaagcugaauuuggaua

SEQ ID NO: 2254353 - RNA, 19 nt, Homo sapiens
  misc_RNA (1)...(19): siRNA sense strand
uggagaacagaaaggaaaa

SEQ ID NO: 2254354 - RNA, 19 nt, Homo sapiens
  misc_RNA (1)...(19): siRNA sense strand
ggugagagcagcaaagaac

SEQ ID NO: 2254355 - RNA, 19 nt, Homo sapiens
  misc_RNA (1)...(19): siRNA sense strand
acagauagggauggaacaa

SEQ ID NO: 2254356 - RNA, 19 nt, Homo sapiens
  misc_RNA (1)...(19): siRNA sense strand
gcuuacaauacgagccuga

SEQ ID NO: 2254357 - RNA, 19 nt, Homo sapiens
  misc_RNA (1)...(19): siRNA sense strand
aauuagaacuauugccagu

SEQ ID NO: 2254358 - RNA, 19 nt, Homo sapiens
  misc_RNA (1)...(19): siRNA sense strand
gugcagaaccugacugaac

SEQ ID NO: 2254359 - RNA, 19 nt, Homo sapiens
  misc_RNA (1)...(19): siRNA sense strand
agauagggauggaacaacu

SEQ ID NO: 2254360 - RNA, 19 nt, Homo sapiens
  misc_RNA (1)...(19): siRNA sense strand
aaguguggauggucggcua

SEQ ID NO: 2254361 - RNA, 19 nt, Homo sapiens
  misc_RNA (1)...(19): siRNA sense strand
ugaccuuugccuuggacaa

SEQ ID NO: 2254362 - RNA, 19 nt, Homo sapiens
  misc_RNA (1)...(19): siRNA sense strand
acagaaaggaaaaugcuua

SEQ ID NO: 2254363 - RNA, 19 nt, Homo sapiens
  misc_RNA (1)...(19): siRNA sense strand
agugacacgcuaugggauu

SEQ ID NO: 2254364 - RNA, 19 nt, Homo sapiens
  misc_RNA (1)...(19): siRNA sense strand
uacgaagacugguagggaa

SEQ ID NO: 2254365 - RNA, 19 nt, Homo sapiens
  misc_RNA (1)...(19): siRNA sense strand
aggacguguuuauguguau

SEQ ID NO: 2254366 - RNA, 19 nt, Homo sapiens
  misc_RNA (1)...(19): siRNA sense strand
ccaaggaacacuucagcca

SEQ ID NO: 2254367 - RNA, 19 nt, Homo sapiens
  misc_RNA (1)...(19): siRNA sense strand
cuggaagagugacacgcua

SEQ ID NO: 2254368 - RNA, 19 nt, Homo sapiens
  misc_RNA (1)...(19): siRNA sense strand
gaaauuagaacuauugcca

SEQ ID NO: 2254369 - RNA, 19 nt, Homo sapiens
  misc_RNA (1)...(19): siRNA sense strand
acaaagacugcccaagcaa

SEQ ID NO: 2254370 - RNA, 19 nt, Homo sapiens
  misc_RNA (1)...(19): siRNA sense strand
cacgaauggcacuggaaga

SEQ ID NO: 2254371 - RNA, 19 nt, Homo sapiens
  misc_RNA (1)...(19): siRNA sense strand
gggacgagaaacaaagacu

SEQ ID NO: 2254372 - RNA, 19 nt, Homo sapiens
  misc_RNA (1)...(19): siRNA sense strand
gagcagucauggagagcau

SEQ ID NO: 2254373 - RNA, 19 nt, Homo sapiens
  misc_RNA (1)...(19): siRNA sense strand
gcaaauaguaucauggcau

SEQ ID NO: 2254374 - RNA, 19 nt, Homo sapiens
  misc_RNA (1)...(19): siRNA sense strand
augagaaagcugagaauca

SEQ ID NO: 2254375 - RNA, 19 nt, Homo sapiens
  misc_RNA (1)...(19): siRNA sense strand
gaucauaacccuaaggugu

SEQ ID NO: 2254376 - RNA, 19 nt, Homo sapiens
  misc_RNA (1)...(19): siRNA sense strand
caugauuggagaagaggaa

SEQ ID NO: 2254377 - RNA, 19 nt, Homo sapiens
  misc_RNA (1)...(19): siRNA sense strand
cagaauugaaagaagaaga

SEQ ID NO: 2254378 - RNA, 19 nt, Homo sapiens
  misc_RNA (1)...(19): siRNA sense strand
gggaagaagcuuugaggcu

SEQ ID NO: 2254379 - RNA, 19 nt, Homo sapiens
  misc_RNA (1)...(19): siRNA sense strand
ugaacaaggaagggaauua

SEQ ID NO: 2254380 - RNA, 19 nt, Homo sapiens
  misc_RNA (1)...(19): siRNA sense strand
gcaugagaaagcugagaau

SEQ ID NO: 2254381 - RNA, 19 nt, Homo sapiens
  misc_RNA (1)...(19): siRNA sense strand
cggaagaagcacagccuca

SEQ ID NO: 2254382 - RNA, 19 nt, Homo sapiens
  misc_RNA (1)...(19): siRNA sense strand
ugagauggaugaagagcau

SEQ ID NO: 2254383 - RNA, 19 nt, Homo sapiens
  misc_RNA (1)...(19): siRNA sense strand
gggaauuacagaaggccuu

SEQ ID NO: 2254384 - RNA, 19 nt, Homo sapiens
  misc_RNA (1)...(19): siRNA sense strand
acacgagcuucaaggaaau

SEQ ID NO: 2254385 - RNA, 19 nt, Homo sapiens
  misc_RNA (1)...(19): siRNA sense strand
cagaaggaucccaaagaau

SEQ ID NO: 2254386 - RNA, 19 nt, Homo sapiens
  misc_RNA (1)...(19): siRNA sense strand
aaagaugagguuaagguaa

SEQ ID NO: 2254387 - RNA, 19 nt, Homo sapiens
  misc_RNA (1)...(19): siRNA sense strand
acuaauuaucagcgguuua

SEQ ID NO: 2254388 - RNA, 19 nt, Homo sapiens
  misc_RNA (1)...(19): siRNA sense strand
caggaaagcugguugagca

SEQ ID NO: 2254389 - RNA, 19 nt, Homo sapiens
  misc_RNA (1)...(19): siRNA sense strand
ccauaguaacuccaggaua

SEQ ID NO: 2254390 - RNA, 19 nt, Homo sapiens
  misc_RNA (1)...(19): siRNA sense strand
uggaaauuguacugcaaaa

SEQ ID NO: 2254391 - RNA, 19 nt, Homo sapiens
  misc_RNA (1)...(19): siRNA sense strand
guuuauugguaguucgaga

SEQ ID NO: 2254392 - RNA, 19 nt, Homo sapiens
  misc_RNA (1)...(19): siRNA sense strand
aagaagaagaugucacgaa

SEQ ID NO: 2254393 - RNA, 19 nt, Homo sapiens
  misc_RNA (1)...(19): siRNA sense strand
acgcugcaguugauggaaa

SEQ ID NO: 2254394 - RNA, 19 nt, Homo sapiens
  misc_RNA (1)...(19): siRNA sense strand
uggcugucauugauggaaa

SEQ ID NO: 2254395 - RNA, 19 nt, Homo sapiens
  misc_RNA (1)...(19): siRNA sense strand
cagugagaugaguggcaaa

SEQ ID NO: 2254396 - RNA, 19 nt, Homo sapiens
  misc_RNA (1)...(19): siRNA sense strand
ccaccaaagaucaacagaa

SEQ ID NO: 2254397 - RNA, 19 nt, Homo sapiens
  misc_RNA (1)...(19): siRNA sense strand
agguuaagguaaaugacuu

SEQ ID NO: 2254398 - RNA, 19 nt, Homo sapiens
  misc_RNA (1)...(19): siRNA sense strand
cugaaaaccugaaagauga

SEQ ID NO: 2254399 - RNA, 19 nt, Homo sapiens
  misc_RNA (1)...(19): siRNA sense strand
acagaaggccuuugaagau

SEQ ID NO: 2254400 - RNA, 19 nt, Homo sapiens
  misc_RNA (1)...(19): siRNA sense strand
agaccaagucaguaguauu

SEQ ID NO: 2254401 - RNA, 19 nt, Homo sapiens
  misc_RNA (1)...(19): siRNA sense strand
ugaugaacaaggaagggaa

SEQ ID NO: 2254402 - RNA, 19 nt, Homo sapiens
  misc_RNA (1)...(19): siRNA sense strand
acagaagaacccaguggaa

SEQ ID NO: 2254403 - RNA, 19 nt, Homo sapiens
  misc_RNA (1)...(19): siRNA sense strand
gcaccugugggaagagcaa

SEQ ID NO: 2254404 - RNA, 19 nt, Homo sapiens
  misc_RNA (1)...(19): siRNA sense strand
agaaggagcugccugggaa

SEQ ID NO: 2254405 - RNA, 19 nt, Homo sapiens
  misc_RNA (1)...(19): siRNA sense strand
aggucuggaugaugaggua

SEQ ID NO: 2254406 - RNA, 19 nt, Homo sapiens
  misc_RNA (1)...(19): siRNA sense strand
gaugaacaaggaagggaau

SEQ ID NO: 2254407 - RNA, 19 nt, Homo sapiens
  misc_RNA (1)...(19): siRNA sense strand
ggagagggguucacggauu

SEQ ID NO: 2254408 - RNA, 19 nt, Homo sapiens
  misc_RNA (1)...(19): siRNA sense strand
cggccaugguuuuggaaga

SEQ ID NO: 2254409 - RNA, 19 nt, Homo sapiens
  misc_RNA (1)...(19): siRNA sense strand
gaagaaagcuccauuccga

SEQ ID NO: 2254410 - RNA, 19 nt, Homo sapiens
  misc_RNA (1)...(19): siRNA sense strand
cuauuaaaccauggaagaa

SEQ ID NO: 2254411 - RNA, 19 nt, Homo sapiens
  misc_RNA (1)...(19): siRNA sense strand
gccgaaaagcggagcggaa

SEQ ID NO: 2254412 - RNA, 19 nt, Homo sapiens
  misc_RNA (1)...(19): siRNA sense strand
cugagaagucacagaagga

SEQ ID NO: 2254413 - RNA, 19 nt, Homo sapiens
  misc_RNA (1)...(19): siRNA sense strand
gcuucuugccacaggucaa

SEQ ID NO: 2254414 - RNA, 19 nt, Homo sapiens
  misc_RNA (1)...(19): siRNA sense strand
accugaaagaugaaguaua

SEQ ID NO: 2254415 - RNA, 19 nt, Homo sapiens
  misc_RNA (1)...(19): siRNA sense strand
gcagucauggagagcauaa

SEQ ID NO: 2254416 - RNA, 19 nt, Homo sapiens
  misc_RNA (1)...(19): siRNA sense strand
gugaaguggugcagaacac

SEQ ID NO: 2254417 - RNA, 19 nt, Homo sapiens
  misc_RNA (1)...(19): siRNA sense strand
ucuuugaguuugaugaaca

SEQ ID NO: 2254418 - RNA, 19 nt, Homo sapiens
  misc_RNA (1)...(19): siRNA sense strand
cuuugaguuugaugaacaa

SEQ ID NO: 2254419 - RNA, 19 nt, Homo sapiens
  misc_RNA (1)...(19): siRNA sense strand
gcucuggacuguuggaaac

SEQ ID NO: 2254420 - RNA, 19 nt, Homo sapiens
  misc_RNA (1)...(19): siRNA sense strand
cuuugaggcugguauacaa

SEQ ID NO: 2254421 - RNA, 19 nt, Homo sapiens
  misc_RNA (1)...(19): siRNA sense strand
auucggaagugguuggaca

SEQ ID NO: 2254422 - RNA, 19 nt, Homo sapiens
  misc_RNA (1)...(19): siRNA sense strand
acuggaaauuguacugcaa

SEQ ID NO: 2254423 - RNA, 19 nt, Homo sapiens
  misc_RNA (1)...(19): siRNA sense strand
ggucccaauucuacugcaa

SEQ ID NO: 2254424 - RNA, 19 nt, Homo sapiens
  misc_RNA (1)...(19): siRNA sense strand
gaguguagccagugguauc

SEQ ID NO: 2254425 - RNA, 19 nt, Homo sapiens
  misc_RNA (1)...(19): siRNA sense strand
gcugaagaggccuugaaau

SEQ ID NO: 2254426 - RNA, 19 nt, Homo sapiens
  misc_RNA (1)...(19): siRNA sense strand
cagaugauguugagggcaa

SEQ ID NO: 2254427 - RNA, 19 nt, Homo sapiens
  misc_RNA (1)...(19): siRNA sense strand
agaaacuggcagaguacaa

SEQ ID NO: 2254428 - RNA, 19 nt, Homo sapiens
  misc_RNA (1)...(19): siRNA sense strand
ugacaugagugaugccgaa

SEQ ID NO: 2254429 - RNA, 19 nt, Homo sapiens
  misc_RNA (1)...(19): siRNA sense strand
gggcaaaauuagacaaauc

SEQ ID NO: 2254430 - RNA, 19 nt, Homo sapiens
  misc_RNA (1)...(19): siRNA sense strand
ccaaaagcuaugugaaauu

SEQ ID NO: 2254431 - RNA, 19 nt, Homo sapiens
  misc_RNA (1)...(19): siRNA sense strand
ugugaaauuacgagacuuu

SEQ ID NO: 2254432 - RNA, 19 nt, Homo sapiens
  misc_RNA (1)...(19): siRNA sense strand
gcaacacgcuagaaggguu

SEQ ID NO: 2254433 - RNA, 19 nt, Homo sapiens
  misc_RNA (1)...(19): siRNA sense strand
caguccaacaggaggagaa

SEQ ID NO: 2254434 - RNA, 19 nt, Homo sapiens
  misc_RNA (1)...(19): siRNA sense strand
guguagaggcagaugaugu

SEQ ID NO: 2254435 - RNA, 19 nt, Homo sapiens
  misc_RNA (1)...(19): siRNA sense strand
uggaaaaggaaguugauuu

SEQ ID NO: 2254436 - RNA, 19 nt, Homo sapiens
  misc_RNA (1)...(19): siRNA sense strand
auguagaggcuuucgagaa

SEQ ID NO: 2254437 - RNA, 19 nt, Homo sapiens
  misc_RNA (1)...(19): siRNA sense strand
agauauggcgauagaggca

SEQ ID NO: 2254438 - RNA, 19 nt, Homo sapiens
  misc_RNA (1)...(19): siRNA sense strand
auaaauaagcaacacgcua

SEQ ID NO: 2254439 - RNA, 19 nt, Homo sapiens
  misc_RNA (1)...(19): siRNA sense strand
gugcaguggagaagaaacu

SEQ ID NO: 2254440 - RNA, 19 nt, Homo sapiens
  misc_RNA (1)...(19): siRNA sense strand
gcuuuauugacguggauga

SEQ ID NO: 2254441 - RNA, 19 nt, Homo sapiens
  misc_RNA (1)...(19): siRNA sense strand
uauaauaaggauggagcua

SEQ ID NO: 2254442 - RNA, 19 nt, Homo sapiens
  misc_RNA (1)...(19): siRNA sense strand
gcacaacagaaguucaaaa

SEQ ID NO: 2254443 - RNA, 19 nt, Homo sapiens
  misc_RNA (1)...(19): siRNA sense strand
auaagagugcaguggagaa

SEQ ID NO: 2254444 - RNA, 19 nt, Homo sapiens
  misc_RNA (1)...(19): siRNA sense strand
aggcacaacagaaguucaa

SEQ ID NO: 2254445 - RNA, 19 nt, Homo sapiens
  misc_RNA (1)...(19): siRNA sense strand
gagaauaucaugaaaggcu

SEQ ID NO: 2254446 - RNA, 19 nt, Homo sapiens
  misc_RNA (1)...(19): siRNA sense strand
ccaaauagaaauaagcaug

SEQ ID NO: 2254447 - RNA, 19 nt, Homo sapiens
  misc_RNA (1)...(19): siRNA sense strand
uggagaagaaacuggcaga

SEQ ID NO: 2254448 - RNA, 19 nt, Homo sapiens
  misc_RNA (1)...(19): siRNA sense strand
uucaggaacuaguggaaga

SEQ ID NO: 2254449 - RNA, 19 nt, Homo sapiens
  misc_RNA (1)...(19): siRNA sense strand
cuauguguacccagacaaa

SEQ ID NO: 2254450 - RNA, 19 nt, Homo sapiens
  misc_RNA (1)...(19): siRNA sense strand
auuucaaggucaaggccau

SEQ ID NO: 2254451 - RNA, 19 nt, Homo sapiens
  misc_RNA (1)...(19): siRNA sense strand
ucuugauauuacagcggaa

SEQ ID NO: 2254452 - RNA, 19 nt, Homo sapiens
  misc_RNA (1)...(19): siRNA sense strand
auugaaacugcuagcuuua

SEQ ID NO: 2254453 - RNA, 19 nt, Homo sapiens
  misc_RNA (1)...(19): siRNA sense strand
agaugauguugagggcaaa

SEQ ID NO: 2254454 - RNA, 19 nt, Homo sapiens
  misc_RNA (1)...(19): siRNA sense strand
auccaaaagcuaugugaaa

SEQ ID NO: 2254455 - RNA, 19 nt, Homo sapiens
  misc_RNA (1)...(19): siRNA sense strand
ggauuuggugcuauggaga

SEQ ID NO: 2254456 - RNA, 19 nt, Homo sapiens
  misc_RNA (1)...(19): siRNA sense strand
agaauaucaugaaaggcuu

SEQ ID NO: 2254457 - RNA, 19 nt, Homo sapiens
  misc_RNA (1)...(19): siRNA sense strand
ccaccuggauuuugcacaa

SEQ ID NO: 2254458 - RNA, 19 nt, Homo sapiens
  misc_RNA (1)...(19): siRNA sense strand
gauuuggugcuauggagaa

SEQ ID NO: 2254459 - RNA, 19 nt, Homo sapiens
  misc_RNA (1)...(19): siRNA sense strand
uagaaauaagcaugcaaca

SEQ ID NO: 2254460 - RNA, 19 nt, Homo sapiens
  misc_RNA (1)...(19): siRNA sense strand
agaaauaagcaugcaacau

SEQ ID NO: 2254461 - RNA, 19 nt, Homo sapiens
  misc_RNA (1)...(19): siRNA sense strand
aucuaaaguugaugagaac

SEQ ID NO: 2254462 - RNA, 19 nt, Homo sapiens
  misc_RNA (1)...(19): siRNA sense strand
uguaacaccaacacagcaa

SEQ ID NO: 2254463 - RNA, 19 nt, Homo sapiens
  misc_RNA (1)...(19): siRNA sense strand
cuugcuaagaugagaaaau

SEQ ID NO: 2254464 - RNA, 19 nt, Homo sapiens
  misc_RNA (1)...(19): siRNA sense strand
auuuggugcuauggagaaa

SEQ ID NO: 2254465 - RNA, 19 nt, Homo sapiens
  misc_RNA (1)...(19): siRNA sense strand
ggcagaagcagcagcggaa

SEQ ID NO: 2254466 - RNA, 19 nt, Homo sapiens
  misc_RNA (1)...(19): siRNA sense strand
aaaccaaguuagaagcuga

SEQ ID NO: 2254467 - RNA, 19 nt, Homo sapiens
  misc_RNA (1)...(19): siRNA sense strand
uugaggaagaaaugacaua

SEQ ID NO: 2254468 - RNA, 19 nt, Homo sapiens
  misc_RNA (1)...(19): siRNA sense strand
uucugaagacaaagagaua

SEQ ID NO: 2254469 - RNA, 19 nt, Homo sapiens
  misc_RNA (1)...(19): siRNA sense strand
aguuagaagcugaggcaag

SEQ ID NO: 2254470 - RNA, 19 nt, Homo sapiens
  misc_RNA (1)...(19): siRNA sense strand
cagcaauauucacugccaa

SEQ ID NO: 2254471 - RNA, 19 nt, Homo sapiens
  misc_RNA (1)...(19): siRNA sense strand
ucuacagcucggaggacaa

SEQ ID NO: 2254472 - RNA, 19 nt, Homo sapiens
  misc_RNA (1)...(19): siRNA sense strand
ggagaaaucaucuugcuga

SEQ ID NO: 2254473 - RNA, 19 nt, Homo sapiens
  misc_RNA (1)...(19): siRNA sense strand
aagagcagcaaaugggauu

SEQ ID NO: 2254474 - RNA, 19 nt, Homo sapiens
  misc_RNA (1)...(19): siRNA sense strand
gaaaugacauacuuggguu

SEQ ID NO: 2254475 - RNA, 19 nt, Homo sapiens
  misc_RNA (1)...(19): siRNA sense strand
gggauauuaaugaugugaa

SEQ ID NO: 2254476 - RNA, 19 nt, Homo sapiens
  misc_RNA (1)...(19): siRNA sense strand
acaaagagauauuaagcug

SEQ ID NO: 2254477 - RNA, 19 nt, Homo sapiens
  misc_RNA (1)...(19): siRNA sense strand
aguuauggucugggaggaa

SEQ ID NO: 2254478 - RNA, 19 nt, Homo sapiens
  misc_RNA (1)...(19): siRNA sense strand
ccaugaagaaagugaacac

SEQ ID NO: 2254479 - RNA, 19 nt, Homo sapiens
  misc_RNA (1)...(19): siRNA sense strand
acuuugauucugaagacaa

SEQ ID NO: 2254480 - RNA, 19 nt, Homo sapiens
  misc_RNA (1)...(19): siRNA sense strand
cagcagaacucacuaaaug

SEQ ID NO: 2254481 - RNA, 19 nt, Homo sapiens
  misc_RNA (1)...(19): siRNA sense strand
agaaacagcugaagggcaa

SEQ ID NO: 2254482 - RNA, 19 nt, Homo sapiens
  misc_RNA (1)...(19): siRNA sense strand
gcaacaagacagaggagga

SEQ ID NO: 2254483 - RNA, 19 nt, Homo sapiens
  misc_RNA (1)...(19): siRNA sense strand
uggagaggguagagaugau

SEQ ID NO: 2254484 - RNA, 19 nt, Homo sapiens
  misc_RNA (1)...(19): siRNA sense strand
cagucgagcccguggauca

SEQ ID NO: 2254485 - RNA, 19 nt, Homo sapiens
  misc_RNA (1)...(19): siRNA sense strand
aacaaaugcagaaggaaau

SEQ ID NO: 2254486 - RNA, 19 nt, Homo sapiens
  misc_RNA (1)...(19): siRNA sense strand
ccgggaaaggauaaagauu

SEQ ID NO: 2254487 - RNA, 19 nt, Homo sapiens
  misc_RNA (1)...(19): siRNA sense strand
ccgugagaacuucaagaaa

SEQ ID NO: 2254488 - RNA, 19 nt, Homo sapiens
  misc_RNA (1)...(19): siRNA sense strand
ucucagaacuccuuggcuu

SEQ ID NO: 2254489 - RNA, 19 nt, Homo sapiens
  misc_RNA (1)...(19): siRNA sense strand
cggacgaagcagaaguuca

SEQ ID NO: 2254490 - RNA, 19 nt, Homo sapiens
  misc_RNA (1)...(19): siRNA sense strand
ggguagagaugauccggca

SEQ ID NO: 2254491 - RNA, 19 nt, Homo sapiens
  misc_RNA (1)...(19): siRNA sense strand
gaguggagcuacugcgacu

SEQ ID NO: 2254492 - RNA, 19 nt, Homo sapiens
  misc_RNA (1)...(19): siRNA sense strand
cugccaagcuucacagcga

SEQ ID NO: 2254493 - RNA, 19 nt, Homo sapiens
  misc_RNA (1)...(19): siRNA sense strand
cagaaacagcugaagggca

SEQ ID NO: 2254494 - RNA, 19 nt, Homo sapiens
  misc_RNA (1)...(19): siRNA sense strand
uugaagaagacuaugcgaa

SEQ ID NO: 2254495 - RNA, 19 nt, Homo sapiens
  misc_RNA (1)...(19): siRNA sense strand
augcgaagaacuuagcuaa

SEQ ID NO: 2254496 - RNA, 19 nt, Homo sapiens
  misc_RNA (1)...(19): siRNA sense strand
acaagacagaggaggacau

SEQ ID NO: 2254497 - RNA, 19 nt, Homo sapiens
  misc_RNA (1)...(19): siRNA sense strand
ccucaugcgcuguguggau

SEQ ID NO: 2254498 - RNA, 19 nt, Homo sapiens
  misc_RNA (1)...(19): siRNA sense strand
agaagagccuggcggacga

SEQ ID NO: 2254499 - RNA, 19 nt, Homo sapiens
  misc_RNA (1)...(19): siRNA sense strand
agggcaaacaaaugcagaa

SEQ ID NO: 2254500 - RNA, 19 nt, Homo sapiens
  misc_RNA (1)...(19): siRNA sense strand
gagaacuucaagaaagaca

SEQ ID NO: 2254501 - RNA, 19 nt, Homo sapiens
  misc_RNA (1)...(19): siRNA sense strand
gguuugaacuacugcucca

SEQ ID NO: 2254502 - RNA, 19 nt, Homo sapiens
  misc_RNA (1)...(19): siRNA sense strand
aagacuaugcgaagaacuu

SEQ ID NO: 2254503 - RNA, 19 nt, Homo sapiens
  misc_RNA (1)...(19): siRNA sense strand
uggagaucaagcugagcaa

SEQ ID NO: 2254504 - RNA, 19 nt, Homo sapiens
  misc_RNA (1)...(19): siRNA sense strand
cggcagagagaccuggaga

SEQ ID NO: 2254505 - RNA, 19 nt, Homo sapiens
  misc_RNA (1)...(19): siRNA sense strand
aggaaaugucagaauucau

SEQ ID NO: 2254506 - RNA, 19 nt, Homo sapiens
  misc_RNA (1)...(19): siRNA sense strand
uggagaagccccugaugaa

SEQ ID NO: 2254507 - RNA, 19 nt, Homo sapiens
  misc_RNA (1)...(19): siRNA sense strand
cauuggagcuagagcggcu

SEQ ID NO: 2254508 - RNA, 19 nt, Homo sapiens
  misc_RNA (1)...(19): siRNA sense strand
agaaacagcugaagggcaa

SEQ ID NO: 2254509 - RNA, 19 nt, Homo sapiens
  misc_RNA (1)...(19): siRNA sense strand
gcaacaagacagaggagga

SEQ ID NO: 2254510 - RNA, 19 nt, Homo sapiens
  misc_RNA (1)...(19): siRNA sense strand
uggagaggguagagaugau

SEQ ID NO: 2254511 - RNA, 19 nt, Homo sapiens
  misc_RNA (1)...(19): siRNA sense strand
cagucgagcccguggauca

SEQ ID NO: 2254512 - RNA, 19 nt, Homo sapiens
  misc_RNA (1)...(19): siRNA sense strand
aacaaaugcagaaggaaau

SEQ ID NO: 2254513 - RNA, 19 nt, Homo sapiens
  misc_RNA (1)...(19): siRNA sense strand
ccgggaaaggauaaagauu

SEQ ID NO: 2254514 - RNA, 19 nt, Homo sapiens
  misc_RNA (1)...(19): siRNA sense strand
ccgugagaacuucaagaaa

SEQ ID NO: 2254515 - RNA, 19 nt, Homo sapiens
  misc_RNA (1)...(19): siRNA sense strand
ucucagaacuccuuggcuu

SEQ ID NO: 2254516 - RNA, 19 nt, Homo sapiens
  misc_RNA (1)...(19): siRNA sense strand
cggacgaagcagaaguuca

SEQ ID NO: 2254517 - RNA, 19 nt, Homo sapiens
  misc_RNA (1)...(19): siRNA sense strand
ggguagagaugauccggca

SEQ ID NO: 2254518 - RNA, 19 nt, Homo sapiens
  misc_RNA (1)...(19): siRNA sense strand
gaguggagcuacugcgacu

SEQ ID NO: 2254519 - RNA, 19 nt, Homo sapiens
  misc_RNA (1)...(19): siRNA sense strand
cugccaagcuucacagcga

SEQ ID NO: 2254520 - RNA, 19 nt, Homo sapiens
  misc_RNA (1)...(19): siRNA sense strand
cagaaacagcugaagggca

SEQ ID NO: 2254521 - RNA, 19 nt, Homo sapiens
  misc_RNA (1)...(19): siRNA sense strand
uugaagaagacuaugcgaa

SEQ ID NO: 2254522 - RNA, 19 nt, Homo sapiens
  misc_RNA (1)...(19): siRNA sense strand
augcgaagaacuuagcuaa

SEQ ID NO: 2254523 - RNA, 19 nt, Homo sapiens
  misc_RNA (1)...(19): siRNA sense strand
acaagacagaggaggacau

SEQ ID NO: 2254524 - RNA, 19 nt, Homo sapiens
  misc_RNA (1)...(19): siRNA sense strand
ccucaugcgcuguguggau

SEQ ID NO: 2254525 - RNA, 19 nt, Homo sapiens
  misc_RNA (1)...(19): siRNA sense strand
agaagagccuggcggacga

SEQ ID NO: 2254526 - RNA, 19 nt, Homo sapiens
  misc_RNA (1)...(19): siRNA sense strand
agggcaaacaaaugcagaa

SEQ ID NO: 2254527 - RNA, 19 nt, Homo sapiens
  misc_RNA (1)...(19): siRNA sense strand
gagaacuucaagaaagaca

SEQ ID NO: 2254528 - RNA, 19 nt, Homo sapiens
  misc_RNA (1)...(19): siRNA sense strand
gguuugaacuacugcucca

SEQ ID NO: 2254529 - RNA, 19 nt, Homo sapiens
  misc_RNA (1)...(19): siRNA sense strand
aagacuaugcgaagaacuu

SEQ ID NO: 2254530 - RNA, 19 nt, Homo sapiens
  misc_RNA (1)...(19): siRNA sense strand
uggagaucaagcugagcaa

SEQ ID NO: 2254531 - RNA, 19 nt, Homo sapiens
  misc_RNA (1)...(19): siRNA sense strand
cggcagagagaccuggaga

SEQ ID NO: 2254532 - RNA, 19 nt, Homo sapiens
  misc_RNA (1)...(19): siRNA sense strand
aggaaaugucagaauucau

SEQ ID NO: 2254533 - RNA, 19 nt, Homo sapiens
  misc_RNA (1)...(19): siRNA sense strand
uggagaagccccugaugaa

SEQ ID NO: 2254534 - RNA, 19 nt, Homo sapiens
  misc_RNA (1)...(19): siRNA sense strand
cauuggagcuagagcggcu

SEQ ID NO: 2254535 - RNA, 19 nt, Homo sapiens
  misc_RNA (1)...(19): siRNA sense strand
agaaacagcugaagggcaa

SEQ ID NO: 2254536 - RNA, 19 nt, Homo sapiens
  misc_RNA (1)...(19): siRNA sense strand
gcaacaagacagaggagga

SEQ ID NO: 2254537 - RNA, 19 nt, Homo sapiens
  misc_RNA (1)...(19): siRNA sense strand
uggagaggguagagaugau

SEQ ID NO: 2254538 - RNA, 19 nt, Homo sapiens
  misc_RNA (1)...(19): siRNA sense strand
cagucgagcccguggauca

SEQ ID NO: 2254539 - RNA, 19 nt, Homo sapiens
  misc_RNA (1)...(19): siRNA sense strand
aacaaaugcagaaggaaau

SEQ ID NO: 2254540 - RNA, 19 nt, Homo sapiens
  misc_RNA (1)...(19): siRNA sense strand
ccgggaaaggauaaagauu

SEQ ID NO: 2254541 - RNA, 19 nt, Homo sapiens
  misc_RNA (1)...(19): siRNA sense strand
ccgugagaacuucaagaaa

SEQ ID NO: 2254542 - RNA, 19 nt, Homo sapiens
  misc_RNA (1)...(19): siRNA sense strand
ucucagaacuccuuggcuu

SEQ ID NO: 2254543 - RNA, 19 nt, Homo sapiens
  misc_RNA (1)...(19): siRNA sense strand
cggacgaagcagaaguuca

SEQ ID NO: 2254544 - RNA, 19 nt, Homo sapiens
  misc_RNA (1)...(19): siRNA sense strand
ggguagagaugauccggca

SEQ ID NO: 2254545 - RNA, 19 nt, Homo sapiens
  misc_RNA (1)...(19): siRNA sense strand
gaguggagcuacugcgacu

SEQ ID NO: 2254546 - RNA, 19 nt, Homo sapiens
  misc_RNA (1)...(19): siRNA sense strand
cugccaagcuucacagcga

SEQ ID NO: 2254547 - RNA, 19 nt, Homo sapiens
  misc_RNA (1)...(19): siRNA sense strand
cagaaacagcugaagggca

SEQ ID NO: 2254548 - RNA, 19 nt, Homo sapiens
  misc_RNA (1)...(19): siRNA sense strand
uugaagaagacuaugcgaa

SEQ ID NO: 2254549 - RNA, 19 nt, Homo sapiens
  misc_RNA (1)...(19): siRNA sense strand
augcgaagaacuuagcuaa

SEQ ID NO: 2254550 - RNA, 19 nt, Homo sapiens
  misc_RNA (1)...(19): siRNA sense strand
acaagacagaggaggacau

SEQ ID NO: 2254551 - RNA, 19 nt, Homo sapiens
  misc_RNA (1)...(19): siRNA sense strand
ccucaugcgcuguguggau

SEQ ID NO: 2254552 - RNA, 19 nt, Homo sapiens
  misc_RNA (1)...(19): siRNA sense strand
agaagagccuggcggacga

SEQ ID NO: 2254553 - RNA, 19 nt, Homo sapiens
  misc_RNA (1)...(19): siRNA sense strand
agggcaaacaaaugcagaa

SEQ ID NO: 2254554 - RNA, 19 nt, Homo sapiens
  misc_RNA (1)...(19): siRNA sense strand
gagaacuucaagaaagaca

SEQ ID NO: 2254555 - RNA, 19 nt, Homo sapiens
  misc_RNA (1)...(19): siRNA sense strand
gguuugaacuacugcucca

SEQ ID NO: 2254556 - RNA, 19 nt, Homo sapiens
  misc_RNA (1)...(19): siRNA sense strand
aagacuaugcgaagaacuu

SEQ ID NO: 2254557 - RNA, 19 nt, Homo sapiens
  misc_RNA (1)...(19): siRNA sense strand
uggagaucaagcugagcaa

SEQ ID NO: 2254558 - RNA, 19 nt, Homo sapiens
  misc_RNA (1)...(19): siRNA sense strand
cggcagagagaccuggaga

SEQ ID NO: 2254559 - RNA, 19 nt, Homo sapiens
  misc_RNA (1)...(19): siRNA sense strand
aggaaaugucagaauucau

SEQ ID NO: 2254560 - RNA, 19 nt, Homo sapiens
  misc_RNA (1)...(19): siRNA sense strand
uggagaagccccugaugaa

SEQ ID NO: 2254561 - RNA, 19 nt, Homo sapiens
  misc_RNA (1)...(19): siRNA sense strand
cauuggagcuagagcggcu

SEQ ID NO: 2254562 - RNA, 19 nt, Homo sapiens
  misc_RNA (1)...(19): siRNA sense strand
gggaaauggcuuacgagga

SEQ ID NO: 2254563 - RNA, 19 nt, Homo sapiens
  misc_RNA (1)...(19): siRNA sense strand
gcucagacagagaagaaaa

SEQ ID NO: 2254564 - RNA, 19 nt, Homo sapiens
  misc_RNA (1)...(19): siRNA sense strand
gaaaauggauauugcguca

SEQ ID NO: 2254565 - RNA, 19 nt, Homo sapiens
  misc_RNA (1)...(19): siRNA sense strand
aggcucagacagagaagaa

SEQ ID NO: 2254566 - RNA, 19 nt, Homo sapiens
  misc_RNA (1)...(19): siRNA sense strand
uggacaaaguggaugaagu

SEQ ID NO: 2254567 - RNA, 19 nt, Homo sapiens
  misc_RNA (1)...(19): siRNA sense strand
ugagacuggcacugggaaa

SEQ ID NO: 2254568 - RNA, 19 nt, Homo sapiens
  misc_RNA (1)...(19): siRNA sense strand
aguuggugcuguuggaaga

SEQ ID NO: 2254569 - RNA, 19 nt, Homo sapiens
  misc_RNA (1)...(19): siRNA sense strand
ggaaauggcuuacgaggag

SEQ ID NO: 2254570 - RNA, 19 nt, Homo sapiens
  misc_RNA (1)...(19): siRNA sense strand
ugggaugacugcagaaaau

SEQ ID NO: 2254571 - RNA, 19 nt, Homo sapiens
  misc_RNA (1)...(19): siRNA sense strand
ccgugaucauaaagugaga

SEQ ID NO: 2254572 - RNA, 19 nt, Homo sapiens
  misc_RNA (1)...(19): siRNA sense strand
ggagauacauuccggugga

SEQ ID NO: 2254573 - RNA, 19 nt, Homo sapiens
  misc_RNA (1)...(19): siRNA sense strand
uggcgcuccuuauggguaa

SEQ ID NO: 2254574 - RNA, 19 nt, Homo sapiens
  misc_RNA (1)...(19): siRNA sense strand
ggugcuguuggaagaguaa

SEQ ID NO: 2254575 - RNA, 19 nt, Homo sapiens
  misc_RNA (1)...(19): siRNA sense strand
cagaguucccaaaggugaa

SEQ ID NO: 2254576 - RNA, 19 nt, Homo sapiens
  misc_RNA (1)...(19): siRNA sense strand
cacugaaguugcugauaca

SEQ ID NO: 2254577 - RNA, 19 nt, Homo sapiens
  misc_RNA (1)...(19): siRNA sense strand
ggcacugggaaauggcuua

SEQ ID NO: 2254578 - RNA, 19 nt, Homo sapiens
  misc_RNA (1)...(19): siRNA sense strand
cauacuucuuccaggacau

SEQ ID NO: 2254579 - RNA, 19 nt, Homo sapiens
  misc_RNA (1)...(19): siRNA sense strand
augcaacucaccacagaaa

SEQ ID NO: 2254580 - RNA, 19 nt, Homo sapiens
  misc_RNA (1)...(19): siRNA sense strand
gagaaggacuguugggaga

SEQ ID NO: 2254581 - RNA, 19 nt, Homo sapiens
  misc_RNA (1)...(19): siRNA sense strand
acaugaagauuaagggaca

SEQ ID NO: 2254582 - RNA, 19 nt, Homo sapiens
  misc_RNA (1)...(19): siRNA sense strand
gcacauacagugaggcuga

SEQ ID NO: 2254583 - RNA, 19 nt, Homo sapiens
  misc_RNA (1)...(19): siRNA sense strand
ggaagucguuggaguauau

SEQ ID NO: 2254584 - RNA, 19 nt, Homo sapiens
  misc_RNA (1)...(19): siRNA sense strand
gcuggaagucguuggagua

SEQ ID NO: 2254585 - RNA, 19 nt, Homo sapiens
  misc_RNA (1)...(19): siRNA sense strand
guuuagugcaagaauguaa

SEQ ID NO: 2254586 - RNA, 19 nt, Homo sapiens
  misc_RNA (1)...(19): siRNA sense strand
cggaucaagaagauauaaa

SEQ ID NO: 2254587 - RNA, 19 nt, Homo sapiens
  misc_RNA (1)...(19): siRNA sense strand
gaaauguaauggaagcaga

SEQ ID NO: 2254588 - RNA, 19 nt, Homo sapiens
  misc_RNA (1)...(19): siRNA sense strand
agcuagaacuggaugguga

SEQ ID NO: 2254589 - RNA, 19 nt, Homo sapiens
  misc_RNA (1)...(19): siRNA sense strand
agaacuggauggugagcga

SEQ ID NO: 2254590 - RNA, 19 nt, Homo sapiens
  misc_RNA (1)...(19): siRNA sense strand
gaauuaaacuagaucgaug

SEQ ID NO: 2254591 - RNA, 19 nt, Homo sapiens
  misc_RNA (1)...(19): siRNA sense strand
uaauggaagcagauggaau

SEQ ID NO: 2254592 - RNA, 19 nt, Homo sapiens
  misc_RNA (1)...(19): siRNA sense strand
agauuaagggacaagaaaa

SEQ ID NO: 2254593 - RNA, 19 nt, Homo sapiens
  misc_RNA (1)...(19): siRNA sense strand
gugcauuuggugccagaaa

SEQ ID NO: 2254594 - RNA, 19 nt, Homo sapiens
  misc_RNA (1)...(19): siRNA sense strand
caugaagauuaagggacaa

SEQ ID NO: 2254595 - RNA, 19 nt, Homo sapiens
  misc_RNA (1)...(19): siRNA sense strand
ggagauuaugcucaagaau

SEQ ID NO: 2254596 - RNA, 19 nt, Homo sapiens
  misc_RNA (1)...(19): siRNA sense strand
ggguacagguuaugcugga

SEQ ID NO: 2254597 - RNA, 19 nt, Homo sapiens
  misc_RNA (1)...(19): siRNA sense strand
ggcuaauccuuuucgaaua

SEQ ID NO: 2254598 - RNA, 19 nt, Homo sapiens
  misc_RNA (1)...(19): siRNA sense strand
uggaauuaaacuagaucga

SEQ ID NO: 2254599 - RNA, 19 nt, Homo sapiens
  misc_RNA (1)...(19): siRNA sense strand
gcagggacaucuuccgcaa

SEQ ID NO: 2254600 - RNA, 19 nt, Homo sapiens
  misc_RNA (1)...(19): siRNA sense strand
ggauacuacaacuuaagaa

SEQ ID NO: 2254601 - RNA, 19 nt, Homo sapiens
  misc_RNA (1)...(19): siRNA sense strand
ccauaacucacaagacaca

SEQ ID NO: 2254602 - RNA, 19 nt, Homo sapiens
  misc_RNA (1)...(19): siRNA sense strand
caguacaugaugagugcau

SEQ ID NO: 2254603 - RNA, 19 nt, Homo sapiens
  misc_RNA (1)...(19): siRNA sense strand
uggaagucguuggaguaua

SEQ ID NO: 2254604 - RNA, 19 nt, Homo sapiens
  misc_RNA (1)...(19): siRNA sense strand
ggguugggguacagguuau

SEQ ID NO: 2254605 - RNA, 19 nt, Homo sapiens
  misc_RNA (1)...(19): siRNA sense strand
aagauuguuuagugcaaga

SEQ ID NO: 2254606 - RNA, 19 nt, Homo sapiens
  misc_RNA (1)...(19): siRNA sense strand
caagaagauauaaaggcga

SEQ ID NO: 2254607 - RNA, 19 nt, Homo sapiens
  misc_RNA (1)...(19): siRNA sense strand
agucagaggucauggccaa

SEQ ID NO: 2254608 - RNA, 19 nt, Homo sapiens
  misc_RNA (1)...(19): siRNA sense strand
gcgcagucgcagugguaaa

SEQ ID NO: 2254609 - RNA, 19 nt, Homo sapiens
  misc_RNA (1)...(19): siRNA sense strand
ucgaaaucuccgugugaaa

SEQ ID NO: 2254610 - RNA, 19 nt, Homo sapiens
  misc_RNA (1)...(19): siRNA sense strand
gcugauaacagaaaagaaa

SEQ ID NO: 2254611 - RNA, 19 nt, Homo sapiens
  misc_RNA (1)...(19): siRNA sense strand
gagaagugcaggagccgaa

SEQ ID NO: 2254612 - RNA, 19 nt, Homo sapiens
  misc_RNA (1)...(19): siRNA sense strand
cgacaagaccuguggcagu

SEQ ID NO: 2254613 - RNA, 19 nt, Homo sapiens
  misc_RNA (1)...(19): siRNA sense strand
cuuuaagcuucgagggcga

SEQ ID NO: 2254614 - RNA, 19 nt, Homo sapiens
  misc_RNA (1)...(19): siRNA sense strand
ugaagaugcagaugggauu

SEQ ID NO: 2254615 - RNA, 19 nt, Homo sapiens
  misc_RNA (1)...(19): siRNA sense strand
accagaaacccuagaguau

SEQ ID NO: 2254616 - RNA, 19 nt, Homo sapiens
  misc_RNA (1)...(19): siRNA sense strand
cggaggagucagaggucau

SEQ ID NO: 2254617 - RNA, 19 nt, Homo sapiens
  misc_RNA (1)...(19): siRNA sense strand
cuggacagguggagcguca

SEQ ID NO: 2254618 - RNA, 19 nt, Homo sapiens
  misc_RNA (1)...(19): siRNA sense strand
gcgaggauuccgagguaca

SEQ ID NO: 2254619 - RNA, 19 nt, Homo sapiens
  misc_RNA (1)...(19): siRNA sense strand
cuacaagaaccuggagcaa

SEQ ID NO: 2254620 - RNA, 19 nt, Homo sapiens
  misc_RNA (1)...(19): siRNA sense strand
gcagcuucguccuggaaau

SEQ ID NO: 2254621 - RNA, 19 nt, Homo sapiens
  misc_RNA (1)...(19): siRNA sense strand
cugaaagagaagcuggauu

SEQ ID NO: 2254622 - RNA, 19 nt, Homo sapiens
  misc_RNA (1)...(19): siRNA sense strand
cggagaaaugugucaugaa

SEQ ID NO: 2254623 - RNA, 19 nt, Homo sapiens
  misc_RNA (1)...(19): siRNA sense strand
gagaaaugugucaugaaca

SEQ ID NO: 2254624 - RNA, 19 nt, Homo sapiens
  misc_RNA (1)...(19): siRNA sense strand
cgaagauaucccuggacuu

SEQ ID NO: 2254625 - RNA, 19 nt, Homo sapiens
  misc_RNA (1)...(19): siRNA sense strand
acagaaaagaaauggaaga

SEQ ID NO: 2254626 - RNA, 19 nt, Homo sapiens
  misc_RNA (1)...(19): siRNA sense strand
gagaaguuggagagagcca

SEQ ID NO: 2254627 - RNA, 19 nt, Homo sapiens
  misc_RNA (1)...(19): siRNA sense strand
agucagaggagaagaugga

SEQ ID NO: 2254628 - RNA, 19 nt, Homo sapiens
  misc_RNA (1)...(19): siRNA sense strand
aggucuugcuggaguguga

SEQ ID NO: 2254629 - RNA, 19 nt, Homo sapiens
  misc_RNA (1)...(19): siRNA sense strand
gugagacggugaaggacuu

SEQ ID NO: 2254630 - RNA, 19 nt, Homo sapiens
  misc_RNA (1)...(19): siRNA sense strand
ggugcaaggccaugguuca

SEQ ID NO: 2254631 - RNA, 19 nt, Homo sapiens
  misc_RNA (1)...(19): siRNA sense strand
auucacaguauccgagaaa

SEQ ID NO: 2254632 - RNA, 19 nt, Homo sapiens
  misc_RNA (1)...(19): siRNA sense strand
gugaaguuccucagaagau

SEQ ID NO: 2254633 - RNA, 19 nt, Homo sapiens
  misc_RNA (1)...(19): siRNA sense strand
uggagaaguuggagagagc

SEQ ID NO: 2254634 - RNA, 19 nt, Homo sapiens
  misc_RNA (1)...(19): siRNA sense strand
gggacauggagcaggaacu

SEQ ID NO: 2254635 - RNA, 19 nt, Homo sapiens
  misc_RNA (1)...(19): siRNA sense strand
ccaaagaguugcugcacag

SEQ ID NO: 2254636 - RNA, 19 nt, Homo sapiens
  misc_RNA (1)...(19): siRNA sense strand
ccugggaagacaagcagaa

SEQ ID NO: 2254637 - RNA, 19 nt, Homo sapiens
  misc_RNA (1)...(19): siRNA sense strand
gcaccaagaugcuggacag

SEQ ID NO: 2254638 - RNA, 19 nt, Homo sapiens
  misc_RNA (1)...(19): siRNA sense strand
cuagaguauuacacggaga

SEQ ID NO: 2254639 - RNA, 19 nt, Homo sapiens
  misc_RNA (1)...(19): siRNA sense strand
caacaagaacaaagaagcu

SEQ ID NO: 2254640 - RNA, 19 nt, Homo sapiens
  misc_RNA (1)...(19): siRNA sense strand
cugugcagguggacggaga

SEQ ID NO: 2254641 - RNA, 19 nt, Homo sapiens
  misc_RNA (1)...(19): siRNA sense strand
ucauagaacacacagaaaa

SEQ ID NO: 2254642 - RNA, 19 nt, Homo sapiens
  misc_RNA (1)...(19): siRNA sense strand
gguuauuccagaaguuuga

SEQ ID NO: 2254643 - RNA, 19 nt, Homo sapiens
  misc_RNA (1)...(19): siRNA sense strand
gaguauuacacggagaaau

SEQ ID NO: 2254644 - RNA, 19 nt, Homo sapiens
  misc_RNA (1)...(19): siRNA sense strand
ucaucaggcuacagcauca

SEQ ID NO: 2254645 - RNA, 19 nt, Homo sapiens
  misc_RNA (1)...(19): siRNA sense strand
ccuacaagaaccuggagca

SEQ ID NO: 2254646 - RNA, 19 nt, Homo sapiens
  misc_RNA (1)...(19): siRNA sense strand
uguaaagaauccuugcuga

SEQ ID NO: 2254647 - RNA, 19 nt, Homo sapiens
  misc_RNA (1)...(19): siRNA sense strand
cagaggagaagauggacca

SEQ ID NO: 2254648 - RNA, 19 nt, Homo sapiens
  misc_RNA (1)...(19): siRNA sense strand
gaaccaaagaguugcugca

SEQ ID NO: 2254649 - RNA, 19 nt, Homo sapiens
  misc_RNA (1)...(19): siRNA sense strand
acggcaaagucaaucauau

SEQ ID NO: 2254650 - RNA, 19 nt, Homo sapiens
  misc_RNA (1)...(19): siRNA sense strand
aagaaauggaagauuggau

SEQ ID NO: 2254651 - RNA, 19 nt, Homo sapiens
  misc_RNA (1)...(19): siRNA sense strand
aagaauccuugcugaccaa

SEQ ID NO: 2254652 - RNA, 19 nt, Homo sapiens
  misc_RNA (1)...(19): siRNA sense strand
uaugagaagacgaccgaga

SEQ ID NO: 2254653 - RNA, 19 nt, Homo sapiens
  misc_RNA (1)...(19): siRNA sense strand
ugaagaaagcaauucguca

SEQ ID NO: 2254654 - RNA, 19 nt, Homo sapiens
  misc_RNA (1)...(19): siRNA sense strand
guaccaaggaagaugauac

SEQ ID NO: 2254655 - RNA, 19 nt, Homo sapiens
  misc_RNA (1)...(19): siRNA sense strand
aagacaagcagaagugcga

SEQ ID NO: 2254656 - RNA, 19 nt, Homo sapiens
  misc_RNA (1)...(19): siRNA sense strand
gccaaagugcucugugaga

SEQ ID NO: 2254657 - RNA, 19 nt, Homo sapiens
  misc_RNA (1)...(19): siRNA sense strand
aguauuacacggagaaaug

SEQ ID NO: 2254658 - RNA, 19 nt, Homo sapiens
  misc_RNA (1)...(19): siRNA sense strand
agucagaggucauggccaa

SEQ ID NO: 2254659 - RNA, 19 nt, Homo sapiens
  misc_RNA (1)...(19): siRNA sense strand
gcgcagucgcagugguaaa

SEQ ID NO: 2254660 - RNA, 19 nt, Homo sapiens
  misc_RNA (1)...(19): siRNA sense strand
ucgaaaucuccgugugaaa

SEQ ID NO: 2254661 - RNA, 19 nt, Homo sapiens
  misc_RNA (1)...(19): siRNA sense strand
gcugauaacagaaaagaaa

SEQ ID NO: 2254662 - RNA, 19 nt, Homo sapiens
  misc_RNA (1)...(19): siRNA sense strand
gagaagugcaggagccgaa

SEQ ID NO: 2254663 - RNA, 19 nt, Homo sapiens
  misc_RNA (1)...(19): siRNA sense strand
cgacaagaccuguggcagu

SEQ ID NO: 2254664 - RNA, 19 nt, Homo sapiens
  misc_RNA (1)...(19): siRNA sense strand
cuuuaagcuucgagggcga

SEQ ID NO: 2254665 - RNA, 19 nt, Homo sapiens
  misc_RNA (1)...(19): siRNA sense strand
ugaagaugcagaugggauu

SEQ ID NO: 2254666 - RNA, 19 nt, Homo sapiens
  misc_RNA (1)...(19): siRNA sense strand
accagaaacccuagaguau

SEQ ID NO: 2254667 - RNA, 19 nt, Homo sapiens
  misc_RNA (1)...(19): siRNA sense strand
cggaggagucagaggucau

SEQ ID NO: 2254668 - RNA, 19 nt, Homo sapiens
  misc_RNA (1)...(19): siRNA sense strand
cuggacagguggagcguca

SEQ ID NO: 2254669 - RNA, 19 nt, Homo sapiens
  misc_RNA (1)...(19): siRNA sense strand
gcgaggauuccgagguaca

SEQ ID NO: 2254670 - RNA, 19 nt, Homo sapiens
  misc_RNA (1)...(19): siRNA sense strand
cuacaagaaccuggagcaa

SEQ ID NO: 2254671 - RNA, 19 nt, Homo sapiens
  misc_RNA (1)...(19): siRNA sense strand
gcagcuucguccuggaaau

SEQ ID NO: 2254672 - RNA, 19 nt, Homo sapiens
  misc_RNA (1)...(19): siRNA sense strand
cugaaagagaagcuggauu

SEQ ID NO: 2254673 - RNA, 19 nt, Homo sapiens
  misc_RNA (1)...(19): siRNA sense strand
cggagaaaugugucaugaa

SEQ ID NO: 2254674 - RNA, 19 nt, Homo sapiens
  misc_RNA (1)...(19): siRNA sense strand
gagaaaugugucaugaaca

SEQ ID NO: 2254675 - RNA, 19 nt, Homo sapiens
  misc_RNA (1)...(19): siRNA sense strand
cgaagauaucccuggacuu

SEQ ID NO: 2254676 - RNA, 19 nt, Homo sapiens
  misc_RNA (1)...(19): siRNA sense strand
acagaaaagaaauggaaga

SEQ ID NO: 2254677 - RNA, 19 nt, Homo sapiens
  misc_RNA (1)...(19): siRNA sense strand
gagaaguuggagagagcca

SEQ ID NO: 2254678 - RNA, 19 nt, Homo sapiens
  misc_RNA (1)...(19): siRNA sense strand
agucagaggagaagaugga

SEQ ID NO: 2254679 - RNA, 19 nt, Homo sapiens
  misc_RNA (1)...(19): siRNA sense strand
aggucuugcuggaguguga

SEQ ID NO: 2254680 - RNA, 19 nt, Homo sapiens
  misc_RNA (1)...(19): siRNA sense strand
gugagacggugaaggacuu

SEQ ID NO: 2254681 - RNA, 19 nt, Homo sapiens
  misc_RNA (1)...(19): siRNA sense strand
ggugcaaggccaugguuca

SEQ ID NO: 2254682 - RNA, 19 nt, Homo sapiens
  misc_RNA (1)...(19): siRNA sense strand
auucacaguauccgagaaa

SEQ ID NO: 2254683 - RNA, 19 nt, Homo sapiens
  misc_RNA (1)...(19): siRNA sense strand
gugaaguuccucagaagau

SEQ ID NO: 2254684 - RNA, 19 nt, Homo sapiens
  misc_RNA (1)...(19): siRNA sense strand
uggagaaguuggagagagc

SEQ ID NO: 2254685 - RNA, 19 nt, Homo sapiens
  misc_RNA (1)...(19): siRNA sense strand
gggacauggagcaggaacu

SEQ ID NO: 2254686 - RNA, 19 nt, Homo sapiens
  misc_RNA (1)...(19): siRNA sense strand
ccaaagaguugcugcacag

SEQ ID NO: 2254687 - RNA, 19 nt, Homo sapiens
  misc_RNA (1)...(19): siRNA sense strand
ccugggaagacaagcagaa

SEQ ID NO: 2254688 - RNA, 19 nt, Homo sapiens
  misc_RNA (1)...(19): siRNA sense strand
gcaccaagaugcuggacag

SEQ ID NO: 2254689 - RNA, 19 nt, Homo sapiens
  misc_RNA (1)...(19): siRNA sense strand
cuagaguauuacacggaga

SEQ ID NO: 2254690 - RNA, 19 nt, Homo sapiens
  misc_RNA (1)...(19): siRNA sense strand
caacaagaacaaagaagcu

SEQ ID NO: 2254691 - RNA, 19 nt, Homo sapiens
  misc_RNA (1)...(19): siRNA sense strand
cugugcagguggacggaga

SEQ ID NO: 2254692 - RNA, 19 nt, Homo sapiens
  misc_RNA (1)...(19): siRNA sense strand
ucauagaacacacagaaaa

SEQ ID NO: 2254693 - RNA, 19 nt, Homo sapiens
  misc_RNA (1)...(19): siRNA sense strand
gguuauuccagaaguuuga

SEQ ID NO: 2254694 - RNA, 19 nt, Homo sapiens
  misc_RNA (1)...(19): siRNA sense strand
gaguauuacacggagaaau

SEQ ID NO: 2254695 - RNA, 19 nt, Homo sapiens
  misc_RNA (1)...(19): siRNA sense strand
ucaucaggcuacagcauca

SEQ ID NO: 2254696 - RNA, 19 nt, Homo sapiens
  misc_RNA (1)...(19): siRNA sense strand
ccuacaagaaccuggagca

SEQ ID NO: 2254697 - RNA, 19 nt, Homo sapiens
  misc_RNA (1)...(19): siRNA sense strand
uguaaagaauccuugcuga

SEQ ID NO: 2254698 - RNA, 19 nt, Homo sapiens
  misc_RNA (1)...(19): siRNA sense strand
cagaggagaagauggacca

SEQ ID NO: 2254699 - RNA, 19 nt, Homo sapiens
  misc_RNA (1)...(19): siRNA sense strand
gaaccaaagaguugcugca

SEQ ID NO: 2254700 - RNA, 19 nt, Homo sapiens
  misc_RNA (1)...(19): siRNA sense strand
acggcaaagucaaucauau

SEQ ID NO: 2254701 - RNA, 19 nt, Homo sapiens
  misc_RNA (1)...(19): siRNA sense strand
aagaaauggaagauuggau

SEQ ID NO: 2254702 - RNA, 19 nt, Homo sapiens
  misc_RNA (1)...(19): siRNA sense strand
aagaauccuugcugaccaa

SEQ ID NO: 2254703 - RNA, 19 nt, Homo sapiens
  misc_RNA (1)...(19): siRNA sense strand
uaugagaagacgaccgaga

SEQ ID NO: 2254704 - RNA, 19 nt, Homo sapiens
  misc_RNA (1)...(19): siRNA sense strand
ugaagaaagcaauucguca

SEQ ID NO: 2254705 - RNA, 19 nt, Homo sapiens
  misc_RNA (1)...(19): siRNA sense strand
guaccaaggaagaugauac

SEQ ID NO: 2254706 - RNA, 19 nt, Homo sapiens
  misc_RNA (1)...(19): siRNA sense strand
aagacaagcagaagugcga

SEQ ID NO: 2254707 - RNA, 19 nt, Homo sapiens
  misc_RNA (1)...(19): siRNA sense strand
gccaaagugcucugugaga

SEQ ID NO: 2254708 - RNA, 19 nt, Homo sapiens
  misc_RNA (1)...(19): siRNA sense strand
aguauuacacggagaaaug

SEQ ID NO: 2254709 - RNA, 19 nt, Homo sapiens
  misc_RNA (1)...(19): siRNA sense strand
ggugcgaguuugagcggaa

SEQ ID NO: 2254710 - RNA, 19 nt, Homo sapiens
  misc_RNA (1)...(19): siRNA sense strand
ccauuaacccugacggcua

SEQ ID NO: 2254711 - RNA, 19 nt, Homo sapiens
  misc_RNA (1)...(19): siRNA sense strand
aggugaagcucaucggcaa

SEQ ID NO: 2254712 - RNA, 19 nt, Homo sapiens
  misc_RNA (1)...(19): siRNA sense strand
gagaauagguguggaggca

SEQ ID NO: 2254713 - RNA, 19 nt, Homo sapiens
  misc_RNA (1)...(19): siRNA sense strand
ccacauugucauugcccaa

SEQ ID NO: 2254714 - RNA, 19 nt, Homo sapiens
  misc_RNA (1)...(19): siRNA sense strand
aggcaaucaugaaguggau

SEQ ID NO: 2254715 - RNA, 19 nt, Homo sapiens
  misc_RNA (1)...(19): siRNA sense strand
cagcacuacugguggggua

SEQ ID NO: 2254716 - RNA, 19 nt, Homo sapiens
  misc_RNA (1)...(19): siRNA sense strand
agguguggugacagauaaa

SEQ ID NO: 2254717 - RNA, 19 nt, Homo sapiens
  misc_RNA (1)...(19): siRNA sense strand
ggaucucagucaaaggcau

SEQ ID NO: 2254718 - RNA, 19 nt, Homo sapiens
  misc_RNA (1)...(19): siRNA sense strand
ccgacgagaagauguucaa

SEQ ID NO: 2254719 - RNA, 19 nt, Homo sapiens
  misc_RNA (1)...(19): siRNA sense strand
cggcaacauucauggcaac

SEQ ID NO: 2254720 - RNA, 19 nt, Homo sapiens
  misc_RNA (1)...(19): siRNA sense strand
gcucucagcucaagggcaa

SEQ ID NO: 2254721 - RNA, 19 nt, Homo sapiens
  misc_RNA (1)...(19): siRNA sense strand
agucauaucauguuggaau

SEQ ID NO: 2254722 - RNA, 19 nt, Homo sapiens
  misc_RNA (1)...(19): siRNA sense strand
augcacuuguggaaagaaa

SEQ ID NO: 2254723 - RNA, 19 nt, Homo sapiens
  misc_RNA (1)...(19): siRNA sense strand
agaugauucaggaaacaaa

SEQ ID NO: 2254724 - RNA, 19 nt, Homo sapiens
  misc_RNA (1)...(19): siRNA sense strand
gaagaauauucagaggcua

SEQ ID NO: 2254725 - RNA, 19 nt, Homo sapiens
  misc_RNA (1)...(19): siRNA sense strand
caagaagaugauucaggaa

SEQ ID NO: 2254726 - RNA, 19 nt, Homo sapiens
  misc_RNA (1)...(19): siRNA sense strand
cagaaggacgguaugguca

SEQ ID NO: 2254727 - RNA, 19 nt, Homo sapiens
  misc_RNA (1)...(19): siRNA sense strand
ccauagacaagaugcagau

SEQ ID NO: 2254728 - RNA, 19 nt, Homo sapiens
  misc_RNA (1)...(19): siRNA sense strand
agaagaauauucagaggcu

SEQ ID NO: 2254729 - RNA, 19 nt, Homo sapiens
  misc_RNA (1)...(19): siRNA sense strand
guaaagagaauggagccua

SEQ ID NO: 2254730 - RNA, 19 nt, Homo sapiens
  misc_RNA (1)...(19): siRNA sense strand
gcgaagaacuuaucccauc

SEQ ID NO: 2254731 - RNA, 19 nt, Homo sapiens
  misc_RNA (1)...(19): siRNA sense strand
acaugauagaagaugguga

SEQ ID NO: 2254732 - RNA, 19 nt, Homo sapiens
  misc_RNA (1)...(19): siRNA sense strand
gaucaacaagaguggggaa

SEQ ID NO: 2254733 - RNA, 19 nt, Homo sapiens
  misc_RNA (1)...(19): siRNA sense strand
uggucaguuuccaugauaa

SEQ ID NO: 2254734 - RNA, 19 nt, Homo sapiens
  misc_RNA (1)...(19): siRNA sense strand
cuauuauuauggagggaug

SEQ ID NO: 2254735 - RNA, 19 nt, Homo sapiens
  misc_RNA (1)...(19): siRNA sense strand
gaagauaagaggacgcaga

SEQ ID NO: 2254736 - RNA, 19 nt, Homo sapiens
  misc_RNA (1)...(19): siRNA sense strand
cgcagaagcugguggccau

SEQ ID NO: 2254737 - RNA, 19 nt, Homo sapiens
  misc_RNA (1)...(19): siRNA sense strand
cggaggugauccuggcaga

SEQ ID NO: 2254738 - RNA, 19 nt, Homo sapiens
  misc_RNA (1)...(19): siRNA sense strand
cggugagugagcagaucaa

SEQ ID NO: 2254739 - RNA, 19 nt, Homo sapiens
  misc_RNA (1)...(19): siRNA sense strand
aggaaggcagcauggagaa

SEQ ID NO: 2254740 - RNA, 19 nt, Homo sapiens
  misc_RNA (1)...(19): siRNA sense strand
auggauugcaggagauaca

SEQ ID NO: 2254741 - RNA, 19 nt, Homo sapiens
  misc_RNA (1)...(19): siRNA sense strand
ucaagaagaacuuugccaa

SEQ ID NO: 2254742 - RNA, 19 nt, Homo sapiens
  misc_RNA (1)...(19): siRNA sense strand
aggcggaggacauuagaga

SEQ ID NO: 2254743 - RNA, 19 nt, Homo sapiens
  misc_RNA (1)...(19): siRNA sense strand
ugaaauaccugcaugaccu

SEQ ID NO: 2254744 - RNA, 19 nt, Homo sapiens
  misc_RNA (1)...(19): siRNA sense strand
ccaaagauuucauccggca

SEQ ID NO: 2254745 - RNA, 19 nt, Homo sapiens
  misc_RNA (1)...(19): siRNA sense strand
uggcagaagauaagaggac

SEQ ID NO: 2254746 - RNA, 19 nt, Homo sapiens
  misc_RNA (1)...(19): siRNA sense strand
cugugaaauaccugcauga

SEQ ID NO: 2254747 - RNA, 19 nt, Homo sapiens
  misc_RNA (1)...(19): siRNA sense strand
ccuguggaacuccgggaua

SEQ ID NO: 2254748 - RNA, 19 nt, Homo sapiens
  misc_RNA (1)...(19): siRNA sense strand
cagaagaaauaaaugggaa

SEQ ID NO: 2254749 - RNA, 19 nt, Homo sapiens
  misc_RNA (1)...(19): siRNA sense strand
caauaaagcuccagcgaac

SEQ ID NO: 2254750 - RNA, 19 nt, Homo sapiens
  misc_RNA (1)...(19): siRNA sense strand
gcaacaagcaggaagccaa

SEQ ID NO: 2254751 - RNA, 19 nt, Homo sapiens
  misc_RNA (1)...(19): siRNA sense strand
aguugaagaccaagagaau

SEQ ID NO: 2254752 - RNA, 19 nt, Homo sapiens
  misc_RNA (1)...(19): siRNA sense strand
gauaagugcuguugcggau

SEQ ID NO: 2254753 - RNA, 19 nt, Homo sapiens
  misc_RNA (1)...(19): siRNA sense strand
aggacauaguugacggcaa

SEQ ID NO: 2254754 - RNA, 19 nt, Homo sapiens
  misc_RNA (1)...(19): siRNA sense strand
gaauaagugucaagacgga

SEQ ID NO: 2254755 - RNA, 19 nt, Homo sapiens
  misc_RNA (1)...(19): siRNA sense strand
ggacauaguugacggcaag

SEQ ID NO: 2254756 - RNA, 19 nt, Homo sapiens
  misc_RNA (1)...(19): siRNA sense strand
aggaaggcaccaaggagaa

SEQ ID NO: 2254757 - RNA, 19 nt, Homo sapiens
  misc_RNA (1)...(19): siRNA sense strand
uuauaaaguccaaggaagu

SEQ ID NO: 2254758 - RNA, 19 nt, Homo sapiens
  misc_RNA (1)...(19): siRNA sense strand
ucaaaagagaagaaagcaa

SEQ ID NO: 2254759 - RNA, 19 nt, Homo sapiens
  misc_RNA (1)...(19): siRNA sense strand
agaaugaaccagaagcaga

SEQ ID NO: 2254760 - RNA, 19 nt, Homo sapiens
  misc_RNA (1)...(19): siRNA sense strand
uggacaagggacaggaaaa

SEQ ID NO: 2254761 - RNA, 19 nt, Homo sapiens
  misc_RNA (1)...(19): siRNA sense strand
ggaaagaggccaaacccga

SEQ ID NO: 2254762 - RNA, 19 nt, Homo sapiens
  misc_RNA (1)...(19): siRNA sense strand
agucagcagccgagaugaa

SEQ ID NO: 2254763 - RNA, 19 nt, Homo sapiens
  misc_RNA (1)...(19): siRNA sense strand
cccaaagaguugaagacca

SEQ ID NO: 2254764 - RNA, 19 nt, Homo sapiens
  misc_RNA (1)...(19): siRNA sense strand
ccgagaugaacaagcagaa

SEQ ID NO: 2254765 - RNA, 19 nt, Homo sapiens
  misc_RNA (1)...(19): siRNA sense strand
aggacguaccggagaccaa

SEQ ID NO: 2254766 - RNA, 19 nt, Homo sapiens
  misc_RNA (1)...(19): siRNA sense strand
gcagagacuuaccaggaca

SEQ ID NO: 2254767 - RNA, 19 nt, Homo sapiens
  misc_RNA (1)...(19): siRNA sense strand
aggaaaaggugccagguga

SEQ ID NO: 2254768 - RNA, 19 nt, Homo sapiens
  misc_RNA (1)...(19): siRNA sense strand
agucaccaguagagauuau

SEQ ID NO: 2254769 - RNA, 19 nt, Homo sapiens
  misc_RNA (1)...(19): siRNA sense strand
ccaauaaagcuccagcgaa

SEQ ID NO: 2254770 - RNA, 19 nt, Homo sapiens
  misc_RNA (1)...(19): siRNA sense strand
auaagugucaagacggaua

SEQ ID NO: 2254771 - RNA, 19 nt, Homo sapiens
  misc_RNA (1)...(19): siRNA sense strand
ggacaagcuccaaaagaga

SEQ ID NO: 2254772 - RNA, 19 nt, Homo sapiens
  misc_RNA (1)...(19): siRNA sense strand
cagcagccgagaugaacaa

SEQ ID NO: 2254773 - RNA, 19 nt, Homo sapiens
  misc_RNA (1)...(19): siRNA sense strand
acacgaacucacugcagaa

SEQ ID NO: 2254774 - RNA, 19 nt, Homo sapiens
  misc_RNA (1)...(19): siRNA sense strand
aguucagcacuuagaggaa

SEQ ID NO: 2254775 - RNA, 19 nt, Homo sapiens
  misc_RNA (1)...(19): siRNA sense strand
gggaauaagugucaagacg

SEQ ID NO: 2254776 - RNA, 19 nt, Homo sapiens
  misc_RNA (1)...(19): siRNA sense strand
aacaaagacccaagugaga

SEQ ID NO: 2254777 - RNA, 19 nt, Homo sapiens
  misc_RNA (1)...(19): siRNA sense strand
aaaagaaggacaagaacuu

SEQ ID NO: 2254778 - RNA, 19 nt, Homo sapiens
  misc_RNA (1)...(19): siRNA sense strand
ccaucggaccaguuggcaa

SEQ ID NO: 2254779 - RNA, 19 nt, Homo sapiens
  misc_RNA (1)...(19): siRNA sense strand
aaggaaggcaccaaggaga

SEQ ID NO: 2254780 - RNA, 19 nt, Homo sapiens
  misc_RNA (1)...(19): siRNA sense strand
agagaagaaagcaaaccaa

SEQ ID NO: 2254781 - RNA, 19 nt, Homo sapiens
  misc_RNA (1)...(19): siRNA sense strand
agagaaugaaccagaagca

SEQ ID NO: 2254782 - RNA, 19 nt, Homo sapiens
  misc_RNA (1)...(19): siRNA sense strand
uugcggaugccaacggaaa

SEQ ID NO: 2254783 - RNA, 19 nt, Homo sapiens
  misc_RNA (1)...(19): siRNA sense strand
ccaaaugaguguuccccaa

SEQ ID NO: 2254784 - RNA, 19 nt, Homo sapiens
  misc_RNA (1)...(19): siRNA sense strand
ggggcaggacacagauaaa

SEQ ID NO: 2254785 - RNA, 19 nt, Homo sapiens
  misc_RNA (1)...(19): siRNA sense strand
agaccaagagaaugaacca

SEQ ID NO: 2254786 - RNA, 19 nt, Homo sapiens
  misc_RNA (1)...(19): siRNA sense strand
auuauaaaguccaaggaag

SEQ ID NO: 2254787 - RNA, 19 nt, Homo sapiens
  misc_RNA (1)...(19): siRNA sense strand
cgaaggagaugcugcaccu

SEQ ID NO: 2254788 - RNA, 19 nt, Homo sapiens
  misc_RNA (1)...(19): siRNA sense strand
gaaaggggauggagggauc

SEQ ID NO: 2254789 - RNA, 19 nt, Homo sapiens
  misc_RNA (1)...(19): siRNA sense strand
gcuuaaagaaagugguuau

SEQ ID NO: 2254790 - RNA, 19 nt, Homo sapiens
  misc_RNA (1)...(19): siRNA sense strand
aagcaauggcuaaaggaaa

SEQ ID NO: 2254791 - RNA, 19 nt, Homo sapiens
  misc_RNA (1)...(19): siRNA sense strand
aaggaauguuugagcgaau

SEQ ID NO: 2254792 - RNA, 19 nt, Homo sapiens
  misc_RNA (1)...(19): siRNA sense strand
agaagaauaucuauggcaa

SEQ ID NO: 2254793 - RNA, 19 nt, Homo sapiens
  misc_RNA (1)...(19): siRNA sense strand
agaaagaauaacaagggaa

SEQ ID NO: 2254794 - RNA, 19 nt, Homo sapiens
  misc_RNA (1)...(19): siRNA sense strand
cuuaaauccuagugauaca

SEQ ID NO: 2254795 - RNA, 19 nt, Homo sapiens
  misc_RNA (1)...(19): siRNA sense strand
guucaguacuguaggagga

SEQ ID NO: 2254796 - RNA, 19 nt, Homo sapiens
  misc_RNA (1)...(19): siRNA sense strand
ccuagagguauaauagaaa

SEQ ID NO: 2254797 - RNA, 19 nt, Homo sapiens
  misc_RNA (1)...(19): siRNA sense strand
cggcaagaaguuaugaaau

SEQ ID NO: 2254798 - RNA, 19 nt, Homo sapiens
  misc_RNA (1)...(19): siRNA sense strand
agaagaaauccuugcuaau

SEQ ID NO: 2254799 - RNA, 19 nt, Homo sapiens
  misc_RNA (1)...(19): siRNA sense strand
aggaacucuugguguaaua

SEQ ID NO: 2254800 - RNA, 19 nt, Homo sapiens
  misc_RNA (1)...(19): siRNA sense strand
ggaaggaauguuugagcga

SEQ ID NO: 2254801 - RNA, 19 nt, Homo sapiens
  misc_RNA (1)...(19): siRNA sense strand
gcaucaggcaugaagaaga

SEQ ID NO: 2254802 - RNA, 19 nt, Homo sapiens
  misc_RNA (1)...(19): siRNA sense strand
guuuaaaggauuugaccca

SEQ ID NO: 2254803 - RNA, 19 nt, Homo sapiens
  misc_RNA (1)...(19): siRNA sense strand
gcggcaagaaguuaugaaa

SEQ ID NO: 2254804 - RNA, 19 nt, Homo sapiens
  misc_RNA (1)...(19): siRNA sense strand
gcgcaucaggcaugaagaa

SEQ ID NO: 2254805 - RNA, 19 nt, Homo sapiens
  misc_RNA (1)...(19): siRNA sense strand
guagccuguuuaagagaaa

SEQ ID NO: 2254806 - RNA, 19 nt, Homo sapiens
  misc_RNA (1)...(19): siRNA sense strand
auuuagagcucauggucau

SEQ ID NO: 2254807 - RNA, 19 nt, Homo sapiens
  misc_RNA (1)...(19): siRNA sense strand
uuacggaagcaauggcuaa

SEQ ID NO: 2254808 - RNA, 19 nt, Homo sapiens
  misc_RNA (1)...(19): siRNA sense strand
gguagaucucuguagaaau

SEQ ID NO: 2254809 - RNA, 19 nt, Homo sapiens
  misc_RNA (1)...(19): siRNA sense strand
ggcagcugcuagagaagaa

SEQ ID NO: 2254810 - RNA, 19 nt, Homo sapiens
  misc_RNA (1)...(19): siRNA sense strand
uccuuaaauccuagugaua

SEQ ID NO: 2254811 - RNA, 19 nt, Homo sapiens
  misc_RNA (1)...(19): siRNA sense strand
gggacagggugguagaucu

SEQ ID NO: 2254812 - RNA, 19 nt, Homo sapiens
  misc_RNA (1)...(19): siRNA sense strand
uggaaagacagcuuaaaga

SEQ ID NO: 2254813 - RNA, 19 nt, Homo sapiens
  misc_RNA (1)...(19): siRNA sense strand
gccuuuaacuacaggggaa

SEQ ID NO: 2254814 - RNA, 19 nt, Homo sapiens
  misc_RNA (1)...(19): siRNA sense strand
ccucuaaagcauccuuaaa

SEQ ID NO: 2254815 - RNA, 19 nt, Homo sapiens
  misc_RNA (1)...(19): siRNA sense strand
caucaugggaucugaagga

SEQ ID NO: 2254816 - RNA, 19 nt, Homo sapiens
  misc_RNA (1)...(19): siRNA sense strand
cuggagaagauaauggaca

SEQ ID NO: 2254817 - RNA, 19 nt, Homo sapiens
  misc_RNA (1)...(19): siRNA sense strand
agaugagacaagaacaauu

SEQ ID NO: 2254818 - RNA, 19 nt, Homo sapiens
  misc_RNA (1)...(19): siRNA sense strand
aauaacaagggaaugcaaa

SEQ ID NO: 2254819 - RNA, 19 nt, Homo sapiens
  misc_RNA (1)...(19): siRNA sense strand
uggaauggauggggauaua

SEQ ID NO: 2254820 - RNA, 19 nt, Homo sapiens
  misc_RNA (1)...(19): siRNA sense strand
aagaagggccaaauugaau

SEQ ID NO: 2254821 - RNA, 19 nt, Homo sapiens
  misc_RNA (1)...(19): siRNA sense strand
caggcaugaagaagaauau

SEQ ID NO: 2254822 - RNA, 19 nt, Homo sapiens
  misc_RNA (1)...(19): siRNA sense strand
aggaauauguggaccccaa

SEQ ID NO: 2254823 - RNA, 19 nt, Homo sapiens
  misc_RNA (1)...(19): siRNA sense strand
gccaugaugauguaguuaa

SEQ ID NO: 2254824 - RNA, 19 nt, Homo sapiens
  misc_RNA (1)...(19): siRNA sense strand
gagaacaauuugacagcuc

SEQ ID NO: 2254825 - RNA, 19 nt, Homo sapiens
  misc_RNA (1)...(19): siRNA sense strand
gggcaaguuacggaagcaa

SEQ ID NO: 2254826 - RNA, 19 nt, Homo sapiens
  misc_RNA (1)...(19): siRNA sense strand
aguuggaaagacagcuuaa

SEQ ID NO: 2254827 - RNA, 19 nt, Homo sapiens
  misc_RNA (1)...(19): siRNA sense strand
agcaauggcuaaaggaaag

SEQ ID NO: 2254828 - RNA, 19 nt, Homo sapiens
  misc_RNA (1)...(19): siRNA sense strand
caauaacaucuuuggaaac

SEQ ID NO: 2254829 - RNA, 19 nt, Homo sapiens
  misc_RNA (1)...(19): siRNA sense strand
ugauauaguuuuauggcca

SEQ ID NO: 2254830 - RNA, 19 nt, Homo sapiens
  misc_RNA (1)...(19): siRNA sense strand
uggaguaaauguggagcau

SEQ ID NO: 2254831 - RNA, 19 nt, Homo sapiens
  misc_RNA (1)...(19): siRNA sense strand
agaaauugcaaaacagaga

SEQ ID NO: 2254832 - RNA, 19 nt, Homo sapiens
  misc_RNA (1)...(19): siRNA sense strand
ggaguaaauguggagcaua

SEQ ID NO: 2254833 - RNA, 19 nt, Homo sapiens
  misc_RNA (1)...(19): siRNA sense strand
gagcauaaaacuaccucua

SEQ ID NO: 2254834 - RNA, 19 nt, Homo sapiens
  misc_RNA (1)...(19): siRNA sense strand
cauauucacaagaggcaga

SEQ ID NO: 2254835 - RNA, 19 nt, Homo sapiens
  misc_RNA (1)...(19): siRNA sense strand
ucgaguauuuagagcucau

SEQ ID NO: 2254836 - RNA, 19 nt, Homo sapiens
  misc_RNA (1)...(19): siRNA sense strand
uuguacaggucaugaacca

SEQ ID NO: 2254837 - RNA, 19 nt, Homo sapiens
  misc_RNA (1)...(19): siRNA sense strand
uggcagcuggagaagauaa

SEQ ID NO: 2254838 - RNA, 19 nt, Homo sapiens
  misc_RNA (1)...(19): siRNA sense strand
cugaauucuggcugggaaa

SEQ ID NO: 2254839 - RNA, 19 nt, Homo sapiens
  misc_RNA (1)...(19): siRNA sense strand
gauucaagcaacagcaacu

SEQ ID NO: 2254840 - RNA, 19 nt, Homo sapiens
  misc_RNA (1)...(19): siRNA sense strand
aggaugguucuguggauuu

SEQ ID NO: 2254841 - RNA, 19 nt, Homo sapiens
  misc_RNA (1)...(19): siRNA sense strand
cugaauucuggcugggaaa

SEQ ID NO: 2254842 - RNA, 19 nt, Homo sapiens
  misc_RNA (1)...(19): siRNA sense strand
gauucaagcaacagcaacu

SEQ ID NO: 2254843 - RNA, 19 nt, Homo sapiens
  misc_RNA (1)...(19): siRNA sense strand
aggaugguucuguggauuu

SEQ ID NO: 2254844 - RNA, 19 nt, Homo sapiens
  misc_RNA (1)...(19): siRNA sense strand
aggcagugguugcaggaau

SEQ ID NO: 2254845 - RNA, 19 nt, Homo sapiens
  misc_RNA (1)...(19): siRNA sense strand
agaaugaagaugagaaacu

SEQ ID NO: 2254846 - RNA, 19 nt, Homo sapiens
  misc_RNA (1)...(19): siRNA sense strand
cagauaaaguagaucgacu

SEQ ID NO: 2254847 - RNA, 19 nt, Homo sapiens
  misc_RNA (1)...(19): siRNA sense strand
gcaggugauagaagagcaa

SEQ ID NO: 2254848 - RNA, 19 nt, Homo sapiens
  misc_RNA (1)...(19): siRNA sense strand
agaaagaucaugacaggca

SEQ ID NO: 2254849 - RNA, 19 nt, Homo sapiens
  misc_RNA (1)...(19): siRNA sense strand
acagagaccucaagccuga

SEQ ID NO: 2254850 - RNA, 19 nt, Homo sapiens
  misc_RNA (1)...(19): siRNA sense strand
ggauaugcgaagaaagauc

SEQ ID NO: 2254851 - RNA, 19 nt, Homo sapiens
  misc_RNA (1)...(19): siRNA sense strand
gaggagagcgacauggaca

SEQ ID NO: 2254852 - RNA, 19 nt, Homo sapiens
  misc_RNA (1)...(19): siRNA sense strand
acgcggaacaguuggccaa

SEQ ID NO: 2254853 - RNA, 19 nt, Homo sapiens
  misc_RNA (1)...(19): siRNA sense strand
ugaaugaaguaaugcagga

SEQ ID NO: 2254854 - RNA, 19 nt, Homo sapiens
  misc_RNA (1)...(19): siRNA sense strand
aggagagcgacauggacaa

SEQ ID NO: 2254855 - RNA, 19 nt, Homo sapiens
  misc_RNA (1)...(19): siRNA sense strand
aguauaaccgggaaugcaa

SEQ ID NO: 2254856 - RNA, 19 nt, Homo sapiens
  misc_RNA (1)...(19): siRNA sense strand
aauuagugguccaguuaga

SEQ ID NO: 2254857 - RNA, 19 nt, Homo sapiens
  misc_RNA (1)...(19): siRNA sense strand
uugugaagcaggugauaga

SEQ ID NO: 2254858 - RNA, 19 nt, Homo sapiens
  misc_RNA (1)...(19): siRNA sense strand
ucguggauucacagauaaa

SEQ ID NO: 2254859 - RNA, 19 nt, Homo sapiens
  misc_RNA (1)...(19): siRNA sense strand
gcaccaagccaaaggacag

SEQ ID NO: 2254860 - RNA, 19 nt, Homo sapiens
  misc_RNA (1)...(19): siRNA sense strand
uggaaguauaaccgggaau

SEQ ID NO: 2254861 - RNA, 19 nt, Homo sapiens
  misc_RNA (1)...(19): siRNA sense strand
acuaaaacuggcagaaauu

SEQ ID NO: 2254862 - RNA, 19 nt, Homo sapiens
  misc_RNA (1)...(19): siRNA sense strand
cgacuaaaacuggcagaaa

SEQ ID NO: 2254863 - RNA, 19 nt, Homo sapiens
  misc_RNA (1)...(19): siRNA sense strand
gagcuauuucacagaauca

SEQ ID NO: 2254864 - RNA, 19 nt, Homo sapiens
  misc_RNA (1)...(19): siRNA sense strand
gaagaaagaucaugacagg

SEQ ID NO: 2254865 - RNA, 19 nt, Homo sapiens
  misc_RNA (1)...(19): siRNA sense strand
augcaaacuccuaagagau

SEQ ID NO: 2254866 - RNA, 19 nt, Homo sapiens
  misc_RNA (1)...(19): siRNA sense strand
cagaaauugugaagcaggu

SEQ ID NO: 2254867 - RNA, 19 nt, Homo sapiens
  misc_RNA (1)...(19): siRNA sense strand
aguuagagucuguguaaag

SEQ ID NO: 2254868 - RNA, 19 nt, Homo sapiens
  misc_RNA (1)...(19): siRNA sense strand
aaggauaacucuuuggaug

SEQ ID NO: 2254869 - RNA, 19 nt, Homo sapiens
  misc_RNA (1)...(19): siRNA sense strand
ccaagauugaccaagguga

SEQ ID NO: 2254870 - RNA, 19 nt, Homo sapiens
  misc_RNA (1)...(19): siRNA sense strand
aggcagugguugcaggaau

SEQ ID NO: 2254871 - RNA, 19 nt, Homo sapiens
  misc_RNA (1)...(19): siRNA sense strand
agaaugaagaugagaaacu

SEQ ID NO: 2254872 - RNA, 19 nt, Homo sapiens
  misc_RNA (1)...(19): siRNA sense strand
cagauaaaguagaucgacu

SEQ ID NO: 2254873 - RNA, 19 nt, Homo sapiens
  misc_RNA (1)...(19): siRNA sense strand
gcaggugauagaagagcaa

SEQ ID NO: 2254874 - RNA, 19 nt, Homo sapiens
  misc_RNA (1)...(19): siRNA sense strand
agaaagaucaugacaggca

SEQ ID NO: 2254875 - RNA, 19 nt, Homo sapiens
  misc_RNA (1)...(19): siRNA sense strand
acagagaccucaagccuga

SEQ ID NO: 2254876 - RNA, 19 nt, Homo sapiens
  misc_RNA (1)...(19): siRNA sense strand
ggauaugcgaagaaagauc

SEQ ID NO: 2254877 - RNA, 19 nt, Homo sapiens
  misc_RNA (1)...(19): siRNA sense strand
gaggagagcgacauggaca

SEQ ID NO: 2254878 - RNA, 19 nt, Homo sapiens
  misc_RNA (1)...(19): siRNA sense strand
acgcggaacaguuggccaa

SEQ ID NO: 2254879 - RNA, 19 nt, Homo sapiens
  misc_RNA (1)...(19): siRNA sense strand
ugaaugaaguaaugcagga

SEQ ID NO: 2254880 - RNA, 19 nt, Homo sapiens
  misc_RNA (1)...(19): siRNA sense strand
aggagagcgacauggacaa

SEQ ID NO: 2254881 - RNA, 19 nt, Homo sapiens
  misc_RNA (1)...(19): siRNA sense strand
aguauaaccgggaaugcaa

SEQ ID NO: 2254882 - RNA, 19 nt, Homo sapiens
  misc_RNA (1)...(19): siRNA sense strand
aauuagugguccaguuaga

SEQ ID NO: 2254883 - RNA, 19 nt, Homo sapiens
  misc_RNA (1)...(19): siRNA sense strand
uugugaagcaggugauaga

SEQ ID NO: 2254884 - RNA, 19 nt, Homo sapiens
  misc_RNA (1)...(19): siRNA sense strand
ucguggauucacagauaaa

SEQ ID NO: 2254885 - RNA, 19 nt, Homo sapiens
  misc_RNA (1)...(19): siRNA sense strand
gcaccaagccaaaggacag

SEQ ID NO: 2254886 - RNA, 19 nt, Homo sapiens
  misc_RNA (1)...(19): siRNA sense strand
uggaaguauaaccgggaau

SEQ ID NO: 2254887 - RNA, 19 nt, Homo sapiens
  misc_RNA (1)...(19): siRNA sense strand
acuaaaacuggcagaaauu

SEQ ID NO: 2254888 - RNA, 19 nt, Homo sapiens
  misc_RNA (1)...(19): siRNA sense strand
cgacuaaaacuggcagaaa

SEQ ID NO: 2254889 - RNA, 19 nt, Homo sapiens
  misc_RNA (1)...(19): siRNA sense strand
gagcuauuucacagaauca

SEQ ID NO: 2254890 - RNA, 19 nt, Homo sapiens
  misc_RNA (1)...(19): siRNA sense strand
gaagaaagaucaugacagg

SEQ ID NO: 2254891 - RNA, 19 nt, Homo sapiens
  misc_RNA (1)...(19): siRNA sense strand
augcaaacuccuaagagau

SEQ ID NO: 2254892 - RNA, 19 nt, Homo sapiens
  misc_RNA (1)...(19): siRNA sense strand
cagaaauugugaagcaggu

SEQ ID NO: 2254893 - RNA, 19 nt, Homo sapiens
  misc_RNA (1)...(19): siRNA sense strand
aguuagagucuguguaaag

SEQ ID NO: 2254894 - RNA, 19 nt, Homo sapiens
  misc_RNA (1)...(19): siRNA sense strand
aaggauaacucuuuggaug

SEQ ID NO: 2254895 - RNA, 19 nt, Homo sapiens
  misc_RNA (1)...(19): siRNA sense strand
ccaagauugaccaagguga

SEQ ID NO: 2254896 - RNA, 19 nt, Homo sapiens
  misc_RNA (1)...(19): siRNA sense strand
gcgcaaagauccugaggug

SEQ ID NO: 2254897 - RNA, 19 nt, Homo sapiens
  misc_RNA (1)...(19): siRNA sense strand
gguaaguggaggugggauc

SEQ ID NO: 2254898 - RNA, 19 nt, Homo sapiens
  misc_RNA (1)...(19): siRNA sense strand
ggagaaaggaucggcgcaa

SEQ ID NO: 2254899 - RNA, 19 nt, Homo sapiens
  misc_RNA (1)...(19): siRNA sense strand
acuuagaaaccaaagacua

SEQ ID NO: 2254900 - RNA, 19 nt, Homo sapiens
  misc_RNA (1)...(19): siRNA sense strand
ugauggacuucaaggaaaa

SEQ ID NO: 2254901 - RNA, 19 nt, Homo sapiens
  misc_RNA (1)...(19): siRNA sense strand
uucggaagguccugggaaa

SEQ ID NO: 2254902 - RNA, 19 nt, Homo sapiens
  misc_RNA (1)...(19): siRNA sense strand
gagaaucggagaagggcga

SEQ ID NO: 2254903 - RNA, 19 nt, Homo sapiens
  misc_RNA (1)...(19): siRNA sense strand
ggaauaaagcggagcgagg

SEQ ID NO: 2254904 - RNA, 19 nt, Homo sapiens
  misc_RNA (1)...(19): siRNA sense strand
agacaguggcuauggagga

SEQ ID NO: 2254905 - RNA, 19 nt, Homo sapiens
  misc_RNA (1)...(19): siRNA sense strand
caauuaagcaagaguccga

SEQ ID NO: 2254906 - RNA, 19 nt, Homo sapiens
  misc_RNA (1)...(19): siRNA sense strand
augugaaagcacuaacaaa

SEQ ID NO: 2254907 - RNA, 19 nt, Homo sapiens
  misc_RNA (1)...(19): siRNA sense strand
gaacuuaccuugaagcaug

SEQ ID NO: 2254908 - RNA, 19 nt, Homo sapiens
  misc_RNA (1)...(19): siRNA sense strand
aggacagcaaggagaccua

SEQ ID NO: 2254909 - RNA, 19 nt, Homo sapiens
  misc_RNA (1)...(19): siRNA sense strand
gagaagugcugguauccca

SEQ ID NO: 2254910 - RNA, 19 nt, Homo sapiens
  misc_RNA (1)...(19): siRNA sense strand
ggagaaaugucgaaacagg

SEQ ID NO: 2254911 - RNA, 19 nt, Homo sapiens
  misc_RNA (1)...(19): siRNA sense strand
aguuaaaggggcaggagaa

SEQ ID NO: 2254912 - RNA, 19 nt, Homo sapiens
  misc_RNA (1)...(19): siRNA sense strand
cuugaaaagcagaagacaa

SEQ ID NO: 2254913 - RNA, 19 nt, Homo sapiens
  misc_RNA (1)...(19): siRNA sense strand
auuaaucuuuggagagaca

SEQ ID NO: 2254914 - RNA, 19 nt, Homo sapiens
  misc_RNA (1)...(19): siRNA sense strand
uugaaaagcagaagacaau

SEQ ID NO: 2254915 - RNA, 19 nt, Homo sapiens
  misc_RNA (1)...(19): siRNA sense strand
aggcaaugcaguauggcuu

SEQ ID NO: 2254916 - RNA, 19 nt, Homo sapiens
  misc_RNA (1)...(19): siRNA sense strand
cgagaaucaagaucagcaa

SEQ ID NO: 2254917 - RNA, 19 nt, Homo sapiens
  misc_RNA (1)...(19): siRNA sense strand
ggaccucauucaagagcca

SEQ ID NO: 2254918 - RNA, 19 nt, Homo sapiens
  misc_RNA (1)...(19): siRNA sense strand
ccuagauaucugugaaaau

SEQ ID NO: 2254919 - RNA, 19 nt, Homo sapiens
  misc_RNA (1)...(19): siRNA sense strand
cauaaauggggucgagaau

SEQ ID NO: 2254920 - RNA, 19 nt, Homo sapiens
  misc_RNA (1)...(19): siRNA sense strand
aaggauguaugaugccaaa

SEQ ID NO: 2254921 - RNA, 19 nt, Homo sapiens
  misc_RNA (1)...(19): siRNA sense strand
augaagcauuacaggauga

SEQ ID NO: 2254922 - RNA, 19 nt, Homo sapiens
  misc_RNA (1)...(19): siRNA sense strand
agaaucaagaucagcaaga

SEQ ID NO: 2254923 - RNA, 19 nt, Homo sapiens
  misc_RNA (1)...(19): siRNA sense strand
ugacagcagccgagaccau

SEQ ID NO: 2254924 - RNA, 19 nt, Homo sapiens
  misc_RNA (1)...(19): siRNA sense strand
gguuauauauuuggggaga

SEQ ID NO: 2254925 - RNA, 19 nt, Homo sapiens
  misc_RNA (1)...(19): siRNA sense strand
gggucgagaaucaagauca

SEQ ID NO: 2254926 - RNA, 19 nt, Homo sapiens
  misc_RNA (1)...(19): siRNA sense strand
augcaguaaagaaggcaau

SEQ ID NO: 2254927 - RNA, 19 nt, Homo sapiens
  misc_RNA (1)...(19): siRNA sense strand
guaaagaaggcaaugcagu

SEQ ID NO: 2254928 - RNA, 19 nt, Homo sapiens
  misc_RNA (1)...(19): siRNA sense strand
agcaagaacccgaaccgua

SEQ ID NO: 2254929 - RNA, 19 nt, Homo sapiens
  misc_RNA (1)...(19): siRNA sense strand
gaucagagaaaacaagcaa

SEQ ID NO: 2254930 - RNA, 19 nt, Homo sapiens
  misc_RNA (1)...(19): siRNA sense strand
aguuaaaggggcaggagaa

SEQ ID NO: 2254931 - RNA, 19 nt, Homo sapiens
  misc_RNA (1)...(19): siRNA sense strand
cuugaaaagcagaagacaa

SEQ ID NO: 2254932 - RNA, 19 nt, Homo sapiens
  misc_RNA (1)...(19): siRNA sense strand
auuaaucuuuggagagaca

SEQ ID NO: 2254933 - RNA, 19 nt, Homo sapiens
  misc_RNA (1)...(19): siRNA sense strand
uugaaaagcagaagacaau

SEQ ID NO: 2254934 - RNA, 19 nt, Homo sapiens
  misc_RNA (1)...(19): siRNA sense strand
aggcaaugcaguauggcuu

SEQ ID NO: 2254935 - RNA, 19 nt, Homo sapiens
  misc_RNA (1)...(19): siRNA sense strand
cgagaaucaagaucagcaa

SEQ ID NO: 2254936 - RNA, 19 nt, Homo sapiens
  misc_RNA (1)...(19): siRNA sense strand
ggaccucauucaagagcca

SEQ ID NO: 2254937 - RNA, 19 nt, Homo sapiens
  misc_RNA (1)...(19): siRNA sense strand
ccuagauaucugugaaaau

SEQ ID NO: 2254938 - RNA, 19 nt, Homo sapiens
  misc_RNA (1)...(19): siRNA sense strand
cauaaauggggucgagaau

SEQ ID NO: 2254939 - RNA, 19 nt, Homo sapiens
  misc_RNA (1)...(19): siRNA sense strand
aaggauguaugaugccaaa

SEQ ID NO: 2254940 - RNA, 19 nt, Homo sapiens
  misc_RNA (1)...(19): siRNA sense strand
augaagcauuacaggauga

SEQ ID NO: 2254941 - RNA, 19 nt, Homo sapiens
  misc_RNA (1)...(19): siRNA sense strand
agaaucaagaucagcaaga

SEQ ID NO: 2254942 - RNA, 19 nt, Homo sapiens
  misc_RNA (1)...(19): siRNA sense strand
ugacagcagccgagaccau

SEQ ID NO: 2254943 - RNA, 19 nt, Homo sapiens
  misc_RNA (1)...(19): siRNA sense strand
gguuauauauuuggggaga

SEQ ID NO: 2254944 - RNA, 19 nt, Homo sapiens
  misc_RNA (1)...(19): siRNA sense strand
gggucgagaaucaagauca

SEQ ID NO: 2254945 - RNA, 19 nt, Homo sapiens
  misc_RNA (1)...(19): siRNA sense strand
augcaguaaagaaggcaau

SEQ ID NO: 2254946 - RNA, 19 nt, Homo sapiens
  misc_RNA (1)...(19): siRNA sense strand
guaaagaaggcaaugcagu

SEQ ID NO: 2254947 - RNA, 19 nt, Homo sapiens
  misc_RNA (1)...(19): siRNA sense strand
agcaagaacccgaaccgua

SEQ ID NO: 2254948 - RNA, 19 nt, Homo sapiens
  misc_RNA (1)...(19): siRNA sense strand
gaucagagaaaacaagcaa

SEQ ID NO: 2254949 - RNA, 19 nt, Homo sapiens
  misc_RNA (1)...(19): siRNA sense strand
aguuaaaggggcaggagaa

SEQ ID NO: 2254950 - RNA, 19 nt, Homo sapiens
  misc_RNA (1)...(19): siRNA sense strand
cuugaaaagcagaagacaa

SEQ ID NO: 2254951 - RNA, 19 nt, Homo sapiens
  misc_RNA (1)...(19): siRNA sense strand
auuaaucuuuggagagaca

SEQ ID NO: 2254952 - RNA, 19 nt, Homo sapiens
  misc_RNA (1)...(19): siRNA sense strand
uugaaaagcagaagacaau

SEQ ID NO: 2254953 - RNA, 19 nt, Homo sapiens
  misc_RNA (1)...(19): siRNA sense strand
aggcaaugcaguauggcuu

SEQ ID NO: 2254954 - RNA, 19 nt, Homo sapiens
  misc_RNA (1)...(19): siRNA sense strand
cgagaaucaagaucagcaa

SEQ ID NO: 2254955 - RNA, 19 nt, Homo sapiens
  misc_RNA (1)...(19): siRNA sense strand
ggaccucauucaagagcca

SEQ ID NO: 2254956 - RNA, 19 nt, Homo sapiens
  misc_RNA (1)...(19): siRNA sense strand
ccuagauaucugugaaaau

SEQ ID NO: 2254957 - RNA, 19 nt, Homo sapiens
  misc_RNA (1)...(19): siRNA sense strand
cauaaauggggucgagaau

SEQ ID NO: 2254958 - RNA, 19 nt, Homo sapiens
  misc_RNA (1)...(19): siRNA sense strand
aaggauguaugaugccaaa

SEQ ID NO: 2254959 - RNA, 19 nt, Homo sapiens
  misc_RNA (1)...(19): siRNA sense strand
augaagcauuacaggauga

SEQ ID NO: 2254960 - RNA, 19 nt, Homo sapiens
  misc_RNA (1)...(19): siRNA sense strand
agaaucaagaucagcaaga

SEQ ID NO: 2254961 - RNA, 19 nt, Homo sapiens
  misc_RNA (1)...(19): siRNA sense strand
ugacagcagccgagaccau

SEQ ID NO: 2254962 - RNA, 19 nt, Homo sapiens
  misc_RNA (1)...(19): siRNA sense strand
gguuauauauuuggggaga

SEQ ID NO: 2254963 - RNA, 19 nt, Homo sapiens
  misc_RNA (1)...(19): siRNA sense strand
gggucgagaaucaagauca

SEQ ID NO: 2254964 - RNA, 19 nt, Homo sapiens
  misc_RNA (1)...(19): siRNA sense strand
augcaguaaagaaggcaau

SEQ ID NO: 2254965 - RNA, 19 nt, Homo sapiens
  misc_RNA (1)...(19): siRNA sense strand
guaaagaaggcaaugcagu

SEQ ID NO: 2254966 - RNA, 19 nt, Homo sapiens
  misc_RNA (1)...(19): siRNA sense strand
agcaagaacccgaaccgua

SEQ ID NO: 2254967 - RNA, 19 nt, Homo sapiens
  misc_RNA (1)...(19): siRNA sense strand
gaucagagaaaacaagcaa

SEQ ID NO: 2254968 - RNA, 19 nt, Homo sapiens
  misc_RNA (1)...(19): siRNA sense strand
cugcaaacuaaacaagaaa

SEQ ID NO: 2254969 - RNA, 19 nt, Homo sapiens
  misc_RNA (1)...(19): siRNA sense strand
acuuuaaggaauagaccaa

SEQ ID NO: 2254970 - RNA, 19 nt, Homo sapiens
  misc_RNA (1)...(19): siRNA sense strand
caguuugucaagaaagaaa

SEQ ID NO: 2254971 - RNA, 19 nt, Homo sapiens
  misc_RNA (1)...(19): siRNA sense strand
cuucauagauggcagcaca

SEQ ID NO: 2254972 - RNA, 19 nt, Homo sapiens
  misc_RNA (1)...(19): siRNA sense strand
ucgaugaggagcuggucua

SEQ ID NO: 2254973 - RNA, 19 nt, Homo sapiens
  misc_RNA (1)...(19): siRNA sense strand
gaagaagccuacagagcac

SEQ ID NO: 2254974 - RNA, 19 nt, Homo sapiens
  misc_RNA (1)...(19): siRNA sense strand
cagugaaggaaguauuaau

SEQ ID NO: 2254975 - RNA, 19 nt, Homo sapiens
  misc_RNA (1)...(19): siRNA sense strand
ccuaaaagcaaaauugaga

SEQ ID NO: 2254976 - RNA, 19 nt, Homo sapiens
  misc_RNA (1)...(19): siRNA sense strand
acgcuggcuucgagcacua

SEQ ID NO: 2254977 - RNA, 19 nt, Homo sapiens
  misc_RNA (1)...(19): siRNA sense strand
auaugaacauuaugagcga

SEQ ID NO: 2254978 - RNA, 19 nt, Homo sapiens
  misc_RNA (1)...(19): siRNA sense strand
ucgacuguuugcagggaau

SEQ ID NO: 2254979 - RNA, 19 nt, Homo sapiens
  misc_RNA (1)...(19): siRNA sense strand
gugacaacaucgugcgaag

SEQ ID NO: 2254980 - RNA, 19 nt, Homo sapiens
  misc_RNA (1)...(19): siRNA sense strand
gcauaaugugacugcaguu

SEQ ID NO: 2254981 - RNA, 19 nt, Homo sapiens
  misc_RNA (1)...(19): siRNA sense strand
gcagggaaucagaaaggga

SEQ ID NO: 2254982 - RNA, 19 nt, Homo sapiens
  misc_RNA (1)...(19): siRNA sense strand
agggauuacaacauggauu

SEQ ID NO: 2254983 - RNA, 19 nt, Homo sapiens
  misc_RNA (1)...(19): siRNA sense strand
ugaacuuggcaauggugua

SEQ ID NO: 2254984 - RNA, 19 nt, Homo sapiens
  misc_RNA (1)...(19): siRNA sense strand
gugccuaugcaguaaucua

SEQ ID NO: 2254985 - RNA, 19 nt, Homo sapiens
  misc_RNA (1)...(19): siRNA sense strand
ugauaugucuauuggugga

SEQ ID NO: 2254986 - RNA, 19 nt, Homo sapiens
  misc_RNA (1)...(19): siRNA sense strand
gaaaagagcaaaugcagca

SEQ ID NO: 2254987 - RNA, 19 nt, Homo sapiens
  misc_RNA (1)...(19): siRNA sense strand
cugcaaacuaaacaagaaa

SEQ ID NO: 2254988 - RNA, 19 nt, Homo sapiens
  misc_RNA (1)...(19): siRNA sense strand
acuuuaaggaauagaccaa

SEQ ID NO: 2254989 - RNA, 19 nt, Homo sapiens
  misc_RNA (1)...(19): siRNA sense strand
caguuugucaagaaagaaa

SEQ ID NO: 2254990 - RNA, 19 nt, Homo sapiens
  misc_RNA (1)...(19): siRNA sense strand
cuucauagauggcagcaca

SEQ ID NO: 2254991 - RNA, 19 nt, Homo sapiens
  misc_RNA (1)...(19): siRNA sense strand
ucgaugaggagcuggucua

SEQ ID NO: 2254992 - RNA, 19 nt, Homo sapiens
  misc_RNA (1)...(19): siRNA sense strand
gaagaagccuacagagcac

SEQ ID NO: 2254993 - RNA, 19 nt, Homo sapiens
  misc_RNA (1)...(19): siRNA sense strand
cagugaaggaaguauuaau

SEQ ID NO: 2254994 - RNA, 19 nt, Homo sapiens
  misc_RNA (1)...(19): siRNA sense strand
ccuaaaagcaaaauugaga

SEQ ID NO: 2254995 - RNA, 19 nt, Homo sapiens
  misc_RNA (1)...(19): siRNA sense strand
acgcuggcuucgagcacua

SEQ ID NO: 2254996 - RNA, 19 nt, Homo sapiens
  misc_RNA (1)...(19): siRNA sense strand
auaugaacauuaugagcga

SEQ ID NO: 2254997 - RNA, 19 nt, Homo sapiens
  misc_RNA (1)...(19): siRNA sense strand
ucgacuguuugcagggaau

SEQ ID NO: 2254998 - RNA, 19 nt, Homo sapiens
  misc_RNA (1)...(19): siRNA sense strand
gugacaacaucgugcgaag

SEQ ID NO: 2254999 - RNA, 19 nt, Homo sapiens
  misc_RNA (1)...(19): siRNA sense strand
gcauaaugugacugcaguu

SEQ ID NO: 2255000 - RNA, 19 nt, Homo sapiens
  misc_RNA (1)...(19): siRNA sense strand
gcagggaaucagaaaggga

SEQ ID NO: 2255001 - RNA, 19 nt, Homo sapiens
  misc_RNA (1)...(19): siRNA sense strand
agggauuacaacauggauu

SEQ ID NO: 2255002 - RNA, 19 nt, Homo sapiens
  misc_RNA (1)...(19): siRNA sense strand
ugaacuuggcaauggugua

SEQ ID NO: 2255003 - RNA, 19 nt, Homo sapiens
  misc_RNA (1)...(19): siRNA sense strand
gugccuaugcaguaaucua

SEQ ID NO: 2255004 - RNA, 19 nt, Homo sapiens
  misc_RNA (1)...(19): siRNA sense strand
ugauaugucuauuggugga

SEQ ID NO: 2255005 - RNA, 19 nt, Homo sapiens
  misc_RNA (1)...(19): siRNA sense strand
gaaaagagcaaaugcagca

SEQ ID NO: 2255006 - RNA, 19 nt, Homo sapiens
  misc_RNA (1)...(19): siRNA sense strand
cugcaaacuaaacaagaaa

SEQ ID NO: 2255007 - RNA, 19 nt, Homo sapiens
  misc_RNA (1)...(19): siRNA sense strand
acuuuaaggaauagaccaa

SEQ ID NO: 2255008 - RNA, 19 nt, Homo sapiens
  misc_RNA (1)...(19): siRNA sense strand
caguuugucaagaaagaaa

SEQ ID NO: 2255009 - RNA, 19 nt, Homo sapiens
  misc_RNA (1)...(19): siRNA sense strand
cguuguggguccaaggaga

SEQ ID NO: 2255010 - RNA, 19 nt, Homo sapiens
  misc_RNA (1)...(19): siRNA sense strand
cuucauagauggcagcaca

SEQ ID NO: 2255011 - RNA, 19 nt, Homo sapiens
  misc_RNA (1)...(19): siRNA sense strand
ucgaugaggagcuggucua

SEQ ID NO: 2255012 - RNA, 19 nt, Homo sapiens
  misc_RNA (1)...(19): siRNA sense strand
gaagaagccuacagagcac

SEQ ID NO: 2255013 - RNA, 19 nt, Homo sapiens
  misc_RNA (1)...(19): siRNA sense strand
cagugaaggaaguauuaau

SEQ ID NO: 2255014 - RNA, 19 nt, Homo sapiens
  misc_RNA (1)...(19): siRNA sense strand
ccuaaaagcaaaauugaga

SEQ ID NO: 2255015 - RNA, 19 nt, Homo sapiens
  misc_RNA (1)...(19): siRNA sense strand
acgcuggcuucgagcacua

SEQ ID NO: 2255016 - RNA, 19 nt, Homo sapiens
  misc_RNA (1)...(19): siRNA sense strand
auaugaacauuaugagcga

SEQ ID NO: 2255017 - RNA, 19 nt, Homo sapiens
  misc_RNA (1)...(19): siRNA sense strand
ucgacuguuugcagggaau

SEQ ID NO: 2255018 - RNA, 19 nt, Homo sapiens
  misc_RNA (1)...(19): siRNA sense strand
gugacaacaucgugcgaag

SEQ ID NO: 2255019 - RNA, 19 nt, Homo sapiens
  misc_RNA (1)...(19): siRNA sense strand
gcauaaugugacugcaguu

SEQ ID NO: 2255020 - RNA, 19 nt, Homo sapiens
  misc_RNA (1)...(19): siRNA sense strand
gcagggaaucagaaaggga

SEQ ID NO: 2255021 - RNA, 19 nt, Homo sapiens
  misc_RNA (1)...(19): siRNA sense strand
agggauuacaacauggauu

SEQ ID NO: 2255022 - RNA, 19 nt, Homo sapiens
  misc_RNA (1)...(19): siRNA sense strand
ugaacuuggcaauggugua

SEQ ID NO: 2255023 - RNA, 19 nt, Homo sapiens
  misc_RNA (1)...(19): siRNA sense strand
gugccuaugcaguaaucua

SEQ ID NO: 2255024 - RNA, 19 nt, Homo sapiens
  misc_RNA (1)...(19): siRNA sense strand
ugauaugucuauuggugga

SEQ ID NO: 2255025 - RNA, 19 nt, Homo sapiens
  misc_RNA (1)...(19): siRNA sense strand
gaaaagagcaaaugcagca

SEQ ID NO: 2255026 - RNA, 19 nt, Homo sapiens
  misc_RNA (1)...(19): siRNA sense strand
ccaccaaggaggagcguga

SEQ ID NO: 2255027 - RNA, 19 nt, Homo sapiens
  misc_RNA (1)...(19): siRNA sense strand
gcgaggugucggaggagaa

SEQ ID NO: 2255028 - RNA, 19 nt, Homo sapiens
  misc_RNA (1)...(19): siRNA sense strand
aggaggacacccagagaca

SEQ ID NO: 2255029 - RNA, 19 nt, Homo sapiens
  misc_RNA (1)...(19): siRNA sense strand
cccagagacaugagaccua

SEQ ID NO: 2255030 - RNA, 19 nt, Homo sapiens
  misc_RNA (1)...(19): siRNA sense strand
aggaggugguuguggggaa

SEQ ID NO: 2255031 - RNA, 19 nt, Homo sapiens
  misc_RNA (1)...(19): siRNA sense strand
ucucggaggcucaggucaa

SEQ ID NO: 2255032 - RNA, 19 nt, Homo sapiens
  misc_RNA (1)...(19): siRNA sense strand
agaaggugcggauggacaa

SEQ ID NO: 2255033 - RNA, 19 nt, Homo sapiens
  misc_RNA (1)...(19): siRNA sense strand
ccaacuugcucaugaccga

SEQ ID NO: 2255034 - RNA, 19 nt, Homo sapiens
  misc_RNA (1)...(19): siRNA sense strand
acaaggagaaggauggcau

SEQ ID NO: 2255035 - RNA, 19 nt, Homo sapiens
  misc_RNA (1)...(19): siRNA sense strand
aagaaggugcggauggaca

SEQ ID NO: 2255036 - RNA, 19 nt, Homo sapiens
  misc_RNA (1)...(19): siRNA sense strand
aggcucaggucaagugcau

SEQ ID NO: 2255037 - RNA, 19 nt, Homo sapiens
  misc_RNA (1)...(19): siRNA sense strand
cugaacugcuguugggaac

SEQ ID NO: 2255038 - RNA, 19 nt, Homo sapiens
  misc_RNA (1)...(19): siRNA sense strand
ucuuccuggugauggguua

SEQ ID NO: 2255039 - RNA, 19 nt, Homo sapiens
  misc_RNA (1)...(19): siRNA sense strand
aggaggugguuguggggaa

SEQ ID NO: 2255040 - RNA, 19 nt, Homo sapiens
  misc_RNA (1)...(19): siRNA sense strand
ucucggaggcucaggucaa

SEQ ID NO: 2255041 - RNA, 19 nt, Homo sapiens
  misc_RNA (1)...(19): siRNA sense strand
agaaggugcggauggacaa

SEQ ID NO: 2255042 - RNA, 19 nt, Homo sapiens
  misc_RNA (1)...(19): siRNA sense strand
ccaacuugcucaugaccga

SEQ ID NO: 2255043 - RNA, 19 nt, Homo sapiens
  misc_RNA (1)...(19): siRNA sense strand
acaaggagaaggauggcau

SEQ ID NO: 2255044 - RNA, 19 nt, Homo sapiens
  misc_RNA (1)...(19): siRNA sense strand
aagaaggugcggauggaca

SEQ ID NO: 2255045 - RNA, 19 nt, Homo sapiens
  misc_RNA (1)...(19): siRNA sense strand
aggcucaggucaagugcau

SEQ ID NO: 2255046 - RNA, 19 nt, Homo sapiens
  misc_RNA (1)...(19): siRNA sense strand
cugaacugcuguugggaac

SEQ ID NO: 2255047 - RNA, 19 nt, Homo sapiens
  misc_RNA (1)...(19): siRNA sense strand
ucuuccuggugauggguua

SEQ ID NO: 2255048 - RNA, 19 nt, Homo sapiens
  misc_RNA (1)...(19): siRNA sense strand
aggaggugguuguggggaa

SEQ ID NO: 2255049 - RNA, 19 nt, Homo sapiens
  misc_RNA (1)...(19): siRNA sense strand
ucucggaggcucaggucaa

SEQ ID NO: 2255050 - RNA, 19 nt, Homo sapiens
  misc_RNA (1)...(19): siRNA sense strand
ccaacuugcucaugaccga

SEQ ID NO: 2255051 - RNA, 19 nt, Homo sapiens
  misc_RNA (1)...(19): siRNA sense strand
acaaggagaaggauggcau

SEQ ID NO: 2255052 - RNA, 19 nt, Homo sapiens
  misc_RNA (1)...(19): siRNA sense strand
aggcucaggucaagugcau

SEQ ID NO: 2255053 - RNA, 19 nt, Homo sapiens
  misc_RNA (1)...(19): siRNA sense strand
ucuuccuggugauggguua

SEQ ID NO: 2255054 - RNA, 19 nt, Homo sapiens
  misc_RNA (1)...(19): siRNA sense strand
gagagaaagaggagaacca

SEQ ID NO: 2255055 - RNA, 19 nt, Homo sapiens
  misc_RNA (1)...(19): siRNA sense strand
cagaagauugagagaaaga

SEQ ID NO: 2255056 - RNA, 19 nt, Homo sapiens
  misc_RNA (1)...(19): siRNA sense strand
uggagaguccuuagggaaa

SEQ ID NO: 2255057 - RNA, 19 nt, Homo sapiens
  misc_RNA (1)...(19): siRNA sense strand
gcuaaagaauugaaugcca

SEQ ID NO: 2255058 - RNA, 19 nt, Homo sapiens
  misc_RNA (1)...(19): siRNA sense strand
agagaauacgugaaggcaa

SEQ ID NO: 2255059 - RNA, 19 nt, Homo sapiens
  misc_RNA (1)...(19): siRNA sense strand
auugagagaaagaggagaa

SEQ ID NO: 2255060 - RNA, 19 nt, Homo sapiens
  misc_RNA (1)...(19): siRNA sense strand
cagaaguuaacaagggauu

SEQ ID NO: 2255061 - RNA, 19 nt, Homo sapiens
  misc_RNA (1)...(19): siRNA sense strand
cagacuauuuggagagacu

SEQ ID NO: 2255062 - RNA, 19 nt, Homo sapiens
  misc_RNA (1)...(19): siRNA sense strand
ccacaauugaagaguuaga

SEQ ID NO: 2255063 - RNA, 19 nt, Homo sapiens
  misc_RNA (1)...(19): siRNA sense strand
uuaacaagggauugaggaa

SEQ ID NO: 2255064 - RNA, 19 nt, Homo sapiens
  misc_RNA (1)...(19): siRNA sense strand
gaucauaaagacauggaca

SEQ ID NO: 2255065 - RNA, 19 nt, Homo sapiens
  misc_RNA (1)...(19): siRNA sense strand
gagaaagaggagaaccaau

SEQ ID NO: 2255066 - RNA, 19 nt, Homo sapiens
  misc_RNA (1)...(19): siRNA sense strand
agggaaaggcgaugaucau

SEQ ID NO: 2255067 - RNA, 19 nt, Homo sapiens
  misc_RNA (1)...(19): siRNA sense strand
caaucagacuauuuggaga

SEQ ID NO: 2255068 - RNA, 19 nt, Homo sapiens
  misc_RNA (1)...(19): siRNA sense strand
aaucagagauccuucggaa

SEQ ID NO: 2255069 - RNA, 19 nt, Homo sapiens
  misc_RNA (1)...(19): siRNA sense strand
aguuagaggcgcuuggaga

SEQ ID NO: 2255070 - RNA, 19 nt, Homo sapiens
  misc_RNA (1)...(19): siRNA sense strand
cagggauugaagagguuaa

SEQ ID NO: 2255071 - RNA, 19 nt, Homo sapiens
  misc_RNA (1)...(19): siRNA sense strand
aauucauguugcagagaga

SEQ ID NO: 2255072 - RNA, 19 nt, Homo sapiens
  misc_RNA (1)...(19): siRNA sense strand
gcggaaauauauucaggga

SEQ ID NO: 2255073 - RNA, 19 nt, Homo sapiens
  misc_RNA (1)...(19): siRNA sense strand
agaggaagacacacagaau

SEQ ID NO: 2255074 - RNA, 19 nt, Homo sapiens
  misc_RNA (1)...(19): siRNA sense strand
gacgaaacucagcggaaau

SEQ ID NO: 2255075 - RNA, 19 nt, Homo sapiens
  misc_RNA (1)...(19): siRNA sense strand
auugaaugccagagaagau

SEQ ID NO: 2255076 - RNA, 19 nt, Homo sapiens
  misc_RNA (1)...(19): siRNA sense strand
uugaagagguuaaugacca

SEQ ID NO: 2255077 - RNA, 19 nt, Homo sapiens
  misc_RNA (1)...(19): siRNA sense strand
ggucaucagaagauugaga

SEQ ID NO: 2255078 - RNA, 19 nt, Homo sapiens
  misc_RNA (1)...(19): siRNA sense strand
gcguagugagcucgccaaa

SEQ ID NO: 2255079 - RNA, 19 nt, Homo sapiens
  misc_RNA (1)...(19): siRNA sense strand
cuucuuggcguuugggcua

SEQ ID NO: 2255080 - RNA, 19 nt, Homo sapiens
  misc_RNA (1)...(19): siRNA sense strand
uugaacuggcagaggaaaa

SEQ ID NO: 2255081 - RNA, 19 nt, Homo sapiens
  misc_RNA (1)...(19): siRNA sense strand
ugaagagguuaaugaccau

SEQ ID NO: 2255082 - RNA, 19 nt, Homo sapiens
  misc_RNA (1)...(19): siRNA sense strand
acuugaacuggcagaggaa

SEQ ID NO: 2255083 - RNA, 19 nt, Homo sapiens
  misc_RNA (1)...(19): siRNA sense strand
caucagaagauugagagaa

SEQ ID NO: 2255084 - RNA, 19 nt, Homo sapiens
  misc_RNA (1)...(19): siRNA sense strand
cggaaauauauucagggau

SEQ ID NO: 2255085 - RNA, 19 nt, Homo sapiens
  misc_RNA (1)...(19): siRNA sense strand
uggauaagauugaucagca

SEQ ID NO: 2255086 - RNA, 19 nt, Homo sapiens
  misc_RNA (1)...(19): siRNA sense strand
cuggagaggaagacacaca

SEQ ID NO: 2255087 - RNA, 19 nt, Homo sapiens
  misc_RNA (1)...(19): siRNA sense strand
uuuagaaagcuacggaaaa

SEQ ID NO: 2255088 - RNA, 19 nt, Homo sapiens
  misc_RNA (1)...(19): siRNA sense strand
aggagaaccaaucagacua

SEQ ID NO: 2255089 - RNA, 19 nt, Homo sapiens
  misc_RNA (1)...(19): siRNA sense strand
aggcaagaggucaucagaa

SEQ ID NO: 2255090 - RNA, 19 nt, Homo sapiens
  misc_RNA (1)...(19): siRNA sense strand
aggaaugauuugaaagcag

SEQ ID NO: 2255091 - RNA, 19 nt, Homo sapiens
  misc_RNA (1)...(19): siRNA sense strand
ggauaagauugaucagcag

SEQ ID NO: 2255092 - RNA, 19 nt, Homo sapiens
  misc_RNA (1)...(19): siRNA sense strand
uuggagaguccuuagggaa

SEQ ID NO: 2255093 - RNA, 19 nt, Homo sapiens
  misc_RNA (1)...(19): siRNA sense strand
augacgaaacucagcggaa

SEQ ID NO: 2255094 - RNA, 19 nt, Homo sapiens
  misc_RNA (1)...(19): siRNA sense strand
gaauugaaugccagagaag

SEQ ID NO: 2255095 - RNA, 19 nt, Homo sapiens
  misc_RNA (1)...(19): siRNA sense strand
cagccuuggauaagauuga

SEQ ID NO: 2255096 - RNA, 19 nt, Homo sapiens
  misc_RNA (1)...(19): siRNA sense strand
gaggaggaccagaaaccau

SEQ ID NO: 2255097 - RNA, 19 nt, Homo sapiens
  misc_RNA (1)...(19): siRNA sense strand
gggcuaaagaauugaaugc

SEQ ID NO: 2255098 - RNA, 19 nt, Homo sapiens
  misc_RNA (1)...(19): siRNA sense strand
aagaauugaaugccagaga

SEQ ID NO: 2255099 - RNA, 19 nt, Homo sapiens
  misc_RNA (1)...(19): siRNA sense strand
gaagagaagcugaaggaga

SEQ ID NO: 2255100 - RNA, 19 nt, Homo sapiens
  misc_RNA (1)...(19): siRNA sense strand
ugguaaagcagguggagca

SEQ ID NO: 2255101 - RNA, 19 nt, Homo sapiens
  misc_RNA (1)...(19): siRNA sense strand
ugguaguggugcugugcaa

SEQ ID NO: 2255102 - RNA, 19 nt, Homo sapiens
  misc_RNA (1)...(19): siRNA sense strand
gaggcauugaucagagaaa

SEQ ID NO: 2255103 - RNA, 19 nt, Homo sapiens
  misc_RNA (1)...(19): siRNA sense strand
acuaugagaaugugaucaa

SEQ ID NO: 2255104 - RNA, 19 nt, Homo sapiens
  misc_RNA (1)...(19): siRNA sense strand
ucgagaaguugcaggcuga

SEQ ID NO: 2255105 - RNA, 19 nt, Homo sapiens
  misc_RNA (1)...(19): siRNA sense strand
aggauuaacaggcagcaaa

SEQ ID NO: 2255106 - RNA, 19 nt, Homo sapiens
  misc_RNA (1)...(19): siRNA sense strand
ggcauugaucagagaaaga

SEQ ID NO: 2255107 - RNA, 19 nt, Homo sapiens
  misc_RNA (1)...(19): siRNA sense strand
ggauuaacaggcagcaaaa

SEQ ID NO: 2255108 - RNA, 19 nt, Homo sapiens
  misc_RNA (1)...(19): siRNA sense strand
ugguacaguucgugcccaa

SEQ ID NO: 2255109 - RNA, 19 nt, Homo sapiens
  misc_RNA (1)...(19): siRNA sense strand
acguguuugugaagggcua

SEQ ID NO: 2255110 - RNA, 19 nt, Homo sapiens
  misc_RNA (1)...(19): siRNA sense strand
agcucaagcccaagaagaa

SEQ ID NO: 2255111 - RNA, 19 nt, Homo sapiens
  misc_RNA (1)...(19): siRNA sense strand
ggauauccguguggggaaa

SEQ ID NO: 2255112 - RNA, 19 nt, Homo sapiens
  misc_RNA (1)...(19): siRNA sense strand
ucaccuuugcagagaagua

SEQ ID NO: 2255113 - RNA, 19 nt, Homo sapiens
  misc_RNA (1)...(19): siRNA sense strand
agccaggaaauguggagaa

SEQ ID NO: 2255114 - RNA, 19 nt, Homo sapiens
  misc_RNA (1)...(19): siRNA sense strand
uugaagucgcacugaacaa

SEQ ID NO: 2255115 - RNA, 19 nt, Homo sapiens
  misc_RNA (1)...(19): siRNA sense strand
aaaucaucacuguggagaa

SEQ ID NO: 2255116 - RNA, 19 nt, Homo sapiens
  misc_RNA (1)...(19): siRNA sense strand
ccaagaauucagaaccaga

SEQ ID NO: 2255117 - RNA, 19 nt, Homo sapiens
  misc_RNA (1)...(19): siRNA sense strand
auucagaaccagaggaggu

SEQ ID NO: 2255118 - RNA, 19 nt, Homo sapiens
  misc_RNA (1)...(19): siRNA sense strand
ugccaagaauucagaacca

SEQ ID NO: 2255119 - RNA, 19 nt, Homo sapiens
  misc_RNA (1)...(19): siRNA sense strand
gcacaguggaagcaaacca

SEQ ID NO: 2255120 - RNA, 19 nt, Homo sapiens
  misc_RNA (1)...(19): siRNA sense strand
ucuuaaaggcaggguguga

SEQ ID NO: 2255121 - RNA, 19 nt, Homo sapiens
  misc_RNA (1)...(19): siRNA sense strand
ccaaggaggaacugcagga

SEQ ID NO: 2255122 - RNA, 19 nt, Homo sapiens
  misc_RNA (1)...(19): siRNA sense strand
cuggagcugaggugguaaa

SEQ ID NO: 2255123 - RNA, 19 nt, Homo sapiens
  misc_RNA (1)...(19): siRNA sense strand
cuuuggaugaagaguauuu

SEQ ID NO: 2255124 - RNA, 19 nt, Homo sapiens
  misc_RNA (1)...(19): siRNA sense strand
cccucaaagcagaagccaa

SEQ ID NO: 2255125 - RNA, 19 nt, Homo sapiens
  misc_RNA (1)...(19): siRNA sense strand
cuuucaaggagcugugcaa

SEQ ID NO: 2255126 - RNA, 19 nt, Homo sapiens
  misc_RNA (1)...(19): siRNA sense strand
cagagaaagcgauggugga

SEQ ID NO: 2255127 - RNA, 19 nt, Homo sapiens
  misc_RNA (1)...(19): siRNA sense strand
aaguauuggucagggaauu

SEQ ID NO: 2255128 - RNA, 19 nt, Homo sapiens
  misc_RNA (1)...(19): siRNA sense strand
acuaaaaccagcaucaaaa

SEQ ID NO: 2255129 - RNA, 19 nt, Homo sapiens
  misc_RNA (1)...(19): siRNA sense strand
uggagagucaagauacaaa

SEQ ID NO: 2255130 - RNA, 19 nt, Homo sapiens
  misc_RNA (1)...(19): siRNA sense strand
caaguauuggucagggaau

SEQ ID NO: 2255131 - RNA, 19 nt, Homo sapiens
  misc_RNA (1)...(19): siRNA sense strand
ggagaauuaaacaggccuu

SEQ ID NO: 2255132 - RNA, 19 nt, Homo sapiens
  misc_RNA (1)...(19): siRNA sense strand
ucuggagagucaagauaca

SEQ ID NO: 2255133 - RNA, 19 nt, Homo sapiens
  misc_RNA (1)...(19): siRNA sense strand
caacuaaugguguacguca

SEQ ID NO: 2255134 - RNA, 19 nt, Homo sapiens
  misc_RNA (1)...(19): siRNA sense strand
cuuucaaggagcugugcaa

SEQ ID NO: 2255135 - RNA, 19 nt, Homo sapiens
  misc_RNA (1)...(19): siRNA sense strand
cagagaaagcgauggugga

SEQ ID NO: 2255136 - RNA, 19 nt, Homo sapiens
  misc_RNA (1)...(19): siRNA sense strand
aaguauuggucagggaauu

SEQ ID NO: 2255137 - RNA, 19 nt, Homo sapiens
  misc_RNA (1)...(19): siRNA sense strand
acuaaaaccagcaucaaaa

SEQ ID NO: 2255138 - RNA, 19 nt, Homo sapiens
  misc_RNA (1)...(19): siRNA sense strand
uggagagucaagauacaaa

SEQ ID NO: 2255139 - RNA, 19 nt, Homo sapiens
  misc_RNA (1)...(19): siRNA sense strand
caaguauuggucagggaau

SEQ ID NO: 2255140 - RNA, 19 nt, Homo sapiens
  misc_RNA (1)...(19): siRNA sense strand
ggagaauuaaacaggccuu

SEQ ID NO: 2255141 - RNA, 19 nt, Homo sapiens
  misc_RNA (1)...(19): siRNA sense strand
ucuggagagucaagauaca

SEQ ID NO: 2255142 - RNA, 19 nt, Homo sapiens
  misc_RNA (1)...(19): siRNA sense strand
caacuaaugguguacguca

SEQ ID NO: 2255143 - RNA, 19 nt, Homo sapiens
  misc_RNA (1)...(19): siRNA sense strand
augucaggguagagaggaa

SEQ ID NO: 2255144 - RNA, 19 nt, Homo sapiens
  misc_RNA (1)...(19): siRNA sense strand
gaaaggacuuccacggaca

SEQ ID NO: 2255145 - RNA, 19 nt, Homo sapiens
  misc_RNA (1)...(19): siRNA sense strand
agcagaacuucgugugcaa

SEQ ID NO: 2255146 - RNA, 19 nt, Homo sapiens
  misc_RNA (1)...(19): siRNA sense strand
gaacaacuaccuucgggaa

SEQ ID NO: 2255147 - RNA, 19 nt, Homo sapiens
  misc_RNA (1)...(19): siRNA sense strand
ugcugaaggauguggaaaa

SEQ ID NO: 2255148 - RNA, 19 nt, Homo sapiens
  misc_RNA (1)...(19): siRNA sense strand
uugacgagcuccagcgcau

SEQ ID NO: 2255149 - RNA, 19 nt, Homo sapiens
  misc_RNA (1)...(19): siRNA sense strand
ucgcaguguuccuggucau

SEQ ID NO: 2255150 - RNA, 19 nt, Homo sapiens
  misc_RNA (1)...(19): siRNA sense strand
ggcauagacuugaagguac

SEQ ID NO: 2255151 - RNA, 19 nt, Homo sapiens
  misc_RNA (1)...(19): siRNA sense strand
augucaggguagagaggaa

SEQ ID NO: 2255152 - RNA, 19 nt, Homo sapiens
  misc_RNA (1)...(19): siRNA sense strand
gaaaggacuuccacggaca

SEQ ID NO: 2255153 - RNA, 19 nt, Homo sapiens
  misc_RNA (1)...(19): siRNA sense strand
agcagaacuucgugugcaa

SEQ ID NO: 2255154 - RNA, 19 nt, Homo sapiens
  misc_RNA (1)...(19): siRNA sense strand
gaacaacuaccuucgggaa

SEQ ID NO: 2255155 - RNA, 19 nt, Homo sapiens
  misc_RNA (1)...(19): siRNA sense strand
ugcugaaggauguggaaaa

SEQ ID NO: 2255156 - RNA, 19 nt, Homo sapiens
  misc_RNA (1)...(19): siRNA sense strand
uugacgagcuccagcgcau

SEQ ID NO: 2255157 - RNA, 19 nt, Homo sapiens
  misc_RNA (1)...(19): siRNA sense strand
ucgcaguguuccuggucau

SEQ ID NO: 2255158 - RNA, 19 nt, Homo sapiens
  misc_RNA (1)...(19): siRNA sense strand
ggcauagacuugaagguac

SEQ ID NO: 2255159 - RNA, 19 nt, Homo sapiens
  misc_RNA (1)...(19): siRNA sense strand
aggaggagcuggaacggaa

SEQ ID NO: 2255160 - RNA, 19 nt, Homo sapiens
  misc_RNA (1)...(19): siRNA sense strand
gagaaggugugcaggggaa

SEQ ID NO: 2255161 - RNA, 19 nt, Homo sapiens
  misc_RNA (1)...(19): siRNA sense strand
accacaaccacuauggaua

SEQ ID NO: 2255162 - RNA, 19 nt, Homo sapiens
  misc_RNA (1)...(19): siRNA sense strand
gggauguacugcauggugu

SEQ ID NO: 2255163 - RNA, 19 nt, Homo sapiens
  misc_RNA (1)...(19): siRNA sense strand
aggaggagcuggaacggaa

SEQ ID NO: 2255164 - RNA, 19 nt, Homo sapiens
  misc_RNA (1)...(19): siRNA sense strand
gagaaggugugcaggggaa

SEQ ID NO: 2255165 - RNA, 19 nt, Homo sapiens
  misc_RNA (1)...(19): siRNA sense strand
accacaaccacuauggaua

SEQ ID NO: 2255166 - RNA, 19 nt, Homo sapiens
  misc_RNA (1)...(19): siRNA sense strand
gggauguacugcauggugu

SEQ ID NO: 2255167 - RNA, 19 nt, Homo sapiens
  misc_RNA (1)...(19): siRNA sense strand
aggaggagcuggaacggaa

SEQ ID NO: 2255168 - RNA, 19 nt, Homo sapiens
  misc_RNA (1)...(19): siRNA sense strand
gagaaggugugcaggggaa

SEQ ID NO: 2255169 - RNA, 19 nt, Homo sapiens
  misc_RNA (1)...(19): siRNA sense strand
accacaaccacuauggaua

SEQ ID NO: 2255170 - RNA, 19 nt, Homo sapiens
  misc_RNA (1)...(19): siRNA sense strand
gggauguacugcauggugu

SEQ ID NO: 2255171 - RNA, 19 nt, Homo sapiens
  misc_RNA (1)...(19): siRNA sense strand
aaauaugauucgagagcaa

SEQ ID NO: 2255172 - RNA, 19 nt, Homo sapiens
  misc_RNA (1)...(19): siRNA sense strand
guuugaaguuggagaugaa

SEQ ID NO: 2255173 - RNA, 19 nt, Homo sapiens
  misc_RNA (1)...(19): siRNA sense strand
gcgagaagagauagaagaa

SEQ ID NO: 2255174 - RNA, 19 nt, Homo sapiens
  misc_RNA (1)...(19): siRNA sense strand
gaggauuggcaaagagaau

SEQ ID NO: 2255175 - RNA, 19 nt, Homo sapiens
  misc_RNA (1)...(19): siRNA sense strand
acaugaaagagaagcuaaa

SEQ ID NO: 2255176 - RNA, 19 nt, Homo sapiens
  misc_RNA (1)...(19): siRNA sense strand
cauuauuacaagagaccaa

SEQ ID NO: 2255177 - RNA, 19 nt, Homo sapiens
  misc_RNA (1)...(19): siRNA sense strand
acacagaagccgagacgau

SEQ ID NO: 2255178 - RNA, 19 nt, Homo sapiens
  misc_RNA (1)...(19): siRNA sense strand
acuugaaucuggagaccaa

SEQ ID NO: 2255179 - RNA, 19 nt, Homo sapiens
  misc_RNA (1)...(19): siRNA sense strand
aagaagaagaaguagaaga

SEQ ID NO: 2255180 - RNA, 19 nt, Homo sapiens
  misc_RNA (1)...(19): siRNA sense strand
caguugaagaagaggauga

SEQ ID NO: 2255181 - RNA, 19 nt, Homo sapiens
  misc_RNA (1)...(19): siRNA sense strand
agcuagagauucugaacaa

SEQ ID NO: 2255182 - RNA, 19 nt, Homo sapiens
  misc_RNA (1)...(19): siRNA sense strand
ugagaagaggauuggcaaa

SEQ ID NO: 2255183 - RNA, 19 nt, Homo sapiens
  misc_RNA (1)...(19): siRNA sense strand
cauuagaacagcaugacaa

SEQ ID NO: 2255184 - RNA, 19 nt, Homo sapiens
  misc_RNA (1)...(19): siRNA sense strand
aggaagacugucagcauua

SEQ ID NO: 2255185 - RNA, 19 nt, Homo sapiens
  misc_RNA (1)...(19): siRNA sense strand
guauacaagcuauggaaca

SEQ ID NO: 2255186 - RNA, 19 nt, Homo sapiens
  misc_RNA (1)...(19): siRNA sense strand
cuaaugaagaagaagaaga

SEQ ID NO: 2255187 - RNA, 19 nt, Homo sapiens
  misc_RNA (1)...(19): siRNA sense strand
aagaagaagaagaaguaga

SEQ ID NO: 2255188 - RNA, 19 nt, Homo sapiens
  misc_RNA (1)...(19): siRNA sense strand
ucauuaagcagcaggaaaa

SEQ ID NO: 2255189 - RNA, 19 nt, Homo sapiens
  misc_RNA (1)...(19): siRNA sense strand
caguugagguacaaggaga

SEQ ID NO: 2255190 - RNA, 19 nt, Homo sapiens
  misc_RNA (1)...(19): siRNA sense strand
agguauaguaguugaagau

SEQ ID NO: 2255191 - RNA, 19 nt, Homo sapiens
  misc_RNA (1)...(19): siRNA sense strand
accaagaggaugaggauga

SEQ ID NO: 2255192 - RNA, 19 nt, Homo sapiens
  misc_RNA (1)...(19): siRNA sense strand
aggacaaauugcagaaaau

SEQ ID NO: 2255193 - RNA, 19 nt, Homo sapiens
  misc_RNA (1)...(19): siRNA sense strand
agaccaaagaguuaaagaa

SEQ ID NO: 2255194 - RNA, 19 nt, Homo sapiens
  misc_RNA (1)...(19): siRNA sense strand
cauagagaaacuaggauuu

SEQ ID NO: 2255195 - RNA, 19 nt, Homo sapiens
  misc_RNA (1)...(19): siRNA sense strand
gcauucagccagaagaaau

SEQ ID NO: 2255196 - RNA, 19 nt, Homo sapiens
  misc_RNA (1)...(19): siRNA sense strand
aaggagagaccgagacuau

SEQ ID NO: 2255197 - RNA, 19 nt, Homo sapiens
  misc_RNA (1)...(19): siRNA sense strand
acguaaugauggcgucuua

SEQ ID NO: 2255198 - RNA, 19 nt, Homo sapiens
  misc_RNA (1)...(19): siRNA sense strand
agaaauaccgcuuggaagu

SEQ ID NO: 2255199 - RNA, 19 nt, Homo sapiens
  misc_RNA (1)...(19): siRNA sense strand
uuauaaguccagugaagaa

SEQ ID NO: 2255200 - RNA, 19 nt, Homo sapiens
  misc_RNA (1)...(19): siRNA sense strand
cuggagaccaagaggauga

SEQ ID NO: 2255201 - RNA, 19 nt, Homo sapiens
  misc_RNA (1)...(19): siRNA sense strand
ggaugaugaaagugaagau

SEQ ID NO: 2255202 - RNA, 19 nt, Homo sapiens
  misc_RNA (1)...(19): siRNA sense strand
ggauuggcaaagagaauuu

SEQ ID NO: 2255203 - RNA, 19 nt, Homo sapiens
  misc_RNA (1)...(19): siRNA sense strand
uagauugcgagaagagaua

SEQ ID NO: 2255204 - RNA, 19 nt, Homo sapiens
  misc_RNA (1)...(19): siRNA sense strand
aggaaagaacugccauuaa

SEQ ID NO: 2255205 - RNA, 19 nt, Homo sapiens
  misc_RNA (1)...(19): siRNA sense strand
agaaauugguagauugcga

SEQ ID NO: 2255206 - RNA, 19 nt, Homo sapiens
  misc_RNA (1)...(19): siRNA sense strand
caaaaucaguugagguaca

SEQ ID NO: 2255207 - RNA, 19 nt, Homo sapiens
  misc_RNA (1)...(19): siRNA sense strand
ggacauuauuucagaggag

SEQ ID NO: 2255208 - RNA, 19 nt, Homo sapiens
  misc_RNA (1)...(19): siRNA sense strand
cagggaaguuauacguaau

SEQ ID NO: 2255209 - RNA, 19 nt, Homo sapiens
  misc_RNA (1)...(19): siRNA sense strand
agcaauaguuucagcuaga

SEQ ID NO: 2255210 - RNA, 19 nt, Homo sapiens
  misc_RNA (1)...(19): siRNA sense strand
cugcacagaaagugaccaa

SEQ ID NO: 2255211 - RNA, 19 nt, Homo sapiens
  misc_RNA (1)...(19): siRNA sense strand
ucauagagaaacuaggauu

SEQ ID NO: 2255212 - RNA, 19 nt, Homo sapiens
  misc_RNA (1)...(19): siRNA sense strand
gaguuguauuccagagcau

SEQ ID NO: 2255213 - RNA, 19 nt, Homo sapiens
  misc_RNA (1)...(19): siRNA sense strand
guccagugaagaagauaaa

SEQ ID NO: 2255214 - RNA, 19 nt, Homo sapiens
  misc_RNA (1)...(19): siRNA sense strand
gagguauaguaguugaaga

SEQ ID NO: 2255215 - RNA, 19 nt, Homo sapiens
  misc_RNA (1)...(19): siRNA sense strand
agcacaaagaccaguauaa

SEQ ID NO: 2255216 - RNA, 19 nt, Homo sapiens
  misc_RNA (1)...(19): siRNA sense strand
agaacuugaagguguuaua

SEQ ID NO: 2255217 - RNA, 19 nt, Homo sapiens
  misc_RNA (1)...(19): siRNA sense strand
aaacauuagaacagcauga

SEQ ID NO: 2255218 - RNA, 19 nt, Homo sapiens
  misc_RNA (1)...(19): siRNA sense strand
ggguauacaagcuauggaa

SEQ ID NO: 2255219 - RNA, 19 nt, Homo sapiens
  misc_RNA (1)...(19): siRNA sense strand
guacaaggagagaccgaga

SEQ ID NO: 2255220 - RNA, 19 nt, Homo sapiens
  misc_RNA (1)...(19): siRNA sense strand
uuacaaacugagaaagaca

SEQ ID NO: 2255221 - RNA, 19 nt, Homo sapiens
  misc_RNA (1)...(19): siRNA sense strand
acaaacugagaaagacaaa

SEQ ID NO: 2255222 - RNA, 19 nt, Homo sapiens
  misc_RNA (1)...(19): siRNA sense strand
caccaaaacuacugaugua

SEQ ID NO: 2255223 - RNA, 19 nt, Homo sapiens
  misc_RNA (1)...(19): siRNA sense strand
aagaagaggaugaacuuga

SEQ ID NO: 2255224 - RNA, 19 nt, Homo sapiens
  misc_RNA (1)...(19): siRNA sense strand
augaagaagaagaagaagu

SEQ ID NO: 2255225 - RNA, 19 nt, Homo sapiens
  misc_RNA (1)...(19): siRNA sense strand
aagaagagcaguuggucca

SEQ ID NO: 2255226 - RNA, 19 nt, Homo sapiens
  misc_RNA (1)...(19): siRNA sense strand
uaaaagaacuugaaggugu

SEQ ID NO: 2255227 - RNA, 19 nt, Homo sapiens
  misc_RNA (1)...(19): siRNA sense strand
ugaagaagaggaugaacuu

SEQ ID NO: 2255228 - RNA, 19 nt, Homo sapiens
  misc_RNA (1)...(19): siRNA sense strand
caaacagaucguucagauu

SEQ ID NO: 2255229 - RNA, 19 nt, Homo sapiens
  misc_RNA (1)...(19): siRNA sense strand
gcaacagguaauucaguuu

SEQ ID NO: 2255230 - RNA, 19 nt, Homo sapiens
  misc_RNA (1)...(19): siRNA sense strand
agaaaaugccacccagaaa

SEQ ID NO: 2255231 - RNA, 19 nt, Homo sapiens
  misc_RNA (1)...(19): siRNA sense strand
aguccagugaagaagauaa

SEQ ID NO: 2255232 - RNA, 19 nt, Homo sapiens
  misc_RNA (1)...(19): siRNA sense strand
ucgagagacuacuggacau

SEQ ID NO: 2255233 - RNA, 19 nt, Homo sapiens
  misc_RNA (1)...(19): siRNA sense strand
cugacugagaccauaaaua

SEQ ID NO: 2255234 - RNA, 19 nt, Homo sapiens
  misc_RNA (1)...(19): siRNA sense strand
ccauugaugcaacagguaa

SEQ ID NO: 2255235 - RNA, 19 nt, Homo sapiens
  misc_RNA (1)...(19): siRNA sense strand
cauugaugcaacagguaau

SEQ ID NO: 2255236 - RNA, 19 nt, Homo sapiens
  misc_RNA (1)...(19): siRNA sense strand
gcagaaauacccagggauc

SEQ ID NO: 2255237 - RNA, 19 nt, Homo sapiens
  misc_RNA (1)...(19): siRNA sense strand
ugaaaugcguugaggccuu

SEQ ID NO: 2255238 - RNA, 19 nt, Homo sapiens
  misc_RNA (1)...(19): siRNA sense strand
uugccguggcccugggaua

SEQ ID NO: 2255239 - RNA, 19 nt, Homo sapiens
  misc_RNA (1)...(19): siRNA sense strand
cggaaagugcaacagguga

SEQ ID NO: 2255240 - RNA, 19 nt, Homo sapiens
  misc_RNA (1)...(19): siRNA sense strand
gcagaagaccucauccaga

SEQ ID NO: 2255241 - RNA, 19 nt, Homo sapiens
  misc_RNA (1)...(19): siRNA sense strand
gggauaccggaaagugcaa

SEQ ID NO: 2255242 - RNA, 19 nt, Homo sapiens
  misc_RNA (1)...(19): siRNA sense strand
ugaaaugcguugaggccuu

SEQ ID NO: 2255243 - RNA, 19 nt, Homo sapiens
  misc_RNA (1)...(19): siRNA sense strand
uugccguggcccugggaua

SEQ ID NO: 2255244 - RNA, 19 nt, Homo sapiens
  misc_RNA (1)...(19): siRNA sense strand
cggaaagugcaacagguga

SEQ ID NO: 2255245 - RNA, 19 nt, Homo sapiens
  misc_RNA (1)...(19): siRNA sense strand
gcagaagaccucauccaga

SEQ ID NO: 2255246 - RNA, 19 nt, Homo sapiens
  misc_RNA (1)...(19): siRNA sense strand
gggauaccggaaagugcaa

SEQ ID NO: 2255247 - RNA, 19 nt, Homo sapiens
  misc_RNA (1)...(19): siRNA sense strand
aggaggaguuggaggcaga

SEQ ID NO: 2255248 - RNA, 19 nt, Homo sapiens
  misc_RNA (1)...(19): siRNA sense strand
ccuauaaggcccaggggaa

SEQ ID NO: 2255249 - RNA, 19 nt, Homo sapiens
  misc_RNA (1)...(19): siRNA sense strand
ccaacaaggcgcuggagca

SEQ ID NO: 2255250 - RNA, 19 nt, Homo sapiens
  misc_RNA (1)...(19): siRNA sense strand
ccucauuggugcagcccau

SEQ ID NO: 2255251 - RNA, 19 nt, Homo sapiens
  misc_RNA (1)...(19): siRNA sense strand
gggagaagcggaagagggu

SEQ ID NO: 2255252 - RNA, 19 nt, Homo sapiens
  misc_RNA (1)...(19): siRNA sense strand
cagcagagguuguguggag

SEQ ID NO: 2255253 - RNA, 19 nt, Homo sapiens
  misc_RNA (1)...(19): siRNA sense strand
aggaguacaaugugggcau

SEQ ID NO: 2255254 - RNA, 19 nt, Homo sapiens
  misc_RNA (1)...(19): siRNA sense strand
gugcugacacugaaggaga

SEQ ID NO: 2255255 - RNA, 19 nt, Homo sapiens
  misc_RNA (1)...(19): siRNA sense strand
aguuggaggcagagugcuu

SEQ ID NO: 2255256 - RNA, 19 nt, Homo sapiens
  misc_RNA (1)...(19): siRNA sense strand
ggagcagggcauucggaga

SEQ ID NO: 2255257 - RNA, 19 nt, Homo sapiens
  misc_RNA (1)...(19): siRNA sense strand
cugaaggagaagauugaca

SEQ ID NO: 2255258 - RNA, 19 nt, Homo sapiens
  misc_RNA (1)...(19): siRNA sense strand
gggaagagcagaggggaga

SEQ ID NO: 2255259 - RNA, 19 nt, Homo sapiens
  misc_RNA (1)...(19): siRNA sense strand
ugacacugaaggagaagau

SEQ ID NO: 2255260 - RNA, 19 nt, Homo sapiens
  misc_RNA (1)...(19): siRNA sense strand
gcagaggggagaagcggaa

SEQ ID NO: 2255261 - RNA, 19 nt, Homo sapiens
  misc_RNA (1)...(19): siRNA sense strand
agagauuucaugaggaacu

SEQ ID NO: 2255262 - RNA, 19 nt, Homo sapiens
  misc_RNA (1)...(19): siRNA sense strand
guuguguggaguucagaaa

SEQ ID NO: 2255263 - RNA, 19 nt, Homo sapiens
  misc_RNA (1)...(19): siRNA sense strand
ccaaggacuucuacgagca

SEQ ID NO: 2255264 - RNA, 19 nt, Homo sapiens
  misc_RNA (1)...(19): siRNA sense strand
cagugaagccccacaacaa

SEQ ID NO: 2255265 - RNA, 19 nt, Homo sapiens
  misc_RNA (1)...(19): siRNA sense strand
cacugaaggagaagauuga

SEQ ID NO: 2255266 - RNA, 19 nt, Homo sapiens
  misc_RNA (1)...(19): siRNA sense strand
gggcauucggagagauuuc

SEQ ID NO: 2255267 - RNA, 19 nt, Homo sapiens
  misc_RNA (1)...(19): siRNA sense strand
cggagagauuucaugagga

SEQ ID NO: 2255268 - RNA, 19 nt, Homo sapiens
  misc_RNA (1)...(19): siRNA sense strand
aggagaaagaagaagaaga

SEQ ID NO: 2255269 - RNA, 19 nt, Homo sapiens
  misc_RNA (1)...(19): siRNA sense strand
uggcagaagguuugcggaa

SEQ ID NO: 2255270 - RNA, 19 nt, Homo sapiens
  misc_RNA (1)...(19): siRNA sense strand
augaagaggaugaggagga

SEQ ID NO: 2255271 - RNA, 19 nt, Homo sapiens
  misc_RNA (1)...(19): siRNA sense strand
acgaaaaggaguagacuau

SEQ ID NO: 2255272 - RNA, 19 nt, Homo sapiens
  misc_RNA (1)...(19): siRNA sense strand
aggaugaggaggaagaaga

SEQ ID NO: 2255273 - RNA, 19 nt, Homo sapiens
  misc_RNA (1)...(19): siRNA sense strand
cguaaaaggagcucaagaa

SEQ ID NO: 2255274 - RNA, 19 nt, Homo sapiens
  misc_RNA (1)...(19): siRNA sense strand
acguaaucaagcaaggaua

SEQ ID NO: 2255275 - RNA, 19 nt, Homo sapiens
  misc_RNA (1)...(19): siRNA sense strand
aagaggaugaggaggaaga

SEQ ID NO: 2255276 - RNA, 19 nt, Homo sapiens
  misc_RNA (1)...(19): siRNA sense strand
aggaugagggaauggaaga

SEQ ID NO: 2255277 - RNA, 19 nt, Homo sapiens
  misc_RNA (1)...(19): siRNA sense strand
auuaucaggaugagggaau

SEQ ID NO: 2255278 - RNA, 19 nt, Homo sapiens
  misc_RNA (1)...(19): siRNA sense strand
aggacagcucugaugauaa

SEQ ID NO: 2255279 - RNA, 19 nt, Homo sapiens
  misc_RNA (1)...(19): siRNA sense strand
augaggaggaagaagaaaa

SEQ ID NO: 2255280 - RNA, 19 nt, Homo sapiens
  misc_RNA (1)...(19): siRNA sense strand
gcaugaucuagaagaggau

SEQ ID NO: 2255281 - RNA, 19 nt, Homo sapiens
  misc_RNA (1)...(19): siRNA sense strand
uugcaagggaucacagaga

SEQ ID NO: 2255282 - RNA, 19 nt, Homo sapiens
  misc_RNA (1)...(19): siRNA sense strand
uuuaugaagucuugccaga

SEQ ID NO: 2255283 - RNA, 19 nt, Homo sapiens
  misc_RNA (1)...(19): siRNA sense strand
gagaagagcaagcagccca

SEQ ID NO: 2255284 - RNA, 19 nt, Homo sapiens
  misc_RNA (1)...(19): siRNA sense strand
cauaugaagaggaugagga

SEQ ID NO: 2255285 - RNA, 19 nt, Homo sapiens
  misc_RNA (1)...(19): siRNA sense strand
uuccauaugaagaggauga

SEQ ID NO: 2255286 - RNA, 19 nt, Homo sapiens
  misc_RNA (1)...(19): siRNA sense strand
ggauacuuggagaagaaaa

SEQ ID NO: 2255287 - RNA, 19 nt, Homo sapiens
  misc_RNA (1)...(19): siRNA sense strand
uguuaaaggaucugagcuc

SEQ ID NO: 2255288 - RNA, 19 nt, Homo sapiens
  misc_RNA (1)...(19): siRNA sense strand
agaugaaagaguagaugaa

SEQ ID NO: 2255289 - RNA, 19 nt, Homo sapiens
  misc_RNA (1)...(19): siRNA sense strand
cggaguggucuguguguaa

SEQ ID NO: 2255290 - RNA, 19 nt, Homo sapiens
  misc_RNA (1)...(19): siRNA sense strand
ccauggagcaaguggucua

SEQ ID NO: 2255291 - RNA, 19 nt, Homo sapiens
  misc_RNA (1)...(19): siRNA sense strand
ggaagaaaugggaagacau

SEQ ID NO: 2255292 - RNA, 19 nt, Homo sapiens
  misc_RNA (1)...(19): siRNA sense strand
uggcuaaauaucaggaaau

SEQ ID NO: 2255293 - RNA, 19 nt, Homo sapiens
  misc_RNA (1)...(19): siRNA sense strand
cuggaaagauuuagccuga

SEQ ID NO: 2255294 - RNA, 19 nt, Homo sapiens
  misc_RNA (1)...(19): siRNA sense strand
ccgcuguggacgaggguau

SEQ ID NO: 2255295 - RNA, 19 nt, Homo sapiens
  misc_RNA (1)...(19): siRNA sense strand
acauuaagcuggaugcaga

SEQ ID NO: 2255296 - RNA, 19 nt, Homo sapiens
  misc_RNA (1)...(19): siRNA sense strand
agaaaugggaagacaugaa

SEQ ID NO: 2255297 - RNA, 19 nt, Homo sapiens
  misc_RNA (1)...(19): siRNA sense strand
agucguuguuggagaauga

SEQ ID NO: 2255298 - RNA, 19 nt, Homo sapiens
  misc_RNA (1)...(19): siRNA sense strand
uggacagguacuugaauua

SEQ ID NO: 2255299 - RNA, 19 nt, Homo sapiens
  misc_RNA (1)...(19): siRNA sense strand
aggaagugucuuuggaaca

SEQ ID NO: 2255300 - RNA, 19 nt, Homo sapiens
  misc_RNA (1)...(19): siRNA sense strand
gggcagagugugcagaaaa

SEQ ID NO: 2255301 - RNA, 19 nt, Homo sapiens
  misc_RNA (1)...(19): siRNA sense strand
guguaauagugaauggguu

SEQ ID NO: 2255302 - RNA, 19 nt, Homo sapiens
  misc_RNA (1)...(19): siRNA sense strand
ccuuauugagccugaagaa

SEQ ID NO: 2255303 - RNA, 19 nt, Homo sapiens
  misc_RNA (1)...(19): siRNA sense strand
ggaagacauuugagcagga

SEQ ID NO: 2255304 - RNA, 19 nt, Homo sapiens
  misc_RNA (1)...(19): siRNA sense strand
cuggcuaaauaucaggaaa

SEQ ID NO: 2255305 - RNA, 19 nt, Homo sapiens
  misc_RNA (1)...(19): siRNA sense strand
gcggacugggacugggaua

SEQ ID NO: 2255306 - RNA, 19 nt, Homo sapiens
  misc_RNA (1)...(19): siRNA sense strand
acaaagagccggaaggcgu

SEQ ID NO: 2255307 - RNA, 19 nt, Homo sapiens
  misc_RNA (1)...(19): siRNA sense strand
uggacgaggguaucagaaa

SEQ ID NO: 2255308 - RNA, 19 nt, Homo sapiens
  misc_RNA (1)...(19): siRNA sense strand
cagaaacguacaaggacuu

SEQ ID NO: 2255309 - RNA, 19 nt, Homo sapiens
  misc_RNA (1)...(19): siRNA sense strand
cuauguugggauugugaua

SEQ ID NO: 2255310 - RNA, 19 nt, Homo sapiens
  misc_RNA (1)...(19): siRNA sense strand
uggaagaaaugggaagaca

SEQ ID NO: 2255311 - RNA, 19 nt, Homo sapiens
  misc_RNA (1)...(19): siRNA sense strand
ggaccacauaguagaugaa

SEQ ID NO: 2255312 - RNA, 19 nt, Homo sapiens
  misc_RNA (1)...(19): siRNA sense strand
augaaagaguagaugaaac

SEQ ID NO: 2255313 - RNA, 19 nt, Homo sapiens
  misc_RNA (1)...(19): siRNA sense strand
ucagaaacguacaaggacu

SEQ ID NO: 2255314 - RNA, 19 nt, Homo sapiens
  misc_RNA (1)...(19): siRNA sense strand
gaacugcacugaugggcuu

SEQ ID NO: 2255315 - RNA, 19 nt, Homo sapiens
  misc_RNA (1)...(19): siRNA sense strand
gcauugagauuucgcgcca

SEQ ID NO: 2255316 - RNA, 19 nt, Homo sapiens
  misc_RNA (1)...(19): siRNA sense strand
cggaagaaucaucgugacu

SEQ ID NO: 2255317 - RNA, 19 nt, Homo sapiens
  misc_RNA (1)...(19): siRNA sense strand
acaucaaggcagcaagaca

SEQ ID NO: 2255318 - RNA, 19 nt, Homo sapiens
  misc_RNA (1)...(19): siRNA sense strand
aagggagagucuacgaaau

SEQ ID NO: 2255319 - RNA, 19 nt, Homo sapiens
  misc_RNA (1)...(19): siRNA sense strand
gaaagaaacuaugaggcca

SEQ ID NO: 2255320 - RNA, 19 nt, Homo sapiens
  misc_RNA (1)...(19): siRNA sense strand
aggaugcccugaaggaaau

SEQ ID NO: 2255321 - RNA, 19 nt, Homo sapiens
  misc_RNA (1)...(19): siRNA sense strand
gggcagaucuuccagcuca

SEQ ID NO: 2255322 - RNA, 19 nt, Homo sapiens
  misc_RNA (1)...(19): siRNA sense strand
acauaguagaugaaagagu

SEQ ID NO: 2255323 - RNA, 19 nt, Homo sapiens
  misc_RNA (1)...(19): siRNA sense strand
gccaagaggaaaaguacaa

SEQ ID NO: 2255324 - RNA, 19 nt, Homo sapiens
  misc_RNA (1)...(19): siRNA sense strand
aaauacugcucaagaacca

SEQ ID NO: 2255325 - RNA, 19 nt, Homo sapiens
  misc_RNA (1)...(19): siRNA sense strand
uagaagaaccuaaggcucu

SEQ ID NO: 2255326 - RNA, 19 nt, Homo sapiens
  misc_RNA (1)...(19): siRNA sense strand
acauuguugccaagaggaa

SEQ ID NO: 2255327 - RNA, 19 nt, Homo sapiens
  misc_RNA (1)...(19): siRNA sense strand
ggguaucagaaacguacaa

SEQ ID NO: 2255328 - RNA, 19 nt, Homo sapiens
  misc_RNA (1)...(19): siRNA sense strand
cugaagaagcuuauauugu

SEQ ID NO: 2255329 - RNA, 19 nt, Homo sapiens
  misc_RNA (1)...(19): siRNA sense strand
ccuucacucuggaaagauu

SEQ ID NO: 2255330 - RNA, 19 nt, Homo sapiens
  misc_RNA (1)...(19): siRNA sense strand
caaagagccggaaggcgua

SEQ ID NO: 2255331 - RNA, 19 nt, Homo sapiens
  misc_RNA (1)...(19): siRNA sense strand
acgaaauguaugugacugu

SEQ ID NO: 2255332 - RNA, 19 nt, Homo sapiens
  misc_RNA (1)...(19): siRNA sense strand
gggaggauguggugguggu

SEQ ID NO: 2255333 - RNA, 19 nt, Homo sapiens
  misc_RNA (1)...(19): siRNA sense strand
gcggcagguggaaggagaa

SEQ ID NO: 2255334 - RNA, 19 nt, Homo sapiens
  misc_RNA (1)...(19): siRNA sense strand
agacauaauugaucccguu

SEQ ID NO: 2255335 - RNA, 19 nt, Homo sapiens
  misc_RNA (1)...(19): siRNA sense strand
uguaauagugaauggguuc

SEQ ID NO: 2255336 - RNA, 19 nt, Homo sapiens
  misc_RNA (1)...(19): siRNA sense strand
cugaagaaccagagucuag

SEQ ID NO: 2255337 - RNA, 19 nt, Homo sapiens
  misc_RNA (1)...(19): siRNA sense strand
acaaaaucccaaugaccaa

SEQ ID NO: 2255338 - RNA, 19 nt, Homo sapiens
  misc_RNA (1)...(19): siRNA sense strand
uggaagcaugagugggaaa

SEQ ID NO: 2255339 - RNA, 19 nt, Homo sapiens
  misc_RNA (1)...(19): siRNA sense strand
augaggaaguacagacaau

SEQ ID NO: 2255340 - RNA, 19 nt, Homo sapiens
  misc_RNA (1)...(19): siRNA sense strand
ccuccggauuacuggacaa

SEQ ID NO: 2255341 - RNA, 19 nt, Homo sapiens
  misc_RNA (1)...(19): siRNA sense strand
agacaguaugcgagaaaau

SEQ ID NO: 2255342 - RNA, 19 nt, Homo sapiens
  misc_RNA (1)...(19): siRNA sense strand
uguaauagaucguggcccu

SEQ ID NO: 2255343 - RNA, 19 nt, Homo sapiens
  misc_RNA (1)...(19): siRNA sense strand
agacaauuggucagauaga

SEQ ID NO: 2255344 - RNA, 19 nt, Homo sapiens
  misc_RNA (1)...(19): siRNA sense strand
gaagaaguacuuuggcaga

SEQ ID NO: 2255345 - RNA, 19 nt, Homo sapiens
  misc_RNA (1)...(19): siRNA sense strand
caggaagucuggcuggcaa

SEQ ID NO: 2255346 - RNA, 19 nt, Homo sapiens
  misc_RNA (1)...(19): siRNA sense strand
cuucuaaaauuggggauaa

SEQ ID NO: 2255347 - RNA, 19 nt, Homo sapiens
  misc_RNA (1)...(19): siRNA sense strand
cagaagaaguacuuuggca

SEQ ID NO: 2255348 - RNA, 19 nt, Homo sapiens
  misc_RNA (1)...(19): siRNA sense strand
aggaagucuggcuggcaaa

SEQ ID NO: 2255349 - RNA, 19 nt, Homo sapiens
  misc_RNA (1)...(19): siRNA sense strand
aagugaaggauguaauaga

SEQ ID NO: 2255350 - RNA, 19 nt, Homo sapiens
  misc_RNA (1)...(19): siRNA sense strand
cuggacaauacauggacua

SEQ ID NO: 2255351 - RNA, 19 nt, Homo sapiens
  misc_RNA (1)...(19): siRNA sense strand
cgcucaacucccagaagaa

SEQ ID NO: 2255352 - RNA, 19 nt, Homo sapiens
  misc_RNA (1)...(19): siRNA sense strand
gggucugggccgaggauau

SEQ ID NO: 2255353 - RNA, 19 nt, Homo sapiens
  misc_RNA (1)...(19): siRNA sense strand
aggagaaagacuaguuuau

SEQ ID NO: 2255354 - RNA, 19 nt, Homo sapiens
  misc_RNA (1)...(19): siRNA sense strand
cuuccaaggagaaagacua

SEQ ID NO: 2255355 - RNA, 19 nt, Homo sapiens
  misc_RNA (1)...(19): siRNA sense strand
caguggggccauagaaaua

SEQ ID NO: 2255356 - RNA, 19 nt, Homo sapiens
  misc_RNA (1)...(19): siRNA sense strand
ggaucuggauguagcagga

SEQ ID NO: 2255357 - RNA, 19 nt, Homo sapiens
  misc_RNA (1)...(19): siRNA sense strand
gcuucagcugggagaggua

SEQ ID NO: 2255358 - RNA, 19 nt, Homo sapiens
  misc_RNA (1)...(19): siRNA sense strand
gauucuaugccacgggcua

SEQ ID NO: 2255359 - RNA, 19 nt, Homo sapiens
  misc_RNA (1)...(19): siRNA sense strand
gggccgaggauauggucuu

SEQ ID NO: 2255360 - RNA, 19 nt, Homo sapiens
  misc_RNA (1)...(19): siRNA sense strand
gggccauagaaauacgauu

SEQ ID NO: 2255361 - RNA, 19 nt, Homo sapiens
  misc_RNA (1)...(19): siRNA sense strand
ggauggaggcuuuggcaug

SEQ ID NO: 2255362 - RNA, 19 nt, Homo sapiens
  misc_RNA (1)...(19): siRNA sense strand
agacaauacgugaugccuu

SEQ ID NO: 2255363 - RNA, 19 nt, Homo sapiens
  misc_RNA (1)...(19): siRNA sense strand
gagaggagcugacggcugu

SEQ ID NO: 2255364 - RNA, 19 nt, Homo sapiens
  misc_RNA (1)...(19): siRNA sense strand
uaugacuaugugugggaua

SEQ ID NO: 2255365 - RNA, 19 nt, Homo sapiens
  misc_RNA (1)...(19): siRNA sense strand
gggaagaacucucugcaga

SEQ ID NO: 2255366 - RNA, 19 nt, Homo sapiens
  misc_RNA (1)...(19): siRNA sense strand
cgaaggagucaaugcggaa

SEQ ID NO: 2255367 - RNA, 19 nt, Homo sapiens
  misc_RNA (1)...(19): siRNA sense strand
cuuauaucccagagaacaa

SEQ ID NO: 2255368 - RNA, 19 nt, Homo sapiens
  misc_RNA (1)...(19): siRNA sense strand
gagaaaggcucuagggugg

SEQ ID NO: 2255369 - RNA, 19 nt, Homo sapiens
  misc_RNA (1)...(19): siRNA sense strand
agauuguaauucagggaca

SEQ ID NO: 2255370 - RNA, 19 nt, Homo sapiens
  misc_RNA (1)...(19): siRNA sense strand
uggcagacaccaacgacaa

SEQ ID NO: 2255371 - RNA, 19 nt, Homo sapiens
  misc_RNA (1)...(19): siRNA sense strand
ggauagaccgggaggagcu

SEQ ID NO: 2255372 - RNA, 19 nt, Homo sapiens
  misc_RNA (1)...(19): siRNA sense strand
aagugcaagcaauggauaa

SEQ ID NO: 2255373 - RNA, 19 nt, Homo sapiens
  misc_RNA (1)...(19): siRNA sense strand
accaagauucugaggaaaa

SEQ ID NO: 2255374 - RNA, 19 nt, Homo sapiens
  misc_RNA (1)...(19): siRNA sense strand
gaaguagaaguaagggaca

SEQ ID NO: 2255375 - RNA, 19 nt, Homo sapiens
  misc_RNA (1)...(19): siRNA sense strand
cagacaugcucgucagcca

SEQ ID NO: 2255376 - RNA, 19 nt, Homo sapiens
  misc_RNA (1)...(19): siRNA sense strand
aaguagaaguaagggacau

SEQ ID NO: 2255377 - RNA, 19 nt, Homo sapiens
  misc_RNA (1)...(19): siRNA sense strand
ugauggaggauaaagugaa

SEQ ID NO: 2255378 - RNA, 19 nt, Homo sapiens
  misc_RNA (1)...(19): siRNA sense strand
agggacaauaucaacaaua

SEQ ID NO: 2255379 - RNA, 19 nt, Homo sapiens
  misc_RNA (1)...(19): siRNA sense strand
uguaaaugaccaagauucu

SEQ ID NO: 2255380 - RNA, 19 nt, Homo sapiens
  misc_RNA (1)...(19): siRNA sense strand
ggcuuguccugcugggaau

SEQ ID NO: 2255381 - RNA, 19 nt, Homo sapiens
  misc_RNA (1)...(19): siRNA sense strand
ggauauucugcgcgagcca

SEQ ID NO: 2255382 - RNA, 19 nt, Homo sapiens
  misc_RNA (1)...(19): siRNA sense strand
auauggaguagaaguagaa

SEQ ID NO: 2255383 - RNA, 19 nt, Homo sapiens
  misc_RNA (1)...(19): siRNA sense strand
cuaccagauggaagugcaa

SEQ ID NO: 2255384 - RNA, 19 nt, Homo sapiens
  misc_RNA (1)...(19): siRNA sense strand
gggaagaacucucugcaga

SEQ ID NO: 2255385 - RNA, 19 nt, Homo sapiens
  misc_RNA (1)...(19): siRNA sense strand
cgaaggagucaaugcggaa

SEQ ID NO: 2255386 - RNA, 19 nt, Homo sapiens
  misc_RNA (1)...(19): siRNA sense strand
cuuauaucccagagaacaa

SEQ ID NO: 2255387 - RNA, 19 nt, Homo sapiens
  misc_RNA (1)...(19): siRNA sense strand
gagaaaggcucuagggugg

SEQ ID NO: 2255388 - RNA, 19 nt, Homo sapiens
  misc_RNA (1)...(19): siRNA sense strand
agauuguaauucagggaca

SEQ ID NO: 2255389 - RNA, 19 nt, Homo sapiens
  misc_RNA (1)...(19): siRNA sense strand
uggcagacaccaacgacaa

SEQ ID NO: 2255390 - RNA, 19 nt, Homo sapiens
  misc_RNA (1)...(19): siRNA sense strand
ggauagaccgggaggagcu

SEQ ID NO: 2255391 - RNA, 19 nt, Homo sapiens
  misc_RNA (1)...(19): siRNA sense strand
aagugcaagcaauggauaa

SEQ ID NO: 2255392 - RNA, 19 nt, Homo sapiens
  misc_RNA (1)...(19): siRNA sense strand
accaagauucugaggaaaa

SEQ ID NO: 2255393 - RNA, 19 nt, Homo sapiens
  misc_RNA (1)...(19): siRNA sense strand
gaaguagaaguaagggaca

SEQ ID NO: 2255394 - RNA, 19 nt, Homo sapiens
  misc_RNA (1)...(19): siRNA sense strand
cagacaugcucgucagcca

SEQ ID NO: 2255395 - RNA, 19 nt, Homo sapiens
  misc_RNA (1)...(19): siRNA sense strand
aaguagaaguaagggacau

SEQ ID NO: 2255396 - RNA, 19 nt, Homo sapiens
  misc_RNA (1)...(19): siRNA sense strand
ugauggaggauaaagugaa

SEQ ID NO: 2255397 - RNA, 19 nt, Homo sapiens
  misc_RNA (1)...(19): siRNA sense strand
agggacaauaucaacaaua

SEQ ID NO: 2255398 - RNA, 19 nt, Homo sapiens
  misc_RNA (1)...(19): siRNA sense strand
uguaaaugaccaagauucu

SEQ ID NO: 2255399 - RNA, 19 nt, Homo sapiens
  misc_RNA (1)...(19): siRNA sense strand
ggcuuguccugcugggaau

SEQ ID NO: 2255400 - RNA, 19 nt, Homo sapiens
  misc_RNA (1)...(19): siRNA sense strand
ggauauucugcgcgagcca

SEQ ID NO: 2255401 - RNA, 19 nt, Homo sapiens
  misc_RNA (1)...(19): siRNA sense strand
auauggaguagaaguagaa

SEQ ID NO: 2255402 - RNA, 19 nt, Homo sapiens
  misc_RNA (1)...(19): siRNA sense strand
cuaccagauggaagugcaa

SEQ ID NO: 2255403 - RNA, 19 nt, Homo sapiens
  misc_RNA (1)...(19): siRNA sense strand
cgccaaaauucacgcaaaa

SEQ ID NO: 2255404 - RNA, 19 nt, Homo sapiens
  misc_RNA (1)...(19): siRNA sense strand
cuuguaaauuggaagguga

SEQ ID NO: 2255405 - RNA, 19 nt, Homo sapiens
  misc_RNA (1)...(19): siRNA sense strand
caguggagguagaagucau

SEQ ID NO: 2255406 - RNA, 19 nt, Homo sapiens
  misc_RNA (1)...(19): siRNA sense strand
ccucugaccuccaggcuga

SEQ ID NO: 2255407 - RNA, 19 nt, Homo sapiens
  misc_RNA (1)...(19): siRNA sense strand
acgugaauguggagaucga

SEQ ID NO: 2255408 - RNA, 19 nt, Homo sapiens
  misc_RNA (1)...(19): siRNA sense strand
acaccuuuggacagagaaa

SEQ ID NO: 2255409 - RNA, 19 nt, Homo sapiens
  misc_RNA (1)...(19): siRNA sense strand
gcggauauugguagcaaca

SEQ ID NO: 2255410 - RNA, 19 nt, Homo sapiens
  misc_RNA (1)...(19): siRNA sense strand
gguucagcguccaggaguu

SEQ ID NO: 2255411 - RNA, 19 nt, Homo sapiens
  misc_RNA (1)...(19): siRNA sense strand
acacaauggagaagugacu

SEQ ID NO: 2255412 - RNA, 19 nt, Homo sapiens
  misc_RNA (1)...(19): siRNA sense strand
gggaggagauaugcgggaa

SEQ ID NO: 2255413 - RNA, 19 nt, Homo sapiens
  misc_RNA (1)...(19): siRNA sense strand
caguaaauacccugagaug

SEQ ID NO: 2255414 - RNA, 19 nt, Homo sapiens
  misc_RNA (1)...(19): siRNA sense strand
agcagaauccagaguacaa

SEQ ID NO: 2255415 - RNA, 19 nt, Homo sapiens
  misc_RNA (1)...(19): siRNA sense strand
gcagcaggcuagacaggga

SEQ ID NO: 2255416 - RNA, 19 nt, Homo sapiens
  misc_RNA (1)...(19): siRNA sense strand
ggacagagaaaagcagaaa

SEQ ID NO: 2255417 - RNA, 19 nt, Homo sapiens
  misc_RNA (1)...(19): siRNA sense strand
uggaggaaugauugcgcaa

SEQ ID NO: 2255418 - RNA, 19 nt, Homo sapiens
  misc_RNA (1)...(19): siRNA sense strand
uggagaucgaggacauuaa

SEQ ID NO: 2255419 - RNA, 19 nt, Homo sapiens
  misc_RNA (1)...(19): siRNA sense strand
uguuaguggacgaccgcaa

SEQ ID NO: 2255420 - RNA, 19 nt, Homo sapiens
  misc_RNA (1)...(19): siRNA sense strand
ggcuagacagggaggagau

SEQ ID NO: 2255421 - RNA, 19 nt, Homo sapiens
  misc_RNA (1)...(19): siRNA sense strand
cggaccaggaugagggugu

SEQ ID NO: 2255422 - RNA, 19 nt, Homo sapiens
  misc_RNA (1)...(19): siRNA sense strand
cggggaaauuacuguuuua

SEQ ID NO: 2255423 - RNA, 19 nt, Homo sapiens
  misc_RNA (1)...(19): siRNA sense strand
ccuaaaauguagugagcag

SEQ ID NO: 2255424 - RNA, 19 nt, Homo sapiens
  misc_RNA (1)...(19): siRNA sense strand
gcugcaaauaagugagucu

SEQ ID NO: 2255425 - RNA, 19 nt, Homo sapiens
  misc_RNA (1)...(19): siRNA sense strand
gugacaaggauuccagaca

SEQ ID NO: 2255426 - RNA, 19 nt, Homo sapiens
  misc_RNA (1)...(19): siRNA sense strand
aggugauguuccauuuaaa

SEQ ID NO: 2255427 - RNA, 19 nt, Homo sapiens
  misc_RNA (1)...(19): siRNA sense strand
agaaaucagauggcaguaa

SEQ ID NO: 2255428 - RNA, 19 nt, Homo sapiens
  misc_RNA (1)...(19): siRNA sense strand
caggaggugcugccggaua

SEQ ID NO: 2255429 - RNA, 19 nt, Homo sapiens
  misc_RNA (1)...(19): siRNA sense strand
gcuugugagcagcaggcua

SEQ ID NO: 2255430 - RNA, 19 nt, Homo sapiens
  misc_RNA (1)...(19): siRNA sense strand
cugaaaauccacugaacuu

SEQ ID NO: 2255431 - RNA, 19 nt, Homo sapiens
  misc_RNA (1)...(19): siRNA sense strand
cgagcagaauccagaguac

SEQ ID NO: 2255432 - RNA, 19 nt, Homo sapiens
  misc_RNA (1)...(19): siRNA sense strand
ccuuauuuccacuuuguaa

SEQ ID NO: 2255433 - RNA, 19 nt, Homo sapiens
  misc_RNA (1)...(19): siRNA sense strand
acgccaaaauucacgcaaa

SEQ ID NO: 2255434 - RNA, 19 nt, Homo sapiens
  misc_RNA (1)...(19): siRNA sense strand
ugaccaagguaguggcggu

SEQ ID NO: 2255435 - RNA, 19 nt, Homo sapiens
  misc_RNA (1)...(19): siRNA sense strand
caagacguauacaggguga

SEQ ID NO: 2255436 - RNA, 19 nt, Homo sapiens
  misc_RNA (1)...(19): siRNA sense strand
cgccaaaauucacgcaaaa

SEQ ID NO: 2255437 - RNA, 19 nt, Homo sapiens
  misc_RNA (1)...(19): siRNA sense strand
cuuguaaauuggaagguga

SEQ ID NO: 2255438 - RNA, 19 nt, Homo sapiens
  misc_RNA (1)...(19): siRNA sense strand
caguggagguagaagucau

SEQ ID NO: 2255439 - RNA, 19 nt, Homo sapiens
  misc_RNA (1)...(19): siRNA sense strand
ccucugaccuccaggcuga

SEQ ID NO: 2255440 - RNA, 19 nt, Homo sapiens
  misc_RNA (1)...(19): siRNA sense strand
acgugaauguggagaucga

SEQ ID NO: 2255441 - RNA, 19 nt, Homo sapiens
  misc_RNA (1)...(19): siRNA sense strand
acaccuuuggacagagaaa

SEQ ID NO: 2255442 - RNA, 19 nt, Homo sapiens
  misc_RNA (1)...(19): siRNA sense strand
gcggauauugguagcaaca

SEQ ID NO: 2255443 - RNA, 19 nt, Homo sapiens
  misc_RNA (1)...(19): siRNA sense strand
gguucagcguccaggaguu

SEQ ID NO: 2255444 - RNA, 19 nt, Homo sapiens
  misc_RNA (1)...(19): siRNA sense strand
acacaauggagaagugacu

SEQ ID NO: 2255445 - RNA, 19 nt, Homo sapiens
  misc_RNA (1)...(19): siRNA sense strand
gggaggagauaugcgggaa

SEQ ID NO: 2255446 - RNA, 19 nt, Homo sapiens
  misc_RNA (1)...(19): siRNA sense strand
caguaaauacccugagaug

SEQ ID NO: 2255447 - RNA, 19 nt, Homo sapiens
  misc_RNA (1)...(19): siRNA sense strand
agcagaauccagaguacaa

SEQ ID NO: 2255448 - RNA, 19 nt, Homo sapiens
  misc_RNA (1)...(19): siRNA sense strand
gcagcaggcuagacaggga

SEQ ID NO: 2255449 - RNA, 19 nt, Homo sapiens
  misc_RNA (1)...(19): siRNA sense strand
ggacagagaaaagcagaaa

SEQ ID NO: 2255450 - RNA, 19 nt, Homo sapiens
  misc_RNA (1)...(19): siRNA sense strand
uggaggaaugauugcgcaa

SEQ ID NO: 2255451 - RNA, 19 nt, Homo sapiens
  misc_RNA (1)...(19): siRNA sense strand
uggagaucgaggacauuaa

SEQ ID NO: 2255452 - RNA, 19 nt, Homo sapiens
  misc_RNA (1)...(19): siRNA sense strand
uguuaguggacgaccgcaa

SEQ ID NO: 2255453 - RNA, 19 nt, Homo sapiens
  misc_RNA (1)...(19): siRNA sense strand
ggcuagacagggaggagau

SEQ ID NO: 2255454 - RNA, 19 nt, Homo sapiens
  misc_RNA (1)...(19): siRNA sense strand
cggaccaggaugagggugu

SEQ ID NO: 2255455 - RNA, 19 nt, Homo sapiens
  misc_RNA (1)...(19): siRNA sense strand
cggggaaauuacuguuuua

SEQ ID NO: 2255456 - RNA, 19 nt, Homo sapiens
  misc_RNA (1)...(19): siRNA sense strand
ccuaaaauguagugagcag

SEQ ID NO: 2255457 - RNA, 19 nt, Homo sapiens
  misc_RNA (1)...(19): siRNA sense strand
gcugcaaauaagugagucu

SEQ ID NO: 2255458 - RNA, 19 nt, Homo sapiens
  misc_RNA (1)...(19): siRNA sense strand
gugacaaggauuccagaca

SEQ ID NO: 2255459 - RNA, 19 nt, Homo sapiens
  misc_RNA (1)...(19): siRNA sense strand
aggugauguuccauuuaaa

SEQ ID NO: 2255460 - RNA, 19 nt, Homo sapiens
  misc_RNA (1)...(19): siRNA sense strand
agaaaucagauggcaguaa

SEQ ID NO: 2255461 - RNA, 19 nt, Homo sapiens
  misc_RNA (1)...(19): siRNA sense strand
caggaggugcugccggaua

SEQ ID NO: 2255462 - RNA, 19 nt, Homo sapiens
  misc_RNA (1)...(19): siRNA sense strand
gcuugugagcagcaggcua

SEQ ID NO: 2255463 - RNA, 19 nt, Homo sapiens
  misc_RNA (1)...(19): siRNA sense strand
cugaaaauccacugaacuu

SEQ ID NO: 2255464 - RNA, 19 nt, Homo sapiens
  misc_RNA (1)...(19): siRNA sense strand
cgagcagaauccagaguac

SEQ ID NO: 2255465 - RNA, 19 nt, Homo sapiens
  misc_RNA (1)...(19): siRNA sense strand
ccuuauuuccacuuuguaa

SEQ ID NO: 2255466 - RNA, 19 nt, Homo sapiens
  misc_RNA (1)...(19): siRNA sense strand
acgccaaaauucacgcaaa

SEQ ID NO: 2255467 - RNA, 19 nt, Homo sapiens
  misc_RNA (1)...(19): siRNA sense strand
ugaccaagguaguggcggu

SEQ ID NO: 2255468 - RNA, 19 nt, Homo sapiens
  misc_RNA (1)...(19): siRNA sense strand
caagacguauacaggguga

SEQ ID NO: 2255469 - RNA, 19 nt, Homo sapiens
  misc_RNA (1)...(19): siRNA sense strand
aggaacaggaggagaucaa

SEQ ID NO: 2255470 - RNA, 19 nt, Homo sapiens
  misc_RNA (1)...(19): siRNA sense strand
ugacagugcuggaugccaa

SEQ ID NO: 2255471 - RNA, 19 nt, Homo sapiens
  misc_RNA (1)...(19): siRNA sense strand
cugcaagaugugaaugaua

SEQ ID NO: 2255472 - RNA, 19 nt, Homo sapiens
  misc_RNA (1)...(19): siRNA sense strand
ggcccuggaucgagaggaa

SEQ ID NO: 2255473 - RNA, 19 nt, Homo sapiens
  misc_RNA (1)...(19): siRNA sense strand
cguagaaguuacagugcga

SEQ ID NO: 2255474 - RNA, 19 nt, Homo sapiens
  misc_RNA (1)...(19): siRNA sense strand
cuguggaggaugagaauga

SEQ ID NO: 2255475 - RNA, 19 nt, Homo sapiens
  misc_RNA (1)...(19): siRNA sense strand
ggucaggagcaguggaugu

SEQ ID NO: 2255476 - RNA, 19 nt, Homo sapiens
  misc_RNA (1)...(19): siRNA sense strand
gcgagaugccaaugacaau

SEQ ID NO: 2255477 - RNA, 19 nt, Homo sapiens
  misc_RNA (1)...(19): siRNA sense strand
uguacauacugaagguaau

SEQ ID NO: 2255478 - RNA, 19 nt, Homo sapiens
  misc_RNA (1)...(19): siRNA sense strand
ggaucaaggcucuggagga

SEQ ID NO: 2255479 - RNA, 19 nt, Homo sapiens
  misc_RNA (1)...(19): siRNA sense strand
gacuaugagcacacagaaa

SEQ ID NO: 2255480 - RNA, 19 nt, Homo sapiens
  misc_RNA (1)...(19): siRNA sense strand
cuggagaggaugaguauga

SEQ ID NO: 2255481 - RNA, 19 nt, Homo sapiens
  misc_RNA (1)...(19): siRNA sense strand
guauaagggccgaaaggca

SEQ ID NO: 2255482 - RNA, 19 nt, Homo sapiens
  misc_RNA (1)...(19): siRNA sense strand
ggaacuggaccgagagaac

SEQ ID NO: 2255483 - RNA, 19 nt, Homo sapiens
  misc_RNA (1)...(19): siRNA sense strand
gaacaacccuccuggcaca

SEQ ID NO: 2255484 - RNA, 19 nt, Homo sapiens
  misc_RNA (1)...(19): siRNA sense strand
gagaucaaccggaggcaga

SEQ ID NO: 2255485 - RNA, 19 nt, Homo sapiens
  misc_RNA (1)...(19): siRNA sense strand
ugguauaugugaagguguu

SEQ ID NO: 2255486 - RNA, 19 nt, Homo sapiens
  misc_RNA (1)...(19): siRNA sense strand
gaguaugcugccaguauaa

SEQ ID NO: 2255487 - RNA, 19 nt, Homo sapiens
  misc_RNA (1)...(19): siRNA sense strand
gccucaaguccaugguaua

SEQ ID NO: 2255488 - RNA, 19 nt, Homo sapiens
  misc_RNA (1)...(19): siRNA sense strand
gggcagcacuagaccguga

SEQ ID NO: 2255489 - RNA, 19 nt, Homo sapiens
  misc_RNA (1)...(19): siRNA sense strand
gguuacagccacagacuca

SEQ ID NO: 2255490 - RNA, 19 nt, Homo sapiens
  misc_RNA (1)...(19): siRNA sense strand
gcaagaugugaaugauaau

SEQ ID NO: 2255491 - RNA, 19 nt, Homo sapiens
  misc_RNA (1)...(19): siRNA sense strand
cugcagaggaugaugagau

SEQ ID NO: 2255492 - RNA, 19 nt, Homo sapiens
  misc_RNA (1)...(19): siRNA sense strand
gaacagugucccagcuaca

SEQ ID NO: 2255493 - RNA, 19 nt, Homo sapiens
  misc_RNA (1)...(19): siRNA sense strand
cguccaugcaggaggcaca

SEQ ID NO: 2255494 - RNA, 19 nt, Homo sapiens
  misc_RNA (1)...(19): siRNA sense strand
ugcuacagcuggaggccua

SEQ ID NO: 2255495 - RNA, 19 nt, Homo sapiens
  misc_RNA (1)...(19): siRNA sense strand
gguguuaacagucgaguca

SEQ ID NO: 2255496 - RNA, 19 nt, Homo sapiens
  misc_RNA (1)...(19): siRNA sense strand
caguauaagugcccagagu

SEQ ID NO: 2255497 - RNA, 19 nt, Homo sapiens
  misc_RNA (1)...(19): siRNA sense strand
guaucaggacuguugcaaa

SEQ ID NO: 2255498 - RNA, 19 nt, Homo sapiens
  misc_RNA (1)...(19): siRNA sense strand
gcuaacugguccuggcuca

SEQ ID NO: 2255499 - RNA, 19 nt, Homo sapiens
  misc_RNA (1)...(19): siRNA sense strand
ugucagaagaugcguuauu

SEQ ID NO: 2255500 - RNA, 19 nt, Homo sapiens
  misc_RNA (1)...(19): siRNA sense strand
ggguggugguacaggaugu

SEQ ID NO: 2255501 - RNA, 19 nt, Homo sapiens
  misc_RNA (1)...(19): siRNA sense strand
gcugguaguuacuggggaa

SEQ ID NO: 2255502 - RNA, 19 nt, Homo sapiens
  misc_RNA (1)...(19): siRNA sense strand
ggccuaugauggugguuca

SEQ ID NO: 2255503 - RNA, 19 nt, Homo sapiens
  misc_RNA (1)...(19): siRNA sense strand
ucacuguacuagaugucaa

SEQ ID NO: 2255504 - RNA, 19 nt, Homo sapiens
  misc_RNA (1)...(19): siRNA sense strand
ccagcguggccgagaauca

SEQ ID NO: 2255505 - RNA, 19 nt, Homo sapiens
  misc_RNA (1)...(19): siRNA sense strand
cccagaugauggugacuuu

SEQ ID NO: 2255506 - RNA, 19 nt, Homo sapiens
  misc_RNA (1)...(19): siRNA sense strand
gagaggagagggaugccua

SEQ ID NO: 2255507 - RNA, 19 nt, Homo sapiens
  misc_RNA (1)...(19): siRNA sense strand
cccugaugcuggagcuaau

SEQ ID NO: 2255508 - RNA, 19 nt, Homo sapiens
  misc_RNA (1)...(19): siRNA sense strand
ucgugaugcuggugccaau

SEQ ID NO: 2255509 - RNA, 19 nt, Homo sapiens
  misc_RNA (1)...(19): siRNA sense strand
ugggaaugagaaagggaca

SEQ ID NO: 2255510 - RNA, 19 nt, Homo sapiens
  misc_RNA (1)...(19): siRNA sense strand
agaccuggccauugacgaa

SEQ ID NO: 2255511 - RNA, 19 nt, Homo sapiens
  misc_RNA (1)...(19): siRNA sense strand
uuguacauacugaagguaa

SEQ ID NO: 2255512 - RNA, 19 nt, Homo sapiens
  misc_RNA (1)...(19): siRNA sense strand
agagaguggaggagccuuu

SEQ ID NO: 2255513 - RNA, 19 nt, Homo sapiens
  misc_RNA (1)...(19): siRNA sense strand
aguccaugguauaugugaa

SEQ ID NO: 2255514 - RNA, 19 nt, Homo sapiens
  misc_RNA (1)...(19): siRNA sense strand
ugacugugcaugugcgaga

SEQ ID NO: 2255515 - RNA, 19 nt, Homo sapiens
  misc_RNA (1)...(19): siRNA sense strand
ccuugcuucuggagaguuu

SEQ ID NO: 2255516 - RNA, 19 nt, Homo sapiens
  misc_RNA (1)...(19): siRNA sense strand
gggaaugagaaagggacau

SEQ ID NO: 2255517 - RNA, 19 nt, Homo sapiens
  misc_RNA (1)...(19): siRNA sense strand
aagugcaggacgagaauga

SEQ ID NO: 2255518 - RNA, 19 nt, Homo sapiens
  misc_RNA (1)...(19): siRNA sense strand
cuaauggccaugugaccua

SEQ ID NO: 2255519 - RNA, 19 nt, Homo sapiens
  misc_RNA (1)...(19): siRNA sense strand
ucagcuaccuugacgguga

SEQ ID NO: 2255520 - RNA, 19 nt, Homo sapiens
  misc_RNA (1)...(19): siRNA sense strand
gcuccgagugucagaagau

SEQ ID NO: 2255521 - RNA, 19 nt, Homo sapiens
  misc_RNA (1)...(19): siRNA sense strand
cuacagaugcugauggaag

SEQ ID NO: 2255522 - RNA, 19 nt, Homo sapiens
  misc_RNA (1)...(19): siRNA sense strand
ccgcaugaucaaugaguuc

SEQ ID NO: 2255523 - RNA, 19 nt, Homo sapiens
  misc_RNA (1)...(19): siRNA sense strand
gcauaguccaggcacacaa

SEQ ID NO: 2255524 - RNA, 19 nt, Homo sapiens
  misc_RNA (1)...(19): siRNA sense strand
ugacuggagaggaugagua

SEQ ID NO: 2255525 - RNA, 19 nt, Homo sapiens
  misc_RNA (1)...(19): siRNA sense strand
gaucgagaggagagggaug

SEQ ID NO: 2255526 - RNA, 19 nt, Homo sapiens
  misc_RNA (1)...(19): siRNA sense strand
gggccaauucuguggugca

SEQ ID NO: 2255527 - RNA, 19 nt, Homo sapiens
  misc_RNA (1)...(19): siRNA sense strand
ugguacaggaugugggaac

SEQ ID NO: 2255528 - RNA, 19 nt, Homo sapiens
  misc_RNA (1)...(19): siRNA sense strand
gacuacggguggugguaca

SEQ ID NO: 2255529 - RNA, 19 nt, Homo sapiens
  misc_RNA (1)...(19): siRNA sense strand
gcaagugcaggacgagaau

SEQ ID NO: 2255530 - RNA, 19 nt, Homo sapiens
  misc_RNA (1)...(19): siRNA sense strand
cugcagccuuggacagaga

SEQ ID NO: 2255531 - RNA, 19 nt, Homo sapiens
  misc_RNA (1)...(19): siRNA sense strand
acugagagcugaagaucgu

SEQ ID NO: 2255532 - RNA, 19 nt, Homo sapiens
  misc_RNA (1)...(19): siRNA sense strand
ggacaguaccagugggcau

SEQ ID NO: 2255533 - RNA, 19 nt, Homo sapiens
  misc_RNA (1)...(19): siRNA sense strand
ccgcaauggcucugaggau

SEQ ID NO: 2255534 - RNA, 19 nt, Homo sapiens
  misc_RNA (1)...(19): siRNA sense strand
aaguaucacucuaugggaa

SEQ ID NO: 2255535 - RNA, 19 nt, Homo sapiens
  misc_RNA (1)...(19): siRNA sense strand
cugcauuacaccaaggaga

SEQ ID NO: 2255536 - RNA, 19 nt, Homo sapiens
  misc_RNA (1)...(19): siRNA sense strand
aguccugggauuugaacaa

SEQ ID NO: 2255537 - RNA, 19 nt, Homo sapiens
  misc_RNA (1)...(19): siRNA sense strand
gaggaggagacaaggcaga

SEQ ID NO: 2255538 - RNA, 19 nt, Homo sapiens
  misc_RNA (1)...(19): siRNA sense strand
ccuucuuggcucugggaau

SEQ ID NO: 2255539 - RNA, 19 nt, Homo sapiens
  misc_RNA (1)...(19): siRNA sense strand
cgaugaugacaguggaacu

SEQ ID NO: 2255540 - RNA, 19 nt, Homo sapiens
  misc_RNA (1)...(19): siRNA sense strand
auggaaugauugagcagau

SEQ ID NO: 2255541 - RNA, 19 nt, Homo sapiens
  misc_RNA (1)...(19): siRNA sense strand
caaggaagcugguggacag

SEQ ID NO: 2255542 - RNA, 19 nt, Homo sapiens
  misc_RNA (1)...(19): siRNA sense strand
gccaggagggagagaacau

SEQ ID NO: 2255543 - RNA, 19 nt, Homo sapiens
  misc_RNA (1)...(19): siRNA sense strand
aggcauuggcguugaguuc

SEQ ID NO: 2255544 - RNA, 19 nt, Homo sapiens
  misc_RNA (1)...(19): siRNA sense strand
cagacuuuguggaggccau

SEQ ID NO: 2255545 - RNA, 19 nt, Homo sapiens
  misc_RNA (1)...(19): siRNA sense strand
agacaaacuuggaacagcu

SEQ ID NO: 2255546 - RNA, 19 nt, Homo sapiens
  misc_RNA (1)...(19): siRNA sense strand
gagcuuugccagagugacu

SEQ ID NO: 2255547 - RNA, 19 nt, Homo sapiens
  misc_RNA (1)...(19): siRNA sense strand
cuaucagacacaugacauu

SEQ ID NO: 2255548 - RNA, 19 nt, Homo sapiens
  misc_RNA (1)...(19): siRNA sense strand
ugggaaucggcguggauga

SEQ ID NO: 2255549 - RNA, 19 nt, Homo sapiens
  misc_RNA (1)...(19): siRNA sense strand
cuucugggagggagccaaa

SEQ ID NO: 2255550 - RNA, 19 nt, Homo sapiens
  misc_RNA (1)...(19): siRNA sense strand
gagacaaggcagaaggcag

SEQ ID NO: 2255551 - RNA, 19 nt, Homo sapiens
  misc_RNA (1)...(19): siRNA sense strand
ggaacuacaucgagggccu

SEQ ID NO: 2255552 - RNA, 19 nt, Homo sapiens
  misc_RNA (1)...(19): siRNA sense strand
ggacaagauccuagaggug

SEQ ID NO: 2255553 - RNA, 19 nt, Homo sapiens
  misc_RNA (1)...(19): siRNA sense strand
ucacagacacugaggagca

SEQ ID NO: 2255554 - RNA, 19 nt, Homo sapiens
  misc_RNA (1)...(19): siRNA sense strand
augaguacaacaaggcuaa

SEQ ID NO: 2255555 - RNA, 19 nt, Homo sapiens
  misc_RNA (1)...(19): siRNA sense strand
ccuccaaggacgucaacau

SEQ ID NO: 2255556 - RNA, 19 nt, Homo sapiens
  misc_RNA (1)...(19): siRNA sense strand
ccaagagaggugugagucu

SEQ ID NO: 2255557 - RNA, 19 nt, Homo sapiens
  misc_RNA (1)...(19): siRNA sense strand
cuuacgaacagcugaugaa

SEQ ID NO: 2255558 - RNA, 19 nt, Homo sapiens
  misc_RNA (1)...(19): siRNA sense strand
ucaucaagcagaucgggaa

SEQ ID NO: 2255559 - RNA, 19 nt, Homo sapiens
  misc_RNA (1)...(19): siRNA sense strand
ggaccgcaucagcgaggaa

SEQ ID NO: 2255560 - RNA, 19 nt, Homo sapiens
  misc_RNA (1)...(19): siRNA sense strand
uggaaggaggccaagaaaa

SEQ ID NO: 2255561 - RNA, 19 nt, Homo sapiens
  misc_RNA (1)...(19): siRNA sense strand
cuggaaggaggccaagaaa

SEQ ID NO: 2255562 - RNA, 19 nt, Homo sapiens
  misc_RNA (1)...(19): siRNA sense strand
ucaacuggaaggugagcau

SEQ ID NO: 2255563 - RNA, 19 nt, Homo sapiens
  misc_RNA (1)...(19): siRNA sense strand
ugagcauguuuguggaagu

SEQ ID NO: 2255564 - RNA, 19 nt, Homo sapiens
  misc_RNA (1)...(19): siRNA sense strand
gcagugaggugguggccau

SEQ ID NO: 2255565 - RNA, 19 nt, Homo sapiens
  misc_RNA (1)...(19): siRNA sense strand
gcagagaccuucagugcca

SEQ ID NO: 2255566 - RNA, 19 nt, Homo sapiens
  misc_RNA (1)...(19): siRNA sense strand
gcuugguggcucagaacaa

SEQ ID NO: 2255567 - RNA, 19 nt, Homo sapiens
  misc_RNA (1)...(19): siRNA sense strand
ggugcaagugguagggaca

SEQ ID NO: 2255568 - RNA, 19 nt, Homo sapiens
  misc_RNA (1)...(19): siRNA sense strand
gcaagaacaucaaaccaga

SEQ ID NO: 2255569 - RNA, 19 nt, Homo sapiens
  misc_RNA (1)...(19): siRNA sense strand
ugcgagaacuucaggccaa

SEQ ID NO: 2255570 - RNA, 19 nt, Homo sapiens
  misc_RNA (1)...(19): siRNA sense strand
aaacaagaugucagagacu

SEQ ID NO: 2255571 - RNA, 19 nt, Homo sapiens
  misc_RNA (1)...(19): siRNA sense strand
gcaccaaggacuucccaga

SEQ ID NO: 2255572 - RNA, 19 nt, Homo sapiens
  misc_RNA (1)...(19): siRNA sense strand
cgccaaaccuggugguccu

SEQ ID NO: 2255573 - RNA, 19 nt, Homo sapiens
  misc_RNA (1)...(19): siRNA sense strand
uugcugaggugcugcccaa

SEQ ID NO: 2255574 - RNA, 19 nt, Homo sapiens
  misc_RNA (1)...(19): siRNA sense strand
ugaaggaccuggagccgga

SEQ ID NO: 2255575 - RNA, 19 nt, Homo sapiens
  misc_RNA (1)...(19): siRNA sense strand
gcagagaccuucagugcca

SEQ ID NO: 2255576 - RNA, 19 nt, Homo sapiens
  misc_RNA (1)...(19): siRNA sense strand
gcaagaacaucaaaccaga

SEQ ID NO: 2255577 - RNA, 19 nt, Homo sapiens
  misc_RNA (1)...(19): siRNA sense strand
ugcgagaacuucaggccaa

SEQ ID NO: 2255578 - RNA, 19 nt, Homo sapiens
  misc_RNA (1)...(19): siRNA sense strand
gguugaaagguaugagaaa

SEQ ID NO: 2255579 - RNA, 19 nt, Homo sapiens
  misc_RNA (1)...(19): siRNA sense strand
gagcaguggauguggcaaa

SEQ ID NO: 2255580 - RNA, 19 nt, Homo sapiens
  misc_RNA (1)...(19): siRNA sense strand
gggaauuagaaaaggaaua

SEQ ID NO: 2255581 - RNA, 19 nt, Homo sapiens
  misc_RNA (1)...(19): siRNA sense strand
ugucauaguaggagcuuua

SEQ ID NO: 2255582 - RNA, 19 nt, Homo sapiens
  misc_RNA (1)...(19): siRNA sense strand
caggauaguuuaagggcuu

SEQ ID NO: 2255583 - RNA, 19 nt, Homo sapiens
  misc_RNA (1)...(19): siRNA sense strand
cccaauuucuacagggaua

SEQ ID NO: 2255584 - RNA, 19 nt, Homo sapiens
  misc_RNA (1)...(19): siRNA sense strand
gggauaugccuuugcuaaa

SEQ ID NO: 2255585 - RNA, 19 nt, Homo sapiens
  misc_RNA (1)...(19): siRNA sense strand
gaagaaaggugauggcguu

SEQ ID NO: 2255586 - RNA, 19 nt, Homo sapiens
  misc_RNA (1)...(19): siRNA sense strand
auacaauacugcaggugaa

SEQ ID NO: 2255587 - RNA, 19 nt, Homo sapiens
  misc_RNA (1)...(19): siRNA sense strand
agacaaagccagagagggu

SEQ ID NO: 2255588 - RNA, 19 nt, Homo sapiens
  misc_RNA (1)...(19): siRNA sense strand
gagaauaaugagaauggaa

SEQ ID NO: 2255589 - RNA, 19 nt, Homo sapiens
  misc_RNA (1)...(19): siRNA sense strand
aaggaauagugaugggauu

SEQ ID NO: 2255590 - RNA, 19 nt, Homo sapiens
  misc_RNA (1)...(19): siRNA sense strand
agaaauuuggagaggagaa

SEQ ID NO: 2255591 - RNA, 19 nt, Homo sapiens
  misc_RNA (1)...(19): siRNA sense strand
aggaaaagcaugugugaau

SEQ ID NO: 2255592 - RNA, 19 nt, Homo sapiens
  misc_RNA (1)...(19): siRNA sense strand
guuacaaguuggaucgaau

SEQ ID NO: 2255593 - RNA, 19 nt, Homo sapiens
  misc_RNA (1)...(19): siRNA sense strand
gcauaauggacaauaucaa

SEQ ID NO: 2255594 - RNA, 19 nt, Homo sapiens
  misc_RNA (1)...(19): siRNA sense strand
aaauuugguuucagggcaa

SEQ ID NO: 2255595 - RNA, 19 nt, Homo sapiens
  misc_RNA (1)...(19): siRNA sense strand
caucauguuuauugcgaau

SEQ ID NO: 2255596 - RNA, 19 nt, Homo sapiens
  misc_RNA (1)...(19): siRNA sense strand
auagaaaggacaaggacau

SEQ ID NO: 2255597 - RNA, 19 nt, Homo sapiens
  misc_RNA (1)...(19): siRNA sense strand
agucauagcagcugcaaaa

SEQ ID NO: 2255598 - RNA, 19 nt, Homo sapiens
  misc_RNA (1)...(19): siRNA sense strand
agaauuacuggaaaggaaa

SEQ ID NO: 2255599 - RNA, 19 nt, Homo sapiens
  misc_RNA (1)...(19): siRNA sense strand
ggaaaggagaggcgguuca

SEQ ID NO: 2255600 - RNA, 19 nt, Homo sapiens
  misc_RNA (1)...(19): siRNA sense strand
ugucacucccagagaaaua

SEQ ID NO: 2255601 - RNA, 19 nt, Homo sapiens
  misc_RNA (1)...(19): siRNA sense strand
uuugaugaccucagaaaua

SEQ ID NO: 2255602 - RNA, 19 nt, Homo sapiens
  misc_RNA (1)...(19): siRNA sense strand
ggagauggugggacagauu

SEQ ID NO: 2255603 - RNA, 19 nt, Homo sapiens
  misc_RNA (1)...(19): siRNA sense strand
gugcauuucuccauggaau

SEQ ID NO: 2255604 - RNA, 19 nt, Homo sapiens
  misc_RNA (1)...(19): siRNA sense strand
aagaagauagaaaggacaa

SEQ ID NO: 2255605 - RNA, 19 nt, Homo sapiens
  misc_RNA (1)...(19): siRNA sense strand
ggaaacugaccuugguuau

SEQ ID NO: 2255606 - RNA, 19 nt, Homo sapiens
  misc_RNA (1)...(19): siRNA sense strand
agaaauagcccuggagcau

SEQ ID NO: 2255607 - RNA, 19 nt, Homo sapiens
  misc_RNA (1)...(19): siRNA sense strand
ccuuagacacagaaaguga

SEQ ID NO: 2255608 - RNA, 19 nt, Homo sapiens
  misc_RNA (1)...(19): siRNA sense strand
gagacaacaccaaagaaau

SEQ ID NO: 2255609 - RNA, 19 nt, Homo sapiens
  misc_RNA (1)...(19): siRNA sense strand
ggaugaaggagaauauaca

SEQ ID NO: 2255610 - RNA, 19 nt, Homo sapiens
  misc_RNA (1)...(19): siRNA sense strand
ggacauaaaggaugcaacu

SEQ ID NO: 2255611 - RNA, 19 nt, Homo sapiens
  misc_RNA (1)...(19): siRNA sense strand
gguuugaugaccucagaaa

SEQ ID NO: 2255612 - RNA, 19 nt, Homo sapiens
  misc_RNA (1)...(19): siRNA sense strand
gauagaaaggacaaggaca

SEQ ID NO: 2255613 - RNA, 19 nt, Homo sapiens
  misc_RNA (1)...(19): siRNA sense strand
gggacagauuacaaaugaa

SEQ ID NO: 2255614 - RNA, 19 nt, Homo sapiens
  misc_RNA (1)...(19): siRNA sense strand
ccgcacuguugcuggaauu

SEQ ID NO: 2255615 - RNA, 19 nt, Homo sapiens
  misc_RNA (1)...(19): siRNA sense strand
gaagaagauagaaaggaca

SEQ ID NO: 2255616 - RNA, 19 nt, Homo sapiens
  misc_RNA (1)...(19): siRNA sense strand
gaaaagcaugugugaauaa

SEQ ID NO: 2255617 - RNA, 19 nt, Homo sapiens
  misc_RNA (1)...(19): siRNA sense strand
gugggaaguuugugugcau

SEQ ID NO: 2255618 - RNA, 19 nt, Homo sapiens
  misc_RNA (1)...(19): siRNA sense strand
gcaugucagaagaugguua

SEQ ID NO: 2255619 - RNA, 19 nt, Homo sapiens
  misc_RNA (1)...(19): siRNA sense strand
cagaaauagcccuggagca

SEQ ID NO: 2255620 - RNA, 19 nt, Homo sapiens
  misc_RNA (1)...(19): siRNA sense strand
aagggaaggugaugauaga

SEQ ID NO: 2255621 - RNA, 19 nt, Homo sapiens
  misc_RNA (1)...(19): siRNA sense strand
gaaugaugguuuugaguca

SEQ ID NO: 2255622 - RNA, 19 nt, Homo sapiens
  misc_RNA (1)...(19): siRNA sense strand
cuacagauauggagguuac

SEQ ID NO: 2255623 - RNA, 19 nt, Homo sapiens
  misc_RNA (1)...(19): siRNA sense strand
aggugaagauucuaaauga

SEQ ID NO: 2255624 - RNA, 19 nt, Homo sapiens
  misc_RNA (1)...(19): siRNA sense strand
cuuaacauucaguggcuua

SEQ ID NO: 2255625 - RNA, 19 nt, Homo sapiens
  misc_RNA (1)...(19): siRNA sense strand
caucauugguuuugaacau

SEQ ID NO: 2255626 - RNA, 19 nt, Homo sapiens
  misc_RNA (1)...(19): siRNA sense strand
cagauauggagguuacuua

SEQ ID NO: 2255627 - RNA, 19 nt, Homo sapiens
  misc_RNA (1)...(19): siRNA sense strand
ccuggaugaaggagaauau

SEQ ID NO: 2255628 - RNA, 19 nt, Homo sapiens
  misc_RNA (1)...(19): siRNA sense strand
ccaugaagaauuacuggaa

SEQ ID NO: 2255629 - RNA, 19 nt, Homo sapiens
  misc_RNA (1)...(19): siRNA sense strand
cccuggagauggugggaca

SEQ ID NO: 2255630 - RNA, 19 nt, Homo sapiens
  misc_RNA (1)...(19): siRNA sense strand
cauugaagcacuugagacu

SEQ ID NO: 2255631 - RNA, 19 nt, Homo sapiens
  misc_RNA (1)...(19): siRNA sense strand
gaucgaaucaagggugaaa

SEQ ID NO: 2255632 - RNA, 19 nt, Homo sapiens
  misc_RNA (1)...(19): siRNA sense strand
uggcagagaagaugcaaca

SEQ ID NO: 2255633 - RNA, 19 nt, Homo sapiens
  misc_RNA (1)...(19): siRNA sense strand
aagccaauauuuacggauu

SEQ ID NO: 2255634 - RNA, 19 nt, Homo sapiens
  misc_RNA (1)...(19): siRNA sense strand
guagcauaauggacaauau

SEQ ID NO: 2255635 - RNA, 19 nt, Homo sapiens
  misc_RNA (1)...(19): siRNA sense strand
gggaaguuugugugcauuu

SEQ ID NO: 2255636 - RNA, 19 nt, Homo sapiens
  misc_RNA (1)...(19): siRNA sense strand
cuuccagaccagaggugaa

SEQ ID NO: 2255637 - RNA, 19 nt, Homo sapiens
  misc_RNA (1)...(19): siRNA sense strand
acauaaaggaugcaacuga

SEQ ID NO: 2255638 - RNA, 19 nt, Homo sapiens
  misc_RNA (1)...(19): siRNA sense strand
augaagaacugauggccca

SEQ ID NO: 2255639 - RNA, 19 nt, Homo sapiens
  misc_RNA (1)...(19): siRNA sense strand
ccgcucaaacauuggaauu

SEQ ID NO: 2255640 - RNA, 19 nt, Homo sapiens
  misc_RNA (1)...(19): siRNA sense strand
guugaaagguaugagaaaa

SEQ ID NO: 2255641 - RNA, 19 nt, Homo sapiens
  misc_RNA (1)...(19): siRNA sense strand
ccacacuuguccuggauga

SEQ ID NO: 2255642 - RNA, 19 nt, Homo sapiens
  misc_RNA (1)...(19): siRNA sense strand
caacaauggaagacauagu

SEQ ID NO: 2255643 - RNA, 19 nt, Homo sapiens
  misc_RNA (1)...(19): siRNA sense strand
ggucacagaucaauggugu

SEQ ID NO: 2255644 - RNA, 19 nt, Homo sapiens
  misc_RNA (1)...(19): siRNA sense strand
cagcaugggcacacaauca

SEQ ID NO: 2255645 - RNA, 19 nt, Homo sapiens
  misc_RNA (1)...(19): siRNA sense strand
augaagaauuacuggaaag

SEQ ID NO: 2255646 - RNA, 19 nt, Homo sapiens
  misc_RNA (1)...(19): siRNA sense strand
agggauaugccuuugcuaa

SEQ ID NO: 2255647 - RNA, 19 nt, Homo sapiens
  misc_RNA (1)...(19): siRNA sense strand
ccuguagcauaauggacaa

SEQ ID NO: 2255648 - RNA, 19 nt, Homo sapiens
  misc_RNA (1)...(19): siRNA sense strand
ggagaauauacaccaggaa

SEQ ID NO: 2255649 - RNA, 19 nt, Homo sapiens
  misc_RNA (1)...(19): siRNA sense strand
uuaaaguggcaaaugacaa

SEQ ID NO: 2255650 - RNA, 19 nt, Homo sapiens
  misc_RNA (1)...(19): siRNA sense strand
cuguuauuaaaguggcaaa

SEQ ID NO: 2255651 - RNA, 19 nt, Homo sapiens
  misc_RNA (1)...(19): siRNA sense strand
uguuugaagaacugagaca

SEQ ID NO: 2255652 - RNA, 19 nt, Homo sapiens
  misc_RNA (1)...(19): siRNA sense strand
agaccaaggaagcaaacuu

SEQ ID NO: 2255653 - RNA, 19 nt, Homo sapiens
  misc_RNA (1)...(19): siRNA sense strand
aggacuaauugucagccua

SEQ ID NO: 2255654 - RNA, 19 nt, Homo sapiens
  misc_RNA (1)...(19): siRNA sense strand
auggaguaccuguuauuaa

SEQ ID NO: 2255655 - RNA, 19 nt, Homo sapiens
  misc_RNA (1)...(19): siRNA sense strand
aggaauuugacaagaagua

SEQ ID NO: 2255656 - RNA, 19 nt, Homo sapiens
  misc_RNA (1)...(19): siRNA sense strand
cggaagagaugcaacagga

SEQ ID NO: 2255657 - RNA, 19 nt, Homo sapiens
  misc_RNA (1)...(19): siRNA sense strand
accgaaaggccgugaucaa

SEQ ID NO: 2255658 - RNA, 19 nt, Homo sapiens
  misc_RNA (1)...(19): siRNA sense strand
acaacauagagaaggacau

SEQ ID NO: 2255659 - RNA, 19 nt, Homo sapiens
  misc_RNA (1)...(19): siRNA sense strand
agaaggacauugcggcuca

SEQ ID NO: 2255660 - RNA, 19 nt, Homo sapiens
  misc_RNA (1)...(19): siRNA sense strand
cuucgguaguuaugugaca

SEQ ID NO: 2255661 - RNA, 19 nt, Homo sapiens
  misc_RNA (1)...(19): siRNA sense strand
gugaugacuccgugggcua

SEQ ID NO: 2255662 - RNA, 19 nt, Homo sapiens
  misc_RNA (1)...(19): siRNA sense strand
ccugcaucguggagagcaa

SEQ ID NO: 2255663 - RNA, 19 nt, Homo sapiens
  misc_RNA (1)...(19): siRNA sense strand
ccauggugggacaggguaa

SEQ ID NO: 2255664 - RNA, 19 nt, Homo sapiens
  misc_RNA (1)...(19): siRNA sense strand
ccaagaccauggugggaca

SEQ ID NO: 2255665 - RNA, 19 nt, Homo sapiens
  misc_RNA (1)...(19): siRNA sense strand
cugcagugauugaugccaa

SEQ ID NO: 2255666 - RNA, 19 nt, Homo sapiens
  misc_RNA (1)...(19): siRNA sense strand
gggcugagauccucgccaa

SEQ ID NO: 2255667 - RNA, 19 nt, Homo sapiens
  misc_RNA (1)...(19): siRNA sense strand
ggacaggguaagaccguga

SEQ ID NO: 2255668 - RNA, 19 nt, Homo sapiens
  misc_RNA (1)...(19): siRNA sense strand
ucaugaaggaggagaucuu

SEQ ID NO: 2255669 - RNA, 19 nt, Homo sapiens
  misc_RNA (1)...(19): siRNA sense strand
ccuucaaacaccuguggaa

SEQ ID NO: 2255670 - RNA, 19 nt, Homo sapiens
  misc_RNA (1)...(19): siRNA sense strand
caguguucucccaggauaa

SEQ ID NO: 2255671 - RNA, 19 nt, Homo sapiens
  misc_RNA (1)...(19): siRNA sense strand
ccaucaugaaggaggagau

SEQ ID NO: 2255672 - RNA, 19 nt, Homo sapiens
  misc_RNA (1)...(19): siRNA sense strand
cuauggaagcccagugaca

SEQ ID NO: 2255673 - RNA, 19 nt, Homo sapiens
  misc_RNA (1)...(19): siRNA sense strand
ccggcaacuucuacaucaa

SEQ ID NO: 2255674 - RNA, 19 nt, Homo sapiens
  misc_RNA (1)...(19): siRNA sense strand
ccgcaggucaucaaggaga

SEQ ID NO: 2255675 - RNA, 19 nt, Homo sapiens
  misc_RNA (1)...(19): siRNA sense strand
gagugggaccugaagccua

SEQ ID NO: 2255676 - RNA, 19 nt, Homo sapiens
  misc_RNA (1)...(19): siRNA sense strand
acuucuacaucaacgacaa

SEQ ID NO: 2255677 - RNA, 19 nt, Homo sapiens
  misc_RNA (1)...(19): siRNA sense strand
gacgacaaguacaaggaga

SEQ ID NO: 2255678 - RNA, 19 nt, Homo sapiens
  misc_RNA (1)...(19): siRNA sense strand
auaaggacgucgugcagga

SEQ ID NO: 2255679 - RNA, 19 nt, Homo sapiens
  misc_RNA (1)...(19): siRNA sense strand
gugaugacuccgugggcua

SEQ ID NO: 2255680 - RNA, 19 nt, Homo sapiens
  misc_RNA (1)...(19): siRNA sense strand
ccugcaucguggagagcaa

SEQ ID NO: 2255681 - RNA, 19 nt, Homo sapiens
  misc_RNA (1)...(19): siRNA sense strand
ccauggugggacaggguaa

SEQ ID NO: 2255682 - RNA, 19 nt, Homo sapiens
  misc_RNA (1)...(19): siRNA sense strand
ccaagaccauggugggaca

SEQ ID NO: 2255683 - RNA, 19 nt, Homo sapiens
  misc_RNA (1)...(19): siRNA sense strand
cugcagugauugaugccaa

SEQ ID NO: 2255684 - RNA, 19 nt, Homo sapiens
  misc_RNA (1)...(19): siRNA sense strand
gggcugagauccucgccaa

SEQ ID NO: 2255685 - RNA, 19 nt, Homo sapiens
  misc_RNA (1)...(19): siRNA sense strand
ggacaggguaagaccguga

SEQ ID NO: 2255686 - RNA, 19 nt, Homo sapiens
  misc_RNA (1)...(19): siRNA sense strand
ucaugaaggaggagaucuu

SEQ ID NO: 2255687 - RNA, 19 nt, Homo sapiens
  misc_RNA (1)...(19): siRNA sense strand
ccuucaaacaccuguggaa

SEQ ID NO: 2255688 - RNA, 19 nt, Homo sapiens
  misc_RNA (1)...(19): siRNA sense strand
caguguucucccaggauaa

SEQ ID NO: 2255689 - RNA, 19 nt, Homo sapiens
  misc_RNA (1)...(19): siRNA sense strand
ccaucaugaaggaggagau

SEQ ID NO: 2255690 - RNA, 19 nt, Homo sapiens
  misc_RNA (1)...(19): siRNA sense strand
cuauggaagcccagugaca

SEQ ID NO: 2255691 - RNA, 19 nt, Homo sapiens
  misc_RNA (1)...(19): siRNA sense strand
ccggcaacuucuacaucaa

SEQ ID NO: 2255692 - RNA, 19 nt, Homo sapiens
  misc_RNA (1)...(19): siRNA sense strand
ccgcaggucaucaaggaga

SEQ ID NO: 2255693 - RNA, 19 nt, Homo sapiens
  misc_RNA (1)...(19): siRNA sense strand
gagugggaccugaagccua

SEQ ID NO: 2255694 - RNA, 19 nt, Homo sapiens
  misc_RNA (1)...(19): siRNA sense strand
acuucuacaucaacgacaa

SEQ ID NO: 2255695 - RNA, 19 nt, Homo sapiens
  misc_RNA (1)...(19): siRNA sense strand
gacgacaaguacaaggaga

SEQ ID NO: 2255696 - RNA, 19 nt, Homo sapiens
  misc_RNA (1)...(19): siRNA sense strand
auaaggacgucgugcagga

SEQ ID NO: 2255697 - RNA, 19 nt, Homo sapiens
  misc_RNA (1)...(19): siRNA sense strand
gcggugaguucuacgggua

SEQ ID NO: 2255698 - RNA, 19 nt, Homo sapiens
  misc_RNA (1)...(19): siRNA sense strand
gcgcagaacauccacgaga

SEQ ID NO: 2255699 - RNA, 19 nt, Homo sapiens
  misc_RNA (1)...(19): siRNA sense strand
agaccauccuggaggccau

SEQ ID NO: 2255700 - RNA, 19 nt, Homo sapiens
  misc_RNA (1)...(19): siRNA sense strand
gaguacuacgagagcgaga

SEQ ID NO: 2255701 - RNA, 19 nt, Homo sapiens
  misc_RNA (1)...(19): siRNA sense strand
agaacgagcaggagcagga

SEQ ID NO: 2255702 - RNA, 19 nt, Homo sapiens
  misc_RNA (1)...(19): siRNA sense strand
ccgagaacgagcaggagca

SEQ ID NO: 2255703 - RNA, 19 nt, Homo sapiens
  misc_RNA (1)...(19): siRNA sense strand
cggugguggcgcagaacau

SEQ ID NO: 2255704 - RNA, 19 nt, Homo sapiens
  misc_RNA (1)...(19): siRNA sense strand
ucgaguacuacgagagcga

SEQ ID NO: 2255705 - RNA, 19 nt, Homo sapiens
  misc_RNA (1)...(19): siRNA sense strand
acccagaggacuacggaga

SEQ ID NO: 2255706 - RNA, 19 nt, Homo sapiens
  misc_RNA (1)...(19): siRNA sense strand
ggccagagcaagaaccuga

SEQ ID NO: 2255707 - RNA, 19 nt, Homo sapiens
  misc_RNA (1)...(19): siRNA sense strand
aggccaccaucgugaaaga

SEQ ID NO: 2255708 - RNA, 19 nt, Homo sapiens
  misc_RNA (1)...(19): siRNA sense strand
ugucgggagucgaggccuu

SEQ ID NO: 2255709 - RNA, 19 nt, Homo sapiens
  misc_RNA (1)...(19): siRNA sense strand
acucggugguggcgcagaa

SEQ ID NO: 2255710 - RNA, 19 nt, Homo sapiens
  misc_RNA (1)...(19): siRNA sense strand
agaacauccacgagaccau

SEQ ID NO: 2255711 - RNA, 19 nt, Homo sapiens
  misc_RNA (1)...(19): siRNA sense strand
caaacaacuucgaaggcaa

SEQ ID NO: 2255712 - RNA, 19 nt, Homo sapiens
  misc_RNA (1)...(19): siRNA sense strand
cagaugaagaagaggacuu

SEQ ID NO: 2255713 - RNA, 19 nt, Homo sapiens
  misc_RNA (1)...(19): siRNA sense strand
gugaaaagugaaaggagaa

SEQ ID NO: 2255714 - RNA, 19 nt, Homo sapiens
  misc_RNA (1)...(19): siRNA sense strand
aggacaaaucagaaagcuu

SEQ ID NO: 2255715 - RNA, 19 nt, Homo sapiens
  misc_RNA (1)...(19): siRNA sense strand
ugugaaaagugaaaggaga

SEQ ID NO: 2255716 - RNA, 19 nt, Homo sapiens
  misc_RNA (1)...(19): siRNA sense strand
ggauaaugcaacagcuuuu

SEQ ID NO: 2255717 - RNA, 19 nt, Homo sapiens
  misc_RNA (1)...(19): siRNA sense strand
aguuauugaugucaugcaa

SEQ ID NO: 2255718 - RNA, 19 nt, Homo sapiens
  misc_RNA (1)...(19): siRNA sense strand
uacaaagguaauugagaga

SEQ ID NO: 2255719 - RNA, 19 nt, Homo sapiens
  misc_RNA (1)...(19): siRNA sense strand
gcaacagcuuuuagcaaca

SEQ ID NO: 2255720 - RNA, 19 nt, Homo sapiens
  misc_RNA (1)...(19): siRNA sense strand
aggcaaaugugguggcgug

SEQ ID NO: 2255721 - RNA, 19 nt, Homo sapiens
  misc_RNA (1)...(19): siRNA sense strand
caaacaacuucgaaggcaa

SEQ ID NO: 2255722 - RNA, 19 nt, Homo sapiens
  misc_RNA (1)...(19): siRNA sense strand
cagaugaagaagaggacuu

SEQ ID NO: 2255723 - RNA, 19 nt, Homo sapiens
  misc_RNA (1)...(19): siRNA sense strand
gugaaaagugaaaggagaa

SEQ ID NO: 2255724 - RNA, 19 nt, Homo sapiens
  misc_RNA (1)...(19): siRNA sense strand
aggacaaaucagaaagcuu

SEQ ID NO: 2255725 - RNA, 19 nt, Homo sapiens
  misc_RNA (1)...(19): siRNA sense strand
ugugaaaagugaaaggaga

SEQ ID NO: 2255726 - RNA, 19 nt, Homo sapiens
  misc_RNA (1)...(19): siRNA sense strand
ggauaaugcaacagcuuuu

SEQ ID NO: 2255727 - RNA, 19 nt, Homo sapiens
  misc_RNA (1)...(19): siRNA sense strand
aguuauugaugucaugcaa

SEQ ID NO: 2255728 - RNA, 19 nt, Homo sapiens
  misc_RNA (1)...(19): siRNA sense strand
uacaaagguaauugagaga

SEQ ID NO: 2255729 - RNA, 19 nt, Homo sapiens
  misc_RNA (1)...(19): siRNA sense strand
gcaacagcuuuuagcaaca

SEQ ID NO: 2255730 - RNA, 19 nt, Homo sapiens
  misc_RNA (1)...(19): siRNA sense strand
aggcaaaugugguggcgug

SEQ ID NO: 2255731 - RNA, 19 nt, Homo sapiens
  misc_RNA (1)...(19): siRNA sense strand
gagcugagaugcacgguga

SEQ ID NO: 2255732 - RNA, 19 nt, Homo sapiens
  misc_RNA (1)...(19): siRNA sense strand
ccaugugccucuuggccaa

SEQ ID NO: 2255733 - RNA, 19 nt, Homo sapiens
  misc_RNA (1)...(19): siRNA sense strand
cagaagauccugugcagca

SEQ ID NO: 2255734 - RNA, 19 nt, Homo sapiens
  misc_RNA (1)...(19): siRNA sense strand
gcugagaaugccaggcuga

SEQ ID NO: 2255735 - RNA, 19 nt, Homo sapiens
  misc_RNA (1)...(19): siRNA sense strand
aaguaaagauucugaggag

SEQ ID NO: 2255736 - RNA, 19 nt, Homo sapiens
  misc_RNA (1)...(19): siRNA sense strand
guaaagauucugaggaguc

SEQ ID NO: 2255737 - RNA, 19 nt, Homo sapiens
  misc_RNA (1)...(19): siRNA sense strand
augcagagcuggagaccac

SEQ ID NO: 2255738 - RNA, 19 nt, Homo sapiens
  misc_RNA (1)...(19): siRNA sense strand
uggccaacuaccuggagaa

SEQ ID NO: 2255739 - RNA, 19 nt, Homo sapiens
  misc_RNA (1)...(19): siRNA sense strand
guacaaucgaggagcucca

SEQ ID NO: 2255740 - RNA, 19 nt, Homo sapiens
  misc_RNA (1)...(19): siRNA sense strand
accacgagcaggaaguaaa

SEQ ID NO: 2255741 - RNA, 19 nt, Homo sapiens
  misc_RNA (1)...(19): siRNA sense strand
ccugaauggccaugagaag

SEQ ID NO: 2255742 - RNA, 19 nt, Homo sapiens
  misc_RNA (1)...(19): siRNA sense strand
gggcucaguacgaggccau

SEQ ID NO: 2255743 - RNA, 19 nt, Homo sapiens
  misc_RNA (1)...(19): siRNA sense strand
gccaugagaaggagaccau

SEQ ID NO: 2255744 - RNA, 19 nt, Homo sapiens
  misc_RNA (1)...(19): siRNA sense strand
gcccagaugcagagccuca

SEQ ID NO: 2255745 - RNA, 19 nt, Homo sapiens
  misc_RNA (1)...(19): siRNA sense strand
aggcccugguggagaauaa

SEQ ID NO: 2255746 - RNA, 19 nt, Homo sapiens
  misc_RNA (1)...(19): siRNA sense strand
agaagaaucacgaggagga

SEQ ID NO: 2255747 - RNA, 19 nt, Homo sapiens
  misc_RNA (1)...(19): siRNA sense strand
aggcugaccuggaggcuca

SEQ ID NO: 2255748 - RNA, 19 nt, Homo sapiens
  misc_RNA (1)...(19): siRNA sense strand
gcaccaucaccgaggagau

SEQ ID NO: 2255749 - RNA, 19 nt, Homo sapiens
  misc_RNA (1)...(19): siRNA sense strand
agguguuacuggacgucaa

SEQ ID NO: 2255750 - RNA, 19 nt, Homo sapiens
  misc_RNA (1)...(19): siRNA sense strand
agacugaggagcugaacca

SEQ ID NO: 2255751 - RNA, 19 nt, Homo sapiens
  misc_RNA (1)...(19): siRNA sense strand
cgcuagagauugagcugca

SEQ ID NO: 2255752 - RNA, 19 nt, Homo sapiens
  misc_RNA (1)...(19): siRNA sense strand
uggccaacuaccuggagaa

SEQ ID NO: 2255753 - RNA, 19 nt, Homo sapiens
  misc_RNA (1)...(19): siRNA sense strand
gcagagauguggaggccug

SEQ ID NO: 2255754 - RNA, 19 nt, Homo sapiens
  misc_RNA (1)...(19): siRNA sense strand
uaguggaggccgacaucaa

SEQ ID NO: 2255755 - RNA, 19 nt, Homo sapiens
  misc_RNA (1)...(19): siRNA sense strand
aguccuacuucaagaccau

SEQ ID NO: 2255756 - RNA, 19 nt, Homo sapiens
  misc_RNA (1)...(19): siRNA sense strand
gacugaauguggaggugga

SEQ ID NO: 2255757 - RNA, 19 nt, Homo sapiens
  misc_RNA (1)...(19): siRNA sense strand
gcaaagagcaaaagggaau

SEQ ID NO: 2255758 - RNA, 19 nt, Homo sapiens
  misc_RNA (1)...(19): siRNA sense strand
cggcacagcauuagagaga

SEQ ID NO: 2255759 - RNA, 19 nt, Homo sapiens
  misc_RNA (1)...(19): siRNA sense strand
ccgacaaugguuugauaaa

SEQ ID NO: 2255760 - RNA, 19 nt, Homo sapiens
  misc_RNA (1)...(19): siRNA sense strand
gccgcaaguucgagaguau

SEQ ID NO: 2255761 - RNA, 19 nt, Homo sapiens
  misc_RNA (1)...(19): siRNA sense strand
cugaaaucauucuggaaga

SEQ ID NO: 2255762 - RNA, 19 nt, Homo sapiens
  misc_RNA (1)...(19): siRNA sense strand
cuaaaggcuugcaggaaaa

SEQ ID NO: 2255763 - RNA, 19 nt, Homo sapiens
  misc_RNA (1)...(19): siRNA sense strand
guguuaacugauagcgaaa

SEQ ID NO: 2255764 - RNA, 19 nt, Homo sapiens
  misc_RNA (1)...(19): siRNA sense strand
acaacuuggaagaagguaa

SEQ ID NO: 2255765 - RNA, 19 nt, Homo sapiens
  misc_RNA (1)...(19): siRNA sense strand
uggcagugauuuauggaau

SEQ ID NO: 2255766 - RNA, 19 nt, Homo sapiens
  misc_RNA (1)...(19): siRNA sense strand
ccuucuaggauuucaguaa

SEQ ID NO: 2255767 - RNA, 19 nt, Homo sapiens
  misc_RNA (1)...(19): siRNA sense strand
cauccauguaugaggaauu

SEQ ID NO: 2255768 - RNA, 19 nt, Homo sapiens
  misc_RNA (1)...(19): siRNA sense strand
uuauggaauuggugaaaca

SEQ ID NO: 2255769 - RNA, 19 nt, Homo sapiens
  misc_RNA (1)...(19): siRNA sense strand
agaaagagagccuggacuu

SEQ ID NO: 2255770 - RNA, 19 nt, Homo sapiens
  misc_RNA (1)...(19): siRNA sense strand
ccacaagucuuuuggccaa

SEQ ID NO: 2255771 - RNA, 19 nt, Homo sapiens
  misc_RNA (1)...(19): siRNA sense strand
gaggaauuggacagggcaa

SEQ ID NO: 2255772 - RNA, 19 nt, Homo sapiens
  misc_RNA (1)...(19): siRNA sense strand
aaaaugaggaggaggaaau

SEQ ID NO: 2255773 - RNA, 19 nt, Homo sapiens
  misc_RNA (1)...(19): siRNA sense strand
uggcauggaacuuaguaaa

SEQ ID NO: 2255774 - RNA, 19 nt, Homo sapiens
  misc_RNA (1)...(19): siRNA sense strand
uggaauuggugaaacaaca

SEQ ID NO: 2255775 - RNA, 19 nt, Homo sapiens
  misc_RNA (1)...(19): siRNA sense strand
aggaggaaauagaacuaau

SEQ ID NO: 2255776 - RNA, 19 nt, Homo sapiens
  misc_RNA (1)...(19): siRNA sense strand
cuacaaugcagaugaaacu

SEQ ID NO: 2255777 - RNA, 19 nt, Homo sapiens
  misc_RNA (1)...(19): siRNA sense strand
cuaugguagaggagaaaga

SEQ ID NO: 2255778 - RNA, 19 nt, Homo sapiens
  misc_RNA (1)...(19): siRNA sense strand
gauuuauggaauuggugaa

SEQ ID NO: 2255779 - RNA, 19 nt, Homo sapiens
  misc_RNA (1)...(19): siRNA sense strand
ucccuaugguagaggagaa

SEQ ID NO: 2255780 - RNA, 19 nt, Homo sapiens
  misc_RNA (1)...(19): siRNA sense strand
gagagaauuuacagccuga

SEQ ID NO: 2255781 - RNA, 19 nt, Homo sapiens
  misc_RNA (1)...(19): siRNA sense strand
ugccaaugcaacagguuua

SEQ ID NO: 2255782 - RNA, 19 nt, Homo sapiens
  misc_RNA (1)...(19): siRNA sense strand
aaucaucagaagagcacaa

SEQ ID NO: 2255783 - RNA, 19 nt, Homo sapiens
  misc_RNA (1)...(19): siRNA sense strand
gagcacaaggccaggcaga

SEQ ID NO: 2255784 - RNA, 19 nt, Homo sapiens
  misc_RNA (1)...(19): siRNA sense strand
agaugaauccagugaaaau

SEQ ID NO: 2255785 - RNA, 19 nt, Homo sapiens
  misc_RNA (1)...(19): siRNA sense strand
gugaaaaugaggaggagga

SEQ ID NO: 2255786 - RNA, 19 nt, Homo sapiens
  misc_RNA (1)...(19): siRNA sense strand
aaucaaagguaaaugcacu

SEQ ID NO: 2255787 - RNA, 19 nt, Homo sapiens
  misc_RNA (1)...(19): siRNA sense strand
aaagaaacuugaagacgga

SEQ ID NO: 2255788 - RNA, 19 nt, Homo sapiens
  misc_RNA (1)...(19): siRNA sense strand
ccaacacauccaaaugaaa

SEQ ID NO: 2255789 - RNA, 19 nt, Homo sapiens
  misc_RNA (1)...(19): siRNA sense strand
ggauuaucuagaacaacaa

SEQ ID NO: 2255790 - RNA, 19 nt, Homo sapiens
  misc_RNA (1)...(19): siRNA sense strand
aggaaaaggcugugcucuu

SEQ ID NO: 2255791 - RNA, 19 nt, Homo sapiens
  misc_RNA (1)...(19): siRNA sense strand
gcacuuuaugaaauagcaa

SEQ ID NO: 2255792 - RNA, 19 nt, Homo sapiens
  misc_RNA (1)...(19): siRNA sense strand
gaagauauuucuguggcua

SEQ ID NO: 2255793 - RNA, 19 nt, Homo sapiens
  misc_RNA (1)...(19): siRNA sense strand
gagaaauuaucgugcaggu

SEQ ID NO: 2255794 - RNA, 19 nt, Homo sapiens
  misc_RNA (1)...(19): siRNA sense strand
gaucuaaaggcuugcagga

SEQ ID NO: 2255795 - RNA, 19 nt, Homo sapiens
  misc_RNA (1)...(19): siRNA sense strand
ggauaauucaccaacacau

SEQ ID NO: 2255796 - RNA, 19 nt, Homo sapiens
  misc_RNA (1)...(19): siRNA sense strand
caaccagcaaagagcaaaa

SEQ ID NO: 2255797 - RNA, 19 nt, Homo sapiens
  misc_RNA (1)...(19): siRNA sense strand
auuaaauggagaugagacu

SEQ ID NO: 2255798 - RNA, 19 nt, Homo sapiens
  misc_RNA (1)...(19): siRNA sense strand
cgaaaucaucagaagagca

SEQ ID NO: 2255799 - RNA, 19 nt, Homo sapiens
  misc_RNA (1)...(19): siRNA sense strand
gaacaaaucuacaaugcag

SEQ ID NO: 2255800 - RNA, 19 nt, Homo sapiens
  misc_RNA (1)...(19): siRNA sense strand
gaaaaugaggaggaggaaa

SEQ ID NO: 2255801 - RNA, 19 nt, Homo sapiens
  misc_RNA (1)...(19): siRNA sense strand
gaagagaaauuaucgugca

SEQ ID NO: 2255802 - RNA, 19 nt, Homo sapiens
  misc_RNA (1)...(19): siRNA sense strand
aacuaauuccagagaaaca

SEQ ID NO: 2255803 - RNA, 19 nt, Homo sapiens
  misc_RNA (1)...(19): siRNA sense strand
aguguuaacugauagcgaa

SEQ ID NO: 2255804 - RNA, 19 nt, Homo sapiens
  misc_RNA (1)...(19): siRNA sense strand
aagaaagagucacaaucau

SEQ ID NO: 2255805 - RNA, 19 nt, Homo sapiens
  misc_RNA (1)...(19): siRNA sense strand
ugaaaauguccuaagguca

SEQ ID NO: 2255806 - RNA, 19 nt, Homo sapiens
  misc_RNA (1)...(19): siRNA sense strand
augaggaggaggaaauaga

SEQ ID NO: 2255807 - RNA, 19 nt, Homo sapiens
  misc_RNA (1)...(19): siRNA sense strand
aauugaagaaagagucaca

SEQ ID NO: 2255808 - RNA, 19 nt, Homo sapiens
  misc_RNA (1)...(19): siRNA sense strand
uugugaugcucuagauaaa

SEQ ID NO: 2255809 - RNA, 19 nt, Homo sapiens
  misc_RNA (1)...(19): siRNA sense strand
gaaaagaagcuuaugguga

SEQ ID NO: 2255810 - RNA, 19 nt, Homo sapiens
  misc_RNA (1)...(19): siRNA sense strand
guggcagugugguggcaaa

SEQ ID NO: 2255811 - RNA, 19 nt, Homo sapiens
  misc_RNA (1)...(19): siRNA sense strand
gcaucgacacauagaggau

SEQ ID NO: 2255812 - RNA, 19 nt, Homo sapiens
  misc_RNA (1)...(19): siRNA sense strand
aggaugaacugaagcagca

SEQ ID NO: 2255813 - RNA, 19 nt, Homo sapiens
  misc_RNA (1)...(19): siRNA sense strand
aaggauugggagagaugaa

SEQ ID NO: 2255814 - RNA, 19 nt, Homo sapiens
  misc_RNA (1)...(19): siRNA sense strand
cagcaagaaaagaagcuua

SEQ ID NO: 2255815 - RNA, 19 nt, Homo sapiens
  misc_RNA (1)...(19): siRNA sense strand
augaauacaaagagcacuu

SEQ ID NO: 2255816 - RNA, 19 nt, Homo sapiens
  misc_RNA (1)...(19): siRNA sense strand
aauagaaacccuccagcaa

SEQ ID NO: 2255817 - RNA, 19 nt, Homo sapiens
  misc_RNA (1)...(19): siRNA sense strand
aucgacacauagaggauaa

SEQ ID NO: 2255818 - RNA, 19 nt, Homo sapiens
  misc_RNA (1)...(19): siRNA sense strand
gguugagaugcaagagcuu

SEQ ID NO: 2255819 - RNA, 19 nt, Homo sapiens
  misc_RNA (1)...(19): siRNA sense strand
gauugggagagaugaaaca

SEQ ID NO: 2255820 - RNA, 19 nt, Homo sapiens
  misc_RNA (1)...(19): siRNA sense strand
ggauuugucucgaccgcuu

SEQ ID NO: 2255821 - RNA, 19 nt, Homo sapiens
  misc_RNA (1)...(19): siRNA sense strand
caggaaagggacaggcgga

SEQ ID NO: 2255822 - RNA, 19 nt, Homo sapiens
  misc_RNA (1)...(19): siRNA sense strand
agggacaggcggauaucaa

SEQ ID NO: 2255823 - RNA, 19 nt, Homo sapiens
  misc_RNA (1)...(19): siRNA sense strand
ucuuagugcuuaucggaca

SEQ ID NO: 2255824 - RNA, 19 nt, Homo sapiens
  misc_RNA (1)...(19): siRNA sense strand
aguguaagucccagaaguu

SEQ ID NO: 2255825 - RNA, 19 nt, Homo sapiens
  misc_RNA (1)...(19): siRNA sense strand
gcagaaguuuggauggaug

SEQ ID NO: 2255826 - RNA, 19 nt, Homo sapiens
  misc_RNA (1)...(19): siRNA sense strand
guuuggaugccauggucaa

SEQ ID NO: 2255827 - RNA, 19 nt, Homo sapiens
  misc_RNA (1)...(19): siRNA sense strand
ugauagaguacgcuugauu

SEQ ID NO: 2255828 - RNA, 19 nt, Homo sapiens
  misc_RNA (1)...(19): siRNA sense strand
acugaagcagcaagaagaa

SEQ ID NO: 2255829 - RNA, 19 nt, Homo sapiens
  misc_RNA (1)...(19): siRNA sense strand
aguuguguguccuguuaua

SEQ ID NO: 2255830 - RNA, 19 nt, Homo sapiens
  misc_RNA (1)...(19): siRNA sense strand
ugguggaugacuugaguga

SEQ ID NO: 2255831 - RNA, 19 nt, Homo sapiens
  misc_RNA (1)...(19): siRNA sense strand
gauuaggaccaauaagcga

SEQ ID NO: 2255832 - RNA, 19 nt, Homo sapiens
  misc_RNA (1)...(19): siRNA sense strand
ggaugaauacaaagagcac

SEQ ID NO: 2255833 - RNA, 19 nt, Homo sapiens
  misc_RNA (1)...(19): siRNA sense strand
ccauggucaaggaggcaau

SEQ ID NO: 2255834 - RNA, 19 nt, Homo sapiens
  misc_RNA (1)...(19): siRNA sense strand
ucaacgaggaugaacugaa

SEQ ID NO: 2255835 - RNA, 19 nt, Homo sapiens
  misc_RNA (1)...(19): siRNA sense strand
cccaaacaggaaagggaca

SEQ ID NO: 2255836 - RNA, 19 nt, Homo sapiens
  misc_RNA (1)...(19): siRNA sense strand
ggaacguaugacacaggaa

SEQ ID NO: 2255837 - RNA, 19 nt, Homo sapiens
  misc_RNA (1)...(19): siRNA sense strand
ucucugaggccaagggaca

SEQ ID NO: 2255838 - RNA, 19 nt, Homo sapiens
  misc_RNA (1)...(19): siRNA sense strand
ugguggugcuggagaacuu

SEQ ID NO: 2255839 - RNA, 19 nt, Homo sapiens
  misc_RNA (1)...(19): siRNA sense strand
gccugguggugcuggagaa

SEQ ID NO: 2255840 - RNA, 19 nt, Homo sapiens
  misc_RNA (1)...(19): siRNA sense strand
gcaaaggaguucauggcua

SEQ ID NO: 2255841 - RNA, 19 nt, Homo sapiens
  misc_RNA (1)...(19): siRNA sense strand
ccaccggaacagagagaaa

SEQ ID NO: 2255842 - RNA, 19 nt, Homo sapiens
  misc_RNA (1)...(19): siRNA sense strand
uggaagagguacaggcaga

SEQ ID NO: 2255843 - RNA, 19 nt, Homo sapiens
  misc_RNA (1)...(19): siRNA sense strand
gcaaugaggugaacgcaga

SEQ ID NO: 2255844 - RNA, 19 nt, Homo sapiens
  misc_RNA (1)...(19): siRNA sense strand
ggaugaagcucuuacacca

SEQ ID NO: 2255845 - RNA, 19 nt, Homo sapiens
  misc_RNA (1)...(19): siRNA sense strand
acaaaggcaaugaggugaa

SEQ ID NO: 2255846 - RNA, 19 nt, Homo sapiens
  misc_RNA (1)...(19): siRNA sense strand
acacuagagacaaaggcaa

SEQ ID NO: 2255847 - RNA, 19 nt, Homo sapiens
  misc_RNA (1)...(19): siRNA sense strand
aauuaguaucuguggaaca

SEQ ID NO: 2255848 - RNA, 19 nt, Homo sapiens
  misc_RNA (1)...(19): siRNA sense strand
cacuagagacaaaggcaau

SEQ ID NO: 2255849 - RNA, 19 nt, Homo sapiens
  misc_RNA (1)...(19): siRNA sense strand
agacaaaggcaaugaggug

SEQ ID NO: 2255850 - RNA, 19 nt, Homo sapiens
  misc_RNA (1)...(19): siRNA sense strand
gguaaauauacaauggucu

SEQ ID NO: 2255851 - RNA, 19 nt, Homo sapiens
  misc_RNA (1)...(19): siRNA sense strand
ucacuuuggaagagguaca

SEQ ID NO: 2255852 - RNA, 19 nt, Homo sapiens
  misc_RNA (1)...(19): siRNA sense strand
ucaacaucacaguggauuu

SEQ ID NO: 2255853 - RNA, 19 nt, Homo sapiens
  misc_RNA (1)...(19): siRNA sense strand
ucauuuuggggaagggaaa

SEQ ID NO: 2255854 - RNA, 19 nt, Homo sapiens
  misc_RNA (1)...(19): siRNA sense strand
agauaagggcaaugaggaa

SEQ ID NO: 2255855 - RNA, 19 nt, Homo sapiens
  misc_RNA (1)...(19): siRNA sense strand
cagagauuguggagcggaa

SEQ ID NO: 2255856 - RNA, 19 nt, Homo sapiens
  misc_RNA (1)...(19): siRNA sense strand
ggaacauuuaacagggcaa

SEQ ID NO: 2255857 - RNA, 19 nt, Homo sapiens
  misc_RNA (1)...(19): siRNA sense strand
ggacacuauaagaugguga

SEQ ID NO: 2255858 - RNA, 19 nt, Homo sapiens
  misc_RNA (1)...(19): siRNA sense strand
cggaggagucucagcacuu

SEQ ID NO: 2255859 - RNA, 19 nt, Homo sapiens
  misc_RNA (1)...(19): siRNA sense strand
ccgaagucucagugcccua

SEQ ID NO: 2255860 - RNA, 19 nt, Homo sapiens
  misc_RNA (1)...(19): siRNA sense strand
gagauaagggcaaugagga

SEQ ID NO: 2255861 - RNA, 19 nt, Homo sapiens
  misc_RNA (1)...(19): siRNA sense strand
cgugaugaagagugggacu

SEQ ID NO: 2255862 - RNA, 19 nt, Homo sapiens
  misc_RNA (1)...(19): siRNA sense strand
gggaacaccaccugcgcua

SEQ ID NO: 2255863 - RNA, 19 nt, Homo sapiens
  misc_RNA (1)...(19): siRNA sense strand
ccaugaagcgggacggcau

SEQ ID NO: 2255864 - RNA, 19 nt, Homo sapiens
  misc_RNA (1)...(19): siRNA sense strand
gcauugggucagugcggua

SEQ ID NO: 2255865 - RNA, 19 nt, Homo sapiens
  misc_RNA (1)...(19): siRNA sense strand
ccaauaucacaguggacau

SEQ ID NO: 2255866 - RNA, 19 nt, Homo sapiens
  misc_RNA (1)...(19): siRNA sense strand
cuacuuuggagguguguca

SEQ ID NO: 2255867 - RNA, 19 nt, Homo sapiens
  misc_RNA (1)...(19): siRNA sense strand
agguuuaccaagauucaaa

SEQ ID NO: 2255868 - RNA, 19 nt, Homo sapiens
  misc_RNA (1)...(19): siRNA sense strand
ugaggaagaugaagggcaa

SEQ ID NO: 2255869 - RNA, 19 nt, Homo sapiens
  misc_RNA (1)...(19): siRNA sense strand
cagaagggccagagccuga

SEQ ID NO: 2255870 - RNA, 19 nt, Homo sapiens
  misc_RNA (1)...(19): siRNA sense strand
ccugauaccaagagggugu

SEQ ID NO: 2255871 - RNA, 19 nt, Homo sapiens
  misc_RNA (1)...(19): siRNA sense strand
augaagagcagaugaaacu

SEQ ID NO: 2255872 - RNA, 19 nt, Homo sapiens
  misc_RNA (1)...(19): siRNA sense strand
agagagagaggaugaggga

SEQ ID NO: 2255873 - RNA, 19 nt, Homo sapiens
  misc_RNA (1)...(19): siRNA sense strand
agagagaggaugagggagc

SEQ ID NO: 2255874 - RNA, 19 nt, Homo sapiens
  misc_RNA (1)...(19): siRNA sense strand
gggaugaagaacuggcuga

SEQ ID NO: 2255875 - RNA, 19 nt, Homo sapiens
  misc_RNA (1)...(19): siRNA sense strand
uggaggaugcgcugcgaaa

SEQ ID NO: 2255876 - RNA, 19 nt, Homo sapiens
  misc_RNA (1)...(19): siRNA sense strand
ccuacgaguacgagcgcga

SEQ ID NO: 2255877 - RNA, 19 nt, Homo sapiens
  misc_RNA (1)...(19): siRNA sense strand
aguacgagcgcgagggacu

SEQ ID NO: 2255878 - RNA, 19 nt, Homo sapiens
  misc_RNA (1)...(19): siRNA sense strand
gcgagggacuguacgagca

SEQ ID NO: 2255879 - RNA, 19 nt, Homo sapiens
  misc_RNA (1)...(19): siRNA sense strand
gggaugaagaacuggcuga

SEQ ID NO: 2255880 - RNA, 19 nt, Homo sapiens
  misc_RNA (1)...(19): siRNA sense strand
uggaggaugcgcugcgaaa

SEQ ID NO: 2255881 - RNA, 19 nt, Homo sapiens
  misc_RNA (1)...(19): siRNA sense strand
ccuacgaguacgagcgcga

SEQ ID NO: 2255882 - RNA, 19 nt, Homo sapiens
  misc_RNA (1)...(19): siRNA sense strand
aguacgagcgcgagggacu

SEQ ID NO: 2255883 - RNA, 19 nt, Homo sapiens
  misc_RNA (1)...(19): siRNA sense strand
gcgagggacuguacgagca

SEQ ID NO: 2255884 - RNA, 19 nt, Homo sapiens
  misc_RNA (1)...(19): siRNA sense strand
ccguccaguugguggguaa

SEQ ID NO: 2255885 - RNA, 19 nt, Homo sapiens
  misc_RNA (1)...(19): siRNA sense strand
ggaaggaguucgugcgcac

SEQ ID NO: 2255886 - RNA, 19 nt, Homo sapiens
  misc_RNA (1)...(19): siRNA sense strand
aggcagagaucgaagccgu

SEQ ID NO: 2255887 - RNA, 19 nt, Homo sapiens
  misc_RNA (1)...(19): siRNA sense strand
ccguccaguugguggguaa

SEQ ID NO: 2255888 - RNA, 19 nt, Homo sapiens
  misc_RNA (1)...(19): siRNA sense strand
ggaaggaguucgugcgcac

SEQ ID NO: 2255889 - RNA, 19 nt, Homo sapiens
  misc_RNA (1)...(19): siRNA sense strand
aggcagagaucgaagccgu

SEQ ID NO: 2255890 - RNA, 19 nt, Homo sapiens
  misc_RNA (1)...(19): siRNA sense strand
ccguccaguugguggguaa

SEQ ID NO: 2255891 - RNA, 19 nt, Homo sapiens
  misc_RNA (1)...(19): siRNA sense strand
ggaaggaguucgugcgcac

SEQ ID NO: 2255892 - RNA, 19 nt, Homo sapiens
  misc_RNA (1)...(19): siRNA sense strand
aggcagagaucgaagccgu

SEQ ID NO: 2255893 - RNA, 19 nt, Homo sapiens
  misc_RNA (1)...(19): siRNA sense strand
ccguccaguugguggguaa

SEQ ID NO: 2255894 - RNA, 19 nt, Homo sapiens
  misc_RNA (1)...(19): siRNA sense strand
ggaaggaguucgugcgcac

SEQ ID NO: 2255895 - RNA, 19 nt, Homo sapiens
  misc_RNA (1)...(19): siRNA sense strand
aggcagagaucgaagccgu

SEQ ID NO: 2255896 - RNA, 19 nt, Homo sapiens
  misc_RNA (1)...(19): siRNA sense strand
ccguccaguugguggguaa

SEQ ID NO: 2255897 - RNA, 19 nt, Homo sapiens
  misc_RNA (1)...(19): siRNA sense strand
ggaaggaguucgugcgcac

SEQ ID NO: 2255898 - RNA, 19 nt, Homo sapiens
  misc_RNA (1)...(19): siRNA sense strand
aggcagagaucgaagccgu

SEQ ID NO: 2255899 - RNA, 19 nt, Homo sapiens
  misc_RNA (1)...(19): siRNA sense strand
ccugaagagcagugaagua

SEQ ID NO: 2255900 - RNA, 19 nt, Homo sapiens
  misc_RNA (1)...(19): siRNA sense strand
ggaagaaacaucugggcga

SEQ ID NO: 2255901 - RNA, 19 nt, Homo sapiens
  misc_RNA (1)...(19): siRNA sense strand
gggaauuaacagcuaacaa

SEQ ID NO: 2255902 - RNA, 19 nt, Homo sapiens
  misc_RNA (1)...(19): siRNA sense strand
aggaagaauuguagauaag

SEQ ID NO: 2255903 - RNA, 19 nt, Homo sapiens
  misc_RNA (1)...(19): siRNA sense strand
gggauauacaggugcuaau

SEQ ID NO: 2255904 - RNA, 19 nt, Homo sapiens
  misc_RNA (1)...(19): siRNA sense strand
cggcauugacuuugaagau

SEQ ID NO: 2255905 - RNA, 19 nt, Homo sapiens
  misc_RNA (1)...(19): siRNA sense strand
cgacagacuggaaaagaaa

SEQ ID NO: 2255906 - RNA, 19 nt, Homo sapiens
  misc_RNA (1)...(19): siRNA sense strand
agaagaucgacguguuaaa

SEQ ID NO: 2255907 - RNA, 19 nt, Homo sapiens
  misc_RNA (1)...(19): siRNA sense strand
gcgacagacuggaaaagaa

SEQ ID NO: 2255908 - RNA, 19 nt, Homo sapiens
  misc_RNA (1)...(19): siRNA sense strand
guugacaaggugugggaau

SEQ ID NO: 2255909 - RNA, 19 nt, Homo sapiens
  misc_RNA (1)...(19): siRNA sense strand
gcacaguccagaagcguga

SEQ ID NO: 2255910 - RNA, 19 nt, Homo sapiens
  misc_RNA (1)...(19): siRNA sense strand
uugaggugauucagauaaa

SEQ ID NO: 2255911 - RNA, 19 nt, Homo sapiens
  misc_RNA (1)...(19): siRNA sense strand
ugacuuugaagguggaauu

SEQ ID NO: 2255912 - RNA, 19 nt, Homo sapiens
  misc_RNA (1)...(19): siRNA sense strand
guacaaaucaacaaggcca

SEQ ID NO: 2255913 - RNA, 19 nt, Homo sapiens
  misc_RNA (1)...(19): siRNA sense strand
caguuguggaauaugaaua

SEQ ID NO: 2255914 - RNA, 19 nt, Homo sapiens
  misc_RNA (1)...(19): siRNA sense strand
cuuuauggcacucugaaua

SEQ ID NO: 2255915 - RNA, 19 nt, Homo sapiens
  misc_RNA (1)...(19): siRNA sense strand
auucguggcaggugugaua

SEQ ID NO: 2255916 - RNA, 19 nt, Homo sapiens
  misc_RNA (1)...(19): siRNA sense strand
gagagaaccaacuggacca

SEQ ID NO: 2255917 - RNA, 19 nt, Homo sapiens
  misc_RNA (1)...(19): siRNA sense strand
gcacauucguggcaggugu

SEQ ID NO: 2255918 - RNA, 19 nt, Homo sapiens
  misc_RNA (1)...(19): siRNA sense strand
gcugcuaacacuugaagau

SEQ ID NO: 2255919 - RNA, 19 nt, Homo sapiens
  misc_RNA (1)...(19): siRNA sense strand
ugaaguagacaauuggaga

SEQ ID NO: 2255920 - RNA, 19 nt, Homo sapiens
  misc_RNA (1)...(19): siRNA sense strand
caugggagucacaggaaga

SEQ ID NO: 2255921 - RNA, 19 nt, Homo sapiens
  misc_RNA (1)...(19): siRNA sense strand
gugugggaauuaacagcua

SEQ ID NO: 2255922 - RNA, 19 nt, Homo sapiens
  misc_RNA (1)...(19): siRNA sense strand
uugacaaggugugggaauu

SEQ ID NO: 2255923 - RNA, 19 nt, Homo sapiens
  misc_RNA (1)...(19): siRNA sense strand
ccaaacaucaaacggguca

SEQ ID NO: 2255924 - RNA, 19 nt, Homo sapiens
  misc_RNA (1)...(19): siRNA sense strand
gauuggaguaggcggcauu

SEQ ID NO: 2255925 - RNA, 19 nt, Homo sapiens
  misc_RNA (1)...(19): siRNA sense strand
ucgcaugaaaccugacauu

SEQ ID NO: 2255926 - RNA, 19 nt, Homo sapiens
  misc_RNA (1)...(19): siRNA sense strand
gcuacaagccacaggcaag

SEQ ID NO: 2255927 - RNA, 19 nt, Homo sapiens
  misc_RNA (1)...(19): siRNA sense strand
gcuacauagaucugacuga

SEQ ID NO: 2255928 - RNA, 19 nt, Homo sapiens
  misc_RNA (1)...(19): siRNA sense strand
gacacugggcugagcgaga

SEQ ID NO: 2255929 - RNA, 19 nt, Homo sapiens
  misc_RNA (1)...(19): siRNA sense strand
aggauuugcuccagaugca

SEQ ID NO: 2255930 - RNA, 19 nt, Homo sapiens
  misc_RNA (1)...(19): siRNA sense strand
ccugaagagcagugaagua

SEQ ID NO: 2255931 - RNA, 19 nt, Homo sapiens
  misc_RNA (1)...(19): siRNA sense strand
ggaagaaacaucugggcga

SEQ ID NO: 2255932 - RNA, 19 nt, Homo sapiens
  misc_RNA (1)...(19): siRNA sense strand
gcaccaaagacucgggaga

SEQ ID NO: 2255933 - RNA, 19 nt, Homo sapiens
  misc_RNA (1)...(19): siRNA sense strand
gggaauuaacagcuaacaa

SEQ ID NO: 2255934 - RNA, 19 nt, Homo sapiens
  misc_RNA (1)...(19): siRNA sense strand
aggaagaauuguagauaag

SEQ ID NO: 2255935 - RNA, 19 nt, Homo sapiens
  misc_RNA (1)...(19): siRNA sense strand
gggauauacaggugcuaau

SEQ ID NO: 2255936 - RNA, 19 nt, Homo sapiens
  misc_RNA (1)...(19): siRNA sense strand
cggcauugacuuugaagau

SEQ ID NO: 2255937 - RNA, 19 nt, Homo sapiens
  misc_RNA (1)...(19): siRNA sense strand
cgacagacuggaaaagaaa

SEQ ID NO: 2255938 - RNA, 19 nt, Homo sapiens
  misc_RNA (1)...(19): siRNA sense strand
gcuaaaagacgcuuguuaa

SEQ ID NO: 2255939 - RNA, 19 nt, Homo sapiens
  misc_RNA (1)...(19): siRNA sense strand
agaagaucgacguguuaaa

SEQ ID NO: 2255940 - RNA, 19 nt, Homo sapiens
  misc_RNA (1)...(19): siRNA sense strand
cgagaagauuccuguggau

SEQ ID NO: 2255941 - RNA, 19 nt, Homo sapiens
  misc_RNA (1)...(19): siRNA sense strand
gcgacagacuggaaaagaa

SEQ ID NO: 2255942 - RNA, 19 nt, Homo sapiens
  misc_RNA (1)...(19): siRNA sense strand
guugacaaggugugggaau

SEQ ID NO: 2255943 - RNA, 19 nt, Homo sapiens
  misc_RNA (1)...(19): siRNA sense strand
gcacaguccagaagcguga

SEQ ID NO: 2255944 - RNA, 19 nt, Homo sapiens
  misc_RNA (1)...(19): siRNA sense strand
ggauguacuuuccaaacaa

SEQ ID NO: 2255945 - RNA, 19 nt, Homo sapiens
  misc_RNA (1)...(19): siRNA sense strand
uugaggugauucagauaaa

SEQ ID NO: 2255946 - RNA, 19 nt, Homo sapiens
  misc_RNA (1)...(19): siRNA sense strand
ugacuuugaagguggaauu

SEQ ID NO: 2255947 - RNA, 19 nt, Homo sapiens
  misc_RNA (1)...(19): siRNA sense strand
ccugguacaucgagaagau

SEQ ID NO: 2255948 - RNA, 19 nt, Homo sapiens
  misc_RNA (1)...(19): siRNA sense strand
guacaaaucaacaaggcca

SEQ ID NO: 2255949 - RNA, 19 nt, Homo sapiens
  misc_RNA (1)...(19): siRNA sense strand
caguuguggaauaugaaua

SEQ ID NO: 2255950 - RNA, 19 nt, Homo sapiens
  misc_RNA (1)...(19): siRNA sense strand
cgggagaacuggaaaggcu

SEQ ID NO: 2255951 - RNA, 19 nt, Homo sapiens
  misc_RNA (1)...(19): siRNA sense strand
cuuuauggcacucugaaua

SEQ ID NO: 2255952 - RNA, 19 nt, Homo sapiens
  misc_RNA (1)...(19): siRNA sense strand
auucguggcaggugugaua

SEQ ID NO: 2255953 - RNA, 19 nt, Homo sapiens
  misc_RNA (1)...(19): siRNA sense strand
gagagaaccaacuggacca

SEQ ID NO: 2255954 - RNA, 19 nt, Homo sapiens
  misc_RNA (1)...(19): siRNA sense strand
gcacauucguggcaggugu

SEQ ID NO: 2255955 - RNA, 19 nt, Homo sapiens
  misc_RNA (1)...(19): siRNA sense strand
ggcagaggcuccugguaca

SEQ ID NO: 2255956 - RNA, 19 nt, Homo sapiens
  misc_RNA (1)...(19): siRNA sense strand
gcugcuaacacuugaagau

SEQ ID NO: 2255957 - RNA, 19 nt, Homo sapiens
  misc_RNA (1)...(19): siRNA sense strand
ugaaguagacaauuggaga

SEQ ID NO: 2255958 - RNA, 19 nt, Homo sapiens
  misc_RNA (1)...(19): siRNA sense strand
caugggagucacaggaaga

SEQ ID NO: 2255959 - RNA, 19 nt, Homo sapiens
  misc_RNA (1)...(19): siRNA sense strand
gugugggaauuaacagcua

SEQ ID NO: 2255960 - RNA, 19 nt, Homo sapiens
  misc_RNA (1)...(19): siRNA sense strand
uugacaaggugugggaauu

SEQ ID NO: 2255961 - RNA, 19 nt, Homo sapiens
  misc_RNA (1)...(19): siRNA sense strand
ccaaacaucaaacggguca

SEQ ID NO: 2255962 - RNA, 19 nt, Homo sapiens
  misc_RNA (1)...(19): siRNA sense strand
gauuggaguaggcggcauu

SEQ ID NO: 2255963 - RNA, 19 nt, Homo sapiens
  misc_RNA (1)...(19): siRNA sense strand
ucgcaugaaaccugacauu

SEQ ID NO: 2255964 - RNA, 19 nt, Homo sapiens
  misc_RNA (1)...(19): siRNA sense strand
gcuacaagccacaggcaag

SEQ ID NO: 2255965 - RNA, 19 nt, Homo sapiens
  misc_RNA (1)...(19): siRNA sense strand
gcuacauagaucugacuga

SEQ ID NO: 2255966 - RNA, 19 nt, Homo sapiens
  misc_RNA (1)...(19): siRNA sense strand
gacacugggcugagcgaga

SEQ ID NO: 2255967 - RNA, 19 nt, Homo sapiens
  misc_RNA (1)...(19): siRNA sense strand
aggauuugcuccagaugca

SEQ ID NO: 2255968 - RNA, 19 nt, Homo sapiens
  misc_RNA (1)...(19): siRNA sense strand
caccaaagacucgggagaa

SEQ ID NO: 2255969 - RNA, 19 nt, Homo sapiens
  misc_RNA (1)...(19): siRNA sense strand
ggcacagagacgaggagaa

SEQ ID NO: 2255970 - RNA, 19 nt, Homo sapiens
  misc_RNA (1)...(19): siRNA sense strand
gggcaaggugauccagcaa

SEQ ID NO: 2255971 - RNA, 19 nt, Homo sapiens
  misc_RNA (1)...(19): siRNA sense strand
agacagaggagcugcacca

SEQ ID NO: 2255972 - RNA, 19 nt, Homo sapiens
  misc_RNA (1)...(19): siRNA sense strand
cggcagagcaaggggcuua

SEQ ID NO: 2255973 - RNA, 19 nt, Homo sapiens
  misc_RNA (1)...(19): siRNA sense strand
gaggagaagauguggagac

SEQ ID NO: 2255974 - RNA, 19 nt, Homo sapiens
  misc_RNA (1)...(19): siRNA sense strand
augagaagccacaggugau

SEQ ID NO: 2255975 - RNA, 19 nt, Homo sapiens
  misc_RNA (1)...(19): siRNA sense strand
gccaaauccaagcaggcua

SEQ ID NO: 2255976 - RNA, 19 nt, Homo sapiens
  misc_RNA (1)...(19): siRNA sense strand
aggagaagauguggagacu

SEQ ID NO: 2255977 - RNA, 19 nt, Homo sapiens
  misc_RNA (1)...(19): siRNA sense strand
ggcacagagacgaggagaa

SEQ ID NO: 2255978 - RNA, 19 nt, Homo sapiens
  misc_RNA (1)...(19): siRNA sense strand
gggcaaggugauccagcaa

SEQ ID NO: 2255979 - RNA, 19 nt, Homo sapiens
  misc_RNA (1)...(19): siRNA sense strand
agacagaggagcugcacca

SEQ ID NO: 2255980 - RNA, 19 nt, Homo sapiens
  misc_RNA (1)...(19): siRNA sense strand
cggcagagcaaggggcuua

SEQ ID NO: 2255981 - RNA, 19 nt, Homo sapiens
  misc_RNA (1)...(19): siRNA sense strand
gaggagaagauguggagac

SEQ ID NO: 2255982 - RNA, 19 nt, Homo sapiens
  misc_RNA (1)...(19): siRNA sense strand
augagaagccacaggugau

SEQ ID NO: 2255983 - RNA, 19 nt, Homo sapiens
  misc_RNA (1)...(19): siRNA sense strand
gccaaauccaagcaggcua

SEQ ID NO: 2255984 - RNA, 19 nt, Homo sapiens
  misc_RNA (1)...(19): siRNA sense strand
aggagaagauguggagacu

SEQ ID NO: 2255985 - RNA, 19 nt, Homo sapiens
  misc_RNA (1)...(19): siRNA sense strand
gaagguaacuggaaggaga

SEQ ID NO: 2255986 - RNA, 19 nt, Homo sapiens
  misc_RNA (1)...(19): siRNA sense strand
ugguugaagaagauagaaa

SEQ ID NO: 2255987 - RNA, 19 nt, Homo sapiens
  misc_RNA (1)...(19): siRNA sense strand
aauaaaggugcuagaagaa

SEQ ID NO: 2255988 - RNA, 19 nt, Homo sapiens
  misc_RNA (1)...(19): siRNA sense strand
gggaauuauggucgaguuu

SEQ ID NO: 2255989 - RNA, 19 nt, Homo sapiens
  misc_RNA (1)...(19): siRNA sense strand
aaggagaacaacagcuaaa

SEQ ID NO: 2255990 - RNA, 19 nt, Homo sapiens
  misc_RNA (1)...(19): siRNA sense strand
gguugaagaagauagaaau

SEQ ID NO: 2255991 - RNA, 19 nt, Homo sapiens
  misc_RNA (1)...(19): siRNA sense strand
gggcagaauuuguuuggca

SEQ ID NO: 2255992 - RNA, 19 nt, Homo sapiens
  misc_RNA (1)...(19): siRNA sense strand
aaacaaggucaguugaaca

SEQ ID NO: 2255993 - RNA, 19 nt, Homo sapiens
  misc_RNA (1)...(19): siRNA sense strand
ccagaauaaaggugcuaga

SEQ ID NO: 2255994 - RNA, 19 nt, Homo sapiens
  misc_RNA (1)...(19): siRNA sense strand
gggcugauauugaacgcuu

SEQ ID NO: 2255995 - RNA, 19 nt, Homo sapiens
  misc_RNA (1)...(19): siRNA sense strand
ucaagaaacuccagagcag

SEQ ID NO: 2255996 - RNA, 19 nt, Homo sapiens
  misc_RNA (1)...(19): siRNA sense strand
aaggagacugugaaugaaa

SEQ ID NO: 2255997 - RNA, 19 nt, Homo sapiens
  misc_RNA (1)...(19): siRNA sense strand
gugcaggaaacaugaacuu

SEQ ID NO: 2255998 - RNA, 19 nt, Homo sapiens
  misc_RNA (1)...(19): siRNA sense strand
gaacaaaagaaccgagacu

SEQ ID NO: 2255999 - RNA, 19 nt, Homo sapiens
  misc_RNA (1)...(19): siRNA sense strand
ccucauugaaacaagguca

SEQ ID NO: 2256000 - RNA, 19 nt, Homo sapiens
  misc_RNA (1)...(19): siRNA sense strand
aaucaguguuucagaagca

SEQ ID NO: 2256001 - RNA, 19 nt, Homo sapiens
  misc_RNA (1)...(19): siRNA sense strand
agaaaugggugauggacug

SEQ ID NO: 2256002 - RNA, 19 nt, Homo sapiens
  misc_RNA (1)...(19): siRNA sense strand
augaagaacauuaugcaga

SEQ ID NO: 2256003 - RNA, 19 nt, Homo sapiens
  misc_RNA (1)...(19): siRNA sense strand
acgcaugggcugauauuga

SEQ ID NO: 2256004 - RNA, 19 nt, Homo sapiens
  misc_RNA (1)...(19): siRNA sense strand
uuuggaagaugaagaacau

SEQ ID NO: 2256005 - RNA, 19 nt, Homo sapiens
  misc_RNA (1)...(19): siRNA sense strand
agagagaagccagaauaaa

SEQ ID NO: 2256006 - RNA, 19 nt, Homo sapiens
  misc_RNA (1)...(19): siRNA sense strand
gaggcgacggauugguuua

SEQ ID NO: 2256007 - RNA, 19 nt, Homo sapiens
  misc_RNA (1)...(19): siRNA sense strand
gaagcagcagugugaggaa

SEQ ID NO: 2256008 - RNA, 19 nt, Homo sapiens
  misc_RNA (1)...(19): siRNA sense strand
aacccagacaagagauuua

SEQ ID NO: 2256009 - RNA, 19 nt, Homo sapiens
  misc_RNA (1)...(19): siRNA sense strand
cagaucaguaugugcaaaa

SEQ ID NO: 2256010 - RNA, 19 nt, Homo sapiens
  misc_RNA (1)...(19): siRNA sense strand
aauuugaguuguugagaag

SEQ ID NO: 2256011 - RNA, 19 nt, Homo sapiens
  misc_RNA (1)...(19): siRNA sense strand
aagaaaugggugauggacu

SEQ ID NO: 2256012 - RNA, 19 nt, Homo sapiens
  misc_RNA (1)...(19): siRNA sense strand
ggaacugguaacugggacu

SEQ ID NO: 2256013 - RNA, 19 nt, Homo sapiens
  misc_RNA (1)...(19): siRNA sense strand
gguaacugggacugugaga

SEQ ID NO: 2256014 - RNA, 19 nt, Homo sapiens
  misc_RNA (1)...(19): siRNA sense strand
uaaaugaaggagaacaaca

SEQ ID NO: 2256015 - RNA, 19 nt, Homo sapiens
  misc_RNA (1)...(19): siRNA sense strand
gcuucaaagaacaaaagaa

SEQ ID NO: 2256016 - RNA, 19 nt, Homo sapiens
  misc_RNA (1)...(19): siRNA sense strand
uaaacaaggucgcugguca

SEQ ID NO: 2256017 - RNA, 19 nt, Homo sapiens
  misc_RNA (1)...(19): siRNA sense strand
aaacaaggucgcuggucau

SEQ ID NO: 2256018 - RNA, 19 nt, Homo sapiens
  misc_RNA (1)...(19): siRNA sense strand
uuagaggagaugauggaau

SEQ ID NO: 2256019 - RNA, 19 nt, Homo sapiens
  misc_RNA (1)...(19): siRNA sense strand
uaaacaaggucgcugguca

SEQ ID NO: 2256020 - RNA, 19 nt, Homo sapiens
  misc_RNA (1)...(19): siRNA sense strand
aaacaaggucgcuggucau

SEQ ID NO: 2256021 - RNA, 19 nt, Homo sapiens
  misc_RNA (1)...(19): siRNA sense strand
uuagaggagaugauggaau

SEQ ID NO: 2256022 - RNA, 19 nt, Homo sapiens
  misc_RNA (1)...(19): siRNA sense strand
gaacaacaaacuaggccaa

SEQ ID NO: 2256023 - RNA, 19 nt, Homo sapiens
  misc_RNA (1)...(19): siRNA sense strand
gaaaggacaugaaugguga

SEQ ID NO: 2256024 - RNA, 19 nt, Homo sapiens
  misc_RNA (1)...(19): siRNA sense strand
cagaaagccccgugagaga

SEQ ID NO: 2256025 - RNA, 19 nt, Homo sapiens
  misc_RNA (1)...(19): siRNA sense strand
cuguggagaagaagaggaa

SEQ ID NO: 2256026 - RNA, 19 nt, Homo sapiens
  misc_RNA (1)...(19): siRNA sense strand
aggaauuagaggacugauu

SEQ ID NO: 2256027 - RNA, 19 nt, Homo sapiens
  misc_RNA (1)...(19): siRNA sense strand
cagcacuugccgaggaauu

SEQ ID NO: 2256028 - RNA, 19 nt, Homo sapiens
  misc_RNA (1)...(19): siRNA sense strand
guggagaagaagaggaaug

SEQ ID NO: 2256029 - RNA, 19 nt, Homo sapiens
  misc_RNA (1)...(19): siRNA sense strand
ccaccaaacacaagcucau

SEQ ID NO: 2256030 - RNA, 19 nt, Homo sapiens
  misc_RNA (1)...(19): siRNA sense strand
ggaugaaaagggaagauuu

SEQ ID NO: 2256031 - RNA, 19 nt, Homo sapiens
  misc_RNA (1)...(19): siRNA sense strand
aggugaauguggcaggaga

SEQ ID NO: 2256032 - RNA, 19 nt, Homo sapiens
  misc_RNA (1)...(19): siRNA sense strand
ggaagaagugcaauggcca

SEQ ID NO: 2256033 - RNA, 19 nt, Homo sapiens
  misc_RNA (1)...(19): siRNA sense strand
uccuggaccuggagaagaa

SEQ ID NO: 2256034 - RNA, 19 nt, Homo sapiens
  misc_RNA (1)...(19): siRNA sense strand
uggagaagaaugagcaacu

SEQ ID NO: 2256035 - RNA, 19 nt, Homo sapiens
  misc_RNA (1)...(19): siRNA sense strand
ccgaggaauuagaggacug

SEQ ID NO: 2256036 - RNA, 19 nt, Homo sapiens
  misc_RNA (1)...(19): siRNA sense strand
ggauugcucucgugggcuu

SEQ ID NO: 2256037 - RNA, 19 nt, Homo sapiens
  misc_RNA (1)...(19): siRNA sense strand
ccaaaguguucaauggaug

SEQ ID NO: 2256038 - RNA, 19 nt, Homo sapiens
  misc_RNA (1)...(19): siRNA sense strand
cuuugaaacugaaggcugu

SEQ ID NO: 2256039 - RNA, 19 nt, Homo sapiens
  misc_RNA (1)...(19): siRNA sense strand
acacaagcucauagagauc

SEQ ID NO: 2256040 - RNA, 19 nt, Homo sapiens
  misc_RNA (1)...(19): siRNA sense strand
agagugugacuguggagaa

SEQ ID NO: 2256041 - RNA, 19 nt, Homo sapiens
  misc_RNA (1)...(19): siRNA sense strand
gcaagcgaaaggugaucaa

SEQ ID NO: 2256042 - RNA, 19 nt, Homo sapiens
  misc_RNA (1)...(19): siRNA sense strand
caaauagagaggacggagu

SEQ ID NO: 2256043 - RNA, 19 nt, Homo sapiens
  misc_RNA (1)...(19): siRNA sense strand
ggaaacuguggaaaggaca

SEQ ID NO: 2256044 - RNA, 19 nt, Homo sapiens
  misc_RNA (1)...(19): siRNA sense strand
gugaacacaggaagugcaa

SEQ ID NO: 2256045 - RNA, 19 nt, Homo sapiens
  misc_RNA (1)...(19): siRNA sense strand
gugaucaacacuccggaaa

SEQ ID NO: 2256046 - RNA, 19 nt, Homo sapiens
  misc_RNA (1)...(19): siRNA sense strand
cccaauuaaucacgggcau

SEQ ID NO: 2256047 - RNA, 19 nt, Homo sapiens
  misc_RNA (1)...(19): siRNA sense strand
gcaacaugagagaugcgaa

SEQ ID NO: 2256048 - RNA, 19 nt, Homo sapiens
  misc_RNA (1)...(19): siRNA sense strand
gaagaagugcaauggccau

SEQ ID NO: 2256049 - RNA, 19 nt, Homo sapiens
  misc_RNA (1)...(19): siRNA sense strand
cuggaguguugguggccau

SEQ ID NO: 2256050 - RNA, 19 nt, Homo sapiens
  misc_RNA (1)...(19): siRNA sense strand
ccaugaaguauguggagcu

SEQ ID NO: 2256051 - RNA, 19 nt, Homo sapiens
  misc_RNA (1)...(19): siRNA sense strand
caacaugagagaugcgaag

SEQ ID NO: 2256052 - RNA, 19 nt, Homo sapiens
  misc_RNA (1)...(19): siRNA sense strand
ccuggagaagaaugagcaa

SEQ ID NO: 2256053 - RNA, 19 nt, Homo sapiens
  misc_RNA (1)...(19): siRNA sense strand
cccagaaguaccaugacaa

SEQ ID NO: 2256054 - RNA, 19 nt, Homo sapiens
  misc_RNA (1)...(19): siRNA sense strand
ugaucaacacuccggaaau

SEQ ID NO: 2256055 - RNA, 19 nt, Homo sapiens
  misc_RNA (1)...(19): siRNA sense strand
aagaagaggaauguaacaa

SEQ ID NO: 2256056 - RNA, 19 nt, Homo sapiens
  misc_RNA (1)...(19): siRNA sense strand
gaacaacaaacuaggccaa

SEQ ID NO: 2256057 - RNA, 19 nt, Homo sapiens
  misc_RNA (1)...(19): siRNA sense strand
gaaaggacaugaaugguga

SEQ ID NO: 2256058 - RNA, 19 nt, Homo sapiens
  misc_RNA (1)...(19): siRNA sense strand
cagaaagccccgugagaga

SEQ ID NO: 2256059 - RNA, 19 nt, Homo sapiens
  misc_RNA (1)...(19): siRNA sense strand
cuguggagaagaagaggaa

SEQ ID NO: 2256060 - RNA, 19 nt, Homo sapiens
  misc_RNA (1)...(19): siRNA sense strand
aggaauuagaggacugauu

SEQ ID NO: 2256061 - RNA, 19 nt, Homo sapiens
  misc_RNA (1)...(19): siRNA sense strand
cagcacuugccgaggaauu

SEQ ID NO: 2256062 - RNA, 19 nt, Homo sapiens
  misc_RNA (1)...(19): siRNA sense strand
guggagaagaagaggaaug

SEQ ID NO: 2256063 - RNA, 19 nt, Homo sapiens
  misc_RNA (1)...(19): siRNA sense strand
ccaccaaacacaagcucau

SEQ ID NO: 2256064 - RNA, 19 nt, Homo sapiens
  misc_RNA (1)...(19): siRNA sense strand
ggaugaaaagggaagauuu

SEQ ID NO: 2256065 - RNA, 19 nt, Homo sapiens
  misc_RNA (1)...(19): siRNA sense strand
aggugaauguggcaggaga

SEQ ID NO: 2256066 - RNA, 19 nt, Homo sapiens
  misc_RNA (1)...(19): siRNA sense strand
ggaagaagugcaauggcca

SEQ ID NO: 2256067 - RNA, 19 nt, Homo sapiens
  misc_RNA (1)...(19): siRNA sense strand
uccuggaccuggagaagaa

SEQ ID NO: 2256068 - RNA, 19 nt, Homo sapiens
  misc_RNA (1)...(19): siRNA sense strand
uggagaagaaugagcaacu

SEQ ID NO: 2256069 - RNA, 19 nt, Homo sapiens
  misc_RNA (1)...(19): siRNA sense strand
ccgaggaauuagaggacug

SEQ ID NO: 2256070 - RNA, 19 nt, Homo sapiens
  misc_RNA (1)...(19): siRNA sense strand
ggauugcucucgugggcuu

SEQ ID NO: 2256071 - RNA, 19 nt, Homo sapiens
  misc_RNA (1)...(19): siRNA sense strand
ccaaaguguucaauggaug

SEQ ID NO: 2256072 - RNA, 19 nt, Homo sapiens
  misc_RNA (1)...(19): siRNA sense strand
cuuugaaacugaaggcugu

SEQ ID NO: 2256073 - RNA, 19 nt, Homo sapiens
  misc_RNA (1)...(19): siRNA sense strand
acacaagcucauagagauc

SEQ ID NO: 2256074 - RNA, 19 nt, Homo sapiens
  misc_RNA (1)...(19): siRNA sense strand
agagugugacuguggagaa

SEQ ID NO: 2256075 - RNA, 19 nt, Homo sapiens
  misc_RNA (1)...(19): siRNA sense strand
gcaagcgaaaggugaucaa

SEQ ID NO: 2256076 - RNA, 19 nt, Homo sapiens
  misc_RNA (1)...(19): siRNA sense strand
caaauagagaggacggagu

SEQ ID NO: 2256077 - RNA, 19 nt, Homo sapiens
  misc_RNA (1)...(19): siRNA sense strand
ggaaacuguggaaaggaca

SEQ ID NO: 2256078 - RNA, 19 nt, Homo sapiens
  misc_RNA (1)...(19): siRNA sense strand
gugaacacaggaagugcaa

SEQ ID NO: 2256079 - RNA, 19 nt, Homo sapiens
  misc_RNA (1)...(19): siRNA sense strand
gugaucaacacuccggaaa

SEQ ID NO: 2256080 - RNA, 19 nt, Homo sapiens
  misc_RNA (1)...(19): siRNA sense strand
cccaauuaaucacgggcau

SEQ ID NO: 2256081 - RNA, 19 nt, Homo sapiens
  misc_RNA (1)...(19): siRNA sense strand
gcaacaugagagaugcgaa

SEQ ID NO: 2256082 - RNA, 19 nt, Homo sapiens
  misc_RNA (1)...(19): siRNA sense strand
gaagaagugcaauggccau

SEQ ID NO: 2256083 - RNA, 19 nt, Homo sapiens
  misc_RNA (1)...(19): siRNA sense strand
cuggaguguugguggccau

SEQ ID NO: 2256084 - RNA, 19 nt, Homo sapiens
  misc_RNA (1)...(19): siRNA sense strand
ccaugaaguauguggagcu

SEQ ID NO: 2256085 - RNA, 19 nt, Homo sapiens
  misc_RNA (1)...(19): siRNA sense strand
caacaugagagaugcgaag

SEQ ID NO: 2256086 - RNA, 19 nt, Homo sapiens
  misc_RNA (1)...(19): siRNA sense strand
ccuggagaagaaugagcaa

SEQ ID NO: 2256087 - RNA, 19 nt, Homo sapiens
  misc_RNA (1)...(19): siRNA sense strand
cccagaaguaccaugacaa

SEQ ID NO: 2256088 - RNA, 19 nt, Homo sapiens
  misc_RNA (1)...(19): siRNA sense strand
ugaucaacacuccggaaau

SEQ ID NO: 2256089 - RNA, 19 nt, Homo sapiens
  misc_RNA (1)...(19): siRNA sense strand
aagaagaggaauguaacaa

SEQ ID NO: 2256090 - RNA, 19 nt, Homo sapiens
  misc_RNA (1)...(19): siRNA sense strand
gggcagauuuauugggcca

SEQ ID NO: 2256091 - RNA, 19 nt, Homo sapiens
  misc_RNA (1)...(19): siRNA sense strand
gcaccaacguguacggcau

SEQ ID NO: 2256092 - RNA, 19 nt, Homo sapiens
  misc_RNA (1)...(19): siRNA sense strand
cguugugcgugcugagcua

SEQ ID NO: 2256093 - RNA, 19 nt, Homo sapiens
  misc_RNA (1)...(19): siRNA sense strand
uggcagaggcugaggcugu

SEQ ID NO: 2256094 - RNA, 19 nt, Homo sapiens
  misc_RNA (1)...(19): siRNA sense strand
gcaaggcuuuggagggcau

SEQ ID NO: 2256095 - RNA, 19 nt, Homo sapiens
  misc_RNA (1)...(19): siRNA sense strand
aggucuacacgcagaguuu

SEQ ID NO: 2256096 - RNA, 19 nt, Homo sapiens
  misc_RNA (1)...(19): siRNA sense strand
aguaugaccugguggcagu

SEQ ID NO: 2256097 - RNA, 19 nt, Homo sapiens
  misc_RNA (1)...(19): siRNA sense strand
uggcagugggcaaggcuuu

SEQ ID NO: 2256098 - RNA, 19 nt, Homo sapiens
  misc_RNA (1)...(19): siRNA sense strand
ugugcacgcuucagggcaa

SEQ ID NO: 2256099 - RNA, 19 nt, Homo sapiens
  misc_RNA (1)...(19): siRNA sense strand
ccaaagagguuguuguaaa

SEQ ID NO: 2256100 - RNA, 19 nt, Homo sapiens
  misc_RNA (1)...(19): siRNA sense strand
ccaaagagcuggucgggua

SEQ ID NO: 2256101 - RNA, 19 nt, Homo sapiens
  misc_RNA (1)...(19): siRNA sense strand
gaguaaaguaagugaaaca

SEQ ID NO: 2256102 - RNA, 19 nt, Homo sapiens
  misc_RNA (1)...(19): siRNA sense strand
ugagaaagcuagacuuaaa

SEQ ID NO: 2256103 - RNA, 19 nt, Homo sapiens
  misc_RNA (1)...(19): siRNA sense strand
ggagagagggagagacaau

SEQ ID NO: 2256104 - RNA, 19 nt, Homo sapiens
  misc_RNA (1)...(19): siRNA sense strand
gggagaaggagaauguaaa

SEQ ID NO: 2256105 - RNA, 19 nt, Homo sapiens
  misc_RNA (1)...(19): siRNA sense strand
gcaaauauuaagaaggaga

SEQ ID NO: 2256106 - RNA, 19 nt, Homo sapiens
  misc_RNA (1)...(19): siRNA sense strand
gaaagaugaccgaggaaaa

SEQ ID NO: 2256107 - RNA, 19 nt, Homo sapiens
  misc_RNA (1)...(19): siRNA sense strand
cgaugagccugguggacua

SEQ ID NO: 2256108 - RNA, 19 nt, Homo sapiens
  misc_RNA (1)...(19): siRNA sense strand
gguacaaagaugagaggga

SEQ ID NO: 2256109 - RNA, 19 nt, Homo sapiens
  misc_RNA (1)...(19): siRNA sense strand
gcugagaaagcuagacuua

SEQ ID NO: 2256110 - RNA, 19 nt, Homo sapiens
  misc_RNA (1)...(19): siRNA sense strand
gccaaacagaagugaguaa

SEQ ID NO: 2256111 - RNA, 19 nt, Homo sapiens
  misc_RNA (1)...(19): siRNA sense strand
gggcagaaauuacuggcua

SEQ ID NO: 2256112 - RNA, 19 nt, Homo sapiens
  misc_RNA (1)...(19): siRNA sense strand
uggaaaagcuacaggauga

SEQ ID NO: 2256113 - RNA, 19 nt, Homo sapiens
  misc_RNA (1)...(19): siRNA sense strand
gaggaaaacauuagaagaa

SEQ ID NO: 2256114 - RNA, 19 nt, Homo sapiens
  misc_RNA (1)...(19): siRNA sense strand
cgaugaauguuaaaggaga

SEQ ID NO: 2256115 - RNA, 19 nt, Homo sapiens
  misc_RNA (1)...(19): siRNA sense strand
acuuaauagaugaggaaga

SEQ ID NO: 2256116 - RNA, 19 nt, Homo sapiens
  misc_RNA (1)...(19): siRNA sense strand
ucgaaauguucauggaaaa

SEQ ID NO: 2256117 - RNA, 19 nt, Homo sapiens
  misc_RNA (1)...(19): siRNA sense strand
gugaguaaaguaagugaaa

SEQ ID NO: 2256118 - RNA, 19 nt, Homo sapiens
  misc_RNA (1)...(19): siRNA sense strand
cuuacuauguggaggauuu

SEQ ID NO: 2256119 - RNA, 19 nt, Homo sapiens
  misc_RNA (1)...(19): siRNA sense strand
caaagagguuguuguaaau

SEQ ID NO: 2256120 - RNA, 19 nt, Homo sapiens
  misc_RNA (1)...(19): siRNA sense strand
ugaaaugcaagguggcaaa

SEQ ID NO: 2256121 - RNA, 19 nt, Homo sapiens
  misc_RNA (1)...(19): siRNA sense strand
cauuguuacugaagaggaa

SEQ ID NO: 2256122 - RNA, 19 nt, Homo sapiens
  misc_RNA (1)...(19): siRNA sense strand
ggagagaagccaaugucaa

SEQ ID NO: 2256123 - RNA, 19 nt, Homo sapiens
  misc_RNA (1)...(19): siRNA sense strand
aagcauacgaugaggccua

SEQ ID NO: 2256124 - RNA, 19 nt, Homo sapiens
  misc_RNA (1)...(19): siRNA sense strand
auuagcaacuugaaggaaa

SEQ ID NO: 2256125 - RNA, 19 nt, Homo sapiens
  misc_RNA (1)...(19): siRNA sense strand
ggauggaugacuuggguau

SEQ ID NO: 2256126 - RNA, 19 nt, Homo sapiens
  misc_RNA (1)...(19): siRNA sense strand
gggagauaucaguggauga

SEQ ID NO: 2256127 - RNA, 19 nt, Homo sapiens
  misc_RNA (1)...(19): siRNA sense strand
gcaagaauggaucaggaaa

SEQ ID NO: 2256128 - RNA, 19 nt, Homo sapiens
  misc_RNA (1)...(19): siRNA sense strand
cuacuuaauagaugaggaa

SEQ ID NO: 2256129 - RNA, 19 nt, Homo sapiens
  misc_RNA (1)...(19): siRNA sense strand
gguauaagggagaguuuga

SEQ ID NO: 2256130 - RNA, 19 nt, Homo sapiens
  misc_RNA (1)...(19): siRNA sense strand
acggaagaagaaagaauua

SEQ ID NO: 2256131 - RNA, 19 nt, Homo sapiens
  misc_RNA (1)...(19): siRNA sense strand
cauugaacuucgaguguga

SEQ ID NO: 2256132 - RNA, 19 nt, Homo sapiens
  misc_RNA (1)...(19): siRNA sense strand
cuuauauagcccagaggaa

SEQ ID NO: 2256133 - RNA, 19 nt, Homo sapiens
  misc_RNA (1)...(19): siRNA sense strand
acagaagugaguaaaguaa

SEQ ID NO: 2256134 - RNA, 19 nt, Homo sapiens
  misc_RNA (1)...(19): siRNA sense strand
ccauaaaccaggcgggagu

SEQ ID NO: 2256135 - RNA, 19 nt, Homo sapiens
  misc_RNA (1)...(19): siRNA sense strand
cugagaaacugucuggcaa

SEQ ID NO: 2256136 - RNA, 19 nt, Homo sapiens
  misc_RNA (1)...(19): siRNA sense strand
ugggagagagggagagaca

SEQ ID NO: 2256137 - RNA, 19 nt, Homo sapiens
  misc_RNA (1)...(19): siRNA sense strand
gaguucgagcugugaauaa

SEQ ID NO: 2256138 - RNA, 19 nt, Homo sapiens
  misc_RNA (1)...(19): siRNA sense strand
ccagagauccagugguaca

SEQ ID NO: 2256139 - RNA, 19 nt, Homo sapiens
  misc_RNA (1)...(19): siRNA sense strand
agauaucaguggaugaaaa

SEQ ID NO: 2256140 - RNA, 19 nt, Homo sapiens
  misc_RNA (1)...(19): siRNA sense strand
cgguuugggagaaggagaa

SEQ ID NO: 2256141 - RNA, 19 nt, Homo sapiens
  misc_RNA (1)...(19): siRNA sense strand
ugggagaaggagaauguaa

SEQ ID NO: 2256142 - RNA, 19 nt, Homo sapiens
  misc_RNA (1)...(19): siRNA sense strand
uuguaaauguggaugauga

SEQ ID NO: 2256143 - RNA, 19 nt, Homo sapiens
  misc_RNA (1)...(19): siRNA sense strand
uggaauuacugauacggaa

SEQ ID NO: 2256144 - RNA, 19 nt, Homo sapiens
  misc_RNA (1)...(19): siRNA sense strand
agccagagauccaguggua

SEQ ID NO: 2256145 - RNA, 19 nt, Homo sapiens
  misc_RNA (1)...(19): siRNA sense strand
ggcagaaauuacuggcuau

SEQ ID NO: 2256146 - RNA, 19 nt, Homo sapiens
  misc_RNA (1)...(19): siRNA sense strand
guuccguguucgagccaua

SEQ ID NO: 2256147 - RNA, 19 nt, Homo sapiens
  misc_RNA (1)...(19): siRNA sense strand
auacggaagaagaaagaau

SEQ ID NO: 2256148 - RNA, 19 nt, Homo sapiens
  misc_RNA (1)...(19): siRNA sense strand
ggaaaguugugauucgaga

SEQ ID NO: 2256149 - RNA, 19 nt, Homo sapiens
  misc_RNA (1)...(19): siRNA sense strand
ucuucuugcuagugaggaa

SEQ ID NO: 2256150 - RNA, 19 nt, Homo sapiens
  misc_RNA (1)...(19): siRNA sense strand
gaauguuaaaggagagcuu

SEQ ID NO: 2256151 - RNA, 19 nt, Homo sapiens
  misc_RNA (1)...(19): siRNA sense strand
cuucaaagaccuugggaug

SEQ ID NO: 2256152 - RNA, 19 nt, Homo sapiens
  misc_RNA (1)...(19): siRNA sense strand
aaagauaagagcagacuga

SEQ ID NO: 2256153 - RNA, 19 nt, Homo sapiens
  misc_RNA (1)...(19): siRNA sense strand
augcuucaguugugguaaa

SEQ ID NO: 2256154 - RNA, 19 nt, Homo sapiens
  misc_RNA (1)...(19): siRNA sense strand
gcugaauuccagagguuga

SEQ ID NO: 2256155 - RNA, 19 nt, Homo sapiens
  misc_RNA (1)...(19): siRNA sense strand
cggaagaagaaagaauuaa

SEQ ID NO: 2256156 - RNA, 19 nt, Homo sapiens
  misc_RNA (1)...(19): siRNA sense strand
aggaaaacaugguguauca

SEQ ID NO: 2256157 - RNA, 19 nt, Homo sapiens
  misc_RNA (1)...(19): siRNA sense strand
ggaugcaggcugagaaacu

SEQ ID NO: 2256158 - RNA, 19 nt, Homo sapiens
  misc_RNA (1)...(19): siRNA sense strand
uuugaaggcccgaaauaua

SEQ ID NO: 2256159 - RNA, 19 nt, Homo sapiens
  misc_RNA (1)...(19): siRNA sense strand
caaagaugagagggagaua

SEQ ID NO: 2256160 - RNA, 19 nt, Homo sapiens
  misc_RNA (1)...(19): siRNA sense strand
gggccaaacagaagugagu

SEQ ID NO: 2256161 - RNA, 19 nt, Homo sapiens
  misc_RNA (1)...(19): siRNA sense strand
aggcauacaagauuagcaa

SEQ ID NO: 2256162 - RNA, 19 nt, Homo sapiens
  misc_RNA (1)...(19): siRNA sense strand
guguagugaagucaggaaa

SEQ ID NO: 2256163 - RNA, 19 nt, Homo sapiens
  misc_RNA (1)...(19): siRNA sense strand
aggaugaggaugagggaac

SEQ ID NO: 2256164 - RNA, 19 nt, Homo sapiens
  misc_RNA (1)...(19): siRNA sense strand
cggcaagaauggaucagga

SEQ ID NO: 2256165 - RNA, 19 nt, Homo sapiens
  misc_RNA (1)...(19): siRNA sense strand
uggugaauguaauguacua

SEQ ID NO: 2256166 - RNA, 19 nt, Homo sapiens
  misc_RNA (1)...(19): siRNA sense strand
ccuaaacaguccacggcau

SEQ ID NO: 2256167 - RNA, 19 nt, Homo sapiens
  misc_RNA (1)...(19): siRNA sense strand
caguugaaauuuuggagaa

SEQ ID NO: 2256168 - RNA, 19 nt, Homo sapiens
  misc_RNA (1)...(19): siRNA sense strand
ccaaagagagccaagcaca

SEQ ID NO: 2256169 - RNA, 19 nt, Homo sapiens
  misc_RNA (1)...(19): siRNA sense strand
ugaaaagaagucaaggaaa

SEQ ID NO: 2256170 - RNA, 19 nt, Homo sapiens
  misc_RNA (1)...(19): siRNA sense strand
ucuccaugcuccugaguuu

SEQ ID NO: 2256171 - RNA, 19 nt, Homo sapiens
  misc_RNA (1)...(19): siRNA sense strand
ggagaaggagaauguaaaa

SEQ ID NO: 2256172 - RNA, 19 nt, Homo sapiens
  misc_RNA (1)...(19): siRNA sense strand
agguauugguggagggacu

SEQ ID NO: 2256173 - RNA, 19 nt, Homo sapiens
  misc_RNA (1)...(19): siRNA sense strand
gggaagaggccaugaccga

SEQ ID NO: 2256174 - RNA, 19 nt, Homo sapiens
  misc_RNA (1)...(19): siRNA sense strand
aggcaagggaagaggccau

SEQ ID NO: 2256175 - RNA, 19 nt, Homo sapiens
  misc_RNA (1)...(19): siRNA sense strand
cccuaaagcauuugauaca

SEQ ID NO: 2256176 - RNA, 19 nt, Homo sapiens
  misc_RNA (1)...(19): siRNA sense strand
gagaagcugaagaaggcaa

SEQ ID NO: 2256177 - RNA, 19 nt, Homo sapiens
  misc_RNA (1)...(19): siRNA sense strand
cugaagaaggcaagggaag

SEQ ID NO: 2256178 - RNA, 19 nt, Homo sapiens
  misc_RNA (1)...(19): siRNA sense strand
gcugaagaaggcaagggaa

SEQ ID NO: 2256179 - RNA, 19 nt, Homo sapiens
  misc_RNA (1)...(19): siRNA sense strand
aggaaggaaucuugacgga

SEQ ID NO: 2256180 - RNA, 19 nt, Homo sapiens
  misc_RNA (1)...(19): siRNA sense strand
aaacaaugcuccugcugga

SEQ ID NO: 2256181 - RNA, 19 nt, Homo sapiens
  misc_RNA (1)...(19): siRNA sense strand
aaucaaugcucaaaccaca

SEQ ID NO: 2256182 - RNA, 19 nt, Homo sapiens
  misc_RNA (1)...(19): siRNA sense strand
gggagaagcugaagaaggc

SEQ ID NO: 2256183 - RNA, 19 nt, Homo sapiens
  misc_RNA (1)...(19): siRNA sense strand
ugacagaggugauguggca

SEQ ID NO: 2256184 - RNA, 19 nt, Homo sapiens
  misc_RNA (1)...(19): siRNA sense strand
ggggauauucugaguguca

SEQ ID NO: 2256185 - RNA, 19 nt, Homo sapiens
  misc_RNA (1)...(19): siRNA sense strand
ggccaaggaaggcaggaga

SEQ ID NO: 2256186 - RNA, 19 nt, Homo sapiens
  misc_RNA (1)...(19): siRNA sense strand
ccgaugugacagaggugau

SEQ ID NO: 2256187 - RNA, 19 nt, Homo sapiens
  misc_RNA (1)...(19): siRNA sense strand
ugacagaggugauguggca

SEQ ID NO: 2256188 - RNA, 19 nt, Homo sapiens
  misc_RNA (1)...(19): siRNA sense strand
ggggauauucugaguguca

SEQ ID NO: 2256189 - RNA, 19 nt, Homo sapiens
  misc_RNA (1)...(19): siRNA sense strand
ggccaaggaaggcaggaga

SEQ ID NO: 2256190 - RNA, 19 nt, Homo sapiens
  misc_RNA (1)...(19): siRNA sense strand
ccgaugugacagaggugau

SEQ ID NO: 2256191 - RNA, 19 nt, Homo sapiens
  misc_RNA (1)...(19): siRNA sense strand
ugacagaggugauguggca

SEQ ID NO: 2256192 - RNA, 19 nt, Homo sapiens
  misc_RNA (1)...(19): siRNA sense strand
ggggauauucugaguguca

SEQ ID NO: 2256193 - RNA, 19 nt, Homo sapiens
  misc_RNA (1)...(19): siRNA sense strand
ggccaaggaaggcaggaga

SEQ ID NO: 2256194 - RNA, 19 nt, Homo sapiens
  misc_RNA (1)...(19): siRNA sense strand
ccgaugugacagaggugau

SEQ ID NO: 2256195 - RNA, 19 nt, Homo sapiens
  misc_RNA (1)...(19): siRNA sense strand
ugacagaggugauguggca

SEQ ID NO: 2256196 - RNA, 19 nt, Homo sapiens
  misc_RNA (1)...(19): siRNA sense strand
ggggauauucugaguguca

SEQ ID NO: 2256197 - RNA, 19 nt, Homo sapiens
  misc_RNA (1)...(19): siRNA sense strand
ggccaaggaaggcaggaga

SEQ ID NO: 2256198 - RNA, 19 nt, Homo sapiens
  misc_RNA (1)...(19): siRNA sense strand
ccgaugugacagaggugau

SEQ ID NO: 2256199 - RNA, 19 nt, Homo sapiens
  misc_RNA (1)...(19): siRNA sense strand
ggggaauauuugagcuuaa

SEQ ID NO: 2256200 - RNA, 19 nt, Homo sapiens
  misc_RNA (1)...(19): siRNA sense strand
uagaaauaguuguuggucu

SEQ ID NO: 2256201 - RNA, 19 nt, Homo sapiens
  misc_RNA (1)...(19): siRNA sense strand
cgacaaacaaaugguccaa

SEQ ID NO: 2256202 - RNA, 19 nt, Homo sapiens
  misc_RNA (1)...(19): siRNA sense strand
caaaauaaacuccugggaa

SEQ ID NO: 2256203 - RNA, 19 nt, Homo sapiens
  misc_RNA (1)...(19): siRNA sense strand
caggaggaaauaaaagaaa

SEQ ID NO: 2256204 - RNA, 19 nt, Homo sapiens
  misc_RNA (1)...(19): siRNA sense strand
aagaaaacacaaagaacga

SEQ ID NO: 2256205 - RNA, 19 nt, Homo sapiens
  misc_RNA (1)...(19): siRNA sense strand
aggagcuggugguggccaa

SEQ ID NO: 2256206 - RNA, 19 nt, Homo sapiens
  misc_RNA (1)...(19): siRNA sense strand
uugcaaaguccguggucaa

SEQ ID NO: 2256207 - RNA, 19 nt, Homo sapiens
  misc_RNA (1)...(19): siRNA sense strand
ccuacaaauucaagcccua

SEQ ID NO: 2256208 - RNA, 19 nt, Homo sapiens
  misc_RNA (1)...(19): siRNA sense strand
gcuacaauggcgagugcaa

SEQ ID NO: 2256209 - RNA, 19 nt, Homo sapiens
  misc_RNA (1)...(19): siRNA sense strand
cggaauguggaaauggaua

SEQ ID NO: 2256210 - RNA, 19 nt, Homo sapiens
  misc_RNA (1)...(19): siRNA sense strand
aggcaagacaccagcaaaa

SEQ ID NO: 2256211 - RNA, 19 nt, Homo sapiens
  misc_RNA (1)...(19): siRNA sense strand
aggcaagcuuccagauuga

SEQ ID NO: 2256212 - RNA, 19 nt, Homo sapiens
  misc_RNA (1)...(19): siRNA sense strand
gugcaagaccagagacaac

SEQ ID NO: 2256213 - RNA, 19 nt, Homo sapiens
  misc_RNA (1)...(19): siRNA sense strand
gcaauggacuucauggcau

SEQ ID NO: 2256214 - RNA, 19 nt, Homo sapiens
  misc_RNA (1)...(19): siRNA sense strand
gcacaaguauuaucgcaga

SEQ ID NO: 2256215 - RNA, 19 nt, Homo sapiens
  misc_RNA (1)...(19): siRNA sense strand
gagaaggaucagauugaca

SEQ ID NO: 2256216 - RNA, 19 nt, Homo sapiens
  misc_RNA (1)...(19): siRNA sense strand
aaggaagagagcagugaau

SEQ ID NO: 2256217 - RNA, 19 nt, Homo sapiens
  misc_RNA (1)...(19): siRNA sense strand
ccaccaacccugugcagau

SEQ ID NO: 2256218 - RNA, 19 nt, Homo sapiens
  misc_RNA (1)...(19): siRNA sense strand
uucauaagcaagacggaua

SEQ ID NO: 2256219 - RNA, 19 nt, Homo sapiens
  misc_RNA (1)...(19): siRNA sense strand
aagaaucucacuauggaaa

SEQ ID NO: 2256220 - RNA, 19 nt, Homo sapiens
  misc_RNA (1)...(19): siRNA sense strand
uggaaauggauacguggaa

SEQ ID NO: 2256221 - RNA, 19 nt, Homo sapiens
  misc_RNA (1)...(19): siRNA sense strand
gcacaagaggaguuggugu

SEQ ID NO: 2256222 - RNA, 19 nt, Homo sapiens
  misc_RNA (1)...(19): siRNA sense strand
gagugcaagaccagagaca

SEQ ID NO: 2256223 - RNA, 19 nt, Homo sapiens
  misc_RNA (1)...(19): siRNA sense strand
guggagauucacuacgaaa

SEQ ID NO: 2256224 - RNA, 19 nt, Homo sapiens
  misc_RNA (1)...(19): siRNA sense strand
uguagaagauggaacgcca

SEQ ID NO: 2256225 - RNA, 19 nt, Homo sapiens
  misc_RNA (1)...(19): siRNA sense strand
guucuugacacaaaggcaa

SEQ ID NO: 2256226 - RNA, 19 nt, Homo sapiens
  misc_RNA (1)...(19): siRNA sense strand
uuacagugguugaaaagaa

SEQ ID NO: 2256227 - RNA, 19 nt, Homo sapiens
  misc_RNA (1)...(19): siRNA sense strand
ggguaugaaugccgggaug

SEQ ID NO: 2256228 - RNA, 19 nt, Homo sapiens
  misc_RNA (1)...(19): siRNA sense strand
cggauaugcaugcaaucaa

SEQ ID NO: 2256229 - RNA, 19 nt, Homo sapiens
  misc_RNA (1)...(19): siRNA sense strand
gaacaaaggcugcaggguc

SEQ ID NO: 2256230 - RNA, 19 nt, Homo sapiens
  misc_RNA (1)...(19): siRNA sense strand
aagcacaggucgaccacau

SEQ ID NO: 2256231 - RNA, 19 nt, Homo sapiens
  misc_RNA (1)...(19): siRNA sense strand
ccacauauaauccagaaaa

SEQ ID NO: 2256232 - RNA, 19 nt, Homo sapiens
  misc_RNA (1)...(19): siRNA sense strand
guggaaugcuauggauuau

SEQ ID NO: 2256233 - RNA, 19 nt, Homo sapiens
  misc_RNA (1)...(19): siRNA sense strand
augaaaagcugaauacaga

SEQ ID NO: 2256234 - RNA, 19 nt, Homo sapiens
  misc_RNA (1)...(19): siRNA sense strand
gcaucagaggcgucaaaga

SEQ ID NO: 2256235 - RNA, 19 nt, Homo sapiens
  misc_RNA (1)...(19): siRNA sense strand
augauacggaugugggcua

SEQ ID NO: 2256236 - RNA, 19 nt, Homo sapiens
  misc_RNA (1)...(19): siRNA sense strand
guucgauccuacucagcaa

SEQ ID NO: 2256237 - RNA, 19 nt, Homo sapiens
  misc_RNA (1)...(19): siRNA sense strand
aacaaaggcugcagggucu

SEQ ID NO: 2256238 - RNA, 19 nt, Homo sapiens
  misc_RNA (1)...(19): siRNA sense strand
accaaaucuucauaagcaa

SEQ ID NO: 2256239 - RNA, 19 nt, Homo sapiens
  misc_RNA (1)...(19): siRNA sense strand
ccuucaagacucauauauu

SEQ ID NO: 2256240 - RNA, 19 nt, Homo sapiens
  misc_RNA (1)...(19): siRNA sense strand
uggcauguuugaagaugau

SEQ ID NO: 2256241 - RNA, 19 nt, Homo sapiens
  misc_RNA (1)...(19): siRNA sense strand
aggacaguauucuaagcaa

SEQ ID NO: 2256242 - RNA, 19 nt, Homo sapiens
  misc_RNA (1)...(19): siRNA sense strand
ccuggcagaugaagacaau

SEQ ID NO: 2256243 - RNA, 19 nt, Homo sapiens
  misc_RNA (1)...(19): siRNA sense strand
cacucgauuccaaggguaa

SEQ ID NO: 2256244 - RNA, 19 nt, Homo sapiens
  misc_RNA (1)...(19): siRNA sense strand
uggaaugaaacugcagaaa

SEQ ID NO: 2256245 - RNA, 19 nt, Homo sapiens
  misc_RNA (1)...(19): siRNA sense strand
uggucaaccuuguggauuc

SEQ ID NO: 2256246 - RNA, 19 nt, Homo sapiens
  misc_RNA (1)...(19): siRNA sense strand
agaccuggacugagaagga

SEQ ID NO: 2256247 - RNA, 19 nt, Homo sapiens
  misc_RNA (1)...(19): siRNA sense strand
uggcaguggcacaaguauu

SEQ ID NO: 2256248 - RNA, 19 nt, Homo sapiens
  misc_RNA (1)...(19): siRNA sense strand
cuauuugagcccacggaau

SEQ ID NO: 2256249 - RNA, 19 nt, Homo sapiens
  misc_RNA (1)...(19): siRNA sense strand
acagaauagcagcaguaau

SEQ ID NO: 2256250 - RNA, 19 nt, Homo sapiens
  misc_RNA (1)...(19): siRNA sense strand
gcugaauacagaaggcacu

SEQ ID NO: 2256251 - RNA, 19 nt, Homo sapiens
  misc_RNA (1)...(19): siRNA sense strand
caaucuuacucgagcucca

SEQ ID NO: 2256252 - RNA, 19 nt, Homo sapiens
  misc_RNA (1)...(19): siRNA sense strand
gggaaaccacaguacucua

SEQ ID NO: 2256253 - RNA, 19 nt, Homo sapiens
  misc_RNA (1)...(19): siRNA sense strand
ggaauguggaaauggauac

SEQ ID NO: 2256254 - RNA, 19 nt, Homo sapiens
  misc_RNA (1)...(19): siRNA sense strand
ggauggagaccgguggauu

SEQ ID NO: 2256255 - RNA, 19 nt, Homo sapiens
  misc_RNA (1)...(19): siRNA sense strand
gggcuauguagaagaugga

SEQ ID NO: 2256256 - RNA, 19 nt, Homo sapiens
  misc_RNA (1)...(19): siRNA sense strand
ccacucgauuccaagggua

SEQ ID NO: 2256257 - RNA, 19 nt, Homo sapiens
  misc_RNA (1)...(19): siRNA sense strand
gcuaaagcgcugugggaau

SEQ ID NO: 2256258 - RNA, 19 nt, Homo sapiens
  misc_RNA (1)...(19): siRNA sense strand
ccaaagaaacuaaggcuca

SEQ ID NO: 2256259 - RNA, 19 nt, Homo sapiens
  misc_RNA (1)...(19): siRNA sense strand
aguaaacaguaaugagaca

SEQ ID NO: 2256260 - RNA, 19 nt, Homo sapiens
  misc_RNA (1)...(19): siRNA sense strand
agccuauguugcaggaaua

SEQ ID NO: 2256261 - RNA, 19 nt, Homo sapiens
  misc_RNA (1)...(19): siRNA sense strand
ucucaaaggugcaagagga

SEQ ID NO: 2256262 - RNA, 19 nt, Homo sapiens
  misc_RNA (1)...(19): siRNA sense strand
gagaguucaaugugagaau

SEQ ID NO: 2256263 - RNA, 19 nt, Homo sapiens
  misc_RNA (1)...(19): siRNA sense strand
ugugagaaugugagagaca

SEQ ID NO: 2256264 - RNA, 19 nt, Homo sapiens
  misc_RNA (1)...(19): siRNA sense strand
gggcagaagugcaaaggcu

SEQ ID NO: 2256265 - RNA, 19 nt, Homo sapiens
  misc_RNA (1)...(19): siRNA sense strand
uagagugccagcagagaaa

SEQ ID NO: 2256266 - RNA, 19 nt, Homo sapiens
  misc_RNA (1)...(19): siRNA sense strand
cagcagagaaauucaccaa

SEQ ID NO: 2256267 - RNA, 19 nt, Homo sapiens
  misc_RNA (1)...(19): siRNA sense strand
agacaagaggucaaugaau

SEQ ID NO: 2256268 - RNA, 19 nt, Homo sapiens
  misc_RNA (1)...(19): siRNA sense strand
ugguauaaauggcacaaca

SEQ ID NO: 2256269 - RNA, 19 nt, Homo sapiens
  misc_RNA (1)...(19): siRNA sense strand
agcuaugagauguggcuua

SEQ ID NO: 2256270 - RNA, 19 nt, Homo sapiens
  misc_RNA (1)...(19): siRNA sense strand
cguacagcagugugaacaa

SEQ ID NO: 2256271 - RNA, 19 nt, Homo sapiens
  misc_RNA (1)...(19): siRNA sense strand
gcuuaacagagaaggaagu

SEQ ID NO: 2256272 - RNA, 19 nt, Homo sapiens
  misc_RNA (1)...(19): siRNA sense strand
uggaauuugaagaggcuga

SEQ ID NO: 2256273 - RNA, 19 nt, Homo sapiens
  misc_RNA (1)...(19): siRNA sense strand
gguauaaauggcacaacau

SEQ ID NO: 2256274 - RNA, 19 nt, Homo sapiens
  misc_RNA (1)...(19): siRNA sense strand
ucucaaagcaacaucucaa

SEQ ID NO: 2256275 - RNA, 19 nt, Homo sapiens
  misc_RNA (1)...(19): siRNA sense strand
caaaggugcaagaggaugu

SEQ ID NO: 2256276 - RNA, 19 nt, Homo sapiens
  misc_RNA (1)...(19): siRNA sense strand
ucuuauguaucuacgacaa

SEQ ID NO: 2256277 - RNA, 19 nt, Homo sapiens
  misc_RNA (1)...(19): siRNA sense strand
gaccagcauugcagggaga

SEQ ID NO: 2256278 - RNA, 19 nt, Homo sapiens
  misc_RNA (1)...(19): siRNA sense strand
aaugugagaaugugagaga

SEQ ID NO: 2256279 - RNA, 19 nt, Homo sapiens
  misc_RNA (1)...(19): siRNA sense strand
caguuagguacuuacauaa

SEQ ID NO: 2256280 - RNA, 19 nt, Homo sapiens
  misc_RNA (1)...(19): siRNA sense strand
gaauggugugguugaaaga

SEQ ID NO: 2256281 - RNA, 19 nt, Homo sapiens
  misc_RNA (1)...(19): siRNA sense strand
agagaagagcagugugacu

SEQ ID NO: 2256282 - RNA, 19 nt, Homo sapiens
  misc_RNA (1)...(19): siRNA sense strand
cuuccugagaccugcaaua

SEQ ID NO: 2256283 - RNA, 19 nt, Homo sapiens
  misc_RNA (1)...(19): siRNA sense strand
gcaucucagaauugcuaua

SEQ ID NO: 2256284 - RNA, 19 nt, Homo sapiens
  misc_RNA (1)...(19): siRNA sense strand
gaaggaaguagcacgccaa

SEQ ID NO: 2256285 - RNA, 19 nt, Homo sapiens
  misc_RNA (1)...(19): siRNA sense strand
gggaauggugugguugaaa

SEQ ID NO: 2256286 - RNA, 19 nt, Homo sapiens
  misc_RNA (1)...(19): siRNA sense strand
gguugaaagagaagagcag

SEQ ID NO: 2256287 - RNA, 19 nt, Homo sapiens
  misc_RNA (1)...(19): siRNA sense strand
guucaaugugagaauguga

SEQ ID NO: 2256288 - RNA, 19 nt, Homo sapiens
  misc_RNA (1)...(19): siRNA sense strand
uugaagaggcugagaacuc

SEQ ID NO: 2256289 - RNA, 19 nt, Homo sapiens
  misc_RNA (1)...(19): siRNA sense strand
ucauuuacucucaaagcaa

SEQ ID NO: 2256290 - RNA, 19 nt, Homo sapiens
  misc_RNA (1)...(19): siRNA sense strand
ugauuguggaguugauaau

SEQ ID NO: 2256291 - RNA, 19 nt, Homo sapiens
  misc_RNA (1)...(19): siRNA sense strand
uggugugguugaaagagaa

SEQ ID NO: 2256292 - RNA, 19 nt, Homo sapiens
  misc_RNA (1)...(19): siRNA sense strand
gggagaguucaaugugaga

SEQ ID NO: 2256293 - RNA, 19 nt, Homo sapiens
  misc_RNA (1)...(19): siRNA sense strand
uagccuauguugcaggaau

SEQ ID NO: 2256294 - RNA, 19 nt, Homo sapiens
  misc_RNA (1)...(19): siRNA sense strand
ucuguagacaagaggucaa

SEQ ID NO: 2256295 - RNA, 19 nt, Homo sapiens
  misc_RNA (1)...(19): siRNA sense strand
accuauugauuguggaguu

SEQ ID NO: 2256296 - RNA, 19 nt, Homo sapiens
  misc_RNA (1)...(19): siRNA sense strand
ggggaaagagguugcauca

SEQ ID NO: 2256297 - RNA, 19 nt, Homo sapiens
  misc_RNA (1)...(19): siRNA sense strand
caguauugacaguggccca

SEQ ID NO: 2256298 - RNA, 19 nt, Homo sapiens
  misc_RNA (1)...(19): siRNA sense strand
guucaugccaucaggggaa

SEQ ID NO: 2256299 - RNA, 19 nt, Homo sapiens
  misc_RNA (1)...(19): siRNA sense strand
ugagaauguacaagagaua

SEQ ID NO: 2256300 - RNA, 19 nt, Homo sapiens
  misc_RNA (1)...(19): siRNA sense strand
ggauauagagaaagaaacu

SEQ ID NO: 2256301 - RNA, 19 nt, Homo sapiens
  misc_RNA (1)...(19): siRNA sense strand
gauuaauguguuuggacaa

SEQ ID NO: 2256302 - RNA, 19 nt, Homo sapiens
  misc_RNA (1)...(19): siRNA sense strand
ggauuaauguguuuggaca

SEQ ID NO: 2256303 - RNA, 19 nt, Homo sapiens
  misc_RNA (1)...(19): siRNA sense strand
caaaggaugaagaggaaga

SEQ ID NO: 2256304 - RNA, 19 nt, Homo sapiens
  misc_RNA (1)...(19): siRNA sense strand
auuuagagaaugcgaguua

SEQ ID NO: 2256305 - RNA, 19 nt, Homo sapiens
  misc_RNA (1)...(19): siRNA sense strand
uggagauuaacuagagaaa

SEQ ID NO: 2256306 - RNA, 19 nt, Homo sapiens
  misc_RNA (1)...(19): siRNA sense strand
cugaagauuuugugguuua

SEQ ID NO: 2256307 - RNA, 19 nt, Homo sapiens
  misc_RNA (1)...(19): siRNA sense strand
aaguaucaucucagggaaa

SEQ ID NO: 2256308 - RNA, 19 nt, Homo sapiens
  misc_RNA (1)...(19): siRNA sense strand
cugcaaaggaugaagagga

SEQ ID NO: 2256309 - RNA, 19 nt, Homo sapiens
  misc_RNA (1)...(19): siRNA sense strand
cuggcaaacuacuuggaua

SEQ ID NO: 2256310 - RNA, 19 nt, Homo sapiens
  misc_RNA (1)...(19): siRNA sense strand
cauaugagucagauggcaa

SEQ ID NO: 2256311 - RNA, 19 nt, Homo sapiens
  misc_RNA (1)...(19): siRNA sense strand
agaugauucuccuggcaaa

SEQ ID NO: 2256312 - RNA, 19 nt, Homo sapiens
  misc_RNA (1)...(19): siRNA sense strand
agguaugacaugaugggaa

SEQ ID NO: 2256313 - RNA, 19 nt, Homo sapiens
  misc_RNA (1)...(19): siRNA sense strand
caucaugaauucaggagca

SEQ ID NO: 2256314 - RNA, 19 nt, Homo sapiens
  misc_RNA (1)...(19): siRNA sense strand
ugacaugaugggaagaaau

SEQ ID NO: 2256315 - RNA, 19 nt, Homo sapiens
  misc_RNA (1)...(19): siRNA sense strand
cagaaagaagagaucacaa

SEQ ID NO: 2256316 - RNA, 19 nt, Homo sapiens
  misc_RNA (1)...(19): siRNA sense strand
ggaguuuccaacaaggaua

SEQ ID NO: 2256317 - RNA, 19 nt, Homo sapiens
  misc_RNA (1)...(19): siRNA sense strand
ccuuauugucugugcuauu

SEQ ID NO: 2256318 - RNA, 19 nt, Homo sapiens
  misc_RNA (1)...(19): siRNA sense strand
agaagagaucacaaacaua

SEQ ID NO: 2256319 - RNA, 19 nt, Homo sapiens
  misc_RNA (1)...(19): siRNA sense strand
ucguagacaaggaaaggua

SEQ ID NO: 2256320 - RNA, 19 nt, Homo sapiens
  misc_RNA (1)...(19): siRNA sense strand
gcuggaaagaucuguagaa

SEQ ID NO: 2256321 - RNA, 19 nt, Homo sapiens
  misc_RNA (1)...(19): siRNA sense strand
acuaaaggauacggaggaa

SEQ ID NO: 2256322 - RNA, 19 nt, Homo sapiens
  misc_RNA (1)...(19): siRNA sense strand
ggacaaaucacuguggaga

SEQ ID NO: 2256323 - RNA, 19 nt, Homo sapiens
  misc_RNA (1)...(19): siRNA sense strand
ggagcaaagagcugcauca

SEQ ID NO: 2256324 - RNA, 19 nt, Homo sapiens
  misc_RNA (1)...(19): siRNA sense strand
aggaaguaccuguaagcuu

SEQ ID NO: 2256325 - RNA, 19 nt, Homo sapiens
  misc_RNA (1)...(19): siRNA sense strand
gugagaauguacaagagau

SEQ ID NO: 2256326 - RNA, 19 nt, Homo sapiens
  misc_RNA (1)...(19): siRNA sense strand
ccagaauaacaaagccuau

SEQ ID NO: 2256327 - RNA, 19 nt, Homo sapiens
  misc_RNA (1)...(19): siRNA sense strand
gaauacaagaagugugcca

SEQ ID NO: 2256328 - RNA, 19 nt, Homo sapiens
  misc_RNA (1)...(19): siRNA sense strand
gguaugacaugaugggaag

SEQ ID NO: 2256329 - RNA, 19 nt, Homo sapiens
  misc_RNA (1)...(19): siRNA sense strand
auucuaaaggugacagauu

SEQ ID NO: 2256330 - RNA, 19 nt, Homo sapiens
  misc_RNA (1)...(19): siRNA sense strand
ccaauggaaaccugaucaa

SEQ ID NO: 2256331 - RNA, 19 nt, Homo sapiens
  misc_RNA (1)...(19): siRNA sense strand
auaacaaagccuauugcua

SEQ ID NO: 2256332 - RNA, 19 nt, Homo sapiens
  misc_RNA (1)...(19): siRNA sense strand
ggacuggagauuuggacca

SEQ ID NO: 2256333 - RNA, 19 nt, Homo sapiens
  misc_RNA (1)...(19): siRNA sense strand
gguacuuuaugccgaggaa

SEQ ID NO: 2256334 - RNA, 19 nt, Homo sapiens
  misc_RNA (1)...(19): siRNA sense strand
gggacggacuucuggucuu

SEQ ID NO: 2256335 - RNA, 19 nt, Homo sapiens
  misc_RNA (1)...(19): siRNA sense strand
agggaucaacuguggagaa

SEQ ID NO: 2256336 - RNA, 19 nt, Homo sapiens
  misc_RNA (1)...(19): siRNA sense strand
aaaucagacugcugugaga

SEQ ID NO: 2256337 - RNA, 19 nt, Homo sapiens
  misc_RNA (1)...(19): siRNA sense strand
ggauugaaccccugcagaa

SEQ ID NO: 2256338 - RNA, 19 nt, Homo sapiens
  misc_RNA (1)...(19): siRNA sense strand
ggaugaagaggaagagccu

SEQ ID NO: 2256339 - RNA, 19 nt, Homo sapiens
  misc_RNA (1)...(19): siRNA sense strand
gggucauaaucuuggaaug

SEQ ID NO: 2256340 - RNA, 19 nt, Homo sapiens
  misc_RNA (1)...(19): siRNA sense strand
gcaucggguuccagaaacu

SEQ ID NO: 2256341 - RNA, 19 nt, Homo sapiens
  misc_RNA (1)...(19): siRNA sense strand
cugugguacuccaaaggaa

SEQ ID NO: 2256342 - RNA, 19 nt, Homo sapiens
  misc_RNA (1)...(19): siRNA sense strand
aagcaaacccuucuagaca

SEQ ID NO: 2256343 - RNA, 19 nt, Homo sapiens
  misc_RNA (1)...(19): siRNA sense strand
ccaccacaaccgaaaguau

SEQ ID NO: 2256344 - RNA, 19 nt, Homo sapiens
  misc_RNA (1)...(19): siRNA sense strand
acuccaaaggaaugugaau

SEQ ID NO: 2256345 - RNA, 19 nt, Homo sapiens
  misc_RNA (1)...(19): siRNA sense strand
gggguauguaauagcaaua

SEQ ID NO: 2256346 - RNA, 19 nt, Homo sapiens
  misc_RNA (1)...(19): siRNA sense strand
aagaaacugcaaaggauga

SEQ ID NO: 2256347 - RNA, 19 nt, Homo sapiens
  misc_RNA (1)...(19): siRNA sense strand
aacuagagaaagaagagaa

SEQ ID NO: 2256348 - RNA, 19 nt, Homo sapiens
  misc_RNA (1)...(19): siRNA sense strand
auugugagacuaaaggaua

SEQ ID NO: 2256349 - RNA, 19 nt, Homo sapiens
  misc_RNA (1)...(19): siRNA sense strand
aaagaaagguuuuggugga

SEQ ID NO: 2256350 - RNA, 19 nt, Homo sapiens
  misc_RNA (1)...(19): siRNA sense strand
cacgaugaugggagagauu

SEQ ID NO: 2256351 - RNA, 19 nt, Homo sapiens
  misc_RNA (1)...(19): siRNA sense strand
gcauauggugacuguugua

SEQ ID NO: 2256352 - RNA, 19 nt, Homo sapiens
  misc_RNA (1)...(19): siRNA sense strand
ggcaaugaauacaagaagu

SEQ ID NO: 2256353 - RNA, 19 nt, Homo sapiens
  misc_RNA (1)...(19): siRNA sense strand
aggaaagguaugacaugau

SEQ ID NO: 2256354 - RNA, 19 nt, Homo sapiens
  misc_RNA (1)...(19): siRNA sense strand
uggauauccuugccagaau

SEQ ID NO: 2256355 - RNA, 19 nt, Homo sapiens
  misc_RNA (1)...(19): siRNA sense strand
ccccaaauugugagacuaa

SEQ ID NO: 2256356 - RNA, 19 nt, Homo sapiens
  misc_RNA (1)...(19): siRNA sense strand
aaagaagagaucacaaaca

SEQ ID NO: 2256357 - RNA, 19 nt, Homo sapiens
  misc_RNA (1)...(19): siRNA sense strand
aguaaagauucaagaggaa

SEQ ID NO: 2256358 - RNA, 19 nt, Homo sapiens
  misc_RNA (1)...(19): siRNA sense strand
gcaagaacucagaaggcua

SEQ ID NO: 2256359 - RNA, 19 nt, Homo sapiens
  misc_RNA (1)...(19): siRNA sense strand
ccucauugaaccagugaaa

SEQ ID NO: 2256360 - RNA, 19 nt, Homo sapiens
  misc_RNA (1)...(19): siRNA sense strand
ggcucaaauuacagugaaa

SEQ ID NO: 2256361 - RNA, 19 nt, Homo sapiens
  misc_RNA (1)...(19): siRNA sense strand
aggauuuacuugugcagaa

SEQ ID NO: 2256362 - RNA, 19 nt, Homo sapiens
  misc_RNA (1)...(19): siRNA sense strand
ggugaugagcagcagauaa

SEQ ID NO: 2256363 - RNA, 19 nt, Homo sapiens
  misc_RNA (1)...(19): siRNA sense strand
agauaaggacugagccaau

SEQ ID NO: 2256364 - RNA, 19 nt, Homo sapiens
  misc_RNA (1)...(19): siRNA sense strand
agaaguuggaugaggguga

SEQ ID NO: 2256365 - RNA, 19 nt, Homo sapiens
  misc_RNA (1)...(19): siRNA sense strand
gcgaaagaugaaugugauu

SEQ ID NO: 2256366 - RNA, 19 nt, Homo sapiens
  misc_RNA (1)...(19): siRNA sense strand
cuucuaagauccagggagu

SEQ ID NO: 2256367 - RNA, 19 nt, Homo sapiens
  misc_RNA (1)...(19): siRNA sense strand
guugguuggcauugaaaua

SEQ ID NO: 2256368 - RNA, 19 nt, Homo sapiens
  misc_RNA (1)...(19): siRNA sense strand
gcagauaaggacugagcca

SEQ ID NO: 2256369 - RNA, 19 nt, Homo sapiens
  misc_RNA (1)...(19): siRNA sense strand
uuggagaagacaagacuua

SEQ ID NO: 2256370 - RNA, 19 nt, Homo sapiens
  misc_RNA (1)...(19): siRNA sense strand
cuacagaaacccugggagu

SEQ ID NO: 2256371 - RNA, 19 nt, Homo sapiens
  misc_RNA (1)...(19): siRNA sense strand
aaguaaagauucaagagga

SEQ ID NO: 2256372 - RNA, 19 nt, Homo sapiens
  misc_RNA (1)...(19): siRNA sense strand
ggaaaaugcgugauggaca

SEQ ID NO: 2256373 - RNA, 19 nt, Homo sapiens
  misc_RNA (1)...(19): siRNA sense strand
cugauacagaagcgagaua

SEQ ID NO: 2256374 - RNA, 19 nt, Homo sapiens
  misc_RNA (1)...(19): siRNA sense strand
guucagggucaauggauuu

SEQ ID NO: 2256375 - RNA, 19 nt, Homo sapiens
  misc_RNA (1)...(19): siRNA sense strand
cccugggaguggagaacaa

SEQ ID NO: 2256376 - RNA, 19 nt, Homo sapiens
  misc_RNA (1)...(19): siRNA sense strand
caaaauguggagagggaau

SEQ ID NO: 2256377 - RNA, 19 nt, Homo sapiens
  misc_RNA (1)...(19): siRNA sense strand
auggacacaugaagauaaa

SEQ ID NO: 2256378 - RNA, 19 nt, Homo sapiens
  misc_RNA (1)...(19): siRNA sense strand
cuuaaaacacggaaggauu

SEQ ID NO: 2256379 - RNA, 19 nt, Homo sapiens
  misc_RNA (1)...(19): siRNA sense strand
acucacaugugcaaggaau

SEQ ID NO: 2256380 - RNA, 19 nt, Homo sapiens
  misc_RNA (1)...(19): siRNA sense strand
acaacugguucguccuaaa

SEQ ID NO: 2256381 - RNA, 19 nt, Homo sapiens
  misc_RNA (1)...(19): siRNA sense strand
aguucagggucaauggauu

SEQ ID NO: 2256382 - RNA, 19 nt, Homo sapiens
  misc_RNA (1)...(19): siRNA sense strand
ugaugaugacauacugaaa

SEQ ID NO: 2256383 - RNA, 19 nt, Homo sapiens
  misc_RNA (1)...(19): siRNA sense strand
cuucagaauaaacgaccaa

SEQ ID NO: 2256384 - RNA, 19 nt, Homo sapiens
  misc_RNA (1)...(19): siRNA sense strand
aaauauaaccugagggugc

SEQ ID NO: 2256385 - RNA, 19 nt, Homo sapiens
  misc_RNA (1)...(19): siRNA sense strand
ggaaagaucuacugcacug

SEQ ID NO: 2256386 - RNA, 19 nt, Homo sapiens
  misc_RNA (1)...(19): siRNA sense strand
accuguagccugugaagaa

SEQ ID NO: 2256387 - RNA, 19 nt, Homo sapiens
  misc_RNA (1)...(19): siRNA sense strand
aaacagaauggcacaucaa

SEQ ID NO: 2256388 - RNA, 19 nt, Homo sapiens
  misc_RNA (1)...(19): siRNA sense strand
ggaaacaagaaguuggaug

SEQ ID NO: 2256389 - RNA, 19 nt, Homo sapiens
  misc_RNA (1)...(19): siRNA sense strand
aggagaaugcugugaaucu

SEQ ID NO: 2256390 - RNA, 19 nt, Homo sapiens
  misc_RNA (1)...(19): siRNA sense strand
gggaauggugugcaacaau

SEQ ID NO: 2256391 - RNA, 19 nt, Homo sapiens
  misc_RNA (1)...(19): siRNA sense strand
gguguauauucuugaugau

SEQ ID NO: 2256392 - RNA, 19 nt, Homo sapiens
  misc_RNA (1)...(19): siRNA sense strand
uugaaggauuauaagccaa

SEQ ID NO: 2256393 - RNA, 19 nt, Homo sapiens
  misc_RNA (1)...(19): siRNA sense strand
uggaguagagggucaacaa

SEQ ID NO: 2256394 - RNA, 19 nt, Homo sapiens
  misc_RNA (1)...(19): siRNA sense strand
caugaaaggagaagcguuc

SEQ ID NO: 2256395 - RNA, 19 nt, Homo sapiens
  misc_RNA (1)...(19): siRNA sense strand
gggauaaugaaucugaaga

SEQ ID NO: 2256396 - RNA, 19 nt, Homo sapiens
  misc_RNA (1)...(19): siRNA sense strand
ggacacaugaagauaaaau

SEQ ID NO: 2256397 - RNA, 19 nt, Homo sapiens
  misc_RNA (1)...(19): siRNA sense strand
gauuauaagccaacaugca

SEQ ID NO: 2256398 - RNA, 19 nt, Homo sapiens
  misc_RNA (1)...(19): siRNA sense strand
cagaagaaugcuacuguca

SEQ ID NO: 2256399 - RNA, 19 nt, Homo sapiens
  misc_RNA (1)...(19): siRNA sense strand
cugaacuauuugaugauga

SEQ ID NO: 2256400 - RNA, 19 nt, Homo sapiens
  misc_RNA (1)...(19): siRNA sense strand
uggcauugaaauauggaca

SEQ ID NO: 2256401 - RNA, 19 nt, Homo sapiens
  misc_RNA (1)...(19): siRNA sense strand
acucagaaggcuacuguuu

SEQ ID NO: 2256402 - RNA, 19 nt, Homo sapiens
  misc_RNA (1)...(19): siRNA sense strand
ugaugaugcaauagagagu

SEQ ID NO: 2256403 - RNA, 19 nt, Homo sapiens
  misc_RNA (1)...(19): siRNA sense strand
acugaaaacguaugaagaa

SEQ ID NO: 2256404 - RNA, 19 nt, Homo sapiens
  misc_RNA (1)...(19): siRNA sense strand
gcauugaaauauggacaca

SEQ ID NO: 2256405 - RNA, 19 nt, Homo sapiens
  misc_RNA (1)...(19): siRNA sense strand
aaauauggacacaugaaga

SEQ ID NO: 2256406 - RNA, 19 nt, Homo sapiens
  misc_RNA (1)...(19): siRNA sense strand
gggugaagagugugacugu

SEQ ID NO: 2256407 - RNA, 19 nt, Homo sapiens
  misc_RNA (1)...(19): siRNA sense strand
caguacguguaauggucua

SEQ ID NO: 2256408 - RNA, 19 nt, Homo sapiens
  misc_RNA (1)...(19): siRNA sense strand
cucaaauuacagugaaaca

SEQ ID NO: 2256409 - RNA, 19 nt, Homo sapiens
  misc_RNA (1)...(19): siRNA sense strand
gagggaauggugugcaaca

SEQ ID NO: 2256410 - RNA, 19 nt, Homo sapiens
  misc_RNA (1)...(19): siRNA sense strand
ccaugaaaggagaagcguu

SEQ ID NO: 2256411 - RNA, 19 nt, Homo sapiens
  misc_RNA (1)...(19): siRNA sense strand
uggaagaacugguggguga

SEQ ID NO: 2256412 - RNA, 19 nt, Homo sapiens
  misc_RNA (1)...(19): siRNA sense strand
gagaagagccuuugcggau

SEQ ID NO: 2256413 - RNA, 19 nt, Homo sapiens
  misc_RNA (1)...(19): siRNA sense strand
agauaaucacuauuggcua

SEQ ID NO: 2256414 - RNA, 19 nt, Homo sapiens
  misc_RNA (1)...(19): siRNA sense strand
aguaaauaccaccgguuca

SEQ ID NO: 2256415 - RNA, 19 nt, Homo sapiens
  misc_RNA (1)...(19): siRNA sense strand
acaaccuauuugaaggaau

SEQ ID NO: 2256416 - RNA, 19 nt, Homo sapiens
  misc_RNA (1)...(19): siRNA sense strand
ggagagacugcaucggaca

SEQ ID NO: 2256417 - RNA, 19 nt, Homo sapiens
  misc_RNA (1)...(19): siRNA sense strand
gauaaucacuauuggcuac

SEQ ID NO: 2256418 - RNA, 19 nt, Homo sapiens
  misc_RNA (1)...(19): siRNA sense strand
aguacaacaaugacaccaa

SEQ ID NO: 2256419 - RNA, 19 nt, Homo sapiens
  misc_RNA (1)...(19): siRNA sense strand
ccaccacagaggacgagua

SEQ ID NO: 2256420 - RNA, 19 nt, Homo sapiens
  misc_RNA (1)...(19): siRNA sense strand
ccgaggacaaggagucaga

SEQ ID NO: 2256421 - RNA, 19 nt, Homo sapiens
  misc_RNA (1)...(19): siRNA sense strand
gcauguuuguacugagucu

SEQ ID NO: 2256422 - RNA, 19 nt, Homo sapiens
  misc_RNA (1)...(19): siRNA sense strand
agaggaaggaagagagaaa

SEQ ID NO: 2256423 - RNA, 19 nt, Homo sapiens
  misc_RNA (1)...(19): siRNA sense strand
uggaagaagcaaaggguuu

SEQ ID NO: 2256424 - RNA, 19 nt, Homo sapiens
  misc_RNA (1)...(19): siRNA sense strand
aguugaaacaggagagaau

SEQ ID NO: 2256425 - RNA, 19 nt, Homo sapiens
  misc_RNA (1)...(19): siRNA sense strand
gcaaagagcgggaagcuga

SEQ ID NO: 2256426 - RNA, 19 nt, Homo sapiens
  misc_RNA (1)...(19): siRNA sense strand
uugaugugauuaagggaaa

SEQ ID NO: 2256427 - RNA, 19 nt, Homo sapiens
  misc_RNA (1)...(19): siRNA sense strand
ggaggauggaagaagcaaa

SEQ ID NO: 2256428 - RNA, 19 nt, Homo sapiens
  misc_RNA (1)...(19): siRNA sense strand
uugaaacaggagagaauua

SEQ ID NO: 2256429 - RNA, 19 nt, Homo sapiens
  misc_RNA (1)...(19): siRNA sense strand
aggaaugccaagugcuaua

SEQ ID NO: 2256430 - RNA, 19 nt, Homo sapiens
  misc_RNA (1)...(19): siRNA sense strand
ggaagagaugaauggaaaa

SEQ ID NO: 2256431 - RNA, 19 nt, Homo sapiens
  misc_RNA (1)...(19): siRNA sense strand
ggaucaauuaccagugcua

SEQ ID NO: 2256432 - RNA, 19 nt, Homo sapiens
  misc_RNA (1)...(19): siRNA sense strand
ccgacaaggccaucgagaa

SEQ ID NO: 2256433 - RNA, 19 nt, Homo sapiens
  misc_RNA (1)...(19): siRNA sense strand
gagaaaaucugguguggga

SEQ ID NO: 2256434 - RNA, 19 nt, Homo sapiens
  misc_RNA (1)...(19): siRNA sense strand
cugggaagaucacgggaau

SEQ ID NO: 2256435 - RNA, 19 nt, Homo sapiens
  misc_RNA (1)...(19): siRNA sense strand
gggaaugcugcuggagaua

SEQ ID NO: 2256436 - RNA, 19 nt, Homo sapiens
  misc_RNA (1)...(19): siRNA sense strand
ucaucaagaaccuggacaa

SEQ ID NO: 2256437 - RNA, 19 nt, Homo sapiens
  misc_RNA (1)...(19): siRNA sense strand
ggaugaugagagucugaaa

SEQ ID NO: 2256438 - RNA, 19 nt, Homo sapiens
  misc_RNA (1)...(19): siRNA sense strand
auucaaaucuggcugggaa

SEQ ID NO: 2256439 - RNA, 19 nt, Homo sapiens
  misc_RNA (1)...(19): siRNA sense strand
agaacggcucuaaggguua

SEQ ID NO: 2256440 - RNA, 19 nt, Homo sapiens
  misc_RNA (1)...(19): siRNA sense strand
ccagaggaaggaagagaga

SEQ ID NO: 2256441 - RNA, 19 nt, Homo sapiens
  misc_RNA (1)...(19): siRNA sense strand
gagaacggcucuaaggguu

SEQ ID NO: 2256442 - RNA, 19 nt, Homo sapiens
  misc_RNA (1)...(19): siRNA sense strand
guggaagagaugaauggaa

SEQ ID NO: 2256443 - RNA, 19 nt, Homo sapiens
  misc_RNA (1)...(19): siRNA sense strand
aggaagagagaaaggcuca

SEQ ID NO: 2256444 - RNA, 19 nt, Homo sapiens
  misc_RNA (1)...(19): siRNA sense strand
gagaugaauggaaaagaaa

SEQ ID NO: 2256445 - RNA, 19 nt, Homo sapiens
  misc_RNA (1)...(19): siRNA sense strand
ucgagaagaugaauggcau

SEQ ID NO: 2256446 - RNA, 19 nt, Homo sapiens
  misc_RNA (1)...(19): siRNA sense strand
aggcuguggaagagaugaa

SEQ ID NO: 2256447 - RNA, 19 nt, Homo sapiens
  misc_RNA (1)...(19): siRNA sense strand
agagaugaauggaaaagaa

SEQ ID NO: 2256448 - RNA, 19 nt, Homo sapiens
  misc_RNA (1)...(19): siRNA sense strand
aaguagaacggcaggcaga

SEQ ID NO: 2256449 - RNA, 19 nt, Homo sapiens
  misc_RNA (1)...(19): siRNA sense strand
aggccaugcuguacgaaaa

SEQ ID NO: 2256450 - RNA, 19 nt, Homo sapiens
  misc_RNA (1)...(19): siRNA sense strand
cccaagaggcugccgacaa

SEQ ID NO: 2256451 - RNA, 19 nt, Homo sapiens
  misc_RNA (1)...(19): siRNA sense strand
aggaauucaccaauguuua

SEQ ID NO: 2256452 - RNA, 19 nt, Homo sapiens
  misc_RNA (1)...(19): siRNA sense strand
ugauuaagggaaagccaau

SEQ ID NO: 2256453 - RNA, 19 nt, Homo sapiens
  misc_RNA (1)...(19): siRNA sense strand
aggcagaguuaaaacggaa

SEQ ID NO: 2256454 - RNA, 19 nt, Homo sapiens
  misc_RNA (1)...(19): siRNA sense strand
ccaugaacuuugaugugau

SEQ ID NO: 2256455 - RNA, 19 nt, Homo sapiens
  misc_RNA (1)...(19): siRNA sense strand
gugauuaagggaaagccaa

SEQ ID NO: 2256456 - RNA, 19 nt, Homo sapiens
  misc_RNA (1)...(19): siRNA sense strand
gugcuaagguaaugcugga

SEQ ID NO: 2256457 - RNA, 19 nt, Homo sapiens
  misc_RNA (1)...(19): siRNA sense strand
agaacggcaggcagaguua

SEQ ID NO: 2256458 - RNA, 19 nt, Homo sapiens
  misc_RNA (1)...(19): siRNA sense strand
ccuccauauuauacaccua

SEQ ID NO: 2256459 - RNA, 19 nt, Homo sapiens
  misc_RNA (1)...(19): siRNA sense strand
gggaucccucuuugagaaa

SEQ ID NO: 2256460 - RNA, 19 nt, Homo sapiens
  misc_RNA (1)...(19): siRNA sense strand
agguaaugcuggaggaugg

SEQ ID NO: 2256461 - RNA, 19 nt, Homo sapiens
  misc_RNA (1)...(19): siRNA sense strand
gcugggaagaucacgggaa

SEQ ID NO: 2256462 - RNA, 19 nt, Homo sapiens
  misc_RNA (1)...(19): siRNA sense strand
acacuauugaugaugagaa

SEQ ID NO: 2256463 - RNA, 19 nt, Homo sapiens
  misc_RNA (1)...(19): siRNA sense strand
cucaaugaccgcaaaguau

SEQ ID NO: 2256464 - RNA, 19 nt, Homo sapiens
  misc_RNA (1)...(19): siRNA sense strand
ugagagucugaaagagcua

SEQ ID NO: 2256465 - RNA, 19 nt, Homo sapiens
  misc_RNA (1)...(19): siRNA sense strand
agggaaagccaauccgcau

SEQ ID NO: 2256466 - RNA, 19 nt, Homo sapiens
  misc_RNA (1)...(19): siRNA sense strand
cagcagucccacaggcuca

SEQ ID NO: 2256467 - RNA, 19 nt, Homo sapiens
  misc_RNA (1)...(19): siRNA sense strand
ggaaaagacaggaggcaga

SEQ ID NO: 2256468 - RNA, 19 nt, Homo sapiens
  misc_RNA (1)...(19): siRNA sense strand
ccugcaaggaggacgagua

SEQ ID NO: 2256469 - RNA, 19 nt, Homo sapiens
  misc_RNA (1)...(19): siRNA sense strand
gugaaaagaagaaagccaa

SEQ ID NO: 2256470 - RNA, 19 nt, Homo sapiens
  misc_RNA (1)...(19): siRNA sense strand
gugauguagucaaggugau

SEQ ID NO: 2256471 - RNA, 19 nt, Homo sapiens
  misc_RNA (1)...(19): siRNA sense strand
gacaggaggcagaagguga

SEQ ID NO: 2256472 - RNA, 19 nt, Homo sapiens
  misc_RNA (1)...(19): siRNA sense strand
agggaggcaccgagaguca

SEQ ID NO: 2256473 - RNA, 19 nt, Homo sapiens
  misc_RNA (1)...(19): siRNA sense strand
gcaagugucugcagugcca

SEQ ID NO: 2256474 - RNA, 19 nt, Homo sapiens
  misc_RNA (1)...(19): siRNA sense strand
uggccguggaggagacaau

SEQ ID NO: 2256475 - RNA, 19 nt, Homo sapiens
  misc_RNA (1)...(19): siRNA sense strand
acgcggaguggcagaaaca

SEQ ID NO: 2256476 - RNA, 19 nt, Homo sapiens
  misc_RNA (1)...(19): siRNA sense strand
acgcggaguggcagaaaca

SEQ ID NO: 2256477 - RNA, 19 nt, Homo sapiens
  misc_RNA (1)...(19): siRNA sense strand
ggaaugauguugaaggaga

SEQ ID NO: 2256478 - RNA, 19 nt, Homo sapiens
  misc_RNA (1)...(19): siRNA sense strand
cugcugaugaagaggaaga

SEQ ID NO: 2256479 - RNA, 19 nt, Homo sapiens
  misc_RNA (1)...(19): siRNA sense strand
cugaugaagaggaagauga

SEQ ID NO: 2256480 - RNA, 19 nt, Homo sapiens
  misc_RNA (1)...(19): siRNA sense strand
aguacauggacaaugauua

SEQ ID NO: 2256481 - RNA, 19 nt, Homo sapiens
  misc_RNA (1)...(19): siRNA sense strand
gagggaagcuguugcccau

SEQ ID NO: 2256482 - RNA, 19 nt, Homo sapiens
  misc_RNA (1)...(19): siRNA sense strand
cugcaacaccacaggccaa

SEQ ID NO: 2256483 - RNA, 19 nt, Homo sapiens
  misc_RNA (1)...(19): siRNA sense strand
uguugaaggagaugcagaa

SEQ ID NO: 2256484 - RNA, 19 nt, Homo sapiens
  misc_RNA (1)...(19): siRNA sense strand
uggacaaugauuaugcuaa

SEQ ID NO: 2256485 - RNA, 19 nt, Homo sapiens
  misc_RNA (1)...(19): siRNA sense strand
aggaaaagccuccagacua

SEQ ID NO: 2256486 - RNA, 19 nt, Homo sapiens
  misc_RNA (1)...(19): siRNA sense strand
gaaagauguguccgggaga

SEQ ID NO: 2256487 - RNA, 19 nt, Homo sapiens
  misc_RNA (1)...(19): siRNA sense strand
cuuuggagcgagcuggaaa

SEQ ID NO: 2256488 - RNA, 19 nt, Homo sapiens
  misc_RNA (1)...(19): siRNA sense strand
cuuaugagcaagcuggaau

SEQ ID NO: 2256489 - RNA, 19 nt, Homo sapiens
  misc_RNA (1)...(19): siRNA sense strand
gcaugauguaucuagaaaa

SEQ ID NO: 2256490 - RNA, 19 nt, Homo sapiens
  misc_RNA (1)...(19): siRNA sense strand
aagcagagaaauaccugaa

SEQ ID NO: 2256491 - RNA, 19 nt, Homo sapiens
  misc_RNA (1)...(19): siRNA sense strand
cuguacaguuauaucaaca

SEQ ID NO: 2256492 - RNA, 19 nt, Homo sapiens
  misc_RNA (1)...(19): siRNA sense strand
augaagaacgcuuacgaca

SEQ ID NO: 2256493 - RNA, 19 nt, Homo sapiens
  misc_RNA (1)...(19): siRNA sense strand
cucucuauucagaaagaaa

SEQ ID NO: 2256494 - RNA, 19 nt, Homo sapiens
  misc_RNA (1)...(19): siRNA sense strand
ugacuauguagcugcagaa

SEQ ID NO: 2256495 - RNA, 19 nt, Homo sapiens
  misc_RNA (1)...(19): siRNA sense strand
agaugaauacucaggagga

SEQ ID NO: 2256496 - RNA, 19 nt, Homo sapiens
  misc_RNA (1)...(19): siRNA sense strand
ggaaggaagcggaggcgau

SEQ ID NO: 2256497 - RNA, 19 nt, Homo sapiens
  misc_RNA (1)...(19): siRNA sense strand
ccucaaguacagcgccaaa

SEQ ID NO: 2256498 - RNA, 19 nt, Homo sapiens
  misc_RNA (1)...(19): siRNA sense strand
cgggaaugcaaguugauga

SEQ ID NO: 2256499 - RNA, 19 nt, Homo sapiens
  misc_RNA (1)...(19): siRNA sense strand
acaaaggcgaggaguccaa

SEQ ID NO: 2256500 - RNA, 19 nt, Homo sapiens
  misc_RNA (1)...(19): siRNA sense strand
gagcaguaucagaaggcca

SEQ ID NO: 2256501 - RNA, 19 nt, Homo sapiens
  misc_RNA (1)...(19): siRNA sense strand
auagaggaagcaugcgaaa

SEQ ID NO: 2256502 - RNA, 19 nt, Homo sapiens
  misc_RNA (1)...(19): siRNA sense strand
augaggaggaccugcgcua

SEQ ID NO: 2256503 - RNA, 19 nt, Homo sapiens
  misc_RNA (1)...(19): siRNA sense strand
ucgacaugcucaacgccaa

SEQ ID NO: 2256504 - RNA, 19 nt, Homo sapiens
  misc_RNA (1)...(19): siRNA sense strand
guagaaaaggaguggauaa

SEQ ID NO: 2256505 - RNA, 19 nt, Homo sapiens
  misc_RNA (1)...(19): siRNA sense strand
acagaguaaacuagggaua

SEQ ID NO: 2256506 - RNA, 19 nt, Homo sapiens
  misc_RNA (1)...(19): siRNA sense strand
ugcuaauguuggacaguua

SEQ ID NO: 2256507 - RNA, 19 nt, Homo sapiens
  misc_RNA (1)...(19): siRNA sense strand
cuuauaaacaggaagaaca

SEQ ID NO: 2256508 - RNA, 19 nt, Homo sapiens
  misc_RNA (1)...(19): siRNA sense strand
ggaggauaugaaagugaaa

SEQ ID NO: 2256509 - RNA, 19 nt, Homo sapiens
  misc_RNA (1)...(19): siRNA sense strand
gcugauaccaacaagacaa

SEQ ID NO: 2256510 - RNA, 19 nt, Homo sapiens
  misc_RNA (1)...(19): siRNA sense strand
uuacaaggcucuaagggau

SEQ ID NO: 2256511 - RNA, 19 nt, Homo sapiens
  misc_RNA (1)...(19): siRNA sense strand
gugaaagaugucauguaua

SEQ ID NO: 2256512 - RNA, 19 nt, Homo sapiens
  misc_RNA (1)...(19): siRNA sense strand
gcgagugggccaugguaau

SEQ ID NO: 2256513 - RNA, 19 nt, Homo sapiens
  misc_RNA (1)...(19): siRNA sense strand
agauagugugcaaggauau

SEQ ID NO: 2256514 - RNA, 19 nt, Homo sapiens
  misc_RNA (1)...(19): siRNA sense strand
aacaggaagaacagaguaa

SEQ ID NO: 2256515 - RNA, 19 nt, Homo sapiens
  misc_RNA (1)...(19): siRNA sense strand
aauuaugaguucugugaca

SEQ ID NO: 2256516 - RNA, 19 nt, Homo sapiens
  misc_RNA (1)...(19): siRNA sense strand
gcugcaaagaggaugaaaa

SEQ ID NO: 2256517 - RNA, 19 nt, Homo sapiens
  misc_RNA (1)...(19): siRNA sense strand
ggguggaggauaugaaagu

SEQ ID NO: 2256518 - RNA, 19 nt, Homo sapiens
  misc_RNA (1)...(19): siRNA sense strand
gcgagagucacuacgcaaa

SEQ ID NO: 2256519 - RNA, 19 nt, Homo sapiens
  misc_RNA (1)...(19): siRNA sense strand
uuccugugguauagagaua

SEQ ID NO: 2256520 - RNA, 19 nt, Homo sapiens
  misc_RNA (1)...(19): siRNA sense strand
ugugcaaggauaugaggaa

SEQ ID NO: 2256521 - RNA, 19 nt, Homo sapiens
  misc_RNA (1)...(19): siRNA sense strand
augaaaaccacguguuaua

SEQ ID NO: 2256522 - RNA, 19 nt, Homo sapiens
  misc_RNA (1)...(19): siRNA sense strand
ggagaagauuggagcacag

SEQ ID NO: 2256523 - RNA, 19 nt, Homo sapiens
  misc_RNA (1)...(19): siRNA sense strand
gguucagugacaucagaaa

SEQ ID NO: 2256524 - RNA, 19 nt, Homo sapiens
  misc_RNA (1)...(19): siRNA sense strand
ucagcagaguggagaagau

SEQ ID NO: 2256525 - RNA, 19 nt, Homo sapiens
  misc_RNA (1)...(19): siRNA sense strand
agagacagggcuugccaaa

SEQ ID NO: 2256526 - RNA, 19 nt, Homo sapiens
  misc_RNA (1)...(19): siRNA sense strand
uguaaaagaugaugaccuu

SEQ ID NO: 2256527 - RNA, 19 nt, Homo sapiens
  misc_RNA (1)...(19): siRNA sense strand
auuugaaacucucguagaa

SEQ ID NO: 2256528 - RNA, 19 nt, Homo sapiens
  misc_RNA (1)...(19): siRNA sense strand
aauauaagagacagggcuu

SEQ ID NO: 2256529 - RNA, 19 nt, Homo sapiens
  misc_RNA (1)...(19): siRNA sense strand
uggcaaaugacaaggcagu

SEQ ID NO: 2256530 - RNA, 19 nt, Homo sapiens
  misc_RNA (1)...(19): siRNA sense strand
ggcucuaagggauggaaau

SEQ ID NO: 2256531 - RNA, 19 nt, Homo sapiens
  misc_RNA (1)...(19): siRNA sense strand
agucugagucauuuggaau

SEQ ID NO: 2256532 - RNA, 19 nt, Homo sapiens
  misc_RNA (1)...(19): siRNA sense strand
guggaggauaugaaaguga

SEQ ID NO: 2256533 - RNA, 19 nt, Homo sapiens
  misc_RNA (1)...(19): siRNA sense strand
ggucguauaucaauagcca

SEQ ID NO: 2256534 - RNA, 19 nt, Homo sapiens
  misc_RNA (1)...(19): siRNA sense strand
ggagaaucaauuaaagcca

SEQ ID NO: 2256535 - RNA, 19 nt, Homo sapiens
  misc_RNA (1)...(19): siRNA sense strand
gagaaucaauuaaagccau

SEQ ID NO: 2256536 - RNA, 19 nt, Homo sapiens
  misc_RNA (1)...(19): siRNA sense strand
aggauaugaaagugaaagu

SEQ ID NO: 2256537 - RNA, 19 nt, Homo sapiens
  misc_RNA (1)...(19): siRNA sense strand
gagcacagagccauggaga

SEQ ID NO: 2256538 - RNA, 19 nt, Homo sapiens
  misc_RNA (1)...(19): siRNA sense strand
gggccaugguaaugacaac

SEQ ID NO: 2256539 - RNA, 19 nt, Homo sapiens
  misc_RNA (1)...(19): siRNA sense strand
cuuuauggucguauaucaa

SEQ ID NO: 2256540 - RNA, 19 nt, Homo sapiens
  misc_RNA (1)...(19): siRNA sense strand
auucgaguuuaaugagcua

SEQ ID NO: 2256541 - RNA, 19 nt, Homo sapiens
  misc_RNA (1)...(19): siRNA sense strand
acgcauuggcuggaauaua

SEQ ID NO: 2256542 - RNA, 19 nt, Homo sapiens
  misc_RNA (1)...(19): siRNA sense strand
cagaguaaacuagggauau

SEQ ID NO: 2256543 - RNA, 19 nt, Homo sapiens
  misc_RNA (1)...(19): siRNA sense strand
guggauaagcuuuggacac

SEQ ID NO: 2256544 - RNA, 19 nt, Homo sapiens
  misc_RNA (1)...(19): siRNA sense strand
caggaagaacagaguaaac

SEQ ID NO: 2256545 - RNA, 19 nt, Homo sapiens
  misc_RNA (1)...(19): siRNA sense strand
cugauaccaacaagacaaa

SEQ ID NO: 2256546 - RNA, 19 nt, Homo sapiens
  misc_RNA (1)...(19): siRNA sense strand
uugaaacucucguagaaaa

SEQ ID NO: 2256547 - RNA, 19 nt, Homo sapiens
  misc_RNA (1)...(19): siRNA sense strand
aguggaacccugacaguga

SEQ ID NO: 2256548 - RNA, 19 nt, Homo sapiens
  misc_RNA (1)...(19): siRNA sense strand
gaacagaguaaacuaggga

SEQ ID NO: 2256549 - RNA, 19 nt, Homo sapiens
  misc_RNA (1)...(19): siRNA sense strand
aguuacuacaggaccauua

SEQ ID NO: 2256550 - RNA, 19 nt, Homo sapiens
  misc_RNA (1)...(19): siRNA sense strand
guagaaaaggaguggauaa

SEQ ID NO: 2256551 - RNA, 19 nt, Homo sapiens
  misc_RNA (1)...(19): siRNA sense strand
acagaguaaacuagggaua

SEQ ID NO: 2256552 - RNA, 19 nt, Homo sapiens
  misc_RNA (1)...(19): siRNA sense strand
ugcuaauguuggacaguua

SEQ ID NO: 2256553 - RNA, 19 nt, Homo sapiens
  misc_RNA (1)...(19): siRNA sense strand
cuuauaaacaggaagaaca

SEQ ID NO: 2256554 - RNA, 19 nt, Homo sapiens
  misc_RNA (1)...(19): siRNA sense strand
ggaggauaugaaagugaaa

SEQ ID NO: 2256555 - RNA, 19 nt, Homo sapiens
  misc_RNA (1)...(19): siRNA sense strand
gcugauaccaacaagacaa

SEQ ID NO: 2256556 - RNA, 19 nt, Homo sapiens
  misc_RNA (1)...(19): siRNA sense strand
uuacaaggcucuaagggau

SEQ ID NO: 2256557 - RNA, 19 nt, Homo sapiens
  misc_RNA (1)...(19): siRNA sense strand
gugaaagaugucauguaua

SEQ ID NO: 2256558 - RNA, 19 nt, Homo sapiens
  misc_RNA (1)...(19): siRNA sense strand
gcgagugggccaugguaau

SEQ ID NO: 2256559 - RNA, 19 nt, Homo sapiens
  misc_RNA (1)...(19): siRNA sense strand
agauagugugcaaggauau

SEQ ID NO: 2256560 - RNA, 19 nt, Homo sapiens
  misc_RNA (1)...(19): siRNA sense strand
aacaggaagaacagaguaa

SEQ ID NO: 2256561 - RNA, 19 nt, Homo sapiens
  misc_RNA (1)...(19): siRNA sense strand
aauuaugaguucugugaca

SEQ ID NO: 2256562 - RNA, 19 nt, Homo sapiens
  misc_RNA (1)...(19): siRNA sense strand
gcugcaaagaggaugaaaa

SEQ ID NO: 2256563 - RNA, 19 nt, Homo sapiens
  misc_RNA (1)...(19): siRNA sense strand
ggguggaggauaugaaagu

SEQ ID NO: 2256564 - RNA, 19 nt, Homo sapiens
  misc_RNA (1)...(19): siRNA sense strand
gcgagagucacuacgcaaa

SEQ ID NO: 2256565 - RNA, 19 nt, Homo sapiens
  misc_RNA (1)...(19): siRNA sense strand
uuccugugguauagagaua

SEQ ID NO: 2256566 - RNA, 19 nt, Homo sapiens
  misc_RNA (1)...(19): siRNA sense strand
ugugcaaggauaugaggaa

SEQ ID NO: 2256567 - RNA, 19 nt, Homo sapiens
  misc_RNA (1)...(19): siRNA sense strand
ggagaagauuggagcacag

SEQ ID NO: 2256568 - RNA, 19 nt, Homo sapiens
  misc_RNA (1)...(19): siRNA sense strand
gguucagugacaucagaaa

SEQ ID NO: 2256569 - RNA, 19 nt, Homo sapiens
  misc_RNA (1)...(19): siRNA sense strand
ucagcagaguggagaagau

SEQ ID NO: 2256570 - RNA, 19 nt, Homo sapiens
  misc_RNA (1)...(19): siRNA sense strand
agagacagggcuugccaaa

SEQ ID NO: 2256571 - RNA, 19 nt, Homo sapiens
  misc_RNA (1)...(19): siRNA sense strand
uguaaaagaugaugaccuu

SEQ ID NO: 2256572 - RNA, 19 nt, Homo sapiens
  misc_RNA (1)...(19): siRNA sense strand
auuugaaacucucguagaa

SEQ ID NO: 2256573 - RNA, 19 nt, Homo sapiens
  misc_RNA (1)...(19): siRNA sense strand
aauauaagagacagggcuu

SEQ ID NO: 2256574 - RNA, 19 nt, Homo sapiens
  misc_RNA (1)...(19): siRNA sense strand
uggcaaaugacaaggcagu

SEQ ID NO: 2256575 - RNA, 19 nt, Homo sapiens
  misc_RNA (1)...(19): siRNA sense strand
ggcucuaagggauggaaau

SEQ ID NO: 2256576 - RNA, 19 nt, Homo sapiens
  misc_RNA (1)...(19): siRNA sense strand
guggaggauaugaaaguga

SEQ ID NO: 2256577 - RNA, 19 nt, Homo sapiens
  misc_RNA (1)...(19): siRNA sense strand
ggagaaucaauuaaagcca

SEQ ID NO: 2256578 - RNA, 19 nt, Homo sapiens
  misc_RNA (1)...(19): siRNA sense strand
gagaaucaauuaaagccau

SEQ ID NO: 2256579 - RNA, 19 nt, Homo sapiens
  misc_RNA (1)...(19): siRNA sense strand
aggauaugaaagugaaagu

SEQ ID NO: 2256580 - RNA, 19 nt, Homo sapiens
  misc_RNA (1)...(19): siRNA sense strand
gagcacagagccauggaga

SEQ ID NO: 2256581 - RNA, 19 nt, Homo sapiens
  misc_RNA (1)...(19): siRNA sense strand
gggccaugguaaugacaac

SEQ ID NO: 2256582 - RNA, 19 nt, Homo sapiens
  misc_RNA (1)...(19): siRNA sense strand
auucgaguuuaaugagcua

SEQ ID NO: 2256583 - RNA, 19 nt, Homo sapiens
  misc_RNA (1)...(19): siRNA sense strand
acgcauuggcuggaauaua

SEQ ID NO: 2256584 - RNA, 19 nt, Homo sapiens
  misc_RNA (1)...(19): siRNA sense strand
cagaguaaacuagggauau

SEQ ID NO: 2256585 - RNA, 19 nt, Homo sapiens
  misc_RNA (1)...(19): siRNA sense strand
guggauaagcuuuggacac

SEQ ID NO: 2256586 - RNA, 19 nt, Homo sapiens
  misc_RNA (1)...(19): siRNA sense strand
caggaagaacagaguaaac

SEQ ID NO: 2256587 - RNA, 19 nt, Homo sapiens
  misc_RNA (1)...(19): siRNA sense strand
cugauaccaacaagacaaa

SEQ ID NO: 2256588 - RNA, 19 nt, Homo sapiens
  misc_RNA (1)...(19): siRNA sense strand
uugaaacucucguagaaaa

SEQ ID NO: 2256589 - RNA, 19 nt, Homo sapiens
  misc_RNA (1)...(19): siRNA sense strand
aguggaacccugacaguga

SEQ ID NO: 2256590 - RNA, 19 nt, Homo sapiens
  misc_RNA (1)...(19): siRNA sense strand
gaacagaguaaacuaggga

SEQ ID NO: 2256591 - RNA, 19 nt, Homo sapiens
  misc_RNA (1)...(19): siRNA sense strand
aguuacuacaggaccauua

SEQ ID NO: 2256592 - RNA, 19 nt, Homo sapiens
  misc_RNA (1)...(19): siRNA sense strand
agauagaagcuuuggagaa

SEQ ID NO: 2256593 - RNA, 19 nt, Homo sapiens
  misc_RNA (1)...(19): siRNA sense strand
gggagaaagaacacagcaa

SEQ ID NO: 2256594 - RNA, 19 nt, Homo sapiens
  misc_RNA (1)...(19): siRNA sense strand
cuggaauguuggagacaau

SEQ ID NO: 2256595 - RNA, 19 nt, Homo sapiens
  misc_RNA (1)...(19): siRNA sense strand
ugaaguaguaugugggaga

SEQ ID NO: 2256596 - RNA, 19 nt, Homo sapiens
  misc_RNA (1)...(19): siRNA sense strand
ccuuaugaagacagcgaua

SEQ ID NO: 2256597 - RNA, 19 nt, Homo sapiens
  misc_RNA (1)...(19): siRNA sense strand
gaaagaugauggagaccca

SEQ ID NO: 2256598 - RNA, 19 nt, Homo sapiens
  misc_RNA (1)...(19): siRNA sense strand
aagaaaugaaagaagccua

SEQ ID NO: 2256599 - RNA, 19 nt, Homo sapiens
  misc_RNA (1)...(19): siRNA sense strand
ccauuuauuacuggagaaa

SEQ ID NO: 2256600 - RNA, 19 nt, Homo sapiens
  misc_RNA (1)...(19): siRNA sense strand
gcuuaaacaucacagcaga

SEQ ID NO: 2256601 - RNA, 19 nt, Homo sapiens
  misc_RNA (1)...(19): siRNA sense strand
auucaauggagauagcaaa

SEQ ID NO: 2256602 - RNA, 19 nt, Homo sapiens
  misc_RNA (1)...(19): siRNA sense strand
guaguaugugggagaaaga

SEQ ID NO: 2256603 - RNA, 19 nt, Homo sapiens
  misc_RNA (1)...(19): siRNA sense strand
gcaagaaugcagagagcug

SEQ ID NO: 2256604 - RNA, 19 nt, Homo sapiens
  misc_RNA (1)...(19): siRNA sense strand
cagaagaauggaaggaaag

SEQ ID NO: 2256605 - RNA, 19 nt, Homo sapiens
  misc_RNA (1)...(19): siRNA sense strand
ccagaaaggaggagucaag

SEQ ID NO: 2256606 - RNA, 19 nt, Homo sapiens
  misc_RNA (1)...(19): siRNA sense strand
ggagcauggaggaugaaaa

SEQ ID NO: 2256607 - RNA, 19 nt, Homo sapiens
  misc_RNA (1)...(19): siRNA sense strand
uggaauuggaauggauuua

SEQ ID NO: 2256608 - RNA, 19 nt, Homo sapiens
  misc_RNA (1)...(19): siRNA sense strand
ggagaaaaugaaugaagau

SEQ ID NO: 2256609 - RNA, 19 nt, Homo sapiens
  misc_RNA (1)...(19): siRNA sense strand
agauggaauuggaauggau

SEQ ID NO: 2256610 - RNA, 19 nt, Homo sapiens
  misc_RNA (1)...(19): siRNA sense strand
agcaaguguccaugggcua

SEQ ID NO: 2256611 - RNA, 19 nt, Homo sapiens
  misc_RNA (1)...(19): siRNA sense strand
aaguaguaugugggagaaa

SEQ ID NO: 2256612 - RNA, 19 nt, Homo sapiens
  misc_RNA (1)...(19): siRNA sense strand
cagcgauagcucugaagau

SEQ ID NO: 2256613 - RNA, 19 nt, Homo sapiens
  misc_RNA (1)...(19): siRNA sense strand
cuacagaaugugccaucaa

SEQ ID NO: 2256614 - RNA, 19 nt, Homo sapiens
  misc_RNA (1)...(19): siRNA sense strand
uuguacuacugaagaaaca

SEQ ID NO: 2256615 - RNA, 19 nt, Homo sapiens
  misc_RNA (1)...(19): siRNA sense strand
guucuuuggcugauguaau

SEQ ID NO: 2256616 - RNA, 19 nt, Homo sapiens
  misc_RNA (1)...(19): siRNA sense strand
acagagaauaugaugcaca

SEQ ID NO: 2256617 - RNA, 19 nt, Homo sapiens
  misc_RNA (1)...(19): siRNA sense strand
gaucgaugucagucaguca

SEQ ID NO: 2256618 - RNA, 19 nt, Homo sapiens
  misc_RNA (1)...(19): siRNA sense strand
gagauagaagcuuuggaga

SEQ ID NO: 2256619 - RNA, 19 nt, Homo sapiens
  misc_RNA (1)...(19): siRNA sense strand
gugaagaaaugaaagaagc

SEQ ID NO: 2256620 - RNA, 19 nt, Homo sapiens
  misc_RNA (1)...(19): siRNA sense strand
cggcaguuauaucaugaau

SEQ ID NO: 2256621 - RNA, 19 nt, Homo sapiens
  misc_RNA (1)...(19): siRNA sense strand
uggagaaaaugaaugaaga

SEQ ID NO: 2256622 - RNA, 19 nt, Homo sapiens
  misc_RNA (1)...(19): siRNA sense strand
ugagugaacagcuggccaa

SEQ ID NO: 2256623 - RNA, 19 nt, Homo sapiens
  misc_RNA (1)...(19): siRNA sense strand
guaugugggagaaagaaca

SEQ ID NO: 2256624 - RNA, 19 nt, Homo sapiens
  misc_RNA (1)...(19): siRNA sense strand
aauugcaguuagaagaaga

SEQ ID NO: 2256625 - RNA, 19 nt, Homo sapiens
  misc_RNA (1)...(19): siRNA sense strand
gggagaaagaacacagcaa

SEQ ID NO: 2256626 - RNA, 19 nt, Homo sapiens
  misc_RNA (1)...(19): siRNA sense strand
cuggaauguuggagacaau

SEQ ID NO: 2256627 - RNA, 19 nt, Homo sapiens
  misc_RNA (1)...(19): siRNA sense strand
ugaaguaguaugugggaga

SEQ ID NO: 2256628 - RNA, 19 nt, Homo sapiens
  misc_RNA (1)...(19): siRNA sense strand
ccuuaugaagacagcgaua

SEQ ID NO: 2256629 - RNA, 19 nt, Homo sapiens
  misc_RNA (1)...(19): siRNA sense strand
aagaaaugaaagaagccua

SEQ ID NO: 2256630 - RNA, 19 nt, Homo sapiens
  misc_RNA (1)...(19): siRNA sense strand
ccauuuauuacuggagaaa

SEQ ID NO: 2256631 - RNA, 19 nt, Homo sapiens
  misc_RNA (1)...(19): siRNA sense strand
auucaauggagauagcaaa

SEQ ID NO: 2256632 - RNA, 19 nt, Homo sapiens
  misc_RNA (1)...(19): siRNA sense strand
guaguaugugggagaaaga

SEQ ID NO: 2256633 - RNA, 19 nt, Homo sapiens
  misc_RNA (1)...(19): siRNA sense strand
gcaagaaugcagagagcug

SEQ ID NO: 2256634 - RNA, 19 nt, Homo sapiens
  misc_RNA (1)...(19): siRNA sense strand
ggagcauggaggaugaaaa

SEQ ID NO: 2256635 - RNA, 19 nt, Homo sapiens
  misc_RNA (1)...(19): siRNA sense strand
uggaauuggaauggauuua

SEQ ID NO: 2256636 - RNA, 19 nt, Homo sapiens
  misc_RNA (1)...(19): siRNA sense strand
agauggaauuggaauggau

SEQ ID NO: 2256637 - RNA, 19 nt, Homo sapiens
  misc_RNA (1)...(19): siRNA sense strand
agcaaguguccaugggcua

SEQ ID NO: 2256638 - RNA, 19 nt, Homo sapiens
  misc_RNA (1)...(19): siRNA sense strand
aaguaguaugugggagaaa

SEQ ID NO: 2256639 - RNA, 19 nt, Homo sapiens
  misc_RNA (1)...(19): siRNA sense strand
cagcgauagcucugaagau

SEQ ID NO: 2256640 - RNA, 19 nt, Homo sapiens
  misc_RNA (1)...(19): siRNA sense strand
cuacagaaugugccaucaa

SEQ ID NO: 2256641 - RNA, 19 nt, Homo sapiens
  misc_RNA (1)...(19): siRNA sense strand
uuguacuacugaagaaaca

SEQ ID NO: 2256642 - RNA, 19 nt, Homo sapiens
  misc_RNA (1)...(19): siRNA sense strand
guucuuuggcugauguaau

SEQ ID NO: 2256643 - RNA, 19 nt, Homo sapiens
  misc_RNA (1)...(19): siRNA sense strand
acagagaauaugaugcaca

SEQ ID NO: 2256644 - RNA, 19 nt, Homo sapiens
  misc_RNA (1)...(19): siRNA sense strand
ugagugaacagcuggccaa

SEQ ID NO: 2256645 - RNA, 19 nt, Homo sapiens
  misc_RNA (1)...(19): siRNA sense strand
gugaagaaaugaaagaagc

SEQ ID NO: 2256646 - RNA, 19 nt, Homo sapiens
  misc_RNA (1)...(19): siRNA sense strand
cggcaguuauaucaugaau

SEQ ID NO: 2256647 - RNA, 19 nt, Homo sapiens
  misc_RNA (1)...(19): siRNA sense strand
aauugcaguuagaagaaga

SEQ ID NO: 2256648 - RNA, 19 nt, Homo sapiens
  misc_RNA (1)...(19): siRNA sense strand
guaugugggagaaagaaca

SEQ ID NO: 2256649 - RNA, 19 nt, Homo sapiens
  misc_RNA (1)...(19): siRNA sense strand
gcgccaaggaggaaggcau

SEQ ID NO: 2256650 - RNA, 19 nt, Homo sapiens
  misc_RNA (1)...(19): siRNA sense strand
cuucuucagcccugggaaa

SEQ ID NO: 2256651 - RNA, 19 nt, Homo sapiens
  misc_RNA (1)...(19): siRNA sense strand
cggaacugcacguguccua

SEQ ID NO: 2256652 - RNA, 19 nt, Homo sapiens
  misc_RNA (1)...(19): siRNA sense strand
gccuggaggaucuggagaa

SEQ ID NO: 2256653 - RNA, 19 nt, Homo sapiens
  misc_RNA (1)...(19): siRNA sense strand
agucaagugcagagcgucu

SEQ ID NO: 2256654 - RNA, 19 nt, Homo sapiens
  misc_RNA (1)...(19): siRNA sense strand
gcgccaaggaggaaggcau

SEQ ID NO: 2256655 - RNA, 19 nt, Homo sapiens
  misc_RNA (1)...(19): siRNA sense strand
cuucuucagcccugggaaa

SEQ ID NO: 2256656 - RNA, 19 nt, Homo sapiens
  misc_RNA (1)...(19): siRNA sense strand
cggaacugcacguguccua

SEQ ID NO: 2256657 - RNA, 19 nt, Homo sapiens
  misc_RNA (1)...(19): siRNA sense strand
gccuggaggaucuggagaa

SEQ ID NO: 2256658 - RNA, 19 nt, Homo sapiens
  misc_RNA (1)...(19): siRNA sense strand
agucaagugcagagcgucu

SEQ ID NO: 2256659 - RNA, 19 nt, Homo sapiens
  misc_RNA (1)...(19): siRNA sense strand
gcgccaaggaggaaggcau

SEQ ID NO: 2256660 - RNA, 19 nt, Homo sapiens
  misc_RNA (1)...(19): siRNA sense strand
cuucuucagcccugggaaa

SEQ ID NO: 2256661 - RNA, 19 nt, Homo sapiens
  misc_RNA (1)...(19): siRNA sense strand
cggaacugcacguguccua

SEQ ID NO: 2256662 - RNA, 19 nt, Homo sapiens
  misc_RNA (1)...(19): siRNA sense strand
gccuggaggaucuggagaa

SEQ ID NO: 2256663 - RNA, 19 nt, Homo sapiens
  misc_RNA (1)...(19): siRNA sense strand
agucaagugcagagcgucu

SEQ ID NO: 2256664 - RNA, 19 nt, Homo sapiens
  misc_RNA (1)...(19): siRNA sense strand
ggaaaggaguucaguggag

SEQ ID NO: 2256665 - RNA, 19 nt, Homo sapiens
  misc_RNA (1)...(19): siRNA sense strand
agaucgaguacuucaggaa

SEQ ID NO: 2256666 - RNA, 19 nt, Homo sapiens
  misc_RNA (1)...(19): siRNA sense strand
gaaaggaguucaguggaga

SEQ ID NO: 2256667 - RNA, 19 nt, Homo sapiens
  misc_RNA (1)...(19): siRNA sense strand
cggcuacacaagaagauca

SEQ ID NO: 2256668 - RNA, 19 nt, Homo sapiens
  misc_RNA (1)...(19): siRNA sense strand
ucucagacaaugacgccua

SEQ ID NO: 2256669 - RNA, 19 nt, Homo sapiens
  misc_RNA (1)...(19): siRNA sense strand
ggaaaggaguucaguggag

SEQ ID NO: 2256670 - RNA, 19 nt, Homo sapiens
  misc_RNA (1)...(19): siRNA sense strand
agaucgaguacuucaggaa

SEQ ID NO: 2256671 - RNA, 19 nt, Homo sapiens
  misc_RNA (1)...(19): siRNA sense strand
gaaaggaguucaguggaga

SEQ ID NO: 2256672 - RNA, 19 nt, Homo sapiens
  misc_RNA (1)...(19): siRNA sense strand
cggcuacacaagaagauca

SEQ ID NO: 2256673 - RNA, 19 nt, Homo sapiens
  misc_RNA (1)...(19): siRNA sense strand
ucucagacaaugacgccua

SEQ ID NO: 2256674 - RNA, 19 nt, Homo sapiens
  misc_RNA (1)...(19): siRNA sense strand
ggaaagauuuacagccuga

SEQ ID NO: 2256675 - RNA, 19 nt, Homo sapiens
  misc_RNA (1)...(19): siRNA sense strand
acgugaagcccgaggcaau

SEQ ID NO: 2256676 - RNA, 19 nt, Homo sapiens
  misc_RNA (1)...(19): siRNA sense strand
gcguuaacgugacgggaga

SEQ ID NO: 2256677 - RNA, 19 nt, Homo sapiens
  misc_RNA (1)...(19): siRNA sense strand
gguuaugcgcuguacggua

SEQ ID NO: 2256678 - RNA, 19 nt, Homo sapiens
  misc_RNA (1)...(19): siRNA sense strand
ugacgggagaugaggugaa

SEQ ID NO: 2256679 - RNA, 19 nt, Homo sapiens
  misc_RNA (1)...(19): siRNA sense strand
gcgcuguacgguagugcaa

SEQ ID NO: 2256680 - RNA, 19 nt, Homo sapiens
  misc_RNA (1)...(19): siRNA sense strand
gcaggaagcguuaacguga

SEQ ID NO: 2256681 - RNA, 19 nt, Homo sapiens
  misc_RNA (1)...(19): siRNA sense strand
acucaaugcugacggccau

SEQ ID NO: 2256682 - RNA, 19 nt, Homo sapiens
  misc_RNA (1)...(19): siRNA sense strand
gcgucaggccaaagggacu

SEQ ID NO: 2256683 - RNA, 19 nt, Homo sapiens
  misc_RNA (1)...(19): siRNA sense strand
gugaauuuguccuggugga

SEQ ID NO: 2256684 - RNA, 19 nt, Homo sapiens
  misc_RNA (1)...(19): siRNA sense strand
aauuuguccugguggaaaa

SEQ ID NO: 2256685 - RNA, 19 nt, Homo sapiens
  misc_RNA (1)...(19): siRNA sense strand
gggagaugaggugaagaaa

SEQ ID NO: 2256686 - RNA, 19 nt, Homo sapiens
  misc_RNA (1)...(19): siRNA sense strand
gauuaagaagaaaggaaag

SEQ ID NO: 2256687 - RNA, 19 nt, Homo sapiens
  misc_RNA (1)...(19): siRNA sense strand
ugaaugagggcuaugccaa

SEQ ID NO: 2256688 - RNA, 19 nt, Homo sapiens
  misc_RNA (1)...(19): siRNA sense strand
cugcugaacucaaugcuga

SEQ ID NO: 2256689 - RNA, 19 nt, Homo sapiens
  misc_RNA (1)...(19): siRNA sense strand
cugcaguguggccgcaaua

SEQ ID NO: 2256690 - RNA, 19 nt, Homo sapiens
  misc_RNA (1)...(19): siRNA sense strand
aaggaaagauuuacagccu

SEQ ID NO: 2256691 - RNA, 19 nt, Homo sapiens
  misc_RNA (1)...(19): siRNA sense strand
ucuuaaaguuacagaggaa

SEQ ID NO: 2256692 - RNA, 19 nt, Homo sapiens
  misc_RNA (1)...(19): siRNA sense strand
uggaaaagcuauauggaga

SEQ ID NO: 2256693 - RNA, 19 nt, Homo sapiens
  misc_RNA (1)...(19): siRNA sense strand
augcaagugcucugggaaa

SEQ ID NO: 2256694 - RNA, 19 nt, Homo sapiens
  misc_RNA (1)...(19): siRNA sense strand
acuuguagcacguggagaa

SEQ ID NO: 2256695 - RNA, 19 nt, Homo sapiens
  misc_RNA (1)...(19): siRNA sense strand
aauuggaaauggaggauca

SEQ ID NO: 2256696 - RNA, 19 nt, Homo sapiens
  misc_RNA (1)...(19): siRNA sense strand
uagaaaugaggcagagaau

SEQ ID NO: 2256697 - RNA, 19 nt, Homo sapiens
  misc_RNA (1)...(19): siRNA sense strand
guuaagaacaagucagcau

SEQ ID NO: 2256698 - RNA, 19 nt, Homo sapiens
  misc_RNA (1)...(19): siRNA sense strand
ugucauuaaagaagaguca

SEQ ID NO: 2256699 - RNA, 19 nt, Homo sapiens
  misc_RNA (1)...(19): siRNA sense strand
gagucagaguugguagaaa

SEQ ID NO: 2256700 - RNA, 19 nt, Homo sapiens
  misc_RNA (1)...(19): siRNA sense strand
cguggagaauucugggaca

SEQ ID NO: 2256701 - RNA, 19 nt, Homo sapiens
  misc_RNA (1)...(19): siRNA sense strand
gcugugaaauagaugccua

SEQ ID NO: 2256702 - RNA, 19 nt, Homo sapiens
  misc_RNA (1)...(19): siRNA sense strand
cuguaucauucaaagcaua

SEQ ID NO: 2256703 - RNA, 19 nt, Homo sapiens
  misc_RNA (1)...(19): siRNA sense strand
guggaguacaccagaaaca

SEQ ID NO: 2256704 - RNA, 19 nt, Homo sapiens
  misc_RNA (1)...(19): siRNA sense strand
uaugauaacuuacagggaa

SEQ ID NO: 2256705 - RNA, 19 nt, Homo sapiens
  misc_RNA (1)...(19): siRNA sense strand
ucauuaaagaagagucaga

SEQ ID NO: 2256706 - RNA, 19 nt, Homo sapiens
  misc_RNA (1)...(19): siRNA sense strand
ucuuaaaggaacaucacua

SEQ ID NO: 2256707 - RNA, 19 nt, Homo sapiens
  misc_RNA (1)...(19): siRNA sense strand
cauuuggagugcaagacaa

SEQ ID NO: 2256708 - RNA, 19 nt, Homo sapiens
  misc_RNA (1)...(19): siRNA sense strand
aggcaaacuuguagcacgu

SEQ ID NO: 2256709 - RNA, 19 nt, Homo sapiens
  misc_RNA (1)...(19): siRNA sense strand
uggaaauggaggaucaaca

SEQ ID NO: 2256710 - RNA, 19 nt, Homo sapiens
  misc_RNA (1)...(19): siRNA sense strand
ggaucauaaaucagcaaaa

SEQ ID NO: 2256711 - RNA, 19 nt, Homo sapiens
  misc_RNA (1)...(19): siRNA sense strand
gcugaaaagaaaggaguua

SEQ ID NO: 2256712 - RNA, 19 nt, Homo sapiens
  misc_RNA (1)...(19): siRNA sense strand
cugcauuauuagugguucu

SEQ ID NO: 2256713 - RNA, 19 nt, Homo sapiens
  misc_RNA (1)...(19): siRNA sense strand
aaccaacagcugucagaaa

SEQ ID NO: 2256714 - RNA, 19 nt, Homo sapiens
  misc_RNA (1)...(19): siRNA sense strand
cauuggaacaaccgaagaa

SEQ ID NO: 2256715 - RNA, 19 nt, Homo sapiens
  misc_RNA (1)...(19): siRNA sense strand
uuggaacaaccgaagaaua

SEQ ID NO: 2256716 - RNA, 19 nt, Homo sapiens
  misc_RNA (1)...(19): siRNA sense strand
gaauacaggucuugccauc

SEQ ID NO: 2256717 - RNA, 19 nt, Homo sapiens
  misc_RNA (1)...(19): siRNA sense strand
guggagaauucugggacau

SEQ ID NO: 2256718 - RNA, 19 nt, Homo sapiens
  misc_RNA (1)...(19): siRNA sense strand
cuucauaagcccagcauag

SEQ ID NO: 2256719 - RNA, 19 nt, Homo sapiens
  misc_RNA (1)...(19): siRNA sense strand
gcauagaaaagauguauca

SEQ ID NO: 2256720 - RNA, 19 nt, Homo sapiens
  misc_RNA (1)...(19): siRNA sense strand
ggaaaagcuauauggagau

SEQ ID NO: 2256721 - RNA, 19 nt, Homo sapiens
  misc_RNA (1)...(19): siRNA sense strand
cugacuaugucuacacaga

SEQ ID NO: 2256722 - RNA, 19 nt, Homo sapiens
  misc_RNA (1)...(19): siRNA sense strand
augauaacuuacagggaac

SEQ ID NO: 2256723 - RNA, 19 nt, Homo sapiens
  misc_RNA (1)...(19): siRNA sense strand
uggagaauucugggacaua

SEQ ID NO: 2256724 - RNA, 19 nt, Homo sapiens
  misc_RNA (1)...(19): siRNA sense strand
guguguagaccuggaaauu

SEQ ID NO: 2256725 - RNA, 19 nt, Homo sapiens
  misc_RNA (1)...(19): siRNA sense strand
cuguggaguacaccagaaa

SEQ ID NO: 2256726 - RNA, 19 nt, Homo sapiens
  misc_RNA (1)...(19): siRNA sense strand
cuggagcaacuguggagua

SEQ ID NO: 2256727 - RNA, 19 nt, Homo sapiens
  misc_RNA (1)...(19): siRNA sense strand
cuggaaugaagaagauaaa

SEQ ID NO: 2256728 - RNA, 19 nt, Homo sapiens
  misc_RNA (1)...(19): siRNA sense strand
uggaaagagaguagaacau

SEQ ID NO: 2256729 - RNA, 19 nt, Homo sapiens
  misc_RNA (1)...(19): siRNA sense strand
aguagaacaucaugggaca

SEQ ID NO: 2256730 - RNA, 19 nt, Homo sapiens
  misc_RNA (1)...(19): siRNA sense strand
acaucaugggacagagaaa

SEQ ID NO: 2256731 - RNA, 19 nt, Homo sapiens
  misc_RNA (1)...(19): siRNA sense strand
agauagaggaagacagcuu

SEQ ID NO: 2256732 - RNA, 19 nt, Homo sapiens
  misc_RNA (1)...(19): siRNA sense strand
cugaaaacuacuugcaaaa

SEQ ID NO: 2256733 - RNA, 19 nt, Homo sapiens
  misc_RNA (1)...(19): siRNA sense strand
gaagaugaauacauggaca

SEQ ID NO: 2256734 - RNA, 19 nt, Homo sapiens
  misc_RNA (1)...(19): siRNA sense strand
acaaaugugaaccaggaaa

SEQ ID NO: 2256735 - RNA, 19 nt, Homo sapiens
  misc_RNA (1)...(19): siRNA sense strand
ccuuggaaagagaguagaa

SEQ ID NO: 2256736 - RNA, 19 nt, Homo sapiens
  misc_RNA (1)...(19): siRNA sense strand
ggcguuugcuauaggaaaa

SEQ ID NO: 2256737 - RNA, 19 nt, Homo sapiens
  misc_RNA (1)...(19): siRNA sense strand
gggcacauguguaggaggu

SEQ ID NO: 2256738 - RNA, 19 nt, Homo sapiens
  misc_RNA (1)...(19): siRNA sense strand
uaacaaaugugaaccagga

SEQ ID NO: 2256739 - RNA, 19 nt, Homo sapiens
  misc_RNA (1)...(19): siRNA sense strand
gugagaagcauuaugagca

SEQ ID NO: 2256740 - RNA, 19 nt, Homo sapiens
  misc_RNA (1)...(19): siRNA sense strand
ggggagaaugacaguuuaa

SEQ ID NO: 2256741 - RNA, 19 nt, Homo sapiens
  misc_RNA (1)...(19): siRNA sense strand
gugcaggacugauuggacu

SEQ ID NO: 2256742 - RNA, 19 nt, Homo sapiens
  misc_RNA (1)...(19): siRNA sense strand
cggaugaauacuuggauag

SEQ ID NO: 2256743 - RNA, 19 nt, Homo sapiens
  misc_RNA (1)...(19): siRNA sense strand
uggcguuugcuauaggaaa

SEQ ID NO: 2256744 - RNA, 19 nt, Homo sapiens
  misc_RNA (1)...(19): siRNA sense strand
ccagcgggcaggugaugaa

SEQ ID NO: 2256745 - RNA, 19 nt, Homo sapiens
  misc_RNA (1)...(19): siRNA sense strand
ggcagaagcugaagggugu

SEQ ID NO: 2256746 - RNA, 19 nt, Homo sapiens
  misc_RNA (1)...(19): siRNA sense strand
uggaagaaggacaugcaaa

SEQ ID NO: 2256747 - RNA, 19 nt, Homo sapiens
  misc_RNA (1)...(19): siRNA sense strand
aggaaacaauucaggacca

SEQ ID NO: 2256748 - RNA, 19 nt, Homo sapiens
  misc_RNA (1)...(19): siRNA sense strand
caacacuggaagaaggaca

SEQ ID NO: 2256749 - RNA, 19 nt, Homo sapiens
  misc_RNA (1)...(19): siRNA sense strand
agaauauacuggagccugu

SEQ ID NO: 2256750 - RNA, 19 nt, Homo sapiens
  misc_RNA (1)...(19): siRNA sense strand
ccucaaaggcaucugcuca

SEQ ID NO: 2256751 - RNA, 19 nt, Homo sapiens
  misc_RNA (1)...(19): siRNA sense strand
uggaacaggcagaagcuga

SEQ ID NO: 2256752 - RNA, 19 nt, Homo sapiens
  misc_RNA (1)...(19): siRNA sense strand
uuguaaaucaggucaaaca

SEQ ID NO: 2256753 - RNA, 19 nt, Homo sapiens
  misc_RNA (1)...(19): siRNA sense strand
cugcucaggugguggagga

SEQ ID NO: 2256754 - RNA, 19 nt, Homo sapiens
  misc_RNA (1)...(19): siRNA sense strand
uggcagagcuaacaggugu

SEQ ID NO: 2256755 - RNA, 19 nt, Homo sapiens
  misc_RNA (1)...(19): siRNA sense strand
ccacagcaacagaggcaca

SEQ ID NO: 2256756 - RNA, 19 nt, Homo sapiens
  misc_RNA (1)...(19): siRNA sense strand
cauaaaaguuccugcacca

SEQ ID NO: 2256757 - RNA, 19 nt, Homo sapiens
  misc_RNA (1)...(19): siRNA sense strand
caccaugaccagagacaca

SEQ ID NO: 2256758 - RNA, 19 nt, Homo sapiens
  misc_RNA (1)...(19): siRNA sense strand
aaguguagcaggugcccua

SEQ ID NO: 2256759 - RNA, 19 nt, Homo sapiens
  misc_RNA (1)...(19): siRNA sense strand
agaacauacuggagccugu

SEQ ID NO: 2256760 - RNA, 19 nt, Homo sapiens
  misc_RNA (1)...(19): siRNA sense strand
cguagggaucauaguucua

SEQ ID NO: 2256761 - RNA, 19 nt, Homo sapiens
  misc_RNA (1)...(19): siRNA sense strand
ggacagauaaagauggcaa

SEQ ID NO: 2256762 - RNA, 19 nt, Homo sapiens
  misc_RNA (1)...(19): siRNA sense strand
ccugaaagaaacagaacua

SEQ ID NO: 2256763 - RNA, 19 nt, Homo sapiens
  misc_RNA (1)...(19): siRNA sense strand
aaacaaaagcagugaacaa

SEQ ID NO: 2256764 - RNA, 19 nt, Homo sapiens
  misc_RNA (1)...(19): siRNA sense strand
caggaaaguaaaugagaga

SEQ ID NO: 2256765 - RNA, 19 nt, Homo sapiens
  misc_RNA (1)...(19): siRNA sense strand
ugaaaauaccacuggaaaa

SEQ ID NO: 2256766 - RNA, 19 nt, Homo sapiens
  misc_RNA (1)...(19): siRNA sense strand
guaaagaagaagaggcagu

SEQ ID NO: 2256767 - RNA, 19 nt, Homo sapiens
  misc_RNA (1)...(19): siRNA sense strand
ccaauguuaccuugagaaa

SEQ ID NO: 2256768 - RNA, 19 nt, Homo sapiens
  misc_RNA (1)...(19): siRNA sense strand
ggaaaugagaugaagagca

SEQ ID NO: 2256769 - RNA, 19 nt, Homo sapiens
  misc_RNA (1)...(19): siRNA sense strand
gggugauaguauuuggauu

SEQ ID NO: 2256770 - RNA, 19 nt, Homo sapiens
  misc_RNA (1)...(19): siRNA sense strand
gggccagagccuugauaau

SEQ ID NO: 2256771 - RNA, 19 nt, Homo sapiens
  misc_RNA (1)...(19): siRNA sense strand
augaguacccggacagaua

SEQ ID NO: 2256772 - RNA, 19 nt, Homo sapiens
  misc_RNA (1)...(19): siRNA sense strand
cuguaaagaagaagaggca

SEQ ID NO: 2256773 - RNA, 19 nt, Homo sapiens
  misc_RNA (1)...(19): siRNA sense strand
aaugagaaaggaagacaaa

SEQ ID NO: 2256774 - RNA, 19 nt, Homo sapiens
  misc_RNA (1)...(19): siRNA sense strand
ccugaaguaaagagaagua

SEQ ID NO: 2256775 - RNA, 19 nt, Homo sapiens
  misc_RNA (1)...(19): siRNA sense strand
aguaaagagaaguaaccaa

SEQ ID NO: 2256776 - RNA, 19 nt, Homo sapiens
  misc_RNA (1)...(19): siRNA sense strand
gaaaugagaugaagagcac

SEQ ID NO: 2256777 - RNA, 19 nt, Homo sapiens
  misc_RNA (1)...(19): siRNA sense strand
uaaucaaaggacugacaaa

SEQ ID NO: 2256778 - RNA, 19 nt, Homo sapiens
  misc_RNA (1)...(19): siRNA sense strand
aagugaagaccuugauaau

SEQ ID NO: 2256779 - RNA, 19 nt, Homo sapiens
  misc_RNA (1)...(19): siRNA sense strand
aaguaaaucccaaaggaca

SEQ ID NO: 2256780 - RNA, 19 nt, Homo sapiens
  misc_RNA (1)...(19): siRNA sense strand
aguaaaucccaaaggacau

SEQ ID NO: 2256781 - RNA, 19 nt, Homo sapiens
  misc_RNA (1)...(19): siRNA sense strand
caaagguagaagaaagaga

SEQ ID NO: 2256782 - RNA, 19 nt, Homo sapiens
  misc_RNA (1)...(19): siRNA sense strand
aauaaaacgagcagaagaa

SEQ ID NO: 2256783 - RNA, 19 nt, Homo sapiens
  misc_RNA (1)...(19): siRNA sense strand
gaucacuggaaguaacaaa

SEQ ID NO: 2256784 - RNA, 19 nt, Homo sapiens
  misc_RNA (1)...(19): siRNA sense strand
agacaggauaauaggcaga

SEQ ID NO: 2256785 - RNA, 19 nt, Homo sapiens
  misc_RNA (1)...(19): siRNA sense strand
caacuaaccaauaggagca

SEQ ID NO: 2256786 - RNA, 19 nt, Homo sapiens
  misc_RNA (1)...(19): siRNA sense strand
acagaucugcugaaagaaa

SEQ ID NO: 2256787 - RNA, 19 nt, Homo sapiens
  misc_RNA (1)...(19): siRNA sense strand
ugagaaaggaagacaaaau

SEQ ID NO: 2256788 - RNA, 19 nt, Homo sapiens
  misc_RNA (1)...(19): siRNA sense strand
gagcagaagaagugaagac

SEQ ID NO: 2256789 - RNA, 19 nt, Homo sapiens
  misc_RNA (1)...(19): siRNA sense strand
gcuaaaacauauaaggcca

SEQ ID NO: 2256790 - RNA, 19 nt, Homo sapiens
  misc_RNA (1)...(19): siRNA sense strand
auaaagauggcaaaggaau

SEQ ID NO: 2256791 - RNA, 19 nt, Homo sapiens
  misc_RNA (1)...(19): siRNA sense strand
ggauuuauagacagacaau

SEQ ID NO: 2256792 - RNA, 19 nt, Homo sapiens
  misc_RNA (1)...(19): siRNA sense strand
cuugaaagucucaucuaua

SEQ ID NO: 2256793 - RNA, 19 nt, Homo sapiens
  misc_RNA (1)...(19): siRNA sense strand
augaauaaaacgagcagaa

SEQ ID NO: 2256794 - RNA, 19 nt, Homo sapiens
  misc_RNA (1)...(19): siRNA sense strand
augagagagaugugccaaa

SEQ ID NO: 2256795 - RNA, 19 nt, Homo sapiens
  misc_RNA (1)...(19): siRNA sense strand
ccuuggguguagaaacuaa

SEQ ID NO: 2256796 - RNA, 19 nt, Homo sapiens
  misc_RNA (1)...(19): siRNA sense strand
acaggauaacaguuggaua

SEQ ID NO: 2256797 - RNA, 19 nt, Homo sapiens
  misc_RNA (1)...(19): siRNA sense strand
aaaugagaaaggaagacaa

SEQ ID NO: 2256798 - RNA, 19 nt, Homo sapiens
  misc_RNA (1)...(19): siRNA sense strand
gaauaaaacgagcagaaga

SEQ ID NO: 2256799 - RNA, 19 nt, Homo sapiens
  misc_RNA (1)...(19): siRNA sense strand
aaguggauccugaaacaaa

SEQ ID NO: 2256800 - RNA, 19 nt, Homo sapiens
  misc_RNA (1)...(19): siRNA sense strand
gcaaaggaauccaaagccu

SEQ ID NO: 2256801 - RNA, 19 nt, Homo sapiens
  misc_RNA (1)...(19): siRNA sense strand
acacggaagcagcaggauu

SEQ ID NO: 2256802 - RNA, 19 nt, Homo sapiens
  misc_RNA (1)...(19): siRNA sense strand
agaucugcugaaagaaaua

SEQ ID NO: 2256803 - RNA, 19 nt, Homo sapiens
  misc_RNA (1)...(19): siRNA sense strand
acgguaggguggugcucaa

SEQ ID NO: 2256804 - RNA, 19 nt, Homo sapiens
  misc_RNA (1)...(19): siRNA sense strand
acaggaucucagacagaaa

SEQ ID NO: 2256805 - RNA, 19 nt, Homo sapiens
  misc_RNA (1)...(19): siRNA sense strand
ccaaaagccuugaaagucu

SEQ ID NO: 2256806 - RNA, 19 nt, Homo sapiens
  misc_RNA (1)...(19): siRNA sense strand
gacagauaaagauggcaaa

SEQ ID NO: 2256807 - RNA, 19 nt, Homo sapiens
  misc_RNA (1)...(19): siRNA sense strand
aaguaaauccugcaguaau

SEQ ID NO: 2256808 - RNA, 19 nt, Homo sapiens
  misc_RNA (1)...(19): siRNA sense strand
aggauggauaucaggagaa

SEQ ID NO: 2256809 - RNA, 19 nt, Homo sapiens
  misc_RNA (1)...(19): siRNA sense strand
aaacaagaauggaagcucu

SEQ ID NO: 2256810 - RNA, 19 nt, Homo sapiens
  misc_RNA (1)...(19): siRNA sense strand
cuauaugaguacccggaca

SEQ ID NO: 2256811 - RNA, 19 nt, Homo sapiens
  misc_RNA (1)...(19): siRNA sense strand
ucagaaacaaucagagcca

SEQ ID NO: 2256812 - RNA, 19 nt, Homo sapiens
  misc_RNA (1)...(19): siRNA sense strand
acaaaagcuugaauaggaa

SEQ ID NO: 2256813 - RNA, 19 nt, Homo sapiens
  misc_RNA (1)...(19): siRNA sense strand
uccaaagguagaagaaaga

SEQ ID NO: 2256814 - RNA, 19 nt, Homo sapiens
  misc_RNA (1)...(19): siRNA sense strand
agaaacgcccugaagaaga

SEQ ID NO: 2256815 - RNA, 19 nt, Homo sapiens
  misc_RNA (1)...(19): siRNA sense strand
aguaaauccugcaguaauc

SEQ ID NO: 2256816 - RNA, 19 nt, Homo sapiens
  misc_RNA (1)...(19): siRNA sense strand
ggguggugcucaaccgaca

SEQ ID NO: 2256817 - RNA, 19 nt, Homo sapiens
  misc_RNA (1)...(19): siRNA sense strand
gaggugaacaaaagaagaa

SEQ ID NO: 2256818 - RNA, 19 nt, Homo sapiens
  misc_RNA (1)...(19): siRNA sense strand
ggacagauaaagauggcaa

SEQ ID NO: 2256819 - RNA, 19 nt, Homo sapiens
  misc_RNA (1)...(19): siRNA sense strand
ccugaaagaaacagaacua

SEQ ID NO: 2256820 - RNA, 19 nt, Homo sapiens
  misc_RNA (1)...(19): siRNA sense strand
aaacaaaagcagugaacaa

SEQ ID NO: 2256821 - RNA, 19 nt, Homo sapiens
  misc_RNA (1)...(19): siRNA sense strand
caggaaaguaaaugagaga

SEQ ID NO: 2256822 - RNA, 19 nt, Homo sapiens
  misc_RNA (1)...(19): siRNA sense strand
ugaaaauaccacuggaaaa

SEQ ID NO: 2256823 - RNA, 19 nt, Homo sapiens
  misc_RNA (1)...(19): siRNA sense strand
guaaagaagaagaggcagu

SEQ ID NO: 2256824 - RNA, 19 nt, Homo sapiens
  misc_RNA (1)...(19): siRNA sense strand
ccaauguuaccuugagaaa

SEQ ID NO: 2256825 - RNA, 19 nt, Homo sapiens
  misc_RNA (1)...(19): siRNA sense strand
ggaaaugagaugaagagca

SEQ ID NO: 2256826 - RNA, 19 nt, Homo sapiens
  misc_RNA (1)...(19): siRNA sense strand
gggugauaguauuuggauu

SEQ ID NO: 2256827 - RNA, 19 nt, Homo sapiens
  misc_RNA (1)...(19): siRNA sense strand
gggccagagccuugauaau

SEQ ID NO: 2256828 - RNA, 19 nt, Homo sapiens
  misc_RNA (1)...(19): siRNA sense strand
augaguacccggacagaua

SEQ ID NO: 2256829 - RNA, 19 nt, Homo sapiens
  misc_RNA (1)...(19): siRNA sense strand
cuguaaagaagaagaggca

SEQ ID NO: 2256830 - RNA, 19 nt, Homo sapiens
  misc_RNA (1)...(19): siRNA sense strand
aaugagaaaggaagacaaa

SEQ ID NO: 2256831 - RNA, 19 nt, Homo sapiens
  misc_RNA (1)...(19): siRNA sense strand
ccugaaguaaagagaagua

SEQ ID NO: 2256832 - RNA, 19 nt, Homo sapiens
  misc_RNA (1)...(19): siRNA sense strand
aguaaagagaaguaaccaa

SEQ ID NO: 2256833 - RNA, 19 nt, Homo sapiens
  misc_RNA (1)...(19): siRNA sense strand
gaaaugagaugaagagcac

SEQ ID NO: 2256834 - RNA, 19 nt, Homo sapiens
  misc_RNA (1)...(19): siRNA sense strand
uaaucaaaggacugacaaa

SEQ ID NO: 2256835 - RNA, 19 nt, Homo sapiens
  misc_RNA (1)...(19): siRNA sense strand
aagugaagaccuugauaau

SEQ ID NO: 2256836 - RNA, 19 nt, Homo sapiens
  misc_RNA (1)...(19): siRNA sense strand
aaguaaaucccaaaggaca

SEQ ID NO: 2256837 - RNA, 19 nt, Homo sapiens
  misc_RNA (1)...(19): siRNA sense strand
aguaaaucccaaaggacau

SEQ ID NO: 2256838 - RNA, 19 nt, Homo sapiens
  misc_RNA (1)...(19): siRNA sense strand
caaagguagaagaaagaga

SEQ ID NO: 2256839 - RNA, 19 nt, Homo sapiens
  misc_RNA (1)...(19): siRNA sense strand
aauaaaacgagcagaagaa

SEQ ID NO: 2256840 - RNA, 19 nt, Homo sapiens
  misc_RNA (1)...(19): siRNA sense strand
gaucacuggaaguaacaaa

SEQ ID NO: 2256841 - RNA, 19 nt, Homo sapiens
  misc_RNA (1)...(19): siRNA sense strand
agacaggauaauaggcaga

SEQ ID NO: 2256842 - RNA, 19 nt, Homo sapiens
  misc_RNA (1)...(19): siRNA sense strand
caacuaaccaauaggagca

SEQ ID NO: 2256843 - RNA, 19 nt, Homo sapiens
  misc_RNA (1)...(19): siRNA sense strand
acagaucugcugaaagaaa

SEQ ID NO: 2256844 - RNA, 19 nt, Homo sapiens
  misc_RNA (1)...(19): siRNA sense strand
ugagaaaggaagacaaaau

SEQ ID NO: 2256845 - RNA, 19 nt, Homo sapiens
  misc_RNA (1)...(19): siRNA sense strand
gagcagaagaagugaagac

SEQ ID NO: 2256846 - RNA, 19 nt, Homo sapiens
  misc_RNA (1)...(19): siRNA sense strand
gcuaaaacauauaaggcca

SEQ ID NO: 2256847 - RNA, 19 nt, Homo sapiens
  misc_RNA (1)...(19): siRNA sense strand
auaaagauggcaaaggaau

SEQ ID NO: 2256848 - RNA, 19 nt, Homo sapiens
  misc_RNA (1)...(19): siRNA sense strand
ggauuuauagacagacaau

SEQ ID NO: 2256849 - RNA, 19 nt, Homo sapiens
  misc_RNA (1)...(19): siRNA sense strand
cuugaaagucucaucuaua

SEQ ID NO: 2256850 - RNA, 19 nt, Homo sapiens
  misc_RNA (1)...(19): siRNA sense strand
augaauaaaacgagcagaa

SEQ ID NO: 2256851 - RNA, 19 nt, Homo sapiens
  misc_RNA (1)...(19): siRNA sense strand
augagagagaugugccaaa

SEQ ID NO: 2256852 - RNA, 19 nt, Homo sapiens
  misc_RNA (1)...(19): siRNA sense strand
ccuuggguguagaaacuaa

SEQ ID NO: 2256853 - RNA, 19 nt, Homo sapiens
  misc_RNA (1)...(19): siRNA sense strand
acaggauaacaguuggaua

SEQ ID NO: 2256854 - RNA, 19 nt, Homo sapiens
  misc_RNA (1)...(19): siRNA sense strand
aaaugagaaaggaagacaa

SEQ ID NO: 2256855 - RNA, 19 nt, Homo sapiens
  misc_RNA (1)...(19): siRNA sense strand
gaauaaaacgagcagaaga

SEQ ID NO: 2256856 - RNA, 19 nt, Homo sapiens
  misc_RNA (1)...(19): siRNA sense strand
aaguggauccugaaacaaa

SEQ ID NO: 2256857 - RNA, 19 nt, Homo sapiens
  misc_RNA (1)...(19): siRNA sense strand
gcaaaggaauccaaagccu

SEQ ID NO: 2256858 - RNA, 19 nt, Homo sapiens
  misc_RNA (1)...(19): siRNA sense strand
acacggaagcagcaggauu

SEQ ID NO: 2256859 - RNA, 19 nt, Homo sapiens
  misc_RNA (1)...(19): siRNA sense strand
agaucugcugaaagaaaua

SEQ ID NO: 2256860 - RNA, 19 nt, Homo sapiens
  misc_RNA (1)...(19): siRNA sense strand
acgguaggguggugcucaa

SEQ ID NO: 2256861 - RNA, 19 nt, Homo sapiens
  misc_RNA (1)...(19): siRNA sense strand
acaggaucucagacagaaa

SEQ ID NO: 2256862 - RNA, 19 nt, Homo sapiens
  misc_RNA (1)...(19): siRNA sense strand
ccaaaagccuugaaagucu

SEQ ID NO: 2256863 - RNA, 19 nt, Homo sapiens
  misc_RNA (1)...(19): siRNA sense strand
gacagauaaagauggcaaa

SEQ ID NO: 2256864 - RNA, 19 nt, Homo sapiens
  misc_RNA (1)...(19): siRNA sense strand
aaguaaauccugcaguaau

SEQ ID NO: 2256865 - RNA, 19 nt, Homo sapiens
  misc_RNA (1)...(19): siRNA sense strand
aggauggauaucaggagaa

SEQ ID NO: 2256866 - RNA, 19 nt, Homo sapiens
  misc_RNA (1)...(19): siRNA sense strand
aaacaagaauggaagcucu

SEQ ID NO: 2256867 - RNA, 19 nt, Homo sapiens
  misc_RNA (1)...(19): siRNA sense strand
cuauaugaguacccggaca

SEQ ID NO: 2256868 - RNA, 19 nt, Homo sapiens
  misc_RNA (1)...(19): siRNA sense strand
ucagaaacaaucagagcca

SEQ ID NO: 2256869 - RNA, 19 nt, Homo sapiens
  misc_RNA (1)...(19): siRNA sense strand
acaaaagcuugaauaggaa

SEQ ID NO: 2256870 - RNA, 19 nt, Homo sapiens
  misc_RNA (1)...(19): siRNA sense strand
uccaaagguagaagaaaga

SEQ ID NO: 2256871 - RNA, 19 nt, Homo sapiens
  misc_RNA (1)...(19): siRNA sense strand
agaaacgcccugaagaaga

SEQ ID NO: 2256872 - RNA, 19 nt, Homo sapiens
  misc_RNA (1)...(19): siRNA sense strand
aguaaauccugcaguaauc

SEQ ID NO: 2256873 - RNA, 19 nt, Homo sapiens
  misc_RNA (1)...(19): siRNA sense strand
ggguggugcucaaccgaca

SEQ ID NO: 2256874 - RNA, 19 nt, Homo sapiens
  misc_RNA (1)...(19): siRNA sense strand
gaggugaacaaaagaagaa

SEQ ID NO: 2256875 - RNA, 19 nt, Homo sapiens
  misc_RNA (1)...(19): siRNA sense strand
gugaccaaggugaaugaaa

SEQ ID NO: 2256876 - RNA, 19 nt, Homo sapiens
  misc_RNA (1)...(19): siRNA sense strand
ucgugacaccagaagaaua

SEQ ID NO: 2256877 - RNA, 19 nt, Homo sapiens
  misc_RNA (1)...(19): siRNA sense strand
acagaaauggauauugcaa

SEQ ID NO: 2256878 - RNA, 19 nt, Homo sapiens
  misc_RNA (1)...(19): siRNA sense strand
acauaaugcugucaggaac

SEQ ID NO: 2256879 - RNA, 19 nt, Homo sapiens
  misc_RNA (1)...(19): siRNA sense strand
aaggugaaugaaacagaaa

SEQ ID NO: 2256880 - RNA, 19 nt, Homo sapiens
  misc_RNA (1)...(19): siRNA sense strand
ggaacugugaccaagguga

SEQ ID NO: 2256881 - RNA, 19 nt, Homo sapiens
  misc_RNA (1)...(19): siRNA sense strand
cuuuaguaaucgaggauaa

SEQ ID NO: 2256882 - RNA, 19 nt, Homo sapiens
  misc_RNA (1)...(19): siRNA sense strand
agacaaggaaagaggauga

SEQ ID NO: 2256883 - RNA, 19 nt, Homo sapiens
  misc_RNA (1)...(19): siRNA sense strand
cagcaggauaugauggaaa

SEQ ID NO: 2256884 - RNA, 19 nt, Homo sapiens
  misc_RNA (1)...(19): siRNA sense strand
guacaagcugugaggacaa

SEQ ID NO: 2256885 - RNA, 19 nt, Homo sapiens
  misc_RNA (1)...(19): siRNA sense strand
ggaaguaucuccagaggca

SEQ ID NO: 2256886 - RNA, 19 nt, Homo sapiens
  misc_RNA (1)...(19): siRNA sense strand
guuagaacauaaagagcau

SEQ ID NO: 2256887 - RNA, 19 nt, Homo sapiens
  misc_RNA (1)...(19): siRNA sense strand
ccacaaaugccuaagcaga

SEQ ID NO: 2256888 - RNA, 19 nt, Homo sapiens
  misc_RNA (1)...(19): siRNA sense strand
aagaaugugcagagagaca

SEQ ID NO: 2256889 - RNA, 19 nt, Homo sapiens
  misc_RNA (1)...(19): siRNA sense strand
cugugagacaugugacaaa

SEQ ID NO: 2256890 - RNA, 19 nt, Homo sapiens
  misc_RNA (1)...(19): siRNA sense strand
cgcagaagccaauggguuu

SEQ ID NO: 2256891 - RNA, 19 nt, Homo sapiens
  misc_RNA (1)...(19): siRNA sense strand
gaaagugaucauagauaca

SEQ ID NO: 2256892 - RNA, 19 nt, Homo sapiens
  misc_RNA (1)...(19): siRNA sense strand
agaaaagacuacaagaaga

SEQ ID NO: 2256893 - RNA, 19 nt, Homo sapiens
  misc_RNA (1)...(19): siRNA sense strand
acucaaaaccugaagauuu

SEQ ID NO: 2256894 - RNA, 19 nt, Homo sapiens
  misc_RNA (1)...(19): siRNA sense strand
ggguaaaguucacaaaaga

SEQ ID NO: 2256895 - RNA, 19 nt, Homo sapiens
  misc_RNA (1)...(19): siRNA sense strand
cacugaugguagaaauaaa

SEQ ID NO: 2256896 - RNA, 19 nt, Homo sapiens
  misc_RNA (1)...(19): siRNA sense strand
agguggaacaggauauuaa

SEQ ID NO: 2256897 - RNA, 19 nt, Homo sapiens
  misc_RNA (1)...(19): siRNA sense strand
cacaaaugccuaagcagaa

SEQ ID NO: 2256898 - RNA, 19 nt, Homo sapiens
  misc_RNA (1)...(19): siRNA sense strand
ucuucauguuggagagaca

SEQ ID NO: 2256899 - RNA, 19 nt, Homo sapiens
  misc_RNA (1)...(19): siRNA sense strand
caagaaaagacuacaagaa

SEQ ID NO: 2256900 - RNA, 19 nt, Homo sapiens
  misc_RNA (1)...(19): siRNA sense strand
ggaaagaggaugaccccaa

SEQ ID NO: 2256901 - RNA, 19 nt, Homo sapiens
  misc_RNA (1)...(19): siRNA sense strand
caauuauccaagaagcaua

SEQ ID NO: 2256902 - RNA, 19 nt, Homo sapiens
  misc_RNA (1)...(19): siRNA sense strand
cgacaagcaauaaagccaa

SEQ ID NO: 2256903 - RNA, 19 nt, Homo sapiens
  misc_RNA (1)...(19): siRNA sense strand
ggauaaagagagccagcca

SEQ ID NO: 2256904 - RNA, 19 nt, Homo sapiens
  misc_RNA (1)...(19): siRNA sense strand
aggaaaagcucuacugcau

SEQ ID NO: 2256905 - RNA, 19 nt, Homo sapiens
  misc_RNA (1)...(19): siRNA sense strand
gcauaugcagcaacagcaa

SEQ ID NO: 2256906 - RNA, 19 nt, Homo sapiens
  misc_RNA (1)...(19): siRNA sense strand
aggacaacgcagaagccaa

SEQ ID NO: 2256907 - RNA, 19 nt, Homo sapiens
  misc_RNA (1)...(19): siRNA sense strand
ggaacagaauucacagcca

SEQ ID NO: 2256908 - RNA, 19 nt, Homo sapiens
  misc_RNA (1)...(19): siRNA sense strand
uggucaugcuggagccaau

SEQ ID NO: 2256909 - RNA, 19 nt, Homo sapiens
  misc_RNA (1)...(19): siRNA sense strand
agagcucaucagaggguaa

SEQ ID NO: 2256910 - RNA, 19 nt, Homo sapiens
  misc_RNA (1)...(19): siRNA sense strand
ggauaugauggaaaggcuu

SEQ ID NO: 2256911 - RNA, 19 nt, Homo sapiens
  misc_RNA (1)...(19): siRNA sense strand
gaaaagacuacaagaagau

SEQ ID NO: 2256912 - RNA, 19 nt, Homo sapiens
  misc_RNA (1)...(19): siRNA sense strand
caggaaugaaucagaagau

SEQ ID NO: 2256913 - RNA, 19 nt, Homo sapiens
  misc_RNA (1)...(19): siRNA sense strand
guugaauggcucugcaaga

SEQ ID NO: 2256914 - RNA, 19 nt, Homo sapiens
  misc_RNA (1)...(19): siRNA sense strand
agcaagaaucagaugaaga

SEQ ID NO: 2256915 - RNA, 19 nt, Homo sapiens
  misc_RNA (1)...(19): siRNA sense strand
aaagaaaacugaaggccuu

SEQ ID NO: 2256916 - RNA, 19 nt, Homo sapiens
  misc_RNA (1)...(19): siRNA sense strand
guacaguagaaaagucaaa

SEQ ID NO: 2256917 - RNA, 19 nt, Homo sapiens
  misc_RNA (1)...(19): siRNA sense strand
acgcagaagccaauggguu

SEQ ID NO: 2256918 - RNA, 19 nt, Homo sapiens
  misc_RNA (1)...(19): siRNA sense strand
acaggaaaucagauccaaa

SEQ ID NO: 2256919 - RNA, 19 nt, Homo sapiens
  misc_RNA (1)...(19): siRNA sense strand
aguuagagagccuugcaaa

SEQ ID NO: 2256920 - RNA, 19 nt, Homo sapiens
  misc_RNA (1)...(19): siRNA sense strand
uguuggagagacaaggaaa

SEQ ID NO: 2256921 - RNA, 19 nt, Homo sapiens
  misc_RNA (1)...(19): siRNA sense strand
caucagaggguaaaguuca

SEQ ID NO: 2256922 - RNA, 19 nt, Homo sapiens
  misc_RNA (1)...(19): siRNA sense strand
cauaccacgacaagcaaua

SEQ ID NO: 2256923 - RNA, 19 nt, Homo sapiens
  misc_RNA (1)...(19): siRNA sense strand
gaucagcaguggacaggga

SEQ ID NO: 2256924 - RNA, 19 nt, Homo sapiens
  misc_RNA (1)...(19): siRNA sense strand
ccucaaauggaaagucuga

SEQ ID NO: 2256925 - RNA, 19 nt, Homo sapiens
  misc_RNA (1)...(19): siRNA sense strand
ucaaauggaaagucugaau

SEQ ID NO: 2256926 - RNA, 19 nt, Homo sapiens
  misc_RNA (1)...(19): siRNA sense strand
acaaagucccaguggucau

SEQ ID NO: 2256927 - RNA, 19 nt, Homo sapiens
  misc_RNA (1)...(19): siRNA sense strand
cuuuauagcaaacgacuga

SEQ ID NO: 2256928 - RNA, 19 nt, Homo sapiens
  misc_RNA (1)...(19): siRNA sense strand
cuaaaccagaaguugaaua

SEQ ID NO: 2256929 - RNA, 19 nt, Homo sapiens
  misc_RNA (1)...(19): siRNA sense strand
cagcaaaccagcaggagcu

SEQ ID NO: 2256930 - RNA, 19 nt, Homo sapiens
  misc_RNA (1)...(19): siRNA sense strand
agccaaugcugguauaaaa

SEQ ID NO: 2256931 - RNA, 19 nt, Homo sapiens
  misc_RNA (1)...(19): siRNA sense strand
uuacacugaugguagaaau

SEQ ID NO: 2256932 - RNA, 19 nt, Homo sapiens
  misc_RNA (1)...(19): siRNA sense strand
gaaacuuaugcaacaacaa

SEQ ID NO: 2256933 - RNA, 19 nt, Homo sapiens
  misc_RNA (1)...(19): siRNA sense strand
aauuacggcuccagcauau

SEQ ID NO: 2256934 - RNA, 19 nt, Homo sapiens
  misc_RNA (1)...(19): siRNA sense strand
uaguaaucgaggauaaaga

SEQ ID NO: 2256935 - RNA, 19 nt, Homo sapiens
  misc_RNA (1)...(19): siRNA sense strand
uuguuauagugaagcaaga

SEQ ID NO: 2256936 - RNA, 19 nt, Homo sapiens
  misc_RNA (1)...(19): siRNA sense strand
acgacaagcaauaaagcca

SEQ ID NO: 2256937 - RNA, 19 nt, Homo sapiens
  misc_RNA (1)...(19): siRNA sense strand
gcuggagccaauucgaaua

SEQ ID NO: 2256938 - RNA, 19 nt, Homo sapiens
  misc_RNA (1)...(19): siRNA sense strand
ggagccaauucgaauaaaa

SEQ ID NO: 2256939 - RNA, 19 nt, Homo sapiens
  misc_RNA (1)...(19): siRNA sense strand
cugccaaagugaugcacaa

SEQ ID NO: 2256940 - RNA, 19 nt, Homo sapiens
  misc_RNA (1)...(19): siRNA sense strand
gauuacacucagucggaua

SEQ ID NO: 2256941 - RNA, 19 nt, Homo sapiens
  misc_RNA (1)...(19): siRNA sense strand
acuacaagcagcagugaau

SEQ ID NO: 2256942 - RNA, 19 nt, Homo sapiens
  misc_RNA (1)...(19): siRNA sense strand
ucguaguggaugaaguuua

SEQ ID NO: 2256943 - RNA, 19 nt, Homo sapiens
  misc_RNA (1)...(19): siRNA sense strand
ugagaaccauugugggaga

SEQ ID NO: 2256944 - RNA, 19 nt, Homo sapiens
  misc_RNA (1)...(19): siRNA sense strand
caaggagugaagaggaauu

SEQ ID NO: 2256945 - RNA, 19 nt, Homo sapiens
  misc_RNA (1)...(19): siRNA sense strand
acacuaaacucaaaccaga

SEQ ID NO: 2256946 - RNA, 19 nt, Homo sapiens
  misc_RNA (1)...(19): siRNA sense strand
aaguuaagccccagacaaa

SEQ ID NO: 2256947 - RNA, 19 nt, Homo sapiens
  misc_RNA (1)...(19): siRNA sense strand
ccacuuuaaaggaugaaau

SEQ ID NO: 2256948 - RNA, 19 nt, Homo sapiens
  misc_RNA (1)...(19): siRNA sense strand
ucauauauuuguagaccca

SEQ ID NO: 2256949 - RNA, 19 nt, Homo sapiens
  misc_RNA (1)...(19): siRNA sense strand
ugcacaaaguccagcggua

SEQ ID NO: 2256950 - RNA, 19 nt, Homo sapiens
  misc_RNA (1)...(19): siRNA sense strand
uugaaauagugcugcugua

SEQ ID NO: 2256951 - RNA, 19 nt, Homo sapiens
  misc_RNA (1)...(19): siRNA sense strand
gcuuguugcaggagagcga

SEQ ID NO: 2256952 - RNA, 19 nt, Homo sapiens
  misc_RNA (1)...(19): siRNA sense strand
auuagaggacauuaggaaa

SEQ ID NO: 2256953 - RNA, 19 nt, Homo sapiens
  misc_RNA (1)...(19): siRNA sense strand
ccgcaucacauaagcaaga

SEQ ID NO: 2256954 - RNA, 19 nt, Homo sapiens
  misc_RNA (1)...(19): siRNA sense strand
gaucagacgcuuggggaua

SEQ ID NO: 2256955 - RNA, 19 nt, Homo sapiens
  misc_RNA (1)...(19): siRNA sense strand
ggaugaucaaacacugaaa

SEQ ID NO: 2256956 - RNA, 19 nt, Homo sapiens
  misc_RNA (1)...(19): siRNA sense strand
ccugguacaagaauggaaa

SEQ ID NO: 2256957 - RNA, 19 nt, Homo sapiens
  misc_RNA (1)...(19): siRNA sense strand
gugaguucguggacaguca

SEQ ID NO: 2256958 - RNA, 19 nt, Homo sapiens
  misc_RNA (1)...(19): siRNA sense strand
gaguguaugcagaagacau

SEQ ID NO: 2256959 - RNA, 19 nt, Homo sapiens
  misc_RNA (1)...(19): siRNA sense strand
uuagaggacauuaggaaaa

SEQ ID NO: 2256960 - RNA, 19 nt, Homo sapiens
  misc_RNA (1)...(19): siRNA sense strand
guggaaaggagcaaccgaa

SEQ ID NO: 2256961 - RNA, 19 nt, Homo sapiens
  misc_RNA (1)...(19): siRNA sense strand
caaccgaaucguaguggau

SEQ ID NO: 2256962 - RNA, 19 nt, Homo sapiens
  misc_RNA (1)...(19): siRNA sense strand
ccauugugggagacacuaa

SEQ ID NO: 2256963 - RNA, 19 nt, Homo sapiens
  misc_RNA (1)...(19): siRNA sense strand
caggaggaguguaugcaga

SEQ ID NO: 2256964 - RNA, 19 nt, Homo sapiens
  misc_RNA (1)...(19): siRNA sense strand
guggaaaggacucaguaga

SEQ ID NO: 2256965 - RNA, 19 nt, Homo sapiens
  misc_RNA (1)...(19): siRNA sense strand
uaagagaagcagaagagga

SEQ ID NO: 2256966 - RNA, 19 nt, Homo sapiens
  misc_RNA (1)...(19): siRNA sense strand
aauucuagguucugggcca

SEQ ID NO: 2256967 - RNA, 19 nt, Homo sapiens
  misc_RNA (1)...(19): siRNA sense strand
gugauuuaccagagccaca

SEQ ID NO: 2256968 - RNA, 19 nt, Homo sapiens
  misc_RNA (1)...(19): siRNA sense strand
gaaucguaguggaugaagu

SEQ ID NO: 2256969 - RNA, 19 nt, Homo sapiens
  misc_RNA (1)...(19): siRNA sense strand
cuacaaggagugaagagga

SEQ ID NO: 2256970 - RNA, 19 nt, Homo sapiens
  misc_RNA (1)...(19): siRNA sense strand
uggaaaggagcaaccgaau

SEQ ID NO: 2256971 - RNA, 19 nt, Homo sapiens
  misc_RNA (1)...(19): siRNA sense strand
gcgaaaaguauuaaaucca

SEQ ID NO: 2256972 - RNA, 19 nt, Homo sapiens
  misc_RNA (1)...(19): siRNA sense strand
aggaggaguguaugcagaa

SEQ ID NO: 2256973 - RNA, 19 nt, Homo sapiens
  misc_RNA (1)...(19): siRNA sense strand
acccaguaucuuugaacua

SEQ ID NO: 2256974 - RNA, 19 nt, Homo sapiens
  misc_RNA (1)...(19): siRNA sense strand
accgaaucguaguggauga

SEQ ID NO: 2256975 - RNA, 19 nt, Homo sapiens
  misc_RNA (1)...(19): siRNA sense strand
aggacacacuggaaguaga

SEQ ID NO: 2256976 - RNA, 19 nt, Homo sapiens
  misc_RNA (1)...(19): siRNA sense strand
cuggauauuucuuuggcuu

SEQ ID NO: 2256977 - RNA, 19 nt, Homo sapiens
  misc_RNA (1)...(19): siRNA sense strand
gcguaauaucaucuuggaa

SEQ ID NO: 2256978 - RNA, 19 nt, Homo sapiens
  misc_RNA (1)...(19): siRNA sense strand
gugaagaacacuuggcccu

SEQ ID NO: 2256979 - RNA, 19 nt, Homo sapiens
  misc_RNA (1)...(19): siRNA sense strand
agugagaaccauuguggga

SEQ ID NO: 2256980 - RNA, 19 nt, Homo sapiens
  misc_RNA (1)...(19): siRNA sense strand
cauuauuaagagaagcaga

SEQ ID NO: 2256981 - RNA, 19 nt, Homo sapiens
  misc_RNA (1)...(19): siRNA sense strand
gguccaauaaagugguaua

SEQ ID NO: 2256982 - RNA, 19 nt, Homo sapiens
  misc_RNA (1)...(19): siRNA sense strand
guuauaaaggguagagaca

SEQ ID NO: 2256983 - RNA, 19 nt, Homo sapiens
  misc_RNA (1)...(19): siRNA sense strand
ccgagguguuggagagaca

SEQ ID NO: 2256984 - RNA, 19 nt, Homo sapiens
  misc_RNA (1)...(19): siRNA sense strand
uggagaaaaucgaggacua

SEQ ID NO: 2256985 - RNA, 19 nt, Homo sapiens
  misc_RNA (1)...(19): siRNA sense strand
gcagauggaugcaaggaca

SEQ ID NO: 2256986 - RNA, 19 nt, Homo sapiens
  misc_RNA (1)...(19): siRNA sense strand
uuuggaagacagugagaua

SEQ ID NO: 2256987 - RNA, 19 nt, Homo sapiens
  misc_RNA (1)...(19): siRNA sense strand
cagaugaguacaagcaaau

SEQ ID NO: 2256988 - RNA, 19 nt, Homo sapiens
  misc_RNA (1)...(19): siRNA sense strand
agaugaauucccuggacaa

SEQ ID NO: 2256989 - RNA, 19 nt, Homo sapiens
  misc_RNA (1)...(19): siRNA sense strand
uauaaggacuguaacgaga

SEQ ID NO: 2256990 - RNA, 19 nt, Homo sapiens
  misc_RNA (1)...(19): siRNA sense strand
aggacuguaacgagauuaa

SEQ ID NO: 2256991 - RNA, 19 nt, Homo sapiens
  misc_RNA (1)...(19): siRNA sense strand
auaaagugguauaaggacu

SEQ ID NO: 2256992 - RNA, 19 nt, Homo sapiens
  misc_RNA (1)...(19): siRNA sense strand
gcaauguaacagacaccaa

SEQ ID NO: 2256993 - RNA, 19 nt, Homo sapiens
  misc_RNA (1)...(19): siRNA sense strand
gaacauaauuuguacacag

SEQ ID NO: 2256994 - RNA, 19 nt, Homo sapiens
  misc_RNA (1)...(19): siRNA sense strand
cuggacaagccguggccaa

SEQ ID NO: 2256995 - RNA, 19 nt, Homo sapiens
  misc_RNA (1)...(19): siRNA sense strand
gcaaaaucccaguguccaa

SEQ ID NO: 2256996 - RNA, 19 nt, Homo sapiens
  misc_RNA (1)...(19): siRNA sense strand
aggacgggaugaagguuau

SEQ ID NO: 2256997 - RNA, 19 nt, Homo sapiens
  misc_RNA (1)...(19): siRNA sense strand
cggcagaggacagagggaa

SEQ ID NO: 2256998 - RNA, 19 nt, Homo sapiens
  misc_RNA (1)...(19): siRNA sense strand
gagaugaauucccuggaca

SEQ ID NO: 2256999 - RNA, 19 nt, Homo sapiens
  misc_RNA (1)...(19): siRNA sense strand
aaggaaagccagaggcaug

SEQ ID NO: 2257000 - RNA, 19 nt, Homo sapiens
  misc_RNA (1)...(19): siRNA sense strand
cagucaugccagagucaau

SEQ ID NO: 2257001 - RNA, 19 nt, Homo sapiens
  misc_RNA (1)...(19): siRNA sense strand
agucaauucaguacaucaa

SEQ ID NO: 2257002 - RNA, 19 nt, Homo sapiens
  misc_RNA (1)...(19): siRNA sense strand
cggagcagucacaguguau

SEQ ID NO: 2257003 - RNA, 19 nt, Homo sapiens
  misc_RNA (1)...(19): siRNA sense strand
ugugagcauuacagaaaga

SEQ ID NO: 2257004 - RNA, 19 nt, Homo sapiens
  misc_RNA (1)...(19): siRNA sense strand
ggaagcaguacgagguuuu

SEQ ID NO: 2257005 - RNA, 19 nt, Homo sapiens
  misc_RNA (1)...(19): siRNA sense strand
ggauaauacaaaucuacga

SEQ ID NO: 2257006 - RNA, 19 nt, Homo sapiens
  misc_RNA (1)...(19): siRNA sense strand
agucaguguaacaugguau

SEQ ID NO: 2257007 - RNA, 19 nt, Homo sapiens
  misc_RNA (1)...(19): siRNA sense strand
caggacgagacuuggauuu

SEQ ID NO: 2257008 - RNA, 19 nt, Homo sapiens
  misc_RNA (1)...(19): siRNA sense strand
uacagaaagagcuggauau

SEQ ID NO: 2257009 - RNA, 19 nt, Homo sapiens
  misc_RNA (1)...(19): siRNA sense strand
guacaaaagcaguggauca

SEQ ID NO: 2257010 - RNA, 19 nt, Homo sapiens
  misc_RNA (1)...(19): siRNA sense strand
agagaaaagccgaagacua

SEQ ID NO: 2257011 - RNA, 19 nt, Homo sapiens
  misc_RNA (1)...(19): siRNA sense strand
aggaacauguggagcugaa

SEQ ID NO: 2257012 - RNA, 19 nt, Homo sapiens
  misc_RNA (1)...(19): siRNA sense strand
ccacucacugauagagaaa

SEQ ID NO: 2257013 - RNA, 19 nt, Homo sapiens
  misc_RNA (1)...(19): siRNA sense strand
uugcaguggaauuaggaaa

SEQ ID NO: 2257014 - RNA, 19 nt, Homo sapiens
  misc_RNA (1)...(19): siRNA sense strand
ucuuauaacucaagguucu

SEQ ID NO: 2257015 - RNA, 19 nt, Homo sapiens
  misc_RNA (1)...(19): siRNA sense strand
ugaaugaagaggauguaau

SEQ ID NO: 2257016 - RNA, 19 nt, Homo sapiens
  misc_RNA (1)...(19): siRNA sense strand
agcuacuacuggagaacaa

SEQ ID NO: 2257017 - RNA, 19 nt, Homo sapiens
  misc_RNA (1)...(19): siRNA sense strand
acgccgaguuugaagauca

SEQ ID NO: 2257018 - RNA, 19 nt, Homo sapiens
  misc_RNA (1)...(19): siRNA sense strand
ggaagaaaauggaucggau

SEQ ID NO: 2257019 - RNA, 19 nt, Homo sapiens
  misc_RNA (1)...(19): siRNA sense strand
cgauaaagaagaacgccga

SEQ ID NO: 2257020 - RNA, 19 nt, Homo sapiens
  misc_RNA (1)...(19): siRNA sense strand
agguagagacgaaccggaa

SEQ ID NO: 2257021 - RNA, 19 nt, Homo sapiens
  misc_RNA (1)...(19): siRNA sense strand
aagcaguggaucacaggaa

SEQ ID NO: 2257022 - RNA, 19 nt, Homo sapiens
  misc_RNA (1)...(19): siRNA sense strand
augcauauuugaaagggau

SEQ ID NO: 2257023 - RNA, 19 nt, Homo sapiens
  misc_RNA (1)...(19): siRNA sense strand
aacucaagguucuggaaga

SEQ ID NO: 2257024 - RNA, 19 nt, Homo sapiens
  misc_RNA (1)...(19): siRNA sense strand
ccuucaucauaauggaaaa

SEQ ID NO: 2257025 - RNA, 19 nt, Homo sapiens
  misc_RNA (1)...(19): siRNA sense strand
ggauguaauuuauuggaug

SEQ ID NO: 2257026 - RNA, 19 nt, Homo sapiens
  misc_RNA (1)...(19): siRNA sense strand
ugucuaaugaggucaggua

SEQ ID NO: 2257027 - RNA, 19 nt, Homo sapiens
  misc_RNA (1)...(19): siRNA sense strand
gcaguggaucacaggaaca

SEQ ID NO: 2257028 - RNA, 19 nt, Homo sapiens
  misc_RNA (1)...(19): siRNA sense strand
ccaugaagcauugguggaa

SEQ ID NO: 2257029 - RNA, 19 nt, Homo sapiens
  misc_RNA (1)...(19): siRNA sense strand
ggauguucggggaagaaaa

SEQ ID NO: 2257030 - RNA, 19 nt, Homo sapiens
  misc_RNA (1)...(19): siRNA sense strand
ucacaagaggaaugaucau

SEQ ID NO: 2257031 - RNA, 19 nt, Homo sapiens
  misc_RNA (1)...(19): siRNA sense strand
ugcccaggguguuggagaa

SEQ ID NO: 2257032 - RNA, 19 nt, Homo sapiens
  misc_RNA (1)...(19): siRNA sense strand
gauugaaacaaccaccaaa

SEQ ID NO: 2257033 - RNA, 19 nt, Homo sapiens
  misc_RNA (1)...(19): siRNA sense strand
acauuuaacgagaagagau

SEQ ID NO: 2257034 - RNA, 19 nt, Homo sapiens
  misc_RNA (1)...(19): siRNA sense strand
ggccaguugaguugaauga

SEQ ID NO: 2257035 - RNA, 19 nt, Homo sapiens
  misc_RNA (1)...(19): siRNA sense strand
aggcaaauggcaugcuuca

SEQ ID NO: 2257036 - RNA, 19 nt, Homo sapiens
  misc_RNA (1)...(19): siRNA sense strand
ugaaagggauguagugccu

SEQ ID NO: 2257037 - RNA, 19 nt, Homo sapiens
  misc_RNA (1)...(19): siRNA sense strand
cuaguaaaauuguggaagu

SEQ ID NO: 2257038 - RNA, 19 nt, Homo sapiens
  misc_RNA (1)...(19): siRNA sense strand
aggaaugaucauagcuguu

SEQ ID NO: 2257039 - RNA, 19 nt, Homo sapiens
  misc_RNA (1)...(19): siRNA sense strand
aggaaauggagguguauau

SEQ ID NO: 2257040 - RNA, 19 nt, Homo sapiens
  misc_RNA (1)...(19): siRNA sense strand
ggagaagaucuauggguca

SEQ ID NO: 2257041 - RNA, 19 nt, Homo sapiens
  misc_RNA (1)...(19): siRNA sense strand
cuacaaaggaaauggaggu

SEQ ID NO: 2257042 - RNA, 19 nt, Homo sapiens
  misc_RNA (1)...(19): siRNA sense strand
cgggcaagacaguugaauu

SEQ ID NO: 2257043 - RNA, 19 nt, Homo sapiens
  misc_RNA (1)...(19): siRNA sense strand
uugcugaacaguuggagaa

SEQ ID NO: 2257044 - RNA, 19 nt, Homo sapiens
  misc_RNA (1)...(19): siRNA sense strand
ggagaugauuguucgggca

SEQ ID NO: 2257045 - RNA, 19 nt, Homo sapiens
  misc_RNA (1)...(19): siRNA sense strand
gagaugauuguucgggcaa

SEQ ID NO: 2257046 - RNA, 19 nt, Homo sapiens
  misc_RNA (1)...(19): siRNA sense strand
gguguauauggcugggauu

SEQ ID NO: 2257047 - RNA, 19 nt, Homo sapiens
  misc_RNA (1)...(19): siRNA sense strand
guggaaucaacuaugaaau

SEQ ID NO: 2257048 - RNA, 19 nt, Homo sapiens
  misc_RNA (1)...(19): siRNA sense strand
ccagauggaacaagggaug

SEQ ID NO: 2257049 - RNA, 19 nt, Homo sapiens
  misc_RNA (1)...(19): siRNA sense strand
ugauauugucucuggaacu

SEQ ID NO: 2257050 - RNA, 19 nt, Homo sapiens
  misc_RNA (1)...(19): siRNA sense strand
cgggaauggcugaaagaca

SEQ ID NO: 2257051 - RNA, 19 nt, Homo sapiens
  misc_RNA (1)...(19): siRNA sense strand
gggcaagaagcuggaggaa

SEQ ID NO: 2257052 - RNA, 19 nt, Homo sapiens
  misc_RNA (1)...(19): siRNA sense strand
uuggugaaguccugggcaa

SEQ ID NO: 2257053 - RNA, 19 nt, Homo sapiens
  misc_RNA (1)...(19): siRNA sense strand
gggaauggcugaaagacac

SEQ ID NO: 2257054 - RNA, 19 nt, Homo sapiens
  misc_RNA (1)...(19): siRNA sense strand
ggugcuaaagaaagaugaa

SEQ ID NO: 2257055 - RNA, 19 nt, Homo sapiens
  misc_RNA (1)...(19): siRNA sense strand
ugcuaaagaaagaugaaga

SEQ ID NO: 2257056 - RNA, 19 nt, Homo sapiens
  misc_RNA (1)...(19): siRNA sense strand
aaagaaagaugaagaccuc

SEQ ID NO: 2257057 - RNA, 19 nt, Homo sapiens
  misc_RNA (1)...(19): siRNA sense strand
cagccggaccagugggaaa

SEQ ID NO: 2257058 - RNA, 19 nt, Homo sapiens
  misc_RNA (1)...(19): siRNA sense strand
gcaugaaccgcaaaggcaa

SEQ ID NO: 2257059 - RNA, 19 nt, Homo sapiens
  misc_RNA (1)...(19): siRNA sense strand
ccgaggagaacguggacuu

SEQ ID NO: 2257060 - RNA, 19 nt, Homo sapiens
  misc_RNA (1)...(19): siRNA sense strand
aaggcaagcucguggggaa

SEQ ID NO: 2257061 - RNA, 19 nt, Homo sapiens
  misc_RNA (1)...(19): siRNA sense strand
gggagaaccagcaggacgu

SEQ ID NO: 2257062 - RNA, 19 nt, Homo sapiens
  misc_RNA (1)...(19): siRNA sense strand
ggaaacacauccagguccu

SEQ ID NO: 2257063 - RNA, 19 nt, Homo sapiens
  misc_RNA (1)...(19): siRNA sense strand
agggcaaggagacggaauu

SEQ ID NO: 2257064 - RNA, 19 nt, Homo sapiens
  misc_RNA (1)...(19): siRNA sense strand
cggaauucuaccugugcau

SEQ ID NO: 2257065 - RNA, 19 nt, Homo sapiens
  misc_RNA (1)...(19): siRNA sense strand
cagccggaccagugggaaa

SEQ ID NO: 2257066 - RNA, 19 nt, Homo sapiens
  misc_RNA (1)...(19): siRNA sense strand
gcaugaaccgcaaaggcaa

SEQ ID NO: 2257067 - RNA, 19 nt, Homo sapiens
  misc_RNA (1)...(19): siRNA sense strand
ccgaggagaacguggacuu

SEQ ID NO: 2257068 - RNA, 19 nt, Homo sapiens
  misc_RNA (1)...(19): siRNA sense strand
aaggcaagcucguggggaa

SEQ ID NO: 2257069 - RNA, 19 nt, Homo sapiens
  misc_RNA (1)...(19): siRNA sense strand
gggagaaccagcaggacgu

SEQ ID NO: 2257070 - RNA, 19 nt, Homo sapiens
  misc_RNA (1)...(19): siRNA sense strand
ggaaacacauccagguccu

SEQ ID NO: 2257071 - RNA, 19 nt, Homo sapiens
  misc_RNA (1)...(19): siRNA sense strand
agggcaaggagacggaauu

SEQ ID NO: 2257072 - RNA, 19 nt, Homo sapiens
  misc_RNA (1)...(19): siRNA sense strand
cggaauucuaccugugcau

SEQ ID NO: 2257073 - RNA, 19 nt, Homo sapiens
  misc_RNA (1)...(19): siRNA sense strand
ggauaagagcgcaaggcau

SEQ ID NO: 2257074 - RNA, 19 nt, Homo sapiens
  misc_RNA (1)...(19): siRNA sense strand
aguaaauacacuuaggaga

SEQ ID NO: 2257075 - RNA, 19 nt, Homo sapiens
  misc_RNA (1)...(19): siRNA sense strand
gagcuggauaagagcgcaa

SEQ ID NO: 2257076 - RNA, 19 nt, Homo sapiens
  misc_RNA (1)...(19): siRNA sense strand
gagaaaagggagugaugau

SEQ ID NO: 2257077 - RNA, 19 nt, Homo sapiens
  misc_RNA (1)...(19): siRNA sense strand
aggacuuaauaaagcacaa

SEQ ID NO: 2257078 - RNA, 19 nt, Homo sapiens
  misc_RNA (1)...(19): siRNA sense strand
gugaagaaugacaagaaca

SEQ ID NO: 2257079 - RNA, 19 nt, Homo sapiens
  misc_RNA (1)...(19): siRNA sense strand
ucgaaacagaagaaagaga

SEQ ID NO: 2257080 - RNA, 19 nt, Homo sapiens
  misc_RNA (1)...(19): siRNA sense strand
ugaugaugauggaggugau

SEQ ID NO: 2257081 - RNA, 19 nt, Homo sapiens
  misc_RNA (1)...(19): siRNA sense strand
ucaucuacucagugaagaa

SEQ ID NO: 2257082 - RNA, 19 nt, Homo sapiens
  misc_RNA (1)...(19): siRNA sense strand
agaacaaaucagaucucaa

SEQ ID NO: 2257083 - RNA, 19 nt, Homo sapiens
  misc_RNA (1)...(19): siRNA sense strand
gauaagagcgcaaggcauc

SEQ ID NO: 2257084 - RNA, 19 nt, Homo sapiens
  misc_RNA (1)...(19): siRNA sense strand
aggugaagaucgagcugga

SEQ ID NO: 2257085 - RNA, 19 nt, Homo sapiens
  misc_RNA (1)...(19): siRNA sense strand
cccagaagaaggugaagau

SEQ ID NO: 2257086 - RNA, 19 nt, Homo sapiens
  misc_RNA (1)...(19): siRNA sense strand
ugaugauggaggugauuca

SEQ ID NO: 2257087 - RNA, 19 nt, Homo sapiens
  misc_RNA (1)...(19): siRNA sense strand
acucagugaagaaugacaa

SEQ ID NO: 2257088 - RNA, 19 nt, Homo sapiens
  misc_RNA (1)...(19): siRNA sense strand
cagaagagcaucucccaga

SEQ ID NO: 2257089 - RNA, 19 nt, Homo sapiens
  misc_RNA (1)...(19): siRNA sense strand
caagguugauagugguguu

SEQ ID NO: 2257090 - RNA, 19 nt, Homo sapiens
  misc_RNA (1)...(19): siRNA sense strand
cgaugaaauuggaauguua

SEQ ID NO: 2257091 - RNA, 19 nt, Homo sapiens
  misc_RNA (1)...(19): siRNA sense strand
ccacagauguacagggaca

SEQ ID NO: 2257092 - RNA, 19 nt, Homo sapiens
  misc_RNA (1)...(19): siRNA sense strand
cagcagcaaaggagagaaa

SEQ ID NO: 2257093 - RNA, 19 nt, Homo sapiens
  misc_RNA (1)...(19): siRNA sense strand
ccggaaagugugagcggaa

SEQ ID NO: 2257094 - RNA, 19 nt, Homo sapiens
  misc_RNA (1)...(19): siRNA sense strand
ccgaaauuguggagggaac

SEQ ID NO: 2257095 - RNA, 19 nt, Homo sapiens
  misc_RNA (1)...(19): siRNA sense strand
gacaauaaguggaugcgaa

SEQ ID NO: 2257096 - RNA, 19 nt, Homo sapiens
  misc_RNA (1)...(19): siRNA sense strand
ugaaagagaugguggcagu

SEQ ID NO: 2257097 - RNA, 19 nt, Homo sapiens
  misc_RNA (1)...(19): siRNA sense strand
cagacuaugaugaggaaga

SEQ ID NO: 2257098 - RNA, 19 nt, Homo sapiens
  misc_RNA (1)...(19): siRNA sense strand
ggaaagugugagcggaaaa

SEQ ID NO: 2257099 - RNA, 19 nt, Homo sapiens
  misc_RNA (1)...(19): siRNA sense strand
ccaucuaugaggagaccaa

SEQ ID NO: 2257100 - RNA, 19 nt, Homo sapiens
  misc_RNA (1)...(19): siRNA sense strand
ggucaagcuuccagccaga

SEQ ID NO: 2257101 - RNA, 19 nt, Homo sapiens
  misc_RNA (1)...(19): siRNA sense strand
ccgcaaacugaaugguauu

SEQ ID NO: 2257102 - RNA, 19 nt, Homo sapiens
  misc_RNA (1)...(19): siRNA sense strand
cggaaagugugagcggaaa

SEQ ID NO: 2257103 - RNA, 19 nt, Homo sapiens
  misc_RNA (1)...(19): siRNA sense strand
aguuauaacaggaagacga

SEQ ID NO: 2257104 - RNA, 19 nt, Homo sapiens
  misc_RNA (1)...(19): siRNA sense strand
acaauaaguggaugcgaau

SEQ ID NO: 2257105 - RNA, 19 nt, Homo sapiens
  misc_RNA (1)...(19): siRNA sense strand
cagaagaagggcagcacuu

SEQ ID NO: 2257106 - RNA, 19 nt, Homo sapiens
  misc_RNA (1)...(19): siRNA sense strand
cagccaaagcaaaggaagu

SEQ ID NO: 2257107 - RNA, 19 nt, Homo sapiens
  misc_RNA (1)...(19): siRNA sense strand
gggaagagccugaacugca

SEQ ID NO: 2257108 - RNA, 19 nt, Homo sapiens
  misc_RNA (1)...(19): siRNA sense strand
gcaugggagaaguggugaa

SEQ ID NO: 2257109 - RNA, 19 nt, Homo sapiens
  misc_RNA (1)...(19): siRNA sense strand
uggaaucaaugaacagcaa

SEQ ID NO: 2257110 - RNA, 19 nt, Homo sapiens
  misc_RNA (1)...(19): siRNA sense strand
gccgaaguuucuugggcua

SEQ ID NO: 2257111 - RNA, 19 nt, Homo sapiens
  misc_RNA (1)...(19): siRNA sense strand
guggacaaacugauugaaa

SEQ ID NO: 2257112 - RNA, 19 nt, Homo sapiens
  misc_RNA (1)...(19): siRNA sense strand
gagaacauuacgugguaga

SEQ ID NO: 2257113 - RNA, 19 nt, Homo sapiens
  misc_RNA (1)...(19): siRNA sense strand
auuacgugguagaggucaa

SEQ ID NO: 2257114 - RNA, 19 nt, Homo sapiens
  misc_RNA (1)...(19): siRNA sense strand
gaugaggaagagugggaca

SEQ ID NO: 2257115 - RNA, 19 nt, Homo sapiens
  misc_RNA (1)...(19): siRNA sense strand
aggcagugguggcaacaau

SEQ ID NO: 2257116 - RNA, 19 nt, Homo sapiens
  misc_RNA (1)...(19): siRNA sense strand
gaaagaagaaauaccggau

SEQ ID NO: 2257117 - RNA, 19 nt, Homo sapiens
  misc_RNA (1)...(19): siRNA sense strand
uauaacaggaagacgagaa

SEQ ID NO: 2257118 - RNA, 19 nt, Homo sapiens
  misc_RNA (1)...(19): siRNA sense strand
ccagaauguuugagucacu

SEQ ID NO: 2257119 - RNA, 19 nt, Homo sapiens
  misc_RNA (1)...(19): siRNA sense strand
gcugaaagguuuggagaug

SEQ ID NO: 2257120 - RNA, 19 nt, Homo sapiens
  misc_RNA (1)...(19): siRNA sense strand
ggaaggggcaucagaagaa

SEQ ID NO: 2257121 - RNA, 19 nt, Homo sapiens
  misc_RNA (1)...(19): siRNA sense strand
caaaucaagcagcagcaaa

SEQ ID NO: 2257122 - RNA, 19 nt, Homo sapiens
  misc_RNA (1)...(19): siRNA sense strand
agaggggacuuauggaaaa

SEQ ID NO: 2257123 - RNA, 19 nt, Homo sapiens
  misc_RNA (1)...(19): siRNA sense strand
cguucgaaccaguguccua

SEQ ID NO: 2257124 - RNA, 19 nt, Homo sapiens
  misc_RNA (1)...(19): siRNA sense strand
gguugauaguacaauauga

SEQ ID NO: 2257125 - RNA, 19 nt, Homo sapiens
  misc_RNA (1)...(19): siRNA sense strand
aaaagaacuuggugagcuu

SEQ ID NO: 2257126 - RNA, 19 nt, Homo sapiens
  misc_RNA (1)...(19): siRNA sense strand
ggagagaaaacauuagaau

SEQ ID NO: 2257127 - RNA, 19 nt, Homo sapiens
  misc_RNA (1)...(19): siRNA sense strand
agccaaauccaaugaugua

SEQ ID NO: 2257128 - RNA, 19 nt, Homo sapiens
  misc_RNA (1)...(19): siRNA sense strand
guccugagccugagaacuu

SEQ ID NO: 2257129 - RNA, 19 nt, Homo sapiens
  misc_RNA (1)...(19): siRNA sense strand
cuacaaccucuuauagcaa

SEQ ID NO: 2257130 - RNA, 19 nt, Homo sapiens
  misc_RNA (1)...(19): siRNA sense strand
aaggauaagucucaugaca

SEQ ID NO: 2257131 - RNA, 19 nt, Homo sapiens
  misc_RNA (1)...(19): siRNA sense strand
aagaagaaauaccggauac

SEQ ID NO: 2257132 - RNA, 19 nt, Homo sapiens
  misc_RNA (1)...(19): siRNA sense strand
uugcaugagaagagaagga

SEQ ID NO: 2257133 - RNA, 19 nt, Homo sapiens
  misc_RNA (1)...(19): siRNA sense strand
gaagaauaucaaaugcaga

SEQ ID NO: 2257134 - RNA, 19 nt, Homo sapiens
  misc_RNA (1)...(19): siRNA sense strand
guuaaagaacccaguaugu

SEQ ID NO: 2257135 - RNA, 19 nt, Homo sapiens
  misc_RNA (1)...(19): siRNA sense strand
acuccauagauuugaaaca

SEQ ID NO: 2257136 - RNA, 19 nt, Homo sapiens
  misc_RNA (1)...(19): siRNA sense strand
cagcaacaucaaucaacua

SEQ ID NO: 2257137 - RNA, 19 nt, Homo sapiens
  misc_RNA (1)...(19): siRNA sense strand
ugucugaugcugacgcuaa

SEQ ID NO: 2257138 - RNA, 19 nt, Homo sapiens
  misc_RNA (1)...(19): siRNA sense strand
gggcaucagaagaagggca

SEQ ID NO: 2257139 - RNA, 19 nt, Homo sapiens
  misc_RNA (1)...(19): siRNA sense strand
ggagauugaggauggggaa

SEQ ID NO: 2257140 - RNA, 19 nt, Homo sapiens
  misc_RNA (1)...(19): siRNA sense strand
ggcaacaaugauggagaaa

SEQ ID NO: 2257141 - RNA, 19 nt, Homo sapiens
  misc_RNA (1)...(19): siRNA sense strand
ccaagcagucccugacauu

SEQ ID NO: 2257142 - RNA, 19 nt, Homo sapiens
  misc_RNA (1)...(19): siRNA sense strand
gaaggauuguuaaguacau

SEQ ID NO: 2257143 - RNA, 19 nt, Homo sapiens
  misc_RNA (1)...(19): siRNA sense strand
aaugauguauugccaguua

SEQ ID NO: 2257144 - RNA, 19 nt, Homo sapiens
  misc_RNA (1)...(19): siRNA sense strand
agccagaauguuugaguca

SEQ ID NO: 2257145 - RNA, 19 nt, Homo sapiens
  misc_RNA (1)...(19): siRNA sense strand
gucuaugaugucaaggaua

SEQ ID NO: 2257146 - RNA, 19 nt, Homo sapiens
  misc_RNA (1)...(19): siRNA sense strand
ggagagcugcugaagucaa

SEQ ID NO: 2257147 - RNA, 19 nt, Homo sapiens
  misc_RNA (1)...(19): siRNA sense strand
cgagagcagaugucagaga

SEQ ID NO: 2257148 - RNA, 19 nt, Homo sapiens
  misc_RNA (1)...(19): siRNA sense strand
agauaaaagaacuugguga

SEQ ID NO: 2257149 - RNA, 19 nt, Homo sapiens
  misc_RNA (1)...(19): siRNA sense strand
gcaaaggagagaaaacauu

SEQ ID NO: 2257150 - RNA, 19 nt, Homo sapiens
  misc_RNA (1)...(19): siRNA sense strand
gcugagagugagaaguaca

SEQ ID NO: 2257151 - RNA, 19 nt, Homo sapiens
  misc_RNA (1)...(19): siRNA sense strand
gagaacaacuauacggccu

SEQ ID NO: 2257152 - RNA, 19 nt, Homo sapiens
  misc_RNA (1)...(19): siRNA sense strand
caucaaaggggcugagagu

SEQ ID NO: 2257153 - RNA, 19 nt, Homo sapiens
  misc_RNA (1)...(19): siRNA sense strand
aaugaaugagcgaggagaa

SEQ ID NO: 2257154 - RNA, 19 nt, Homo sapiens
  misc_RNA (1)...(19): siRNA sense strand
auucggacucagagagaca

SEQ ID NO: 2257155 - RNA, 19 nt, Homo sapiens
  misc_RNA (1)...(19): siRNA sense strand
gaggagaacucuauggguc

SEQ ID NO: 2257156 - RNA, 19 nt, Homo sapiens
  misc_RNA (1)...(19): siRNA sense strand
cggaaaagaauuagcaaaa

SEQ ID NO: 2257157 - RNA, 19 nt, Homo sapiens
  misc_RNA (1)...(19): siRNA sense strand
uggagauaguguagacaaa

SEQ ID NO: 2257158 - RNA, 19 nt, Homo sapiens
  misc_RNA (1)...(19): siRNA sense strand
aguugagagaggagggaaa

SEQ ID NO: 2257159 - RNA, 19 nt, Homo sapiens
  misc_RNA (1)...(19): siRNA sense strand
cuauaaaggaacaaggauu

SEQ ID NO: 2257160 - RNA, 19 nt, Homo sapiens
  misc_RNA (1)...(19): siRNA sense strand
acaaaguagcugauggauu

SEQ ID NO: 2257161 - RNA, 19 nt, Homo sapiens
  misc_RNA (1)...(19): siRNA sense strand
gcucaguacuuuacgccaa

SEQ ID NO: 2257162 - RNA, 19 nt, Homo sapiens
  misc_RNA (1)...(19): siRNA sense strand
ggagaaugcuggaggagac

SEQ ID NO: 2257163 - RNA, 19 nt, Homo sapiens
  misc_RNA (1)...(19): siRNA sense strand
agauagaaccccacggaaa

SEQ ID NO: 2257164 - RNA, 19 nt, Homo sapiens
  misc_RNA (1)...(19): siRNA sense strand
cgggaaagucauagaccga

SEQ ID NO: 2257165 - RNA, 19 nt, Homo sapiens
  misc_RNA (1)...(19): siRNA sense strand
ugauauagcuggaugcagu

SEQ ID NO: 2257166 - RNA, 19 nt, Homo sapiens
  misc_RNA (1)...(19): siRNA sense strand
ccuauuacagagagucaaa

SEQ ID NO: 2257167 - RNA, 19 nt, Homo sapiens
  misc_RNA (1)...(19): siRNA sense strand
aggcauagcaaaugaaucu

SEQ ID NO: 2257168 - RNA, 19 nt, Homo sapiens
  misc_RNA (1)...(19): siRNA sense strand
gcucaguacgggaaaguca

SEQ ID NO: 2257169 - RNA, 19 nt, Homo sapiens
  misc_RNA (1)...(19): siRNA sense strand
agacaaaguagcugaugga

SEQ ID NO: 2257170 - RNA, 19 nt, Homo sapiens
  misc_RNA (1)...(19): siRNA sense strand
cagaguaauaugugcugaa

SEQ ID NO: 2257171 - RNA, 19 nt, Homo sapiens
  misc_RNA (1)...(19): siRNA sense strand
gcaaauuaccagucugcau

SEQ ID NO: 2257172 - RNA, 19 nt, Homo sapiens
  misc_RNA (1)...(19): siRNA sense strand
cuguaggugugcaggguga

SEQ ID NO: 2257173 - RNA, 19 nt, Homo sapiens
  misc_RNA (1)...(19): siRNA sense strand
agucaaagccugcacaaca

SEQ ID NO: 2257174 - RNA, 19 nt, Homo sapiens
  misc_RNA (1)...(19): siRNA sense strand
gaaacauaguagcaggcau

SEQ ID NO: 2257175 - RNA, 19 nt, Homo sapiens
  misc_RNA (1)...(19): siRNA sense strand
gcuuacacauggagauagu

SEQ ID NO: 2257176 - RNA, 19 nt, Homo sapiens
  misc_RNA (1)...(19): siRNA sense strand
ccuuacagaaaauggaaaa

SEQ ID NO: 2257177 - RNA, 19 nt, Homo sapiens
  misc_RNA (1)...(19): siRNA sense strand
cagaugaugaauaagguau

SEQ ID NO: 2257178 - RNA, 19 nt, Homo sapiens
  misc_RNA (1)...(19): siRNA sense strand
caacagaagaggaucagga

SEQ ID NO: 2257179 - RNA, 19 nt, Homo sapiens
  misc_RNA (1)...(19): siRNA sense strand
ucaacauuaguguggauaa

SEQ ID NO: 2257180 - RNA, 19 nt, Homo sapiens
  misc_RNA (1)...(19): siRNA sense strand
gggaaaaguaauagaaccu

SEQ ID NO: 2257181 - RNA, 19 nt, Homo sapiens
  misc_RNA (1)...(19): siRNA sense strand
cugcacaacagaagaggau

SEQ ID NO: 2257182 - RNA, 19 nt, Homo sapiens
  misc_RNA (1)...(19): siRNA sense strand
ggaacuacugagugggagu

SEQ ID NO: 2257183 - RNA, 19 nt, Homo sapiens
  misc_RNA (1)...(19): siRNA sense strand
ugucagagaagauggaguu

SEQ ID NO: 2257184 - RNA, 19 nt, Homo sapiens
  misc_RNA (1)...(19): siRNA sense strand
ucgagagaucaaagagaga

SEQ ID NO: 2257185 - RNA, 19 nt, Homo sapiens
  misc_RNA (1)...(19): siRNA sense strand
ccuggcaaucagaguaaua

SEQ ID NO: 2257186 - RNA, 19 nt, Homo sapiens
  misc_RNA (1)...(19): siRNA sense strand
aauucaggucaaagugaua

SEQ ID NO: 2257187 - RNA, 19 nt, Homo sapiens
  misc_RNA (1)...(19): siRNA sense strand
aguagcaggcauagcaaau

SEQ ID NO: 2257188 - RNA, 19 nt, Homo sapiens
  misc_RNA (1)...(19): siRNA sense strand
gagagaucaaagagagagu

SEQ ID NO: 2257189 - RNA, 19 nt, Homo sapiens
  misc_RNA (1)...(19): siRNA sense strand
acguuaaauaugaccacaa

SEQ ID NO: 2257190 - RNA, 19 nt, Homo sapiens
  misc_RNA (1)...(19): siRNA sense strand
agaugaaccugacugggaa

SEQ ID NO: 2257191 - RNA, 19 nt, Homo sapiens
  misc_RNA (1)...(19): siRNA sense strand
gaaccuucaccgugcagaa

SEQ ID NO: 2257192 - RNA, 19 nt, Homo sapiens
  misc_RNA (1)...(19): siRNA sense strand
agugauaaaugcugcucau

SEQ ID NO: 2257193 - RNA, 19 nt, Homo sapiens
  misc_RNA (1)...(19): siRNA sense strand
acggaaaagaauuagcaaa

SEQ ID NO: 2257194 - RNA, 19 nt, Homo sapiens
  misc_RNA (1)...(19): siRNA sense strand
cggccugaucuaauugaaa

SEQ ID NO: 2257195 - RNA, 19 nt, Homo sapiens
  misc_RNA (1)...(19): siRNA sense strand
ggaaagucauagaccgaag

SEQ ID NO: 2257196 - RNA, 19 nt, Homo sapiens
  misc_RNA (1)...(19): siRNA sense strand
cuuggaaacaccagcauuu

SEQ ID NO: 2257197 - RNA, 19 nt, Homo sapiens
  misc_RNA (1)...(19): siRNA sense strand
caucaaaacccaucacaau

SEQ ID NO: 2257198 - RNA, 19 nt, Homo sapiens
  misc_RNA (1)...(19): siRNA sense strand
cgugcagaacagagaacuu

SEQ ID NO: 2257199 - RNA, 19 nt, Homo sapiens
  misc_RNA (1)...(19): siRNA sense strand
ggccuggcaaucagaguaa

SEQ ID NO: 2257200 - RNA, 19 nt, Homo sapiens
  misc_RNA (1)...(19): siRNA sense strand
gucauagaccgaagaguga

SEQ ID NO: 2257201 - RNA, 19 nt, Homo sapiens
  misc_RNA (1)...(19): siRNA sense strand
ucaucagaaaguugagaga

SEQ ID NO: 2257202 - RNA, 19 nt, Homo sapiens
  misc_RNA (1)...(19): siRNA sense strand
gcuuggaauucaggucaaa

SEQ ID NO: 2257203 - RNA, 19 nt, Homo sapiens
  misc_RNA (1)...(19): siRNA sense strand
gaaaugaacuugaaaccag

SEQ ID NO: 2257204 - RNA, 19 nt, Homo sapiens
  misc_RNA (1)...(19): siRNA sense strand
cuuuauuacuagugacuuc

SEQ ID NO: 2257205 - RNA, 19 nt, Homo sapiens
  misc_RNA (1)...(19): siRNA sense strand
gaguaauaugugcugaaga

SEQ ID NO: 2257206 - RNA, 19 nt, Homo sapiens
  misc_RNA (1)...(19): siRNA sense strand
ccaguaaagaugaaccuga

SEQ ID NO: 2257207 - RNA, 19 nt, Homo sapiens
  misc_RNA (1)...(19): siRNA sense strand
acaaggauuccgugcuauu

SEQ ID NO: 2257208 - RNA, 19 nt, Homo sapiens
  misc_RNA (1)...(19): siRNA sense strand
ucucagggagucuggguau

SEQ ID NO: 2257209 - RNA, 19 nt, Homo sapiens
  misc_RNA (1)...(19): siRNA sense strand
ggagaaaugaacuugaaac

SEQ ID NO: 2257210 - RNA, 19 nt, Homo sapiens
  misc_RNA (1)...(19): siRNA sense strand
acauugugcaugagaucua

SEQ ID NO: 2257211 - RNA, 19 nt, Homo sapiens
  misc_RNA (1)...(19): siRNA sense strand
gcuggaucaccgugggcaa

SEQ ID NO: 2257212 - RNA, 19 nt, Homo sapiens
  misc_RNA (1)...(19): siRNA sense strand
gggagaaugcccaagacca

SEQ ID NO: 2257213 - RNA, 19 nt, Homo sapiens
  misc_RNA (1)...(19): siRNA sense strand
cgaccugcacagaaagaga

SEQ ID NO: 2257214 - RNA, 19 nt, Homo sapiens
  misc_RNA (1)...(19): siRNA sense strand
ccuauaaacugucgcgccu

SEQ ID NO: 2257215 - RNA, 19 nt, Homo sapiens
  misc_RNA (1)...(19): siRNA sense strand
cuacaaauacagauggcaa

SEQ ID NO: 2257216 - RNA, 19 nt, Homo sapiens
  misc_RNA (1)...(19): siRNA sense strand
ggaagaauuuggauggcau

SEQ ID NO: 2257217 - RNA, 19 nt, Homo sapiens
  misc_RNA (1)...(19): siRNA sense strand
uguuaaugaagcucggaaa

SEQ ID NO: 2257218 - RNA, 19 nt, Homo sapiens
  misc_RNA (1)...(19): siRNA sense strand
ccguaauaaagucaugaaa

SEQ ID NO: 2257219 - RNA, 19 nt, Homo sapiens
  misc_RNA (1)...(19): siRNA sense strand
cugaaucugaagaggagaa

SEQ ID NO: 2257220 - RNA, 19 nt, Homo sapiens
  misc_RNA (1)...(19): siRNA sense strand
gcaccuuaugaguggaaga

SEQ ID NO: 2257221 - RNA, 19 nt, Homo sapiens
  misc_RNA (1)...(19): siRNA sense strand
ccuuggauuugaagagcuu

SEQ ID NO: 2257222 - RNA, 19 nt, Homo sapiens
  misc_RNA (1)...(19): siRNA sense strand
guuaaugaagcucggaaaa

SEQ ID NO: 2257223 - RNA, 19 nt, Homo sapiens
  misc_RNA (1)...(19): siRNA sense strand
gcugauuaguggagagugc

SEQ ID NO: 2257224 - RNA, 19 nt, Homo sapiens
  misc_RNA (1)...(19): siRNA sense strand
guggaauaugcuuggauaa

SEQ ID NO: 2257225 - RNA, 19 nt, Homo sapiens
  misc_RNA (1)...(19): siRNA sense strand
ggaauaucuaacaggguga

SEQ ID NO: 2257226 - RNA, 19 nt, Homo sapiens
  misc_RNA (1)...(19): siRNA sense strand
agcuaaagguggaaagaag

SEQ ID NO: 2257227 - RNA, 19 nt, Homo sapiens
  misc_RNA (1)...(19): siRNA sense strand
cugcagagaaccuggagau

SEQ ID NO: 2257228 - RNA, 19 nt, Homo sapiens
  misc_RNA (1)...(19): siRNA sense strand
gccaaguguuucagcccaa

SEQ ID NO: 2257229 - RNA, 19 nt, Homo sapiens
  misc_RNA (1)...(19): siRNA sense strand
agaacaugugggaugggaa

SEQ ID NO: 2257230 - RNA, 19 nt, Homo sapiens
  misc_RNA (1)...(19): siRNA sense strand
cuugugugugucagagaaa

SEQ ID NO: 2257231 - RNA, 19 nt, Homo sapiens
  misc_RNA (1)...(19): siRNA sense strand
uaucuaacagggugaccaa

SEQ ID NO: 2257232 - RNA, 19 nt, Homo sapiens
  misc_RNA (1)...(19): siRNA sense strand
gagaaacugcagagaaccu

SEQ ID NO: 2257233 - RNA, 19 nt, Homo sapiens
  misc_RNA (1)...(19): siRNA sense strand
guggaauaugcuuggauaa

SEQ ID NO: 2257234 - RNA, 19 nt, Homo sapiens
  misc_RNA (1)...(19): siRNA sense strand
ggaauaucuaacaggguga

SEQ ID NO: 2257235 - RNA, 19 nt, Homo sapiens
  misc_RNA (1)...(19): siRNA sense strand
agcuaaagguggaaagaag

SEQ ID NO: 2257236 - RNA, 19 nt, Homo sapiens
  misc_RNA (1)...(19): siRNA sense strand
cugcagagaaccuggagau

SEQ ID NO: 2257237 - RNA, 19 nt, Homo sapiens
  misc_RNA (1)...(19): siRNA sense strand
gccaaguguuucagcccaa

SEQ ID NO: 2257238 - RNA, 19 nt, Homo sapiens
  misc_RNA (1)...(19): siRNA sense strand
agaacaugugggaugggaa

SEQ ID NO: 2257239 - RNA, 19 nt, Homo sapiens
  misc_RNA (1)...(19): siRNA sense strand
cuugugugugucagagaaa

SEQ ID NO: 2257240 - RNA, 19 nt, Homo sapiens
  misc_RNA (1)...(19): siRNA sense strand
uaucuaacagggugaccaa

SEQ ID NO: 2257241 - RNA, 19 nt, Homo sapiens
  misc_RNA (1)...(19): siRNA sense strand
gagaaacugcagagaaccu

SEQ ID NO: 2257242 - RNA, 19 nt, Homo sapiens
  misc_RNA (1)...(19): siRNA sense strand
guggaauaugcuuggauaa

SEQ ID NO: 2257243 - RNA, 19 nt, Homo sapiens
  misc_RNA (1)...(19): siRNA sense strand
ggaauaucuaacaggguga

SEQ ID NO: 2257244 - RNA, 19 nt, Homo sapiens
  misc_RNA (1)...(19): siRNA sense strand
agcuaaagguggaaagaag

SEQ ID NO: 2257245 - RNA, 19 nt, Homo sapiens
  misc_RNA (1)...(19): siRNA sense strand
cugcagagaaccuggagau

SEQ ID NO: 2257246 - RNA, 19 nt, Homo sapiens
  misc_RNA (1)...(19): siRNA sense strand
gccaaguguuucagcccaa

SEQ ID NO: 2257247 - RNA, 19 nt, Homo sapiens
  misc_RNA (1)...(19): siRNA sense strand
agaacaugugggaugggaa

SEQ ID NO: 2257248 - RNA, 19 nt, Homo sapiens
  misc_RNA (1)...(19): siRNA sense strand
cuugugugugucagagaaa

SEQ ID NO: 2257249 - RNA, 19 nt, Homo sapiens
  misc_RNA (1)...(19): siRNA sense strand
uaucuaacagggugaccaa

SEQ ID NO: 2257250 - RNA, 19 nt, Homo sapiens
  misc_RNA (1)...(19): siRNA sense strand
gagaaacugcagagaaccu

SEQ ID NO: 2257251 - RNA, 19 nt, Homo sapiens
  misc_RNA (1)...(19): siRNA sense strand
ucauuaaggcagggaagaa

SEQ ID NO: 2257252 - RNA, 19 nt, Homo sapiens
  misc_RNA (1)...(19): siRNA sense strand
ccgccagguccuauggauu

SEQ ID NO: 2257253 - RNA, 19 nt, Homo sapiens
  misc_RNA (1)...(19): siRNA sense strand
ggaagaagugucuggcugu

SEQ ID NO: 2257254 - RNA, 19 nt, Homo sapiens
  misc_RNA (1)...(19): siRNA sense strand
ccaaugacaucuuugcuga

SEQ ID NO: 2257255 - RNA, 19 nt, Homo sapiens
  misc_RNA (1)...(19): siRNA sense strand
gggaagaagugucuggcug

SEQ ID NO: 2257256 - RNA, 19 nt, Homo sapiens
  misc_RNA (1)...(19): siRNA sense strand
ucauuaaggcagggaagaa

SEQ ID NO: 2257257 - RNA, 19 nt, Homo sapiens
  misc_RNA (1)...(19): siRNA sense strand
ccgccagguccuauggauu

SEQ ID NO: 2257258 - RNA, 19 nt, Homo sapiens
  misc_RNA (1)...(19): siRNA sense strand
ggaagaagugucuggcugu

SEQ ID NO: 2257259 - RNA, 19 nt, Homo sapiens
  misc_RNA (1)...(19): siRNA sense strand
ccaaugacaucuuugcuga

SEQ ID NO: 2257260 - RNA, 19 nt, Homo sapiens
  misc_RNA (1)...(19): siRNA sense strand
gggaagaagugucuggcug

SEQ ID NO: 2257261 - RNA, 19 nt, Homo sapiens
  misc_RNA (1)...(19): siRNA sense strand
cuucuggacuugaggcaaa

SEQ ID NO: 2257262 - RNA, 19 nt, Homo sapiens
  misc_RNA (1)...(19): siRNA sense strand
ggagaaugugucagaggaa

SEQ ID NO: 2257263 - RNA, 19 nt, Homo sapiens
  misc_RNA (1)...(19): siRNA sense strand
gggccaagaaacuggagaa

SEQ ID NO: 2257264 - RNA, 19 nt, Homo sapiens
  misc_RNA (1)...(19): siRNA sense strand
agaaauuauucauggcaga

SEQ ID NO: 2257265 - RNA, 19 nt, Homo sapiens
  misc_RNA (1)...(19): siRNA sense strand
cuggauacaaagagaacua

SEQ ID NO: 2257266 - RNA, 19 nt, Homo sapiens
  misc_RNA (1)...(19): siRNA sense strand
aauuaaggaagcuggauua

SEQ ID NO: 2257267 - RNA, 19 nt, Homo sapiens
  misc_RNA (1)...(19): siRNA sense strand
uugaacagggugugaauaa

SEQ ID NO: 2257268 - RNA, 19 nt, Homo sapiens
  misc_RNA (1)...(19): siRNA sense strand
caauaguugaguuggcaaa

SEQ ID NO: 2257269 - RNA, 19 nt, Homo sapiens
  misc_RNA (1)...(19): siRNA sense strand
agucaagggcuauggaaca

SEQ ID NO: 2257270 - RNA, 19 nt, Homo sapiens
  misc_RNA (1)...(19): siRNA sense strand
uuuaaugggaugugagcua

SEQ ID NO: 2257271 - RNA, 19 nt, Homo sapiens
  misc_RNA (1)...(19): siRNA sense strand
guggaaaagagaaaaguaa

SEQ ID NO: 2257272 - RNA, 19 nt, Homo sapiens
  misc_RNA (1)...(19): siRNA sense strand
ugucagaggaagaaaugaa

SEQ ID NO: 2257273 - RNA, 19 nt, Homo sapiens
  misc_RNA (1)...(19): siRNA sense strand
agaaugugucagaggaaga

SEQ ID NO: 2257274 - RNA, 19 nt, Homo sapiens
  misc_RNA (1)...(19): siRNA sense strand
aggaagaaaugaacagacu

SEQ ID NO: 2257275 - RNA, 19 nt, Homo sapiens
  misc_RNA (1)...(19): siRNA sense strand
cuggaaaccgaguggaaaa

SEQ ID NO: 2257276 - RNA, 19 nt, Homo sapiens
  misc_RNA (1)...(19): siRNA sense strand
gaggcaaacccaggagaaa

SEQ ID NO: 2257277 - RNA, 19 nt, Homo sapiens
  misc_RNA (1)...(19): siRNA sense strand
augagcaagucaagggcua

SEQ ID NO: 2257278 - RNA, 19 nt, Homo sapiens
  misc_RNA (1)...(19): siRNA sense strand
ggccaagaaacuggagaaa

SEQ ID NO: 2257279 - RNA, 19 nt, Homo sapiens
  misc_RNA (1)...(19): siRNA sense strand
ugcuagaagaagaaguaua

SEQ ID NO: 2257280 - RNA, 19 nt, Homo sapiens
  misc_RNA (1)...(19): siRNA sense strand
ccaggagaaaagaggaaaa

SEQ ID NO: 2257281 - RNA, 19 nt, Homo sapiens
  misc_RNA (1)...(19): siRNA sense strand
aagaagaugcagauaccaa

SEQ ID NO: 2257282 - RNA, 19 nt, Homo sapiens
  misc_RNA (1)...(19): siRNA sense strand
uguccaugcuagaagaaga

SEQ ID NO: 2257283 - RNA, 19 nt, Homo sapiens
  misc_RNA (1)...(19): siRNA sense strand
ccaauugcaaagaguacaa

SEQ ID NO: 2257284 - RNA, 19 nt, Homo sapiens
  misc_RNA (1)...(19): siRNA sense strand
ccaucugggaucaggauuu

SEQ ID NO: 2257285 - RNA, 19 nt, Homo sapiens
  misc_RNA (1)...(19): siRNA sense strand
ucaaggauucacagagauu

SEQ ID NO: 2257286 - RNA, 19 nt, Homo sapiens
  misc_RNA (1)...(19): siRNA sense strand
ccacaaggaagaagaugca

SEQ ID NO: 2257287 - RNA, 19 nt, Homo sapiens
  misc_RNA (1)...(19): siRNA sense strand
gcaaaagaaaggcaaacaa

SEQ ID NO: 2257288 - RNA, 19 nt, Homo sapiens
  misc_RNA (1)...(19): siRNA sense strand
gguugaaggcucuuuggaa

SEQ ID NO: 2257289 - RNA, 19 nt, Homo sapiens
  misc_RNA (1)...(19): siRNA sense strand
ggcuggaaaccgaguggaa

SEQ ID NO: 2257290 - RNA, 19 nt, Homo sapiens
  misc_RNA (1)...(19): siRNA sense strand
gagugaacgccucaagaau

SEQ ID NO: 2257291 - RNA, 19 nt, Homo sapiens
  misc_RNA (1)...(19): siRNA sense strand
aagaauagguacuacgugu

SEQ ID NO: 2257292 - RNA, 19 nt, Homo sapiens
  misc_RNA (1)...(19): siRNA sense strand
aaauuaaggaagcuggauu

SEQ ID NO: 2257293 - RNA, 19 nt, Homo sapiens
  misc_RNA (1)...(19): siRNA sense strand
cuauuuaagcucuugagaa

SEQ ID NO: 2257294 - RNA, 19 nt, Homo sapiens
  misc_RNA (1)...(19): siRNA sense strand
gccaagaaaccccgaguua

SEQ ID NO: 2257295 - RNA, 19 nt, Homo sapiens
  misc_RNA (1)...(19): siRNA sense strand
gagacaggcuggaaaccga

SEQ ID NO: 2257296 - RNA, 19 nt, Homo sapiens
  misc_RNA (1)...(19): siRNA sense strand
uggcagacuuacagcgagu

SEQ ID NO: 2257297 - RNA, 19 nt, Homo sapiens
  misc_RNA (1)...(19): siRNA sense strand
cauugaacagggugugaau

SEQ ID NO: 2257298 - RNA, 19 nt, Homo sapiens
  misc_RNA (1)...(19): siRNA sense strand
uccuggaauuagagagaca

SEQ ID NO: 2257299 - RNA, 19 nt, Homo sapiens
  misc_RNA (1)...(19): siRNA sense strand
gaagagaacagaagcucca

SEQ ID NO: 2257300 - RNA, 19 nt, Homo sapiens
  misc_RNA (1)...(19): siRNA sense strand
gcgacaacuccuggaacaa

SEQ ID NO: 2257301 - RNA, 19 nt, Homo sapiens
  misc_RNA (1)...(19): siRNA sense strand
cccgaaucgccgugaagaa

SEQ ID NO: 2257302 - RNA, 19 nt, Homo sapiens
  misc_RNA (1)...(19): siRNA sense strand
ccgaaucgccgugaagaaa

SEQ ID NO: 2257303 - RNA, 19 nt, Homo sapiens
  misc_RNA (1)...(19): siRNA sense strand
uagagagacaggcuggaaa

SEQ ID NO: 2257304 - RNA, 19 nt, Homo sapiens
  misc_RNA (1)...(19): siRNA sense strand
agaagaugcagauaccaaa

SEQ ID NO: 2257305 - RNA, 19 nt, Homo sapiens
  misc_RNA (1)...(19): siRNA sense strand
cgauggaauuaaucaacga

SEQ ID NO: 2257306 - RNA, 19 nt, Homo sapiens
  misc_RNA (1)...(19): siRNA sense strand
acaaggaagaagaugcaga

SEQ ID NO: 2257307 - RNA, 19 nt, Homo sapiens
  misc_RNA (1)...(19): siRNA sense strand
agcagaaggagauaauuaa

SEQ ID NO: 2257308 - RNA, 19 nt, Homo sapiens
  misc_RNA (1)...(19): siRNA sense strand
acuacgugucuaagaaauu

SEQ ID NO: 2257309 - RNA, 19 nt, Homo sapiens
  misc_RNA (1)...(19): siRNA sense strand
aaauguaauggcuggaaaa

SEQ ID NO: 2257310 - RNA, 19 nt, Homo sapiens
  misc_RNA (1)...(19): siRNA sense strand
ccagcaaaagaaaggcaaa

SEQ ID NO: 2257311 - RNA, 19 nt, Homo sapiens
  misc_RNA (1)...(19): siRNA sense strand
ggauacaaagagaacuaca

SEQ ID NO: 2257312 - RNA, 19 nt, Homo sapiens
  misc_RNA (1)...(19): siRNA sense strand
ccaaacaagaagauccuga

SEQ ID NO: 2257313 - RNA, 19 nt, Homo sapiens
  misc_RNA (1)...(19): siRNA sense strand
gcuggaaaccgaguggaaa

SEQ ID NO: 2257314 - RNA, 19 nt, Homo sapiens
  misc_RNA (1)...(19): siRNA sense strand
aggcaaacccaggagaaaa

SEQ ID NO: 2257315 - RNA, 19 nt, Homo sapiens
  misc_RNA (1)...(19): siRNA sense strand
ugccaauauccuggagaaa

SEQ ID NO: 2257316 - RNA, 19 nt, Homo sapiens
  misc_RNA (1)...(19): siRNA sense strand
cagaugaagcugugggaaa

SEQ ID NO: 2257317 - RNA, 19 nt, Homo sapiens
  misc_RNA (1)...(19): siRNA sense strand
gugcaaugccacagaacua

SEQ ID NO: 2257318 - RNA, 19 nt, Homo sapiens
  misc_RNA (1)...(19): siRNA sense strand
acauaaaguaggagacaca

SEQ ID NO: 2257319 - RNA, 19 nt, Homo sapiens
  misc_RNA (1)...(19): siRNA sense strand
agaaaugacagcagcuaaa

SEQ ID NO: 2257320 - RNA, 19 nt, Homo sapiens
  misc_RNA (1)...(19): siRNA sense strand
gaaaugaaagagagggaca

SEQ ID NO: 2257321 - RNA, 19 nt, Homo sapiens
  misc_RNA (1)...(19): siRNA sense strand
ccugaauguagaagauaaa

SEQ ID NO: 2257322 - RNA, 19 nt, Homo sapiens
  misc_RNA (1)...(19): siRNA sense strand
gggaacaaagagagaauca

SEQ ID NO: 2257323 - RNA, 19 nt, Homo sapiens
  misc_RNA (1)...(19): siRNA sense strand
ccaugaaagcugaaaugaa

SEQ ID NO: 2257324 - RNA, 19 nt, Homo sapiens
  misc_RNA (1)...(19): siRNA sense strand
ggagaaguuggaagguaaa

SEQ ID NO: 2257325 - RNA, 19 nt, Homo sapiens
  misc_RNA (1)...(19): siRNA sense strand
gggaaagguggccaggaaa

SEQ ID NO: 2257326 - RNA, 19 nt, Homo sapiens
  misc_RNA (1)...(19): siRNA sense strand
cccugaauguagaagauaa

SEQ ID NO: 2257327 - RNA, 19 nt, Homo sapiens
  misc_RNA (1)...(19): siRNA sense strand
cugaagaggguguugcuaa

SEQ ID NO: 2257328 - RNA, 19 nt, Homo sapiens
  misc_RNA (1)...(19): siRNA sense strand
agagagggacaaaggcaaa

SEQ ID NO: 2257329 - RNA, 19 nt, Homo sapiens
  misc_RNA (1)...(19): siRNA sense strand
uaguagaaucugugaugaa

SEQ ID NO: 2257330 - RNA, 19 nt, Homo sapiens
  misc_RNA (1)...(19): siRNA sense strand
ggagaggaguccagggaag

SEQ ID NO: 2257331 - RNA, 19 nt, Homo sapiens
  misc_RNA (1)...(19): siRNA sense strand
cugaaaugaaagagaggga

SEQ ID NO: 2257332 - RNA, 19 nt, Homo sapiens
  misc_RNA (1)...(19): siRNA sense strand
acugacuagugcugagaaa

SEQ ID NO: 2257333 - RNA, 19 nt, Homo sapiens
  misc_RNA (1)...(19): siRNA sense strand
ccacagauucacuggccaa

SEQ ID NO: 2257334 - RNA, 19 nt, Homo sapiens
  misc_RNA (1)...(19): siRNA sense strand
cugacaaagcggaagaaca

SEQ ID NO: 2257335 - RNA, 19 nt, Homo sapiens
  misc_RNA (1)...(19): siRNA sense strand
gggagauaaggauggacaa

SEQ ID NO: 2257336 - RNA, 19 nt, Homo sapiens
  misc_RNA (1)...(19): siRNA sense strand
cagcuaaagcagcagagaa

SEQ ID NO: 2257337 - RNA, 19 nt, Homo sapiens
  misc_RNA (1)...(19): siRNA sense strand
cugggaacaaagagagaau

SEQ ID NO: 2257338 - RNA, 19 nt, Homo sapiens
  misc_RNA (1)...(19): siRNA sense strand
caugcgaaggugagaacaa

SEQ ID NO: 2257339 - RNA, 19 nt, Homo sapiens
  misc_RNA (1)...(19): siRNA sense strand
aggaaaucaaggagaaguu

SEQ ID NO: 2257340 - RNA, 19 nt, Homo sapiens
  misc_RNA (1)...(19): siRNA sense strand
ccuaugaagcuguggaacu

SEQ ID NO: 2257341 - RNA, 19 nt, Homo sapiens
  misc_RNA (1)...(19): siRNA sense strand
cagaugucccagagagaga

SEQ ID NO: 2257342 - RNA, 19 nt, Homo sapiens
  misc_RNA (1)...(19): siRNA sense strand
cagagagagagcaaagaau

SEQ ID NO: 2257343 - RNA, 19 nt, Homo sapiens
  misc_RNA (1)...(19): siRNA sense strand
gucaauaaucagugcucua

SEQ ID NO: 2257344 - RNA, 19 nt, Homo sapiens
  misc_RNA (1)...(19): siRNA sense strand
gauaaagauuacaaggaug

SEQ ID NO: 2257345 - RNA, 19 nt, Homo sapiens
  misc_RNA (1)...(19): siRNA sense strand
ugggaagucuggaagaaaa

SEQ ID NO: 2257346 - RNA, 19 nt, Homo sapiens
  misc_RNA (1)...(19): siRNA sense strand
aagagauuaucgugaucaa

SEQ ID NO: 2257347 - RNA, 19 nt, Homo sapiens
  misc_RNA (1)...(19): siRNA sense strand
gaagcaagcgaacgggcaa

SEQ ID NO: 2257348 - RNA, 19 nt, Homo sapiens
  misc_RNA (1)...(19): siRNA sense strand
cuguaaacauaaaguagga

SEQ ID NO: 2257349 - RNA, 19 nt, Homo sapiens
  misc_RNA (1)...(19): siRNA sense strand
cagaguacucaauaugaaa

SEQ ID NO: 2257350 - RNA, 19 nt, Homo sapiens
  misc_RNA (1)...(19): siRNA sense strand
cauaaggaaaucaaggaga

SEQ ID NO: 2257351 - RNA, 19 nt, Homo sapiens
  misc_RNA (1)...(19): siRNA sense strand
ggcucaugguuuaugcaaa

SEQ ID NO: 2257352 - RNA, 19 nt, Homo sapiens
  misc_RNA (1)...(19): siRNA sense strand
ggaccauccaccugucaaa

SEQ ID NO: 2257353 - RNA, 19 nt, Homo sapiens
  misc_RNA (1)...(19): siRNA sense strand
ccaaggagauuguguccga

SEQ ID NO: 2257354 - RNA, 19 nt, Homo sapiens
  misc_RNA (1)...(19): siRNA sense strand
gaucaaggacacugagaag

SEQ ID NO: 2257355 - RNA, 19 nt, Homo sapiens
  misc_RNA (1)...(19): siRNA sense strand
gaacaagcagccucggcaa

SEQ ID NO: 2257356 - RNA, 19 nt, Homo sapiens
  misc_RNA (1)...(19): siRNA sense strand
guaaacauaaaguaggaga

SEQ ID NO: 2257357 - RNA, 19 nt, Homo sapiens
  misc_RNA (1)...(19): siRNA sense strand
cagaaggacagcaagauca

SEQ ID NO: 2257358 - RNA, 19 nt, Homo sapiens
  misc_RNA (1)...(19): siRNA sense strand
uagaaaugacagcagcuaa

SEQ ID NO: 2257359 - RNA, 19 nt, Homo sapiens
  misc_RNA (1)...(19): siRNA sense strand
guuggaagguaaaagcaaa

SEQ ID NO: 2257360 - RNA, 19 nt, Homo sapiens
  misc_RNA (1)...(19): siRNA sense strand
aagagagggacaaaggcaa

SEQ ID NO: 2257361 - RNA, 19 nt, Homo sapiens
  misc_RNA (1)...(19): siRNA sense strand
uugcugaguuggaagaaca

SEQ ID NO: 2257362 - RNA, 19 nt, Homo sapiens
  misc_RNA (1)...(19): siRNA sense strand
ucaugaagaccuugaaagu

SEQ ID NO: 2257363 - RNA, 19 nt, Homo sapiens
  misc_RNA (1)...(19): siRNA sense strand
gcuauauggcucagaguac

SEQ ID NO: 2257364 - RNA, 19 nt, Homo sapiens
  misc_RNA (1)...(19): siRNA sense strand
aggccaugcugaagcgcuu

SEQ ID NO: 2257365 - RNA, 19 nt, Homo sapiens
  misc_RNA (1)...(19): siRNA sense strand
aaugaaagagagggacaaa

SEQ ID NO: 2257366 - RNA, 19 nt, Homo sapiens
  misc_RNA (1)...(19): siRNA sense strand
ucuacaacccagaaggaca

SEQ ID NO: 2257367 - RNA, 19 nt, Homo sapiens
  misc_RNA (1)...(19): siRNA sense strand
ugaugauauugacugguua

SEQ ID NO: 2257368 - RNA, 19 nt, Homo sapiens
  misc_RNA (1)...(19): siRNA sense strand
gaucugacaaagcggaaga

SEQ ID NO: 2257369 - RNA, 19 nt, Homo sapiens
  misc_RNA (1)...(19): siRNA sense strand
caacccagaaggacagcaa

SEQ ID NO: 2257370 - RNA, 19 nt, Homo sapiens
  misc_RNA (1)...(19): siRNA sense strand
ggaaagguggccaggaaac

SEQ ID NO: 2257371 - RNA, 19 nt, Homo sapiens
  misc_RNA (1)...(19): siRNA sense strand
cagaugaagcugugggaaa

SEQ ID NO: 2257372 - RNA, 19 nt, Homo sapiens
  misc_RNA (1)...(19): siRNA sense strand
gugcaaugccacagaacua

SEQ ID NO: 2257373 - RNA, 19 nt, Homo sapiens
  misc_RNA (1)...(19): siRNA sense strand
acauaaaguaggagacaca

SEQ ID NO: 2257374 - RNA, 19 nt, Homo sapiens
  misc_RNA (1)...(19): siRNA sense strand
agaaaugacagcagcuaaa

SEQ ID NO: 2257375 - RNA, 19 nt, Homo sapiens
  misc_RNA (1)...(19): siRNA sense strand
gaaaugaaagagagggaca

SEQ ID NO: 2257376 - RNA, 19 nt, Homo sapiens
  misc_RNA (1)...(19): siRNA sense strand
ccugaauguagaagauaaa

SEQ ID NO: 2257377 - RNA, 19 nt, Homo sapiens
  misc_RNA (1)...(19): siRNA sense strand
gggaacaaagagagaauca

SEQ ID NO: 2257378 - RNA, 19 nt, Homo sapiens
  misc_RNA (1)...(19): siRNA sense strand
ccaugaaagcugaaaugaa

SEQ ID NO: 2257379 - RNA, 19 nt, Homo sapiens
  misc_RNA (1)...(19): siRNA sense strand
ggagaaguuggaagguaaa

SEQ ID NO: 2257380 - RNA, 19 nt, Homo sapiens
  misc_RNA (1)...(19): siRNA sense strand
gggaaagguggccaggaaa

SEQ ID NO: 2257381 - RNA, 19 nt, Homo sapiens
  misc_RNA (1)...(19): siRNA sense strand
cccugaauguagaagauaa

SEQ ID NO: 2257382 - RNA, 19 nt, Homo sapiens
  misc_RNA (1)...(19): siRNA sense strand
cugaagaggguguugcuaa

SEQ ID NO: 2257383 - RNA, 19 nt, Homo sapiens
  misc_RNA (1)...(19): siRNA sense strand
agagagggacaaaggcaaa

SEQ ID NO: 2257384 - RNA, 19 nt, Homo sapiens
  misc_RNA (1)...(19): siRNA sense strand
uaguagaaucugugaugaa

SEQ ID NO: 2257385 - RNA, 19 nt, Homo sapiens
  misc_RNA (1)...(19): siRNA sense strand
ggagaggaguccagggaag

SEQ ID NO: 2257386 - RNA, 19 nt, Homo sapiens
  misc_RNA (1)...(19): siRNA sense strand
cugaaaugaaagagaggga

SEQ ID NO: 2257387 - RNA, 19 nt, Homo sapiens
  misc_RNA (1)...(19): siRNA sense strand
acugacuagugcugagaaa

SEQ ID NO: 2257388 - RNA, 19 nt, Homo sapiens
  misc_RNA (1)...(19): siRNA sense strand
ccacagauucacuggccaa

SEQ ID NO: 2257389 - RNA, 19 nt, Homo sapiens
  misc_RNA (1)...(19): siRNA sense strand
cugacaaagcggaagaaca

SEQ ID NO: 2257390 - RNA, 19 nt, Homo sapiens
  misc_RNA (1)...(19): siRNA sense strand
gggagauaaggauggacaa

SEQ ID NO: 2257391 - RNA, 19 nt, Homo sapiens
  misc_RNA (1)...(19): siRNA sense strand
cagcuaaagcagcagagaa

SEQ ID NO: 2257392 - RNA, 19 nt, Homo sapiens
  misc_RNA (1)...(19): siRNA sense strand
cugggaacaaagagagaau

SEQ ID NO: 2257393 - RNA, 19 nt, Homo sapiens
  misc_RNA (1)...(19): siRNA sense strand
caugcgaaggugagaacaa

SEQ ID NO: 2257394 - RNA, 19 nt, Homo sapiens
  misc_RNA (1)...(19): siRNA sense strand
aggaaaucaaggagaaguu

SEQ ID NO: 2257395 - RNA, 19 nt, Homo sapiens
  misc_RNA (1)...(19): siRNA sense strand
ccuaugaagcuguggaacu

SEQ ID NO: 2257396 - RNA, 19 nt, Homo sapiens
  misc_RNA (1)...(19): siRNA sense strand
cagaugucccagagagaga

SEQ ID NO: 2257397 - RNA, 19 nt, Homo sapiens
  misc_RNA (1)...(19): siRNA sense strand
cagagagagagcaaagaau

SEQ ID NO: 2257398 - RNA, 19 nt, Homo sapiens
  misc_RNA (1)...(19): siRNA sense strand
gucaauaaucagugcucua

SEQ ID NO: 2257399 - RNA, 19 nt, Homo sapiens
  misc_RNA (1)...(19): siRNA sense strand
gauaaagauuacaaggaug

SEQ ID NO: 2257400 - RNA, 19 nt, Homo sapiens
  misc_RNA (1)...(19): siRNA sense strand
ugggaagucuggaagaaaa

SEQ ID NO: 2257401 - RNA, 19 nt, Homo sapiens
  misc_RNA (1)...(19): siRNA sense strand
aagagauuaucgugaucaa

SEQ ID NO: 2257402 - RNA, 19 nt, Homo sapiens
  misc_RNA (1)...(19): siRNA sense strand
gaagcaagcgaacgggcaa

SEQ ID NO: 2257403 - RNA, 19 nt, Homo sapiens
  misc_RNA (1)...(19): siRNA sense strand
cuguaaacauaaaguagga

SEQ ID NO: 2257404 - RNA, 19 nt, Homo sapiens
  misc_RNA (1)...(19): siRNA sense strand
cagaguacucaauaugaaa

SEQ ID NO: 2257405 - RNA, 19 nt, Homo sapiens
  misc_RNA (1)...(19): siRNA sense strand
cauaaggaaaucaaggaga

SEQ ID NO: 2257406 - RNA, 19 nt, Homo sapiens
  misc_RNA (1)...(19): siRNA sense strand
ggcucaugguuuaugcaaa

SEQ ID NO: 2257407 - RNA, 19 nt, Homo sapiens
  misc_RNA (1)...(19): siRNA sense strand
ggaccauccaccugucaaa

SEQ ID NO: 2257408 - RNA, 19 nt, Homo sapiens
  misc_RNA (1)...(19): siRNA sense strand
ccaaggagauuguguccga

SEQ ID NO: 2257409 - RNA, 19 nt, Homo sapiens
  misc_RNA (1)...(19): siRNA sense strand
gaucaaggacacugagaag

SEQ ID NO: 2257410 - RNA, 19 nt, Homo sapiens
  misc_RNA (1)...(19): siRNA sense strand
gaacaagcagccucggcaa

SEQ ID NO: 2257411 - RNA, 19 nt, Homo sapiens
  misc_RNA (1)...(19): siRNA sense strand
guaaacauaaaguaggaga

SEQ ID NO: 2257412 - RNA, 19 nt, Homo sapiens
  misc_RNA (1)...(19): siRNA sense strand
uagaaaugacagcagcuaa

SEQ ID NO: 2257413 - RNA, 19 nt, Homo sapiens
  misc_RNA (1)...(19): siRNA sense strand
cagaaggacagcaagauca

SEQ ID NO: 2257414 - RNA, 19 nt, Homo sapiens
  misc_RNA (1)...(19): siRNA sense strand
guuggaagguaaaagcaaa

SEQ ID NO: 2257415 - RNA, 19 nt, Homo sapiens
  misc_RNA (1)...(19): siRNA sense strand
aagagagggacaaaggcaa

SEQ ID NO: 2257416 - RNA, 19 nt, Homo sapiens
  misc_RNA (1)...(19): siRNA sense strand
uugcugaguuggaagaaca

SEQ ID NO: 2257417 - RNA, 19 nt, Homo sapiens
  misc_RNA (1)...(19): siRNA sense strand
ucaugaagaccuugaaagu

SEQ ID NO: 2257418 - RNA, 19 nt, Homo sapiens
  misc_RNA (1)...(19): siRNA sense strand
gcuauauggcucagaguac

SEQ ID NO: 2257419 - RNA, 19 nt, Homo sapiens
  misc_RNA (1)...(19): siRNA sense strand
ucuacaacccagaaggaca

SEQ ID NO: 2257420 - RNA, 19 nt, Homo sapiens
  misc_RNA (1)...(19): siRNA sense strand
aggccaugcugaagcgcuu

SEQ ID NO: 2257421 - RNA, 19 nt, Homo sapiens
  misc_RNA (1)...(19): siRNA sense strand
aaugaaagagagggacaaa

SEQ ID NO: 2257422 - RNA, 19 nt, Homo sapiens
  misc_RNA (1)...(19): siRNA sense strand
ugaugauauugacugguua

SEQ ID NO: 2257423 - RNA, 19 nt, Homo sapiens
  misc_RNA (1)...(19): siRNA sense strand
caacccagaaggacagcaa

SEQ ID NO: 2257424 - RNA, 19 nt, Homo sapiens
  misc_RNA (1)...(19): siRNA sense strand
gaucugacaaagcggaaga

SEQ ID NO: 2257425 - RNA, 19 nt, Homo sapiens
  misc_RNA (1)...(19): siRNA sense strand
ggaaagguggccaggaaac

SEQ ID NO: 2257426 - RNA, 19 nt, Homo sapiens
  misc_RNA (1)...(19): siRNA sense strand
ggauaaacagacagggaaa

SEQ ID NO: 2257427 - RNA, 19 nt, Homo sapiens
  misc_RNA (1)...(19): siRNA sense strand
ugaaauaagcggagcggaa

SEQ ID NO: 2257428 - RNA, 19 nt, Homo sapiens
  misc_RNA (1)...(19): siRNA sense strand
ugacaauacuggagaaaau

SEQ ID NO: 2257429 - RNA, 19 nt, Homo sapiens
  misc_RNA (1)...(19): siRNA sense strand
gcaaaauagcaaagaagaa

SEQ ID NO: 2257430 - RNA, 19 nt, Homo sapiens
  misc_RNA (1)...(19): siRNA sense strand
agaccaacccugaggagaa

SEQ ID NO: 2257431 - RNA, 19 nt, Homo sapiens
  misc_RNA (1)...(19): siRNA sense strand
caacaaaggccaaccgaga

SEQ ID NO: 2257432 - RNA, 19 nt, Homo sapiens
  misc_RNA (1)...(19): siRNA sense strand
cgucaaaacgagagauauu

SEQ ID NO: 2257433 - RNA, 19 nt, Homo sapiens
  misc_RNA (1)...(19): siRNA sense strand
ccuaggaagucgcaggcaa

SEQ ID NO: 2257434 - RNA, 19 nt, Homo sapiens
  misc_RNA (1)...(19): siRNA sense strand
acgacauggaugagaaauu

SEQ ID NO: 2257435 - RNA, 19 nt, Homo sapiens
  misc_RNA (1)...(19): siRNA sense strand
gcgacaugaaugcaagaaa

SEQ ID NO: 2257436 - RNA, 19 nt, Homo sapiens
  misc_RNA (1)...(19): siRNA sense strand
gauaaagcuuggaaggacu

SEQ ID NO: 2257437 - RNA, 19 nt, Homo sapiens
  misc_RNA (1)...(19): siRNA sense strand
aagaaauccgugaaagcaa

SEQ ID NO: 2257438 - RNA, 19 nt, Homo sapiens
  misc_RNA (1)...(19): siRNA sense strand
cggaaauugccgaagagau

SEQ ID NO: 2257439 - RNA, 19 nt, Homo sapiens
  misc_RNA (1)...(19): siRNA sense strand
gggaaggccuccaucgaga

SEQ ID NO: 2257440 - RNA, 19 nt, Homo sapiens
  misc_RNA (1)...(19): siRNA sense strand
ccacauugauggagauccu

SEQ ID NO: 2257441 - RNA, 19 nt, Homo sapiens
  misc_RNA (1)...(19): siRNA sense strand
ccgcauugcagguugaaca

SEQ ID NO: 2257442 - RNA, 19 nt, Homo sapiens
  misc_RNA (1)...(19): siRNA sense strand
ccuuagauguacugggaac

SEQ ID NO: 2257443 - RNA, 19 nt, Homo sapiens
  misc_RNA (1)...(19): siRNA sense strand
uggaaaaugaagagcagua

SEQ ID NO: 2257444 - RNA, 19 nt, Homo sapiens
  misc_RNA (1)...(19): siRNA sense strand
ucagaagugcagaggauga

SEQ ID NO: 2257445 - RNA, 19 nt, Homo sapiens
  misc_RNA (1)...(19): siRNA sense strand
agacaaacucuguaagugu

SEQ ID NO: 2257446 - RNA, 19 nt, Homo sapiens
  misc_RNA (1)...(19): siRNA sense strand
ccgaagagauggaaaagga

SEQ ID NO: 2257447 - RNA, 19 nt, Homo sapiens
  misc_RNA (1)...(19): siRNA sense strand
gugcagaggaugacgggca

SEQ ID NO: 2257448 - RNA, 19 nt, Homo sapiens
  misc_RNA (1)...(19): siRNA sense strand
gguguggaucuuacggaaa

SEQ ID NO: 2257449 - RNA, 19 nt, Homo sapiens
  misc_RNA (1)...(19): siRNA sense strand
aggaagaagcacgcggaua

SEQ ID NO: 2257450 - RNA, 19 nt, Homo sapiens
  misc_RNA (1)...(19): siRNA sense strand
uggagauccuggucgcaaa

SEQ ID NO: 2257451 - RNA, 19 nt, Homo sapiens
  misc_RNA (1)...(19): siRNA sense strand
ccgagacccaugaggacua

SEQ ID NO: 2257452 - RNA, 19 nt, Homo sapiens
  misc_RNA (1)...(19): siRNA sense strand
aggagauacgcaaggaaga

SEQ ID NO: 2257453 - RNA, 19 nt, Homo sapiens
  misc_RNA (1)...(19): siRNA sense strand
aaauaagcggagcggaaau

SEQ ID NO: 2257454 - RNA, 19 nt, Homo sapiens
  misc_RNA (1)...(19): siRNA sense strand
cugcugaaggucaacgaaa

SEQ ID NO: 2257455 - RNA, 19 nt, Homo sapiens
  misc_RNA (1)...(19): siRNA sense strand
cgagaggaccuguggaucu

SEQ ID NO: 2257456 - RNA, 19 nt, Homo sapiens
  misc_RNA (1)...(19): siRNA sense strand
gcuuggaaggacuaugaaa

SEQ ID NO: 2257457 - RNA, 19 nt, Homo sapiens
  misc_RNA (1)...(19): siRNA sense strand
ccaagauagaaaaggagaa

SEQ ID NO: 2257458 - RNA, 19 nt, Homo sapiens
  misc_RNA (1)...(19): siRNA sense strand
gaugacaauacuggagaaa

SEQ ID NO: 2257459 - RNA, 19 nt, Homo sapiens
  misc_RNA (1)...(19): siRNA sense strand
gaucauggaauguugccua

SEQ ID NO: 2257460 - RNA, 19 nt, Homo sapiens
  misc_RNA (1)...(19): siRNA sense strand
ccaaguacaucgagaggag

SEQ ID NO: 2257461 - RNA, 19 nt, Homo sapiens
  misc_RNA (1)...(19): siRNA sense strand
gugaugacgacauggauga

SEQ ID NO: 2257462 - RNA, 19 nt, Homo sapiens
  misc_RNA (1)...(19): siRNA sense strand
ugacgacauggaugagaaa

SEQ ID NO: 2257463 - RNA, 19 nt, Homo sapiens
  misc_RNA (1)...(19): siRNA sense strand
cagaaagaggacucccaaa

SEQ ID NO: 2257464 - RNA, 19 nt, Homo sapiens
  misc_RNA (1)...(19): siRNA sense strand
caagaagagugacgggauc

SEQ ID NO: 2257465 - RNA, 19 nt, Homo sapiens
  misc_RNA (1)...(19): siRNA sense strand
gcuacagaugugcgaguau

SEQ ID NO: 2257466 - RNA, 19 nt, Homo sapiens
  misc_RNA (1)...(19): siRNA sense strand
caagauagaaaaggagaaa

SEQ ID NO: 2257467 - RNA, 19 nt, Homo sapiens
  misc_RNA (1)...(19): siRNA sense strand
acgccaagcuccaugggau

SEQ ID NO: 2257468 - RNA, 19 nt, Homo sapiens
  misc_RNA (1)...(19): siRNA sense strand
ggaugaaagugaugacgac

SEQ ID NO: 2257469 - RNA, 19 nt, Homo sapiens
  misc_RNA (1)...(19): siRNA sense strand
gugaggagcugcugaccca

SEQ ID NO: 2257470 - RNA, 19 nt, Homo sapiens
  misc_RNA (1)...(19): siRNA sense strand
uggaagacaaacucuguaa

SEQ ID NO: 2257471 - RNA, 19 nt, Homo sapiens
  misc_RNA (1)...(19): siRNA sense strand
uggagaaguuuggcggcaa

SEQ ID NO: 2257472 - RNA, 19 nt, Homo sapiens
  misc_RNA (1)...(19): siRNA sense strand
cggccaucgaggaggcuuu

SEQ ID NO: 2257473 - RNA, 19 nt, Homo sapiens
  misc_RNA (1)...(19): siRNA sense strand
ugcugaaggucaacgaaau

SEQ ID NO: 2257474 - RNA, 19 nt, Homo sapiens
  misc_RNA (1)...(19): siRNA sense strand
ccgaaaaguguggcagaaa

SEQ ID NO: 2257475 - RNA, 19 nt, Homo sapiens
  misc_RNA (1)...(19): siRNA sense strand
guguggaucuuacggaaaa

SEQ ID NO: 2257476 - RNA, 19 nt, Homo sapiens
  misc_RNA (1)...(19): siRNA sense strand
uggauaaacagacagggaa

SEQ ID NO: 2257477 - RNA, 19 nt, Homo sapiens
  misc_RNA (1)...(19): siRNA sense strand
acaagaagagugacgggau

SEQ ID NO: 2257478 - RNA, 19 nt, Homo sapiens
  misc_RNA (1)...(19): siRNA sense strand
agcugaagaugaacaggaa

SEQ ID NO: 2257479 - RNA, 19 nt, Homo sapiens
  misc_RNA (1)...(19): siRNA sense strand
ccagcaucuugcagaauga

SEQ ID NO: 2257480 - RNA, 19 nt, Homo sapiens
  misc_RNA (1)...(19): siRNA sense strand
cggcaacuguguaugcaga

SEQ ID NO: 2257481 - RNA, 19 nt, Homo sapiens
  misc_RNA (1)...(19): siRNA sense strand
aguaucugcugaaggucaa

SEQ ID NO: 2257482 - RNA, 19 nt, Homo sapiens
  misc_RNA (1)...(19): siRNA sense strand
aaugaagaaauccgugaaa

SEQ ID NO: 2257483 - RNA, 19 nt, Homo sapiens
  misc_RNA (1)...(19): siRNA sense strand
ucuggaaaugggagagaaa

SEQ ID NO: 2257484 - RNA, 19 nt, Homo sapiens
  misc_RNA (1)...(19): siRNA sense strand
uauuaagccagcagagcaa

SEQ ID NO: 2257485 - RNA, 19 nt, Homo sapiens
  misc_RNA (1)...(19): siRNA sense strand
gaauuuggcuugcgggagu

SEQ ID NO: 2257486 - RNA, 19 nt, Homo sapiens
  misc_RNA (1)...(19): siRNA sense strand
gguucaguguggagaagga

SEQ ID NO: 2257487 - RNA, 19 nt, Homo sapiens
  misc_RNA (1)...(19): siRNA sense strand
gggagagaaaugggagaau

SEQ ID NO: 2257488 - RNA, 19 nt, Homo sapiens
  misc_RNA (1)...(19): siRNA sense strand
aucccuaaaugguggcaaa

SEQ ID NO: 2257489 - RNA, 19 nt, Homo sapiens
  misc_RNA (1)...(19): siRNA sense strand
uggaaaugggagagaaaug

SEQ ID NO: 2257490 - RNA, 19 nt, Homo sapiens
  misc_RNA (1)...(19): siRNA sense strand
agacgauggaugaaguuau

SEQ ID NO: 2257491 - RNA, 19 nt, Homo sapiens
  misc_RNA (1)...(19): siRNA sense strand
auucaagaugucuggaaau

SEQ ID NO: 2257492 - RNA, 19 nt, Homo sapiens
  misc_RNA (1)...(19): siRNA sense strand
ugauaaaauucaugggaug

SEQ ID NO: 2257493 - RNA, 19 nt, Homo sapiens
  misc_RNA (1)...(19): siRNA sense strand
augaggaguuugugagaag

SEQ ID NO: 2257494 - RNA, 19 nt, Homo sapiens
  misc_RNA (1)...(19): siRNA sense strand
acucagaaguuaagacggu

SEQ ID NO: 2257495 - RNA, 19 nt, Homo sapiens
  misc_RNA (1)...(19): siRNA sense strand
aggauggaugcuucagaaa

SEQ ID NO: 2257496 - RNA, 19 nt, Homo sapiens
  misc_RNA (1)...(19): siRNA sense strand
uugccaaggaggagaucuu

SEQ ID NO: 2257497 - RNA, 19 nt, Homo sapiens
  misc_RNA (1)...(19): siRNA sense strand
ucuggaaaugggagagaaa

SEQ ID NO: 2257498 - RNA, 19 nt, Homo sapiens
  misc_RNA (1)...(19): siRNA sense strand
uauuaagccagcagagcaa

SEQ ID NO: 2257499 - RNA, 19 nt, Homo sapiens
  misc_RNA (1)...(19): siRNA sense strand
gaauuuggcuugcgggagu

SEQ ID NO: 2257500 - RNA, 19 nt, Homo sapiens
  misc_RNA (1)...(19): siRNA sense strand
gguucaguguggagaagga

SEQ ID NO: 2257501 - RNA, 19 nt, Homo sapiens
  misc_RNA (1)...(19): siRNA sense strand
gggagagaaaugggagaau

SEQ ID NO: 2257502 - RNA, 19 nt, Homo sapiens
  misc_RNA (1)...(19): siRNA sense strand
aucccuaaaugguggcaaa

SEQ ID NO: 2257503 - RNA, 19 nt, Homo sapiens
  misc_RNA (1)...(19): siRNA sense strand
uggaaaugggagagaaaug

SEQ ID NO: 2257504 - RNA, 19 nt, Homo sapiens
  misc_RNA (1)...(19): siRNA sense strand
agacgauggaugaaguuau

SEQ ID NO: 2257505 - RNA, 19 nt, Homo sapiens
  misc_RNA (1)...(19): siRNA sense strand
auucaagaugucuggaaau

SEQ ID NO: 2257506 - RNA, 19 nt, Homo sapiens
  misc_RNA (1)...(19): siRNA sense strand
ugauaaaauucaugggaug

SEQ ID NO: 2257507 - RNA, 19 nt, Homo sapiens
  misc_RNA (1)...(19): siRNA sense strand
augaggaguuugugagaag

SEQ ID NO: 2257508 - RNA, 19 nt, Homo sapiens
  misc_RNA (1)...(19): siRNA sense strand
acucagaaguuaagacggu

SEQ ID NO: 2257509 - RNA, 19 nt, Homo sapiens
  misc_RNA (1)...(19): siRNA sense strand
aggauggaugcuucagaaa

SEQ ID NO: 2257510 - RNA, 19 nt, Homo sapiens
  misc_RNA (1)...(19): siRNA sense strand
uugccaaggaggagaucuu

SEQ ID NO: 2257511 - RNA, 19 nt, Homo sapiens
  misc_RNA (1)...(19): siRNA sense strand
ucuggaaaugggagagaaa

SEQ ID NO: 2257512 - RNA, 19 nt, Homo sapiens
  misc_RNA (1)...(19): siRNA sense strand
uauuaagccagcagagcaa

SEQ ID NO: 2257513 - RNA, 19 nt, Homo sapiens
  misc_RNA (1)...(19): siRNA sense strand
gaauuuggcuugcgggagu

SEQ ID NO: 2257514 - RNA, 19 nt, Homo sapiens
  misc_RNA (1)...(19): siRNA sense strand
gggagagaaaugggagaau

SEQ ID NO: 2257515 - RNA, 19 nt, Homo sapiens
  misc_RNA (1)...(19): siRNA sense strand
aucccuaaaugguggcaaa

SEQ ID NO: 2257516 - RNA, 19 nt, Homo sapiens
  misc_RNA (1)...(19): siRNA sense strand
uggaaaugggagagaaaug

SEQ ID NO: 2257517 - RNA, 19 nt, Homo sapiens
  misc_RNA (1)...(19): siRNA sense strand
agacgauggaugaaguuau

SEQ ID NO: 2257518 - RNA, 19 nt, Homo sapiens
  misc_RNA (1)...(19): siRNA sense strand
auucaagaugucuggaaau

SEQ ID NO: 2257519 - RNA, 19 nt, Homo sapiens
  misc_RNA (1)...(19): siRNA sense strand
ugauaaaauucaugggaug

SEQ ID NO: 2257520 - RNA, 19 nt, Homo sapiens
  misc_RNA (1)...(19): siRNA sense strand
augaggaguuugugagaag

SEQ ID NO: 2257521 - RNA, 19 nt, Homo sapiens
  misc_RNA (1)...(19): siRNA sense strand
acucagaaguuaagacggu

SEQ ID NO: 2257522 - RNA, 19 nt, Homo sapiens
  misc_RNA (1)...(19): siRNA sense strand
uugccaaggaggagaucuu

SEQ ID NO: 2257523 - RNA, 19 nt, Homo sapiens
  misc_RNA (1)...(19): siRNA sense strand
gcaugaagaaggagaugau

SEQ ID NO: 2257524 - RNA, 19 nt, Homo sapiens
  misc_RNA (1)...(19): siRNA sense strand
gaagaaaagugaacggaca

SEQ ID NO: 2257525 - RNA, 19 nt, Homo sapiens
  misc_RNA (1)...(19): siRNA sense strand
ugacagaggagcagcggau

SEQ ID NO: 2257526 - RNA, 19 nt, Homo sapiens
  misc_RNA (1)...(19): siRNA sense strand
ugaagaaggagaugaucau

SEQ ID NO: 2257527 - RNA, 19 nt, Homo sapiens
  misc_RNA (1)...(19): siRNA sense strand
gugaaggaugcaagggcuu

SEQ ID NO: 2257528 - RNA, 19 nt, Homo sapiens
  misc_RNA (1)...(19): siRNA sense strand
augaagaaggagaugauca

SEQ ID NO: 2257529 - RNA, 19 nt, Homo sapiens
  misc_RNA (1)...(19): siRNA sense strand
agccgacaguggcgggaaa

SEQ ID NO: 2257530 - RNA, 19 nt, Homo sapiens
  misc_RNA (1)...(19): siRNA sense strand
ccuacauguucaaaggcau

SEQ ID NO: 2257531 - RNA, 19 nt, Homo sapiens
  misc_RNA (1)...(19): siRNA sense strand
acagaggagcagcggauga

SEQ ID NO: 2257532 - RNA, 19 nt, Homo sapiens
  misc_RNA (1)...(19): siRNA sense strand
ggacagggacucagccacu

SEQ ID NO: 2257533 - RNA, 19 nt, Homo sapiens
  misc_RNA (1)...(19): siRNA sense strand
gcaugaagaaggagaugau

SEQ ID NO: 2257534 - RNA, 19 nt, Homo sapiens
  misc_RNA (1)...(19): siRNA sense strand
gaagaaaagugaacggaca

SEQ ID NO: 2257535 - RNA, 19 nt, Homo sapiens
  misc_RNA (1)...(19): siRNA sense strand
ugacagaggagcagcggau

SEQ ID NO: 2257536 - RNA, 19 nt, Homo sapiens
  misc_RNA (1)...(19): siRNA sense strand
ugaagaaggagaugaucau

SEQ ID NO: 2257537 - RNA, 19 nt, Homo sapiens
  misc_RNA (1)...(19): siRNA sense strand
gugaaggaugcaagggcuu

SEQ ID NO: 2257538 - RNA, 19 nt, Homo sapiens
  misc_RNA (1)...(19): siRNA sense strand
augaagaaggagaugauca

SEQ ID NO: 2257539 - RNA, 19 nt, Homo sapiens
  misc_RNA (1)...(19): siRNA sense strand
agccgacaguggcgggaaa

SEQ ID NO: 2257540 - RNA, 19 nt, Homo sapiens
  misc_RNA (1)...(19): siRNA sense strand
ccuacauguucaaaggcau

SEQ ID NO: 2257541 - RNA, 19 nt, Homo sapiens
  misc_RNA (1)...(19): siRNA sense strand
acagaggagcagcggauga

SEQ ID NO: 2257542 - RNA, 19 nt, Homo sapiens
  misc_RNA (1)...(19): siRNA sense strand
ggacagggacucagccacu

SEQ ID NO: 2257543 - RNA, 19 nt, Homo sapiens
  misc_RNA (1)...(19): siRNA sense strand
gcaugaagaaggagaugau

SEQ ID NO: 2257544 - RNA, 19 nt, Homo sapiens
  misc_RNA (1)...(19): siRNA sense strand
gaagaaaagugaacggaca

SEQ ID NO: 2257545 - RNA, 19 nt, Homo sapiens
  misc_RNA (1)...(19): siRNA sense strand
ugacagaggagcagcggau

SEQ ID NO: 2257546 - RNA, 19 nt, Homo sapiens
  misc_RNA (1)...(19): siRNA sense strand
ugaagaaggagaugaucau

SEQ ID NO: 2257547 - RNA, 19 nt, Homo sapiens
  misc_RNA (1)...(19): siRNA sense strand
gugaaggaugcaagggcuu

SEQ ID NO: 2257548 - RNA, 19 nt, Homo sapiens
  misc_RNA (1)...(19): siRNA sense strand
augaagaaggagaugauca

SEQ ID NO: 2257549 - RNA, 19 nt, Homo sapiens
  misc_RNA (1)...(19): siRNA sense strand
agccgacaguggcgggaaa

SEQ ID NO: 2257550 - RNA, 19 nt, Homo sapiens
  misc_RNA (1)...(19): siRNA sense strand
ccuacauguucaaaggcau

SEQ ID NO: 2257551 - RNA, 19 nt, Homo sapiens
  misc_RNA (1)...(19): siRNA sense strand
acagaggagcagcggauga

SEQ ID NO: 2257552 - RNA, 19 nt, Homo sapiens
  misc_RNA (1)...(19): siRNA sense strand
ggacagggacucagccacu

SEQ ID NO: 2257553 - RNA, 19 nt, Homo sapiens
  misc_RNA (1)...(19): siRNA sense strand
cgauaaugacaaagacaua

SEQ ID NO: 2257554 - RNA, 19 nt, Homo sapiens
  misc_RNA (1)...(19): siRNA sense strand
gugaacagcaagaucgaaa

SEQ ID NO: 2257555 - RNA, 19 nt, Homo sapiens
  misc_RNA (1)...(19): siRNA sense strand
uaaaagaagaccuggaaaa

SEQ ID NO: 2257556 - RNA, 19 nt, Homo sapiens
  misc_RNA (1)...(19): siRNA sense strand
ccucagaagaagacaaaca

SEQ ID NO: 2257557 - RNA, 19 nt, Homo sapiens
  misc_RNA (1)...(19): siRNA sense strand
aggugaagacagaaagcaa

SEQ ID NO: 2257558 - RNA, 19 nt, Homo sapiens
  misc_RNA (1)...(19): siRNA sense strand
ccguggaggugaagacaga

SEQ ID NO: 2257559 - RNA, 19 nt, Homo sapiens
  misc_RNA (1)...(19): siRNA sense strand
gcaggaaagggaagcacaa

SEQ ID NO: 2257560 - RNA, 19 nt, Homo sapiens
  misc_RNA (1)...(19): siRNA sense strand
agacgaaggcggagcagau

SEQ ID NO: 2257561 - RNA, 19 nt, Homo sapiens
  misc_RNA (1)...(19): siRNA sense strand
gcaagaaagcaggagcaaa

SEQ ID NO: 2257562 - RNA, 19 nt, Homo sapiens
  misc_RNA (1)...(19): siRNA sense strand
aagcaggagcaaagcuaaa

SEQ ID NO: 2257563 - RNA, 19 nt, Homo sapiens
  misc_RNA (1)...(19): siRNA sense strand
ccugugaggauuugaggaa

SEQ ID NO: 2257564 - RNA, 19 nt, Homo sapiens
  misc_RNA (1)...(19): siRNA sense strand
cccagaaggaagagcagaa

SEQ ID NO: 2257565 - RNA, 19 nt, Homo sapiens
  misc_RNA (1)...(19): siRNA sense strand
guggaggugaagacagaaa

SEQ ID NO: 2257566 - RNA, 19 nt, Homo sapiens
  misc_RNA (1)...(19): siRNA sense strand
gggaagcacaagcggaaga

SEQ ID NO: 2257567 - RNA, 19 nt, Homo sapiens
  misc_RNA (1)...(19): siRNA sense strand
ggugaauguaagaccuuua

SEQ ID NO: 2257568 - RNA, 19 nt, Homo sapiens
  misc_RNA (1)...(19): siRNA sense strand
gcauaaaguucgaacgagc

SEQ ID NO: 2257569 - RNA, 19 nt, Homo sapiens
  misc_RNA (1)...(19): siRNA sense strand
cggcauaaaguucgaacga

SEQ ID NO: 2257570 - RNA, 19 nt, Homo sapiens
  misc_RNA (1)...(19): siRNA sense strand
caggauccguggaggugaa

SEQ ID NO: 2257571 - RNA, 19 nt, Homo sapiens
  misc_RNA (1)...(19): siRNA sense strand
gugaagacagaaagcaaga

SEQ ID NO: 2257572 - RNA, 19 nt, Homo sapiens
  misc_RNA (1)...(19): siRNA sense strand
cuggaagguuagugcacau

SEQ ID NO: 2257573 - RNA, 19 nt, Homo sapiens
  misc_RNA (1)...(19): siRNA sense strand
agacagaaagcaagagaag

SEQ ID NO: 2257574 - RNA, 19 nt, Homo sapiens
  misc_RNA (1)...(19): siRNA sense strand
auucaaagccagacuguca

SEQ ID NO: 2257575 - RNA, 19 nt, Homo sapiens
  misc_RNA (1)...(19): siRNA sense strand
agaugaacgauaaugacaa

SEQ ID NO: 2257576 - RNA, 19 nt, Homo sapiens
  misc_RNA (1)...(19): siRNA sense strand
ccaaaggagagaggaggaa

SEQ ID NO: 2257577 - RNA, 19 nt, Homo sapiens
  misc_RNA (1)...(19): siRNA sense strand
aaaggagagaggaggaaaa

SEQ ID NO: 2257578 - RNA, 19 nt, Homo sapiens
  misc_RNA (1)...(19): siRNA sense strand
aggaaaagugggaggcaca

SEQ ID NO: 2257579 - RNA, 19 nt, Homo sapiens
  misc_RNA (1)...(19): siRNA sense strand
cagcaagaaagcaggagca

SEQ ID NO: 2257580 - RNA, 19 nt, Homo sapiens
  misc_RNA (1)...(19): siRNA sense strand
aagggaagcacaagcggaa

SEQ ID NO: 2257581 - RNA, 19 nt, Homo sapiens
  misc_RNA (1)...(19): siRNA sense strand
caauaaaccaagcacucua

SEQ ID NO: 2257582 - RNA, 19 nt, Homo sapiens
  misc_RNA (1)...(19): siRNA sense strand
accgaauggugguggugaa

SEQ ID NO: 2257583 - RNA, 19 nt, Homo sapiens
  misc_RNA (1)...(19): siRNA sense strand
agaugauguccaagccuua

SEQ ID NO: 2257584 - RNA, 19 nt, Homo sapiens
  misc_RNA (1)...(19): siRNA sense strand
cauccuaucaacagaucaa

SEQ ID NO: 2257585 - RNA, 19 nt, Homo sapiens
  misc_RNA (1)...(19): siRNA sense strand
caacaauggcagugagagc

SEQ ID NO: 2257586 - RNA, 19 nt, Homo sapiens
  misc_RNA (1)...(19): siRNA sense strand
ggaaauuggcggacagcag

SEQ ID NO: 2257587 - RNA, 19 nt, Homo sapiens
  misc_RNA (1)...(19): siRNA sense strand
cggaagaauuuaaacacgu

SEQ ID NO: 2257588 - RNA, 19 nt, Homo sapiens
  misc_RNA (1)...(19): siRNA sense strand
caaaggagagaggaggaaa

SEQ ID NO: 2257589 - RNA, 19 nt, Homo sapiens
  misc_RNA (1)...(19): siRNA sense strand
cagccacagugaacagcaa

SEQ ID NO: 2257590 - RNA, 19 nt, Homo sapiens
  misc_RNA (1)...(19): siRNA sense strand
cucaagaaaucgacauuca

SEQ ID NO: 2257591 - RNA, 19 nt, Homo sapiens
  misc_RNA (1)...(19): siRNA sense strand
gcaucaggaagcagcgaca

SEQ ID NO: 2257592 - RNA, 19 nt, Homo sapiens
  misc_RNA (1)...(19): siRNA sense strand
acagaaagcaagagaagug

SEQ ID NO: 2257593 - RNA, 19 nt, Homo sapiens
  misc_RNA (1)...(19): siRNA sense strand
cccucaaugucgucagcaa

SEQ ID NO: 2257594 - RNA, 19 nt, Homo sapiens
  misc_RNA (1)...(19): siRNA sense strand
ccagaucagaugagaagga

SEQ ID NO: 2257595 - RNA, 19 nt, Homo sapiens
  misc_RNA (1)...(19): siRNA sense strand
ggagagacgcaauaaacca

SEQ ID NO: 2257596 - RNA, 19 nt, Homo sapiens
  misc_RNA (1)...(19): siRNA sense strand
auuucugucuggaagguua

SEQ ID NO: 2257597 - RNA, 19 nt, Homo sapiens
  misc_RNA (1)...(19): siRNA sense strand
aagaagacaaacagaacca

SEQ ID NO: 2257598 - RNA, 19 nt, Homo sapiens
  misc_RNA (1)...(19): siRNA sense strand
gccaaaggagagaggagga

SEQ ID NO: 2257599 - RNA, 19 nt, Homo sapiens
  misc_RNA (1)...(19): siRNA sense strand
aagacaaacagaaccacaa

SEQ ID NO: 2257600 - RNA, 19 nt, Homo sapiens
  misc_RNA (1)...(19): siRNA sense strand
aggaacacgugcccacaaa

SEQ ID NO: 2257601 - RNA, 19 nt, Homo sapiens
  misc_RNA (1)...(19): siRNA sense strand
cuuugauccugaaucguaa

SEQ ID NO: 2257602 - RNA, 19 nt, Homo sapiens
  misc_RNA (1)...(19): siRNA sense strand
cagaucaacuguaucgaca

SEQ ID NO: 2257603 - RNA, 19 nt, Homo sapiens
  misc_RNA (1)...(19): siRNA sense strand
ccucggaagaauuuaaaca

SEQ ID NO: 2257604 - RNA, 19 nt, Homo sapiens
  misc_RNA (1)...(19): siRNA sense strand
ggucuaugccagugugaac

SEQ ID NO: 2257605 - RNA, 19 nt, Homo sapiens
  misc_RNA (1)...(19): siRNA sense strand
agccauaccuaaaucagaa

SEQ ID NO: 2257606 - RNA, 19 nt, Homo sapiens
  misc_RNA (1)...(19): siRNA sense strand
guccauagacacaggagga

SEQ ID NO: 2257607 - RNA, 19 nt, Homo sapiens
  misc_RNA (1)...(19): siRNA sense strand
aggagcagcuugucagcau

SEQ ID NO: 2257608 - RNA, 19 nt, Homo sapiens
  misc_RNA (1)...(19): siRNA sense strand
cagaaggaagagcagaauu

SEQ ID NO: 2257609 - RNA, 19 nt, Homo sapiens
  misc_RNA (1)...(19): siRNA sense strand
cugagaggguuaaagaagu

SEQ ID NO: 2257610 - RNA, 19 nt, Homo sapiens
  misc_RNA (1)...(19): siRNA sense strand
agaagaagacaaacagaac

SEQ ID NO: 2257611 - RNA, 19 nt, Homo sapiens
  misc_RNA (1)...(19): siRNA sense strand
aaaaggaggagcuggcuaa

SEQ ID NO: 2257612 - RNA, 19 nt, Homo sapiens
  misc_RNA (1)...(19): siRNA sense strand
agacacaggaggaggagcu

SEQ ID NO: 2257613 - RNA, 19 nt, Homo sapiens
  misc_RNA (1)...(19): siRNA sense strand
ccucaaugucgucagcaau

SEQ ID NO: 2257614 - RNA, 19 nt, Homo sapiens
  misc_RNA (1)...(19): siRNA sense strand
ggguuaaagaaguuguacu

SEQ ID NO: 2257615 - RNA, 19 nt, Homo sapiens
  misc_RNA (1)...(19): siRNA sense strand
gagagacgcaauaaaccaa

SEQ ID NO: 2257616 - RNA, 19 nt, Homo sapiens
  misc_RNA (1)...(19): siRNA sense strand
cgauguugugauaagguua

SEQ ID NO: 2257617 - RNA, 19 nt, Homo sapiens
  misc_RNA (1)...(19): siRNA sense strand
gcauaaugugacaacggaa

SEQ ID NO: 2257618 - RNA, 19 nt, Homo sapiens
  misc_RNA (1)...(19): siRNA sense strand
ccaaagacagugaagcuga

SEQ ID NO: 2257619 - RNA, 19 nt, Homo sapiens
  misc_RNA (1)...(19): siRNA sense strand
gguuauuggaagcggagga

SEQ ID NO: 2257620 - RNA, 19 nt, Homo sapiens
  misc_RNA (1)...(19): siRNA sense strand
uuauuugagcacagguaua

SEQ ID NO: 2257621 - RNA, 19 nt, Homo sapiens
  misc_RNA (1)...(19): siRNA sense strand
agaucucaguggaggcauu

SEQ ID NO: 2257622 - RNA, 19 nt, Homo sapiens
  misc_RNA (1)...(19): siRNA sense strand
acagugaagcugaguccaa

SEQ ID NO: 2257623 - RNA, 19 nt, Homo sapiens
  misc_RNA (1)...(19): siRNA sense strand
ccugaacacuugaaagcca

SEQ ID NO: 2257624 - RNA, 19 nt, Homo sapiens
  misc_RNA (1)...(19): siRNA sense strand
ggugaaagaucucagugga

SEQ ID NO: 2257625 - RNA, 19 nt, Homo sapiens
  misc_RNA (1)...(19): siRNA sense strand
ccuuuauauccucaaguua

SEQ ID NO: 2257626 - RNA, 19 nt, Homo sapiens
  misc_RNA (1)...(19): siRNA sense strand
ggucaaagagggaguggug

SEQ ID NO: 2257627 - RNA, 19 nt, Homo sapiens
  misc_RNA (1)...(19): siRNA sense strand
cugaacacuugaaagccaa

SEQ ID NO: 2257628 - RNA, 19 nt, Homo sapiens
  misc_RNA (1)...(19): siRNA sense strand
ccaguaaaguccagacccu

SEQ ID NO: 2257629 - RNA, 19 nt, Homo sapiens
  misc_RNA (1)...(19): siRNA sense strand
ucuuggaacucuugccaga

SEQ ID NO: 2257630 - RNA, 19 nt, Homo sapiens
  misc_RNA (1)...(19): siRNA sense strand
ccugauggcugaagagggu

SEQ ID NO: 2257631 - RNA, 19 nt, Homo sapiens
  misc_RNA (1)...(19): siRNA sense strand
ccugauggcugaagagggu

SEQ ID NO: 2257632 - RNA, 19 nt, Homo sapiens
  misc_RNA (1)...(19): siRNA sense strand
ucacaaagcuugaggacag

SEQ ID NO: 2257633 - RNA, 19 nt, Homo sapiens
  misc_RNA (1)...(19): siRNA sense strand
gcuuuaucuaucagggaaa

SEQ ID NO: 2257634 - RNA, 19 nt, Homo sapiens
  misc_RNA (1)...(19): siRNA sense strand
gcgcaaaccugaacggaag

SEQ ID NO: 2257635 - RNA, 19 nt, Homo sapiens
  misc_RNA (1)...(19): siRNA sense strand
ggagcaugauugagcggau

SEQ ID NO: 2257636 - RNA, 19 nt, Homo sapiens
  misc_RNA (1)...(19): siRNA sense strand
aggucacgucugugggaaa

SEQ ID NO: 2257637 - RNA, 19 nt, Homo sapiens
  misc_RNA (1)...(19): siRNA sense strand
aguaagagcccuaagacca

SEQ ID NO: 2257638 - RNA, 19 nt, Homo sapiens
  misc_RNA (1)...(19): siRNA sense strand
ccuucaugcgccuggauaa

SEQ ID NO: 2257639 - RNA, 19 nt, Homo sapiens
  misc_RNA (1)...(19): siRNA sense strand
cgauaauagcaacaaucaa

SEQ ID NO: 2257640 - RNA, 19 nt, Homo sapiens
  misc_RNA (1)...(19): siRNA sense strand
ccggaagaggaaagagcuu

SEQ ID NO: 2257641 - RNA, 19 nt, Homo sapiens
  misc_RNA (1)...(19): siRNA sense strand
aagaaguccggaagaggaa

SEQ ID NO: 2257642 - RNA, 19 nt, Homo sapiens
  misc_RNA (1)...(19): siRNA sense strand
caggaaugacaaucacaaa

SEQ ID NO: 2257643 - RNA, 19 nt, Homo sapiens
  misc_RNA (1)...(19): siRNA sense strand
cggaacacagugaggaguu

SEQ ID NO: 2257644 - RNA, 19 nt, Homo sapiens
  misc_RNA (1)...(19): siRNA sense strand
aagcuugaggacagugaaa

SEQ ID NO: 2257645 - RNA, 19 nt, Homo sapiens
  misc_RNA (1)...(19): siRNA sense strand
acauuaaaacucugggcaa

SEQ ID NO: 2257646 - RNA, 19 nt, Homo sapiens
  misc_RNA (1)...(19): siRNA sense strand
aggcaaacacucaauucaa

SEQ ID NO: 2257647 - RNA, 19 nt, Homo sapiens
  misc_RNA (1)...(19): siRNA sense strand
auguggugcuacagaauau

SEQ ID NO: 2257648 - RNA, 19 nt, Homo sapiens
  misc_RNA (1)...(19): siRNA sense strand
gcuugaggacagugaaaau

SEQ ID NO: 2257649 - RNA, 19 nt, Homo sapiens
  misc_RNA (1)...(19): siRNA sense strand
cauacagauagacaagaua

SEQ ID NO: 2257650 - RNA, 19 nt, Homo sapiens
  misc_RNA (1)...(19): siRNA sense strand
ccaaguugcccgaagcuca

SEQ ID NO: 2257651 - RNA, 19 nt, Homo sapiens
  misc_RNA (1)...(19): siRNA sense strand
cagaagcaaacgaagguca

SEQ ID NO: 2257652 - RNA, 19 nt, Homo sapiens
  misc_RNA (1)...(19): siRNA sense strand
caaucaacugguaguaaga

SEQ ID NO: 2257653 - RNA, 19 nt, Homo sapiens
  misc_RNA (1)...(19): siRNA sense strand
ccaugucacccguguggaa

SEQ ID NO: 2257654 - RNA, 19 nt, Homo sapiens
  misc_RNA (1)...(19): siRNA sense strand
auuacaauguggugcuaca

SEQ ID NO: 2257655 - RNA, 19 nt, Homo sapiens
  misc_RNA (1)...(19): siRNA sense strand
auauuagugucgugcaaca

SEQ ID NO: 2257656 - RNA, 19 nt, Homo sapiens
  misc_RNA (1)...(19): siRNA sense strand
cuucaugcgccuggauaaa

SEQ ID NO: 2257657 - RNA, 19 nt, Homo sapiens
  misc_RNA (1)...(19): siRNA sense strand
cagauagacaagauauuca

SEQ ID NO: 2257658 - RNA, 19 nt, Homo sapiens
  misc_RNA (1)...(19): siRNA sense strand
caauguggugcuacagaau

SEQ ID NO: 2257659 - RNA, 19 nt, Homo sapiens
  misc_RNA (1)...(19): siRNA sense strand
cagaccagugagaaguuaa

SEQ ID NO: 2257660 - RNA, 19 nt, Homo sapiens
  misc_RNA (1)...(19): siRNA sense strand
ugacaaucacaaagcuuga

SEQ ID NO: 2257661 - RNA, 19 nt, Homo sapiens
  misc_RNA (1)...(19): siRNA sense strand
acuacgugcgcgaggucaa

SEQ ID NO: 2257662 - RNA, 19 nt, Homo sapiens
  misc_RNA (1)...(19): siRNA sense strand
caagaaguccggaagagga

SEQ ID NO: 2257663 - RNA, 19 nt, Homo sapiens
  misc_RNA (1)...(19): siRNA sense strand
ucacaaagcuugaggacag

SEQ ID NO: 2257664 - RNA, 19 nt, Homo sapiens
  misc_RNA (1)...(19): siRNA sense strand
gcuuuaucuaucagggaaa

SEQ ID NO: 2257665 - RNA, 19 nt, Homo sapiens
  misc_RNA (1)...(19): siRNA sense strand
gcgcaaaccugaacggaag

SEQ ID NO: 2257666 - RNA, 19 nt, Homo sapiens
  misc_RNA (1)...(19): siRNA sense strand
ggagcaugauugagcggau

SEQ ID NO: 2257667 - RNA, 19 nt, Homo sapiens
  misc_RNA (1)...(19): siRNA sense strand
aggucacgucugugggaaa

SEQ ID NO: 2257668 - RNA, 19 nt, Homo sapiens
  misc_RNA (1)...(19): siRNA sense strand
aguaagagcccuaagacca

SEQ ID NO: 2257669 - RNA, 19 nt, Homo sapiens
  misc_RNA (1)...(19): siRNA sense strand
cgauaauagcaacaaucaa

SEQ ID NO: 2257670 - RNA, 19 nt, Homo sapiens
  misc_RNA (1)...(19): siRNA sense strand
ccuucaugcgccuggauaa

SEQ ID NO: 2257671 - RNA, 19 nt, Homo sapiens
  misc_RNA (1)...(19): siRNA sense strand
ccggaagaggaaagagcuu

SEQ ID NO: 2257672 - RNA, 19 nt, Homo sapiens
  misc_RNA (1)...(19): siRNA sense strand
aagaaguccggaagaggaa

SEQ ID NO: 2257673 - RNA, 19 nt, Homo sapiens
  misc_RNA (1)...(19): siRNA sense strand
caggaaugacaaucacaaa

SEQ ID NO: 2257674 - RNA, 19 nt, Homo sapiens
  misc_RNA (1)...(19): siRNA sense strand
cggaacacagugaggaguu

SEQ ID NO: 2257675 - RNA, 19 nt, Homo sapiens
  misc_RNA (1)...(19): siRNA sense strand
aagcuugaggacagugaaa

SEQ ID NO: 2257676 - RNA, 19 nt, Homo sapiens
  misc_RNA (1)...(19): siRNA sense strand
acauuaaaacucugggcaa

SEQ ID NO: 2257677 - RNA, 19 nt, Homo sapiens
  misc_RNA (1)...(19): siRNA sense strand
aggcaaacacucaauucaa

SEQ ID NO: 2257678 - RNA, 19 nt, Homo sapiens
  misc_RNA (1)...(19): siRNA sense strand
auguggugcuacagaauau

SEQ ID NO: 2257679 - RNA, 19 nt, Homo sapiens
  misc_RNA (1)...(19): siRNA sense strand
gcuugaggacagugaaaau

SEQ ID NO: 2257680 - RNA, 19 nt, Homo sapiens
  misc_RNA (1)...(19): siRNA sense strand
aguuuggacaugaccgaua

SEQ ID NO: 2257681 - RNA, 19 nt, Homo sapiens
  misc_RNA (1)...(19): siRNA sense strand
cauacagauagacaagaua

SEQ ID NO: 2257682 - RNA, 19 nt, Homo sapiens
  misc_RNA (1)...(19): siRNA sense strand
caaucaacugguaguaaga

SEQ ID NO: 2257683 - RNA, 19 nt, Homo sapiens
  misc_RNA (1)...(19): siRNA sense strand
ccaaguugcccgaagcuca

SEQ ID NO: 2257684 - RNA, 19 nt, Homo sapiens
  misc_RNA (1)...(19): siRNA sense strand
cagaagcaaacgaagguca

SEQ ID NO: 2257685 - RNA, 19 nt, Homo sapiens
  misc_RNA (1)...(19): siRNA sense strand
ccaugucacccguguggaa

SEQ ID NO: 2257686 - RNA, 19 nt, Homo sapiens
  misc_RNA (1)...(19): siRNA sense strand
auuacaauguggugcuaca

SEQ ID NO: 2257687 - RNA, 19 nt, Homo sapiens
  misc_RNA (1)...(19): siRNA sense strand
auauuagugucgugcaaca

SEQ ID NO: 2257688 - RNA, 19 nt, Homo sapiens
  misc_RNA (1)...(19): siRNA sense strand
agagcgagugccugagcaa

SEQ ID NO: 2257689 - RNA, 19 nt, Homo sapiens
  misc_RNA (1)...(19): siRNA sense strand
cuucaugcgccuggauaaa

SEQ ID NO: 2257690 - RNA, 19 nt, Homo sapiens
  misc_RNA (1)...(19): siRNA sense strand
cagauagacaagauauuca

SEQ ID NO: 2257691 - RNA, 19 nt, Homo sapiens
  misc_RNA (1)...(19): siRNA sense strand
caauguggugcuacagaau

SEQ ID NO: 2257692 - RNA, 19 nt, Homo sapiens
  misc_RNA (1)...(19): siRNA sense strand
cagaccagugagaaguuaa

SEQ ID NO: 2257693 - RNA, 19 nt, Homo sapiens
  misc_RNA (1)...(19): siRNA sense strand
ugacaaucacaaagcuuga

SEQ ID NO: 2257694 - RNA, 19 nt, Homo sapiens
  misc_RNA (1)...(19): siRNA sense strand
acuacgugcgcgaggucaa

SEQ ID NO: 2257695 - RNA, 19 nt, Homo sapiens
  misc_RNA (1)...(19): siRNA sense strand
caagaaguccggaagagga

SEQ ID NO: 2257696 - RNA, 19 nt, Homo sapiens
  misc_RNA (1)...(19): siRNA sense strand
aggaagagguagaggucaa

SEQ ID NO: 2257697 - RNA, 19 nt, Homo sapiens
  misc_RNA (1)...(19): siRNA sense strand
caggauuagucauuggaaa

SEQ ID NO: 2257698 - RNA, 19 nt, Homo sapiens
  misc_RNA (1)...(19): siRNA sense strand
ggucaaggcaacuggaaca

SEQ ID NO: 2257699 - RNA, 19 nt, Homo sapiens
  misc_RNA (1)...(19): siRNA sense strand
agaguuaauucgugaucaa

SEQ ID NO: 2257700 - RNA, 19 nt, Homo sapiens
  misc_RNA (1)...(19): siRNA sense strand
gucaagaauaggaggaaau

SEQ ID NO: 2257701 - RNA, 19 nt, Homo sapiens
  misc_RNA (1)...(19): siRNA sense strand
aggauuagucauuggaaaa

SEQ ID NO: 2257702 - RNA, 19 nt, Homo sapiens
  misc_RNA (1)...(19): siRNA sense strand
cggaaugaguaugggucaa

SEQ ID NO: 2257703 - RNA, 19 nt, Homo sapiens
  misc_RNA (1)...(19): siRNA sense strand
aggaaaugguguuagaguu

SEQ ID NO: 2257704 - RNA, 19 nt, Homo sapiens
  misc_RNA (1)...(19): siRNA sense strand
uggcauuguaauaggaaga

SEQ ID NO: 2257705 - RNA, 19 nt, Homo sapiens
  misc_RNA (1)...(19): siRNA sense strand
cgguggugguggaggaguu

SEQ ID NO: 2257706 - RNA, 19 nt, Homo sapiens
  misc_RNA (1)...(19): siRNA sense strand
agguagaggucaaggcaac

SEQ ID NO: 2257707 - RNA, 19 nt, Homo sapiens
  misc_RNA (1)...(19): siRNA sense strand
gggaaaacuggauuaauaa

SEQ ID NO: 2257708 - RNA, 19 nt, Homo sapiens
  misc_RNA (1)...(19): siRNA sense strand
gggcugaguauuauagaca

SEQ ID NO: 2257709 - RNA, 19 nt, Homo sapiens
  misc_RNA (1)...(19): siRNA sense strand
guucaacaagccaaggaaa

SEQ ID NO: 2257710 - RNA, 19 nt, Homo sapiens
  misc_RNA (1)...(19): siRNA sense strand
gcauuguaauaggaagaaa

SEQ ID NO: 2257711 - RNA, 19 nt, Homo sapiens
  misc_RNA (1)...(19): siRNA sense strand
gugcaagaauagaacuuca

SEQ ID NO: 2257712 - RNA, 19 nt, Homo sapiens
  misc_RNA (1)...(19): siRNA sense strand
aacucaaacuaauggacaa

SEQ ID NO: 2257713 - RNA, 19 nt, Homo sapiens
  misc_RNA (1)...(19): siRNA sense strand
ugacagaagaauacaaagu

SEQ ID NO: 2257714 - RNA, 19 nt, Homo sapiens
  misc_RNA (1)...(19): siRNA sense strand
aggcuugggaagaguacua

SEQ ID NO: 2257715 - RNA, 19 nt, Homo sapiens
  misc_RNA (1)...(19): siRNA sense strand
cgggaaaugcaguucaaga

SEQ ID NO: 2257716 - RNA, 19 nt, Homo sapiens
  misc_RNA (1)...(19): siRNA sense strand
uggaggugaugcagggaca

SEQ ID NO: 2257717 - RNA, 19 nt, Homo sapiens
  misc_RNA (1)...(19): siRNA sense strand
cauaauuggcagaggaggu

SEQ ID NO: 2257718 - RNA, 19 nt, Homo sapiens
  misc_RNA (1)...(19): siRNA sense strand
uguaauaggaagaaaugga

SEQ ID NO: 2257719 - RNA, 19 nt, Homo sapiens
  misc_RNA (1)...(19): siRNA sense strand
aggcaggaacggauccaaa

SEQ ID NO: 2257720 - RNA, 19 nt, Homo sapiens
  misc_RNA (1)...(19): siRNA sense strand
agaaauggagagaugauca

SEQ ID NO: 2257721 - RNA, 19 nt, Homo sapiens
  misc_RNA (1)...(19): siRNA sense strand
cugguggacuacaggaauu

SEQ ID NO: 2257722 - RNA, 19 nt, Homo sapiens
  misc_RNA (1)...(19): siRNA sense strand
uggucgaggaagagguaga

SEQ ID NO: 2257723 - RNA, 19 nt, Homo sapiens
  misc_RNA (1)...(19): siRNA sense strand
caccaaaugcagauccuaa

SEQ ID NO: 2257724 - RNA, 19 nt, Homo sapiens
  misc_RNA (1)...(19): siRNA sense strand
gacaaggagaucagcagaa

SEQ ID NO: 2257725 - RNA, 19 nt, Homo sapiens
  misc_RNA (1)...(19): siRNA sense strand
gcagcaaagcagaucugua

SEQ ID NO: 2257726 - RNA, 19 nt, Homo sapiens
  misc_RNA (1)...(19): siRNA sense strand
gggucaagaauaggaggaa

SEQ ID NO: 2257727 - RNA, 19 nt, Homo sapiens
  misc_RNA (1)...(19): siRNA sense strand
gcauucaguuuaagccaga

SEQ ID NO: 2257728 - RNA, 19 nt, Homo sapiens
  misc_RNA (1)...(19): siRNA sense strand
uuucagagaaguucggaau

SEQ ID NO: 2257729 - RNA, 19 nt, Homo sapiens
  misc_RNA (1)...(19): siRNA sense strand
uguuagaguuaauucguga

SEQ ID NO: 2257730 - RNA, 19 nt, Homo sapiens
  misc_RNA (1)...(19): siRNA sense strand
ugaguaugggucaagaaua

SEQ ID NO: 2257731 - RNA, 19 nt, Homo sapiens
  misc_RNA (1)...(19): siRNA sense strand
gauugguggcccaguaaau

SEQ ID NO: 2257732 - RNA, 19 nt, Homo sapiens
  misc_RNA (1)...(19): siRNA sense strand
ucacuauuaucaacagcaa

SEQ ID NO: 2257733 - RNA, 19 nt, Homo sapiens
  misc_RNA (1)...(19): siRNA sense strand
acaaauaacaggaccucca

SEQ ID NO: 2257734 - RNA, 19 nt, Homo sapiens
  misc_RNA (1)...(19): siRNA sense strand
agaaaagauugguggccca

SEQ ID NO: 2257735 - RNA, 19 nt, Homo sapiens
  misc_RNA (1)...(19): siRNA sense strand
uguaaugacagaagaauac

SEQ ID NO: 2257736 - RNA, 19 nt, Homo sapiens
  misc_RNA (1)...(19): siRNA sense strand
gaaucuguccagucagcaa

SEQ ID NO: 2257737 - RNA, 19 nt, Homo sapiens
  misc_RNA (1)...(19): siRNA sense strand
gaggaaaugaagggauaga

SEQ ID NO: 2257738 - RNA, 19 nt, Homo sapiens
  misc_RNA (1)...(19): siRNA sense strand
ucggcaacucauagaagaa

SEQ ID NO: 2257739 - RNA, 19 nt, Homo sapiens
  misc_RNA (1)...(19): siRNA sense strand
ggacaaggagaucagcaga

SEQ ID NO: 2257740 - RNA, 19 nt, Homo sapiens
  misc_RNA (1)...(19): siRNA sense strand
gcugaguauuauagacaac

SEQ ID NO: 2257741 - RNA, 19 nt, Homo sapiens
  misc_RNA (1)...(19): siRNA sense strand
cuguaguaauggagaaaga

SEQ ID NO: 2257742 - RNA, 19 nt, Homo sapiens
  misc_RNA (1)...(19): siRNA sense strand
uuggaaaccucaaggaaaa

SEQ ID NO: 2257743 - RNA, 19 nt, Homo sapiens
  misc_RNA (1)...(19): siRNA sense strand
agccacaacacuugagaaa

SEQ ID NO: 2257744 - RNA, 19 nt, Homo sapiens
  misc_RNA (1)...(19): siRNA sense strand
ucagaauggagaauggaaa

SEQ ID NO: 2257745 - RNA, 19 nt, Homo sapiens
  misc_RNA (1)...(19): siRNA sense strand
ccgugggauuucagggaau

SEQ ID NO: 2257746 - RNA, 19 nt, Homo sapiens
  misc_RNA (1)...(19): siRNA sense strand
gggaauuugaaguagaaaa

SEQ ID NO: 2257747 - RNA, 19 nt, Homo sapiens
  misc_RNA (1)...(19): siRNA sense strand
cagaauggagaauggaaaa

SEQ ID NO: 2257748 - RNA, 19 nt, Homo sapiens
  misc_RNA (1)...(19): siRNA sense strand
guguaaugaagaacaggaa

SEQ ID NO: 2257749 - RNA, 19 nt, Homo sapiens
  misc_RNA (1)...(19): siRNA sense strand
auuggaaaccucaaggaaa

SEQ ID NO: 2257750 - RNA, 19 nt, Homo sapiens
  misc_RNA (1)...(19): siRNA sense strand
ugaacaugccagaagauau

SEQ ID NO: 2257751 - RNA, 19 nt, Homo sapiens
  misc_RNA (1)...(19): siRNA sense strand
ucucauggucggucauaaa

SEQ ID NO: 2257752 - RNA, 19 nt, Homo sapiens
  misc_RNA (1)...(19): siRNA sense strand
uugaaaaugcuguggacua

SEQ ID NO: 2257753 - RNA, 19 nt, Homo sapiens
  misc_RNA (1)...(19): siRNA sense strand
ccagaagauaucucagcaa

SEQ ID NO: 2257754 - RNA, 19 nt, Homo sapiens
  misc_RNA (1)...(19): siRNA sense strand
cuaugaugcucuagauaac

SEQ ID NO: 2257755 - RNA, 19 nt, Homo sapiens
  misc_RNA (1)...(19): siRNA sense strand
ugacagcacaagaagaaaa

SEQ ID NO: 2257756 - RNA, 19 nt, Homo sapiens
  misc_RNA (1)...(19): siRNA sense strand
ggucuuaggcgagaugaua

SEQ ID NO: 2257757 - RNA, 19 nt, Homo sapiens
  misc_RNA (1)...(19): siRNA sense strand
cuguagauggcuugcaaga

SEQ ID NO: 2257758 - RNA, 19 nt, Homo sapiens
  misc_RNA (1)...(19): siRNA sense strand
ggacgcuuguagagcugaa

SEQ ID NO: 2257759 - RNA, 19 nt, Homo sapiens
  misc_RNA (1)...(19): siRNA sense strand
agcagacauuaaagacaaa

SEQ ID NO: 2257760 - RNA, 19 nt, Homo sapiens
  misc_RNA (1)...(19): siRNA sense strand
cgcuuguagagcugaauaa

SEQ ID NO: 2257761 - RNA, 19 nt, Homo sapiens
  misc_RNA (1)...(19): siRNA sense strand
ggagagugagcacgaccaa

SEQ ID NO: 2257762 - RNA, 19 nt, Homo sapiens
  misc_RNA (1)...(19): siRNA sense strand
gggcaugucugcagaaaac

SEQ ID NO: 2257763 - RNA, 19 nt, Homo sapiens
  misc_RNA (1)...(19): siRNA sense strand
cgguggagagugagcacga

SEQ ID NO: 2257764 - RNA, 19 nt, Homo sapiens
  misc_RNA (1)...(19): siRNA sense strand
ggguaaucauguugccaaa

SEQ ID NO: 2257765 - RNA, 19 nt, Homo sapiens
  misc_RNA (1)...(19): siRNA sense strand
gcggagaagaugcuggaaa

SEQ ID NO: 2257766 - RNA, 19 nt, Homo sapiens
  misc_RNA (1)...(19): siRNA sense strand
cggcaagaaccgagcugaa

SEQ ID NO: 2257767 - RNA, 19 nt, Homo sapiens
  misc_RNA (1)...(19): siRNA sense strand
gggcaagaggcuuuagaau

SEQ ID NO: 2257768 - RNA, 19 nt, Homo sapiens
  misc_RNA (1)...(19): siRNA sense strand
uaaaggaauuuguggccaa

SEQ ID NO: 2257769 - RNA, 19 nt, Homo sapiens
  misc_RNA (1)...(19): siRNA sense strand
cuguaauggugaaagauga

SEQ ID NO: 2257770 - RNA, 19 nt, Homo sapiens
  misc_RNA (1)...(19): siRNA sense strand
cggagaagaugcuggaaac

SEQ ID NO: 2257771 - RNA, 19 nt, Homo sapiens
  misc_RNA (1)...(19): siRNA sense strand
cuguaggacauauggacua

SEQ ID NO: 2257772 - RNA, 19 nt, Homo sapiens
  misc_RNA (1)...(19): siRNA sense strand
gauugugaucauagcuaaa

SEQ ID NO: 2257773 - RNA, 19 nt, Homo sapiens
  misc_RNA (1)...(19): siRNA sense strand
gauuuggaucauauggaaa

SEQ ID NO: 2257774 - RNA, 19 nt, Homo sapiens
  misc_RNA (1)...(19): siRNA sense strand
cuccagaagaugaagagaa

SEQ ID NO: 2257775 - RNA, 19 nt, Homo sapiens
  misc_RNA (1)...(19): siRNA sense strand
cagucauacuccauggauu

SEQ ID NO: 2257776 - RNA, 19 nt, Homo sapiens
  misc_RNA (1)...(19): siRNA sense strand
ggaagagaguccagaaaac

SEQ ID NO: 2257777 - RNA, 19 nt, Homo sapiens
  misc_RNA (1)...(19): siRNA sense strand
ccuucaggaauaugguuua

SEQ ID NO: 2257778 - RNA, 19 nt, Homo sapiens
  misc_RNA (1)...(19): siRNA sense strand
aaugaugaucgcugcauaa

SEQ ID NO: 2257779 - RNA, 19 nt, Homo sapiens
  misc_RNA (1)...(19): siRNA sense strand
gugguauagugaaacaaau

SEQ ID NO: 2257780 - RNA, 19 nt, Homo sapiens
  misc_RNA (1)...(19): siRNA sense strand
auauggagcugcugagcca

SEQ ID NO: 2257781 - RNA, 19 nt, Homo sapiens
  misc_RNA (1)...(19): siRNA sense strand
gcucaagaggucaucaaaa

SEQ ID NO: 2257782 - RNA, 19 nt, Homo sapiens
  misc_RNA (1)...(19): siRNA sense strand
aauaaaugcaacagccaca

SEQ ID NO: 2257783 - RNA, 19 nt, Homo sapiens
  misc_RNA (1)...(19): siRNA sense strand
uauuuagcacagugguaua

SEQ ID NO: 2257784 - RNA, 19 nt, Homo sapiens
  misc_RNA (1)...(19): siRNA sense strand
guugaagaagauauaggaa

SEQ ID NO: 2257785 - RNA, 19 nt, Homo sapiens
  misc_RNA (1)...(19): siRNA sense strand
auaggaaaguugaagucuu

SEQ ID NO: 2257786 - RNA, 19 nt, Homo sapiens
  misc_RNA (1)...(19): siRNA sense strand
guuuaucuguaauggugaa

SEQ ID NO: 2257787 - RNA, 19 nt, Homo sapiens
  misc_RNA (1)...(19): siRNA sense strand
cuccauggauugugaucau

SEQ ID NO: 2257788 - RNA, 19 nt, Homo sapiens
  misc_RNA (1)...(19): siRNA sense strand
agaauaugguuuggauaca

SEQ ID NO: 2257789 - RNA, 19 nt, Homo sapiens
  misc_RNA (1)...(19): siRNA sense strand
caaagaagcaguaucggca

SEQ ID NO: 2257790 - RNA, 19 nt, Homo sapiens
  misc_RNA (1)...(19): siRNA sense strand
uagcugaagaauaugguuu

SEQ ID NO: 2257791 - RNA, 19 nt, Homo sapiens
  misc_RNA (1)...(19): siRNA sense strand
auaaacaacaggguagaua

SEQ ID NO: 2257792 - RNA, 19 nt, Homo sapiens
  misc_RNA (1)...(19): siRNA sense strand
aaaucaggucagcggagaa

SEQ ID NO: 2257793 - RNA, 19 nt, Homo sapiens
  misc_RNA (1)...(19): siRNA sense strand
ggagaagaugcuggaaaca

SEQ ID NO: 2257794 - RNA, 19 nt, Homo sapiens
  misc_RNA (1)...(19): siRNA sense strand
cugaagcugccauggaauu

SEQ ID NO: 2257795 - RNA, 19 nt, Homo sapiens
  misc_RNA (1)...(19): siRNA sense strand
aauauuuagcacaguggua

SEQ ID NO: 2257796 - RNA, 19 nt, Homo sapiens
  misc_RNA (1)...(19): siRNA sense strand
gguagauauccaggaguau

SEQ ID NO: 2257797 - RNA, 19 nt, Homo sapiens
  misc_RNA (1)...(19): siRNA sense strand
agccacaggaacugaaauu

SEQ ID NO: 2257798 - RNA, 19 nt, Homo sapiens
  misc_RNA (1)...(19): siRNA sense strand
cccaagcaguauugaagau

SEQ ID NO: 2257799 - RNA, 19 nt, Homo sapiens
  misc_RNA (1)...(19): siRNA sense strand
gccaaagagggucaaggaa

SEQ ID NO: 2257800 - RNA, 19 nt, Homo sapiens
  misc_RNA (1)...(19): siRNA sense strand
aaguugaagucuugucuca

SEQ ID NO: 2257801 - RNA, 19 nt, Homo sapiens
  misc_RNA (1)...(19): siRNA sense strand
caaaagaaguggagccaga

SEQ ID NO: 2257802 - RNA, 19 nt, Homo sapiens
  misc_RNA (1)...(19): siRNA sense strand
gagaagauauaucaaggaa

SEQ ID NO: 2257803 - RNA, 19 nt, Homo sapiens
  misc_RNA (1)...(19): siRNA sense strand
gggcaggcucagaaagaga

SEQ ID NO: 2257804 - RNA, 19 nt, Homo sapiens
  misc_RNA (1)...(19): siRNA sense strand
cucuagaagaugaagacaa

SEQ ID NO: 2257805 - RNA, 19 nt, Homo sapiens
  misc_RNA (1)...(19): siRNA sense strand
acuaugagcaagaagaaaa

SEQ ID NO: 2257806 - RNA, 19 nt, Homo sapiens
  misc_RNA (1)...(19): siRNA sense strand
acuuguaaucaaaggaaga

SEQ ID NO: 2257807 - RNA, 19 nt, Homo sapiens
  misc_RNA (1)...(19): siRNA sense strand
ugacauuaugcuuggcaau

SEQ ID NO: 2257808 - RNA, 19 nt, Homo sapiens
  misc_RNA (1)...(19): siRNA sense strand
aagaagaagaagaagccuu

SEQ ID NO: 2257809 - RNA, 19 nt, Homo sapiens
  misc_RNA (1)...(19): siRNA sense strand
uucaacaucaugagggaaa

SEQ ID NO: 2257810 - RNA, 19 nt, Homo sapiens
  misc_RNA (1)...(19): siRNA sense strand
cugaagaagguguaaagga

SEQ ID NO: 2257811 - RNA, 19 nt, Homo sapiens
  misc_RNA (1)...(19): siRNA sense strand
cccagaugaggaugaaaua

SEQ ID NO: 2257812 - RNA, 19 nt, Homo sapiens
  misc_RNA (1)...(19): siRNA sense strand
agggaaaagaauccagaua

SEQ ID NO: 2257813 - RNA, 19 nt, Homo sapiens
  misc_RNA (1)...(19): siRNA sense strand
gugcgaaacuugucauucu

SEQ ID NO: 2257814 - RNA, 19 nt, Homo sapiens
  misc_RNA (1)...(19): siRNA sense strand
ccaacugaggacaaggauu

SEQ ID NO: 2257815 - RNA, 19 nt, Homo sapiens
  misc_RNA (1)...(19): siRNA sense strand
augaagaggacacuaggaa

SEQ ID NO: 2257816 - RNA, 19 nt, Homo sapiens
  misc_RNA (1)...(19): siRNA sense strand
acaaggauuuggaagcuga

SEQ ID NO: 2257817 - RNA, 19 nt, Homo sapiens
  misc_RNA (1)...(19): siRNA sense strand
gaauaugucacuugucaca

SEQ ID NO: 2257818 - RNA, 19 nt, Homo sapiens
  misc_RNA (1)...(19): siRNA sense strand
ccuacuaugagcaagaaga

SEQ ID NO: 2257819 - RNA, 19 nt, Homo sapiens
  misc_RNA (1)...(19): siRNA sense strand
cauacgaggagcugcugaa

SEQ ID NO: 2257820 - RNA, 19 nt, Homo sapiens
  misc_RNA (1)...(19): siRNA sense strand
agaggaugaccuugacauu

SEQ ID NO: 2257821 - RNA, 19 nt, Homo sapiens
  misc_RNA (1)...(19): siRNA sense strand
cagaugaggaugaaauacu

SEQ ID NO: 2257822 - RNA, 19 nt, Homo sapiens
  misc_RNA (1)...(19): siRNA sense strand
aggaauaugucacuuguca

SEQ ID NO: 2257823 - RNA, 19 nt, Homo sapiens
  misc_RNA (1)...(19): siRNA sense strand
ggauacccaaacagaggaa

SEQ ID NO: 2257824 - RNA, 19 nt, Homo sapiens
  misc_RNA (1)...(19): siRNA sense strand
cgaguaggaaccaagaaaa

SEQ ID NO: 2257825 - RNA, 19 nt, Homo sapiens
  misc_RNA (1)...(19): siRNA sense strand
ggauaaagauauaggguca

SEQ ID NO: 2257826 - RNA, 19 nt, Homo sapiens
  misc_RNA (1)...(19): siRNA sense strand
gcuaaugguucaucggaca

SEQ ID NO: 2257827 - RNA, 19 nt, Homo sapiens
  misc_RNA (1)...(19): siRNA sense strand
agauauagggucaaaguca

SEQ ID NO: 2257828 - RNA, 19 nt, Homo sapiens
  misc_RNA (1)...(19): siRNA sense strand
ugugaaacagugugagauu

SEQ ID NO: 2257829 - RNA, 19 nt, Homo sapiens
  misc_RNA (1)...(19): siRNA sense strand
cuauauaaugggaggaugu

SEQ ID NO: 2257830 - RNA, 19 nt, Homo sapiens
  misc_RNA (1)...(19): siRNA sense strand
ugaauguacccuuggacaa

SEQ ID NO: 2257831 - RNA, 19 nt, Homo sapiens
  misc_RNA (1)...(19): siRNA sense strand
gcgaaguggccaucagaga

SEQ ID NO: 2257832 - RNA, 19 nt, Homo sapiens
  misc_RNA (1)...(19): siRNA sense strand
ccacgaaacaacagaagca

SEQ ID NO: 2257833 - RNA, 19 nt, Homo sapiens
  misc_RNA (1)...(19): siRNA sense strand
uugaaauggaagccagaaa

SEQ ID NO: 2257834 - RNA, 19 nt, Homo sapiens
  misc_RNA (1)...(19): siRNA sense strand
gguaugagguugagcgcac

SEQ ID NO: 2257835 - RNA, 19 nt, Homo sapiens
  misc_RNA (1)...(19): siRNA sense strand
agguguuaucagugugaaa

SEQ ID NO: 2257836 - RNA, 19 nt, Homo sapiens
  misc_RNA (1)...(19): siRNA sense strand
gugugagauuacaguagaa

SEQ ID NO: 2257837 - RNA, 19 nt, Homo sapiens
  misc_RNA (1)...(19): siRNA sense strand
caacaaaacuauugagcug

SEQ ID NO: 2257838 - RNA, 19 nt, Homo sapiens
  misc_RNA (1)...(19): siRNA sense strand
ggguuuaugacaucgacaa

SEQ ID NO: 2257839 - RNA, 19 nt, Homo sapiens
  misc_RNA (1)...(19): siRNA sense strand
uuggaaagucagacccaua

SEQ ID NO: 2257840 - RNA, 19 nt, Homo sapiens
  misc_RNA (1)...(19): siRNA sense strand
guuacggagauauggacaa

SEQ ID NO: 2257841 - RNA, 19 nt, Homo sapiens
  misc_RNA (1)...(19): siRNA sense strand
agguggaguguuaugauua

SEQ ID NO: 2257842 - RNA, 19 nt, Homo sapiens
  misc_RNA (1)...(19): siRNA sense strand
aggauuaagaauugcuuga

SEQ ID NO: 2257843 - RNA, 19 nt, Homo sapiens
  misc_RNA (1)...(19): siRNA sense strand
gauaaagauauagggucaa

SEQ ID NO: 2257844 - RNA, 19 nt, Homo sapiens
  misc_RNA (1)...(19): siRNA sense strand
cacagaaaggauuaagaau

SEQ ID NO: 2257845 - RNA, 19 nt, Homo sapiens
  misc_RNA (1)...(19): siRNA sense strand
cuguugaauuugaaugcau

SEQ ID NO: 2257846 - RNA, 19 nt, Homo sapiens
  misc_RNA (1)...(19): siRNA sense strand
cauccaaucccuacugcaa

SEQ ID NO: 2257847 - RNA, 19 nt, Homo sapiens
  misc_RNA (1)...(19): siRNA sense strand
gauaaaacucuauggacca

SEQ ID NO: 2257848 - RNA, 19 nt, Homo sapiens
  misc_RNA (1)...(19): siRNA sense strand
ucacuguguuacggagaua

SEQ ID NO: 2257849 - RNA, 19 nt, Homo sapiens
  misc_RNA (1)...(19): siRNA sense strand
ucugauggaaacuggcuaa

SEQ ID NO: 2257850 - RNA, 19 nt, Homo sapiens
  misc_RNA (1)...(19): siRNA sense strand
ugaaaccagacaagcuaua

SEQ ID NO: 2257851 - RNA, 19 nt, Homo sapiens
  misc_RNA (1)...(19): siRNA sense strand
ccaucauaauuguuggagu

SEQ ID NO: 2257852 - RNA, 19 nt, Homo sapiens
  misc_RNA (1)...(19): siRNA sense strand
gaauguuuccugugccaau

SEQ ID NO: 2257853 - RNA, 19 nt, Homo sapiens
  misc_RNA (1)...(19): siRNA sense strand
agugugaaacagugugaga

SEQ ID NO: 2257854 - RNA, 19 nt, Homo sapiens
  misc_RNA (1)...(19): siRNA sense strand
acgcaacagcagacagcuu

SEQ ID NO: 2257855 - RNA, 19 nt, Homo sapiens
  misc_RNA (1)...(19): siRNA sense strand
uggaguuucuggaugguga

SEQ ID NO: 2257856 - RNA, 19 nt, Homo sapiens
  misc_RNA (1)...(19): siRNA sense strand
guuuccagcaagaagcuaa

SEQ ID NO: 2257857 - RNA, 19 nt, Homo sapiens
  misc_RNA (1)...(19): siRNA sense strand
uuucagaccaccaugacaa

SEQ ID NO: 2257858 - RNA, 19 nt, Homo sapiens
  misc_RNA (1)...(19): siRNA sense strand
cagcaagcaauuagggaga

SEQ ID NO: 2257859 - RNA, 19 nt, Homo sapiens
  misc_RNA (1)...(19): siRNA sense strand
cgacaaggagugugcguca

SEQ ID NO: 2257860 - RNA, 19 nt, Homo sapiens
  misc_RNA (1)...(19): siRNA sense strand
gaaauaaggcacagaccca

SEQ ID NO: 2257861 - RNA, 19 nt, Homo sapiens
  misc_RNA (1)...(19): siRNA sense strand
agggagaaguacaaggcuu

SEQ ID NO: 2257862 - RNA, 19 nt, Homo sapiens
  misc_RNA (1)...(19): siRNA sense strand
aagcaauuagggagaagua

SEQ ID NO: 2257863 - RNA, 19 nt, Homo sapiens
  misc_RNA (1)...(19): siRNA sense strand
gugauaaaugugacugaau

SEQ ID NO: 2257864 - RNA, 19 nt, Homo sapiens
  misc_RNA (1)...(19): siRNA sense strand
gggcaguacaggaggaccu

SEQ ID NO: 2257865 - RNA, 19 nt, Homo sapiens
  misc_RNA (1)...(19): siRNA sense strand
gcaaaugggcaguacagga

SEQ ID NO: 2257866 - RNA, 19 nt, Homo sapiens
  misc_RNA (1)...(19): siRNA sense strand
ccguggagucugaagcaau

SEQ ID NO: 2257867 - RNA, 19 nt, Homo sapiens
  misc_RNA (1)...(19): siRNA sense strand
augaagaagcagccagaca

SEQ ID NO: 2257868 - RNA, 19 nt, Homo sapiens
  misc_RNA (1)...(19): siRNA sense strand
gaauauaaacuucgagcag

SEQ ID NO: 2257869 - RNA, 19 nt, Homo sapiens
  misc_RNA (1)...(19): siRNA sense strand
cuucaaaguaccugugugu

SEQ ID NO: 2257870 - RNA, 19 nt, Homo sapiens
  misc_RNA (1)...(19): siRNA sense strand
aagcacacuacaugaagaa

SEQ ID NO: 2257871 - RNA, 19 nt, Homo sapiens
  misc_RNA (1)...(19): siRNA sense strand
gggcuggggagaagaguau

SEQ ID NO: 2257872 - RNA, 19 nt, Homo sapiens
  misc_RNA (1)...(19): siRNA sense strand
agagacagcugcucgguca

SEQ ID NO: 2257873 - RNA, 19 nt, Homo sapiens
  misc_RNA (1)...(19): siRNA sense strand
gcacagacccaaagcacac

SEQ ID NO: 2257874 - RNA, 19 nt, Homo sapiens
  misc_RNA (1)...(19): siRNA sense strand
gaaagaaagcacucccuga

SEQ ID NO: 2257875 - RNA, 19 nt, Homo sapiens
  misc_RNA (1)...(19): siRNA sense strand
acaugaagaagcagccaga

SEQ ID NO: 2257876 - RNA, 19 nt, Homo sapiens
  misc_RNA (1)...(19): siRNA sense strand
ccugagugagcuucauaaa

SEQ ID NO: 2257877 - RNA, 19 nt, Homo sapiens
  misc_RNA (1)...(19): siRNA sense strand
ggacugaacgggugcggaa

SEQ ID NO: 2257878 - RNA, 19 nt, Homo sapiens
  misc_RNA (1)...(19): siRNA sense strand
gcucaggaauuaaaggaca

SEQ ID NO: 2257879 - RNA, 19 nt, Homo sapiens
  misc_RNA (1)...(19): siRNA sense strand
ugucaagauuugucgggua

SEQ ID NO: 2257880 - RNA, 19 nt, Homo sapiens
  misc_RNA (1)...(19): siRNA sense strand
cucaggaauuaaaggacaa

SEQ ID NO: 2257881 - RNA, 19 nt, Homo sapiens
  misc_RNA (1)...(19): siRNA sense strand
gugcaggcauccagggcau

SEQ ID NO: 2257882 - RNA, 19 nt, Homo sapiens
  misc_RNA (1)...(19): siRNA sense strand
cugaggucaucaagaacaa

SEQ ID NO: 2257883 - RNA, 19 nt, Homo sapiens
  misc_RNA (1)...(19): siRNA sense strand
gugcugacuuugaggccau

SEQ ID NO: 2257884 - RNA, 19 nt, Homo sapiens
  misc_RNA (1)...(19): siRNA sense strand
ccugagaagcagcagaaaa

SEQ ID NO: 2257885 - RNA, 19 nt, Homo sapiens
  misc_RNA (1)...(19): siRNA sense strand
cuacaagaacucuggaacu

SEQ ID NO: 2257886 - RNA, 19 nt, Homo sapiens
  misc_RNA (1)...(19): siRNA sense strand
ggguagaaacagaguacuc

SEQ ID NO: 2257887 - RNA, 19 nt, Homo sapiens
  misc_RNA (1)...(19): siRNA sense strand
cuacacuaccugaguccaa

SEQ ID NO: 2257888 - RNA, 19 nt, Homo sapiens
  misc_RNA (1)...(19): siRNA sense strand
aggccagaaaccuagauaa

SEQ ID NO: 2257889 - RNA, 19 nt, Homo sapiens
  misc_RNA (1)...(19): siRNA sense strand
aagaacaaccugaacccua

SEQ ID NO: 2257890 - RNA, 19 nt, Homo sapiens
  misc_RNA (1)...(19): siRNA sense strand
cggucucagcucaggaauu

SEQ ID NO: 2257891 - RNA, 19 nt, Homo sapiens
  misc_RNA (1)...(19): siRNA sense strand
uggagguagaggccagaaa

SEQ ID NO: 2257892 - RNA, 19 nt, Homo sapiens
  misc_RNA (1)...(19): siRNA sense strand
cagugaucauugugggugu

SEQ ID NO: 2257893 - RNA, 19 nt, Homo sapiens
  misc_RNA (1)...(19): siRNA sense strand
ccauggagguagaggccag

SEQ ID NO: 2257894 - RNA, 19 nt, Homo sapiens
  misc_RNA (1)...(19): siRNA sense strand
ggacugaacgggugcggaa

SEQ ID NO: 2257895 - RNA, 19 nt, Homo sapiens
  misc_RNA (1)...(19): siRNA sense strand
gcucaggaauuaaaggaca

SEQ ID NO: 2257896 - RNA, 19 nt, Homo sapiens
  misc_RNA (1)...(19): siRNA sense strand
ugucaagauuugucgggua

SEQ ID NO: 2257897 - RNA, 19 nt, Homo sapiens
  misc_RNA (1)...(19): siRNA sense strand
cucaggaauuaaaggacaa

SEQ ID NO: 2257898 - RNA, 19 nt, Homo sapiens
  misc_RNA (1)...(19): siRNA sense strand
gugcaggcauccagggcau

SEQ ID NO: 2257899 - RNA, 19 nt, Homo sapiens
  misc_RNA (1)...(19): siRNA sense strand
cugaggucaucaagaacaa

SEQ ID NO: 2257900 - RNA, 19 nt, Homo sapiens
  misc_RNA (1)...(19): siRNA sense strand
gugcugacuuugaggccau

SEQ ID NO: 2257901 - RNA, 19 nt, Homo sapiens
  misc_RNA (1)...(19): siRNA sense strand
ccugagaagcagcagaaaa

SEQ ID NO: 2257902 - RNA, 19 nt, Homo sapiens
  misc_RNA (1)...(19): siRNA sense strand
cuacaagaacucuggaacu

SEQ ID NO: 2257903 - RNA, 19 nt, Homo sapiens
  misc_RNA (1)...(19): siRNA sense strand
ggguagaaacagaguacuc

SEQ ID NO: 2257904 - RNA, 19 nt, Homo sapiens
  misc_RNA (1)...(19): siRNA sense strand
cuacacuaccugaguccaa

SEQ ID NO: 2257905 - RNA, 19 nt, Homo sapiens
  misc_RNA (1)...(19): siRNA sense strand
aggccagaaaccuagauaa

SEQ ID NO: 2257906 - RNA, 19 nt, Homo sapiens
  misc_RNA (1)...(19): siRNA sense strand
aagaacaaccugaacccua

SEQ ID NO: 2257907 - RNA, 19 nt, Homo sapiens
  misc_RNA (1)...(19): siRNA sense strand
cggucucagcucaggaauu

SEQ ID NO: 2257908 - RNA, 19 nt, Homo sapiens
  misc_RNA (1)...(19): siRNA sense strand
uggagguagaggccagaaa

SEQ ID NO: 2257909 - RNA, 19 nt, Homo sapiens
  misc_RNA (1)...(19): siRNA sense strand
cagugaucauugugggugu

SEQ ID NO: 2257910 - RNA, 19 nt, Homo sapiens
  misc_RNA (1)...(19): siRNA sense strand
ccauggagguagaggccag

SEQ ID NO: 2257911 - RNA, 19 nt, Homo sapiens
  misc_RNA (1)...(19): siRNA sense strand
ggacugaacgggugcggaa

SEQ ID NO: 2257912 - RNA, 19 nt, Homo sapiens
  misc_RNA (1)...(19): siRNA sense strand
gcucaggaauuaaaggaca

SEQ ID NO: 2257913 - RNA, 19 nt, Homo sapiens
  misc_RNA (1)...(19): siRNA sense strand
ugucaagauuugucgggua

SEQ ID NO: 2257914 - RNA, 19 nt, Homo sapiens
  misc_RNA (1)...(19): siRNA sense strand
cucaggaauuaaaggacaa

SEQ ID NO: 2257915 - RNA, 19 nt, Homo sapiens
  misc_RNA (1)...(19): siRNA sense strand
gugcaggcauccagggcau

SEQ ID NO: 2257916 - RNA, 19 nt, Homo sapiens
  misc_RNA (1)...(19): siRNA sense strand
cugaggucaucaagaacaa

SEQ ID NO: 2257917 - RNA, 19 nt, Homo sapiens
  misc_RNA (1)...(19): siRNA sense strand
gugcugacuuugaggccau

SEQ ID NO: 2257918 - RNA, 19 nt, Homo sapiens
  misc_RNA (1)...(19): siRNA sense strand
ccugagaagcagcagaaaa

SEQ ID NO: 2257919 - RNA, 19 nt, Homo sapiens
  misc_RNA (1)...(19): siRNA sense strand
cuacaagaacucuggaacu

SEQ ID NO: 2257920 - RNA, 19 nt, Homo sapiens
  misc_RNA (1)...(19): siRNA sense strand
ggguagaaacagaguacuc

SEQ ID NO: 2257921 - RNA, 19 nt, Homo sapiens
  misc_RNA (1)...(19): siRNA sense strand
cuacacuaccugaguccaa

SEQ ID NO: 2257922 - RNA, 19 nt, Homo sapiens
  misc_RNA (1)...(19): siRNA sense strand
aggccagaaaccuagauaa

SEQ ID NO: 2257923 - RNA, 19 nt, Homo sapiens
  misc_RNA (1)...(19): siRNA sense strand
aagaacaaccugaacccua

SEQ ID NO: 2257924 - RNA, 19 nt, Homo sapiens
  misc_RNA (1)...(19): siRNA sense strand
cggucucagcucaggaauu

SEQ ID NO: 2257925 - RNA, 19 nt, Homo sapiens
  misc_RNA (1)...(19): siRNA sense strand
uggagguagaggccagaaa

SEQ ID NO: 2257926 - RNA, 19 nt, Homo sapiens
  misc_RNA (1)...(19): siRNA sense strand
cagugaucauugugggugu

SEQ ID NO: 2257927 - RNA, 19 nt, Homo sapiens
  misc_RNA (1)...(19): siRNA sense strand
ccauggagguagaggccag

SEQ ID NO: 2257928 - RNA, 19 nt, Homo sapiens
  misc_RNA (1)...(19): siRNA sense strand
ggacugaacgggugcggaa

SEQ ID NO: 2257929 - RNA, 19 nt, Homo sapiens
  misc_RNA (1)...(19): siRNA sense strand
gcucaggaauuaaaggaca

SEQ ID NO: 2257930 - RNA, 19 nt, Homo sapiens
  misc_RNA (1)...(19): siRNA sense strand
ugucaagauuugucgggua

SEQ ID NO: 2257931 - RNA, 19 nt, Homo sapiens
  misc_RNA (1)...(19): siRNA sense strand
cucaggaauuaaaggacaa

SEQ ID NO: 2257932 - RNA, 19 nt, Homo sapiens
  misc_RNA (1)...(19): siRNA sense strand
gugcaggcauccagggcau

SEQ ID NO: 2257933 - RNA, 19 nt, Homo sapiens
  misc_RNA (1)...(19): siRNA sense strand
cugaggucaucaagaacaa

SEQ ID NO: 2257934 - RNA, 19 nt, Homo sapiens
  misc_RNA (1)...(19): siRNA sense strand
gugcugacuuugaggccau

SEQ ID NO: 2257935 - RNA, 19 nt, Homo sapiens
  misc_RNA (1)...(19): siRNA sense strand
ccugagaagcagcagaaaa

SEQ ID NO: 2257936 - RNA, 19 nt, Homo sapiens
  misc_RNA (1)...(19): siRNA sense strand
cuacaagaacucuggaacu

SEQ ID NO: 2257937 - RNA, 19 nt, Homo sapiens
  misc_RNA (1)...(19): siRNA sense strand
ggguagaaacagaguacuc

SEQ ID NO: 2257938 - RNA, 19 nt, Homo sapiens
  misc_RNA (1)...(19): siRNA sense strand
cuacacuaccugaguccaa

SEQ ID NO: 2257939 - RNA, 19 nt, Homo sapiens
  misc_RNA (1)...(19): siRNA sense strand
aggccagaaaccuagauaa

SEQ ID NO: 2257940 - RNA, 19 nt, Homo sapiens
  misc_RNA (1)...(19): siRNA sense strand
aagaacaaccugaacccua

SEQ ID NO: 2257941 - RNA, 19 nt, Homo sapiens
  misc_RNA (1)...(19): siRNA sense strand
cggucucagcucaggaauu

SEQ ID NO: 2257942 - RNA, 19 nt, Homo sapiens
  misc_RNA (1)...(19): siRNA sense strand
uggagguagaggccagaaa

SEQ ID NO: 2257943 - RNA, 19 nt, Homo sapiens
  misc_RNA (1)...(19): siRNA sense strand
cagugaucauugugggugu

SEQ ID NO: 2257944 - RNA, 19 nt, Homo sapiens
  misc_RNA (1)...(19): siRNA sense strand
ccauggagguagaggccag

SEQ ID NO: 2257945 - RNA, 19 nt, Homo sapiens
  misc_RNA (1)...(19): siRNA sense strand
ggacugaacgggugcggaa

SEQ ID NO: 2257946 - RNA, 19 nt, Homo sapiens
  misc_RNA (1)...(19): siRNA sense strand
gcucaggaauuaaaggaca

SEQ ID NO: 2257947 - RNA, 19 nt, Homo sapiens
  misc_RNA (1)...(19): siRNA sense strand
ugucaagauuugucgggua

SEQ ID NO: 2257948 - RNA, 19 nt, Homo sapiens
  misc_RNA (1)...(19): siRNA sense strand
cucaggaauuaaaggacaa

SEQ ID NO: 2257949 - RNA, 19 nt, Homo sapiens
  misc_RNA (1)...(19): siRNA sense strand
gugcaggcauccagggcau

SEQ ID NO: 2257950 - RNA, 19 nt, Homo sapiens
  misc_RNA (1)...(19): siRNA sense strand
cugaggucaucaagaacaa

SEQ ID NO: 2257951 - RNA, 19 nt, Homo sapiens
  misc_RNA (1)...(19): siRNA sense strand
gugcugacuuugaggccau

SEQ ID NO: 2257952 - RNA, 19 nt, Homo sapiens
  misc_RNA (1)...(19): siRNA sense strand
ccugagaagcagcagaaaa

SEQ ID NO: 2257953 - RNA, 19 nt, Homo sapiens
  misc_RNA (1)...(19): siRNA sense strand
cuacaagaacucuggaacu

SEQ ID NO: 2257954 - RNA, 19 nt, Homo sapiens
  misc_RNA (1)...(19): siRNA sense strand
ggguagaaacagaguacuc

SEQ ID NO: 2257955 - RNA, 19 nt, Homo sapiens
  misc_RNA (1)...(19): siRNA sense strand
cuacacuaccugaguccaa

SEQ ID NO: 2257956 - RNA, 19 nt, Homo sapiens
  misc_RNA (1)...(19): siRNA sense strand
aggccagaaaccuagauaa

SEQ ID NO: 2257957 - RNA, 19 nt, Homo sapiens
  misc_RNA (1)...(19): siRNA sense strand
aagaacaaccugaacccua

SEQ ID NO: 2257958 - RNA, 19 nt, Homo sapiens
  misc_RNA (1)...(19): siRNA sense strand
cggucucagcucaggaauu

SEQ ID NO: 2257959 - RNA, 19 nt, Homo sapiens
  misc_RNA (1)...(19): siRNA sense strand
uggagguagaggccagaaa

SEQ ID NO: 2257960 - RNA, 19 nt, Homo sapiens
  misc_RNA (1)...(19): siRNA sense strand
cagugaucauugugggugu

SEQ ID NO: 2257961 - RNA, 19 nt, Homo sapiens
  misc_RNA (1)...(19): siRNA sense strand
ccauggagguagaggccag

SEQ ID NO: 2257962 - RNA, 19 nt, Homo sapiens
  misc_RNA (1)...(19): siRNA sense strand
ggacugaacgggugcggaa

SEQ ID NO: 2257963 - RNA, 19 nt, Homo sapiens
  misc_RNA (1)...(19): siRNA sense strand
gcucaggaauuaaaggaca

SEQ ID NO: 2257964 - RNA, 19 nt, Homo sapiens
  misc_RNA (1)...(19): siRNA sense strand
ugucaagauuugucgggua

SEQ ID NO: 2257965 - RNA, 19 nt, Homo sapiens
  misc_RNA (1)...(19): siRNA sense strand
cucaggaauuaaaggacaa

SEQ ID NO: 2257966 - RNA, 19 nt, Homo sapiens
  misc_RNA (1)...(19): siRNA sense strand
gugcaggcauccagggcau

SEQ ID NO: 2257967 - RNA, 19 nt, Homo sapiens
  misc_RNA (1)...(19): siRNA sense strand
cugaggucaucaagaacaa

SEQ ID NO: 2257968 - RNA, 19 nt, Homo sapiens
  misc_RNA (1)...(19): siRNA sense strand
gugcugacuuugaggccau

SEQ ID NO: 2257969 - RNA, 19 nt, Homo sapiens
  misc_RNA (1)...(19): siRNA sense strand
ccugagaagcagcagaaaa

SEQ ID NO: 2257970 - RNA, 19 nt, Homo sapiens
  misc_RNA (1)...(19): siRNA sense strand
cuacaagaacucuggaacu

SEQ ID NO: 2257971 - RNA, 19 nt, Homo sapiens
  misc_RNA (1)...(19): siRNA sense strand
ggguagaaacagaguacuc

SEQ ID NO: 2257972 - RNA, 19 nt, Homo sapiens
  misc_RNA (1)...(19): siRNA sense strand
cuacacuaccugaguccaa

SEQ ID NO: 2257973 - RNA, 19 nt, Homo sapiens
  misc_RNA (1)...(19): siRNA sense strand
aggccagaaaccuagauaa

SEQ ID NO: 2257974 - RNA, 19 nt, Homo sapiens
  misc_RNA (1)...(19): siRNA sense strand
aagaacaaccugaacccua

SEQ ID NO: 2257975 - RNA, 19 nt, Homo sapiens
  misc_RNA (1)...(19): siRNA sense strand
cggucucagcucaggaauu

SEQ ID NO: 2257976 - RNA, 19 nt, Homo sapiens
  misc_RNA (1)...(19): siRNA sense strand
uggagguagaggccagaaa

SEQ ID NO: 2257977 - RNA, 19 nt, Homo sapiens
  misc_RNA (1)...(19): siRNA sense strand
cagugaucauugugggugu

SEQ ID NO: 2257978 - RNA, 19 nt, Homo sapiens
  misc_RNA (1)...(19): siRNA sense strand
ccauggagguagaggccag

SEQ ID NO: 2257979 - RNA, 19 nt, Homo sapiens
  misc_RNA (1)...(19): siRNA sense strand
ggacugaacgggugcggaa

SEQ ID NO: 2257980 - RNA, 19 nt, Homo sapiens
  misc_RNA (1)...(19): siRNA sense strand
gcucaggaauuaaaggaca

SEQ ID NO: 2257981 - RNA, 19 nt, Homo sapiens
  misc_RNA (1)...(19): siRNA sense strand
ugucaagauuugucgggua

SEQ ID NO: 2257982 - RNA, 19 nt, Homo sapiens
  misc_RNA (1)...(19): siRNA sense strand
cucaggaauuaaaggacaa

SEQ ID NO: 2257983 - RNA, 19 nt, Homo sapiens
  misc_RNA (1)...(19): siRNA sense strand
gugcaggcauccagggcau

SEQ ID NO: 2257984 - RNA, 19 nt, Homo sapiens
  misc_RNA (1)...(19): siRNA sense strand
cugaggucaucaagaacaa

SEQ ID NO: 2257985 - RNA, 19 nt, Homo sapiens
  misc_RNA (1)...(19): siRNA sense strand
gugcugacuuugaggccau

SEQ ID NO: 2257986 - RNA, 19 nt, Homo sapiens
  misc_RNA (1)...(19): siRNA sense strand
ccugagaagcagcagaaaa

SEQ ID NO: 2257987 - RNA, 19 nt, Homo sapiens
  misc_RNA (1)...(19): siRNA sense strand
cuacaagaacucuggaacu

SEQ ID NO: 2257988 - RNA, 19 nt, Homo sapiens
  misc_RNA (1)...(19): siRNA sense strand
ggguagaaacagaguacuc

SEQ ID NO: 2257989 - RNA, 19 nt, Homo sapiens
  misc_RNA (1)...(19): siRNA sense strand
cuacacuaccugaguccaa

SEQ ID NO: 2257990 - RNA, 19 nt, Homo sapiens
  misc_RNA (1)...(19): siRNA sense strand
aggccagaaaccuagauaa

SEQ ID NO: 2257991 - RNA, 19 nt, Homo sapiens
  misc_RNA (1)...(19): siRNA sense strand
aagaacaaccugaacccua

SEQ ID NO: 2257992 - RNA, 19 nt, Homo sapiens
  misc_RNA (1)...(19): siRNA sense strand
cggucucagcucaggaauu

SEQ ID NO: 2257993 - RNA, 19 nt, Homo sapiens
  misc_RNA (1)...(19): siRNA sense strand
uggagguagaggccagaaa

SEQ ID NO: 2257994 - RNA, 19 nt, Homo sapiens
  misc_RNA (1)...(19): siRNA sense strand
cagugaucauugugggugu

SEQ ID NO: 2257995 - RNA, 19 nt, Homo sapiens
  misc_RNA (1)...(19): siRNA sense strand
ccauggagguagaggccag

SEQ ID NO: 2257996 - RNA, 19 nt, Homo sapiens
  misc_RNA (1)...(19): siRNA sense strand
ggacugaacgggugcggaa

SEQ ID NO: 2257997 - RNA, 19 nt, Homo sapiens
  misc_RNA (1)...(19): siRNA sense strand
gcucaggaauuaaaggaca

SEQ ID NO: 2257998 - RNA, 19 nt, Homo sapiens
  misc_RNA (1)...(19): siRNA sense strand
ugucaagauuugucgggua

SEQ ID NO: 2257999 - RNA, 19 nt, Homo sapiens
  misc_RNA (1)...(19): siRNA sense strand
cucaggaauuaaaggacaa

SEQ ID NO: 2258000 - RNA, 19 nt, Homo sapiens
  misc_RNA (1)...(19): siRNA sense strand
gugcaggcauccagggcau

SEQ ID NO: 2258001 - RNA, 19 nt, Homo sapiens
  misc_RNA (1)...(19): siRNA sense strand
cugaggucaucaagaacaa

SEQ ID NO: 2258002 - RNA, 19 nt, Homo sapiens
  misc_RNA (1)...(19): siRNA sense strand
gugcugacuuugaggccau

SEQ ID NO: 2258003 - RNA, 19 nt, Homo sapiens
  misc_RNA (1)...(19): siRNA sense strand
ccugagaagcagcagaaaa

SEQ ID NO: 2258004 - RNA, 19 nt, Homo sapiens
  misc_RNA (1)...(19): siRNA sense strand
cuacaagaacucuggaacu

SEQ ID NO: 2258005 - RNA, 19 nt, Homo sapiens
  misc_RNA (1)...(19): siRNA sense strand
ggguagaaacagaguacuc

SEQ ID NO: 2258006 - RNA, 19 nt, Homo sapiens
  misc_RNA (1)...(19): siRNA sense strand
cuacacuaccugaguccaa

SEQ ID NO: 2258007 - RNA, 19 nt, Homo sapiens
  misc_RNA (1)...(19): siRNA sense strand
aggccagaaaccuagauaa

SEQ ID NO: 2258008 - RNA, 19 nt, Homo sapiens
  misc_RNA (1)...(19): siRNA sense strand
aagaacaaccugaacccua

SEQ ID NO: 2258009 - RNA, 19 nt, Homo sapiens
  misc_RNA (1)...(19): siRNA sense strand
cggucucagcucaggaauu

SEQ ID NO: 2258010 - RNA, 19 nt, Homo sapiens
  misc_RNA (1)...(19): siRNA sense strand
uggagguagaggccagaaa

SEQ ID NO: 2258011 - RNA, 19 nt, Homo sapiens
  misc_RNA (1)...(19): siRNA sense strand
cagugaucauugugggugu

SEQ ID NO: 2258012 - RNA, 19 nt, Homo sapiens
  misc_RNA (1)...(19): siRNA sense strand
ccauggagguagaggccag

SEQ ID NO: 2258013 - RNA, 19 nt, Homo sapiens
  misc_RNA (1)...(19): siRNA sense strand
cagacaagagggugggcua

SEQ ID NO: 2258014 - RNA, 19 nt, Homo sapiens
  misc_RNA (1)...(19): siRNA sense strand
guggaaugucuacgggaaa

SEQ ID NO: 2258015 - RNA, 19 nt, Homo sapiens
  misc_RNA (1)...(19): siRNA sense strand
gggaugaugcaguggccaa

SEQ ID NO: 2258016 - RNA, 19 nt, Homo sapiens
  misc_RNA (1)...(19): siRNA sense strand
gguggaaugucuacgggaa

SEQ ID NO: 2258017 - RNA, 19 nt, Homo sapiens
  misc_RNA (1)...(19): siRNA sense strand
aggagaucuuugaggugaa

SEQ ID NO: 2258018 - RNA, 19 nt, Homo sapiens
  misc_RNA (1)...(19): siRNA sense strand
ggacagauggagugccuga

SEQ ID NO: 2258019 - RNA, 19 nt, Homo sapiens
  misc_RNA (1)...(19): siRNA sense strand
aggcugaugaggaagcaaa

SEQ ID NO: 2258020 - RNA, 19 nt, Homo sapiens
  misc_RNA (1)...(19): siRNA sense strand
aggaagcaaaggaaagcaa

SEQ ID NO: 2258021 - RNA, 19 nt, Homo sapiens
  misc_RNA (1)...(19): siRNA sense strand
ccaacuucucagaggguga

SEQ ID NO: 2258022 - RNA, 19 nt, Homo sapiens
  misc_RNA (1)...(19): siRNA sense strand
ccccagagguggagaaacu

SEQ ID NO: 2258023 - RNA, 19 nt, Homo sapiens
  misc_RNA (1)...(19): siRNA sense strand
agaucuuugaggugaacaa

SEQ ID NO: 2258024 - RNA, 19 nt, Homo sapiens
  misc_RNA (1)...(19): siRNA sense strand
cggcuaaagcugcgccuca

SEQ ID NO: 2258025 - RNA, 19 nt, Homo sapiens
  misc_RNA (1)...(19): siRNA sense strand
uguuugagcgugagggagu

SEQ ID NO: 2258026 - RNA, 19 nt, Homo sapiens
  misc_RNA (1)...(19): siRNA sense strand
ccuccagauucacagacaa

SEQ ID NO: 2258027 - RNA, 19 nt, Homo sapiens
  misc_RNA (1)...(19): siRNA sense strand
guaaauagcuccaaugugc

SEQ ID NO: 2258028 - RNA, 19 nt, Homo sapiens
  misc_RNA (1)...(19): siRNA sense strand
gcuuggacguggagcugca

SEQ ID NO: 2258029 - RNA, 19 nt, Homo sapiens
  misc_RNA (1)...(19): siRNA sense strand
ugaugaggaagcaaaggaa

SEQ ID NO: 2258030 - RNA, 19 nt, Homo sapiens
  misc_RNA (1)...(19): siRNA sense strand
ucaagaaugaccugagcca

SEQ ID NO: 2258031 - RNA, 19 nt, Homo sapiens
  misc_RNA (1)...(19): siRNA sense strand
agguggacgaagaggaagu

SEQ ID NO: 2258032 - RNA, 19 nt, Homo sapiens
  misc_RNA (1)...(19): siRNA sense strand
cagacaagagggugggcua

SEQ ID NO: 2258033 - RNA, 19 nt, Homo sapiens
  misc_RNA (1)...(19): siRNA sense strand
guggaaugucuacgggaaa

SEQ ID NO: 2258034 - RNA, 19 nt, Homo sapiens
  misc_RNA (1)...(19): siRNA sense strand
gggaugaugcaguggccaa

SEQ ID NO: 2258035 - RNA, 19 nt, Homo sapiens
  misc_RNA (1)...(19): siRNA sense strand
gguggaaugucuacgggaa

SEQ ID NO: 2258036 - RNA, 19 nt, Homo sapiens
  misc_RNA (1)...(19): siRNA sense strand
aggagaucuuugaggugaa

SEQ ID NO: 2258037 - RNA, 19 nt, Homo sapiens
  misc_RNA (1)...(19): siRNA sense strand
ggacagauggagugccuga

SEQ ID NO: 2258038 - RNA, 19 nt, Homo sapiens
  misc_RNA (1)...(19): siRNA sense strand
aggcugaugaggaagcaaa

SEQ ID NO: 2258039 - RNA, 19 nt, Homo sapiens
  misc_RNA (1)...(19): siRNA sense strand
aggaagcaaaggaaagcaa

SEQ ID NO: 2258040 - RNA, 19 nt, Homo sapiens
  misc_RNA (1)...(19): siRNA sense strand
ccaacuucucagaggguga

SEQ ID NO: 2258041 - RNA, 19 nt, Homo sapiens
  misc_RNA (1)...(19): siRNA sense strand
ccccagagguggagaaacu

SEQ ID NO: 2258042 - RNA, 19 nt, Homo sapiens
  misc_RNA (1)...(19): siRNA sense strand
agaucuuugaggugaacaa

SEQ ID NO: 2258043 - RNA, 19 nt, Homo sapiens
  misc_RNA (1)...(19): siRNA sense strand
cggcuaaagcugcgccuca

SEQ ID NO: 2258044 - RNA, 19 nt, Homo sapiens
  misc_RNA (1)...(19): siRNA sense strand
uguuugagcgugagggagu

SEQ ID NO: 2258045 - RNA, 19 nt, Homo sapiens
  misc_RNA (1)...(19): siRNA sense strand
ccuccagauucacagacaa

SEQ ID NO: 2258046 - RNA, 19 nt, Homo sapiens
  misc_RNA (1)...(19): siRNA sense strand
guaaauagcuccaaugugc

SEQ ID NO: 2258047 - RNA, 19 nt, Homo sapiens
  misc_RNA (1)...(19): siRNA sense strand
gcuuggacguggagcugca

SEQ ID NO: 2258048 - RNA, 19 nt, Homo sapiens
  misc_RNA (1)...(19): siRNA sense strand
ugaugaggaagcaaaggaa

SEQ ID NO: 2258049 - RNA, 19 nt, Homo sapiens
  misc_RNA (1)...(19): siRNA sense strand
ucaagaaugaccugagcca

SEQ ID NO: 2258050 - RNA, 19 nt, Homo sapiens
  misc_RNA (1)...(19): siRNA sense strand
agguggacgaagaggaagu

SEQ ID NO: 2258051 - RNA, 19 nt, Homo sapiens
  misc_RNA (1)...(19): siRNA sense strand
ucaaauaacagaagggaaa

SEQ ID NO: 2258052 - RNA, 19 nt, Homo sapiens
  misc_RNA (1)...(19): siRNA sense strand
aguuagagcuugcgggaaa

SEQ ID NO: 2258053 - RNA, 19 nt, Homo sapiens
  misc_RNA (1)...(19): siRNA sense strand
ggaagaagaagaugagaau

SEQ ID NO: 2258054 - RNA, 19 nt, Homo sapiens
  misc_RNA (1)...(19): siRNA sense strand
caaauuaugucuugggcaa

SEQ ID NO: 2258055 - RNA, 19 nt, Homo sapiens
  misc_RNA (1)...(19): siRNA sense strand
ugaagaaaguggugcggua

SEQ ID NO: 2258056 - RNA, 19 nt, Homo sapiens
  misc_RNA (1)...(19): siRNA sense strand
aaucagaugaagaggguua

SEQ ID NO: 2258057 - RNA, 19 nt, Homo sapiens
  misc_RNA (1)...(19): siRNA sense strand
gagaggagaaggagagcaa

SEQ ID NO: 2258058 - RNA, 19 nt, Homo sapiens
  misc_RNA (1)...(19): siRNA sense strand
gcaaguuaauggaggaaaa

SEQ ID NO: 2258059 - RNA, 19 nt, Homo sapiens
  misc_RNA (1)...(19): siRNA sense strand
uggaaaagauggugaauau

SEQ ID NO: 2258060 - RNA, 19 nt, Homo sapiens
  misc_RNA (1)...(19): siRNA sense strand
guggagaaacugagaagaa

SEQ ID NO: 2258061 - RNA, 19 nt, Homo sapiens
  misc_RNA (1)...(19): siRNA sense strand
ggaaggaaguuauggcaga

SEQ ID NO: 2258062 - RNA, 19 nt, Homo sapiens
  misc_RNA (1)...(19): siRNA sense strand
ccagagugcugauggcaaa

SEQ ID NO: 2258063 - RNA, 19 nt, Homo sapiens
  misc_RNA (1)...(19): siRNA sense strand
gcucaucagaacagaguaa

SEQ ID NO: 2258064 - RNA, 19 nt, Homo sapiens
  misc_RNA (1)...(19): siRNA sense strand
caggauggauauaggaaau

SEQ ID NO: 2258065 - RNA, 19 nt, Homo sapiens
  misc_RNA (1)...(19): siRNA sense strand
cagauuaggacaaggaaau

SEQ ID NO: 2258066 - RNA, 19 nt, Homo sapiens
  misc_RNA (1)...(19): siRNA sense strand
ggucagaagcuaaagaaaa

SEQ ID NO: 2258067 - RNA, 19 nt, Homo sapiens
  misc_RNA (1)...(19): siRNA sense strand
gugcaaaccgccagggcua

SEQ ID NO: 2258068 - RNA, 19 nt, Homo sapiens
  misc_RNA (1)...(19): siRNA sense strand
gcuaacuggugaagaagaa

SEQ ID NO: 2258069 - RNA, 19 nt, Homo sapiens
  misc_RNA (1)...(19): siRNA sense strand
guugguaacuuaagaacaa

SEQ ID NO: 2258070 - RNA, 19 nt, Homo sapiens
  misc_RNA (1)...(19): siRNA sense strand
ggauaacaguaaauggauu

SEQ ID NO: 2258071 - RNA, 19 nt, Homo sapiens
  misc_RNA (1)...(19): siRNA sense strand
ggacggaaguguaagccua

SEQ ID NO: 2258072 - RNA, 19 nt, Homo sapiens
  misc_RNA (1)...(19): siRNA sense strand
ggaccugauagaugggaaa

SEQ ID NO: 2258073 - RNA, 19 nt, Homo sapiens
  misc_RNA (1)...(19): siRNA sense strand
gguucagagccgagaggaa

SEQ ID NO: 2258074 - RNA, 19 nt, Homo sapiens
  misc_RNA (1)...(19): siRNA sense strand
cuugagagauacugugaua

SEQ ID NO: 2258075 - RNA, 19 nt, Homo sapiens
  misc_RNA (1)...(19): siRNA sense strand
ggucauuuguggucagaau

SEQ ID NO: 2258076 - RNA, 19 nt, Homo sapiens
  misc_RNA (1)...(19): siRNA sense strand
agauggugauuaugggaaa

SEQ ID NO: 2258077 - RNA, 19 nt, Homo sapiens
  misc_RNA (1)...(19): siRNA sense strand
cagcaauagucguaacauu

SEQ ID NO: 2258078 - RNA, 19 nt, Homo sapiens
  misc_RNA (1)...(19): siRNA sense strand
ggaacaucaucaucagaaa

SEQ ID NO: 2258079 - RNA, 19 nt, Homo sapiens
  misc_RNA (1)...(19): siRNA sense strand
cauugaagacagugggauu

SEQ ID NO: 2258080 - RNA, 19 nt, Homo sapiens
  misc_RNA (1)...(19): siRNA sense strand
ggguauggcuuguggaucu

SEQ ID NO: 2258081 - RNA, 19 nt, Homo sapiens
  misc_RNA (1)...(19): siRNA sense strand
aagaacaggcugagagaga

SEQ ID NO: 2258082 - RNA, 19 nt, Homo sapiens
  misc_RNA (1)...(19): siRNA sense strand
acuacaugcucucgagaaa

SEQ ID NO: 2258083 - RNA, 19 nt, Homo sapiens
  misc_RNA (1)...(19): siRNA sense strand
cagcaagagcgaaggguca

SEQ ID NO: 2258084 - RNA, 19 nt, Homo sapiens
  misc_RNA (1)...(19): siRNA sense strand
ucacggcaguggagggaaa

SEQ ID NO: 2258085 - RNA, 19 nt, Homo sapiens
  misc_RNA (1)...(19): siRNA sense strand
gaggaagguuuuagugaaa

SEQ ID NO: 2258086 - RNA, 19 nt, Homo sapiens
  misc_RNA (1)...(19): siRNA sense strand
cuugcaaacuguugugaua

SEQ ID NO: 2258087 - RNA, 19 nt, Homo sapiens
  misc_RNA (1)...(19): siRNA sense strand
aaagaaagugaguggcuua

SEQ ID NO: 2258088 - RNA, 19 nt, Homo sapiens
  misc_RNA (1)...(19): siRNA sense strand
ugagagauacugugauaaa

SEQ ID NO: 2258089 - RNA, 19 nt, Homo sapiens
  misc_RNA (1)...(19): siRNA sense strand
gaaguaggaaggaggcaaa

SEQ ID NO: 2258090 - RNA, 19 nt, Homo sapiens
  misc_RNA (1)...(19): siRNA sense strand
gggaggagaucuuagaaaa

SEQ ID NO: 2258091 - RNA, 19 nt, Homo sapiens
  misc_RNA (1)...(19): siRNA sense strand
aaaggaaccacuugagaaa

SEQ ID NO: 2258092 - RNA, 19 nt, Homo sapiens
  misc_RNA (1)...(19): siRNA sense strand
gcagauuaggacaaggaaa

SEQ ID NO: 2258093 - RNA, 19 nt, Homo sapiens
  misc_RNA (1)...(19): siRNA sense strand
gcucaaucgacauggacaa

SEQ ID NO: 2258094 - RNA, 19 nt, Homo sapiens
  misc_RNA (1)...(19): siRNA sense strand
uggaagaagaagaugagaa

SEQ ID NO: 2258095 - RNA, 19 nt, Homo sapiens
  misc_RNA (1)...(19): siRNA sense strand
ggauguugaugaagaugaa

SEQ ID NO: 2258096 - RNA, 19 nt, Homo sapiens
  misc_RNA (1)...(19): siRNA sense strand
gcuuguggaucuagaaaga

SEQ ID NO: 2258097 - RNA, 19 nt, Homo sapiens
  misc_RNA (1)...(19): siRNA sense strand
cuuaugaccaggagugaaa

SEQ ID NO: 2258098 - RNA, 19 nt, Homo sapiens
  misc_RNA (1)...(19): siRNA sense strand
cugaaauggaggaagguuu

SEQ ID NO: 2258099 - RNA, 19 nt, Homo sapiens
  misc_RNA (1)...(19): siRNA sense strand
gaccauuugcagugggaua

SEQ ID NO: 2258100 - RNA, 19 nt, Homo sapiens
  misc_RNA (1)...(19): siRNA sense strand
ggaucagcaugcaggacua

SEQ ID NO: 2258101 - RNA, 19 nt, Homo sapiens
  misc_RNA (1)...(19): siRNA sense strand
agucagaaguugaaaagaa

SEQ ID NO: 2258102 - RNA, 19 nt, Homo sapiens
  misc_RNA (1)...(19): siRNA sense strand
cagcaauguaggagagguu

SEQ ID NO: 2258103 - RNA, 19 nt, Homo sapiens
  misc_RNA (1)...(19): siRNA sense strand
agaagacggugaagaagaa

SEQ ID NO: 2258104 - RNA, 19 nt, Homo sapiens
  misc_RNA (1)...(19): siRNA sense strand
agguuaagcugguuggaga

SEQ ID NO: 2258105 - RNA, 19 nt, Homo sapiens
  misc_RNA (1)...(19): siRNA sense strand
aggaggagacaaugguaaa

SEQ ID NO: 2258106 - RNA, 19 nt, Homo sapiens
  misc_RNA (1)...(19): siRNA sense strand
caacaaguucugaaaggua

SEQ ID NO: 2258107 - RNA, 19 nt, Homo sapiens
  misc_RNA (1)...(19): siRNA sense strand
cugaaagguacaagggaca

SEQ ID NO: 2258108 - RNA, 19 nt, Homo sapiens
  misc_RNA (1)...(19): siRNA sense strand
gagauggagacuauggaaa

SEQ ID NO: 2258109 - RNA, 19 nt, Homo sapiens
  misc_RNA (1)...(19): siRNA sense strand
aggaauugcugaagagaac

SEQ ID NO: 2258110 - RNA, 19 nt, Homo sapiens
  misc_RNA (1)...(19): siRNA sense strand
caaugugacuagugcagaa

SEQ ID NO: 2258111 - RNA, 19 nt, Homo sapiens
  misc_RNA (1)...(19): siRNA sense strand
ccacagugcugcauggaca

SEQ ID NO: 2258112 - RNA, 19 nt, Homo sapiens
  misc_RNA (1)...(19): siRNA sense strand
gggcauggaaauaguucaa

SEQ ID NO: 2258113 - RNA, 19 nt, Homo sapiens
  misc_RNA (1)...(19): siRNA sense strand
cagaaauaucccaagcuua

SEQ ID NO: 2258114 - RNA, 19 nt, Homo sapiens
  misc_RNA (1)...(19): siRNA sense strand
agaaauaucccaagcuuau

SEQ ID NO: 2258115 - RNA, 19 nt, Homo sapiens
  misc_RNA (1)...(19): siRNA sense strand
ggcaauguggucagggaaa

SEQ ID NO: 2258116 - RNA, 19 nt, Homo sapiens
  misc_RNA (1)...(19): siRNA sense strand
ggaagaacaggcugagaga

SEQ ID NO: 2258117 - RNA, 19 nt, Homo sapiens
  misc_RNA (1)...(19): siRNA sense strand
gaaggagagcaaagaggaa

SEQ ID NO: 2258118 - RNA, 19 nt, Homo sapiens
  misc_RNA (1)...(19): siRNA sense strand
agucaagcauguggagaaa

SEQ ID NO: 2258119 - RNA, 19 nt, Homo sapiens
  misc_RNA (1)...(19): siRNA sense strand
gaaacugagaagaaagauu

SEQ ID NO: 2258120 - RNA, 19 nt, Homo sapiens
  misc_RNA (1)...(19): siRNA sense strand
aaucaaagucggagagaag

SEQ ID NO: 2258121 - RNA, 19 nt, Homo sapiens
  misc_RNA (1)...(19): siRNA sense strand
aagaaguggugguguguga

SEQ ID NO: 2258122 - RNA, 19 nt, Homo sapiens
  misc_RNA (1)...(19): siRNA sense strand
cugcaaagccccaggccaa

SEQ ID NO: 2258123 - RNA, 19 nt, Homo sapiens
  misc_RNA (1)...(19): siRNA sense strand
gggaagacuacgagggcug

SEQ ID NO: 2258124 - RNA, 19 nt, Homo sapiens
  misc_RNA (1)...(19): siRNA sense strand
agaagagguaccugcgaca

SEQ ID NO: 2258125 - RNA, 19 nt, Homo sapiens
  misc_RNA (1)...(19): siRNA sense strand
ggaaagacuccauucgcca

SEQ ID NO: 2258126 - RNA, 19 nt, Homo sapiens
  misc_RNA (1)...(19): siRNA sense strand
gcaaagaggccaagagcac

SEQ ID NO: 2258127 - RNA, 19 nt, Homo sapiens
  misc_RNA (1)...(19): siRNA sense strand
ccagggacgacgagagcaa

SEQ ID NO: 2258128 - RNA, 19 nt, Homo sapiens
  misc_RNA (1)...(19): siRNA sense strand
ucaaagagcuggaaagggu

SEQ ID NO: 2258129 - RNA, 19 nt, Homo sapiens
  misc_RNA (1)...(19): siRNA sense strand
uggaauauucuuaccucaa

SEQ ID NO: 2258130 - RNA, 19 nt, Homo sapiens
  misc_RNA (1)...(19): siRNA sense strand
acgagagcaaagaggccaa

SEQ ID NO: 2258131 - RNA, 19 nt, Homo sapiens
  misc_RNA (1)...(19): siRNA sense strand
gccucaacgagaagcgcaa

SEQ ID NO: 2258132 - RNA, 19 nt, Homo sapiens
  misc_RNA (1)...(19): siRNA sense strand
uggaaagggucuucgcgga

SEQ ID NO: 2258133 - RNA, 19 nt, Homo sapiens
  misc_RNA (1)...(19): siRNA sense strand
ugaaagaagaugagggugu

SEQ ID NO: 2258134 - RNA, 19 nt, Homo sapiens
  misc_RNA (1)...(19): siRNA sense strand
guucaaagugauagcaaaa

SEQ ID NO: 2258135 - RNA, 19 nt, Homo sapiens
  misc_RNA (1)...(19): siRNA sense strand
ugggagaagaugaggaaca

SEQ ID NO: 2258136 - RNA, 19 nt, Homo sapiens
  misc_RNA (1)...(19): siRNA sense strand
cagaugaauaccugacaaa

SEQ ID NO: 2258137 - RNA, 19 nt, Homo sapiens
  misc_RNA (1)...(19): siRNA sense strand
aaguagaaguuguggaaag

SEQ ID NO: 2258138 - RNA, 19 nt, Homo sapiens
  misc_RNA (1)...(19): siRNA sense strand
uguucaaagugauagcaaa

SEQ ID NO: 2258139 - RNA, 19 nt, Homo sapiens
  misc_RNA (1)...(19): siRNA sense strand
aggaaagaacauuugcaua

SEQ ID NO: 2258140 - RNA, 19 nt, Homo sapiens
  misc_RNA (1)...(19): siRNA sense strand
aagugaaccuguugcacaa

SEQ ID NO: 2258141 - RNA, 19 nt, Homo sapiens
  misc_RNA (1)...(19): siRNA sense strand
cagugugaccagugaagaa

SEQ ID NO: 2258142 - RNA, 19 nt, Homo sapiens
  misc_RNA (1)...(19): siRNA sense strand
cuacaaaaccaaaguaaca

SEQ ID NO: 2258143 - RNA, 19 nt, Homo sapiens
  misc_RNA (1)...(19): siRNA sense strand
ggauguaggaagagcuguu

SEQ ID NO: 2258144 - RNA, 19 nt, Homo sapiens
  misc_RNA (1)...(19): siRNA sense strand
agagaaucuguguguaaua

SEQ ID NO: 2258145 - RNA, 19 nt, Homo sapiens
  misc_RNA (1)...(19): siRNA sense strand
agaaaacagccuuguaaaa

SEQ ID NO: 2258146 - RNA, 19 nt, Homo sapiens
  misc_RNA (1)...(19): siRNA sense strand
agugauagcaaaagagaau

SEQ ID NO: 2258147 - RNA, 19 nt, Homo sapiens
  misc_RNA (1)...(19): siRNA sense strand
cugacaaagcaguggaagu

SEQ ID NO: 2258148 - RNA, 19 nt, Homo sapiens
  misc_RNA (1)...(19): siRNA sense strand
aggaaucccaauuaagaaa

SEQ ID NO: 2258149 - RNA, 19 nt, Homo sapiens
  misc_RNA (1)...(19): siRNA sense strand
agaaguuguggaaaggaaa

SEQ ID NO: 2258150 - RNA, 19 nt, Homo sapiens
  misc_RNA (1)...(19): siRNA sense strand
ugggaagacagcaggaaga

SEQ ID NO: 2258151 - RNA, 19 nt, Homo sapiens
  misc_RNA (1)...(19): siRNA sense strand
uggaaaggaaagaacauuu

SEQ ID NO: 2258152 - RNA, 19 nt, Homo sapiens
  misc_RNA (1)...(19): siRNA sense strand
cuauggaauuggaaagagu

SEQ ID NO: 2258153 - RNA, 19 nt, Homo sapiens
  misc_RNA (1)...(19): siRNA sense strand
agaugaggguguugaugau

SEQ ID NO: 2258154 - RNA, 19 nt, Homo sapiens
  misc_RNA (1)...(19): siRNA sense strand
ggaauuggaaagaguggga

SEQ ID NO: 2258155 - RNA, 19 nt, Homo sapiens
  misc_RNA (1)...(19): siRNA sense strand
uggaaagagugggagaaga

SEQ ID NO: 2258156 - RNA, 19 nt, Homo sapiens
  misc_RNA (1)...(19): siRNA sense strand
ucaaguucucagaugaaua

SEQ ID NO: 2258157 - RNA, 19 nt, Homo sapiens
  misc_RNA (1)...(19): siRNA sense strand
guugugaagcaaagguuau

SEQ ID NO: 2258158 - RNA, 19 nt, Homo sapiens
  misc_RNA (1)...(19): siRNA sense strand
acuucagaaagguuagaaa

SEQ ID NO: 2258159 - RNA, 19 nt, Homo sapiens
  misc_RNA (1)...(19): siRNA sense strand
ugucaaguucucagaugaa

SEQ ID NO: 2258160 - RNA, 19 nt, Homo sapiens
  misc_RNA (1)...(19): siRNA sense strand
guucagaguugcaggagag

SEQ ID NO: 2258161 - RNA, 19 nt, Homo sapiens
  misc_RNA (1)...(19): siRNA sense strand
gugacuauuuugaaaggaa

SEQ ID NO: 2258162 - RNA, 19 nt, Homo sapiens
  misc_RNA (1)...(19): siRNA sense strand
ccagcaaauauaacaaaga

SEQ ID NO: 2258163 - RNA, 19 nt, Homo sapiens
  misc_RNA (1)...(19): siRNA sense strand
gagagaugugucagaacuu

SEQ ID NO: 2258164 - RNA, 19 nt, Homo sapiens
  misc_RNA (1)...(19): siRNA sense strand
aauuggaaagagugggaga

SEQ ID NO: 2258165 - RNA, 19 nt, Homo sapiens
  misc_RNA (1)...(19): siRNA sense strand
agugggagaagaugaggaa

SEQ ID NO: 2258166 - RNA, 19 nt, Homo sapiens
  misc_RNA (1)...(19): siRNA sense strand
aagaaagaucauugaguuc

SEQ ID NO: 2258167 - RNA, 19 nt, Homo sapiens
  misc_RNA (1)...(19): siRNA sense strand
aaguaguaguucagaguug

SEQ ID NO: 2258168 - RNA, 19 nt, Homo sapiens
  misc_RNA (1)...(19): siRNA sense strand
ggagaagaugaggaacaaa

SEQ ID NO: 2258169 - RNA, 19 nt, Homo sapiens
  misc_RNA (1)...(19): siRNA sense strand
ccaaguaguaguucagagu

SEQ ID NO: 2258170 - RNA, 19 nt, Homo sapiens
  misc_RNA (1)...(19): siRNA sense strand
aggaagauuugauguguac

SEQ ID NO: 2258171 - RNA, 19 nt, Homo sapiens
  misc_RNA (1)...(19): siRNA sense strand
aguucagaguugcaggaga

SEQ ID NO: 2258172 - RNA, 19 nt, Homo sapiens
  misc_RNA (1)...(19): siRNA sense strand
gaaguauccaauugagcuu

SEQ ID NO: 2258173 - RNA, 19 nt, Homo sapiens
  misc_RNA (1)...(19): siRNA sense strand
guaacaauucaaacuggaa

SEQ ID NO: 2258174 - RNA, 19 nt, Homo sapiens
  misc_RNA (1)...(19): siRNA sense strand
cggaacaaaaguagaaguu

SEQ ID NO: 2258175 - RNA, 19 nt, Homo sapiens
  misc_RNA (1)...(19): siRNA sense strand
aauucaaacuggaaccuca

SEQ ID NO: 2258176 - RNA, 19 nt, Homo sapiens
  misc_RNA (1)...(19): siRNA sense strand
uguggaaaggaaagaacau

SEQ ID NO: 2258177 - RNA, 19 nt, Homo sapiens
  misc_RNA (1)...(19): siRNA sense strand
cuuuggaaguuucuggaga

SEQ ID NO: 2258178 - RNA, 19 nt, Homo sapiens
  misc_RNA (1)...(19): siRNA sense strand
uggcaagguaccugggaaa

SEQ ID NO: 2258179 - RNA, 19 nt, Homo sapiens
  misc_RNA (1)...(19): siRNA sense strand
ggaaacaggaagagcgagu

SEQ ID NO: 2258180 - RNA, 19 nt, Homo sapiens
  misc_RNA (1)...(19): siRNA sense strand
acagcaaguacgcaagaaa

SEQ ID NO: 2258181 - RNA, 19 nt, Homo sapiens
  misc_RNA (1)...(19): siRNA sense strand
ccaaaggucuucaaggagu

SEQ ID NO: 2258182 - RNA, 19 nt, Homo sapiens
  misc_RNA (1)...(19): siRNA sense strand
gcaagaaauuggaagaagc

SEQ ID NO: 2258183 - RNA, 19 nt, Homo sapiens
  misc_RNA (1)...(19): siRNA sense strand
gcacacaagcucugcgcca

SEQ ID NO: 2258184 - RNA, 19 nt, Homo sapiens
  misc_RNA (1)...(19): siRNA sense strand
gaacaaacagagacugcga

SEQ ID NO: 2258185 - RNA, 19 nt, Homo sapiens
  misc_RNA (1)...(19): siRNA sense strand
caggaaacaggaagagcga

SEQ ID NO: 2258186 - RNA, 19 nt, Homo sapiens
  misc_RNA (1)...(19): siRNA sense strand
agaagaacaaacagagacu

SEQ ID NO: 2258187 - RNA, 19 nt, Homo sapiens
  misc_RNA (1)...(19): siRNA sense strand
agaagaggcuacaaggacu

SEQ ID NO: 2258188 - RNA, 19 nt, Homo sapiens
  misc_RNA (1)...(19): siRNA sense strand
cgguaaccaaagucacaaa

SEQ ID NO: 2258189 - RNA, 19 nt, Homo sapiens
  misc_RNA (1)...(19): siRNA sense strand
acgaaugaaugaacagcca

SEQ ID NO: 2258190 - RNA, 19 nt, Homo sapiens
  misc_RNA (1)...(19): siRNA sense strand
agcaaguacgcaagaaauu

SEQ ID NO: 2258191 - RNA, 19 nt, Homo sapiens
  misc_RNA (1)...(19): siRNA sense strand
aagaagcacugauggcaga

SEQ ID NO: 2258192 - RNA, 19 nt, Homo sapiens
  misc_RNA (1)...(19): siRNA sense strand
cagauguaacagaacaaau

SEQ ID NO: 2258193 - RNA, 19 nt, Homo sapiens
  misc_RNA (1)...(19): siRNA sense strand
acaucaggaaacaggaaga

SEQ ID NO: 2258194 - RNA, 19 nt, Homo sapiens
  misc_RNA (1)...(19): siRNA sense strand
agaaauuggaagaagcacu

SEQ ID NO: 2258195 - RNA, 19 nt, Homo sapiens
  misc_RNA (1)...(19): siRNA sense strand
agacaucaggaaacaggaa

SEQ ID NO: 2258196 - RNA, 19 nt, Homo sapiens
  misc_RNA (1)...(19): siRNA sense strand
acgcaagaaauuggaagaa

SEQ ID NO: 2258197 - RNA, 19 nt, Homo sapiens
  misc_RNA (1)...(19): siRNA sense strand
cggagagcgggaagaggau

SEQ ID NO: 2258198 - RNA, 19 nt, Homo sapiens
  misc_RNA (1)...(19): siRNA sense strand
ccggauggaagaaggagga

SEQ ID NO: 2258199 - RNA, 19 nt, Homo sapiens
  misc_RNA (1)...(19): siRNA sense strand
uggcaagguaccugggaaa

SEQ ID NO: 2258200 - RNA, 19 nt, Homo sapiens
  misc_RNA (1)...(19): siRNA sense strand
gaacaaacagagacugcga

SEQ ID NO: 2258201 - RNA, 19 nt, Homo sapiens
  misc_RNA (1)...(19): siRNA sense strand
agaagaacaaacagagacu

SEQ ID NO: 2258202 - RNA, 19 nt, Homo sapiens
  misc_RNA (1)...(19): siRNA sense strand
cggagagcgggaagaggau

SEQ ID NO: 2258203 - RNA, 19 nt, Homo sapiens
  misc_RNA (1)...(19): siRNA sense strand
ccggauggaagaaggagga

SEQ ID NO: 2258204 - RNA, 19 nt, Homo sapiens
  misc_RNA (1)...(19): siRNA sense strand
ccaagaaagcaaaggaaaa

SEQ ID NO: 2258205 - RNA, 19 nt, Homo sapiens
  misc_RNA (1)...(19): siRNA sense strand
gcaaaggaaaagagagaau

SEQ ID NO: 2258206 - RNA, 19 nt, Homo sapiens
  misc_RNA (1)...(19): siRNA sense strand
agugaaaguggaagaacaa

SEQ ID NO: 2258207 - RNA, 19 nt, Homo sapiens
  misc_RNA (1)...(19): siRNA sense strand
agauauacugaaaggagaa

SEQ ID NO: 2258208 - RNA, 19 nt, Homo sapiens
  misc_RNA (1)...(19): siRNA sense strand
cagauauacugaaaggaga

SEQ ID NO: 2258209 - RNA, 19 nt, Homo sapiens
  misc_RNA (1)...(19): siRNA sense strand
aggaagaugagucaggaua

SEQ ID NO: 2258210 - RNA, 19 nt, Homo sapiens
  misc_RNA (1)...(19): siRNA sense strand
aagcaaaggaaaagagaga

SEQ ID NO: 2258211 - RNA, 19 nt, Homo sapiens
  misc_RNA (1)...(19): siRNA sense strand
guggaagaacaaaggaaga

SEQ ID NO: 2258212 - RNA, 19 nt, Homo sapiens
  misc_RNA (1)...(19): siRNA sense strand
agauauggcugguggguag

SEQ ID NO: 2258213 - RNA, 19 nt, Homo sapiens
  misc_RNA (1)...(19): siRNA sense strand
cagaagauggggaagaaua

SEQ ID NO: 2258214 - RNA, 19 nt, Homo sapiens
  misc_RNA (1)...(19): siRNA sense strand
cagaagaagaagaggacag

SEQ ID NO: 2258215 - RNA, 19 nt, Homo sapiens
  misc_RNA (1)...(19): siRNA sense strand
cucuaagaaaggauggaaa

SEQ ID NO: 2258216 - RNA, 19 nt, Homo sapiens
  misc_RNA (1)...(19): siRNA sense strand
cuacagugucagaaugaau

SEQ ID NO: 2258217 - RNA, 19 nt, Homo sapiens
  misc_RNA (1)...(19): siRNA sense strand
gaacaaaggaagaugaguc

SEQ ID NO: 2258218 - RNA, 19 nt, Homo sapiens
  misc_RNA (1)...(19): siRNA sense strand
uccaagaaagcaaaggaaa

SEQ ID NO: 2258219 - RNA, 19 nt, Homo sapiens
  misc_RNA (1)...(19): siRNA sense strand
gugauaaagacaaacaaca

SEQ ID NO: 2258220 - RNA, 19 nt, Homo sapiens
  misc_RNA (1)...(19): siRNA sense strand
caaacaacagaaaggugaa

SEQ ID NO: 2258221 - RNA, 19 nt, Homo sapiens
  misc_RNA (1)...(19): siRNA sense strand
acaaacaacagaaagguga

SEQ ID NO: 2258222 - RNA, 19 nt, Homo sapiens
  misc_RNA (1)...(19): siRNA sense strand
cucagaacgauaugauaaa

SEQ ID NO: 2258223 - RNA, 19 nt, Homo sapiens
  misc_RNA (1)...(19): siRNA sense strand
aaggauggaaagaaagauu

SEQ ID NO: 2258224 - RNA, 19 nt, Homo sapiens
  misc_RNA (1)...(19): siRNA sense strand
gggauuugaauggcagaaa

SEQ ID NO: 2258225 - RNA, 19 nt, Homo sapiens
  misc_RNA (1)...(19): siRNA sense strand
ggagaaaugaagggagcca

SEQ ID NO: 2258226 - RNA, 19 nt, Homo sapiens
  misc_RNA (1)...(19): siRNA sense strand
gcagaaaagaucacagcuu

SEQ ID NO: 2258227 - RNA, 19 nt, Homo sapiens
  misc_RNA (1)...(19): siRNA sense strand
gaucacagcuuucugggau

SEQ ID NO: 2258228 - RNA, 19 nt, Homo sapiens
  misc_RNA (1)...(19): siRNA sense strand
ggaagaauaugaugacccu

SEQ ID NO: 2258229 - RNA, 19 nt, Homo sapiens
  misc_RNA (1)...(19): siRNA sense strand
acgauaugauaaagacgau

SEQ ID NO: 2258230 - RNA, 19 nt, Homo sapiens
  misc_RNA (1)...(19): siRNA sense strand
aaguggaagaacaaaggaa

SEQ ID NO: 2258231 - RNA, 19 nt, Homo sapiens
  misc_RNA (1)...(19): siRNA sense strand
cagaaaggugaauuugcaa

SEQ ID NO: 2258232 - RNA, 19 nt, Homo sapiens
  misc_RNA (1)...(19): siRNA sense strand
cuaagaaaggauggaaaga

SEQ ID NO: 2258233 - RNA, 19 nt, Homo sapiens
  misc_RNA (1)...(19): siRNA sense strand
uuaugaugagagaggagaa

SEQ ID NO: 2258234 - RNA, 19 nt, Homo sapiens
  misc_RNA (1)...(19): siRNA sense strand
cauuagccucagaacgaua

SEQ ID NO: 2258235 - RNA, 19 nt, Homo sapiens
  misc_RNA (1)...(19): siRNA sense strand
cagaacgauaugauaaaga

SEQ ID NO: 2258236 - RNA, 19 nt, Homo sapiens
  misc_RNA (1)...(19): siRNA sense strand
uuacauucuuagcaaggaa

SEQ ID NO: 2258237 - RNA, 19 nt, Homo sapiens
  misc_RNA (1)...(19): siRNA sense strand
cagucaaccaauagaugau

SEQ ID NO: 2258238 - RNA, 19 nt, Homo sapiens
  misc_RNA (1)...(19): siRNA sense strand
uuaggaaccuguuggcaga

SEQ ID NO: 2258239 - RNA, 19 nt, Homo sapiens
  misc_RNA (1)...(19): siRNA sense strand
aagccuacauaauggagau

SEQ ID NO: 2258240 - RNA, 19 nt, Homo sapiens
  misc_RNA (1)...(19): siRNA sense strand
acgaaaagguauucagcua

SEQ ID NO: 2258241 - RNA, 19 nt, Homo sapiens
  misc_RNA (1)...(19): siRNA sense strand
acuaaguagccuaaguaaa

SEQ ID NO: 2258242 - RNA, 19 nt, Homo sapiens
  misc_RNA (1)...(19): siRNA sense strand
cuuauagagaugaugguaa

SEQ ID NO: 2258243 - RNA, 19 nt, Homo sapiens
  misc_RNA (1)...(19): siRNA sense strand
aggauaagaggaaggaaaa

SEQ ID NO: 2258244 - RNA, 19 nt, Homo sapiens
  misc_RNA (1)...(19): siRNA sense strand
cugaagauauauuuggaga

SEQ ID NO: 2258245 - RNA, 19 nt, Homo sapiens
  misc_RNA (1)...(19): siRNA sense strand
aaguagaagagcagcguga

SEQ ID NO: 2258246 - RNA, 19 nt, Homo sapiens
  misc_RNA (1)...(19): siRNA sense strand
auccaaaggaagaagaauu

SEQ ID NO: 2258247 - RNA, 19 nt, Homo sapiens
  misc_RNA (1)...(19): siRNA sense strand
guugcaagauacagaggau

SEQ ID NO: 2258248 - RNA, 19 nt, Homo sapiens
  misc_RNA (1)...(19): siRNA sense strand
uggcugaagaugaugcuaa

SEQ ID NO: 2258249 - RNA, 19 nt, Homo sapiens
  misc_RNA (1)...(19): siRNA sense strand
aggaaaagaggaagcagaa

SEQ ID NO: 2258250 - RNA, 19 nt, Homo sapiens
  misc_RNA (1)...(19): siRNA sense strand
gguauuagucagaccacau

SEQ ID NO: 2258251 - RNA, 19 nt, Homo sapiens
  misc_RNA (1)...(19): siRNA sense strand
cagaauuugaugaaguaga

SEQ ID NO: 2258252 - RNA, 19 nt, Homo sapiens
  misc_RNA (1)...(19): siRNA sense strand
cguuuaucuguuaguguua

SEQ ID NO: 2258253 - RNA, 19 nt, Homo sapiens
  misc_RNA (1)...(19): siRNA sense strand
agaggaaggaaaagaggaa

SEQ ID NO: 2258254 - RNA, 19 nt, Homo sapiens
  misc_RNA (1)...(19): siRNA sense strand
aaguagauugguuggagua

SEQ ID NO: 2258255 - RNA, 19 nt, Homo sapiens
  misc_RNA (1)...(19): siRNA sense strand
ccuaaguaaauaugcugaa

SEQ ID NO: 2258256 - RNA, 19 nt, Homo sapiens
  misc_RNA (1)...(19): siRNA sense strand
agucagaccacaugaacca

SEQ ID NO: 2258257 - RNA, 19 nt, Homo sapiens
  misc_RNA (1)...(19): siRNA sense strand
ugacuagagcugaggaaag

SEQ ID NO: 2258258 - RNA, 19 nt, Homo sapiens
  misc_RNA (1)...(19): siRNA sense strand
aagcuaagcaugaacgcau

SEQ ID NO: 2258259 - RNA, 19 nt, Homo sapiens
  misc_RNA (1)...(19): siRNA sense strand
aagaggaagcagaagcaga

SEQ ID NO: 2258260 - RNA, 19 nt, Homo sapiens
  misc_RNA (1)...(19): siRNA sense strand
ugaaacaagaccucagaca

SEQ ID NO: 2258261 - RNA, 19 nt, Homo sapiens
  misc_RNA (1)...(19): siRNA sense strand
aguuacagcucuugcucau

SEQ ID NO: 2258262 - RNA, 19 nt, Homo sapiens
  misc_RNA (1)...(19): siRNA sense strand
acgcaaaguagaagagcag

SEQ ID NO: 2258263 - RNA, 19 nt, Homo sapiens
  misc_RNA (1)...(19): siRNA sense strand
gaaguagauugguuggagu

SEQ ID NO: 2258264 - RNA, 19 nt, Homo sapiens
  misc_RNA (1)...(19): siRNA sense strand
cuggaauguguaaccaaua

SEQ ID NO: 2258265 - RNA, 19 nt, Homo sapiens
  misc_RNA (1)...(19): siRNA sense strand
auaacaaugaggaaagcuu

SEQ ID NO: 2258266 - RNA, 19 nt, Homo sapiens
  misc_RNA (1)...(19): siRNA sense strand
agaugaugguaaagaaggu

SEQ ID NO: 2258267 - RNA, 19 nt, Homo sapiens
  misc_RNA (1)...(19): siRNA sense strand
agguauucagcuacgcaaa

SEQ ID NO: 2258268 - RNA, 19 nt, Homo sapiens
  misc_RNA (1)...(19): siRNA sense strand
cuaugaaccuggaccgcua

SEQ ID NO: 2258269 - RNA, 19 nt, Homo sapiens
  misc_RNA (1)...(19): siRNA sense strand
gccaagaagaagaaaggca

SEQ ID NO: 2258270 - RNA, 19 nt, Homo sapiens
  misc_RNA (1)...(19): siRNA sense strand
agaagaagaaaggcagcaa

SEQ ID NO: 2258271 - RNA, 19 nt, Homo sapiens
  misc_RNA (1)...(19): siRNA sense strand
ccuuaagaauagaggauau

SEQ ID NO: 2258272 - RNA, 19 nt, Homo sapiens
  misc_RNA (1)...(19): siRNA sense strand
gggaaauucucuuggccuu

SEQ ID NO: 2258273 - RNA, 19 nt, Homo sapiens
  misc_RNA (1)...(19): siRNA sense strand
gaagauaagcugaggcacu

SEQ ID NO: 2258274 - RNA, 19 nt, Homo sapiens
  misc_RNA (1)...(19): siRNA sense strand
uuacaggagaugagaguau

SEQ ID NO: 2258275 - RNA, 19 nt, Homo sapiens
  misc_RNA (1)...(19): siRNA sense strand
uggcaaagauaaagcagca

SEQ ID NO: 2258276 - RNA, 19 nt, Homo sapiens
  misc_RNA (1)...(19): siRNA sense strand
agccaaugagaaagaaaua

SEQ ID NO: 2258277 - RNA, 19 nt, Homo sapiens
  misc_RNA (1)...(19): siRNA sense strand
ugagaaagaaauagcccua

SEQ ID NO: 2258278 - RNA, 19 nt, Homo sapiens
  misc_RNA (1)...(19): siRNA sense strand
guauuuaaaugcaggagca

SEQ ID NO: 2258279 - RNA, 19 nt, Homo sapiens
  misc_RNA (1)...(19): siRNA sense strand
cggacuuaacauugaagaa

SEQ ID NO: 2258280 - RNA, 19 nt, Homo sapiens
  misc_RNA (1)...(19): siRNA sense strand
ggagccaaugagaaagaaa

SEQ ID NO: 2258281 - RNA, 19 nt, Homo sapiens
  misc_RNA (1)...(19): siRNA sense strand
uugaaguaauugagaagga

SEQ ID NO: 2258282 - RNA, 19 nt, Homo sapiens
  misc_RNA (1)...(19): siRNA sense strand
gaacuagauaagugggcca

SEQ ID NO: 2258283 - RNA, 19 nt, Homo sapiens
  misc_RNA (1)...(19): siRNA sense strand
gaacauaauuacuccgucu

SEQ ID NO: 2258284 - RNA, 19 nt, Homo sapiens
  misc_RNA (1)...(19): siRNA sense strand
uagcacaugcaguuggaaa

SEQ ID NO: 2258285 - RNA, 19 nt, Homo sapiens
  misc_RNA (1)...(19): siRNA sense strand
accuagaugaggaagauaa

SEQ ID NO: 2258286 - RNA, 19 nt, Homo sapiens
  misc_RNA (1)...(19): siRNA sense strand
ugcaggagcaggaggaauu

SEQ ID NO: 2258287 - RNA, 19 nt, Homo sapiens
  misc_RNA (1)...(19): siRNA sense strand
aagaaauagcccuaaugaa

SEQ ID NO: 2258288 - RNA, 19 nt, Homo sapiens
  misc_RNA (1)...(19): siRNA sense strand
gauuacaggagaugagagu

SEQ ID NO: 2258289 - RNA, 19 nt, Homo sapiens
  misc_RNA (1)...(19): siRNA sense strand
uaauugagaaggaaggaga

SEQ ID NO: 2258290 - RNA, 19 nt, Homo sapiens
  misc_RNA (1)...(19): siRNA sense strand
augaaggcauugcggaaaa

SEQ ID NO: 2258291 - RNA, 19 nt, Homo sapiens
  misc_RNA (1)...(19): siRNA sense strand
aagauaaagcagcaaccaa

SEQ ID NO: 2258292 - RNA, 19 nt, Homo sapiens
  misc_RNA (1)...(19): siRNA sense strand
cggcugaacucaaaugcca

SEQ ID NO: 2258293 - RNA, 19 nt, Homo sapiens
  misc_RNA (1)...(19): siRNA sense strand
ucuuuaagcaagcgacaau

SEQ ID NO: 2258294 - RNA, 19 nt, Homo sapiens
  misc_RNA (1)...(19): siRNA sense strand
ugagaguauuguaggccuu

SEQ ID NO: 2258295 - RNA, 19 nt, Homo sapiens
  misc_RNA (1)...(19): siRNA sense strand
ccuugaaguaauugagaag

SEQ ID NO: 2258296 - RNA, 19 nt, Homo sapiens
  misc_RNA (1)...(19): siRNA sense strand
uggcuuugaucuagcacau

SEQ ID NO: 2258297 - RNA, 19 nt, Homo sapiens
  misc_RNA (1)...(19): siRNA sense strand
aggaagauaagcugaggca

SEQ ID NO: 2258298 - RNA, 19 nt, Homo sapiens
  misc_RNA (1)...(19): siRNA sense strand
aggaauugcuggugccuuc

SEQ ID NO: 2258299 - RNA, 19 nt, Homo sapiens
  misc_RNA (1)...(19): siRNA sense strand
gcaugcuaguuuagagauc

SEQ ID NO: 2258300 - RNA, 19 nt, Homo sapiens
  misc_RNA (1)...(19): siRNA sense strand
cgccaaaacgauauaaaau

SEQ ID NO: 2258301 - RNA, 19 nt, Homo sapiens
  misc_RNA (1)...(19): siRNA sense strand
uuuaaaugcaggagcagga

SEQ ID NO: 2258302 - RNA, 19 nt, Homo sapiens
  misc_RNA (1)...(19): siRNA sense strand
gggccaaaauagcagccua

SEQ ID NO: 2258303 - RNA, 19 nt, Homo sapiens
  misc_RNA (1)...(19): siRNA sense strand
ggggaagcguccuuggauu

SEQ ID NO: 2258304 - RNA, 19 nt, Homo sapiens
  misc_RNA (1)...(19): siRNA sense strand
ccaaagaaugcauggaaau

SEQ ID NO: 2258305 - RNA, 19 nt, Homo sapiens
  misc_RNA (1)...(19): siRNA sense strand
aggaagugcauauggauua

SEQ ID NO: 2258306 - RNA, 19 nt, Homo sapiens
  misc_RNA (1)...(19): siRNA sense strand
aaauagacccaguggagaa

SEQ ID NO: 2258307 - RNA, 19 nt, Homo sapiens
  misc_RNA (1)...(19): siRNA sense strand
acgcaaaguggaucagaaa

SEQ ID NO: 2258308 - RNA, 19 nt, Homo sapiens
  misc_RNA (1)...(19): siRNA sense strand
cagauggaacaaaggaaua

SEQ ID NO: 2258309 - RNA, 19 nt, Homo sapiens
  misc_RNA (1)...(19): siRNA sense strand
gcuucugcaucuuggaaua

SEQ ID NO: 2258310 - RNA, 19 nt, Homo sapiens
  misc_RNA (1)...(19): siRNA sense strand
gggaaauaagacaagaaau

SEQ ID NO: 2258311 - RNA, 19 nt, Homo sapiens
  misc_RNA (1)...(19): siRNA sense strand
ugguaauggaugaagacaa

SEQ ID NO: 2258312 - RNA, 19 nt, Homo sapiens
  misc_RNA (1)...(19): siRNA sense strand
cugacauaguccugaacaa

SEQ ID NO: 2258313 - RNA, 19 nt, Homo sapiens
  misc_RNA (1)...(19): siRNA sense strand
ggauauaagcaauguucuu

SEQ ID NO: 2258314 - RNA, 19 nt, Homo sapiens
  misc_RNA (1)...(19): siRNA sense strand
cggacgacacggaggauuu

SEQ ID NO: 2258315 - RNA, 19 nt, Homo sapiens
  misc_RNA (1)...(19): siRNA sense strand
acgcaaugguacaaaauaa

SEQ ID NO: 2258316 - RNA, 19 nt, Homo sapiens
  misc_RNA (1)...(19): siRNA sense strand
ugaauaaugaggugaugaa

SEQ ID NO: 2258317 - RNA, 19 nt, Homo sapiens
  misc_RNA (1)...(19): siRNA sense strand
uggaagugcugcaugaaau

SEQ ID NO: 2258318 - RNA, 19 nt, Homo sapiens
  misc_RNA (1)...(19): siRNA sense strand
ucauaauucuccaggcaau

SEQ ID NO: 2258319 - RNA, 19 nt, Homo sapiens
  misc_RNA (1)...(19): siRNA sense strand
guggcaauguggagcaauu

SEQ ID NO: 2258320 - RNA, 19 nt, Homo sapiens
  misc_RNA (1)...(19): siRNA sense strand
gguuuaagaaagagcagau

SEQ ID NO: 2258321 - RNA, 19 nt, Homo sapiens
  misc_RNA (1)...(19): siRNA sense strand
gcagauggaacaaaggaau

SEQ ID NO: 2258322 - RNA, 19 nt, Homo sapiens
  misc_RNA (1)...(19): siRNA sense strand
gugcccaaguagacauaaa

SEQ ID NO: 2258323 - RNA, 19 nt, Homo sapiens
  misc_RNA (1)...(19): siRNA sense strand
aguuaugggcguaucaaua

SEQ ID NO: 2258324 - RNA, 19 nt, Homo sapiens
  misc_RNA (1)...(19): siRNA sense strand
aagacagguuuaagaaaga

SEQ ID NO: 2258325 - RNA, 19 nt, Homo sapiens
  misc_RNA (1)...(19): siRNA sense strand
gcaugaaauggaugauuau

SEQ ID NO: 2258326 - RNA, 19 nt, Homo sapiens
  misc_RNA (1)...(19): siRNA sense strand
uugcugagguccagaaaca

SEQ ID NO: 2258327 - RNA, 19 nt, Homo sapiens
  misc_RNA (1)...(19): siRNA sense strand
agaucaaagagcugguaau

SEQ ID NO: 2258328 - RNA, 19 nt, Homo sapiens
  misc_RNA (1)...(19): siRNA sense strand
auaccagcuuagagaagaa

SEQ ID NO: 2258329 - RNA, 19 nt, Homo sapiens
  misc_RNA (1)...(19): siRNA sense strand
aaggaauagcagauggaau

SEQ ID NO: 2258330 - RNA, 19 nt, Homo sapiens
  misc_RNA (1)...(19): siRNA sense strand
ucaugaaaugguuggcuua

SEQ ID NO: 2258331 - RNA, 19 nt, Homo sapiens
  misc_RNA (1)...(19): siRNA sense strand
ugauaaaguaguucagcuu

SEQ ID NO: 2258332 - RNA, 19 nt, Homo sapiens
  misc_RNA (1)...(19): siRNA sense strand
ucauugaagaggauagcua

SEQ ID NO: 2258333 - RNA, 19 nt, Homo sapiens
  misc_RNA (1)...(19): siRNA sense strand
gcaugaauaaugaggugau

SEQ ID NO: 2258334 - RNA, 19 nt, Homo sapiens
  misc_RNA (1)...(19): siRNA sense strand
gcuuauggauuuagagcuc

SEQ ID NO: 2258335 - RNA, 19 nt, Homo sapiens
  misc_RNA (1)...(19): siRNA sense strand
acaccuucuucuugcauua

SEQ ID NO: 2258336 - RNA, 19 nt, Homo sapiens
  misc_RNA (1)...(19): siRNA sense strand
gcagaggagcaaacccaaa

SEQ ID NO: 2258337 - RNA, 19 nt, Homo sapiens
  misc_RNA (1)...(19): siRNA sense strand
gcaucuuggaauauuguaa

SEQ ID NO: 2258338 - RNA, 19 nt, Homo sapiens
  misc_RNA (1)...(19): siRNA sense strand
uuguuauguuggagguaau

SEQ ID NO: 2258339 - RNA, 19 nt, Homo sapiens
  misc_RNA (1)...(19): siRNA sense strand
ggaacaaaggaauagcaga

SEQ ID NO: 2258340 - RNA, 19 nt, Homo sapiens
  misc_RNA (1)...(19): siRNA sense strand
gggaaggugcacagccauu

SEQ ID NO: 2258341 - RNA, 19 nt, Homo sapiens
  misc_RNA (1)...(19): siRNA sense strand
ugagaaaugaauuggcaca

SEQ ID NO: 2258342 - RNA, 19 nt, Homo sapiens
  misc_RNA (1)...(19): siRNA sense strand
agaaauaccggcugaagga

SEQ ID NO: 2258343 - RNA, 19 nt, Homo sapiens
  misc_RNA (1)...(19): siRNA sense strand
caaauugagcuaauggaga

SEQ ID NO: 2258344 - RNA, 19 nt, Homo sapiens
  misc_RNA (1)...(19): siRNA sense strand
gagcuaauggagaagauca

SEQ ID NO: 2258345 - RNA, 19 nt, Homo sapiens
  misc_RNA (1)...(19): siRNA sense strand
auguuaauuuggaaggaga

SEQ ID NO: 2258346 - RNA, 19 nt, Homo sapiens
  misc_RNA (1)...(19): siRNA sense strand
uaacaaaggagcuaagcca

SEQ ID NO: 2258347 - RNA, 19 nt, Homo sapiens
  misc_RNA (1)...(19): siRNA sense strand
cagcagaaggccaaauuga

SEQ ID NO: 2258348 - RNA, 19 nt, Homo sapiens
  misc_RNA (1)...(19): siRNA sense strand
acggaggauuucaaggaau

SEQ ID NO: 2258349 - RNA, 19 nt, Homo sapiens
  misc_RNA (1)...(19): siRNA sense strand
cauccuguguguaaagaau

SEQ ID NO: 2258350 - RNA, 19 nt, Homo sapiens
  misc_RNA (1)...(19): siRNA sense strand
gcuuggaugaagacgggaa

SEQ ID NO: 2258351 - RNA, 19 nt, Homo sapiens
  misc_RNA (1)...(19): siRNA sense strand
acuagugaucauucagaaa

SEQ ID NO: 2258352 - RNA, 19 nt, Homo sapiens
  misc_RNA (1)...(19): siRNA sense strand
gcucaucugcaguggcaau

SEQ ID NO: 2258353 - RNA, 19 nt, Homo sapiens
  misc_RNA (1)...(19): siRNA sense strand
aagcagaaauaccggcuga

SEQ ID NO: 2258354 - RNA, 19 nt, Homo sapiens
  misc_RNA (1)...(19): siRNA sense strand
cagugggagcagauauuaa

SEQ ID NO: 2258355 - RNA, 19 nt, Homo sapiens
  misc_RNA (1)...(19): siRNA sense strand
aggucauucuugauacuaa

SEQ ID NO: 2258356 - RNA, 19 nt, Homo sapiens
  misc_RNA (1)...(19): siRNA sense strand
gauacuaauuugaagugca

SEQ ID NO: 2258357 - RNA, 19 nt, Homo sapiens
  misc_RNA (1)...(19): siRNA sense strand
aggcaauaaauguccaauu

SEQ ID NO: 2258358 - RNA, 19 nt, Homo sapiens
  misc_RNA (1)...(19): siRNA sense strand
ggucauucuugauacuaau

SEQ ID NO: 2258359 - RNA, 19 nt, Homo sapiens
  misc_RNA (1)...(19): siRNA sense strand
gagcaaaagaugggaugaa

SEQ ID NO: 2258360 - RNA, 19 nt, Homo sapiens
  misc_RNA (1)...(19): siRNA sense strand
gaaccauaucugagaaaug

SEQ ID NO: 2258361 - RNA, 19 nt, Homo sapiens
  misc_RNA (1)...(19): siRNA sense strand
agacagaggaugaugauag

SEQ ID NO: 2258362 - RNA, 19 nt, Homo sapiens
  misc_RNA (1)...(19): siRNA sense strand
cuuuggaagugcugcauga

SEQ ID NO: 2258363 - RNA, 19 nt, Homo sapiens
  misc_RNA (1)...(19): siRNA sense strand
aaccaaauugaaagcguua

SEQ ID NO: 2258364 - RNA, 19 nt, Homo sapiens
  misc_RNA (1)...(19): siRNA sense strand
cuauuuaauuucaguggga

SEQ ID NO: 2258365 - RNA, 19 nt, Homo sapiens
  misc_RNA (1)...(19): siRNA sense strand
gagucaacacagaggauaa

SEQ ID NO: 2258366 - RNA, 19 nt, Homo sapiens
  misc_RNA (1)...(19): siRNA sense strand
gcucagugucccaaagaaa

SEQ ID NO: 2258367 - RNA, 19 nt, Homo sapiens
  misc_RNA (1)...(19): siRNA sense strand
gagauaaggaaauggguga

SEQ ID NO: 2258368 - RNA, 19 nt, Homo sapiens
  misc_RNA (1)...(19): siRNA sense strand
ugacagaauaagacaggaa

SEQ ID NO: 2258369 - RNA, 19 nt, Homo sapiens
  misc_RNA (1)...(19): siRNA sense strand
uggaaggguucgacgagaa

SEQ ID NO: 2258370 - RNA, 19 nt, Homo sapiens
  misc_RNA (1)...(19): siRNA sense strand
ccgauagcuuuguggaaaa

SEQ ID NO: 2258371 - RNA, 19 nt, Homo sapiens
  misc_RNA (1)...(19): siRNA sense strand
gagaccuaccugugggaaa

SEQ ID NO: 2258372 - RNA, 19 nt, Homo sapiens
  misc_RNA (1)...(19): siRNA sense strand
gguccaggcaucaggaauu

SEQ ID NO: 2258373 - RNA, 19 nt, Homo sapiens
  misc_RNA (1)...(19): siRNA sense strand
caaacaaaggagaagguga

SEQ ID NO: 2258374 - RNA, 19 nt, Homo sapiens
  misc_RNA (1)...(19): siRNA sense strand
ggacaagcuccuagaagca

SEQ ID NO: 2258375 - RNA, 19 nt, Homo sapiens
  misc_RNA (1)...(19): siRNA sense strand
ggagaaagcccuaggaguc

SEQ ID NO: 2258376 - RNA, 19 nt, Homo sapiens
  misc_RNA (1)...(19): siRNA sense strand
ggcagaaacagaagaccaa

SEQ ID NO: 2258377 - RNA, 19 nt, Homo sapiens
  misc_RNA (1)...(19): siRNA sense strand
ccuggagagcuuagagcaa

SEQ ID NO: 2258378 - RNA, 19 nt, Homo sapiens
  misc_RNA (1)...(19): siRNA sense strand
cgagaagugauucaagaaa

SEQ ID NO: 2258379 - RNA, 19 nt, Homo sapiens
  misc_RNA (1)...(19): siRNA sense strand
gauccaagaaacaggugaa

SEQ ID NO: 2258380 - RNA, 19 nt, Homo sapiens
  misc_RNA (1)...(19): siRNA sense strand
ucggaaugaugguuugaaa

SEQ ID NO: 2258381 - RNA, 19 nt, Homo sapiens
  misc_RNA (1)...(19): siRNA sense strand
caagugaggacgugugcaa

SEQ ID NO: 2258382 - RNA, 19 nt, Homo sapiens
  misc_RNA (1)...(19): siRNA sense strand
accaaagaguuguggacau

SEQ ID NO: 2258383 - RNA, 19 nt, Homo sapiens
  misc_RNA (1)...(19): siRNA sense strand
ccuccaacauugaaaccaa

SEQ ID NO: 2258384 - RNA, 19 nt, Homo sapiens
  misc_RNA (1)...(19): siRNA sense strand
agaaggagauguuggagga

SEQ ID NO: 2258385 - RNA, 19 nt, Homo sapiens
  misc_RNA (1)...(19): siRNA sense strand
cagaggaacaauaguaaga

SEQ ID NO: 2258386 - RNA, 19 nt, Homo sapiens
  misc_RNA (1)...(19): siRNA sense strand
ggacauggauggaagaccu

SEQ ID NO: 2258387 - RNA, 19 nt, Homo sapiens
  misc_RNA (1)...(19): siRNA sense strand
gcugaaagaauauggggaa

SEQ ID NO: 2258388 - RNA, 19 nt, Homo sapiens
  misc_RNA (1)...(19): siRNA sense strand
ccaagcaaacaaaggagaa

SEQ ID NO: 2258389 - RNA, 19 nt, Homo sapiens
  misc_RNA (1)...(19): siRNA sense strand
cagcaaacacacuggaguu

SEQ ID NO: 2258390 - RNA, 19 nt, Homo sapiens
  misc_RNA (1)...(19): siRNA sense strand
ucaaugaagagaagcggaa

SEQ ID NO: 2258391 - RNA, 19 nt, Homo sapiens
  misc_RNA (1)...(19): siRNA sense strand
cgaggugacagcagagcua

SEQ ID NO: 2258392 - RNA, 19 nt, Homo sapiens
  misc_RNA (1)...(19): siRNA sense strand
ggaagcuagccaugaacaa

SEQ ID NO: 2258393 - RNA, 19 nt, Homo sapiens
  misc_RNA (1)...(19): siRNA sense strand
ggacuggugugguggacga

SEQ ID NO: 2258394 - RNA, 19 nt, Homo sapiens
  misc_RNA (1)...(19): siRNA sense strand
gggauuugcaugagugcuu

SEQ ID NO: 2258395 - RNA, 19 nt, Homo sapiens
  misc_RNA (1)...(19): siRNA sense strand
gccaaacagaggaacaaua

SEQ ID NO: 2258396 - RNA, 19 nt, Homo sapiens
  misc_RNA (1)...(19): siRNA sense strand
aggagauguuggaggaugu

SEQ ID NO: 2258397 - RNA, 19 nt, Homo sapiens
  misc_RNA (1)...(19): siRNA sense strand
aggaguggaucaagaacau

SEQ ID NO: 2258398 - RNA, 19 nt, Homo sapiens
  misc_RNA (1)...(19): siRNA sense strand
uggacaagcacuacagaga

SEQ ID NO: 2258399 - RNA, 19 nt, Homo sapiens
  misc_RNA (1)...(19): siRNA sense strand
ggaugggaaaguaccgaua

SEQ ID NO: 2258400 - RNA, 19 nt, Homo sapiens
  misc_RNA (1)...(19): siRNA sense strand
aaaccaagcaggaguggau

SEQ ID NO: 2258401 - RNA, 19 nt, Homo sapiens
  misc_RNA (1)...(19): siRNA sense strand
aagcaggaguggaucaaga

SEQ ID NO: 2258402 - RNA, 19 nt, Homo sapiens
  misc_RNA (1)...(19): siRNA sense strand
ccaugaaugccuaugucaa

SEQ ID NO: 2258403 - RNA, 19 nt, Homo sapiens
  misc_RNA (1)...(19): siRNA sense strand
gggaaugugcugagaaggu

SEQ ID NO: 2258404 - RNA, 19 nt, Homo sapiens
  misc_RNA (1)...(19): siRNA sense strand
ggaacaauaguaagaggga

SEQ ID NO: 2258405 - RNA, 19 nt, Homo sapiens
  misc_RNA (1)...(19): siRNA sense strand
aguuauuccuccagagcca

SEQ ID NO: 2258406 - RNA, 19 nt, Homo sapiens
  misc_RNA (1)...(19): siRNA sense strand
ccaggauggcaaagcacua

SEQ ID NO: 2258407 - RNA, 19 nt, Homo sapiens
  misc_RNA (1)...(19): siRNA sense strand
cggaagaucaagcuggaca

SEQ ID NO: 2258408 - RNA, 19 nt, Homo sapiens
  misc_RNA (1)...(19): siRNA sense strand
uggagagcuuagagcaaga

SEQ ID NO: 2258409 - RNA, 19 nt, Homo sapiens
  misc_RNA (1)...(19): siRNA sense strand
ucauuaaacccgacaacuu

SEQ ID NO: 2258410 - RNA, 19 nt, Homo sapiens
  misc_RNA (1)...(19): siRNA sense strand
cugaacuacuccagacaga

SEQ ID NO: 2258411 - RNA, 19 nt, Homo sapiens
  misc_RNA (1)...(19): siRNA sense strand
acagaauaagacaggaaga

SEQ ID NO: 2258412 - RNA, 19 nt, Homo sapiens
  misc_RNA (1)...(19): siRNA sense strand
uggcagaaacagaagacca

SEQ ID NO: 2258413 - RNA, 19 nt, Homo sapiens
  misc_RNA (1)...(19): siRNA sense strand
agcaugaauuggagcucaa

SEQ ID NO: 2258414 - RNA, 19 nt, Homo sapiens
  misc_RNA (1)...(19): siRNA sense strand
ggaacugcugaaagaauau

SEQ ID NO: 2258415 - RNA, 19 nt, Homo sapiens
  misc_RNA (1)...(19): siRNA sense strand
agaacacaguggacaguga

SEQ ID NO: 2258416 - RNA, 19 nt, Homo sapiens
  misc_RNA (1)...(19): siRNA sense strand
uugcugugaagaagggaaa

SEQ ID NO: 2258417 - RNA, 19 nt, Homo sapiens
  misc_RNA (1)...(19): siRNA sense strand
ucaaacagguucugggaug

SEQ ID NO: 2258418 - RNA, 19 nt, Homo sapiens
  misc_RNA (1)...(19): siRNA sense strand
guaguguccuggagagcuu

SEQ ID NO: 2258419 - RNA, 19 nt, Homo sapiens
  misc_RNA (1)...(19): siRNA sense strand
ccccaaaacaccagccaaa

SEQ ID NO: 2258420 - RNA, 19 nt, Homo sapiens
  misc_RNA (1)...(19): siRNA sense strand
aaugaugguuugaaagcuu

SEQ ID NO: 2258421 - RNA, 19 nt, Homo sapiens
  misc_RNA (1)...(19): siRNA sense strand
ucaacacagaggauaauaa

SEQ ID NO: 2258422 - RNA, 19 nt, Homo sapiens
  misc_RNA (1)...(19): siRNA sense strand
agaccuaccugugggaaau

SEQ ID NO: 2258423 - RNA, 19 nt, Homo sapiens
  misc_RNA (1)...(19): siRNA sense strand
ggaucaagaacauucgaga

SEQ ID NO: 2258424 - RNA, 19 nt, Homo sapiens
  misc_RNA (1)...(19): siRNA sense strand
gaauaagacaggaagaccu

SEQ ID NO: 2258425 - RNA, 19 nt, Homo sapiens
  misc_RNA (1)...(19): siRNA sense strand
acgaagucaaugaagagaa

SEQ ID NO: 2258426 - RNA, 19 nt, Homo sapiens
  misc_RNA (1)...(19): siRNA sense strand
guccaaaggaucaccaaau

SEQ ID NO: 2258427 - RNA, 19 nt, Homo sapiens
  misc_RNA (1)...(19): siRNA sense strand
ggaagaucaagcuggacau

SEQ ID NO: 2258428 - RNA, 19 nt, Homo sapiens
  misc_RNA (1)...(19): siRNA sense strand
augagaagcagcaugaauu

SEQ ID NO: 2258429 - RNA, 19 nt, Homo sapiens
  misc_RNA (1)...(19): siRNA sense strand
agauauaaagccagagaau

SEQ ID NO: 2258430 - RNA, 19 nt, Homo sapiens
  misc_RNA (1)...(19): siRNA sense strand
ccuuaguugaagaaagaaa

SEQ ID NO: 2258431 - RNA, 19 nt, Homo sapiens
  misc_RNA (1)...(19): siRNA sense strand
acacagagauauaaagcca

SEQ ID NO: 2258432 - RNA, 19 nt, Homo sapiens
  misc_RNA (1)...(19): siRNA sense strand
caaaacagaaagaaggaaa

SEQ ID NO: 2258433 - RNA, 19 nt, Homo sapiens
  misc_RNA (1)...(19): siRNA sense strand
cuuggaaguguguaagaaa

SEQ ID NO: 2258434 - RNA, 19 nt, Homo sapiens
  misc_RNA (1)...(19): siRNA sense strand
cugaaaucaaggaaagaga

SEQ ID NO: 2258435 - RNA, 19 nt, Homo sapiens
  misc_RNA (1)...(19): siRNA sense strand
ggugaugaaguguaggaau

SEQ ID NO: 2258436 - RNA, 19 nt, Homo sapiens
  misc_RNA (1)...(19): siRNA sense strand
aggaauaaagauacuggaa

SEQ ID NO: 2258437 - RNA, 19 nt, Homo sapiens
  misc_RNA (1)...(19): siRNA sense strand
cuccaugacaguaggacaa

SEQ ID NO: 2258438 - RNA, 19 nt, Homo sapiens
  misc_RNA (1)...(19): siRNA sense strand
uagaaagugacgaugacaa

SEQ ID NO: 2258439 - RNA, 19 nt, Homo sapiens
  misc_RNA (1)...(19): siRNA sense strand
cuggaagaauuguggccau

SEQ ID NO: 2258440 - RNA, 19 nt, Homo sapiens
  misc_RNA (1)...(19): siRNA sense strand
aagauugcaaugcgagaaa

SEQ ID NO: 2258441 - RNA, 19 nt, Homo sapiens
  misc_RNA (1)...(19): siRNA sense strand
uggugaaucucuuggaagu

SEQ ID NO: 2258442 - RNA, 19 nt, Homo sapiens
  misc_RNA (1)...(19): siRNA sense strand
guguaggaauaaagauacu

SEQ ID NO: 2258443 - RNA, 19 nt, Homo sapiens
  misc_RNA (1)...(19): siRNA sense strand
cagaacuauugguugguga

SEQ ID NO: 2258444 - RNA, 19 nt, Homo sapiens
  misc_RNA (1)...(19): siRNA sense strand
acagagauauaaagccaga

SEQ ID NO: 2258445 - RNA, 19 nt, Homo sapiens
  misc_RNA (1)...(19): siRNA sense strand
aggacaagccacaacaaaa

SEQ ID NO: 2258446 - RNA, 19 nt, Homo sapiens
  misc_RNA (1)...(19): siRNA sense strand
gggacugagacuauaccaa

SEQ ID NO: 2258447 - RNA, 19 nt, Homo sapiens
  misc_RNA (1)...(19): siRNA sense strand
uugcaaugcgagaaaucaa

SEQ ID NO: 2258448 - RNA, 19 nt, Homo sapiens
  misc_RNA (1)...(19): siRNA sense strand
guuaaaccgaacagacauu

SEQ ID NO: 2258449 - RNA, 19 nt, Homo sapiens
  misc_RNA (1)...(19): siRNA sense strand
ugaugaaguguaggaauaa

SEQ ID NO: 2258450 - RNA, 19 nt, Homo sapiens
  misc_RNA (1)...(19): siRNA sense strand
ucacaauaucauacacaga

SEQ ID NO: 2258451 - RNA, 19 nt, Homo sapiens
  misc_RNA (1)...(19): siRNA sense strand
cagaaagaugccagaaaug

SEQ ID NO: 2258452 - RNA, 19 nt, Homo sapiens
  misc_RNA (1)...(19): siRNA sense strand
aggcaauagagcuucaaau

SEQ ID NO: 2258453 - RNA, 19 nt, Homo sapiens
  misc_RNA (1)...(19): siRNA sense strand
ucuuagaaagugacgauga

SEQ ID NO: 2258454 - RNA, 19 nt, Homo sapiens
  misc_RNA (1)...(19): siRNA sense strand
uaaucuaauuccaaggcau

SEQ ID NO: 2258455 - RNA, 19 nt, Homo sapiens
  misc_RNA (1)...(19): siRNA sense strand
uggugauagauuuagcaaa

SEQ ID NO: 2258456 - RNA, 19 nt, Homo sapiens
  misc_RNA (1)...(19): siRNA sense strand
uacagaaagaugccagaaa

SEQ ID NO: 2258457 - RNA, 19 nt, Homo sapiens
  misc_RNA (1)...(19): siRNA sense strand
ccuauuuccuggagauucu

SEQ ID NO: 2258458 - RNA, 19 nt, Homo sapiens
  misc_RNA (1)...(19): siRNA sense strand
augaaaacuuggugaaucu

SEQ ID NO: 2258459 - RNA, 19 nt, Homo sapiens
  misc_RNA (1)...(19): siRNA sense strand
ucuuucaaauggauggauu

SEQ ID NO: 2258460 - RNA, 19 nt, Homo sapiens
  misc_RNA (1)...(19): siRNA sense strand
uuggaaguguguaagaaaa

SEQ ID NO: 2258461 - RNA, 19 nt, Homo sapiens
  misc_RNA (1)...(19): siRNA sense strand
aaucaaggaaagagaaccu

SEQ ID NO: 2258462 - RNA, 19 nt, Homo sapiens
  misc_RNA (1)...(19): siRNA sense strand
aggaagaagaagaagcaga

SEQ ID NO: 2258463 - RNA, 19 nt, Homo sapiens
  misc_RNA (1)...(19): siRNA sense strand
ccaagaaggugccggcuga

SEQ ID NO: 2258464 - RNA, 19 nt, Homo sapiens
  misc_RNA (1)...(19): siRNA sense strand
augaagaagaggaggagga

SEQ ID NO: 2258465 - RNA, 19 nt, Homo sapiens
  misc_RNA (1)...(19): siRNA sense strand
gggugauggaagaggcaga

SEQ ID NO: 2258466 - RNA, 19 nt, Homo sapiens
  misc_RNA (1)...(19): siRNA sense strand
cuggaaaggcagcgggcau

SEQ ID NO: 2258467 - RNA, 19 nt, Homo sapiens
  misc_RNA (1)...(19): siRNA sense strand
aggaacaggaagaagaaga

SEQ ID NO: 2258468 - RNA, 19 nt, Homo sapiens
  misc_RNA (1)...(19): siRNA sense strand
augaggaggaugaggauga

SEQ ID NO: 2258469 - RNA, 19 nt, Homo sapiens
  misc_RNA (1)...(19): siRNA sense strand
cugaaaaguugcagaagca

SEQ ID NO: 2258470 - RNA, 19 nt, Homo sapiens
  misc_RNA (1)...(19): siRNA sense strand
aggaugaagaagaggagga

SEQ ID NO: 2258471 - RNA, 19 nt, Homo sapiens
  misc_RNA (1)...(19): siRNA sense strand
aggaaggggugauggaaga

SEQ ID NO: 2258472 - RNA, 19 nt, Homo sapiens
  misc_RNA (1)...(19): siRNA sense strand
aagaggaggaggaagaaaa

SEQ ID NO: 2258473 - RNA, 19 nt, Homo sapiens
  misc_RNA (1)...(19): siRNA sense strand
aggaagaaaaggaggcaga

SEQ ID NO: 2258474 - RNA, 19 nt, Homo sapiens
  misc_RNA (1)...(19): siRNA sense strand
ugauggaggagaacagcaa

SEQ ID NO: 2258475 - RNA, 19 nt, Homo sapiens
  misc_RNA (1)...(19): siRNA sense strand
gggaggagguggaacugga

SEQ ID NO: 2258476 - RNA, 19 nt, Homo sapiens
  misc_RNA (1)...(19): siRNA sense strand
guguuuugauggaggagaa

SEQ ID NO: 2258477 - RNA, 19 nt, Homo sapiens
  misc_RNA (1)...(19): siRNA sense strand
cagccaaggaggagauuuu

SEQ ID NO: 2258478 - RNA, 19 nt, Homo sapiens
  misc_RNA (1)...(19): siRNA sense strand
cggcagcugagguggaaga

SEQ ID NO: 2258479 - RNA, 19 nt, Homo sapiens
  misc_RNA (1)...(19): siRNA sense strand
uguuauauuugcuggagga

SEQ ID NO: 2258480 - RNA, 19 nt, Homo sapiens
  misc_RNA (1)...(19): siRNA sense strand
aggcagaagaggaacagga

SEQ ID NO: 2258481 - RNA, 19 nt, Homo sapiens
  misc_RNA (1)...(19): siRNA sense strand
cuggaagccuugcaggaga

SEQ ID NO: 2258482 - RNA, 19 nt, Homo sapiens
  misc_RNA (1)...(19): siRNA sense strand
agguggaacuggagcugga

SEQ ID NO: 2258483 - RNA, 19 nt, Homo sapiens
  misc_RNA (1)...(19): siRNA sense strand
aagaaaaggaggcagaaga

SEQ ID NO: 2258484 - RNA, 19 nt, Homo sapiens
  misc_RNA (1)...(19): siRNA sense strand
gcugggaggagguggaacu

SEQ ID NO: 2258485 - RNA, 19 nt, Homo sapiens
  misc_RNA (1)...(19): siRNA sense strand
aggaggaugaggaugaaga

SEQ ID NO: 2258486 - RNA, 19 nt, Homo sapiens
  misc_RNA (1)...(19): siRNA sense strand
cucuugaggaugaggaaca

SEQ ID NO: 2258487 - RNA, 19 nt, Homo sapiens
  misc_RNA (1)...(19): siRNA sense strand
auucugaugaggaggauga

SEQ ID NO: 2258488 - RNA, 19 nt, Homo sapiens
  misc_RNA (1)...(19): siRNA sense strand
aggaggcagaagaggaaca

SEQ ID NO: 2258489 - RNA, 19 nt, Homo sapiens
  misc_RNA (1)...(19): siRNA sense strand
uguauuuuauggagaggaa

SEQ ID NO: 2258490 - RNA, 19 nt, Homo sapiens
  misc_RNA (1)...(19): siRNA sense strand
gcucagccaaggaggagau

SEQ ID NO: 2258491 - RNA, 19 nt, Homo sapiens
  misc_RNA (1)...(19): siRNA sense strand
gcccacagcuggaagccuu

SEQ ID NO: 2258492 - RNA, 19 nt, Homo sapiens
  misc_RNA (1)...(19): siRNA sense strand
cagugaggaucgagagcag

SEQ ID NO: 2258493 - RNA, 19 nt, Homo sapiens
  misc_RNA (1)...(19): siRNA sense strand
aggaagaagaagaagcaga

SEQ ID NO: 2258494 - RNA, 19 nt, Homo sapiens
  misc_RNA (1)...(19): siRNA sense strand
ccaagaaggugccggcuga

SEQ ID NO: 2258495 - RNA, 19 nt, Homo sapiens
  misc_RNA (1)...(19): siRNA sense strand
augaagaagaggaggagga

SEQ ID NO: 2258496 - RNA, 19 nt, Homo sapiens
  misc_RNA (1)...(19): siRNA sense strand
gggugauggaagaggcaga

SEQ ID NO: 2258497 - RNA, 19 nt, Homo sapiens
  misc_RNA (1)...(19): siRNA sense strand
cuggaaaggcagcgggcau

SEQ ID NO: 2258498 - RNA, 19 nt, Homo sapiens
  misc_RNA (1)...(19): siRNA sense strand
aggaacaggaagaagaaga

SEQ ID NO: 2258499 - RNA, 19 nt, Homo sapiens
  misc_RNA (1)...(19): siRNA sense strand
augaggaggaugaggauga

SEQ ID NO: 2258500 - RNA, 19 nt, Homo sapiens
  misc_RNA (1)...(19): siRNA sense strand
cugaaaaguugcagaagca

SEQ ID NO: 2258501 - RNA, 19 nt, Homo sapiens
  misc_RNA (1)...(19): siRNA sense strand
aggaugaagaagaggagga

SEQ ID NO: 2258502 - RNA, 19 nt, Homo sapiens
  misc_RNA (1)...(19): siRNA sense strand
aggaaggggugauggaaga

SEQ ID NO: 2258503 - RNA, 19 nt, Homo sapiens
  misc_RNA (1)...(19): siRNA sense strand
aagaggaggaggaagaaaa

SEQ ID NO: 2258504 - RNA, 19 nt, Homo sapiens
  misc_RNA (1)...(19): siRNA sense strand
aggaagaaaaggaggcaga

SEQ ID NO: 2258505 - RNA, 19 nt, Homo sapiens
  misc_RNA (1)...(19): siRNA sense strand
ugauggaggagaacagcaa

SEQ ID NO: 2258506 - RNA, 19 nt, Homo sapiens
  misc_RNA (1)...(19): siRNA sense strand
gggaggagguggaacugga

SEQ ID NO: 2258507 - RNA, 19 nt, Homo sapiens
  misc_RNA (1)...(19): siRNA sense strand
guguuuugauggaggagaa

SEQ ID NO: 2258508 - RNA, 19 nt, Homo sapiens
  misc_RNA (1)...(19): siRNA sense strand
cagccaaggaggagauuuu

SEQ ID NO: 2258509 - RNA, 19 nt, Homo sapiens
  misc_RNA (1)...(19): siRNA sense strand
cggcagcugagguggaaga

SEQ ID NO: 2258510 - RNA, 19 nt, Homo sapiens
  misc_RNA (1)...(19): siRNA sense strand
uguuauauuugcuggagga

SEQ ID NO: 2258511 - RNA, 19 nt, Homo sapiens
  misc_RNA (1)...(19): siRNA sense strand
aggcagaagaggaacagga

SEQ ID NO: 2258512 - RNA, 19 nt, Homo sapiens
  misc_RNA (1)...(19): siRNA sense strand
cuggaagccuugcaggaga

SEQ ID NO: 2258513 - RNA, 19 nt, Homo sapiens
  misc_RNA (1)...(19): siRNA sense strand
agguggaacuggagcugga

SEQ ID NO: 2258514 - RNA, 19 nt, Homo sapiens
  misc_RNA (1)...(19): siRNA sense strand
aagaaaaggaggcagaaga

SEQ ID NO: 2258515 - RNA, 19 nt, Homo sapiens
  misc_RNA (1)...(19): siRNA sense strand
gcugggaggagguggaacu

SEQ ID NO: 2258516 - RNA, 19 nt, Homo sapiens
  misc_RNA (1)...(19): siRNA sense strand
aggaggaugaggaugaaga

SEQ ID NO: 2258517 - RNA, 19 nt, Homo sapiens
  misc_RNA (1)...(19): siRNA sense strand
cucuugaggaugaggaaca

SEQ ID NO: 2258518 - RNA, 19 nt, Homo sapiens
  misc_RNA (1)...(19): siRNA sense strand
auucugaugaggaggauga

SEQ ID NO: 2258519 - RNA, 19 nt, Homo sapiens
  misc_RNA (1)...(19): siRNA sense strand
aggaggcagaagaggaaca

SEQ ID NO: 2258520 - RNA, 19 nt, Homo sapiens
  misc_RNA (1)...(19): siRNA sense strand
uguauuuuauggagaggaa

SEQ ID NO: 2258521 - RNA, 19 nt, Homo sapiens
  misc_RNA (1)...(19): siRNA sense strand
gcucagccaaggaggagau

SEQ ID NO: 2258522 - RNA, 19 nt, Homo sapiens
  misc_RNA (1)...(19): siRNA sense strand
gcccacagcuggaagccuu

SEQ ID NO: 2258523 - RNA, 19 nt, Homo sapiens
  misc_RNA (1)...(19): siRNA sense strand
cagugaggaucgagagcag

SEQ ID NO: 2258524 - RNA, 19 nt, Homo sapiens
  misc_RNA (1)...(19): siRNA sense strand
aggccaagucugugccaau

SEQ ID NO: 2258525 - RNA, 19 nt, Homo sapiens
  misc_RNA (1)...(19): siRNA sense strand
cggccgaguucagggacaa

SEQ ID NO: 2258526 - RNA, 19 nt, Homo sapiens
  misc_RNA (1)...(19): siRNA sense strand
ccgucagccuggaucgcua

SEQ ID NO: 2258527 - RNA, 19 nt, Homo sapiens
  misc_RNA (1)...(19): siRNA sense strand
cuccaaggccucugcggaa

SEQ ID NO: 2258528 - RNA, 19 nt, Homo sapiens
  misc_RNA (1)...(19): siRNA sense strand
cguuguaggaguagagcua

SEQ ID NO: 2258529 - RNA, 19 nt, Homo sapiens
  misc_RNA (1)...(19): siRNA sense strand
augaugaaccagagggcaa

SEQ ID NO: 2258530 - RNA, 19 nt, Homo sapiens
  misc_RNA (1)...(19): siRNA sense strand
cuguaaagaggaaggugua

SEQ ID NO: 2258531 - RNA, 19 nt, Homo sapiens
  misc_RNA (1)...(19): siRNA sense strand
gagauaaaauauagaggga

SEQ ID NO: 2258532 - RNA, 19 nt, Homo sapiens
  misc_RNA (1)...(19): siRNA sense strand
gauaaaauauagagggaug

SEQ ID NO: 2258533 - RNA, 19 nt, Homo sapiens
  misc_RNA (1)...(19): siRNA sense strand
uguggaaacaugagggcuu

SEQ ID NO: 2258534 - RNA, 19 nt, Homo sapiens
  misc_RNA (1)...(19): siRNA sense strand
ugucaggaaugaugggcga

SEQ ID NO: 2258535 - RNA, 19 nt, Homo sapiens
  misc_RNA (1)...(19): siRNA sense strand
uauaaaggauuuuggccaa

SEQ ID NO: 2258536 - RNA, 19 nt, Homo sapiens
  misc_RNA (1)...(19): siRNA sense strand
cggcuuggacccuggaaca

SEQ ID NO: 2258537 - RNA, 19 nt, Homo sapiens
  misc_RNA (1)...(19): siRNA sense strand
acuucagguucaaggccaa

SEQ ID NO: 2258538 - RNA, 19 nt, Homo sapiens
  misc_RNA (1)...(19): siRNA sense strand
aggaaugaugggcgauaca

SEQ ID NO: 2258539 - RNA, 19 nt, Homo sapiens
  misc_RNA (1)...(19): siRNA sense strand
cguuguaggaguagagcua

SEQ ID NO: 2258540 - RNA, 19 nt, Homo sapiens
  misc_RNA (1)...(19): siRNA sense strand
augaugaaccagagggcaa

SEQ ID NO: 2258541 - RNA, 19 nt, Homo sapiens
  misc_RNA (1)...(19): siRNA sense strand
cuguaaagaggaaggugua

SEQ ID NO: 2258542 - RNA, 19 nt, Homo sapiens
  misc_RNA (1)...(19): siRNA sense strand
gagauaaaauauagaggga

SEQ ID NO: 2258543 - RNA, 19 nt, Homo sapiens
  misc_RNA (1)...(19): siRNA sense strand
gauaaaauauagagggaug

SEQ ID NO: 2258544 - RNA, 19 nt, Homo sapiens
  misc_RNA (1)...(19): siRNA sense strand
uguggaaacaugagggcuu

SEQ ID NO: 2258545 - RNA, 19 nt, Homo sapiens
  misc_RNA (1)...(19): siRNA sense strand
ugucaggaaugaugggcga

SEQ ID NO: 2258546 - RNA, 19 nt, Homo sapiens
  misc_RNA (1)...(19): siRNA sense strand
uauaaaggauuuuggccaa

SEQ ID NO: 2258547 - RNA, 19 nt, Homo sapiens
  misc_RNA (1)...(19): siRNA sense strand
cggcuuggacccuggaaca

SEQ ID NO: 2258548 - RNA, 19 nt, Homo sapiens
  misc_RNA (1)...(19): siRNA sense strand
acuucagguucaaggccaa

SEQ ID NO: 2258549 - RNA, 19 nt, Homo sapiens
  misc_RNA (1)...(19): siRNA sense strand
aggaaugaugggcgauaca

SEQ ID NO: 2258550 - RNA, 19 nt, Homo sapiens
  misc_RNA (1)...(19): siRNA sense strand
cggaagaagaagagcucaa

SEQ ID NO: 2258551 - RNA, 19 nt, Homo sapiens
  misc_RNA (1)...(19): siRNA sense strand
ucucaaagcucgcgggaca

SEQ ID NO: 2258552 - RNA, 19 nt, Homo sapiens
  misc_RNA (1)...(19): siRNA sense strand
ggaaccaggccuugggcaa

SEQ ID NO: 2258553 - RNA, 19 nt, Homo sapiens
  misc_RNA (1)...(19): siRNA sense strand
gcucaaagucccuggcuca

SEQ ID NO: 2258554 - RNA, 19 nt, Homo sapiens
  misc_RNA (1)...(19): siRNA sense strand
aacucaagccaguggauua

SEQ ID NO: 2258555 - RNA, 19 nt, Homo sapiens
  misc_RNA (1)...(19): siRNA sense strand
ucaccagagcggaaagcaa

SEQ ID NO: 2258556 - RNA, 19 nt, Homo sapiens
  misc_RNA (1)...(19): siRNA sense strand
ugcacaggauggaggacaa

SEQ ID NO: 2258557 - RNA, 19 nt, Homo sapiens
  misc_RNA (1)...(19): siRNA sense strand
gcagaggagcugauggcau

SEQ ID NO: 2258558 - RNA, 19 nt, Homo sapiens
  misc_RNA (1)...(19): siRNA sense strand
uguauggagcugugagaga

SEQ ID NO: 2258559 - RNA, 19 nt, Homo sapiens
  misc_RNA (1)...(19): siRNA sense strand
aagaaacggaagaagaaga

SEQ ID NO: 2258560 - RNA, 19 nt, Homo sapiens
  misc_RNA (1)...(19): siRNA sense strand
cguguguguuggaagggaa

SEQ ID NO: 2258561 - RNA, 19 nt, Homo sapiens
  misc_RNA (1)...(19): siRNA sense strand
gguccaaacaguacagcca

SEQ ID NO: 2258562 - RNA, 19 nt, Homo sapiens
  misc_RNA (1)...(19): siRNA sense strand
guguguguuggaagggaaa

SEQ ID NO: 2258563 - RNA, 19 nt, Homo sapiens
  misc_RNA (1)...(19): siRNA sense strand
agcuugaggccguggagaa

SEQ ID NO: 2258564 - RNA, 19 nt, Homo sapiens
  misc_RNA (1)...(19): siRNA sense strand
gccccaaaacugaggacaa

SEQ ID NO: 2258565 - RNA, 19 nt, Homo sapiens
  misc_RNA (1)...(19): siRNA sense strand
ggaaagugggagauccuga

SEQ ID NO: 2258566 - RNA, 19 nt, Homo sapiens
  misc_RNA (1)...(19): siRNA sense strand
gggucaaagugggagacau

SEQ ID NO: 2258567 - RNA, 19 nt, Homo sapiens
  misc_RNA (1)...(19): siRNA sense strand
gaagaaguccacugggcca

SEQ ID NO: 2258568 - RNA, 19 nt, Homo sapiens
  misc_RNA (1)...(19): siRNA sense strand
gcggaaagugggagauccu

SEQ ID NO: 2258569 - RNA, 19 nt, Homo sapiens
  misc_RNA (1)...(19): siRNA sense strand
ugagaauagccaagaguuc

SEQ ID NO: 2258570 - RNA, 19 nt, Homo sapiens
  misc_RNA (1)...(19): siRNA sense strand
caguacagccaguccgaga

SEQ ID NO: 2258571 - RNA, 19 nt, Homo sapiens
  misc_RNA (1)...(19): siRNA sense strand
ucuacaagcuugaggccgu

SEQ ID NO: 2258572 - RNA, 19 nt, Homo sapiens
  misc_RNA (1)...(19): siRNA sense strand
uuaugaguaccgagaagaa

SEQ ID NO: 2258573 - RNA, 19 nt, Homo sapiens
  misc_RNA (1)...(19): siRNA sense strand
gcugauggcaugugcagga

SEQ ID NO: 2258574 - RNA, 19 nt, Homo sapiens
  misc_RNA (1)...(19): siRNA sense strand
ccgagagagcuuucgccaa

SEQ ID NO: 2258575 - RNA, 19 nt, Homo sapiens
  misc_RNA (1)...(19): siRNA sense strand
ccaucaaaggccucucaaa

SEQ ID NO: 2258576 - RNA, 19 nt, Homo sapiens
  misc_RNA (1)...(19): siRNA sense strand
aguuuucuguggaggaaua

SEQ ID NO: 2258577 - RNA, 19 nt, Homo sapiens
  misc_RNA (1)...(19): siRNA sense strand
cagaggagcugauggcaug

SEQ ID NO: 2258578 - RNA, 19 nt, Homo sapiens
  misc_RNA (1)...(19): siRNA sense strand
aagcauggccagcuggaga

SEQ ID NO: 2258579 - RNA, 19 nt, Homo sapiens
  misc_RNA (1)...(19): siRNA sense strand
ucccagugcaggaggauga

SEQ ID NO: 2258580 - RNA, 19 nt, Homo sapiens
  misc_RNA (1)...(19): siRNA sense strand
gccagaaacccuugccuga

SEQ ID NO: 2258581 - RNA, 19 nt, Homo sapiens
  misc_RNA (1)...(19): siRNA sense strand
cgagagagcuuucgccaag

SEQ ID NO: 2258582 - RNA, 19 nt, Homo sapiens
  misc_RNA (1)...(19): siRNA sense strand
ggaccaagaaccugcgcau

SEQ ID NO: 2258583 - RNA, 19 nt, Homo sapiens
  misc_RNA (1)...(19): siRNA sense strand
gcaaauaccaggagagcga

SEQ ID NO: 2258584 - RNA, 19 nt, Homo sapiens
  misc_RNA (1)...(19): siRNA sense strand
aagagaagguggugggcau

SEQ ID NO: 2258585 - RNA, 19 nt, Homo sapiens
  misc_RNA (1)...(19): siRNA sense strand
gccaguggguugugggcuu

SEQ ID NO: 2258586 - RNA, 19 nt, Homo sapiens
  misc_RNA (1)...(19): siRNA sense strand
gcuccgaaauggacccaga

SEQ ID NO: 2258587 - RNA, 19 nt, Homo sapiens
  misc_RNA (1)...(19): siRNA sense strand
cagaaauacaagugugcau

SEQ ID NO: 2258588 - RNA, 19 nt, Homo sapiens
  misc_RNA (1)...(19): siRNA sense strand
gguucagggagcagaggua

SEQ ID NO: 2258589 - RNA, 19 nt, Homo sapiens
  misc_RNA (1)...(19): siRNA sense strand
gagcgaugaggcagagcaa

SEQ ID NO: 2258590 - RNA, 19 nt, Homo sapiens
  misc_RNA (1)...(19): siRNA sense strand
ucuaugugcaaaugagaaa

SEQ ID NO: 2258591 - RNA, 19 nt, Homo sapiens
  misc_RNA (1)...(19): siRNA sense strand
aaggugaacuggagagcga

SEQ ID NO: 2258592 - RNA, 19 nt, Homo sapiens
  misc_RNA (1)...(19): siRNA sense strand
gggccuguacagugagaca

SEQ ID NO: 2258593 - RNA, 19 nt, Homo sapiens
  misc_RNA (1)...(19): siRNA sense strand
gacucaaacgcguggaaaa

SEQ ID NO: 2258594 - RNA, 19 nt, Homo sapiens
  misc_RNA (1)...(19): siRNA sense strand
acacuaagguucagggagc

SEQ ID NO: 2258595 - RNA, 19 nt, Homo sapiens
  misc_RNA (1)...(19): siRNA sense strand
gguaaaauauaaaggacuc

SEQ ID NO: 2258596 - RNA, 19 nt, Homo sapiens
  misc_RNA (1)...(19): siRNA sense strand
uggagagcgaugaggcaga

SEQ ID NO: 2258597 - RNA, 19 nt, Homo sapiens
  misc_RNA (1)...(19): siRNA sense strand
uggcaccagaggaugaaua

SEQ ID NO: 2258598 - RNA, 19 nt, Homo sapiens
  misc_RNA (1)...(19): siRNA sense strand
ugguggagcgggaggaaga

SEQ ID NO: 2258599 - RNA, 19 nt, Homo sapiens
  misc_RNA (1)...(19): siRNA sense strand
ugagggaggaggaggagca

SEQ ID NO: 2258600 - RNA, 19 nt, Homo sapiens
  misc_RNA (1)...(19): siRNA sense strand
ugguggagcgggaggaaga

SEQ ID NO: 2258601 - RNA, 19 nt, Homo sapiens
  misc_RNA (1)...(19): siRNA sense strand
ugagggaggaggaggagca

SEQ ID NO: 2258602 - RNA, 19 nt, Homo sapiens
  misc_RNA (1)...(19): siRNA sense strand
aguacaggauugagagcaa

SEQ ID NO: 2258603 - RNA, 19 nt, Homo sapiens
  misc_RNA (1)...(19): siRNA sense strand
acuuaaagaauccggauaa

SEQ ID NO: 2258604 - RNA, 19 nt, Homo sapiens
  misc_RNA (1)...(19): siRNA sense strand
gaaagaugacagaggccaa

SEQ ID NO: 2258605 - RNA, 19 nt, Homo sapiens
  misc_RNA (1)...(19): siRNA sense strand
aggaggaccugcugggcua

SEQ ID NO: 2258606 - RNA, 19 nt, Homo sapiens
  misc_RNA (1)...(19): siRNA sense strand
ccuugaaauagcuggcaaa

SEQ ID NO: 2258607 - RNA, 19 nt, Homo sapiens
  misc_RNA (1)...(19): siRNA sense strand
cggacaagcuuuugaugaa

SEQ ID NO: 2258608 - RNA, 19 nt, Homo sapiens
  misc_RNA (1)...(19): siRNA sense strand
ggagaggaugucugugaaa

SEQ ID NO: 2258609 - RNA, 19 nt, Homo sapiens
  misc_RNA (1)...(19): siRNA sense strand
gugaaguaggaacgaauaa

SEQ ID NO: 2258610 - RNA, 19 nt, Homo sapiens
  misc_RNA (1)...(19): siRNA sense strand
agaccaggcaccaaggaaa

SEQ ID NO: 2258611 - RNA, 19 nt, Homo sapiens
  misc_RNA (1)...(19): siRNA sense strand
uggaagaggcugaguuuca

SEQ ID NO: 2258612 - RNA, 19 nt, Homo sapiens
  misc_RNA (1)...(19): siRNA sense strand
guuugauggcauugagcaa

SEQ ID NO: 2258613 - RNA, 19 nt, Homo sapiens
  misc_RNA (1)...(19): siRNA sense strand
aggcugaguuucaaaggaa

SEQ ID NO: 2258614 - RNA, 19 nt, Homo sapiens
  misc_RNA (1)...(19): siRNA sense strand
uugcaaacaccaagaaaga

SEQ ID NO: 2258615 - RNA, 19 nt, Homo sapiens
  misc_RNA (1)...(19): siRNA sense strand
aagaugaggagcaggagaa

SEQ ID NO: 2258616 - RNA, 19 nt, Homo sapiens
  misc_RNA (1)...(19): siRNA sense strand
agcagaugauggaggacaa

SEQ ID NO: 2258617 - RNA, 19 nt, Homo sapiens
  misc_RNA (1)...(19): siRNA sense strand
caaagaaggaccacgguga

SEQ ID NO: 2258618 - RNA, 19 nt, Homo sapiens
  misc_RNA (1)...(19): siRNA sense strand
ugaugaagcauuugcagaa

SEQ ID NO: 2258619 - RNA, 19 nt, Homo sapiens
  misc_RNA (1)...(19): siRNA sense strand
cuggauauuucguggacuu

SEQ ID NO: 2258620 - RNA, 19 nt, Homo sapiens
  misc_RNA (1)...(19): siRNA sense strand
cagaagagacauaggcacu

SEQ ID NO: 2258621 - RNA, 19 nt, Homo sapiens
  misc_RNA (1)...(19): siRNA sense strand
ucagaugaugagagguuua

SEQ ID NO: 2258622 - RNA, 19 nt, Homo sapiens
  misc_RNA (1)...(19): siRNA sense strand
aggaaucagacgucauaaa

SEQ ID NO: 2258623 - RNA, 19 nt, Homo sapiens
  misc_RNA (1)...(19): siRNA sense strand
ccguucauuuggagggaga

SEQ ID NO: 2258624 - RNA, 19 nt, Homo sapiens
  misc_RNA (1)...(19): siRNA sense strand
gggaggaggaugcuggaga

SEQ ID NO: 2258625 - RNA, 19 nt, Homo sapiens
  misc_RNA (1)...(19): siRNA sense strand
augacuugcuguugaaaga

SEQ ID NO: 2258626 - RNA, 19 nt, Homo sapiens
  misc_RNA (1)...(19): siRNA sense strand
gagcaggagaacagaagca

SEQ ID NO: 2258627 - RNA, 19 nt, Homo sapiens
  misc_RNA (1)...(19): siRNA sense strand
cccagaaguccuugaguca

SEQ ID NO: 2258628 - RNA, 19 nt, Homo sapiens
  misc_RNA (1)...(19): siRNA sense strand
aggaagaugaggagcagga

SEQ ID NO: 2258629 - RNA, 19 nt, Homo sapiens
  misc_RNA (1)...(19): siRNA sense strand
gguuacaagccguucauuu

SEQ ID NO: 2258630 - RNA, 19 nt, Homo sapiens
  misc_RNA (1)...(19): siRNA sense strand
gaccuaagcaugaggagga

SEQ ID NO: 2258631 - RNA, 19 nt, Homo sapiens
  misc_RNA (1)...(19): siRNA sense strand
ucaagaacgaccaggacau

SEQ ID NO: 2258632 - RNA, 19 nt, Homo sapiens
  misc_RNA (1)...(19): siRNA sense strand
caaagauggcagucugauu

SEQ ID NO: 2258633 - RNA, 19 nt, Homo sapiens
  misc_RNA (1)...(19): siRNA sense strand
gugucgaugaacagggcaa

SEQ ID NO: 2258634 - RNA, 19 nt, Homo sapiens
  misc_RNA (1)...(19): siRNA sense strand
gagcaaugaaauaaagaac

SEQ ID NO: 2258635 - RNA, 19 nt, Homo sapiens
  misc_RNA (1)...(19): siRNA sense strand
ggaccuacacugugcagau

SEQ ID NO: 2258636 - RNA, 19 nt, Homo sapiens
  misc_RNA (1)...(19): siRNA sense strand
cuggcaaaguguaugauga

SEQ ID NO: 2258637 - RNA, 19 nt, Homo sapiens
  misc_RNA (1)...(19): siRNA sense strand
cggugagcguguacaaaca

SEQ ID NO: 2258638 - RNA, 19 nt, Homo sapiens
  misc_RNA (1)...(19): siRNA sense strand
caccaaugcccacggacaa

SEQ ID NO: 2258639 - RNA, 19 nt, Homo sapiens
  misc_RNA (1)...(19): siRNA sense strand
uuucagaugaugagagguu

SEQ ID NO: 2258640 - RNA, 19 nt, Homo sapiens
  misc_RNA (1)...(19): siRNA sense strand
uggcaaaguguaugaugau

SEQ ID NO: 2258641 - RNA, 19 nt, Homo sapiens
  misc_RNA (1)...(19): siRNA sense strand
cgacaauccuaacggugga

SEQ ID NO: 2258642 - RNA, 19 nt, Homo sapiens
  misc_RNA (1)...(19): siRNA sense strand
agcgagauacacagaauua

SEQ ID NO: 2258643 - RNA, 19 nt, Homo sapiens
  misc_RNA (1)...(19): siRNA sense strand
acauuugaagagcggauaa

SEQ ID NO: 2258644 - RNA, 19 nt, Homo sapiens
  misc_RNA (1)...(19): siRNA sense strand
ccgggaaaguacaggauug

SEQ ID NO: 2258645 - RNA, 19 nt, Homo sapiens
  misc_RNA (1)...(19): siRNA sense strand
gggcagacuuugacgacac

SEQ ID NO: 2258646 - RNA, 19 nt, Homo sapiens
  misc_RNA (1)...(19): siRNA sense strand
ccaccaaugcccacggaca

SEQ ID NO: 2258647 - RNA, 19 nt, Homo sapiens
  misc_RNA (1)...(19): siRNA sense strand
gcaaugaugcaccggugaa

SEQ ID NO: 2258648 - RNA, 19 nt, Homo sapiens
  misc_RNA (1)...(19): siRNA sense strand
ccugcacgguguuuggaaa

SEQ ID NO: 2258649 - RNA, 19 nt, Homo sapiens
  misc_RNA (1)...(19): siRNA sense strand
cgaggagauuucagaugau

SEQ ID NO: 2258650 - RNA, 19 nt, Homo sapiens
  misc_RNA (1)...(19): siRNA sense strand
acagcgagauacacagaau

SEQ ID NO: 2258651 - RNA, 19 nt, Homo sapiens
  misc_RNA (1)...(19): siRNA sense strand
gagugagcacgcaggaaga

SEQ ID NO: 2258652 - RNA, 19 nt, Homo sapiens
  misc_RNA (1)...(19): siRNA sense strand
acacauuugaagagcggau

SEQ ID NO: 2258653 - RNA, 19 nt, Homo sapiens
  misc_RNA (1)...(19): siRNA sense strand
cgagaucagcagaaacuau

SEQ ID NO: 2258654 - RNA, 19 nt, Homo sapiens
  misc_RNA (1)...(19): siRNA sense strand
gaccaggcaccaaggaaau

SEQ ID NO: 2258655 - RNA, 19 nt, Homo sapiens
  misc_RNA (1)...(19): siRNA sense strand
ggcacguggcagagaguca

SEQ ID NO: 2258656 - RNA, 19 nt, Homo sapiens
  misc_RNA (1)...(19): siRNA sense strand
gaucagacgacaacagcca

SEQ ID NO: 2258657 - RNA, 19 nt, Homo sapiens
  misc_RNA (1)...(19): siRNA sense strand
ggcaaugaguagagucugu

SEQ ID NO: 2258658 - RNA, 19 nt, Homo sapiens
  misc_RNA (1)...(19): siRNA sense strand
ggaaccaucugcagggucu

SEQ ID NO: 2258659 - RNA, 19 nt, Homo sapiens
  misc_RNA (1)...(19): siRNA sense strand
gaagaugaggagcaggaga

SEQ ID NO: 2258660 - RNA, 19 nt, Homo sapiens
  misc_RNA (1)...(19): siRNA sense strand
ggagagaaggagauugcca

SEQ ID NO: 2258661 - RNA, 19 nt, Homo sapiens
  misc_RNA (1)...(19): siRNA sense strand
cgggagagcaguacaucuu

SEQ ID NO: 2258662 - RNA, 19 nt, Homo sapiens
  misc_RNA (1)...(19): siRNA sense strand
gcuucgacugccaggaaau

SEQ ID NO: 2258663 - RNA, 19 nt, Homo sapiens
  misc_RNA (1)...(19): siRNA sense strand
agauggugauggaucgauu

SEQ ID NO: 2258664 - RNA, 19 nt, Homo sapiens
  misc_RNA (1)...(19): siRNA sense strand
cagagagccuccagccaga

SEQ ID NO: 2258665 - RNA, 19 nt, Homo sapiens
  misc_RNA (1)...(19): siRNA sense strand
acgaugagcccgagggagu

SEQ ID NO: 2258666 - RNA, 19 nt, Homo sapiens
  misc_RNA (1)...(19): siRNA sense strand
ccuucuuccuggagaccaa

SEQ ID NO: 2258667 - RNA, 19 nt, Homo sapiens
  misc_RNA (1)...(19): siRNA sense strand
ggagaagccucgucggugu

SEQ ID NO: 2258668 - RNA, 19 nt, Homo sapiens
  misc_RNA (1)...(19): siRNA sense strand
gcugugaccaugagaccua

SEQ ID NO: 2258669 - RNA, 19 nt, Homo sapiens
  misc_RNA (1)...(19): siRNA sense strand
gggcagugaaacaaggcuu

SEQ ID NO: 2258670 - RNA, 19 nt, Homo sapiens
  misc_RNA (1)...(19): siRNA sense strand
aggaauuugcugugaccau

SEQ ID NO: 2258671 - RNA, 19 nt, Homo sapiens
  misc_RNA (1)...(19): siRNA sense strand
gggaguaugccgugcccuu

SEQ ID NO: 2258672 - RNA, 19 nt, Homo sapiens
  misc_RNA (1)...(19): siRNA sense strand
acauauacgaugagcccga

SEQ ID NO: 2258673 - RNA, 19 nt, Homo sapiens
  misc_RNA (1)...(19): siRNA sense strand
acgaugagcccgagggagu

SEQ ID NO: 2258674 - RNA, 19 nt, Homo sapiens
  misc_RNA (1)...(19): siRNA sense strand
gggaguaugccgugcccuu

SEQ ID NO: 2258675 - RNA, 19 nt, Homo sapiens
  misc_RNA (1)...(19): siRNA sense strand
acauauacgaugagcccga

SEQ ID NO: 2258676 - RNA, 19 nt, Homo sapiens
  misc_RNA (1)...(19): siRNA sense strand
ccgcuggugcaguggaaga

SEQ ID NO: 2258677 - RNA, 19 nt, Homo sapiens
  misc_RNA (1)...(19): siRNA sense strand
ccgcuggugcaguggaaga

SEQ ID NO: 2258678 - RNA, 19 nt, Homo sapiens
  misc_RNA (1)...(19): siRNA sense strand
ccgcuggugcaguggaaga

SEQ ID NO: 2258679 - RNA, 19 nt, Homo sapiens
  misc_RNA (1)...(19): siRNA sense strand
ccgcuggugcaguggaaga

SEQ ID NO: 2258680 - RNA, 19 nt, Homo sapiens
  misc_RNA (1)...(19): siRNA sense strand
cagacgaagagaaggcaaa

SEQ ID NO: 2258681 - RNA, 19 nt, Homo sapiens
  misc_RNA (1)...(19): siRNA sense strand
agaaggacgaagaggacaa

SEQ ID NO: 2258682 - RNA, 19 nt, Homo sapiens
  misc_RNA (1)...(19): siRNA sense strand
gcaacaucgcggugggcaa

SEQ ID NO: 2258683 - RNA, 19 nt, Homo sapiens
  misc_RNA (1)...(19): siRNA sense strand
ucaagaaccugcagaugaa

SEQ ID NO: 2258684 - RNA, 19 nt, Homo sapiens
  misc_RNA (1)...(19): siRNA sense strand
acgacaacgucaaggccua

SEQ ID NO: 2258685 - RNA, 19 nt, Homo sapiens
  misc_RNA (1)...(19): siRNA sense strand
ccaaagugcuggagcugga

SEQ ID NO: 2258686 - RNA, 19 nt, Homo sapiens
  misc_RNA (1)...(19): siRNA sense strand
ucaacaaguacgacgacaa

SEQ ID NO: 2258687 - RNA, 19 nt, Homo sapiens
  misc_RNA (1)...(19): siRNA sense strand
gggccaugacagacgaaga

SEQ ID NO: 2258688 - RNA, 19 nt, Homo sapiens
  misc_RNA (1)...(19): siRNA sense strand
ccaugacagacgaagagaa

SEQ ID NO: 2258689 - RNA, 19 nt, Homo sapiens
  misc_RNA (1)...(19): siRNA sense strand
agugcaagcugguggucga

SEQ ID NO: 2258690 - RNA, 19 nt, Homo sapiens
  misc_RNA (1)...(19): siRNA sense strand
agcugguggucgaggagua

SEQ ID NO: 2258691 - RNA, 19 nt, Homo sapiens
  misc_RNA (1)...(19): siRNA sense strand
acuacgaggugcuggacca

SEQ ID NO: 2258692 - RNA, 19 nt, Homo sapiens
  misc_RNA (1)...(19): siRNA sense strand
cgggaggacgggauccaaa

SEQ ID NO: 2258693 - RNA, 19 nt, Homo sapiens
  misc_RNA (1)...(19): siRNA sense strand
ggcagaaggacgaagagga

SEQ ID NO: 2258694 - RNA, 19 nt, Homo sapiens
  misc_RNA (1)...(19): siRNA sense strand
aagagaaggcaaaggcagu

SEQ ID NO: 2258695 - RNA, 19 nt, Homo sapiens
  misc_RNA (1)...(19): siRNA sense strand
uggagaugcugaaggugga

SEQ ID NO: 2258696 - RNA, 19 nt, Homo sapiens
  misc_RNA (1)...(19): siRNA sense strand
gcagaaggacgaagaggac

SEQ ID NO: 2258697 - RNA, 19 nt, Homo sapiens
  misc_RNA (1)...(19): siRNA sense strand
ggaaaucacucaagguuuu

SEQ ID NO: 2258698 - RNA, 19 nt, Homo sapiens
  misc_RNA (1)...(19): siRNA sense strand
aggaaaucacucaagguuu

SEQ ID NO: 2258699 - RNA, 19 nt, Homo sapiens
  misc_RNA (1)...(19): siRNA sense strand
aaguaaagaaagagggcag

SEQ ID NO: 2258700 - RNA, 19 nt, Homo sapiens
  misc_RNA (1)...(19): siRNA sense strand
augaauaggaccaacguca

SEQ ID NO: 2258701 - RNA, 19 nt, Homo sapiens
  misc_RNA (1)...(19): siRNA sense strand
agagcuaugguguggagaa

SEQ ID NO: 2258702 - RNA, 19 nt, Homo sapiens
  misc_RNA (1)...(19): siRNA sense strand
gcccgagagcagagagaaa

SEQ ID NO: 2258703 - RNA, 19 nt, Homo sapiens
  misc_RNA (1)...(19): siRNA sense strand
gaggagaagcggaggcaga

SEQ ID NO: 2258704 - RNA, 19 nt, Homo sapiens
  misc_RNA (1)...(19): siRNA sense strand
gaaaggagccagaagccaa

SEQ ID NO: 2258705 - RNA, 19 nt, Homo sapiens
  misc_RNA (1)...(19): siRNA sense strand
agaaagagagagagaaaau

SEQ ID NO: 2258706 - RNA, 19 nt, Homo sapiens
  misc_RNA (1)...(19): siRNA sense strand
gugaggaacgggagaaaca

SEQ ID NO: 2258707 - RNA, 19 nt, Homo sapiens
  misc_RNA (1)...(19): siRNA sense strand
gugaagaagcagagagggu

SEQ ID NO: 2258708 - RNA, 19 nt, Homo sapiens
  misc_RNA (1)...(19): siRNA sense strand
guuagaaagagaagagcga

SEQ ID NO: 2258709 - RNA, 19 nt, Homo sapiens
  misc_RNA (1)...(19): siRNA sense strand
acgagaagcaccuggaaga

SEQ ID NO: 2258710 - RNA, 19 nt, Homo sapiens
  misc_RNA (1)...(19): siRNA sense strand
ggaagaagagguuggagga

SEQ ID NO: 2258711 - RNA, 19 nt, Homo sapiens
  misc_RNA (1)...(19): siRNA sense strand
ccacaaggcuucuagcuga

SEQ ID NO: 2258712 - RNA, 19 nt, Homo sapiens
  misc_RNA (1)...(19): siRNA sense strand
aaaccagugaucagagaaa

SEQ ID NO: 2258713 - RNA, 19 nt, Homo sapiens
  misc_RNA (1)...(19): siRNA sense strand
cagugagagcccagaaauu

SEQ ID NO: 2258714 - RNA, 19 nt, Homo sapiens
  misc_RNA (1)...(19): siRNA sense strand
agaagagguuggaggagca

SEQ ID NO: 2258715 - RNA, 19 nt, Homo sapiens
  misc_RNA (1)...(19): siRNA sense strand
ccaucuaaucccaaagcaa

SEQ ID NO: 2258716 - RNA, 19 nt, Homo sapiens
  misc_RNA (1)...(19): siRNA sense strand
gacaaaagagagaggaauu

SEQ ID NO: 2258717 - RNA, 19 nt, Homo sapiens
  misc_RNA (1)...(19): siRNA sense strand
ugucaagagggaagucaaa

SEQ ID NO: 2258718 - RNA, 19 nt, Homo sapiens
  misc_RNA (1)...(19): siRNA sense strand
gagaaaaggaagaaaggga

SEQ ID NO: 2258719 - RNA, 19 nt, Homo sapiens
  misc_RNA (1)...(19): siRNA sense strand
gagaagagcaagagcgccu

SEQ ID NO: 2258720 - RNA, 19 nt, Homo sapiens
  misc_RNA (1)...(19): siRNA sense strand
agaacagaagcuacagaua

SEQ ID NO: 2258721 - RNA, 19 nt, Homo sapiens
  misc_RNA (1)...(19): siRNA sense strand
ggcagagacuugaggagga

SEQ ID NO: 2258722 - RNA, 19 nt, Homo sapiens
  misc_RNA (1)...(19): siRNA sense strand
cuuugaugaugaagggaca

SEQ ID NO: 2258723 - RNA, 19 nt, Homo sapiens
  misc_RNA (1)...(19): siRNA sense strand
cuggaagagcggaagaaga

SEQ ID NO: 2258724 - RNA, 19 nt, Homo sapiens
  misc_RNA (1)...(19): siRNA sense strand
guuccuggccagaaguaaa

SEQ ID NO: 2258725 - RNA, 19 nt, Homo sapiens
  misc_RNA (1)...(19): siRNA sense strand
aagucaaaguggagccuga

SEQ ID NO: 2258726 - RNA, 19 nt, Homo sapiens
  misc_RNA (1)...(19): siRNA sense strand
augaaaagaaccaggagaa

SEQ ID NO: 2258727 - RNA, 19 nt, Homo sapiens
  misc_RNA (1)...(19): siRNA sense strand
agagagaggaauuggcuca

SEQ ID NO: 2258728 - RNA, 19 nt, Homo sapiens
  misc_RNA (1)...(19): siRNA sense strand
agccaaaacagaagcauaa

SEQ ID NO: 2258729 - RNA, 19 nt, Homo sapiens
  misc_RNA (1)...(19): siRNA sense strand
auaacaaccacucaggaaa

SEQ ID NO: 2258730 - RNA, 19 nt, Homo sapiens
  misc_RNA (1)...(19): siRNA sense strand
caggagaacagaagcuaca

SEQ ID NO: 2258731 - RNA, 19 nt, Homo sapiens
  misc_RNA (1)...(19): siRNA sense strand
gguuggaggagcagaggca

SEQ ID NO: 2258732 - RNA, 19 nt, Homo sapiens
  misc_RNA (1)...(19): siRNA sense strand
gaaaaggaagaaagggaga

SEQ ID NO: 2258733 - RNA, 19 nt, Homo sapiens
  misc_RNA (1)...(19): siRNA sense strand
gggagaaggaggagcagcu

SEQ ID NO: 2258734 - RNA, 19 nt, Homo sapiens
  misc_RNA (1)...(19): siRNA sense strand
gaggcagaaagaagaagaa

SEQ ID NO: 2258735 - RNA, 19 nt, Homo sapiens
  misc_RNA (1)...(19): siRNA sense strand
ccagauuagaugucaccaa

SEQ ID NO: 2258736 - RNA, 19 nt, Homo sapiens
  misc_RNA (1)...(19): siRNA sense strand
cagcucagcccaugggaga

SEQ ID NO: 2258737 - RNA, 19 nt, Homo sapiens
  misc_RNA (1)...(19): siRNA sense strand
gagcaagagcgccuggaga

SEQ ID NO: 2258738 - RNA, 19 nt, Homo sapiens
  misc_RNA (1)...(19): siRNA sense strand
gggagcaggaagagcuuga

SEQ ID NO: 2258739 - RNA, 19 nt, Homo sapiens
  misc_RNA (1)...(19): siRNA sense strand
agaggagggagcaggaaga

SEQ ID NO: 2258740 - RNA, 19 nt, Homo sapiens
  misc_RNA (1)...(19): siRNA sense strand
aagacaaaagagagaggaa

SEQ ID NO: 2258741 - RNA, 19 nt, Homo sapiens
  misc_RNA (1)...(19): siRNA sense strand
ccagaggcagaaagaagaa

SEQ ID NO: 2258742 - RNA, 19 nt, Homo sapiens
  misc_RNA (1)...(19): siRNA sense strand
cgacagcuacaaagugcaa

SEQ ID NO: 2258743 - RNA, 19 nt, Homo sapiens
  misc_RNA (1)...(19): siRNA sense strand
uagugugguuagaaagaga

SEQ ID NO: 2258744 - RNA, 19 nt, Homo sapiens
  misc_RNA (1)...(19): siRNA sense strand
gggagagcagcguuguuaa

SEQ ID NO: 2258745 - RNA, 19 nt, Homo sapiens
  misc_RNA (1)...(19): siRNA sense strand
agagacuugaggaggacaa

SEQ ID NO: 2258746 - RNA, 19 nt, Homo sapiens
  misc_RNA (1)...(19): siRNA sense strand
ucuagaaauucgauggauc

SEQ ID NO: 2258747 - RNA, 19 nt, Homo sapiens
  misc_RNA (1)...(19): siRNA sense strand
gcccagaggcagaaagaag

SEQ ID NO: 2258748 - RNA, 19 nt, Homo sapiens
  misc_RNA (1)...(19): siRNA sense strand
acgugaggaacgggagaaa

SEQ ID NO: 2258749 - RNA, 19 nt, Homo sapiens
  misc_RNA (1)...(19): siRNA sense strand
aauaacaaccacucaggaa

SEQ ID NO: 2258750 - RNA, 19 nt, Homo sapiens
  misc_RNA (1)...(19): siRNA sense strand
cgaaauauguugaucccgu

SEQ ID NO: 2258751 - RNA, 19 nt, Homo sapiens
  misc_RNA (1)...(19): siRNA sense strand
gcuugaaagacaaaagaga

SEQ ID NO: 2258752 - RNA, 19 nt, Homo sapiens
  misc_RNA (1)...(19): siRNA sense strand
cgagagaagcauuuccaga

SEQ ID NO: 2258753 - RNA, 19 nt, Homo sapiens
  misc_RNA (1)...(19): siRNA sense strand
uuuccagagagaagagcaa

SEQ ID NO: 2258754 - RNA, 19 nt, Homo sapiens
  misc_RNA (1)...(19): siRNA sense strand
agaagcuacagauaagaaa

SEQ ID NO: 2258755 - RNA, 19 nt, Homo sapiens
  misc_RNA (1)...(19): siRNA sense strand
gaggaucauucauggcaca

SEQ ID NO: 2258756 - RNA, 19 nt, Homo sapiens
  misc_RNA (1)...(19): siRNA sense strand
gcacaauggaaaggagcca

SEQ ID NO: 2258757 - RNA, 19 nt, Homo sapiens
  misc_RNA (1)...(19): siRNA sense strand
cugucaagagggaagucaa

SEQ ID NO: 2258758 - RNA, 19 nt, Homo sapiens
  misc_RNA (1)...(19): siRNA sense strand
uugaaagacaaaagagaga

SEQ ID NO: 2258759 - RNA, 19 nt, Homo sapiens
  misc_RNA (1)...(19): siRNA sense strand
cgacgugaggaacgggaga

SEQ ID NO: 2258760 - RNA, 19 nt, Homo sapiens
  misc_RNA (1)...(19): siRNA sense strand
gcuuugaagaggagaggaa

SEQ ID NO: 2258761 - RNA, 19 nt, Homo sapiens
  misc_RNA (1)...(19): siRNA sense strand
aaggauaacuucugggaga

SEQ ID NO: 2258762 - RNA, 19 nt, Homo sapiens
  misc_RNA (1)...(19): siRNA sense strand
cgguaaaggugguggcaag

SEQ ID NO: 2258763 - RNA, 19 nt, Homo sapiens
  misc_RNA (1)...(19): siRNA sense strand
guggaguggugcuggacaa

SEQ ID NO: 2258764 - RNA, 19 nt, Homo sapiens
  misc_RNA (1)...(19): siRNA sense strand
ggauauguguugagacgga

SEQ ID NO: 2258765 - RNA, 19 nt, Homo sapiens
  misc_RNA (1)...(19): siRNA sense strand
cggaagaagccauugccaa

SEQ ID NO: 2258766 - RNA, 19 nt, Homo sapiens
  misc_RNA (1)...(19): siRNA sense strand
cagacauggugaaggacau

SEQ ID NO: 2258767 - RNA, 19 nt, Homo sapiens
  misc_RNA (1)...(19): siRNA sense strand
caagggagcugguggggaa

SEQ ID NO: 2258768 - RNA, 19 nt, Homo sapiens
  misc_RNA (1)...(19): siRNA sense strand
caggcuugauggacgguaa

SEQ ID NO: 2258769 - RNA, 19 nt, Homo sapiens
  misc_RNA (1)...(19): siRNA sense strand
acucuaacagcaagugaaa

SEQ ID NO: 2258770 - RNA, 19 nt, Homo sapiens
  misc_RNA (1)...(19): siRNA sense strand
uguccagaaacgaguguua

SEQ ID NO: 2258771 - RNA, 19 nt, Homo sapiens
  misc_RNA (1)...(19): siRNA sense strand
uggcauucccauugaaaga

SEQ ID NO: 2258772 - RNA, 19 nt, Homo sapiens
  misc_RNA (1)...(19): siRNA sense strand
aaggaugaauugcgggaga

SEQ ID NO: 2258773 - RNA, 19 nt, Homo sapiens
  misc_RNA (1)...(19): siRNA sense strand
agaucuaugacgaaggcua

SEQ ID NO: 2258774 - RNA, 19 nt, Homo sapiens
  misc_RNA (1)...(19): siRNA sense strand
caagaaaagcauugacaca

SEQ ID NO: 2258775 - RNA, 19 nt, Homo sapiens
  misc_RNA (1)...(19): siRNA sense strand
ugguagacauggauggcuu

SEQ ID NO: 2258776 - RNA, 19 nt, Homo sapiens
  misc_RNA (1)...(19): siRNA sense strand
ccgaggaggguaugugcua

SEQ ID NO: 2258777 - RNA, 19 nt, Homo sapiens
  misc_RNA (1)...(19): siRNA sense strand
ccacuuugcucuuugccaa

SEQ ID NO: 2258778 - RNA, 19 nt, Homo sapiens
  misc_RNA (1)...(19): siRNA sense strand
gggagaagauguucgugga

SEQ ID NO: 2258779 - RNA, 19 nt, Homo sapiens
  misc_RNA (1)...(19): siRNA sense strand
ggaugacagcagugaagau

SEQ ID NO: 2258780 - RNA, 19 nt, Homo sapiens
  misc_RNA (1)...(19): siRNA sense strand
acaaggaugugcagaggga

SEQ ID NO: 2258781 - RNA, 19 nt, Homo sapiens
  misc_RNA (1)...(19): siRNA sense strand
aaggaugugcagagggaga

SEQ ID NO: 2258782 - RNA, 19 nt, Homo sapiens
  misc_RNA (1)...(19): siRNA sense strand
uggugaaggacaucauuaa

SEQ ID NO: 2258783 - RNA, 19 nt, Homo sapiens
  misc_RNA (1)...(19): siRNA sense strand
augaagaagaggugcaguu

SEQ ID NO: 2258784 - RNA, 19 nt, Homo sapiens
  misc_RNA (1)...(19): siRNA sense strand
cagaguuuacagugaagaa

SEQ ID NO: 2258785 - RNA, 19 nt, Homo sapiens
  misc_RNA (1)...(19): siRNA sense strand
ccgaccauacacugggaaa

SEQ ID NO: 2258786 - RNA, 19 nt, Homo sapiens
  misc_RNA (1)...(19): siRNA sense strand
cagaauaagauguccaacu

SEQ ID NO: 2258787 - RNA, 19 nt, Homo sapiens
  misc_RNA (1)...(19): siRNA sense strand
agcugaaaucacagggcaa

SEQ ID NO: 2258788 - RNA, 19 nt, Homo sapiens
  misc_RNA (1)...(19): siRNA sense strand
ggaagaagccauugccaag

SEQ ID NO: 2258789 - RNA, 19 nt, Homo sapiens
  misc_RNA (1)...(19): siRNA sense strand
gaguguuagagaagacgaa

SEQ ID NO: 2258790 - RNA, 19 nt, Homo sapiens
  misc_RNA (1)...(19): siRNA sense strand
ugaggaugccgaugggauu

SEQ ID NO: 2258791 - RNA, 19 nt, Homo sapiens
  misc_RNA (1)...(19): siRNA sense strand
gcaacaugaaggauaacuu

SEQ ID NO: 2258792 - RNA, 19 nt, Homo sapiens
  misc_RNA (1)...(19): siRNA sense strand
ccaaaauccucccaggcaa

SEQ ID NO: 2258793 - RNA, 19 nt, Homo sapiens
  misc_RNA (1)...(19): siRNA sense strand
ccaaaguacaauuaccauu

SEQ ID NO: 2258794 - RNA, 19 nt, Homo sapiens
  misc_RNA (1)...(19): siRNA sense strand
cagaaaggcucauugguug

SEQ ID NO: 2258795 - RNA, 19 nt, Homo sapiens
  misc_RNA (1)...(19): siRNA sense strand
auucagagccugggagaca

SEQ ID NO: 2258796 - RNA, 19 nt, Homo sapiens
  misc_RNA (1)...(19): siRNA sense strand
acugauugcugaagagaag

SEQ ID NO: 2258797 - RNA, 19 nt, Homo sapiens
  misc_RNA (1)...(19): siRNA sense strand
guaagauggcucuggaacu

SEQ ID NO: 2258798 - RNA, 19 nt, Homo sapiens
  misc_RNA (1)...(19): siRNA sense strand
aggcugaagagauugcuaa

SEQ ID NO: 2258799 - RNA, 19 nt, Homo sapiens
  misc_RNA (1)...(19): siRNA sense strand
gagaagacgaagcaguuca

SEQ ID NO: 2258800 - RNA, 19 nt, Homo sapiens
  misc_RNA (1)...(19): siRNA sense strand
gcuauguauuugagaacac

SEQ ID NO: 2258801 - RNA, 19 nt, Homo sapiens
  misc_RNA (1)...(19): siRNA sense strand
cccagaaggcccucaggaa

SEQ ID NO: 2258802 - RNA, 19 nt, Homo sapiens
  misc_RNA (1)...(19): siRNA sense strand
gggccuacgggcuguguuu

SEQ ID NO: 2258803 - RNA, 19 nt, Homo sapiens
  misc_RNA (1)...(19): siRNA sense strand
cuuagaagcagaucuggaa

SEQ ID NO: 2258804 - RNA, 19 nt, Homo sapiens
  misc_RNA (1)...(19): siRNA sense strand
ugcaaacagaucuggcaaa

SEQ ID NO: 2258805 - RNA, 19 nt, Homo sapiens
  misc_RNA (1)...(19): siRNA sense strand
augcauuuccugagcugaa

SEQ ID NO: 2258806 - RNA, 19 nt, Homo sapiens
  misc_RNA (1)...(19): siRNA sense strand
acccagacauggugaagga

SEQ ID NO: 2258807 - RNA, 19 nt, Homo sapiens
  misc_RNA (1)...(19): siRNA sense strand
ucucaagacucucagcaga

SEQ ID NO: 2258808 - RNA, 19 nt, Homo sapiens
  misc_RNA (1)...(19): siRNA sense strand
cuaugacaccuauggguuu

SEQ ID NO: 2258809 - RNA, 19 nt, Homo sapiens
  misc_RNA (1)...(19): siRNA sense strand
aagccauugccaaggguau

SEQ ID NO: 2258810 - RNA, 19 nt, Homo sapiens
  misc_RNA (1)...(19): siRNA sense strand
cugcacaggccacaggcaa

SEQ ID NO: 2258811 - RNA, 19 nt, Homo sapiens
  misc_RNA (1)...(19): siRNA sense strand
gcucauugguugcuccuga

SEQ ID NO: 2258812 - RNA, 19 nt, Homo sapiens
  misc_RNA (1)...(19): siRNA sense strand
ucauggaagccaaagugaa

SEQ ID NO: 2258813 - RNA, 19 nt, Homo sapiens
  misc_RNA (1)...(19): siRNA sense strand
ucuaacagcaagugaaauc

SEQ ID NO: 2258814 - RNA, 19 nt, Homo sapiens
  misc_RNA (1)...(19): siRNA sense strand
gaggaggguaugugcuaca

SEQ ID NO: 2258815 - RNA, 19 nt, Homo sapiens
  misc_RNA (1)...(19): siRNA sense strand
cuucaagaggaacgagcau

SEQ ID NO: 2258816 - RNA, 19 nt, Homo sapiens
  misc_RNA (1)...(19): siRNA sense strand
gccaagaagcagagugaca

SEQ ID NO: 2258817 - RNA, 19 nt, Homo sapiens
  misc_RNA (1)...(19): siRNA sense strand
ugcaagagguggaggcaga

SEQ ID NO: 2258818 - RNA, 19 nt, Homo sapiens
  misc_RNA (1)...(19): siRNA sense strand
cgagcaaggagcagcggaa

SEQ ID NO: 2258819 - RNA, 19 nt, Homo sapiens
  misc_RNA (1)...(19): siRNA sense strand
gcgucauccucaaggccaa

SEQ ID NO: 2258820 - RNA, 19 nt, Homo sapiens
  misc_RNA (1)...(19): siRNA sense strand
cuaccaagccuguggagga

SEQ ID NO: 2258821 - RNA, 19 nt, Homo sapiens
  misc_RNA (1)...(19): siRNA sense strand
ucaucuacuuccugagcua

SEQ ID NO: 2258822 - RNA, 19 nt, Homo sapiens
  misc_RNA (1)...(19): siRNA sense strand
ucuacaaggacgacaagaa

SEQ ID NO: 2258823 - RNA, 19 nt, Homo sapiens
  misc_RNA (1)...(19): siRNA sense strand
gcgaacuacgugugggaca

SEQ ID NO: 2258824 - RNA, 19 nt, Homo sapiens
  misc_RNA (1)...(19): siRNA sense strand
gggccaucaccuuuggaaa

SEQ ID NO: 2258825 - RNA, 19 nt, Homo sapiens
  misc_RNA (1)...(19): siRNA sense strand
ggcucaaggaggugaugaa

SEQ ID NO: 2258826 - RNA, 19 nt, Homo sapiens
  misc_RNA (1)...(19): siRNA sense strand
gugacaaccuggagcagca

SEQ ID NO: 2258827 - RNA, 19 nt, Homo sapiens
  misc_RNA (1)...(19): siRNA sense strand
gcgugguggaggaaggcaa

SEQ ID NO: 2258828 - RNA, 19 nt, Homo sapiens
  misc_RNA (1)...(19): siRNA sense strand
gcaccuauggcgacgggua

SEQ ID NO: 2258829 - RNA, 19 nt, Homo sapiens
  misc_RNA (1)...(19): siRNA sense strand
ucuacaacaacaagggcua

SEQ ID NO: 2258830 - RNA, 19 nt, Homo sapiens
  misc_RNA (1)...(19): siRNA sense strand
ccacaaugucucugaguac

SEQ ID NO: 2258831 - RNA, 19 nt, Homo sapiens
  misc_RNA (1)...(19): siRNA sense strand
ccaaccugcccaagagcaa

SEQ ID NO: 2258832 - RNA, 19 nt, Homo sapiens
  misc_RNA (1)...(19): siRNA sense strand
ugaaggacguggugcgguu

SEQ ID NO: 2258833 - RNA, 19 nt, Homo sapiens
  misc_RNA (1)...(19): siRNA sense strand
agaccaugggccugaacaa

SEQ ID NO: 2258834 - RNA, 19 nt, Homo sapiens
  misc_RNA (1)...(19): siRNA sense strand
cugaacaagcugagccuga

SEQ ID NO: 2258835 - RNA, 19 nt, Homo sapiens
  misc_RNA (1)...(19): siRNA sense strand
agauugagaaccugaccaa

SEQ ID NO: 2258836 - RNA, 19 nt, Homo sapiens
  misc_RNA (1)...(19): siRNA sense strand
gagagauggacaagaugau

SEQ ID NO: 2258837 - RNA, 19 nt, Homo sapiens
  misc_RNA (1)...(19): siRNA sense strand
augaauaagaccagcgcca

SEQ ID NO: 2258838 - RNA, 19 nt, Homo sapiens
  misc_RNA (1)...(19): siRNA sense strand
aggagguggcgcaugauaa

SEQ ID NO: 2258839 - RNA, 19 nt, Homo sapiens
  misc_RNA (1)...(19): siRNA sense strand
acucacuggugcagacauu

SEQ ID NO: 2258840 - RNA, 19 nt, Homo sapiens
  misc_RNA (1)...(19): siRNA sense strand
ccuacaacgaguacaucaa

SEQ ID NO: 2258841 - RNA, 19 nt, Homo sapiens
  misc_RNA (1)...(19): siRNA sense strand
ugaccaaguacgcagacaa

SEQ ID NO: 2258842 - RNA, 19 nt, Homo sapiens
  misc_RNA (1)...(19): siRNA sense strand
ggcucacgguggaggaaca

SEQ ID NO: 2258843 - RNA, 19 nt, Homo sapiens
  misc_RNA (1)...(19): siRNA sense strand
ccucaaggccaacgagacu

SEQ ID NO: 2258844 - RNA, 19 nt, Homo sapiens
  misc_RNA (1)...(19): siRNA sense strand
acaagaugaucgaggaccu

SEQ ID NO: 2258845 - RNA, 19 nt, Homo sapiens
  misc_RNA (1)...(19): siRNA sense strand
cgaacuacgugugggacau

SEQ ID NO: 2258846 - RNA, 19 nt, Homo sapiens
  misc_RNA (1)...(19): siRNA sense strand
ugguggacgccguggucua

SEQ ID NO: 2258847 - RNA, 19 nt, Homo sapiens
  misc_RNA (1)...(19): siRNA sense strand
uggaagaacgugacgcuca

SEQ ID NO: 2258848 - RNA, 19 nt, Homo sapiens
  misc_RNA (1)...(19): siRNA sense strand
uggacaauguguucgugaa

SEQ ID NO: 2258849 - RNA, 19 nt, Homo sapiens
  misc_RNA (1)...(19): siRNA sense strand
uggacucgguggccagaaa

SEQ ID NO: 2258850 - RNA, 19 nt, Homo sapiens
  misc_RNA (1)...(19): siRNA sense strand
uugccaagaagcagaguga

SEQ ID NO: 2258851 - RNA, 19 nt, Homo sapiens
  misc_RNA (1)...(19): siRNA sense strand
ccaaggugagcguggacau

SEQ ID NO: 2258852 - RNA, 19 nt, Homo sapiens
  misc_RNA (1)...(19): siRNA sense strand
ccagaaacccgcaggagcu

SEQ ID NO: 2258853 - RNA, 19 nt, Homo sapiens
  misc_RNA (1)...(19): siRNA sense strand
cggguggcaugaagcgcaa

SEQ ID NO: 2258854 - RNA, 19 nt, Homo sapiens
  misc_RNA (1)...(19): siRNA sense strand
gaggaucagucgcuggaga

SEQ ID NO: 2258855 - RNA, 19 nt, Homo sapiens
  misc_RNA (1)...(19): siRNA sense strand
aggaucagucgcuggagaa

SEQ ID NO: 2258856 - RNA, 19 nt, Homo sapiens
  misc_RNA (1)...(19): siRNA sense strand
uggacaucuucaagggcuu

SEQ ID NO: 2258857 - RNA, 19 nt, Homo sapiens
  misc_RNA (1)...(19): siRNA sense strand
gggucuacuccguggccau

SEQ ID NO: 2258858 - RNA, 19 nt, Homo sapiens
  misc_RNA (1)...(19): siRNA sense strand
gugucauggaggaggacca

SEQ ID NO: 2258859 - RNA, 19 nt, Homo sapiens
  misc_RNA (1)...(19): siRNA sense strand
agaagcuggcccugaacaa

SEQ ID NO: 2258860 - RNA, 19 nt, Homo sapiens
  misc_RNA (1)...(19): siRNA sense strand
uggcccagguguucagcaa

SEQ ID NO: 2258861 - RNA, 19 nt, Homo sapiens
  misc_RNA (1)...(19): siRNA sense strand
acagugaggccgaugugaa

SEQ ID NO: 2258862 - RNA, 19 nt, Homo sapiens
  misc_RNA (1)...(19): siRNA sense strand
ccaucaugugccaguacaa

SEQ ID NO: 2258863 - RNA, 19 nt, Homo sapiens
  misc_RNA (1)...(19): siRNA sense strand
ugaagaaccgguuuggaga

SEQ ID NO: 2258864 - RNA, 19 nt, Homo sapiens
  misc_RNA (1)...(19): siRNA sense strand
cgacagaagaagcccacca

SEQ ID NO: 2258865 - RNA, 19 nt, Homo sapiens
  misc_RNA (1)...(19): siRNA sense strand
gguacuucccacugcagaa

SEQ ID NO: 2258866 - RNA, 19 nt, Homo sapiens
  misc_RNA (1)...(19): siRNA sense strand
aggucuacaaggacgacaa

SEQ ID NO: 2258867 - RNA, 19 nt, Homo sapiens
  misc_RNA (1)...(19): siRNA sense strand
ggggagacgccgacaauga

SEQ ID NO: 2258868 - RNA, 19 nt, Homo sapiens
  misc_RNA (1)...(19): siRNA sense strand
aagagcagccagaguguga

SEQ ID NO: 2258869 - RNA, 19 nt, Homo sapiens
  misc_RNA (1)...(19): siRNA sense strand
aggaggugaugaagaccau

SEQ ID NO: 2258870 - RNA, 19 nt, Homo sapiens
  misc_RNA (1)...(19): siRNA sense strand
gcgccaucauccuggacga

SEQ ID NO: 2258871 - RNA, 19 nt, Homo sapiens
  misc_RNA (1)...(19): siRNA sense strand
ccaaccaccccaugaauaa

SEQ ID NO: 2258872 - RNA, 19 nt, Homo sapiens
  misc_RNA (1)...(19): siRNA sense strand
gcuugauggagaaggagaa

SEQ ID NO: 2258873 - RNA, 19 nt, Homo sapiens
  misc_RNA (1)...(19): siRNA sense strand
cagcauagcagguggcauc

SEQ ID NO: 2258874 - RNA, 19 nt, Homo sapiens
  misc_RNA (1)...(19): siRNA sense strand
ggaagagggcauacggagu

SEQ ID NO: 2258875 - RNA, 19 nt, Homo sapiens
  misc_RNA (1)...(19): siRNA sense strand
ccucugagaauguggcuga

SEQ ID NO: 2258876 - RNA, 19 nt, Homo sapiens
  misc_RNA (1)...(19): siRNA sense strand
agaauguggcugagcgguu

SEQ ID NO: 2258877 - RNA, 19 nt, Homo sapiens
  misc_RNA (1)...(19): siRNA sense strand
cugccuacuguguggagaa

SEQ ID NO: 2258878 - RNA, 19 nt, Homo sapiens
  misc_RNA (1)...(19): siRNA sense strand
ccacgguccaugaugacaa

SEQ ID NO: 2258879 - RNA, 19 nt, Homo sapiens
  misc_RNA (1)...(19): siRNA sense strand
ccgcugccgucuuugaaua

SEQ ID NO: 2258880 - RNA, 19 nt, Homo sapiens
  misc_RNA (1)...(19): siRNA sense strand
ucacgggagaagcaggaua

SEQ ID NO: 2258881 - RNA, 19 nt, Homo sapiens
  misc_RNA (1)...(19): siRNA sense strand
ugucaauauugcagagcau

SEQ ID NO: 2258882 - RNA, 19 nt, Homo sapiens
  misc_RNA (1)...(19): siRNA sense strand
agauauaggaauucgaaga

SEQ ID NO: 2258883 - RNA, 19 nt, Homo sapiens
  misc_RNA (1)...(19): siRNA sense strand
gagaagagaauaaaggcuu

SEQ ID NO: 2258884 - RNA, 19 nt, Homo sapiens
  misc_RNA (1)...(19): siRNA sense strand
aguagggagguuugggaaa

SEQ ID NO: 2258885 - RNA, 19 nt, Homo sapiens
  misc_RNA (1)...(19): siRNA sense strand
gugcaauagcaaugacaga

SEQ ID NO: 2258886 - RNA, 19 nt, Homo sapiens
  misc_RNA (1)...(19): siRNA sense strand
ccuacuuggagaagagaau

SEQ ID NO: 2258887 - RNA, 19 nt, Homo sapiens
  misc_RNA (1)...(19): siRNA sense strand
aggcaaauguauuggugca

SEQ ID NO: 2258888 - RNA, 19 nt, Homo sapiens
  misc_RNA (1)...(19): siRNA sense strand
guucaucaguaauggguca

SEQ ID NO: 2258889 - RNA, 19 nt, Homo sapiens
  misc_RNA (1)...(19): siRNA sense strand
aaaccauggcucagaagaa

SEQ ID NO: 2258890 - RNA, 19 nt, Homo sapiens
  misc_RNA (1)...(19): siRNA sense strand
uggugguacaaaugaaaua

SEQ ID NO: 2258891 - RNA, 19 nt, Homo sapiens
  misc_RNA (1)...(19): siRNA sense strand
guuaauugcugauguggca

SEQ ID NO: 2258892 - RNA, 19 nt, Homo sapiens
  misc_RNA (1)...(19): siRNA sense strand
auguguaacccgagcauuu

SEQ ID NO: 2258893 - RNA, 19 nt, Homo sapiens
  misc_RNA (1)...(19): siRNA sense strand
cggaaaaguguaaggaagu

SEQ ID NO: 2258894 - RNA, 19 nt, Homo sapiens
  misc_RNA (1)...(19): siRNA sense strand
agagcaucuugguggaauu

SEQ ID NO: 2258895 - RNA, 19 nt, Homo sapiens
  misc_RNA (1)...(19): siRNA sense strand
gauuaaaagcccaggauac

SEQ ID NO: 2258896 - RNA, 19 nt, Homo sapiens
  misc_RNA (1)...(19): siRNA sense strand
augaaggagcugauugcaa

SEQ ID NO: 2258897 - RNA, 19 nt, Homo sapiens
  misc_RNA (1)...(19): siRNA sense strand
ggggaagaacgucuagaaa

SEQ ID NO: 2258898 - RNA, 19 nt, Homo sapiens
  misc_RNA (1)...(19): siRNA sense strand
ggauuaaaagcccaggaua

SEQ ID NO: 2258899 - RNA, 19 nt, Homo sapiens
  misc_RNA (1)...(19): siRNA sense strand
aaauaaugaaggagcugau

SEQ ID NO: 2258900 - RNA, 19 nt, Homo sapiens
  misc_RNA (1)...(19): siRNA sense strand
ccggaaaaguguaaggaag

SEQ ID NO: 2258901 - RNA, 19 nt, Homo sapiens
  misc_RNA (1)...(19): siRNA sense strand
aagaagaagugauuccuca

SEQ ID NO: 2258902 - RNA, 19 nt, Homo sapiens
  misc_RNA (1)...(19): siRNA sense strand
uacuuggagaagagaauaa

SEQ ID NO: 2258903 - RNA, 19 nt, Homo sapiens
  misc_RNA (1)...(19): siRNA sense strand
cuauggugguacaaaugaa

SEQ ID NO: 2258904 - RNA, 19 nt, Homo sapiens
  misc_RNA (1)...(19): siRNA sense strand
ucacucagaaugggagaaa

SEQ ID NO: 2258905 - RNA, 19 nt, Homo sapiens
  misc_RNA (1)...(19): siRNA sense strand
ggauuuaucaagggacgaa

SEQ ID NO: 2258906 - RNA, 19 nt, Homo sapiens
  misc_RNA (1)...(19): siRNA sense strand
ugaaagagcuuccacagga

SEQ ID NO: 2258907 - RNA, 19 nt, Homo sapiens
  misc_RNA (1)...(19): siRNA sense strand
uugaagaaaccaggaacua

SEQ ID NO: 2258908 - RNA, 19 nt, Homo sapiens
  misc_RNA (1)...(19): siRNA sense strand
augaaauaaugaaggagcu

SEQ ID NO: 2258909 - RNA, 19 nt, Homo sapiens
  misc_RNA (1)...(19): siRNA sense strand
uuuccaagaagaagugauu

SEQ ID NO: 2258910 - RNA, 19 nt, Homo sapiens
  misc_RNA (1)...(19): siRNA sense strand
ggagaagagaauaaaggcu

SEQ ID NO: 2258911 - RNA, 19 nt, Homo sapiens
  misc_RNA (1)...(19): siRNA sense strand
gggccuucauauagggaaa

SEQ ID NO: 2258912 - RNA, 19 nt, Homo sapiens
  misc_RNA (1)...(19): siRNA sense strand
acauggaacagaagaacaa

SEQ ID NO: 2258913 - RNA, 19 nt, Homo sapiens
  misc_RNA (1)...(19): siRNA sense strand
gagcugauaaagagggaga

SEQ ID NO: 2258914 - RNA, 19 nt, Homo sapiens
  misc_RNA (1)...(19): siRNA sense strand
acaaauuggacauggcuau

SEQ ID NO: 2258915 - RNA, 19 nt, Homo sapiens
  misc_RNA (1)...(19): siRNA sense strand
ugaagguagaauaggaauu

SEQ ID NO: 2258916 - RNA, 19 nt, Homo sapiens
  misc_RNA (1)...(19): siRNA sense strand
ugauagaggaauuagccaa

SEQ ID NO: 2258917 - RNA, 19 nt, Homo sapiens
  misc_RNA (1)...(19): siRNA sense strand
ggaaaugaugauaaagagu

SEQ ID NO: 2258918 - RNA, 19 nt, Homo sapiens
  misc_RNA (1)...(19): siRNA sense strand
ccauuggauauaagggaau

SEQ ID NO: 2258919 - RNA, 19 nt, Homo sapiens
  misc_RNA (1)...(19): siRNA sense strand
agggaaaccugaaaacaaa

SEQ ID NO: 2258920 - RNA, 19 nt, Homo sapiens
  misc_RNA (1)...(19): siRNA sense strand
gcugauaaagagggagauu

SEQ ID NO: 2258921 - RNA, 19 nt, Homo sapiens
  misc_RNA (1)...(19): siRNA sense strand
auacaaugcugcuaggcuu

SEQ ID NO: 2258922 - RNA, 19 nt, Homo sapiens
  misc_RNA (1)...(19): siRNA sense strand
uuuagaagcuggaaagcca

SEQ ID NO: 2258923 - RNA, 19 nt, Homo sapiens
  misc_RNA (1)...(19): siRNA sense strand
guauugaaguugacccaga

SEQ ID NO: 2258924 - RNA, 19 nt, Homo sapiens
  misc_RNA (1)...(19): siRNA sense strand
agaccagagcugauaaaga

SEQ ID NO: 2258925 - RNA, 19 nt, Homo sapiens
  misc_RNA (1)...(19): siRNA sense strand
cugauaaagagggagauua

SEQ ID NO: 2258926 - RNA, 19 nt, Homo sapiens
  misc_RNA (1)...(19): siRNA sense strand
cccagaauauggaggcaca

SEQ ID NO: 2258927 - RNA, 19 nt, Homo sapiens
  misc_RNA (1)...(19): siRNA sense strand
gauuagaaaacauggaaca

SEQ ID NO: 2258928 - RNA, 19 nt, Homo sapiens
  misc_RNA (1)...(19): siRNA sense strand
aacaaggguugauggguau

SEQ ID NO: 2258929 - RNA, 19 nt, Homo sapiens
  misc_RNA (1)...(19): siRNA sense strand
aggaauuagccaaaguuga

SEQ ID NO: 2258930 - RNA, 19 nt, Homo sapiens
  misc_RNA (1)...(19): siRNA sense strand
agucagaagcucuacucaa

SEQ ID NO: 2258931 - RNA, 19 nt, Homo sapiens
  misc_RNA (1)...(19): siRNA sense strand
uggagaaaucaguaauaca

SEQ ID NO: 2258932 - RNA, 19 nt, Homo sapiens
  misc_RNA (1)...(19): siRNA sense strand
cugcacagaugcugggacu

SEQ ID NO: 2258933 - RNA, 19 nt, Homo sapiens
  misc_RNA (1)...(19): siRNA sense strand
gaauaggaauugcugcaca

SEQ ID NO: 2258934 - RNA, 19 nt, Homo sapiens
  misc_RNA (1)...(19): siRNA sense strand
cagaugaggaaaugaugau

SEQ ID NO: 2258935 - RNA, 19 nt, Homo sapiens
  misc_RNA (1)...(19): siRNA sense strand
uggagcagguagugacuca

SEQ ID NO: 2258936 - RNA, 19 nt, Homo sapiens
  misc_RNA (1)...(19): siRNA sense strand
agauuacccuguggagaaa

SEQ ID NO: 2258937 - RNA, 19 nt, Homo sapiens
  misc_RNA (1)...(19): siRNA sense strand
agccaaaguugaugcaucu

SEQ ID NO: 2258938 - RNA, 19 nt, Homo sapiens
  misc_RNA (1)...(19): siRNA sense strand
caguugaacaccauugcaa

SEQ ID NO: 2258939 - RNA, 19 nt, Homo sapiens
  misc_RNA (1)...(19): siRNA sense strand
uggacauggcuauaaguau

SEQ ID NO: 2258940 - RNA, 19 nt, Homo sapiens
  misc_RNA (1)...(19): siRNA sense strand
aguugaacaccauugcaaa

SEQ ID NO: 2258941 - RNA, 19 nt, Homo sapiens
  misc_RNA (1)...(19): siRNA sense strand
ccucaauggaucaaagaug

SEQ ID NO: 2258942 - RNA, 19 nt, Homo sapiens
  misc_RNA (1)...(19): siRNA sense strand
ccuucuuaguagaucguga

SEQ ID NO: 2258943 - RNA, 19 nt, Homo sapiens
  misc_RNA (1)...(19): siRNA sense strand
ucauauagggaaaccugaa

SEQ ID NO: 2258944 - RNA, 19 nt, Homo sapiens
  misc_RNA (1)...(19): siRNA sense strand
cauauagggaaaccugaaa

SEQ ID NO: 2258945 - RNA, 19 nt, Homo sapiens
  misc_RNA (1)...(19): siRNA sense strand
gagucucaaugaagguaga

SEQ ID NO: 2258946 - RNA, 19 nt, Homo sapiens
  misc_RNA (1)...(19): siRNA sense strand
aaugaagguagaauaggaa

SEQ ID NO: 2258947 - RNA, 19 nt, Homo sapiens
  misc_RNA (1)...(19): siRNA sense strand
cgagaugcaaagauuggua

SEQ ID NO: 2258948 - RNA, 19 nt, Homo sapiens
  misc_RNA (1)...(19): siRNA sense strand
gcaagagguuuaugugcga

SEQ ID NO: 2258949 - RNA, 19 nt, Homo sapiens
  misc_RNA (1)...(19): siRNA sense strand
cugcagacacagaggugau

SEQ ID NO: 2258950 - RNA, 19 nt, Homo sapiens
  misc_RNA (1)...(19): siRNA sense strand
cagauaaggaagaaccuga

SEQ ID NO: 2258951 - RNA, 19 nt, Homo sapiens
  misc_RNA (1)...(19): siRNA sense strand
ccggcagacaccagaguau

SEQ ID NO: 2258952 - RNA, 19 nt, Homo sapiens
  misc_RNA (1)...(19): siRNA sense strand
ccaacgggaugcagcgcuu

SEQ ID NO: 2258953 - RNA, 19 nt, Homo sapiens
  misc_RNA (1)...(19): siRNA sense strand
ccagaguaucagaaugaga

SEQ ID NO: 2258954 - RNA, 19 nt, Homo sapiens
  misc_RNA (1)...(19): siRNA sense strand
augcacaauuucuggacau

SEQ ID NO: 2258955 - RNA, 19 nt, Homo sapiens
  misc_RNA (1)...(19): siRNA sense strand
cagaggugauuguggccuu

SEQ ID NO: 2258956 - RNA, 19 nt, Homo sapiens
  misc_RNA (1)...(19): siRNA sense strand
ucaugagugcugaggccaa

SEQ ID NO: 2258957 - RNA, 19 nt, Homo sapiens
  misc_RNA (1)...(19): siRNA sense strand
cagugaagacauaucccaa

SEQ ID NO: 2258958 - RNA, 19 nt, Homo sapiens
  misc_RNA (1)...(19): siRNA sense strand
gguacgugcuagccggaaa

SEQ ID NO: 2258959 - RNA, 19 nt, Homo sapiens
  misc_RNA (1)...(19): siRNA sense strand
gcuuuguagccguggguga

SEQ ID NO: 2258960 - RNA, 19 nt, Homo sapiens
  misc_RNA (1)...(19): siRNA sense strand
gacaagagguuccaggaga

SEQ ID NO: 2258961 - RNA, 19 nt, Homo sapiens
  misc_RNA (1)...(19): siRNA sense strand
augagaauggcgugggcua

SEQ ID NO: 2258962 - RNA, 19 nt, Homo sapiens
  misc_RNA (1)...(19): siRNA sense strand
acaucaaugacaagagguu

SEQ ID NO: 2258963 - RNA, 19 nt, Homo sapiens
  misc_RNA (1)...(19): siRNA sense strand
ucaagaucccacagaccaa

SEQ ID NO: 2258964 - RNA, 19 nt, Homo sapiens
  misc_RNA (1)...(19): siRNA sense strand
ccaaugugucuguggccau

SEQ ID NO: 2258965 - RNA, 19 nt, Homo sapiens
  misc_RNA (1)...(19): siRNA sense strand
caaagcggcaccagcgcaa

SEQ ID NO: 2258966 - RNA, 19 nt, Homo sapiens
  misc_RNA (1)...(19): siRNA sense strand
auucaugguucaagggugu

SEQ ID NO: 2258967 - RNA, 19 nt, Homo sapiens
  misc_RNA (1)...(19): siRNA sense strand
auucaugguucaagggugu

SEQ ID NO: 2258968 - RNA, 19 nt, Homo sapiens
  misc_RNA (1)...(19): siRNA sense strand
auucaugguucaagggugu

SEQ ID NO: 2258969 - RNA, 19 nt, Homo sapiens
  misc_RNA (1)...(19): siRNA sense strand
auucaugguucaagggugu

SEQ ID NO: 2258970 - RNA, 19 nt, Homo sapiens
  misc_RNA (1)...(19): siRNA sense strand
auucaugguucaagggugu

SEQ ID NO: 2258971 - RNA, 19 nt, Homo sapiens
  misc_RNA (1)...(19): siRNA sense strand
auucaugguucaagggugu

SEQ ID NO: 2258972 - RNA, 19 nt, Homo sapiens
  misc_RNA (1)...(19): siRNA sense strand
auucaugguucaagggugu

SEQ ID NO: 2258973 - RNA, 19 nt, Homo sapiens
  misc_RNA (1)...(19): siRNA sense strand
auucaugguucaagggugu

SEQ ID NO: 2258974 - RNA, 19 nt, Homo sapiens
  misc_RNA (1)...(19): siRNA sense strand
auucaugguucaagggugu

SEQ ID NO: 2258975 - RNA, 19 nt, Homo sapiens
  misc_RNA (1)...(19): siRNA sense strand
auucaugguucaagggugu

SEQ ID NO: 2258976 - RNA, 19 nt, Homo sapiens
  misc_RNA (1)...(19): siRNA sense strand
auucaugguucaagggugu

SEQ ID NO: 2258977 - RNA, 19 nt, Homo sapiens
  misc_RNA (1)...(19): siRNA sense strand
gugacgaagcacagagcaa

SEQ ID NO: 2258978 - RNA, 19 nt, Homo sapiens
  misc_RNA (1)...(19): siRNA sense strand
cagcagauguggaucagca

SEQ ID NO: 2258979 - RNA, 19 nt, Homo sapiens
  misc_RNA (1)...(19): siRNA sense strand
gggacaucaaggagaaacu

SEQ ID NO: 2258980 - RNA, 19 nt, Homo sapiens
  misc_RNA (1)...(19): siRNA sense strand
gugaagaagaggacagcac

SEQ ID NO: 2258981 - RNA, 19 nt, Homo sapiens
  misc_RNA (1)...(19): siRNA sense strand
aggccaaccgggagaaaau

SEQ ID NO: 2258982 - RNA, 19 nt, Homo sapiens
  misc_RNA (1)...(19): siRNA sense strand
ggauggagucugcuggcau

SEQ ID NO: 2258983 - RNA, 19 nt, Homo sapiens
  misc_RNA (1)...(19): siRNA sense strand
cugaaguacccgauagaac

SEQ ID NO: 2258984 - RNA, 19 nt, Homo sapiens
  misc_RNA (1)...(19): siRNA sense strand
cgggagaaaaugacucaaa

SEQ ID NO: 2258985 - RNA, 19 nt, Homo sapiens
  misc_RNA (1)...(19): siRNA sense strand
agauuauguuugagaccuu

SEQ ID NO: 2258986 - RNA, 19 nt, Homo sapiens
  misc_RNA (1)...(19): siRNA sense strand
gcaaguacucgguguggau

SEQ ID NO: 2258987 - RNA, 19 nt, Homo sapiens
  misc_RNA (1)...(19): siRNA sense strand
gagaagaucuggcaccaca

SEQ ID NO: 2258988 - RNA, 19 nt, Homo sapiens
  misc_RNA (1)...(19): siRNA sense strand
cgggaaaucgugcgcgaca

SEQ ID NO: 2258989 - RNA, 19 nt, Homo sapiens
  misc_RNA (1)...(19): siRNA sense strand
gguauggaaucuugcggca

SEQ ID NO: 2258990 - RNA, 19 nt, Homo sapiens
  misc_RNA (1)...(19): siRNA sense strand
aggccaacagagagaagau

SEQ ID NO: 2258991 - RNA, 19 nt, Homo sapiens
  misc_RNA (1)...(19): siRNA sense strand
gacaggaugcagaaggaga

SEQ ID NO: 2258992 - RNA, 19 nt, Homo sapiens
  misc_RNA (1)...(19): siRNA sense strand
agagagaaauugugcgaga

SEQ ID NO: 2258993 - RNA, 19 nt, Homo sapiens
  misc_RNA (1)...(19): siRNA sense strand
cccaaggccaacagggaaa

SEQ ID NO: 2258994 - RNA, 19 nt, Homo sapiens
  misc_RNA (1)...(19): siRNA sense strand
agggugugauggugggaau

SEQ ID NO: 2258995 - RNA, 19 nt, Homo sapiens
  misc_RNA (1)...(19): siRNA sense strand
cccuaaaucccaaggccaa

SEQ ID NO: 2258996 - RNA, 19 nt, Homo sapiens
  misc_RNA (1)...(19): siRNA sense strand
ugaccacagcugagagaga

SEQ ID NO: 2258997 - RNA, 19 nt, Homo sapiens
  misc_RNA (1)...(19): siRNA sense strand
agagaaauugugcgagaca

SEQ ID NO: 2258998 - RNA, 19 nt, Homo sapiens
  misc_RNA (1)...(19): siRNA sense strand
ugggaaugggccagaaaga

SEQ ID NO: 2258999 - RNA, 19 nt, Homo sapiens
  misc_RNA (1)...(19): siRNA sense strand
cgcuggaauucaugagaca

SEQ ID NO: 2259000 - RNA, 19 nt, Homo sapiens
  misc_RNA (1)...(19): siRNA sense strand
cagcagauguggaucagca

SEQ ID NO: 2259001 - RNA, 19 nt, Homo sapiens
  misc_RNA (1)...(19): siRNA sense strand
ccuccauuguccacaggaa

SEQ ID NO: 2259002 - RNA, 19 nt, Homo sapiens
  misc_RNA (1)...(19): siRNA sense strand
gugcgagacaucaaggaga

SEQ ID NO: 2259003 - RNA, 19 nt, Homo sapiens
  misc_RNA (1)...(19): siRNA sense strand
aggcaggcuucgcaggaga

SEQ ID NO: 2259004 - RNA, 19 nt, Homo sapiens
  misc_RNA (1)...(19): siRNA sense strand
agaaauugugcgagacauc

SEQ ID NO: 2259005 - RNA, 19 nt, Homo sapiens
  misc_RNA (1)...(19): siRNA sense strand
accacagcugagagagaaa

SEQ ID NO: 2259006 - RNA, 19 nt, Homo sapiens
  misc_RNA (1)...(19): siRNA sense strand
ugagagagaaauugugcga

SEQ ID NO: 2259007 - RNA, 19 nt, Homo sapiens
  misc_RNA (1)...(19): siRNA sense strand
gacaggaugcagaaggaga

SEQ ID NO: 2259008 - RNA, 19 nt, Homo sapiens
  misc_RNA (1)...(19): siRNA sense strand
ggacaaacagucauggcaa

SEQ ID NO: 2259009 - RNA, 19 nt, Homo sapiens
  misc_RNA (1)...(19): siRNA sense strand
gggauuaguccuaugggaa

SEQ ID NO: 2259010 - RNA, 19 nt, Homo sapiens
  misc_RNA (1)...(19): siRNA sense strand
cugugaaaccauugaagaa

SEQ ID NO: 2259011 - RNA, 19 nt, Homo sapiens
  misc_RNA (1)...(19): siRNA sense strand
cuuuaaugcuaauugggaa

SEQ ID NO: 2259012 - RNA, 19 nt, Homo sapiens
  misc_RNA (1)...(19): siRNA sense strand
gggcaauauguguaaugaa

SEQ ID NO: 2259013 - RNA, 19 nt, Homo sapiens
  misc_RNA (1)...(19): siRNA sense strand
acccagaugcagagacuaa

SEQ ID NO: 2259014 - RNA, 19 nt, Homo sapiens
  misc_RNA (1)...(19): siRNA sense strand
ggauagauauguaugccau

SEQ ID NO: 2259015 - RNA, 19 nt, Homo sapiens
  misc_RNA (1)...(19): siRNA sense strand
cuauaaacuuccaaaggga

SEQ ID NO: 2259016 - RNA, 19 nt, Homo sapiens
  misc_RNA (1)...(19): siRNA sense strand
acgaauauguggcugucaa

SEQ ID NO: 2259017 - RNA, 19 nt, Homo sapiens
  misc_RNA (1)...(19): siRNA sense strand
auguguaggugaaagaauu

SEQ ID NO: 2259018 - RNA, 19 nt, Homo sapiens
  misc_RNA (1)...(19): siRNA sense strand
uguuauggugacaaagaua

SEQ ID NO: 2259019 - RNA, 19 nt, Homo sapiens
  misc_RNA (1)...(19): siRNA sense strand
cgaauauguggcugucaaa

SEQ ID NO: 2259020 - RNA, 19 nt, Homo sapiens
  misc_RNA (1)...(19): siRNA sense strand
uggcuagaggauuggcaua

SEQ ID NO: 2259021 - RNA, 19 nt, Homo sapiens
  misc_RNA (1)...(19): siRNA sense strand
ggugaaagaauuacccaga

SEQ ID NO: 2259022 - RNA, 19 nt, Homo sapiens
  misc_RNA (1)...(19): siRNA sense strand
uugaagacaugcaggaagu

SEQ ID NO: 2259023 - RNA, 19 nt, Homo sapiens
  misc_RNA (1)...(19): siRNA sense strand
gaaacaugcuggaauggca

SEQ ID NO: 2259024 - RNA, 19 nt, Homo sapiens
  misc_RNA (1)...(19): siRNA sense strand
aagacagcccugaaguaua

SEQ ID NO: 2259025 - RNA, 19 nt, Homo sapiens
  misc_RNA (1)...(19): siRNA sense strand
auauguaugccaugggauu

SEQ ID NO: 2259026 - RNA, 19 nt, Homo sapiens
  misc_RNA (1)...(19): siRNA sense strand
ggcagaaacaugcuggaau

SEQ ID NO: 2259027 - RNA, 19 nt, Homo sapiens
  misc_RNA (1)...(19): siRNA sense strand
ggacugauuguguagaaaa

SEQ ID NO: 2259028 - RNA, 19 nt, Homo sapiens
  misc_RNA (1)...(19): siRNA sense strand
gcauauuuacaugaggaua

SEQ ID NO: 2259029 - RNA, 19 nt, Homo sapiens
  misc_RNA (1)...(19): siRNA sense strand
uggcaagucugcaggcgau

SEQ ID NO: 2259030 - RNA, 19 nt, Homo sapiens
  misc_RNA (1)...(19): siRNA sense strand
agaauuacccagaugcaga

SEQ ID NO: 2259031 - RNA, 19 nt, Homo sapiens
  misc_RNA (1)...(19): siRNA sense strand
uuaagagauuauuggcaga

SEQ ID NO: 2259032 - RNA, 19 nt, Homo sapiens
  misc_RNA (1)...(19): siRNA sense strand
uggauguguaggugaaaga

SEQ ID NO: 2259033 - RNA, 19 nt, Homo sapiens
  misc_RNA (1)...(19): siRNA sense strand
uguguaggugaaagaauua

SEQ ID NO: 2259034 - RNA, 19 nt, Homo sapiens
  misc_RNA (1)...(19): siRNA sense strand
ggaaugaagcaugagaaca

SEQ ID NO: 2259035 - RNA, 19 nt, Homo sapiens
  misc_RNA (1)...(19): siRNA sense strand
auacuugguagaucagaaa

SEQ ID NO: 2259036 - RNA, 19 nt, Homo sapiens
  misc_RNA (1)...(19): siRNA sense strand
cuuccaaagggaugcauuu

SEQ ID NO: 2259037 - RNA, 19 nt, Homo sapiens
  misc_RNA (1)...(19): siRNA sense strand
gauguguaggugaaagaau

SEQ ID NO: 2259038 - RNA, 19 nt, Homo sapiens
  misc_RNA (1)...(19): siRNA sense strand
gugagggcaauauguguaa

SEQ ID NO: 2259039 - RNA, 19 nt, Homo sapiens
  misc_RNA (1)...(19): siRNA sense strand
uggcauauuuacaugagga

SEQ ID NO: 2259040 - RNA, 19 nt, Homo sapiens
  misc_RNA (1)...(19): siRNA sense strand
ggauuaguccuaugggaac

SEQ ID NO: 2259041 - RNA, 19 nt, Homo sapiens
  misc_RNA (1)...(19): siRNA sense strand
auggcaaugcucugugaaa

SEQ ID NO: 2259042 - RNA, 19 nt, Homo sapiens
  misc_RNA (1)...(19): siRNA sense strand
gagcagaagaagcgcguca

SEQ ID NO: 2259043 - RNA, 19 nt, Homo sapiens
  misc_RNA (1)...(19): siRNA sense strand
aggaaguacuggagaugag

SEQ ID NO: 2259044 - RNA, 19 nt, Homo sapiens
  misc_RNA (1)...(19): siRNA sense strand
aaguacuggagaugaggaa

SEQ ID NO: 2259045 - RNA, 19 nt, Homo sapiens
  misc_RNA (1)...(19): siRNA sense strand
gagcagaagaagcgcguca

SEQ ID NO: 2259046 - RNA, 19 nt, Homo sapiens
  misc_RNA (1)...(19): siRNA sense strand
aggaaguacuggagaugag

SEQ ID NO: 2259047 - RNA, 19 nt, Homo sapiens
  misc_RNA (1)...(19): siRNA sense strand
aaguacuggagaugaggaa

SEQ ID NO: 2259048 - RNA, 19 nt, Homo sapiens
  misc_RNA (1)...(19): siRNA sense strand
gagcagaagaagcgcguca

SEQ ID NO: 2259049 - RNA, 19 nt, Homo sapiens
  misc_RNA (1)...(19): siRNA sense strand
aggaaguacuggagaugag

SEQ ID NO: 2259050 - RNA, 19 nt, Homo sapiens
  misc_RNA (1)...(19): siRNA sense strand
aaguacuggagaugaggaa

SEQ ID NO: 2259051 - RNA, 19 nt, Homo sapiens
  misc_RNA (1)...(19): siRNA sense strand
gagcagaagaagcgcguca

SEQ ID NO: 2259052 - RNA, 19 nt, Homo sapiens
  misc_RNA (1)...(19): siRNA sense strand
aggaaguacuggagaugag

SEQ ID NO: 2259053 - RNA, 19 nt, Homo sapiens
  misc_RNA (1)...(19): siRNA sense strand
aaguacuggagaugaggaa

SEQ ID NO: 2259054 - RNA, 19 nt, Homo sapiens
  misc_RNA (1)...(19): siRNA sense strand
gagcagaagaagcgcguca

SEQ ID NO: 2259055 - RNA, 19 nt, Homo sapiens
  misc_RNA (1)...(19): siRNA sense strand
aggaaguacuggagaugag

SEQ ID NO: 2259056 - RNA, 19 nt, Homo sapiens
  misc_RNA (1)...(19): siRNA sense strand
aaguacuggagaugaggaa

SEQ ID NO: 2259057 - RNA, 19 nt, Homo sapiens
  misc_RNA (1)...(19): siRNA sense strand
gagcagaagaagcgcguca

SEQ ID NO: 2259058 - RNA, 19 nt, Homo sapiens
  misc_RNA (1)...(19): siRNA sense strand
aggaaguacuggagaugag

SEQ ID NO: 2259059 - RNA, 19 nt, Homo sapiens
  misc_RNA (1)...(19): siRNA sense strand
aaguacuggagaugaggaa

SEQ ID NO: 2259060 - RNA, 19 nt, Homo sapiens
  misc_RNA (1)...(19): siRNA sense strand
gagcagaagaagcgcguca

SEQ ID NO: 2259061 - RNA, 19 nt, Homo sapiens
  misc_RNA (1)...(19): siRNA sense strand
aggaaguacuggagaugag

SEQ ID NO: 2259062 - RNA, 19 nt, Homo sapiens
  misc_RNA (1)...(19): siRNA sense strand
aaguacuggagaugaggaa

SEQ ID NO: 2259063 - RNA, 19 nt, Homo sapiens
  misc_RNA (1)...(19): siRNA sense strand
gagcagaagaagcgcguca

SEQ ID NO: 2259064 - RNA, 19 nt, Homo sapiens
  misc_RNA (1)...(19): siRNA sense strand
aggaaguacuggagaugag

SEQ ID NO: 2259065 - RNA, 19 nt, Homo sapiens
  misc_RNA (1)...(19): siRNA sense strand
aaguacuggagaugaggaa

SEQ ID NO: 2259066 - RNA, 19 nt, Homo sapiens
  misc_RNA (1)...(19): siRNA sense strand
gggcagaggugaaggcaga

SEQ ID NO: 2259067 - RNA, 19 nt, Homo sapiens
  misc_RNA (1)...(19): siRNA sense strand
gcuuaauccuguugggaga

SEQ ID NO: 2259068 - RNA, 19 nt, Homo sapiens
  misc_RNA (1)...(19): siRNA sense strand
augaagaggcagugaagaa

SEQ ID NO: 2259069 - RNA, 19 nt, Homo sapiens
  misc_RNA (1)...(19): siRNA sense strand
gagucaagagugaaggaaa

SEQ ID NO: 2259070 - RNA, 19 nt, Homo sapiens
  misc_RNA (1)...(19): siRNA sense strand
acaucaaggacgagcuaaa

SEQ ID NO: 2259071 - RNA, 19 nt, Homo sapiens
  misc_RNA (1)...(19): siRNA sense strand
gggcaagcacagugucaaa

SEQ ID NO: 2259072 - RNA, 19 nt, Homo sapiens
  misc_RNA (1)...(19): siRNA sense strand
cugaagaagccgagaucau

SEQ ID NO: 2259073 - RNA, 19 nt, Homo sapiens
  misc_RNA (1)...(19): siRNA sense strand
agagugaaggaaagagaaa

SEQ ID NO: 2259074 - RNA, 19 nt, Homo sapiens
  misc_RNA (1)...(19): siRNA sense strand
agaagauggaggaaguaaa

SEQ ID NO: 2259075 - RNA, 19 nt, Homo sapiens
  misc_RNA (1)...(19): siRNA sense strand
gcgaugagguggauggagu

SEQ ID NO: 2259076 - RNA, 19 nt, Homo sapiens
  misc_RNA (1)...(19): siRNA sense strand
cuaaagaaaguguguucaa

SEQ ID NO: 2259077 - RNA, 19 nt, Homo sapiens
  misc_RNA (1)...(19): siRNA sense strand
augaaguggcgaagaagaa

SEQ ID NO: 2259078 - RNA, 19 nt, Homo sapiens
  misc_RNA (1)...(19): siRNA sense strand
agucaagagugaaggaaag

SEQ ID NO: 2259079 - RNA, 19 nt, Homo sapiens
  misc_RNA (1)...(19): siRNA sense strand
gauagagcgugaaggcgaa

SEQ ID NO: 2259080 - RNA, 19 nt, Homo sapiens
  misc_RNA (1)...(19): siRNA sense strand
aggucaaggaggaagguau

SEQ ID NO: 2259081 - RNA, 19 nt, Homo sapiens
  misc_RNA (1)...(19): siRNA sense strand
aggacgagcuaaagaaagu

SEQ ID NO: 2259082 - RNA, 19 nt, Homo sapiens
  misc_RNA (1)...(19): siRNA sense strand
uguauggagaagauagaaa

SEQ ID NO: 2259083 - RNA, 19 nt, Homo sapiens
  misc_RNA (1)...(19): siRNA sense strand
aggaugaagugaaggccau

SEQ ID NO: 2259084 - RNA, 19 nt, Homo sapiens
  misc_RNA (1)...(19): siRNA sense strand
gcgaagaagaaaucuaaaa

SEQ ID NO: 2259085 - RNA, 19 nt, Homo sapiens
  misc_RNA (1)...(19): siRNA sense strand
cccuaaaggcucagaacga

SEQ ID NO: 2259086 - RNA, 19 nt, Homo sapiens
  misc_RNA (1)...(19): siRNA sense strand
agauagagcgugaaggcga

SEQ ID NO: 2259087 - RNA, 19 nt, Homo sapiens
  misc_RNA (1)...(19): siRNA sense strand
uggaggagugacaggcaaa

SEQ ID NO: 2259088 - RNA, 19 nt, Homo sapiens
  misc_RNA (1)...(19): siRNA sense strand
ugacuuugcagcagaguau

SEQ ID NO: 2259089 - RNA, 19 nt, Homo sapiens
  misc_RNA (1)...(19): siRNA sense strand
cgagucagcucaagggcuu

SEQ ID NO: 2259090 - RNA, 19 nt, Homo sapiens
  misc_RNA (1)...(19): siRNA sense strand
caagagugaaggaaagaga

SEQ ID NO: 2259091 - RNA, 19 nt, Homo sapiens
  misc_RNA (1)...(19): siRNA sense strand
aagccaugguggaguauga

SEQ ID NO: 2259092 - RNA, 19 nt, Homo sapiens
  misc_RNA (1)...(19): siRNA sense strand
cagacagugugcaggccaa

SEQ ID NO: 2259093 - RNA, 19 nt, Homo sapiens
  misc_RNA (1)...(19): siRNA sense strand
agucaagaagacagcggaa

SEQ ID NO: 2259094 - RNA, 19 nt, Homo sapiens
  misc_RNA (1)...(19): siRNA sense strand
aggccaugauugagaaacu

SEQ ID NO: 2259095 - RNA, 19 nt, Homo sapiens
  misc_RNA (1)...(19): siRNA sense strand
gaaaguaugaagaaagcca

SEQ ID NO: 2259096 - RNA, 19 nt, Homo sapiens
  misc_RNA (1)...(19): siRNA sense strand
gaauaagaagauggaggaa

SEQ ID NO: 2259097 - RNA, 19 nt, Homo sapiens
  misc_RNA (1)...(19): siRNA sense strand
aggaaguaaaggaagccaa

SEQ ID NO: 2259098 - RNA, 19 nt, Homo sapiens
  misc_RNA (1)...(19): siRNA sense strand
cuggaggacgacaaggaaa

SEQ ID NO: 2259099 - RNA, 19 nt, Homo sapiens
  misc_RNA (1)...(19): siRNA sense strand
uguggaaaguaugaagaaa

SEQ ID NO: 2259100 - RNA, 19 nt, Homo sapiens
  misc_RNA (1)...(19): siRNA sense strand
gucccagggucuucggaua

SEQ ID NO: 2259101 - RNA, 19 nt, Homo sapiens
  misc_RNA (1)...(19): siRNA sense strand
gguguauggagaagauaga

SEQ ID NO: 2259102 - RNA, 19 nt, Homo sapiens
  misc_RNA (1)...(19): siRNA sense strand
ucccaggagucaagaguga

SEQ ID NO: 2259103 - RNA, 19 nt, Homo sapiens
  misc_RNA (1)...(19): siRNA sense strand
gaguggaugaaguggcgaa

SEQ ID NO: 2259104 - RNA, 19 nt, Homo sapiens
  misc_RNA (1)...(19): siRNA sense strand
ugaauaagaagauggagga

SEQ ID NO: 2259105 - RNA, 19 nt, Homo sapiens
  misc_RNA (1)...(19): siRNA sense strand
uggaggacgacaaggaaaa

SEQ ID NO: 2259106 - RNA, 19 nt, Homo sapiens
  misc_RNA (1)...(19): siRNA sense strand
augauauugcucagguaaa

SEQ ID NO: 2259107 - RNA, 19 nt, Homo sapiens
  misc_RNA (1)...(19): siRNA sense strand
aagugaaggccaugauuga

SEQ ID NO: 2259108 - RNA, 19 nt, Homo sapiens
  misc_RNA (1)...(19): siRNA sense strand
gagaaaggugggaaggucu

SEQ ID NO: 2259109 - RNA, 19 nt, Homo sapiens
  misc_RNA (1)...(19): siRNA sense strand
cauuaaggugguugacaga

SEQ ID NO: 2259110 - RNA, 19 nt, Homo sapiens
  misc_RNA (1)...(19): siRNA sense strand
ggaagcuggaggagugaca

SEQ ID NO: 2259111 - RNA, 19 nt, Homo sapiens
  misc_RNA (1)...(19): siRNA sense strand
acguugagguggauggguu

SEQ ID NO: 2259112 - RNA, 19 nt, Homo sapiens
  misc_RNA (1)...(19): siRNA sense strand
gaguugugucugaggacuu

SEQ ID NO: 2259113 - RNA, 19 nt, Homo sapiens
  misc_RNA (1)...(19): siRNA sense strand
agaagaugcccuuggggaa

SEQ ID NO: 2259114 - RNA, 19 nt, Homo sapiens
  misc_RNA (1)...(19): siRNA sense strand
cagaguaugccaaguccaa

SEQ ID NO: 2259115 - RNA, 19 nt, Homo sapiens
  misc_RNA (1)...(19): siRNA sense strand
gccaaguccaacagaagua

SEQ ID NO: 2259116 - RNA, 19 nt, Homo sapiens
  misc_RNA (1)...(19): siRNA sense strand
aaggauaguaagcuugaaa

SEQ ID NO: 2259117 - RNA, 19 nt, Homo sapiens
  misc_RNA (1)...(19): siRNA sense strand
gaggaagguaucaacaaau

SEQ ID NO: 2259118 - RNA, 19 nt, Homo sapiens
  misc_RNA (1)...(19): siRNA sense strand
gaugaaguggcgaagaaga

SEQ ID NO: 2259119 - RNA, 19 nt, Homo sapiens
  misc_RNA (1)...(19): siRNA sense strand
cuucaagagcgaugccuau

SEQ ID NO: 2259120 - RNA, 19 nt, Homo sapiens
  misc_RNA (1)...(19): siRNA sense strand
aaguaaaggaagccaacau

SEQ ID NO: 2259121 - RNA, 19 nt, Homo sapiens
  misc_RNA (1)...(19): siRNA sense strand
guggaaaguaugaagaaag

SEQ ID NO: 2259122 - RNA, 19 nt, Homo sapiens
  misc_RNA (1)...(19): siRNA sense strand
ugaagaaagccauggugga

SEQ ID NO: 2259123 - RNA, 19 nt, Homo sapiens
  misc_RNA (1)...(19): siRNA sense strand
acagggaggagcuggguuu

SEQ ID NO: 2259124 - RNA, 19 nt, Homo sapiens
  misc_RNA (1)...(19): siRNA sense strand
aaagcaagggccaggucaa

SEQ ID NO: 2259125 - RNA, 19 nt, Homo sapiens
  misc_RNA (1)...(19): siRNA sense strand
gcagaaagucaagaagaca

SEQ ID NO: 2259126 - RNA, 19 nt, Homo sapiens
  misc_RNA (1)...(19): siRNA sense strand
gaaacauguaugaacugaa

SEQ ID NO: 2259127 - RNA, 19 nt, Homo sapiens
  misc_RNA (1)...(19): siRNA sense strand
agguggaaaagaugaauaa

SEQ ID NO: 2259128 - RNA, 19 nt, Homo sapiens
  misc_RNA (1)...(19): siRNA sense strand
cuaugauauugcucaggua

SEQ ID NO: 2259129 - RNA, 19 nt, Homo sapiens
  misc_RNA (1)...(19): siRNA sense strand
gaugauagcagcaaggauc

SEQ ID NO: 2259130 - RNA, 19 nt, Homo sapiens
  misc_RNA (1)...(19): siRNA sense strand
uggaauugguagcaaggca

SEQ ID NO: 2259131 - RNA, 19 nt, Homo sapiens
  misc_RNA (1)...(19): siRNA sense strand
agaaauucauugagagcga

SEQ ID NO: 2259132 - RNA, 19 nt, Homo sapiens
  misc_RNA (1)...(19): siRNA sense strand
ccaugaagugccuggacaa

SEQ ID NO: 2259133 - RNA, 19 nt, Homo sapiens
  misc_RNA (1)...(19): siRNA sense strand
acgagaagcuggagacgga

SEQ ID NO: 2259134 - RNA, 19 nt, Homo sapiens
  misc_RNA (1)...(19): siRNA sense strand
ccaucaacgcugagacaga

SEQ ID NO: 2259135 - RNA, 19 nt, Homo sapiens
  misc_RNA (1)...(19): siRNA sense strand
ggaagaaggagcugcgcga

SEQ ID NO: 2259136 - RNA, 19 nt, Homo sapiens
  misc_RNA (1)...(19): siRNA sense strand
uggccauggagaagagcaa

SEQ ID NO: 2259137 - RNA, 19 nt, Homo sapiens
  misc_RNA (1)...(19): siRNA sense strand
agaucaagaaguacgagaa

SEQ ID NO: 2259138 - RNA, 19 nt, Homo sapiens
  misc_RNA (1)...(19): siRNA sense strand
cagcacaagaccaaagaca

SEQ ID NO: 2259139 - RNA, 19 nt, Homo sapiens
  misc_RNA (1)...(19): siRNA sense strand
agaacaagcagcugggcca

SEQ ID NO: 2259140 - RNA, 19 nt, Homo sapiens
  misc_RNA (1)...(19): siRNA sense strand
cgauaaguucacacgguuu

SEQ ID NO: 2259141 - RNA, 19 nt, Homo sapiens
  misc_RNA (1)...(19): siRNA sense strand
aagacaagcaugagaucga

SEQ ID NO: 2259142 - RNA, 19 nt, Homo sapiens
  misc_RNA (1)...(19): siRNA sense strand
uggaauucuaugaggagau

SEQ ID NO: 2259143 - RNA, 19 nt, Homo sapiens
  misc_RNA (1)...(19): siRNA sense strand
ggaaucaaguuacuggaca

SEQ ID NO: 2259144 - RNA, 19 nt, Homo sapiens
  misc_RNA (1)...(19): siRNA sense strand
ccgugguggagcugagcaa

SEQ ID NO: 2259145 - RNA, 19 nt, Homo sapiens
  misc_RNA (1)...(19): siRNA sense strand
ccaacauccuucuggacga

SEQ ID NO: 2259146 - RNA, 19 nt, Homo sapiens
  misc_RNA (1)...(19): siRNA sense strand
aauucuaugaggagaucaa

SEQ ID NO: 2259147 - RNA, 19 nt, Homo sapiens
  misc_RNA (1)...(19): siRNA sense strand
agacggaggaggagcgugu

SEQ ID NO: 2259148 - RNA, 19 nt, Homo sapiens
  misc_RNA (1)...(19): siRNA sense strand
gcgauaaguucacacgguu

SEQ ID NO: 2259149 - RNA, 19 nt, Homo sapiens
  misc_RNA (1)...(19): siRNA sense strand
gaaucaaguuacuggacag

SEQ ID NO: 2259150 - RNA, 19 nt, Homo sapiens
  misc_RNA (1)...(19): siRNA sense strand
cgcaagaaagccaagaaca

SEQ ID NO: 2259151 - RNA, 19 nt, Homo sapiens
  misc_RNA (1)...(19): siRNA sense strand
ucaagaaguacgagaagcu

SEQ ID NO: 2259152 - RNA, 19 nt, Homo sapiens
  misc_RNA (1)...(19): siRNA sense strand
agcacaagaccaaagacaa

SEQ ID NO: 2259153 - RNA, 19 nt, Homo sapiens
  misc_RNA (1)...(19): siRNA sense strand
uggucuucuugcagaggua

SEQ ID NO: 2259154 - RNA, 19 nt, Homo sapiens
  misc_RNA (1)...(19): siRNA sense strand
gagaucaagaaguacgaga

SEQ ID NO: 2259155 - RNA, 19 nt, Homo sapiens
  misc_RNA (1)...(19): siRNA sense strand
aaauucauugagagcgaua

SEQ ID NO: 2259156 - RNA, 19 nt, Homo sapiens
  misc_RNA (1)...(19): siRNA sense strand
cgguuuugccaguggaaga

SEQ ID NO: 2259157 - RNA, 19 nt, Homo sapiens
  misc_RNA (1)...(19): siRNA sense strand
gccuggagcacaugcacaa

SEQ ID NO: 2259158 - RNA, 19 nt, Homo sapiens
  misc_RNA (1)...(19): siRNA sense strand
ugcagaagggcguggccua

SEQ ID NO: 2259159 - RNA, 19 nt, Homo sapiens
  misc_RNA (1)...(19): siRNA sense strand
uggacaaggaauugaagaa

SEQ ID NO: 2259160 - RNA, 19 nt, Homo sapiens
  misc_RNA (1)...(19): siRNA sense strand
cuuuagaaccaaacacaaa

SEQ ID NO: 2259161 - RNA, 19 nt, Homo sapiens
  misc_RNA (1)...(19): siRNA sense strand
guaucuucauggacagaaa

SEQ ID NO: 2259162 - RNA, 19 nt, Homo sapiens
  misc_RNA (1)...(19): siRNA sense strand
aggaaggaacagagcauuu

SEQ ID NO: 2259163 - RNA, 19 nt, Homo sapiens
  misc_RNA (1)...(19): siRNA sense strand
ccuuauacacagaacuuua

SEQ ID NO: 2259164 - RNA, 19 nt, Homo sapiens
  misc_RNA (1)...(19): siRNA sense strand
cagaaauuggcaagauaau

SEQ ID NO: 2259165 - RNA, 19 nt, Homo sapiens
  misc_RNA (1)...(19): siRNA sense strand
caggauaacuguagagcag

SEQ ID NO: 2259166 - RNA, 19 nt, Homo sapiens
  misc_RNA (1)...(19): siRNA sense strand
ugcagaaauuggcaagaua

SEQ ID NO: 2259167 - RNA, 19 nt, Homo sapiens
  misc_RNA (1)...(19): siRNA sense strand
ggauaacuguagagcagca

SEQ ID NO: 2259168 - RNA, 19 nt, Homo sapiens
  misc_RNA (1)...(19): siRNA sense strand
augauuaagacuggagaaa

SEQ ID NO: 2259169 - RNA, 19 nt, Homo sapiens
  misc_RNA (1)...(19): siRNA sense strand
ugucagaagaugaagcaca

SEQ ID NO: 2259170 - RNA, 19 nt, Homo sapiens
  misc_RNA (1)...(19): siRNA sense strand
guucuuaggcucagcguca

SEQ ID NO: 2259171 - RNA, 19 nt, Homo sapiens
  misc_RNA (1)...(19): siRNA sense strand
cgaaauacgaaguugccuu

SEQ ID NO: 2259172 - RNA, 19 nt, Homo sapiens
  misc_RNA (1)...(19): siRNA sense strand
cuggagaagcuguguugua

SEQ ID NO: 2259173 - RNA, 19 nt, Homo sapiens
  misc_RNA (1)...(19): siRNA sense strand
cuacagaugcuuuggucuu

SEQ ID NO: 2259174 - RNA, 19 nt, Homo sapiens
  misc_RNA (1)...(19): siRNA sense strand
ugaggaaggaacagagcau

SEQ ID NO: 2259175 - RNA, 19 nt, Homo sapiens
  misc_RNA (1)...(19): siRNA sense strand
aaauggaagaccagauuau

SEQ ID NO: 2259176 - RNA, 19 nt, Homo sapiens
  misc_RNA (1)...(19): siRNA sense strand
ggaacagagcauuuacgaa

SEQ ID NO: 2259177 - RNA, 19 nt, Homo sapiens
  misc_RNA (1)...(19): siRNA sense strand
uuucaauuguccacagcaa

SEQ ID NO: 2259178 - RNA, 19 nt, Homo sapiens
  misc_RNA (1)...(19): siRNA sense strand
gcugaaggaaucaagucaa

SEQ ID NO: 2259179 - RNA, 19 nt, Homo sapiens
  misc_RNA (1)...(19): siRNA sense strand
uaaaguaucuucauggaca

SEQ ID NO: 2259180 - RNA, 19 nt, Homo sapiens
  misc_RNA (1)...(19): siRNA sense strand
ucaacgaaucuaugaauga

SEQ ID NO: 2259181 - RNA, 19 nt, Homo sapiens
  misc_RNA (1)...(19): siRNA sense strand
ccgaagaccgagcugaauu

SEQ ID NO: 2259182 - RNA, 19 nt, Homo sapiens
  misc_RNA (1)...(19): siRNA sense strand
cagauuaucaacagcaaca

SEQ ID NO: 2259183 - RNA, 19 nt, Homo sapiens
  misc_RNA (1)...(19): siRNA sense strand
agcaagacccacaacaaua

SEQ ID NO: 2259184 - RNA, 19 nt, Homo sapiens
  misc_RNA (1)...(19): siRNA sense strand
ugaacuuacaagaaggaga

SEQ ID NO: 2259185 - RNA, 19 nt, Homo sapiens
  misc_RNA (1)...(19): siRNA sense strand
gcagaaaacaguaaagcca

SEQ ID NO: 2259186 - RNA, 19 nt, Homo sapiens
  misc_RNA (1)...(19): siRNA sense strand
gucagaagaugaagcacau

SEQ ID NO: 2259187 - RNA, 19 nt, Homo sapiens
  misc_RNA (1)...(19): siRNA sense strand
acaucagaguguauaugaa

SEQ ID NO: 2259188 - RNA, 19 nt, Homo sapiens
  misc_RNA (1)...(19): siRNA sense strand
aaagaaagggaaagaugga

SEQ ID NO: 2259189 - RNA, 19 nt, Homo sapiens
  misc_RNA (1)...(19): siRNA sense strand
auacugcaccgaugggaaa

SEQ ID NO: 2259190 - RNA, 19 nt, Homo sapiens
  misc_RNA (1)...(19): siRNA sense strand
aaauggcacuaguggaaaa

SEQ ID NO: 2259191 - RNA, 19 nt, Homo sapiens
  misc_RNA (1)...(19): siRNA sense strand
aaaccaaaagcauggauua

SEQ ID NO: 2259192 - RNA, 19 nt, Homo sapiens
  misc_RNA (1)...(19): siRNA sense strand
cuuacaagaaggagaauuc

SEQ ID NO: 2259193 - RNA, 19 nt, Homo sapiens
  misc_RNA (1)...(19): siRNA sense strand
cacgagaggcucagguuau

SEQ ID NO: 2259194 - RNA, 19 nt, Homo sapiens
  misc_RNA (1)...(19): siRNA sense strand
agaaaacaguaaagccaau

SEQ ID NO: 2259195 - RNA, 19 nt, Homo sapiens
  misc_RNA (1)...(19): siRNA sense strand
cagcaagacccacaacaau

SEQ ID NO: 2259196 - RNA, 19 nt, Homo sapiens
  misc_RNA (1)...(19): siRNA sense strand
cuaaggugucugcuggaua

SEQ ID NO: 2259197 - RNA, 19 nt, Homo sapiens
  misc_RNA (1)...(19): siRNA sense strand
gcaaugaauuuccaaggga

SEQ ID NO: 2259198 - RNA, 19 nt, Homo sapiens
  misc_RNA (1)...(19): siRNA sense strand
ccaagggaaguuaaaguau

SEQ ID NO: 2259199 - RNA, 19 nt, Homo sapiens
  misc_RNA (1)...(19): siRNA sense strand
cuugaaauccggaccaaaa

SEQ ID NO: 2259200 - RNA, 19 nt, Homo sapiens
  misc_RNA (1)...(19): siRNA sense strand
uccugaaacaugagcaaau

SEQ ID NO: 2259201 - RNA, 19 nt, Homo sapiens
  misc_RNA (1)...(19): siRNA sense strand
ccuucauaccuucagauua

SEQ ID NO: 2259202 - RNA, 19 nt, Homo sapiens
  misc_RNA (1)...(19): siRNA sense strand
uagaacagcaacagcaaca

SEQ ID NO: 2259203 - RNA, 19 nt, Homo sapiens
  misc_RNA (1)...(19): siRNA sense strand
acagcaagacccacaacaa

SEQ ID NO: 2259204 - RNA, 19 nt, Homo sapiens
  misc_RNA (1)...(19): siRNA sense strand
ccaugaugcaacaagauga

SEQ ID NO: 2259205 - RNA, 19 nt, Homo sapiens
  misc_RNA (1)...(19): siRNA sense strand
agugacuuguacagcauaa

SEQ ID NO: 2259206 - RNA, 19 nt, Homo sapiens
  misc_RNA (1)...(19): siRNA sense strand
agaugaagcacaugcaagu

SEQ ID NO: 2259207 - RNA, 19 nt, Homo sapiens
  misc_RNA (1)...(19): siRNA sense strand
gaguuggaccguuuggcua

SEQ ID NO: 2259208 - RNA, 19 nt, Homo sapiens
  misc_RNA (1)...(19): siRNA sense strand
agacauugacuuaacggau

SEQ ID NO: 2259209 - RNA, 19 nt, Homo sapiens
  misc_RNA (1)...(19): siRNA sense strand
accacuaacagaugaggaa

SEQ ID NO: 2259210 - RNA, 19 nt, Homo sapiens
  misc_RNA (1)...(19): siRNA sense strand
ccacauccacucuaagcaa

SEQ ID NO: 2259211 - RNA, 19 nt, Homo sapiens
  misc_RNA (1)...(19): siRNA sense strand
guuucagaauggaguuuua

SEQ ID NO: 2259212 - RNA, 19 nt, Homo sapiens
  misc_RNA (1)...(19): siRNA sense strand
ggauaauucaucugguuuu

SEQ ID NO: 2259213 - RNA, 19 nt, Homo sapiens
  misc_RNA (1)...(19): siRNA sense strand
ccuacaaaucugaaaugga

SEQ ID NO: 2259214 - RNA, 19 nt, Homo sapiens
  misc_RNA (1)...(19): siRNA sense strand
ugaaagaaacggaggccag

SEQ ID NO: 2259215 - RNA, 19 nt, Homo sapiens
  misc_RNA (1)...(19): siRNA sense strand
uguugaaacuagauggcaa

SEQ ID NO: 2259216 - RNA, 19 nt, Homo sapiens
  misc_RNA (1)...(19): siRNA sense strand
ccuucaacgcucagaacaa

SEQ ID NO: 2259217 - RNA, 19 nt, Homo sapiens
  misc_RNA (1)...(19): siRNA sense strand
cggagagcuguuugagauu

SEQ ID NO: 2259218 - RNA, 19 nt, Homo sapiens
  misc_RNA (1)...(19): siRNA sense strand
cugcgaugauccagaaacu

SEQ ID NO: 2259219 - RNA, 19 nt, Homo sapiens
  misc_RNA (1)...(19): siRNA sense strand
aaacacaccuugaaccaga

SEQ ID NO: 2259220 - RNA, 19 nt, Homo sapiens
  misc_RNA (1)...(19): siRNA sense strand
aaguaaagguguggccuca

SEQ ID NO: 2259221 - RNA, 19 nt, Homo sapiens
  misc_RNA (1)...(19): siRNA sense strand
cugggaaacuggugaguga

SEQ ID NO: 2259222 - RNA, 19 nt, Homo sapiens
  misc_RNA (1)...(19): siRNA sense strand
aacuauggaugcugggaaa

SEQ ID NO: 2259223 - RNA, 19 nt, Homo sapiens
  misc_RNA (1)...(19): siRNA sense strand
cagaaaugcucgaugaccu

SEQ ID NO: 2259224 - RNA, 19 nt, Homo sapiens
  misc_RNA (1)...(19): siRNA sense strand
auggagaagaggaaagaga

SEQ ID NO: 2259225 - RNA, 19 nt, Homo sapiens
  misc_RNA (1)...(19): siRNA sense strand
gaaacuggugagugaugaa

SEQ ID NO: 2259226 - RNA, 19 nt, Homo sapiens
  misc_RNA (1)...(19): siRNA sense strand
augaaaugguaguggagcu

SEQ ID NO: 2259227 - RNA, 19 nt, Homo sapiens
  misc_RNA (1)...(19): siRNA sense strand
caacuauggaugcugggaa

SEQ ID NO: 2259228 - RNA, 19 nt, Homo sapiens
  misc_RNA (1)...(19): siRNA sense strand
aggaaagagaagcuugauu

SEQ ID NO: 2259229 - RNA, 19 nt, Homo sapiens
  misc_RNA (1)...(19): siRNA sense strand
ccgaguauccuaaaggcau

SEQ ID NO: 2259230 - RNA, 19 nt, Homo sapiens
  misc_RNA (1)...(19): siRNA sense strand
gugaugaaaugguagugga

SEQ ID NO: 2259231 - RNA, 19 nt, Homo sapiens
  misc_RNA (1)...(19): siRNA sense strand
ggacugugaggcaggcaga

SEQ ID NO: 2259232 - RNA, 19 nt, Homo sapiens
  misc_RNA (1)...(19): siRNA sense strand
cugggaaacuggugaguga

SEQ ID NO: 2259233 - RNA, 19 nt, Homo sapiens
  misc_RNA (1)...(19): siRNA sense strand
aacuauggaugcugggaaa

SEQ ID NO: 2259234 - RNA, 19 nt, Homo sapiens
  misc_RNA (1)...(19): siRNA sense strand
cagaaaugcucgaugaccu

SEQ ID NO: 2259235 - RNA, 19 nt, Homo sapiens
  misc_RNA (1)...(19): siRNA sense strand
auggagaagaggaaagaga

SEQ ID NO: 2259236 - RNA, 19 nt, Homo sapiens
  misc_RNA (1)...(19): siRNA sense strand
gaaacuggugagugaugaa

SEQ ID NO: 2259237 - RNA, 19 nt, Homo sapiens
  misc_RNA (1)...(19): siRNA sense strand
augaaaugguaguggagcu

SEQ ID NO: 2259238 - RNA, 19 nt, Homo sapiens
  misc_RNA (1)...(19): siRNA sense strand
caacuauggaugcugggaa

SEQ ID NO: 2259239 - RNA, 19 nt, Homo sapiens
  misc_RNA (1)...(19): siRNA sense strand
aggaaagagaagcuugauu

SEQ ID NO: 2259240 - RNA, 19 nt, Homo sapiens
  misc_RNA (1)...(19): siRNA sense strand
ccgaguauccuaaaggcau

SEQ ID NO: 2259241 - RNA, 19 nt, Homo sapiens
  misc_RNA (1)...(19): siRNA sense strand
gugaugaaaugguagugga

SEQ ID NO: 2259242 - RNA, 19 nt, Homo sapiens
  misc_RNA (1)...(19): siRNA sense strand
ggacugugaggcaggcaga

SEQ ID NO: 2259243 - RNA, 19 nt, Homo sapiens
  misc_RNA (1)...(19): siRNA sense strand
cugggaaacuggugaguga

SEQ ID NO: 2259244 - RNA, 19 nt, Homo sapiens
  misc_RNA (1)...(19): siRNA sense strand
aacuauggaugcugggaaa

SEQ ID NO: 2259245 - RNA, 19 nt, Homo sapiens
  misc_RNA (1)...(19): siRNA sense strand
cagaaaugcucgaugaccu

SEQ ID NO: 2259246 - RNA, 19 nt, Homo sapiens
  misc_RNA (1)...(19): siRNA sense strand
auggagaagaggaaagaga

SEQ ID NO: 2259247 - RNA, 19 nt, Homo sapiens
  misc_RNA (1)...(19): siRNA sense strand
gaaacuggugagugaugaa

SEQ ID NO: 2259248 - RNA, 19 nt, Homo sapiens
  misc_RNA (1)...(19): siRNA sense strand
augaaaugguaguggagcu

SEQ ID NO: 2259249 - RNA, 19 nt, Homo sapiens
  misc_RNA (1)...(19): siRNA sense strand
caacuauggaugcugggaa

SEQ ID NO: 2259250 - RNA, 19 nt, Homo sapiens
  misc_RNA (1)...(19): siRNA sense strand
aggaaagagaagcuugauu

SEQ ID NO: 2259251 - RNA, 19 nt, Homo sapiens
  misc_RNA (1)...(19): siRNA sense strand
ccgaguauccuaaaggcau

SEQ ID NO: 2259252 - RNA, 19 nt, Homo sapiens
  misc_RNA (1)...(19): siRNA sense strand
gugaugaaaugguagugga

SEQ ID NO: 2259253 - RNA, 19 nt, Homo sapiens
  misc_RNA (1)...(19): siRNA sense strand
ggacugugaggcaggcaga

SEQ ID NO: 2259254 - RNA, 19 nt, Homo sapiens
  misc_RNA (1)...(19): siRNA sense strand
ccaugaagauccugcgaaa

SEQ ID NO: 2259255 - RNA, 19 nt, Homo sapiens
  misc_RNA (1)...(19): siRNA sense strand
ccaaggaggucauggagca

SEQ ID NO: 2259256 - RNA, 19 nt, Homo sapiens
  misc_RNA (1)...(19): siRNA sense strand
uggaaguggcggucagcaa

SEQ ID NO: 2259257 - RNA, 19 nt, Homo sapiens
  misc_RNA (1)...(19): siRNA sense strand
guuuuauggugcagagauu

SEQ ID NO: 2259258 - RNA, 19 nt, Homo sapiens
  misc_RNA (1)...(19): siRNA sense strand
ugguauaccgcgacaucaa

SEQ ID NO: 2259259 - RNA, 19 nt, Homo sapiens
  misc_RNA (1)...(19): siRNA sense strand
ccacagucaucgagaggac

SEQ ID NO: 2259260 - RNA, 19 nt, Homo sapiens
  misc_RNA (1)...(19): siRNA sense strand
gguacuucgaugaugaauu

SEQ ID NO: 2259261 - RNA, 19 nt, Homo sapiens
  misc_RNA (1)...(19): siRNA sense strand
gcgacaucaagcuggaaaa

SEQ ID NO: 2259262 - RNA, 19 nt, Homo sapiens
  misc_RNA (1)...(19): siRNA sense strand
acgagagggaggaguggau

SEQ ID NO: 2259263 - RNA, 19 nt, Homo sapiens
  misc_RNA (1)...(19): siRNA sense strand
gugaauacaucaagaccug

SEQ ID NO: 2259264 - RNA, 19 nt, Homo sapiens
  misc_RNA (1)...(19): siRNA sense strand
aggaagucaucauugccaa

SEQ ID NO: 2259265 - RNA, 19 nt, Homo sapiens
  misc_RNA (1)...(19): siRNA sense strand
gaaucaggcuggacgggaa

SEQ ID NO: 2259266 - RNA, 19 nt, Homo sapiens
  misc_RNA (1)...(19): siRNA sense strand
ccaagaagcugcagcccau

SEQ ID NO: 2259267 - RNA, 19 nt, Homo sapiens
  misc_RNA (1)...(19): siRNA sense strand
gugcaggaauggcuggcaa

SEQ ID NO: 2259268 - RNA, 19 nt, Homo sapiens
  misc_RNA (1)...(19): siRNA sense strand
cguccauccuguacggcaa

SEQ ID NO: 2259269 - RNA, 19 nt, Homo sapiens
  misc_RNA (1)...(19): siRNA sense strand
caggaaagucaguaggagu

SEQ ID NO: 2259270 - RNA, 19 nt, Homo sapiens
  misc_RNA (1)...(19): siRNA sense strand
aggccaacuuccagaccau

SEQ ID NO: 2259271 - RNA, 19 nt, Homo sapiens
  misc_RNA (1)...(19): siRNA sense strand
cgcuuuaaccagugcaaca

SEQ ID NO: 2259272 - RNA, 19 nt, Homo sapiens
  misc_RNA (1)...(19): siRNA sense strand
cagacgugaaugagagcga

SEQ ID NO: 2259273 - RNA, 19 nt, Homo sapiens
  misc_RNA (1)...(19): siRNA sense strand
gugccugguauguguggaa

SEQ ID NO: 2259274 - RNA, 19 nt, Homo sapiens
  misc_RNA (1)...(19): siRNA sense strand
ggaagaaucuggugcagga

SEQ ID NO: 2259275 - RNA, 19 nt, Homo sapiens
  misc_RNA (1)...(19): siRNA sense strand
gggccaagaaagcagggaa

SEQ ID NO: 2259276 - RNA, 19 nt, Homo sapiens
  misc_RNA (1)...(19): siRNA sense strand
cagggaagucagugggagu

SEQ ID NO: 2259277 - RNA, 19 nt, Homo sapiens
  misc_RNA (1)...(19): siRNA sense strand
acaugaaauacgagaucca

SEQ ID NO: 2259278 - RNA, 19 nt, Homo sapiens
  misc_RNA (1)...(19): siRNA sense strand
caagaaagcagggaaguca

SEQ ID NO: 2259279 - RNA, 19 nt, Homo sapiens
  misc_RNA (1)...(19): siRNA sense strand
gauguuaccgagagcgaga

SEQ ID NO: 2259280 - RNA, 19 nt, Homo sapiens
  misc_RNA (1)...(19): siRNA sense strand
gggcacugacugagacgau

SEQ ID NO: 2259281 - RNA, 19 nt, Homo sapiens
  misc_RNA (1)...(19): siRNA sense strand
cgcuuuaaccagugcaaca

SEQ ID NO: 2259282 - RNA, 19 nt, Homo sapiens
  misc_RNA (1)...(19): siRNA sense strand
uagacaaacaugugccaga

SEQ ID NO: 2259283 - RNA, 19 nt, Homo sapiens
  misc_RNA (1)...(19): siRNA sense strand
cgguccuccuauacggaaa

SEQ ID NO: 2259284 - RNA, 19 nt, Homo sapiens
  misc_RNA (1)...(19): siRNA sense strand
agccuggagacaugaaaua

SEQ ID NO: 2259285 - RNA, 19 nt, Homo sapiens
  misc_RNA (1)...(19): siRNA sense strand
cggauguuaccgagagcga

SEQ ID NO: 2259286 - RNA, 19 nt, Homo sapiens
  misc_RNA (1)...(19): siRNA sense strand
caaucauaagugugacaaa

SEQ ID NO: 2259287 - RNA, 19 nt, Homo sapiens
  misc_RNA (1)...(19): siRNA sense strand
cccaaauggagcaggauau

SEQ ID NO: 2259288 - RNA, 19 nt, Homo sapiens
  misc_RNA (1)...(19): siRNA sense strand
cuugauugccagagugcua

SEQ ID NO: 2259289 - RNA, 19 nt, Homo sapiens
  misc_RNA (1)...(19): siRNA sense strand
ggauggaacuuauuggacu

SEQ ID NO: 2259290 - RNA, 19 nt, Homo sapiens
  misc_RNA (1)...(19): siRNA sense strand
ccgagaagcugcuggaggu

SEQ ID NO: 2259291 - RNA, 19 nt, Homo sapiens
  misc_RNA (1)...(19): siRNA sense strand
gaaugaaaucggauggaac

SEQ ID NO: 2259292 - RNA, 19 nt, Homo sapiens
  misc_RNA (1)...(19): siRNA sense strand
ccaagaucugagugggaca

SEQ ID NO: 2259293 - RNA, 19 nt, Homo sapiens
  misc_RNA (1)...(19): siRNA sense strand
ggauauuguaugggacgua

SEQ ID NO: 2259294 - RNA, 19 nt, Homo sapiens
  misc_RNA (1)...(19): siRNA sense strand
gggacauacuuuugaagga

SEQ ID NO: 2259295 - RNA, 19 nt, Homo sapiens
  misc_RNA (1)...(19): siRNA sense strand
ucccaaauggagcaggaua

SEQ ID NO: 2259296 - RNA, 19 nt, Homo sapiens
  misc_RNA (1)...(19): siRNA sense strand
caguuauggaccaguucua

SEQ ID NO: 2259297 - RNA, 19 nt, Homo sapiens
  misc_RNA (1)...(19): siRNA sense strand
ggguaaucagucagccaga

SEQ ID NO: 2259298 - RNA, 19 nt, Homo sapiens
  misc_RNA (1)...(19): siRNA sense strand
cgaaauaacuauaggugca

SEQ ID NO: 2259299 - RNA, 19 nt, Homo sapiens
  misc_RNA (1)...(19): siRNA sense strand
ccaugaagaggaaggagaa

SEQ ID NO: 2259300 - RNA, 19 nt, Homo sapiens
  misc_RNA (1)...(19): siRNA sense strand
cgacaaaggaacugcagca

SEQ ID NO: 2259301 - RNA, 19 nt, Homo sapiens
  misc_RNA (1)...(19): siRNA sense strand
guaccagacuucagcgaga

SEQ ID NO: 2259302 - RNA, 19 nt, Homo sapiens
  misc_RNA (1)...(19): siRNA sense strand
ggcaagaagcagaggguac

SEQ ID NO: 2259303 - RNA, 19 nt, Homo sapiens
  misc_RNA (1)...(19): siRNA sense strand
ucucuaaggcagaagaaga

SEQ ID NO: 2259304 - RNA, 19 nt, Homo sapiens
  misc_RNA (1)...(19): siRNA sense strand
cugcagagcuccaagagga

SEQ ID NO: 2259305 - RNA, 19 nt, Homo sapiens
  misc_RNA (1)...(19): siRNA sense strand
gagaggaagcagaggcgga

SEQ ID NO: 2259306 - RNA, 19 nt, Homo sapiens
  misc_RNA (1)...(19): siRNA sense strand
ucaguuucuuugaggacaa

SEQ ID NO: 2259307 - RNA, 19 nt, Homo sapiens
  misc_RNA (1)...(19): siRNA sense strand
cucuaaggcagaagaagaa

SEQ ID NO: 2259308 - RNA, 19 nt, Homo sapiens
  misc_RNA (1)...(19): siRNA sense strand
augaagucccugaggugaa

SEQ ID NO: 2259309 - RNA, 19 nt, Homo sapiens
  misc_RNA (1)...(19): siRNA sense strand
cagcaaauucugaugaacu

SEQ ID NO: 2259310 - RNA, 19 nt, Homo sapiens
  misc_RNA (1)...(19): siRNA sense strand
ucgaagaauauguccagaa

SEQ ID NO: 2259311 - RNA, 19 nt, Homo sapiens
  misc_RNA (1)...(19): siRNA sense strand
caugaagaggaaggagaaa

SEQ ID NO: 2259312 - RNA, 19 nt, Homo sapiens
  misc_RNA (1)...(19): siRNA sense strand
cuguaugaagugaugacaa

SEQ ID NO: 2259313 - RNA, 19 nt, Homo sapiens
  misc_RNA (1)...(19): siRNA sense strand
aggaguaaguuuagaggag

SEQ ID NO: 2259314 - RNA, 19 nt, Homo sapiens
  misc_RNA (1)...(19): siRNA sense strand
ggggcaauuuccugacaua

SEQ ID NO: 2259315 - RNA, 19 nt, Homo sapiens
  misc_RNA (1)...(19): siRNA sense strand
aggcagaagaagaauuuca

SEQ ID NO: 2259316 - RNA, 19 nt, Homo sapiens
  misc_RNA (1)...(19): siRNA sense strand
aggaagcagaggcggagaa

SEQ ID NO: 2259317 - RNA, 19 nt, Homo sapiens
  misc_RNA (1)...(19): siRNA sense strand
cuauaggugcagagcccaa

SEQ ID NO: 2259318 - RNA, 19 nt, Homo sapiens
  misc_RNA (1)...(19): siRNA sense strand
cagaaagcacagaaagugu

SEQ ID NO: 2259319 - RNA, 19 nt, Homo sapiens
  misc_RNA (1)...(19): siRNA sense strand
gcaugaagucuaugagccu

SEQ ID NO: 2259320 - RNA, 19 nt, Homo sapiens
  misc_RNA (1)...(19): siRNA sense strand
cagaggagcucgaagcaac

SEQ ID NO: 2259321 - RNA, 19 nt, Homo sapiens
  misc_RNA (1)...(19): siRNA sense strand
gugcagagcccaaggagac

SEQ ID NO: 2259322 - RNA, 19 nt, Homo sapiens
  misc_RNA (1)...(19): siRNA sense strand
agacaaaagacgaacaguu

SEQ ID NO: 2259323 - RNA, 19 nt, Homo sapiens
  misc_RNA (1)...(19): siRNA sense strand
agcaaauucugaugaacuu

SEQ ID NO: 2259324 - RNA, 19 nt, Homo sapiens
  misc_RNA (1)...(19): siRNA sense strand
aggaaggaugagagucgaa

SEQ ID NO: 2259325 - RNA, 19 nt, Homo sapiens
  misc_RNA (1)...(19): siRNA sense strand
gcuacggagcagaagccua

SEQ ID NO: 2259326 - RNA, 19 nt, Homo sapiens
  misc_RNA (1)...(19): siRNA sense strand
cggggaaggaguaaguuua

SEQ ID NO: 2259327 - RNA, 19 nt, Homo sapiens
  misc_RNA (1)...(19): siRNA sense strand
ccgaggauauuuagcagca

SEQ ID NO: 2259328 - RNA, 19 nt, Homo sapiens
  misc_RNA (1)...(19): siRNA sense strand
cuccaaccaugaagaggaa

SEQ ID NO: 2259329 - RNA, 19 nt, Homo sapiens
  misc_RNA (1)...(19): siRNA sense strand
ucuacaagguggaaacacu

SEQ ID NO: 2259330 - RNA, 19 nt, Homo sapiens
  misc_RNA (1)...(19): siRNA sense strand
gauauuuagcagcaaucaa

SEQ ID NO: 2259331 - RNA, 19 nt, Homo sapiens
  misc_RNA (1)...(19): siRNA sense strand
ggugcagagcccaaggaga

SEQ ID NO: 2259332 - RNA, 19 nt, Homo sapiens
  misc_RNA (1)...(19): siRNA sense strand
aguuuaacguugacuuaca

SEQ ID NO: 2259333 - RNA, 19 nt, Homo sapiens
  misc_RNA (1)...(19): siRNA sense strand
uaaguuuagaggaggccaa

SEQ ID NO: 2259334 - RNA, 19 nt, Homo sapiens
  misc_RNA (1)...(19): siRNA sense strand
ccgacaaggccuucaccau

SEQ ID NO: 2259335 - RNA, 19 nt, Homo sapiens
  misc_RNA (1)...(19): siRNA sense strand
cgaaauaacuauaggugca

SEQ ID NO: 2259336 - RNA, 19 nt, Homo sapiens
  misc_RNA (1)...(19): siRNA sense strand
ccaugaagaggaaggagaa

SEQ ID NO: 2259337 - RNA, 19 nt, Homo sapiens
  misc_RNA (1)...(19): siRNA sense strand
cgacaaaggaacugcagca

SEQ ID NO: 2259338 - RNA, 19 nt, Homo sapiens
  misc_RNA (1)...(19): siRNA sense strand
guaccagacuucagcgaga

SEQ ID NO: 2259339 - RNA, 19 nt, Homo sapiens
  misc_RNA (1)...(19): siRNA sense strand
ggcaagaagcagaggguac

SEQ ID NO: 2259340 - RNA, 19 nt, Homo sapiens
  misc_RNA (1)...(19): siRNA sense strand
ucucuaaggcagaagaaga

SEQ ID NO: 2259341 - RNA, 19 nt, Homo sapiens
  misc_RNA (1)...(19): siRNA sense strand
cugcagagcuccaagagga

SEQ ID NO: 2259342 - RNA, 19 nt, Homo sapiens
  misc_RNA (1)...(19): siRNA sense strand
gagaggaagcagaggcgga

SEQ ID NO: 2259343 - RNA, 19 nt, Homo sapiens
  misc_RNA (1)...(19): siRNA sense strand
ucaguuucuuugaggacaa

SEQ ID NO: 2259344 - RNA, 19 nt, Homo sapiens
  misc_RNA (1)...(19): siRNA sense strand
cucuaaggcagaagaagaa

SEQ ID NO: 2259345 - RNA, 19 nt, Homo sapiens
  misc_RNA (1)...(19): siRNA sense strand
augaagucccugaggugaa

SEQ ID NO: 2259346 - RNA, 19 nt, Homo sapiens
  misc_RNA (1)...(19): siRNA sense strand
cagcaaauucugaugaacu

SEQ ID NO: 2259347 - RNA, 19 nt, Homo sapiens
  misc_RNA (1)...(19): siRNA sense strand
ucgaagaauauguccagaa

SEQ ID NO: 2259348 - RNA, 19 nt, Homo sapiens
  misc_RNA (1)...(19): siRNA sense strand
caugaagaggaaggagaaa

SEQ ID NO: 2259349 - RNA, 19 nt, Homo sapiens
  misc_RNA (1)...(19): siRNA sense strand
cuguaugaagugaugacaa

SEQ ID NO: 2259350 - RNA, 19 nt, Homo sapiens
  misc_RNA (1)...(19): siRNA sense strand
aggaguaaguuuagaggag

SEQ ID NO: 2259351 - RNA, 19 nt, Homo sapiens
  misc_RNA (1)...(19): siRNA sense strand
ggggcaauuuccugacaua

SEQ ID NO: 2259352 - RNA, 19 nt, Homo sapiens
  misc_RNA (1)...(19): siRNA sense strand
aggcagaagaagaauuuca

SEQ ID NO: 2259353 - RNA, 19 nt, Homo sapiens
  misc_RNA (1)...(19): siRNA sense strand
aggaagcagaggcggagaa

SEQ ID NO: 2259354 - RNA, 19 nt, Homo sapiens
  misc_RNA (1)...(19): siRNA sense strand
cuauaggugcagagcccaa

SEQ ID NO: 2259355 - RNA, 19 nt, Homo sapiens
  misc_RNA (1)...(19): siRNA sense strand
cagaaagcacagaaagugu

SEQ ID NO: 2259356 - RNA, 19 nt, Homo sapiens
  misc_RNA (1)...(19): siRNA sense strand
gcaugaagucuaugagccu

SEQ ID NO: 2259357 - RNA, 19 nt, Homo sapiens
  misc_RNA (1)...(19): siRNA sense strand
cagaggagcucgaagcaac

SEQ ID NO: 2259358 - RNA, 19 nt, Homo sapiens
  misc_RNA (1)...(19): siRNA sense strand
gugcagagcccaaggagac

SEQ ID NO: 2259359 - RNA, 19 nt, Homo sapiens
  misc_RNA (1)...(19): siRNA sense strand
agacaaaagacgaacaguu

SEQ ID NO: 2259360 - RNA, 19 nt, Homo sapiens
  misc_RNA (1)...(19): siRNA sense strand
agcaaauucugaugaacuu

SEQ ID NO: 2259361 - RNA, 19 nt, Homo sapiens
  misc_RNA (1)...(19): siRNA sense strand
aggaaggaugagagucgaa

SEQ ID NO: 2259362 - RNA, 19 nt, Homo sapiens
  misc_RNA (1)...(19): siRNA sense strand
gcuacggagcagaagccua

SEQ ID NO: 2259363 - RNA, 19 nt, Homo sapiens
  misc_RNA (1)...(19): siRNA sense strand
cggggaaggaguaaguuua

SEQ ID NO: 2259364 - RNA, 19 nt, Homo sapiens
  misc_RNA (1)...(19): siRNA sense strand
ccgaggauauuuagcagca

SEQ ID NO: 2259365 - RNA, 19 nt, Homo sapiens
  misc_RNA (1)...(19): siRNA sense strand
cuccaaccaugaagaggaa

SEQ ID NO: 2259366 - RNA, 19 nt, Homo sapiens
  misc_RNA (1)...(19): siRNA sense strand
ucuacaagguggaaacacu

SEQ ID NO: 2259367 - RNA, 19 nt, Homo sapiens
  misc_RNA (1)...(19): siRNA sense strand
gauauuuagcagcaaucaa

SEQ ID NO: 2259368 - RNA, 19 nt, Homo sapiens
  misc_RNA (1)...(19): siRNA sense strand
ggugcagagcccaaggaga

SEQ ID NO: 2259369 - RNA, 19 nt, Homo sapiens
  misc_RNA (1)...(19): siRNA sense strand
aguuuaacguugacuuaca

SEQ ID NO: 2259370 - RNA, 19 nt, Homo sapiens
  misc_RNA (1)...(19): siRNA sense strand
uaaguuuagaggaggccaa

SEQ ID NO: 2259371 - RNA, 19 nt, Homo sapiens
  misc_RNA (1)...(19): siRNA sense strand
ccgacaaggccuucaccau

SEQ ID NO: 2259372 - RNA, 19 nt, Homo sapiens
  misc_RNA (1)...(19): siRNA sense strand
ucaagaagauguacggcaa

SEQ ID NO: 2259373 - RNA, 19 nt, Homo sapiens
  misc_RNA (1)...(19): siRNA sense strand
cgagaagauucgugggacu

SEQ ID NO: 2259374 - RNA, 19 nt, Homo sapiens
  misc_RNA (1)...(19): siRNA sense strand
gggagauaaugaaggcgua

SEQ ID NO: 2259375 - RNA, 19 nt, Homo sapiens
  misc_RNA (1)...(19): siRNA sense strand
ggauugaacaggagggugu

SEQ ID NO: 2259376 - RNA, 19 nt, Homo sapiens
  misc_RNA (1)...(19): siRNA sense strand
aggcguaugaggaagacua

SEQ ID NO: 2259377 - RNA, 19 nt, Homo sapiens
  misc_RNA (1)...(19): siRNA sense strand
gcaucaagagugagaccca

SEQ ID NO: 2259378 - RNA, 19 nt, Homo sapiens
  misc_RNA (1)...(19): siRNA sense strand
caacaagagcauugaggac

SEQ ID NO: 2259379 - RNA, 19 nt, Homo sapiens
  misc_RNA (1)...(19): siRNA sense strand
gggacugaugagaugaaau

SEQ ID NO: 2259380 - RNA, 19 nt, Homo sapiens
  misc_RNA (1)...(19): siRNA sense strand
guggcaaguuugagaggcu

SEQ ID NO: 2259381 - RNA, 19 nt, Homo sapiens
  misc_RNA (1)...(19): siRNA sense strand
uguuugaagaguaugagaa

SEQ ID NO: 2259382 - RNA, 19 nt, Homo sapiens
  misc_RNA (1)...(19): siRNA sense strand
gcucacuggaggaggccau

SEQ ID NO: 2259383 - RNA, 19 nt, Homo sapiens
  misc_RNA (1)...(19): siRNA sense strand
cauacagauacgaagccaa

SEQ ID NO: 2259384 - RNA, 19 nt, Homo sapiens
  misc_RNA (1)...(19): siRNA sense strand
gcuacuuugcagagagacu

SEQ ID NO: 2259385 - RNA, 19 nt, Homo sapiens
  misc_RNA (1)...(19): siRNA sense strand
cguuucaaggagcgagauu

SEQ ID NO: 2259386 - RNA, 19 nt, Homo sapiens
  misc_RNA (1)...(19): siRNA sense strand
aagccaaggagcugcauga

SEQ ID NO: 2259387 - RNA, 19 nt, Homo sapiens
  misc_RNA (1)...(19): siRNA sense strand
ccaagaaccagcugcggga

SEQ ID NO: 2259388 - RNA, 19 nt, Homo sapiens
  misc_RNA (1)...(19): siRNA sense strand
aauugcagccagugagaaa

SEQ ID NO: 2259389 - RNA, 19 nt, Homo sapiens
  misc_RNA (1)...(19): siRNA sense strand
gcgcagauaugaaugcuga

SEQ ID NO: 2259390 - RNA, 19 nt, Homo sapiens
  misc_RNA (1)...(19): siRNA sense strand
cccaaggagacauggaaau

SEQ ID NO: 2259391 - RNA, 19 nt, Homo sapiens
  misc_RNA (1)...(19): siRNA sense strand
ggaaccuuucucugggaua

SEQ ID NO: 2259392 - RNA, 19 nt, Homo sapiens
  misc_RNA (1)...(19): siRNA sense strand
gauucaaacuguaauggca

SEQ ID NO: 2259393 - RNA, 19 nt, Homo sapiens
  misc_RNA (1)...(19): siRNA sense strand
ucccgaaaccugaagaaau

SEQ ID NO: 2259394 - RNA, 19 nt, Homo sapiens
  misc_RNA (1)...(19): siRNA sense strand
cagagagagcagagcaacu

SEQ ID NO: 2259395 - RNA, 19 nt, Homo sapiens
  misc_RNA (1)...(19): siRNA sense strand
cauucaaagauguggauuc

SEQ ID NO: 2259396 - RNA, 19 nt, Homo sapiens
  misc_RNA (1)...(19): siRNA sense strand
auguggauucagacaaaua

SEQ ID NO: 2259397 - RNA, 19 nt, Homo sapiens
  misc_RNA (1)...(19): siRNA sense strand
guuccauaugagaagaaau

SEQ ID NO: 2259398 - RNA, 19 nt, Homo sapiens
  misc_RNA (1)...(19): siRNA sense strand
cuaugaaaucagaggauau

SEQ ID NO: 2259399 - RNA, 19 nt, Homo sapiens
  misc_RNA (1)...(19): siRNA sense strand
auacauuggaagacacaaa

SEQ ID NO: 2259400 - RNA, 19 nt, Homo sapiens
  misc_RNA (1)...(19): siRNA sense strand
auaaagaaagaguuggaga

SEQ ID NO: 2259401 - RNA, 19 nt, Homo sapiens
  misc_RNA (1)...(19): siRNA sense strand
uggaagacacaaaguuaca

SEQ ID NO: 2259402 - RNA, 19 nt, Homo sapiens
  misc_RNA (1)...(19): siRNA sense strand
acacagaccucagugggaa

SEQ ID NO: 2259403 - RNA, 19 nt, Homo sapiens
  misc_RNA (1)...(19): siRNA sense strand
ggcaaggaccugauggaga

SEQ ID NO: 2259404 - RNA, 19 nt, Homo sapiens
  misc_RNA (1)...(19): siRNA sense strand
gagcuuugguucggagaca

SEQ ID NO: 2259405 - RNA, 19 nt, Homo sapiens
  misc_RNA (1)...(19): siRNA sense strand
cuggcgaagcucaggcaaa

SEQ ID NO: 2259406 - RNA, 19 nt, Homo sapiens
  misc_RNA (1)...(19): siRNA sense strand
ccuuguuaacaguggagua

SEQ ID NO: 2259407 - RNA, 19 nt, Homo sapiens
  misc_RNA (1)...(19): siRNA sense strand
auucagauuaugagagcau

SEQ ID NO: 2259408 - RNA, 19 nt, Homo sapiens
  misc_RNA (1)...(19): siRNA sense strand
ggaugaagcucacuggcca

SEQ ID NO: 2259409 - RNA, 19 nt, Homo sapiens
  misc_RNA (1)...(19): siRNA sense strand
auuucaagaagauggcaaa

SEQ ID NO: 2259410 - RNA, 19 nt, Homo sapiens
  misc_RNA (1)...(19): siRNA sense strand
gauuucaagaagauggcaa

SEQ ID NO: 2259411 - RNA, 19 nt, Homo sapiens
  misc_RNA (1)...(19): siRNA sense strand
cuuguuaacaguggaguaa

SEQ ID NO: 2259412 - RNA, 19 nt, Homo sapiens
  misc_RNA (1)...(19): siRNA sense strand
agaaagugaaggagaaacu

SEQ ID NO: 2259413 - RNA, 19 nt, Homo sapiens
  misc_RNA (1)...(19): siRNA sense strand
agcugaaggaguuuggaaa

SEQ ID NO: 2259414 - RNA, 19 nt, Homo sapiens
  misc_RNA (1)...(19): siRNA sense strand
uuggauaagcugaaggagu

SEQ ID NO: 2259415 - RNA, 19 nt, Homo sapiens
  misc_RNA (1)...(19): siRNA sense strand
ggaugaaggagcugcugga

SEQ ID NO: 2259416 - RNA, 19 nt, Homo sapiens
  misc_RNA (1)...(19): siRNA sense strand
gugaauaaguaucucggaa

SEQ ID NO: 2259417 - RNA, 19 nt, Homo sapiens
  misc_RNA (1)...(19): siRNA sense strand
ugaaucaaaucgaagguga

SEQ ID NO: 2259418 - RNA, 19 nt, Homo sapiens
  misc_RNA (1)...(19): siRNA sense strand
agaucaaaguguuaaacca

SEQ ID NO: 2259419 - RNA, 19 nt, Homo sapiens
  misc_RNA (1)...(19): siRNA sense strand
uggaaaacggaaagaucaa

SEQ ID NO: 2259420 - RNA, 19 nt, Homo sapiens
  misc_RNA (1)...(19): siRNA sense strand
gaaauugagaagaucccaa

SEQ ID NO: 2259421 - RNA, 19 nt, Homo sapiens
  misc_RNA (1)...(19): siRNA sense strand
gggccauagaucugggaua

SEQ ID NO: 2259422 - RNA, 19 nt, Homo sapiens
  misc_RNA (1)...(19): siRNA sense strand
ccagaaaggcagaagcaca

SEQ ID NO: 2259423 - RNA, 19 nt, Homo sapiens
  misc_RNA (1)...(19): siRNA sense strand
aggagcaagcugugcacaa

SEQ ID NO: 2259424 - RNA, 19 nt, Homo sapiens
  misc_RNA (1)...(19): siRNA sense strand
aaggaggguuugagggcca

SEQ ID NO: 2259425 - RNA, 19 nt, Homo sapiens
  misc_RNA (1)...(19): siRNA sense strand
gugagaaugagaaggagca

SEQ ID NO: 2259426 - RNA, 19 nt, Homo sapiens
  misc_RNA (1)...(19): siRNA sense strand
ucauauggaaagcagacaa

SEQ ID NO: 2259427 - RNA, 19 nt, Homo sapiens
  misc_RNA (1)...(19): siRNA sense strand
gccuaugggucuagcgauc

SEQ ID NO: 2259428 - RNA, 19 nt, Homo sapiens
  misc_RNA (1)...(19): siRNA sense strand
aguauuaccaagaucagaa

SEQ ID NO: 2259429 - RNA, 19 nt, Homo sapiens
  misc_RNA (1)...(19): siRNA sense strand
aagaucagaaagacgcaaa

SEQ ID NO: 2259430 - RNA, 19 nt, Homo sapiens
  misc_RNA (1)...(19): siRNA sense strand
ccugcaugcucgaggacaa

SEQ ID NO: 2259431 - RNA, 19 nt, Homo sapiens
  misc_RNA (1)...(19): siRNA sense strand
uggagaaagaccagaucaa

SEQ ID NO: 2259432 - RNA, 19 nt, Homo sapiens
  misc_RNA (1)...(19): siRNA sense strand
gagaugagaucgucggcau

SEQ ID NO: 2259433 - RNA, 19 nt, Homo sapiens
  misc_RNA (1)...(19): siRNA sense strand
ggacaagacucguggccag

SEQ ID NO: 2259434 - RNA, 19 nt, Homo sapiens
  misc_RNA (1)...(19): siRNA sense strand
cuuggaaggaacagaggaa

SEQ ID NO: 2259435 - RNA, 19 nt, Homo sapiens
  misc_RNA (1)...(19): siRNA sense strand
ccagggagaucguggggaa

SEQ ID NO: 2259436 - RNA, 19 nt, Homo sapiens
  misc_RNA (1)...(19): siRNA sense strand
uggaggacgugcaggccaa

SEQ ID NO: 2259437 - RNA, 19 nt, Homo sapiens
  misc_RNA (1)...(19): siRNA sense strand
cugcaagcccagcgaguuu

SEQ ID NO: 2259438 - RNA, 19 nt, Homo sapiens
  misc_RNA (1)...(19): siRNA sense strand
ugaagaagcaggagcucau

SEQ ID NO: 2259439 - RNA, 19 nt, Homo sapiens
  misc_RNA (1)...(19): siRNA sense strand
acucggaaccugagaagau

SEQ ID NO: 2259440 - RNA, 19 nt, Homo sapiens
  misc_RNA (1)...(19): siRNA sense strand
aguacaaugccgagcccaa

SEQ ID NO: 2259441 - RNA, 19 nt, Homo sapiens
  misc_RNA (1)...(19): siRNA sense strand
gagcagaaauugaaguccu

SEQ ID NO: 2259442 - RNA, 19 nt, Homo sapiens
  misc_RNA (1)...(19): siRNA sense strand
uggacaaaguggugaaccu

SEQ ID NO: 2259443 - RNA, 19 nt, Homo sapiens
  misc_RNA (1)...(19): siRNA sense strand
guuuagacaggaagcgauu

SEQ ID NO: 2259444 - RNA, 19 nt, Homo sapiens
  misc_RNA (1)...(19): siRNA sense strand
gguucacagcugagcagaa

SEQ ID NO: 2259445 - RNA, 19 nt, Homo sapiens
  misc_RNA (1)...(19): siRNA sense strand
cccugaagcuggucgucaa

SEQ ID NO: 2259446 - RNA, 19 nt, Homo sapiens
  misc_RNA (1)...(19): siRNA sense strand
cagaagagccggagcacag

SEQ ID NO: 2259447 - RNA, 19 nt, Homo sapiens
  misc_RNA (1)...(19): siRNA sense strand
uggaaggaacagaggaaac

SEQ ID NO: 2259448 - RNA, 19 nt, Homo sapiens
  misc_RNA (1)...(19): siRNA sense strand
ugaaggaccugcaggagca

SEQ ID NO: 2259449 - RNA, 19 nt, Homo sapiens
  misc_RNA (1)...(19): siRNA sense strand
cgauaagaagaaagcacca

SEQ ID NO: 2259450 - RNA, 19 nt, Homo sapiens
  misc_RNA (1)...(19): siRNA sense strand
ccucgagauuauagauacu

SEQ ID NO: 2259451 - RNA, 19 nt, Homo sapiens
  misc_RNA (1)...(19): siRNA sense strand
caugaaggccaaagagaag

SEQ ID NO: 2259452 - RNA, 19 nt, Homo sapiens
  misc_RNA (1)...(19): siRNA sense strand
ggaugaggauucaaccaga

SEQ ID NO: 2259453 - RNA, 19 nt, Homo sapiens
  misc_RNA (1)...(19): siRNA sense strand
gccaaggagcucaaggaga

SEQ ID NO: 2259454 - RNA, 19 nt, Homo sapiens
  misc_RNA (1)...(19): siRNA sense strand
gcgggagcuggaagauaaa

SEQ ID NO: 2259455 - RNA, 19 nt, Homo sapiens
  misc_RNA (1)...(19): siRNA sense strand
acaaguuacuggcuggaga

SEQ ID NO: 2259456 - RNA, 19 nt, Homo sapiens
  misc_RNA (1)...(19): siRNA sense strand
ccuauaaagaccaccugaa

SEQ ID NO: 2259457 - RNA, 19 nt, Homo sapiens
  misc_RNA (1)...(19): siRNA sense strand
agcagaaauugaaguccua

SEQ ID NO: 2259458 - RNA, 19 nt, Homo sapiens
  misc_RNA (1)...(19): siRNA sense strand
agauugaagagggcaguaa

SEQ ID NO: 2259459 - RNA, 19 nt, Homo sapiens
  misc_RNA (1)...(19): siRNA sense strand
gcaccuuugcagaguauca

SEQ ID NO: 2259460 - RNA, 19 nt, Homo sapiens
  misc_RNA (1)...(19): siRNA sense strand
ucagcuacaugaaggccaa

SEQ ID NO: 2259461 - RNA, 19 nt, Homo sapiens
  misc_RNA (1)...(19): siRNA sense strand
uggacuugauggaaggcau

SEQ ID NO: 2259462 - RNA, 19 nt, Homo sapiens
  misc_RNA (1)...(19): siRNA sense strand
ugaucaagaugaaggaccu

SEQ ID NO: 2259463 - RNA, 19 nt, Homo sapiens
  misc_RNA (1)...(19): siRNA sense strand
cacggaaucccgagagaca

SEQ ID NO: 2259464 - RNA, 19 nt, Homo sapiens
  misc_RNA (1)...(19): siRNA sense strand
cggcaccuuugcagaguau

SEQ ID NO: 2259465 - RNA, 19 nt, Homo sapiens
  misc_RNA (1)...(19): siRNA sense strand
ccagaaacugacggacaaa

SEQ ID NO: 2259466 - RNA, 19 nt, Homo sapiens
  misc_RNA (1)...(19): siRNA sense strand
uggaagaccugaagucgga

SEQ ID NO: 2259467 - RNA, 19 nt, Homo sapiens
  misc_RNA (1)...(19): siRNA sense strand
cgggaagcgacuuggacca

SEQ ID NO: 2259468 - RNA, 19 nt, Homo sapiens
  misc_RNA (1)...(19): siRNA sense strand
ccaucaagaucgugcacuc

SEQ ID NO: 2259469 - RNA, 19 nt, Homo sapiens
  misc_RNA (1)...(19): siRNA sense strand
ucauuggagaccuggacaa

SEQ ID NO: 2259470 - RNA, 19 nt, Homo sapiens
  misc_RNA (1)...(19): siRNA sense strand
cccaggagauacagggcca

SEQ ID NO: 2259471 - RNA, 19 nt, Homo sapiens
  misc_RNA (1)...(19): siRNA sense strand
ccacuauggacuugaugga

SEQ ID NO: 2259472 - RNA, 19 nt, Homo sapiens
  misc_RNA (1)...(19): siRNA sense strand
cauuggagaccuggacaaa

SEQ ID NO: 2259473 - RNA, 19 nt, Homo sapiens
  misc_RNA (1)...(19): siRNA sense strand
ccgagagacaagccagaga

SEQ ID NO: 2259474 - RNA, 19 nt, Homo sapiens
  misc_RNA (1)...(19): siRNA sense strand
ggaaagaccaaucuggaga

SEQ ID NO: 2259475 - RNA, 19 nt, Homo sapiens
  misc_RNA (1)...(19): siRNA sense strand
ugggaaaaccauuggauau

SEQ ID NO: 2259476 - RNA, 19 nt, Homo sapiens
  misc_RNA (1)...(19): siRNA sense strand
gaaagcagucacagcggaa

SEQ ID NO: 2259477 - RNA, 19 nt, Homo sapiens
  misc_RNA (1)...(19): siRNA sense strand
gagaggagaagaaggggaa

SEQ ID NO: 2259478 - RNA, 19 nt, Homo sapiens
  misc_RNA (1)...(19): siRNA sense strand
ggagucagguagagacgga

SEQ ID NO: 2259479 - RNA, 19 nt, Homo sapiens
  misc_RNA (1)...(19): siRNA sense strand
gcuacauggagguggagga

SEQ ID NO: 2259480 - RNA, 19 nt, Homo sapiens
  misc_RNA (1)...(19): siRNA sense strand
cagcggaauuucuggccau

SEQ ID NO: 2259481 - RNA, 19 nt, Homo sapiens
  misc_RNA (1)...(19): siRNA sense strand
gaagcuacauggaggugga

SEQ ID NO: 2259482 - RNA, 19 nt, Homo sapiens
  misc_RNA (1)...(19): siRNA sense strand
caucauuggagcaggaauc

SEQ ID NO: 2259483 - RNA, 19 nt, Homo sapiens
  misc_RNA (1)...(19): siRNA sense strand
gaagaaggggaaagaccaa

SEQ ID NO: 2259484 - RNA, 19 nt, Homo sapiens
  misc_RNA (1)...(19): siRNA sense strand
ccuuuguguaccagagaga

SEQ ID NO: 2259485 - RNA, 19 nt, Homo sapiens
  misc_RNA (1)...(19): siRNA sense strand
aagcagucacagcggaauu

SEQ ID NO: 2259486 - RNA, 19 nt, Homo sapiens
  misc_RNA (1)...(19): siRNA sense strand
agcuuuagcaauuggauuu

SEQ ID NO: 2259487 - RNA, 19 nt, Homo sapiens
  misc_RNA (1)...(19): siRNA sense strand
uaucaugggaaauugggaa

SEQ ID NO: 2259488 - RNA, 19 nt, Homo sapiens
  misc_RNA (1)...(19): siRNA sense strand
ggaaagaccaaucuggaga

SEQ ID NO: 2259489 - RNA, 19 nt, Homo sapiens
  misc_RNA (1)...(19): siRNA sense strand
ugggaaaaccauuggauau

SEQ ID NO: 2259490 - RNA, 19 nt, Homo sapiens
  misc_RNA (1)...(19): siRNA sense strand
gaaagcagucacagcggaa

SEQ ID NO: 2259491 - RNA, 19 nt, Homo sapiens
  misc_RNA (1)...(19): siRNA sense strand
gagaggagaagaaggggaa

SEQ ID NO: 2259492 - RNA, 19 nt, Homo sapiens
  misc_RNA (1)...(19): siRNA sense strand
ggagucagguagagacgga

SEQ ID NO: 2259493 - RNA, 19 nt, Homo sapiens
  misc_RNA (1)...(19): siRNA sense strand
gcuacauggagguggagga

SEQ ID NO: 2259494 - RNA, 19 nt, Homo sapiens
  misc_RNA (1)...(19): siRNA sense strand
cagcggaauuucuggccau

SEQ ID NO: 2259495 - RNA, 19 nt, Homo sapiens
  misc_RNA (1)...(19): siRNA sense strand
gaagcuacauggaggugga

SEQ ID NO: 2259496 - RNA, 19 nt, Homo sapiens
  misc_RNA (1)...(19): siRNA sense strand
caucauuggagcaggaauc

SEQ ID NO: 2259497 - RNA, 19 nt, Homo sapiens
  misc_RNA (1)...(19): siRNA sense strand
gaagaaggggaaagaccaa

SEQ ID NO: 2259498 - RNA, 19 nt, Homo sapiens
  misc_RNA (1)...(19): siRNA sense strand
agcuuuagcaauuggauuu

SEQ ID NO: 2259499 - RNA, 19 nt, Homo sapiens
  misc_RNA (1)...(19): siRNA sense strand
aagcagucacagcggaauu

SEQ ID NO: 2259500 - RNA, 19 nt, Homo sapiens
  misc_RNA (1)...(19): siRNA sense strand
uaucaugggaaauugggaa

SEQ ID NO: 2259501 - RNA, 19 nt, Homo sapiens
  misc_RNA (1)...(19): siRNA sense strand
cgggaagagcggaagaaga

SEQ ID NO: 2259502 - RNA, 19 nt, Homo sapiens
  misc_RNA (1)...(19): siRNA sense strand
ggaagaagaccauggagcu

SEQ ID NO: 2259503 - RNA, 19 nt, Homo sapiens
  misc_RNA (1)...(19): siRNA sense strand
cguaugagccugacgagga

SEQ ID NO: 2259504 - RNA, 19 nt, Homo sapiens
  misc_RNA (1)...(19): siRNA sense strand
ccauggugguggagcugau

SEQ ID NO: 2259505 - RNA, 19 nt, Homo sapiens
  misc_RNA (1)...(19): siRNA sense strand
ccgucaacgcgcucaacaa

SEQ ID NO: 2259506 - RNA, 19 nt, Homo sapiens
  misc_RNA (1)...(19): siRNA sense strand
ccgagagacccuugggauc

SEQ ID NO: 2259507 - RNA, 19 nt, Homo sapiens
  misc_RNA (1)...(19): siRNA sense strand
guucgggagccguggagau

SEQ ID NO: 2259508 - RNA, 19 nt, Homo sapiens
  misc_RNA (1)...(19): siRNA sense strand
ccgagagacccuugggauc

SEQ ID NO: 2259509 - RNA, 19 nt, Homo sapiens
  misc_RNA (1)...(19): siRNA sense strand
cauugaaggaggagaacaa

SEQ ID NO: 2259510 - RNA, 19 nt, Homo sapiens
  misc_RNA (1)...(19): siRNA sense strand
cugcaaagaauauggaaaa

SEQ ID NO: 2259511 - RNA, 19 nt, Homo sapiens
  misc_RNA (1)...(19): siRNA sense strand
agaagaaaucacugaacua

SEQ ID NO: 2259512 - RNA, 19 nt, Homo sapiens
  misc_RNA (1)...(19): siRNA sense strand
ccagaaaauuaguuggaau

SEQ ID NO: 2259513 - RNA, 19 nt, Homo sapiens
  misc_RNA (1)...(19): siRNA sense strand
ggaccuucacagaggaaau

SEQ ID NO: 2259514 - RNA, 19 nt, Homo sapiens
  misc_RNA (1)...(19): siRNA sense strand
uggaaacauugcagaaaca

SEQ ID NO: 2259515 - RNA, 19 nt, Homo sapiens
  misc_RNA (1)...(19): siRNA sense strand
guguggaguuugugaagau

SEQ ID NO: 2259516 - RNA, 19 nt, Homo sapiens
  misc_RNA (1)...(19): siRNA sense strand
acguggaaacuguagaaua

SEQ ID NO: 2259517 - RNA, 19 nt, Homo sapiens
  misc_RNA (1)...(19): siRNA sense strand
auuacaagguuacuggaaa

SEQ ID NO: 2259518 - RNA, 19 nt, Homo sapiens
  misc_RNA (1)...(19): siRNA sense strand
aauuaagaccauuguggaa

SEQ ID NO: 2259519 - RNA, 19 nt, Homo sapiens
  misc_RNA (1)...(19): siRNA sense strand
gauagcagucauagagaca

SEQ ID NO: 2259520 - RNA, 19 nt, Homo sapiens
  misc_RNA (1)...(19): siRNA sense strand
ggugcaugccauugaguuu

SEQ ID NO: 2259521 - RNA, 19 nt, Homo sapiens
  misc_RNA (1)...(19): siRNA sense strand
ucugcaaagaauauggaaa

SEQ ID NO: 2259522 - RNA, 19 nt, Homo sapiens
  misc_RNA (1)...(19): siRNA sense strand
caaaguuguuaacggaaaa

SEQ ID NO: 2259523 - RNA, 19 nt, Homo sapiens
  misc_RNA (1)...(19): siRNA sense strand
ggauaucuggagagagcau

SEQ ID NO: 2259524 - RNA, 19 nt, Homo sapiens
  misc_RNA (1)...(19): siRNA sense strand
ggauaaucgaguucacauu

SEQ ID NO: 2259525 - RNA, 19 nt, Homo sapiens
  misc_RNA (1)...(19): siRNA sense strand
uagcagucauagagacaga

SEQ ID NO: 2259526 - RNA, 19 nt, Homo sapiens
  misc_RNA (1)...(19): siRNA sense strand
ggaagauggaauuggaaug

SEQ ID NO: 2259527 - RNA, 19 nt, Homo sapiens
  misc_RNA (1)...(19): siRNA sense strand
uauuggaaccagaagcuaa

SEQ ID NO: 2259528 - RNA, 19 nt, Homo sapiens
  misc_RNA (1)...(19): siRNA sense strand
agacuuugcagcaggauga

SEQ ID NO: 2259529 - RNA, 19 nt, Homo sapiens
  misc_RNA (1)...(19): siRNA sense strand
ucgacaaguaacagaccua

SEQ ID NO: 2259530 - RNA, 19 nt, Homo sapiens
  misc_RNA (1)...(19): siRNA sense strand
ucuacaaagacauuagcaa

SEQ ID NO: 2259531 - RNA, 19 nt, Homo sapiens
  misc_RNA (1)...(19): siRNA sense strand
agaccauuguggaaacauu

SEQ ID NO: 2259532 - RNA, 19 nt, Homo sapiens
  misc_RNA (1)...(19): siRNA sense strand
ucucagauuauuccagaaa

SEQ ID NO: 2259533 - RNA, 19 nt, Homo sapiens
  misc_RNA (1)...(19): siRNA sense strand
ccauuugaucgacaaguaa

SEQ ID NO: 2259534 - RNA, 19 nt, Homo sapiens
  misc_RNA (1)...(19): siRNA sense strand
aguaacagaccuaggugau

SEQ ID NO: 2259535 - RNA, 19 nt, Homo sapiens
  misc_RNA (1)...(19): siRNA sense strand
gugaugaagaugaagcuca

SEQ ID NO: 2259536 - RNA, 19 nt, Homo sapiens
  misc_RNA (1)...(19): siRNA sense strand
accagggacugcagagaau

SEQ ID NO: 2259537 - RNA, 19 nt, Homo sapiens
  misc_RNA (1)...(19): siRNA sense strand
uuacaagguuacuggaaac

SEQ ID NO: 2259538 - RNA, 19 nt, Homo sapiens
  misc_RNA (1)...(19): siRNA sense strand
cagaauuagugaagcacac

SEQ ID NO: 2259539 - RNA, 19 nt, Homo sapiens
  misc_RNA (1)...(19): siRNA sense strand
uggaagauggaauuggaau

SEQ ID NO: 2259540 - RNA, 19 nt, Homo sapiens
  misc_RNA (1)...(19): siRNA sense strand
acucagucuccauaaauua

SEQ ID NO: 2259541 - RNA, 19 nt, Homo sapiens
  misc_RNA (1)...(19): siRNA sense strand
gauuggauggugcuggaaa

SEQ ID NO: 2259542 - RNA, 19 nt, Homo sapiens
  misc_RNA (1)...(19): siRNA sense strand
ucguugugaugaagaugaa

SEQ ID NO: 2259543 - RNA, 19 nt, Homo sapiens
  misc_RNA (1)...(19): siRNA sense strand
gcagaagaauccauuggga

SEQ ID NO: 2259544 - RNA, 19 nt, Homo sapiens
  misc_RNA (1)...(19): siRNA sense strand
gcgaguuccucuagcugau

SEQ ID NO: 2259545 - RNA, 19 nt, Homo sapiens
  misc_RNA (1)...(19): siRNA sense strand
ggugcuagaguguggaguu

SEQ ID NO: 2259546 - RNA, 19 nt, Homo sapiens
  misc_RNA (1)...(19): siRNA sense strand
gcuaaucagauccgagcau

SEQ ID NO: 2259547 - RNA, 19 nt, Homo sapiens
  misc_RNA (1)...(19): siRNA sense strand
gguggaaaacacaaauuaa

SEQ ID NO: 2259548 - RNA, 19 nt, Homo sapiens
  misc_RNA (1)...(19): siRNA sense strand
ugggauaucuggagagagc

SEQ ID NO: 2259549 - RNA, 19 nt, Homo sapiens
  misc_RNA (1)...(19): siRNA sense strand
uugcaaaguuguuaacgga

SEQ ID NO: 2259550 - RNA, 19 nt, Homo sapiens
  misc_RNA (1)...(19): siRNA sense strand
aggagaacaaaucguggaa

SEQ ID NO: 2259551 - RNA, 19 nt, Homo sapiens
  misc_RNA (1)...(19): siRNA sense strand
cauugaaggaggagaacaa

SEQ ID NO: 2259552 - RNA, 19 nt, Homo sapiens
  misc_RNA (1)...(19): siRNA sense strand
agagguagucacagagaaa

SEQ ID NO: 2259553 - RNA, 19 nt, Homo sapiens
  misc_RNA (1)...(19): siRNA sense strand
cugcaaagaauauggaaaa

SEQ ID NO: 2259554 - RNA, 19 nt, Homo sapiens
  misc_RNA (1)...(19): siRNA sense strand
agaagaaaucacugaacua

SEQ ID NO: 2259555 - RNA, 19 nt, Homo sapiens
  misc_RNA (1)...(19): siRNA sense strand
agucacagagaaaggguaa

SEQ ID NO: 2259556 - RNA, 19 nt, Homo sapiens
  misc_RNA (1)...(19): siRNA sense strand
ccagaaaauuaguuggaau

SEQ ID NO: 2259557 - RNA, 19 nt, Homo sapiens
  misc_RNA (1)...(19): siRNA sense strand
ggaccuucacagaggaaau

SEQ ID NO: 2259558 - RNA, 19 nt, Homo sapiens
  misc_RNA (1)...(19): siRNA sense strand
uggaaacauugcagaaaca

SEQ ID NO: 2259559 - RNA, 19 nt, Homo sapiens
  misc_RNA (1)...(19): siRNA sense strand
ucagauaauaugugaccaa

SEQ ID NO: 2259560 - RNA, 19 nt, Homo sapiens
  misc_RNA (1)...(19): siRNA sense strand
guguggaguuugugaagau

SEQ ID NO: 2259561 - RNA, 19 nt, Homo sapiens
  misc_RNA (1)...(19): siRNA sense strand
acguggaaacuguagaaua

SEQ ID NO: 2259562 - RNA, 19 nt, Homo sapiens
  misc_RNA (1)...(19): siRNA sense strand
auuacaagguuacuggaaa

SEQ ID NO: 2259563 - RNA, 19 nt, Homo sapiens
  misc_RNA (1)...(19): siRNA sense strand
aauuaagaccauuguggaa

SEQ ID NO: 2259564 - RNA, 19 nt, Homo sapiens
  misc_RNA (1)...(19): siRNA sense strand
gauagcagucauagagaca

SEQ ID NO: 2259565 - RNA, 19 nt, Homo sapiens
  misc_RNA (1)...(19): siRNA sense strand
ggugcaugccauugaguuu

SEQ ID NO: 2259566 - RNA, 19 nt, Homo sapiens
  misc_RNA (1)...(19): siRNA sense strand
ucugcaaagaauauggaaa

SEQ ID NO: 2259567 - RNA, 19 nt, Homo sapiens
  misc_RNA (1)...(19): siRNA sense strand
caaaguuguuaacggaaaa

SEQ ID NO: 2259568 - RNA, 19 nt, Homo sapiens
  misc_RNA (1)...(19): siRNA sense strand
ggauaucuggagagagcau

SEQ ID NO: 2259569 - RNA, 19 nt, Homo sapiens
  misc_RNA (1)...(19): siRNA sense strand
ggauaaucgaguucacauu

SEQ ID NO: 2259570 - RNA, 19 nt, Homo sapiens
  misc_RNA (1)...(19): siRNA sense strand
uagcagucauagagacaga

SEQ ID NO: 2259571 - RNA, 19 nt, Homo sapiens
  misc_RNA (1)...(19): siRNA sense strand
ggaagauggaauuggaaug

SEQ ID NO: 2259572 - RNA, 19 nt, Homo sapiens
  misc_RNA (1)...(19): siRNA sense strand
uauuggaaccagaagcuaa

SEQ ID NO: 2259573 - RNA, 19 nt, Homo sapiens
  misc_RNA (1)...(19): siRNA sense strand
agacuuugcagcaggauga

SEQ ID NO: 2259574 - RNA, 19 nt, Homo sapiens
  misc_RNA (1)...(19): siRNA sense strand
ucgacaaguaacagaccua

SEQ ID NO: 2259575 - RNA, 19 nt, Homo sapiens
  misc_RNA (1)...(19): siRNA sense strand
ucuacaaagacauuagcaa

SEQ ID NO: 2259576 - RNA, 19 nt, Homo sapiens
  misc_RNA (1)...(19): siRNA sense strand
agaccauuguggaaacauu

SEQ ID NO: 2259577 - RNA, 19 nt, Homo sapiens
  misc_RNA (1)...(19): siRNA sense strand
ucucagauuauuccagaaa

SEQ ID NO: 2259578 - RNA, 19 nt, Homo sapiens
  misc_RNA (1)...(19): siRNA sense strand
ccauuugaucgacaaguaa

SEQ ID NO: 2259579 - RNA, 19 nt, Homo sapiens
  misc_RNA (1)...(19): siRNA sense strand
aguaacagaccuaggugau

SEQ ID NO: 2259580 - RNA, 19 nt, Homo sapiens
  misc_RNA (1)...(19): siRNA sense strand
gugaugaagaugaagcuca

SEQ ID NO: 2259581 - RNA, 19 nt, Homo sapiens
  misc_RNA (1)...(19): siRNA sense strand
accagggacugcagagaau

SEQ ID NO: 2259582 - RNA, 19 nt, Homo sapiens
  misc_RNA (1)...(19): siRNA sense strand
uuacaagguuacuggaaac

SEQ ID NO: 2259583 - RNA, 19 nt, Homo sapiens
  misc_RNA (1)...(19): siRNA sense strand
cagaauuagugaagcacac

SEQ ID NO: 2259584 - RNA, 19 nt, Homo sapiens
  misc_RNA (1)...(19): siRNA sense strand
uggaagauggaauuggaau

SEQ ID NO: 2259585 - RNA, 19 nt, Homo sapiens
  misc_RNA (1)...(19): siRNA sense strand
acucagucuccauaaauua

SEQ ID NO: 2259586 - RNA, 19 nt, Homo sapiens
  misc_RNA (1)...(19): siRNA sense strand
gauuggauggugcuggaaa

SEQ ID NO: 2259587 - RNA, 19 nt, Homo sapiens
  misc_RNA (1)...(19): siRNA sense strand
ucguugugaugaagaugaa

SEQ ID NO: 2259588 - RNA, 19 nt, Homo sapiens
  misc_RNA (1)...(19): siRNA sense strand
gcagaagaauccauuggga

SEQ ID NO: 2259589 - RNA, 19 nt, Homo sapiens
  misc_RNA (1)...(19): siRNA sense strand
gcgaguuccucuagcugau

SEQ ID NO: 2259590 - RNA, 19 nt, Homo sapiens
  misc_RNA (1)...(19): siRNA sense strand
gcuaaucagauccgagcau

SEQ ID NO: 2259591 - RNA, 19 nt, Homo sapiens
  misc_RNA (1)...(19): siRNA sense strand
ggugcuagaguguggaguu

SEQ ID NO: 2259592 - RNA, 19 nt, Homo sapiens
  misc_RNA (1)...(19): siRNA sense strand
gguggaaaacacaaauuaa

SEQ ID NO: 2259593 - RNA, 19 nt, Homo sapiens
  misc_RNA (1)...(19): siRNA sense strand
ugggaaagagguagucaca

SEQ ID NO: 2259594 - RNA, 19 nt, Homo sapiens
  misc_RNA (1)...(19): siRNA sense strand
ugggauaucuggagagagc

SEQ ID NO: 2259595 - RNA, 19 nt, Homo sapiens
  misc_RNA (1)...(19): siRNA sense strand
uugcaaaguuguuaacgga

SEQ ID NO: 2259596 - RNA, 19 nt, Homo sapiens
  misc_RNA (1)...(19): siRNA sense strand
aggagaacaaaucguggaa

SEQ ID NO: 2259597 - RNA, 19 nt, Homo sapiens
  misc_RNA (1)...(19): siRNA sense strand
cauugaaggaggagaacaa

SEQ ID NO: 2259598 - RNA, 19 nt, Homo sapiens
  misc_RNA (1)...(19): siRNA sense strand
cugcaaagaauauggaaaa

SEQ ID NO: 2259599 - RNA, 19 nt, Homo sapiens
  misc_RNA (1)...(19): siRNA sense strand
agaagaaaucacugaacua

SEQ ID NO: 2259600 - RNA, 19 nt, Homo sapiens
  misc_RNA (1)...(19): siRNA sense strand
ccagaaaauuaguuggaau

SEQ ID NO: 2259601 - RNA, 19 nt, Homo sapiens
  misc_RNA (1)...(19): siRNA sense strand
ggaccuucacagaggaaau

SEQ ID NO: 2259602 - RNA, 19 nt, Homo sapiens
  misc_RNA (1)...(19): siRNA sense strand
uggaaacauugcagaaaca

SEQ ID NO: 2259603 - RNA, 19 nt, Homo sapiens
  misc_RNA (1)...(19): siRNA sense strand
guguggaguuugugaagau

SEQ ID NO: 2259604 - RNA, 19 nt, Homo sapiens
  misc_RNA (1)...(19): siRNA sense strand
acguggaaacuguagaaua

SEQ ID NO: 2259605 - RNA, 19 nt, Homo sapiens
  misc_RNA (1)...(19): siRNA sense strand
auuacaagguuacuggaaa

SEQ ID NO: 2259606 - RNA, 19 nt, Homo sapiens
  misc_RNA (1)...(19): siRNA sense strand
aauuaagaccauuguggaa

SEQ ID NO: 2259607 - RNA, 19 nt, Homo sapiens
  misc_RNA (1)...(19): siRNA sense strand
gauagcagucauagagaca

SEQ ID NO: 2259608 - RNA, 19 nt, Homo sapiens
  misc_RNA (1)...(19): siRNA sense strand
ggugcaugccauugaguuu

SEQ ID NO: 2259609 - RNA, 19 nt, Homo sapiens
  misc_RNA (1)...(19): siRNA sense strand
ucugcaaagaauauggaaa

SEQ ID NO: 2259610 - RNA, 19 nt, Homo sapiens
  misc_RNA (1)...(19): siRNA sense strand
caaaguuguuaacggaaaa

SEQ ID NO: 2259611 - RNA, 19 nt, Homo sapiens
  misc_RNA (1)...(19): siRNA sense strand
ggauaucuggagagagcau

SEQ ID NO: 2259612 - RNA, 19 nt, Homo sapiens
  misc_RNA (1)...(19): siRNA sense strand
ggauaaucgaguucacauu

SEQ ID NO: 2259613 - RNA, 19 nt, Homo sapiens
  misc_RNA (1)...(19): siRNA sense strand
uagcagucauagagacaga

SEQ ID NO: 2259614 - RNA, 19 nt, Homo sapiens
  misc_RNA (1)...(19): siRNA sense strand
ggaagauggaauuggaaug

SEQ ID NO: 2259615 - RNA, 19 nt, Homo sapiens
  misc_RNA (1)...(19): siRNA sense strand
uauuggaaccagaagcuaa

SEQ ID NO: 2259616 - RNA, 19 nt, Homo sapiens
  misc_RNA (1)...(19): siRNA sense strand
agacuuugcagcaggauga

SEQ ID NO: 2259617 - RNA, 19 nt, Homo sapiens
  misc_RNA (1)...(19): siRNA sense strand
ucgacaaguaacagaccua

SEQ ID NO: 2259618 - RNA, 19 nt, Homo sapiens
  misc_RNA (1)...(19): siRNA sense strand
ucuacaaagacauuagcaa

SEQ ID NO: 2259619 - RNA, 19 nt, Homo sapiens
  misc_RNA (1)...(19): siRNA sense strand
agaccauuguggaaacauu

SEQ ID NO: 2259620 - RNA, 19 nt, Homo sapiens
  misc_RNA (1)...(19): siRNA sense strand
ucucagauuauuccagaaa

SEQ ID NO: 2259621 - RNA, 19 nt, Homo sapiens
  misc_RNA (1)...(19): siRNA sense strand
ccauuugaucgacaaguaa

SEQ ID NO: 2259622 - RNA, 19 nt, Homo sapiens
  misc_RNA (1)...(19): siRNA sense strand
aguaacagaccuaggugau

SEQ ID NO: 2259623 - RNA, 19 nt, Homo sapiens
  misc_RNA (1)...(19): siRNA sense strand
gugaugaagaugaagcuca

SEQ ID NO: 2259624 - RNA, 19 nt, Homo sapiens
  misc_RNA (1)...(19): siRNA sense strand
accagggacugcagagaau

SEQ ID NO: 2259625 - RNA, 19 nt, Homo sapiens
  misc_RNA (1)...(19): siRNA sense strand
uuacaagguuacuggaaac

SEQ ID NO: 2259626 - RNA, 19 nt, Homo sapiens
  misc_RNA (1)...(19): siRNA sense strand
cagaauuagugaagcacac

SEQ ID NO: 2259627 - RNA, 19 nt, Homo sapiens
  misc_RNA (1)...(19): siRNA sense strand
uggaagauggaauuggaau

SEQ ID NO: 2259628 - RNA, 19 nt, Homo sapiens
  misc_RNA (1)...(19): siRNA sense strand
acucagucuccauaaauua

SEQ ID NO: 2259629 - RNA, 19 nt, Homo sapiens
  misc_RNA (1)...(19): siRNA sense strand
gauuggauggugcuggaaa

SEQ ID NO: 2259630 - RNA, 19 nt, Homo sapiens
  misc_RNA (1)...(19): siRNA sense strand
ucguugugaugaagaugaa

SEQ ID NO: 2259631 - RNA, 19 nt, Homo sapiens
  misc_RNA (1)...(19): siRNA sense strand
gcagaagaauccauuggga

SEQ ID NO: 2259632 - RNA, 19 nt, Homo sapiens
  misc_RNA (1)...(19): siRNA sense strand
gcgaguuccucuagcugau

SEQ ID NO: 2259633 - RNA, 19 nt, Homo sapiens
  misc_RNA (1)...(19): siRNA sense strand
ggugcuagaguguggaguu

SEQ ID NO: 2259634 - RNA, 19 nt, Homo sapiens
  misc_RNA (1)...(19): siRNA sense strand
gcuaaucagauccgagcau

SEQ ID NO: 2259635 - RNA, 19 nt, Homo sapiens
  misc_RNA (1)...(19): siRNA sense strand
gguggaaaacacaaauuaa

SEQ ID NO: 2259636 - RNA, 19 nt, Homo sapiens
  misc_RNA (1)...(19): siRNA sense strand
ugggauaucuggagagagc

SEQ ID NO: 2259637 - RNA, 19 nt, Homo sapiens
  misc_RNA (1)...(19): siRNA sense strand
uugcaaaguuguuaacgga

SEQ ID NO: 2259638 - RNA, 19 nt, Homo sapiens
  misc_RNA (1)...(19): siRNA sense strand
aggagaacaaaucguggaa

SEQ ID NO: 2259639 - RNA, 19 nt, Homo sapiens
  misc_RNA (1)...(19): siRNA sense strand
acguggaaaccguggagua

SEQ ID NO: 2259640 - RNA, 19 nt, Homo sapiens
  misc_RNA (1)...(19): siRNA sense strand
cagcaaugacagagagcgu

SEQ ID NO: 2259641 - RNA, 19 nt, Homo sapiens
  misc_RNA (1)...(19): siRNA sense strand
ccguggaguacaagaacau

SEQ ID NO: 2259642 - RNA, 19 nt, Homo sapiens
  misc_RNA (1)...(19): siRNA sense strand
ucuucgugguggacagcaa

SEQ ID NO: 2259643 - RNA, 19 nt, Homo sapiens
  misc_RNA (1)...(19): siRNA sense strand
gcaaugacagagagcgugu

SEQ ID NO: 2259644 - RNA, 19 nt, Homo sapiens
  misc_RNA (1)...(19): siRNA sense strand
gcuuaagcugggugagauc

SEQ ID NO: 2259645 - RNA, 19 nt, Homo sapiens
  misc_RNA (1)...(19): siRNA sense strand
ggaagaaggagaugcgcau

SEQ ID NO: 2259646 - RNA, 19 nt, Homo sapiens
  misc_RNA (1)...(19): siRNA sense strand
cgggaagagcugaugagaa

SEQ ID NO: 2259647 - RNA, 19 nt, Homo sapiens
  misc_RNA (1)...(19): siRNA sense strand
gggcaauaucuuuggaaac

SEQ ID NO: 2259648 - RNA, 19 nt, Homo sapiens
  misc_RNA (1)...(19): siRNA sense strand
gguugauauuuguggucga

SEQ ID NO: 2259649 - RNA, 19 nt, Homo sapiens
  misc_RNA (1)...(19): siRNA sense strand
cagcaaugaucgggagcga

SEQ ID NO: 2259650 - RNA, 19 nt, Homo sapiens
  misc_RNA (1)...(19): siRNA sense strand
ugagaaugcuggcggagga

SEQ ID NO: 2259651 - RNA, 19 nt, Homo sapiens
  misc_RNA (1)...(19): siRNA sense strand
caguggaguauaagaacau

SEQ ID NO: 2259652 - RNA, 19 nt, Homo sapiens
  misc_RNA (1)...(19): siRNA sense strand
auguggagacaguggagua

SEQ ID NO: 2259653 - RNA, 19 nt, Homo sapiens
  misc_RNA (1)...(19): siRNA sense strand
uauuuguggucgacagcaa

SEQ ID NO: 2259654 - RNA, 19 nt, Homo sapiens
  misc_RNA (1)...(19): siRNA sense strand
cugauugggaagaaggaga

SEQ ID NO: 2259655 - RNA, 19 nt, Homo sapiens
  misc_RNA (1)...(19): siRNA sense strand
gggaagaaggagaugcgca

SEQ ID NO: 2259656 - RNA, 19 nt, Homo sapiens
  misc_RNA (1)...(19): siRNA sense strand
gcaaugaucgggagcgagu

SEQ ID NO: 2259657 - RNA, 19 nt, Homo sapiens
  misc_RNA (1)...(19): siRNA sense strand
ucaagagccugauugggaa

SEQ ID NO: 2259658 - RNA, 19 nt, Homo sapiens
  misc_RNA (1)...(19): siRNA sense strand
aaugaucgggagcgaguaa

SEQ ID NO: 2259659 - RNA, 19 nt, Homo sapiens
  misc_RNA (1)...(19): siRNA sense strand
aguauaagaacaucagcuu

SEQ ID NO: 2259660 - RNA, 19 nt, Homo sapiens
  misc_RNA (1)...(19): siRNA sense strand
cagugaaaugacagauaaa

SEQ ID NO: 2259661 - RNA, 19 nt, Homo sapiens
  misc_RNA (1)...(19): siRNA sense strand
gcaagaagcagaugcgcau

SEQ ID NO: 2259662 - RNA, 19 nt, Homo sapiens
  misc_RNA (1)...(19): siRNA sense strand
aagcauuacuuccagaaua

SEQ ID NO: 2259663 - RNA, 19 nt, Homo sapiens
  misc_RNA (1)...(19): siRNA sense strand
ugguagaugaauugagaga

SEQ ID NO: 2259664 - RNA, 19 nt, Homo sapiens
  misc_RNA (1)...(19): siRNA sense strand
auguggaaacaguagaaua

SEQ ID NO: 2259665 - RNA, 19 nt, Homo sapiens
  misc_RNA (1)...(19): siRNA sense strand
gugaaaugacagauaaacu

SEQ ID NO: 2259666 - RNA, 19 nt, Homo sapiens
  misc_RNA (1)...(19): siRNA sense strand
ggaaguagcagaugagcug

SEQ ID NO: 2259667 - RNA, 19 nt, Homo sapiens
  misc_RNA (1)...(19): siRNA sense strand
uggcaagaagagacgguga

SEQ ID NO: 2259668 - RNA, 19 nt, Homo sapiens
  misc_RNA (1)...(19): siRNA sense strand
auguagaaacaguggaaua

SEQ ID NO: 2259669 - RNA, 19 nt, Homo sapiens
  misc_RNA (1)...(19): siRNA sense strand
ggaagaagcagaugcggau

SEQ ID NO: 2259670 - RNA, 19 nt, Homo sapiens
  misc_RNA (1)...(19): siRNA sense strand
gggaagaagcagaugcgga

SEQ ID NO: 2259671 - RNA, 19 nt, Homo sapiens
  misc_RNA (1)...(19): siRNA sense strand
agaagaugcugcaggagga

SEQ ID NO: 2259672 - RNA, 19 nt, Homo sapiens
  misc_RNA (1)...(19): siRNA sense strand
caguggaauauaagaacau

SEQ ID NO: 2259673 - RNA, 19 nt, Homo sapiens
  misc_RNA (1)...(19): siRNA sense strand
ggaacaaggaaaugcggau

SEQ ID NO: 2259674 - RNA, 19 nt, Homo sapiens
  misc_RNA (1)...(19): siRNA sense strand
ccacgagauccaggagaaa

SEQ ID NO: 2259675 - RNA, 19 nt, Homo sapiens
  misc_RNA (1)...(19): siRNA sense strand
ccaaaaucuucgggaacaa

SEQ ID NO: 2259676 - RNA, 19 nt, Homo sapiens
  misc_RNA (1)...(19): siRNA sense strand
cggcauuacuacacuggga

SEQ ID NO: 2259677 - RNA, 19 nt, Homo sapiens
  misc_RNA (1)...(19): siRNA sense strand
cugaagaagaugaagcaga

SEQ ID NO: 2259678 - RNA, 19 nt, Homo sapiens
  misc_RNA (1)...(19): siRNA sense strand
ggaacuacuuugagagcac

SEQ ID NO: 2259679 - RNA, 19 nt, Homo sapiens
  misc_RNA (1)...(19): siRNA sense strand
ggaaagacaaccauccuga

SEQ ID NO: 2259680 - RNA, 19 nt, Homo sapiens
  misc_RNA (1)...(19): siRNA sense strand
ggauaaacuucgugagcag

SEQ ID NO: 2259681 - RNA, 19 nt, Homo sapiens
  misc_RNA (1)...(19): siRNA sense strand
ggaacaagaugacagccua

SEQ ID NO: 2259682 - RNA, 19 nt, Homo sapiens
  misc_RNA (1)...(19): siRNA sense strand
ggaucuaaagacuggaaca

SEQ ID NO: 2259683 - RNA, 19 nt, Homo sapiens
  misc_RNA (1)...(19): siRNA sense strand
guguaugggcucaaggaga

SEQ ID NO: 2259684 - RNA, 19 nt, Homo sapiens
  misc_RNA (1)...(19): siRNA sense strand
ggcugagcuuugugaggaa

SEQ ID NO: 2259685 - RNA, 19 nt, Homo sapiens
  misc_RNA (1)...(19): siRNA sense strand
auggagaagggaacaguaa

SEQ ID NO: 2259686 - RNA, 19 nt, Homo sapiens
  misc_RNA (1)...(19): siRNA sense strand
gccauuguccagagggcua

SEQ ID NO: 2259687 - RNA, 19 nt, Homo sapiens
  misc_RNA (1)...(19): siRNA sense strand
ccgaaugagguguggcagu

SEQ ID NO: 2259688 - RNA, 19 nt, Homo sapiens
  misc_RNA (1)...(19): siRNA sense strand
uggagaagggaacaguaaa

SEQ ID NO: 2259689 - RNA, 19 nt, Homo sapiens
  misc_RNA (1)...(19): siRNA sense strand
ggauaaacuucgugagcag

SEQ ID NO: 2259690 - RNA, 19 nt, Homo sapiens
  misc_RNA (1)...(19): siRNA sense strand
ggaacaagaugacagccua

SEQ ID NO: 2259691 - RNA, 19 nt, Homo sapiens
  misc_RNA (1)...(19): siRNA sense strand
ggaucuaaagacuggaaca

SEQ ID NO: 2259692 - RNA, 19 nt, Homo sapiens
  misc_RNA (1)...(19): siRNA sense strand
guguaugggcucaaggaga

SEQ ID NO: 2259693 - RNA, 19 nt, Homo sapiens
  misc_RNA (1)...(19): siRNA sense strand
ggcugagcuuugugaggaa

SEQ ID NO: 2259694 - RNA, 19 nt, Homo sapiens
  misc_RNA (1)...(19): siRNA sense strand
auggagaagggaacaguaa

SEQ ID NO: 2259695 - RNA, 19 nt, Homo sapiens
  misc_RNA (1)...(19): siRNA sense strand
gccauuguccagagggcua

SEQ ID NO: 2259696 - RNA, 19 nt, Homo sapiens
  misc_RNA (1)...(19): siRNA sense strand
ccgaaugagguguggcagu

SEQ ID NO: 2259697 - RNA, 19 nt, Homo sapiens
  misc_RNA (1)...(19): siRNA sense strand
uggagaagggaacaguaaa

SEQ ID NO: 2259698 - RNA, 19 nt, Homo sapiens
  misc_RNA (1)...(19): siRNA sense strand
ggauaaacuucgugagcag

SEQ ID NO: 2259699 - RNA, 19 nt, Homo sapiens
  misc_RNA (1)...(19): siRNA sense strand
ggaacaagaugacagccua

SEQ ID NO: 2259700 - RNA, 19 nt, Homo sapiens
  misc_RNA (1)...(19): siRNA sense strand
ggaucuaaagacuggaaca

SEQ ID NO: 2259701 - RNA, 19 nt, Homo sapiens
  misc_RNA (1)...(19): siRNA sense strand
guguaugggcucaaggaga

SEQ ID NO: 2259702 - RNA, 19 nt, Homo sapiens
  misc_RNA (1)...(19): siRNA sense strand
ggcugagcuuugugaggaa

SEQ ID NO: 2259703 - RNA, 19 nt, Homo sapiens
  misc_RNA (1)...(19): siRNA sense strand
auggagaagggaacaguaa

SEQ ID NO: 2259704 - RNA, 19 nt, Homo sapiens
  misc_RNA (1)...(19): siRNA sense strand
gccauuguccagagggcua

SEQ ID NO: 2259705 - RNA, 19 nt, Homo sapiens
  misc_RNA (1)...(19): siRNA sense strand
ccgaaugagguguggcagu

SEQ ID NO: 2259706 - RNA, 19 nt, Homo sapiens
  misc_RNA (1)...(19): siRNA sense strand
uggagaagggaacaguaaa

SEQ ID NO: 2259707 - RNA, 19 nt, Homo sapiens
  misc_RNA (1)...(19): siRNA sense strand
uggcugagcuugugcggaa

SEQ ID NO: 2259708 - RNA, 19 nt, Homo sapiens
  misc_RNA (1)...(19): siRNA sense strand
gcaagaaggccaaagagga

SEQ ID NO: 2259709 - RNA, 19 nt, Homo sapiens
  misc_RNA (1)...(19): siRNA sense strand
aaggaaagaaggaugguga

SEQ ID NO: 2259710 - RNA, 19 nt, Homo sapiens
  misc_RNA (1)...(19): siRNA sense strand
gcuuugagaacgagggugu

SEQ ID NO: 2259711 - RNA, 19 nt, Homo sapiens
  misc_RNA (1)...(19): siRNA sense strand
aggccaaagaggagugguu

SEQ ID NO: 2259712 - RNA, 19 nt, Homo sapiens
  misc_RNA (1)...(19): siRNA sense strand
cagacaguguggagcuaca

SEQ ID NO: 2259713 - RNA, 19 nt, Homo sapiens
  misc_RNA (1)...(19): siRNA sense strand
uguccuaccacgugcacaa

SEQ ID NO: 2259714 - RNA, 19 nt, Homo sapiens
  misc_RNA (1)...(19): siRNA sense strand
gcagaaagaugguuggacc

SEQ ID NO: 2259715 - RNA, 19 nt, Homo sapiens
  misc_RNA (1)...(19): siRNA sense strand
acucaggaugggagcguga

SEQ ID NO: 2259716 - RNA, 19 nt, Homo sapiens
  misc_RNA (1)...(19): siRNA sense strand
ggagcuacgccauggcuga

SEQ ID NO: 2259717 - RNA, 19 nt, Homo sapiens
  misc_RNA (1)...(19): siRNA sense strand
cggcagaaaagcagcagaa

SEQ ID NO: 2259718 - RNA, 19 nt, Homo sapiens
  misc_RNA (1)...(19): siRNA sense strand
cugugaaccuacuggaugu

SEQ ID NO: 2259719 - RNA, 19 nt, Homo sapiens
  misc_RNA (1)...(19): siRNA sense strand
gcgcugaacaagaaaucca

SEQ ID NO: 2259720 - RNA, 19 nt, Homo sapiens
  misc_RNA (1)...(19): siRNA sense strand
uggagaaggaucagaugaa

SEQ ID NO: 2259721 - RNA, 19 nt, Homo sapiens
  misc_RNA (1)...(19): siRNA sense strand
guuccuggguagagauaca

SEQ ID NO: 2259722 - RNA, 19 nt, Homo sapiens
  misc_RNA (1)...(19): siRNA sense strand
aagccgaggaggagaguga

SEQ ID NO: 2259723 - RNA, 19 nt, Homo sapiens
  misc_RNA (1)...(19): siRNA sense strand
ucauauuggaagugaacau

SEQ ID NO: 2259724 - RNA, 19 nt, Homo sapiens
  misc_RNA (1)...(19): siRNA sense strand
agcuaaaggucuuguuaca

SEQ ID NO: 2259725 - RNA, 19 nt, Homo sapiens
  misc_RNA (1)...(19): siRNA sense strand
uguugaagcagcugaaaga

SEQ ID NO: 2259726 - RNA, 19 nt, Homo sapiens
  misc_RNA (1)...(19): siRNA sense strand
gugaaaucuacaaccauaa

SEQ ID NO: 2259727 - RNA, 19 nt, Homo sapiens
  misc_RNA (1)...(19): siRNA sense strand
gugagaggcuucugaggga

SEQ ID NO: 2259728 - RNA, 19 nt, Homo sapiens
  misc_RNA (1)...(19): siRNA sense strand
augacaauguggagaaacu

SEQ ID NO: 2259729 - RNA, 19 nt, Homo sapiens
  misc_RNA (1)...(19): siRNA sense strand
aaguauauucggaagaaca

SEQ ID NO: 2259730 - RNA, 19 nt, Homo sapiens
  misc_RNA (1)...(19): siRNA sense strand
agaucauauuggaagugaa

SEQ ID NO: 2259731 - RNA, 19 nt, Homo sapiens
  misc_RNA (1)...(19): siRNA sense strand
auucggaagaacacagaua

SEQ ID NO: 2259732 - RNA, 19 nt, Homo sapiens
  misc_RNA (1)...(19): siRNA sense strand
agaaaguguuccuggguag

SEQ ID NO: 2259733 - RNA, 19 nt, Homo sapiens
  misc_RNA (1)...(19): siRNA sense strand
uguuuaaagcaaugacaga

SEQ ID NO: 2259734 - RNA, 19 nt, Homo sapiens
  misc_RNA (1)...(19): siRNA sense strand
guucagaagcuaaaggucu

SEQ ID NO: 2259735 - RNA, 19 nt, Homo sapiens
  misc_RNA (1)...(19): siRNA sense strand
ucuaugacaauguggagaa

SEQ ID NO: 2259736 - RNA, 19 nt, Homo sapiens
  misc_RNA (1)...(19): siRNA sense strand
gaugaugcaaugauggcaa

SEQ ID NO: 2259737 - RNA, 19 nt, Homo sapiens
  misc_RNA (1)...(19): siRNA sense strand
cuguauguucagaagcuaa

SEQ ID NO: 2259738 - RNA, 19 nt, Homo sapiens
  misc_RNA (1)...(19): siRNA sense strand
cuuuccagguuuugagaua

SEQ ID NO: 2259739 - RNA, 19 nt, Homo sapiens
  misc_RNA (1)...(19): siRNA sense strand
cauccguggaaaugguuaa

SEQ ID NO: 2259740 - RNA, 19 nt, Homo sapiens
  misc_RNA (1)...(19): siRNA sense strand
cuaugacaauguggagaaa

SEQ ID NO: 2259741 - RNA, 19 nt, Homo sapiens
  misc_RNA (1)...(19): siRNA sense strand
cagaaaugagaauuccaaa

SEQ ID NO: 2259742 - RNA, 19 nt, Homo sapiens
  misc_RNA (1)...(19): siRNA sense strand
guuacaauggugaaaucua

SEQ ID NO: 2259743 - RNA, 19 nt, Homo sapiens
  misc_RNA (1)...(19): siRNA sense strand
agagauacauauggaguca

SEQ ID NO: 2259744 - RNA, 19 nt, Homo sapiens
  misc_RNA (1)...(19): siRNA sense strand
gagaaggaucagaugaacu

SEQ ID NO: 2259745 - RNA, 19 nt, Homo sapiens
  misc_RNA (1)...(19): siRNA sense strand
acgcaggguuacauauauu

SEQ ID NO: 2259746 - RNA, 19 nt, Homo sapiens
  misc_RNA (1)...(19): siRNA sense strand
caaagaaugggauagaaaa

SEQ ID NO: 2259747 - RNA, 19 nt, Homo sapiens
  misc_RNA (1)...(19): siRNA sense strand
cuaaaaccaaagaaggaua

SEQ ID NO: 2259748 - RNA, 19 nt, Homo sapiens
  misc_RNA (1)...(19): siRNA sense strand
aguuaagaauuccugguuu

SEQ ID NO: 2259749 - RNA, 19 nt, Homo sapiens
  misc_RNA (1)...(19): siRNA sense strand
caaugacagaagauggauu

SEQ ID NO: 2259750 - RNA, 19 nt, Homo sapiens
  misc_RNA (1)...(19): siRNA sense strand
ggaagaacacagauagcgu

SEQ ID NO: 2259751 - RNA, 19 nt, Homo sapiens
  misc_RNA (1)...(19): siRNA sense strand
cguggaaaugguuaaauau

SEQ ID NO: 2259752 - RNA, 19 nt, Homo sapiens
  misc_RNA (1)...(19): siRNA sense strand
auagaaacugugaagaaca

SEQ ID NO: 2259753 - RNA, 19 nt, Homo sapiens
  misc_RNA (1)...(19): siRNA sense strand
aauuugaauaccagaccaa

SEQ ID NO: 2259754 - RNA, 19 nt, Homo sapiens
  misc_RNA (1)...(19): siRNA sense strand
aagaaaguguuccugggua

SEQ ID NO: 2259755 - RNA, 19 nt, Homo sapiens
  misc_RNA (1)...(19): siRNA sense strand
uggcaaaugcagcccagaa

SEQ ID NO: 2259756 - RNA, 19 nt, Homo sapiens
  misc_RNA (1)...(19): siRNA sense strand
agccaauucgagugaagaa

SEQ ID NO: 2259757 - RNA, 19 nt, Homo sapiens
  misc_RNA (1)...(19): siRNA sense strand
aaguggauggugagauaau

SEQ ID NO: 2259758 - RNA, 19 nt, Homo sapiens
  misc_RNA (1)...(19): siRNA sense strand
ccaccagaaaugagaauuc

SEQ ID NO: 2259759 - RNA, 19 nt, Homo sapiens
  misc_RNA (1)...(19): siRNA sense strand
ucuacaaccauaagaagau

SEQ ID NO: 2259760 - RNA, 19 nt, Homo sapiens
  misc_RNA (1)...(19): siRNA sense strand
ggaggaauugagcaaacaa

SEQ ID NO: 2259761 - RNA, 19 nt, Homo sapiens
  misc_RNA (1)...(19): siRNA sense strand
acacagauagcguggugau

SEQ ID NO: 2259762 - RNA, 19 nt, Homo sapiens
  misc_RNA (1)...(19): siRNA sense strand
augaacuuacgcaggguua

SEQ ID NO: 2259763 - RNA, 19 nt, Homo sapiens
  misc_RNA (1)...(19): siRNA sense strand
acguugaacaucagguuga

SEQ ID NO: 2259764 - RNA, 19 nt, Homo sapiens
  misc_RNA (1)...(19): siRNA sense strand
ggaugguguguuugcauuu

SEQ ID NO: 2259765 - RNA, 19 nt, Homo sapiens
  misc_RNA (1)...(19): siRNA sense strand
augaugcaaugauggcaaa

SEQ ID NO: 2259766 - RNA, 19 nt, Homo sapiens
  misc_RNA (1)...(19): siRNA sense strand
uggagaaggaucagaugaa

SEQ ID NO: 2259767 - RNA, 19 nt, Homo sapiens
  misc_RNA (1)...(19): siRNA sense strand
guuccuggguagagauaca

SEQ ID NO: 2259768 - RNA, 19 nt, Homo sapiens
  misc_RNA (1)...(19): siRNA sense strand
aagccgaggaggagaguga

SEQ ID NO: 2259769 - RNA, 19 nt, Homo sapiens
  misc_RNA (1)...(19): siRNA sense strand
ucauauuggaagugaacau

SEQ ID NO: 2259770 - RNA, 19 nt, Homo sapiens
  misc_RNA (1)...(19): siRNA sense strand
agcuaaaggucuuguuaca

SEQ ID NO: 2259771 - RNA, 19 nt, Homo sapiens
  misc_RNA (1)...(19): siRNA sense strand
uguugaagcagcugaaaga

SEQ ID NO: 2259772 - RNA, 19 nt, Homo sapiens
  misc_RNA (1)...(19): siRNA sense strand
gugaaaucuacaaccauaa

SEQ ID NO: 2259773 - RNA, 19 nt, Homo sapiens
  misc_RNA (1)...(19): siRNA sense strand
gugagaggcuucugaggga

SEQ ID NO: 2259774 - RNA, 19 nt, Homo sapiens
  misc_RNA (1)...(19): siRNA sense strand
augacaauguggagaaacu

SEQ ID NO: 2259775 - RNA, 19 nt, Homo sapiens
  misc_RNA (1)...(19): siRNA sense strand
aaguauauucggaagaaca

SEQ ID NO: 2259776 - RNA, 19 nt, Homo sapiens
  misc_RNA (1)...(19): siRNA sense strand
agaucauauuggaagugaa

SEQ ID NO: 2259777 - RNA, 19 nt, Homo sapiens
  misc_RNA (1)...(19): siRNA sense strand
auucggaagaacacagaua

SEQ ID NO: 2259778 - RNA, 19 nt, Homo sapiens
  misc_RNA (1)...(19): siRNA sense strand
agaaaguguuccuggguag

SEQ ID NO: 2259779 - RNA, 19 nt, Homo sapiens
  misc_RNA (1)...(19): siRNA sense strand
uguuuaaagcaaugacaga

SEQ ID NO: 2259780 - RNA, 19 nt, Homo sapiens
  misc_RNA (1)...(19): siRNA sense strand
guucagaagcuaaaggucu

SEQ ID NO: 2259781 - RNA, 19 nt, Homo sapiens
  misc_RNA (1)...(19): siRNA sense strand
ucuaugacaauguggagaa

SEQ ID NO: 2259782 - RNA, 19 nt, Homo sapiens
  misc_RNA (1)...(19): siRNA sense strand
gaugaugcaaugauggcaa

SEQ ID NO: 2259783 - RNA, 19 nt, Homo sapiens
  misc_RNA (1)...(19): siRNA sense strand
cuguauguucagaagcuaa

SEQ ID NO: 2259784 - RNA, 19 nt, Homo sapiens
  misc_RNA (1)...(19): siRNA sense strand
cuuuccagguuuugagaua

SEQ ID NO: 2259785 - RNA, 19 nt, Homo sapiens
  misc_RNA (1)...(19): siRNA sense strand
cauccguggaaaugguuaa

SEQ ID NO: 2259786 - RNA, 19 nt, Homo sapiens
  misc_RNA (1)...(19): siRNA sense strand
cuaugacaauguggagaaa

SEQ ID NO: 2259787 - RNA, 19 nt, Homo sapiens
  misc_RNA (1)...(19): siRNA sense strand
cagaaaugagaauuccaaa

SEQ ID NO: 2259788 - RNA, 19 nt, Homo sapiens
  misc_RNA (1)...(19): siRNA sense strand
guuacaauggugaaaucua

SEQ ID NO: 2259789 - RNA, 19 nt, Homo sapiens
  misc_RNA (1)...(19): siRNA sense strand
agagauacauauggaguca

SEQ ID NO: 2259790 - RNA, 19 nt, Homo sapiens
  misc_RNA (1)...(19): siRNA sense strand
gagaaggaucagaugaacu

SEQ ID NO: 2259791 - RNA, 19 nt, Homo sapiens
  misc_RNA (1)...(19): siRNA sense strand
acgcaggguuacauauauu

SEQ ID NO: 2259792 - RNA, 19 nt, Homo sapiens
  misc_RNA (1)...(19): siRNA sense strand
caaagaaugggauagaaaa

SEQ ID NO: 2259793 - RNA, 19 nt, Homo sapiens
  misc_RNA (1)...(19): siRNA sense strand
cuaaaaccaaagaaggaua

SEQ ID NO: 2259794 - RNA, 19 nt, Homo sapiens
  misc_RNA (1)...(19): siRNA sense strand
aguuaagaauuccugguuu

SEQ ID NO: 2259795 - RNA, 19 nt, Homo sapiens
  misc_RNA (1)...(19): siRNA sense strand
caaugacagaagauggauu

SEQ ID NO: 2259796 - RNA, 19 nt, Homo sapiens
  misc_RNA (1)...(19): siRNA sense strand
ggaagaacacagauagcgu

SEQ ID NO: 2259797 - RNA, 19 nt, Homo sapiens
  misc_RNA (1)...(19): siRNA sense strand
cguggaaaugguuaaauau

SEQ ID NO: 2259798 - RNA, 19 nt, Homo sapiens
  misc_RNA (1)...(19): siRNA sense strand
auagaaacugugaagaaca

SEQ ID NO: 2259799 - RNA, 19 nt, Homo sapiens
  misc_RNA (1)...(19): siRNA sense strand
aauuugaauaccagaccaa

SEQ ID NO: 2259800 - RNA, 19 nt, Homo sapiens
  misc_RNA (1)...(19): siRNA sense strand
aagaaaguguuccugggua

SEQ ID NO: 2259801 - RNA, 19 nt, Homo sapiens
  misc_RNA (1)...(19): siRNA sense strand
uggcaaaugcagcccagaa

SEQ ID NO: 2259802 - RNA, 19 nt, Homo sapiens
  misc_RNA (1)...(19): siRNA sense strand
agccaauucgagugaagaa

SEQ ID NO: 2259803 - RNA, 19 nt, Homo sapiens
  misc_RNA (1)...(19): siRNA sense strand
aaguggauggugagauaau

SEQ ID NO: 2259804 - RNA, 19 nt, Homo sapiens
  misc_RNA (1)...(19): siRNA sense strand
ccaccagaaaugagaauuc

SEQ ID NO: 2259805 - RNA, 19 nt, Homo sapiens
  misc_RNA (1)...(19): siRNA sense strand
ucuacaaccauaagaagau

SEQ ID NO: 2259806 - RNA, 19 nt, Homo sapiens
  misc_RNA (1)...(19): siRNA sense strand
ggaggaauugagcaaacaa

SEQ ID NO: 2259807 - RNA, 19 nt, Homo sapiens
  misc_RNA (1)...(19): siRNA sense strand
acacagauagcguggugau

SEQ ID NO: 2259808 - RNA, 19 nt, Homo sapiens
  misc_RNA (1)...(19): siRNA sense strand
augaacuuacgcaggguua

SEQ ID NO: 2259809 - RNA, 19 nt, Homo sapiens
  misc_RNA (1)...(19): siRNA sense strand
acguugaacaucagguuga

SEQ ID NO: 2259810 - RNA, 19 nt, Homo sapiens
  misc_RNA (1)...(19): siRNA sense strand
ggaugguguguuugcauuu

SEQ ID NO: 2259811 - RNA, 19 nt, Homo sapiens
  misc_RNA (1)...(19): siRNA sense strand
augaugcaaugauggcaaa

SEQ ID NO: 2259812 - RNA, 19 nt, Homo sapiens
  misc_RNA (1)...(19): siRNA sense strand
uggagaaggaucagaugaa

SEQ ID NO: 2259813 - RNA, 19 nt, Homo sapiens
  misc_RNA (1)...(19): siRNA sense strand
guuccuggguagagauaca

SEQ ID NO: 2259814 - RNA, 19 nt, Homo sapiens
  misc_RNA (1)...(19): siRNA sense strand
aagccgaggaggagaguga

SEQ ID NO: 2259815 - RNA, 19 nt, Homo sapiens
  misc_RNA (1)...(19): siRNA sense strand
ucauauuggaagugaacau

SEQ ID NO: 2259816 - RNA, 19 nt, Homo sapiens
  misc_RNA (1)...(19): siRNA sense strand
agcuaaaggucuuguuaca

SEQ ID NO: 2259817 - RNA, 19 nt, Homo sapiens
  misc_RNA (1)...(19): siRNA sense strand
uguugaagcagcugaaaga

SEQ ID NO: 2259818 - RNA, 19 nt, Homo sapiens
  misc_RNA (1)...(19): siRNA sense strand
gugaaaucuacaaccauaa

SEQ ID NO: 2259819 - RNA, 19 nt, Homo sapiens
  misc_RNA (1)...(19): siRNA sense strand
gugagaggcuucugaggga

SEQ ID NO: 2259820 - RNA, 19 nt, Homo sapiens
  misc_RNA (1)...(19): siRNA sense strand
augacaauguggagaaacu

SEQ ID NO: 2259821 - RNA, 19 nt, Homo sapiens
  misc_RNA (1)...(19): siRNA sense strand
aaguauauucggaagaaca

SEQ ID NO: 2259822 - RNA, 19 nt, Homo sapiens
  misc_RNA (1)...(19): siRNA sense strand
agaucauauuggaagugaa

SEQ ID NO: 2259823 - RNA, 19 nt, Homo sapiens
  misc_RNA (1)...(19): siRNA sense strand
auucggaagaacacagaua

SEQ ID NO: 2259824 - RNA, 19 nt, Homo sapiens
  misc_RNA (1)...(19): siRNA sense strand
agaaaguguuccuggguag

SEQ ID NO: 2259825 - RNA, 19 nt, Homo sapiens
  misc_RNA (1)...(19): siRNA sense strand
uguuuaaagcaaugacaga

SEQ ID NO: 2259826 - RNA, 19 nt, Homo sapiens
  misc_RNA (1)...(19): siRNA sense strand
guucagaagcuaaaggucu

SEQ ID NO: 2259827 - RNA, 19 nt, Homo sapiens
  misc_RNA (1)...(19): siRNA sense strand
ucuaugacaauguggagaa

SEQ ID NO: 2259828 - RNA, 19 nt, Homo sapiens
  misc_RNA (1)...(19): siRNA sense strand
gaugaugcaaugauggcaa

SEQ ID NO: 2259829 - RNA, 19 nt, Homo sapiens
  misc_RNA (1)...(19): siRNA sense strand
cuguauguucagaagcuaa

SEQ ID NO: 2259830 - RNA, 19 nt, Homo sapiens
  misc_RNA (1)...(19): siRNA sense strand
cuuuccagguuuugagaua

SEQ ID NO: 2259831 - RNA, 19 nt, Homo sapiens
  misc_RNA (1)...(19): siRNA sense strand
cauccguggaaaugguuaa

SEQ ID NO: 2259832 - RNA, 19 nt, Homo sapiens
  misc_RNA (1)...(19): siRNA sense strand
cuaugacaauguggagaaa

SEQ ID NO: 2259833 - RNA, 19 nt, Homo sapiens
  misc_RNA (1)...(19): siRNA sense strand
cagaaaugagaauuccaaa

SEQ ID NO: 2259834 - RNA, 19 nt, Homo sapiens
  misc_RNA (1)...(19): siRNA sense strand
guuacaauggugaaaucua

SEQ ID NO: 2259835 - RNA, 19 nt, Homo sapiens
  misc_RNA (1)...(19): siRNA sense strand
agagauacauauggaguca

SEQ ID NO: 2259836 - RNA, 19 nt, Homo sapiens
  misc_RNA (1)...(19): siRNA sense strand
gagaaggaucagaugaacu

SEQ ID NO: 2259837 - RNA, 19 nt, Homo sapiens
  misc_RNA (1)...(19): siRNA sense strand
acgcaggguuacauauauu

SEQ ID NO: 2259838 - RNA, 19 nt, Homo sapiens
  misc_RNA (1)...(19): siRNA sense strand
caaagaaugggauagaaaa

SEQ ID NO: 2259839 - RNA, 19 nt, Homo sapiens
  misc_RNA (1)...(19): siRNA sense strand
cuaaaaccaaagaaggaua

SEQ ID NO: 2259840 - RNA, 19 nt, Homo sapiens
  misc_RNA (1)...(19): siRNA sense strand
aguuaagaauuccugguuu

SEQ ID NO: 2259841 - RNA, 19 nt, Homo sapiens
  misc_RNA (1)...(19): siRNA sense strand
caaugacagaagauggauu

SEQ ID NO: 2259842 - RNA, 19 nt, Homo sapiens
  misc_RNA (1)...(19): siRNA sense strand
ggaagaacacagauagcgu

SEQ ID NO: 2259843 - RNA, 19 nt, Homo sapiens
  misc_RNA (1)...(19): siRNA sense strand
cguggaaaugguuaaauau

SEQ ID NO: 2259844 - RNA, 19 nt, Homo sapiens
  misc_RNA (1)...(19): siRNA sense strand
auagaaacugugaagaaca

SEQ ID NO: 2259845 - RNA, 19 nt, Homo sapiens
  misc_RNA (1)...(19): siRNA sense strand
aauuugaauaccagaccaa

SEQ ID NO: 2259846 - RNA, 19 nt, Homo sapiens
  misc_RNA (1)...(19): siRNA sense strand
aagaaaguguuccugggua

SEQ ID NO: 2259847 - RNA, 19 nt, Homo sapiens
  misc_RNA (1)...(19): siRNA sense strand
uggcaaaugcagcccagaa

SEQ ID NO: 2259848 - RNA, 19 nt, Homo sapiens
  misc_RNA (1)...(19): siRNA sense strand
agccaauucgagugaagaa

SEQ ID NO: 2259849 - RNA, 19 nt, Homo sapiens
  misc_RNA (1)...(19): siRNA sense strand
aaguggauggugagauaau

SEQ ID NO: 2259850 - RNA, 19 nt, Homo sapiens
  misc_RNA (1)...(19): siRNA sense strand
ccaccagaaaugagaauuc

SEQ ID NO: 2259851 - RNA, 19 nt, Homo sapiens
  misc_RNA (1)...(19): siRNA sense strand
ucuacaaccauaagaagau

SEQ ID NO: 2259852 - RNA, 19 nt, Homo sapiens
  misc_RNA (1)...(19): siRNA sense strand
ggaggaauugagcaaacaa

SEQ ID NO: 2259853 - RNA, 19 nt, Homo sapiens
  misc_RNA (1)...(19): siRNA sense strand
acacagauagcguggugau

SEQ ID NO: 2259854 - RNA, 19 nt, Homo sapiens
  misc_RNA (1)...(19): siRNA sense strand
augaacuuacgcaggguua

SEQ ID NO: 2259855 - RNA, 19 nt, Homo sapiens
  misc_RNA (1)...(19): siRNA sense strand
acguugaacaucagguuga

SEQ ID NO: 2259856 - RNA, 19 nt, Homo sapiens
  misc_RNA (1)...(19): siRNA sense strand
ggaugguguguuugcauuu

SEQ ID NO: 2259857 - RNA, 19 nt, Homo sapiens
  misc_RNA (1)...(19): siRNA sense strand
augaugcaaugauggcaaa

SEQ ID NO: 2259858 - RNA, 19 nt, Homo sapiens
  misc_RNA (1)...(19): siRNA sense strand
cuccagaagaugagagaaa

SEQ ID NO: 2259859 - RNA, 19 nt, Homo sapiens
  misc_RNA (1)...(19): siRNA sense strand
cgaaacaagaagaaggaga

SEQ ID NO: 2259860 - RNA, 19 nt, Homo sapiens
  misc_RNA (1)...(19): siRNA sense strand
gaagaagaugaaaggaaaa

SEQ ID NO: 2259861 - RNA, 19 nt, Homo sapiens
  misc_RNA (1)...(19): siRNA sense strand
agaagaaggagaagacgga

SEQ ID NO: 2259862 - RNA, 19 nt, Homo sapiens
  misc_RNA (1)...(19): siRNA sense strand
augcugaacugaaggcuca

SEQ ID NO: 2259863 - RNA, 19 nt, Homo sapiens
  misc_RNA (1)...(19): siRNA sense strand
gcucagaaugggaggacuc

SEQ ID NO: 2259864 - RNA, 19 nt, Homo sapiens
  misc_RNA (1)...(19): siRNA sense strand
acagauaaaagaaggaaca

SEQ ID NO: 2259865 - RNA, 19 nt, Homo sapiens
  misc_RNA (1)...(19): siRNA sense strand
gagucggagaagcuggaaa

SEQ ID NO: 2259866 - RNA, 19 nt, Homo sapiens
  misc_RNA (1)...(19): siRNA sense strand
uggaaagugugaaugcuga

SEQ ID NO: 2259867 - RNA, 19 nt, Homo sapiens
  misc_RNA (1)...(19): siRNA sense strand
gugugaaugcugaacugaa

SEQ ID NO: 2259868 - RNA, 19 nt, Homo sapiens
  misc_RNA (1)...(19): siRNA sense strand
cgaaacaagaagaaggaga

SEQ ID NO: 2259869 - RNA, 19 nt, Homo sapiens
  misc_RNA (1)...(19): siRNA sense strand
gaagaagaugaaaggaaaa

SEQ ID NO: 2259870 - RNA, 19 nt, Homo sapiens
  misc_RNA (1)...(19): siRNA sense strand
agaagaaggagaagacgga

SEQ ID NO: 2259871 - RNA, 19 nt, Homo sapiens
  misc_RNA (1)...(19): siRNA sense strand
gugagaaacuggauaagaa

SEQ ID NO: 2259872 - RNA, 19 nt, Homo sapiens
  misc_RNA (1)...(19): siRNA sense strand
cagcaaaaguaaaggguga

SEQ ID NO: 2259873 - RNA, 19 nt, Homo sapiens
  misc_RNA (1)...(19): siRNA sense strand
ggauaucacugaaggagau

SEQ ID NO: 2259874 - RNA, 19 nt, Homo sapiens
  misc_RNA (1)...(19): siRNA sense strand
aaguaaagggugagaaacu

SEQ ID NO: 2259875 - RNA, 19 nt, Homo sapiens
  misc_RNA (1)...(19): siRNA sense strand
ugauagaagagguccgcaa

SEQ ID NO: 2259876 - RNA, 19 nt, Homo sapiens
  misc_RNA (1)...(19): siRNA sense strand
gcauaaaggaggaagacac

SEQ ID NO: 2259877 - RNA, 19 nt, Homo sapiens
  misc_RNA (1)...(19): siRNA sense strand
agggugagaaacuggauaa

SEQ ID NO: 2259878 - RNA, 19 nt, Homo sapiens
  misc_RNA (1)...(19): siRNA sense strand
agauaaugauaguggcauc

SEQ ID NO: 2259879 - RNA, 19 nt, Homo sapiens
  misc_RNA (1)...(19): siRNA sense strand
ucacugaaggagauaggaa

SEQ ID NO: 2259880 - RNA, 19 nt, Homo sapiens
  misc_RNA (1)...(19): siRNA sense strand
ggagauaggaagccagacu

SEQ ID NO: 2259881 - RNA, 19 nt, Homo sapiens
  misc_RNA (1)...(19): siRNA sense strand
gaagagguccgcaaggcaa

SEQ ID NO: 2259882 - RNA, 19 nt, Homo sapiens
  misc_RNA (1)...(19): siRNA sense strand
agaagagggcggagcagga

SEQ ID NO: 2259883 - RNA, 19 nt, Homo sapiens
  misc_RNA (1)...(19): siRNA sense strand
acagauuggauguuggaga

SEQ ID NO: 2259884 - RNA, 19 nt, Homo sapiens
  misc_RNA (1)...(19): siRNA sense strand
agugcaaagagcuggaaaa

SEQ ID NO: 2259885 - RNA, 19 nt, Homo sapiens
  misc_RNA (1)...(19): siRNA sense strand
ccaacaacagcaaggagga

SEQ ID NO: 2259886 - RNA, 19 nt, Homo sapiens
  misc_RNA (1)...(19): siRNA sense strand
cuggauaagaagcugaaaa

SEQ ID NO: 2259887 - RNA, 19 nt, Homo sapiens
  misc_RNA (1)...(19): siRNA sense strand
agugcauaaaggaggaaga

SEQ ID NO: 2259888 - RNA, 19 nt, Homo sapiens
  misc_RNA (1)...(19): siRNA sense strand
uggauaucacugaaggaga

SEQ ID NO: 2259889 - RNA, 19 nt, Homo sapiens
  misc_RNA (1)...(19): siRNA sense strand
gaaaugagcuuccugagca

SEQ ID NO: 2259890 - RNA, 19 nt, Homo sapiens
  misc_RNA (1)...(19): siRNA sense strand
agaagaagagggcggagca

SEQ ID NO: 2259891 - RNA, 19 nt, Homo sapiens
  misc_RNA (1)...(19): siRNA sense strand
gugagaaacuggauaagaa

SEQ ID NO: 2259892 - RNA, 19 nt, Homo sapiens
  misc_RNA (1)...(19): siRNA sense strand
cagcaaaaguaaaggguga

SEQ ID NO: 2259893 - RNA, 19 nt, Homo sapiens
  misc_RNA (1)...(19): siRNA sense strand
ggauaucacugaaggagau

SEQ ID NO: 2259894 - RNA, 19 nt, Homo sapiens
  misc_RNA (1)...(19): siRNA sense strand
aaguaaagggugagaaacu

SEQ ID NO: 2259895 - RNA, 19 nt, Homo sapiens
  misc_RNA (1)...(19): siRNA sense strand
ugauagaagagguccgcaa

SEQ ID NO: 2259896 - RNA, 19 nt, Homo sapiens
  misc_RNA (1)...(19): siRNA sense strand
gcauaaaggaggaagacac

SEQ ID NO: 2259897 - RNA, 19 nt, Homo sapiens
  misc_RNA (1)...(19): siRNA sense strand
agggugagaaacuggauaa

SEQ ID NO: 2259898 - RNA, 19 nt, Homo sapiens
  misc_RNA (1)...(19): siRNA sense strand
agauaaugauaguggcauc

SEQ ID NO: 2259899 - RNA, 19 nt, Homo sapiens
  misc_RNA (1)...(19): siRNA sense strand
ucacugaaggagauaggaa

SEQ ID NO: 2259900 - RNA, 19 nt, Homo sapiens
  misc_RNA (1)...(19): siRNA sense strand
ggagauaggaagccagacu

SEQ ID NO: 2259901 - RNA, 19 nt, Homo sapiens
  misc_RNA (1)...(19): siRNA sense strand
gaagagguccgcaaggcaa

SEQ ID NO: 2259902 - RNA, 19 nt, Homo sapiens
  misc_RNA (1)...(19): siRNA sense strand
agaagagggcggagcagga

SEQ ID NO: 2259903 - RNA, 19 nt, Homo sapiens
  misc_RNA (1)...(19): siRNA sense strand
acagauuggauguuggaga

SEQ ID NO: 2259904 - RNA, 19 nt, Homo sapiens
  misc_RNA (1)...(19): siRNA sense strand
agugcaaagagcuggaaaa

SEQ ID NO: 2259905 - RNA, 19 nt, Homo sapiens
  misc_RNA (1)...(19): siRNA sense strand
ccaacaacagcaaggagga

SEQ ID NO: 2259906 - RNA, 19 nt, Homo sapiens
  misc_RNA (1)...(19): siRNA sense strand
cuggauaagaagcugaaaa

SEQ ID NO: 2259907 - RNA, 19 nt, Homo sapiens
  misc_RNA (1)...(19): siRNA sense strand
agugcauaaaggaggaaga

SEQ ID NO: 2259908 - RNA, 19 nt, Homo sapiens
  misc_RNA (1)...(19): siRNA sense strand
uggauaucacugaaggaga

SEQ ID NO: 2259909 - RNA, 19 nt, Homo sapiens
  misc_RNA (1)...(19): siRNA sense strand
gaaaugagcuuccugagca

SEQ ID NO: 2259910 - RNA, 19 nt, Homo sapiens
  misc_RNA (1)...(19): siRNA sense strand
agaagaagagggcggagca

SEQ ID NO: 2259911 - RNA, 19 nt, Homo sapiens
  misc_RNA (1)...(19): siRNA sense strand
guguauggcaggaaagaaa

SEQ ID NO: 2259912 - RNA, 19 nt, Homo sapiens
  misc_RNA (1)...(19): siRNA sense strand
guuugaagaaggugaagaa

SEQ ID NO: 2259913 - RNA, 19 nt, Homo sapiens
  misc_RNA (1)...(19): siRNA sense strand
aggcaaaggguguguauga

SEQ ID NO: 2259914 - RNA, 19 nt, Homo sapiens
  misc_RNA (1)...(19): siRNA sense strand
uggauuacaaugaggcaaa

SEQ ID NO: 2259915 - RNA, 19 nt, Homo sapiens
  misc_RNA (1)...(19): siRNA sense strand
ggauuaaagcuaaagacau

SEQ ID NO: 2259916 - RNA, 19 nt, Homo sapiens
  misc_RNA (1)...(19): siRNA sense strand
ccaaauaaaccaagcagga

SEQ ID NO: 2259917 - RNA, 19 nt, Homo sapiens
  misc_RNA (1)...(19): siRNA sense strand
ucgcagaauggcaaagaaa

SEQ ID NO: 2259918 - RNA, 19 nt, Homo sapiens
  misc_RNA (1)...(19): siRNA sense strand
uggagaagcuacagagacu

SEQ ID NO: 2259919 - RNA, 19 nt, Homo sapiens
  misc_RNA (1)...(19): siRNA sense strand
gaucauaaauauugggcac

SEQ ID NO: 2259920 - RNA, 19 nt, Homo sapiens
  misc_RNA (1)...(19): siRNA sense strand
gggaugaaaugguggcaac

SEQ ID NO: 2259921 - RNA, 19 nt, Homo sapiens
  misc_RNA (1)...(19): siRNA sense strand
gucaagaagcuuaaggaga

SEQ ID NO: 2259922 - RNA, 19 nt, Homo sapiens
  misc_RNA (1)...(19): siRNA sense strand
cggauuaaagcuaaagaca

SEQ ID NO: 2259923 - RNA, 19 nt, Homo sapiens
  misc_RNA (1)...(19): siRNA sense strand
gcagcggauuaaagcuaaa

SEQ ID NO: 2259924 - RNA, 19 nt, Homo sapiens
  misc_RNA (1)...(19): siRNA sense strand
uggacagaguggaagguga

SEQ ID NO: 2259925 - RNA, 19 nt, Homo sapiens
  misc_RNA (1)...(19): siRNA sense strand
cuauuggagaagugcauaa

SEQ ID NO: 2259926 - RNA, 19 nt, Homo sapiens
  misc_RNA (1)...(19): siRNA sense strand
aaaccaagcaggacaucaa

SEQ ID NO: 2259927 - RNA, 19 nt, Homo sapiens
  misc_RNA (1)...(19): siRNA sense strand
gagucaaacagaagaucau

SEQ ID NO: 2259928 - RNA, 19 nt, Homo sapiens
  misc_RNA (1)...(19): siRNA sense strand
gcaggaaagaaaugcugaa

SEQ ID NO: 2259929 - RNA, 19 nt, Homo sapiens
  misc_RNA (1)...(19): siRNA sense strand
ugguagaauuagcaacaau

SEQ ID NO: 2259930 - RNA, 19 nt, Homo sapiens
  misc_RNA (1)...(19): siRNA sense strand
ggguaguggcagcgacaca

SEQ ID NO: 2259931 - RNA, 19 nt, Homo sapiens
  misc_RNA (1)...(19): siRNA sense strand
gaaagagugugcagcggau

SEQ ID NO: 2259932 - RNA, 19 nt, Homo sapiens
  misc_RNA (1)...(19): siRNA sense strand
aaauaaaccaagcaggaca

SEQ ID NO: 2259933 - RNA, 19 nt, Homo sapiens
  misc_RNA (1)...(19): siRNA sense strand
acaaugaggcaaagggugu

SEQ ID NO: 2259934 - RNA, 19 nt, Homo sapiens
  misc_RNA (1)...(19): siRNA sense strand
gugcagcggauuaaagcua

SEQ ID NO: 2259935 - RNA, 19 nt, Homo sapiens
  misc_RNA (1)...(19): siRNA sense strand
ccacauucgaguuggaagu

SEQ ID NO: 2259936 - RNA, 19 nt, Homo sapiens
  misc_RNA (1)...(19): siRNA sense strand
acucauauuaguagccaau

SEQ ID NO: 2259937 - RNA, 19 nt, Homo sapiens
  misc_RNA (1)...(19): siRNA sense strand
cugaaaugggcaaagugua

SEQ ID NO: 2259938 - RNA, 19 nt, Homo sapiens
  misc_RNA (1)...(19): siRNA sense strand
cauggaggguccuggauca

SEQ ID NO: 2259939 - RNA, 19 nt, Homo sapiens
  misc_RNA (1)...(19): siRNA sense strand
auugaagggucuuucuaaa

SEQ ID NO: 2259940 - RNA, 19 nt, Homo sapiens
  misc_RNA (1)...(19): siRNA sense strand
auuaguagccaaugcaauu

SEQ ID NO: 2259941 - RNA, 19 nt, Homo sapiens
  misc_RNA (1)...(19): siRNA sense strand
augaaaugguggcaacaga

SEQ ID NO: 2259942 - RNA, 19 nt, Homo sapiens
  misc_RNA (1)...(19): siRNA sense strand
agaugauaaaccagugaau

SEQ ID NO: 2259943 - RNA, 19 nt, Homo sapiens
  misc_RNA (1)...(19): siRNA sense strand
ccuuaaugaguuuaccaua

SEQ ID NO: 2259944 - RNA, 19 nt, Homo sapiens
  misc_RNA (1)...(19): siRNA sense strand
gcaggacaucaaugagcaa

SEQ ID NO: 2259945 - RNA, 19 nt, Homo sapiens
  misc_RNA (1)...(19): siRNA sense strand
cccacugagaagagaagaa

SEQ ID NO: 2259946 - RNA, 19 nt, Homo sapiens
  misc_RNA (1)...(19): siRNA sense strand
gggcaaucuacaacaacau

SEQ ID NO: 2259947 - RNA, 19 nt, Homo sapiens
  misc_RNA (1)...(19): siRNA sense strand
ccaacgaguuaccggcuga

SEQ ID NO: 2259948 - RNA, 19 nt, Homo sapiens
  misc_RNA (1)...(19): siRNA sense strand
aagagugugcagcggauua

SEQ ID NO: 2259949 - RNA, 19 nt, Homo sapiens
  misc_RNA (1)...(19): siRNA sense strand
gccuaguagagaagaugaa

SEQ ID NO: 2259950 - RNA, 19 nt, Homo sapiens
  misc_RNA (1)...(19): siRNA sense strand
agaaagucaaugucgguuu

SEQ ID NO: 2259951 - RNA, 19 nt, Homo sapiens
  misc_RNA (1)...(19): siRNA sense strand
ucaagaagcuuaaggagag

SEQ ID NO: 2259952 - RNA, 19 nt, Homo sapiens
  misc_RNA (1)...(19): siRNA sense strand
aggaaagaaaugcugaaaa

SEQ ID NO: 2259953 - RNA, 19 nt, Homo sapiens
  misc_RNA (1)...(19): siRNA sense strand
ggaacucgcagaauggcaa

SEQ ID NO: 2259954 - RNA, 19 nt, Homo sapiens
  misc_RNA (1)...(19): siRNA sense strand
ccaagacgguggaggaggu

SEQ ID NO: 2259955 - RNA, 19 nt, Homo sapiens
  misc_RNA (1)...(19): siRNA sense strand
agguuaacuuccaucaaau

SEQ ID NO: 2259956 - RNA, 19 nt, Homo sapiens
  misc_RNA (1)...(19): siRNA sense strand
aggaauaugagccugaaau

SEQ ID NO: 2259957 - RNA, 19 nt, Homo sapiens
  misc_RNA (1)...(19): siRNA sense strand
gagcugucaaccaagauaa

SEQ ID NO: 2259958 - RNA, 19 nt, Homo sapiens
  misc_RNA (1)...(19): siRNA sense strand
uguaucgacaggacagaaa

SEQ ID NO: 2259959 - RNA, 19 nt, Homo sapiens
  misc_RNA (1)...(19): siRNA sense strand
cuggugauauuguagaaau

SEQ ID NO: 2259960 - RNA, 19 nt, Homo sapiens
  misc_RNA (1)...(19): siRNA sense strand
agaaauugcuguuggugac

SEQ ID NO: 2259961 - RNA, 19 nt, Homo sapiens
  misc_RNA (1)...(19): siRNA sense strand
aauugcuguuggugacaaa

SEQ ID NO: 2259962 - RNA, 19 nt, Homo sapiens
  misc_RNA (1)...(19): siRNA sense strand
ugauggucugguagaauua

SEQ ID NO: 2259963 - RNA, 19 nt, Homo sapiens
  misc_RNA (1)...(19): siRNA sense strand
caggaaagaaaugcugaaa

SEQ ID NO: 2259964 - RNA, 19 nt, Homo sapiens
  misc_RNA (1)...(19): siRNA sense strand
ggacagaaagagugugcag

SEQ ID NO: 2259965 - RNA, 19 nt, Homo sapiens
  misc_RNA (1)...(19): siRNA sense strand
uagaaauugcuguugguga

SEQ ID NO: 2259966 - RNA, 19 nt, Homo sapiens
  misc_RNA (1)...(19): siRNA sense strand
ccugcugauauaagguuaa

SEQ ID NO: 2259967 - RNA, 19 nt, Homo sapiens
  misc_RNA (1)...(19): siRNA sense strand
ugggcaaaguguaucgaca

SEQ ID NO: 2259968 - RNA, 19 nt, Homo sapiens
  misc_RNA (1)...(19): siRNA sense strand
ugauugagcaguuugaaga

SEQ ID NO: 2259969 - RNA, 19 nt, Homo sapiens
  misc_RNA (1)...(19): siRNA sense strand
caagaagcuuaaggagaga

SEQ ID NO: 2259970 - RNA, 19 nt, Homo sapiens
  misc_RNA (1)...(19): siRNA sense strand
augauaaaccagugaauug

SEQ ID NO: 2259971 - RNA, 19 nt, Homo sapiens
  misc_RNA (1)...(19): siRNA sense strand
aagaaggugaagaaacaau

SEQ ID NO: 2259972 - RNA, 19 nt, Homo sapiens
  misc_RNA (1)...(19): siRNA sense strand
guguauggcaggaaagaaa

SEQ ID NO: 2259973 - RNA, 19 nt, Homo sapiens
  misc_RNA (1)...(19): siRNA sense strand
guuugaagaaggugaagaa

SEQ ID NO: 2259974 - RNA, 19 nt, Homo sapiens
  misc_RNA (1)...(19): siRNA sense strand
aggcaaaggguguguauga

SEQ ID NO: 2259975 - RNA, 19 nt, Homo sapiens
  misc_RNA (1)...(19): siRNA sense strand
uggauuacaaugaggcaaa

SEQ ID NO: 2259976 - RNA, 19 nt, Homo sapiens
  misc_RNA (1)...(19): siRNA sense strand
ggauuaaagcuaaagacau

SEQ ID NO: 2259977 - RNA, 19 nt, Homo sapiens
  misc_RNA (1)...(19): siRNA sense strand
ccaaauaaaccaagcagga

SEQ ID NO: 2259978 - RNA, 19 nt, Homo sapiens
  misc_RNA (1)...(19): siRNA sense strand
ucgcagaauggcaaagaaa

SEQ ID NO: 2259979 - RNA, 19 nt, Homo sapiens
  misc_RNA (1)...(19): siRNA sense strand
uggagaagcuacagagacu

SEQ ID NO: 2259980 - RNA, 19 nt, Homo sapiens
  misc_RNA (1)...(19): siRNA sense strand
gaucauaaauauugggcac

SEQ ID NO: 2259981 - RNA, 19 nt, Homo sapiens
  misc_RNA (1)...(19): siRNA sense strand
gggaugaaaugguggcaac

SEQ ID NO: 2259982 - RNA, 19 nt, Homo sapiens
  misc_RNA (1)...(19): siRNA sense strand
gucaagaagcuuaaggaga

SEQ ID NO: 2259983 - RNA, 19 nt, Homo sapiens
  misc_RNA (1)...(19): siRNA sense strand
cggauuaaagcuaaagaca

SEQ ID NO: 2259984 - RNA, 19 nt, Homo sapiens
  misc_RNA (1)...(19): siRNA sense strand
gcagcggauuaaagcuaaa

SEQ ID NO: 2259985 - RNA, 19 nt, Homo sapiens
  misc_RNA (1)...(19): siRNA sense strand
uggacagaguggaagguga

SEQ ID NO: 2259986 - RNA, 19 nt, Homo sapiens
  misc_RNA (1)...(19): siRNA sense strand
cuauuggagaagugcauaa

SEQ ID NO: 2259987 - RNA, 19 nt, Homo sapiens
  misc_RNA (1)...(19): siRNA sense strand
aaaccaagcaggacaucaa

SEQ ID NO: 2259988 - RNA, 19 nt, Homo sapiens
  misc_RNA (1)...(19): siRNA sense strand
gagucaaacagaagaucau

SEQ ID NO: 2259989 - RNA, 19 nt, Homo sapiens
  misc_RNA (1)...(19): siRNA sense strand
gcaggaaagaaaugcugaa

SEQ ID NO: 2259990 - RNA, 19 nt, Homo sapiens
  misc_RNA (1)...(19): siRNA sense strand
ugguagaauuagcaacaau

SEQ ID NO: 2259991 - RNA, 19 nt, Homo sapiens
  misc_RNA (1)...(19): siRNA sense strand
ggguaguggcagcgacaca

SEQ ID NO: 2259992 - RNA, 19 nt, Homo sapiens
  misc_RNA (1)...(19): siRNA sense strand
gaaagagugugcagcggau

SEQ ID NO: 2259993 - RNA, 19 nt, Homo sapiens
  misc_RNA (1)...(19): siRNA sense strand
aaauaaaccaagcaggaca

SEQ ID NO: 2259994 - RNA, 19 nt, Homo sapiens
  misc_RNA (1)...(19): siRNA sense strand
acaaugaggcaaagggugu

SEQ ID NO: 2259995 - RNA, 19 nt, Homo sapiens
  misc_RNA (1)...(19): siRNA sense strand
gugcagcggauuaaagcua

SEQ ID NO: 2259996 - RNA, 19 nt, Homo sapiens
  misc_RNA (1)...(19): siRNA sense strand
ccacauucgaguuggaagu

SEQ ID NO: 2259997 - RNA, 19 nt, Homo sapiens
  misc_RNA (1)...(19): siRNA sense strand
acucauauuaguagccaau

SEQ ID NO: 2259998 - RNA, 19 nt, Homo sapiens
  misc_RNA (1)...(19): siRNA sense strand
cugaaaugggcaaagugua

SEQ ID NO: 2259999 - RNA, 19 nt, Homo sapiens
  misc_RNA (1)...(19): siRNA sense strand
cauggaggguccuggauca

SEQ ID NO: 2260000 - RNA, 19 nt, Homo sapiens
  misc_RNA (1)...(19): siRNA sense strand
auugaagggucuuucuaaa

SEQ ID NO: 2260001 - RNA, 19 nt, Homo sapiens
  misc_RNA (1)...(19): siRNA sense strand
auuaguagccaaugcaauu

SEQ ID NO: 2260002 - RNA, 19 nt, Homo sapiens
  misc_RNA (1)...(19): siRNA sense strand
augaaaugguggcaacaga

SEQ ID NO: 2260003 - RNA, 19 nt, Homo sapiens
  misc_RNA (1)...(19): siRNA sense strand
agaugauaaaccagugaau

SEQ ID NO: 2260004 - RNA, 19 nt, Homo sapiens
  misc_RNA (1)...(19): siRNA sense strand
ccuuaaugaguuuaccaua

SEQ ID NO: 2260005 - RNA, 19 nt, Homo sapiens
  misc_RNA (1)...(19): siRNA sense strand
gcaggacaucaaugagcaa

SEQ ID NO: 2260006 - RNA, 19 nt, Homo sapiens
  misc_RNA (1)...(19): siRNA sense strand
cccacugagaagagaagaa

SEQ ID NO: 2260007 - RNA, 19 nt, Homo sapiens
  misc_RNA (1)...(19): siRNA sense strand
gggcaaucuacaacaacau

SEQ ID NO: 2260008 - RNA, 19 nt, Homo sapiens
  misc_RNA (1)...(19): siRNA sense strand
ccaacgaguuaccggcuga

SEQ ID NO: 2260009 - RNA, 19 nt, Homo sapiens
  misc_RNA (1)...(19): siRNA sense strand
aagagugugcagcggauua

SEQ ID NO: 2260010 - RNA, 19 nt, Homo sapiens
  misc_RNA (1)...(19): siRNA sense strand
gccuaguagagaagaugaa

SEQ ID NO: 2260011 - RNA, 19 nt, Homo sapiens
  misc_RNA (1)...(19): siRNA sense strand
agaaagucaaugucgguuu

SEQ ID NO: 2260012 - RNA, 19 nt, Homo sapiens
  misc_RNA (1)...(19): siRNA sense strand
ucaagaagcuuaaggagag

SEQ ID NO: 2260013 - RNA, 19 nt, Homo sapiens
  misc_RNA (1)...(19): siRNA sense strand
aggaaagaaaugcugaaaa

SEQ ID NO: 2260014 - RNA, 19 nt, Homo sapiens
  misc_RNA (1)...(19): siRNA sense strand
ggaacucgcagaauggcaa

SEQ ID NO: 2260015 - RNA, 19 nt, Homo sapiens
  misc_RNA (1)...(19): siRNA sense strand
ccaagacgguggaggaggu

SEQ ID NO: 2260016 - RNA, 19 nt, Homo sapiens
  misc_RNA (1)...(19): siRNA sense strand
agguuaacuuccaucaaau

SEQ ID NO: 2260017 - RNA, 19 nt, Homo sapiens
  misc_RNA (1)...(19): siRNA sense strand
aggaauaugagccugaaau

SEQ ID NO: 2260018 - RNA, 19 nt, Homo sapiens
  misc_RNA (1)...(19): siRNA sense strand
gagcugucaaccaagauaa

SEQ ID NO: 2260019 - RNA, 19 nt, Homo sapiens
  misc_RNA (1)...(19): siRNA sense strand
uguaucgacaggacagaaa

SEQ ID NO: 2260020 - RNA, 19 nt, Homo sapiens
  misc_RNA (1)...(19): siRNA sense strand
cuggugauauuguagaaau

SEQ ID NO: 2260021 - RNA, 19 nt, Homo sapiens
  misc_RNA (1)...(19): siRNA sense strand
agaaauugcuguuggugac

SEQ ID NO: 2260022 - RNA, 19 nt, Homo sapiens
  misc_RNA (1)...(19): siRNA sense strand
aauugcuguuggugacaaa

SEQ ID NO: 2260023 - RNA, 19 nt, Homo sapiens
  misc_RNA (1)...(19): siRNA sense strand
ugauggucugguagaauua

SEQ ID NO: 2260024 - RNA, 19 nt, Homo sapiens
  misc_RNA (1)...(19): siRNA sense strand
caggaaagaaaugcugaaa

SEQ ID NO: 2260025 - RNA, 19 nt, Homo sapiens
  misc_RNA (1)...(19): siRNA sense strand
ggacagaaagagugugcag

SEQ ID NO: 2260026 - RNA, 19 nt, Homo sapiens
  misc_RNA (1)...(19): siRNA sense strand
uagaaauugcuguugguga

SEQ ID NO: 2260027 - RNA, 19 nt, Homo sapiens
  misc_RNA (1)...(19): siRNA sense strand
ccugcugauauaagguuaa

SEQ ID NO: 2260028 - RNA, 19 nt, Homo sapiens
  misc_RNA (1)...(19): siRNA sense strand
ugggcaaaguguaucgaca

SEQ ID NO: 2260029 - RNA, 19 nt, Homo sapiens
  misc_RNA (1)...(19): siRNA sense strand
ugauugagcaguuugaaga

SEQ ID NO: 2260030 - RNA, 19 nt, Homo sapiens
  misc_RNA (1)...(19): siRNA sense strand
caagaagcuuaaggagaga

SEQ ID NO: 2260031 - RNA, 19 nt, Homo sapiens
  misc_RNA (1)...(19): siRNA sense strand
augauaaaccagugaauug

SEQ ID NO: 2260032 - RNA, 19 nt, Homo sapiens
  misc_RNA (1)...(19): siRNA sense strand
aagaaggugaagaaacaau

SEQ ID NO: 2260033 - RNA, 19 nt, Homo sapiens
  misc_RNA (1)...(19): siRNA sense strand
caagaaaggaccauggaga

SEQ ID NO: 2260034 - RNA, 19 nt, Homo sapiens
  misc_RNA (1)...(19): siRNA sense strand
aggaagaccacuugcgaau

SEQ ID NO: 2260035 - RNA, 19 nt, Homo sapiens
  misc_RNA (1)...(19): siRNA sense strand
ggaaggacgugcaggccau

SEQ ID NO: 2260036 - RNA, 19 nt, Homo sapiens
  misc_RNA (1)...(19): siRNA sense strand
agaucuacguggacagaca

SEQ ID NO: 2260037 - RNA, 19 nt, Homo sapiens
  misc_RNA (1)...(19): siRNA sense strand
gcuggaagcugcugcgcau

SEQ ID NO: 2260038 - RNA, 19 nt, Homo sapiens
  misc_RNA (1)...(19): siRNA sense strand
gcuucaucacagagggaca

SEQ ID NO: 2260039 - RNA, 19 nt, Homo sapiens
  misc_RNA (1)...(19): siRNA sense strand
ggggaaggcaugacaagaa

SEQ ID NO: 2260040 - RNA, 19 nt, Homo sapiens
  misc_RNA (1)...(19): siRNA sense strand
gaacauggagacagccaga

SEQ ID NO: 2260041 - RNA, 19 nt, Homo sapiens
  misc_RNA (1)...(19): siRNA sense strand
ggacagaucuacguggaca

SEQ ID NO: 2260042 - RNA, 19 nt, Homo sapiens
  misc_RNA (1)...(19): siRNA sense strand
caaccuaggugcagcccga

SEQ ID NO: 2260043 - RNA, 19 nt, Homo sapiens
  misc_RNA (1)...(19): siRNA sense strand
ccggcaagcccauugacaa

SEQ ID NO: 2260044 - RNA, 19 nt, Homo sapiens
  misc_RNA (1)...(19): siRNA sense strand
gugaagaaguccaaggcug

SEQ ID NO: 2260045 - RNA, 19 nt, Homo sapiens
  misc_RNA (1)...(19): siRNA sense strand
uggucauggcggaggacuu

SEQ ID NO: 2260046 - RNA, 19 nt, Homo sapiens
  misc_RNA (1)...(19): siRNA sense strand
augcagaggccuugcggga

SEQ ID NO: 2260047 - RNA, 19 nt, Homo sapiens
  misc_RNA (1)...(19): siRNA sense strand
ugaagaaguccaaggcugu

SEQ ID NO: 2260048 - RNA, 19 nt, Homo sapiens
  misc_RNA (1)...(19): siRNA sense strand
aggacuuucuggauaucaa

SEQ ID NO: 2260049 - RNA, 19 nt, Homo sapiens
  misc_RNA (1)...(19): siRNA sense strand
ggauauauguacacagacc

SEQ ID NO: 2260050 - RNA, 19 nt, Homo sapiens
  misc_RNA (1)...(19): siRNA sense strand
ccgugaucgacgaguucua

SEQ ID NO: 2260051 - RNA, 19 nt, Homo sapiens
  misc_RNA (1)...(19): siRNA sense strand
ggauaugcuuggucgggua

SEQ ID NO: 2260052 - RNA, 19 nt, Homo sapiens
  misc_RNA (1)...(19): siRNA sense strand
aggcaguaguucagguauu

SEQ ID NO: 2260053 - RNA, 19 nt, Homo sapiens
  misc_RNA (1)...(19): siRNA sense strand
cacaaagagaagugggcaa

SEQ ID NO: 2260054 - RNA, 19 nt, Homo sapiens
  misc_RNA (1)...(19): siRNA sense strand
gggaaaacccauugacaga

SEQ ID NO: 2260055 - RNA, 19 nt, Homo sapiens
  misc_RNA (1)...(19): siRNA sense strand
gaaaauggcucaauggaca

SEQ ID NO: 2260056 - RNA, 19 nt, Homo sapiens
  misc_RNA (1)...(19): siRNA sense strand
cagcugaauuucuggcgua

SEQ ID NO: 2260057 - RNA, 19 nt, Homo sapiens
  misc_RNA (1)...(19): siRNA sense strand
agaucuauguggacagaca

SEQ ID NO: 2260058 - RNA, 19 nt, Homo sapiens
  misc_RNA (1)...(19): siRNA sense strand
gguauagaugcuaagaaaa

SEQ ID NO: 2260059 - RNA, 19 nt, Homo sapiens
  misc_RNA (1)...(19): siRNA sense strand
gaacuuggcuaaugaccca

SEQ ID NO: 2260060 - RNA, 19 nt, Homo sapiens
  misc_RNA (1)...(19): siRNA sense strand
gggcagaucuauguggaca

SEQ ID NO: 2260061 - RNA, 19 nt, Homo sapiens
  misc_RNA (1)...(19): siRNA sense strand
cgugcuaugcuauuggaaa

SEQ ID NO: 2260062 - RNA, 19 nt, Homo sapiens
  misc_RNA (1)...(19): siRNA sense strand
ugguaaagaaauccaaaga

SEQ ID NO: 2260063 - RNA, 19 nt, Homo sapiens
  misc_RNA (1)...(19): siRNA sense strand
cguaccaaugugagaaaca

SEQ ID NO: 2260064 - RNA, 19 nt, Homo sapiens
  misc_RNA (1)...(19): siRNA sense strand
cgguuaaugaagucugcua

SEQ ID NO: 2260065 - RNA, 19 nt, Homo sapiens
  misc_RNA (1)...(19): siRNA sense strand
gaaaggaugugcaagccau

SEQ ID NO: 2260066 - RNA, 19 nt, Homo sapiens
  misc_RNA (1)...(19): siRNA sense strand
ggcgaguggaagggagaaa

SEQ ID NO: 2260067 - RNA, 19 nt, Homo sapiens
  misc_RNA (1)...(19): siRNA sense strand
ggagaagggaugaccagga

SEQ ID NO: 2260068 - RNA, 19 nt, Homo sapiens
  misc_RNA (1)...(19): siRNA sense strand
ugaaagcugucguuggaga

SEQ ID NO: 2260069 - RNA, 19 nt, Homo sapiens
  misc_RNA (1)...(19): siRNA sense strand
guuccaaggcaguaguuca

SEQ ID NO: 2260070 - RNA, 19 nt, Homo sapiens
  misc_RNA (1)...(19): siRNA sense strand
uauucaauggaucgggaaa

SEQ ID NO: 2260071 - RNA, 19 nt, Homo sapiens
  misc_RNA (1)...(19): siRNA sense strand
uagacuacagugaggaaaa

SEQ ID NO: 2260072 - RNA, 19 nt, Homo sapiens
  misc_RNA (1)...(19): siRNA sense strand
gggaugaccaggaaggauc

SEQ ID NO: 2260073 - RNA, 19 nt, Homo sapiens
  misc_RNA (1)...(19): siRNA sense strand
gcuaccacacaaugagauu

SEQ ID NO: 2260074 - RNA, 19 nt, Homo sapiens
  misc_RNA (1)...(19): siRNA sense strand
ggaagagguaccuggucga

SEQ ID NO: 2260075 - RNA, 19 nt, Homo sapiens
  misc_RNA (1)...(19): siRNA sense strand
aauccaaagauguaguaga

SEQ ID NO: 2260076 - RNA, 19 nt, Homo sapiens
  misc_RNA (1)...(19): siRNA sense strand
ucgaaucuacccagaggaa

SEQ ID NO: 2260077 - RNA, 19 nt, Homo sapiens
  misc_RNA (1)...(19): siRNA sense strand
acccaaccauugagcgaau

SEQ ID NO: 2260078 - RNA, 19 nt, Homo sapiens
  misc_RNA (1)...(19): siRNA sense strand
cuucucugcugcugggcua

SEQ ID NO: 2260079 - RNA, 19 nt, Homo sapiens
  misc_RNA (1)...(19): siRNA sense strand
uggacagacagcugcacaa

SEQ ID NO: 2260080 - RNA, 19 nt, Homo sapiens
  misc_RNA (1)...(19): siRNA sense strand
agaagaagcccuuaccuca

SEQ ID NO: 2260081 - RNA, 19 nt, Homo sapiens
  misc_RNA (1)...(19): siRNA sense strand
cagagcacccucagcgaau

SEQ ID NO: 2260082 - RNA, 19 nt, Homo sapiens
  misc_RNA (1)...(19): siRNA sense strand
ggaaaggaugugcaagcca

SEQ ID NO: 2260083 - RNA, 19 nt, Homo sapiens
  misc_RNA (1)...(19): siRNA sense strand
augcaaaggcagaagaaga

SEQ ID NO: 2260084 - RNA, 19 nt, Homo sapiens
  misc_RNA (1)...(19): siRNA sense strand
aggcagaagaagaguucaa

SEQ ID NO: 2260085 - RNA, 19 nt, Homo sapiens
  misc_RNA (1)...(19): siRNA sense strand
agaaauagaugcaaaggca

SEQ ID NO: 2260086 - RNA, 19 nt, Homo sapiens
  misc_RNA (1)...(19): siRNA sense strand
augagaaagcagaagaaau

SEQ ID NO: 2260087 - RNA, 19 nt, Homo sapiens
  misc_RNA (1)...(19): siRNA sense strand
augagaagaaagagaaaca

SEQ ID NO: 2260088 - RNA, 19 nt, Homo sapiens
  misc_RNA (1)...(19): siRNA sense strand
cuauaauggagaucguaaa

SEQ ID NO: 2260089 - RNA, 19 nt, Homo sapiens
  misc_RNA (1)...(19): siRNA sense strand
agaaacagauugagcagca

SEQ ID NO: 2260090 - RNA, 19 nt, Homo sapiens
  misc_RNA (1)...(19): siRNA sense strand
aaauagaugcaaaggcaga

SEQ ID NO: 2260091 - RNA, 19 nt, Homo sapiens
  misc_RNA (1)...(19): siRNA sense strand
aggcaauuccuauguacaa

SEQ ID NO: 2260092 - RNA, 19 nt, Homo sapiens
  misc_RNA (1)...(19): siRNA sense strand
cucaaaguccucagagcaa

SEQ ID NO: 2260093 - RNA, 19 nt, Homo sapiens
  misc_RNA (1)...(19): siRNA sense strand
aagauuucccucugguaaa

SEQ ID NO: 2260094 - RNA, 19 nt, Homo sapiens
  misc_RNA (1)...(19): siRNA sense strand
ucauugaacaagaagccaa

SEQ ID NO: 2260095 - RNA, 19 nt, Homo sapiens
  misc_RNA (1)...(19): siRNA sense strand
ccucagagcaagagaugac

SEQ ID NO: 2260096 - RNA, 19 nt, Homo sapiens
  misc_RNA (1)...(19): siRNA sense strand
aacccaaagacuaaagauu

SEQ ID NO: 2260097 - RNA, 19 nt, Homo sapiens
  misc_RNA (1)...(19): siRNA sense strand
ccuuaaggaaagagccaaa

SEQ ID NO: 2260098 - RNA, 19 nt, Homo sapiens
  misc_RNA (1)...(19): siRNA sense strand
agaugaagacggaggacga

SEQ ID NO: 2260099 - RNA, 19 nt, Homo sapiens
  misc_RNA (1)...(19): siRNA sense strand
gcaaagaagccaaagcagu

SEQ ID NO: 2260100 - RNA, 19 nt, Homo sapiens
  misc_RNA (1)...(19): siRNA sense strand
gcuacagcucugagaugaa

SEQ ID NO: 2260101 - RNA, 19 nt, Homo sapiens
  misc_RNA (1)...(19): siRNA sense strand
gcucugagaugaagacgga

SEQ ID NO: 2260102 - RNA, 19 nt, Homo sapiens
  misc_RNA (1)...(19): siRNA sense strand
cgcuuuaggugguggucuu

SEQ ID NO: 2260103 - RNA, 19 nt, Homo sapiens
  misc_RNA (1)...(19): siRNA sense strand
gaggaggagaaccgaggaa

SEQ ID NO: 2260104 - RNA, 19 nt, Homo sapiens
  misc_RNA (1)...(19): siRNA sense strand
uaaacagagcuuauggcaa

SEQ ID NO: 2260105 - RNA, 19 nt, Homo sapiens
  misc_RNA (1)...(19): siRNA sense strand
aauuguggugcuuggaaua

SEQ ID NO: 2260106 - RNA, 19 nt, Homo sapiens
  misc_RNA (1)...(19): siRNA sense strand
gcucauauucucugcgcga

SEQ ID NO: 2260107 - RNA, 19 nt, Homo sapiens
  misc_RNA (1)...(19): siRNA sense strand
aacagaaccaggagggaga

SEQ ID NO: 2260108 - RNA, 19 nt, Homo sapiens
  misc_RNA (1)...(19): siRNA sense strand
gauaagaaaguacggacca

SEQ ID NO: 2260109 - RNA, 19 nt, Homo sapiens
  misc_RNA (1)...(19): siRNA sense strand
cauaauaaucaggagugaa

SEQ ID NO: 2260110 - RNA, 19 nt, Homo sapiens
  misc_RNA (1)...(19): siRNA sense strand
ggacauagggcuaaggcaa

SEQ ID NO: 2260111 - RNA, 19 nt, Homo sapiens
  misc_RNA (1)...(19): siRNA sense strand
gcuaauggacauagggcua

SEQ ID NO: 2260112 - RNA, 19 nt, Homo sapiens
  misc_RNA (1)...(19): siRNA sense strand
ccugagaacauuagugcua

SEQ ID NO: 2260113 - RNA, 19 nt, Homo sapiens
  misc_RNA (1)...(19): siRNA sense strand
agugaagagcugaaggaga

SEQ ID NO: 2260114 - RNA, 19 nt, Homo sapiens
  misc_RNA (1)...(19): siRNA sense strand
cggucugcaugaaggaauu

SEQ ID NO: 2260115 - RNA, 19 nt, Homo sapiens
  misc_RNA (1)...(19): siRNA sense strand
cugaguaccaagagauuca

SEQ ID NO: 2260116 - RNA, 19 nt, Homo sapiens
  misc_RNA (1)...(19): siRNA sense strand
guuugaaccaacaguggaa

SEQ ID NO: 2260117 - RNA, 19 nt, Homo sapiens
  misc_RNA (1)...(19): siRNA sense strand
ccguuauggagaaguguuu

SEQ ID NO: 2260118 - RNA, 19 nt, Homo sapiens
  misc_RNA (1)...(19): siRNA sense strand
guggauugccauugagagu

SEQ ID NO: 2260119 - RNA, 19 nt, Homo sapiens
  misc_RNA (1)...(19): siRNA sense strand
cugugaagacgaugaagau

SEQ ID NO: 2260120 - RNA, 19 nt, Homo sapiens
  misc_RNA (1)...(19): siRNA sense strand
gcaugaaggaauuugacca

SEQ ID NO: 2260121 - RNA, 19 nt, Homo sapiens
  misc_RNA (1)...(19): siRNA sense strand
cguggagaacagcgagauu

SEQ ID NO: 2260122 - RNA, 19 nt, Homo sapiens
  misc_RNA (1)...(19): siRNA sense strand
auguugggcuggagggcuu

SEQ ID NO: 2260123 - RNA, 19 nt, Homo sapiens
  misc_RNA (1)...(19): siRNA sense strand
cgaaagaaggagacccguu

SEQ ID NO: 2260124 - RNA, 19 nt, Homo sapiens
  misc_RNA (1)...(19): siRNA sense strand
guuugguguuucugggaca

SEQ ID NO: 2260125 - RNA, 19 nt, Homo sapiens
  misc_RNA (1)...(19): siRNA sense strand
gggcaucagugaagagcug

SEQ ID NO: 2260126 - RNA, 19 nt, Homo sapiens
  misc_RNA (1)...(19): siRNA sense strand
gagcugugauggaaggcca

SEQ ID NO: 2260127 - RNA, 19 nt, Homo sapiens
  misc_RNA (1)...(19): siRNA sense strand
cgggacaguaccaguguuu

SEQ ID NO: 2260128 - RNA, 19 nt, Homo sapiens
  misc_RNA (1)...(19): siRNA sense strand
acuaucugcgccagggaaa

SEQ ID NO: 2260129 - RNA, 19 nt, Homo sapiens
  misc_RNA (1)...(19): siRNA sense strand
guacauuggcuucgggaug

SEQ ID NO: 2260130 - RNA, 19 nt, Homo sapiens
  misc_RNA (1)...(19): siRNA sense strand
uggagaaguguuugaacca

SEQ ID NO: 2260131 - RNA, 19 nt, Homo sapiens
  misc_RNA (1)...(19): siRNA sense strand
cgggaagauuuggagaaca

SEQ ID NO: 2260132 - RNA, 19 nt, Homo sapiens
  misc_RNA (1)...(19): siRNA sense strand
caugaaggaauuugaccau

SEQ ID NO: 2260133 - RNA, 19 nt, Homo sapiens
  misc_RNA (1)...(19): siRNA sense strand
cauccaggcgggagaacca

SEQ ID NO: 2260134 - RNA, 19 nt, Homo sapiens
  misc_RNA (1)...(19): siRNA sense strand
gggcuaaggcaagagguga

SEQ ID NO: 2260135 - RNA, 19 nt, Homo sapiens
  misc_RNA (1)...(19): siRNA sense strand
gagaaguguuugaaccaac

SEQ ID NO: 2260136 - RNA, 19 nt, Homo sapiens
  misc_RNA (1)...(19): siRNA sense strand
ugauggaaggccagcucaa

SEQ ID NO: 2260137 - RNA, 19 nt, Homo sapiens
  misc_RNA (1)...(19): siRNA sense strand
gcacgaggucagagcugga

SEQ ID NO: 2260138 - RNA, 19 nt, Homo sapiens
  misc_RNA (1)...(19): siRNA sense strand
ggacauagggcuaaggcaa

SEQ ID NO: 2260139 - RNA, 19 nt, Homo sapiens
  misc_RNA (1)...(19): siRNA sense strand
gcuaauggacauagggcua

SEQ ID NO: 2260140 - RNA, 19 nt, Homo sapiens
  misc_RNA (1)...(19): siRNA sense strand
ccugagaacauuagugcua

SEQ ID NO: 2260141 - RNA, 19 nt, Homo sapiens
  misc_RNA (1)...(19): siRNA sense strand
agugaagagcugaaggaga

SEQ ID NO: 2260142 - RNA, 19 nt, Homo sapiens
  misc_RNA (1)...(19): siRNA sense strand
cggucugcaugaaggaauu

SEQ ID NO: 2260143 - RNA, 19 nt, Homo sapiens
  misc_RNA (1)...(19): siRNA sense strand
cugaguaccaagagauuca

SEQ ID NO: 2260144 - RNA, 19 nt, Homo sapiens
  misc_RNA (1)...(19): siRNA sense strand
guuugaaccaacaguggaa

SEQ ID NO: 2260145 - RNA, 19 nt, Homo sapiens
  misc_RNA (1)...(19): siRNA sense strand
ccguuauggagaaguguuu

SEQ ID NO: 2260146 - RNA, 19 nt, Homo sapiens
  misc_RNA (1)...(19): siRNA sense strand
guggauugccauugagagu

SEQ ID NO: 2260147 - RNA, 19 nt, Homo sapiens
  misc_RNA (1)...(19): siRNA sense strand
cugugaagacgaugaagau

SEQ ID NO: 2260148 - RNA, 19 nt, Homo sapiens
  misc_RNA (1)...(19): siRNA sense strand
gcaugaaggaauuugacca

SEQ ID NO: 2260149 - RNA, 19 nt, Homo sapiens
  misc_RNA (1)...(19): siRNA sense strand
cguggagaacagcgagauu

SEQ ID NO: 2260150 - RNA, 19 nt, Homo sapiens
  misc_RNA (1)...(19): siRNA sense strand
auguugggcuggagggcuu

SEQ ID NO: 2260151 - RNA, 19 nt, Homo sapiens
  misc_RNA (1)...(19): siRNA sense strand
cgaaagaaggagacccguu

SEQ ID NO: 2260152 - RNA, 19 nt, Homo sapiens
  misc_RNA (1)...(19): siRNA sense strand
guuugguguuucugggaca

SEQ ID NO: 2260153 - RNA, 19 nt, Homo sapiens
  misc_RNA (1)...(19): siRNA sense strand
gggcaucagugaagagcug

SEQ ID NO: 2260154 - RNA, 19 nt, Homo sapiens
  misc_RNA (1)...(19): siRNA sense strand
gagcugugauggaaggcca

SEQ ID NO: 2260155 - RNA, 19 nt, Homo sapiens
  misc_RNA (1)...(19): siRNA sense strand
cgggacaguaccaguguuu

SEQ ID NO: 2260156 - RNA, 19 nt, Homo sapiens
  misc_RNA (1)...(19): siRNA sense strand
acuaucugcgccagggaaa

SEQ ID NO: 2260157 - RNA, 19 nt, Homo sapiens
  misc_RNA (1)...(19): siRNA sense strand
guacauuggcuucgggaug

SEQ ID NO: 2260158 - RNA, 19 nt, Homo sapiens
  misc_RNA (1)...(19): siRNA sense strand
uggagaaguguuugaacca

SEQ ID NO: 2260159 - RNA, 19 nt, Homo sapiens
  misc_RNA (1)...(19): siRNA sense strand
cgggaagauuuggagaaca

SEQ ID NO: 2260160 - RNA, 19 nt, Homo sapiens
  misc_RNA (1)...(19): siRNA sense strand
caugaaggaauuugaccau

SEQ ID NO: 2260161 - RNA, 19 nt, Homo sapiens
  misc_RNA (1)...(19): siRNA sense strand
cauccaggcgggagaacca

SEQ ID NO: 2260162 - RNA, 19 nt, Homo sapiens
  misc_RNA (1)...(19): siRNA sense strand
gggcuaaggcaagagguga

SEQ ID NO: 2260163 - RNA, 19 nt, Homo sapiens
  misc_RNA (1)...(19): siRNA sense strand
gagaaguguuugaaccaac

SEQ ID NO: 2260164 - RNA, 19 nt, Homo sapiens
  misc_RNA (1)...(19): siRNA sense strand
ugauggaaggccagcucaa

SEQ ID NO: 2260165 - RNA, 19 nt, Homo sapiens
  misc_RNA (1)...(19): siRNA sense strand
gcacgaggucagagcugga

SEQ ID NO: 2260166 - RNA, 19 nt, Homo sapiens
  misc_RNA (1)...(19): siRNA sense strand
gaacaugcuuggaaggaga

SEQ ID NO: 2260167 - RNA, 19 nt, Homo sapiens
  misc_RNA (1)...(19): siRNA sense strand
ugaaaagagaugugaugaa

SEQ ID NO: 2260168 - RNA, 19 nt, Homo sapiens
  misc_RNA (1)...(19): siRNA sense strand
ccuccuuggccuuggcuua

SEQ ID NO: 2260169 - RNA, 19 nt, Homo sapiens
  misc_RNA (1)...(19): siRNA sense strand
aggaguacagauuggacua

SEQ ID NO: 2260170 - RNA, 19 nt, Homo sapiens
  misc_RNA (1)...(19): siRNA sense strand
cugaagagacaugggaaga

SEQ ID NO: 2260171 - RNA, 19 nt, Homo sapiens
  misc_RNA (1)...(19): siRNA sense strand
cugaacaagccauaggaca

SEQ ID NO: 2260172 - RNA, 19 nt, Homo sapiens
  misc_RNA (1)...(19): siRNA sense strand
gggccaaugaauucgguga

SEQ ID NO: 2260173 - RNA, 19 nt, Homo sapiens
  misc_RNA (1)...(19): siRNA sense strand
ccugaaaagcuauuaacaa

SEQ ID NO: 2260174 - RNA, 19 nt, Homo sapiens
  misc_RNA (1)...(19): siRNA sense strand
agagacaugggaagaacaa

SEQ ID NO: 2260175 - RNA, 19 nt, Homo sapiens
  misc_RNA (1)...(19): siRNA sense strand
cuuuccagguccaaguaaa

SEQ ID NO: 2260176 - RNA, 19 nt, Homo sapiens
  misc_RNA (1)...(19): siRNA sense strand
gaacaauaaaguugccagu

SEQ ID NO: 2260177 - RNA, 19 nt, Homo sapiens
  misc_RNA (1)...(19): siRNA sense strand
augucaaggaguacagauu

SEQ ID NO: 2260178 - RNA, 19 nt, Homo sapiens
  misc_RNA (1)...(19): siRNA sense strand
gaggagaggugaucccaca

SEQ ID NO: 2260179 - RNA, 19 nt, Homo sapiens
  misc_RNA (1)...(19): siRNA sense strand
cauuguaggagaaggugau

SEQ ID NO: 2260180 - RNA, 19 nt, Homo sapiens
  misc_RNA (1)...(19): siRNA sense strand
gcugaagagacaugggaag

SEQ ID NO: 2260181 - RNA, 19 nt, Homo sapiens
  misc_RNA (1)...(19): siRNA sense strand
agacaugggaagaacaacu

SEQ ID NO: 2260182 - RNA, 19 nt, Homo sapiens
  misc_RNA (1)...(19): siRNA sense strand
ugaacaagccauaggacag

SEQ ID NO: 2260183 - RNA, 19 nt, Homo sapiens
  misc_RNA (1)...(19): siRNA sense strand
agggaaaguucuucggcua

SEQ ID NO: 2260184 - RNA, 19 nt, Homo sapiens
  misc_RNA (1)...(19): siRNA sense strand
gcaugaaggaccugaggga

SEQ ID NO: 2260185 - RNA, 19 nt, Homo sapiens
  misc_RNA (1)...(19): siRNA sense strand
gcugugaucuggaaggaga

SEQ ID NO: 2260186 - RNA, 19 nt, Homo sapiens
  misc_RNA (1)...(19): siRNA sense strand
ccguugugcuggugaacau

SEQ ID NO: 2260187 - RNA, 19 nt, Homo sapiens
  misc_RNA (1)...(19): siRNA sense strand
ucaccaaggccaaagggua

SEQ ID NO: 2260188 - RNA, 19 nt, Homo sapiens
  misc_RNA (1)...(19): siRNA sense strand
gaacauggucauugggauc

SEQ ID NO: 2260189 - RNA, 19 nt, Homo sapiens
  misc_RNA (1)...(19): siRNA sense strand
gcagaggagaaucgggaca

SEQ ID NO: 2260190 - RNA, 19 nt, Homo sapiens
  misc_RNA (1)...(19): siRNA sense strand
augcauaccaggugacaga

SEQ ID NO: 2260191 - RNA, 19 nt, Homo sapiens
  misc_RNA (1)...(19): siRNA sense strand
ccgaggaggagaagcugaa

SEQ ID NO: 2260192 - RNA, 19 nt, Homo sapiens
  misc_RNA (1)...(19): siRNA sense strand
aacaagaggcccugggaga

SEQ ID NO: 2260193 - RNA, 19 nt, Homo sapiens
  misc_RNA (1)...(19): siRNA sense strand
agaucugugaugaggacaa

SEQ ID NO: 2260194 - RNA, 19 nt, Homo sapiens
  misc_RNA (1)...(19): siRNA sense strand
gccaaaggguacagcacca

SEQ ID NO: 2260195 - RNA, 19 nt, Homo sapiens
  misc_RNA (1)...(19): siRNA sense strand
acgcagcggagaaggacaa

SEQ ID NO: 2260196 - RNA, 19 nt, Homo sapiens
  misc_RNA (1)...(19): siRNA sense strand
ggaacaugacagagauuuu

SEQ ID NO: 2260197 - RNA, 19 nt, Homo sapiens
  misc_RNA (1)...(19): siRNA sense strand
ggugugagcuggacgagga

SEQ ID NO: 2260198 - RNA, 19 nt, Homo sapiens
  misc_RNA (1)...(19): siRNA sense strand
gcaacaaggugaugugcac

SEQ ID NO: 2260199 - RNA, 19 nt, Homo sapiens
  misc_RNA (1)...(19): siRNA sense strand
cggacaagaagcugaagga

SEQ ID NO: 2260200 - RNA, 19 nt, Homo sapiens
  misc_RNA (1)...(19): siRNA sense strand
cggagaaggacaaggaggu

SEQ ID NO: 2260201 - RNA, 19 nt, Homo sapiens
  misc_RNA (1)...(19): siRNA sense strand
ucgagaaggacguggaucu

SEQ ID NO: 2260202 - RNA, 19 nt, Homo sapiens
  misc_RNA (1)...(19): siRNA sense strand
gggugaagaaggagcugga

SEQ ID NO: 2260203 - RNA, 19 nt, Homo sapiens
  misc_RNA (1)...(19): siRNA sense strand
gggaugucugcuugagaga

SEQ ID NO: 2260204 - RNA, 19 nt, Homo sapiens
  misc_RNA (1)...(19): siRNA sense strand
augaaggaccugagggaug

SEQ ID NO: 2260205 - RNA, 19 nt, Homo sapiens
  misc_RNA (1)...(19): siRNA sense strand
guccugaauucuaagguga

SEQ ID NO: 2260206 - RNA, 19 nt, Homo sapiens
  misc_RNA (1)...(19): siRNA sense strand
cugcacugguuguggccau

SEQ ID NO: 2260207 - RNA, 19 nt, Homo sapiens
  misc_RNA (1)...(19): siRNA sense strand
uggccauuucugugggauu

SEQ ID NO: 2260208 - RNA, 19 nt, Homo sapiens
  misc_RNA (1)...(19): siRNA sense strand
ucgacucgcuggagggcuu

SEQ ID NO: 2260209 - RNA, 19 nt, Homo sapiens
  misc_RNA (1)...(19): siRNA sense strand
gugccagaggacaggguca

SEQ ID NO: 2260210 - RNA, 19 nt, Homo sapiens
  misc_RNA (1)...(19): siRNA sense strand
cagaacuggacuuugagaa

SEQ ID NO: 2260211 - RNA, 19 nt, Homo sapiens
  misc_RNA (1)...(19): siRNA sense strand
gcgaacauggagaaggcga

SEQ ID NO: 2260212 - RNA, 19 nt, Homo sapiens
  misc_RNA (1)...(19): siRNA sense strand
cagaagaggaggaggcaga

SEQ ID NO: 2260213 - RNA, 19 nt, Homo sapiens
  misc_RNA (1)...(19): siRNA sense strand
caucagagcuggagcaccu

SEQ ID NO: 2260214 - RNA, 19 nt, Homo sapiens
  misc_RNA (1)...(19): siRNA sense strand
cggaagaggaaccgaaagu

SEQ ID NO: 2260215 - RNA, 19 nt, Homo sapiens
  misc_RNA (1)...(19): siRNA sense strand
uggcuuuacccgaacgaaa

SEQ ID NO: 2260216 - RNA, 19 nt, Homo sapiens
  misc_RNA (1)...(19): siRNA sense strand
ggaauauccuggugcccau

SEQ ID NO: 2260217 - RNA, 19 nt, Homo sapiens
  misc_RNA (1)...(19): siRNA sense strand
cuguggacauucugaggaa

SEQ ID NO: 2260218 - RNA, 19 nt, Homo sapiens
  misc_RNA (1)...(19): siRNA sense strand
ccgacaaauccaagaagca

SEQ ID NO: 2260219 - RNA, 19 nt, Homo sapiens
  misc_RNA (1)...(19): siRNA sense strand
caugagaugugcagggaug

SEQ ID NO: 2260220 - RNA, 19 nt, Homo sapiens
  misc_RNA (1)...(19): siRNA sense strand
gugaggagccggaagagga

SEQ ID NO: 2260221 - RNA, 19 nt, Homo sapiens
  misc_RNA (1)...(19): siRNA sense strand
gagaagagguguccagccu

SEQ ID NO: 2260222 - RNA, 19 nt, Homo sapiens
  misc_RNA (1)...(19): siRNA sense strand
cugaugaugugcagcgcuu

SEQ ID NO: 2260223 - RNA, 19 nt, Homo sapiens
  misc_RNA (1)...(19): siRNA sense strand
gguccugagcugcagacua

SEQ ID NO: 2260224 - RNA, 19 nt, Homo sapiens
  misc_RNA (1)...(19): siRNA sense strand
ccgucauuguccuggugaa

SEQ ID NO: 2260225 - RNA, 19 nt, Homo sapiens
  misc_RNA (1)...(19): siRNA sense strand
aggucuugcucaucaacaa

SEQ ID NO: 2260226 - RNA, 19 nt, Homo sapiens
  misc_RNA (1)...(19): siRNA sense strand
auucagaacucuaccacga

SEQ ID NO: 2260227 - RNA, 19 nt, Homo sapiens
  misc_RNA (1)...(19): siRNA sense strand
augcugaugacguggaaga

SEQ ID NO: 2260228 - RNA, 19 nt, Homo sapiens
  misc_RNA (1)...(19): siRNA sense strand
cuucaugguggaugcggaa

SEQ ID NO: 2260229 - RNA, 19 nt, Homo sapiens
  misc_RNA (1)...(19): siRNA sense strand
caacaacaacucuagccaa

SEQ ID NO: 2260230 - RNA, 19 nt, Homo sapiens
  misc_RNA (1)...(19): siRNA sense strand
ccaucaucuugcugaacuu

SEQ ID NO: 2260231 - RNA, 19 nt, Homo sapiens
  misc_RNA (1)...(19): siRNA sense strand
gaacgaaaggauacgguac

SEQ ID NO: 2260232 - RNA, 19 nt, Homo sapiens
  misc_RNA (1)...(19): siRNA sense strand
ucauuguccuggugaacau

SEQ ID NO: 2260233 - RNA, 19 nt, Homo sapiens
  misc_RNA (1)...(19): siRNA sense strand
gugaaaacccaguggccga

SEQ ID NO: 2260234 - RNA, 19 nt, Homo sapiens
  misc_RNA (1)...(19): siRNA sense strand
cccuggagcgaaagaaauu

SEQ ID NO: 2260235 - RNA, 19 nt, Homo sapiens
  misc_RNA (1)...(19): siRNA sense strand
ugaucagcauucagcgaga

SEQ ID NO: 2260236 - RNA, 19 nt, Homo sapiens
  misc_RNA (1)...(19): siRNA sense strand
uggaaugcguggagccugu

SEQ ID NO: 2260237 - RNA, 19 nt, Homo sapiens
  misc_RNA (1)...(19): siRNA sense strand
cgaacgaaaggauacggua

SEQ ID NO: 2260238 - RNA, 19 nt, Homo sapiens
  misc_RNA (1)...(19): siRNA sense strand
cauacaaggaagaggcaua

SEQ ID NO: 2260239 - RNA, 19 nt, Homo sapiens
  misc_RNA (1)...(19): siRNA sense strand
caauaugaacuuagagcaa

SEQ ID NO: 2260240 - RNA, 19 nt, Homo sapiens
  misc_RNA (1)...(19): siRNA sense strand
ggccaaagaacaagaacaa

SEQ ID NO: 2260241 - RNA, 19 nt, Homo sapiens
  misc_RNA (1)...(19): siRNA sense strand
gcucagcaaccuagagaaa

SEQ ID NO: 2260242 - RNA, 19 nt, Homo sapiens
  misc_RNA (1)...(19): siRNA sense strand
ggaugauaaugcaggacua

SEQ ID NO: 2260243 - RNA, 19 nt, Homo sapiens
  misc_RNA (1)...(19): siRNA sense strand
cuguggagauccugagaaa

SEQ ID NO: 2260244 - RNA, 19 nt, Homo sapiens
  misc_RNA (1)...(19): siRNA sense strand
caaugaaagaagaaagcaa

SEQ ID NO: 2260245 - RNA, 19 nt, Homo sapiens
  misc_RNA (1)...(19): siRNA sense strand
agauggaauccuagauaaa

SEQ ID NO: 2260246 - RNA, 19 nt, Homo sapiens
  misc_RNA (1)...(19): siRNA sense strand
ggucgaggccaaagaacaa

SEQ ID NO: 2260247 - RNA, 19 nt, Homo sapiens
  misc_RNA (1)...(19): siRNA sense strand
gggaagaagaucagaaauc

SEQ ID NO: 2260248 - RNA, 19 nt, Homo sapiens
  misc_RNA (1)...(19): siRNA sense strand
augaaaggcuauugcacua

SEQ ID NO: 2260249 - RNA, 19 nt, Homo sapiens
  misc_RNA (1)...(19): siRNA sense strand
ggacuaucaagaagugaaa

SEQ ID NO: 2260250 - RNA, 19 nt, Homo sapiens
  misc_RNA (1)...(19): siRNA sense strand
ucuuagacacagaggcaaa

SEQ ID NO: 2260251 - RNA, 19 nt, Homo sapiens
  misc_RNA (1)...(19): siRNA sense strand
uggauuuaacucagagaaa

SEQ ID NO: 2260252 - RNA, 19 nt, Homo sapiens
  misc_RNA (1)...(19): siRNA sense strand
ugaaaggacggaagggaau

SEQ ID NO: 2260253 - RNA, 19 nt, Homo sapiens
  misc_RNA (1)...(19): siRNA sense strand
cugucagggugcagugaua

SEQ ID NO: 2260254 - RNA, 19 nt, Homo sapiens
  misc_RNA (1)...(19): siRNA sense strand
ggagauagaacuagcucau

SEQ ID NO: 2260255 - RNA, 19 nt, Homo sapiens
  misc_RNA (1)...(19): siRNA sense strand
ugaaauaugcccugaggau

SEQ ID NO: 2260256 - RNA, 19 nt, Homo sapiens
  misc_RNA (1)...(19): siRNA sense strand
uggugaaucugguguggaa

SEQ ID NO: 2260257 - RNA, 19 nt, Homo sapiens
  misc_RNA (1)...(19): siRNA sense strand
augaaaggacggaagggaa

SEQ ID NO: 2260258 - RNA, 19 nt, Homo sapiens
  misc_RNA (1)...(19): siRNA sense strand
caauaaggccugaacccaa

SEQ ID NO: 2260259 - RNA, 19 nt, Homo sapiens
  misc_RNA (1)...(19): siRNA sense strand
gugugaaggaccugaaaca

SEQ ID NO: 2260260 - RNA, 19 nt, Homo sapiens
  misc_RNA (1)...(19): siRNA sense strand
caacuuuggugaagggagu

SEQ ID NO: 2260261 - RNA, 19 nt, Homo sapiens
  misc_RNA (1)...(19): siRNA sense strand
ggcaagaaacucagaagau

SEQ ID NO: 2260262 - RNA, 19 nt, Homo sapiens
  misc_RNA (1)...(19): siRNA sense strand
aauaagaguaucugcacaa

SEQ ID NO: 2260263 - RNA, 19 nt, Homo sapiens
  misc_RNA (1)...(19): siRNA sense strand
gcucaaaucaugacagacu

SEQ ID NO: 2260264 - RNA, 19 nt, Homo sapiens
  misc_RNA (1)...(19): siRNA sense strand
ggcacaaacuggugaaucu

SEQ ID NO: 2260265 - RNA, 19 nt, Homo sapiens
  misc_RNA (1)...(19): siRNA sense strand
cugcuaaauuuauggcaca

SEQ ID NO: 2260266 - RNA, 19 nt, Homo sapiens
  misc_RNA (1)...(19): siRNA sense strand
ugugauggcggcugggaaa

SEQ ID NO: 2260267 - RNA, 19 nt, Homo sapiens
  misc_RNA (1)...(19): siRNA sense strand
aguuaaugcaggugauuga

SEQ ID NO: 2260268 - RNA, 19 nt, Homo sapiens
  misc_RNA (1)...(19): siRNA sense strand
gcuucauucuguuggguuu

SEQ ID NO: 2260269 - RNA, 19 nt, Homo sapiens
  misc_RNA (1)...(19): siRNA sense strand
gggagaucauacaauuaaa

SEQ ID NO: 2260270 - RNA, 19 nt, Homo sapiens
  misc_RNA (1)...(19): siRNA sense strand
agccaauggucaauggaau

SEQ ID NO: 2260271 - RNA, 19 nt, Homo sapiens
  misc_RNA (1)...(19): siRNA sense strand
caacauggugauuggcauu

SEQ ID NO: 2260272 - RNA, 19 nt, Homo sapiens
  misc_RNA (1)...(19): siRNA sense strand
auaugaacuuagagcaaca

SEQ ID NO: 2260273 - RNA, 19 nt, Homo sapiens
  misc_RNA (1)...(19): siRNA sense strand
gcacuuggacgcuggaaaa

SEQ ID NO: 2260274 - RNA, 19 nt, Homo sapiens
  misc_RNA (1)...(19): siRNA sense strand
gggcaagaaacucagaaga

SEQ ID NO: 2260275 - RNA, 19 nt, Homo sapiens
  misc_RNA (1)...(19): siRNA sense strand
aaugaguucuuuagagaga

SEQ ID NO: 2260276 - RNA, 19 nt, Homo sapiens
  misc_RNA (1)...(19): siRNA sense strand
gaaaaugggagaacagaau

SEQ ID NO: 2260277 - RNA, 19 nt, Homo sapiens
  misc_RNA (1)...(19): siRNA sense strand
ugaaggaacgggcgaagaa

SEQ ID NO: 2260278 - RNA, 19 nt, Homo sapiens
  misc_RNA (1)...(19): siRNA sense strand
aguccauccucaagaaaga

SEQ ID NO: 2260279 - RNA, 19 nt, Homo sapiens
  misc_RNA (1)...(19): siRNA sense strand
ggaagaggcauauggaacu

SEQ ID NO: 2260280 - RNA, 19 nt, Homo sapiens
  misc_RNA (1)...(19): siRNA sense strand
uuggacagauuucgggaua

SEQ ID NO: 2260281 - RNA, 19 nt, Homo sapiens
  misc_RNA (1)...(19): siRNA sense strand
gugaaggaccugaaacaca

SEQ ID NO: 2260282 - RNA, 19 nt, Homo sapiens
  misc_RNA (1)...(19): siRNA sense strand
ggagagagguucaggaugc

SEQ ID NO: 2260283 - RNA, 19 nt, Homo sapiens
  misc_RNA (1)...(19): siRNA sense strand
augaauauuggcauggaaa

SEQ ID NO: 2260284 - RNA, 19 nt, Homo sapiens
  misc_RNA (1)...(19): siRNA sense strand
aaguaaacccugaauucaa

SEQ ID NO: 2260285 - RNA, 19 nt, Homo sapiens
  misc_RNA (1)...(19): siRNA sense strand
agaacaagaacaaggucau

SEQ ID NO: 2260286 - RNA, 19 nt, Homo sapiens
  misc_RNA (1)...(19): siRNA sense strand
ucaaaugaguacagacacu

SEQ ID NO: 2260287 - RNA, 19 nt, Homo sapiens
  misc_RNA (1)...(19): siRNA sense strand
agaagauaggguaguaauu

SEQ ID NO: 2260288 - RNA, 19 nt, Homo sapiens
  misc_RNA (1)...(19): siRNA sense strand
ccugaagggcuaagcuauu

SEQ ID NO: 2260289 - RNA, 19 nt, Homo sapiens
  misc_RNA (1)...(19): siRNA sense strand
uaucaaaugaguacagaca

SEQ ID NO: 2260290 - RNA, 19 nt, Homo sapiens
  misc_RNA (1)...(19): siRNA sense strand
uuagaugccgauugagaaa

SEQ ID NO: 2260291 - RNA, 19 nt, Homo sapiens
  misc_RNA (1)...(19): siRNA sense strand
aagaaagaaugauggaaag

SEQ ID NO: 2260292 - RNA, 19 nt, Homo sapiens
  misc_RNA (1)...(19): siRNA sense strand
gaugauggacuuucagaau

SEQ ID NO: 2260293 - RNA, 19 nt, Homo sapiens
  misc_RNA (1)...(19): siRNA sense strand
aauagugaauugcggagaa

SEQ ID NO: 2260294 - RNA, 19 nt, Homo sapiens
  misc_RNA (1)...(19): siRNA sense strand
cuauugcacuacaaaguaa

SEQ ID NO: 2260295 - RNA, 19 nt, Homo sapiens
  misc_RNA (1)...(19): siRNA sense strand
cuguaauggaccaguucaa

SEQ ID NO: 2260296 - RNA, 19 nt, Homo sapiens
  misc_RNA (1)...(19): siRNA sense strand
ggauuuaacucagagaaaa

SEQ ID NO: 2260297 - RNA, 19 nt, Homo sapiens
  misc_RNA (1)...(19): siRNA sense strand
cgaacgagucuuugggaac

SEQ ID NO: 2260298 - RNA, 19 nt, Homo sapiens
  misc_RNA (1)...(19): siRNA sense strand
uagcaauccauguuugaaa

SEQ ID NO: 2260299 - RNA, 19 nt, Homo sapiens
  misc_RNA (1)...(19): siRNA sense strand
ugggagaagugucugaauu

SEQ ID NO: 2260300 - RNA, 19 nt, Homo sapiens
  misc_RNA (1)...(19): siRNA sense strand
uggaugugcaagaggguga

SEQ ID NO: 2260301 - RNA, 19 nt, Homo sapiens
  misc_RNA (1)...(19): siRNA sense strand
gcgaccacccaaagaagaa

SEQ ID NO: 2260302 - RNA, 19 nt, Homo sapiens
  misc_RNA (1)...(19): siRNA sense strand
ggaggaaggccgugugaag

SEQ ID NO: 2260303 - RNA, 19 nt, Homo sapiens
  misc_RNA (1)...(19): siRNA sense strand
cugagaaaugugacagaca

SEQ ID NO: 2260304 - RNA, 19 nt, Homo sapiens
  misc_RNA (1)...(19): siRNA sense strand
cguccauaccggugagaaa

SEQ ID NO: 2260305 - RNA, 19 nt, Homo sapiens
  misc_RNA (1)...(19): siRNA sense strand
gcaaagaagaagagagacc

SEQ ID NO: 2260306 - RNA, 19 nt, Homo sapiens
  misc_RNA (1)...(19): siRNA sense strand
aauccacacaggagagaaa

SEQ ID NO: 2260307 - RNA, 19 nt, Homo sapiens
  misc_RNA (1)...(19): siRNA sense strand
cccaagacaucauggccua

SEQ ID NO: 2260308 - RNA, 19 nt, Homo sapiens
  misc_RNA (1)...(19): siRNA sense strand
cugcagacccacagugaca

SEQ ID NO: 2260309 - RNA, 19 nt, Homo sapiens
  misc_RNA (1)...(19): siRNA sense strand
ccauggagccugagaaccu

SEQ ID NO: 2260310 - RNA, 19 nt, Homo sapiens
  misc_RNA (1)...(19): siRNA sense strand
uauuaaggccagugaagca

SEQ ID NO: 2260311 - RNA, 19 nt, Homo sapiens
  misc_RNA (1)...(19): siRNA sense strand
gugugagagcagagccuuu

SEQ ID NO: 2260312 - RNA, 19 nt, Homo sapiens
  misc_RNA (1)...(19): siRNA sense strand
ugaagagccaccugcgaau

SEQ ID NO: 2260313 - RNA, 19 nt, Homo sapiens
  misc_RNA (1)...(19): siRNA sense strand
ccgccaugccagugauguu

SEQ ID NO: 2260314 - RNA, 19 nt, Homo sapiens
  misc_RNA (1)...(19): siRNA sense strand
ccaaccaagcugagugcca

SEQ ID NO: 2260315 - RNA, 19 nt, Homo sapiens
  misc_RNA (1)...(19): siRNA sense strand
cguccauaccggugagaaa

SEQ ID NO: 2260316 - RNA, 19 nt, Homo sapiens
  misc_RNA (1)...(19): siRNA sense strand
gcaaagaagaagagagacc

SEQ ID NO: 2260317 - RNA, 19 nt, Homo sapiens
  misc_RNA (1)...(19): siRNA sense strand
aauccacacaggagagaaa

SEQ ID NO: 2260318 - RNA, 19 nt, Homo sapiens
  misc_RNA (1)...(19): siRNA sense strand
cccaagacaucauggccua

SEQ ID NO: 2260319 - RNA, 19 nt, Homo sapiens
  misc_RNA (1)...(19): siRNA sense strand
cugcagacccacagugaca

SEQ ID NO: 2260320 - RNA, 19 nt, Homo sapiens
  misc_RNA (1)...(19): siRNA sense strand
ccauggagccugagaaccu

SEQ ID NO: 2260321 - RNA, 19 nt, Homo sapiens
  misc_RNA (1)...(19): siRNA sense strand
uauuaaggccagugaagca

SEQ ID NO: 2260322 - RNA, 19 nt, Homo sapiens
  misc_RNA (1)...(19): siRNA sense strand
gugugagagcagagccuuu

SEQ ID NO: 2260323 - RNA, 19 nt, Homo sapiens
  misc_RNA (1)...(19): siRNA sense strand
ugaagagccaccugcgaau

SEQ ID NO: 2260324 - RNA, 19 nt, Homo sapiens
  misc_RNA (1)...(19): siRNA sense strand
ccgccaugccagugauguu

SEQ ID NO: 2260325 - RNA, 19 nt, Homo sapiens
  misc_RNA (1)...(19): siRNA sense strand
ccaaccaagcugagugcca

SEQ ID NO: 2260326 - RNA, 19 nt, Homo sapiens
  misc_RNA (1)...(19): siRNA sense strand
gggaacaacagaagcggaa

SEQ ID NO: 2260327 - RNA, 19 nt, Homo sapiens
  misc_RNA (1)...(19): siRNA sense strand
uguucaaagucaaggauau

SEQ ID NO: 2260328 - RNA, 19 nt, Homo sapiens
  misc_RNA (1)...(19): siRNA sense strand
aagauauggucuagugaca

SEQ ID NO: 2260329 - RNA, 19 nt, Homo sapiens
  misc_RNA (1)...(19): siRNA sense strand
caagagaagucguuucauu

SEQ ID NO: 2260330 - RNA, 19 nt, Homo sapiens
  misc_RNA (1)...(19): siRNA sense strand
aaggcagagugcagagcaa

SEQ ID NO: 2260331 - RNA, 19 nt, Homo sapiens
  misc_RNA (1)...(19): siRNA sense strand
ccuacuacaaugugaguga

SEQ ID NO: 2260332 - RNA, 19 nt, Homo sapiens
  misc_RNA (1)...(19): siRNA sense strand
aagucaaggauauggaaaa

SEQ ID NO: 2260333 - RNA, 19 nt, Homo sapiens
  misc_RNA (1)...(19): siRNA sense strand
acuacaacauuaaugggaa

SEQ ID NO: 2260334 - RNA, 19 nt, Homo sapiens
  misc_RNA (1)...(19): siRNA sense strand
gaguaguggaugucugcaa

SEQ ID NO: 2260335 - RNA, 19 nt, Homo sapiens
  misc_RNA (1)...(19): siRNA sense strand
gcacaaggaaggugggcag

SEQ ID NO: 2260336 - RNA, 19 nt, Homo sapiens
  misc_RNA (1)...(19): siRNA sense strand
uagaaggagucgaugcuga

SEQ ID NO: 2260337 - RNA, 19 nt, Homo sapiens
  misc_RNA (1)...(19): siRNA sense strand
acgaagcagcucaaugaaa

SEQ ID NO: 2260338 - RNA, 19 nt, Homo sapiens
  misc_RNA (1)...(19): siRNA sense strand
gggucgggccuuuggugaa

SEQ ID NO: 2260339 - RNA, 19 nt, Homo sapiens
  misc_RNA (1)...(19): siRNA sense strand
ccaagaaagacaaugagca

SEQ ID NO: 2260340 - RNA, 19 nt, Homo sapiens
  misc_RNA (1)...(19): siRNA sense strand
cuuccaagaaagacaauga

SEQ ID NO: 2260341 - RNA, 19 nt, Homo sapiens
  misc_RNA (1)...(19): siRNA sense strand
uggaaaaccuggaagaugu

SEQ ID NO: 2260342 - RNA, 19 nt, Homo sapiens
  misc_RNA (1)...(19): siRNA sense strand
augaagaccacaaguugaa

SEQ ID NO: 2260343 - RNA, 19 nt, Homo sapiens
  misc_RNA (1)...(19): siRNA sense strand
cauucaaguugguguaauc

SEQ ID NO: 2260344 - RNA, 19 nt, Homo sapiens
  misc_RNA (1)...(19): siRNA sense strand
ucaauuaugaagaccacaa

SEQ ID NO: 2260345 - RNA, 19 nt, Homo sapiens
  misc_RNA (1)...(19): siRNA sense strand
ggccaagaucucagucauu

SEQ ID NO: 2260346 - RNA, 19 nt, Homo sapiens
  misc_RNA (1)...(19): siRNA sense strand
ugggaacacaggaagggua

SEQ ID NO: 2260347 - RNA, 19 nt, Homo sapiens
  misc_RNA (1)...(19): siRNA sense strand
gcggcgaacgugucaggaa

SEQ ID NO: 2260348 - RNA, 19 nt, Homo sapiens
  misc_RNA (1)...(19): siRNA sense strand
aguuauggugugaagccaa

SEQ ID NO: 2260349 - RNA, 19 nt, Homo sapiens
  misc_RNA (1)...(19): siRNA sense strand
cuguggaugacaaggaaca

SEQ ID NO: 2260350 - RNA, 19 nt, Homo sapiens
  misc_RNA (1)...(19): siRNA sense strand
gagaagucguuucauucaa

SEQ ID NO: 2260351 - RNA, 19 nt, Homo sapiens
  misc_RNA (1)...(19): siRNA sense strand
ugacugauggauugcacaa

SEQ ID NO: 2260352 - RNA, 19 nt, Homo sapiens
  misc_RNA (1)...(19): siRNA sense strand
guguucaaagucaaggaua

SEQ ID NO: 2260353 - RNA, 19 nt, Homo sapiens
  misc_RNA (1)...(19): siRNA sense strand
cuaccaaaugaucgaugaa

SEQ ID NO: 2260354 - RNA, 19 nt, Homo sapiens
  misc_RNA (1)...(19): siRNA sense strand
ugcccuggcugaaggagaa

SEQ ID NO: 2260355 - RNA, 19 nt, Homo sapiens
  misc_RNA (1)...(19): siRNA sense strand
aggaaggaauacugggaga

SEQ ID NO: 2260356 - RNA, 19 nt, Homo sapiens
  misc_RNA (1)...(19): siRNA sense strand
aggaauacugggagaaucu

SEQ ID NO: 2260357 - RNA, 19 nt, Homo sapiens
  misc_RNA (1)...(19): siRNA sense strand
ccgacaaguggcugaugaa

SEQ ID NO: 2260358 - RNA, 19 nt, Homo sapiens
  misc_RNA (1)...(19): siRNA sense strand
gggcaauugcagaggagcu

SEQ ID NO: 2260359 - RNA, 19 nt, Homo sapiens
  misc_RNA (1)...(19): siRNA sense strand
gagagauugugauuggaga

SEQ ID NO: 2260360 - RNA, 19 nt, Homo sapiens
  misc_RNA (1)...(19): siRNA sense strand
gcucaaacgucaugcagac

SEQ ID NO: 2260361 - RNA, 19 nt, Homo sapiens
  misc_RNA (1)...(19): siRNA sense strand
uagcaggaggagugaguca

SEQ ID NO: 2260362 - RNA, 19 nt, Homo sapiens
  misc_RNA (1)...(19): siRNA sense strand
cuuagcugcaagagugaaa

SEQ ID NO: 2260363 - RNA, 19 nt, Homo sapiens
  misc_RNA (1)...(19): siRNA sense strand
agagugaaacugaagucaa

SEQ ID NO: 2260364 - RNA, 19 nt, Homo sapiens
  misc_RNA (1)...(19): siRNA sense strand
gugcagugcgccuggugaa

SEQ ID NO: 2260365 - RNA, 19 nt, Homo sapiens
  misc_RNA (1)...(19): siRNA sense strand
gcuguggauuugagcccua

SEQ ID NO: 2260366 - RNA, 19 nt, Homo sapiens
  misc_RNA (1)...(19): siRNA sense strand
ccuugauagcauccgguaa

SEQ ID NO: 2260367 - RNA, 19 nt, Homo sapiens
  misc_RNA (1)...(19): siRNA sense strand
aaacauggcagcuggggaa

SEQ ID NO: 2260368 - RNA, 19 nt, Homo sapiens
  misc_RNA (1)...(19): siRNA sense strand
cuucaaugucaaagccaga

SEQ ID NO: 2260369 - RNA, 19 nt, Homo sapiens
  misc_RNA (1)...(19): siRNA sense strand
gguagcaggaggagugagu

SEQ ID NO: 2260370 - RNA, 19 nt, Homo sapiens
  misc_RNA (1)...(19): siRNA sense strand
ugcaacaguuagaggucuu

SEQ ID NO: 2260371 - RNA, 19 nt, Homo sapiens
  misc_RNA (1)...(19): siRNA sense strand
cgguaaaccuguggcagca

SEQ ID NO: 2260372 - RNA, 19 nt, Homo sapiens
  misc_RNA (1)...(19): siRNA sense strand
ggugaaagcaggagcaucc

SEQ ID NO: 2260373 - RNA, 19 nt, Homo sapiens
  misc_RNA (1)...(19): siRNA sense strand
ggcugaaggccguggacaa

SEQ ID NO: 2260374 - RNA, 19 nt, Homo sapiens
  misc_RNA (1)...(19): siRNA sense strand
ccaucuggcuggugggcuu

SEQ ID NO: 2260375 - RNA, 19 nt, Homo sapiens
  misc_RNA (1)...(19): siRNA sense strand
gaaccaagcagaaacgcau

SEQ ID NO: 2260376 - RNA, 19 nt, Homo sapiens
  misc_RNA (1)...(19): siRNA sense strand
gacaauaccugcaagcuga

SEQ ID NO: 2260377 - RNA, 19 nt, Homo sapiens
  misc_RNA (1)...(19): siRNA sense strand
ggcugaaggccguggacaa

SEQ ID NO: 2260378 - RNA, 19 nt, Homo sapiens
  misc_RNA (1)...(19): siRNA sense strand
ccaucuggcuggugggcuu

SEQ ID NO: 2260379 - RNA, 19 nt, Homo sapiens
  misc_RNA (1)...(19): siRNA sense strand
gaaccaagcagaaacgcau

SEQ ID NO: 2260380 - RNA, 19 nt, Homo sapiens
  misc_RNA (1)...(19): siRNA sense strand
gacaauaccugcaagcuga

SEQ ID NO: 2260381 - RNA, 19 nt, Homo sapiens
  misc_RNA (1)...(19): siRNA sense strand
ucgucaaccucguggaaca

SEQ ID NO: 2260382 - RNA, 19 nt, Homo sapiens
  misc_RNA (1)...(19): siRNA sense strand
uccugaagaaauacagaaa

SEQ ID NO: 2260383 - RNA, 19 nt, Homo sapiens
  misc_RNA (1)...(19): siRNA sense strand
gagcacuugggcagggaau

SEQ ID NO: 2260384 - RNA, 19 nt, Homo sapiens
  misc_RNA (1)...(19): siRNA sense strand
uuaacaugguggagcgaga

SEQ ID NO: 2260385 - RNA, 19 nt, Homo sapiens
  misc_RNA (1)...(19): siRNA sense strand
gcugguugcugaagcguca

SEQ ID NO: 2260386 - RNA, 19 nt, Homo sapiens
  misc_RNA (1)...(19): siRNA sense strand
gagcaguccaacagggagu

SEQ ID NO: 2260387 - RNA, 19 nt, Homo sapiens
  misc_RNA (1)...(19): siRNA sense strand
acaaugucauccugcgcaa

SEQ ID NO: 2260388 - RNA, 19 nt, Homo sapiens
  misc_RNA (1)...(19): siRNA sense strand
agacagaggugcagggcga

SEQ ID NO: 2260389 - RNA, 19 nt, Homo sapiens
  misc_RNA (1)...(19): siRNA sense strand
aagaaggagaagcgugaaa

SEQ ID NO: 2260390 - RNA, 19 nt, Homo sapiens
  misc_RNA (1)...(19): siRNA sense strand
agaucaaggaagagcccaa

SEQ ID NO: 2260391 - RNA, 19 nt, Homo sapiens
  misc_RNA (1)...(19): siRNA sense strand
agaaagaccgagaagccaa

SEQ ID NO: 2260392 - RNA, 19 nt, Homo sapiens
  misc_RNA (1)...(19): siRNA sense strand
ucaagaaggagaagcguga

SEQ ID NO: 2260393 - RNA, 19 nt, Homo sapiens
  misc_RNA (1)...(19): siRNA sense strand
aagagaagagagagacaga

SEQ ID NO: 2260394 - RNA, 19 nt, Homo sapiens
  misc_RNA (1)...(19): siRNA sense strand
augaggaggaagaggccaa

SEQ ID NO: 2260395 - RNA, 19 nt, Homo sapiens
  misc_RNA (1)...(19): siRNA sense strand
ucaccaaggaagaggaacu

SEQ ID NO: 2260396 - RNA, 19 nt, Homo sapiens
  misc_RNA (1)...(19): siRNA sense strand
augacgaaccagauguuaa

SEQ ID NO: 2260397 - RNA, 19 nt, Homo sapiens
  misc_RNA (1)...(19): siRNA sense strand
gagaagcgugaaagggaca

SEQ ID NO: 2260398 - RNA, 19 nt, Homo sapiens
  misc_RNA (1)...(19): siRNA sense strand
ugaaagggacagagaccga

SEQ ID NO: 2260399 - RNA, 19 nt, Homo sapiens
  misc_RNA (1)...(19): siRNA sense strand
aggacauggagguggacau

SEQ ID NO: 2260400 - RNA, 19 nt, Homo sapiens
  misc_RNA (1)...(19): siRNA sense strand
cugugaaagugaaagagga

SEQ ID NO: 2260401 - RNA, 19 nt, Homo sapiens
  misc_RNA (1)...(19): siRNA sense strand
aggagaagcgugaaaggga

SEQ ID NO: 2260402 - RNA, 19 nt, Homo sapiens
  misc_RNA (1)...(19): siRNA sense strand
cacgagaugaggaggaaga

SEQ ID NO: 2260403 - RNA, 19 nt, Homo sapiens
  misc_RNA (1)...(19): siRNA sense strand
ccuuggagacaguaggaca

SEQ ID NO: 2260404 - RNA, 19 nt, Homo sapiens
  misc_RNA (1)...(19): siRNA sense strand
aggaagaggacauggaggu

SEQ ID NO: 2260405 - RNA, 19 nt, Homo sapiens
  misc_RNA (1)...(19): siRNA sense strand
cugcugugaaagugaaaga

SEQ ID NO: 2260406 - RNA, 19 nt, Homo sapiens
  misc_RNA (1)...(19): siRNA sense strand
ugaaagaggagccacgaga

SEQ ID NO: 2260407 - RNA, 19 nt, Homo sapiens
  misc_RNA (1)...(19): siRNA sense strand
cuaucaagacagaggugca

SEQ ID NO: 2260408 - RNA, 19 nt, Homo sapiens
  misc_RNA (1)...(19): siRNA sense strand
ccaaauaucaucagucgga

SEQ ID NO: 2260409 - RNA, 19 nt, Homo sapiens
  misc_RNA (1)...(19): siRNA sense strand
aggaagaggaacugcuguu

SEQ ID NO: 2260410 - RNA, 19 nt, Homo sapiens
  misc_RNA (1)...(19): siRNA sense strand
ggagaaagaccgagaagcc

SEQ ID NO: 2260411 - RNA, 19 nt, Homo sapiens
  misc_RNA (1)...(19): siRNA sense strand
guaacugucaagaaggaga

SEQ ID NO: 2260412 - RNA, 19 nt, Homo sapiens
  misc_RNA (1)...(19): siRNA sense strand
aagaggacauggaggugga

SEQ ID NO: 2260413 - RNA, 19 nt, Homo sapiens
  misc_RNA (1)...(19): siRNA sense strand
gcaagcuacucauccgcaa

SEQ ID NO: 2260414 - RNA, 19 nt, Homo sapiens
  misc_RNA (1)...(19): siRNA sense strand
caucaugaccagugaggaa

SEQ ID NO: 2260415 - RNA, 19 nt, Homo sapiens
  misc_RNA (1)...(19): siRNA sense strand
aagugaagccugagaggaa

SEQ ID NO: 2260416 - RNA, 19 nt, Homo sapiens
  misc_RNA (1)...(19): siRNA sense strand
cuaaagaacuggagcacgu

SEQ ID NO: 2260417 - RNA, 19 nt, Homo sapiens
  misc_RNA (1)...(19): siRNA sense strand
ccgcaggagcagagacaga

SEQ ID NO: 2260418 - RNA, 19 nt, Homo sapiens
  misc_RNA (1)...(19): siRNA sense strand
uggcaauucaagagaaaga

SEQ ID NO: 2260419 - RNA, 19 nt, Homo sapiens
  misc_RNA (1)...(19): siRNA sense strand
cagaaauaaccgggacaaa

SEQ ID NO: 2260420 - RNA, 19 nt, Homo sapiens
  misc_RNA (1)...(19): siRNA sense strand
gggacaaagaccucaggaa

SEQ ID NO: 2260421 - RNA, 19 nt, Homo sapiens
  misc_RNA (1)...(19): siRNA sense strand
gcaugaagucagagaguag

SEQ ID NO: 2260422 - RNA, 19 nt, Homo sapiens
  misc_RNA (1)...(19): siRNA sense strand
gccaaaagacauacaguaa

SEQ ID NO: 2260423 - RNA, 19 nt, Homo sapiens
  misc_RNA (1)...(19): siRNA sense strand
augccaaugaacagaaaua

SEQ ID NO: 2260424 - RNA, 19 nt, Homo sapiens
  misc_RNA (1)...(19): siRNA sense strand
ucaagagaaagaagagcaa

SEQ ID NO: 2260425 - RNA, 19 nt, Homo sapiens
  misc_RNA (1)...(19): siRNA sense strand
gugaagccugagaggaaua

SEQ ID NO: 2260426 - RNA, 19 nt, Homo sapiens
  misc_RNA (1)...(19): siRNA sense strand
gaggaauagccuugguaca

SEQ ID NO: 2260427 - RNA, 19 nt, Homo sapiens
  misc_RNA (1)...(19): siRNA sense strand
uggaaauagcuaaugagaa

SEQ ID NO: 2260428 - RNA, 19 nt, Homo sapiens
  misc_RNA (1)...(19): siRNA sense strand
ccacaaaugcaaaguacca

SEQ ID NO: 2260429 - RNA, 19 nt, Homo sapiens
  misc_RNA (1)...(19): siRNA sense strand
guuugaaaggacacaguua

SEQ ID NO: 2260430 - RNA, 19 nt, Homo sapiens
  misc_RNA (1)...(19): siRNA sense strand
ggacaaagaccucaggaac

SEQ ID NO: 2260431 - RNA, 19 nt, Homo sapiens
  misc_RNA (1)...(19): siRNA sense strand
gcaggauggccgaggcuau

SEQ ID NO: 2260432 - RNA, 19 nt, Homo sapiens
  misc_RNA (1)...(19): siRNA sense strand
ccucagucacacagaguau

SEQ ID NO: 2260433 - RNA, 19 nt, Homo sapiens
  misc_RNA (1)...(19): siRNA sense strand
aggaauagccuugguacaa

SEQ ID NO: 2260434 - RNA, 19 nt, Homo sapiens
  misc_RNA (1)...(19): siRNA sense strand
cgaaacagacacagccaga

SEQ ID NO: 2260435 - RNA, 19 nt, Homo sapiens
  misc_RNA (1)...(19): siRNA sense strand
caagaauaugcaugucaaa

SEQ ID NO: 2260436 - RNA, 19 nt, Homo sapiens
  misc_RNA (1)...(19): siRNA sense strand
gagaaagaagcuguggaaa

SEQ ID NO: 2260437 - RNA, 19 nt, Homo sapiens
  misc_RNA (1)...(19): siRNA sense strand
gagcaugaagucagagagu

SEQ ID NO: 2260438 - RNA, 19 nt, Homo sapiens
  misc_RNA (1)...(19): siRNA sense strand
ggaacaagucgaaugggca

SEQ ID NO: 2260439 - RNA, 19 nt, Homo sapiens
  misc_RNA (1)...(19): siRNA sense strand
aggaagaaguggccaccuu

SEQ ID NO: 2260440 - RNA, 19 nt, Homo sapiens
  misc_RNA (1)...(19): siRNA sense strand
agcaaacacgccugggaua

SEQ ID NO: 2260441 - RNA, 19 nt, Homo sapiens
  misc_RNA (1)...(19): siRNA sense strand
uguacagucaggaggcuua

SEQ ID NO: 2260442 - RNA, 19 nt, Homo sapiens
  misc_RNA (1)...(19): siRNA sense strand
uggccagcucugagaacua

SEQ ID NO: 2260443 - RNA, 19 nt, Homo sapiens
  misc_RNA (1)...(19): siRNA sense strand
gcucaaaccuaaaccucca

SEQ ID NO: 2260444 - RNA, 19 nt, Homo sapiens
  misc_RNA (1)...(19): siRNA sense strand
aguccaauguaguguuuga

SEQ ID NO: 2260445 - RNA, 19 nt, Homo sapiens
  misc_RNA (1)...(19): siRNA sense strand
cggaaucgccauagcgcca

SEQ ID NO: 2260446 - RNA, 19 nt, Homo sapiens
  misc_RNA (1)...(19): siRNA sense strand
agucaggaggcuuagggaa

SEQ ID NO: 2260447 - RNA, 19 nt, Homo sapiens
  misc_RNA (1)...(19): siRNA sense strand
aggaagcauuggagaguag

SEQ ID NO: 2260448 - RNA, 19 nt, Homo sapiens
  misc_RNA (1)...(19): siRNA sense strand
aagagaaagaagagcaauc

SEQ ID NO: 2260449 - RNA, 19 nt, Homo sapiens
  misc_RNA (1)...(19): siRNA sense strand
gcuaaugagaaaagacaca

SEQ ID NO: 2260450 - RNA, 19 nt, Homo sapiens
  misc_RNA (1)...(19): siRNA sense strand
ccuaucaggauguggcuuu

SEQ ID NO: 2260451 - RNA, 19 nt, Homo sapiens
  misc_RNA (1)...(19): siRNA sense strand
cuucaaaggaacaagucga

SEQ ID NO: 2260452 - RNA, 19 nt, Homo sapiens
  misc_RNA (1)...(19): siRNA sense strand
guggauacguacugcagga

SEQ ID NO: 2260453 - RNA, 19 nt, Homo sapiens
  misc_RNA (1)...(19): siRNA sense strand
aaaugcuuguagugugaaa

SEQ ID NO: 2260454 - RNA, 19 nt, Homo sapiens
  misc_RNA (1)...(19): siRNA sense strand
agcacuaccucgagcauga

SEQ ID NO: 2260455 - RNA, 19 nt, Homo sapiens
  misc_RNA (1)...(19): siRNA sense strand
cccuacagguggucaguga

SEQ ID NO: 2260456 - RNA, 19 nt, Homo sapiens
  misc_RNA (1)...(19): siRNA sense strand
cacaauucagagagggaga

SEQ ID NO: 2260457 - RNA, 19 nt, Homo sapiens
  misc_RNA (1)...(19): siRNA sense strand
ccaacaagccagguggaga

SEQ ID NO: 2260458 - RNA, 19 nt, Homo sapiens
  misc_RNA (1)...(19): siRNA sense strand
ucagagaguagcagccauu

SEQ ID NO: 2260459 - RNA, 19 nt, Homo sapiens
  misc_RNA (1)...(19): siRNA sense strand
agaaagaagagcaauccau

SEQ ID NO: 2260460 - RNA, 19 nt, Homo sapiens
  misc_RNA (1)...(19): siRNA sense strand
agagacagacacagcucaa

SEQ ID NO: 2260461 - RNA, 19 nt, Homo sapiens
  misc_RNA (1)...(19): siRNA sense strand
uucugaaagauguggcuaa

SEQ ID NO: 2260462 - RNA, 19 nt, Homo sapiens
  misc_RNA (1)...(19): siRNA sense strand
uggagagaccaaaucuaua

SEQ ID NO: 2260463 - RNA, 19 nt, Homo sapiens
  misc_RNA (1)...(19): siRNA sense strand
cagcaaauguagauaucag

SEQ ID NO: 2260464 - RNA, 19 nt, Homo sapiens
  misc_RNA (1)...(19): siRNA sense strand
gcaaaguaccaggcugcaa

SEQ ID NO: 2260465 - RNA, 19 nt, Homo sapiens
  misc_RNA (1)...(19): siRNA sense strand
caauucaagagaaagaaga

SEQ ID NO: 2260466 - RNA, 19 nt, Homo sapiens
  misc_RNA (1)...(19): siRNA sense strand
ucacuaaguuugaaaggac

SEQ ID NO: 2260467 - RNA, 19 nt, Homo sapiens
  misc_RNA (1)...(19): siRNA sense strand
ggaggacagugaugggaac

SEQ ID NO: 2260468 - RNA, 19 nt, Homo sapiens
  misc_RNA (1)...(19): siRNA sense strand
agagaaagauucaggaaaa

SEQ ID NO: 2260469 - RNA, 19 nt, Homo sapiens
  misc_RNA (1)...(19): siRNA sense strand
guucaggaguagagccaaa

SEQ ID NO: 2260470 - RNA, 19 nt, Homo sapiens
  misc_RNA (1)...(19): siRNA sense strand
ggaaucaauggaagagaaa

SEQ ID NO: 2260471 - RNA, 19 nt, Homo sapiens
  misc_RNA (1)...(19): siRNA sense strand
cagaaagagaggagcaaga

SEQ ID NO: 2260472 - RNA, 19 nt, Homo sapiens
  misc_RNA (1)...(19): siRNA sense strand
cggaaguacagcugugaua

SEQ ID NO: 2260473 - RNA, 19 nt, Homo sapiens
  misc_RNA (1)...(19): siRNA sense strand
cugaaguacuacagagaca

SEQ ID NO: 2260474 - RNA, 19 nt, Homo sapiens
  misc_RNA (1)...(19): siRNA sense strand
aaucaauggaagagaaaga

SEQ ID NO: 2260475 - RNA, 19 nt, Homo sapiens
  misc_RNA (1)...(19): siRNA sense strand
gaaaugaaacagagcaaaa

SEQ ID NO: 2260476 - RNA, 19 nt, Homo sapiens
  misc_RNA (1)...(19): siRNA sense strand
ccgaaauagaaaugaaaca

SEQ ID NO: 2260477 - RNA, 19 nt, Homo sapiens
  misc_RNA (1)...(19): siRNA sense strand
cagagaaagauucaggaaa

SEQ ID NO: 2260478 - RNA, 19 nt, Homo sapiens
  misc_RNA (1)...(19): siRNA sense strand
ccaacagaauugagcaaca

SEQ ID NO: 2260479 - RNA, 19 nt, Homo sapiens
  misc_RNA (1)...(19): siRNA sense strand
agaaagagcuggaacgacu

SEQ ID NO: 2260480 - RNA, 19 nt, Homo sapiens
  misc_RNA (1)...(19): siRNA sense strand
aguuauagcugacaagaau

SEQ ID NO: 2260481 - RNA, 19 nt, Homo sapiens
  misc_RNA (1)...(19): siRNA sense strand
gguugaaacuacucagaga

SEQ ID NO: 2260482 - RNA, 19 nt, Homo sapiens
  misc_RNA (1)...(19): siRNA sense strand
cagaaaaguugcacagauu

SEQ ID NO: 2260483 - RNA, 19 nt, Homo sapiens
  misc_RNA (1)...(19): siRNA sense strand
acauaaacaugaagagugu

SEQ ID NO: 2260484 - RNA, 19 nt, Homo sapiens
  misc_RNA (1)...(19): siRNA sense strand
uagaaaugaaacagagcaa

SEQ ID NO: 2260485 - RNA, 19 nt, Homo sapiens
  misc_RNA (1)...(19): siRNA sense strand
ugacaacagaacagacaaa

SEQ ID NO: 2260486 - RNA, 19 nt, Homo sapiens
  misc_RNA (1)...(19): siRNA sense strand
gguuaacuauugaggccua

SEQ ID NO: 2260487 - RNA, 19 nt, Homo sapiens
  misc_RNA (1)...(19): siRNA sense strand
ucacagaacaggagaaacu

SEQ ID NO: 2260488 - RNA, 19 nt, Homo sapiens
  misc_RNA (1)...(19): siRNA sense strand
aaacauuagacuucgguua

SEQ ID NO: 2260489 - RNA, 19 nt, Homo sapiens
  misc_RNA (1)...(19): siRNA sense strand
cauuaguccuacugggaau

SEQ ID NO: 2260490 - RNA, 19 nt, Homo sapiens
  misc_RNA (1)...(19): siRNA sense strand
cugcagaagcccucguaaa

SEQ ID NO: 2260491 - RNA, 19 nt, Homo sapiens
  misc_RNA (1)...(19): siRNA sense strand
aggaaucaauggaagagaa

SEQ ID NO: 2260492 - RNA, 19 nt, Homo sapiens
  misc_RNA (1)...(19): siRNA sense strand
cagcuacagugaaggacua

SEQ ID NO: 2260493 - RNA, 19 nt, Homo sapiens
  misc_RNA (1)...(19): siRNA sense strand
ggaagagaaagaagaacuu

SEQ ID NO: 2260494 - RNA, 19 nt, Homo sapiens
  misc_RNA (1)...(19): siRNA sense strand
ccuaaugggaaaagcaaaa

SEQ ID NO: 2260495 - RNA, 19 nt, Homo sapiens
  misc_RNA (1)...(19): siRNA sense strand
gcagaaagcuaaagccauc

SEQ ID NO: 2260496 - RNA, 19 nt, Homo sapiens
  misc_RNA (1)...(19): siRNA sense strand
cuuagagggcauuggcaaa

SEQ ID NO: 2260497 - RNA, 19 nt, Homo sapiens
  misc_RNA (1)...(19): siRNA sense strand
ccaacagaguucagaggga

SEQ ID NO: 2260498 - RNA, 19 nt, Homo sapiens
  misc_RNA (1)...(19): siRNA sense strand
gcaaaauggacgaguguca

SEQ ID NO: 2260499 - RNA, 19 nt, Homo sapiens
  misc_RNA (1)...(19): siRNA sense strand
agauauaacacaacuggaa

SEQ ID NO: 2260500 - RNA, 19 nt, Homo sapiens
  misc_RNA (1)...(19): siRNA sense strand
agagaugauuugcaugaaa

SEQ ID NO: 2260501 - RNA, 19 nt, Homo sapiens
  misc_RNA (1)...(19): siRNA sense strand
cagugaaggacuaugaauu

SEQ ID NO: 2260502 - RNA, 19 nt, Homo sapiens
  misc_RNA (1)...(19): siRNA sense strand
caucaggauuaguuccaaa

SEQ ID NO: 2260503 - RNA, 19 nt, Homo sapiens
  misc_RNA (1)...(19): siRNA sense strand
augacuggagugagagaaa

SEQ ID NO: 2260504 - RNA, 19 nt, Homo sapiens
  misc_RNA (1)...(19): siRNA sense strand
cagaacaggagaaacuaaa

SEQ ID NO: 2260505 - RNA, 19 nt, Homo sapiens
  misc_RNA (1)...(19): siRNA sense strand
ggaacgacuuaaagaugau

SEQ ID NO: 2260506 - RNA, 19 nt, Homo sapiens
  misc_RNA (1)...(19): siRNA sense strand
cagacaaagcucaugauau

SEQ ID NO: 2260507 - RNA, 19 nt, Homo sapiens
  misc_RNA (1)...(19): siRNA sense strand
gagaggagcaagaggaauc

SEQ ID NO: 2260508 - RNA, 19 nt, Homo sapiens
  misc_RNA (1)...(19): siRNA sense strand
ucagaaugaagcagaaauu

SEQ ID NO: 2260509 - RNA, 19 nt, Homo sapiens
  misc_RNA (1)...(19): siRNA sense strand
augcugaauuaaugagaga

SEQ ID NO: 2260510 - RNA, 19 nt, Homo sapiens
  misc_RNA (1)...(19): siRNA sense strand
cgugcuaaauggaagguca

SEQ ID NO: 2260511 - RNA, 19 nt, Homo sapiens
  misc_RNA (1)...(19): siRNA sense strand
acaaagaagcgguggaccu

SEQ ID NO: 2260512 - RNA, 19 nt, Homo sapiens
  misc_RNA (1)...(19): siRNA sense strand
ggacuaugaauuacaaaca

SEQ ID NO: 2260513 - RNA, 19 nt, Homo sapiens
  misc_RNA (1)...(19): siRNA sense strand
gagcaagaggaaucaguuu

SEQ ID NO: 2260514 - RNA, 19 nt, Homo sapiens
  misc_RNA (1)...(19): siRNA sense strand
acaggagaaacuaaagaaa

SEQ ID NO: 2260515 - RNA, 19 nt, Homo sapiens
  misc_RNA (1)...(19): siRNA sense strand
gugaagaagaagcaguuau

SEQ ID NO: 2260516 - RNA, 19 nt, Homo sapiens
  misc_RNA (1)...(19): siRNA sense strand
uugaaacuacucagagaaa

SEQ ID NO: 2260517 - RNA, 19 nt, Homo sapiens
  misc_RNA (1)...(19): siRNA sense strand
aaugagagaacuugaucaa

SEQ ID NO: 2260518 - RNA, 19 nt, Homo sapiens
  misc_RNA (1)...(19): siRNA sense strand
caguuauagcugacaagaa

SEQ ID NO: 2260519 - RNA, 19 nt, Homo sapiens
  misc_RNA (1)...(19): siRNA sense strand
gcagcuacuucuagaaaau

SEQ ID NO: 2260520 - RNA, 19 nt, Homo sapiens
  misc_RNA (1)...(19): siRNA sense strand
aggcagaucaauugguaca

SEQ ID NO: 2260521 - RNA, 19 nt, Homo sapiens
  misc_RNA (1)...(19): siRNA sense strand
caauggaagagaaagaaga

SEQ ID NO: 2260522 - RNA, 19 nt, Homo sapiens
  misc_RNA (1)...(19): siRNA sense strand
agacaaugcuaccugguga

SEQ ID NO: 2260523 - RNA, 19 nt, Homo sapiens
  misc_RNA (1)...(19): siRNA sense strand
gcacagaccuuacacccua

SEQ ID NO: 2260524 - RNA, 19 nt, Homo sapiens
  misc_RNA (1)...(19): siRNA sense strand
cagauuagagagucaguau

SEQ ID NO: 2260525 - RNA, 19 nt, Homo sapiens
  misc_RNA (1)...(19): siRNA sense strand
cugcagaaagagaggagca

SEQ ID NO: 2260526 - RNA, 19 nt, Homo sapiens
  misc_RNA (1)...(19): siRNA sense strand
gaugaguugcagaaagcua

SEQ ID NO: 2260527 - RNA, 19 nt, Homo sapiens
  misc_RNA (1)...(19): siRNA sense strand
gcagaaauugcuggguaua

SEQ ID NO: 2260528 - RNA, 19 nt, Homo sapiens
  misc_RNA (1)...(19): siRNA sense strand
cagaauugagcaacaguau

SEQ ID NO: 2260529 - RNA, 19 nt, Homo sapiens
  misc_RNA (1)...(19): siRNA sense strand
uguccgaaauagaaaugaa

SEQ ID NO: 2260530 - RNA, 19 nt, Homo sapiens
  misc_RNA (1)...(19): siRNA sense strand
agagaaagauucaggaaaa

SEQ ID NO: 2260531 - RNA, 19 nt, Homo sapiens
  misc_RNA (1)...(19): siRNA sense strand
guucaggaguagagccaaa

SEQ ID NO: 2260532 - RNA, 19 nt, Homo sapiens
  misc_RNA (1)...(19): siRNA sense strand
ggaaucaauggaagagaaa

SEQ ID NO: 2260533 - RNA, 19 nt, Homo sapiens
  misc_RNA (1)...(19): siRNA sense strand
cagaaagagaggagcaaga

SEQ ID NO: 2260534 - RNA, 19 nt, Homo sapiens
  misc_RNA (1)...(19): siRNA sense strand
cggaaguacagcugugaua

SEQ ID NO: 2260535 - RNA, 19 nt, Homo sapiens
  misc_RNA (1)...(19): siRNA sense strand
cugaaguacuacagagaca

SEQ ID NO: 2260536 - RNA, 19 nt, Homo sapiens
  misc_RNA (1)...(19): siRNA sense strand
aaucaauggaagagaaaga

SEQ ID NO: 2260537 - RNA, 19 nt, Homo sapiens
  misc_RNA (1)...(19): siRNA sense strand
gaaaugaaacagagcaaaa

SEQ ID NO: 2260538 - RNA, 19 nt, Homo sapiens
  misc_RNA (1)...(19): siRNA sense strand
ccgaaauagaaaugaaaca

SEQ ID NO: 2260539 - RNA, 19 nt, Homo sapiens
  misc_RNA (1)...(19): siRNA sense strand
cagagaaagauucaggaaa

SEQ ID NO: 2260540 - RNA, 19 nt, Homo sapiens
  misc_RNA (1)...(19): siRNA sense strand
ccaacagaauugagcaaca

SEQ ID NO: 2260541 - RNA, 19 nt, Homo sapiens
  misc_RNA (1)...(19): siRNA sense strand
agaaagagcuggaacgacu

SEQ ID NO: 2260542 - RNA, 19 nt, Homo sapiens
  misc_RNA (1)...(19): siRNA sense strand
aguuauagcugacaagaau

SEQ ID NO: 2260543 - RNA, 19 nt, Homo sapiens
  misc_RNA (1)...(19): siRNA sense strand
gguugaaacuacucagaga

SEQ ID NO: 2260544 - RNA, 19 nt, Homo sapiens
  misc_RNA (1)...(19): siRNA sense strand
cagaaaaguugcacagauu

SEQ ID NO: 2260545 - RNA, 19 nt, Homo sapiens
  misc_RNA (1)...(19): siRNA sense strand
acauaaacaugaagagugu

SEQ ID NO: 2260546 - RNA, 19 nt, Homo sapiens
  misc_RNA (1)...(19): siRNA sense strand
uagaaaugaaacagagcaa

SEQ ID NO: 2260547 - RNA, 19 nt, Homo sapiens
  misc_RNA (1)...(19): siRNA sense strand
ugacaacagaacagacaaa

SEQ ID NO: 2260548 - RNA, 19 nt, Homo sapiens
  misc_RNA (1)...(19): siRNA sense strand
gguuaacuauugaggccua

SEQ ID NO: 2260549 - RNA, 19 nt, Homo sapiens
  misc_RNA (1)...(19): siRNA sense strand
ucacagaacaggagaaacu

SEQ ID NO: 2260550 - RNA, 19 nt, Homo sapiens
  misc_RNA (1)...(19): siRNA sense strand
aaacauuagacuucgguua

SEQ ID NO: 2260551 - RNA, 19 nt, Homo sapiens
  misc_RNA (1)...(19): siRNA sense strand
cauuaguccuacugggaau

SEQ ID NO: 2260552 - RNA, 19 nt, Homo sapiens
  misc_RNA (1)...(19): siRNA sense strand
cugcagaagcccucguaaa

SEQ ID NO: 2260553 - RNA, 19 nt, Homo sapiens
  misc_RNA (1)...(19): siRNA sense strand
aggaaucaauggaagagaa

SEQ ID NO: 2260554 - RNA, 19 nt, Homo sapiens
  misc_RNA (1)...(19): siRNA sense strand
cagcuacagugaaggacua

SEQ ID NO: 2260555 - RNA, 19 nt, Homo sapiens
  misc_RNA (1)...(19): siRNA sense strand
ggaagagaaagaagaacuu

SEQ ID NO: 2260556 - RNA, 19 nt, Homo sapiens
  misc_RNA (1)...(19): siRNA sense strand
ccuaaugggaaaagcaaaa

SEQ ID NO: 2260557 - RNA, 19 nt, Homo sapiens
  misc_RNA (1)...(19): siRNA sense strand
gcagaaagcuaaagccauc

SEQ ID NO: 2260558 - RNA, 19 nt, Homo sapiens
  misc_RNA (1)...(19): siRNA sense strand
cuuagagggcauuggcaaa

SEQ ID NO: 2260559 - RNA, 19 nt, Homo sapiens
  misc_RNA (1)...(19): siRNA sense strand
ccaacagaguucagaggga

SEQ ID NO: 2260560 - RNA, 19 nt, Homo sapiens
  misc_RNA (1)...(19): siRNA sense strand
gcaaaauggacgaguguca

SEQ ID NO: 2260561 - RNA, 19 nt, Homo sapiens
  misc_RNA (1)...(19): siRNA sense strand
agauauaacacaacuggaa

SEQ ID NO: 2260562 - RNA, 19 nt, Homo sapiens
  misc_RNA (1)...(19): siRNA sense strand
agagaugauuugcaugaaa

SEQ ID NO: 2260563 - RNA, 19 nt, Homo sapiens
  misc_RNA (1)...(19): siRNA sense strand
cagugaaggacuaugaauu

SEQ ID NO: 2260564 - RNA, 19 nt, Homo sapiens
  misc_RNA (1)...(19): siRNA sense strand
caucaggauuaguuccaaa

SEQ ID NO: 2260565 - RNA, 19 nt, Homo sapiens
  misc_RNA (1)...(19): siRNA sense strand
augacuggagugagagaaa

SEQ ID NO: 2260566 - RNA, 19 nt, Homo sapiens
  misc_RNA (1)...(19): siRNA sense strand
cagaacaggagaaacuaaa

SEQ ID NO: 2260567 - RNA, 19 nt, Homo sapiens
  misc_RNA (1)...(19): siRNA sense strand
ggaacgacuuaaagaugau

SEQ ID NO: 2260568 - RNA, 19 nt, Homo sapiens
  misc_RNA (1)...(19): siRNA sense strand
cagacaaagcucaugauau

SEQ ID NO: 2260569 - RNA, 19 nt, Homo sapiens
  misc_RNA (1)...(19): siRNA sense strand
gagaggagcaagaggaauc

SEQ ID NO: 2260570 - RNA, 19 nt, Homo sapiens
  misc_RNA (1)...(19): siRNA sense strand
ucagaaugaagcagaaauu

SEQ ID NO: 2260571 - RNA, 19 nt, Homo sapiens
  misc_RNA (1)...(19): siRNA sense strand
augcugaauuaaugagaga

SEQ ID NO: 2260572 - RNA, 19 nt, Homo sapiens
  misc_RNA (1)...(19): siRNA sense strand
cgugcuaaauggaagguca

SEQ ID NO: 2260573 - RNA, 19 nt, Homo sapiens
  misc_RNA (1)...(19): siRNA sense strand
acaaagaagcgguggaccu

SEQ ID NO: 2260574 - RNA, 19 nt, Homo sapiens
  misc_RNA (1)...(19): siRNA sense strand
ggacuaugaauuacaaaca

SEQ ID NO: 2260575 - RNA, 19 nt, Homo sapiens
  misc_RNA (1)...(19): siRNA sense strand
gagcaagaggaaucaguuu

SEQ ID NO: 2260576 - RNA, 19 nt, Homo sapiens
  misc_RNA (1)...(19): siRNA sense strand
acaggagaaacuaaagaaa

SEQ ID NO: 2260577 - RNA, 19 nt, Homo sapiens
  misc_RNA (1)...(19): siRNA sense strand
gugaagaagaagcaguuau

SEQ ID NO: 2260578 - RNA, 19 nt, Homo sapiens
  misc_RNA (1)...(19): siRNA sense strand
uugaaacuacucagagaaa

SEQ ID NO: 2260579 - RNA, 19 nt, Homo sapiens
  misc_RNA (1)...(19): siRNA sense strand
aaugagagaacuugaucaa

SEQ ID NO: 2260580 - RNA, 19 nt, Homo sapiens
  misc_RNA (1)...(19): siRNA sense strand
caguuauagcugacaagaa

SEQ ID NO: 2260581 - RNA, 19 nt, Homo sapiens
  misc_RNA (1)...(19): siRNA sense strand
gcagcuacuucuagaaaau

SEQ ID NO: 2260582 - RNA, 19 nt, Homo sapiens
  misc_RNA (1)...(19): siRNA sense strand
aggcagaucaauugguaca

SEQ ID NO: 2260583 - RNA, 19 nt, Homo sapiens
  misc_RNA (1)...(19): siRNA sense strand
caauggaagagaaagaaga

SEQ ID NO: 2260584 - RNA, 19 nt, Homo sapiens
  misc_RNA (1)...(19): siRNA sense strand
agacaaugcuaccugguga

SEQ ID NO: 2260585 - RNA, 19 nt, Homo sapiens
  misc_RNA (1)...(19): siRNA sense strand
gcacagaccuuacacccua

SEQ ID NO: 2260586 - RNA, 19 nt, Homo sapiens
  misc_RNA (1)...(19): siRNA sense strand
cagauuagagagucaguau

SEQ ID NO: 2260587 - RNA, 19 nt, Homo sapiens
  misc_RNA (1)...(19): siRNA sense strand
cugcagaaagagaggagca

SEQ ID NO: 2260588 - RNA, 19 nt, Homo sapiens
  misc_RNA (1)...(19): siRNA sense strand
gaugaguugcagaaagcua

SEQ ID NO: 2260589 - RNA, 19 nt, Homo sapiens
  misc_RNA (1)...(19): siRNA sense strand
gcagaaauugcuggguaua

SEQ ID NO: 2260590 - RNA, 19 nt, Homo sapiens
  misc_RNA (1)...(19): siRNA sense strand
cagaauugagcaacaguau

SEQ ID NO: 2260591 - RNA, 19 nt, Homo sapiens
  misc_RNA (1)...(19): siRNA sense strand
uguccgaaauagaaaugaa

SEQ ID NO: 2260592 - RNA, 19 nt, Homo sapiens
  misc_RNA (1)...(19): siRNA sense strand
agagaaagauucaggaaaa

SEQ ID NO: 2260593 - RNA, 19 nt, Homo sapiens
  misc_RNA (1)...(19): siRNA sense strand
guucaggaguagagccaaa

SEQ ID NO: 2260594 - RNA, 19 nt, Homo sapiens
  misc_RNA (1)...(19): siRNA sense strand
ggaaucaauggaagagaaa

SEQ ID NO: 2260595 - RNA, 19 nt, Homo sapiens
  misc_RNA (1)...(19): siRNA sense strand
cagaaagagaggagcaaga

SEQ ID NO: 2260596 - RNA, 19 nt, Homo sapiens
  misc_RNA (1)...(19): siRNA sense strand
cggaaguacagcugugaua

SEQ ID NO: 2260597 - RNA, 19 nt, Homo sapiens
  misc_RNA (1)...(19): siRNA sense strand
cugaaguacuacagagaca

SEQ ID NO: 2260598 - RNA, 19 nt, Homo sapiens
  misc_RNA (1)...(19): siRNA sense strand
aaucaauggaagagaaaga

SEQ ID NO: 2260599 - RNA, 19 nt, Homo sapiens
  misc_RNA (1)...(19): siRNA sense strand
gaaaugaaacagagcaaaa

SEQ ID NO: 2260600 - RNA, 19 nt, Homo sapiens
  misc_RNA (1)...(19): siRNA sense strand
ccgaaauagaaaugaaaca

SEQ ID NO: 2260601 - RNA, 19 nt, Homo sapiens
  misc_RNA (1)...(19): siRNA sense strand
cagagaaagauucaggaaa

SEQ ID NO: 2260602 - RNA, 19 nt, Homo sapiens
  misc_RNA (1)...(19): siRNA sense strand
ccaacagaauugagcaaca

SEQ ID NO: 2260603 - RNA, 19 nt, Homo sapiens
  misc_RNA (1)...(19): siRNA sense strand
agaaagagcuggaacgacu

SEQ ID NO: 2260604 - RNA, 19 nt, Homo sapiens
  misc_RNA (1)...(19): siRNA sense strand
aguuauagcugacaagaau

SEQ ID NO: 2260605 - RNA, 19 nt, Homo sapiens
  misc_RNA (1)...(19): siRNA sense strand
gguugaaacuacucagaga

SEQ ID NO: 2260606 - RNA, 19 nt, Homo sapiens
  misc_RNA (1)...(19): siRNA sense strand
cagaaaaguugcacagauu

SEQ ID NO: 2260607 - RNA, 19 nt, Homo sapiens
  misc_RNA (1)...(19): siRNA sense strand
acauaaacaugaagagugu

SEQ ID NO: 2260608 - RNA, 19 nt, Homo sapiens
  misc_RNA (1)...(19): siRNA sense strand
uagaaaugaaacagagcaa

SEQ ID NO: 2260609 - RNA, 19 nt, Homo sapiens
  misc_RNA (1)...(19): siRNA sense strand
ugacaacagaacagacaaa

SEQ ID NO: 2260610 - RNA, 19 nt, Homo sapiens
  misc_RNA (1)...(19): siRNA sense strand
gguuaacuauugaggccua

SEQ ID NO: 2260611 - RNA, 19 nt, Homo sapiens
  misc_RNA (1)...(19): siRNA sense strand
ucacagaacaggagaaacu

SEQ ID NO: 2260612 - RNA, 19 nt, Homo sapiens
  misc_RNA (1)...(19): siRNA sense strand
aaacauuagacuucgguua

SEQ ID NO: 2260613 - RNA, 19 nt, Homo sapiens
  misc_RNA (1)...(19): siRNA sense strand
cauuaguccuacugggaau

SEQ ID NO: 2260614 - RNA, 19 nt, Homo sapiens
  misc_RNA (1)...(19): siRNA sense strand
cugcagaagcccucguaaa

SEQ ID NO: 2260615 - RNA, 19 nt, Homo sapiens
  misc_RNA (1)...(19): siRNA sense strand
aggaaucaauggaagagaa

SEQ ID NO: 2260616 - RNA, 19 nt, Homo sapiens
  misc_RNA (1)...(19): siRNA sense strand
cagcuacagugaaggacua

SEQ ID NO: 2260617 - RNA, 19 nt, Homo sapiens
  misc_RNA (1)...(19): siRNA sense strand
ggaagagaaagaagaacuu

SEQ ID NO: 2260618 - RNA, 19 nt, Homo sapiens
  misc_RNA (1)...(19): siRNA sense strand
ccuaaugggaaaagcaaaa

SEQ ID NO: 2260619 - RNA, 19 nt, Homo sapiens
  misc_RNA (1)...(19): siRNA sense strand
gcagaaagcuaaagccauc

SEQ ID NO: 2260620 - RNA, 19 nt, Homo sapiens
  misc_RNA (1)...(19): siRNA sense strand
cuuagagggcauuggcaaa

SEQ ID NO: 2260621 - RNA, 19 nt, Homo sapiens
  misc_RNA (1)...(19): siRNA sense strand
ccaacagaguucagaggga

SEQ ID NO: 2260622 - RNA, 19 nt, Homo sapiens
  misc_RNA (1)...(19): siRNA sense strand
gcaaaauggacgaguguca

SEQ ID NO: 2260623 - RNA, 19 nt, Homo sapiens
  misc_RNA (1)...(19): siRNA sense strand
agauauaacacaacuggaa

SEQ ID NO: 2260624 - RNA, 19 nt, Homo sapiens
  misc_RNA (1)...(19): siRNA sense strand
agagaugauuugcaugaaa

SEQ ID NO: 2260625 - RNA, 19 nt, Homo sapiens
  misc_RNA (1)...(19): siRNA sense strand
cagugaaggacuaugaauu

SEQ ID NO: 2260626 - RNA, 19 nt, Homo sapiens
  misc_RNA (1)...(19): siRNA sense strand
caucaggauuaguuccaaa

SEQ ID NO: 2260627 - RNA, 19 nt, Homo sapiens
  misc_RNA (1)...(19): siRNA sense strand
augacuggagugagagaaa

SEQ ID NO: 2260628 - RNA, 19 nt, Homo sapiens
  misc_RNA (1)...(19): siRNA sense strand
cagaacaggagaaacuaaa

SEQ ID NO: 2260629 - RNA, 19 nt, Homo sapiens
  misc_RNA (1)...(19): siRNA sense strand
ggaacgacuuaaagaugau

SEQ ID NO: 2260630 - RNA, 19 nt, Homo sapiens
  misc_RNA (1)...(19): siRNA sense strand
cagacaaagcucaugauau

SEQ ID NO: 2260631 - RNA, 19 nt, Homo sapiens
  misc_RNA (1)...(19): siRNA sense strand
gagaggagcaagaggaauc

SEQ ID NO: 2260632 - RNA, 19 nt, Homo sapiens
  misc_RNA (1)...(19): siRNA sense strand
ucagaaugaagcagaaauu

SEQ ID NO: 2260633 - RNA, 19 nt, Homo sapiens
  misc_RNA (1)...(19): siRNA sense strand
augcugaauuaaugagaga

SEQ ID NO: 2260634 - RNA, 19 nt, Homo sapiens
  misc_RNA (1)...(19): siRNA sense strand
cgugcuaaauggaagguca

SEQ ID NO: 2260635 - RNA, 19 nt, Homo sapiens
  misc_RNA (1)...(19): siRNA sense strand
acaaagaagcgguggaccu

SEQ ID NO: 2260636 - RNA, 19 nt, Homo sapiens
  misc_RNA (1)...(19): siRNA sense strand
ggacuaugaauuacaaaca

SEQ ID NO: 2260637 - RNA, 19 nt, Homo sapiens
  misc_RNA (1)...(19): siRNA sense strand
gagcaagaggaaucaguuu

SEQ ID NO: 2260638 - RNA, 19 nt, Homo sapiens
  misc_RNA (1)...(19): siRNA sense strand
acaggagaaacuaaagaaa

SEQ ID NO: 2260639 - RNA, 19 nt, Homo sapiens
  misc_RNA (1)...(19): siRNA sense strand
gugaagaagaagcaguuau

SEQ ID NO: 2260640 - RNA, 19 nt, Homo sapiens
  misc_RNA (1)...(19): siRNA sense strand
uugaaacuacucagagaaa

SEQ ID NO: 2260641 - RNA, 19 nt, Homo sapiens
  misc_RNA (1)...(19): siRNA sense strand
aaugagagaacuugaucaa

SEQ ID NO: 2260642 - RNA, 19 nt, Homo sapiens
  misc_RNA (1)...(19): siRNA sense strand
caguuauagcugacaagaa

SEQ ID NO: 2260643 - RNA, 19 nt, Homo sapiens
  misc_RNA (1)...(19): siRNA sense strand
gcagcuacuucuagaaaau

SEQ ID NO: 2260644 - RNA, 19 nt, Homo sapiens
  misc_RNA (1)...(19): siRNA sense strand
aggcagaucaauugguaca

SEQ ID NO: 2260645 - RNA, 19 nt, Homo sapiens
  misc_RNA (1)...(19): siRNA sense strand
caauggaagagaaagaaga

SEQ ID NO: 2260646 - RNA, 19 nt, Homo sapiens
  misc_RNA (1)...(19): siRNA sense strand
agacaaugcuaccugguga

SEQ ID NO: 2260647 - RNA, 19 nt, Homo sapiens
  misc_RNA (1)...(19): siRNA sense strand
gcacagaccuuacacccua

SEQ ID NO: 2260648 - RNA, 19 nt, Homo sapiens
  misc_RNA (1)...(19): siRNA sense strand
cagauuagagagucaguau

SEQ ID NO: 2260649 - RNA, 19 nt, Homo sapiens
  misc_RNA (1)...(19): siRNA sense strand
cugcagaaagagaggagca

SEQ ID NO: 2260650 - RNA, 19 nt, Homo sapiens
  misc_RNA (1)...(19): siRNA sense strand
gaugaguugcagaaagcua

SEQ ID NO: 2260651 - RNA, 19 nt, Homo sapiens
  misc_RNA (1)...(19): siRNA sense strand
gcagaaauugcuggguaua

SEQ ID NO: 2260652 - RNA, 19 nt, Homo sapiens
  misc_RNA (1)...(19): siRNA sense strand
cagaauugagcaacaguau

SEQ ID NO: 2260653 - RNA, 19 nt, Homo sapiens
  misc_RNA (1)...(19): siRNA sense strand
uguccgaaauagaaaugaa

SEQ ID NO: 2260654 - RNA, 19 nt, Homo sapiens
  misc_RNA (1)...(19): siRNA sense strand
agagaaagauucaggaaaa

SEQ ID NO: 2260655 - RNA, 19 nt, Homo sapiens
  misc_RNA (1)...(19): siRNA sense strand
guucaggaguagagccaaa

SEQ ID NO: 2260656 - RNA, 19 nt, Homo sapiens
  misc_RNA (1)...(19): siRNA sense strand
ggaaucaauggaagagaaa

SEQ ID NO: 2260657 - RNA, 19 nt, Homo sapiens
  misc_RNA (1)...(19): siRNA sense strand
cagaaagagaggagcaaga

SEQ ID NO: 2260658 - RNA, 19 nt, Homo sapiens
  misc_RNA (1)...(19): siRNA sense strand
cggaaguacagcugugaua

SEQ ID NO: 2260659 - RNA, 19 nt, Homo sapiens
  misc_RNA (1)...(19): siRNA sense strand
cugaaguacuacagagaca

SEQ ID NO: 2260660 - RNA, 19 nt, Homo sapiens
  misc_RNA (1)...(19): siRNA sense strand
aaucaauggaagagaaaga

SEQ ID NO: 2260661 - RNA, 19 nt, Homo sapiens
  misc_RNA (1)...(19): siRNA sense strand
gaaaugaaacagagcaaaa

SEQ ID NO: 2260662 - RNA, 19 nt, Homo sapiens
  misc_RNA (1)...(19): siRNA sense strand
ccgaaauagaaaugaaaca

SEQ ID NO: 2260663 - RNA, 19 nt, Homo sapiens
  misc_RNA (1)...(19): siRNA sense strand
cagagaaagauucaggaaa

SEQ ID NO: 2260664 - RNA, 19 nt, Homo sapiens
  misc_RNA (1)...(19): siRNA sense strand
ccaacagaauugagcaaca

SEQ ID NO: 2260665 - RNA, 19 nt, Homo sapiens
  misc_RNA (1)...(19): siRNA sense strand
agaaagagcuggaacgacu

SEQ ID NO: 2260666 - RNA, 19 nt, Homo sapiens
  misc_RNA (1)...(19): siRNA sense strand
aguuauagcugacaagaau

SEQ ID NO: 2260667 - RNA, 19 nt, Homo sapiens
  misc_RNA (1)...(19): siRNA sense strand
gguugaaacuacucagaga

SEQ ID NO: 2260668 - RNA, 19 nt, Homo sapiens
  misc_RNA (1)...(19): siRNA sense strand
cagaaaaguugcacagauu

SEQ ID NO: 2260669 - RNA, 19 nt, Homo sapiens
  misc_RNA (1)...(19): siRNA sense strand
acauaaacaugaagagugu

SEQ ID NO: 2260670 - RNA, 19 nt, Homo sapiens
  misc_RNA (1)...(19): siRNA sense strand
uagaaaugaaacagagcaa

SEQ ID NO: 2260671 - RNA, 19 nt, Homo sapiens
  misc_RNA (1)...(19): siRNA sense strand
ugacaacagaacagacaaa

SEQ ID NO: 2260672 - RNA, 19 nt, Homo sapiens
  misc_RNA (1)...(19): siRNA sense strand
gguuaacuauugaggccua

SEQ ID NO: 2260673 - RNA, 19 nt, Homo sapiens
  misc_RNA (1)...(19): siRNA sense strand
ucacagaacaggagaaacu

SEQ ID NO: 2260674 - RNA, 19 nt, Homo sapiens
  misc_RNA (1)...(19): siRNA sense strand
aaacauuagacuucgguua

SEQ ID NO: 2260675 - RNA, 19 nt, Homo sapiens
  misc_RNA (1)...(19): siRNA sense strand
cauuaguccuacugggaau

SEQ ID NO: 2260676 - RNA, 19 nt, Homo sapiens
  misc_RNA (1)...(19): siRNA sense strand
cugcagaagcccucguaaa

SEQ ID NO: 2260677 - RNA, 19 nt, Homo sapiens
  misc_RNA (1)...(19): siRNA sense strand
aggaaucaauggaagagaa

SEQ ID NO: 2260678 - RNA, 19 nt, Homo sapiens
  misc_RNA (1)...(19): siRNA sense strand
cagcuacagugaaggacua

SEQ ID NO: 2260679 - RNA, 19 nt, Homo sapiens
  misc_RNA (1)...(19): siRNA sense strand
ggaagagaaagaagaacuu

SEQ ID NO: 2260680 - RNA, 19 nt, Homo sapiens
  misc_RNA (1)...(19): siRNA sense strand
ccuaaugggaaaagcaaaa

SEQ ID NO: 2260681 - RNA, 19 nt, Homo sapiens
  misc_RNA (1)...(19): siRNA sense strand
gcagaaagcuaaagccauc

SEQ ID NO: 2260682 - RNA, 19 nt, Homo sapiens
  misc_RNA (1)...(19): siRNA sense strand
cuuagagggcauuggcaaa

SEQ ID NO: 2260683 - RNA, 19 nt, Homo sapiens
  misc_RNA (1)...(19): siRNA sense strand
ccaacagaguucagaggga

SEQ ID NO: 2260684 - RNA, 19 nt, Homo sapiens
  misc_RNA (1)...(19): siRNA sense strand
gcaaaauggacgaguguca

SEQ ID NO: 2260685 - RNA, 19 nt, Homo sapiens
  misc_RNA (1)...(19): siRNA sense strand
agauauaacacaacuggaa

SEQ ID NO: 2260686 - RNA, 19 nt, Homo sapiens
  misc_RNA (1)...(19): siRNA sense strand
agagaugauuugcaugaaa

SEQ ID NO: 2260687 - RNA, 19 nt, Homo sapiens
  misc_RNA (1)...(19): siRNA sense strand
cagugaaggacuaugaauu

SEQ ID NO: 2260688 - RNA, 19 nt, Homo sapiens
  misc_RNA (1)...(19): siRNA sense strand
caucaggauuaguuccaaa

SEQ ID NO: 2260689 - RNA, 19 nt, Homo sapiens
  misc_RNA (1)...(19): siRNA sense strand
augacuggagugagagaaa

SEQ ID NO: 2260690 - RNA, 19 nt, Homo sapiens
  misc_RNA (1)...(19): siRNA sense strand
cagaacaggagaaacuaaa

SEQ ID NO: 2260691 - RNA, 19 nt, Homo sapiens
  misc_RNA (1)...(19): siRNA sense strand
ggaacgacuuaaagaugau

SEQ ID NO: 2260692 - RNA, 19 nt, Homo sapiens
  misc_RNA (1)...(19): siRNA sense strand
cagacaaagcucaugauau

SEQ ID NO: 2260693 - RNA, 19 nt, Homo sapiens
  misc_RNA (1)...(19): siRNA sense strand
gagaggagcaagaggaauc

SEQ ID NO: 2260694 - RNA, 19 nt, Homo sapiens
  misc_RNA (1)...(19): siRNA sense strand
ucagaaugaagcagaaauu

SEQ ID NO: 2260695 - RNA, 19 nt, Homo sapiens
  misc_RNA (1)...(19): siRNA sense strand
augcugaauuaaugagaga

SEQ ID NO: 2260696 - RNA, 19 nt, Homo sapiens
  misc_RNA (1)...(19): siRNA sense strand
cgugcuaaauggaagguca

SEQ ID NO: 2260697 - RNA, 19 nt, Homo sapiens
  misc_RNA (1)...(19): siRNA sense strand
acaaagaagcgguggaccu

SEQ ID NO: 2260698 - RNA, 19 nt, Homo sapiens
  misc_RNA (1)...(19): siRNA sense strand
ggacuaugaauuacaaaca

SEQ ID NO: 2260699 - RNA, 19 nt, Homo sapiens
  misc_RNA (1)...(19): siRNA sense strand
gagcaagaggaaucaguuu

SEQ ID NO: 2260700 - RNA, 19 nt, Homo sapiens
  misc_RNA (1)...(19): siRNA sense strand
acaggagaaacuaaagaaa

SEQ ID NO: 2260701 - RNA, 19 nt, Homo sapiens
  misc_RNA (1)...(19): siRNA sense strand
gugaagaagaagcaguuau

SEQ ID NO: 2260702 - RNA, 19 nt, Homo sapiens
  misc_RNA (1)...(19): siRNA sense strand
uugaaacuacucagagaaa

SEQ ID NO: 2260703 - RNA, 19 nt, Homo sapiens
  misc_RNA (1)...(19): siRNA sense strand
aaugagagaacuugaucaa

SEQ ID NO: 2260704 - RNA, 19 nt, Homo sapiens
  misc_RNA (1)...(19): siRNA sense strand
caguuauagcugacaagaa

SEQ ID NO: 2260705 - RNA, 19 nt, Homo sapiens
  misc_RNA (1)...(19): siRNA sense strand
gcagcuacuucuagaaaau

SEQ ID NO: 2260706 - RNA, 19 nt, Homo sapiens
  misc_RNA (1)...(19): siRNA sense strand
aggcagaucaauugguaca

SEQ ID NO: 2260707 - RNA, 19 nt, Homo sapiens
  misc_RNA (1)...(19): siRNA sense strand
caauggaagagaaagaaga

SEQ ID NO: 2260708 - RNA, 19 nt, Homo sapiens
  misc_RNA (1)...(19): siRNA sense strand
agacaaugcuaccugguga

SEQ ID NO: 2260709 - RNA, 19 nt, Homo sapiens
  misc_RNA (1)...(19): siRNA sense strand
gcacagaccuuacacccua

SEQ ID NO: 2260710 - RNA, 19 nt, Homo sapiens
  misc_RNA (1)...(19): siRNA sense strand
cagauuagagagucaguau

SEQ ID NO: 2260711 - RNA, 19 nt, Homo sapiens
  misc_RNA (1)...(19): siRNA sense strand
cugcagaaagagaggagca

SEQ ID NO: 2260712 - RNA, 19 nt, Homo sapiens
  misc_RNA (1)...(19): siRNA sense strand
gaugaguugcagaaagcua

SEQ ID NO: 2260713 - RNA, 19 nt, Homo sapiens
  misc_RNA (1)...(19): siRNA sense strand
gcagaaauugcuggguaua

SEQ ID NO: 2260714 - RNA, 19 nt, Homo sapiens
  misc_RNA (1)...(19): siRNA sense strand
cagaauugagcaacaguau

SEQ ID NO: 2260715 - RNA, 19 nt, Homo sapiens
  misc_RNA (1)...(19): siRNA sense strand
uguccgaaauagaaaugaa

SEQ ID NO: 2260716 - RNA, 19 nt, Homo sapiens
  misc_RNA (1)...(19): siRNA sense strand
cagccaggucugcgagaaa

SEQ ID NO: 2260717 - RNA, 19 nt, Homo sapiens
  misc_RNA (1)...(19): siRNA sense strand
agauaagcauggugcccaa

SEQ ID NO: 2260718 - RNA, 19 nt, Homo sapiens
  misc_RNA (1)...(19): siRNA sense strand
gaaacaagaugaacagcca

SEQ ID NO: 2260719 - RNA, 19 nt, Homo sapiens
  misc_RNA (1)...(19): siRNA sense strand
cuucgaaacaagaugaaca

SEQ ID NO: 2260720 - RNA, 19 nt, Homo sapiens
  misc_RNA (1)...(19): siRNA sense strand
acaugaagauacagaucca

SEQ ID NO: 2260721 - RNA, 19 nt, Homo sapiens
  misc_RNA (1)...(19): siRNA sense strand
cagaaggagcugaagagga

SEQ ID NO: 2260722 - RNA, 19 nt, Homo sapiens
  misc_RNA (1)...(19): siRNA sense strand
cauuauagcuucuacagca

SEQ ID NO: 2260723 - RNA, 19 nt, Homo sapiens
  misc_RNA (1)...(19): siRNA sense strand
cugcagaaggagcugaaga

SEQ ID NO: 2260724 - RNA, 19 nt, Homo sapiens
  misc_RNA (1)...(19): siRNA sense strand
cgguugaauugcugcagga

SEQ ID NO: 2260725 - RNA, 19 nt, Homo sapiens
  misc_RNA (1)...(19): siRNA sense strand
aggaaaaguccaagagaaa

SEQ ID NO: 2260726 - RNA, 19 nt, Homo sapiens
  misc_RNA (1)...(19): siRNA sense strand
gaacaagagaggaggagga

SEQ ID NO: 2260727 - RNA, 19 nt, Homo sapiens
  misc_RNA (1)...(19): siRNA sense strand
guauuuaagcagcaagaaa

SEQ ID NO: 2260728 - RNA, 19 nt, Homo sapiens
  misc_RNA (1)...(19): siRNA sense strand
gcaucaacacuaagagaau

SEQ ID NO: 2260729 - RNA, 19 nt, Homo sapiens
  misc_RNA (1)...(19): siRNA sense strand
gagaaaucagccaaagaaa

SEQ ID NO: 2260730 - RNA, 19 nt, Homo sapiens
  misc_RNA (1)...(19): siRNA sense strand
cugaugagauagagauaga

SEQ ID NO: 2260731 - RNA, 19 nt, Homo sapiens
  misc_RNA (1)...(19): siRNA sense strand
auggaaaaguuuaggcaaa

SEQ ID NO: 2260732 - RNA, 19 nt, Homo sapiens
  misc_RNA (1)...(19): siRNA sense strand
ggaacaaaauacaaaggaa

SEQ ID NO: 2260733 - RNA, 19 nt, Homo sapiens
  misc_RNA (1)...(19): siRNA sense strand
aguuaaagcaaguagugaa

SEQ ID NO: 2260734 - RNA, 19 nt, Homo sapiens
  misc_RNA (1)...(19): siRNA sense strand
ccauagaaaaggaaguaaa

SEQ ID NO: 2260735 - RNA, 19 nt, Homo sapiens
  misc_RNA (1)...(19): siRNA sense strand
uugcaaagcuucaggagca

SEQ ID NO: 2260736 - RNA, 19 nt, Homo sapiens
  misc_RNA (1)...(19): siRNA sense strand
aaaugaggcuaaaggaaaa

SEQ ID NO: 2260737 - RNA, 19 nt, Homo sapiens
  misc_RNA (1)...(19): siRNA sense strand
agaagcgcuuggagaauaa

SEQ ID NO: 2260738 - RNA, 19 nt, Homo sapiens
  misc_RNA (1)...(19): siRNA sense strand
caaaaggugugaagaggaa

SEQ ID NO: 2260739 - RNA, 19 nt, Homo sapiens
  misc_RNA (1)...(19): siRNA sense strand
augcuaaaccuaugaacua

SEQ ID NO: 2260740 - RNA, 19 nt, Homo sapiens
  misc_RNA (1)...(19): siRNA sense strand
cuggagaagagcagaaaga

SEQ ID NO: 2260741 - RNA, 19 nt, Homo sapiens
  misc_RNA (1)...(19): siRNA sense strand
guuaaagcaaguagugaau

SEQ ID NO: 2260742 - RNA, 19 nt, Homo sapiens
  misc_RNA (1)...(19): siRNA sense strand
ccaagagaaaucagccaaa

SEQ ID NO: 2260743 - RNA, 19 nt, Homo sapiens
  misc_RNA (1)...(19): siRNA sense strand
ucuccaacauucacagaaa

SEQ ID NO: 2260744 - RNA, 19 nt, Homo sapiens
  misc_RNA (1)...(19): siRNA sense strand
gguuacuggauguuaauaa

SEQ ID NO: 2260745 - RNA, 19 nt, Homo sapiens
  misc_RNA (1)...(19): siRNA sense strand
aaacaagugcucuggagaa

SEQ ID NO: 2260746 - RNA, 19 nt, Homo sapiens
  misc_RNA (1)...(19): siRNA sense strand
uuaagaagcgcuuggagaa

SEQ ID NO: 2260747 - RNA, 19 nt, Homo sapiens
  misc_RNA (1)...(19): siRNA sense strand
ggagaagagcagaaagaac

SEQ ID NO: 2260748 - RNA, 19 nt, Homo sapiens
  misc_RNA (1)...(19): siRNA sense strand
gagaggaggaggagagaag

SEQ ID NO: 2260749 - RNA, 19 nt, Homo sapiens
  misc_RNA (1)...(19): siRNA sense strand
guggagacuguuaaaguaa

SEQ ID NO: 2260750 - RNA, 19 nt, Homo sapiens
  misc_RNA (1)...(19): siRNA sense strand
cuucuaaagagcauguaaa

SEQ ID NO: 2260751 - RNA, 19 nt, Homo sapiens
  misc_RNA (1)...(19): siRNA sense strand
uuccaauccugaugagaua

SEQ ID NO: 2260752 - RNA, 19 nt, Homo sapiens
  misc_RNA (1)...(19): siRNA sense strand
ucuaagaaagagaccauua

SEQ ID NO: 2260753 - RNA, 19 nt, Homo sapiens
  misc_RNA (1)...(19): siRNA sense strand
cagaauguauagaagacuu

SEQ ID NO: 2260754 - RNA, 19 nt, Homo sapiens
  misc_RNA (1)...(19): siRNA sense strand
gugaagaggaaagcagaua

SEQ ID NO: 2260755 - RNA, 19 nt, Homo sapiens
  misc_RNA (1)...(19): siRNA sense strand
cuguacagaaggauauaaa

SEQ ID NO: 2260756 - RNA, 19 nt, Homo sapiens
  misc_RNA (1)...(19): siRNA sense strand
agugaaaccaucaggugua

SEQ ID NO: 2260757 - RNA, 19 nt, Homo sapiens
  misc_RNA (1)...(19): siRNA sense strand
gguguuaaggaaagaauca

SEQ ID NO: 2260758 - RNA, 19 nt, Homo sapiens
  misc_RNA (1)...(19): siRNA sense strand
cauccaaagcuguugaaaa

SEQ ID NO: 2260759 - RNA, 19 nt, Homo sapiens
  misc_RNA (1)...(19): siRNA sense strand
cuaaaagcaucucaagaaa

SEQ ID NO: 2260760 - RNA, 19 nt, Homo sapiens
  misc_RNA (1)...(19): siRNA sense strand
gaaagaaucaagaaaggca

SEQ ID NO: 2260761 - RNA, 19 nt, Homo sapiens
  misc_RNA (1)...(19): siRNA sense strand
auccaaagcuguugaaaau

SEQ ID NO: 2260762 - RNA, 19 nt, Homo sapiens
  misc_RNA (1)...(19): siRNA sense strand
aaggaaaaguccaagagaa

SEQ ID NO: 2260763 - RNA, 19 nt, Homo sapiens
  misc_RNA (1)...(19): siRNA sense strand
cgucacacagauaggauau

SEQ ID NO: 2260764 - RNA, 19 nt, Homo sapiens
  misc_RNA (1)...(19): siRNA sense strand
cccuaaguuuacagaagua

SEQ ID NO: 2260765 - RNA, 19 nt, Homo sapiens
  misc_RNA (1)...(19): siRNA sense strand
gcggcagauguuagauuaa

SEQ ID NO: 2260766 - RNA, 19 nt, Homo sapiens
  misc_RNA (1)...(19): siRNA sense strand
acugaaagcaucaacacua

SEQ ID NO: 2260767 - RNA, 19 nt, Homo sapiens
  misc_RNA (1)...(19): siRNA sense strand
agaaaucagccaaagaaaa

SEQ ID NO: 2260768 - RNA, 19 nt, Homo sapiens
  misc_RNA (1)...(19): siRNA sense strand
gagauaaacuugggcgagu

SEQ ID NO: 2260769 - RNA, 19 nt, Homo sapiens
  misc_RNA (1)...(19): siRNA sense strand
ggauauugugugcaagaca

SEQ ID NO: 2260770 - RNA, 19 nt, Homo sapiens
  misc_RNA (1)...(19): siRNA sense strand
aguuguggguguuaaggaa

SEQ ID NO: 2260771 - RNA, 19 nt, Homo sapiens
  misc_RNA (1)...(19): siRNA sense strand
gaagaggaaagcagauaca

SEQ ID NO: 2260772 - RNA, 19 nt, Homo sapiens
  misc_RNA (1)...(19): siRNA sense strand
ucugaagaugagcgaguua

SEQ ID NO: 2260773 - RNA, 19 nt, Homo sapiens
  misc_RNA (1)...(19): siRNA sense strand
agauaaacuugggcgagua

SEQ ID NO: 2260774 - RNA, 19 nt, Homo sapiens
  misc_RNA (1)...(19): siRNA sense strand
cuaugaacuaugaugagaa

SEQ ID NO: 2260775 - RNA, 19 nt, Homo sapiens
  misc_RNA (1)...(19): siRNA sense strand
caagaaaaucagagggauc

SEQ ID NO: 2260776 - RNA, 19 nt, Homo sapiens
  misc_RNA (1)...(19): siRNA sense strand
aggaaagcagauacaacaa

SEQ ID NO: 2260777 - RNA, 19 nt, Homo sapiens
  misc_RNA (1)...(19): siRNA sense strand
uggaacuauuaaggagaaa

SEQ ID NO: 2260778 - RNA, 19 nt, Homo sapiens
  misc_RNA (1)...(19): siRNA sense strand
augaauugcuacaaguaca

SEQ ID NO: 2260779 - RNA, 19 nt, Homo sapiens
  misc_RNA (1)...(19): siRNA sense strand
agauagacuuugaaacacu

SEQ ID NO: 2260780 - RNA, 19 nt, Homo sapiens
  misc_RNA (1)...(19): siRNA sense strand
cuagaaaacgucaaacaaa

SEQ ID NO: 2260781 - RNA, 19 nt, Homo sapiens
  misc_RNA (1)...(19): siRNA sense strand
aggaagaacaggcgucaca

SEQ ID NO: 2260782 - RNA, 19 nt, Homo sapiens
  misc_RNA (1)...(19): siRNA sense strand
agacacaaccucugccaau

SEQ ID NO: 2260783 - RNA, 19 nt, Homo sapiens
  misc_RNA (1)...(19): siRNA sense strand
auuaagaagcgcuuggaga

SEQ ID NO: 2260784 - RNA, 19 nt, Homo sapiens
  misc_RNA (1)...(19): siRNA sense strand
gcaaugaaaauccaagaaa

SEQ ID NO: 2260785 - RNA, 19 nt, Homo sapiens
  misc_RNA (1)...(19): siRNA sense strand
agaacuucacucacagaaa

SEQ ID NO: 2260786 - RNA, 19 nt, Homo sapiens
  misc_RNA (1)...(19): siRNA sense strand
uguuagaaucugaauguca

SEQ ID NO: 2260787 - RNA, 19 nt, Homo sapiens
  misc_RNA (1)...(19): siRNA sense strand
cccaauggauuuaaauaca

SEQ ID NO: 2260788 - RNA, 19 nt, Homo sapiens
  misc_RNA (1)...(19): siRNA sense strand
guggagacccugaggaaaa

SEQ ID NO: 2260789 - RNA, 19 nt, Homo sapiens
  misc_RNA (1)...(19): siRNA sense strand
ccacacaaucaaagcggaa

SEQ ID NO: 2260790 - RNA, 19 nt, Homo sapiens
  misc_RNA (1)...(19): siRNA sense strand
cuguggagacccugaggaa

SEQ ID NO: 2260791 - RNA, 19 nt, Homo sapiens
  misc_RNA (1)...(19): siRNA sense strand
aagaagaagaaauggaaac

SEQ ID NO: 2260792 - RNA, 19 nt, Homo sapiens
  misc_RNA (1)...(19): siRNA sense strand
uuaccuaagaggagacaga

SEQ ID NO: 2260793 - RNA, 19 nt, Homo sapiens
  misc_RNA (1)...(19): siRNA sense strand
ggguaaagauauaacuccu

SEQ ID NO: 2260794 - RNA, 19 nt, Homo sapiens
  misc_RNA (1)...(19): siRNA sense strand
aaucaaagcggaaaggcca

SEQ ID NO: 2260795 - RNA, 19 nt, Homo sapiens
  misc_RNA (1)...(19): siRNA sense strand
aacucuggguaaagauaua

SEQ ID NO: 2260796 - RNA, 19 nt, Homo sapiens
  misc_RNA (1)...(19): siRNA sense strand
uggagcaaggugugagaga

SEQ ID NO: 2260797 - RNA, 19 nt, Homo sapiens
  misc_RNA (1)...(19): siRNA sense strand
cguaaaagaaagaagaaag

SEQ ID NO: 2260798 - RNA, 19 nt, Homo sapiens
  misc_RNA (1)...(19): siRNA sense strand
gugugguggcagaugggaa

SEQ ID NO: 2260799 - RNA, 19 nt, Homo sapiens
  misc_RNA (1)...(19): siRNA sense strand
aggagacagaggacagauu

SEQ ID NO: 2260800 - RNA, 19 nt, Homo sapiens
  misc_RNA (1)...(19): siRNA sense strand
cggaaacgucguaaaagaa

SEQ ID NO: 2260801 - RNA, 19 nt, Homo sapiens
  misc_RNA (1)...(19): siRNA sense strand
cugucacccucuucggaaa

SEQ ID NO: 2260802 - RNA, 19 nt, Homo sapiens
  misc_RNA (1)...(19): siRNA sense strand
cugcagaccuucagccaga

SEQ ID NO: 2260803 - RNA, 19 nt, Homo sapiens
  misc_RNA (1)...(19): siRNA sense strand
augaaguguccuacagaau

SEQ ID NO: 2260804 - RNA, 19 nt, Homo sapiens
  misc_RNA (1)...(19): siRNA sense strand
ccaacgugcaaaugguaga

SEQ ID NO: 2260805 - RNA, 19 nt, Homo sapiens
  misc_RNA (1)...(19): siRNA sense strand
guucaagagaauggagaaa

SEQ ID NO: 2260806 - RNA, 19 nt, Homo sapiens
  misc_RNA (1)...(19): siRNA sense strand
aggagaagaaaguagaaau

SEQ ID NO: 2260807 - RNA, 19 nt, Homo sapiens
  misc_RNA (1)...(19): siRNA sense strand
cugagaaaacagagagauu

SEQ ID NO: 2260808 - RNA, 19 nt, Homo sapiens
  misc_RNA (1)...(19): siRNA sense strand
ggagaaaucugucuggagu

SEQ ID NO: 2260809 - RNA, 19 nt, Homo sapiens
  misc_RNA (1)...(19): siRNA sense strand
ggagaacuuccaagggaga

SEQ ID NO: 2260810 - RNA, 19 nt, Homo sapiens
  misc_RNA (1)...(19): siRNA sense strand
ggauaguggcuguggcugu

SEQ ID NO: 2260811 - RNA, 19 nt, Homo sapiens
  misc_RNA (1)...(19): siRNA sense strand
cgaaagacccagagagagg

SEQ ID NO: 2260812 - RNA, 19 nt, Homo sapiens
  misc_RNA (1)...(19): siRNA sense strand
aguucaagagaauggagaa

SEQ ID NO: 2260813 - RNA, 19 nt, Homo sapiens
  misc_RNA (1)...(19): siRNA sense strand
agggagaaugugaugaaga

SEQ ID NO: 2260814 - RNA, 19 nt, Homo sapiens
  misc_RNA (1)...(19): siRNA sense strand
ccccaugacuccugagaau

SEQ ID NO: 2260815 - RNA, 19 nt, Homo sapiens
  misc_RNA (1)...(19): siRNA sense strand
caggagaagaaaguagaaa

SEQ ID NO: 2260816 - RNA, 19 nt, Homo sapiens
  misc_RNA (1)...(19): siRNA sense strand
acgaagaagcccuggugca

SEQ ID NO: 2260817 - RNA, 19 nt, Homo sapiens
  misc_RNA (1)...(19): siRNA sense strand
cggcguguguagggagaau

SEQ ID NO: 2260818 - RNA, 19 nt, Homo sapiens
  misc_RNA (1)...(19): siRNA sense strand
ugccuauggucuagcggua

SEQ ID NO: 2260819 - RNA, 19 nt, Homo sapiens
  misc_RNA (1)...(19): siRNA sense strand
caucaguaugcaaguucaa

SEQ ID NO: 2260820 - RNA, 19 nt, Homo sapiens
  misc_RNA (1)...(19): siRNA sense strand
acaucagaguccaggaauc

SEQ ID NO: 2260821 - RNA, 19 nt, Homo sapiens
  misc_RNA (1)...(19): siRNA sense strand
ugugaugaagaaaggauuu

SEQ ID NO: 2260822 - RNA, 19 nt, Homo sapiens
  misc_RNA (1)...(19): siRNA sense strand
ggaaauggguacugggccc

SEQ ID NO: 2260823 - RNA, 19 nt, Homo sapiens
  misc_RNA (1)...(19): siRNA sense strand
ccuucuacaacaugaauga

SEQ ID NO: 2260824 - RNA, 19 nt, Homo sapiens
  misc_RNA (1)...(19): siRNA sense strand
guguguagggagaauguga

SEQ ID NO: 2260825 - RNA, 19 nt, Homo sapiens
  misc_RNA (1)...(19): siRNA sense strand
gggcaguacaaaugagcau

SEQ ID NO: 2260826 - RNA, 19 nt, Homo sapiens
  misc_RNA (1)...(19): siRNA sense strand
caauuaaaaccaagggcaa

SEQ ID NO: 2260827 - RNA, 19 nt, Homo sapiens
  misc_RNA (1)...(19): siRNA sense strand
cagccaaagaaauuaucaa

SEQ ID NO: 2260828 - RNA, 19 nt, Homo sapiens
  misc_RNA (1)...(19): siRNA sense strand
ggcagaacagugagagcuu

SEQ ID NO: 2260829 - RNA, 19 nt, Homo sapiens
  misc_RNA (1)...(19): siRNA sense strand
gcaaaguacuccagccuug

SEQ ID NO: 2260830 - RNA, 19 nt, Homo sapiens
  misc_RNA (1)...(19): siRNA sense strand
ggagcaagcuguaucccau

SEQ ID NO: 2260831 - RNA, 19 nt, Homo sapiens
  misc_RNA (1)...(19): siRNA sense strand
cagaacagugagagcuuca

SEQ ID NO: 2260832 - RNA, 19 nt, Homo sapiens
  misc_RNA (1)...(19): siRNA sense strand
gaacaauggagcaagcugu

SEQ ID NO: 2260833 - RNA, 19 nt, Homo sapiens
  misc_RNA (1)...(19): siRNA sense strand
guacaaaugagcaugguuc

SEQ ID NO: 2260834 - RNA, 19 nt, Homo sapiens
  misc_RNA (1)...(19): siRNA sense strand
uggaucaucuguaaggaga

SEQ ID NO: 2260835 - RNA, 19 nt, Homo sapiens
  misc_RNA (1)...(19): siRNA sense strand
gaggagaagaugaugguga

SEQ ID NO: 2260836 - RNA, 19 nt, Homo sapiens
  misc_RNA (1)...(19): siRNA sense strand
aggaagcugucgugggaga

SEQ ID NO: 2260837 - RNA, 19 nt, Homo sapiens
  misc_RNA (1)...(19): siRNA sense strand
acaucuugccggaaauaaa

SEQ ID NO: 2260838 - RNA, 19 nt, Homo sapiens
  misc_RNA (1)...(19): siRNA sense strand
ccuucuugguugagcagau

SEQ ID NO: 2260839 - RNA, 19 nt, Homo sapiens
  misc_RNA (1)...(19): siRNA sense strand
caaggaagcugucguggga

SEQ ID NO: 2260840 - RNA, 19 nt, Homo sapiens
  misc_RNA (1)...(19): siRNA sense strand
ugcagaggcugguggacau

SEQ ID NO: 2260841 - RNA, 19 nt, Homo sapiens
  misc_RNA (1)...(19): siRNA sense strand
uggguauauugaagguaaa

SEQ ID NO: 2260842 - RNA, 19 nt, Homo sapiens
  misc_RNA (1)...(19): siRNA sense strand
cagggaagcucuaccgcaa

SEQ ID NO: 2260843 - RNA, 19 nt, Homo sapiens
  misc_RNA (1)...(19): siRNA sense strand
acuuugacgcagacggaaa

SEQ ID NO: 2260844 - RNA, 19 nt, Homo sapiens
  misc_RNA (1)...(19): siRNA sense strand
ggagaaaagaugaaggagu

SEQ ID NO: 2260845 - RNA, 19 nt, Homo sapiens
  misc_RNA (1)...(19): siRNA sense strand
cggaaguacgacacagaca

SEQ ID NO: 2260846 - RNA, 19 nt, Homo sapiens
  misc_RNA (1)...(19): siRNA sense strand
gcuggagaaggcaaggaaa

SEQ ID NO: 2260847 - RNA, 19 nt, Homo sapiens
  misc_RNA (1)...(19): siRNA sense strand
ggaaaaucgagauggcaga

SEQ ID NO: 2260848 - RNA, 19 nt, Homo sapiens
  misc_RNA (1)...(19): siRNA sense strand
gcuacauugacgagcauga

SEQ ID NO: 2260849 - RNA, 19 nt, Homo sapiens
  misc_RNA (1)...(19): siRNA sense strand
ggaagcacuuugacgcaga

SEQ ID NO: 2260850 - RNA, 19 nt, Homo sapiens
  misc_RNA (1)...(19): siRNA sense strand
acgcagacggaaaugggua

SEQ ID NO: 2260851 - RNA, 19 nt, Homo sapiens
  misc_RNA (1)...(19): siRNA sense strand
gcgucauguccuuggcaga

SEQ ID NO: 2260852 - RNA, 19 nt, Homo sapiens
  misc_RNA (1)...(19): siRNA sense strand
ggccguacgaugagcccaa

SEQ ID NO: 2260853 - RNA, 19 nt, Homo sapiens
  misc_RNA (1)...(19): siRNA sense strand
caugcagaaguaugauaaa

SEQ ID NO: 2260854 - RNA, 19 nt, Homo sapiens
  misc_RNA (1)...(19): siRNA sense strand
uggaaauauggaagcacuu

SEQ ID NO: 2260855 - RNA, 19 nt, Homo sapiens
  misc_RNA (1)...(19): siRNA sense strand
aggaauacacccaaaccau

SEQ ID NO: 2260856 - RNA, 19 nt, Homo sapiens
  misc_RNA (1)...(19): siRNA sense strand
uggguauauugaagguaaa

SEQ ID NO: 2260857 - RNA, 19 nt, Homo sapiens
  misc_RNA (1)...(19): siRNA sense strand
acuuugacgcagacggaaa

SEQ ID NO: 2260858 - RNA, 19 nt, Homo sapiens
  misc_RNA (1)...(19): siRNA sense strand
ggagaaaagaugaaggagu

SEQ ID NO: 2260859 - RNA, 19 nt, Homo sapiens
  misc_RNA (1)...(19): siRNA sense strand
cggaaguacgacacagaca

SEQ ID NO: 2260860 - RNA, 19 nt, Homo sapiens
  misc_RNA (1)...(19): siRNA sense strand
gcuggagaaggcaaggaaa

SEQ ID NO: 2260861 - RNA, 19 nt, Homo sapiens
  misc_RNA (1)...(19): siRNA sense strand
ggaaaaucgagauggcaga

SEQ ID NO: 2260862 - RNA, 19 nt, Homo sapiens
  misc_RNA (1)...(19): siRNA sense strand
ggaagcacuuugacgcaga

SEQ ID NO: 2260863 - RNA, 19 nt, Homo sapiens
  misc_RNA (1)...(19): siRNA sense strand
acgcagacggaaaugggua

SEQ ID NO: 2260864 - RNA, 19 nt, Homo sapiens
  misc_RNA (1)...(19): siRNA sense strand
ggccguacgaugagcccaa

SEQ ID NO: 2260865 - RNA, 19 nt, Homo sapiens
  misc_RNA (1)...(19): siRNA sense strand
uggaaauauggaagcacuu

SEQ ID NO: 2260866 - RNA, 19 nt, Homo sapiens
  misc_RNA (1)...(19): siRNA sense strand
caugcagaaguaugauaaa

SEQ ID NO: 2260867 - RNA, 19 nt, Homo sapiens
  misc_RNA (1)...(19): siRNA sense strand
aggaauacacccaaaccau

SEQ ID NO: 2260868 - RNA, 19 nt, Homo sapiens
  misc_RNA (1)...(19): siRNA sense strand
uggguauauugaagguaaa

SEQ ID NO: 2260869 - RNA, 19 nt, Homo sapiens
  misc_RNA (1)...(19): siRNA sense strand
acuuugacgcagacggaaa

SEQ ID NO: 2260870 - RNA, 19 nt, Homo sapiens
  misc_RNA (1)...(19): siRNA sense strand
ggagaaaagaugaaggagu

SEQ ID NO: 2260871 - RNA, 19 nt, Homo sapiens
  misc_RNA (1)...(19): siRNA sense strand
cggaaguacgacacagaca

SEQ ID NO: 2260872 - RNA, 19 nt, Homo sapiens
  misc_RNA (1)...(19): siRNA sense strand
gcuggagaaggcaaggaaa

SEQ ID NO: 2260873 - RNA, 19 nt, Homo sapiens
  misc_RNA (1)...(19): siRNA sense strand
ggaaaaucgagauggcaga

SEQ ID NO: 2260874 - RNA, 19 nt, Homo sapiens
  misc_RNA (1)...(19): siRNA sense strand
gcuacauugacgagcauga

SEQ ID NO: 2260875 - RNA, 19 nt, Homo sapiens
  misc_RNA (1)...(19): siRNA sense strand
ggaagcacuuugacgcaga

SEQ ID NO: 2260876 - RNA, 19 nt, Homo sapiens
  misc_RNA (1)...(19): siRNA sense strand
acgcagacggaaaugggua

SEQ ID NO: 2260877 - RNA, 19 nt, Homo sapiens
  misc_RNA (1)...(19): siRNA sense strand
ggccguacgaugagcccaa

SEQ ID NO: 2260878 - RNA, 19 nt, Homo sapiens
  misc_RNA (1)...(19): siRNA sense strand
caugcagaaguaugauaaa

SEQ ID NO: 2260879 - RNA, 19 nt, Homo sapiens
  misc_RNA (1)...(19): siRNA sense strand
uggaaauauggaagcacuu

SEQ ID NO: 2260880 - RNA, 19 nt, Homo sapiens
  misc_RNA (1)...(19): siRNA sense strand
aggaauacacccaaaccau

SEQ ID NO: 2260881 - RNA, 19 nt, Homo sapiens
  misc_RNA (1)...(19): siRNA sense strand
uggaaauacaacagaagaa

SEQ ID NO: 2260882 - RNA, 19 nt, Homo sapiens
  misc_RNA (1)...(19): siRNA sense strand
gugguguggccgagguaaa

SEQ ID NO: 2260883 - RNA, 19 nt, Homo sapiens
  misc_RNA (1)...(19): siRNA sense strand
auggauaccuauagcaaaa

SEQ ID NO: 2260884 - RNA, 19 nt, Homo sapiens
  misc_RNA (1)...(19): siRNA sense strand
cagucaagaggauggaaau

SEQ ID NO: 2260885 - RNA, 19 nt, Homo sapiens
  misc_RNA (1)...(19): siRNA sense strand
agucaagaggauggaaaua

SEQ ID NO: 2260886 - RNA, 19 nt, Homo sapiens
  misc_RNA (1)...(19): siRNA sense strand
agcaaugaagcuaaggaaa

SEQ ID NO: 2260887 - RNA, 19 nt, Homo sapiens
  misc_RNA (1)...(19): siRNA sense strand
aagcaaugaagcuaaggaa

SEQ ID NO: 2260888 - RNA, 19 nt, Homo sapiens
  misc_RNA (1)...(19): siRNA sense strand
cgaucaauggauaccuaua

SEQ ID NO: 2260889 - RNA, 19 nt, Homo sapiens
  misc_RNA (1)...(19): siRNA sense strand
ccagauucgaagaagcaau

SEQ ID NO: 2260890 - RNA, 19 nt, Homo sapiens
  misc_RNA (1)...(19): siRNA sense strand
aaaucaaagcagcaggaca

SEQ ID NO: 2260891 - RNA, 19 nt, Homo sapiens
  misc_RNA (1)...(19): siRNA sense strand
gcacuucuauugucgggaa

SEQ ID NO: 2260892 - RNA, 19 nt, Homo sapiens
  misc_RNA (1)...(19): siRNA sense strand
aaucaaagcagcaggacag

SEQ ID NO: 2260893 - RNA, 19 nt, Homo sapiens
  misc_RNA (1)...(19): siRNA sense strand
gcaaaaugggcgaagucuu

SEQ ID NO: 2260894 - RNA, 19 nt, Homo sapiens
  misc_RNA (1)...(19): siRNA sense strand
aggcauacgccaagaucaa

SEQ ID NO: 2260895 - RNA, 19 nt, Homo sapiens
  misc_RNA (1)...(19): siRNA sense strand
ggaagaugggcgaggacau

SEQ ID NO: 2260896 - RNA, 19 nt, Homo sapiens
  misc_RNA (1)...(19): siRNA sense strand
ugaucaagcuggaggagga

SEQ ID NO: 2260897 - RNA, 19 nt, Homo sapiens
  misc_RNA (1)...(19): siRNA sense strand
augaugaaaucgaggccaa

SEQ ID NO: 2260898 - RNA, 19 nt, Homo sapiens
  misc_RNA (1)...(19): siRNA sense strand
guucaagaucauccagaaa

SEQ ID NO: 2260899 - RNA, 19 nt, Homo sapiens
  misc_RNA (1)...(19): siRNA sense strand
gacccagaggagagggaaa

SEQ ID NO: 2260900 - RNA, 19 nt, Homo sapiens
  misc_RNA (1)...(19): siRNA sense strand
cauuagaagaagcagguuu

SEQ ID NO: 2260901 - RNA, 19 nt, Homo sapiens
  misc_RNA (1)...(19): siRNA sense strand
aggaggaggaugaggacga

SEQ ID NO: 2260902 - RNA, 19 nt, Homo sapiens
  misc_RNA (1)...(19): siRNA sense strand
gcgccaagauaucaaguca

SEQ ID NO: 2260903 - RNA, 19 nt, Homo sapiens
  misc_RNA (1)...(19): siRNA sense strand
aggaugaggacgaggagga

SEQ ID NO: 2260904 - RNA, 19 nt, Homo sapiens
  misc_RNA (1)...(19): siRNA sense strand
ccaugaauuccuaugaaau

SEQ ID NO: 2260905 - RNA, 19 nt, Homo sapiens
  misc_RNA (1)...(19): siRNA sense strand
ugaaaguaacggaagccua

SEQ ID NO: 2260906 - RNA, 19 nt, Homo sapiens
  misc_RNA (1)...(19): siRNA sense strand
gaggagagggaaaggcuga

SEQ ID NO: 2260907 - RNA, 19 nt, Homo sapiens
  misc_RNA (1)...(19): siRNA sense strand
uggagaaggcauacgccaa

SEQ ID NO: 2260908 - RNA, 19 nt, Homo sapiens
  misc_RNA (1)...(19): siRNA sense strand
caggagaggaugcggagau

SEQ ID NO: 2260909 - RNA, 19 nt, Homo sapiens
  misc_RNA (1)...(19): siRNA sense strand
ccaguuggcaggagaggau

SEQ ID NO: 2260910 - RNA, 19 nt, Homo sapiens
  misc_RNA (1)...(19): siRNA sense strand
ucaccaaaauggaugggaa

SEQ ID NO: 2260911 - RNA, 19 nt, Homo sapiens
  misc_RNA (1)...(19): siRNA sense strand
gccaagauaucaagucaga

SEQ ID NO: 2260912 - RNA, 19 nt, Homo sapiens
  misc_RNA (1)...(19): siRNA sense strand
uggaaugacaacugcccaa

SEQ ID NO: 2260913 - RNA, 19 nt, Homo sapiens
  misc_RNA (1)...(19): siRNA sense strand
cggcaugaagauggagaau

SEQ ID NO: 2260914 - RNA, 19 nt, Homo sapiens
  misc_RNA (1)...(19): siRNA sense strand
acuacgaggcgcugcggaa

SEQ ID NO: 2260915 - RNA, 19 nt, Homo sapiens
  misc_RNA (1)...(19): siRNA sense strand
agugguaugaguugaagaa

SEQ ID NO: 2260916 - RNA, 19 nt, Homo sapiens
  misc_RNA (1)...(19): siRNA sense strand
acggaagccuacagaaacu

SEQ ID NO: 2260917 - RNA, 19 nt, Homo sapiens
  misc_RNA (1)...(19): siRNA sense strand
aguuaagugggcagaccaa

SEQ ID NO: 2260918 - RNA, 19 nt, Homo sapiens
  misc_RNA (1)...(19): siRNA sense strand
gcgggagguugcaggaacu

SEQ ID NO: 2260919 - RNA, 19 nt, Homo sapiens
  misc_RNA (1)...(19): siRNA sense strand
gggcccuacuccagcaaaa

SEQ ID NO: 2260920 - RNA, 19 nt, Homo sapiens
  misc_RNA (1)...(19): siRNA sense strand
gggaggugcucaaccgcuu

SEQ ID NO: 2260921 - RNA, 19 nt, Homo sapiens
  misc_RNA (1)...(19): siRNA sense strand
cugaaaagaaagcugacua

SEQ ID NO: 2260922 - RNA, 19 nt, Homo sapiens
  misc_RNA (1)...(19): siRNA sense strand
ucaccuugaaugaagaaau

SEQ ID NO: 2260923 - RNA, 19 nt, Homo sapiens
  misc_RNA (1)...(19): siRNA sense strand
gaggcauugcugaguggua

SEQ ID NO: 2260924 - RNA, 19 nt, Homo sapiens
  misc_RNA (1)...(19): siRNA sense strand
agcuggaggaggaggauga

SEQ ID NO: 2260925 - RNA, 19 nt, Homo sapiens
  misc_RNA (1)...(19): siRNA sense strand
ccaacauccaccucagcaa

SEQ ID NO: 2260926 - RNA, 19 nt, Homo sapiens
  misc_RNA (1)...(19): siRNA sense strand
acuccaacauugaggccaa

SEQ ID NO: 2260927 - RNA, 19 nt, Homo sapiens
  misc_RNA (1)...(19): siRNA sense strand
ugacaaagauggcacugga

SEQ ID NO: 2260928 - RNA, 19 nt, Homo sapiens
  misc_RNA (1)...(19): siRNA sense strand
ggaacauggauuuugacaa

SEQ ID NO: 2260929 - RNA, 19 nt, Homo sapiens
  misc_RNA (1)...(19): siRNA sense strand
ucucaauaagguugugaca

SEQ ID NO: 2260930 - RNA, 19 nt, Homo sapiens
  misc_RNA (1)...(19): siRNA sense strand
ccauauacaaacaguucga

SEQ ID NO: 2260931 - RNA, 19 nt, Homo sapiens
  misc_RNA (1)...(19): siRNA sense strand
acguagacucggagggaca

SEQ ID NO: 2260932 - RNA, 19 nt, Homo sapiens
  misc_RNA (1)...(19): siRNA sense strand
acaacaaggccauggcaga

SEQ ID NO: 2260933 - RNA, 19 nt, Homo sapiens
  misc_RNA (1)...(19): siRNA sense strand
gcaaauacguagacucgga

SEQ ID NO: 2260934 - RNA, 19 nt, Homo sapiens
  misc_RNA (1)...(19): siRNA sense strand
gcagacgagcugagcgaga

SEQ ID NO: 2260935 - RNA, 19 nt, Homo sapiens
  misc_RNA (1)...(19): siRNA sense strand
uggcagacgagcugagcga

SEQ ID NO: 2260936 - RNA, 19 nt, Homo sapiens
  misc_RNA (1)...(19): siRNA sense strand
agaugugauugcagaacca

SEQ ID NO: 2260937 - RNA, 19 nt, Homo sapiens
  misc_RNA (1)...(19): siRNA sense strand
ucuuugaagcuguugggaa

SEQ ID NO: 2260938 - RNA, 19 nt, Homo sapiens
  misc_RNA (1)...(19): siRNA sense strand
gcaacaucuacaagcccaa

SEQ ID NO: 2260939 - RNA, 19 nt, Homo sapiens
  misc_RNA (1)...(19): siRNA sense strand
ugaagaugugauugcagaa

SEQ ID NO: 2260940 - RNA, 19 nt, Homo sapiens
  misc_RNA (1)...(19): siRNA sense strand
cggagaaggacacgcgaau

SEQ ID NO: 2260941 - RNA, 19 nt, Homo sapiens
  misc_RNA (1)...(19): siRNA sense strand
gcgaauuugaagauagaga

SEQ ID NO: 2260942 - RNA, 19 nt, Homo sapiens
  misc_RNA (1)...(19): siRNA sense strand
cagagaagcaaguucgaga

SEQ ID NO: 2260943 - RNA, 19 nt, Homo sapiens
  misc_RNA (1)...(19): siRNA sense strand
uagaaagagaagcaggcaa

SEQ ID NO: 2260944 - RNA, 19 nt, Homo sapiens
  misc_RNA (1)...(19): siRNA sense strand
cagggagaacagcgacaaa

SEQ ID NO: 2260945 - RNA, 19 nt, Homo sapiens
  misc_RNA (1)...(19): siRNA sense strand
agaaagagaagcaggcaag

SEQ ID NO: 2260946 - RNA, 19 nt, Homo sapiens
  misc_RNA (1)...(19): siRNA sense strand
agucuguguuaucuggaaa

SEQ ID NO: 2260947 - RNA, 19 nt, Homo sapiens
  misc_RNA (1)...(19): siRNA sense strand
agauuaaguacacgggcuu

SEQ ID NO: 2260948 - RNA, 19 nt, Homo sapiens
  misc_RNA (1)...(19): siRNA sense strand
gccgcgagugugagauuaa

SEQ ID NO: 2260949 - RNA, 19 nt, Homo sapiens
  misc_RNA (1)...(19): siRNA sense strand
gagauuaaguacacgggcu

SEQ ID NO: 2260950 - RNA, 19 nt, Homo sapiens
  misc_RNA (1)...(19): siRNA sense strand
augucgacuuagaaagaga

SEQ ID NO: 2260951 - RNA, 19 nt, Homo sapiens
  misc_RNA (1)...(19): siRNA sense strand
cggagaaggacacgcgaau

SEQ ID NO: 2260952 - RNA, 19 nt, Homo sapiens
  misc_RNA (1)...(19): siRNA sense strand
gcgaauuugaagauagaga

SEQ ID NO: 2260953 - RNA, 19 nt, Homo sapiens
  misc_RNA (1)...(19): siRNA sense strand
cagagaagcaaguucgaga

SEQ ID NO: 2260954 - RNA, 19 nt, Homo sapiens
  misc_RNA (1)...(19): siRNA sense strand
uagaaagagaagcaggcaa

SEQ ID NO: 2260955 - RNA, 19 nt, Homo sapiens
  misc_RNA (1)...(19): siRNA sense strand
cagggagaacagcgacaaa

SEQ ID NO: 2260956 - RNA, 19 nt, Homo sapiens
  misc_RNA (1)...(19): siRNA sense strand
agaaagagaagcaggcaag

SEQ ID NO: 2260957 - RNA, 19 nt, Homo sapiens
  misc_RNA (1)...(19): siRNA sense strand
agucuguguuaucuggaaa

SEQ ID NO: 2260958 - RNA, 19 nt, Homo sapiens
  misc_RNA (1)...(19): siRNA sense strand
agauuaaguacacgggcuu

SEQ ID NO: 2260959 - RNA, 19 nt, Homo sapiens
  misc_RNA (1)...(19): siRNA sense strand
gccgcgagugugagauuaa

SEQ ID NO: 2260960 - RNA, 19 nt, Homo sapiens
  misc_RNA (1)...(19): siRNA sense strand
gagauuaaguacacgggcu

SEQ ID NO: 2260961 - RNA, 19 nt, Homo sapiens
  misc_RNA (1)...(19): siRNA sense strand
augucgacuuagaaagaga

SEQ ID NO: 2260962 - RNA, 19 nt, Homo sapiens
  misc_RNA (1)...(19): siRNA sense strand
agaugaacuacgugggcaa

SEQ ID NO: 2260963 - RNA, 19 nt, Homo sapiens
  misc_RNA (1)...(19): siRNA sense strand
cuucaaaggcacauggaca

SEQ ID NO: 2260964 - RNA, 19 nt, Homo sapiens
  misc_RNA (1)...(19): siRNA sense strand
agaauaagacacaggggaa

SEQ ID NO: 2260965 - RNA, 19 nt, Homo sapiens
  misc_RNA (1)...(19): siRNA sense strand
gaauaagacacaggggaaa

SEQ ID NO: 2260966 - RNA, 19 nt, Homo sapiens
  misc_RNA (1)...(19): siRNA sense strand
gcacauggacacagcccuu

SEQ ID NO: 2260967 - RNA, 19 nt, Homo sapiens
  misc_RNA (1)...(19): siRNA sense strand
cugagauccaccaggguuu

SEQ ID NO: 2260968 - RNA, 19 nt, Homo sapiens
  misc_RNA (1)...(19): siRNA sense strand
acuaugagucagaggucuu

SEQ ID NO: 2260969 - RNA, 19 nt, Homo sapiens
  misc_RNA (1)...(19): siRNA sense strand
cggacaaggggaagaugaa

SEQ ID NO: 2260970 - RNA, 19 nt, Homo sapiens
  misc_RNA (1)...(19): siRNA sense strand
aggcaaauuucucacgcau

SEQ ID NO: 2260971 - RNA, 19 nt, Homo sapiens
  misc_RNA (1)...(19): siRNA sense strand
aggucuuggcuaugaauuu

SEQ ID NO: 2260972 - RNA, 19 nt, Homo sapiens
  misc_RNA (1)...(19): siRNA sense strand
agucuaugaccuuggagau

SEQ ID NO: 2260973 - RNA, 19 nt, Homo sapiens
  misc_RNA (1)...(19): siRNA sense strand
aauaaaaccccaagggaga

SEQ ID NO: 2260974 - RNA, 19 nt, Homo sapiens
  misc_RNA (1)...(19): siRNA sense strand
caaagaagggagugcacca

SEQ ID NO: 2260975 - RNA, 19 nt, Homo sapiens
  misc_RNA (1)...(19): siRNA sense strand
agaagaaggugcagagacc

SEQ ID NO: 2260976 - RNA, 19 nt, Homo sapiens
  misc_RNA (1)...(19): siRNA sense strand
gcugaagugacgaugaaaa

SEQ ID NO: 2260977 - RNA, 19 nt, Homo sapiens
  misc_RNA (1)...(19): siRNA sense strand
gcaacaagggcaucggcuu

SEQ ID NO: 2260978 - RNA, 19 nt, Homo sapiens
  misc_RNA (1)...(19): siRNA sense strand
ggauaauggugaauggaca

SEQ ID NO: 2260979 - RNA, 19 nt, Homo sapiens
  misc_RNA (1)...(19): siRNA sense strand
gugaacaacugcaggccaa

SEQ ID NO: 2260980 - RNA, 19 nt, Homo sapiens
  misc_RNA (1)...(19): siRNA sense strand
cuaugaagaaggaagcaaa

SEQ ID NO: 2260981 - RNA, 19 nt, Homo sapiens
  misc_RNA (1)...(19): siRNA sense strand
cuggaaaagucauugauaa

SEQ ID NO: 2260982 - RNA, 19 nt, Homo sapiens
  misc_RNA (1)...(19): siRNA sense strand
aaaauaaggcgaagaucaa

SEQ ID NO: 2260983 - RNA, 19 nt, Homo sapiens
  misc_RNA (1)...(19): siRNA sense strand
ucugagacaacuugaggaa

SEQ ID NO: 2260984 - RNA, 19 nt, Homo sapiens
  misc_RNA (1)...(19): siRNA sense strand
acaacuugaggaagagcaa

SEQ ID NO: 2260985 - RNA, 19 nt, Homo sapiens
  misc_RNA (1)...(19): siRNA sense strand
aaaucagacagauggaaau

SEQ ID NO: 2260986 - RNA, 19 nt, Homo sapiens
  misc_RNA (1)...(19): siRNA sense strand
cacugaaaauucuggauaa

SEQ ID NO: 2260987 - RNA, 19 nt, Homo sapiens
  misc_RNA (1)...(19): siRNA sense strand
acuggaaacaugagagcca

SEQ ID NO: 2260988 - RNA, 19 nt, Homo sapiens
  misc_RNA (1)...(19): siRNA sense strand
agccagaaccugagccaga

SEQ ID NO: 2260989 - RNA, 19 nt, Homo sapiens
  misc_RNA (1)...(19): siRNA sense strand
gguuguugcaggagaccau

SEQ ID NO: 2260990 - RNA, 19 nt, Homo sapiens
  misc_RNA (1)...(19): siRNA sense strand
agaauaauugugugcccaa

SEQ ID NO: 2260991 - RNA, 19 nt, Homo sapiens
  misc_RNA (1)...(19): siRNA sense strand
cauccuaauugacuggcua

SEQ ID NO: 2260992 - RNA, 19 nt, Homo sapiens
  misc_RNA (1)...(19): siRNA sense strand
uaaaugauguggaugcaga

SEQ ID NO: 2260993 - RNA, 19 nt, Homo sapiens
  misc_RNA (1)...(19): siRNA sense strand
ccaagaagaugcugcagcu

SEQ ID NO: 2260994 - RNA, 19 nt, Homo sapiens
  misc_RNA (1)...(19): siRNA sense strand
aggcuguggcaaaggugua

SEQ ID NO: 2260995 - RNA, 19 nt, Homo sapiens
  misc_RNA (1)...(19): siRNA sense strand
ccuaugaagaaggaagcaa

SEQ ID NO: 2260996 - RNA, 19 nt, Homo sapiens
  misc_RNA (1)...(19): siRNA sense strand
gcaagcagucagaccaaaa

SEQ ID NO: 2260997 - RNA, 19 nt, Homo sapiens
  misc_RNA (1)...(19): siRNA sense strand
gaacuaacuauguuggacu

SEQ ID NO: 2260998 - RNA, 19 nt, Homo sapiens
  misc_RNA (1)...(19): siRNA sense strand
gccaaauaccugauggaac

SEQ ID NO: 2260999 - RNA, 19 nt, Homo sapiens
  misc_RNA (1)...(19): siRNA sense strand
ccuacagacgugcgggaua

SEQ ID NO: 2261000 - RNA, 19 nt, Homo sapiens
  misc_RNA (1)...(19): siRNA sense strand
ucaccaucgaggagcgcua

SEQ ID NO: 2261001 - RNA, 19 nt, Homo sapiens
  misc_RNA (1)...(19): siRNA sense strand
gugaggaacagaagugcga

SEQ ID NO: 2261002 - RNA, 19 nt, Homo sapiens
  misc_RNA (1)...(19): siRNA sense strand
ccaucaagccucaggagcu

SEQ ID NO: 2261003 - RNA, 19 nt, Homo sapiens
  misc_RNA (1)...(19): siRNA sense strand
gcuccagcaggaugaggaa

SEQ ID NO: 2261004 - RNA, 19 nt, Homo sapiens
  misc_RNA (1)...(19): siRNA sense strand
gcgugcagcgggagaucaa

SEQ ID NO: 2261005 - RNA, 19 nt, Homo sapiens
  misc_RNA (1)...(19): siRNA sense strand
agggagagccucagggaag

SEQ ID NO: 2261006 - RNA, 19 nt, Homo sapiens
  misc_RNA (1)...(19): siRNA sense strand
gguuugaggacaagcgcua

SEQ ID NO: 2261007 - RNA, 19 nt, Homo sapiens
  misc_RNA (1)...(19): siRNA sense strand
ucgcaaaggcugcugggaa

SEQ ID NO: 2261008 - RNA, 19 nt, Homo sapiens
  misc_RNA (1)...(19): siRNA sense strand
uguucgaggaugaggagaa

SEQ ID NO: 2261009 - RNA, 19 nt, Homo sapiens
  misc_RNA (1)...(19): siRNA sense strand
aggcuuguccagaggcaaa

SEQ ID NO: 2261010 - RNA, 19 nt, Homo sapiens
  misc_RNA (1)...(19): siRNA sense strand
gcgcagaagugaauggccu

SEQ ID NO: 2261011 - RNA, 19 nt, Homo sapiens
  misc_RNA (1)...(19): siRNA sense strand
gcugcaaggccgugguuca

SEQ ID NO: 2261012 - RNA, 19 nt, Homo sapiens
  misc_RNA (1)...(19): siRNA sense strand
acagugaggaggaggacau

SEQ ID NO: 2261013 - RNA, 19 nt, Homo sapiens
  misc_RNA (1)...(19): siRNA sense strand
aggacaagcgcuauggaga

SEQ ID NO: 2261014 - RNA, 19 nt, Homo sapiens
  misc_RNA (1)...(19): siRNA sense strand
cgcaaaggcugcugggaag

SEQ ID NO: 2261015 - RNA, 19 nt, Homo sapiens
  misc_RNA (1)...(19): siRNA sense strand
cugcauuaggagugacaca

SEQ ID NO: 2261016 - RNA, 19 nt, Homo sapiens
  misc_RNA (1)...(19): siRNA sense strand
gaaccaaacggaagcggga

SEQ ID NO: 2261017 - RNA, 19 nt, Homo sapiens
  misc_RNA (1)...(19): siRNA sense strand
ugggaaagcgacaggagga

SEQ ID NO: 2261018 - RNA, 19 nt, Homo sapiens
  misc_RNA (1)...(19): siRNA sense strand
uggagaaaucagccaggaa

SEQ ID NO: 2261019 - RNA, 19 nt, Homo sapiens
  misc_RNA (1)...(19): siRNA sense strand
cuucccaggcugucaguaa

SEQ ID NO: 2261020 - RNA, 19 nt, Homo sapiens
  misc_RNA (1)...(19): siRNA sense strand
gcauacacagugaggagga

SEQ ID NO: 2261021 - RNA, 19 nt, Homo sapiens
  misc_RNA (1)...(19): siRNA sense strand
aagcgaagaauaaggagga

SEQ ID NO: 2261022 - RNA, 19 nt, Homo sapiens
  misc_RNA (1)...(19): siRNA sense strand
agagugagggcgagaagga

SEQ ID NO: 2261023 - RNA, 19 nt, Homo sapiens
  misc_RNA (1)...(19): siRNA sense strand
ggugaagcggauaaaccua

SEQ ID NO: 2261024 - RNA, 19 nt, Homo sapiens
  misc_RNA (1)...(19): siRNA sense strand
gcggagaaccaaacggaag

SEQ ID NO: 2261025 - RNA, 19 nt, Homo sapiens
  misc_RNA (1)...(19): siRNA sense strand
agcaacaggugaagcggau

SEQ ID NO: 2261026 - RNA, 19 nt, Homo sapiens
  misc_RNA (1)...(19): siRNA sense strand
uggugagaaugaugggcga

SEQ ID NO: 2261027 - RNA, 19 nt, Homo sapiens
  misc_RNA (1)...(19): siRNA sense strand
ccaagaaggacgugcggaa

SEQ ID NO: 2261028 - RNA, 19 nt, Homo sapiens
  misc_RNA (1)...(19): siRNA sense strand
gcaucagcauugaccgcua

SEQ ID NO: 2261029 - RNA, 19 nt, Homo sapiens
  misc_RNA (1)...(19): siRNA sense strand
ccaugaguguggaggccga

SEQ ID NO: 2261030 - RNA, 19 nt, Homo sapiens
  misc_RNA (1)...(19): siRNA sense strand
cacgcaacuuugagcgcaa

SEQ ID NO: 2261031 - RNA, 19 nt, Homo sapiens
  misc_RNA (1)...(19): siRNA sense strand
aagaugaggucacggacga

SEQ ID NO: 2261032 - RNA, 19 nt, Homo sapiens
  misc_RNA (1)...(19): siRNA sense strand
cagagcauguggaggccuu

SEQ ID NO: 2261033 - RNA, 19 nt, Homo sapiens
  misc_RNA (1)...(19): siRNA sense strand
agaccaugaccgauaccua

SEQ ID NO: 2261034 - RNA, 19 nt, Homo sapiens
  misc_RNA (1)...(19): siRNA sense strand
gugcggaacuuuaaagccu

SEQ ID NO: 2261035 - RNA, 19 nt, Homo sapiens
  misc_RNA (1)...(19): siRNA sense strand
ucgugggccuacugggcaa

SEQ ID NO: 2261036 - RNA, 19 nt, Homo sapiens
  misc_RNA (1)...(19): siRNA sense strand
gguccaaaguccuggccau

SEQ ID NO: 2261037 - RNA, 19 nt, Homo sapiens
  misc_RNA (1)...(19): siRNA sense strand
gcagaaaccuggaccacgu

SEQ ID NO: 2261038 - RNA, 19 nt, Homo sapiens
  misc_RNA (1)...(19): siRNA sense strand
cugcagagagccacaucua

SEQ ID NO: 2261039 - RNA, 19 nt, Homo sapiens
  misc_RNA (1)...(19): siRNA sense strand
ucgauauuccugugcagaa

SEQ ID NO: 2261040 - RNA, 19 nt, Homo sapiens
  misc_RNA (1)...(19): siRNA sense strand
ccaucaagccugugggaau

SEQ ID NO: 2261041 - RNA, 19 nt, Homo sapiens
  misc_RNA (1)...(19): siRNA sense strand
cuacagacauggaaggcaa

SEQ ID NO: 2261042 - RNA, 19 nt, Homo sapiens
  misc_RNA (1)...(19): siRNA sense strand
acaaagagacccaggaaaa

SEQ ID NO: 2261043 - RNA, 19 nt, Homo sapiens
  misc_RNA (1)...(19): siRNA sense strand
augccaaguuccugauaua

SEQ ID NO: 2261044 - RNA, 19 nt, Homo sapiens
  misc_RNA (1)...(19): siRNA sense strand
ccuuaaagcggcugacaau

SEQ ID NO: 2261045 - RNA, 19 nt, Homo sapiens
  misc_RNA (1)...(19): siRNA sense strand
agaagguggaggagaagaa

SEQ ID NO: 2261046 - RNA, 19 nt, Homo sapiens
  misc_RNA (1)...(19): siRNA sense strand
ugauauaugcccaagacaa

SEQ ID NO: 2261047 - RNA, 19 nt, Homo sapiens
  misc_RNA (1)...(19): siRNA sense strand
cagaagagagacuggguca

SEQ ID NO: 2261048 - RNA, 19 nt, Homo sapiens
  misc_RNA (1)...(19): siRNA sense strand
auaaagaacgccaggccaa

SEQ ID NO: 2261049 - RNA, 19 nt, Homo sapiens
  misc_RNA (1)...(19): siRNA sense strand
cgauauaugcagcaaaaua

SEQ ID NO: 2261050 - RNA, 19 nt, Homo sapiens
  misc_RNA (1)...(19): siRNA sense strand
ggacaguuccugagggauc

SEQ ID NO: 2261051 - RNA, 19 nt, Homo sapiens
  misc_RNA (1)...(19): siRNA sense strand
gguuagucaccguggucaa

SEQ ID NO: 2261052 - RNA, 19 nt, Homo sapiens
  misc_RNA (1)...(19): siRNA sense strand
gaggcagagacuugcgaaa

SEQ ID NO: 2261053 - RNA, 19 nt, Homo sapiens
  misc_RNA (1)...(19): siRNA sense strand
auggaaaucaaguggagaa

SEQ ID NO: 2261054 - RNA, 19 nt, Homo sapiens
  misc_RNA (1)...(19): siRNA sense strand
gggcacaugcaguagauau

SEQ ID NO: 2261055 - RNA, 19 nt, Homo sapiens
  misc_RNA (1)...(19): siRNA sense strand
guacagaaucaguggcgga

SEQ ID NO: 2261056 - RNA, 19 nt, Homo sapiens
  misc_RNA (1)...(19): siRNA sense strand
gacaaagagacccaggaaa

SEQ ID NO: 2261057 - RNA, 19 nt, Homo sapiens
  misc_RNA (1)...(19): siRNA sense strand
caggucugauagagauaaa

SEQ ID NO: 2261058 - RNA, 19 nt, Homo sapiens
  misc_RNA (1)...(19): siRNA sense strand
gaacauaugugaugaccgu

SEQ ID NO: 2261059 - RNA, 19 nt, Homo sapiens
  misc_RNA (1)...(19): siRNA sense strand
acauaugugaugaccguaa

SEQ ID NO: 2261060 - RNA, 19 nt, Homo sapiens
  misc_RNA (1)...(19): siRNA sense strand
uguuacaguuauugacgua

SEQ ID NO: 2261061 - RNA, 19 nt, Homo sapiens
  misc_RNA (1)...(19): siRNA sense strand
ugccauuagccaagggaau

SEQ ID NO: 2261062 - RNA, 19 nt, Homo sapiens
  misc_RNA (1)...(19): siRNA sense strand
aagagaaauuggaccauca

SEQ ID NO: 2261063 - RNA, 19 nt, Homo sapiens
  misc_RNA (1)...(19): siRNA sense strand
agacaaagagacccaggaa

SEQ ID NO: 2261064 - RNA, 19 nt, Homo sapiens
  misc_RNA (1)...(19): siRNA sense strand
aaauugagccugaagccaa

SEQ ID NO: 2261065 - RNA, 19 nt, Homo sapiens
  misc_RNA (1)...(19): siRNA sense strand
agaagaugauguaagagau

SEQ ID NO: 2261066 - RNA, 19 nt, Homo sapiens
  misc_RNA (1)...(19): siRNA sense strand
uacaaaggcagaagagaga

SEQ ID NO: 2261067 - RNA, 19 nt, Homo sapiens
  misc_RNA (1)...(19): siRNA sense strand
ggaucaaagccuggaacau

SEQ ID NO: 2261068 - RNA, 19 nt, Homo sapiens
  misc_RNA (1)...(19): siRNA sense strand
ggauguugagguacagaau

SEQ ID NO: 2261069 - RNA, 19 nt, Homo sapiens
  misc_RNA (1)...(19): siRNA sense strand
acauauggccuuucaaaca

SEQ ID NO: 2261070 - RNA, 19 nt, Homo sapiens
  misc_RNA (1)...(19): siRNA sense strand
ugaugaagaagguggagga

SEQ ID NO: 2261071 - RNA, 19 nt, Homo sapiens
  misc_RNA (1)...(19): siRNA sense strand
ccgacgaauggaugaaaga

SEQ ID NO: 2261072 - RNA, 19 nt, Homo sapiens
  misc_RNA (1)...(19): siRNA sense strand
cauguaugguggaggugau

SEQ ID NO: 2261073 - RNA, 19 nt, Homo sapiens
  misc_RNA (1)...(19): siRNA sense strand
agaacaggguagacaucau

SEQ ID NO: 2261074 - RNA, 19 nt, Homo sapiens
  misc_RNA (1)...(19): siRNA sense strand
ugguggaggugaugacuga

SEQ ID NO: 2261075 - RNA, 19 nt, Homo sapiens
  misc_RNA (1)...(19): siRNA sense strand
gcaguaaaauugagccuga

SEQ ID NO: 2261076 - RNA, 19 nt, Homo sapiens
  misc_RNA (1)...(19): siRNA sense strand
ggcacaugcaguagauauu

SEQ ID NO: 2261077 - RNA, 19 nt, Homo sapiens
  misc_RNA (1)...(19): siRNA sense strand
cagcuggacuugaucgaga

SEQ ID NO: 2261078 - RNA, 19 nt, Homo sapiens
  misc_RNA (1)...(19): siRNA sense strand
cagaaaaucaagugccauu

SEQ ID NO: 2261079 - RNA, 19 nt, Homo sapiens
  misc_RNA (1)...(19): siRNA sense strand
cuacaaaggcagaagagag

SEQ ID NO: 2261080 - RNA, 19 nt, Homo sapiens
  misc_RNA (1)...(19): siRNA sense strand
auuaagagaaauuggacca

SEQ ID NO: 2261081 - RNA, 19 nt, Homo sapiens
  misc_RNA (1)...(19): siRNA sense strand
ucccaagacaauucaguaa

SEQ ID NO: 2261082 - RNA, 19 nt, Homo sapiens
  misc_RNA (1)...(19): siRNA sense strand
aaucuaacugugaccgaua

SEQ ID NO: 2261083 - RNA, 19 nt, Homo sapiens
  misc_RNA (1)...(19): siRNA sense strand
agaccgacccaaacagcaa

SEQ ID NO: 2261084 - RNA, 19 nt, Homo sapiens
  misc_RNA (1)...(19): siRNA sense strand
ccuaugaguggaacaggaa

SEQ ID NO: 2261085 - RNA, 19 nt, Homo sapiens
  misc_RNA (1)...(19): siRNA sense strand
agacaucauaguagcuaau

SEQ ID NO: 2261086 - RNA, 19 nt, Homo sapiens
  misc_RNA (1)...(19): siRNA sense strand
ucgccaagaagaagggcuu

SEQ ID NO: 2261087 - RNA, 19 nt, Homo sapiens
  misc_RNA (1)...(19): siRNA sense strand
gaucgauauaugcagcaaa

SEQ ID NO: 2261088 - RNA, 19 nt, Homo sapiens
  misc_RNA (1)...(19): siRNA sense strand
ccaacauguuuacaaucaa

SEQ ID NO: 2261089 - RNA, 19 nt, Homo sapiens
  misc_RNA (1)...(19): siRNA sense strand
aggaugugcaugaaggaca

SEQ ID NO: 2261090 - RNA, 19 nt, Homo sapiens
  misc_RNA (1)...(19): siRNA sense strand
gugaugaccguaacagcaa

SEQ ID NO: 2261091 - RNA, 19 nt, Homo sapiens
  misc_RNA (1)...(19): siRNA sense strand
aaugggauguugagguaca

SEQ ID NO: 2261092 - RNA, 19 nt, Homo sapiens
  misc_RNA (1)...(19): siRNA sense strand
ccuuacuguugcugcagaa

SEQ ID NO: 2261093 - RNA, 19 nt, Homo sapiens
  misc_RNA (1)...(19): siRNA sense strand
agacaauucaguaagcaca

SEQ ID NO: 2261094 - RNA, 19 nt, Homo sapiens
  misc_RNA (1)...(19): siRNA sense strand
gggaucaaagccuggaaca

SEQ ID NO: 2261095 - RNA, 19 nt, Homo sapiens
  misc_RNA (1)...(19): siRNA sense strand
cuguagaggcuucugguga

SEQ ID NO: 2261096 - RNA, 19 nt, Homo sapiens
  misc_RNA (1)...(19): siRNA sense strand
ccagaaaacuccaggggac

SEQ ID NO: 2261097 - RNA, 19 nt, Homo sapiens
  misc_RNA (1)...(19): siRNA sense strand
augaagauggcauggugua

SEQ ID NO: 2261098 - RNA, 19 nt, Homo sapiens
  misc_RNA (1)...(19): siRNA sense strand
agugaaggagucagcagaa

SEQ ID NO: 2261099 - RNA, 19 nt, Homo sapiens
  misc_RNA (1)...(19): siRNA sense strand
uagacaucauaguagcuaa

SEQ ID NO: 2261100 - RNA, 19 nt, Homo sapiens
  misc_RNA (1)...(19): siRNA sense strand
ggcagagacuugcgaaacu

SEQ ID NO: 2261101 - RNA, 19 nt, Homo sapiens
  misc_RNA (1)...(19): siRNA sense strand
gaagaaauaguguucccaa

SEQ ID NO: 2261102 - RNA, 19 nt, Homo sapiens
  misc_RNA (1)...(19): siRNA sense strand
gcaguagauauuaauggaa

SEQ ID NO: 2261103 - RNA, 19 nt, Homo sapiens
  misc_RNA (1)...(19): siRNA sense strand
ccagugacuauuaagagaa

SEQ ID NO: 2261104 - RNA, 19 nt, Homo sapiens
  misc_RNA (1)...(19): siRNA sense strand
ccgcacaauagcagcaaca

SEQ ID NO: 2261105 - RNA, 19 nt, Homo sapiens
  misc_RNA (1)...(19): siRNA sense strand
aaacgauggcagaacgaga

SEQ ID NO: 2261106 - RNA, 19 nt, Homo sapiens
  misc_RNA (1)...(19): siRNA sense strand
ccgcacaauagcagcaaca

SEQ ID NO: 2261107 - RNA, 19 nt, Homo sapiens
  misc_RNA (1)...(19): siRNA sense strand
aaacgauggcagaacgaga

SEQ ID NO: 2261108 - RNA, 19 nt, Homo sapiens
  misc_RNA (1)...(19): siRNA sense strand
ccgaacuggaggagauaua

SEQ ID NO: 2261109 - RNA, 19 nt, Homo sapiens
  misc_RNA (1)...(19): siRNA sense strand
ucgaaagugucaugcggaa

SEQ ID NO: 2261110 - RNA, 19 nt, Homo sapiens
  misc_RNA (1)...(19): siRNA sense strand
ccgaauaaccaaaaggaca

SEQ ID NO: 2261111 - RNA, 19 nt, Homo sapiens
  misc_RNA (1)...(19): siRNA sense strand
caacaagaagguucgggaa

SEQ ID NO: 2261112 - RNA, 19 nt, Homo sapiens
  misc_RNA (1)...(19): siRNA sense strand
cgaaagugucaugcggaaa

SEQ ID NO: 2261113 - RNA, 19 nt, Homo sapiens
  misc_RNA (1)...(19): siRNA sense strand
ccaucuacagcaagggcua

SEQ ID NO: 2261114 - RNA, 19 nt, Homo sapiens
  misc_RNA (1)...(19): siRNA sense strand
uggaagagugacagcgaca

SEQ ID NO: 2261115 - RNA, 19 nt, Homo sapiens
  misc_RNA (1)...(19): siRNA sense strand
gggcagcaucagugugaca

SEQ ID NO: 2261116 - RNA, 19 nt, Homo sapiens
  misc_RNA (1)...(19): siRNA sense strand
guggaggacuggaagcuga

SEQ ID NO: 2261117 - RNA, 19 nt, Homo sapiens
  misc_RNA (1)...(19): siRNA sense strand
ucaugaggauccuggccaa

SEQ ID NO: 2261118 - RNA, 19 nt, Homo sapiens
  misc_RNA (1)...(19): siRNA sense strand
aauccagacaugaagaaau

SEQ ID NO: 2261119 - RNA, 19 nt, Homo sapiens
  misc_RNA (1)...(19): siRNA sense strand
cgggaagaauaccggaagu

SEQ ID NO: 2261120 - RNA, 19 nt, Homo sapiens
  misc_RNA (1)...(19): siRNA sense strand
cuggaggagauauaugaaa

SEQ ID NO: 2261121 - RNA, 19 nt, Homo sapiens
  misc_RNA (1)...(19): siRNA sense strand
acaacaacaccaaggaacu

SEQ ID NO: 2261122 - RNA, 19 nt, Homo sapiens
  misc_RNA (1)...(19): siRNA sense strand
uggccaagagccugccuaa

SEQ ID NO: 2261123 - RNA, 19 nt, Homo sapiens
  misc_RNA (1)...(19): siRNA sense strand
ugacgacauugcuggccaa

SEQ ID NO: 2261124 - RNA, 19 nt, Homo sapiens
  misc_RNA (1)...(19): siRNA sense strand
ccgaacuggaggagauaua

SEQ ID NO: 2261125 - RNA, 19 nt, Homo sapiens
  misc_RNA (1)...(19): siRNA sense strand
ucgaaagugucaugcggaa

SEQ ID NO: 2261126 - RNA, 19 nt, Homo sapiens
  misc_RNA (1)...(19): siRNA sense strand
ccgaauaaccaaaaggaca

SEQ ID NO: 2261127 - RNA, 19 nt, Homo sapiens
  misc_RNA (1)...(19): siRNA sense strand
caacaagaagguucgggaa

SEQ ID NO: 2261128 - RNA, 19 nt, Homo sapiens
  misc_RNA (1)...(19): siRNA sense strand
cgaaagugucaugcggaaa

SEQ ID NO: 2261129 - RNA, 19 nt, Homo sapiens
  misc_RNA (1)...(19): siRNA sense strand
ccaucuacagcaagggcua

SEQ ID NO: 2261130 - RNA, 19 nt, Homo sapiens
  misc_RNA (1)...(19): siRNA sense strand
uggaagagugacagcgaca

SEQ ID NO: 2261131 - RNA, 19 nt, Homo sapiens
  misc_RNA (1)...(19): siRNA sense strand
gggcagcaucagugugaca

SEQ ID NO: 2261132 - RNA, 19 nt, Homo sapiens
  misc_RNA (1)...(19): siRNA sense strand
guggaggacuggaagcuga

SEQ ID NO: 2261133 - RNA, 19 nt, Homo sapiens
  misc_RNA (1)...(19): siRNA sense strand
ucaugaggauccuggccaa

SEQ ID NO: 2261134 - RNA, 19 nt, Homo sapiens
  misc_RNA (1)...(19): siRNA sense strand
aauccagacaugaagaaau

SEQ ID NO: 2261135 - RNA, 19 nt, Homo sapiens
  misc_RNA (1)...(19): siRNA sense strand
cgggaagaauaccggaagu

SEQ ID NO: 2261136 - RNA, 19 nt, Homo sapiens
  misc_RNA (1)...(19): siRNA sense strand
cuggaggagauauaugaaa

SEQ ID NO: 2261137 - RNA, 19 nt, Homo sapiens
  misc_RNA (1)...(19): siRNA sense strand
acaacaacaccaaggaacu

SEQ ID NO: 2261138 - RNA, 19 nt, Homo sapiens
  misc_RNA (1)...(19): siRNA sense strand
uggccaagagccugccuaa

SEQ ID NO: 2261139 - RNA, 19 nt, Homo sapiens
  misc_RNA (1)...(19): siRNA sense strand
ugacgacauugcuggccaa

SEQ ID NO: 2261140 - RNA, 19 nt, Homo sapiens
  misc_RNA (1)...(19): siRNA sense strand
uggaaaagaacaagaagaa

SEQ ID NO: 2261141 - RNA, 19 nt, Homo sapiens
  misc_RNA (1)...(19): siRNA sense strand
uuggagaugcaguggauaa

SEQ ID NO: 2261142 - RNA, 19 nt, Homo sapiens
  misc_RNA (1)...(19): siRNA sense strand
agaacaagaagaaagggaa

SEQ ID NO: 2261143 - RNA, 19 nt, Homo sapiens
  misc_RNA (1)...(19): siRNA sense strand
ggcaaaagggucagaggaa

SEQ ID NO: 2261144 - RNA, 19 nt, Homo sapiens
  misc_RNA (1)...(19): siRNA sense strand
cgcuuaugguaguggguga

SEQ ID NO: 2261145 - RNA, 19 nt, Homo sapiens
  misc_RNA (1)...(19): siRNA sense strand
aggaaugccaacaguuuaa

SEQ ID NO: 2261146 - RNA, 19 nt, Homo sapiens
  misc_RNA (1)...(19): siRNA sense strand
caacaagaauaaagggcag

SEQ ID NO: 2261147 - RNA, 19 nt, Homo sapiens
  misc_RNA (1)...(19): siRNA sense strand
ggcacaaauggaagaagaa

SEQ ID NO: 2261148 - RNA, 19 nt, Homo sapiens
  misc_RNA (1)...(19): siRNA sense strand
augcaguggauaauaguaa

SEQ ID NO: 2261149 - RNA, 19 nt, Homo sapiens
  misc_RNA (1)...(19): siRNA sense strand
gaacaagaagaaagggaag

SEQ ID NO: 2261150 - RNA, 19 nt, Homo sapiens
  misc_RNA (1)...(19): siRNA sense strand
ggucagaggaaggcaguau

SEQ ID NO: 2261151 - RNA, 19 nt, Homo sapiens
  misc_RNA (1)...(19): siRNA sense strand
agacuguacagguggaaca

SEQ ID NO: 2261152 - RNA, 19 nt, Homo sapiens
  misc_RNA (1)...(19): siRNA sense strand
cagaugaugaagaagaaaa

SEQ ID NO: 2261153 - RNA, 19 nt, Homo sapiens
  misc_RNA (1)...(19): siRNA sense strand
aauaaagggcagcugacua

SEQ ID NO: 2261154 - RNA, 19 nt, Homo sapiens
  misc_RNA (1)...(19): siRNA sense strand
aagaagauggagauggaga

SEQ ID NO: 2261155 - RNA, 19 nt, Homo sapiens
  misc_RNA (1)...(19): siRNA sense strand
ggaaaagaacaagaagaaa

SEQ ID NO: 2261156 - RNA, 19 nt, Homo sapiens
  misc_RNA (1)...(19): siRNA sense strand
ugagaaagcaaacugggaa

SEQ ID NO: 2261157 - RNA, 19 nt, Homo sapiens
  misc_RNA (1)...(19): siRNA sense strand
aguugaaaauggugaacau

SEQ ID NO: 2261158 - RNA, 19 nt, Homo sapiens
  misc_RNA (1)...(19): siRNA sense strand
agaagaaagaagggagcau

SEQ ID NO: 2261159 - RNA, 19 nt, Homo sapiens
  misc_RNA (1)...(19): siRNA sense strand
gcgccaugagcaaaugaaa

SEQ ID NO: 2261160 - RNA, 19 nt, Homo sapiens
  misc_RNA (1)...(19): siRNA sense strand
cuacagaagcagaaaacuu

SEQ ID NO: 2261161 - RNA, 19 nt, Homo sapiens
  misc_RNA (1)...(19): siRNA sense strand
aaaugaagaagauggagau

SEQ ID NO: 2261162 - RNA, 19 nt, Homo sapiens
  misc_RNA (1)...(19): siRNA sense strand
agaagauggagauggagau

SEQ ID NO: 2261163 - RNA, 19 nt, Homo sapiens
  misc_RNA (1)...(19): siRNA sense strand
gaaccuuggaaaagaacaa

SEQ ID NO: 2261164 - RNA, 19 nt, Homo sapiens
  misc_RNA (1)...(19): siRNA sense strand
guuaauggcaaaaggguca

SEQ ID NO: 2261165 - RNA, 19 nt, Homo sapiens
  misc_RNA (1)...(19): siRNA sense strand
uugaaggcuaugugggauu

SEQ ID NO: 2261166 - RNA, 19 nt, Homo sapiens
  misc_RNA (1)...(19): siRNA sense strand
aagggagcauguagcuaaa

SEQ ID NO: 2261167 - RNA, 19 nt, Homo sapiens
  misc_RNA (1)...(19): siRNA sense strand
acaugcaggacuugaaaga

SEQ ID NO: 2261168 - RNA, 19 nt, Homo sapiens
  misc_RNA (1)...(19): siRNA sense strand
ggaagaagaaagaagggag

SEQ ID NO: 2261169 - RNA, 19 nt, Homo sapiens
  misc_RNA (1)...(19): siRNA sense strand
aauuugaggacuaccuaaa

SEQ ID NO: 2261170 - RNA, 19 nt, Homo sapiens
  misc_RNA (1)...(19): siRNA sense strand
agcagguguuugagaugaa

SEQ ID NO: 2261171 - RNA, 19 nt, Homo sapiens
  misc_RNA (1)...(19): siRNA sense strand
guguuugagaugaagguca

SEQ ID NO: 2261172 - RNA, 19 nt, Homo sapiens
  misc_RNA (1)...(19): siRNA sense strand
auuuggaagcacagcacaa

SEQ ID NO: 2261173 - RNA, 19 nt, Homo sapiens
  misc_RNA (1)...(19): siRNA sense strand
gagaaagcaaacugggaag

SEQ ID NO: 2261174 - RNA, 19 nt, Homo sapiens
  misc_RNA (1)...(19): siRNA sense strand
aagaacaagaagaaaggga

SEQ ID NO: 2261175 - RNA, 19 nt, Homo sapiens
  misc_RNA (1)...(19): siRNA sense strand
caucccacuuauugccaaa

SEQ ID NO: 2261176 - RNA, 19 nt, Homo sapiens
  misc_RNA (1)...(19): siRNA sense strand
aggcaguauccuuggggua

SEQ ID NO: 2261177 - RNA, 19 nt, Homo sapiens
  misc_RNA (1)...(19): siRNA sense strand
ucgaggaugagaaagcaaa

SEQ ID NO: 2261178 - RNA, 19 nt, Homo sapiens
  misc_RNA (1)...(19): siRNA sense strand
aagaaagaagggagcaugu

SEQ ID NO: 2261179 - RNA, 19 nt, Homo sapiens
  misc_RNA (1)...(19): siRNA sense strand
aagaagaaagggaagaucu

SEQ ID NO: 2261180 - RNA, 19 nt, Homo sapiens
  misc_RNA (1)...(19): siRNA sense strand
aggacuaccuaaaugcaga

SEQ ID NO: 2261181 - RNA, 19 nt, Homo sapiens
  misc_RNA (1)...(19): siRNA sense strand
cgccaugagcaaaugaaaa

SEQ ID NO: 2261182 - RNA, 19 nt, Homo sapiens
  misc_RNA (1)...(19): siRNA sense strand
ggaguuguguauaagggua

SEQ ID NO: 2261183 - RNA, 19 nt, Homo sapiens
  misc_RNA (1)...(19): siRNA sense strand
augcaggauuccagguuau

SEQ ID NO: 2261184 - RNA, 19 nt, Homo sapiens
  misc_RNA (1)...(19): siRNA sense strand
ccaaacgaauuucuggcaa

SEQ ID NO: 2261185 - RNA, 19 nt, Homo sapiens
  misc_RNA (1)...(19): siRNA sense strand
ggaacuucgucauccaaau

SEQ ID NO: 2261186 - RNA, 19 nt, Homo sapiens
  misc_RNA (1)...(19): siRNA sense strand
cuuuacaggacuauaagaa

SEQ ID NO: 2261187 - RNA, 19 nt, Homo sapiens
  misc_RNA (1)...(19): siRNA sense strand
agagaaaauuggagaaggu

SEQ ID NO: 2261188 - RNA, 19 nt, Homo sapiens
  misc_RNA (1)...(19): siRNA sense strand
auggaaaccaggaagccua

SEQ ID NO: 2261189 - RNA, 19 nt, Homo sapiens
  misc_RNA (1)...(19): siRNA sense strand
aguacugcaauucgggaaa

SEQ ID NO: 2261190 - RNA, 19 nt, Homo sapiens
  misc_RNA (1)...(19): siRNA sense strand
gaacuucgucauccaaaua

SEQ ID NO: 2261191 - RNA, 19 nt, Homo sapiens
  misc_RNA (1)...(19): siRNA sense strand
ggaguuguguauaagggua

SEQ ID NO: 2261192 - RNA, 19 nt, Homo sapiens
  misc_RNA (1)...(19): siRNA sense strand
augcaggauuccagguuau

SEQ ID NO: 2261193 - RNA, 19 nt, Homo sapiens
  misc_RNA (1)...(19): siRNA sense strand
ccaaacgaauuucuggcaa

SEQ ID NO: 2261194 - RNA, 19 nt, Homo sapiens
  misc_RNA (1)...(19): siRNA sense strand
ggaacuucgucauccaaau

SEQ ID NO: 2261195 - RNA, 19 nt, Homo sapiens
  misc_RNA (1)...(19): siRNA sense strand
cuuuacaggacuauaagaa

SEQ ID NO: 2261196 - RNA, 19 nt, Homo sapiens
  misc_RNA (1)...(19): siRNA sense strand
agagaaaauuggagaaggu

SEQ ID NO: 2261197 - RNA, 19 nt, Homo sapiens
  misc_RNA (1)...(19): siRNA sense strand
auggaaaccaggaagccua

SEQ ID NO: 2261198 - RNA, 19 nt, Homo sapiens
  misc_RNA (1)...(19): siRNA sense strand
aguacugcaauucgggaaa

SEQ ID NO: 2261199 - RNA, 19 nt, Homo sapiens
  misc_RNA (1)...(19): siRNA sense strand
gaacuucgucauccaaaua

SEQ ID NO: 2261200 - RNA, 19 nt, Homo sapiens
  misc_RNA (1)...(19): siRNA sense strand
gagaagagcaagagggaga

SEQ ID NO: 2261201 - RNA, 19 nt, Homo sapiens
  misc_RNA (1)...(19): siRNA sense strand
aguacaaagaggaggaaga

SEQ ID NO: 2261202 - RNA, 19 nt, Homo sapiens
  misc_RNA (1)...(19): siRNA sense strand
ccagaugagaacaaggaaa

SEQ ID NO: 2261203 - RNA, 19 nt, Homo sapiens
  misc_RNA (1)...(19): siRNA sense strand
aggugaagaacaacaguaa

SEQ ID NO: 2261204 - RNA, 19 nt, Homo sapiens
  misc_RNA (1)...(19): siRNA sense strand
cagaugagaacaaggaaaa

SEQ ID NO: 2261205 - RNA, 19 nt, Homo sapiens
  misc_RNA (1)...(19): siRNA sense strand
gggcaggggagaagagcaa

SEQ ID NO: 2261206 - RNA, 19 nt, Homo sapiens
  misc_RNA (1)...(19): siRNA sense strand
ggaaguacaaagaggagga

SEQ ID NO: 2261207 - RNA, 19 nt, Homo sapiens
  misc_RNA (1)...(19): siRNA sense strand
uggaagaagagguugaaga

SEQ ID NO: 2261208 - RNA, 19 nt, Homo sapiens
  misc_RNA (1)...(19): siRNA sense strand
gguaugugagagagagaga

SEQ ID NO: 2261209 - RNA, 19 nt, Homo sapiens
  misc_RNA (1)...(19): siRNA sense strand
gggagaagagcaagaggga

SEQ ID NO: 2261210 - RNA, 19 nt, Homo sapiens
  misc_RNA (1)...(19): siRNA sense strand
ccucagaagcuguugggau

SEQ ID NO: 2261211 - RNA, 19 nt, Homo sapiens
  misc_RNA (1)...(19): siRNA sense strand
acaaagaggaggaagagca

SEQ ID NO: 2261212 - RNA, 19 nt, Homo sapiens
  misc_RNA (1)...(19): siRNA sense strand
gggucugggcagugauuau

SEQ ID NO: 2261213 - RNA, 19 nt, Homo sapiens
  misc_RNA (1)...(19): siRNA sense strand
uagcagugaaccagggaau

SEQ ID NO: 2261214 - RNA, 19 nt, Homo sapiens
  misc_RNA (1)...(19): siRNA sense strand
cugggaaacaucaggauuu

SEQ ID NO: 2261215 - RNA, 19 nt, Homo sapiens
  misc_RNA (1)...(19): siRNA sense strand
acauggaagaagagguuga

SEQ ID NO: 2261216 - RNA, 19 nt, Homo sapiens
  misc_RNA (1)...(19): siRNA sense strand
agagcaagagggagaugua

SEQ ID NO: 2261217 - RNA, 19 nt, Homo sapiens
  misc_RNA (1)...(19): siRNA sense strand
caaagaggaggaagagcau

SEQ ID NO: 2261218 - RNA, 19 nt, Homo sapiens
  misc_RNA (1)...(19): siRNA sense strand
auggagagaaucugaagaa

SEQ ID NO: 2261219 - RNA, 19 nt, Homo sapiens
  misc_RNA (1)...(19): siRNA sense strand
agagaaggcccaugagacu

SEQ ID NO: 2261220 - RNA, 19 nt, Homo sapiens
  misc_RNA (1)...(19): siRNA sense strand
cugaagaaguuccgcacca

SEQ ID NO: 2261221 - RNA, 19 nt, Homo sapiens
  misc_RNA (1)...(19): siRNA sense strand
ccgguaugugagagagaga

SEQ ID NO: 2261222 - RNA, 19 nt, Homo sapiens
  misc_RNA (1)...(19): siRNA sense strand
guugaagagaccagaacga

SEQ ID NO: 2261223 - RNA, 19 nt, Homo sapiens
  misc_RNA (1)...(19): siRNA sense strand
ugaacuugcacauggaaga

SEQ ID NO: 2261224 - RNA, 19 nt, Homo sapiens
  misc_RNA (1)...(19): siRNA sense strand
uccucaaaugaaagagaua

SEQ ID NO: 2261225 - RNA, 19 nt, Homo sapiens
  misc_RNA (1)...(19): siRNA sense strand
cugaugaggaugauggcuu

SEQ ID NO: 2261226 - RNA, 19 nt, Homo sapiens
  misc_RNA (1)...(19): siRNA sense strand
aaggaaccauugagaacau

SEQ ID NO: 2261227 - RNA, 19 nt, Homo sapiens
  misc_RNA (1)...(19): siRNA sense strand
ccacuggaggugaagaaca

SEQ ID NO: 2261228 - RNA, 19 nt, Homo sapiens
  misc_RNA (1)...(19): siRNA sense strand
aagagauagcagugaacca

SEQ ID NO: 2261229 - RNA, 19 nt, Homo sapiens
  misc_RNA (1)...(19): siRNA sense strand
uugagaacauuuuggacaa

SEQ ID NO: 2261230 - RNA, 19 nt, Homo sapiens
  misc_RNA (1)...(19): siRNA sense strand
cucagaagcuguugggaug

SEQ ID NO: 2261231 - RNA, 19 nt, Homo sapiens
  misc_RNA (1)...(19): siRNA sense strand
ccaugcaccacgaggacuu

SEQ ID NO: 2261232 - RNA, 19 nt, Homo sapiens
  misc_RNA (1)...(19): siRNA sense strand
gagaagagcaagagggaga

SEQ ID NO: 2261233 - RNA, 19 nt, Homo sapiens
  misc_RNA (1)...(19): siRNA sense strand
aguacaaagaggaggaaga

SEQ ID NO: 2261234 - RNA, 19 nt, Homo sapiens
  misc_RNA (1)...(19): siRNA sense strand
ccagaugagaacaaggaaa

SEQ ID NO: 2261235 - RNA, 19 nt, Homo sapiens
  misc_RNA (1)...(19): siRNA sense strand
aggugaagaacaacaguaa

SEQ ID NO: 2261236 - RNA, 19 nt, Homo sapiens
  misc_RNA (1)...(19): siRNA sense strand
cagaugagaacaaggaaaa

SEQ ID NO: 2261237 - RNA, 19 nt, Homo sapiens
  misc_RNA (1)...(19): siRNA sense strand
gggcaggggagaagagcaa

SEQ ID NO: 2261238 - RNA, 19 nt, Homo sapiens
  misc_RNA (1)...(19): siRNA sense strand
ggaaguacaaagaggagga

SEQ ID NO: 2261239 - RNA, 19 nt, Homo sapiens
  misc_RNA (1)...(19): siRNA sense strand
uggaagaagagguugaaga

SEQ ID NO: 2261240 - RNA, 19 nt, Homo sapiens
  misc_RNA (1)...(19): siRNA sense strand
gguaugugagagagagaga

SEQ ID NO: 2261241 - RNA, 19 nt, Homo sapiens
  misc_RNA (1)...(19): siRNA sense strand
gggagaagagcaagaggga

SEQ ID NO: 2261242 - RNA, 19 nt, Homo sapiens
  misc_RNA (1)...(19): siRNA sense strand
ccucagaagcuguugggau

SEQ ID NO: 2261243 - RNA, 19 nt, Homo sapiens
  misc_RNA (1)...(19): siRNA sense strand
acaaagaggaggaagagca

SEQ ID NO: 2261244 - RNA, 19 nt, Homo sapiens
  misc_RNA (1)...(19): siRNA sense strand
gggucugggcagugauuau

SEQ ID NO: 2261245 - RNA, 19 nt, Homo sapiens
  misc_RNA (1)...(19): siRNA sense strand
uagcagugaaccagggaau

SEQ ID NO: 2261246 - RNA, 19 nt, Homo sapiens
  misc_RNA (1)...(19): siRNA sense strand
cugggaaacaucaggauuu

SEQ ID NO: 2261247 - RNA, 19 nt, Homo sapiens
  misc_RNA (1)...(19): siRNA sense strand
acauggaagaagagguuga

SEQ ID NO: 2261248 - RNA, 19 nt, Homo sapiens
  misc_RNA (1)...(19): siRNA sense strand
agagcaagagggagaugua

SEQ ID NO: 2261249 - RNA, 19 nt, Homo sapiens
  misc_RNA (1)...(19): siRNA sense strand
caaagaggaggaagagcau

SEQ ID NO: 2261250 - RNA, 19 nt, Homo sapiens
  misc_RNA (1)...(19): siRNA sense strand
auggagagaaucugaagaa

SEQ ID NO: 2261251 - RNA, 19 nt, Homo sapiens
  misc_RNA (1)...(19): siRNA sense strand
agagaaggcccaugagacu

SEQ ID NO: 2261252 - RNA, 19 nt, Homo sapiens
  misc_RNA (1)...(19): siRNA sense strand
cugaagaaguuccgcacca

SEQ ID NO: 2261253 - RNA, 19 nt, Homo sapiens
  misc_RNA (1)...(19): siRNA sense strand
ccgguaugugagagagaga

SEQ ID NO: 2261254 - RNA, 19 nt, Homo sapiens
  misc_RNA (1)...(19): siRNA sense strand
guugaagagaccagaacga

SEQ ID NO: 2261255 - RNA, 19 nt, Homo sapiens
  misc_RNA (1)...(19): siRNA sense strand
ugaacuugcacauggaaga

SEQ ID NO: 2261256 - RNA, 19 nt, Homo sapiens
  misc_RNA (1)...(19): siRNA sense strand
uccucaaaugaaagagaua

SEQ ID NO: 2261257 - RNA, 19 nt, Homo sapiens
  misc_RNA (1)...(19): siRNA sense strand
cugaugaggaugauggcuu

SEQ ID NO: 2261258 - RNA, 19 nt, Homo sapiens
  misc_RNA (1)...(19): siRNA sense strand
aaggaaccauugagaacau

SEQ ID NO: 2261259 - RNA, 19 nt, Homo sapiens
  misc_RNA (1)...(19): siRNA sense strand
ccacuggaggugaagaaca

SEQ ID NO: 2261260 - RNA, 19 nt, Homo sapiens
  misc_RNA (1)...(19): siRNA sense strand
aagagauagcagugaacca

SEQ ID NO: 2261261 - RNA, 19 nt, Homo sapiens
  misc_RNA (1)...(19): siRNA sense strand
uugagaacauuuuggacaa

SEQ ID NO: 2261262 - RNA, 19 nt, Homo sapiens
  misc_RNA (1)...(19): siRNA sense strand
cucagaagcuguugggaug

SEQ ID NO: 2261263 - RNA, 19 nt, Homo sapiens
  misc_RNA (1)...(19): siRNA sense strand
ccaugcaccacgaggacuu

SEQ ID NO: 2261264 - RNA, 19 nt, Homo sapiens
  misc_RNA (1)...(19): siRNA sense strand
ccacagagcuacugcccua

SEQ ID NO: 2261265 - RNA, 19 nt, Homo sapiens
  misc_RNA (1)...(19): siRNA sense strand
cgucgaugccagagaacuu

SEQ ID NO: 2261266 - RNA, 19 nt, Homo sapiens
  misc_RNA (1)...(19): siRNA sense strand
gacugaagcagguggaaaa

SEQ ID NO: 2261267 - RNA, 19 nt, Homo sapiens
  misc_RNA (1)...(19): siRNA sense strand
uggacagugaaaugaaaua

SEQ ID NO: 2261268 - RNA, 19 nt, Homo sapiens
  misc_RNA (1)...(19): siRNA sense strand
gaucaagaagcaaagguga

SEQ ID NO: 2261269 - RNA, 19 nt, Homo sapiens
  misc_RNA (1)...(19): siRNA sense strand
aggucuaaucaaaggaaaa

SEQ ID NO: 2261270 - RNA, 19 nt, Homo sapiens
  misc_RNA (1)...(19): siRNA sense strand
cuagaacuccagugggcaa

SEQ ID NO: 2261271 - RNA, 19 nt, Homo sapiens
  misc_RNA (1)...(19): siRNA sense strand
agacugaagcagguggaaa

SEQ ID NO: 2261272 - RNA, 19 nt, Homo sapiens
  misc_RNA (1)...(19): siRNA sense strand
acuuauauagucaggaaga

SEQ ID NO: 2261273 - RNA, 19 nt, Homo sapiens
  misc_RNA (1)...(19): siRNA sense strand
gugaaggacaugagcccau

SEQ ID NO: 2261274 - RNA, 19 nt, Homo sapiens
  misc_RNA (1)...(19): siRNA sense strand
ggugagcagaaguggccua

SEQ ID NO: 2261275 - RNA, 19 nt, Homo sapiens
  misc_RNA (1)...(19): siRNA sense strand
uaggagaagaccaggcaga

SEQ ID NO: 2261276 - RNA, 19 nt, Homo sapiens
  misc_RNA (1)...(19): siRNA sense strand
aaauccaaaccuaggagaa

SEQ ID NO: 2261277 - RNA, 19 nt, Homo sapiens
  misc_RNA (1)...(19): siRNA sense strand
cuuauauagucaggaagaa

SEQ ID NO: 2261278 - RNA, 19 nt, Homo sapiens
  misc_RNA (1)...(19): siRNA sense strand
ugucgaagccagagcaaag

SEQ ID NO: 2261279 - RNA, 19 nt, Homo sapiens
  misc_RNA (1)...(19): siRNA sense strand
gagaacuugaacaggccaa

SEQ ID NO: 2261280 - RNA, 19 nt, Homo sapiens
  misc_RNA (1)...(19): siRNA sense strand
gcaaagugcaggaagggga

SEQ ID NO: 2261281 - RNA, 19 nt, Homo sapiens
  misc_RNA (1)...(19): siRNA sense strand
ccacagagcuacugcccua

SEQ ID NO: 2261282 - RNA, 19 nt, Homo sapiens
  misc_RNA (1)...(19): siRNA sense strand
cgucgaugccagagaacuu

SEQ ID NO: 2261283 - RNA, 19 nt, Homo sapiens
  misc_RNA (1)...(19): siRNA sense strand
gacugaagcagguggaaaa

SEQ ID NO: 2261284 - RNA, 19 nt, Homo sapiens
  misc_RNA (1)...(19): siRNA sense strand
uggacagugaaaugaaaua

SEQ ID NO: 2261285 - RNA, 19 nt, Homo sapiens
  misc_RNA (1)...(19): siRNA sense strand
gaucaagaagcaaagguga

SEQ ID NO: 2261286 - RNA, 19 nt, Homo sapiens
  misc_RNA (1)...(19): siRNA sense strand
aggucuaaucaaaggaaaa

SEQ ID NO: 2261287 - RNA, 19 nt, Homo sapiens
  misc_RNA (1)...(19): siRNA sense strand
cuagaacuccagugggcaa

SEQ ID NO: 2261288 - RNA, 19 nt, Homo sapiens
  misc_RNA (1)...(19): siRNA sense strand
agacugaagcagguggaaa

SEQ ID NO: 2261289 - RNA, 19 nt, Homo sapiens
  misc_RNA (1)...(19): siRNA sense strand
acuuauauagucaggaaga

SEQ ID NO: 2261290 - RNA, 19 nt, Homo sapiens
  misc_RNA (1)...(19): siRNA sense strand
gugaaggacaugagcccau

SEQ ID NO: 2261291 - RNA, 19 nt, Homo sapiens
  misc_RNA (1)...(19): siRNA sense strand
ggugagcagaaguggccua

SEQ ID NO: 2261292 - RNA, 19 nt, Homo sapiens
  misc_RNA (1)...(19): siRNA sense strand
uaggagaagaccaggcaga

SEQ ID NO: 2261293 - RNA, 19 nt, Homo sapiens
  misc_RNA (1)...(19): siRNA sense strand
aaauccaaaccuaggagaa

SEQ ID NO: 2261294 - RNA, 19 nt, Homo sapiens
  misc_RNA (1)...(19): siRNA sense strand
cuuauauagucaggaagaa

SEQ ID NO: 2261295 - RNA, 19 nt, Homo sapiens
  misc_RNA (1)...(19): siRNA sense strand
ugucgaagccagagcaaag

SEQ ID NO: 2261296 - RNA, 19 nt, Homo sapiens
  misc_RNA (1)...(19): siRNA sense strand
gagaacuugaacaggccaa

SEQ ID NO: 2261297 - RNA, 19 nt, Homo sapiens
  misc_RNA (1)...(19): siRNA sense strand
gcaaagugcaggaagggga

SEQ ID NO: 2261298 - RNA, 19 nt, Homo sapiens
  misc_RNA (1)...(19): siRNA sense strand
aggagaaagcagagauaaa

SEQ ID NO: 2261299 - RNA, 19 nt, Homo sapiens
  misc_RNA (1)...(19): siRNA sense strand
aggaagaagaggaggagga

SEQ ID NO: 2261300 - RNA, 19 nt, Homo sapiens
  misc_RNA (1)...(19): siRNA sense strand
aggaagaggaggaggagga

SEQ ID NO: 2261301 - RNA, 19 nt, Homo sapiens
  misc_RNA (1)...(19): siRNA sense strand
gugaagaaucagaggagga

SEQ ID NO: 2261302 - RNA, 19 nt, Homo sapiens
  misc_RNA (1)...(19): siRNA sense strand
aggaagaggaagaggagga

SEQ ID NO: 2261303 - RNA, 19 nt, Homo sapiens
  misc_RNA (1)...(19): siRNA sense strand
aggaagaggaggaggagga

SEQ ID NO: 2261304 - RNA, 19 nt, Homo sapiens
  misc_RNA (1)...(19): siRNA sense strand
aggaggaggaggaggaaga

SEQ ID NO: 2261305 - RNA, 19 nt, Homo sapiens
  misc_RNA (1)...(19): siRNA sense strand
aggaggaggaagaggaaga

SEQ ID NO: 2261306 - RNA, 19 nt, Homo sapiens
  misc_RNA (1)...(19): siRNA sense strand
ggaagaagugggugaggga

SEQ ID NO: 2261307 - RNA, 19 nt, Homo sapiens
  misc_RNA (1)...(19): siRNA sense strand
cagaggaagaaguggguga

SEQ ID NO: 2261308 - RNA, 19 nt, Homo sapiens
  misc_RNA (1)...(19): siRNA sense strand
aagaagaggaggaggagga

SEQ ID NO: 2261309 - RNA, 19 nt, Homo sapiens
  misc_RNA (1)...(19): siRNA sense strand
agaaggagaaggagggcuu

SEQ ID NO: 2261310 - RNA, 19 nt, Homo sapiens
  misc_RNA (1)...(19): siRNA sense strand
aaucagaggaggaggagga

SEQ ID NO: 2261311 - RNA, 19 nt, Homo sapiens
  misc_RNA (1)...(19): siRNA sense strand
agaugaagaacgagaaaau

SEQ ID NO: 2261312 - RNA, 19 nt, Homo sapiens
  misc_RNA (1)...(19): siRNA sense strand
aagaaguaagugaggaaga

SEQ ID NO: 2261313 - RNA, 19 nt, Homo sapiens
  misc_RNA (1)...(19): siRNA sense strand
gugaagaugaagaacgaga

SEQ ID NO: 2261314 - RNA, 19 nt, Homo sapiens
  misc_RNA (1)...(19): siRNA sense strand
cagaggaggaggaggagga

SEQ ID NO: 2261315 - RNA, 19 nt, Homo sapiens
  misc_RNA (1)...(19): siRNA sense strand
cugaagauggagaaggaga

SEQ ID NO: 2261316 - RNA, 19 nt, Homo sapiens
  misc_RNA (1)...(19): siRNA sense strand
gagcaaaagacaagaaaac

SEQ ID NO: 2261317 - RNA, 19 nt, Homo sapiens
  misc_RNA (1)...(19): siRNA sense strand
aggaggaggaagaggagga

SEQ ID NO: 2261318 - RNA, 19 nt, Homo sapiens
  misc_RNA (1)...(19): siRNA sense strand
aggaggaagaggaggagga

SEQ ID NO: 2261319 - RNA, 19 nt, Homo sapiens
  misc_RNA (1)...(19): siRNA sense strand
aaguaagugaggaagaaau

SEQ ID NO: 2261320 - RNA, 19 nt, Homo sapiens
  misc_RNA (1)...(19): siRNA sense strand
cucaagagccugauggaga

SEQ ID NO: 2261321 - RNA, 19 nt, Homo sapiens
  misc_RNA (1)...(19): siRNA sense strand
cgggaaugggaaagacaga

SEQ ID NO: 2261322 - RNA, 19 nt, Homo sapiens
  misc_RNA (1)...(19): siRNA sense strand
ugaacuauguggagcacga

SEQ ID NO: 2261323 - RNA, 19 nt, Homo sapiens
  misc_RNA (1)...(19): siRNA sense strand
ccagcaaaugucucggaaa

SEQ ID NO: 2261324 - RNA, 19 nt, Homo sapiens
  misc_RNA (1)...(19): siRNA sense strand
aagagaagggaaauggcaa

SEQ ID NO: 2261325 - RNA, 19 nt, Homo sapiens
  misc_RNA (1)...(19): siRNA sense strand
ccaucgagcucaagcagga

SEQ ID NO: 2261326 - RNA, 19 nt, Homo sapiens
  misc_RNA (1)...(19): siRNA sense strand
cgggauuccaagcgggauu

SEQ ID NO: 2261327 - RNA, 19 nt, Homo sapiens
  misc_RNA (1)...(19): siRNA sense strand
cugaggaagaagaggagga

SEQ ID NO: 2261328 - RNA, 19 nt, Homo sapiens
  misc_RNA (1)...(19): siRNA sense strand
aucgagaagaacaggauaa

SEQ ID NO: 2261329 - RNA, 19 nt, Homo sapiens
  misc_RNA (1)...(19): siRNA sense strand
cagaugaaauuguggcucu

SEQ ID NO: 2261330 - RNA, 19 nt, Homo sapiens
  misc_RNA (1)...(19): siRNA sense strand
agauggagaaggagaagga

SEQ ID NO: 2261331 - RNA, 19 nt, Homo sapiens
  misc_RNA (1)...(19): siRNA sense strand
aagaggaagaggaggagga

SEQ ID NO: 2261332 - RNA, 19 nt, Homo sapiens
  misc_RNA (1)...(19): siRNA sense strand
agggagcaccagugaagaa

SEQ ID NO: 2261333 - RNA, 19 nt, Homo sapiens
  misc_RNA (1)...(19): siRNA sense strand
aagaagagaaaauggaaga

SEQ ID NO: 2261334 - RNA, 19 nt, Homo sapiens
  misc_RNA (1)...(19): siRNA sense strand
agacaagaaaacagaugaa

SEQ ID NO: 2261335 - RNA, 19 nt, Homo sapiens
  misc_RNA (1)...(19): siRNA sense strand
acagaggagaagaagauga

SEQ ID NO: 2261336 - RNA, 19 nt, Homo sapiens
  misc_RNA (1)...(19): siRNA sense strand
augcuagagugaaagaaaa

SEQ ID NO: 2261337 - RNA, 19 nt, Homo sapiens
  misc_RNA (1)...(19): siRNA sense strand
aagaagugggugagggaac

SEQ ID NO: 2261338 - RNA, 19 nt, Homo sapiens
  misc_RNA (1)...(19): siRNA sense strand
augaaauuguggcucuaaa

SEQ ID NO: 2261339 - RNA, 19 nt, Homo sapiens
  misc_RNA (1)...(19): siRNA sense strand
ggacucuuggaaagugaaa

SEQ ID NO: 2261340 - RNA, 19 nt, Homo sapiens
  misc_RNA (1)...(19): siRNA sense strand
aagaaucagaggaggagga

SEQ ID NO: 2261341 - RNA, 19 nt, Homo sapiens
  misc_RNA (1)...(19): siRNA sense strand
ggaaaagaaacgaaggaag

SEQ ID NO: 2261342 - RNA, 19 nt, Homo sapiens
  misc_RNA (1)...(19): siRNA sense strand
cugccgaagaaguaaguga

SEQ ID NO: 2261343 - RNA, 19 nt, Homo sapiens
  misc_RNA (1)...(19): siRNA sense strand
gggagagugaagaagcaga

SEQ ID NO: 2261344 - RNA, 19 nt, Homo sapiens
  misc_RNA (1)...(19): siRNA sense strand
agaaacgaaggaaggaaca

SEQ ID NO: 2261345 - RNA, 19 nt, Homo sapiens
  misc_RNA (1)...(19): siRNA sense strand
uuacaggacaucagcgaca

SEQ ID NO: 2261346 - RNA, 19 nt, Homo sapiens
  misc_RNA (1)...(19): siRNA sense strand
aggagaaagcagagauaaa

SEQ ID NO: 2261347 - RNA, 19 nt, Homo sapiens
  misc_RNA (1)...(19): siRNA sense strand
aggaagaagaggaggagga

SEQ ID NO: 2261348 - RNA, 19 nt, Homo sapiens
  misc_RNA (1)...(19): siRNA sense strand
aggaagaggaggaggagga

SEQ ID NO: 2261349 - RNA, 19 nt, Homo sapiens
  misc_RNA (1)...(19): siRNA sense strand
gugaagaaucagaggagga

SEQ ID NO: 2261350 - RNA, 19 nt, Homo sapiens
  misc_RNA (1)...(19): siRNA sense strand
aggaagaggaagaggagga

SEQ ID NO: 2261351 - RNA, 19 nt, Homo sapiens
  misc_RNA (1)...(19): siRNA sense strand
aggaagaggaggaggagga

SEQ ID NO: 2261352 - RNA, 19 nt, Homo sapiens
  misc_RNA (1)...(19): siRNA sense strand
aggaggaggaggaggaaga

SEQ ID NO: 2261353 - RNA, 19 nt, Homo sapiens
  misc_RNA (1)...(19): siRNA sense strand
aggaggaggaagaggaaga

SEQ ID NO: 2261354 - RNA, 19 nt, Homo sapiens
  misc_RNA (1)...(19): siRNA sense strand
ggaagaagugggugaggga

SEQ ID NO: 2261355 - RNA, 19 nt, Homo sapiens
  misc_RNA (1)...(19): siRNA sense strand
cagaggaagaaguggguga

SEQ ID NO: 2261356 - RNA, 19 nt, Homo sapiens
  misc_RNA (1)...(19): siRNA sense strand
aagaagaggaggaggagga

SEQ ID NO: 2261357 - RNA, 19 nt, Homo sapiens
  misc_RNA (1)...(19): siRNA sense strand
agaaggagaaggagggcuu

SEQ ID NO: 2261358 - RNA, 19 nt, Homo sapiens
  misc_RNA (1)...(19): siRNA sense strand
aaucagaggaggaggagga

SEQ ID NO: 2261359 - RNA, 19 nt, Homo sapiens
  misc_RNA (1)...(19): siRNA sense strand
agaugaagaacgagaaaau

SEQ ID NO: 2261360 - RNA, 19 nt, Homo sapiens
  misc_RNA (1)...(19): siRNA sense strand
aagaaguaagugaggaaga

SEQ ID NO: 2261361 - RNA, 19 nt, Homo sapiens
  misc_RNA (1)...(19): siRNA sense strand
gugaagaugaagaacgaga

SEQ ID NO: 2261362 - RNA, 19 nt, Homo sapiens
  misc_RNA (1)...(19): siRNA sense strand
cagaggaggaggaggagga

SEQ ID NO: 2261363 - RNA, 19 nt, Homo sapiens
  misc_RNA (1)...(19): siRNA sense strand
cugaagauggagaaggaga

SEQ ID NO: 2261364 - RNA, 19 nt, Homo sapiens
  misc_RNA (1)...(19): siRNA sense strand
gagcaaaagacaagaaaac

SEQ ID NO: 2261365 - RNA, 19 nt, Homo sapiens
  misc_RNA (1)...(19): siRNA sense strand
aggaggaggaagaggagga

SEQ ID NO: 2261366 - RNA, 19 nt, Homo sapiens
  misc_RNA (1)...(19): siRNA sense strand
aggaggaagaggaggagga

SEQ ID NO: 2261367 - RNA, 19 nt, Homo sapiens
  misc_RNA (1)...(19): siRNA sense strand
aaguaagugaggaagaaau

SEQ ID NO: 2261368 - RNA, 19 nt, Homo sapiens
  misc_RNA (1)...(19): siRNA sense strand
cucaagagccugauggaga

SEQ ID NO: 2261369 - RNA, 19 nt, Homo sapiens
  misc_RNA (1)...(19): siRNA sense strand
cgggaaugggaaagacaga

SEQ ID NO: 2261370 - RNA, 19 nt, Homo sapiens
  misc_RNA (1)...(19): siRNA sense strand
ugaacuauguggagcacga

SEQ ID NO: 2261371 - RNA, 19 nt, Homo sapiens
  misc_RNA (1)...(19): siRNA sense strand
ccagcaaaugucucggaaa

SEQ ID NO: 2261372 - RNA, 19 nt, Homo sapiens
  misc_RNA (1)...(19): siRNA sense strand
aagagaagggaaauggcaa

SEQ ID NO: 2261373 - RNA, 19 nt, Homo sapiens
  misc_RNA (1)...(19): siRNA sense strand
ccaucgagcucaagcagga

SEQ ID NO: 2261374 - RNA, 19 nt, Homo sapiens
  misc_RNA (1)...(19): siRNA sense strand
cgggauuccaagcgggauu

SEQ ID NO: 2261375 - RNA, 19 nt, Homo sapiens
  misc_RNA (1)...(19): siRNA sense strand
cugaggaagaagaggagga

SEQ ID NO: 2261376 - RNA, 19 nt, Homo sapiens
  misc_RNA (1)...(19): siRNA sense strand
aucgagaagaacaggauaa

SEQ ID NO: 2261377 - RNA, 19 nt, Homo sapiens
  misc_RNA (1)...(19): siRNA sense strand
cagaugaaauuguggcucu

SEQ ID NO: 2261378 - RNA, 19 nt, Homo sapiens
  misc_RNA (1)...(19): siRNA sense strand
agauggagaaggagaagga

SEQ ID NO: 2261379 - RNA, 19 nt, Homo sapiens
  misc_RNA (1)...(19): siRNA sense strand
aagaggaagaggaggagga

SEQ ID NO: 2261380 - RNA, 19 nt, Homo sapiens
  misc_RNA (1)...(19): siRNA sense strand
agggagcaccagugaagaa

SEQ ID NO: 2261381 - RNA, 19 nt, Homo sapiens
  misc_RNA (1)...(19): siRNA sense strand
aagaagagaaaauggaaga

SEQ ID NO: 2261382 - RNA, 19 nt, Homo sapiens
  misc_RNA (1)...(19): siRNA sense strand
agacaagaaaacagaugaa

SEQ ID NO: 2261383 - RNA, 19 nt, Homo sapiens
  misc_RNA (1)...(19): siRNA sense strand
acagaggagaagaagauga

SEQ ID NO: 2261384 - RNA, 19 nt, Homo sapiens
  misc_RNA (1)...(19): siRNA sense strand
augcuagagugaaagaaaa

SEQ ID NO: 2261385 - RNA, 19 nt, Homo sapiens
  misc_RNA (1)...(19): siRNA sense strand
aagaagugggugagggaac

SEQ ID NO: 2261386 - RNA, 19 nt, Homo sapiens
  misc_RNA (1)...(19): siRNA sense strand
augaaauuguggcucuaaa

SEQ ID NO: 2261387 - RNA, 19 nt, Homo sapiens
  misc_RNA (1)...(19): siRNA sense strand
ggacucuuggaaagugaaa

SEQ ID NO: 2261388 - RNA, 19 nt, Homo sapiens
  misc_RNA (1)...(19): siRNA sense strand
aagaaucagaggaggagga

SEQ ID NO: 2261389 - RNA, 19 nt, Homo sapiens
  misc_RNA (1)...(19): siRNA sense strand
ggaaaagaaacgaaggaag

SEQ ID NO: 2261390 - RNA, 19 nt, Homo sapiens
  misc_RNA (1)...(19): siRNA sense strand
cugccgaagaaguaaguga

SEQ ID NO: 2261391 - RNA, 19 nt, Homo sapiens
  misc_RNA (1)...(19): siRNA sense strand
gggagagugaagaagcaga

SEQ ID NO: 2261392 - RNA, 19 nt, Homo sapiens
  misc_RNA (1)...(19): siRNA sense strand
agaaacgaaggaaggaaca

SEQ ID NO: 2261393 - RNA, 19 nt, Homo sapiens
  misc_RNA (1)...(19): siRNA sense strand
uuacaggacaucagcgaca

SEQ ID NO: 2261394 - RNA, 19 nt, Homo sapiens
  misc_RNA (1)...(19): siRNA sense strand
aggaagaagaggaggagga

SEQ ID NO: 2261395 - RNA, 19 nt, Homo sapiens
  misc_RNA (1)...(19): siRNA sense strand
aggaagaggaggaggagga

SEQ ID NO: 2261396 - RNA, 19 nt, Homo sapiens
  misc_RNA (1)...(19): siRNA sense strand
gugaagaaucagaggagga

SEQ ID NO: 2261397 - RNA, 19 nt, Homo sapiens
  misc_RNA (1)...(19): siRNA sense strand
aggaagaggaagaggagga

SEQ ID NO: 2261398 - RNA, 19 nt, Homo sapiens
  misc_RNA (1)...(19): siRNA sense strand
aggaagaggaggaggagga

SEQ ID NO: 2261399 - RNA, 19 nt, Homo sapiens
  misc_RNA (1)...(19): siRNA sense strand
aggaggaggaggaggaaga

SEQ ID NO: 2261400 - RNA, 19 nt, Homo sapiens
  misc_RNA (1)...(19): siRNA sense strand
aggaggaggaagaggaaga

SEQ ID NO: 2261401 - RNA, 19 nt, Homo sapiens
  misc_RNA (1)...(19): siRNA sense strand
ggaagaagugggugaggga

SEQ ID NO: 2261402 - RNA, 19 nt, Homo sapiens
  misc_RNA (1)...(19): siRNA sense strand
cagaggaagaaguggguga

SEQ ID NO: 2261403 - RNA, 19 nt, Homo sapiens
  misc_RNA (1)...(19): siRNA sense strand
aagaagaggaggaggagga

SEQ ID NO: 2261404 - RNA, 19 nt, Homo sapiens
  misc_RNA (1)...(19): siRNA sense strand
agaaggagaaggagggcuu

SEQ ID NO: 2261405 - RNA, 19 nt, Homo sapiens
  misc_RNA (1)...(19): siRNA sense strand
aaucagaggaggaggagga

SEQ ID NO: 2261406 - RNA, 19 nt, Homo sapiens
  misc_RNA (1)...(19): siRNA sense strand
agaugaagaacgagaaaau

SEQ ID NO: 2261407 - RNA, 19 nt, Homo sapiens
  misc_RNA (1)...(19): siRNA sense strand
aagaaguaagugaggaaga

SEQ ID NO: 2261408 - RNA, 19 nt, Homo sapiens
  misc_RNA (1)...(19): siRNA sense strand
gugaagaugaagaacgaga

SEQ ID NO: 2261409 - RNA, 19 nt, Homo sapiens
  misc_RNA (1)...(19): siRNA sense strand
cagaggaggaggaggagga

SEQ ID NO: 2261410 - RNA, 19 nt, Homo sapiens
  misc_RNA (1)...(19): siRNA sense strand
cugaagauggagaaggaga

SEQ ID NO: 2261411 - RNA, 19 nt, Homo sapiens
  misc_RNA (1)...(19): siRNA sense strand
gagcaaaagacaagaaaac

SEQ ID NO: 2261412 - RNA, 19 nt, Homo sapiens
  misc_RNA (1)...(19): siRNA sense strand
aggaggaggaagaggagga

SEQ ID NO: 2261413 - RNA, 19 nt, Homo sapiens
  misc_RNA (1)...(19): siRNA sense strand
aggaggaagaggaggagga

SEQ ID NO: 2261414 - RNA, 19 nt, Homo sapiens
  misc_RNA (1)...(19): siRNA sense strand
aaguaagugaggaagaaau

SEQ ID NO: 2261415 - RNA, 19 nt, Homo sapiens
  misc_RNA (1)...(19): siRNA sense strand
cucaagagccugauggaga

SEQ ID NO: 2261416 - RNA, 19 nt, Homo sapiens
  misc_RNA (1)...(19): siRNA sense strand
ugaacuauguggagcacga

SEQ ID NO: 2261417 - RNA, 19 nt, Homo sapiens
  misc_RNA (1)...(19): siRNA sense strand
ccaucgagcucaagcagga

SEQ ID NO: 2261418 - RNA, 19 nt, Homo sapiens
  misc_RNA (1)...(19): siRNA sense strand
cugaggaagaagaggagga

SEQ ID NO: 2261419 - RNA, 19 nt, Homo sapiens
  misc_RNA (1)...(19): siRNA sense strand
cagaugaaauuguggcucu

SEQ ID NO: 2261420 - RNA, 19 nt, Homo sapiens
  misc_RNA (1)...(19): siRNA sense strand
agauggagaaggagaagga

SEQ ID NO: 2261421 - RNA, 19 nt, Homo sapiens
  misc_RNA (1)...(19): siRNA sense strand
aagaggaagaggaggagga

SEQ ID NO: 2261422 - RNA, 19 nt, Homo sapiens
  misc_RNA (1)...(19): siRNA sense strand
agggagcaccagugaagaa

SEQ ID NO: 2261423 - RNA, 19 nt, Homo sapiens
  misc_RNA (1)...(19): siRNA sense strand
agacaagaaaacagaugaa

SEQ ID NO: 2261424 - RNA, 19 nt, Homo sapiens
  misc_RNA (1)...(19): siRNA sense strand
aagaagugggugagggaac

SEQ ID NO: 2261425 - RNA, 19 nt, Homo sapiens
  misc_RNA (1)...(19): siRNA sense strand
augaaauuguggcucuaaa

SEQ ID NO: 2261426 - RNA, 19 nt, Homo sapiens
  misc_RNA (1)...(19): siRNA sense strand
aagaaucagaggaggagga

SEQ ID NO: 2261427 - RNA, 19 nt, Homo sapiens
  misc_RNA (1)...(19): siRNA sense strand
cugccgaagaaguaaguga

SEQ ID NO: 2261428 - RNA, 19 nt, Homo sapiens
  misc_RNA (1)...(19): siRNA sense strand
gggagagugaagaagcaga

SEQ ID NO: 2261429 - RNA, 19 nt, Homo sapiens
  misc_RNA (1)...(19): siRNA sense strand
uuacaggacaucagcgaca

SEQ ID NO: 2261430 - RNA, 19 nt, Homo sapiens
  misc_RNA (1)...(19): siRNA sense strand
gacaagaucuacaucguga

SEQ ID NO: 2261431 - RNA, 19 nt, Homo sapiens
  misc_RNA (1)...(19): siRNA sense strand
aaugagugaagaugaagaa

SEQ ID NO: 2261432 - RNA, 19 nt, Homo sapiens
  misc_RNA (1)...(19): siRNA sense strand
aggaggaggaggaagagga

SEQ ID NO: 2261433 - RNA, 19 nt, Homo sapiens
  misc_RNA (1)...(19): siRNA sense strand
aggaggaggaggaagagga

SEQ ID NO: 2261434 - RNA, 19 nt, Homo sapiens
  misc_RNA (1)...(19): siRNA sense strand
aggaggaagaggaagagga

SEQ ID NO: 2261435 - RNA, 19 nt, Homo sapiens
  misc_RNA (1)...(19): siRNA sense strand
agaugaaauuguggcucua

SEQ ID NO: 2261436 - RNA, 19 nt, Homo sapiens
  misc_RNA (1)...(19): siRNA sense strand
cuugguuguuccagaguca

SEQ ID NO: 2261437 - RNA, 19 nt, Homo sapiens
  misc_RNA (1)...(19): siRNA sense strand
aggaagaagaggaggagga

SEQ ID NO: 2261438 - RNA, 19 nt, Homo sapiens
  misc_RNA (1)...(19): siRNA sense strand
aggaagaggaggaggagga

SEQ ID NO: 2261439 - RNA, 19 nt, Homo sapiens
  misc_RNA (1)...(19): siRNA sense strand
gugaagaaucagaggagga

SEQ ID NO: 2261440 - RNA, 19 nt, Homo sapiens
  misc_RNA (1)...(19): siRNA sense strand
aggaagaggaagaggagga

SEQ ID NO: 2261441 - RNA, 19 nt, Homo sapiens
  misc_RNA (1)...(19): siRNA sense strand
aggaagaggaggaggagga

SEQ ID NO: 2261442 - RNA, 19 nt, Homo sapiens
  misc_RNA (1)...(19): siRNA sense strand
aggaggaggaggaggaaga

SEQ ID NO: 2261443 - RNA, 19 nt, Homo sapiens
  misc_RNA (1)...(19): siRNA sense strand
aggaggaggaagaggaaga

SEQ ID NO: 2261444 - RNA, 19 nt, Homo sapiens
  misc_RNA (1)...(19): siRNA sense strand
ggaagaagugggugaggga

SEQ ID NO: 2261445 - RNA, 19 nt, Homo sapiens
  misc_RNA (1)...(19): siRNA sense strand
cagaggaagaaguggguga

SEQ ID NO: 2261446 - RNA, 19 nt, Homo sapiens
  misc_RNA (1)...(19): siRNA sense strand
aagaagaggaggaggagga

SEQ ID NO: 2261447 - RNA, 19 nt, Homo sapiens
  misc_RNA (1)...(19): siRNA sense strand
agaaggagaaggagggcuu

SEQ ID NO: 2261448 - RNA, 19 nt, Homo sapiens
  misc_RNA (1)...(19): siRNA sense strand
aaucagaggaggaggagga

SEQ ID NO: 2261449 - RNA, 19 nt, Homo sapiens
  misc_RNA (1)...(19): siRNA sense strand
agaugaagaacgagaaaau

SEQ ID NO: 2261450 - RNA, 19 nt, Homo sapiens
  misc_RNA (1)...(19): siRNA sense strand
aagaaguaagugaggaaga

SEQ ID NO: 2261451 - RNA, 19 nt, Homo sapiens
  misc_RNA (1)...(19): siRNA sense strand
gugaagaugaagaacgaga

SEQ ID NO: 2261452 - RNA, 19 nt, Homo sapiens
  misc_RNA (1)...(19): siRNA sense strand
cagaggaggaggaggagga

SEQ ID NO: 2261453 - RNA, 19 nt, Homo sapiens
  misc_RNA (1)...(19): siRNA sense strand
cugaagauggagaaggaga

SEQ ID NO: 2261454 - RNA, 19 nt, Homo sapiens
  misc_RNA (1)...(19): siRNA sense strand
gagcaaaagacaagaaaac

SEQ ID NO: 2261455 - RNA, 19 nt, Homo sapiens
  misc_RNA (1)...(19): siRNA sense strand
aggaggaggaagaggagga

SEQ ID NO: 2261456 - RNA, 19 nt, Homo sapiens
  misc_RNA (1)...(19): siRNA sense strand
aggaggaagaggaggagga

SEQ ID NO: 2261457 - RNA, 19 nt, Homo sapiens
  misc_RNA (1)...(19): siRNA sense strand
aaguaagugaggaagaaau

SEQ ID NO: 2261458 - RNA, 19 nt, Homo sapiens
  misc_RNA (1)...(19): siRNA sense strand
cucaagagccugauggaga

SEQ ID NO: 2261459 - RNA, 19 nt, Homo sapiens
  misc_RNA (1)...(19): siRNA sense strand
cgggaaugggaaagacaga

SEQ ID NO: 2261460 - RNA, 19 nt, Homo sapiens
  misc_RNA (1)...(19): siRNA sense strand
ugaacuauguggagcacga

SEQ ID NO: 2261461 - RNA, 19 nt, Homo sapiens
  misc_RNA (1)...(19): siRNA sense strand
ccagcaaaugucucggaaa

SEQ ID NO: 2261462 - RNA, 19 nt, Homo sapiens
  misc_RNA (1)...(19): siRNA sense strand
aagagaagggaaauggcaa

SEQ ID NO: 2261463 - RNA, 19 nt, Homo sapiens
  misc_RNA (1)...(19): siRNA sense strand
ccaucgagcucaagcagga

SEQ ID NO: 2261464 - RNA, 19 nt, Homo sapiens
  misc_RNA (1)...(19): siRNA sense strand
cgggauuccaagcgggauu

SEQ ID NO: 2261465 - RNA, 19 nt, Homo sapiens
  misc_RNA (1)...(19): siRNA sense strand
cugaggaagaagaggagga

SEQ ID NO: 2261466 - RNA, 19 nt, Homo sapiens
  misc_RNA (1)...(19): siRNA sense strand
aucgagaagaacaggauaa

SEQ ID NO: 2261467 - RNA, 19 nt, Homo sapiens
  misc_RNA (1)...(19): siRNA sense strand
cagaugaaauuguggcucu

SEQ ID NO: 2261468 - RNA, 19 nt, Homo sapiens
  misc_RNA (1)...(19): siRNA sense strand
agauggagaaggagaagga

SEQ ID NO: 2261469 - RNA, 19 nt, Homo sapiens
  misc_RNA (1)...(19): siRNA sense strand
aagaggaagaggaggagga

SEQ ID NO: 2261470 - RNA, 19 nt, Homo sapiens
  misc_RNA (1)...(19): siRNA sense strand
agggagcaccagugaagaa

SEQ ID NO: 2261471 - RNA, 19 nt, Homo sapiens
  misc_RNA (1)...(19): siRNA sense strand
aagaagagaaaauggaaga

SEQ ID NO: 2261472 - RNA, 19 nt, Homo sapiens
  misc_RNA (1)...(19): siRNA sense strand
agacaagaaaacagaugaa

SEQ ID NO: 2261473 - RNA, 19 nt, Homo sapiens
  misc_RNA (1)...(19): siRNA sense strand
augcuagagugaaagaaaa

SEQ ID NO: 2261474 - RNA, 19 nt, Homo sapiens
  misc_RNA (1)...(19): siRNA sense strand
acagaggagaagaagauga

SEQ ID NO: 2261475 - RNA, 19 nt, Homo sapiens
  misc_RNA (1)...(19): siRNA sense strand
aagaagugggugagggaac

SEQ ID NO: 2261476 - RNA, 19 nt, Homo sapiens
  misc_RNA (1)...(19): siRNA sense strand
augaaauuguggcucuaaa

SEQ ID NO: 2261477 - RNA, 19 nt, Homo sapiens
  misc_RNA (1)...(19): siRNA sense strand
aagaaucagaggaggagga

SEQ ID NO: 2261478 - RNA, 19 nt, Homo sapiens
  misc_RNA (1)...(19): siRNA sense strand
cugccgaagaaguaaguga

SEQ ID NO: 2261479 - RNA, 19 nt, Homo sapiens
  misc_RNA (1)...(19): siRNA sense strand
gggagagugaagaagcaga

SEQ ID NO: 2261480 - RNA, 19 nt, Homo sapiens
  misc_RNA (1)...(19): siRNA sense strand
uuacaggacaucagcgaca

SEQ ID NO: 2261481 - RNA, 19 nt, Homo sapiens
  misc_RNA (1)...(19): siRNA sense strand
gacaagaucuacaucguga

SEQ ID NO: 2261482 - RNA, 19 nt, Homo sapiens
  misc_RNA (1)...(19): siRNA sense strand
aaugagugaagaugaagaa

SEQ ID NO: 2261483 - RNA, 19 nt, Homo sapiens
  misc_RNA (1)...(19): siRNA sense strand
ucggaaacgacaucgagaa

SEQ ID NO: 2261484 - RNA, 19 nt, Homo sapiens
  misc_RNA (1)...(19): siRNA sense strand
aggaggaggaggaagagga

SEQ ID NO: 2261485 - RNA, 19 nt, Homo sapiens
  misc_RNA (1)...(19): siRNA sense strand
aggaggaggaggaagagga

SEQ ID NO: 2261486 - RNA, 19 nt, Homo sapiens
  misc_RNA (1)...(19): siRNA sense strand
aggaagaagaggaggagga

SEQ ID NO: 2261487 - RNA, 19 nt, Homo sapiens
  misc_RNA (1)...(19): siRNA sense strand
aggaagaggaggaggagga

SEQ ID NO: 2261488 - RNA, 19 nt, Homo sapiens
  misc_RNA (1)...(19): siRNA sense strand
gugaagaaucagaggagga

SEQ ID NO: 2261489 - RNA, 19 nt, Homo sapiens
  misc_RNA (1)...(19): siRNA sense strand
aggaagaggaagaggagga

SEQ ID NO: 2261490 - RNA, 19 nt, Homo sapiens
  misc_RNA (1)...(19): siRNA sense strand
aggaagaggaggaggagga

SEQ ID NO: 2261491 - RNA, 19 nt, Homo sapiens
  misc_RNA (1)...(19): siRNA sense strand
aggaggaggaggaggaaga

SEQ ID NO: 2261492 - RNA, 19 nt, Homo sapiens
  misc_RNA (1)...(19): siRNA sense strand
aggaggaggaagaggaaga

SEQ ID NO: 2261493 - RNA, 19 nt, Homo sapiens
  misc_RNA (1)...(19): siRNA sense strand
ggaagaagugggugaggga

SEQ ID NO: 2261494 - RNA, 19 nt, Homo sapiens
  misc_RNA (1)...(19): siRNA sense strand
cagaggaagaaguggguga

SEQ ID NO: 2261495 - RNA, 19 nt, Homo sapiens
  misc_RNA (1)...(19): siRNA sense strand
aagaagaggaggaggagga

SEQ ID NO: 2261496 - RNA, 19 nt, Homo sapiens
  misc_RNA (1)...(19): siRNA sense strand
agaaggagaaggagggcuu

SEQ ID NO: 2261497 - RNA, 19 nt, Homo sapiens
  misc_RNA (1)...(19): siRNA sense strand
aaucagaggaggaggagga

SEQ ID NO: 2261498 - RNA, 19 nt, Homo sapiens
  misc_RNA (1)...(19): siRNA sense strand
agaugaagaacgagaaaau

SEQ ID NO: 2261499 - RNA, 19 nt, Homo sapiens
  misc_RNA (1)...(19): siRNA sense strand
aagaaguaagugaggaaga

SEQ ID NO: 2261500 - RNA, 19 nt, Homo sapiens
  misc_RNA (1)...(19): siRNA sense strand
gugaagaugaagaacgaga

SEQ ID NO: 2261501 - RNA, 19 nt, Homo sapiens
  misc_RNA (1)...(19): siRNA sense strand
cagaggaggaggaggagga

SEQ ID NO: 2261502 - RNA, 19 nt, Homo sapiens
  misc_RNA (1)...(19): siRNA sense strand
cugaagauggagaaggaga

SEQ ID NO: 2261503 - RNA, 19 nt, Homo sapiens
  misc_RNA (1)...(19): siRNA sense strand
gagcaaaagacaagaaaac

SEQ ID NO: 2261504 - RNA, 19 nt, Homo sapiens
  misc_RNA (1)...(19): siRNA sense strand
aggaggaggaagaggagga

SEQ ID NO: 2261505 - RNA, 19 nt, Homo sapiens
  misc_RNA (1)...(19): siRNA sense strand
aggaggaagaggaggagga

SEQ ID NO: 2261506 - RNA, 19 nt, Homo sapiens
  misc_RNA (1)...(19): siRNA sense strand
aaguaagugaggaagaaau

SEQ ID NO: 2261507 - RNA, 19 nt, Homo sapiens
  misc_RNA (1)...(19): siRNA sense strand
cucaagagccugauggaga

SEQ ID NO: 2261508 - RNA, 19 nt, Homo sapiens
  misc_RNA (1)...(19): siRNA sense strand
cgggaaugggaaagacaga

SEQ ID NO: 2261509 - RNA, 19 nt, Homo sapiens
  misc_RNA (1)...(19): siRNA sense strand
ugaacuauguggagcacga

SEQ ID NO: 2261510 - RNA, 19 nt, Homo sapiens
  misc_RNA (1)...(19): siRNA sense strand
ccagcaaaugucucggaaa

SEQ ID NO: 2261511 - RNA, 19 nt, Homo sapiens
  misc_RNA (1)...(19): siRNA sense strand
aagagaagggaaauggcaa

SEQ ID NO: 2261512 - RNA, 19 nt, Homo sapiens
  misc_RNA (1)...(19): siRNA sense strand
ccaucgagcucaagcagga

SEQ ID NO: 2261513 - RNA, 19 nt, Homo sapiens
  misc_RNA (1)...(19): siRNA sense strand
cgggauuccaagcgggauu

SEQ ID NO: 2261514 - RNA, 19 nt, Homo sapiens
  misc_RNA (1)...(19): siRNA sense strand
cugaggaagaagaggagga

SEQ ID NO: 2261515 - RNA, 19 nt, Homo sapiens
  misc_RNA (1)...(19): siRNA sense strand
aucgagaagaacaggauaa

SEQ ID NO: 2261516 - RNA, 19 nt, Homo sapiens
  misc_RNA (1)...(19): siRNA sense strand
cagaugaaauuguggcucu

SEQ ID NO: 2261517 - RNA, 19 nt, Homo sapiens
  misc_RNA (1)...(19): siRNA sense strand
agauggagaaggagaagga

SEQ ID NO: 2261518 - RNA, 19 nt, Homo sapiens
  misc_RNA (1)...(19): siRNA sense strand
aagaggaagaggaggagga

SEQ ID NO: 2261519 - RNA, 19 nt, Homo sapiens
  misc_RNA (1)...(19): siRNA sense strand
agggagcaccagugaagaa

SEQ ID NO: 2261520 - RNA, 19 nt, Homo sapiens
  misc_RNA (1)...(19): siRNA sense strand
aagaagagaaaauggaaga

SEQ ID NO: 2261521 - RNA, 19 nt, Homo sapiens
  misc_RNA (1)...(19): siRNA sense strand
agacaagaaaacagaugaa

SEQ ID NO: 2261522 - RNA, 19 nt, Homo sapiens
  misc_RNA (1)...(19): siRNA sense strand
augcuagagugaaagaaaa

SEQ ID NO: 2261523 - RNA, 19 nt, Homo sapiens
  misc_RNA (1)...(19): siRNA sense strand
acagaggagaagaagauga

SEQ ID NO: 2261524 - RNA, 19 nt, Homo sapiens
  misc_RNA (1)...(19): siRNA sense strand
aagaagugggugagggaac

SEQ ID NO: 2261525 - RNA, 19 nt, Homo sapiens
  misc_RNA (1)...(19): siRNA sense strand
augaaauuguggcucuaaa

SEQ ID NO: 2261526 - RNA, 19 nt, Homo sapiens
  misc_RNA (1)...(19): siRNA sense strand
aagaaucagaggaggagga

SEQ ID NO: 2261527 - RNA, 19 nt, Homo sapiens
  misc_RNA (1)...(19): siRNA sense strand
cugccgaagaaguaaguga

SEQ ID NO: 2261528 - RNA, 19 nt, Homo sapiens
  misc_RNA (1)...(19): siRNA sense strand
gggagagugaagaagcaga

SEQ ID NO: 2261529 - RNA, 19 nt, Homo sapiens
  misc_RNA (1)...(19): siRNA sense strand
uuacaggacaucagcgaca

SEQ ID NO: 2261530 - RNA, 19 nt, Homo sapiens
  misc_RNA (1)...(19): siRNA sense strand
gacaagaucuacaucguga

SEQ ID NO: 2261531 - RNA, 19 nt, Homo sapiens
  misc_RNA (1)...(19): siRNA sense strand
aaugagugaagaugaagaa

SEQ ID NO: 2261532 - RNA, 19 nt, Homo sapiens
  misc_RNA (1)...(19): siRNA sense strand
ucggaaacgacaucgagaa

SEQ ID NO: 2261533 - RNA, 19 nt, Homo sapiens
  misc_RNA (1)...(19): siRNA sense strand
aggaggaggaggaagagga

SEQ ID NO: 2261534 - RNA, 19 nt, Homo sapiens
  misc_RNA (1)...(19): siRNA sense strand
aggaggaggaggaagagga

SEQ ID NO: 2261535 - RNA, 19 nt, Homo sapiens
  misc_RNA (1)...(19): siRNA sense strand
aggaagaagaggaggagga

SEQ ID NO: 2261536 - RNA, 19 nt, Homo sapiens
  misc_RNA (1)...(19): siRNA sense strand
aggaagaggaggaggagga

SEQ ID NO: 2261537 - RNA, 19 nt, Homo sapiens
  misc_RNA (1)...(19): siRNA sense strand
gugaagaaucagaggagga

SEQ ID NO: 2261538 - RNA, 19 nt, Homo sapiens
  misc_RNA (1)...(19): siRNA sense strand
aggaagaggaagaggagga

SEQ ID NO: 2261539 - RNA, 19 nt, Homo sapiens
  misc_RNA (1)...(19): siRNA sense strand
aggaagaggaggaggagga

SEQ ID NO: 2261540 - RNA, 19 nt, Homo sapiens
  misc_RNA (1)...(19): siRNA sense strand
aggaggaggaggaggaaga

SEQ ID NO: 2261541 - RNA, 19 nt, Homo sapiens
  misc_RNA (1)...(19): siRNA sense strand
aggaggaggaagaggaaga

SEQ ID NO: 2261542 - RNA, 19 nt, Homo sapiens
  misc_RNA (1)...(19): siRNA sense strand
ggaagaagugggugaggga

SEQ ID NO: 2261543 - RNA, 19 nt, Homo sapiens
  misc_RNA (1)...(19): siRNA sense strand
cagaggaagaaguggguga

SEQ ID NO: 2261544 - RNA, 19 nt, Homo sapiens
  misc_RNA (1)...(19): siRNA sense strand
aagaagaggaggaggagga

SEQ ID NO: 2261545 - RNA, 19 nt, Homo sapiens
  misc_RNA (1)...(19): siRNA sense strand
agaaggagaaggagggcuu

SEQ ID NO: 2261546 - RNA, 19 nt, Homo sapiens
  misc_RNA (1)...(19): siRNA sense strand
aaucagaggaggaggagga

SEQ ID NO: 2261547 - RNA, 19 nt, Homo sapiens
  misc_RNA (1)...(19): siRNA sense strand
agaugaagaacgagaaaau

SEQ ID NO: 2261548 - RNA, 19 nt, Homo sapiens
  misc_RNA (1)...(19): siRNA sense strand
aagaaguaagugaggaaga

SEQ ID NO: 2261549 - RNA, 19 nt, Homo sapiens
  misc_RNA (1)...(19): siRNA sense strand
gugaagaugaagaacgaga

SEQ ID NO: 2261550 - RNA, 19 nt, Homo sapiens
  misc_RNA (1)...(19): siRNA sense strand
cagaggaggaggaggagga

SEQ ID NO: 2261551 - RNA, 19 nt, Homo sapiens
  misc_RNA (1)...(19): siRNA sense strand
cugaagauggagaaggaga

SEQ ID NO: 2261552 - RNA, 19 nt, Homo sapiens
  misc_RNA (1)...(19): siRNA sense strand
gagcaaaagacaagaaaac

SEQ ID NO: 2261553 - RNA, 19 nt, Homo sapiens
  misc_RNA (1)...(19): siRNA sense strand
aggaggaggaagaggagga

SEQ ID NO: 2261554 - RNA, 19 nt, Homo sapiens
  misc_RNA (1)...(19): siRNA sense strand
aggaggaagaggaggagga

SEQ ID NO: 2261555 - RNA, 19 nt, Homo sapiens
  misc_RNA (1)...(19): siRNA sense strand
aaguaagugaggaagaaau

SEQ ID NO: 2261556 - RNA, 19 nt, Homo sapiens
  misc_RNA (1)...(19): siRNA sense strand
cucaagagccugauggaga

SEQ ID NO: 2261557 - RNA, 19 nt, Homo sapiens
  misc_RNA (1)...(19): siRNA sense strand
ugaacuauguggagcacga

SEQ ID NO: 2261558 - RNA, 19 nt, Homo sapiens
  misc_RNA (1)...(19): siRNA sense strand
ccaucgagcucaagcagga

SEQ ID NO: 2261559 - RNA, 19 nt, Homo sapiens
  misc_RNA (1)...(19): siRNA sense strand
cugaggaagaagaggagga

SEQ ID NO: 2261560 - RNA, 19 nt, Homo sapiens
  misc_RNA (1)...(19): siRNA sense strand
cagaugaaauuguggcucu

SEQ ID NO: 2261561 - RNA, 19 nt, Homo sapiens
  misc_RNA (1)...(19): siRNA sense strand
agauggagaaggagaagga

SEQ ID NO: 2261562 - RNA, 19 nt, Homo sapiens
  misc_RNA (1)...(19): siRNA sense strand
aagaggaagaggaggagga

SEQ ID NO: 2261563 - RNA, 19 nt, Homo sapiens
  misc_RNA (1)...(19): siRNA sense strand
agggagcaccagugaagaa

SEQ ID NO: 2261564 - RNA, 19 nt, Homo sapiens
  misc_RNA (1)...(19): siRNA sense strand
aagaagagaaaauggaaga

SEQ ID NO: 2261565 - RNA, 19 nt, Homo sapiens
  misc_RNA (1)...(19): siRNA sense strand
agacaagaaaacagaugaa

SEQ ID NO: 2261566 - RNA, 19 nt, Homo sapiens
  misc_RNA (1)...(19): siRNA sense strand
aagaagugggugagggaac

SEQ ID NO: 2261567 - RNA, 19 nt, Homo sapiens
  misc_RNA (1)...(19): siRNA sense strand
augaaauuguggcucuaaa

SEQ ID NO: 2261568 - RNA, 19 nt, Homo sapiens
  misc_RNA (1)...(19): siRNA sense strand
aagaaucagaggaggagga

SEQ ID NO: 2261569 - RNA, 19 nt, Homo sapiens
  misc_RNA (1)...(19): siRNA sense strand
cugccgaagaaguaaguga

SEQ ID NO: 2261570 - RNA, 19 nt, Homo sapiens
  misc_RNA (1)...(19): siRNA sense strand
gggagagugaagaagcaga

SEQ ID NO: 2261571 - RNA, 19 nt, Homo sapiens
  misc_RNA (1)...(19): siRNA sense strand
uuacaggacaucagcgaca

SEQ ID NO: 2261572 - RNA, 19 nt, Homo sapiens
  misc_RNA (1)...(19): siRNA sense strand
gacaagaucuacaucguga

SEQ ID NO: 2261573 - RNA, 19 nt, Homo sapiens
  misc_RNA (1)...(19): siRNA sense strand
aaugagugaagaugaagaa

SEQ ID NO: 2261574 - RNA, 19 nt, Homo sapiens
  misc_RNA (1)...(19): siRNA sense strand
aggaggaggaggaagagga

SEQ ID NO: 2261575 - RNA, 19 nt, Homo sapiens
  misc_RNA (1)...(19): siRNA sense strand
aggaggaggaggaagagga

SEQ ID NO: 2261576 - RNA, 19 nt, Homo sapiens
  misc_RNA (1)...(19): siRNA sense strand
aggaggaagaggaagagga

SEQ ID NO: 2261577 - RNA, 19 nt, Homo sapiens
  misc_RNA (1)...(19): siRNA sense strand
agaaaauggaagaaaggga

SEQ ID NO: 2261578 - RNA, 19 nt, Homo sapiens
  misc_RNA (1)...(19): siRNA sense strand
agaugaaauuguggcucua

SEQ ID NO: 2261579 - RNA, 19 nt, Homo sapiens
  misc_RNA (1)...(19): siRNA sense strand
cuugguuguuccagaguca

SEQ ID NO: 2261580 - RNA, 19 nt, Homo sapiens
  misc_RNA (1)...(19): siRNA sense strand
aggagaaagcagagauaaa

SEQ ID NO: 2261581 - RNA, 19 nt, Homo sapiens
  misc_RNA (1)...(19): siRNA sense strand
aggaagaagaggaggagga

SEQ ID NO: 2261582 - RNA, 19 nt, Homo sapiens
  misc_RNA (1)...(19): siRNA sense strand
aggaagaggaggaggagga

SEQ ID NO: 2261583 - RNA, 19 nt, Homo sapiens
  misc_RNA (1)...(19): siRNA sense strand
gugaagaaucagaggagga

SEQ ID NO: 2261584 - RNA, 19 nt, Homo sapiens
  misc_RNA (1)...(19): siRNA sense strand
aggaagaggaagaggagga

SEQ ID NO: 2261585 - RNA, 19 nt, Homo sapiens
  misc_RNA (1)...(19): siRNA sense strand
aggaagaggaggaggagga

SEQ ID NO: 2261586 - RNA, 19 nt, Homo sapiens
  misc_RNA (1)...(19): siRNA sense strand
aggaggaggaggaggaaga

SEQ ID NO: 2261587 - RNA, 19 nt, Homo sapiens
  misc_RNA (1)...(19): siRNA sense strand
aggaggaggaagaggaaga

SEQ ID NO: 2261588 - RNA, 19 nt, Homo sapiens
  misc_RNA (1)...(19): siRNA sense strand
ggaagaagugggugaggga

SEQ ID NO: 2261589 - RNA, 19 nt, Homo sapiens
  misc_RNA (1)...(19): siRNA sense strand
cagaggaagaaguggguga

SEQ ID NO: 2261590 - RNA, 19 nt, Homo sapiens
  misc_RNA (1)...(19): siRNA sense strand
aagaagaggaggaggagga

SEQ ID NO: 2261591 - RNA, 19 nt, Homo sapiens
  misc_RNA (1)...(19): siRNA sense strand
agaaggagaaggagggcuu

SEQ ID NO: 2261592 - RNA, 19 nt, Homo sapiens
  misc_RNA (1)...(19): siRNA sense strand
aaucagaggaggaggagga

SEQ ID NO: 2261593 - RNA, 19 nt, Homo sapiens
  misc_RNA (1)...(19): siRNA sense strand
agaugaagaacgagaaaau

SEQ ID NO: 2261594 - RNA, 19 nt, Homo sapiens
  misc_RNA (1)...(19): siRNA sense strand
aagaaguaagugaggaaga

SEQ ID NO: 2261595 - RNA, 19 nt, Homo sapiens
  misc_RNA (1)...(19): siRNA sense strand
gugaagaugaagaacgaga

SEQ ID NO: 2261596 - RNA, 19 nt, Homo sapiens
  misc_RNA (1)...(19): siRNA sense strand
cagaggaggaggaggagga

SEQ ID NO: 2261597 - RNA, 19 nt, Homo sapiens
  misc_RNA (1)...(19): siRNA sense strand
cugaagauggagaaggaga

SEQ ID NO: 2261598 - RNA, 19 nt, Homo sapiens
  misc_RNA (1)...(19): siRNA sense strand
gagcaaaagacaagaaaac

SEQ ID NO: 2261599 - RNA, 19 nt, Homo sapiens
  misc_RNA (1)...(19): siRNA sense strand
aggaggaggaagaggagga

SEQ ID NO: 2261600 - RNA, 19 nt, Homo sapiens
  misc_RNA (1)...(19): siRNA sense strand
aggaggaagaggaggagga

SEQ ID NO: 2261601 - RNA, 19 nt, Homo sapiens
  misc_RNA (1)...(19): siRNA sense strand
aaguaagugaggaagaaau

SEQ ID NO: 2261602 - RNA, 19 nt, Homo sapiens
  misc_RNA (1)...(19): siRNA sense strand
cucaagagccugauggaga

SEQ ID NO: 2261603 - RNA, 19 nt, Homo sapiens
  misc_RNA (1)...(19): siRNA sense strand
cgggaaugggaaagacaga

SEQ ID NO: 2261604 - RNA, 19 nt, Homo sapiens
  misc_RNA (1)...(19): siRNA sense strand
ugaacuauguggagcacga

SEQ ID NO: 2261605 - RNA, 19 nt, Homo sapiens
  misc_RNA (1)...(19): siRNA sense strand
ccagcaaaugucucggaaa

SEQ ID NO: 2261606 - RNA, 19 nt, Homo sapiens
  misc_RNA (1)...(19): siRNA sense strand
aagagaagggaaauggcaa

SEQ ID NO: 2261607 - RNA, 19 nt, Homo sapiens
  misc_RNA (1)...(19): siRNA sense strand
ccaucgagcucaagcagga

SEQ ID NO: 2261608 - RNA, 19 nt, Homo sapiens
  misc_RNA (1)...(19): siRNA sense strand
cgggauuccaagcgggauu

SEQ ID NO: 2261609 - RNA, 19 nt, Homo sapiens
  misc_RNA (1)...(19): siRNA sense strand
cugaggaagaagaggagga

SEQ ID NO: 2261610 - RNA, 19 nt, Homo sapiens
  misc_RNA (1)...(19): siRNA sense strand
aucgagaagaacaggauaa

SEQ ID NO: 2261611 - RNA, 19 nt, Homo sapiens
  misc_RNA (1)...(19): siRNA sense strand
cagaugaaauuguggcucu

SEQ ID NO: 2261612 - RNA, 19 nt, Homo sapiens
  misc_RNA (1)...(19): siRNA sense strand
agauggagaaggagaagga

SEQ ID NO: 2261613 - RNA, 19 nt, Homo sapiens
  misc_RNA (1)...(19): siRNA sense strand
aagaggaagaggaggagga

SEQ ID NO: 2261614 - RNA, 19 nt, Homo sapiens
  misc_RNA (1)...(19): siRNA sense strand
agggagcaccagugaagaa

SEQ ID NO: 2261615 - RNA, 19 nt, Homo sapiens
  misc_RNA (1)...(19): siRNA sense strand
aagaagagaaaauggaaga

SEQ ID NO: 2261616 - RNA, 19 nt, Homo sapiens
  misc_RNA (1)...(19): siRNA sense strand
agacaagaaaacagaugaa

SEQ ID NO: 2261617 - RNA, 19 nt, Homo sapiens
  misc_RNA (1)...(19): siRNA sense strand
acagaggagaagaagauga

SEQ ID NO: 2261618 - RNA, 19 nt, Homo sapiens
  misc_RNA (1)...(19): siRNA sense strand
augcuagagugaaagaaaa

SEQ ID NO: 2261619 - RNA, 19 nt, Homo sapiens
  misc_RNA (1)...(19): siRNA sense strand
aagaagugggugagggaac

SEQ ID NO: 2261620 - RNA, 19 nt, Homo sapiens
  misc_RNA (1)...(19): siRNA sense strand
augaaauuguggcucuaaa

SEQ ID NO: 2261621 - RNA, 19 nt, Homo sapiens
  misc_RNA (1)...(19): siRNA sense strand
ggacucuuggaaagugaaa

SEQ ID NO: 2261622 - RNA, 19 nt, Homo sapiens
  misc_RNA (1)...(19): siRNA sense strand
aagaaucagaggaggagga

SEQ ID NO: 2261623 - RNA, 19 nt, Homo sapiens
  misc_RNA (1)...(19): siRNA sense strand
ggaaaagaaacgaaggaag

SEQ ID NO: 2261624 - RNA, 19 nt, Homo sapiens
  misc_RNA (1)...(19): siRNA sense strand
cugccgaagaaguaaguga

SEQ ID NO: 2261625 - RNA, 19 nt, Homo sapiens
  misc_RNA (1)...(19): siRNA sense strand
gggagagugaagaagcaga

SEQ ID NO: 2261626 - RNA, 19 nt, Homo sapiens
  misc_RNA (1)...(19): siRNA sense strand
agaaacgaaggaaggaaca

SEQ ID NO: 2261627 - RNA, 19 nt, Homo sapiens
  misc_RNA (1)...(19): siRNA sense strand
uuacaggacaucagcgaca

SEQ ID NO: 2261628 - RNA, 19 nt, Homo sapiens
  misc_RNA (1)...(19): siRNA sense strand
aggagaaagcagagauaaa

SEQ ID NO: 2261629 - RNA, 19 nt, Homo sapiens
  misc_RNA (1)...(19): siRNA sense strand
aggaagaagaggaggagga

SEQ ID NO: 2261630 - RNA, 19 nt, Homo sapiens
  misc_RNA (1)...(19): siRNA sense strand
aggaagaggaggaggagga

SEQ ID NO: 2261631 - RNA, 19 nt, Homo sapiens
  misc_RNA (1)...(19): siRNA sense strand
gugaagaaucagaggagga

SEQ ID NO: 2261632 - RNA, 19 nt, Homo sapiens
  misc_RNA (1)...(19): siRNA sense strand
aggaagaggaagaggagga

SEQ ID NO: 2261633 - RNA, 19 nt, Homo sapiens
  misc_RNA (1)...(19): siRNA sense strand
aggaagaggaggaggagga

SEQ ID NO: 2261634 - RNA, 19 nt, Homo sapiens
  misc_RNA (1)...(19): siRNA sense strand
aggaggaggaggaggaaga

SEQ ID NO: 2261635 - RNA, 19 nt, Homo sapiens
  misc_RNA (1)...(19): siRNA sense strand
aggaggaggaagaggaaga

SEQ ID NO: 2261636 - RNA, 19 nt, Homo sapiens
  misc_RNA (1)...(19): siRNA sense strand
ggaagaagugggugaggga

SEQ ID NO: 2261637 - RNA, 19 nt, Homo sapiens
  misc_RNA (1)...(19): siRNA sense strand
cagaggaagaaguggguga

SEQ ID NO: 2261638 - RNA, 19 nt, Homo sapiens
  misc_RNA (1)...(19): siRNA sense strand
aagaagaggaggaggagga

SEQ ID NO: 2261639 - RNA, 19 nt, Homo sapiens
  misc_RNA (1)...(19): siRNA sense strand
agaaggagaaggagggcuu

SEQ ID NO: 2261640 - RNA, 19 nt, Homo sapiens
  misc_RNA (1)...(19): siRNA sense strand
aaucagaggaggaggagga

SEQ ID NO: 2261641 - RNA, 19 nt, Homo sapiens
  misc_RNA (1)...(19): siRNA sense strand
agaugaagaacgagaaaau

SEQ ID NO: 2261642 - RNA, 19 nt, Homo sapiens
  misc_RNA (1)...(19): siRNA sense strand
aagaaguaagugaggaaga

SEQ ID NO: 2261643 - RNA, 19 nt, Homo sapiens
  misc_RNA (1)...(19): siRNA sense strand
gugaagaugaagaacgaga

SEQ ID NO: 2261644 - RNA, 19 nt, Homo sapiens
  misc_RNA (1)...(19): siRNA sense strand
cagaggaggaggaggagga

SEQ ID NO: 2261645 - RNA, 19 nt, Homo sapiens
  misc_RNA (1)...(19): siRNA sense strand
cugaagauggagaaggaga

SEQ ID NO: 2261646 - RNA, 19 nt, Homo sapiens
  misc_RNA (1)...(19): siRNA sense strand
gagcaaaagacaagaaaac

SEQ ID NO: 2261647 - RNA, 19 nt, Homo sapiens
  misc_RNA (1)...(19): siRNA sense strand
aggaggaggaagaggagga

SEQ ID NO: 2261648 - RNA, 19 nt, Homo sapiens
  misc_RNA (1)...(19): siRNA sense strand
aggaggaagaggaggagga

SEQ ID NO: 2261649 - RNA, 19 nt, Homo sapiens
  misc_RNA (1)...(19): siRNA sense strand
aaguaagugaggaagaaau

SEQ ID NO: 2261650 - RNA, 19 nt, Homo sapiens
  misc_RNA (1)...(19): siRNA sense strand
cucaagagccugauggaga

SEQ ID NO: 2261651 - RNA, 19 nt, Homo sapiens
  misc_RNA (1)...(19): siRNA sense strand
cgggaaugggaaagacaga

SEQ ID NO: 2261652 - RNA, 19 nt, Homo sapiens
  misc_RNA (1)...(19): siRNA sense strand
ugaacuauguggagcacga

SEQ ID NO: 2261653 - RNA, 19 nt, Homo sapiens
  misc_RNA (1)...(19): siRNA sense strand
ccagcaaaugucucggaaa

SEQ ID NO: 2261654 - RNA, 19 nt, Homo sapiens
  misc_RNA (1)...(19): siRNA sense strand
aagagaagggaaauggcaa

SEQ ID NO: 2261655 - RNA, 19 nt, Homo sapiens
  misc_RNA (1)...(19): siRNA sense strand
ccaucgagcucaagcagga

SEQ ID NO: 2261656 - RNA, 19 nt, Homo sapiens
  misc_RNA (1)...(19): siRNA sense strand
cgggauuccaagcgggauu

SEQ ID NO: 2261657 - RNA, 19 nt, Homo sapiens
  misc_RNA (1)...(19): siRNA sense strand
cugaggaagaagaggagga

SEQ ID NO: 2261658 - RNA, 19 nt, Homo sapiens
  misc_RNA (1)...(19): siRNA sense strand
aucgagaagaacaggauaa

SEQ ID NO: 2261659 - RNA, 19 nt, Homo sapiens
  misc_RNA (1)...(19): siRNA sense strand
cagaugaaauuguggcucu

SEQ ID NO: 2261660 - RNA, 19 nt, Homo sapiens
  misc_RNA (1)...(19): siRNA sense strand
agauggagaaggagaagga

SEQ ID NO: 2261661 - RNA, 19 nt, Homo sapiens
  misc_RNA (1)...(19): siRNA sense strand
aagaggaagaggaggagga

SEQ ID NO: 2261662 - RNA, 19 nt, Homo sapiens
  misc_RNA (1)...(19): siRNA sense strand
agggagcaccagugaagaa

SEQ ID NO: 2261663 - RNA, 19 nt, Homo sapiens
  misc_RNA (1)...(19): siRNA sense strand
aagaagagaaaauggaaga

SEQ ID NO: 2261664 - RNA, 19 nt, Homo sapiens
  misc_RNA (1)...(19): siRNA sense strand
agacaagaaaacagaugaa

SEQ ID NO: 2261665 - RNA, 19 nt, Homo sapiens
  misc_RNA (1)...(19): siRNA sense strand
acagaggagaagaagauga

SEQ ID NO: 2261666 - RNA, 19 nt, Homo sapiens
  misc_RNA (1)...(19): siRNA sense strand
augcuagagugaaagaaaa

SEQ ID NO: 2261667 - RNA, 19 nt, Homo sapiens
  misc_RNA (1)...(19): siRNA sense strand
aagaagugggugagggaac

SEQ ID NO: 2261668 - RNA, 19 nt, Homo sapiens
  misc_RNA (1)...(19): siRNA sense strand
augaaauuguggcucuaaa

SEQ ID NO: 2261669 - RNA, 19 nt, Homo sapiens
  misc_RNA (1)...(19): siRNA sense strand
ggacucuuggaaagugaaa

SEQ ID NO: 2261670 - RNA, 19 nt, Homo sapiens
  misc_RNA (1)...(19): siRNA sense strand
aagaaucagaggaggagga

SEQ ID NO: 2261671 - RNA, 19 nt, Homo sapiens
  misc_RNA (1)...(19): siRNA sense strand
ggaaaagaaacgaaggaag

SEQ ID NO: 2261672 - RNA, 19 nt, Homo sapiens
  misc_RNA (1)...(19): siRNA sense strand
cugccgaagaaguaaguga

SEQ ID NO: 2261673 - RNA, 19 nt, Homo sapiens
  misc_RNA (1)...(19): siRNA sense strand
gggagagugaagaagcaga

SEQ ID NO: 2261674 - RNA, 19 nt, Homo sapiens
  misc_RNA (1)...(19): siRNA sense strand
agaaacgaaggaaggaaca

SEQ ID NO: 2261675 - RNA, 19 nt, Homo sapiens
  misc_RNA (1)...(19): siRNA sense strand
uuacaggacaucagcgaca

SEQ ID NO: 2261676 - RNA, 19 nt, Homo sapiens
  misc_RNA (1)...(19): siRNA sense strand
aguuaugauugguggagaa

SEQ ID NO: 2261677 - RNA, 19 nt, Homo sapiens
  misc_RNA (1)...(19): siRNA sense strand
aagaacaaacagaagccua

SEQ ID NO: 2261678 - RNA, 19 nt, Homo sapiens
  misc_RNA (1)...(19): siRNA sense strand
cugaaaagcuggcccguga

SEQ ID NO: 2261679 - RNA, 19 nt, Homo sapiens
  misc_RNA (1)...(19): siRNA sense strand
cauuugaaaacgugaaaga

SEQ ID NO: 2261680 - RNA, 19 nt, Homo sapiens
  misc_RNA (1)...(19): siRNA sense strand
aguuaugauugguggagaa

SEQ ID NO: 2261681 - RNA, 19 nt, Homo sapiens
  misc_RNA (1)...(19): siRNA sense strand
aagaacaaacagaagccua

SEQ ID NO: 2261682 - RNA, 19 nt, Homo sapiens
  misc_RNA (1)...(19): siRNA sense strand
cugaaaagcuggcccguga

SEQ ID NO: 2261683 - RNA, 19 nt, Homo sapiens
  misc_RNA (1)...(19): siRNA sense strand
cauuugaaaacgugaaaga

SEQ ID NO: 2261684 - RNA, 19 nt, Homo sapiens
  misc_RNA (1)...(19): siRNA sense strand
cggcagaggucaacgagga

SEQ ID NO: 2261685 - RNA, 19 nt, Homo sapiens
  misc_RNA (1)...(19): siRNA sense strand
gugagaaagaagcggaaga

SEQ ID NO: 2261686 - RNA, 19 nt, Homo sapiens
  misc_RNA (1)...(19): siRNA sense strand
ccaaagucguugaggucca

SEQ ID NO: 2261687 - RNA, 19 nt, Homo sapiens
  misc_RNA (1)...(19): siRNA sense strand
ccacccacccugagagcaa

SEQ ID NO: 2261688 - RNA, 19 nt, Homo sapiens
  misc_RNA (1)...(19): siRNA sense strand
agaaggucacugaaggaaa

SEQ ID NO: 2261689 - RNA, 19 nt, Homo sapiens
  misc_RNA (1)...(19): siRNA sense strand
cagccaacccagaugaaau

SEQ ID NO: 2261690 - RNA, 19 nt, Homo sapiens
  misc_RNA (1)...(19): siRNA sense strand
ggucacugaaggaaaggaa

SEQ ID NO: 2261691 - RNA, 19 nt, Homo sapiens
  misc_RNA (1)...(19): siRNA sense strand
augagcaguuugugaggaa

SEQ ID NO: 2261692 - RNA, 19 nt, Homo sapiens
  misc_RNA (1)...(19): siRNA sense strand
gagcaguuugugaggaaca

SEQ ID NO: 2261693 - RNA, 19 nt, Homo sapiens
  misc_RNA (1)...(19): siRNA sense strand
acguggaggaugugaauga

SEQ ID NO: 2261694 - RNA, 19 nt, Homo sapiens
  misc_RNA (1)...(19): siRNA sense strand
ggaaaguauucaugggcug

SEQ ID NO: 2261695 - RNA, 19 nt, Homo sapiens
  misc_RNA (1)...(19): siRNA sense strand
ccgaccaagaccaagauua

SEQ ID NO: 2261696 - RNA, 19 nt, Homo sapiens
  misc_RNA (1)...(19): siRNA sense strand
cugagaaugcagugggcca

SEQ ID NO: 2261697 - RNA, 19 nt, Homo sapiens
  misc_RNA (1)...(19): siRNA sense strand
ggagugucuuagagggagu

SEQ ID NO: 2261698 - RNA, 19 nt, Homo sapiens
  misc_RNA (1)...(19): siRNA sense strand
ccuugaugccaaugacaau

SEQ ID NO: 2261699 - RNA, 19 nt, Homo sapiens
  misc_RNA (1)...(19): siRNA sense strand
uaauaaagauagagacacc

SEQ ID NO: 2261700 - RNA, 19 nt, Homo sapiens
  misc_RNA (1)...(19): siRNA sense strand
agaaugaccacaagcccaa

SEQ ID NO: 2261701 - RNA, 19 nt, Homo sapiens
  misc_RNA (1)...(19): siRNA sense strand
cugcagaagacccugacaa

SEQ ID NO: 2261702 - RNA, 19 nt, Homo sapiens
  misc_RNA (1)...(19): siRNA sense strand
cagccacggaugaggauga

SEQ ID NO: 2261703 - RNA, 19 nt, Homo sapiens
  misc_RNA (1)...(19): siRNA sense strand
aggucaacgaggaagguga

SEQ ID NO: 2261704 - RNA, 19 nt, Homo sapiens
  misc_RNA (1)...(19): siRNA sense strand
aguaugagcucuuuggcca

SEQ ID NO: 2261705 - RNA, 19 nt, Homo sapiens
  misc_RNA (1)...(19): siRNA sense strand
cggaugaggaugaugccau

SEQ ID NO: 2261706 - RNA, 19 nt, Homo sapiens
  misc_RNA (1)...(19): siRNA sense strand
uggagauccuugaugccaa

SEQ ID NO: 2261707 - RNA, 19 nt, Homo sapiens
  misc_RNA (1)...(19): siRNA sense strand
gugcugaacaucacggaca

SEQ ID NO: 2261708 - RNA, 19 nt, Homo sapiens
  misc_RNA (1)...(19): siRNA sense strand
uggucuuggccauggacaa

SEQ ID NO: 2261709 - RNA, 19 nt, Homo sapiens
  misc_RNA (1)...(19): siRNA sense strand
cuuccgagggagugucuua

SEQ ID NO: 2261710 - RNA, 19 nt, Homo sapiens
  misc_RNA (1)...(19): siRNA sense strand
uggcaguaguggagauccu

SEQ ID NO: 2261711 - RNA, 19 nt, Homo sapiens
  misc_RNA (1)...(19): siRNA sense strand
ccacagacauggaugggga

SEQ ID NO: 2261712 - RNA, 19 nt, Homo sapiens
  misc_RNA (1)...(19): siRNA sense strand
ccugacaaggagaaucaaa

SEQ ID NO: 2261713 - RNA, 19 nt, Homo sapiens
  misc_RNA (1)...(19): siRNA sense strand
auaaagauagagacaccaa

SEQ ID NO: 2261714 - RNA, 19 nt, Homo sapiens
  misc_RNA (1)...(19): siRNA sense strand
cauccauagccaagaacca

SEQ ID NO: 2261715 - RNA, 19 nt, Homo sapiens
  misc_RNA (1)...(19): siRNA sense strand
ugucuuagagggaguccua

SEQ ID NO: 2261716 - RNA, 19 nt, Homo sapiens
  misc_RNA (1)...(19): siRNA sense strand
cugacaaggagaaucaaaa

SEQ ID NO: 2261717 - RNA, 19 nt, Homo sapiens
  misc_RNA (1)...(19): siRNA sense strand
ccuccuacucccagaagau

SEQ ID NO: 2261718 - RNA, 19 nt, Homo sapiens
  misc_RNA (1)...(19): siRNA sense strand
gaagaugauuacacggcau

SEQ ID NO: 2261719 - RNA, 19 nt, Homo sapiens
  misc_RNA (1)...(19): siRNA sense strand
cggcauuaaucucccaaaa

SEQ ID NO: 2261720 - RNA, 19 nt, Homo sapiens
  misc_RNA (1)...(19): siRNA sense strand
gaagaugauuacacggcau

SEQ ID NO: 2261721 - RNA, 19 nt, Homo sapiens
  misc_RNA (1)...(19): siRNA sense strand
cggcauuaaucucccaaaa

SEQ ID NO: 2261722 - RNA, 19 nt, Homo sapiens
  misc_RNA (1)...(19): siRNA sense strand
aaggagaauaugugggcaa

SEQ ID NO: 2261723 - RNA, 19 nt, Homo sapiens
  misc_RNA (1)...(19): siRNA sense strand
ccgcaauagacaaggacau

SEQ ID NO: 2261724 - RNA, 19 nt, Homo sapiens
  misc_RNA (1)...(19): siRNA sense strand
cagccaugaucgaggugaa

SEQ ID NO: 2261725 - RNA, 19 nt, Homo sapiens
  misc_RNA (1)...(19): siRNA sense strand
gguuuaagaugcuggcuga

SEQ ID NO: 2261726 - RNA, 19 nt, Homo sapiens
  misc_RNA (1)...(19): siRNA sense strand
gguaugagaucguggugga

SEQ ID NO: 2261727 - RNA, 19 nt, Homo sapiens
  misc_RNA (1)...(19): siRNA sense strand
ccaugaucgaggugaagaa

SEQ ID NO: 2261728 - RNA, 19 nt, Homo sapiens
  misc_RNA (1)...(19): siRNA sense strand
ugaagaaggacgaggcgga

SEQ ID NO: 2261729 - RNA, 19 nt, Homo sapiens
  misc_RNA (1)...(19): siRNA sense strand
gaaacagagcccaggucau

SEQ ID NO: 2261730 - RNA, 19 nt, Homo sapiens
  misc_RNA (1)...(19): siRNA sense strand
gcccaaagugugugagaac

SEQ ID NO: 2261731 - RNA, 19 nt, Homo sapiens
  misc_RNA (1)...(19): siRNA sense strand
acacauuugucgugccuga

SEQ ID NO: 2261732 - RNA, 19 nt, Homo sapiens
  misc_RNA (1)...(19): siRNA sense strand
cgaaaagcuuggaccgaga

SEQ ID NO: 2261733 - RNA, 19 nt, Homo sapiens
  misc_RNA (1)...(19): siRNA sense strand
cuuucaccauugagacaaa

SEQ ID NO: 2261734 - RNA, 19 nt, Homo sapiens
  misc_RNA (1)...(19): siRNA sense strand
gagaacaacuuuacccuca

SEQ ID NO: 2261735 - RNA, 19 nt, Homo sapiens
  misc_RNA (1)...(19): siRNA sense strand
acauugaaguuuuggauga

SEQ ID NO: 2261736 - RNA, 19 nt, Homo sapiens
  misc_RNA (1)...(19): siRNA sense strand
aagaucaagucaagcguga

SEQ ID NO: 2261737 - RNA, 19 nt, Homo sapiens
  misc_RNA (1)...(19): siRNA sense strand
ccgacucugacguggauua

SEQ ID NO: 2261738 - RNA, 19 nt, Homo sapiens
  misc_RNA (1)...(19): siRNA sense strand
ugaccguggccgugugcaa

SEQ ID NO: 2261739 - RNA, 19 nt, Homo sapiens
  misc_RNA (1)...(19): siRNA sense strand
ggcuggaccgggagaauau

SEQ ID NO: 2261740 - RNA, 19 nt, Homo sapiens
  misc_RNA (1)...(19): siRNA sense strand
guaccugcucaaaggagaa

SEQ ID NO: 2261741 - RNA, 19 nt, Homo sapiens
  misc_RNA (1)...(19): siRNA sense strand
ugacagcaguggaugcaga

SEQ ID NO: 2261742 - RNA, 19 nt, Homo sapiens
  misc_RNA (1)...(19): siRNA sense strand
cugcaagacaucaaugaca

SEQ ID NO: 2261743 - RNA, 19 nt, Homo sapiens
  misc_RNA (1)...(19): siRNA sense strand
ggaccagugacaagggcca

SEQ ID NO: 2261744 - RNA, 19 nt, Homo sapiens
  misc_RNA (1)...(19): siRNA sense strand
caucaaaguucaugacgug

SEQ ID NO: 2261745 - RNA, 19 nt, Homo sapiens
  misc_RNA (1)...(19): siRNA sense strand
ugaaggaaaaccagaagaa

SEQ ID NO: 2261746 - RNA, 19 nt, Homo sapiens
  misc_RNA (1)...(19): siRNA sense strand
cggccaacaucacagucaa

SEQ ID NO: 2261747 - RNA, 19 nt, Homo sapiens
  misc_RNA (1)...(19): siRNA sense strand
ccugaaggggaaagaguau

SEQ ID NO: 2261748 - RNA, 19 nt, Homo sapiens
  misc_RNA (1)...(19): siRNA sense strand
ccaacaucacagucaagua

SEQ ID NO: 2261749 - RNA, 19 nt, Homo sapiens
  misc_RNA (1)...(19): siRNA sense strand
agacaaggacauaacacca

SEQ ID NO: 2261750 - RNA, 19 nt, Homo sapiens
  misc_RNA (1)...(19): siRNA sense strand
ccaucaaaguucaugacgu

SEQ ID NO: 2261751 - RNA, 19 nt, Homo sapiens
  misc_RNA (1)...(19): siRNA sense strand
accaaauccugaaggggaa

SEQ ID NO: 2261752 - RNA, 19 nt, Homo sapiens
  misc_RNA (1)...(19): siRNA sense strand
ccgcaggaccagugacaag

SEQ ID NO: 2261753 - RNA, 19 nt, Homo sapiens
  misc_RNA (1)...(19): siRNA sense strand
gaaacaaguugacgggaga

SEQ ID NO: 2261754 - RNA, 19 nt, Homo sapiens
  misc_RNA (1)...(19): siRNA sense strand
guguacaaagccagaaaca

SEQ ID NO: 2261755 - RNA, 19 nt, Homo sapiens
  misc_RNA (1)...(19): siRNA sense strand
cuggagauucugagauuga

SEQ ID NO: 2261756 - RNA, 19 nt, Homo sapiens
  misc_RNA (1)...(19): siRNA sense strand
ggaugaagauggacggagc

SEQ ID NO: 2261757 - RNA, 19 nt, Homo sapiens
  misc_RNA (1)...(19): siRNA sense strand
caccaagaucucaagaaau

SEQ ID NO: 2261758 - RNA, 19 nt, Homo sapiens
  misc_RNA (1)...(19): siRNA sense strand
gcacguacggaguugugua

SEQ ID NO: 2261759 - RNA, 19 nt, Homo sapiens
  misc_RNA (1)...(19): siRNA sense strand
agacuuuggacuagccaga

SEQ ID NO: 2261760 - RNA, 19 nt, Homo sapiens
  misc_RNA (1)...(19): siRNA sense strand
gaaacaaguugacgggaga

SEQ ID NO: 2261761 - RNA, 19 nt, Homo sapiens
  misc_RNA (1)...(19): siRNA sense strand
guguacaaagccagaaaca

SEQ ID NO: 2261762 - RNA, 19 nt, Homo sapiens
  misc_RNA (1)...(19): siRNA sense strand
cuggagauucugagauuga

SEQ ID NO: 2261763 - RNA, 19 nt, Homo sapiens
  misc_RNA (1)...(19): siRNA sense strand
ggaugaagauggacggagc

SEQ ID NO: 2261764 - RNA, 19 nt, Homo sapiens
  misc_RNA (1)...(19): siRNA sense strand
caccaagaucucaagaaau

SEQ ID NO: 2261765 - RNA, 19 nt, Homo sapiens
  misc_RNA (1)...(19): siRNA sense strand
agacuuuggacuagccaga

SEQ ID NO: 2261766 - RNA, 19 nt, Homo sapiens
  misc_RNA (1)...(19): siRNA sense strand
gauaagaauaccaaccaaa

SEQ ID NO: 2261767 - RNA, 19 nt, Homo sapiens
  misc_RNA (1)...(19): siRNA sense strand
ccgccuuaagagagauaaa

SEQ ID NO: 2261768 - RNA, 19 nt, Homo sapiens
  misc_RNA (1)...(19): siRNA sense strand
ggaaaagaacagaggccuu

SEQ ID NO: 2261769 - RNA, 19 nt, Homo sapiens
  misc_RNA (1)...(19): siRNA sense strand
guguagucuuccagauuau

SEQ ID NO: 2261770 - RNA, 19 nt, Homo sapiens
  misc_RNA (1)...(19): siRNA sense strand
ggauaauagucuugugcug

SEQ ID NO: 2261771 - RNA, 19 nt, Homo sapiens
  misc_RNA (1)...(19): siRNA sense strand
agaugaaaauggaguucua

SEQ ID NO: 2261772 - RNA, 19 nt, Homo sapiens
  misc_RNA (1)...(19): siRNA sense strand
ccacacaggcacugaaaau

SEQ ID NO: 2261773 - RNA, 19 nt, Homo sapiens
  misc_RNA (1)...(19): siRNA sense strand
agauaagaauaccaaccaa

SEQ ID NO: 2261774 - RNA, 19 nt, Homo sapiens
  misc_RNA (1)...(19): siRNA sense strand
gacgugaagucucgggcaa

SEQ ID NO: 2261775 - RNA, 19 nt, Homo sapiens
  misc_RNA (1)...(19): siRNA sense strand
caucacacaucaaagccua

SEQ ID NO: 2261776 - RNA, 19 nt, Homo sapiens
  misc_RNA (1)...(19): siRNA sense strand
guauauuagcagaguuacu

SEQ ID NO: 2261777 - RNA, 19 nt, Homo sapiens
  misc_RNA (1)...(19): siRNA sense strand
acuuguugcuagaugaaaa

SEQ ID NO: 2261778 - RNA, 19 nt, Homo sapiens
  misc_RNA (1)...(19): siRNA sense strand
cuggaauaccuuugcauca

SEQ ID NO: 2261779 - RNA, 19 nt, Homo sapiens
  misc_RNA (1)...(19): siRNA sense strand
gaggaacaguggccggaca

SEQ ID NO: 2261780 - RNA, 19 nt, Homo sapiens
  misc_RNA (1)...(19): siRNA sense strand
gagcuaggauguauggugu

SEQ ID NO: 2261781 - RNA, 19 nt, Homo sapiens
  misc_RNA (1)...(19): siRNA sense strand
cgggcaaagcguuaugaga

SEQ ID NO: 2261782 - RNA, 19 nt, Homo sapiens
  misc_RNA (1)...(19): siRNA sense strand
ccagagauaagaauaccaa

SEQ ID NO: 2261783 - RNA, 19 nt, Homo sapiens
  misc_RNA (1)...(19): siRNA sense strand
ggauugcccaagaaacuaa

SEQ ID NO: 2261784 - RNA, 19 nt, Homo sapiens
  misc_RNA (1)...(19): siRNA sense strand
cauagggaucugaaaccaa

SEQ ID NO: 2261785 - RNA, 19 nt, Homo sapiens
  misc_RNA (1)...(19): siRNA sense strand
agaagcuaaagaugguaua

SEQ ID NO: 2261786 - RNA, 19 nt, Homo sapiens
  misc_RNA (1)...(19): siRNA sense strand
agaguuacuucuaaggguu

SEQ ID NO: 2261787 - RNA, 19 nt, Homo sapiens
  misc_RNA (1)...(19): siRNA sense strand
uggcaguucaagaggguca

SEQ ID NO: 2261788 - RNA, 19 nt, Homo sapiens
  misc_RNA (1)...(19): siRNA sense strand
cucaggaccucguggacau

SEQ ID NO: 2261789 - RNA, 19 nt, Homo sapiens
  misc_RNA (1)...(19): siRNA sense strand
uggcaguucaagaggguca

SEQ ID NO: 2261790 - RNA, 19 nt, Homo sapiens
  misc_RNA (1)...(19): siRNA sense strand
cucaggaccucguggacau

SEQ ID NO: 2261791 - RNA, 19 nt, Homo sapiens
  misc_RNA (1)...(19): siRNA sense strand
gcaagauaucgcagcaaaa

SEQ ID NO: 2261792 - RNA, 19 nt, Homo sapiens
  misc_RNA (1)...(19): siRNA sense strand
augaacgguuggaagcaaa

SEQ ID NO: 2261793 - RNA, 19 nt, Homo sapiens
  misc_RNA (1)...(19): siRNA sense strand
agcucaaagaagagaauga

SEQ ID NO: 2261794 - RNA, 19 nt, Homo sapiens
  misc_RNA (1)...(19): siRNA sense strand
aagaagagaaugaacgguu

SEQ ID NO: 2261795 - RNA, 19 nt, Homo sapiens
  misc_RNA (1)...(19): siRNA sense strand
agauuuguuucuugagcau

SEQ ID NO: 2261796 - RNA, 19 nt, Homo sapiens
  misc_RNA (1)...(19): siRNA sense strand
cagacaacguacaguccau

SEQ ID NO: 2261797 - RNA, 19 nt, Homo sapiens
  misc_RNA (1)...(19): siRNA sense strand
aagcaagcagaaagcacaa

SEQ ID NO: 2261798 - RNA, 19 nt, Homo sapiens
  misc_RNA (1)...(19): siRNA sense strand
gcacaagacacacugcaga

SEQ ID NO: 2261799 - RNA, 19 nt, Homo sapiens
  misc_RNA (1)...(19): siRNA sense strand
ggcaacgccgagagaggaa

SEQ ID NO: 2261800 - RNA, 19 nt, Homo sapiens
  misc_RNA (1)...(19): siRNA sense strand
gagaaugaacgguuggaag

SEQ ID NO: 2261801 - RNA, 19 nt, Homo sapiens
  misc_RNA (1)...(19): siRNA sense strand
gguugaaaagcaagcagaa

SEQ ID NO: 2261802 - RNA, 19 nt, Homo sapiens
  misc_RNA (1)...(19): siRNA sense strand
gcggagacaagguuggcua

SEQ ID NO: 2261803 - RNA, 19 nt, Homo sapiens
  misc_RNA (1)...(19): siRNA sense strand
ccuacaagaggcagcagaa

SEQ ID NO: 2261804 - RNA, 19 nt, Homo sapiens
  misc_RNA (1)...(19): siRNA sense strand
cggagacaagguuggcuaa

SEQ ID NO: 2261805 - RNA, 19 nt, Homo sapiens
  misc_RNA (1)...(19): siRNA sense strand
caagguuggcuaaaggaga

SEQ ID NO: 2261806 - RNA, 19 nt, Homo sapiens
  misc_RNA (1)...(19): siRNA sense strand
augaagaagaggaggaaga

SEQ ID NO: 2261807 - RNA, 19 nt, Homo sapiens
  misc_RNA (1)...(19): siRNA sense strand
aggaagaggaggaggagga

SEQ ID NO: 2261808 - RNA, 19 nt, Homo sapiens
  misc_RNA (1)...(19): siRNA sense strand
aggaagaagaggaggagga

SEQ ID NO: 2261809 - RNA, 19 nt, Homo sapiens
  misc_RNA (1)...(19): siRNA sense strand
aggaagagggugaaggaga

SEQ ID NO: 2261810 - RNA, 19 nt, Homo sapiens
  misc_RNA (1)...(19): siRNA sense strand
aggaggaggaggaggaaga

SEQ ID NO: 2261811 - RNA, 19 nt, Homo sapiens
  misc_RNA (1)...(19): siRNA sense strand
aggaggaggaagaggguga

SEQ ID NO: 2261812 - RNA, 19 nt, Homo sapiens
  misc_RNA (1)...(19): siRNA sense strand
aggaagaggagguggagga

SEQ ID NO: 2261813 - RNA, 19 nt, Homo sapiens
  misc_RNA (1)...(19): siRNA sense strand
acgaugaggaagaggauga

SEQ ID NO: 2261814 - RNA, 19 nt, Homo sapiens
  misc_RNA (1)...(19): siRNA sense strand
aagaggagguggaggagga

SEQ ID NO: 2261815 - RNA, 19 nt, Homo sapiens
  misc_RNA (1)...(19): siRNA sense strand
gagaggaagaggaggagga

SEQ ID NO: 2261816 - RNA, 19 nt, Homo sapiens
  misc_RNA (1)...(19): siRNA sense strand
gagaggaagaggaggagga

SEQ ID NO: 2261817 - RNA, 19 nt, Homo sapiens
  misc_RNA (1)...(19): siRNA sense strand
agguggaggaggaggguga

SEQ ID NO: 2261818 - RNA, 19 nt, Homo sapiens
  misc_RNA (1)...(19): siRNA sense strand
uguugauagugaugaagaa

SEQ ID NO: 2261819 - RNA, 19 nt, Homo sapiens
  misc_RNA (1)...(19): siRNA sense strand
gggaggaagaggaggugga

SEQ ID NO: 2261820 - RNA, 19 nt, Homo sapiens
  misc_RNA (1)...(19): siRNA sense strand
aggaggaggaggaagaaga

SEQ ID NO: 2261821 - RNA, 19 nt, Homo sapiens
  misc_RNA (1)...(19): siRNA sense strand
gugaugaagaagaggagga

SEQ ID NO: 2261822 - RNA, 19 nt, Homo sapiens
  misc_RNA (1)...(19): siRNA sense strand
agagugagggagaggaaga

SEQ ID NO: 2261823 - RNA, 19 nt, Homo sapiens
  misc_RNA (1)...(19): siRNA sense strand
agggagaggaagaggagga

SEQ ID NO: 2261824 - RNA, 19 nt, Homo sapiens
  misc_RNA (1)...(19): siRNA sense strand
aagaggacgaugaggaaga

SEQ ID NO: 2261825 - RNA, 19 nt, Homo sapiens
  misc_RNA (1)...(19): siRNA sense strand
aguucgaggucuuggacau

SEQ ID NO: 2261826 - RNA, 19 nt, Homo sapiens
  misc_RNA (1)...(19): siRNA sense strand
uugccauggucaagaggua

SEQ ID NO: 2261827 - RNA, 19 nt, Homo sapiens
  misc_RNA (1)...(19): siRNA sense strand
aggaagaggacgaugagga

SEQ ID NO: 2261828 - RNA, 19 nt, Homo sapiens
  misc_RNA (1)...(19): siRNA sense strand
aggaggaagaagaggagga

SEQ ID NO: 2261829 - RNA, 19 nt, Homo sapiens
  misc_RNA (1)...(19): siRNA sense strand
cagcugacguuccgggaga

SEQ ID NO: 2261830 - RNA, 19 nt, Homo sapiens
  misc_RNA (1)...(19): siRNA sense strand
aaggagaggaagaggagga

SEQ ID NO: 2261831 - RNA, 19 nt, Homo sapiens
  misc_RNA (1)...(19): siRNA sense strand
auucagacagugaggaaga

SEQ ID NO: 2261832 - RNA, 19 nt, Homo sapiens
  misc_RNA (1)...(19): siRNA sense strand
agggugaaggagaggaaga

SEQ ID NO: 2261833 - RNA, 19 nt, Homo sapiens
  misc_RNA (1)...(19): siRNA sense strand
ugauucagacagugaggaa

SEQ ID NO: 2261834 - RNA, 19 nt, Homo sapiens
  misc_RNA (1)...(19): siRNA sense strand
ggaagagggugaaggagag

SEQ ID NO: 2261835 - RNA, 19 nt, Homo sapiens
  misc_RNA (1)...(19): siRNA sense strand
aagaggaggaggaggagga

SEQ ID NO: 2261836 - RNA, 19 nt, Homo sapiens
  misc_RNA (1)...(19): siRNA sense strand
agagggugaaggagaggaa

SEQ ID NO: 2261837 - RNA, 19 nt, Homo sapiens
  misc_RNA (1)...(19): siRNA sense strand
gaggaagcccagugcccua

SEQ ID NO: 2261838 - RNA, 19 nt, Homo sapiens
  misc_RNA (1)...(19): siRNA sense strand
ccaacaagcugucucccua

SEQ ID NO: 2261839 - RNA, 19 nt, Homo sapiens
  misc_RNA (1)...(19): siRNA sense strand
augaagacgacgaugauga

SEQ ID NO: 2261840 - RNA, 19 nt, Homo sapiens
  misc_RNA (1)...(19): siRNA sense strand
gugaaggagaggaagagga

SEQ ID NO: 2261841 - RNA, 19 nt, Homo sapiens
  misc_RNA (1)...(19): siRNA sense strand
acagugaggaagaggacga

SEQ ID NO: 2261842 - RNA, 19 nt, Homo sapiens
  misc_RNA (1)...(19): siRNA sense strand
aggaagaggaggaggaagg

SEQ ID NO: 2261843 - RNA, 19 nt, Homo sapiens
  misc_RNA (1)...(19): siRNA sense strand
aggaagaugaggagagcuc

SEQ ID NO: 2261844 - RNA, 19 nt, Homo sapiens
  misc_RNA (1)...(19): siRNA sense strand
aggaugaugaagaugaaga

SEQ ID NO: 2261845 - RNA, 19 nt, Homo sapiens
  misc_RNA (1)...(19): siRNA sense strand
caguggagccuucggacau

SEQ ID NO: 2261846 - RNA, 19 nt, Homo sapiens
  misc_RNA (1)...(19): siRNA sense strand
augaugaggaggaugguga

SEQ ID NO: 2261847 - RNA, 19 nt, Homo sapiens
  misc_RNA (1)...(19): siRNA sense strand
aggaggaggaagaagagga

SEQ ID NO: 2261848 - RNA, 19 nt, Homo sapiens
  misc_RNA (1)...(19): siRNA sense strand
acgaugaugaugaggagga

SEQ ID NO: 2261849 - RNA, 19 nt, Homo sapiens
  misc_RNA (1)...(19): siRNA sense strand
ggaagaaccacgccaggca

SEQ ID NO: 2261850 - RNA, 19 nt, Homo sapiens
  misc_RNA (1)...(19): siRNA sense strand
augaggaagaggaugauga

SEQ ID NO: 2261851 - RNA, 19 nt, Homo sapiens
  misc_RNA (1)...(19): siRNA sense strand
ccgaaaaucuacuaagaaa

SEQ ID NO: 2261852 - RNA, 19 nt, Homo sapiens
  misc_RNA (1)...(19): siRNA sense strand
ugacauuaacacagagcaa

SEQ ID NO: 2261853 - RNA, 19 nt, Homo sapiens
  misc_RNA (1)...(19): siRNA sense strand
cccagaaacaagagagauu

SEQ ID NO: 2261854 - RNA, 19 nt, Homo sapiens
  misc_RNA (1)...(19): siRNA sense strand
aagcaaagagugccagaaa

SEQ ID NO: 2261855 - RNA, 19 nt, Homo sapiens
  misc_RNA (1)...(19): siRNA sense strand
ccagugaguccaagaacaa

SEQ ID NO: 2261856 - RNA, 19 nt, Homo sapiens
  misc_RNA (1)...(19): siRNA sense strand
guauacaagacauuggaua

SEQ ID NO: 2261857 - RNA, 19 nt, Homo sapiens
  misc_RNA (1)...(19): siRNA sense strand
cacaagaagaaaagggaaa

SEQ ID NO: 2261858 - RNA, 19 nt, Homo sapiens
  misc_RNA (1)...(19): siRNA sense strand
cuacaaaaucagugccuaa

SEQ ID NO: 2261859 - RNA, 19 nt, Homo sapiens
  misc_RNA (1)...(19): siRNA sense strand
ggcuaaaccagcugaagaa

SEQ ID NO: 2261860 - RNA, 19 nt, Homo sapiens
  misc_RNA (1)...(19): siRNA sense strand
acgaaaagucgaagaauuu

SEQ ID NO: 2261861 - RNA, 19 nt, Homo sapiens
  misc_RNA (1)...(19): siRNA sense strand
cuugauuguucuagaucua

SEQ ID NO: 2261862 - RNA, 19 nt, Homo sapiens
  misc_RNA (1)...(19): siRNA sense strand
acauauuacccaagacgaa

SEQ ID NO: 2261863 - RNA, 19 nt, Homo sapiens
  misc_RNA (1)...(19): siRNA sense strand
cagaaauauggaagagcau

SEQ ID NO: 2261864 - RNA, 19 nt, Homo sapiens
  misc_RNA (1)...(19): siRNA sense strand
gaaaaguagcacuagaaaa

SEQ ID NO: 2261865 - RNA, 19 nt, Homo sapiens
  misc_RNA (1)...(19): siRNA sense strand
uggaagagcaugaagagau

SEQ ID NO: 2261866 - RNA, 19 nt, Homo sapiens
  misc_RNA (1)...(19): siRNA sense strand
agcaugaagagaugggaaa

SEQ ID NO: 2261867 - RNA, 19 nt, Homo sapiens
  misc_RNA (1)...(19): siRNA sense strand
uaauauaccaacagaguca

SEQ ID NO: 2261868 - RNA, 19 nt, Homo sapiens
  misc_RNA (1)...(19): siRNA sense strand
gagcaugaagagaugggaa

SEQ ID NO: 2261869 - RNA, 19 nt, Homo sapiens
  misc_RNA (1)...(19): siRNA sense strand
cagacuuggcuaagaagaa

SEQ ID NO: 2261870 - RNA, 19 nt, Homo sapiens
  misc_RNA (1)...(19): siRNA sense strand
ugauguggaugaugaggaa

SEQ ID NO: 2261871 - RNA, 19 nt, Homo sapiens
  misc_RNA (1)...(19): siRNA sense strand
auggugaguugaagguaua

SEQ ID NO: 2261872 - RNA, 19 nt, Homo sapiens
  misc_RNA (1)...(19): siRNA sense strand
cuagaaaagauaaggaaga

SEQ ID NO: 2261873 - RNA, 19 nt, Homo sapiens
  misc_RNA (1)...(19): siRNA sense strand
ucacaauaguagccgaaaa

SEQ ID NO: 2261874 - RNA, 19 nt, Homo sapiens
  misc_RNA (1)...(19): siRNA sense strand
cagaaacaagagagauuau

SEQ ID NO: 2261875 - RNA, 19 nt, Homo sapiens
  misc_RNA (1)...(19): siRNA sense strand
uggaaagugaugaggcaga

SEQ ID NO: 2261876 - RNA, 19 nt, Homo sapiens
  misc_RNA (1)...(19): siRNA sense strand
acgaugaaagaaagacuaa

SEQ ID NO: 2261877 - RNA, 19 nt, Homo sapiens
  misc_RNA (1)...(19): siRNA sense strand
aggcagacuuggcuaagaa

SEQ ID NO: 2261878 - RNA, 19 nt, Homo sapiens
  misc_RNA (1)...(19): siRNA sense strand
uggaaagaaugauguggau

SEQ ID NO: 2261879 - RNA, 19 nt, Homo sapiens
  misc_RNA (1)...(19): siRNA sense strand
cugauuggugggugguaaa

SEQ ID NO: 2261880 - RNA, 19 nt, Homo sapiens
  misc_RNA (1)...(19): siRNA sense strand
ccucagaccaguggauaua

SEQ ID NO: 2261881 - RNA, 19 nt, Homo sapiens
  misc_RNA (1)...(19): siRNA sense strand
agaagaaaauucauggcua

SEQ ID NO: 2261882 - RNA, 19 nt, Homo sapiens
  misc_RNA (1)...(19): siRNA sense strand
cgucuaaaaggaaggcaaa

SEQ ID NO: 2261883 - RNA, 19 nt, Homo sapiens
  misc_RNA (1)...(19): siRNA sense strand
cauggugaguugaagguau

SEQ ID NO: 2261884 - RNA, 19 nt, Homo sapiens
  misc_RNA (1)...(19): siRNA sense strand
agguagaaagucaagagaa

SEQ ID NO: 2261885 - RNA, 19 nt, Homo sapiens
  misc_RNA (1)...(19): siRNA sense strand
cacgaaaagucgaagaauu

SEQ ID NO: 2261886 - RNA, 19 nt, Homo sapiens
  misc_RNA (1)...(19): siRNA sense strand
cugagugagccauuggaaa

SEQ ID NO: 2261887 - RNA, 19 nt, Homo sapiens
  misc_RNA (1)...(19): siRNA sense strand
aggcagggucucugaaaca

SEQ ID NO: 2261888 - RNA, 19 nt, Homo sapiens
  misc_RNA (1)...(19): siRNA sense strand
acagaaauauggaagagca

SEQ ID NO: 2261889 - RNA, 19 nt, Homo sapiens
  misc_RNA (1)...(19): siRNA sense strand
caaacuuguaccugaagaa

SEQ ID NO: 2261890 - RNA, 19 nt, Homo sapiens
  misc_RNA (1)...(19): siRNA sense strand
accaaagaguacagaaguu

SEQ ID NO: 2261891 - RNA, 19 nt, Homo sapiens
  misc_RNA (1)...(19): siRNA sense strand
aguacuaucuccagacaca

SEQ ID NO: 2261892 - RNA, 19 nt, Homo sapiens
  misc_RNA (1)...(19): siRNA sense strand
gaaauugauauuaggacca

SEQ ID NO: 2261893 - RNA, 19 nt, Homo sapiens
  misc_RNA (1)...(19): siRNA sense strand
auucgugauuaguggagua

SEQ ID NO: 2261894 - RNA, 19 nt, Homo sapiens
  misc_RNA (1)...(19): siRNA sense strand
aauucaacgacaagcuaaa

SEQ ID NO: 2261895 - RNA, 19 nt, Homo sapiens
  misc_RNA (1)...(19): siRNA sense strand
cagacagaaauauggaaga

SEQ ID NO: 2261896 - RNA, 19 nt, Homo sapiens
  misc_RNA (1)...(19): siRNA sense strand
uacaagaagcucaaagaau

SEQ ID NO: 2261897 - RNA, 19 nt, Homo sapiens
  misc_RNA (1)...(19): siRNA sense strand
cgaggagagcgaauagauu

SEQ ID NO: 2261898 - RNA, 19 nt, Homo sapiens
  misc_RNA (1)...(19): siRNA sense strand
aguaucagaugaagaggau

SEQ ID NO: 2261899 - RNA, 19 nt, Homo sapiens
  misc_RNA (1)...(19): siRNA sense strand
gcaugaagagaugggaaau

SEQ ID NO: 2261900 - RNA, 19 nt, Homo sapiens
  misc_RNA (1)...(19): siRNA sense strand
agacagcaacuaaaggcaa

SEQ ID NO: 2261901 - RNA, 19 nt, Homo sapiens
  misc_RNA (1)...(19): siRNA sense strand
gccaaugauuuuaguacaa

SEQ ID NO: 2261902 - RNA, 19 nt, Homo sapiens
  misc_RNA (1)...(19): siRNA sense strand
agaacagaauccaucacaa

SEQ ID NO: 2261903 - RNA, 19 nt, Homo sapiens
  misc_RNA (1)...(19): siRNA sense strand
ccaaauguucgcaggacca

SEQ ID NO: 2261904 - RNA, 19 nt, Homo sapiens
  misc_RNA (1)...(19): siRNA sense strand
aaaaggaaggcaaaagaaa

SEQ ID NO: 2261905 - RNA, 19 nt, Homo sapiens
  misc_RNA (1)...(19): siRNA sense strand
aaaggaaggcaaaagaaaa

SEQ ID NO: 2261906 - RNA, 19 nt, Homo sapiens
  misc_RNA (1)...(19): siRNA sense strand
gauaacgaugaaagaaaga

SEQ ID NO: 2261907 - RNA, 19 nt, Homo sapiens
  misc_RNA (1)...(19): siRNA sense strand
aagaaaaccaucaggauca

SEQ ID NO: 2261908 - RNA, 19 nt, Homo sapiens
  misc_RNA (1)...(19): siRNA sense strand
auggaaagccugagagaaa

SEQ ID NO: 2261909 - RNA, 19 nt, Homo sapiens
  misc_RNA (1)...(19): siRNA sense strand
ccaagagauuuaugagaaa

SEQ ID NO: 2261910 - RNA, 19 nt, Homo sapiens
  misc_RNA (1)...(19): siRNA sense strand
cugcagauguuaaggauaa

SEQ ID NO: 2261911 - RNA, 19 nt, Homo sapiens
  misc_RNA (1)...(19): siRNA sense strand
ugacaaacucagaggaauu

SEQ ID NO: 2261912 - RNA, 19 nt, Homo sapiens
  misc_RNA (1)...(19): siRNA sense strand
ccauaaagaaagaaggaga

SEQ ID NO: 2261913 - RNA, 19 nt, Homo sapiens
  misc_RNA (1)...(19): siRNA sense strand
ggagaaaaugugugaaaua

SEQ ID NO: 2261914 - RNA, 19 nt, Homo sapiens
  misc_RNA (1)...(19): siRNA sense strand
acauagaaacggagaauau

SEQ ID NO: 2261915 - RNA, 19 nt, Homo sapiens
  misc_RNA (1)...(19): siRNA sense strand
ugauaaacuaagagggauu

SEQ ID NO: 2261916 - RNA, 19 nt, Homo sapiens
  misc_RNA (1)...(19): siRNA sense strand
aggagaaacuaaagaugaa

SEQ ID NO: 2261917 - RNA, 19 nt, Homo sapiens
  misc_RNA (1)...(19): siRNA sense strand
uggcagaaguugaagaaaa

SEQ ID NO: 2261918 - RNA, 19 nt, Homo sapiens
  misc_RNA (1)...(19): siRNA sense strand
gguauuagacuaugaacaa

SEQ ID NO: 2261919 - RNA, 19 nt, Homo sapiens
  misc_RNA (1)...(19): siRNA sense strand
cccaagaacuucaggagaa

SEQ ID NO: 2261920 - RNA, 19 nt, Homo sapiens
  misc_RNA (1)...(19): siRNA sense strand
ccuggaaacugaagaggaa

SEQ ID NO: 2261921 - RNA, 19 nt, Homo sapiens
  misc_RNA (1)...(19): siRNA sense strand
ccugaaagaacaagaggaa

SEQ ID NO: 2261922 - RNA, 19 nt, Homo sapiens
  misc_RNA (1)...(19): siRNA sense strand
gaaccaugccauaaagaaa

SEQ ID NO: 2261923 - RNA, 19 nt, Homo sapiens
  misc_RNA (1)...(19): siRNA sense strand
ggaucuacauauugaggaa

SEQ ID NO: 2261924 - RNA, 19 nt, Homo sapiens
  misc_RNA (1)...(19): siRNA sense strand
guuacuaagugauggacaa

SEQ ID NO: 2261925 - RNA, 19 nt, Homo sapiens
  misc_RNA (1)...(19): siRNA sense strand
acaguuaaccacagagaaa

SEQ ID NO: 2261926 - RNA, 19 nt, Homo sapiens
  misc_RNA (1)...(19): siRNA sense strand
gaaacuuagugauggacaa

SEQ ID NO: 2261927 - RNA, 19 nt, Homo sapiens
  misc_RNA (1)...(19): siRNA sense strand
aguuaagcaucgagaagua

SEQ ID NO: 2261928 - RNA, 19 nt, Homo sapiens
  misc_RNA (1)...(19): siRNA sense strand
ccuacaaaccaaagaagaa

SEQ ID NO: 2261929 - RNA, 19 nt, Homo sapiens
  misc_RNA (1)...(19): siRNA sense strand
gaaagagauacaagacaaa

SEQ ID NO: 2261930 - RNA, 19 nt, Homo sapiens
  misc_RNA (1)...(19): siRNA sense strand
ccaagauaccucagugaua

SEQ ID NO: 2261931 - RNA, 19 nt, Homo sapiens
  misc_RNA (1)...(19): siRNA sense strand
acuugaagaaauugggaaa

SEQ ID NO: 2261932 - RNA, 19 nt, Homo sapiens
  misc_RNA (1)...(19): siRNA sense strand
caacaggaauuaaaggcua

SEQ ID NO: 2261933 - RNA, 19 nt, Homo sapiens
  misc_RNA (1)...(19): siRNA sense strand
aaggaaagccugcaagaaa

SEQ ID NO: 2261934 - RNA, 19 nt, Homo sapiens
  misc_RNA (1)...(19): siRNA sense strand
auagcaaccuuaagggaaa

SEQ ID NO: 2261935 - RNA, 19 nt, Homo sapiens
  misc_RNA (1)...(19): siRNA sense strand
ggauuugucaagugaauaa

SEQ ID NO: 2261936 - RNA, 19 nt, Homo sapiens
  misc_RNA (1)...(19): siRNA sense strand
agagaaggaaacugaaaua

SEQ ID NO: 2261937 - RNA, 19 nt, Homo sapiens
  misc_RNA (1)...(19): siRNA sense strand
cugaaagagcagcaggaaa

SEQ ID NO: 2261938 - RNA, 19 nt, Homo sapiens
  misc_RNA (1)...(19): siRNA sense strand
gggaaaugauagcuagaga

SEQ ID NO: 2261939 - RNA, 19 nt, Homo sapiens
  misc_RNA (1)...(19): siRNA sense strand
cauuaugagugcuugaaua

SEQ ID NO: 2261940 - RNA, 19 nt, Homo sapiens
  misc_RNA (1)...(19): siRNA sense strand
uuauaaggcuauugagaga

SEQ ID NO: 2261941 - RNA, 19 nt, Homo sapiens
  misc_RNA (1)...(19): siRNA sense strand
ccaagaacuucaggagaaa

SEQ ID NO: 2261942 - RNA, 19 nt, Homo sapiens
  misc_RNA (1)...(19): siRNA sense strand
gcaaguugaucuggagaaa

SEQ ID NO: 2261943 - RNA, 19 nt, Homo sapiens
  misc_RNA (1)...(19): siRNA sense strand
gauccaagaacuucagaaa

SEQ ID NO: 2261944 - RNA, 19 nt, Homo sapiens
  misc_RNA (1)...(19): siRNA sense strand
uggaacagcugaaggaaca

SEQ ID NO: 2261945 - RNA, 19 nt, Homo sapiens
  misc_RNA (1)...(19): siRNA sense strand
aaagaaagaaggagagcuu

SEQ ID NO: 2261946 - RNA, 19 nt, Homo sapiens
  misc_RNA (1)...(19): siRNA sense strand
gggaggaaauccaaagaca

SEQ ID NO: 2261947 - RNA, 19 nt, Homo sapiens
  misc_RNA (1)...(19): siRNA sense strand
cugaagagcuccauauaau

SEQ ID NO: 2261948 - RNA, 19 nt, Homo sapiens
  misc_RNA (1)...(19): siRNA sense strand
agaaagucaggaagagaua

SEQ ID NO: 2261949 - RNA, 19 nt, Homo sapiens
  misc_RNA (1)...(19): siRNA sense strand
uaaagaaagagaugagcua

SEQ ID NO: 2261950 - RNA, 19 nt, Homo sapiens
  misc_RNA (1)...(19): siRNA sense strand
ucacagaagaaguuguaua

SEQ ID NO: 2261951 - RNA, 19 nt, Homo sapiens
  misc_RNA (1)...(19): siRNA sense strand
guagaaaggcugaggaaag

SEQ ID NO: 2261952 - RNA, 19 nt, Homo sapiens
  misc_RNA (1)...(19): siRNA sense strand
gcaagaaaccaaagcuaga

SEQ ID NO: 2261953 - RNA, 19 nt, Homo sapiens
  misc_RNA (1)...(19): siRNA sense strand
agagauaguugcacaagaa

SEQ ID NO: 2261954 - RNA, 19 nt, Homo sapiens
  misc_RNA (1)...(19): siRNA sense strand
aacuauaacuagagaccua

SEQ ID NO: 2261955 - RNA, 19 nt, Homo sapiens
  misc_RNA (1)...(19): siRNA sense strand
cacucaaacuggagagaga

SEQ ID NO: 2261956 - RNA, 19 nt, Homo sapiens
  misc_RNA (1)...(19): siRNA sense strand
auuuggaauuggaaggaaa

SEQ ID NO: 2261957 - RNA, 19 nt, Homo sapiens
  misc_RNA (1)...(19): siRNA sense strand
ggaauuggaaggaaagauu

SEQ ID NO: 2261958 - RNA, 19 nt, Homo sapiens
  misc_RNA (1)...(19): siRNA sense strand
gcaagaauagaaauggaaa

SEQ ID NO: 2261959 - RNA, 19 nt, Homo sapiens
  misc_RNA (1)...(19): siRNA sense strand
ugaaagaacaagaggaaac

SEQ ID NO: 2261960 - RNA, 19 nt, Homo sapiens
  misc_RNA (1)...(19): siRNA sense strand
agaaagaggaacaacuuaa

SEQ ID NO: 2261961 - RNA, 19 nt, Homo sapiens
  misc_RNA (1)...(19): siRNA sense strand
uucaagaacuuaaggcaaa

SEQ ID NO: 2261962 - RNA, 19 nt, Homo sapiens
  misc_RNA (1)...(19): siRNA sense strand
ucaugaaagccuugaagaa

SEQ ID NO: 2261963 - RNA, 19 nt, Homo sapiens
  misc_RNA (1)...(19): siRNA sense strand
gaaugaaucaacagaguuu

SEQ ID NO: 2261964 - RNA, 19 nt, Homo sapiens
  misc_RNA (1)...(19): siRNA sense strand
gaggagaaugagagaauga

SEQ ID NO: 2261965 - RNA, 19 nt, Homo sapiens
  misc_RNA (1)...(19): siRNA sense strand
agacugaccuaaaggaaaa

SEQ ID NO: 2261966 - RNA, 19 nt, Homo sapiens
  misc_RNA (1)...(19): siRNA sense strand
caagaagagaugagugaga

SEQ ID NO: 2261967 - RNA, 19 nt, Homo sapiens
  misc_RNA (1)...(19): siRNA sense strand
augaaagccuugaagaaau

SEQ ID NO: 2261968 - RNA, 19 nt, Homo sapiens
  misc_RNA (1)...(19): siRNA sense strand
cauuugaaacagagagaga

SEQ ID NO: 2261969 - RNA, 19 nt, Homo sapiens
  misc_RNA (1)...(19): siRNA sense strand
agaagaaucacuuggagaa

SEQ ID NO: 2261970 - RNA, 19 nt, Homo sapiens
  misc_RNA (1)...(19): siRNA sense strand
uggaaaagcaaaaggaauu

SEQ ID NO: 2261971 - RNA, 19 nt, Homo sapiens
  misc_RNA (1)...(19): siRNA sense strand
gggacaagugaucaagaaa

SEQ ID NO: 2261972 - RNA, 19 nt, Homo sapiens
  misc_RNA (1)...(19): siRNA sense strand
ucauauggacuuugagcaa

SEQ ID NO: 2261973 - RNA, 19 nt, Homo sapiens
  misc_RNA (1)...(19): siRNA sense strand
gcaagugugagauggauaa

SEQ ID NO: 2261974 - RNA, 19 nt, Homo sapiens
  misc_RNA (1)...(19): siRNA sense strand
cugcaugaagcuaaagaaa

SEQ ID NO: 2261975 - RNA, 19 nt, Homo sapiens
  misc_RNA (1)...(19): siRNA sense strand
ggaaagaacccuuaaaaga

SEQ ID NO: 2261976 - RNA, 19 nt, Homo sapiens
  misc_RNA (1)...(19): siRNA sense strand
ugugaagagagaagacaua

SEQ ID NO: 2261977 - RNA, 19 nt, Homo sapiens
  misc_RNA (1)...(19): siRNA sense strand
ccauauugauucugcuuau

SEQ ID NO: 2261978 - RNA, 19 nt, Homo sapiens
  misc_RNA (1)...(19): siRNA sense strand
ggguugugguccuggccaa

SEQ ID NO: 2261979 - RNA, 19 nt, Homo sapiens
  misc_RNA (1)...(19): siRNA sense strand
auaucagcguguagagcua

SEQ ID NO: 2261980 - RNA, 19 nt, Homo sapiens
  misc_RNA (1)...(19): siRNA sense strand
aggucauggagaaguguaa

SEQ ID NO: 2261981 - RNA, 19 nt, Homo sapiens
  misc_RNA (1)...(19): siRNA sense strand
gugccuuagcaaagaaaca

SEQ ID NO: 2261982 - RNA, 19 nt, Homo sapiens
  misc_RNA (1)...(19): siRNA sense strand
gugugaagagagaagacau

SEQ ID NO: 2261983 - RNA, 19 nt, Homo sapiens
  misc_RNA (1)...(19): siRNA sense strand
gcuacaaugagcagcggau

SEQ ID NO: 2261984 - RNA, 19 nt, Homo sapiens
  misc_RNA (1)...(19): siRNA sense strand
aguguaaggaugcaggauu

SEQ ID NO: 2261985 - RNA, 19 nt, Homo sapiens
  misc_RNA (1)...(19): siRNA sense strand
aguugacaucagaggauau

SEQ ID NO: 2261986 - RNA, 19 nt, Homo sapiens
  misc_RNA (1)...(19): siRNA sense strand
ugaaaguucuagauggucu

SEQ ID NO: 2261987 - RNA, 19 nt, Homo sapiens
  misc_RNA (1)...(19): siRNA sense strand
cgauauguugucauggauu

SEQ ID NO: 2261988 - RNA, 19 nt, Homo sapiens
  misc_RNA (1)...(19): siRNA sense strand
aaguaauauucgacacagu

SEQ ID NO: 2261989 - RNA, 19 nt, Homo sapiens
  misc_RNA (1)...(19): siRNA sense strand
agguagaaugucauccuua

SEQ ID NO: 2261990 - RNA, 19 nt, Homo sapiens
  misc_RNA (1)...(19): siRNA sense strand
cuggauuucugcaagucaa

SEQ ID NO: 2261991 - RNA, 19 nt, Homo sapiens
  misc_RNA (1)...(19): siRNA sense strand
augaggaggacaagagaaa

SEQ ID NO: 2261992 - RNA, 19 nt, Homo sapiens
  misc_RNA (1)...(19): siRNA sense strand
acagaagauagcugagaaa

SEQ ID NO: 2261993 - RNA, 19 nt, Homo sapiens
  misc_RNA (1)...(19): siRNA sense strand
aggaggaggaggagggaga

SEQ ID NO: 2261994 - RNA, 19 nt, Homo sapiens
  misc_RNA (1)...(19): siRNA sense strand
aggaggagggagagaacua

SEQ ID NO: 2261995 - RNA, 19 nt, Homo sapiens
  misc_RNA (1)...(19): siRNA sense strand
uggugaagaaagugaggaa

SEQ ID NO: 2261996 - RNA, 19 nt, Homo sapiens
  misc_RNA (1)...(19): siRNA sense strand
cugaauauggagaagaaau

SEQ ID NO: 2261997 - RNA, 19 nt, Homo sapiens
  misc_RNA (1)...(19): siRNA sense strand
agagagaggaugaggagga

SEQ ID NO: 2261998 - RNA, 19 nt, Homo sapiens
  misc_RNA (1)...(19): siRNA sense strand
cugaggaaggugaggaaga

SEQ ID NO: 2261999 - RNA, 19 nt, Homo sapiens
  misc_RNA (1)...(19): siRNA sense strand
cugaaaagaggaagagauu

SEQ ID NO: 2262000 - RNA, 19 nt, Homo sapiens
  misc_RNA (1)...(19): siRNA sense strand
gagcugaccuugaacgaga

SEQ ID NO: 2262001 - RNA, 19 nt, Homo sapiens
  misc_RNA (1)...(19): siRNA sense strand
ccuugaacgagaagaauuu

SEQ ID NO: 2262002 - RNA, 19 nt, Homo sapiens
  misc_RNA (1)...(19): siRNA sense strand
cugagaagagccagagaga

SEQ ID NO: 2262003 - RNA, 19 nt, Homo sapiens
  misc_RNA (1)...(19): siRNA sense strand
gagaagagccagagagagg

SEQ ID NO: 2262004 - RNA, 19 nt, Homo sapiens
  misc_RNA (1)...(19): siRNA sense strand
ugacaccagagaagagaaa

SEQ ID NO: 2262005 - RNA, 19 nt, Homo sapiens
  misc_RNA (1)...(19): siRNA sense strand
ugaagagccaggagagaca

SEQ ID NO: 2262006 - RNA, 19 nt, Homo sapiens
  misc_RNA (1)...(19): siRNA sense strand
gaggaagagauuaggggaa

SEQ ID NO: 2262007 - RNA, 19 nt, Homo sapiens
  misc_RNA (1)...(19): siRNA sense strand
aacuaugacuggugggaga

SEQ ID NO: 2262008 - RNA, 19 nt, Homo sapiens
  misc_RNA (1)...(19): siRNA sense strand
caagaaaaccagauggaca

SEQ ID NO: 2262009 - RNA, 19 nt, Homo sapiens
  misc_RNA (1)...(19): siRNA sense strand
ugaccuugaacgagaagaa

SEQ ID NO: 2262010 - RNA, 19 nt, Homo sapiens
  misc_RNA (1)...(19): siRNA sense strand
auaagauggcacauggaua

SEQ ID NO: 2262011 - RNA, 19 nt, Homo sapiens
  misc_RNA (1)...(19): siRNA sense strand
aagaaaaccagauggacaa

SEQ ID NO: 2262012 - RNA, 19 nt, Homo sapiens
  misc_RNA (1)...(19): siRNA sense strand
aggaugaggaggaggagga

SEQ ID NO: 2262013 - RNA, 19 nt, Homo sapiens
  misc_RNA (1)...(19): siRNA sense strand
gagaagaguagccaggaga

SEQ ID NO: 2262014 - RNA, 19 nt, Homo sapiens
  misc_RNA (1)...(19): siRNA sense strand
accugaauauggagaagaa

SEQ ID NO: 2262015 - RNA, 19 nt, Homo sapiens
  misc_RNA (1)...(19): siRNA sense strand
guugggaugaggaggacaa

SEQ ID NO: 2262016 - RNA, 19 nt, Homo sapiens
  misc_RNA (1)...(19): siRNA sense strand
gaggaggacaagagaaacu

SEQ ID NO: 2262017 - RNA, 19 nt, Homo sapiens
  misc_RNA (1)...(19): siRNA sense strand
ggagaagaaauaaaggguu

SEQ ID NO: 2262018 - RNA, 19 nt, Homo sapiens
  misc_RNA (1)...(19): siRNA sense strand
gagaggaugaggaggagga

SEQ ID NO: 2262019 - RNA, 19 nt, Homo sapiens
  misc_RNA (1)...(19): siRNA sense strand
ggaaccacaaugaaggaau

SEQ ID NO: 2262020 - RNA, 19 nt, Homo sapiens
  misc_RNA (1)...(19): siRNA sense strand
ccaggagucuaaaggccaa

SEQ ID NO: 2262021 - RNA, 19 nt, Homo sapiens
  misc_RNA (1)...(19): siRNA sense strand
aggaaucugaggagucaaa

SEQ ID NO: 2262022 - RNA, 19 nt, Homo sapiens
  misc_RNA (1)...(19): siRNA sense strand
agcuagguuucaagauaaa

SEQ ID NO: 2262023 - RNA, 19 nt, Homo sapiens
  misc_RNA (1)...(19): siRNA sense strand
cugcaauggauuuggaacu

SEQ ID NO: 2262024 - RNA, 19 nt, Homo sapiens
  misc_RNA (1)...(19): siRNA sense strand
guagaaaagacgucaaaga

SEQ ID NO: 2262025 - RNA, 19 nt, Homo sapiens
  misc_RNA (1)...(19): siRNA sense strand
ccugacagaggacgagaaa

SEQ ID NO: 2262026 - RNA, 19 nt, Homo sapiens
  misc_RNA (1)...(19): siRNA sense strand
gagccaggagagacacaaa

SEQ ID NO: 2262027 - RNA, 19 nt, Homo sapiens
  misc_RNA (1)...(19): siRNA sense strand
cuccaagaccucagaguga

SEQ ID NO: 2262028 - RNA, 19 nt, Homo sapiens
  misc_RNA (1)...(19): siRNA sense strand
ccugaagacgaguagaaaa

SEQ ID NO: 2262029 - RNA, 19 nt, Homo sapiens
  misc_RNA (1)...(19): siRNA sense strand
agagaaaugggcagaggga

SEQ ID NO: 2262030 - RNA, 19 nt, Homo sapiens
  misc_RNA (1)...(19): siRNA sense strand
ggacaaggcaaggaggcau

SEQ ID NO: 2262031 - RNA, 19 nt, Homo sapiens
  misc_RNA (1)...(19): siRNA sense strand
acaaagagacaacugaaaa

SEQ ID NO: 2262032 - RNA, 19 nt, Homo sapiens
  misc_RNA (1)...(19): siRNA sense strand
cugaggaccuggaguggga

SEQ ID NO: 2262033 - RNA, 19 nt, Homo sapiens
  misc_RNA (1)...(19): siRNA sense strand
gcugaaaagaggaagagau

SEQ ID NO: 2262034 - RNA, 19 nt, Homo sapiens
  misc_RNA (1)...(19): siRNA sense strand
auuuggaacuacagaagau

SEQ ID NO: 2262035 - RNA, 19 nt, Homo sapiens
  misc_RNA (1)...(19): siRNA sense strand
caaagagacaacugaaaau

SEQ ID NO: 2262036 - RNA, 19 nt, Homo sapiens
  misc_RNA (1)...(19): siRNA sense strand
guccugaagacgaguagaa

SEQ ID NO: 2262037 - RNA, 19 nt, Homo sapiens
  misc_RNA (1)...(19): siRNA sense strand
gcagaaaaugaaaaggaca

SEQ ID NO: 2262038 - RNA, 19 nt, Homo sapiens
  misc_RNA (1)...(19): siRNA sense strand
agaaaugggcagagggagg

SEQ ID NO: 2262039 - RNA, 19 nt, Homo sapiens
  misc_RNA (1)...(19): siRNA sense strand
cgcuauaggggcagaggaa

SEQ ID NO: 2262040 - RNA, 19 nt, Homo sapiens
  misc_RNA (1)...(19): siRNA sense strand
acaauuuucucgaggguga

SEQ ID NO: 2262041 - RNA, 19 nt, Homo sapiens
  misc_RNA (1)...(19): siRNA sense strand
ggguaugagaagagaaacc

SEQ ID NO: 2262042 - RNA, 19 nt, Homo sapiens
  misc_RNA (1)...(19): siRNA sense strand
ucaaagacaaagagacaac

SEQ ID NO: 2262043 - RNA, 19 nt, Homo sapiens
  misc_RNA (1)...(19): siRNA sense strand
ggaagauagcagugaagag

SEQ ID NO: 2262044 - RNA, 19 nt, Homo sapiens
  misc_RNA (1)...(19): siRNA sense strand
aggaagaaucugaggaagg

SEQ ID NO: 2262045 - RNA, 19 nt, Homo sapiens
  misc_RNA (1)...(19): siRNA sense strand
gguucuugggugaaggaca

SEQ ID NO: 2262046 - RNA, 19 nt, Homo sapiens
  misc_RNA (1)...(19): siRNA sense strand
agacaacaugaaugacaau

SEQ ID NO: 2262047 - RNA, 19 nt, Homo sapiens
  misc_RNA (1)...(19): siRNA sense strand
ggaggaggagggagagaac

SEQ ID NO: 2262048 - RNA, 19 nt, Homo sapiens
  misc_RNA (1)...(19): siRNA sense strand
guuaguggccagaucggaa

SEQ ID NO: 2262049 - RNA, 19 nt, Homo sapiens
  misc_RNA (1)...(19): siRNA sense strand
caguggaagagcagccauu

SEQ ID NO: 2262050 - RNA, 19 nt, Homo sapiens
  misc_RNA (1)...(19): siRNA sense strand
gaugaggaggacaagagaa

SEQ ID NO: 2262051 - RNA, 19 nt, Homo sapiens
  misc_RNA (1)...(19): siRNA sense strand
gaaacaccuugaagagcca

SEQ ID NO: 2262052 - RNA, 19 nt, Homo sapiens
  misc_RNA (1)...(19): siRNA sense strand
cagggagccaggagaauca

SEQ ID NO: 2262053 - RNA, 19 nt, Homo sapiens
  misc_RNA (1)...(19): siRNA sense strand
cagaaauaaacgaggaaga

SEQ ID NO: 2262054 - RNA, 19 nt, Homo sapiens
  misc_RNA (1)...(19): siRNA sense strand
cgacaaagaaucuggacga

SEQ ID NO: 2262055 - RNA, 19 nt, Homo sapiens
  misc_RNA (1)...(19): siRNA sense strand
aguaacugauguagaggaa

SEQ ID NO: 2262056 - RNA, 19 nt, Homo sapiens
  misc_RNA (1)...(19): siRNA sense strand
ccguauacugaaacagaaa

SEQ ID NO: 2262057 - RNA, 19 nt, Homo sapiens
  misc_RNA (1)...(19): siRNA sense strand
acuuagaaucaguggugaa

SEQ ID NO: 2262058 - RNA, 19 nt, Homo sapiens
  misc_RNA (1)...(19): siRNA sense strand
aggaaucaguggagaagga

SEQ ID NO: 2262059 - RNA, 19 nt, Homo sapiens
  misc_RNA (1)...(19): siRNA sense strand
gggaaggaaagguagaaca

SEQ ID NO: 2262060 - RNA, 19 nt, Homo sapiens
  misc_RNA (1)...(19): siRNA sense strand
caguauaagcagaucucua

SEQ ID NO: 2262061 - RNA, 19 nt, Homo sapiens
  misc_RNA (1)...(19): siRNA sense strand
ggaagaacuuacaaagcca

SEQ ID NO: 2262062 - RNA, 19 nt, Homo sapiens
  misc_RNA (1)...(19): siRNA sense strand
gaaucaguggagaaggaaa

SEQ ID NO: 2262063 - RNA, 19 nt, Homo sapiens
  misc_RNA (1)...(19): siRNA sense strand
cgaugaaccaauuagaaau

SEQ ID NO: 2262064 - RNA, 19 nt, Homo sapiens
  misc_RNA (1)...(19): siRNA sense strand
cagauaaagauggagauaa

SEQ ID NO: 2262065 - RNA, 19 nt, Homo sapiens
  misc_RNA (1)...(19): siRNA sense strand
gucaggauauggaggacaa

SEQ ID NO: 2262066 - RNA, 19 nt, Homo sapiens
  misc_RNA (1)...(19): siRNA sense strand
uagaggaaucaguggagaa

SEQ ID NO: 2262067 - RNA, 19 nt, Homo sapiens
  misc_RNA (1)...(19): siRNA sense strand
agagauuucacuagaagua

SEQ ID NO: 2262068 - RNA, 19 nt, Homo sapiens
  misc_RNA (1)...(19): siRNA sense strand
aggacaacguugaagagau

SEQ ID NO: 2262069 - RNA, 19 nt, Homo sapiens
  misc_RNA (1)...(19): siRNA sense strand
ggaccugauccaugaaaca

SEQ ID NO: 2262070 - RNA, 19 nt, Homo sapiens
  misc_RNA (1)...(19): siRNA sense strand
gauccaugaaacagaagaa

SEQ ID NO: 2262071 - RNA, 19 nt, Homo sapiens
  misc_RNA (1)...(19): siRNA sense strand
agauaaggccgaugaacca

SEQ ID NO: 2262072 - RNA, 19 nt, Homo sapiens
  misc_RNA (1)...(19): siRNA sense strand
aaggaaagguagaacaagu

SEQ ID NO: 2262073 - RNA, 19 nt, Homo sapiens
  misc_RNA (1)...(19): siRNA sense strand
ccuagaaagcccagagaag

SEQ ID NO: 2262074 - RNA, 19 nt, Homo sapiens
  misc_RNA (1)...(19): siRNA sense strand
aaucaguggagaaggaaaa

SEQ ID NO: 2262075 - RNA, 19 nt, Homo sapiens
  misc_RNA (1)...(19): siRNA sense strand
cgacgaaaugccugcaaaa

SEQ ID NO: 2262076 - RNA, 19 nt, Homo sapiens
  misc_RNA (1)...(19): siRNA sense strand
guuuagaguaugaacaaca

SEQ ID NO: 2262077 - RNA, 19 nt, Homo sapiens
  misc_RNA (1)...(19): siRNA sense strand
gagaaauuccccaggguuu

SEQ ID NO: 2262078 - RNA, 19 nt, Homo sapiens
  misc_RNA (1)...(19): siRNA sense strand
aaacagaaauaaacgagga

SEQ ID NO: 2262079 - RNA, 19 nt, Homo sapiens
  misc_RNA (1)...(19): siRNA sense strand
caguagaagauaaggccga

SEQ ID NO: 2262080 - RNA, 19 nt, Homo sapiens
  misc_RNA (1)...(19): siRNA sense strand
uggacgauguaaagcaauu

SEQ ID NO: 2262081 - RNA, 19 nt, Homo sapiens
  misc_RNA (1)...(19): siRNA sense strand
ucagauaaagauggagaua

SEQ ID NO: 2262082 - RNA, 19 nt, Homo sapiens
  misc_RNA (1)...(19): siRNA sense strand
aaauaaacgaggaagaacu

SEQ ID NO: 2262083 - RNA, 19 nt, Homo sapiens
  misc_RNA (1)...(19): siRNA sense strand
guugaaaagaggaugcuaa

SEQ ID NO: 2262084 - RNA, 19 nt, Homo sapiens
  misc_RNA (1)...(19): siRNA sense strand
uguacgggucacagaauua

SEQ ID NO: 2262085 - RNA, 19 nt, Homo sapiens
  misc_RNA (1)...(19): siRNA sense strand
aguucuggauucugcauua

SEQ ID NO: 2262086 - RNA, 19 nt, Homo sapiens
  misc_RNA (1)...(19): siRNA sense strand
cagaaaagugauacagaga

SEQ ID NO: 2262087 - RNA, 19 nt, Homo sapiens
  misc_RNA (1)...(19): siRNA sense strand
acuagaaguaacugaugua

SEQ ID NO: 2262088 - RNA, 19 nt, Homo sapiens
  misc_RNA (1)...(19): siRNA sense strand
uugaaggaguaucagcaaa

SEQ ID NO: 2262089 - RNA, 19 nt, Homo sapiens
  misc_RNA (1)...(19): siRNA sense strand
gggacagguuugcccgaau

SEQ ID NO: 2262090 - RNA, 19 nt, Homo sapiens
  misc_RNA (1)...(19): siRNA sense strand
uagaaagcccagagaagca

SEQ ID NO: 2262091 - RNA, 19 nt, Homo sapiens
  misc_RNA (1)...(19): siRNA sense strand
ugaaggaguaucagcaaaa

SEQ ID NO: 2262092 - RNA, 19 nt, Homo sapiens
  misc_RNA (1)...(19): siRNA sense strand
gauaaaacuuguaugcaca

SEQ ID NO: 2262093 - RNA, 19 nt, Homo sapiens
  misc_RNA (1)...(19): siRNA sense strand
auaauguaguaauggccaa

SEQ ID NO: 2262094 - RNA, 19 nt, Homo sapiens
  misc_RNA (1)...(19): siRNA sense strand
agauguuagucguuaugua

SEQ ID NO: 2262095 - RNA, 19 nt, Homo sapiens
  misc_RNA (1)...(19): siRNA sense strand
uguuagucguuauguagaa

SEQ ID NO: 2262096 - RNA, 19 nt, Homo sapiens
  misc_RNA (1)...(19): siRNA sense strand
cagcaagagaagacuuaga

SEQ ID NO: 2262097 - RNA, 19 nt, Homo sapiens
  misc_RNA (1)...(19): siRNA sense strand
gcaagagaagacuuagaau

SEQ ID NO: 2262098 - RNA, 19 nt, Homo sapiens
  misc_RNA (1)...(19): siRNA sense strand
aguaauggccaaacuagaa

SEQ ID NO: 2262099 - RNA, 19 nt, Homo sapiens
  misc_RNA (1)...(19): siRNA sense strand
caaucuucccacagaguuu

SEQ ID NO: 2262100 - RNA, 19 nt, Homo sapiens
  misc_RNA (1)...(19): siRNA sense strand
cagaugucuuuaauagcaa

SEQ ID NO: 2262101 - RNA, 19 nt, Homo sapiens
  misc_RNA (1)...(19): siRNA sense strand
cuauugucuucgucauaaa

SEQ ID NO: 2262102 - RNA, 19 nt, Homo sapiens
  misc_RNA (1)...(19): siRNA sense strand
gaaucaguggugaagaaau

SEQ ID NO: 2262103 - RNA, 19 nt, Homo sapiens
  misc_RNA (1)...(19): siRNA sense strand
acgaggaagaacuuacaaa

SEQ ID NO: 2262104 - RNA, 19 nt, Homo sapiens
  misc_RNA (1)...(19): siRNA sense strand
aaagaggaugcuaaugaaa

SEQ ID NO: 2262105 - RNA, 19 nt, Homo sapiens
  misc_RNA (1)...(19): siRNA sense strand
aagcagaucucuagggcag

SEQ ID NO: 2262106 - RNA, 19 nt, Homo sapiens
  misc_RNA (1)...(19): siRNA sense strand
cugacuguggccugggaaa

SEQ ID NO: 2262107 - RNA, 19 nt, Homo sapiens
  misc_RNA (1)...(19): siRNA sense strand
ugucaagcaagcugaaaca

SEQ ID NO: 2262108 - RNA, 19 nt, Homo sapiens
  misc_RNA (1)...(19): siRNA sense strand
cacuaggauucuugcauuu

SEQ ID NO: 2262109 - RNA, 19 nt, Homo sapiens
  misc_RNA (1)...(19): siRNA sense strand
uuguauggccaaggagaaa

SEQ ID NO: 2262110 - RNA, 19 nt, Homo sapiens
  misc_RNA (1)...(19): siRNA sense strand
uuauuguggaagacaguua

SEQ ID NO: 2262111 - RNA, 19 nt, Homo sapiens
  misc_RNA (1)...(19): siRNA sense strand
ggucuuaacgcaacuaaaa

SEQ ID NO: 2262112 - RNA, 19 nt, Homo sapiens
  misc_RNA (1)...(19): siRNA sense strand
agaaucuggacgauguaaa

SEQ ID NO: 2262113 - RNA, 19 nt, Homo sapiens
  misc_RNA (1)...(19): siRNA sense strand
agacagauuuagaucagca

SEQ ID NO: 2262114 - RNA, 19 nt, Homo sapiens
  misc_RNA (1)...(19): siRNA sense strand
ucauaaagacugugggcau

SEQ ID NO: 2262115 - RNA, 19 nt, Homo sapiens
  misc_RNA (1)...(19): siRNA sense strand
ggguaaucucaauggaaaa

SEQ ID NO: 2262116 - RNA, 19 nt, Homo sapiens
  misc_RNA (1)...(19): siRNA sense strand
gaaacgaguauuugagcga

SEQ ID NO: 2262117 - RNA, 19 nt, Homo sapiens
  misc_RNA (1)...(19): siRNA sense strand
agguagagaacguggccau

SEQ ID NO: 2262118 - RNA, 19 nt, Homo sapiens
  misc_RNA (1)...(19): siRNA sense strand
ccuaugagguguuugcuga

SEQ ID NO: 2262119 - RNA, 19 nt, Homo sapiens
  misc_RNA (1)...(19): siRNA sense strand
uaaaagaaguagaacgguu

SEQ ID NO: 2262120 - RNA, 19 nt, Homo sapiens
  misc_RNA (1)...(19): siRNA sense strand
aggcaauaugaaacgagua

SEQ ID NO: 2262121 - RNA, 19 nt, Homo sapiens
  misc_RNA (1)...(19): siRNA sense strand
agauagucaucgauggagu

SEQ ID NO: 2262122 - RNA, 19 nt, Homo sapiens
  misc_RNA (1)...(19): siRNA sense strand
ccgagaugacggagcagga

SEQ ID NO: 2262123 - RNA, 19 nt, Homo sapiens
  misc_RNA (1)...(19): siRNA sense strand
aacgaguauuugagcgauu

SEQ ID NO: 2262124 - RNA, 19 nt, Homo sapiens
  misc_RNA (1)...(19): siRNA sense strand
caaauuuacuauucggaca

SEQ ID NO: 2262125 - RNA, 19 nt, Homo sapiens
  misc_RNA (1)...(19): siRNA sense strand
acccaagaaaccaaagaaa

SEQ ID NO: 2262126 - RNA, 19 nt, Homo sapiens
  misc_RNA (1)...(19): siRNA sense strand
acaaauacgacgacgagga

SEQ ID NO: 2262127 - RNA, 19 nt, Homo sapiens
  misc_RNA (1)...(19): siRNA sense strand
cggacaaauacgacgacga

SEQ ID NO: 2262128 - RNA, 19 nt, Homo sapiens
  misc_RNA (1)...(19): siRNA sense strand
aauacgacgacgaggaguu

SEQ ID NO: 2262129 - RNA, 19 nt, Homo sapiens
  misc_RNA (1)...(19): siRNA sense strand
acgacgaggaguuugagua

SEQ ID NO: 2262130 - RNA, 19 nt, Homo sapiens
  misc_RNA (1)...(19): siRNA sense strand
gaagaggaguggaggagac

SEQ ID NO: 2262131 - RNA, 19 nt, Homo sapiens
  misc_RNA (1)...(19): siRNA sense strand
agaucuacuacucggacaa

SEQ ID NO: 2262132 - RNA, 19 nt, Homo sapiens
  misc_RNA (1)...(19): siRNA sense strand
cggacaaguacuucgacga

SEQ ID NO: 2262133 - RNA, 19 nt, Homo sapiens
  misc_RNA (1)...(19): siRNA sense strand
acagcaagaaugagggcaa

SEQ ID NO: 2262134 - RNA, 19 nt, Homo sapiens
  misc_RNA (1)...(19): siRNA sense strand
cgggcaggauggugggaau

SEQ ID NO: 2262135 - RNA, 19 nt, Homo sapiens
  misc_RNA (1)...(19): siRNA sense strand
ccauaugggaguucaucaa

SEQ ID NO: 2262136 - RNA, 19 nt, Homo sapiens
  misc_RNA (1)...(19): siRNA sense strand
ggucaaugcgggagcgaug

SEQ ID NO: 2262137 - RNA, 19 nt, Homo sapiens
  misc_RNA (1)...(19): siRNA sense strand
agggaaaagucacgggaca

SEQ ID NO: 2262138 - RNA, 19 nt, Homo sapiens
  misc_RNA (1)...(19): siRNA sense strand
agcugaugcauuugggaaa

SEQ ID NO: 2262139 - RNA, 19 nt, Homo sapiens
  misc_RNA (1)...(19): siRNA sense strand
cugucugccuucugguaua

SEQ ID NO: 2262140 - RNA, 19 nt, Homo sapiens
  misc_RNA (1)...(19): siRNA sense strand
ggaaguacccggugcugga

SEQ ID NO: 2262141 - RNA, 19 nt, Homo sapiens
  misc_RNA (1)...(19): siRNA sense strand
cgcaauaaauaacgccaga

SEQ ID NO: 2262142 - RNA, 19 nt, Homo sapiens
  misc_RNA (1)...(19): siRNA sense strand
ugucauugguggucaucau

SEQ ID NO: 2262143 - RNA, 19 nt, Homo sapiens
  misc_RNA (1)...(19): siRNA sense strand
cgauggaaacgguggugga

SEQ ID NO: 2262144 - RNA, 19 nt, Homo sapiens
  misc_RNA (1)...(19): siRNA sense strand
gguggauaucuuccggaaa

SEQ ID NO: 2262145 - RNA, 19 nt, Homo sapiens
  misc_RNA (1)...(19): siRNA sense strand
cugcuaaucaagacaguca

SEQ ID NO: 2262146 - RNA, 19 nt, Homo sapiens
  misc_RNA (1)...(19): siRNA sense strand
cauauggcccagauggcaa

SEQ ID NO: 2262147 - RNA, 19 nt, Homo sapiens
  misc_RNA (1)...(19): siRNA sense strand
ucgcuguggcucuggcaua

SEQ ID NO: 2262148 - RNA, 19 nt, Homo sapiens
  misc_RNA (1)...(19): siRNA sense strand
gggcaggauggugggaauu

SEQ ID NO: 2262149 - RNA, 19 nt, Homo sapiens
  misc_RNA (1)...(19): siRNA sense strand
cgggagacuucuuggcauc

SEQ ID NO: 2262150 - RNA, 19 nt, Homo sapiens
  misc_RNA (1)...(19): siRNA sense strand
cgggauggguggugaugcu

SEQ ID NO: 2262151 - RNA, 19 nt, Homo sapiens
  misc_RNA (1)...(19): siRNA sense strand
cgaugaguggcucuggaaa

SEQ ID NO: 2262152 - RNA, 19 nt, Homo sapiens
  misc_RNA (1)...(19): siRNA sense strand
gcccaguguaagagcaauu

SEQ ID NO: 2262153 - RNA, 19 nt, Homo sapiens
  misc_RNA (1)...(19): siRNA sense strand
gugcccaguguaagagcaa

SEQ ID NO: 2262154 - RNA, 19 nt, Homo sapiens
  misc_RNA (1)...(19): siRNA sense strand
gaagcagaguggaaagaaa

SEQ ID NO: 2262155 - RNA, 19 nt, Homo sapiens
  misc_RNA (1)...(19): siRNA sense strand
agcaagaagcagaguggaa

SEQ ID NO: 2262156 - RNA, 19 nt, Homo sapiens
  misc_RNA (1)...(19): siRNA sense strand
gcaagaagcagaguggaaa

SEQ ID NO: 2262157 - RNA, 19 nt, Homo sapiens
  misc_RNA (1)...(19): siRNA sense strand
aggcaauaaaggagcuaga

SEQ ID NO: 2262158 - RNA, 19 nt, Homo sapiens
  misc_RNA (1)...(19): siRNA sense strand
ccaggaaaguaauggucca

SEQ ID NO: 2262159 - RNA, 19 nt, Homo sapiens
  misc_RNA (1)...(19): siRNA sense strand
cuacagaaaacaaaagcaa

SEQ ID NO: 2262160 - RNA, 19 nt, Homo sapiens
  misc_RNA (1)...(19): siRNA sense strand
aguaaugguccaacagaca

SEQ ID NO: 2262161 - RNA, 19 nt, Homo sapiens
  misc_RNA (1)...(19): siRNA sense strand
gugaauacuaccaggaaag

SEQ ID NO: 2262162 - RNA, 19 nt, Homo sapiens
  misc_RNA (1)...(19): siRNA sense strand
ccaaagaugucucccgcau

SEQ ID NO: 2262163 - RNA, 19 nt, Homo sapiens
  misc_RNA (1)...(19): siRNA sense strand
aagaacaaauggaacgcuu

SEQ ID NO: 2262164 - RNA, 19 nt, Homo sapiens
  misc_RNA (1)...(19): siRNA sense strand
aagcagaguggaaagaaaa

SEQ ID NO: 2262165 - RNA, 19 nt, Homo sapiens
  misc_RNA (1)...(19): siRNA sense strand
agagcgagauugcgggcau

SEQ ID NO: 2262166 - RNA, 19 nt, Homo sapiens
  misc_RNA (1)...(19): siRNA sense strand
uggaguaaugaauggugaa

SEQ ID NO: 2262167 - RNA, 19 nt, Homo sapiens
  misc_RNA (1)...(19): siRNA sense strand
ucgagaacgacgaggccuu

SEQ ID NO: 2262168 - RNA, 19 nt, Homo sapiens
  misc_RNA (1)...(19): siRNA sense strand
aagaaugguaugcaagaca

SEQ ID NO: 2262169 - RNA, 19 nt, Homo sapiens
  misc_RNA (1)...(19): siRNA sense strand
gagaagaacaaauggaacg

SEQ ID NO: 2262170 - RNA, 19 nt, Homo sapiens
  misc_RNA (1)...(19): siRNA sense strand
uggaagcccuugaugccaa

SEQ ID NO: 2262171 - RNA, 19 nt, Homo sapiens
  misc_RNA (1)...(19): siRNA sense strand
gaagcagaguggaaagaaa

SEQ ID NO: 2262172 - RNA, 19 nt, Homo sapiens
  misc_RNA (1)...(19): siRNA sense strand
agcaagaagcagaguggaa

SEQ ID NO: 2262173 - RNA, 19 nt, Homo sapiens
  misc_RNA (1)...(19): siRNA sense strand
gcaagaagcagaguggaaa

SEQ ID NO: 2262174 - RNA, 19 nt, Homo sapiens
  misc_RNA (1)...(19): siRNA sense strand
aggcaauaaaggagcuaga

SEQ ID NO: 2262175 - RNA, 19 nt, Homo sapiens
  misc_RNA (1)...(19): siRNA sense strand
ccaggaaaguaauggucca

SEQ ID NO: 2262176 - RNA, 19 nt, Homo sapiens
  misc_RNA (1)...(19): siRNA sense strand
cuacagaaaacaaaagcaa

SEQ ID NO: 2262177 - RNA, 19 nt, Homo sapiens
  misc_RNA (1)...(19): siRNA sense strand
aguaaugguccaacagaca

SEQ ID NO: 2262178 - RNA, 19 nt, Homo sapiens
  misc_RNA (1)...(19): siRNA sense strand
gugaauacuaccaggaaag

SEQ ID NO: 2262179 - RNA, 19 nt, Homo sapiens
  misc_RNA (1)...(19): siRNA sense strand
ccaaagaugucucccgcau

SEQ ID NO: 2262180 - RNA, 19 nt, Homo sapiens
  misc_RNA (1)...(19): siRNA sense strand
aagaacaaauggaacgcuu

SEQ ID NO: 2262181 - RNA, 19 nt, Homo sapiens
  misc_RNA (1)...(19): siRNA sense strand
aagcagaguggaaagaaaa

SEQ ID NO: 2262182 - RNA, 19 nt, Homo sapiens
  misc_RNA (1)...(19): siRNA sense strand
agagcgagauugcgggcau

SEQ ID NO: 2262183 - RNA, 19 nt, Homo sapiens
  misc_RNA (1)...(19): siRNA sense strand
uggaguaaugaauggugaa

SEQ ID NO: 2262184 - RNA, 19 nt, Homo sapiens
  misc_RNA (1)...(19): siRNA sense strand
ucgagaacgacgaggccuu

SEQ ID NO: 2262185 - RNA, 19 nt, Homo sapiens
  misc_RNA (1)...(19): siRNA sense strand
aagaaugguaugcaagaca

SEQ ID NO: 2262186 - RNA, 19 nt, Homo sapiens
  misc_RNA (1)...(19): siRNA sense strand
gagaagaacaaauggaacg

SEQ ID NO: 2262187 - RNA, 19 nt, Homo sapiens
  misc_RNA (1)...(19): siRNA sense strand
uggaagcccuugaugccaa

SEQ ID NO: 2262188 - RNA, 19 nt, Homo sapiens
  misc_RNA (1)...(19): siRNA sense strand
gaacaggaauggcgggaga

SEQ ID NO: 2262189 - RNA, 19 nt, Homo sapiens
  misc_RNA (1)...(19): siRNA sense strand
ccaagaaggaccuggagga

SEQ ID NO: 2262190 - RNA, 19 nt, Homo sapiens
  misc_RNA (1)...(19): siRNA sense strand
cgagaggagcagaggaaac

SEQ ID NO: 2262191 - RNA, 19 nt, Homo sapiens
  misc_RNA (1)...(19): siRNA sense strand
ggaccacagucaauggaga

SEQ ID NO: 2262192 - RNA, 19 nt, Homo sapiens
  misc_RNA (1)...(19): siRNA sense strand
uagagaacgacgagggcuu

SEQ ID NO: 2262193 - RNA, 19 nt, Homo sapiens
  misc_RNA (1)...(19): siRNA sense strand
gcaaguggcgagaggagca

SEQ ID NO: 2262194 - RNA, 19 nt, Homo sapiens
  misc_RNA (1)...(19): siRNA sense strand
aacaaguagagaagaacaa

SEQ ID NO: 2262195 - RNA, 19 nt, Homo sapiens
  misc_RNA (1)...(19): siRNA sense strand
ugaaggaauccaaggagga

SEQ ID NO: 2262196 - RNA, 19 nt, Homo sapiens
  misc_RNA (1)...(19): siRNA sense strand
gggcugguucugaggacau

SEQ ID NO: 2262197 - RNA, 19 nt, Homo sapiens
  misc_RNA (1)...(19): siRNA sense strand
gagugaacaaguagagaag

SEQ ID NO: 2262198 - RNA, 19 nt, Homo sapiens
  misc_RNA (1)...(19): siRNA sense strand
uugcaggcauagagaacga

SEQ ID NO: 2262199 - RNA, 19 nt, Homo sapiens
  misc_RNA (1)...(19): siRNA sense strand
agaaggaccuggaggagug

SEQ ID NO: 2262200 - RNA, 19 nt, Homo sapiens
  misc_RNA (1)...(19): siRNA sense strand
gaacaggaauggcgggaga

SEQ ID NO: 2262201 - RNA, 19 nt, Homo sapiens
  misc_RNA (1)...(19): siRNA sense strand
ccaagaaggaccuggagga

SEQ ID NO: 2262202 - RNA, 19 nt, Homo sapiens
  misc_RNA (1)...(19): siRNA sense strand
cgagaggagcagaggaaac

SEQ ID NO: 2262203 - RNA, 19 nt, Homo sapiens
  misc_RNA (1)...(19): siRNA sense strand
ggaccacagucaauggaga

SEQ ID NO: 2262204 - RNA, 19 nt, Homo sapiens
  misc_RNA (1)...(19): siRNA sense strand
uagagaacgacgagggcuu

SEQ ID NO: 2262205 - RNA, 19 nt, Homo sapiens
  misc_RNA (1)...(19): siRNA sense strand
gcaaguggcgagaggagca

SEQ ID NO: 2262206 - RNA, 19 nt, Homo sapiens
  misc_RNA (1)...(19): siRNA sense strand
aacaaguagagaagaacaa

SEQ ID NO: 2262207 - RNA, 19 nt, Homo sapiens
  misc_RNA (1)...(19): siRNA sense strand
ugaaggaauccaaggagga

SEQ ID NO: 2262208 - RNA, 19 nt, Homo sapiens
  misc_RNA (1)...(19): siRNA sense strand
gggcugguucugaggacau

SEQ ID NO: 2262209 - RNA, 19 nt, Homo sapiens
  misc_RNA (1)...(19): siRNA sense strand
gagugaacaaguagagaag

SEQ ID NO: 2262210 - RNA, 19 nt, Homo sapiens
  misc_RNA (1)...(19): siRNA sense strand
uugcaggcauagagaacga

SEQ ID NO: 2262211 - RNA, 19 nt, Homo sapiens
  misc_RNA (1)...(19): siRNA sense strand
agaaggaccuggaggagug

SEQ ID NO: 2262212 - RNA, 19 nt, Homo sapiens
  misc_RNA (1)...(19): siRNA sense strand
cauauguauccgagagaaa

SEQ ID NO: 2262213 - RNA, 19 nt, Homo sapiens
  misc_RNA (1)...(19): siRNA sense strand
guucugaggaagugauuaa

SEQ ID NO: 2262214 - RNA, 19 nt, Homo sapiens
  misc_RNA (1)...(19): siRNA sense strand
ggaagauaacauugugaau

SEQ ID NO: 2262215 - RNA, 19 nt, Homo sapiens
  misc_RNA (1)...(19): siRNA sense strand
gcuguuacgaggagggaau

SEQ ID NO: 2262216 - RNA, 19 nt, Homo sapiens
  misc_RNA (1)...(19): siRNA sense strand
gaggaaggcaagagggagu

SEQ ID NO: 2262217 - RNA, 19 nt, Homo sapiens
  misc_RNA (1)...(19): siRNA sense strand
ccguauuagugcugacaca

SEQ ID NO: 2262218 - RNA, 19 nt, Homo sapiens
  misc_RNA (1)...(19): siRNA sense strand
augacaaguacgaggagua

SEQ ID NO: 2262219 - RNA, 19 nt, Homo sapiens
  misc_RNA (1)...(19): siRNA sense strand
caguuuguguugaggaaga

SEQ ID NO: 2262220 - RNA, 19 nt, Homo sapiens
  misc_RNA (1)...(19): siRNA sense strand
aguucaagauggaggggaa

SEQ ID NO: 2262221 - RNA, 19 nt, Homo sapiens
  misc_RNA (1)...(19): siRNA sense strand
ugaagauguuugauagaca

SEQ ID NO: 2262222 - RNA, 19 nt, Homo sapiens
  misc_RNA (1)...(19): siRNA sense strand
ggcacaaccucguggacuu

SEQ ID NO: 2262223 - RNA, 19 nt, Homo sapiens
  misc_RNA (1)...(19): siRNA sense strand
agagaaaguuggugagcag

SEQ ID NO: 2262224 - RNA, 19 nt, Homo sapiens
  misc_RNA (1)...(19): siRNA sense strand
cugaugaguugguggcuga

SEQ ID NO: 2262225 - RNA, 19 nt, Homo sapiens
  misc_RNA (1)...(19): siRNA sense strand
aaaucuacaucgacagcaa

SEQ ID NO: 2262226 - RNA, 19 nt, Homo sapiens
  misc_RNA (1)...(19): siRNA sense strand
ccgccaagcaagaggagca

SEQ ID NO: 2262227 - RNA, 19 nt, Homo sapiens
  misc_RNA (1)...(19): siRNA sense strand
uccagaaauuccagaguau

SEQ ID NO: 2262228 - RNA, 19 nt, Homo sapiens
  misc_RNA (1)...(19): siRNA sense strand
cugggaggaucuaguuaaa

SEQ ID NO: 2262229 - RNA, 19 nt, Homo sapiens
  misc_RNA (1)...(19): siRNA sense strand
caacaacaagagugugaau

SEQ ID NO: 2262230 - RNA, 19 nt, Homo sapiens
  misc_RNA (1)...(19): siRNA sense strand
acccagagcgugugaagaa

SEQ ID NO: 2262231 - RNA, 19 nt, Homo sapiens
  misc_RNA (1)...(19): siRNA sense strand
ugaucgagcacauuggaaa

SEQ ID NO: 2262232 - RNA, 19 nt, Homo sapiens
  misc_RNA (1)...(19): siRNA sense strand
cuauauagagacugaacuu

SEQ ID NO: 2262233 - RNA, 19 nt, Homo sapiens
  misc_RNA (1)...(19): siRNA sense strand
cagccguguuucugagcua

SEQ ID NO: 2262234 - RNA, 19 nt, Homo sapiens
  misc_RNA (1)...(19): siRNA sense strand
cugcagauggccaggaaaa

SEQ ID NO: 2262235 - RNA, 19 nt, Homo sapiens
  misc_RNA (1)...(19): siRNA sense strand
cgccaaaguugcagcgucu

SEQ ID NO: 2262236 - RNA, 19 nt, Homo sapiens
  misc_RNA (1)...(19): siRNA sense strand
cuccagaggcacagaauga

SEQ ID NO: 2262237 - RNA, 19 nt, Homo sapiens
  misc_RNA (1)...(19): siRNA sense strand
gagaaguggcugaaagaag

SEQ ID NO: 2262238 - RNA, 19 nt, Homo sapiens
  misc_RNA (1)...(19): siRNA sense strand
ccgagugcuuccugagaga

SEQ ID NO: 2262239 - RNA, 19 nt, Homo sapiens
  misc_RNA (1)...(19): siRNA sense strand
acaaguacgaggaguauga

SEQ ID NO: 2262240 - RNA, 19 nt, Homo sapiens
  misc_RNA (1)...(19): siRNA sense strand
cugaggaagugauuaaaca

SEQ ID NO: 2262241 - RNA, 19 nt, Homo sapiens
  misc_RNA (1)...(19): siRNA sense strand
cgugaguccuauauagaga

SEQ ID NO: 2262242 - RNA, 19 nt, Homo sapiens
  misc_RNA (1)...(19): siRNA sense strand
cugacaaguucauauguau

SEQ ID NO: 2262243 - RNA, 19 nt, Homo sapiens
  misc_RNA (1)...(19): siRNA sense strand
ccuuaucgguggaggauuc

SEQ ID NO: 2262244 - RNA, 19 nt, Homo sapiens
  misc_RNA (1)...(19): siRNA sense strand
gcuacaacccagagcgugu

SEQ ID NO: 2262245 - RNA, 19 nt, Homo sapiens
  misc_RNA (1)...(19): siRNA sense strand
gcuaaaaucuacaucgaca

SEQ ID NO: 2262246 - RNA, 19 nt, Homo sapiens
  misc_RNA (1)...(19): siRNA sense strand
acgggauccugaagagauu

SEQ ID NO: 2262247 - RNA, 19 nt, Homo sapiens
  misc_RNA (1)...(19): siRNA sense strand
gcauaugaguuugcggaga

SEQ ID NO: 2262248 - RNA, 19 nt, Homo sapiens
  misc_RNA (1)...(19): siRNA sense strand
aguacgaggaguaugacaa

SEQ ID NO: 2262249 - RNA, 19 nt, Homo sapiens
  misc_RNA (1)...(19): siRNA sense strand
cagagaaggaggacuauca

SEQ ID NO: 2262250 - RNA, 19 nt, Homo sapiens
  misc_RNA (1)...(19): siRNA sense strand
uaugcagauuggagcuaaa

SEQ ID NO: 2262251 - RNA, 19 nt, Homo sapiens
  misc_RNA (1)...(19): siRNA sense strand
agcaagcacuggagcacua

SEQ ID NO: 2262252 - RNA, 19 nt, Homo sapiens
  misc_RNA (1)...(19): siRNA sense strand
gcaacaacugggaggaucu

SEQ ID NO: 2262253 - RNA, 19 nt, Homo sapiens
  misc_RNA (1)...(19): siRNA sense strand
cugcaguucuauuuggauu

SEQ ID NO: 2262254 - RNA, 19 nt, Homo sapiens
  misc_RNA (1)...(19): siRNA sense strand
ccuggaaguuguucaguca

SEQ ID NO: 2262255 - RNA, 19 nt, Homo sapiens
  misc_RNA (1)...(19): siRNA sense strand
uggcagaagaagugauuuu

SEQ ID NO: 2262256 - RNA, 19 nt, Homo sapiens
  misc_RNA (1)...(19): siRNA sense strand
uugcagaguucaagaugga

SEQ ID NO: 2262257 - RNA, 19 nt, Homo sapiens
  misc_RNA (1)...(19): siRNA sense strand
cgucugcaccaaagggaau

SEQ ID NO: 2262258 - RNA, 19 nt, Homo sapiens
  misc_RNA (1)...(19): siRNA sense strand
cagagagacgguccagaaa

SEQ ID NO: 2262259 - RNA, 19 nt, Homo sapiens
  misc_RNA (1)...(19): siRNA sense strand
ugaaagaagauaagcugga

SEQ ID NO: 2262260 - RNA, 19 nt, Homo sapiens
  misc_RNA (1)...(19): siRNA sense strand
cguggaaggaggugugcuu

SEQ ID NO: 2262261 - RNA, 19 nt, Homo sapiens
  misc_RNA (1)...(19): siRNA sense strand
ugagggaguaccugagcaa

SEQ ID NO: 2262262 - RNA, 19 nt, Homo sapiens
  misc_RNA (1)...(19): siRNA sense strand
uggacaaacuggaugccuu

SEQ ID NO: 2262263 - RNA, 19 nt, Homo sapiens
  misc_RNA (1)...(19): siRNA sense strand
ugucacugcuccacacaaa

SEQ ID NO: 2262264 - RNA, 19 nt, Homo sapiens
  misc_RNA (1)...(19): siRNA sense strand
cagacauggcuguuggaga

SEQ ID NO: 2262265 - RNA, 19 nt, Homo sapiens
  misc_RNA (1)...(19): siRNA sense strand
uugaacugcuggagaagau

SEQ ID NO: 2262266 - RNA, 19 nt, Homo sapiens
  misc_RNA (1)...(19): siRNA sense strand
acuugaauccuuagaacuu

SEQ ID NO: 2262267 - RNA, 19 nt, Homo sapiens
  misc_RNA (1)...(19): siRNA sense strand
uagagaaguggcugaaaga

SEQ ID NO: 2262268 - RNA, 19 nt, Homo sapiens
  misc_RNA (1)...(19): siRNA sense strand
acuccaaauucaagccaca

SEQ ID NO: 2262269 - RNA, 19 nt, Homo sapiens
  misc_RNA (1)...(19): siRNA sense strand
ggauaggaagguuucacaa

SEQ ID NO: 2262270 - RNA, 19 nt, Homo sapiens
  misc_RNA (1)...(19): siRNA sense strand
aagauaagcuggagugcuc

SEQ ID NO: 2262271 - RNA, 19 nt, Homo sapiens
  misc_RNA (1)...(19): siRNA sense strand
gauaugaaugccucagcaa

SEQ ID NO: 2262272 - RNA, 19 nt, Homo sapiens
  misc_RNA (1)...(19): siRNA sense strand
aauucaagccacagaagau

SEQ ID NO: 2262273 - RNA, 19 nt, Homo sapiens
  misc_RNA (1)...(19): siRNA sense strand
ucugaaagcugggaagaca

SEQ ID NO: 2262274 - RNA, 19 nt, Homo sapiens
  misc_RNA (1)...(19): siRNA sense strand
cccaugaagauguuugaua

SEQ ID NO: 2262275 - RNA, 19 nt, Homo sapiens
  misc_RNA (1)...(19): siRNA sense strand
cugcuuugcuguacguaau

SEQ ID NO: 2262276 - RNA, 19 nt, Homo sapiens
  misc_RNA (1)...(19): siRNA sense strand
cauauguauccgagagaaa

SEQ ID NO: 2262277 - RNA, 19 nt, Homo sapiens
  misc_RNA (1)...(19): siRNA sense strand
guucugaggaagugauuaa

SEQ ID NO: 2262278 - RNA, 19 nt, Homo sapiens
  misc_RNA (1)...(19): siRNA sense strand
ggaagauaacauugugaau

SEQ ID NO: 2262279 - RNA, 19 nt, Homo sapiens
  misc_RNA (1)...(19): siRNA sense strand
gcuguuacgaggagggaau

SEQ ID NO: 2262280 - RNA, 19 nt, Homo sapiens
  misc_RNA (1)...(19): siRNA sense strand
gaggaaggcaagagggagu

SEQ ID NO: 2262281 - RNA, 19 nt, Homo sapiens
  misc_RNA (1)...(19): siRNA sense strand
ccguauuagugcugacaca

SEQ ID NO: 2262282 - RNA, 19 nt, Homo sapiens
  misc_RNA (1)...(19): siRNA sense strand
augacaaguacgaggagua

SEQ ID NO: 2262283 - RNA, 19 nt, Homo sapiens
  misc_RNA (1)...(19): siRNA sense strand
caguuuguguugaggaaga

SEQ ID NO: 2262284 - RNA, 19 nt, Homo sapiens
  misc_RNA (1)...(19): siRNA sense strand
aguucaagauggaggggaa

SEQ ID NO: 2262285 - RNA, 19 nt, Homo sapiens
  misc_RNA (1)...(19): siRNA sense strand
ugaagauguuugauagaca

SEQ ID NO: 2262286 - RNA, 19 nt, Homo sapiens
  misc_RNA (1)...(19): siRNA sense strand
ggcacaaccucguggacuu

SEQ ID NO: 2262287 - RNA, 19 nt, Homo sapiens
  misc_RNA (1)...(19): siRNA sense strand
agagaaaguuggugagcag

SEQ ID NO: 2262288 - RNA, 19 nt, Homo sapiens
  misc_RNA (1)...(19): siRNA sense strand
cugaugaguugguggcuga

SEQ ID NO: 2262289 - RNA, 19 nt, Homo sapiens
  misc_RNA (1)...(19): siRNA sense strand
aaaucuacaucgacagcaa

SEQ ID NO: 2262290 - RNA, 19 nt, Homo sapiens
  misc_RNA (1)...(19): siRNA sense strand
ccgccaagcaagaggagca

SEQ ID NO: 2262291 - RNA, 19 nt, Homo sapiens
  misc_RNA (1)...(19): siRNA sense strand
uccagaaauuccagaguau

SEQ ID NO: 2262292 - RNA, 19 nt, Homo sapiens
  misc_RNA (1)...(19): siRNA sense strand
cugggaggaucuaguuaaa

SEQ ID NO: 2262293 - RNA, 19 nt, Homo sapiens
  misc_RNA (1)...(19): siRNA sense strand
caacaacaagagugugaau

SEQ ID NO: 2262294 - RNA, 19 nt, Homo sapiens
  misc_RNA (1)...(19): siRNA sense strand
acccagagcgugugaagaa

SEQ ID NO: 2262295 - RNA, 19 nt, Homo sapiens
  misc_RNA (1)...(19): siRNA sense strand
ugaucgagcacauuggaaa

SEQ ID NO: 2262296 - RNA, 19 nt, Homo sapiens
  misc_RNA (1)...(19): siRNA sense strand
cuauauagagacugaacuu

SEQ ID NO: 2262297 - RNA, 19 nt, Homo sapiens
  misc_RNA (1)...(19): siRNA sense strand
cagccguguuucugagcua

SEQ ID NO: 2262298 - RNA, 19 nt, Homo sapiens
  misc_RNA (1)...(19): siRNA sense strand
cugcagauggccaggaaaa

SEQ ID NO: 2262299 - RNA, 19 nt, Homo sapiens
  misc_RNA (1)...(19): siRNA sense strand
cgccaaaguugcagcgucu

SEQ ID NO: 2262300 - RNA, 19 nt, Homo sapiens
  misc_RNA (1)...(19): siRNA sense strand
cuccagaggcacagaauga

SEQ ID NO: 2262301 - RNA, 19 nt, Homo sapiens
  misc_RNA (1)...(19): siRNA sense strand
gagaaguggcugaaagaag

SEQ ID NO: 2262302 - RNA, 19 nt, Homo sapiens
  misc_RNA (1)...(19): siRNA sense strand
ccgagugcuuccugagaga

SEQ ID NO: 2262303 - RNA, 19 nt, Homo sapiens
  misc_RNA (1)...(19): siRNA sense strand
acaaguacgaggaguauga

SEQ ID NO: 2262304 - RNA, 19 nt, Homo sapiens
  misc_RNA (1)...(19): siRNA sense strand
cugaggaagugauuaaaca

SEQ ID NO: 2262305 - RNA, 19 nt, Homo sapiens
  misc_RNA (1)...(19): siRNA sense strand
cgugaguccuauauagaga

SEQ ID NO: 2262306 - RNA, 19 nt, Homo sapiens
  misc_RNA (1)...(19): siRNA sense strand
cugacaaguucauauguau

SEQ ID NO: 2262307 - RNA, 19 nt, Homo sapiens
  misc_RNA (1)...(19): siRNA sense strand
ccuuaucgguggaggauuc

SEQ ID NO: 2262308 - RNA, 19 nt, Homo sapiens
  misc_RNA (1)...(19): siRNA sense strand
gcuacaacccagagcgugu

SEQ ID NO: 2262309 - RNA, 19 nt, Homo sapiens
  misc_RNA (1)...(19): siRNA sense strand
gcuaaaaucuacaucgaca

SEQ ID NO: 2262310 - RNA, 19 nt, Homo sapiens
  misc_RNA (1)...(19): siRNA sense strand
acgggauccugaagagauu

SEQ ID NO: 2262311 - RNA, 19 nt, Homo sapiens
  misc_RNA (1)...(19): siRNA sense strand
gcauaugaguuugcggaga

SEQ ID NO: 2262312 - RNA, 19 nt, Homo sapiens
  misc_RNA (1)...(19): siRNA sense strand
aguacgaggaguaugacaa

SEQ ID NO: 2262313 - RNA, 19 nt, Homo sapiens
  misc_RNA (1)...(19): siRNA sense strand
cagagaaggaggacuauca

SEQ ID NO: 2262314 - RNA, 19 nt, Homo sapiens
  misc_RNA (1)...(19): siRNA sense strand
uaugcagauuggagcuaaa

SEQ ID NO: 2262315 - RNA, 19 nt, Homo sapiens
  misc_RNA (1)...(19): siRNA sense strand
agcaagcacuggagcacua

SEQ ID NO: 2262316 - RNA, 19 nt, Homo sapiens
  misc_RNA (1)...(19): siRNA sense strand
gcaacaacugggaggaucu

SEQ ID NO: 2262317 - RNA, 19 nt, Homo sapiens
  misc_RNA (1)...(19): siRNA sense strand
cugcaguucuauuuggauu

SEQ ID NO: 2262318 - RNA, 19 nt, Homo sapiens
  misc_RNA (1)...(19): siRNA sense strand
ccuggaaguuguucaguca

SEQ ID NO: 2262319 - RNA, 19 nt, Homo sapiens
  misc_RNA (1)...(19): siRNA sense strand
uggcagaagaagugauuuu

SEQ ID NO: 2262320 - RNA, 19 nt, Homo sapiens
  misc_RNA (1)...(19): siRNA sense strand
uugcagaguucaagaugga

SEQ ID NO: 2262321 - RNA, 19 nt, Homo sapiens
  misc_RNA (1)...(19): siRNA sense strand
cgucugcaccaaagggaau

SEQ ID NO: 2262322 - RNA, 19 nt, Homo sapiens
  misc_RNA (1)...(19): siRNA sense strand
cagagagacgguccagaaa

SEQ ID NO: 2262323 - RNA, 19 nt, Homo sapiens
  misc_RNA (1)...(19): siRNA sense strand
ugaaagaagauaagcugga

SEQ ID NO: 2262324 - RNA, 19 nt, Homo sapiens
  misc_RNA (1)...(19): siRNA sense strand
cguggaaggaggugugcuu

SEQ ID NO: 2262325 - RNA, 19 nt, Homo sapiens
  misc_RNA (1)...(19): siRNA sense strand
ugagggaguaccugagcaa

SEQ ID NO: 2262326 - RNA, 19 nt, Homo sapiens
  misc_RNA (1)...(19): siRNA sense strand
uggacaaacuggaugccuu

SEQ ID NO: 2262327 - RNA, 19 nt, Homo sapiens
  misc_RNA (1)...(19): siRNA sense strand
ugucacugcuccacacaaa

SEQ ID NO: 2262328 - RNA, 19 nt, Homo sapiens
  misc_RNA (1)...(19): siRNA sense strand
cagacauggcuguuggaga

SEQ ID NO: 2262329 - RNA, 19 nt, Homo sapiens
  misc_RNA (1)...(19): siRNA sense strand
uugaacugcuggagaagau

SEQ ID NO: 2262330 - RNA, 19 nt, Homo sapiens
  misc_RNA (1)...(19): siRNA sense strand
acuugaauccuuagaacuu

SEQ ID NO: 2262331 - RNA, 19 nt, Homo sapiens
  misc_RNA (1)...(19): siRNA sense strand
uagagaaguggcugaaaga

SEQ ID NO: 2262332 - RNA, 19 nt, Homo sapiens
  misc_RNA (1)...(19): siRNA sense strand
acuccaaauucaagccaca

SEQ ID NO: 2262333 - RNA, 19 nt, Homo sapiens
  misc_RNA (1)...(19): siRNA sense strand
ggauaggaagguuucacaa

SEQ ID NO: 2262334 - RNA, 19 nt, Homo sapiens
  misc_RNA (1)...(19): siRNA sense strand
aagauaagcuggagugcuc

SEQ ID NO: 2262335 - RNA, 19 nt, Homo sapiens
  misc_RNA (1)...(19): siRNA sense strand
gauaugaaugccucagcaa

SEQ ID NO: 2262336 - RNA, 19 nt, Homo sapiens
  misc_RNA (1)...(19): siRNA sense strand
aauucaagccacagaagau

SEQ ID NO: 2262337 - RNA, 19 nt, Homo sapiens
  misc_RNA (1)...(19): siRNA sense strand
ucugaaagcugggaagaca

SEQ ID NO: 2262338 - RNA, 19 nt, Homo sapiens
  misc_RNA (1)...(19): siRNA sense strand
cccaugaagauguuugaua

SEQ ID NO: 2262339 - RNA, 19 nt, Homo sapiens
  misc_RNA (1)...(19): siRNA sense strand
cugcuuugcuguacguaau

SEQ ID NO: 2262340 - RNA, 19 nt, Homo sapiens
  misc_RNA (1)...(19): siRNA sense strand
gcucagugaagaaggucaa

SEQ ID NO: 2262341 - RNA, 19 nt, Homo sapiens
  misc_RNA (1)...(19): siRNA sense strand
augacauauucgaagcaaa

SEQ ID NO: 2262342 - RNA, 19 nt, Homo sapiens
  misc_RNA (1)...(19): siRNA sense strand
aagccaaggaacaggaaca

SEQ ID NO: 2262343 - RNA, 19 nt, Homo sapiens
  misc_RNA (1)...(19): siRNA sense strand
uagaagaggugacaggcau

SEQ ID NO: 2262344 - RNA, 19 nt, Homo sapiens
  misc_RNA (1)...(19): siRNA sense strand
gaguuaaguaugcagaaaa

SEQ ID NO: 2262345 - RNA, 19 nt, Homo sapiens
  misc_RNA (1)...(19): siRNA sense strand
caaaaugcaaacugacaaa

SEQ ID NO: 2262346 - RNA, 19 nt, Homo sapiens
  misc_RNA (1)...(19): siRNA sense strand
ggauagaagaggugacagg

SEQ ID NO: 2262347 - RNA, 19 nt, Homo sapiens
  misc_RNA (1)...(19): siRNA sense strand
gagauuaccaauauagcga

SEQ ID NO: 2262348 - RNA, 19 nt, Homo sapiens
  misc_RNA (1)...(19): siRNA sense strand
gcaauuggauagaagaggu

SEQ ID NO: 2262349 - RNA, 19 nt, Homo sapiens
  misc_RNA (1)...(19): siRNA sense strand
gugaagaaggucaacgagu

SEQ ID NO: 2262350 - RNA, 19 nt, Homo sapiens
  misc_RNA (1)...(19): siRNA sense strand
ggaguaaggaccugcgaca

SEQ ID NO: 2262351 - RNA, 19 nt, Homo sapiens
  misc_RNA (1)...(19): siRNA sense strand
aggagaaugaggagaacau

SEQ ID NO: 2262352 - RNA, 19 nt, Homo sapiens
  misc_RNA (1)...(19): siRNA sense strand
ggggagaacuucauggaca

SEQ ID NO: 2262353 - RNA, 19 nt, Homo sapiens
  misc_RNA (1)...(19): siRNA sense strand
gggaagaugaacaagcuca

SEQ ID NO: 2262354 - RNA, 19 nt, Homo sapiens
  misc_RNA (1)...(19): siRNA sense strand
uguaugaugucuuugggaa

SEQ ID NO: 2262355 - RNA, 19 nt, Homo sapiens
  misc_RNA (1)...(19): siRNA sense strand
cuucauggacauagagugu

SEQ ID NO: 2262356 - RNA, 19 nt, Homo sapiens
  misc_RNA (1)...(19): siRNA sense strand
ccuucacgguccuggagaa

SEQ ID NO: 2262357 - RNA, 19 nt, Homo sapiens
  misc_RNA (1)...(19): siRNA sense strand
ccgcaaagauagccgcaac

SEQ ID NO: 2262358 - RNA, 19 nt, Homo sapiens
  misc_RNA (1)...(19): siRNA sense strand
gccuauaagaggauuguca

SEQ ID NO: 2262359 - RNA, 19 nt, Homo sapiens
  misc_RNA (1)...(19): siRNA sense strand
cugcugaacuccaccguga

SEQ ID NO: 2262360 - RNA, 19 nt, Homo sapiens
  misc_RNA (1)...(19): siRNA sense strand
ccuagauggccuugcagau

SEQ ID NO: 2262361 - RNA, 19 nt, Homo sapiens
  misc_RNA (1)...(19): siRNA sense strand
ggacauuagguuagccaag

SEQ ID NO: 2262362 - RNA, 19 nt, Homo sapiens
  misc_RNA (1)...(19): siRNA sense strand
ggaguaaggaccugcgaca

SEQ ID NO: 2262363 - RNA, 19 nt, Homo sapiens
  misc_RNA (1)...(19): siRNA sense strand
aggagaaugaggagaacau

SEQ ID NO: 2262364 - RNA, 19 nt, Homo sapiens
  misc_RNA (1)...(19): siRNA sense strand
ggggagaacuucauggaca

SEQ ID NO: 2262365 - RNA, 19 nt, Homo sapiens
  misc_RNA (1)...(19): siRNA sense strand
gggaagaugaacaagcuca

SEQ ID NO: 2262366 - RNA, 19 nt, Homo sapiens
  misc_RNA (1)...(19): siRNA sense strand
uguaugaugucuuugggaa

SEQ ID NO: 2262367 - RNA, 19 nt, Homo sapiens
  misc_RNA (1)...(19): siRNA sense strand
cuucauggacauagagugu

SEQ ID NO: 2262368 - RNA, 19 nt, Homo sapiens
  misc_RNA (1)...(19): siRNA sense strand
ccuucacgguccuggagaa

SEQ ID NO: 2262369 - RNA, 19 nt, Homo sapiens
  misc_RNA (1)...(19): siRNA sense strand
ccgcaaagauagccgcaac

SEQ ID NO: 2262370 - RNA, 19 nt, Homo sapiens
  misc_RNA (1)...(19): siRNA sense strand
gccuauaagaggauuguca

SEQ ID NO: 2262371 - RNA, 19 nt, Homo sapiens
  misc_RNA (1)...(19): siRNA sense strand
cugcugaacuccaccguga

SEQ ID NO: 2262372 - RNA, 19 nt, Homo sapiens
  misc_RNA (1)...(19): siRNA sense strand
ggacauuagguuagccaag

SEQ ID NO: 2262373 - RNA, 19 nt, Homo sapiens
  misc_RNA (1)...(19): siRNA sense strand
agacagaggcugaugggaa

SEQ ID NO: 2262374 - RNA, 19 nt, Homo sapiens
  misc_RNA (1)...(19): siRNA sense strand
ggccaagacccuagggcua

SEQ ID NO: 2262375 - RNA, 19 nt, Homo sapiens
  misc_RNA (1)...(19): siRNA sense strand
caucuaugcucuacggagu

SEQ ID NO: 2262376 - RNA, 19 nt, Homo sapiens
  misc_RNA (1)...(19): siRNA sense strand
augcugggugacagagaua

SEQ ID NO: 2262377 - RNA, 19 nt, Homo sapiens
  misc_RNA (1)...(19): siRNA sense strand
agaacguggcugugcucua

SEQ ID NO: 2262378 - RNA, 19 nt, Homo sapiens
  misc_RNA (1)...(19): siRNA sense strand
cugaagauuggcagcguga

SEQ ID NO: 2262379 - RNA, 19 nt, Homo sapiens
  misc_RNA (1)...(19): siRNA sense strand
ucaucaacuccauggucaa

SEQ ID NO: 2262380 - RNA, 19 nt, Homo sapiens
  misc_RNA (1)...(19): siRNA sense strand
aggaaugcugggugacaga

SEQ ID NO: 2262381 - RNA, 19 nt, Homo sapiens
  misc_RNA (1)...(19): siRNA sense strand
ggugacagagauagccaau

SEQ ID NO: 2262382 - RNA, 19 nt, Homo sapiens
  misc_RNA (1)...(19): siRNA sense strand
ucuacggaguggagagauc

SEQ ID NO: 2262383 - RNA, 19 nt, Homo sapiens
  misc_RNA (1)...(19): siRNA sense strand
agaaaauaacagagggaaa

SEQ ID NO: 2262384 - RNA, 19 nt, Homo sapiens
  misc_RNA (1)...(19): siRNA sense strand
ggaaagaugcaaagacaga

SEQ ID NO: 2262385 - RNA, 19 nt, Homo sapiens
  misc_RNA (1)...(19): siRNA sense strand
gagaauaccacuauggcaa

SEQ ID NO: 2262386 - RNA, 19 nt, Homo sapiens
  misc_RNA (1)...(19): siRNA sense strand
cagcaagagcaguggacuu

SEQ ID NO: 2262387 - RNA, 19 nt, Homo sapiens
  misc_RNA (1)...(19): siRNA sense strand
agucauuaauucagcacaa

SEQ ID NO: 2262388 - RNA, 19 nt, Homo sapiens
  misc_RNA (1)...(19): siRNA sense strand
gcuaaagguggaaggguga

SEQ ID NO: 2262389 - RNA, 19 nt, Homo sapiens
  misc_RNA (1)...(19): siRNA sense strand
gagaauacguuguggaggu

SEQ ID NO: 2262390 - RNA, 19 nt, Homo sapiens
  misc_RNA (1)...(19): siRNA sense strand
cuggaaagaugcaaagaca

SEQ ID NO: 2262391 - RNA, 19 nt, Homo sapiens
  misc_RNA (1)...(19): siRNA sense strand
cagaguaaaagaagggaaa

SEQ ID NO: 2262392 - RNA, 19 nt, Homo sapiens
  misc_RNA (1)...(19): siRNA sense strand
gaacauuagaggaaaggau

SEQ ID NO: 2262393 - RNA, 19 nt, Homo sapiens
  misc_RNA (1)...(19): siRNA sense strand
accuaaagcugcaccgaaa

SEQ ID NO: 2262394 - RNA, 19 nt, Homo sapiens
  misc_RNA (1)...(19): siRNA sense strand
aggaaaggauaaacaucaa

SEQ ID NO: 2262395 - RNA, 19 nt, Homo sapiens
  misc_RNA (1)...(19): siRNA sense strand
gggugauaauugaaugcaa

SEQ ID NO: 2262396 - RNA, 19 nt, Homo sapiens
  misc_RNA (1)...(19): siRNA sense strand
gcgccuuugucaagagaau

SEQ ID NO: 2262397 - RNA, 19 nt, Homo sapiens
  misc_RNA (1)...(19): siRNA sense strand
ugucaauagcagcagaaua

SEQ ID NO: 2262398 - RNA, 19 nt, Homo sapiens
  misc_RNA (1)...(19): siRNA sense strand
cgauaucacaguuggagaa

SEQ ID NO: 2262399 - RNA, 19 nt, Homo sapiens
  misc_RNA (1)...(19): siRNA sense strand
acaaagaagaagcugcaaa

SEQ ID NO: 2262400 - RNA, 19 nt, Homo sapiens
  misc_RNA (1)...(19): siRNA sense strand
acauuagaggaaaggauaa

SEQ ID NO: 2262401 - RNA, 19 nt, Homo sapiens
  misc_RNA (1)...(19): siRNA sense strand
gugacaugauugaggcuuu

SEQ ID NO: 2262402 - RNA, 19 nt, Homo sapiens
  misc_RNA (1)...(19): siRNA sense strand
cagaauacucauuugggaa

SEQ ID NO: 2262403 - RNA, 19 nt, Homo sapiens
  misc_RNA (1)...(19): siRNA sense strand
caacaaaggagauggaccu

SEQ ID NO: 2262404 - RNA, 19 nt, Homo sapiens
  misc_RNA (1)...(19): siRNA sense strand
cauuagaggaaaggauaaa

SEQ ID NO: 2262405 - RNA, 19 nt, Homo sapiens
  misc_RNA (1)...(19): siRNA sense strand
augcaaaugcugaguugaa

SEQ ID NO: 2262406 - RNA, 19 nt, Homo sapiens
  misc_RNA (1)...(19): siRNA sense strand
ugauggagaagaauggaaa

SEQ ID NO: 2262407 - RNA, 19 nt, Homo sapiens
  misc_RNA (1)...(19): siRNA sense strand
gagccgugguucagacaau

SEQ ID NO: 2262408 - RNA, 19 nt, Homo sapiens
  misc_RNA (1)...(19): siRNA sense strand
ggaucaugucguugcacua

SEQ ID NO: 2262409 - RNA, 19 nt, Homo sapiens
  misc_RNA (1)...(19): siRNA sense strand
uaacagagggaaagcuaau

SEQ ID NO: 2262410 - RNA, 19 nt, Homo sapiens
  misc_RNA (1)...(19): siRNA sense strand
aaguuaaagucaaggccuu

SEQ ID NO: 2262411 - RNA, 19 nt, Homo sapiens
  misc_RNA (1)...(19): siRNA sense strand
ggaaauauggaggcagcaa

SEQ ID NO: 2262412 - RNA, 19 nt, Homo sapiens
  misc_RNA (1)...(19): siRNA sense strand
cugaggaagacaaaggauu

SEQ ID NO: 2262413 - RNA, 19 nt, Homo sapiens
  misc_RNA (1)...(19): siRNA sense strand
uguaggagguggaggugga

SEQ ID NO: 2262414 - RNA, 19 nt, Homo sapiens
  misc_RNA (1)...(19): siRNA sense strand
guaaaagaagggaaaggaa

SEQ ID NO: 2262415 - RNA, 19 nt, Homo sapiens
  misc_RNA (1)...(19): siRNA sense strand
uguugaggcuuccgacaaa

SEQ ID NO: 2262416 - RNA, 19 nt, Homo sapiens
  misc_RNA (1)...(19): siRNA sense strand
gggaauuaagacuguauga

SEQ ID NO: 2262417 - RNA, 19 nt, Homo sapiens
  misc_RNA (1)...(19): siRNA sense strand
aauaacagagggaaagcua

SEQ ID NO: 2262418 - RNA, 19 nt, Homo sapiens
  misc_RNA (1)...(19): siRNA sense strand
gaugaaaccaugagcccuu

SEQ ID NO: 2262419 - RNA, 19 nt, Homo sapiens
  misc_RNA (1)...(19): siRNA sense strand
caguaugguaggaggaaac

SEQ ID NO: 2262420 - RNA, 19 nt, Homo sapiens
  misc_RNA (1)...(19): siRNA sense strand
uaucaacaacccugacaaa

SEQ ID NO: 2262421 - RNA, 19 nt, Homo sapiens
  misc_RNA (1)...(19): siRNA sense strand
ccaaaguuuucauggagua

SEQ ID NO: 2262422 - RNA, 19 nt, Homo sapiens
  misc_RNA (1)...(19): siRNA sense strand
aggagguggagguggaaga

SEQ ID NO: 2262423 - RNA, 19 nt, Homo sapiens
  misc_RNA (1)...(19): siRNA sense strand
ucaacaacccugacaaaca

SEQ ID NO: 2262424 - RNA, 19 nt, Homo sapiens
  misc_RNA (1)...(19): siRNA sense strand
gcaaaugcugaguugaaga

SEQ ID NO: 2262425 - RNA, 19 nt, Homo sapiens
  misc_RNA (1)...(19): siRNA sense strand
aagucaaggccuucaacaa

SEQ ID NO: 2262426 - RNA, 19 nt, Homo sapiens
  misc_RNA (1)...(19): siRNA sense strand
aguugaagaucuuggcguu

SEQ ID NO: 2262427 - RNA, 19 nt, Homo sapiens
  misc_RNA (1)...(19): siRNA sense strand
cugagaacauuagaggaaa

SEQ ID NO: 2262428 - RNA, 19 nt, Homo sapiens
  misc_RNA (1)...(19): siRNA sense strand
gcagaaaauaacagaggga

SEQ ID NO: 2262429 - RNA, 19 nt, Homo sapiens
  misc_RNA (1)...(19): siRNA sense strand
ugucaagagaauaccacua

SEQ ID NO: 2262430 - RNA, 19 nt, Homo sapiens
  misc_RNA (1)...(19): siRNA sense strand
aaggauaaacaucaagcaa

SEQ ID NO: 2262431 - RNA, 19 nt, Homo sapiens
  misc_RNA (1)...(19): siRNA sense strand
uugcaaauguugaggcuuc

SEQ ID NO: 2262432 - RNA, 19 nt, Homo sapiens
  misc_RNA (1)...(19): siRNA sense strand
caauauucagcuagaagau

SEQ ID NO: 2262433 - RNA, 19 nt, Homo sapiens
  misc_RNA (1)...(19): siRNA sense strand
ucugagaauagaagacauu

SEQ ID NO: 2262434 - RNA, 19 nt, Homo sapiens
  misc_RNA (1)...(19): siRNA sense strand
uggaagaaacagagagcug

SEQ ID NO: 2262435 - RNA, 19 nt, Homo sapiens
  misc_RNA (1)...(19): siRNA sense strand
caacaacaaaggagaugga

SEQ ID NO: 2262436 - RNA, 19 nt, Homo sapiens
  misc_RNA (1)...(19): siRNA sense strand
ugacaaagaagaagcugca

SEQ ID NO: 2262437 - RNA, 19 nt, Homo sapiens
  misc_RNA (1)...(19): siRNA sense strand
acaguaugguaggaggaaa

SEQ ID NO: 2262438 - RNA, 19 nt, Homo sapiens
  misc_RNA (1)...(19): siRNA sense strand
cuauacaugcuuugcagaa

SEQ ID NO: 2262439 - RNA, 19 nt, Homo sapiens
  misc_RNA (1)...(19): siRNA sense strand
auagaagacauuagagcca

SEQ ID NO: 2262440 - RNA, 19 nt, Homo sapiens
  misc_RNA (1)...(19): siRNA sense strand
ccauaaagaugaaaccaug

SEQ ID NO: 2262441 - RNA, 19 nt, Homo sapiens
  misc_RNA (1)...(19): siRNA sense strand
ccuacaauccgaugguuga

SEQ ID NO: 2262442 - RNA, 19 nt, Homo sapiens
  misc_RNA (1)...(19): siRNA sense strand
ugaaaaugccggaauguau

SEQ ID NO: 2262443 - RNA, 19 nt, Homo sapiens
  misc_RNA (1)...(19): siRNA sense strand
ggaaucacuggaaggaaaa

SEQ ID NO: 2262444 - RNA, 19 nt, Homo sapiens
  misc_RNA (1)...(19): siRNA sense strand
agguggagguggaagaaac

SEQ ID NO: 2262445 - RNA, 19 nt, Homo sapiens
  misc_RNA (1)...(19): siRNA sense strand
guuacauaguggcauuuaa

SEQ ID NO: 2262446 - RNA, 19 nt, Homo sapiens
  misc_RNA (1)...(19): siRNA sense strand
uaaaagaagggaaaggaau

SEQ ID NO: 2262447 - RNA, 19 nt, Homo sapiens
  misc_RNA (1)...(19): siRNA sense strand
agacaaauggcaaucucua

SEQ ID NO: 2262448 - RNA, 19 nt, Homo sapiens
  misc_RNA (1)...(19): siRNA sense strand
guaugaauuccgcguggua

SEQ ID NO: 2262449 - RNA, 19 nt, Homo sapiens
  misc_RNA (1)...(19): siRNA sense strand
cagaaagaugcuggaauau

SEQ ID NO: 2262450 - RNA, 19 nt, Homo sapiens
  misc_RNA (1)...(19): siRNA sense strand
agaaaauaacagagggaaa

SEQ ID NO: 2262451 - RNA, 19 nt, Homo sapiens
  misc_RNA (1)...(19): siRNA sense strand
ggaaagaugcaaagacaga

SEQ ID NO: 2262452 - RNA, 19 nt, Homo sapiens
  misc_RNA (1)...(19): siRNA sense strand
gagaauaccacuauggcaa

SEQ ID NO: 2262453 - RNA, 19 nt, Homo sapiens
  misc_RNA (1)...(19): siRNA sense strand
cagcaagagcaguggacuu

SEQ ID NO: 2262454 - RNA, 19 nt, Homo sapiens
  misc_RNA (1)...(19): siRNA sense strand
agucauuaauucagcacaa

SEQ ID NO: 2262455 - RNA, 19 nt, Homo sapiens
  misc_RNA (1)...(19): siRNA sense strand
gcuaaagguggaaggguga

SEQ ID NO: 2262456 - RNA, 19 nt, Homo sapiens
  misc_RNA (1)...(19): siRNA sense strand
gagaauacguuguggaggu

SEQ ID NO: 2262457 - RNA, 19 nt, Homo sapiens
  misc_RNA (1)...(19): siRNA sense strand
cuggaaagaugcaaagaca

SEQ ID NO: 2262458 - RNA, 19 nt, Homo sapiens
  misc_RNA (1)...(19): siRNA sense strand
cagaguaaaagaagggaaa

SEQ ID NO: 2262459 - RNA, 19 nt, Homo sapiens
  misc_RNA (1)...(19): siRNA sense strand
gaacauuagaggaaaggau

SEQ ID NO: 2262460 - RNA, 19 nt, Homo sapiens
  misc_RNA (1)...(19): siRNA sense strand
accuaaagcugcaccgaaa

SEQ ID NO: 2262461 - RNA, 19 nt, Homo sapiens
  misc_RNA (1)...(19): siRNA sense strand
aggaaaggauaaacaucaa

SEQ ID NO: 2262462 - RNA, 19 nt, Homo sapiens
  misc_RNA (1)...(19): siRNA sense strand
gggugauaauugaaugcaa

SEQ ID NO: 2262463 - RNA, 19 nt, Homo sapiens
  misc_RNA (1)...(19): siRNA sense strand
gcgccuuugucaagagaau

SEQ ID NO: 2262464 - RNA, 19 nt, Homo sapiens
  misc_RNA (1)...(19): siRNA sense strand
ugucaauagcagcagaaua

SEQ ID NO: 2262465 - RNA, 19 nt, Homo sapiens
  misc_RNA (1)...(19): siRNA sense strand
cgauaucacaguuggagaa

SEQ ID NO: 2262466 - RNA, 19 nt, Homo sapiens
  misc_RNA (1)...(19): siRNA sense strand
acaaagaagaagcugcaaa

SEQ ID NO: 2262467 - RNA, 19 nt, Homo sapiens
  misc_RNA (1)...(19): siRNA sense strand
acauuagaggaaaggauaa

SEQ ID NO: 2262468 - RNA, 19 nt, Homo sapiens
  misc_RNA (1)...(19): siRNA sense strand
gugacaugauugaggcuuu

SEQ ID NO: 2262469 - RNA, 19 nt, Homo sapiens
  misc_RNA (1)...(19): siRNA sense strand
cagaauacucauuugggaa

SEQ ID NO: 2262470 - RNA, 19 nt, Homo sapiens
  misc_RNA (1)...(19): siRNA sense strand
caacaaaggagauggaccu

SEQ ID NO: 2262471 - RNA, 19 nt, Homo sapiens
  misc_RNA (1)...(19): siRNA sense strand
cauuagaggaaaggauaaa

SEQ ID NO: 2262472 - RNA, 19 nt, Homo sapiens
  misc_RNA (1)...(19): siRNA sense strand
augcaaaugcugaguugaa

SEQ ID NO: 2262473 - RNA, 19 nt, Homo sapiens
  misc_RNA (1)...(19): siRNA sense strand
ugauggagaagaauggaaa

SEQ ID NO: 2262474 - RNA, 19 nt, Homo sapiens
  misc_RNA (1)...(19): siRNA sense strand
gagccgugguucagacaau

SEQ ID NO: 2262475 - RNA, 19 nt, Homo sapiens
  misc_RNA (1)...(19): siRNA sense strand
ggaucaugucguugcacua

SEQ ID NO: 2262476 - RNA, 19 nt, Homo sapiens
  misc_RNA (1)...(19): siRNA sense strand
uaacagagggaaagcuaau

SEQ ID NO: 2262477 - RNA, 19 nt, Homo sapiens
  misc_RNA (1)...(19): siRNA sense strand
aaguuaaagucaaggccuu

SEQ ID NO: 2262478 - RNA, 19 nt, Homo sapiens
  misc_RNA (1)...(19): siRNA sense strand
ggaaauauggaggcagcaa

SEQ ID NO: 2262479 - RNA, 19 nt, Homo sapiens
  misc_RNA (1)...(19): siRNA sense strand
cugaggaagacaaaggauu

SEQ ID NO: 2262480 - RNA, 19 nt, Homo sapiens
  misc_RNA (1)...(19): siRNA sense strand
uguaggagguggaggugga

SEQ ID NO: 2262481 - RNA, 19 nt, Homo sapiens
  misc_RNA (1)...(19): siRNA sense strand
guaaaagaagggaaaggaa

SEQ ID NO: 2262482 - RNA, 19 nt, Homo sapiens
  misc_RNA (1)...(19): siRNA sense strand
uguugaggcuuccgacaaa

SEQ ID NO: 2262483 - RNA, 19 nt, Homo sapiens
  misc_RNA (1)...(19): siRNA sense strand
gggaauuaagacuguauga

SEQ ID NO: 2262484 - RNA, 19 nt, Homo sapiens
  misc_RNA (1)...(19): siRNA sense strand
aauaacagagggaaagcua

SEQ ID NO: 2262485 - RNA, 19 nt, Homo sapiens
  misc_RNA (1)...(19): siRNA sense strand
gaugaaaccaugagcccuu

SEQ ID NO: 2262486 - RNA, 19 nt, Homo sapiens
  misc_RNA (1)...(19): siRNA sense strand
caguaugguaggaggaaac

SEQ ID NO: 2262487 - RNA, 19 nt, Homo sapiens
  misc_RNA (1)...(19): siRNA sense strand
uaucaacaacccugacaaa

SEQ ID NO: 2262488 - RNA, 19 nt, Homo sapiens
  misc_RNA (1)...(19): siRNA sense strand
ccaaaguuuucauggagua

SEQ ID NO: 2262489 - RNA, 19 nt, Homo sapiens
  misc_RNA (1)...(19): siRNA sense strand
aggagguggagguggaaga

SEQ ID NO: 2262490 - RNA, 19 nt, Homo sapiens
  misc_RNA (1)...(19): siRNA sense strand
ucaacaacccugacaaaca

SEQ ID NO: 2262491 - RNA, 19 nt, Homo sapiens
  misc_RNA (1)...(19): siRNA sense strand
gcaaaugcugaguugaaga

SEQ ID NO: 2262492 - RNA, 19 nt, Homo sapiens
  misc_RNA (1)...(19): siRNA sense strand
aagucaaggccuucaacaa

SEQ ID NO: 2262493 - RNA, 19 nt, Homo sapiens
  misc_RNA (1)...(19): siRNA sense strand
aguugaagaucuuggcguu

SEQ ID NO: 2262494 - RNA, 19 nt, Homo sapiens
  misc_RNA (1)...(19): siRNA sense strand
cugagaacauuagaggaaa

SEQ ID NO: 2262495 - RNA, 19 nt, Homo sapiens
  misc_RNA (1)...(19): siRNA sense strand
gcagaaaauaacagaggga

SEQ ID NO: 2262496 - RNA, 19 nt, Homo sapiens
  misc_RNA (1)...(19): siRNA sense strand
ugucaagagaauaccacua

SEQ ID NO: 2262497 - RNA, 19 nt, Homo sapiens
  misc_RNA (1)...(19): siRNA sense strand
aaggauaaacaucaagcaa

SEQ ID NO: 2262498 - RNA, 19 nt, Homo sapiens
  misc_RNA (1)...(19): siRNA sense strand
uugcaaauguugaggcuuc

SEQ ID NO: 2262499 - RNA, 19 nt, Homo sapiens
  misc_RNA (1)...(19): siRNA sense strand
caauauucagcuagaagau

SEQ ID NO: 2262500 - RNA, 19 nt, Homo sapiens
  misc_RNA (1)...(19): siRNA sense strand
ucugagaauagaagacauu

SEQ ID NO: 2262501 - RNA, 19 nt, Homo sapiens
  misc_RNA (1)...(19): siRNA sense strand
uggaagaaacagagagcug

SEQ ID NO: 2262502 - RNA, 19 nt, Homo sapiens
  misc_RNA (1)...(19): siRNA sense strand
caacaacaaaggagaugga

SEQ ID NO: 2262503 - RNA, 19 nt, Homo sapiens
  misc_RNA (1)...(19): siRNA sense strand
ugacaaagaagaagcugca

SEQ ID NO: 2262504 - RNA, 19 nt, Homo sapiens
  misc_RNA (1)...(19): siRNA sense strand
acaguaugguaggaggaaa

SEQ ID NO: 2262505 - RNA, 19 nt, Homo sapiens
  misc_RNA (1)...(19): siRNA sense strand
cuauacaugcuuugcagaa

SEQ ID NO: 2262506 - RNA, 19 nt, Homo sapiens
  misc_RNA (1)...(19): siRNA sense strand
auagaagacauuagagcca

SEQ ID NO: 2262507 - RNA, 19 nt, Homo sapiens
  misc_RNA (1)...(19): siRNA sense strand
ccauaaagaugaaaccaug

SEQ ID NO: 2262508 - RNA, 19 nt, Homo sapiens
  misc_RNA (1)...(19): siRNA sense strand
ccuacaauccgaugguuga

SEQ ID NO: 2262509 - RNA, 19 nt, Homo sapiens
  misc_RNA (1)...(19): siRNA sense strand
ugaaaaugccggaauguau

SEQ ID NO: 2262510 - RNA, 19 nt, Homo sapiens
  misc_RNA (1)...(19): siRNA sense strand
ggaaucacuggaaggaaaa

SEQ ID NO: 2262511 - RNA, 19 nt, Homo sapiens
  misc_RNA (1)...(19): siRNA sense strand
agguggagguggaagaaac

SEQ ID NO: 2262512 - RNA, 19 nt, Homo sapiens
  misc_RNA (1)...(19): siRNA sense strand
guuacauaguggcauuuaa

SEQ ID NO: 2262513 - RNA, 19 nt, Homo sapiens
  misc_RNA (1)...(19): siRNA sense strand
uaaaagaagggaaaggaau

SEQ ID NO: 2262514 - RNA, 19 nt, Homo sapiens
  misc_RNA (1)...(19): siRNA sense strand
agacaaauggcaaucucua

SEQ ID NO: 2262515 - RNA, 19 nt, Homo sapiens
  misc_RNA (1)...(19): siRNA sense strand
guaugaauuccgcguggua

SEQ ID NO: 2262516 - RNA, 19 nt, Homo sapiens
  misc_RNA (1)...(19): siRNA sense strand
cagaaagaugcuggaauau

SEQ ID NO: 2262517 - RNA, 19 nt, Homo sapiens
  misc_RNA (1)...(19): siRNA sense strand
aggagaaagaggagagaaa

SEQ ID NO: 2262518 - RNA, 19 nt, Homo sapiens
  misc_RNA (1)...(19): siRNA sense strand
acuuagauguugaaggaaa

SEQ ID NO: 2262519 - RNA, 19 nt, Homo sapiens
  misc_RNA (1)...(19): siRNA sense strand
gauagaagugagagagcaa

SEQ ID NO: 2262520 - RNA, 19 nt, Homo sapiens
  misc_RNA (1)...(19): siRNA sense strand
agggagagauggaguucaa

SEQ ID NO: 2262521 - RNA, 19 nt, Homo sapiens
  misc_RNA (1)...(19): siRNA sense strand
aagaauaucuaacgggaga

SEQ ID NO: 2262522 - RNA, 19 nt, Homo sapiens
  misc_RNA (1)...(19): siRNA sense strand
agauggagauuuaggcgaa

SEQ ID NO: 2262523 - RNA, 19 nt, Homo sapiens
  misc_RNA (1)...(19): siRNA sense strand
uggaauugcuggaggugau

SEQ ID NO: 2262524 - RNA, 19 nt, Homo sapiens
  misc_RNA (1)...(19): siRNA sense strand
ccucaaggcccaaagggua

SEQ ID NO: 2262525 - RNA, 19 nt, Homo sapiens
  misc_RNA (1)...(19): siRNA sense strand
cuuagauguugaaggaaau

SEQ ID NO: 2262526 - RNA, 19 nt, Homo sapiens
  misc_RNA (1)...(19): siRNA sense strand
uggugcauauggagagaaa

SEQ ID NO: 2262527 - RNA, 19 nt, Homo sapiens
  misc_RNA (1)...(19): siRNA sense strand
ccagaaaaggcuaugaaaa

SEQ ID NO: 2262528 - RNA, 19 nt, Homo sapiens
  misc_RNA (1)...(19): siRNA sense strand
ucaagguaucucagggaaa

SEQ ID NO: 2262529 - RNA, 19 nt, Homo sapiens
  misc_RNA (1)...(19): siRNA sense strand
uggagagaaaggacagaaa

SEQ ID NO: 2262530 - RNA, 19 nt, Homo sapiens
  misc_RNA (1)...(19): siRNA sense strand
agauggagauccuggucaa

SEQ ID NO: 2262531 - RNA, 19 nt, Homo sapiens
  misc_RNA (1)...(19): siRNA sense strand
agaaaggacagaaaggaga

SEQ ID NO: 2262532 - RNA, 19 nt, Homo sapiens
  misc_RNA (1)...(19): siRNA sense strand
uugcauuuauccagacaaa

SEQ ID NO: 2262533 - RNA, 19 nt, Homo sapiens
  misc_RNA (1)...(19): siRNA sense strand
gggucugccaggugacaaa

SEQ ID NO: 2262534 - RNA, 19 nt, Homo sapiens
  misc_RNA (1)...(19): siRNA sense strand
cagaggagaaguuggucaa

SEQ ID NO: 2262535 - RNA, 19 nt, Homo sapiens
  misc_RNA (1)...(19): siRNA sense strand
caauggagcugauggacca

SEQ ID NO: 2262536 - RNA, 19 nt, Homo sapiens
  misc_RNA (1)...(19): siRNA sense strand
gccaaauccaguugaagaa

SEQ ID NO: 2262537 - RNA, 19 nt, Homo sapiens
  misc_RNA (1)...(19): siRNA sense strand
aggugcagauggaggaaga

SEQ ID NO: 2262538 - RNA, 19 nt, Homo sapiens
  misc_RNA (1)...(19): siRNA sense strand
aagcaggagaaaagggaaa

SEQ ID NO: 2262539 - RNA, 19 nt, Homo sapiens
  misc_RNA (1)...(19): siRNA sense strand
gggugaagauggagauccu

SEQ ID NO: 2262540 - RNA, 19 nt, Homo sapiens
  misc_RNA (1)...(19): siRNA sense strand
ucacaauucuccagaggga

SEQ ID NO: 2262541 - RNA, 19 nt, Homo sapiens
  misc_RNA (1)...(19): siRNA sense strand
agaaauagacggcagggau

SEQ ID NO: 2262542 - RNA, 19 nt, Homo sapiens
  misc_RNA (1)...(19): siRNA sense strand
gggaguaaagggagcagau

SEQ ID NO: 2262543 - RNA, 19 nt, Homo sapiens
  misc_RNA (1)...(19): siRNA sense strand
aguuggugguguuggagaa

SEQ ID NO: 2262544 - RNA, 19 nt, Homo sapiens
  misc_RNA (1)...(19): siRNA sense strand
aaaaggaccacaaggaaaa

SEQ ID NO: 2262545 - RNA, 19 nt, Homo sapiens
  misc_RNA (1)...(19): siRNA sense strand
agacuggauuucaaggcaa

SEQ ID NO: 2262546 - RNA, 19 nt, Homo sapiens
  misc_RNA (1)...(19): siRNA sense strand
gcaagggugacaagggaga

SEQ ID NO: 2262547 - RNA, 19 nt, Homo sapiens
  misc_RNA (1)...(19): siRNA sense strand
cucaaggcccaaaggguaa

SEQ ID NO: 2262548 - RNA, 19 nt, Homo sapiens
  misc_RNA (1)...(19): siRNA sense strand
agaagaaaacugugacaau

SEQ ID NO: 2262549 - RNA, 19 nt, Homo sapiens
  misc_RNA (1)...(19): siRNA sense strand
aggugccaauggagagaaa

SEQ ID NO: 2262550 - RNA, 19 nt, Homo sapiens
  misc_RNA (1)...(19): siRNA sense strand
cuucccagauggugaauau

SEQ ID NO: 2262551 - RNA, 19 nt, Homo sapiens
  misc_RNA (1)...(19): siRNA sense strand
aucaggaaguuaugacaaa

SEQ ID NO: 2262552 - RNA, 19 nt, Homo sapiens
  misc_RNA (1)...(19): siRNA sense strand
caauaggucuucagggucu

SEQ ID NO: 2262553 - RNA, 19 nt, Homo sapiens
  misc_RNA (1)...(19): siRNA sense strand
agacaagguccaaaggguu

SEQ ID NO: 2262554 - RNA, 19 nt, Homo sapiens
  misc_RNA (1)...(19): siRNA sense strand
agaagguccuccuggaaaa

SEQ ID NO: 2262555 - RNA, 19 nt, Homo sapiens
  misc_RNA (1)...(19): siRNA sense strand
uagcaaucagcguggagaa

SEQ ID NO: 2262556 - RNA, 19 nt, Homo sapiens
  misc_RNA (1)...(19): siRNA sense strand
uagaagugagagagcaauu

SEQ ID NO: 2262557 - RNA, 19 nt, Homo sapiens
  misc_RNA (1)...(19): siRNA sense strand
aggauauccaggaagacaa

SEQ ID NO: 2262558 - RNA, 19 nt, Homo sapiens
  misc_RNA (1)...(19): siRNA sense strand
aagaaggugcaaaggguga

SEQ ID NO: 2262559 - RNA, 19 nt, Homo sapiens
  misc_RNA (1)...(19): siRNA sense strand
cggagacaagggugaaauu

SEQ ID NO: 2262560 - RNA, 19 nt, Homo sapiens
  misc_RNA (1)...(19): siRNA sense strand
agagggaagacaaggugaa

SEQ ID NO: 2262561 - RNA, 19 nt, Homo sapiens
  misc_RNA (1)...(19): siRNA sense strand
agaauuucaucauggccaa

SEQ ID NO: 2262562 - RNA, 19 nt, Homo sapiens
  misc_RNA (1)...(19): siRNA sense strand
gacagaagcuccuaggcau

SEQ ID NO: 2262563 - RNA, 19 nt, Homo sapiens
  misc_RNA (1)...(19): siRNA sense strand
cgaaggaccaccaggacca

SEQ ID NO: 2262564 - RNA, 19 nt, Homo sapiens
  misc_RNA (1)...(19): siRNA sense strand
aagaggaaugccaggagaa

SEQ ID NO: 2262565 - RNA, 19 nt, Homo sapiens
  misc_RNA (1)...(19): siRNA sense strand
ccaaaggagaaaccaggaa

SEQ ID NO: 2262566 - RNA, 19 nt, Homo sapiens
  misc_RNA (1)...(19): siRNA sense strand
cagaaaaggcuaugaaaag

SEQ ID NO: 2262567 - RNA, 19 nt, Homo sapiens
  misc_RNA (1)...(19): siRNA sense strand
uugcacaaacagaaagaau

SEQ ID NO: 2262568 - RNA, 19 nt, Homo sapiens
  misc_RNA (1)...(19): siRNA sense strand
agguguaggcggucccaaa

SEQ ID NO: 2262569 - RNA, 19 nt, Homo sapiens
  misc_RNA (1)...(19): siRNA sense strand
aaagaauucuaaaggcuca

SEQ ID NO: 2262570 - RNA, 19 nt, Homo sapiens
  misc_RNA (1)...(19): siRNA sense strand
acaaagaaauagacggcag

SEQ ID NO: 2262571 - RNA, 19 nt, Homo sapiens
  misc_RNA (1)...(19): siRNA sense strand
cauaaauggccauggugca

SEQ ID NO: 2262572 - RNA, 19 nt, Homo sapiens
  misc_RNA (1)...(19): siRNA sense strand
cuuccaagcuagagagguc

SEQ ID NO: 2262573 - RNA, 19 nt, Homo sapiens
  misc_RNA (1)...(19): siRNA sense strand
gggaccaaccggugagacu

SEQ ID NO: 2262574 - RNA, 19 nt, Homo sapiens
  misc_RNA (1)...(19): siRNA sense strand
agggaaagauggaccagca

SEQ ID NO: 2262575 - RNA, 19 nt, Homo sapiens
  misc_RNA (1)...(19): siRNA sense strand
aggagaaagaggagagaaa

SEQ ID NO: 2262576 - RNA, 19 nt, Homo sapiens
  misc_RNA (1)...(19): siRNA sense strand
acuuagauguugaaggaaa

SEQ ID NO: 2262577 - RNA, 19 nt, Homo sapiens
  misc_RNA (1)...(19): siRNA sense strand
gauagaagugagagagcaa

SEQ ID NO: 2262578 - RNA, 19 nt, Homo sapiens
  misc_RNA (1)...(19): siRNA sense strand
agggagagauggaguucaa

SEQ ID NO: 2262579 - RNA, 19 nt, Homo sapiens
  misc_RNA (1)...(19): siRNA sense strand
aagaauaucuaacgggaga

SEQ ID NO: 2262580 - RNA, 19 nt, Homo sapiens
  misc_RNA (1)...(19): siRNA sense strand
agauggagauuuaggcgaa

SEQ ID NO: 2262581 - RNA, 19 nt, Homo sapiens
  misc_RNA (1)...(19): siRNA sense strand
uggaauugcuggaggugau

SEQ ID NO: 2262582 - RNA, 19 nt, Homo sapiens
  misc_RNA (1)...(19): siRNA sense strand
ccucaaggcccaaagggua

SEQ ID NO: 2262583 - RNA, 19 nt, Homo sapiens
  misc_RNA (1)...(19): siRNA sense strand
cuuagauguugaaggaaau

SEQ ID NO: 2262584 - RNA, 19 nt, Homo sapiens
  misc_RNA (1)...(19): siRNA sense strand
uggugcauauggagagaaa

SEQ ID NO: 2262585 - RNA, 19 nt, Homo sapiens
  misc_RNA (1)...(19): siRNA sense strand
ccagaaaaggcuaugaaaa

SEQ ID NO: 2262586 - RNA, 19 nt, Homo sapiens
  misc_RNA (1)...(19): siRNA sense strand
ucaagguaucucagggaaa

SEQ ID NO: 2262587 - RNA, 19 nt, Homo sapiens
  misc_RNA (1)...(19): siRNA sense strand
uggagagaaaggacagaaa

SEQ ID NO: 2262588 - RNA, 19 nt, Homo sapiens
  misc_RNA (1)...(19): siRNA sense strand
agauggagauccuggucaa

SEQ ID NO: 2262589 - RNA, 19 nt, Homo sapiens
  misc_RNA (1)...(19): siRNA sense strand
agaaaggacagaaaggaga

SEQ ID NO: 2262590 - RNA, 19 nt, Homo sapiens
  misc_RNA (1)...(19): siRNA sense strand
uugcauuuauccagacaaa

SEQ ID NO: 2262591 - RNA, 19 nt, Homo sapiens
  misc_RNA (1)...(19): siRNA sense strand
gggucugccaggugacaaa

SEQ ID NO: 2262592 - RNA, 19 nt, Homo sapiens
  misc_RNA (1)...(19): siRNA sense strand
cagaggagaaguuggucaa

SEQ ID NO: 2262593 - RNA, 19 nt, Homo sapiens
  misc_RNA (1)...(19): siRNA sense strand
caauggagcugauggacca

SEQ ID NO: 2262594 - RNA, 19 nt, Homo sapiens
  misc_RNA (1)...(19): siRNA sense strand
gccaaauccaguugaagaa

SEQ ID NO: 2262595 - RNA, 19 nt, Homo sapiens
  misc_RNA (1)...(19): siRNA sense strand
aggugcagauggaggaaga

SEQ ID NO: 2262596 - RNA, 19 nt, Homo sapiens
  misc_RNA (1)...(19): siRNA sense strand
aagcaggagaaaagggaaa

SEQ ID NO: 2262597 - RNA, 19 nt, Homo sapiens
  misc_RNA (1)...(19): siRNA sense strand
gggugaagauggagauccu

SEQ ID NO: 2262598 - RNA, 19 nt, Homo sapiens
  misc_RNA (1)...(19): siRNA sense strand
ucacaauucuccagaggga

SEQ ID NO: 2262599 - RNA, 19 nt, Homo sapiens
  misc_RNA (1)...(19): siRNA sense strand
agaaauagacggcagggau

SEQ ID NO: 2262600 - RNA, 19 nt, Homo sapiens
  misc_RNA (1)...(19): siRNA sense strand
gggaguaaagggagcagau

SEQ ID NO: 2262601 - RNA, 19 nt, Homo sapiens
  misc_RNA (1)...(19): siRNA sense strand
aguuggugguguuggagaa

SEQ ID NO: 2262602 - RNA, 19 nt, Homo sapiens
  misc_RNA (1)...(19): siRNA sense strand
aaaaggaccacaaggaaaa

SEQ ID NO: 2262603 - RNA, 19 nt, Homo sapiens
  misc_RNA (1)...(19): siRNA sense strand
agacuggauuucaaggcaa

SEQ ID NO: 2262604 - RNA, 19 nt, Homo sapiens
  misc_RNA (1)...(19): siRNA sense strand
gcaagggugacaagggaga

SEQ ID NO: 2262605 - RNA, 19 nt, Homo sapiens
  misc_RNA (1)...(19): siRNA sense strand
cucaaggcccaaaggguaa

SEQ ID NO: 2262606 - RNA, 19 nt, Homo sapiens
  misc_RNA (1)...(19): siRNA sense strand
agaagaaaacugugacaau

SEQ ID NO: 2262607 - RNA, 19 nt, Homo sapiens
  misc_RNA (1)...(19): siRNA sense strand
aggugccaauggagagaaa

SEQ ID NO: 2262608 - RNA, 19 nt, Homo sapiens
  misc_RNA (1)...(19): siRNA sense strand
cuucccagauggugaauau

SEQ ID NO: 2262609 - RNA, 19 nt, Homo sapiens
  misc_RNA (1)...(19): siRNA sense strand
aucaggaaguuaugacaaa

SEQ ID NO: 2262610 - RNA, 19 nt, Homo sapiens
  misc_RNA (1)...(19): siRNA sense strand
caauaggucuucagggucu

SEQ ID NO: 2262611 - RNA, 19 nt, Homo sapiens
  misc_RNA (1)...(19): siRNA sense strand
agacaagguccaaaggguu

SEQ ID NO: 2262612 - RNA, 19 nt, Homo sapiens
  misc_RNA (1)...(19): siRNA sense strand
agaagguccuccuggaaaa

SEQ ID NO: 2262613 - RNA, 19 nt, Homo sapiens
  misc_RNA (1)...(19): siRNA sense strand
uagcaaucagcguggagaa

SEQ ID NO: 2262614 - RNA, 19 nt, Homo sapiens
  misc_RNA (1)...(19): siRNA sense strand
uagaagugagagagcaauu

SEQ ID NO: 2262615 - RNA, 19 nt, Homo sapiens
  misc_RNA (1)...(19): siRNA sense strand
aggauauccaggaagacaa

SEQ ID NO: 2262616 - RNA, 19 nt, Homo sapiens
  misc_RNA (1)...(19): siRNA sense strand
aagaaggugcaaaggguga

SEQ ID NO: 2262617 - RNA, 19 nt, Homo sapiens
  misc_RNA (1)...(19): siRNA sense strand
cggagacaagggugaaauu

SEQ ID NO: 2262618 - RNA, 19 nt, Homo sapiens
  misc_RNA (1)...(19): siRNA sense strand
agagggaagacaaggugaa

SEQ ID NO: 2262619 - RNA, 19 nt, Homo sapiens
  misc_RNA (1)...(19): siRNA sense strand
agaauuucaucauggccaa

SEQ ID NO: 2262620 - RNA, 19 nt, Homo sapiens
  misc_RNA (1)...(19): siRNA sense strand
gacagaagcuccuaggcau

SEQ ID NO: 2262621 - RNA, 19 nt, Homo sapiens
  misc_RNA (1)...(19): siRNA sense strand
cgaaggaccaccaggacca

SEQ ID NO: 2262622 - RNA, 19 nt, Homo sapiens
  misc_RNA (1)...(19): siRNA sense strand
aagaggaaugccaggagaa

SEQ ID NO: 2262623 - RNA, 19 nt, Homo sapiens
  misc_RNA (1)...(19): siRNA sense strand
ccaaaggagaaaccaggaa

SEQ ID NO: 2262624 - RNA, 19 nt, Homo sapiens
  misc_RNA (1)...(19): siRNA sense strand
cagaaaaggcuaugaaaag

SEQ ID NO: 2262625 - RNA, 19 nt, Homo sapiens
  misc_RNA (1)...(19): siRNA sense strand
uugcacaaacagaaagaau

SEQ ID NO: 2262626 - RNA, 19 nt, Homo sapiens
  misc_RNA (1)...(19): siRNA sense strand
agguguaggcggucccaaa

SEQ ID NO: 2262627 - RNA, 19 nt, Homo sapiens
  misc_RNA (1)...(19): siRNA sense strand
aaagaauucuaaaggcuca

SEQ ID NO: 2262628 - RNA, 19 nt, Homo sapiens
  misc_RNA (1)...(19): siRNA sense strand
acaaagaaauagacggcag

SEQ ID NO: 2262629 - RNA, 19 nt, Homo sapiens
  misc_RNA (1)...(19): siRNA sense strand
cauaaauggccauggugca

SEQ ID NO: 2262630 - RNA, 19 nt, Homo sapiens
  misc_RNA (1)...(19): siRNA sense strand
cuuccaagcuagagagguc

SEQ ID NO: 2262631 - RNA, 19 nt, Homo sapiens
  misc_RNA (1)...(19): siRNA sense strand
gggaccaaccggugagacu

SEQ ID NO: 2262632 - RNA, 19 nt, Homo sapiens
  misc_RNA (1)...(19): siRNA sense strand
agggaaagauggaccagca

SEQ ID NO: 2262633 - RNA, 19 nt, Homo sapiens
  misc_RNA (1)...(19): siRNA sense strand
aggagaaagaggagagaaa

SEQ ID NO: 2262634 - RNA, 19 nt, Homo sapiens
  misc_RNA (1)...(19): siRNA sense strand
acuuagauguugaaggaaa

SEQ ID NO: 2262635 - RNA, 19 nt, Homo sapiens
  misc_RNA (1)...(19): siRNA sense strand
gauagaagugagagagcaa

SEQ ID NO: 2262636 - RNA, 19 nt, Homo sapiens
  misc_RNA (1)...(19): siRNA sense strand
agggagagauggaguucaa

SEQ ID NO: 2262637 - RNA, 19 nt, Homo sapiens
  misc_RNA (1)...(19): siRNA sense strand
aagaauaucuaacgggaga

SEQ ID NO: 2262638 - RNA, 19 nt, Homo sapiens
  misc_RNA (1)...(19): siRNA sense strand
agauggagauuuaggcgaa

SEQ ID NO: 2262639 - RNA, 19 nt, Homo sapiens
  misc_RNA (1)...(19): siRNA sense strand
uggaauugcuggaggugau

SEQ ID NO: 2262640 - RNA, 19 nt, Homo sapiens
  misc_RNA (1)...(19): siRNA sense strand
ccucaaggcccaaagggua

SEQ ID NO: 2262641 - RNA, 19 nt, Homo sapiens
  misc_RNA (1)...(19): siRNA sense strand
cuuagauguugaaggaaau

SEQ ID NO: 2262642 - RNA, 19 nt, Homo sapiens
  misc_RNA (1)...(19): siRNA sense strand
uggugcauauggagagaaa

SEQ ID NO: 2262643 - RNA, 19 nt, Homo sapiens
  misc_RNA (1)...(19): siRNA sense strand
ccagaaaaggcuaugaaaa

SEQ ID NO: 2262644 - RNA, 19 nt, Homo sapiens
  misc_RNA (1)...(19): siRNA sense strand
ucaagguaucucagggaaa

SEQ ID NO: 2262645 - RNA, 19 nt, Homo sapiens
  misc_RNA (1)...(19): siRNA sense strand
uggagagaaaggacagaaa

SEQ ID NO: 2262646 - RNA, 19 nt, Homo sapiens
  misc_RNA (1)...(19): siRNA sense strand
agauggagauccuggucaa

SEQ ID NO: 2262647 - RNA, 19 nt, Homo sapiens
  misc_RNA (1)...(19): siRNA sense strand
agaaaggacagaaaggaga

SEQ ID NO: 2262648 - RNA, 19 nt, Homo sapiens
  misc_RNA (1)...(19): siRNA sense strand
uugcauuuauccagacaaa

SEQ ID NO: 2262649 - RNA, 19 nt, Homo sapiens
  misc_RNA (1)...(19): siRNA sense strand
gggucugccaggugacaaa

SEQ ID NO: 2262650 - RNA, 19 nt, Homo sapiens
  misc_RNA (1)...(19): siRNA sense strand
cagaggagaaguuggucaa

SEQ ID NO: 2262651 - RNA, 19 nt, Homo sapiens
  misc_RNA (1)...(19): siRNA sense strand
caauggagcugauggacca

SEQ ID NO: 2262652 - RNA, 19 nt, Homo sapiens
  misc_RNA (1)...(19): siRNA sense strand
gccaaauccaguugaagaa

SEQ ID NO: 2262653 - RNA, 19 nt, Homo sapiens
  misc_RNA (1)...(19): siRNA sense strand
aggugcagauggaggaaga

SEQ ID NO: 2262654 - RNA, 19 nt, Homo sapiens
  misc_RNA (1)...(19): siRNA sense strand
aagcaggagaaaagggaaa

SEQ ID NO: 2262655 - RNA, 19 nt, Homo sapiens
  misc_RNA (1)...(19): siRNA sense strand
gggugaagauggagauccu

SEQ ID NO: 2262656 - RNA, 19 nt, Homo sapiens
  misc_RNA (1)...(19): siRNA sense strand
ucacaauucuccagaggga

SEQ ID NO: 2262657 - RNA, 19 nt, Homo sapiens
  misc_RNA (1)...(19): siRNA sense strand
agaaauagacggcagggau

SEQ ID NO: 2262658 - RNA, 19 nt, Homo sapiens
  misc_RNA (1)...(19): siRNA sense strand
gggaguaaagggagcagau

SEQ ID NO: 2262659 - RNA, 19 nt, Homo sapiens
  misc_RNA (1)...(19): siRNA sense strand
aguuggugguguuggagaa

SEQ ID NO: 2262660 - RNA, 19 nt, Homo sapiens
  misc_RNA (1)...(19): siRNA sense strand
aaaaggaccacaaggaaaa

SEQ ID NO: 2262661 - RNA, 19 nt, Homo sapiens
  misc_RNA (1)...(19): siRNA sense strand
agacuggauuucaaggcaa

SEQ ID NO: 2262662 - RNA, 19 nt, Homo sapiens
  misc_RNA (1)...(19): siRNA sense strand
gcaagggugacaagggaga

SEQ ID NO: 2262663 - RNA, 19 nt, Homo sapiens
  misc_RNA (1)...(19): siRNA sense strand
cucaaggcccaaaggguaa

SEQ ID NO: 2262664 - RNA, 19 nt, Homo sapiens
  misc_RNA (1)...(19): siRNA sense strand
agaagaaaacugugacaau

SEQ ID NO: 2262665 - RNA, 19 nt, Homo sapiens
  misc_RNA (1)...(19): siRNA sense strand
aggugccaauggagagaaa

SEQ ID NO: 2262666 - RNA, 19 nt, Homo sapiens
  misc_RNA (1)...(19): siRNA sense strand
cuucccagauggugaauau

SEQ ID NO: 2262667 - RNA, 19 nt, Homo sapiens
  misc_RNA (1)...(19): siRNA sense strand
aucaggaaguuaugacaaa

SEQ ID NO: 2262668 - RNA, 19 nt, Homo sapiens
  misc_RNA (1)...(19): siRNA sense strand
caauaggucuucagggucu

SEQ ID NO: 2262669 - RNA, 19 nt, Homo sapiens
  misc_RNA (1)...(19): siRNA sense strand
agacaagguccaaaggguu

SEQ ID NO: 2262670 - RNA, 19 nt, Homo sapiens
  misc_RNA (1)...(19): siRNA sense strand
agaagguccuccuggaaaa

SEQ ID NO: 2262671 - RNA, 19 nt, Homo sapiens
  misc_RNA (1)...(19): siRNA sense strand
uagcaaucagcguggagaa

SEQ ID NO: 2262672 - RNA, 19 nt, Homo sapiens
  misc_RNA (1)...(19): siRNA sense strand
uagaagugagagagcaauu

SEQ ID NO: 2262673 - RNA, 19 nt, Homo sapiens
  misc_RNA (1)...(19): siRNA sense strand
aggauauccaggaagacaa

SEQ ID NO: 2262674 - RNA, 19 nt, Homo sapiens
  misc_RNA (1)...(19): siRNA sense strand
aagaaggugcaaaggguga

SEQ ID NO: 2262675 - RNA, 19 nt, Homo sapiens
  misc_RNA (1)...(19): siRNA sense strand
cggagacaagggugaaauu

SEQ ID NO: 2262676 - RNA, 19 nt, Homo sapiens
  misc_RNA (1)...(19): siRNA sense strand
agagggaagacaaggugaa

SEQ ID NO: 2262677 - RNA, 19 nt, Homo sapiens
  misc_RNA (1)...(19): siRNA sense strand
agaauuucaucauggccaa

SEQ ID NO: 2262678 - RNA, 19 nt, Homo sapiens
  misc_RNA (1)...(19): siRNA sense strand
gacagaagcuccuaggcau

SEQ ID NO: 2262679 - RNA, 19 nt, Homo sapiens
  misc_RNA (1)...(19): siRNA sense strand
cgaaggaccaccaggacca

SEQ ID NO: 2262680 - RNA, 19 nt, Homo sapiens
  misc_RNA (1)...(19): siRNA sense strand
aagaggaaugccaggagaa

SEQ ID NO: 2262681 - RNA, 19 nt, Homo sapiens
  misc_RNA (1)...(19): siRNA sense strand
ccaaaggagaaaccaggaa

SEQ ID NO: 2262682 - RNA, 19 nt, Homo sapiens
  misc_RNA (1)...(19): siRNA sense strand
cagaaaaggcuaugaaaag

SEQ ID NO: 2262683 - RNA, 19 nt, Homo sapiens
  misc_RNA (1)...(19): siRNA sense strand
uugcacaaacagaaagaau

SEQ ID NO: 2262684 - RNA, 19 nt, Homo sapiens
  misc_RNA (1)...(19): siRNA sense strand
agguguaggcggucccaaa

SEQ ID NO: 2262685 - RNA, 19 nt, Homo sapiens
  misc_RNA (1)...(19): siRNA sense strand
aaagaauucuaaaggcuca

SEQ ID NO: 2262686 - RNA, 19 nt, Homo sapiens
  misc_RNA (1)...(19): siRNA sense strand
acaaagaaauagacggcag

SEQ ID NO: 2262687 - RNA, 19 nt, Homo sapiens
  misc_RNA (1)...(19): siRNA sense strand
cauaaauggccauggugca

SEQ ID NO: 2262688 - RNA, 19 nt, Homo sapiens
  misc_RNA (1)...(19): siRNA sense strand
cuuccaagcuagagagguc

SEQ ID NO: 2262689 - RNA, 19 nt, Homo sapiens
  misc_RNA (1)...(19): siRNA sense strand
gggaccaaccggugagacu

SEQ ID NO: 2262690 - RNA, 19 nt, Homo sapiens
  misc_RNA (1)...(19): siRNA sense strand
agggaaagauggaccagca

SEQ ID NO: 2262691 - RNA, 19 nt, Homo sapiens
  misc_RNA (1)...(19): siRNA sense strand
cgguguuaaaggagagaaa

SEQ ID NO: 2262692 - RNA, 19 nt, Homo sapiens
  misc_RNA (1)...(19): siRNA sense strand
cuuugauggucgagacaua

SEQ ID NO: 2262693 - RNA, 19 nt, Homo sapiens
  misc_RNA (1)...(19): siRNA sense strand
gggcaaugcaggagcuaca

SEQ ID NO: 2262694 - RNA, 19 nt, Homo sapiens
  misc_RNA (1)...(19): siRNA sense strand
ccaucagggucguggugaa

SEQ ID NO: 2262695 - RNA, 19 nt, Homo sapiens
  misc_RNA (1)...(19): siRNA sense strand
cagauaaugaagagcguuu

SEQ ID NO: 2262696 - RNA, 19 nt, Homo sapiens
  misc_RNA (1)...(19): siRNA sense strand
uggaaaggcugauggggaa

SEQ ID NO: 2262697 - RNA, 19 nt, Homo sapiens
  misc_RNA (1)...(19): siRNA sense strand
ccaugauuguccaggguga

SEQ ID NO: 2262698 - RNA, 19 nt, Homo sapiens
  misc_RNA (1)...(19): siRNA sense strand
aggacauaaaggagaauuu

SEQ ID NO: 2262699 - RNA, 19 nt, Homo sapiens
  misc_RNA (1)...(19): siRNA sense strand
cugaauggccucaagggua

SEQ ID NO: 2262700 - RNA, 19 nt, Homo sapiens
  misc_RNA (1)...(19): siRNA sense strand
ccagaaagucauuuggcau

SEQ ID NO: 2262701 - RNA, 19 nt, Homo sapiens
  misc_RNA (1)...(19): siRNA sense strand
gcguccgccuuguggauaa

SEQ ID NO: 2262702 - RNA, 19 nt, Homo sapiens
  misc_RNA (1)...(19): siRNA sense strand
cggcaggagcagaagcaga

SEQ ID NO: 2262703 - RNA, 19 nt, Homo sapiens
  misc_RNA (1)...(19): siRNA sense strand
agaacaugugggaaugaaa

SEQ ID NO: 2262704 - RNA, 19 nt, Homo sapiens
  misc_RNA (1)...(19): siRNA sense strand
ccaaaggagaaaaggguga

SEQ ID NO: 2262705 - RNA, 19 nt, Homo sapiens
  misc_RNA (1)...(19): siRNA sense strand
ucaaaggagagaaaggaga

SEQ ID NO: 2262706 - RNA, 19 nt, Homo sapiens
  misc_RNA (1)...(19): siRNA sense strand
aggaaagcagagagauaca

SEQ ID NO: 2262707 - RNA, 19 nt, Homo sapiens
  misc_RNA (1)...(19): siRNA sense strand
guuaaaggagagaaaggau

SEQ ID NO: 2262708 - RNA, 19 nt, Homo sapiens
  misc_RNA (1)...(19): siRNA sense strand
ucuuagaagccgucaccua

SEQ ID NO: 2262709 - RNA, 19 nt, Homo sapiens
  misc_RNA (1)...(19): siRNA sense strand
ugucuaauuccuugaucaa

SEQ ID NO: 2262710 - RNA, 19 nt, Homo sapiens
  misc_RNA (1)...(19): siRNA sense strand
agugaagacaguuuaacaa

SEQ ID NO: 2262711 - RNA, 19 nt, Homo sapiens
  misc_RNA (1)...(19): siRNA sense strand
cagcugugcuaaucggcua

SEQ ID NO: 2262712 - RNA, 19 nt, Homo sapiens
  misc_RNA (1)...(19): siRNA sense strand
ccugaagaguccucggcau

SEQ ID NO: 2262713 - RNA, 19 nt, Homo sapiens
  misc_RNA (1)...(19): siRNA sense strand
ccuugacauugcugaagaa

SEQ ID NO: 2262714 - RNA, 19 nt, Homo sapiens
  misc_RNA (1)...(19): siRNA sense strand
uagugaaccucaagggcca

SEQ ID NO: 2262715 - RNA, 19 nt, Homo sapiens
  misc_RNA (1)...(19): siRNA sense strand
ccaaagaagcaaaaguuga

SEQ ID NO: 2262716 - RNA, 19 nt, Homo sapiens
  misc_RNA (1)...(19): siRNA sense strand
ccaaaggaccaccaggaca

SEQ ID NO: 2262717 - RNA, 19 nt, Homo sapiens
  misc_RNA (1)...(19): siRNA sense strand
caccuggagcugugauuaa

SEQ ID NO: 2262718 - RNA, 19 nt, Homo sapiens
  misc_RNA (1)...(19): siRNA sense strand
uggaagaccuggugauccu

SEQ ID NO: 2262719 - RNA, 19 nt, Homo sapiens
  misc_RNA (1)...(19): siRNA sense strand
agaaaagaauuuagcagca

SEQ ID NO: 2262720 - RNA, 19 nt, Homo sapiens
  misc_RNA (1)...(19): siRNA sense strand
ucaaagagaacauguggga

SEQ ID NO: 2262721 - RNA, 19 nt, Homo sapiens
  misc_RNA (1)...(19): siRNA sense strand
gcagagagauacagccuuc

SEQ ID NO: 2262722 - RNA, 19 nt, Homo sapiens
  misc_RNA (1)...(19): siRNA sense strand
accaggacauaaaggagaa

SEQ ID NO: 2262723 - RNA, 19 nt, Homo sapiens
  misc_RNA (1)...(19): siRNA sense strand
ugugaggaaagcagagaga

SEQ ID NO: 2262724 - RNA, 19 nt, Homo sapiens
  misc_RNA (1)...(19): siRNA sense strand
acggaguagcugagaucuu

SEQ ID NO: 2262725 - RNA, 19 nt, Homo sapiens
  misc_RNA (1)...(19): siRNA sense strand
aagcaaaaguugaacccau

SEQ ID NO: 2262726 - RNA, 19 nt, Homo sapiens
  misc_RNA (1)...(19): siRNA sense strand
acauggaacuuucugguga

SEQ ID NO: 2262727 - RNA, 19 nt, Homo sapiens
  misc_RNA (1)...(19): siRNA sense strand
gaagggagcaagagggccu

SEQ ID NO: 2262728 - RNA, 19 nt, Homo sapiens
  misc_RNA (1)...(19): siRNA sense strand
caacagaggcuuaccugga

SEQ ID NO: 2262729 - RNA, 19 nt, Homo sapiens
  misc_RNA (1)...(19): siRNA sense strand
gggacuuggauucgaggau

SEQ ID NO: 2262730 - RNA, 19 nt, Homo sapiens
  misc_RNA (1)...(19): siRNA sense strand
ucaugaauuucucggacau

SEQ ID NO: 2262731 - RNA, 19 nt, Homo sapiens
  misc_RNA (1)...(19): siRNA sense strand
uguccaccauugugaggaa

SEQ ID NO: 2262732 - RNA, 19 nt, Homo sapiens
  misc_RNA (1)...(19): siRNA sense strand
cagugaagacaguuuaaca

SEQ ID NO: 2262733 - RNA, 19 nt, Homo sapiens
  misc_RNA (1)...(19): siRNA sense strand
ggacauucgagcugauuuu

SEQ ID NO: 2262734 - RNA, 19 nt, Homo sapiens
  misc_RNA (1)...(19): siRNA sense strand
ccuuugaagacauggaacu

SEQ ID NO: 2262735 - RNA, 19 nt, Homo sapiens
  misc_RNA (1)...(19): siRNA sense strand
agcaaaaguugaacccaua

SEQ ID NO: 2262736 - RNA, 19 nt, Homo sapiens
  misc_RNA (1)...(19): siRNA sense strand
guuagagauggcuggaaaa

SEQ ID NO: 2262737 - RNA, 19 nt, Homo sapiens
  misc_RNA (1)...(19): siRNA sense strand
ccaaagggcagaagggaga

SEQ ID NO: 2262738 - RNA, 19 nt, Homo sapiens
  misc_RNA (1)...(19): siRNA sense strand
cgggucagcgggagagaaa

SEQ ID NO: 2262739 - RNA, 19 nt, Homo sapiens
  misc_RNA (1)...(19): siRNA sense strand
gagcaaagguccaucagga

SEQ ID NO: 2262740 - RNA, 19 nt, Homo sapiens
  misc_RNA (1)...(19): siRNA sense strand
cagaaggcccgaagggaga

SEQ ID NO: 2262741 - RNA, 19 nt, Homo sapiens
  misc_RNA (1)...(19): siRNA sense strand
cugaaaggagagaagggua

SEQ ID NO: 2262742 - RNA, 19 nt, Homo sapiens
  misc_RNA (1)...(19): siRNA sense strand
gugacaacagugagggaga

SEQ ID NO: 2262743 - RNA, 19 nt, Homo sapiens
  misc_RNA (1)...(19): siRNA sense strand
gagaaggacggcagggcuu

SEQ ID NO: 2262744 - RNA, 19 nt, Homo sapiens
  misc_RNA (1)...(19): siRNA sense strand
uggcauugcaggagaaaau

SEQ ID NO: 2262745 - RNA, 19 nt, Homo sapiens
  misc_RNA (1)...(19): siRNA sense strand
agaagggagagaagggaga

SEQ ID NO: 2262746 - RNA, 19 nt, Homo sapiens
  misc_RNA (1)...(19): siRNA sense strand
caacaggaccaaugggcca

SEQ ID NO: 2262747 - RNA, 19 nt, Homo sapiens
  misc_RNA (1)...(19): siRNA sense strand
ugaagggcgugcagggaga

SEQ ID NO: 2262748 - RNA, 19 nt, Homo sapiens
  misc_RNA (1)...(19): siRNA sense strand
gggcaaugacuguguucga

SEQ ID NO: 2262749 - RNA, 19 nt, Homo sapiens
  misc_RNA (1)...(19): siRNA sense strand
caaaaggagaaaaggguga

SEQ ID NO: 2262750 - RNA, 19 nt, Homo sapiens
  misc_RNA (1)...(19): siRNA sense strand
cagacgggacucagaggaa

SEQ ID NO: 2262751 - RNA, 19 nt, Homo sapiens
  misc_RNA (1)...(19): siRNA sense strand
cggucuaccaggaguucaa

SEQ ID NO: 2262752 - RNA, 19 nt, Homo sapiens
  misc_RNA (1)...(19): siRNA sense strand
agucugaaggcaaggucua

SEQ ID NO: 2262753 - RNA, 19 nt, Homo sapiens
  misc_RNA (1)...(19): siRNA sense strand
agaaaggcgagaagggcga

SEQ ID NO: 2262754 - RNA, 19 nt, Homo sapiens
  misc_RNA (1)...(19): siRNA sense strand
ucagauuggcagagaagga

SEQ ID NO: 2262755 - RNA, 19 nt, Homo sapiens
  misc_RNA (1)...(19): siRNA sense strand
gcaaagguccaucaggaga

SEQ ID NO: 2262756 - RNA, 19 nt, Homo sapiens
  misc_RNA (1)...(19): siRNA sense strand
ugaagggagagaaggguga

SEQ ID NO: 2262757 - RNA, 19 nt, Homo sapiens
  misc_RNA (1)...(19): siRNA sense strand
ccagagaggagaagagggu

SEQ ID NO: 2262758 - RNA, 19 nt, Homo sapiens
  misc_RNA (1)...(19): siRNA sense strand
agaagggcgaccagggauu

SEQ ID NO: 2262759 - RNA, 19 nt, Homo sapiens
  misc_RNA (1)...(19): siRNA sense strand
uggcaagaugggugcaaca

SEQ ID NO: 2262760 - RNA, 19 nt, Homo sapiens
  misc_RNA (1)...(19): siRNA sense strand
agccaggugugaagggaga

SEQ ID NO: 2262761 - RNA, 19 nt, Homo sapiens
  misc_RNA (1)...(19): siRNA sense strand
gggaagaaucagccagaag

SEQ ID NO: 2262762 - RNA, 19 nt, Homo sapiens
  misc_RNA (1)...(19): siRNA sense strand
ggccaggacugucaggaga

SEQ ID NO: 2262763 - RNA, 19 nt, Homo sapiens
  misc_RNA (1)...(19): siRNA sense strand
aggcaaaguuggaucaccu

SEQ ID NO: 2262764 - RNA, 19 nt, Homo sapiens
  misc_RNA (1)...(19): siRNA sense strand
ccaucaagaagauccgcaa

SEQ ID NO: 2262765 - RNA, 19 nt, Homo sapiens
  misc_RNA (1)...(19): siRNA sense strand
agaagggagaccagggcau

SEQ ID NO: 2262766 - RNA, 19 nt, Homo sapiens
  misc_RNA (1)...(19): siRNA sense strand
cugcaggacagaagggcca

SEQ ID NO: 2262767 - RNA, 19 nt, Homo sapiens
  misc_RNA (1)...(19): siRNA sense strand
ggucagauuggcagagaag

SEQ ID NO: 2262768 - RNA, 19 nt, Homo sapiens
  misc_RNA (1)...(19): siRNA sense strand
aggcgaaccugguacggau

SEQ ID NO: 2262769 - RNA, 19 nt, Homo sapiens
  misc_RNA (1)...(19): siRNA sense strand
caacacugccugaaggguu

SEQ ID NO: 2262770 - RNA, 19 nt, Homo sapiens
  misc_RNA (1)...(19): siRNA sense strand
gcagagaagggcagcgaag

SEQ ID NO: 2262771 - RNA, 19 nt, Homo sapiens
  misc_RNA (1)...(19): siRNA sense strand
cacuacugcugaagaaaca

SEQ ID NO: 2262772 - RNA, 19 nt, Homo sapiens
  misc_RNA (1)...(19): siRNA sense strand
gaccgaugcaaauggguau

SEQ ID NO: 2262773 - RNA, 19 nt, Homo sapiens
  misc_RNA (1)...(19): siRNA sense strand
gggugaaccuggugccaug

SEQ ID NO: 2262774 - RNA, 19 nt, Homo sapiens
  misc_RNA (1)...(19): siRNA sense strand
gaaucagccagaaggcaga

SEQ ID NO: 2262775 - RNA, 19 nt, Homo sapiens
  misc_RNA (1)...(19): siRNA sense strand
aggagagaucugugucauu

SEQ ID NO: 2262776 - RNA, 19 nt, Homo sapiens
  misc_RNA (1)...(19): siRNA sense strand
uggaugggaaggacggcaa

SEQ ID NO: 2262777 - RNA, 19 nt, Homo sapiens
  misc_RNA (1)...(19): siRNA sense strand
uggaugguuuggaugggaa

SEQ ID NO: 2262778 - RNA, 19 nt, Homo sapiens
  misc_RNA (1)...(19): siRNA sense strand
acaaggauaacaagggaaa

SEQ ID NO: 2262779 - RNA, 19 nt, Homo sapiens
  misc_RNA (1)...(19): siRNA sense strand
gaggggaagacgagggaaa

SEQ ID NO: 2262780 - RNA, 19 nt, Homo sapiens
  misc_RNA (1)...(19): siRNA sense strand
ugaaaggagacaaggguga

SEQ ID NO: 2262781 - RNA, 19 nt, Homo sapiens
  misc_RNA (1)...(19): siRNA sense strand
gcaggauggcuuuggaaau

SEQ ID NO: 2262782 - RNA, 19 nt, Homo sapiens
  misc_RNA (1)...(19): siRNA sense strand
aaaaggagauagaggagaa

SEQ ID NO: 2262783 - RNA, 19 nt, Homo sapiens
  misc_RNA (1)...(19): siRNA sense strand
gguaauaggaucacaggga

SEQ ID NO: 2262784 - RNA, 19 nt, Homo sapiens
  misc_RNA (1)...(19): siRNA sense strand
aauaggaagcccaggacua

SEQ ID NO: 2262785 - RNA, 19 nt, Homo sapiens
  misc_RNA (1)...(19): siRNA sense strand
gcccaggacuaaaggguca

SEQ ID NO: 2262786 - RNA, 19 nt, Homo sapiens
  misc_RNA (1)...(19): siRNA sense strand
aagcaacaaaggagaagaa

SEQ ID NO: 2262787 - RNA, 19 nt, Homo sapiens
  misc_RNA (1)...(19): siRNA sense strand
aauuaagggaggugugaau

SEQ ID NO: 2262788 - RNA, 19 nt, Homo sapiens
  misc_RNA (1)...(19): siRNA sense strand
ggaaagaaggugguggaau

SEQ ID NO: 2262789 - RNA, 19 nt, Homo sapiens
  misc_RNA (1)...(19): siRNA sense strand
agaaagggcauaaaggaga

SEQ ID NO: 2262790 - RNA, 19 nt, Homo sapiens
  misc_RNA (1)...(19): siRNA sense strand
aaccaggauuagauggaaa

SEQ ID NO: 2262791 - RNA, 19 nt, Homo sapiens
  misc_RNA (1)...(19): siRNA sense strand
gugcaaaccucauagcuca

SEQ ID NO: 2262792 - RNA, 19 nt, Homo sapiens
  misc_RNA (1)...(19): siRNA sense strand
agggagagauggaaagcca

SEQ ID NO: 2262793 - RNA, 19 nt, Homo sapiens
  misc_RNA (1)...(19): siRNA sense strand
aggaccuguuggagauaua

SEQ ID NO: 2262794 - RNA, 19 nt, Homo sapiens
  misc_RNA (1)...(19): siRNA sense strand
acagaagagucaugcccua

SEQ ID NO: 2262795 - RNA, 19 nt, Homo sapiens
  misc_RNA (1)...(19): siRNA sense strand
gggugaaacuggacuacca

SEQ ID NO: 2262796 - RNA, 19 nt, Homo sapiens
  misc_RNA (1)...(19): siRNA sense strand
agccaggaauaaauggaaa

SEQ ID NO: 2262797 - RNA, 19 nt, Homo sapiens
  misc_RNA (1)...(19): siRNA sense strand
caaaaggagaaaagggaga

SEQ ID NO: 2262798 - RNA, 19 nt, Homo sapiens
  misc_RNA (1)...(19): siRNA sense strand
aggagaaccuggagagccu

SEQ ID NO: 2262799 - RNA, 19 nt, Homo sapiens
  misc_RNA (1)...(19): siRNA sense strand
gcucagggcaucaugggua

SEQ ID NO: 2262800 - RNA, 19 nt, Homo sapiens
  misc_RNA (1)...(19): siRNA sense strand
cccacaagggauaggaauu

SEQ ID NO: 2262801 - RNA, 19 nt, Homo sapiens
  misc_RNA (1)...(19): siRNA sense strand
aggaaagccaggaauaaau

SEQ ID NO: 2262802 - RNA, 19 nt, Homo sapiens
  misc_RNA (1)...(19): siRNA sense strand
acagaggacagaagggaga

SEQ ID NO: 2262803 - RNA, 19 nt, Homo sapiens
  misc_RNA (1)...(19): siRNA sense strand
uggagaaaaugguuugaaa

SEQ ID NO: 2262804 - RNA, 19 nt, Homo sapiens
  misc_RNA (1)...(19): siRNA sense strand
cggcaugagcaguuuauau

SEQ ID NO: 2262805 - RNA, 19 nt, Homo sapiens
  misc_RNA (1)...(19): siRNA sense strand
aggaccagcuggagagcca

SEQ ID NO: 2262806 - RNA, 19 nt, Homo sapiens
  misc_RNA (1)...(19): siRNA sense strand
gggaaaaccuggugcccca

SEQ ID NO: 2262807 - RNA, 19 nt, Homo sapiens
  misc_RNA (1)...(19): siRNA sense strand
caaaggagaacguggugau

SEQ ID NO: 2262808 - RNA, 19 nt, Homo sapiens
  misc_RNA (1)...(19): siRNA sense strand
aggacagaagggagaaaga

SEQ ID NO: 2262809 - RNA, 19 nt, Homo sapiens
  misc_RNA (1)...(19): siRNA sense strand
guggaaagaagguggugga

SEQ ID NO: 2262810 - RNA, 19 nt, Homo sapiens
  misc_RNA (1)...(19): siRNA sense strand
auggcaagccuguggauau

SEQ ID NO: 2262811 - RNA, 19 nt, Homo sapiens
  misc_RNA (1)...(19): siRNA sense strand
uggugagccuggaaaguau

SEQ ID NO: 2262812 - RNA, 19 nt, Homo sapiens
  misc_RNA (1)...(19): siRNA sense strand
gggaccaaagggaagcaaa

SEQ ID NO: 2262813 - RNA, 19 nt, Homo sapiens
  misc_RNA (1)...(19): siRNA sense strand
accuggaccuccuggaaua

SEQ ID NO: 2262814 - RNA, 19 nt, Homo sapiens
  misc_RNA (1)...(19): siRNA sense strand
gccaggaacuccagggacu

SEQ ID NO: 2262815 - RNA, 19 nt, Homo sapiens
  misc_RNA (1)...(19): siRNA sense strand
ugggauaccuggggagaaa

SEQ ID NO: 2262816 - RNA, 19 nt, Homo sapiens
  misc_RNA (1)...(19): siRNA sense strand
guuucaagccacagaggga

SEQ ID NO: 2262817 - RNA, 19 nt, Homo sapiens
  misc_RNA (1)...(19): siRNA sense strand
gcccagagcaggauggcuu

SEQ ID NO: 2262818 - RNA, 19 nt, Homo sapiens
  misc_RNA (1)...(19): siRNA sense strand
gggagaagcaggauuacca

SEQ ID NO: 2262819 - RNA, 19 nt, Homo sapiens
  misc_RNA (1)...(19): siRNA sense strand
acaaggcauuaaaggagaa

SEQ ID NO: 2262820 - RNA, 19 nt, Homo sapiens
  misc_RNA (1)...(19): siRNA sense strand
gccaaagggugaaagagga

SEQ ID NO: 2262821 - RNA, 19 nt, Homo sapiens
  misc_RNA (1)...(19): siRNA sense strand
cauaggcccacaagggaua

SEQ ID NO: 2262822 - RNA, 19 nt, Homo sapiens
  misc_RNA (1)...(19): siRNA sense strand
ugccaggauuagaaggauu

SEQ ID NO: 2262823 - RNA, 19 nt, Homo sapiens
  misc_RNA (1)...(19): siRNA sense strand
ccguuagggacaagacaga

SEQ ID NO: 2262824 - RNA, 19 nt, Homo sapiens
  misc_RNA (1)...(19): siRNA sense strand
aggacuaaagggucagcaa

SEQ ID NO: 2262825 - RNA, 19 nt, Homo sapiens
  misc_RNA (1)...(19): siRNA sense strand
agagagggaccaaagggaa

SEQ ID NO: 2262826 - RNA, 19 nt, Homo sapiens
  misc_RNA (1)...(19): siRNA sense strand
cucaggaaagccaggaaua

SEQ ID NO: 2262827 - RNA, 19 nt, Homo sapiens
  misc_RNA (1)...(19): siRNA sense strand
agggaaaugaugaacauga

SEQ ID NO: 2262828 - RNA, 19 nt, Homo sapiens
  misc_RNA (1)...(19): siRNA sense strand
gaaaagcaacaaaggagaa

SEQ ID NO: 2262829 - RNA, 19 nt, Homo sapiens
  misc_RNA (1)...(19): siRNA sense strand
gaagggugauauagggcca

SEQ ID NO: 2262830 - RNA, 19 nt, Homo sapiens
  misc_RNA (1)...(19): siRNA sense strand
agagaggaccuguuggaga

SEQ ID NO: 2262831 - RNA, 19 nt, Homo sapiens
  misc_RNA (1)...(19): siRNA sense strand
guauauuaaucaagagguc

SEQ ID NO: 2262832 - RNA, 19 nt, Homo sapiens
  misc_RNA (1)...(19): siRNA sense strand
cuuuggaaauauugcauca

SEQ ID NO: 2262833 - RNA, 19 nt, Homo sapiens
  misc_RNA (1)...(19): siRNA sense strand
uggaaauauugcaucauca

SEQ ID NO: 2262834 - RNA, 19 nt, Homo sapiens
  misc_RNA (1)...(19): siRNA sense strand
aaacaagggagaagcagga

SEQ ID NO: 2262835 - RNA, 19 nt, Homo sapiens
  misc_RNA (1)...(19): siRNA sense strand
aggagaaacuggugaaaag

SEQ ID NO: 2262836 - RNA, 19 nt, Homo sapiens
  misc_RNA (1)...(19): siRNA sense strand
agauggaaauccuggagca

SEQ ID NO: 2262837 - RNA, 19 nt, Homo sapiens
  misc_RNA (1)...(19): siRNA sense strand
ccuuggaaacuuuggcuuu

SEQ ID NO: 2262838 - RNA, 19 nt, Homo sapiens
  misc_RNA (1)...(19): siRNA sense strand
gggaauuaaaggugaucaa

SEQ ID NO: 2262839 - RNA, 19 nt, Homo sapiens
  misc_RNA (1)...(19): siRNA sense strand
gcacaggaccuuugggaga

SEQ ID NO: 2262840 - RNA, 19 nt, Homo sapiens
  misc_RNA (1)...(19): siRNA sense strand
gggugauccaggugagaua

SEQ ID NO: 2262841 - RNA, 19 nt, Homo sapiens
  misc_RNA (1)...(19): siRNA sense strand
gggugauacuggagaacca

SEQ ID NO: 2262842 - RNA, 19 nt, Homo sapiens
  misc_RNA (1)...(19): siRNA sense strand
uggaauuguuauaggcaca

SEQ ID NO: 2262843 - RNA, 19 nt, Homo sapiens
  misc_RNA (1)...(19): siRNA sense strand
cagcaggagagaaggguga

SEQ ID NO: 2262844 - RNA, 19 nt, Homo sapiens
  misc_RNA (1)...(19): siRNA sense strand
gggccagaaaggagaccaa

SEQ ID NO: 2262845 - RNA, 19 nt, Homo sapiens
  misc_RNA (1)...(19): siRNA sense strand
agacaaagguucaaagggu

SEQ ID NO: 2262846 - RNA, 19 nt, Homo sapiens
  misc_RNA (1)...(19): siRNA sense strand
ccaaagguguugacggcuu

SEQ ID NO: 2262847 - RNA, 19 nt, Homo sapiens
  misc_RNA (1)...(19): siRNA sense strand
guugaaaggugaaagagga

SEQ ID NO: 2262848 - RNA, 19 nt, Homo sapiens
  misc_RNA (1)...(19): siRNA sense strand
aggagaccaaggagagaaa

SEQ ID NO: 2262849 - RNA, 19 nt, Homo sapiens
  misc_RNA (1)...(19): siRNA sense strand
agaaaggagaccaaggaga

SEQ ID NO: 2262850 - RNA, 19 nt, Homo sapiens
  misc_RNA (1)...(19): siRNA sense strand
uggaguuaaaggugacaaa

SEQ ID NO: 2262851 - RNA, 19 nt, Homo sapiens
  misc_RNA (1)...(19): siRNA sense strand
gaucagaggugaaccggga

SEQ ID NO: 2262852 - RNA, 19 nt, Homo sapiens
  misc_RNA (1)...(19): siRNA sense strand
guuaaaggugacaaaggaa

SEQ ID NO: 2262853 - RNA, 19 nt, Homo sapiens
  misc_RNA (1)...(19): siRNA sense strand
ggucggagagaaaggugaa

SEQ ID NO: 2262854 - RNA, 19 nt, Homo sapiens
  misc_RNA (1)...(19): siRNA sense strand
gggcccuaaaggagauaaa

SEQ ID NO: 2262855 - RNA, 19 nt, Homo sapiens
  misc_RNA (1)...(19): siRNA sense strand
uuaaaggugacaaaggaaa

SEQ ID NO: 2262856 - RNA, 19 nt, Homo sapiens
  misc_RNA (1)...(19): siRNA sense strand
cuguaggauugaaaggaga

SEQ ID NO: 2262857 - RNA, 19 nt, Homo sapiens
  misc_RNA (1)...(19): siRNA sense strand
acgcaaacgcuuacagcuu

SEQ ID NO: 2262858 - RNA, 19 nt, Homo sapiens
  misc_RNA (1)...(19): siRNA sense strand
gggacaaaagggugaaaga

SEQ ID NO: 2262859 - RNA, 19 nt, Homo sapiens
  misc_RNA (1)...(19): siRNA sense strand
aggacuaccuggaacaaaa

SEQ ID NO: 2262860 - RNA, 19 nt, Homo sapiens
  misc_RNA (1)...(19): siRNA sense strand
gccauggagugaagggaca

SEQ ID NO: 2262861 - RNA, 19 nt, Homo sapiens
  misc_RNA (1)...(19): siRNA sense strand
acaaagguucaaaggguga

SEQ ID NO: 2262862 - RNA, 19 nt, Homo sapiens
  misc_RNA (1)...(19): siRNA sense strand
cugcgcaaguucagcacaa

SEQ ID NO: 2262863 - RNA, 19 nt, Homo sapiens
  misc_RNA (1)...(19): siRNA sense strand
ggggaaaacauaagaccau

SEQ ID NO: 2262864 - RNA, 19 nt, Homo sapiens
  misc_RNA (1)...(19): siRNA sense strand
aggagagaaaggacaaauu

SEQ ID NO: 2262865 - RNA, 19 nt, Homo sapiens
  misc_RNA (1)...(19): siRNA sense strand
accaggacccagaggcaaa

SEQ ID NO: 2262866 - RNA, 19 nt, Homo sapiens
  misc_RNA (1)...(19): siRNA sense strand
cauuggugacaaaggacaa

SEQ ID NO: 2262867 - RNA, 19 nt, Homo sapiens
  misc_RNA (1)...(19): siRNA sense strand
ccagggaauuaaaggugau

SEQ ID NO: 2262868 - RNA, 19 nt, Homo sapiens
  misc_RNA (1)...(19): siRNA sense strand
auauuaacaacgugugcaa

SEQ ID NO: 2262869 - RNA, 19 nt, Homo sapiens
  misc_RNA (1)...(19): siRNA sense strand
cgccauucaucgaguguca

SEQ ID NO: 2262870 - RNA, 19 nt, Homo sapiens
  misc_RNA (1)...(19): siRNA sense strand
gcuguugaaaggugaaaga

SEQ ID NO: 2262871 - RNA, 19 nt, Homo sapiens
  misc_RNA (1)...(19): siRNA sense strand
acaaggugucauuggguuu

SEQ ID NO: 2262872 - RNA, 19 nt, Homo sapiens
  misc_RNA (1)...(19): siRNA sense strand
cagagaugguguugcagga

SEQ ID NO: 2262873 - RNA, 19 nt, Homo sapiens
  misc_RNA (1)...(19): siRNA sense strand
uggagaacauggagcgauc

SEQ ID NO: 2262874 - RNA, 19 nt, Homo sapiens
  misc_RNA (1)...(19): siRNA sense strand
agaaaggugaacccggaaa

SEQ ID NO: 2262875 - RNA, 19 nt, Homo sapiens
  misc_RNA (1)...(19): siRNA sense strand
gccaggauuuauaggcgaa

SEQ ID NO: 2262876 - RNA, 19 nt, Homo sapiens
  misc_RNA (1)...(19): siRNA sense strand
aggugcaaaaggagagaaa

SEQ ID NO: 2262877 - RNA, 19 nt, Homo sapiens
  misc_RNA (1)...(19): siRNA sense strand
ccuggagagaagggagaaa

SEQ ID NO: 2262878 - RNA, 19 nt, Homo sapiens
  misc_RNA (1)...(19): siRNA sense strand
gccaggaccaaguggaaga

SEQ ID NO: 2262879 - RNA, 19 nt, Homo sapiens
  misc_RNA (1)...(19): siRNA sense strand
ccauggauaagguggacau

SEQ ID NO: 2262880 - RNA, 19 nt, Homo sapiens
  misc_RNA (1)...(19): siRNA sense strand
gaaaggacaaauuggacca

SEQ ID NO: 2262881 - RNA, 19 nt, Homo sapiens
  misc_RNA (1)...(19): siRNA sense strand
acagggaccaccaggacaa

SEQ ID NO: 2262882 - RNA, 19 nt, Homo sapiens
  misc_RNA (1)...(19): siRNA sense strand
gccaggggucggagagaaa

SEQ ID NO: 2262883 - RNA, 19 nt, Homo sapiens
  misc_RNA (1)...(19): siRNA sense strand
aagaggauucccaggguuu

SEQ ID NO: 2262884 - RNA, 19 nt, Homo sapiens
  misc_RNA (1)...(19): siRNA sense strand
uaaaaggagagaaggguuu

SEQ ID NO: 2262885 - RNA, 19 nt, Homo sapiens
  misc_RNA (1)...(19): siRNA sense strand
aggaagcccuggagagaag

SEQ ID NO: 2262886 - RNA, 19 nt, Homo sapiens
  misc_RNA (1)...(19): siRNA sense strand
uggaauaaaaggagagaag

SEQ ID NO: 2262887 - RNA, 19 nt, Homo sapiens
  misc_RNA (1)...(19): siRNA sense strand
cagcaagguguuacaggau

SEQ ID NO: 2262888 - RNA, 19 nt, Homo sapiens
  misc_RNA (1)...(19): siRNA sense strand
uaccagggaugaaggguga

SEQ ID NO: 2262889 - RNA, 19 nt, Homo sapiens
  misc_RNA (1)...(19): siRNA sense strand
aggcaaacccggaaaagau

SEQ ID NO: 2262890 - RNA, 19 nt, Homo sapiens
  misc_RNA (1)...(19): siRNA sense strand
uguuauaggcacaggaccu

SEQ ID NO: 2262891 - RNA, 19 nt, Homo sapiens
  misc_RNA (1)...(19): siRNA sense strand
ucaaaggugacaaaggaga

SEQ ID NO: 2262892 - RNA, 19 nt, Homo sapiens
  misc_RNA (1)...(19): siRNA sense strand
ccuaaaggugauccaggua

SEQ ID NO: 2262893 - RNA, 19 nt, Homo sapiens
  misc_RNA (1)...(19): siRNA sense strand
caaaaggugacaaggguga

SEQ ID NO: 2262894 - RNA, 19 nt, Homo sapiens
  misc_RNA (1)...(19): siRNA sense strand
uggcucuggcuguggcaaa

SEQ ID NO: 2262895 - RNA, 19 nt, Homo sapiens
  misc_RNA (1)...(19): siRNA sense strand
uggcuucccuggugaaaga

SEQ ID NO: 2262896 - RNA, 19 nt, Homo sapiens
  misc_RNA (1)...(19): siRNA sense strand
ucaaaggagucaagggaga

SEQ ID NO: 2262897 - RNA, 19 nt, Homo sapiens
  misc_RNA (1)...(19): siRNA sense strand
agacgaaggcgguggccaa

SEQ ID NO: 2262898 - RNA, 19 nt, Homo sapiens
  misc_RNA (1)...(19): siRNA sense strand
guaaaggagacaaggguga

SEQ ID NO: 2262899 - RNA, 19 nt, Homo sapiens
  misc_RNA (1)...(19): siRNA sense strand
ugaaagacauuaaaggaga

SEQ ID NO: 2262900 - RNA, 19 nt, Homo sapiens
  misc_RNA (1)...(19): siRNA sense strand
ccaaggagcuccaggggaa

SEQ ID NO: 2262901 - RNA, 19 nt, Homo sapiens
  misc_RNA (1)...(19): siRNA sense strand
gggugaaccuggagagccu

SEQ ID NO: 2262902 - RNA, 19 nt, Homo sapiens
  misc_RNA (1)...(19): siRNA sense strand
ccaagggacccaagggaga

SEQ ID NO: 2262903 - RNA, 19 nt, Homo sapiens
  misc_RNA (1)...(19): siRNA sense strand
uggccgaggacgagaucaa

SEQ ID NO: 2262904 - RNA, 19 nt, Homo sapiens
  misc_RNA (1)...(19): siRNA sense strand
aagaaggaaucaugggcuu

SEQ ID NO: 2262905 - RNA, 19 nt, Homo sapiens
  misc_RNA (1)...(19): siRNA sense strand
gcaacggaacccagggaga

SEQ ID NO: 2262906 - RNA, 19 nt, Homo sapiens
  misc_RNA (1)...(19): siRNA sense strand
gaucaguacaagggugaaa

SEQ ID NO: 2262907 - RNA, 19 nt, Homo sapiens
  misc_RNA (1)...(19): siRNA sense strand
gaaaggagaugaagggccu

SEQ ID NO: 2262908 - RNA, 19 nt, Homo sapiens
  misc_RNA (1)...(19): siRNA sense strand
aggagagaaaggagaugaa

SEQ ID NO: 2262909 - RNA, 19 nt, Homo sapiens
  misc_RNA (1)...(19): siRNA sense strand
ggaaagaggugacccagga

SEQ ID NO: 2262910 - RNA, 19 nt, Homo sapiens
  misc_RNA (1)...(19): siRNA sense strand
aggacgagaucaagcccua

SEQ ID NO: 2262911 - RNA, 19 nt, Homo sapiens
  misc_RNA (1)...(19): siRNA sense strand
ccuaaagaggagcgcgaca

SEQ ID NO: 2262912 - RNA, 19 nt, Homo sapiens
  misc_RNA (1)...(19): siRNA sense strand
aggaauaccuggaacgaag

SEQ ID NO: 2262913 - RNA, 19 nt, Homo sapiens
  misc_RNA (1)...(19): siRNA sense strand
aggacagaaaggagaccaa

SEQ ID NO: 2262914 - RNA, 19 nt, Homo sapiens
  misc_RNA (1)...(19): siRNA sense strand
ugaagggagaagaaggaau

SEQ ID NO: 2262915 - RNA, 19 nt, Homo sapiens
  misc_RNA (1)...(19): siRNA sense strand
cagaacaaucacaaccaaa

SEQ ID NO: 2262916 - RNA, 19 nt, Homo sapiens
  misc_RNA (1)...(19): siRNA sense strand
uaacaggacccaagggcga

SEQ ID NO: 2262917 - RNA, 19 nt, Homo sapiens
  misc_RNA (1)...(19): siRNA sense strand
ggacagugaccgugggguu

SEQ ID NO: 2262918 - RNA, 19 nt, Homo sapiens
  misc_RNA (1)...(19): siRNA sense strand
caucaaaggagucaaggga

SEQ ID NO: 2262919 - RNA, 19 nt, Homo sapiens
  misc_RNA (1)...(19): siRNA sense strand
gagcaggccuguauggcga

SEQ ID NO: 2262920 - RNA, 19 nt, Homo sapiens
  misc_RNA (1)...(19): siRNA sense strand
ucuacggaguuaaggguga

SEQ ID NO: 2262921 - RNA, 19 nt, Homo sapiens
  misc_RNA (1)...(19): siRNA sense strand
ccguguggaggaagagauu

SEQ ID NO: 2262922 - RNA, 19 nt, Homo sapiens
  misc_RNA (1)...(19): siRNA sense strand
caaaaggacagcaaggcaa

SEQ ID NO: 2262923 - RNA, 19 nt, Homo sapiens
  misc_RNA (1)...(19): siRNA sense strand
gggagaugcuggugugccu

SEQ ID NO: 2262924 - RNA, 19 nt, Homo sapiens
  misc_RNA (1)...(19): siRNA sense strand
cagaggaagccaagggaug

SEQ ID NO: 2262925 - RNA, 19 nt, Homo sapiens
  misc_RNA (1)...(19): siRNA sense strand
cagaucaguacaaggguga

SEQ ID NO: 2262926 - RNA, 19 nt, Homo sapiens
  misc_RNA (1)...(19): siRNA sense strand
ucaccaggacagaagggaa

SEQ ID NO: 2262927 - RNA, 19 nt, Homo sapiens
  misc_RNA (1)...(19): siRNA sense strand
cagaaggcgacgaagcuau

SEQ ID NO: 2262928 - RNA, 19 nt, Homo sapiens
  misc_RNA (1)...(19): siRNA sense strand
gcaaaggugacacagggaa

SEQ ID NO: 2262929 - RNA, 19 nt, Homo sapiens
  misc_RNA (1)...(19): siRNA sense strand
caccuggaccugauggaaa

SEQ ID NO: 2262930 - RNA, 19 nt, Homo sapiens
  misc_RNA (1)...(19): siRNA sense strand
ccaaaggagcaaaaggaga

SEQ ID NO: 2262931 - RNA, 19 nt, Homo sapiens
  misc_RNA (1)...(19): siRNA sense strand
uuaaaggagagaaaggaga

SEQ ID NO: 2262932 - RNA, 19 nt, Homo sapiens
  misc_RNA (1)...(19): siRNA sense strand
gaaccaggaauaagaggca

SEQ ID NO: 2262933 - RNA, 19 nt, Homo sapiens
  misc_RNA (1)...(19): siRNA sense strand
guucugacauccacggaga

SEQ ID NO: 2262934 - RNA, 19 nt, Homo sapiens
  misc_RNA (1)...(19): siRNA sense strand
gaacaaggcuucaugggga

SEQ ID NO: 2262935 - RNA, 19 nt, Homo sapiens
  misc_RNA (1)...(19): siRNA sense strand
gugacagacaggaggccau

SEQ ID NO: 2262936 - RNA, 19 nt, Homo sapiens
  misc_RNA (1)...(19): siRNA sense strand
agaagggaacagaagguga

SEQ ID NO: 2262937 - RNA, 19 nt, Homo sapiens
  misc_RNA (1)...(19): siRNA sense strand
cgcaggagcugauggagga

SEQ ID NO: 2262938 - RNA, 19 nt, Homo sapiens
  misc_RNA (1)...(19): siRNA sense strand
cccuggauuuaaaggaauu

SEQ ID NO: 2262939 - RNA, 19 nt, Homo sapiens
  misc_RNA (1)...(19): siRNA sense strand
aaaaggagauagaggcuca

SEQ ID NO: 2262940 - RNA, 19 nt, Homo sapiens
  misc_RNA (1)...(19): siRNA sense strand
acuucgagggccaggagaa

SEQ ID NO: 2262941 - RNA, 19 nt, Homo sapiens
  misc_RNA (1)...(19): siRNA sense strand
cggcuuaccuggaccacca

SEQ ID NO: 2262942 - RNA, 19 nt, Homo sapiens
  misc_RNA (1)...(19): siRNA sense strand
ugaagggauucuuuggaga

SEQ ID NO: 2262943 - RNA, 19 nt, Homo sapiens
  misc_RNA (1)...(19): siRNA sense strand
gggugaaaagggugacgua

SEQ ID NO: 2262944 - RNA, 19 nt, Homo sapiens
  misc_RNA (1)...(19): siRNA sense strand
aggucugccuggugauaga

SEQ ID NO: 2262945 - RNA, 19 nt, Homo sapiens
  misc_RNA (1)...(19): siRNA sense strand
aggccuguauggcgagauu

SEQ ID NO: 2262946 - RNA, 19 nt, Homo sapiens
  misc_RNA (1)...(19): siRNA sense strand
gaaaggagaccaaggagcu

SEQ ID NO: 2262947 - RNA, 19 nt, Homo sapiens
  misc_RNA (1)...(19): siRNA sense strand
ugagaaagguggacguggu

SEQ ID NO: 2262948 - RNA, 19 nt, Homo sapiens
  misc_RNA (1)...(19): siRNA sense strand
agacaagggugaaagggga

SEQ ID NO: 2262949 - RNA, 19 nt, Homo sapiens
  misc_RNA (1)...(19): siRNA sense strand
cuugaagggagaagaagga

SEQ ID NO: 2262950 - RNA, 19 nt, Homo sapiens
  misc_RNA (1)...(19): siRNA sense strand
cgggaugaaaggugacgau

SEQ ID NO: 2262951 - RNA, 19 nt, Homo sapiens
  misc_RNA (1)...(19): siRNA sense strand
cgacagauaucggggugaa

SEQ ID NO: 2262952 - RNA, 19 nt, Homo sapiens
  misc_RNA (1)...(19): siRNA sense strand
gcagauguacagaaggcga

SEQ ID NO: 2262953 - RNA, 19 nt, Homo sapiens
  misc_RNA (1)...(19): siRNA sense strand
caaaggagcaaaaggagau

SEQ ID NO: 2262954 - RNA, 19 nt, Homo sapiens
  misc_RNA (1)...(19): siRNA sense strand
ccaaaggugcagugggccu

SEQ ID NO: 2262955 - RNA, 19 nt, Homo sapiens
  misc_RNA (1)...(19): siRNA sense strand
cugccaggaaugaaagaca

SEQ ID NO: 2262956 - RNA, 19 nt, Homo sapiens
  misc_RNA (1)...(19): siRNA sense strand
gcaaaagguauccaaggaa

SEQ ID NO: 2262957 - RNA, 19 nt, Homo sapiens
  misc_RNA (1)...(19): siRNA sense strand
aggagaaggcgcacaacca

SEQ ID NO: 2262958 - RNA, 19 nt, Homo sapiens
  misc_RNA (1)...(19): siRNA sense strand
cgugggagcaagaggcguu

SEQ ID NO: 2262959 - RNA, 19 nt, Homo sapiens
  misc_RNA (1)...(19): siRNA sense strand
cgauggaauuccuggacac

SEQ ID NO: 2262960 - RNA, 19 nt, Homo sapiens
  misc_RNA (1)...(19): siRNA sense strand
caaaagggcagaaagguga

SEQ ID NO: 2262961 - RNA, 19 nt, Homo sapiens
  misc_RNA (1)...(19): siRNA sense strand
cagcaaggcaacagaggac

SEQ ID NO: 2262962 - RNA, 19 nt, Homo sapiens
  misc_RNA (1)...(19): siRNA sense strand
ugaaaggucucucugguga

SEQ ID NO: 2262963 - RNA, 19 nt, Homo sapiens
  misc_RNA (1)...(19): siRNA sense strand
cuaaagggccuaagggaga

SEQ ID NO: 2262964 - RNA, 19 nt, Homo sapiens
  misc_RNA (1)...(19): siRNA sense strand
ccuuggaacuacuggagaa

SEQ ID NO: 2262965 - RNA, 19 nt, Homo sapiens
  misc_RNA (1)...(19): siRNA sense strand
cuucaggacccaaaggaaa

SEQ ID NO: 2262966 - RNA, 19 nt, Homo sapiens
  misc_RNA (1)...(19): siRNA sense strand
aggagaaagugguucacaa

SEQ ID NO: 2262967 - RNA, 19 nt, Homo sapiens
  misc_RNA (1)...(19): siRNA sense strand
ccaaggugauccuggacaa

SEQ ID NO: 2262968 - RNA, 19 nt, Homo sapiens
  misc_RNA (1)...(19): siRNA sense strand
cggcaugagaggagaacca

SEQ ID NO: 2262969 - RNA, 19 nt, Homo sapiens
  misc_RNA (1)...(19): siRNA sense strand
agaaaggauccaaggguga

SEQ ID NO: 2262970 - RNA, 19 nt, Homo sapiens
  misc_RNA (1)...(19): siRNA sense strand
aggaacaagaggcaagaaa

SEQ ID NO: 2262971 - RNA, 19 nt, Homo sapiens
  misc_RNA (1)...(19): siRNA sense strand
gaaaggagcgagaggacga

SEQ ID NO: 2262972 - RNA, 19 nt, Homo sapiens
  misc_RNA (1)...(19): siRNA sense strand
aggccuagauggagaacga

SEQ ID NO: 2262973 - RNA, 19 nt, Homo sapiens
  misc_RNA (1)...(19): siRNA sense strand
cggccagacaguugaaauu

SEQ ID NO: 2262974 - RNA, 19 nt, Homo sapiens
  misc_RNA (1)...(19): siRNA sense strand
gagauggacuaauaggcaa

SEQ ID NO: 2262975 - RNA, 19 nt, Homo sapiens
  misc_RNA (1)...(19): siRNA sense strand
cggauuaauaggacccaaa

SEQ ID NO: 2262976 - RNA, 19 nt, Homo sapiens
  misc_RNA (1)...(19): siRNA sense strand
caacaaagagucaggguuc

SEQ ID NO: 2262977 - RNA, 19 nt, Homo sapiens
  misc_RNA (1)...(19): siRNA sense strand
cauauggcaucaagggcaa

SEQ ID NO: 2262978 - RNA, 19 nt, Homo sapiens
  misc_RNA (1)...(19): siRNA sense strand
cuguauuauuccuggguca

SEQ ID NO: 2262979 - RNA, 19 nt, Homo sapiens
  misc_RNA (1)...(19): siRNA sense strand
cgggcuuccuggucagaaa

SEQ ID NO: 2262980 - RNA, 19 nt, Homo sapiens
  misc_RNA (1)...(19): siRNA sense strand
ugggcuuccuggagauaaa

SEQ ID NO: 2262981 - RNA, 19 nt, Homo sapiens
  misc_RNA (1)...(19): siRNA sense strand
acaaaggauuucuuggaga

SEQ ID NO: 2262982 - RNA, 19 nt, Homo sapiens
  misc_RNA (1)...(19): siRNA sense strand
aggaaugccaggagaaagu

SEQ ID NO: 2262983 - RNA, 19 nt, Homo sapiens
  misc_RNA (1)...(19): siRNA sense strand
caucggagcuccagggaag

SEQ ID NO: 2262984 - RNA, 19 nt, Homo sapiens
  misc_RNA (1)...(19): siRNA sense strand
caacagggcaagaaaggga

SEQ ID NO: 2262985 - RNA, 19 nt, Homo sapiens
  misc_RNA (1)...(19): siRNA sense strand
uccaaggaauugaggguca

SEQ ID NO: 2262986 - RNA, 19 nt, Homo sapiens
  misc_RNA (1)...(19): siRNA sense strand
uggaaagaaaggaacaaga

SEQ ID NO: 2262987 - RNA, 19 nt, Homo sapiens
  misc_RNA (1)...(19): siRNA sense strand
ugggucaaguggaaguaaa

SEQ ID NO: 2262988 - RNA, 19 nt, Homo sapiens
  misc_RNA (1)...(19): siRNA sense strand
uggaaguaaaggagagcca

SEQ ID NO: 2262989 - RNA, 19 nt, Homo sapiens
  misc_RNA (1)...(19): siRNA sense strand
ccaggaaugccaggagaaa

SEQ ID NO: 2262990 - RNA, 19 nt, Homo sapiens
  misc_RNA (1)...(19): siRNA sense strand
ccaaggaauuccagguuuu

SEQ ID NO: 2262991 - RNA, 19 nt, Homo sapiens
  misc_RNA (1)...(19): siRNA sense strand
aggaauaaaaggagacuca

SEQ ID NO: 2262992 - RNA, 19 nt, Homo sapiens
  misc_RNA (1)...(19): siRNA sense strand
gaaaggaacaagaggcaag

SEQ ID NO: 2262993 - RNA, 19 nt, Homo sapiens
  misc_RNA (1)...(19): siRNA sense strand
ccagaauuugagacugaaa

SEQ ID NO: 2262994 - RNA, 19 nt, Homo sapiens
  misc_RNA (1)...(19): siRNA sense strand
aagaaaggaacaagaggca

SEQ ID NO: 2262995 - RNA, 19 nt, Homo sapiens
  misc_RNA (1)...(19): siRNA sense strand
aggcauuaucaaaggaguu

SEQ ID NO: 2262996 - RNA, 19 nt, Homo sapiens
  misc_RNA (1)...(19): siRNA sense strand
aggcaaggacggaguacca

SEQ ID NO: 2262997 - RNA, 19 nt, Homo sapiens
  misc_RNA (1)...(19): siRNA sense strand
aaagggagacagaggcaau

SEQ ID NO: 2262998 - RNA, 19 nt, Homo sapiens
  misc_RNA (1)...(19): siRNA sense strand
ccaaggaaugccaggagau

SEQ ID NO: 2262999 - RNA, 19 nt, Homo sapiens
  misc_RNA (1)...(19): siRNA sense strand
ccgugguguaauaggagaa

SEQ ID NO: 2263000 - RNA, 19 nt, Homo sapiens
  misc_RNA (1)...(19): siRNA sense strand
cuaguaggacugaaaggaa

SEQ ID NO: 2263001 - RNA, 19 nt, Homo sapiens
  misc_RNA (1)...(19): siRNA sense strand
aggaguuaguggaaagcca

SEQ ID NO: 2263002 - RNA, 19 nt, Homo sapiens
  misc_RNA (1)...(19): siRNA sense strand
gaccaggccuagauggaga

SEQ ID NO: 2263003 - RNA, 19 nt, Homo sapiens
  misc_RNA (1)...(19): siRNA sense strand
gagaaaggagcgagaggac

SEQ ID NO: 2263004 - RNA, 19 nt, Homo sapiens
  misc_RNA (1)...(19): siRNA sense strand
gaauauggggcuagguuuu

SEQ ID NO: 2263005 - RNA, 19 nt, Homo sapiens
  misc_RNA (1)...(19): siRNA sense strand
agcuggaauucaugggauu

SEQ ID NO: 2263006 - RNA, 19 nt, Homo sapiens
  misc_RNA (1)...(19): siRNA sense strand
uggauuaccgggacaacaa

SEQ ID NO: 2263007 - RNA, 19 nt, Homo sapiens
  misc_RNA (1)...(19): siRNA sense strand
cuacuggagagcuggaauu

SEQ ID NO: 2263008 - RNA, 19 nt, Homo sapiens
  misc_RNA (1)...(19): siRNA sense strand
cccaaagggaagaaaggau

SEQ ID NO: 2263009 - RNA, 19 nt, Homo sapiens
  misc_RNA (1)...(19): siRNA sense strand
cgauauagauggugcugug

SEQ ID NO: 2263010 - RNA, 19 nt, Homo sapiens
  misc_RNA (1)...(19): siRNA sense strand
gaaagggcugccagggcua

SEQ ID NO: 2263011 - RNA, 19 nt, Homo sapiens
  misc_RNA (1)...(19): siRNA sense strand
cuccagggcaacagggcaa

SEQ ID NO: 2263012 - RNA, 19 nt, Homo sapiens
  misc_RNA (1)...(19): siRNA sense strand
uuaaaggagaugaaggcau

SEQ ID NO: 2263013 - RNA, 19 nt, Homo sapiens
  misc_RNA (1)...(19): siRNA sense strand
caucuuuggugcugaaaau

SEQ ID NO: 2263014 - RNA, 19 nt, Homo sapiens
  misc_RNA (1)...(19): siRNA sense strand
uggacuaauaggcaauaua

SEQ ID NO: 2263015 - RNA, 19 nt, Homo sapiens
  misc_RNA (1)...(19): siRNA sense strand
ugguuuacauggacugaau

SEQ ID NO: 2263016 - RNA, 19 nt, Homo sapiens
  misc_RNA (1)...(19): siRNA sense strand
agauggacuaauaggcaau

SEQ ID NO: 2263017 - RNA, 19 nt, Homo sapiens
  misc_RNA (1)...(19): siRNA sense strand
aggugauccuggacaaaca

SEQ ID NO: 2263018 - RNA, 19 nt, Homo sapiens
  misc_RNA (1)...(19): siRNA sense strand
aaguacaguuucugguuga

SEQ ID NO: 2263019 - RNA, 19 nt, Homo sapiens
  misc_RNA (1)...(19): siRNA sense strand
ccuaggccucaaaggaaua

SEQ ID NO: 2263020 - RNA, 19 nt, Homo sapiens
  misc_RNA (1)...(19): siRNA sense strand
cuaagggagaccaaggaau

SEQ ID NO: 2263021 - RNA, 19 nt, Homo sapiens
  misc_RNA (1)...(19): siRNA sense strand
acaaacaccaacugcagaa

SEQ ID NO: 2263022 - RNA, 19 nt, Homo sapiens
  misc_RNA (1)...(19): siRNA sense strand
ugggcuacacguugguaaa

SEQ ID NO: 2263023 - RNA, 19 nt, Homo sapiens
  misc_RNA (1)...(19): siRNA sense strand
cuaaagggccuaagggaga

SEQ ID NO: 2263024 - RNA, 19 nt, Homo sapiens
  misc_RNA (1)...(19): siRNA sense strand
ccuuggaacuacuggagaa

SEQ ID NO: 2263025 - RNA, 19 nt, Homo sapiens
  misc_RNA (1)...(19): siRNA sense strand
cuucaggacccaaaggaaa

SEQ ID NO: 2263026 - RNA, 19 nt, Homo sapiens
  misc_RNA (1)...(19): siRNA sense strand
aggagaaagugguucacaa

SEQ ID NO: 2263027 - RNA, 19 nt, Homo sapiens
  misc_RNA (1)...(19): siRNA sense strand
ccaaggugauccuggacaa

SEQ ID NO: 2263028 - RNA, 19 nt, Homo sapiens
  misc_RNA (1)...(19): siRNA sense strand
cggcaugagaggagaacca

SEQ ID NO: 2263029 - RNA, 19 nt, Homo sapiens
  misc_RNA (1)...(19): siRNA sense strand
agaaaggauccaaggguga

SEQ ID NO: 2263030 - RNA, 19 nt, Homo sapiens
  misc_RNA (1)...(19): siRNA sense strand
aggaacaagaggcaagaaa

SEQ ID NO: 2263031 - RNA, 19 nt, Homo sapiens
  misc_RNA (1)...(19): siRNA sense strand
gaaaggagcgagaggacga

SEQ ID NO: 2263032 - RNA, 19 nt, Homo sapiens
  misc_RNA (1)...(19): siRNA sense strand
aggccuagauggagaacga

SEQ ID NO: 2263033 - RNA, 19 nt, Homo sapiens
  misc_RNA (1)...(19): siRNA sense strand
cggccagacaguugaaauu

SEQ ID NO: 2263034 - RNA, 19 nt, Homo sapiens
  misc_RNA (1)...(19): siRNA sense strand
gagauggacuaauaggcaa

SEQ ID NO: 2263035 - RNA, 19 nt, Homo sapiens
  misc_RNA (1)...(19): siRNA sense strand
cggauuaauaggacccaaa

SEQ ID NO: 2263036 - RNA, 19 nt, Homo sapiens
  misc_RNA (1)...(19): siRNA sense strand
caacaaagagucaggguuc

SEQ ID NO: 2263037 - RNA, 19 nt, Homo sapiens
  misc_RNA (1)...(19): siRNA sense strand
cauauggcaucaagggcaa

SEQ ID NO: 2263038 - RNA, 19 nt, Homo sapiens
  misc_RNA (1)...(19): siRNA sense strand
cuguauuauuccuggguca

SEQ ID NO: 2263039 - RNA, 19 nt, Homo sapiens
  misc_RNA (1)...(19): siRNA sense strand
cgggcuuccuggucagaaa

SEQ ID NO: 2263040 - RNA, 19 nt, Homo sapiens
  misc_RNA (1)...(19): siRNA sense strand
ugggcuuccuggagauaaa

SEQ ID NO: 2263041 - RNA, 19 nt, Homo sapiens
  misc_RNA (1)...(19): siRNA sense strand
acaaaggauuucuuggaga

SEQ ID NO: 2263042 - RNA, 19 nt, Homo sapiens
  misc_RNA (1)...(19): siRNA sense strand
aggaaugccaggagaaagu

SEQ ID NO: 2263043 - RNA, 19 nt, Homo sapiens
  misc_RNA (1)...(19): siRNA sense strand
caucggagcuccagggaag

SEQ ID NO: 2263044 - RNA, 19 nt, Homo sapiens
  misc_RNA (1)...(19): siRNA sense strand
caacagggcaagaaaggga

SEQ ID NO: 2263045 - RNA, 19 nt, Homo sapiens
  misc_RNA (1)...(19): siRNA sense strand
uccaaggaauugaggguca

SEQ ID NO: 2263046 - RNA, 19 nt, Homo sapiens
  misc_RNA (1)...(19): siRNA sense strand
uggaaagaaaggaacaaga

SEQ ID NO: 2263047 - RNA, 19 nt, Homo sapiens
  misc_RNA (1)...(19): siRNA sense strand
ugggucaaguggaaguaaa

SEQ ID NO: 2263048 - RNA, 19 nt, Homo sapiens
  misc_RNA (1)...(19): siRNA sense strand
uggaaguaaaggagagcca

SEQ ID NO: 2263049 - RNA, 19 nt, Homo sapiens
  misc_RNA (1)...(19): siRNA sense strand
ccaggaaugccaggagaaa

SEQ ID NO: 2263050 - RNA, 19 nt, Homo sapiens
  misc_RNA (1)...(19): siRNA sense strand
ccaaggaauuccagguuuu

SEQ ID NO: 2263051 - RNA, 19 nt, Homo sapiens
  misc_RNA (1)...(19): siRNA sense strand
aggaauaaaaggagacuca

SEQ ID NO: 2263052 - RNA, 19 nt, Homo sapiens
  misc_RNA (1)...(19): siRNA sense strand
gaaaggaacaagaggcaag

SEQ ID NO: 2263053 - RNA, 19 nt, Homo sapiens
  misc_RNA (1)...(19): siRNA sense strand
ccagaauuugagacugaaa

SEQ ID NO: 2263054 - RNA, 19 nt, Homo sapiens
  misc_RNA (1)...(19): siRNA sense strand
aagaaaggaacaagaggca

SEQ ID NO: 2263055 - RNA, 19 nt, Homo sapiens
  misc_RNA (1)...(19): siRNA sense strand
aggcauuaucaaaggaguu

SEQ ID NO: 2263056 - RNA, 19 nt, Homo sapiens
  misc_RNA (1)...(19): siRNA sense strand
aggcaaggacggaguacca

SEQ ID NO: 2263057 - RNA, 19 nt, Homo sapiens
  misc_RNA (1)...(19): siRNA sense strand
aaagggagacagaggcaau

SEQ ID NO: 2263058 - RNA, 19 nt, Homo sapiens
  misc_RNA (1)...(19): siRNA sense strand
ccaaggaaugccaggagau

SEQ ID NO: 2263059 - RNA, 19 nt, Homo sapiens
  misc_RNA (1)...(19): siRNA sense strand
ccgugguguaauaggagaa

SEQ ID NO: 2263060 - RNA, 19 nt, Homo sapiens
  misc_RNA (1)...(19): siRNA sense strand
cuaguaggacugaaaggaa

SEQ ID NO: 2263061 - RNA, 19 nt, Homo sapiens
  misc_RNA (1)...(19): siRNA sense strand
aggaguuaguggaaagcca

SEQ ID NO: 2263062 - RNA, 19 nt, Homo sapiens
  misc_RNA (1)...(19): siRNA sense strand
gaccaggccuagauggaga

SEQ ID NO: 2263063 - RNA, 19 nt, Homo sapiens
  misc_RNA (1)...(19): siRNA sense strand
gagaaaggagcgagaggac

SEQ ID NO: 2263064 - RNA, 19 nt, Homo sapiens
  misc_RNA (1)...(19): siRNA sense strand
gaauauggggcuagguuuu

SEQ ID NO: 2263065 - RNA, 19 nt, Homo sapiens
  misc_RNA (1)...(19): siRNA sense strand
agcuggaauucaugggauu

SEQ ID NO: 2263066 - RNA, 19 nt, Homo sapiens
  misc_RNA (1)...(19): siRNA sense strand
uggauuaccgggacaacaa

SEQ ID NO: 2263067 - RNA, 19 nt, Homo sapiens
  misc_RNA (1)...(19): siRNA sense strand
cuacuggagagcuggaauu

SEQ ID NO: 2263068 - RNA, 19 nt, Homo sapiens
  misc_RNA (1)...(19): siRNA sense strand
cccaaagggaagaaaggau

SEQ ID NO: 2263069 - RNA, 19 nt, Homo sapiens
  misc_RNA (1)...(19): siRNA sense strand
cgauauagauggugcugug

SEQ ID NO: 2263070 - RNA, 19 nt, Homo sapiens
  misc_RNA (1)...(19): siRNA sense strand
gaaagggcugccagggcua

SEQ ID NO: 2263071 - RNA, 19 nt, Homo sapiens
  misc_RNA (1)...(19): siRNA sense strand
cuccagggcaacagggcaa

SEQ ID NO: 2263072 - RNA, 19 nt, Homo sapiens
  misc_RNA (1)...(19): siRNA sense strand
uuaaaggagaugaaggcau

SEQ ID NO: 2263073 - RNA, 19 nt, Homo sapiens
  misc_RNA (1)...(19): siRNA sense strand
caucuuuggugcugaaaau

SEQ ID NO: 2263074 - RNA, 19 nt, Homo sapiens
  misc_RNA (1)...(19): siRNA sense strand
uggacuaauaggcaauaua

SEQ ID NO: 2263075 - RNA, 19 nt, Homo sapiens
  misc_RNA (1)...(19): siRNA sense strand
ugguuuacauggacugaau

SEQ ID NO: 2263076 - RNA, 19 nt, Homo sapiens
  misc_RNA (1)...(19): siRNA sense strand
agauggacuaauaggcaau

SEQ ID NO: 2263077 - RNA, 19 nt, Homo sapiens
  misc_RNA (1)...(19): siRNA sense strand
aggugauccuggacaaaca

SEQ ID NO: 2263078 - RNA, 19 nt, Homo sapiens
  misc_RNA (1)...(19): siRNA sense strand
aaguacaguuucugguuga

SEQ ID NO: 2263079 - RNA, 19 nt, Homo sapiens
  misc_RNA (1)...(19): siRNA sense strand
ccuaggccucaaaggaaua

SEQ ID NO: 2263080 - RNA, 19 nt, Homo sapiens
  misc_RNA (1)...(19): siRNA sense strand
cuaagggagaccaaggaau

SEQ ID NO: 2263081 - RNA, 19 nt, Homo sapiens
  misc_RNA (1)...(19): siRNA sense strand
acaaacaccaacugcagaa

SEQ ID NO: 2263082 - RNA, 19 nt, Homo sapiens
  misc_RNA (1)...(19): siRNA sense strand
ugggcuacacguugguaaa

SEQ ID NO: 2263083 - RNA, 19 nt, Homo sapiens
  misc_RNA (1)...(19): siRNA sense strand
ccgaguacgacguggccua

SEQ ID NO: 2263084 - RNA, 19 nt, Homo sapiens
  misc_RNA (1)...(19): siRNA sense strand
acaagggagagaagggcaa

SEQ ID NO: 2263085 - RNA, 19 nt, Homo sapiens
  misc_RNA (1)...(19): siRNA sense strand
gcucagacacucagaggga

SEQ ID NO: 2263086 - RNA, 19 nt, Homo sapiens
  misc_RNA (1)...(19): siRNA sense strand
cggucaaguacuuugggaa

SEQ ID NO: 2263087 - RNA, 19 nt, Homo sapiens
  misc_RNA (1)...(19): siRNA sense strand
cagggaaugaagggagaaa

SEQ ID NO: 2263088 - RNA, 19 nt, Homo sapiens
  misc_RNA (1)...(19): siRNA sense strand
ucaaaggagcaaaggggua

SEQ ID NO: 2263089 - RNA, 19 nt, Homo sapiens
  misc_RNA (1)...(19): siRNA sense strand
ggucaaguacuuugggaag

SEQ ID NO: 2263090 - RNA, 19 nt, Homo sapiens
  misc_RNA (1)...(19): siRNA sense strand
ccgaggagucaaaggagca

SEQ ID NO: 2263091 - RNA, 19 nt, Homo sapiens
  misc_RNA (1)...(19): siRNA sense strand
caaagggcuacaagggaga

SEQ ID NO: 2263092 - RNA, 19 nt, Homo sapiens
  misc_RNA (1)...(19): siRNA sense strand
ucgagaaggccgugcagga

SEQ ID NO: 2263093 - RNA, 19 nt, Homo sapiens
  misc_RNA (1)...(19): siRNA sense strand
ccaucguggacaugaucaa

SEQ ID NO: 2263094 - RNA, 19 nt, Homo sapiens
  misc_RNA (1)...(19): siRNA sense strand
ccucggaccuguuggguac

SEQ ID NO: 2263095 - RNA, 19 nt, Homo sapiens
  misc_RNA (1)...(19): siRNA sense strand
ucagacacucagagggaca

SEQ ID NO: 2263096 - RNA, 19 nt, Homo sapiens
  misc_RNA (1)...(19): siRNA sense strand
agaucugcauagacaagaa

SEQ ID NO: 2263097 - RNA, 19 nt, Homo sapiens
  misc_RNA (1)...(19): siRNA sense strand
cggcuuugagggagaacga

SEQ ID NO: 2263098 - RNA, 19 nt, Homo sapiens
  misc_RNA (1)...(19): siRNA sense strand
gggugaucagggaagagaa

SEQ ID NO: 2263099 - RNA, 19 nt, Homo sapiens
  misc_RNA (1)...(19): siRNA sense strand
caguacagccacagccaga

SEQ ID NO: 2263100 - RNA, 19 nt, Homo sapiens
  misc_RNA (1)...(19): siRNA sense strand
cuguuggguaccagggaau

SEQ ID NO: 2263101 - RNA, 19 nt, Homo sapiens
  misc_RNA (1)...(19): siRNA sense strand
uggaggaugcugugaacga

SEQ ID NO: 2263102 - RNA, 19 nt, Homo sapiens
  misc_RNA (1)...(19): siRNA sense strand
ugggaggaaaggagagaaa

SEQ ID NO: 2263103 - RNA, 19 nt, Homo sapiens
  misc_RNA (1)...(19): siRNA sense strand
ggaaaggagagaaaggaga

SEQ ID NO: 2263104 - RNA, 19 nt, Homo sapiens
  misc_RNA (1)...(19): siRNA sense strand
acaaaggagccaagggaga

SEQ ID NO: 2263105 - RNA, 19 nt, Homo sapiens
  misc_RNA (1)...(19): siRNA sense strand
ggagagugcuacaagguga

SEQ ID NO: 2263106 - RNA, 19 nt, Homo sapiens
  misc_RNA (1)...(19): siRNA sense strand
cggacacuaccgagagaaa

SEQ ID NO: 2263107 - RNA, 19 nt, Homo sapiens
  misc_RNA (1)...(19): siRNA sense strand
ucaagaaccugcagggcau

SEQ ID NO: 2263108 - RNA, 19 nt, Homo sapiens
  misc_RNA (1)...(19): siRNA sense strand
gcaucaagcugcaggccga

SEQ ID NO: 2263109 - RNA, 19 nt, Homo sapiens
  misc_RNA (1)...(19): siRNA sense strand
ucaaaggagagaaggguga

SEQ ID NO: 2263110 - RNA, 19 nt, Homo sapiens
  misc_RNA (1)...(19): siRNA sense strand
ccgauggacagaagggcaa

SEQ ID NO: 2263111 - RNA, 19 nt, Homo sapiens
  misc_RNA (1)...(19): siRNA sense strand
gagccuggccagaagggaa

SEQ ID NO: 2263112 - RNA, 19 nt, Homo sapiens
  misc_RNA (1)...(19): siRNA sense strand
ucaugaaacacgaagccua

SEQ ID NO: 2263113 - RNA, 19 nt, Homo sapiens
  misc_RNA (1)...(19): siRNA sense strand
caacaaaggagccaaggga

SEQ ID NO: 2263114 - RNA, 19 nt, Homo sapiens
  misc_RNA (1)...(19): siRNA sense strand
ccaacaugacggagcagau

SEQ ID NO: 2263115 - RNA, 19 nt, Homo sapiens
  misc_RNA (1)...(19): siRNA sense strand
cgcacgagcucuaccgcaa

SEQ ID NO: 2263116 - RNA, 19 nt, Homo sapiens
  misc_RNA (1)...(19): siRNA sense strand
ccagaagggaagacaggga

SEQ ID NO: 2263117 - RNA, 19 nt, Homo sapiens
  misc_RNA (1)...(19): siRNA sense strand
aaggagaaccugggaggaa

SEQ ID NO: 2263118 - RNA, 19 nt, Homo sapiens
  misc_RNA (1)...(19): siRNA sense strand
ccaacuucacacuggagaa

SEQ ID NO: 2263119 - RNA, 19 nt, Homo sapiens
  misc_RNA (1)...(19): siRNA sense strand
aagccuacggagagugcua

SEQ ID NO: 2263120 - RNA, 19 nt, Homo sapiens
  misc_RNA (1)...(19): siRNA sense strand
gcuucaaggaggcugucaa

SEQ ID NO: 2263121 - RNA, 19 nt, Homo sapiens
  misc_RNA (1)...(19): siRNA sense strand
agccacagcaggugcgcaa

SEQ ID NO: 2263122 - RNA, 19 nt, Homo sapiens
  misc_RNA (1)...(19): siRNA sense strand
cugaccagguggagguguu

SEQ ID NO: 2263123 - RNA, 19 nt, Homo sapiens
  misc_RNA (1)...(19): siRNA sense strand
agaagggaagacagggaga

SEQ ID NO: 2263124 - RNA, 19 nt, Homo sapiens
  misc_RNA (1)...(19): siRNA sense strand
gaaaggagagccugcggau

SEQ ID NO: 2263125 - RNA, 19 nt, Homo sapiens
  misc_RNA (1)...(19): siRNA sense strand
ugggaggaaaggagagaaa

SEQ ID NO: 2263126 - RNA, 19 nt, Homo sapiens
  misc_RNA (1)...(19): siRNA sense strand
ggaaaggagagaaaggaga

SEQ ID NO: 2263127 - RNA, 19 nt, Homo sapiens
  misc_RNA (1)...(19): siRNA sense strand
acaaaggagccaagggaga

SEQ ID NO: 2263128 - RNA, 19 nt, Homo sapiens
  misc_RNA (1)...(19): siRNA sense strand
ggagagugcuacaagguga

SEQ ID NO: 2263129 - RNA, 19 nt, Homo sapiens
  misc_RNA (1)...(19): siRNA sense strand
cggacacuaccgagagaaa

SEQ ID NO: 2263130 - RNA, 19 nt, Homo sapiens
  misc_RNA (1)...(19): siRNA sense strand
ucaagaaccugcagggcau

SEQ ID NO: 2263131 - RNA, 19 nt, Homo sapiens
  misc_RNA (1)...(19): siRNA sense strand
gcaucaagcugcaggccga

SEQ ID NO: 2263132 - RNA, 19 nt, Homo sapiens
  misc_RNA (1)...(19): siRNA sense strand
ucaaaggagagaaggguga

SEQ ID NO: 2263133 - RNA, 19 nt, Homo sapiens
  misc_RNA (1)...(19): siRNA sense strand
ccgauggacagaagggcaa

SEQ ID NO: 2263134 - RNA, 19 nt, Homo sapiens
  misc_RNA (1)...(19): siRNA sense strand
gagccuggccagaagggaa

SEQ ID NO: 2263135 - RNA, 19 nt, Homo sapiens
  misc_RNA (1)...(19): siRNA sense strand
ucaugaaacacgaagccua

SEQ ID NO: 2263136 - RNA, 19 nt, Homo sapiens
  misc_RNA (1)...(19): siRNA sense strand
caacaaaggagccaaggga

SEQ ID NO: 2263137 - RNA, 19 nt, Homo sapiens
  misc_RNA (1)...(19): siRNA sense strand
ccaacaugacggagcagau

SEQ ID NO: 2263138 - RNA, 19 nt, Homo sapiens
  misc_RNA (1)...(19): siRNA sense strand
cgcacgagcucuaccgcaa

SEQ ID NO: 2263139 - RNA, 19 nt, Homo sapiens
  misc_RNA (1)...(19): siRNA sense strand
ccagaagggaagacaggga

SEQ ID NO: 2263140 - RNA, 19 nt, Homo sapiens
  misc_RNA (1)...(19): siRNA sense strand
aaggagaaccugggaggaa

SEQ ID NO: 2263141 - RNA, 19 nt, Homo sapiens
  misc_RNA (1)...(19): siRNA sense strand
ccaacuucacacuggagaa

SEQ ID NO: 2263142 - RNA, 19 nt, Homo sapiens
  misc_RNA (1)...(19): siRNA sense strand
aagccuacggagagugcua

SEQ ID NO: 2263143 - RNA, 19 nt, Homo sapiens
  misc_RNA (1)...(19): siRNA sense strand
gcuucaaggaggcugucaa

SEQ ID NO: 2263144 - RNA, 19 nt, Homo sapiens
  misc_RNA (1)...(19): siRNA sense strand
agccacagcaggugcgcaa

SEQ ID NO: 2263145 - RNA, 19 nt, Homo sapiens
  misc_RNA (1)...(19): siRNA sense strand
cugaccagguggagguguu

SEQ ID NO: 2263146 - RNA, 19 nt, Homo sapiens
  misc_RNA (1)...(19): siRNA sense strand
agaagggaagacagggaga

SEQ ID NO: 2263147 - RNA, 19 nt, Homo sapiens
  misc_RNA (1)...(19): siRNA sense strand
gaaaggagagccugcggau

SEQ ID NO: 2263148 - RNA, 19 nt, Homo sapiens
  misc_RNA (1)...(19): siRNA sense strand
ugggaggaaaggagagaaa

SEQ ID NO: 2263149 - RNA, 19 nt, Homo sapiens
  misc_RNA (1)...(19): siRNA sense strand
ggaaaggagagaaaggaga

SEQ ID NO: 2263150 - RNA, 19 nt, Homo sapiens
  misc_RNA (1)...(19): siRNA sense strand
acaaaggagccaagggaga

SEQ ID NO: 2263151 - RNA, 19 nt, Homo sapiens
  misc_RNA (1)...(19): siRNA sense strand
ggagagugcuacaagguga

SEQ ID NO: 2263152 - RNA, 19 nt, Homo sapiens
  misc_RNA (1)...(19): siRNA sense strand
cggacacuaccgagagaaa

SEQ ID NO: 2263153 - RNA, 19 nt, Homo sapiens
  misc_RNA (1)...(19): siRNA sense strand
ucaagaaccugcagggcau

SEQ ID NO: 2263154 - RNA, 19 nt, Homo sapiens
  misc_RNA (1)...(19): siRNA sense strand
gcaucaagcugcaggccga

SEQ ID NO: 2263155 - RNA, 19 nt, Homo sapiens
  misc_RNA (1)...(19): siRNA sense strand
ucaaaggagagaaggguga

SEQ ID NO: 2263156 - RNA, 19 nt, Homo sapiens
  misc_RNA (1)...(19): siRNA sense strand
ccgauggacagaagggcaa

SEQ ID NO: 2263157 - RNA, 19 nt, Homo sapiens
  misc_RNA (1)...(19): siRNA sense strand
gagccuggccagaagggaa

SEQ ID NO: 2263158 - RNA, 19 nt, Homo sapiens
  misc_RNA (1)...(19): siRNA sense strand
ucaugaaacacgaagccua

SEQ ID NO: 2263159 - RNA, 19 nt, Homo sapiens
  misc_RNA (1)...(19): siRNA sense strand
caacaaaggagccaaggga

SEQ ID NO: 2263160 - RNA, 19 nt, Homo sapiens
  misc_RNA (1)...(19): siRNA sense strand
ccaacaugacggagcagau

SEQ ID NO: 2263161 - RNA, 19 nt, Homo sapiens
  misc_RNA (1)...(19): siRNA sense strand
cgcacgagcucuaccgcaa

SEQ ID NO: 2263162 - RNA, 19 nt, Homo sapiens
  misc_RNA (1)...(19): siRNA sense strand
ccagaagggaagacaggga

SEQ ID NO: 2263163 - RNA, 19 nt, Homo sapiens
  misc_RNA (1)...(19): siRNA sense strand
aaggagaaccugggaggaa

SEQ ID NO: 2263164 - RNA, 19 nt, Homo sapiens
  misc_RNA (1)...(19): siRNA sense strand
ccaacuucacacuggagaa

SEQ ID NO: 2263165 - RNA, 19 nt, Homo sapiens
  misc_RNA (1)...(19): siRNA sense strand
aagccuacggagagugcua

SEQ ID NO: 2263166 - RNA, 19 nt, Homo sapiens
  misc_RNA (1)...(19): siRNA sense strand
gcuucaaggaggcugucaa

SEQ ID NO: 2263167 - RNA, 19 nt, Homo sapiens
  misc_RNA (1)...(19): siRNA sense strand
agccacagcaggugcgcaa

SEQ ID NO: 2263168 - RNA, 19 nt, Homo sapiens
  misc_RNA (1)...(19): siRNA sense strand
cugaccagguggagguguu

SEQ ID NO: 2263169 - RNA, 19 nt, Homo sapiens
  misc_RNA (1)...(19): siRNA sense strand
agaagggaagacagggaga

SEQ ID NO: 2263170 - RNA, 19 nt, Homo sapiens
  misc_RNA (1)...(19): siRNA sense strand
gaaaggagagccugcggau

SEQ ID NO: 2263171 - RNA, 19 nt, Homo sapiens
  misc_RNA (1)...(19): siRNA sense strand
cggcauaguuggggacaaa

SEQ ID NO: 2263172 - RNA, 19 nt, Homo sapiens
  misc_RNA (1)...(19): siRNA sense strand
ggaaggaccaagaggacca

SEQ ID NO: 2263173 - RNA, 19 nt, Homo sapiens
  misc_RNA (1)...(19): siRNA sense strand
ugaagaaggugaagcagga

SEQ ID NO: 2263174 - RNA, 19 nt, Homo sapiens
  misc_RNA (1)...(19): siRNA sense strand
cuaaaggugacuugggaga

SEQ ID NO: 2263175 - RNA, 19 nt, Homo sapiens
  misc_RNA (1)...(19): siRNA sense strand
cgguuugccaggagcuaua

SEQ ID NO: 2263176 - RNA, 19 nt, Homo sapiens
  misc_RNA (1)...(19): siRNA sense strand
gacaaggacacaaggguga

SEQ ID NO: 2263177 - RNA, 19 nt, Homo sapiens
  misc_RNA (1)...(19): siRNA sense strand
gggaaagccaggagcucca

SEQ ID NO: 2263178 - RNA, 19 nt, Homo sapiens
  misc_RNA (1)...(19): siRNA sense strand
cugcaggugaaccgggaaa

SEQ ID NO: 2263179 - RNA, 19 nt, Homo sapiens
  misc_RNA (1)...(19): siRNA sense strand
agaaggugaagcaggagaa

SEQ ID NO: 2263180 - RNA, 19 nt, Homo sapiens
  misc_RNA (1)...(19): siRNA sense strand
ccauugggucaaagggaca

SEQ ID NO: 2263181 - RNA, 19 nt, Homo sapiens
  misc_RNA (1)...(19): siRNA sense strand
aagaaggugaccagggaga

SEQ ID NO: 2263182 - RNA, 19 nt, Homo sapiens
  misc_RNA (1)...(19): siRNA sense strand
cagguuugcaugagaguca

SEQ ID NO: 2263183 - RNA, 19 nt, Homo sapiens
  misc_RNA (1)...(19): siRNA sense strand
guguaggaccuguugguga

SEQ ID NO: 2263184 - RNA, 19 nt, Homo sapiens
  misc_RNA (1)...(19): siRNA sense strand
gaugggaauucguggccuu

SEQ ID NO: 2263185 - RNA, 19 nt, Homo sapiens
  misc_RNA (1)...(19): siRNA sense strand
agaauuaggaccaguggga

SEQ ID NO: 2263186 - RNA, 19 nt, Homo sapiens
  misc_RNA (1)...(19): siRNA sense strand
cccaggacccagaggaaca

SEQ ID NO: 2263187 - RNA, 19 nt, Homo sapiens
  misc_RNA (1)...(19): siRNA sense strand
cuaaaggagaaauugguga

SEQ ID NO: 2263188 - RNA, 19 nt, Homo sapiens
  misc_RNA (1)...(19): siRNA sense strand
uggugaagaaggugaagca

SEQ ID NO: 2263189 - RNA, 19 nt, Homo sapiens
  misc_RNA (1)...(19): siRNA sense strand
ugagagggccugagggaag

SEQ ID NO: 2263190 - RNA, 19 nt, Homo sapiens
  misc_RNA (1)...(19): siRNA sense strand
gagucauacaagaacauuu

SEQ ID NO: 2263191 - RNA, 19 nt, Homo sapiens
  misc_RNA (1)...(19): siRNA sense strand
ugaagaaggugaccaggga

SEQ ID NO: 2263192 - RNA, 19 nt, Homo sapiens
  misc_RNA (1)...(19): siRNA sense strand
cggcauaguuggggacaaa

SEQ ID NO: 2263193 - RNA, 19 nt, Homo sapiens
  misc_RNA (1)...(19): siRNA sense strand
ggaaggaccaagaggacca

SEQ ID NO: 2263194 - RNA, 19 nt, Homo sapiens
  misc_RNA (1)...(19): siRNA sense strand
ugaagaaggugaagcagga

SEQ ID NO: 2263195 - RNA, 19 nt, Homo sapiens
  misc_RNA (1)...(19): siRNA sense strand
cuaaaggugacuugggaga

SEQ ID NO: 2263196 - RNA, 19 nt, Homo sapiens
  misc_RNA (1)...(19): siRNA sense strand
cgguuugccaggagcuaua

SEQ ID NO: 2263197 - RNA, 19 nt, Homo sapiens
  misc_RNA (1)...(19): siRNA sense strand
gacaaggacacaaggguga

SEQ ID NO: 2263198 - RNA, 19 nt, Homo sapiens
  misc_RNA (1)...(19): siRNA sense strand
gggaaagccaggagcucca

SEQ ID NO: 2263199 - RNA, 19 nt, Homo sapiens
  misc_RNA (1)...(19): siRNA sense strand
cugcaggugaaccgggaaa

SEQ ID NO: 2263200 - RNA, 19 nt, Homo sapiens
  misc_RNA (1)...(19): siRNA sense strand
agaaggugaagcaggagaa

SEQ ID NO: 2263201 - RNA, 19 nt, Homo sapiens
  misc_RNA (1)...(19): siRNA sense strand
ccauugggucaaagggaca

SEQ ID NO: 2263202 - RNA, 19 nt, Homo sapiens
  misc_RNA (1)...(19): siRNA sense strand
aagaaggugaccagggaga

SEQ ID NO: 2263203 - RNA, 19 nt, Homo sapiens
  misc_RNA (1)...(19): siRNA sense strand
cagguuugcaugagaguca

SEQ ID NO: 2263204 - RNA, 19 nt, Homo sapiens
  misc_RNA (1)...(19): siRNA sense strand
guguaggaccuguugguga

SEQ ID NO: 2263205 - RNA, 19 nt, Homo sapiens
  misc_RNA (1)...(19): siRNA sense strand
gaugggaauucguggccuu

SEQ ID NO: 2263206 - RNA, 19 nt, Homo sapiens
  misc_RNA (1)...(19): siRNA sense strand
agaauuaggaccaguggga

SEQ ID NO: 2263207 - RNA, 19 nt, Homo sapiens
  misc_RNA (1)...(19): siRNA sense strand
cccaggacccagaggaaca

SEQ ID NO: 2263208 - RNA, 19 nt, Homo sapiens
  misc_RNA (1)...(19): siRNA sense strand
cuaaaggagaaauugguga

SEQ ID NO: 2263209 - RNA, 19 nt, Homo sapiens
  misc_RNA (1)...(19): siRNA sense strand
uggugaagaaggugaagca

SEQ ID NO: 2263210 - RNA, 19 nt, Homo sapiens
  misc_RNA (1)...(19): siRNA sense strand
ugagagggccugagggaag

SEQ ID NO: 2263211 - RNA, 19 nt, Homo sapiens
  misc_RNA (1)...(19): siRNA sense strand
gagucauacaagaacauuu

SEQ ID NO: 2263212 - RNA, 19 nt, Homo sapiens
  misc_RNA (1)...(19): siRNA sense strand
ugaagaaggugaccaggga

SEQ ID NO: 2263213 - RNA, 19 nt, Homo sapiens
  misc_RNA (1)...(19): siRNA sense strand
ugggaaagagggagagcca

SEQ ID NO: 2263214 - RNA, 19 nt, Homo sapiens
  misc_RNA (1)...(19): siRNA sense strand
gggacagaagggugaccaa

SEQ ID NO: 2263215 - RNA, 19 nt, Homo sapiens
  misc_RNA (1)...(19): siRNA sense strand
ccucauggauauaaaggca

SEQ ID NO: 2263216 - RNA, 19 nt, Homo sapiens
  misc_RNA (1)...(19): siRNA sense strand
gauuagagguccaccggga

SEQ ID NO: 2263217 - RNA, 19 nt, Homo sapiens
  misc_RNA (1)...(19): siRNA sense strand
cagaugggccagacgggaa

SEQ ID NO: 2263218 - RNA, 19 nt, Homo sapiens
  misc_RNA (1)...(19): siRNA sense strand
ggauggagaucgagggucc

SEQ ID NO: 2263219 - RNA, 19 nt, Homo sapiens
  misc_RNA (1)...(19): siRNA sense strand
agaaaggcgagaagggcga

SEQ ID NO: 2263220 - RNA, 19 nt, Homo sapiens
  misc_RNA (1)...(19): siRNA sense strand
caugaagggcagugcagga

SEQ ID NO: 2263221 - RNA, 19 nt, Homo sapiens
  misc_RNA (1)...(19): siRNA sense strand
gggugacagaggagacaaa

SEQ ID NO: 2263222 - RNA, 19 nt, Homo sapiens
  misc_RNA (1)...(19): siRNA sense strand
ccaaaggcgagaagggaga

SEQ ID NO: 2263223 - RNA, 19 nt, Homo sapiens
  misc_RNA (1)...(19): siRNA sense strand
ccagaggaaaccaggguga

SEQ ID NO: 2263224 - RNA, 19 nt, Homo sapiens
  misc_RNA (1)...(19): siRNA sense strand
cuaagggagaccaggguau

SEQ ID NO: 2263225 - RNA, 19 nt, Homo sapiens
  misc_RNA (1)...(19): siRNA sense strand
cggcauugacggagaagcu

SEQ ID NO: 2263226 - RNA, 19 nt, Homo sapiens
  misc_RNA (1)...(19): siRNA sense strand
ugggaaagcgggugaccga

SEQ ID NO: 2263227 - RNA, 19 nt, Homo sapiens
  misc_RNA (1)...(19): siRNA sense strand
ggauaaaggagaacugggu

SEQ ID NO: 2263228 - RNA, 19 nt, Homo sapiens
  misc_RNA (1)...(19): siRNA sense strand
ggggaugaucagcgaacaa

SEQ ID NO: 2263229 - RNA, 19 nt, Homo sapiens
  misc_RNA (1)...(19): siRNA sense strand
ggaugaucagcgaacaaau

SEQ ID NO: 2263230 - RNA, 19 nt, Homo sapiens
  misc_RNA (1)...(19): siRNA sense strand
uggacgggccugaaggaga

SEQ ID NO: 2263231 - RNA, 19 nt, Homo sapiens
  misc_RNA (1)...(19): siRNA sense strand
acaaagaguggguggccaa

SEQ ID NO: 2263232 - RNA, 19 nt, Homo sapiens
  misc_RNA (1)...(19): siRNA sense strand
augagaaagucgaguugua

SEQ ID NO: 2263233 - RNA, 19 nt, Homo sapiens
  misc_RNA (1)...(19): siRNA sense strand
acgaaaagaacgaguggaa

SEQ ID NO: 2263234 - RNA, 19 nt, Homo sapiens
  misc_RNA (1)...(19): siRNA sense strand
cgcauuaaguucaaggaga

SEQ ID NO: 2263235 - RNA, 19 nt, Homo sapiens
  misc_RNA (1)...(19): siRNA sense strand
gcauuaaguucaaggagag

SEQ ID NO: 2263236 - RNA, 19 nt, Homo sapiens
  misc_RNA (1)...(19): siRNA sense strand
ccaagugggacuacgaaaa

SEQ ID NO: 2263237 - RNA, 19 nt, Homo sapiens
  misc_RNA (1)...(19): siRNA sense strand
cuaguuggcaagcgagcaa

SEQ ID NO: 2263238 - RNA, 19 nt, Homo sapiens
  misc_RNA (1)...(19): siRNA sense strand
uauuuagccuaguuggcaa

SEQ ID NO: 2263239 - RNA, 19 nt, Homo sapiens
  misc_RNA (1)...(19): siRNA sense strand
ucuuacaguugguggaaca

SEQ ID NO: 2263240 - RNA, 19 nt, Homo sapiens
  misc_RNA (1)...(19): siRNA sense strand
cagauugggcagaggacga

SEQ ID NO: 2263241 - RNA, 19 nt, Homo sapiens
  misc_RNA (1)...(19): siRNA sense strand
auaaaguuccggagaagca

SEQ ID NO: 2263242 - RNA, 19 nt, Homo sapiens
  misc_RNA (1)...(19): siRNA sense strand
ccauauaugagcuggcugu

SEQ ID NO: 2263243 - RNA, 19 nt, Homo sapiens
  misc_RNA (1)...(19): siRNA sense strand
guaucuaaaggguggggua

SEQ ID NO: 2263244 - RNA, 19 nt, Homo sapiens
  misc_RNA (1)...(19): siRNA sense strand
ggacauauguagcaacaca

SEQ ID NO: 2263245 - RNA, 19 nt, Homo sapiens
  misc_RNA (1)...(19): siRNA sense strand
ucuccaaguucgaagcauu

SEQ ID NO: 2263246 - RNA, 19 nt, Homo sapiens
  misc_RNA (1)...(19): siRNA sense strand
guucgaagcauucagcaaa

SEQ ID NO: 2263247 - RNA, 19 nt, Homo sapiens
  misc_RNA (1)...(19): siRNA sense strand
caaacaauggcaaggcaga

SEQ ID NO: 2263248 - RNA, 19 nt, Homo sapiens
  misc_RNA (1)...(19): siRNA sense strand
aguucgaagcauucagcaa

SEQ ID NO: 2263249 - RNA, 19 nt, Homo sapiens
  misc_RNA (1)...(19): siRNA sense strand
ggaauagaauggaaccugu

SEQ ID NO: 2263250 - RNA, 19 nt, Homo sapiens
  misc_RNA (1)...(19): siRNA sense strand
uagcaacacaagucggaau

SEQ ID NO: 2263251 - RNA, 19 nt, Homo sapiens
  misc_RNA (1)...(19): siRNA sense strand
auuccgaaguggaggucaa

SEQ ID NO: 2263252 - RNA, 19 nt, Homo sapiens
  misc_RNA (1)...(19): siRNA sense strand
ccgaugaggcccagguaca

SEQ ID NO: 2263253 - RNA, 19 nt, Homo sapiens
  misc_RNA (1)...(19): siRNA sense strand
ugaaggagcuggaggaccu

SEQ ID NO: 2263254 - RNA, 19 nt, Homo sapiens
  misc_RNA (1)...(19): siRNA sense strand
ggaccuacagccagggcau

SEQ ID NO: 2263255 - RNA, 19 nt, Homo sapiens
  misc_RNA (1)...(19): siRNA sense strand
gcaagauccagauuggcaa

SEQ ID NO: 2263256 - RNA, 19 nt, Homo sapiens
  misc_RNA (1)...(19): siRNA sense strand
uuguagacuuugugaagga

SEQ ID NO: 2263257 - RNA, 19 nt, Homo sapiens
  misc_RNA (1)...(19): siRNA sense strand
acgaggagcaggagcagau

SEQ ID NO: 2263258 - RNA, 19 nt, Homo sapiens
  misc_RNA (1)...(19): siRNA sense strand
agaccaugaucgaggacgu

SEQ ID NO: 2263259 - RNA, 19 nt, Homo sapiens
  misc_RNA (1)...(19): siRNA sense strand
ucauguaucccuauggcua

SEQ ID NO: 2263260 - RNA, 19 nt, Homo sapiens
  misc_RNA (1)...(19): siRNA sense strand
aaacagaaccagucccuga

SEQ ID NO: 2263261 - RNA, 19 nt, Homo sapiens
  misc_RNA (1)...(19): siRNA sense strand
agguacagaaggugaagga

SEQ ID NO: 2263262 - RNA, 19 nt, Homo sapiens
  misc_RNA (1)...(19): siRNA sense strand
aggugaaggagcuggagga

SEQ ID NO: 2263263 - RNA, 19 nt, Homo sapiens
  misc_RNA (1)...(19): siRNA sense strand
gugaaggaccaugggaaca

SEQ ID NO: 2263264 - RNA, 19 nt, Homo sapiens
  misc_RNA (1)...(19): siRNA sense strand
uagaaacauuugugggaga

SEQ ID NO: 2263265 - RNA, 19 nt, Homo sapiens
  misc_RNA (1)...(19): siRNA sense strand
uggcuuggcuugaaggcaa

SEQ ID NO: 2263266 - RNA, 19 nt, Homo sapiens
  misc_RNA (1)...(19): siRNA sense strand
uggauaaccucguggcuga

SEQ ID NO: 2263267 - RNA, 19 nt, Homo sapiens
  misc_RNA (1)...(19): siRNA sense strand
cuaccaagccaguggagga

SEQ ID NO: 2263268 - RNA, 19 nt, Homo sapiens
  misc_RNA (1)...(19): siRNA sense strand
uuuaauaggagaagagaac

SEQ ID NO: 2263269 - RNA, 19 nt, Homo sapiens
  misc_RNA (1)...(19): siRNA sense strand
ccauaguggacuucaucaa

SEQ ID NO: 2263270 - RNA, 19 nt, Homo sapiens
  misc_RNA (1)...(19): siRNA sense strand
ccuguuggacaaagagaau

SEQ ID NO: 2263271 - RNA, 19 nt, Homo sapiens
  misc_RNA (1)...(19): siRNA sense strand
uggacaaagagaaugaaga

SEQ ID NO: 2263272 - RNA, 19 nt, Homo sapiens
  misc_RNA (1)...(19): siRNA sense strand
gccuuugaacugagagaca

SEQ ID NO: 2263273 - RNA, 19 nt, Homo sapiens
  misc_RNA (1)...(19): siRNA sense strand
uguuggacaaagagaauga

SEQ ID NO: 2263274 - RNA, 19 nt, Homo sapiens
  misc_RNA (1)...(19): siRNA sense strand
ucuagugagcaaagugaau

SEQ ID NO: 2263275 - RNA, 19 nt, Homo sapiens
  misc_RNA (1)...(19): siRNA sense strand
uguaccaagcaaugaagaa

SEQ ID NO: 2263276 - RNA, 19 nt, Homo sapiens
  misc_RNA (1)...(19): siRNA sense strand
ccucuguguugguguggau

SEQ ID NO: 2263277 - RNA, 19 nt, Homo sapiens
  misc_RNA (1)...(19): siRNA sense strand
gguccuaugauuauggcau

SEQ ID NO: 2263278 - RNA, 19 nt, Homo sapiens
  misc_RNA (1)...(19): siRNA sense strand
aguuagaugacuuugauga

SEQ ID NO: 2263279 - RNA, 19 nt, Homo sapiens
  misc_RNA (1)...(19): siRNA sense strand
cugcauggcaccaaguaca

SEQ ID NO: 2263280 - RNA, 19 nt, Homo sapiens
  misc_RNA (1)...(19): siRNA sense strand
ucauaaaggacuuggccaa

SEQ ID NO: 2263281 - RNA, 19 nt, Homo sapiens
  misc_RNA (1)...(19): siRNA sense strand
acugaaaagaugauggaua

SEQ ID NO: 2263282 - RNA, 19 nt, Homo sapiens
  misc_RNA (1)...(19): siRNA sense strand
cgaguuagugagaaggaau

SEQ ID NO: 2263283 - RNA, 19 nt, Homo sapiens
  misc_RNA (1)...(19): siRNA sense strand
aaugaaagaagaaaggcua

SEQ ID NO: 2263284 - RNA, 19 nt, Homo sapiens
  misc_RNA (1)...(19): siRNA sense strand
gggaaaagauuguggcuug

SEQ ID NO: 2263285 - RNA, 19 nt, Homo sapiens
  misc_RNA (1)...(19): siRNA sense strand
cuuugagcuccgagauaaa

SEQ ID NO: 2263286 - RNA, 19 nt, Homo sapiens
  misc_RNA (1)...(19): siRNA sense strand
gggaaaagaaugaaagaag

SEQ ID NO: 2263287 - RNA, 19 nt, Homo sapiens
  misc_RNA (1)...(19): siRNA sense strand
gggcuuaugaccugggcau

SEQ ID NO: 2263288 - RNA, 19 nt, Homo sapiens
  misc_RNA (1)...(19): siRNA sense strand
aaccaaaacuuaugggaga

SEQ ID NO: 2263289 - RNA, 19 nt, Homo sapiens
  misc_RNA (1)...(19): siRNA sense strand
gcgugaagccccaggauga

SEQ ID NO: 2263290 - RNA, 19 nt, Homo sapiens
  misc_RNA (1)...(19): siRNA sense strand
aguccgagaaagagacgaa

SEQ ID NO: 2263291 - RNA, 19 nt, Homo sapiens
  misc_RNA (1)...(19): siRNA sense strand
cugaaugaaaucaagguuu

SEQ ID NO: 2263292 - RNA, 19 nt, Homo sapiens
  misc_RNA (1)...(19): siRNA sense strand
gagaagguguuccgcguga

SEQ ID NO: 2263293 - RNA, 19 nt, Homo sapiens
  misc_RNA (1)...(19): siRNA sense strand
ggccaaaaccaaugagcuu

SEQ ID NO: 2263294 - RNA, 19 nt, Homo sapiens
  misc_RNA (1)...(19): siRNA sense strand
cagacaucauaaaggacuu

SEQ ID NO: 2263295 - RNA, 19 nt, Homo sapiens
  misc_RNA (1)...(19): siRNA sense strand
cuacaagaagagauugaga

SEQ ID NO: 2263296 - RNA, 19 nt, Homo sapiens
  misc_RNA (1)...(19): siRNA sense strand
gggagaagguguuccgcgu

SEQ ID NO: 2263297 - RNA, 19 nt, Homo sapiens
  misc_RNA (1)...(19): siRNA sense strand
gaaugaaagaagaaaggcu

SEQ ID NO: 2263298 - RNA, 19 nt, Homo sapiens
  misc_RNA (1)...(19): siRNA sense strand
augaaagaagaaaggcuau

SEQ ID NO: 2263299 - RNA, 19 nt, Homo sapiens
  misc_RNA (1)...(19): siRNA sense strand
gagaaagagacgaaagcug

SEQ ID NO: 2263300 - RNA, 19 nt, Homo sapiens
  misc_RNA (1)...(19): siRNA sense strand
cccuauggauauacaucaa

SEQ ID NO: 2263301 - RNA, 19 nt, Homo sapiens
  misc_RNA (1)...(19): siRNA sense strand
ccagaguccgagaaagaga

SEQ ID NO: 2263302 - RNA, 19 nt, Homo sapiens
  misc_RNA (1)...(19): siRNA sense strand
gccuuugagcuccgagaua

SEQ ID NO: 2263303 - RNA, 19 nt, Homo sapiens
  misc_RNA (1)...(19): siRNA sense strand
cauuagaagccaccugaau

SEQ ID NO: 2263304 - RNA, 19 nt, Homo sapiens
  misc_RNA (1)...(19): siRNA sense strand
caccuaaccaugaggacuu

SEQ ID NO: 2263305 - RNA, 19 nt, Homo sapiens
  misc_RNA (1)...(19): siRNA sense strand
cugucaaauuuauugccaa

SEQ ID NO: 2263306 - RNA, 19 nt, Homo sapiens
  misc_RNA (1)...(19): siRNA sense strand
ggauaaagccaacgugcag

SEQ ID NO: 2263307 - RNA, 19 nt, Homo sapiens
  misc_RNA (1)...(19): siRNA sense strand
agaccaugcuagcugucaa

SEQ ID NO: 2263308 - RNA, 19 nt, Homo sapiens
  misc_RNA (1)...(19): siRNA sense strand
agaaagagacgaaagcugu

SEQ ID NO: 2263309 - RNA, 19 nt, Homo sapiens
  misc_RNA (1)...(19): siRNA sense strand
gagaaggaaucccaagcca

SEQ ID NO: 2263310 - RNA, 19 nt, Homo sapiens
  misc_RNA (1)...(19): siRNA sense strand
acaaagaaccgcaugugga

SEQ ID NO: 2263311 - RNA, 19 nt, Homo sapiens
  misc_RNA (1)...(19): siRNA sense strand
cggauaaagccaacgugca

SEQ ID NO: 2263312 - RNA, 19 nt, Homo sapiens
  misc_RNA (1)...(19): siRNA sense strand
aagaaccgcauguggagaa

SEQ ID NO: 2263313 - RNA, 19 nt, Homo sapiens
  misc_RNA (1)...(19): siRNA sense strand
aaguacaacaagugggaaa

SEQ ID NO: 2263314 - RNA, 19 nt, Homo sapiens
  misc_RNA (1)...(19): siRNA sense strand
ugacagagcuucucgacaa

SEQ ID NO: 2263315 - RNA, 19 nt, Homo sapiens
  misc_RNA (1)...(19): siRNA sense strand
ugauaagcaaccugagaaa

SEQ ID NO: 2263316 - RNA, 19 nt, Homo sapiens
  misc_RNA (1)...(19): siRNA sense strand
gaaaugugguggaggcuca

SEQ ID NO: 2263317 - RNA, 19 nt, Homo sapiens
  misc_RNA (1)...(19): siRNA sense strand
cuuugaacuucgagauaca

SEQ ID NO: 2263318 - RNA, 19 nt, Homo sapiens
  misc_RNA (1)...(19): siRNA sense strand
gggcuuaugaccaaggaau

SEQ ID NO: 2263319 - RNA, 19 nt, Homo sapiens
  misc_RNA (1)...(19): siRNA sense strand
uguuaaagcagaagauacu

SEQ ID NO: 2263320 - RNA, 19 nt, Homo sapiens
  misc_RNA (1)...(19): siRNA sense strand
aguugaaugcccuggcuaa

SEQ ID NO: 2263321 - RNA, 19 nt, Homo sapiens
  misc_RNA (1)...(19): siRNA sense strand
gggaaacgauagaggcuug

SEQ ID NO: 2263322 - RNA, 19 nt, Homo sapiens
  misc_RNA (1)...(19): siRNA sense strand
gauccaagugacagagcuu

SEQ ID NO: 2263323 - RNA, 19 nt, Homo sapiens
  misc_RNA (1)...(19): siRNA sense strand
acaaacucggugagaacaa

SEQ ID NO: 2263324 - RNA, 19 nt, Homo sapiens
  misc_RNA (1)...(19): siRNA sense strand
gcgagaagguguuccgugu

SEQ ID NO: 2263325 - RNA, 19 nt, Homo sapiens
  misc_RNA (1)...(19): siRNA sense strand
agaccaaggcccuggcuga

SEQ ID NO: 2263326 - RNA, 19 nt, Homo sapiens
  misc_RNA (1)...(19): siRNA sense strand
uuacaaacucggugagaac

SEQ ID NO: 2263327 - RNA, 19 nt, Homo sapiens
  misc_RNA (1)...(19): siRNA sense strand
ucuaaagcagaaugaacua

SEQ ID NO: 2263328 - RNA, 19 nt, Homo sapiens
  misc_RNA (1)...(19): siRNA sense strand
ccuccugaagguuggcaaa

SEQ ID NO: 2263329 - RNA, 19 nt, Homo sapiens
  misc_RNA (1)...(19): siRNA sense strand
gugugaaauuggagccucu

SEQ ID NO: 2263330 - RNA, 19 nt, Homo sapiens
  misc_RNA (1)...(19): siRNA sense strand
acuucgagauacaggcaga

SEQ ID NO: 2263331 - RNA, 19 nt, Homo sapiens
  misc_RNA (1)...(19): siRNA sense strand
guguuaaagcagaagauac

SEQ ID NO: 2263332 - RNA, 19 nt, Homo sapiens
  misc_RNA (1)...(19): siRNA sense strand
gugagauccaagugacaga

SEQ ID NO: 2263333 - RNA, 19 nt, Homo sapiens
  misc_RNA (1)...(19): siRNA sense strand
cuuccguguuaaagcagaa

SEQ ID NO: 2263334 - RNA, 19 nt, Homo sapiens
  misc_RNA (1)...(19): siRNA sense strand
acaguuaugagaaguacaa

SEQ ID NO: 2263335 - RNA, 19 nt, Homo sapiens
  misc_RNA (1)...(19): siRNA sense strand
aguuaugagaaguacaaca

SEQ ID NO: 2263336 - RNA, 19 nt, Homo sapiens
  misc_RNA (1)...(19): siRNA sense strand
guugaaugcccuggcuaaa

SEQ ID NO: 2263337 - RNA, 19 nt, Homo sapiens
  misc_RNA (1)...(19): siRNA sense strand
cugauaagcaaccugagaa

SEQ ID NO: 2263338 - RNA, 19 nt, Homo sapiens
  misc_RNA (1)...(19): siRNA sense strand
ugugaaagaacuugccuca

SEQ ID NO: 2263339 - RNA, 19 nt, Homo sapiens
  misc_RNA (1)...(19): siRNA sense strand
aguucgugcuauugagaaa

SEQ ID NO: 2263340 - RNA, 19 nt, Homo sapiens
  misc_RNA (1)...(19): siRNA sense strand
ggaucuaugauuugggcau

SEQ ID NO: 2263341 - RNA, 19 nt, Homo sapiens
  misc_RNA (1)...(19): siRNA sense strand
cagcagauuuccaacgaca

SEQ ID NO: 2263342 - RNA, 19 nt, Homo sapiens
  misc_RNA (1)...(19): siRNA sense strand
auucauacucccagcauau

SEQ ID NO: 2263343 - RNA, 19 nt, Homo sapiens
  misc_RNA (1)...(19): siRNA sense strand
ccucaugcucggaaaccua

SEQ ID NO: 2263344 - RNA, 19 nt, Homo sapiens
  misc_RNA (1)...(19): siRNA sense strand
cgacaaugugaaagcccau

SEQ ID NO: 2263345 - RNA, 19 nt, Homo sapiens
  misc_RNA (1)...(19): siRNA sense strand
uuuaaaugugagcggaauu

SEQ ID NO: 2263346 - RNA, 19 nt, Homo sapiens
  misc_RNA (1)...(19): siRNA sense strand
cgguaacagcugaccuuau

SEQ ID NO: 2263347 - RNA, 19 nt, Homo sapiens
  misc_RNA (1)...(19): siRNA sense strand
aaguaaaagcaaagaccau

SEQ ID NO: 2263348 - RNA, 19 nt, Homo sapiens
  misc_RNA (1)...(19): siRNA sense strand
aaccagaagugaaggcagu

SEQ ID NO: 2263349 - RNA, 19 nt, Homo sapiens
  misc_RNA (1)...(19): siRNA sense strand
augugaaagcccauuuaaa

SEQ ID NO: 2263350 - RNA, 19 nt, Homo sapiens
  misc_RNA (1)...(19): siRNA sense strand
cugaauaggaacuuugcuu

SEQ ID NO: 2263351 - RNA, 19 nt, Homo sapiens
  misc_RNA (1)...(19): siRNA sense strand
aguucgugcuauugagaaa

SEQ ID NO: 2263352 - RNA, 19 nt, Homo sapiens
  misc_RNA (1)...(19): siRNA sense strand
ggaucuaugauuugggcau

SEQ ID NO: 2263353 - RNA, 19 nt, Homo sapiens
  misc_RNA (1)...(19): siRNA sense strand
cagcagauuuccaacgaca

SEQ ID NO: 2263354 - RNA, 19 nt, Homo sapiens
  misc_RNA (1)...(19): siRNA sense strand
auucauacucccagcauau

SEQ ID NO: 2263355 - RNA, 19 nt, Homo sapiens
  misc_RNA (1)...(19): siRNA sense strand
ccucaugcucggaaaccua

SEQ ID NO: 2263356 - RNA, 19 nt, Homo sapiens
  misc_RNA (1)...(19): siRNA sense strand
cgacaaugugaaagcccau

SEQ ID NO: 2263357 - RNA, 19 nt, Homo sapiens
  misc_RNA (1)...(19): siRNA sense strand
uuuaaaugugagcggaauu

SEQ ID NO: 2263358 - RNA, 19 nt, Homo sapiens
  misc_RNA (1)...(19): siRNA sense strand
cgguaacagcugaccuuau

SEQ ID NO: 2263359 - RNA, 19 nt, Homo sapiens
  misc_RNA (1)...(19): siRNA sense strand
aaguaaaagcaaagaccau

SEQ ID NO: 2263360 - RNA, 19 nt, Homo sapiens
  misc_RNA (1)...(19): siRNA sense strand
aaccagaagugaaggcagu

SEQ ID NO: 2263361 - RNA, 19 nt, Homo sapiens
  misc_RNA (1)...(19): siRNA sense strand
augugaaagcccauuuaaa

SEQ ID NO: 2263362 - RNA, 19 nt, Homo sapiens
  misc_RNA (1)...(19): siRNA sense strand
cugaauaggaacuuugcuu

SEQ ID NO: 2263363 - RNA, 19 nt, Homo sapiens
  misc_RNA (1)...(19): siRNA sense strand
gaggagaccuuguggccaa

SEQ ID NO: 2263364 - RNA, 19 nt, Homo sapiens
  misc_RNA (1)...(19): siRNA sense strand
gaauagaucugaaccggaa

SEQ ID NO: 2263365 - RNA, 19 nt, Homo sapiens
  misc_RNA (1)...(19): siRNA sense strand
aaaggaaagaagaggagaa

SEQ ID NO: 2263366 - RNA, 19 nt, Homo sapiens
  misc_RNA (1)...(19): siRNA sense strand
agaccuacugggaggauaa

SEQ ID NO: 2263367 - RNA, 19 nt, Homo sapiens
  misc_RNA (1)...(19): siRNA sense strand
gaaugaggcuguuggacga

SEQ ID NO: 2263368 - RNA, 19 nt, Homo sapiens
  misc_RNA (1)...(19): siRNA sense strand
uggaaaaugaugucagaaa

SEQ ID NO: 2263369 - RNA, 19 nt, Homo sapiens
  misc_RNA (1)...(19): siRNA sense strand
cuauaaacuuacagccuca

SEQ ID NO: 2263370 - RNA, 19 nt, Homo sapiens
  misc_RNA (1)...(19): siRNA sense strand
cagcguaccuggagggaug

SEQ ID NO: 2263371 - RNA, 19 nt, Homo sapiens
  misc_RNA (1)...(19): siRNA sense strand
uaacaaagaaaguggcagu

SEQ ID NO: 2263372 - RNA, 19 nt, Homo sapiens
  misc_RNA (1)...(19): siRNA sense strand
acgaauaccagaaggggaa

SEQ ID NO: 2263373 - RNA, 19 nt, Homo sapiens
  misc_RNA (1)...(19): siRNA sense strand
acacaaagcuugcuccuga

SEQ ID NO: 2263374 - RNA, 19 nt, Homo sapiens
  misc_RNA (1)...(19): siRNA sense strand
uggcaauaacaaagaaagu

SEQ ID NO: 2263375 - RNA, 19 nt, Homo sapiens
  misc_RNA (1)...(19): siRNA sense strand
guuugugggucgaagcaau

SEQ ID NO: 2263376 - RNA, 19 nt, Homo sapiens
  misc_RNA (1)...(19): siRNA sense strand
ugagaaagaagguggucca

SEQ ID NO: 2263377 - RNA, 19 nt, Homo sapiens
  misc_RNA (1)...(19): siRNA sense strand
ccuacugggaggauaacaa

SEQ ID NO: 2263378 - RNA, 19 nt, Homo sapiens
  misc_RNA (1)...(19): siRNA sense strand
ugggaauaugcaugggaau

SEQ ID NO: 2263379 - RNA, 19 nt, Homo sapiens
  misc_RNA (1)...(19): siRNA sense strand
uugauggaaugguggaaaa

SEQ ID NO: 2263380 - RNA, 19 nt, Homo sapiens
  misc_RNA (1)...(19): siRNA sense strand
cugaaaggaaagaagagga

SEQ ID NO: 2263381 - RNA, 19 nt, Homo sapiens
  misc_RNA (1)...(19): siRNA sense strand
ccaucuccguggaaggaau

SEQ ID NO: 2263382 - RNA, 19 nt, Homo sapiens
  misc_RNA (1)...(19): siRNA sense strand
uguacgugaaugagaaaga

SEQ ID NO: 2263383 - RNA, 19 nt, Homo sapiens
  misc_RNA (1)...(19): siRNA sense strand
aguuaaaggauuuguccga

SEQ ID NO: 2263384 - RNA, 19 nt, Homo sapiens
  misc_RNA (1)...(19): siRNA sense strand
uuaaaggauuuguccgaga

SEQ ID NO: 2263385 - RNA, 19 nt, Homo sapiens
  misc_RNA (1)...(19): siRNA sense strand
agaaggaagaauugaugga

SEQ ID NO: 2263386 - RNA, 19 nt, Homo sapiens
  misc_RNA (1)...(19): siRNA sense strand
agguaacccaauugcgaau

SEQ ID NO: 2263387 - RNA, 19 nt, Homo sapiens
  misc_RNA (1)...(19): siRNA sense strand
ccaugagccuggugagccu

SEQ ID NO: 2263388 - RNA, 19 nt, Homo sapiens
  misc_RNA (1)...(19): siRNA sense strand
agaaagaaggugguccaaa

SEQ ID NO: 2263389 - RNA, 19 nt, Homo sapiens
  misc_RNA (1)...(19): siRNA sense strand
aggauuuguccgagaccuu

SEQ ID NO: 2263390 - RNA, 19 nt, Homo sapiens
  misc_RNA (1)...(19): siRNA sense strand
uggaaggaauagaccacga

SEQ ID NO: 2263391 - RNA, 19 nt, Homo sapiens
  misc_RNA (1)...(19): siRNA sense strand
ggauggugauuacuggaga

SEQ ID NO: 2263392 - RNA, 19 nt, Homo sapiens
  misc_RNA (1)...(19): siRNA sense strand
cuuacacaguauugggaaa

SEQ ID NO: 2263393 - RNA, 19 nt, Homo sapiens
  misc_RNA (1)...(19): siRNA sense strand
aguucaaauacguggcaaa

SEQ ID NO: 2263394 - RNA, 19 nt, Homo sapiens
  misc_RNA (1)...(19): siRNA sense strand
gggaaaucugugaaaggua

SEQ ID NO: 2263395 - RNA, 19 nt, Homo sapiens
  misc_RNA (1)...(19): siRNA sense strand
cggagaaaucccagaacuu

SEQ ID NO: 2263396 - RNA, 19 nt, Homo sapiens
  misc_RNA (1)...(19): siRNA sense strand
ggaacacagaauugggauu

SEQ ID NO: 2263397 - RNA, 19 nt, Homo sapiens
  misc_RNA (1)...(19): siRNA sense strand
uggcaaauaugcauggaga

SEQ ID NO: 2263398 - RNA, 19 nt, Homo sapiens
  misc_RNA (1)...(19): siRNA sense strand
gaauaauaacaaagccuca

SEQ ID NO: 2263399 - RNA, 19 nt, Homo sapiens
  misc_RNA (1)...(19): siRNA sense strand
gaaccaacaaauauggaga

SEQ ID NO: 2263400 - RNA, 19 nt, Homo sapiens
  misc_RNA (1)...(19): siRNA sense strand
guggaaugcaagauuacaa

SEQ ID NO: 2263401 - RNA, 19 nt, Homo sapiens
  misc_RNA (1)...(19): siRNA sense strand
ccaacaugaagaaaggaga

SEQ ID NO: 2263402 - RNA, 19 nt, Homo sapiens
  misc_RNA (1)...(19): siRNA sense strand
aggaagggauggaagcguu

SEQ ID NO: 2263403 - RNA, 19 nt, Homo sapiens
  misc_RNA (1)...(19): siRNA sense strand
uuugaagacuguugcccaa

SEQ ID NO: 2263404 - RNA, 19 nt, Homo sapiens
  misc_RNA (1)...(19): siRNA sense strand
gggaaaauuauaaccagua

SEQ ID NO: 2263405 - RNA, 19 nt, Homo sapiens
  misc_RNA (1)...(19): siRNA sense strand
ggcaaauaugcauggagau

SEQ ID NO: 2263406 - RNA, 19 nt, Homo sapiens
  misc_RNA (1)...(19): siRNA sense strand
cccuauagaaccaacaaau

SEQ ID NO: 2263407 - RNA, 19 nt, Homo sapiens
  misc_RNA (1)...(19): siRNA sense strand
ggaaaucugugaaagguag

SEQ ID NO: 2263408 - RNA, 19 nt, Homo sapiens
  misc_RNA (1)...(19): siRNA sense strand
ccaacaaauauggagagua

SEQ ID NO: 2263409 - RNA, 19 nt, Homo sapiens
  misc_RNA (1)...(19): siRNA sense strand
cuuacacaguauugggaaa

SEQ ID NO: 2263410 - RNA, 19 nt, Homo sapiens
  misc_RNA (1)...(19): siRNA sense strand
aguucaaauacguggcaaa

SEQ ID NO: 2263411 - RNA, 19 nt, Homo sapiens
  misc_RNA (1)...(19): siRNA sense strand
gggaaaucugugaaaggua

SEQ ID NO: 2263412 - RNA, 19 nt, Homo sapiens
  misc_RNA (1)...(19): siRNA sense strand
cggagaaaucccagaacuu

SEQ ID NO: 2263413 - RNA, 19 nt, Homo sapiens
  misc_RNA (1)...(19): siRNA sense strand
ggaacacagaauugggauu

SEQ ID NO: 2263414 - RNA, 19 nt, Homo sapiens
  misc_RNA (1)...(19): siRNA sense strand
uggcaaauaugcauggaga

SEQ ID NO: 2263415 - RNA, 19 nt, Homo sapiens
  misc_RNA (1)...(19): siRNA sense strand
gaauaauaacaaagccuca

SEQ ID NO: 2263416 - RNA, 19 nt, Homo sapiens
  misc_RNA (1)...(19): siRNA sense strand
gaaccaacaaauauggaga

SEQ ID NO: 2263417 - RNA, 19 nt, Homo sapiens
  misc_RNA (1)...(19): siRNA sense strand
guggaaugcaagauuacaa

SEQ ID NO: 2263418 - RNA, 19 nt, Homo sapiens
  misc_RNA (1)...(19): siRNA sense strand
ccaacaugaagaaaggaga

SEQ ID NO: 2263419 - RNA, 19 nt, Homo sapiens
  misc_RNA (1)...(19): siRNA sense strand
aggaagggauggaagcguu

SEQ ID NO: 2263420 - RNA, 19 nt, Homo sapiens
  misc_RNA (1)...(19): siRNA sense strand
uuugaagacuguugcccaa

SEQ ID NO: 2263421 - RNA, 19 nt, Homo sapiens
  misc_RNA (1)...(19): siRNA sense strand
gggaaaauuauaaccagua

SEQ ID NO: 2263422 - RNA, 19 nt, Homo sapiens
  misc_RNA (1)...(19): siRNA sense strand
ggcaaauaugcauggagau

SEQ ID NO: 2263423 - RNA, 19 nt, Homo sapiens
  misc_RNA (1)...(19): siRNA sense strand
cccuauagaaccaacaaau

SEQ ID NO: 2263424 - RNA, 19 nt, Homo sapiens
  misc_RNA (1)...(19): siRNA sense strand
ggaaaucugugaaagguag

SEQ ID NO: 2263425 - RNA, 19 nt, Homo sapiens
  misc_RNA (1)...(19): siRNA sense strand
ccaacaaauauggagagua

SEQ ID NO: 2263426 - RNA, 19 nt, Homo sapiens
  misc_RNA (1)...(19): siRNA sense strand
cguacauccuugugggaga

SEQ ID NO: 2263427 - RNA, 19 nt, Homo sapiens
  misc_RNA (1)...(19): siRNA sense strand
acuacaaggacaugggcaa

SEQ ID NO: 2263428 - RNA, 19 nt, Homo sapiens
  misc_RNA (1)...(19): siRNA sense strand
caugaagcucuuagacaaa

SEQ ID NO: 2263429 - RNA, 19 nt, Homo sapiens
  misc_RNA (1)...(19): siRNA sense strand
cuacaaauuacgugagcga

SEQ ID NO: 2263430 - RNA, 19 nt, Homo sapiens
  misc_RNA (1)...(19): siRNA sense strand
auucguagccuuugguaaa

SEQ ID NO: 2263431 - RNA, 19 nt, Homo sapiens
  misc_RNA (1)...(19): siRNA sense strand
cguuaggaauaauugcaaa

SEQ ID NO: 2263432 - RNA, 19 nt, Homo sapiens
  misc_RNA (1)...(19): siRNA sense strand
ccggauacgucaauggaca

SEQ ID NO: 2263433 - RNA, 19 nt, Homo sapiens
  misc_RNA (1)...(19): siRNA sense strand
cagugguauuugaaguuaa

SEQ ID NO: 2263434 - RNA, 19 nt, Homo sapiens
  misc_RNA (1)...(19): siRNA sense strand
uuaaaauccuggugggcua

SEQ ID NO: 2263435 - RNA, 19 nt, Homo sapiens
  misc_RNA (1)...(19): siRNA sense strand
gcgacuggugggaggagua

SEQ ID NO: 2263436 - RNA, 19 nt, Homo sapiens
  misc_RNA (1)...(19): siRNA sense strand
ggagaauaacccagaguac

SEQ ID NO: 2263437 - RNA, 19 nt, Homo sapiens
  misc_RNA (1)...(19): siRNA sense strand
cuauuuuggacgugggaaa

SEQ ID NO: 2263438 - RNA, 19 nt, Homo sapiens
  misc_RNA (1)...(19): siRNA sense strand
augaaacugaagaaggaua

SEQ ID NO: 2263439 - RNA, 19 nt, Homo sapiens
  misc_RNA (1)...(19): siRNA sense strand
accaagaucuggaugggua

SEQ ID NO: 2263440 - RNA, 19 nt, Homo sapiens
  misc_RNA (1)...(19): siRNA sense strand
ccaagauuacagugguauu

SEQ ID NO: 2263441 - RNA, 19 nt, Homo sapiens
  misc_RNA (1)...(19): siRNA sense strand
ucuugaugcuguggagaaa

SEQ ID NO: 2263442 - RNA, 19 nt, Homo sapiens
  misc_RNA (1)...(19): siRNA sense strand
guuagaugaaacugaagaa

SEQ ID NO: 2263443 - RNA, 19 nt, Homo sapiens
  misc_RNA (1)...(19): siRNA sense strand
ugacaacgauguacgccaa

SEQ ID NO: 2263444 - RNA, 19 nt, Homo sapiens
  misc_RNA (1)...(19): siRNA sense strand
ugucaagagguuauagaga

SEQ ID NO: 2263445 - RNA, 19 nt, Homo sapiens
  misc_RNA (1)...(19): siRNA sense strand
acaaauuacgugagcgacu

SEQ ID NO: 2263446 - RNA, 19 nt, Homo sapiens
  misc_RNA (1)...(19): siRNA sense strand
gggagauggagcagcagau

SEQ ID NO: 2263447 - RNA, 19 nt, Homo sapiens
  misc_RNA (1)...(19): siRNA sense strand
ccauccagcacaugagaga

SEQ ID NO: 2263448 - RNA, 19 nt, Homo sapiens
  misc_RNA (1)...(19): siRNA sense strand
gggauugaccugcggcuga

SEQ ID NO: 2263449 - RNA, 19 nt, Homo sapiens
  misc_RNA (1)...(19): siRNA sense strand
cagugggagcggauguuua

SEQ ID NO: 2263450 - RNA, 19 nt, Homo sapiens
  misc_RNA (1)...(19): siRNA sense strand
ccaagaucuggauggguau

SEQ ID NO: 2263451 - RNA, 19 nt, Homo sapiens
  misc_RNA (1)...(19): siRNA sense strand
agaaggauacagaagugaa

SEQ ID NO: 2263452 - RNA, 19 nt, Homo sapiens
  misc_RNA (1)...(19): siRNA sense strand
ugcagaggauccuggacaa

SEQ ID NO: 2263453 - RNA, 19 nt, Homo sapiens
  misc_RNA (1)...(19): siRNA sense strand
cauucguagccuuugguaa

SEQ ID NO: 2263454 - RNA, 19 nt, Homo sapiens
  misc_RNA (1)...(19): siRNA sense strand
gggcagaugcgcagaucgu

SEQ ID NO: 2263455 - RNA, 19 nt, Homo sapiens
  misc_RNA (1)...(19): siRNA sense strand
cuguuugacuuggagaaua

SEQ ID NO: 2263456 - RNA, 19 nt, Homo sapiens
  misc_RNA (1)...(19): siRNA sense strand
uuaugaaggaagaagacuu

SEQ ID NO: 2263457 - RNA, 19 nt, Homo sapiens
  misc_RNA (1)...(19): siRNA sense strand
cgcucauggugaacagcaa

SEQ ID NO: 2263458 - RNA, 19 nt, Homo sapiens
  misc_RNA (1)...(19): siRNA sense strand
gagaggagacagacaccau

SEQ ID NO: 2263459 - RNA, 19 nt, Homo sapiens
  misc_RNA (1)...(19): siRNA sense strand
gcucugggaucgaucguca

SEQ ID NO: 2263460 - RNA, 19 nt, Homo sapiens
  misc_RNA (1)...(19): siRNA sense strand
uuggaaggcaccugaaaga

SEQ ID NO: 2263461 - RNA, 19 nt, Homo sapiens
  misc_RNA (1)...(19): siRNA sense strand
cugcaaaggcgacaucaau

SEQ ID NO: 2263462 - RNA, 19 nt, Homo sapiens
  misc_RNA (1)...(19): siRNA sense strand
cuaaauaucucgcugugga

SEQ ID NO: 2263463 - RNA, 19 nt, Homo sapiens
  misc_RNA (1)...(19): siRNA sense strand
caaacuggaccgggaggaa

SEQ ID NO: 2263464 - RNA, 19 nt, Homo sapiens
  misc_RNA (1)...(19): siRNA sense strand
agaauaacccagaguacgu

SEQ ID NO: 2263465 - RNA, 19 nt, Homo sapiens
  misc_RNA (1)...(19): siRNA sense strand
gggaggaguuugaggagca

SEQ ID NO: 2263466 - RNA, 19 nt, Homo sapiens
  misc_RNA (1)...(19): siRNA sense strand
gugaaaugggagagugaga

SEQ ID NO: 2263467 - RNA, 19 nt, Homo sapiens
  misc_RNA (1)...(19): siRNA sense strand
ggaccagagaacugaccaa

SEQ ID NO: 2263468 - RNA, 19 nt, Homo sapiens
  misc_RNA (1)...(19): siRNA sense strand
uggugaaaugggagaguga

SEQ ID NO: 2263469 - RNA, 19 nt, Homo sapiens
  misc_RNA (1)...(19): siRNA sense strand
cccaagaccucguggacca

SEQ ID NO: 2263470 - RNA, 19 nt, Homo sapiens
  misc_RNA (1)...(19): siRNA sense strand
cuguaagagccuggugaaa

SEQ ID NO: 2263471 - RNA, 19 nt, Homo sapiens
  misc_RNA (1)...(19): siRNA sense strand
gagauuaacuucaagguug

SEQ ID NO: 2263472 - RNA, 19 nt, Homo sapiens
  misc_RNA (1)...(19): siRNA sense strand
ccuguaagagccuggugaa

SEQ ID NO: 2263473 - RNA, 19 nt, Homo sapiens
  misc_RNA (1)...(19): siRNA sense strand
caguacagucagaagcaaa

SEQ ID NO: 2263474 - RNA, 19 nt, Homo sapiens
  misc_RNA (1)...(19): siRNA sense strand
aguucugacucaaguguaa

SEQ ID NO: 2263475 - RNA, 19 nt, Homo sapiens
  misc_RNA (1)...(19): siRNA sense strand
acgaagauccugaugaaaa

SEQ ID NO: 2263476 - RNA, 19 nt, Homo sapiens
  misc_RNA (1)...(19): siRNA sense strand
gcugagaaaugaaguggca

SEQ ID NO: 2263477 - RNA, 19 nt, Homo sapiens
  misc_RNA (1)...(19): siRNA sense strand
ugagaaaugaaguggcaca

SEQ ID NO: 2263478 - RNA, 19 nt, Homo sapiens
  misc_RNA (1)...(19): siRNA sense strand
aggaaguaccauuggcaca

SEQ ID NO: 2263479 - RNA, 19 nt, Homo sapiens
  misc_RNA (1)...(19): siRNA sense strand
ggaccagaguacagagccu

SEQ ID NO: 2263480 - RNA, 19 nt, Homo sapiens
  misc_RNA (1)...(19): siRNA sense strand
aauacaaggaccuguggaa

SEQ ID NO: 2263481 - RNA, 19 nt, Homo sapiens
  misc_RNA (1)...(19): siRNA sense strand
acugugaagaaguggguuu

SEQ ID NO: 2263482 - RNA, 19 nt, Homo sapiens
  misc_RNA (1)...(19): siRNA sense strand
acaucuuccuaauggacaa

SEQ ID NO: 2263483 - RNA, 19 nt, Homo sapiens
  misc_RNA (1)...(19): siRNA sense strand
aagucacccugcugagaaa

SEQ ID NO: 2263484 - RNA, 19 nt, Homo sapiens
  misc_RNA (1)...(19): siRNA sense strand
gcaucaauuacaaguucua

SEQ ID NO: 2263485 - RNA, 19 nt, Homo sapiens
  misc_RNA (1)...(19): siRNA sense strand
gguucagucuuuagagaag

SEQ ID NO: 2263486 - RNA, 19 nt, Homo sapiens
  misc_RNA (1)...(19): siRNA sense strand
ggcagaagcuguagccacu

SEQ ID NO: 2263487 - RNA, 19 nt, Homo sapiens
  misc_RNA (1)...(19): siRNA sense strand
gccacauccacuacagaaa

SEQ ID NO: 2263488 - RNA, 19 nt, Homo sapiens
  misc_RNA (1)...(19): siRNA sense strand
ugauaguucagaagacauu

SEQ ID NO: 2263489 - RNA, 19 nt, Homo sapiens
  misc_RNA (1)...(19): siRNA sense strand
augagaugacacugaaauu

SEQ ID NO: 2263490 - RNA, 19 nt, Homo sapiens
  misc_RNA (1)...(19): siRNA sense strand
gaaauuugguccagcacgu

SEQ ID NO: 2263491 - RNA, 19 nt, Homo sapiens
  misc_RNA (1)...(19): siRNA sense strand
ggcgaguccauuugagaau

SEQ ID NO: 2263492 - RNA, 19 nt, Homo sapiens
  misc_RNA (1)...(19): siRNA sense strand
ggguucagucuuuagagaa

SEQ ID NO: 2263493 - RNA, 19 nt, Homo sapiens
  misc_RNA (1)...(19): siRNA sense strand
ugucaaaggucaugguagc

SEQ ID NO: 2263494 - RNA, 19 nt, Homo sapiens
  misc_RNA (1)...(19): siRNA sense strand
acaaguggucgucggagaa

SEQ ID NO: 2263495 - RNA, 19 nt, Homo sapiens
  misc_RNA (1)...(19): siRNA sense strand
ccaaaguacaaguggucgu

SEQ ID NO: 2263496 - RNA, 19 nt, Homo sapiens
  misc_RNA (1)...(19): siRNA sense strand
caucauuacagguucccaa

SEQ ID NO: 2263497 - RNA, 19 nt, Homo sapiens
  misc_RNA (1)...(19): siRNA sense strand
augaaguggcacagcugaa

SEQ ID NO: 2263498 - RNA, 19 nt, Homo sapiens
  misc_RNA (1)...(19): siRNA sense strand
cugauaaagaugauaguuc

SEQ ID NO: 2263499 - RNA, 19 nt, Homo sapiens
  misc_RNA (1)...(19): siRNA sense strand
uacaaguggucgucggaga

SEQ ID NO: 2263500 - RNA, 19 nt, Homo sapiens
  misc_RNA (1)...(19): siRNA sense strand
agagcgaaauagagcagca

SEQ ID NO: 2263501 - RNA, 19 nt, Homo sapiens
  misc_RNA (1)...(19): siRNA sense strand
gcgaaauagagcagcagcu

SEQ ID NO: 2263502 - RNA, 19 nt, Homo sapiens
  misc_RNA (1)...(19): siRNA sense strand
ggucuuagcaggaggagca

SEQ ID NO: 2263503 - RNA, 19 nt, Homo sapiens
  misc_RNA (1)...(19): siRNA sense strand
uggaaaacccaaauggaaa

SEQ ID NO: 2263504 - RNA, 19 nt, Homo sapiens
  misc_RNA (1)...(19): siRNA sense strand
cagcagguugcgagggaau

SEQ ID NO: 2263505 - RNA, 19 nt, Homo sapiens
  misc_RNA (1)...(19): siRNA sense strand
aguccaugaaccaggaaau

SEQ ID NO: 2263506 - RNA, 19 nt, Homo sapiens
  misc_RNA (1)...(19): siRNA sense strand
ccauaaagacagaccccaa

SEQ ID NO: 2263507 - RNA, 19 nt, Homo sapiens
  misc_RNA (1)...(19): siRNA sense strand
aggaggagcaucagaucuu

SEQ ID NO: 2263508 - RNA, 19 nt, Homo sapiens
  misc_RNA (1)...(19): siRNA sense strand
uggaaacaguaucggggaa

SEQ ID NO: 2263509 - RNA, 19 nt, Homo sapiens
  misc_RNA (1)...(19): siRNA sense strand
gagccguacgagcuggaaa

SEQ ID NO: 2263510 - RNA, 19 nt, Homo sapiens
  misc_RNA (1)...(19): siRNA sense strand
aaguuaagguguugggaga

SEQ ID NO: 2263511 - RNA, 19 nt, Homo sapiens
  misc_RNA (1)...(19): siRNA sense strand
ugugaauggaccaaggaaa

SEQ ID NO: 2263512 - RNA, 19 nt, Homo sapiens
  misc_RNA (1)...(19): siRNA sense strand
cugucaaccuggaugugaa

SEQ ID NO: 2263513 - RNA, 19 nt, Homo sapiens
  misc_RNA (1)...(19): siRNA sense strand
gagaugugauugaggugca

SEQ ID NO: 2263514 - RNA, 19 nt, Homo sapiens
  misc_RNA (1)...(19): siRNA sense strand
gauugaggugcauggaaaa

SEQ ID NO: 2263515 - RNA, 19 nt, Homo sapiens
  misc_RNA (1)...(19): siRNA sense strand
aagagaacuuccugggcaa

SEQ ID NO: 2263516 - RNA, 19 nt, Homo sapiens
  misc_RNA (1)...(19): siRNA sense strand
ggaagauggugguguggga

SEQ ID NO: 2263517 - RNA, 19 nt, Homo sapiens
  misc_RNA (1)...(19): siRNA sense strand
gggcaagaaaggagagcug

SEQ ID NO: 2263518 - RNA, 19 nt, Homo sapiens
  misc_RNA (1)...(19): siRNA sense strand
agaaaggagagcugagcga

SEQ ID NO: 2263519 - RNA, 19 nt, Homo sapiens
  misc_RNA (1)...(19): siRNA sense strand
gcacaaagucagcgggacc

SEQ ID NO: 2263520 - RNA, 19 nt, Homo sapiens
  misc_RNA (1)...(19): siRNA sense strand
augggaaggcaaugaagua

SEQ ID NO: 2263521 - RNA, 19 nt, Homo sapiens
  misc_RNA (1)...(19): siRNA sense strand
ccuuccaggugcagagcau

SEQ ID NO: 2263522 - RNA, 19 nt, Homo sapiens
  misc_RNA (1)...(19): siRNA sense strand
gcucccaguuuccgggcua

SEQ ID NO: 2263523 - RNA, 19 nt, Homo sapiens
  misc_RNA (1)...(19): siRNA sense strand
cauucuggaacgaggcgaa

SEQ ID NO: 2263524 - RNA, 19 nt, Homo sapiens
  misc_RNA (1)...(19): siRNA sense strand
caccgugacucgaggcuga

SEQ ID NO: 2263525 - RNA, 19 nt, Homo sapiens
  misc_RNA (1)...(19): siRNA sense strand
gggccaacuucaagggcaa

SEQ ID NO: 2263526 - RNA, 19 nt, Homo sapiens
  misc_RNA (1)...(19): siRNA sense strand
ggaacugccuccugggaac

SEQ ID NO: 2263527 - RNA, 19 nt, Homo sapiens
  misc_RNA (1)...(19): siRNA sense strand
acuacaggcugguggucuu

SEQ ID NO: 2263528 - RNA, 19 nt, Homo sapiens
  misc_RNA (1)...(19): siRNA sense strand
gcacagaaagcuacgacua

SEQ ID NO: 2263529 - RNA, 19 nt, Homo sapiens
  misc_RNA (1)...(19): siRNA sense strand
cagaaagcuacgacuaaua

SEQ ID NO: 2263530 - RNA, 19 nt, Homo sapiens
  misc_RNA (1)...(19): siRNA sense strand
ccuuggauuuccuggacaa

SEQ ID NO: 2263531 - RNA, 19 nt, Homo sapiens
  misc_RNA (1)...(19): siRNA sense strand
agaagaaaauuaagcguga

SEQ ID NO: 2263532 - RNA, 19 nt, Homo sapiens
  misc_RNA (1)...(19): siRNA sense strand
caauuguaccagacguuaa

SEQ ID NO: 2263533 - RNA, 19 nt, Homo sapiens
  misc_RNA (1)...(19): siRNA sense strand
gugaaguauuugaagccau

SEQ ID NO: 2263534 - RNA, 19 nt, Homo sapiens
  misc_RNA (1)...(19): siRNA sense strand
cguuaacagacuaugauau

SEQ ID NO: 2263535 - RNA, 19 nt, Homo sapiens
  misc_RNA (1)...(19): siRNA sense strand
cacagaaagcuacgacuaa

SEQ ID NO: 2263536 - RNA, 19 nt, Homo sapiens
  misc_RNA (1)...(19): siRNA sense strand
uucugaaggcccuggauua

SEQ ID NO: 2263537 - RNA, 19 nt, Homo sapiens
  misc_RNA (1)...(19): siRNA sense strand
caaguaugaucuuucggaa

SEQ ID NO: 2263538 - RNA, 19 nt, Homo sapiens
  misc_RNA (1)...(19): siRNA sense strand
augaucaguuggugaggau

SEQ ID NO: 2263539 - RNA, 19 nt, Homo sapiens
  misc_RNA (1)...(19): siRNA sense strand
ggacaugacaauuaugauc

SEQ ID NO: 2263540 - RNA, 19 nt, Homo sapiens
  misc_RNA (1)...(19): siRNA sense strand
uguaaaagacccuguguca

SEQ ID NO: 2263541 - RNA, 19 nt, Homo sapiens
  misc_RNA (1)...(19): siRNA sense strand
ucaugagcacagaaagcua

SEQ ID NO: 2263542 - RNA, 19 nt, Homo sapiens
  misc_RNA (1)...(19): siRNA sense strand
ccaagaauauaauguccga

SEQ ID NO: 2263543 - RNA, 19 nt, Homo sapiens
  misc_RNA (1)...(19): siRNA sense strand
gcacagaaagcuacgacua

SEQ ID NO: 2263544 - RNA, 19 nt, Homo sapiens
  misc_RNA (1)...(19): siRNA sense strand
cagaaagcuacgacuaaua

SEQ ID NO: 2263545 - RNA, 19 nt, Homo sapiens
  misc_RNA (1)...(19): siRNA sense strand
ccuuggauuuccuggacaa

SEQ ID NO: 2263546 - RNA, 19 nt, Homo sapiens
  misc_RNA (1)...(19): siRNA sense strand
agaagaaaauuaagcguga

SEQ ID NO: 2263547 - RNA, 19 nt, Homo sapiens
  misc_RNA (1)...(19): siRNA sense strand
caauuguaccagacguuaa

SEQ ID NO: 2263548 - RNA, 19 nt, Homo sapiens
  misc_RNA (1)...(19): siRNA sense strand
gugaaguauuugaagccau

SEQ ID NO: 2263549 - RNA, 19 nt, Homo sapiens
  misc_RNA (1)...(19): siRNA sense strand
cguuaacagacuaugauau

SEQ ID NO: 2263550 - RNA, 19 nt, Homo sapiens
  misc_RNA (1)...(19): siRNA sense strand
cacagaaagcuacgacuaa

SEQ ID NO: 2263551 - RNA, 19 nt, Homo sapiens
  misc_RNA (1)...(19): siRNA sense strand
uucugaaggcccuggauua

SEQ ID NO: 2263552 - RNA, 19 nt, Homo sapiens
  misc_RNA (1)...(19): siRNA sense strand
caaguaugaucuuucggaa

SEQ ID NO: 2263553 - RNA, 19 nt, Homo sapiens
  misc_RNA (1)...(19): siRNA sense strand
augaucaguuggugaggau

SEQ ID NO: 2263554 - RNA, 19 nt, Homo sapiens
  misc_RNA (1)...(19): siRNA sense strand
ggacaugacaauuaugauc

SEQ ID NO: 2263555 - RNA, 19 nt, Homo sapiens
  misc_RNA (1)...(19): siRNA sense strand
uguaaaagacccuguguca

SEQ ID NO: 2263556 - RNA, 19 nt, Homo sapiens
  misc_RNA (1)...(19): siRNA sense strand
ucaugagcacagaaagcua

SEQ ID NO: 2263557 - RNA, 19 nt, Homo sapiens
  misc_RNA (1)...(19): siRNA sense strand
ccaagaauauaauguccga

SEQ ID NO: 2263558 - RNA, 19 nt, Homo sapiens
  misc_RNA (1)...(19): siRNA sense strand
gcacagaaagcuacgacua

SEQ ID NO: 2263559 - RNA, 19 nt, Homo sapiens
  misc_RNA (1)...(19): siRNA sense strand
cagaaagcuacgacuaaua

SEQ ID NO: 2263560 - RNA, 19 nt, Homo sapiens
  misc_RNA (1)...(19): siRNA sense strand
ccuuggauuuccuggacaa

SEQ ID NO: 2263561 - RNA, 19 nt, Homo sapiens
  misc_RNA (1)...(19): siRNA sense strand
cacagaaagcuacgacuaa

SEQ ID NO: 2263562 - RNA, 19 nt, Homo sapiens
  misc_RNA (1)...(19): siRNA sense strand
uucugaaggcccuggauua

SEQ ID NO: 2263563 - RNA, 19 nt, Homo sapiens
  misc_RNA (1)...(19): siRNA sense strand
caaguaugaucuuucggaa

SEQ ID NO: 2263564 - RNA, 19 nt, Homo sapiens
  misc_RNA (1)...(19): siRNA sense strand
augaucaguuggugaggau

SEQ ID NO: 2263565 - RNA, 19 nt, Homo sapiens
  misc_RNA (1)...(19): siRNA sense strand
ggacaugacaauuaugauc

SEQ ID NO: 2263566 - RNA, 19 nt, Homo sapiens
  misc_RNA (1)...(19): siRNA sense strand
ucaugagcacagaaagcua

SEQ ID NO: 2263567 - RNA, 19 nt, Homo sapiens
  misc_RNA (1)...(19): siRNA sense strand
ccaagaauauaauguccga

SEQ ID NO: 2263568 - RNA, 19 nt, Homo sapiens
  misc_RNA (1)...(19): siRNA sense strand
ggagaaugguggaagagca

SEQ ID NO: 2263569 - RNA, 19 nt, Homo sapiens
  misc_RNA (1)...(19): siRNA sense strand
gugcaugacgggagcgaga

SEQ ID NO: 2263570 - RNA, 19 nt, Homo sapiens
  misc_RNA (1)...(19): siRNA sense strand
ggcuggaggaggaggagua

SEQ ID NO: 2263571 - RNA, 19 nt, Homo sapiens
  misc_RNA (1)...(19): siRNA sense strand
uggacauauuugagggcca

SEQ ID NO: 2263572 - RNA, 19 nt, Homo sapiens
  misc_RNA (1)...(19): siRNA sense strand
cuacagacgacguggccuu

SEQ ID NO: 2263573 - RNA, 19 nt, Homo sapiens
  misc_RNA (1)...(19): siRNA sense strand
aggaggaguaugaggacga

SEQ ID NO: 2263574 - RNA, 19 nt, Homo sapiens
  misc_RNA (1)...(19): siRNA sense strand
aaacauaccuccugcccau

SEQ ID NO: 2263575 - RNA, 19 nt, Homo sapiens
  misc_RNA (1)...(19): siRNA sense strand
cgcugaaggugguggccau

SEQ ID NO: 2263576 - RNA, 19 nt, Homo sapiens
  misc_RNA (1)...(19): siRNA sense strand
ggacgaugccuauggccau

SEQ ID NO: 2263577 - RNA, 19 nt, Homo sapiens
  misc_RNA (1)...(19): siRNA sense strand
cuuacgacaccguggagaa

SEQ ID NO: 2263578 - RNA, 19 nt, Homo sapiens
  misc_RNA (1)...(19): siRNA sense strand
ucacucaggcagaggucua

SEQ ID NO: 2263579 - RNA, 19 nt, Homo sapiens
  misc_RNA (1)...(19): siRNA sense strand
gaacaaaggucucuggguc

SEQ ID NO: 2263580 - RNA, 19 nt, Homo sapiens
  misc_RNA (1)...(19): siRNA sense strand
aguaugaggacgaugccua

SEQ ID NO: 2263581 - RNA, 19 nt, Homo sapiens
  misc_RNA (1)...(19): siRNA sense strand
ccgaagacaccauggccuu

SEQ ID NO: 2263582 - RNA, 19 nt, Homo sapiens
  misc_RNA (1)...(19): siRNA sense strand
ggaauauucuguaugagca

SEQ ID NO: 2263583 - RNA, 19 nt, Homo sapiens
  misc_RNA (1)...(19): siRNA sense strand
cggugagggauguaaauga

SEQ ID NO: 2263584 - RNA, 19 nt, Homo sapiens
  misc_RNA (1)...(19): siRNA sense strand
gaauauucuguaugagcau

SEQ ID NO: 2263585 - RNA, 19 nt, Homo sapiens
  misc_RNA (1)...(19): siRNA sense strand
ugucaaugcaucagccgua

SEQ ID NO: 2263586 - RNA, 19 nt, Homo sapiens
  misc_RNA (1)...(19): siRNA sense strand
uggaaaucuccguggacca

SEQ ID NO: 2263587 - RNA, 19 nt, Homo sapiens
  misc_RNA (1)...(19): siRNA sense strand
ugucagauggccagggcuu

SEQ ID NO: 2263588 - RNA, 19 nt, Homo sapiens
  misc_RNA (1)...(19): siRNA sense strand
ugagcuuccuugaggccaa

SEQ ID NO: 2263589 - RNA, 19 nt, Homo sapiens
  misc_RNA (1)...(19): siRNA sense strand
gccaacauguucagcguca

SEQ ID NO: 2263590 - RNA, 19 nt, Homo sapiens
  misc_RNA (1)...(19): siRNA sense strand
agauugaguacgaggucca

SEQ ID NO: 2263591 - RNA, 19 nt, Homo sapiens
  misc_RNA (1)...(19): siRNA sense strand
ucauggugauccuggaaca

SEQ ID NO: 2263592 - RNA, 19 nt, Homo sapiens
  misc_RNA (1)...(19): siRNA sense strand
cagaacacccagcaggaga

SEQ ID NO: 2263593 - RNA, 19 nt, Homo sapiens
  misc_RNA (1)...(19): siRNA sense strand
gcacugacccacagcacca

SEQ ID NO: 2263594 - RNA, 19 nt, Homo sapiens
  misc_RNA (1)...(19): siRNA sense strand
acaagugaccauugcccua

SEQ ID NO: 2263595 - RNA, 19 nt, Homo sapiens
  misc_RNA (1)...(19): siRNA sense strand
aaggaggagaauaggauaa

SEQ ID NO: 2263596 - RNA, 19 nt, Homo sapiens
  misc_RNA (1)...(19): siRNA sense strand
guaccaagucccagcccaa

SEQ ID NO: 2263597 - RNA, 19 nt, Homo sapiens
  misc_RNA (1)...(19): siRNA sense strand
acagaaugucccuggugaa

SEQ ID NO: 2263598 - RNA, 19 nt, Homo sapiens
  misc_RNA (1)...(19): siRNA sense strand
ccaucagcgaguacaacaa

SEQ ID NO: 2263599 - RNA, 19 nt, Homo sapiens
  misc_RNA (1)...(19): siRNA sense strand
gcaccaagucccagcccaa

SEQ ID NO: 2263600 - RNA, 19 nt, Homo sapiens
  misc_RNA (1)...(19): siRNA sense strand
ccuucaaugaccagccaaa

SEQ ID NO: 2263601 - RNA, 19 nt, Homo sapiens
  misc_RNA (1)...(19): siRNA sense strand
aguacaacaaggucauuaa

SEQ ID NO: 2263602 - RNA, 19 nt, Homo sapiens
  misc_RNA (1)...(19): siRNA sense strand
gcgaguacaacaaggucau

SEQ ID NO: 2263603 - RNA, 19 nt, Homo sapiens
  misc_RNA (1)...(19): siRNA sense strand
gccaaaacugaaagaggaa

SEQ ID NO: 2263604 - RNA, 19 nt, Homo sapiens
  misc_RNA (1)...(19): siRNA sense strand
ccaucagcgaguacaacaa

SEQ ID NO: 2263605 - RNA, 19 nt, Homo sapiens
  misc_RNA (1)...(19): siRNA sense strand
caaaacugaaagaggaaga

SEQ ID NO: 2263606 - RNA, 19 nt, Homo sapiens
  misc_RNA (1)...(19): siRNA sense strand
ggucgaaccacaugcacca

SEQ ID NO: 2263607 - RNA, 19 nt, Homo sapiens
  misc_RNA (1)...(19): siRNA sense strand
aagaagagcccgugcgcua

SEQ ID NO: 2263608 - RNA, 19 nt, Homo sapiens
  misc_RNA (1)...(19): siRNA sense strand
ccagaauaguguucgggaa

SEQ ID NO: 2263609 - RNA, 19 nt, Homo sapiens
  misc_RNA (1)...(19): siRNA sense strand
gccaagauguugaaggaga

SEQ ID NO: 2263610 - RNA, 19 nt, Homo sapiens
  misc_RNA (1)...(19): siRNA sense strand
cguuaauaccuguagauga

SEQ ID NO: 2263611 - RNA, 19 nt, Homo sapiens
  misc_RNA (1)...(19): siRNA sense strand
ugaggaaacucuauggaga

SEQ ID NO: 2263612 - RNA, 19 nt, Homo sapiens
  misc_RNA (1)...(19): siRNA sense strand
aggagugggugaugagaca

SEQ ID NO: 2263613 - RNA, 19 nt, Homo sapiens
  misc_RNA (1)...(19): siRNA sense strand
acuuagaggacuugggcuu

SEQ ID NO: 2263614 - RNA, 19 nt, Homo sapiens
  misc_RNA (1)...(19): siRNA sense strand
caagaaacgugcugggaug

SEQ ID NO: 2263615 - RNA, 19 nt, Homo sapiens
  misc_RNA (1)...(19): siRNA sense strand
cagaaaggcugcaggcucu

SEQ ID NO: 2263616 - RNA, 19 nt, Homo sapiens
  misc_RNA (1)...(19): siRNA sense strand
acgcagacuacuuggaaga

SEQ ID NO: 2263617 - RNA, 19 nt, Homo sapiens
  misc_RNA (1)...(19): siRNA sense strand
agauguugaaggagagaga

SEQ ID NO: 2263618 - RNA, 19 nt, Homo sapiens
  misc_RNA (1)...(19): siRNA sense strand
aggcugggcaagaggagaa

SEQ ID NO: 2263619 - RNA, 19 nt, Homo sapiens
  misc_RNA (1)...(19): siRNA sense strand
auguugaaggagagagaau

SEQ ID NO: 2263620 - RNA, 19 nt, Homo sapiens
  misc_RNA (1)...(19): siRNA sense strand
ucgaggaacagaaggaaaa

SEQ ID NO: 2263621 - RNA, 19 nt, Homo sapiens
  misc_RNA (1)...(19): siRNA sense strand
gaaccaugaggcugggcaa

SEQ ID NO: 2263622 - RNA, 19 nt, Homo sapiens
  misc_RNA (1)...(19): siRNA sense strand
gcuugaaguuuguuggcca

SEQ ID NO: 2263623 - RNA, 19 nt, Homo sapiens
  misc_RNA (1)...(19): siRNA sense strand
caucagugaaggagaaaau

SEQ ID NO: 2263624 - RNA, 19 nt, Homo sapiens
  misc_RNA (1)...(19): siRNA sense strand
cauuaacaaggaacggaaa

SEQ ID NO: 2263625 - RNA, 19 nt, Homo sapiens
  misc_RNA (1)...(19): siRNA sense strand
aaggagagagaauggaaau

SEQ ID NO: 2263626 - RNA, 19 nt, Homo sapiens
  misc_RNA (1)...(19): siRNA sense strand
ggauuugguguucgaggaa

SEQ ID NO: 2263627 - RNA, 19 nt, Homo sapiens
  misc_RNA (1)...(19): siRNA sense strand
accacaaauuggaaaucaa

SEQ ID NO: 2263628 - RNA, 19 nt, Homo sapiens
  misc_RNA (1)...(19): siRNA sense strand
guacauagauucugcggac

SEQ ID NO: 2263629 - RNA, 19 nt, Homo sapiens
  misc_RNA (1)...(19): siRNA sense strand
cuugaaguuuguuggccaa

SEQ ID NO: 2263630 - RNA, 19 nt, Homo sapiens
  misc_RNA (1)...(19): siRNA sense strand
gcuggaugaugguggggaa

SEQ ID NO: 2263631 - RNA, 19 nt, Homo sapiens
  misc_RNA (1)...(19): siRNA sense strand
ucgggaacuuagaggacuu

SEQ ID NO: 2263632 - RNA, 19 nt, Homo sapiens
  misc_RNA (1)...(19): siRNA sense strand
acaaggaacggaaaggaga

SEQ ID NO: 2263633 - RNA, 19 nt, Homo sapiens
  misc_RNA (1)...(19): siRNA sense strand
ccuuguuguuagaggagca

SEQ ID NO: 2263634 - RNA, 19 nt, Homo sapiens
  misc_RNA (1)...(19): siRNA sense strand
ggaaagagauggcugacag

SEQ ID NO: 2263635 - RNA, 19 nt, Homo sapiens
  misc_RNA (1)...(19): siRNA sense strand
agggacaccuauagugaca

SEQ ID NO: 2263636 - RNA, 19 nt, Homo sapiens
  misc_RNA (1)...(19): siRNA sense strand
cugaaguuuccaucaauaa

SEQ ID NO: 2263637 - RNA, 19 nt, Homo sapiens
  misc_RNA (1)...(19): siRNA sense strand
ggugaugagacaggcguua

SEQ ID NO: 2263638 - RNA, 19 nt, Homo sapiens
  misc_RNA (1)...(19): siRNA sense strand
uauagugacaggaguggaa

SEQ ID NO: 2263639 - RNA, 19 nt, Homo sapiens
  misc_RNA (1)...(19): siRNA sense strand
acauagauucugcggacuu

SEQ ID NO: 2263640 - RNA, 19 nt, Homo sapiens
  misc_RNA (1)...(19): siRNA sense strand
ggaugaugguggggaagua

SEQ ID NO: 2263641 - RNA, 19 nt, Homo sapiens
  misc_RNA (1)...(19): siRNA sense strand
ucauuaacaaggaacggaa

SEQ ID NO: 2263642 - RNA, 19 nt, Homo sapiens
  misc_RNA (1)...(19): siRNA sense strand
gggcacaauacucaaguca

SEQ ID NO: 2263643 - RNA, 19 nt, Homo sapiens
  misc_RNA (1)...(19): siRNA sense strand
cugaaaucaccgaacugaa

SEQ ID NO: 2263644 - RNA, 19 nt, Homo sapiens
  misc_RNA (1)...(19): siRNA sense strand
uuguggaguuagaagauca

SEQ ID NO: 2263645 - RNA, 19 nt, Homo sapiens
  misc_RNA (1)...(19): siRNA sense strand
cuacauuaacauugaugca

SEQ ID NO: 2263646 - RNA, 19 nt, Homo sapiens
  misc_RNA (1)...(19): siRNA sense strand
caaggaacggaaaggagau

SEQ ID NO: 2263647 - RNA, 19 nt, Homo sapiens
  misc_RNA (1)...(19): siRNA sense strand
ugguguuauaucaggaauu

SEQ ID NO: 2263648 - RNA, 19 nt, Homo sapiens
  misc_RNA (1)...(19): siRNA sense strand
uagacaugccagaacacaa

SEQ ID NO: 2263649 - RNA, 19 nt, Homo sapiens
  misc_RNA (1)...(19): siRNA sense strand
cgaccuacaaacaggacaa

SEQ ID NO: 2263650 - RNA, 19 nt, Homo sapiens
  misc_RNA (1)...(19): siRNA sense strand
acaucauggccgagaucua

SEQ ID NO: 2263651 - RNA, 19 nt, Homo sapiens
  misc_RNA (1)...(19): siRNA sense strand
ccaucaaagagaucagaga

SEQ ID NO: 2263652 - RNA, 19 nt, Homo sapiens
  misc_RNA (1)...(19): siRNA sense strand
ccaauagcgagaaggacau

SEQ ID NO: 2263653 - RNA, 19 nt, Homo sapiens
  misc_RNA (1)...(19): siRNA sense strand
accgaucaguacugggaaa

SEQ ID NO: 2263654 - RNA, 19 nt, Homo sapiens
  misc_RNA (1)...(19): siRNA sense strand
uccaauagcgagaaggaca

SEQ ID NO: 2263655 - RNA, 19 nt, Homo sapiens
  misc_RNA (1)...(19): siRNA sense strand
ccuacaaacaggacaagca

SEQ ID NO: 2263656 - RNA, 19 nt, Homo sapiens
  misc_RNA (1)...(19): siRNA sense strand
cgaccuacaaacaggacaa

SEQ ID NO: 2263657 - RNA, 19 nt, Homo sapiens
  misc_RNA (1)...(19): siRNA sense strand
acaucauggccgagaucua

SEQ ID NO: 2263658 - RNA, 19 nt, Homo sapiens
  misc_RNA (1)...(19): siRNA sense strand
ccaucaaagagaucagaga

SEQ ID NO: 2263659 - RNA, 19 nt, Homo sapiens
  misc_RNA (1)...(19): siRNA sense strand
ccaauagcgagaaggacau

SEQ ID NO: 2263660 - RNA, 19 nt, Homo sapiens
  misc_RNA (1)...(19): siRNA sense strand
accgaucaguacugggaaa

SEQ ID NO: 2263661 - RNA, 19 nt, Homo sapiens
  misc_RNA (1)...(19): siRNA sense strand
uccaauagcgagaaggaca

SEQ ID NO: 2263662 - RNA, 19 nt, Homo sapiens
  misc_RNA (1)...(19): siRNA sense strand
ccuacaaacaggacaagca

SEQ ID NO: 2263663 - RNA, 19 nt, Homo sapiens
  misc_RNA (1)...(19): siRNA sense strand
cgaccuacaaacaggacaa

SEQ ID NO: 2263664 - RNA, 19 nt, Homo sapiens
  misc_RNA (1)...(19): siRNA sense strand
acaucauggccgagaucua

SEQ ID NO: 2263665 - RNA, 19 nt, Homo sapiens
  misc_RNA (1)...(19): siRNA sense strand
ccaucaaagagaucagaga

SEQ ID NO: 2263666 - RNA, 19 nt, Homo sapiens
  misc_RNA (1)...(19): siRNA sense strand
ccaauagcgagaaggacau

SEQ ID NO: 2263667 - RNA, 19 nt, Homo sapiens
  misc_RNA (1)...(19): siRNA sense strand
accgaucaguacugggaaa

SEQ ID NO: 2263668 - RNA, 19 nt, Homo sapiens
  misc_RNA (1)...(19): siRNA sense strand
uccaauagcgagaaggaca

SEQ ID NO: 2263669 - RNA, 19 nt, Homo sapiens
  misc_RNA (1)...(19): siRNA sense strand
ccuacaaacaggacaagca

SEQ ID NO: 2263670 - RNA, 19 nt, Homo sapiens
  misc_RNA (1)...(19): siRNA sense strand
cgaccuacaaacaggacaa

SEQ ID NO: 2263671 - RNA, 19 nt, Homo sapiens
  misc_RNA (1)...(19): siRNA sense strand
acaucauggccgagaucua

SEQ ID NO: 2263672 - RNA, 19 nt, Homo sapiens
  misc_RNA (1)...(19): siRNA sense strand
ccaucaaagagaucagaga

SEQ ID NO: 2263673 - RNA, 19 nt, Homo sapiens
  misc_RNA (1)...(19): siRNA sense strand
ccaauagcgagaaggacau

SEQ ID NO: 2263674 - RNA, 19 nt, Homo sapiens
  misc_RNA (1)...(19): siRNA sense strand
accgaucaguacugggaaa

SEQ ID NO: 2263675 - RNA, 19 nt, Homo sapiens
  misc_RNA (1)...(19): siRNA sense strand
uccaauagcgagaaggaca

SEQ ID NO: 2263676 - RNA, 19 nt, Homo sapiens
  misc_RNA (1)...(19): siRNA sense strand
ccuacaaacaggacaagca

SEQ ID NO: 2263677 - RNA, 19 nt, Homo sapiens
  misc_RNA (1)...(19): siRNA sense strand
cgaccuacaaacaggacaa

SEQ ID NO: 2263678 - RNA, 19 nt, Homo sapiens
  misc_RNA (1)...(19): siRNA sense strand
acaucauggccgagaucua

SEQ ID NO: 2263679 - RNA, 19 nt, Homo sapiens
  misc_RNA (1)...(19): siRNA sense strand
ccaucaaagagaucagaga

SEQ ID NO: 2263680 - RNA, 19 nt, Homo sapiens
  misc_RNA (1)...(19): siRNA sense strand
ccaauagcgagaaggacau

SEQ ID NO: 2263681 - RNA, 19 nt, Homo sapiens
  misc_RNA (1)...(19): siRNA sense strand
accgaucaguacugggaaa

SEQ ID NO: 2263682 - RNA, 19 nt, Homo sapiens
  misc_RNA (1)...(19): siRNA sense strand
uccaauagcgagaaggaca

SEQ ID NO: 2263683 - RNA, 19 nt, Homo sapiens
  misc_RNA (1)...(19): siRNA sense strand
ccuacaaacaggacaagca

SEQ ID NO: 2263684 - RNA, 19 nt, Homo sapiens
  misc_RNA (1)...(19): siRNA sense strand
gguuaugggaccacaagaa

SEQ ID NO: 2263685 - RNA, 19 nt, Homo sapiens
  misc_RNA (1)...(19): siRNA sense strand
guuaugggaccacaagaaa

SEQ ID NO: 2263686 - RNA, 19 nt, Homo sapiens
  misc_RNA (1)...(19): siRNA sense strand
cauaugaugaccuuggcaa

SEQ ID NO: 2263687 - RNA, 19 nt, Homo sapiens
  misc_RNA (1)...(19): siRNA sense strand
gguuaugggaccacaagaa

SEQ ID NO: 2263688 - RNA, 19 nt, Homo sapiens
  misc_RNA (1)...(19): siRNA sense strand
guuaugggaccacaagaaa

SEQ ID NO: 2263689 - RNA, 19 nt, Homo sapiens
  misc_RNA (1)...(19): siRNA sense strand
cauaugaugaccuuggcaa

SEQ ID NO: 2263690 - RNA, 19 nt, Homo sapiens
  misc_RNA (1)...(19): siRNA sense strand
cggaaaacugggaggcuua

SEQ ID NO: 2263691 - RNA, 19 nt, Homo sapiens
  misc_RNA (1)...(19): siRNA sense strand
aggaauacagggaagggaa

SEQ ID NO: 2263692 - RNA, 19 nt, Homo sapiens
  misc_RNA (1)...(19): siRNA sense strand
gaagaaggauggaggagag

SEQ ID NO: 2263693 - RNA, 19 nt, Homo sapiens
  misc_RNA (1)...(19): siRNA sense strand
cugugaagaaucaggguca

SEQ ID NO: 2263694 - RNA, 19 nt, Homo sapiens
  misc_RNA (1)...(19): siRNA sense strand
ccaugaacgccuuuggaga

SEQ ID NO: 2263695 - RNA, 19 nt, Homo sapiens
  misc_RNA (1)...(19): siRNA sense strand
uggccaaagaccggagaaa

SEQ ID NO: 2263696 - RNA, 19 nt, Homo sapiens
  misc_RNA (1)...(19): siRNA sense strand
uguggauuggagagagaaa

SEQ ID NO: 2263697 - RNA, 19 nt, Homo sapiens
  misc_RNA (1)...(19): siRNA sense strand
gggaauugccucagcuacu

SEQ ID NO: 2263698 - RNA, 19 nt, Homo sapiens
  misc_RNA (1)...(19): siRNA sense strand
auuugaaagcacagaauca

SEQ ID NO: 2263699 - RNA, 19 nt, Homo sapiens
  misc_RNA (1)...(19): siRNA sense strand
auaugaggcaacagaagaa

SEQ ID NO: 2263700 - RNA, 19 nt, Homo sapiens
  misc_RNA (1)...(19): siRNA sense strand
ucuguggauuggagagaga

SEQ ID NO: 2263701 - RNA, 19 nt, Homo sapiens
  misc_RNA (1)...(19): siRNA sense strand
auaaauauuggcuggugaa

SEQ ID NO: 2263702 - RNA, 19 nt, Homo sapiens
  misc_RNA (1)...(19): siRNA sense strand
aggcgaugcacaacagauu

SEQ ID NO: 2263703 - RNA, 19 nt, Homo sapiens
  misc_RNA (1)...(19): siRNA sense strand
acaacagauuauacggcau

SEQ ID NO: 2263704 - RNA, 19 nt, Homo sapiens
  misc_RNA (1)...(19): siRNA sense strand
ugggagaagaacaugaaga

SEQ ID NO: 2263705 - RNA, 19 nt, Homo sapiens
  misc_RNA (1)...(19): siRNA sense strand
cagugugggagaagaacau

SEQ ID NO: 2263706 - RNA, 19 nt, Homo sapiens
  misc_RNA (1)...(19): siRNA sense strand
aaucaggaauacagggaag

SEQ ID NO: 2263707 - RNA, 19 nt, Homo sapiens
  misc_RNA (1)...(19): siRNA sense strand
aggccuggacucugaggaa

SEQ ID NO: 2263708 - RNA, 19 nt, Homo sapiens
  misc_RNA (1)...(19): siRNA sense strand
gcaugaaugaagaaggaug

SEQ ID NO: 2263709 - RNA, 19 nt, Homo sapiens
  misc_RNA (1)...(19): siRNA sense strand
gcauuuauuuugagccaga

SEQ ID NO: 2263710 - RNA, 19 nt, Homo sapiens
  misc_RNA (1)...(19): siRNA sense strand
aggagagcagugugggaga

SEQ ID NO: 2263711 - RNA, 19 nt, Homo sapiens
  misc_RNA (1)...(19): siRNA sense strand
ggaggagagcaguguggga

SEQ ID NO: 2263712 - RNA, 19 nt, Homo sapiens
  misc_RNA (1)...(19): siRNA sense strand
gaagaauucaggcagguga

SEQ ID NO: 2263713 - RNA, 19 nt, Homo sapiens
  misc_RNA (1)...(19): siRNA sense strand
ugaagaaggauggaggaga

SEQ ID NO: 2263714 - RNA, 19 nt, Homo sapiens
  misc_RNA (1)...(19): siRNA sense strand
agaacaugaagaugauuga

SEQ ID NO: 2263715 - RNA, 19 nt, Homo sapiens
  misc_RNA (1)...(19): siRNA sense strand
cggaaaacugggaggcuua

SEQ ID NO: 2263716 - RNA, 19 nt, Homo sapiens
  misc_RNA (1)...(19): siRNA sense strand
aggaauacagggaagggaa

SEQ ID NO: 2263717 - RNA, 19 nt, Homo sapiens
  misc_RNA (1)...(19): siRNA sense strand
gaagaaggauggaggagag

SEQ ID NO: 2263718 - RNA, 19 nt, Homo sapiens
  misc_RNA (1)...(19): siRNA sense strand
cugugaagaaucaggguca

SEQ ID NO: 2263719 - RNA, 19 nt, Homo sapiens
  misc_RNA (1)...(19): siRNA sense strand
ccaugaacgccuuuggaga

SEQ ID NO: 2263720 - RNA, 19 nt, Homo sapiens
  misc_RNA (1)...(19): siRNA sense strand
uggccaaagaccggagaaa

SEQ ID NO: 2263721 - RNA, 19 nt, Homo sapiens
  misc_RNA (1)...(19): siRNA sense strand
uguggauuggagagagaaa

SEQ ID NO: 2263722 - RNA, 19 nt, Homo sapiens
  misc_RNA (1)...(19): siRNA sense strand
gggaauugccucagcuacu

SEQ ID NO: 2263723 - RNA, 19 nt, Homo sapiens
  misc_RNA (1)...(19): siRNA sense strand
auuugaaagcacagaauca

SEQ ID NO: 2263724 - RNA, 19 nt, Homo sapiens
  misc_RNA (1)...(19): siRNA sense strand
auaugaggcaacagaagaa

SEQ ID NO: 2263725 - RNA, 19 nt, Homo sapiens
  misc_RNA (1)...(19): siRNA sense strand
ucuguggauuggagagaga

SEQ ID NO: 2263726 - RNA, 19 nt, Homo sapiens
  misc_RNA (1)...(19): siRNA sense strand
auaaauauuggcuggugaa

SEQ ID NO: 2263727 - RNA, 19 nt, Homo sapiens
  misc_RNA (1)...(19): siRNA sense strand
aggcgaugcacaacagauu

SEQ ID NO: 2263728 - RNA, 19 nt, Homo sapiens
  misc_RNA (1)...(19): siRNA sense strand
acaacagauuauacggcau

SEQ ID NO: 2263729 - RNA, 19 nt, Homo sapiens
  misc_RNA (1)...(19): siRNA sense strand
ugggagaagaacaugaaga

SEQ ID NO: 2263730 - RNA, 19 nt, Homo sapiens
  misc_RNA (1)...(19): siRNA sense strand
cagugugggagaagaacau

SEQ ID NO: 2263731 - RNA, 19 nt, Homo sapiens
  misc_RNA (1)...(19): siRNA sense strand
aaucaggaauacagggaag

SEQ ID NO: 2263732 - RNA, 19 nt, Homo sapiens
  misc_RNA (1)...(19): siRNA sense strand
aggccuggacucugaggaa

SEQ ID NO: 2263733 - RNA, 19 nt, Homo sapiens
  misc_RNA (1)...(19): siRNA sense strand
gcaugaaugaagaaggaug

SEQ ID NO: 2263734 - RNA, 19 nt, Homo sapiens
  misc_RNA (1)...(19): siRNA sense strand
gcauuuauuuugagccaga

SEQ ID NO: 2263735 - RNA, 19 nt, Homo sapiens
  misc_RNA (1)...(19): siRNA sense strand
aggagagcagugugggaga

SEQ ID NO: 2263736 - RNA, 19 nt, Homo sapiens
  misc_RNA (1)...(19): siRNA sense strand
ggaggagagcaguguggga

SEQ ID NO: 2263737 - RNA, 19 nt, Homo sapiens
  misc_RNA (1)...(19): siRNA sense strand
gaagaauucaggcagguga

SEQ ID NO: 2263738 - RNA, 19 nt, Homo sapiens
  misc_RNA (1)...(19): siRNA sense strand
ugaagaaggauggaggaga

SEQ ID NO: 2263739 - RNA, 19 nt, Homo sapiens
  misc_RNA (1)...(19): siRNA sense strand
agaacaugaagaugauuga

SEQ ID NO: 2263740 - RNA, 19 nt, Homo sapiens
  misc_RNA (1)...(19): siRNA sense strand
agagaaaauccgagaauau

SEQ ID NO: 2263741 - RNA, 19 nt, Homo sapiens
  misc_RNA (1)...(19): siRNA sense strand
uugcagaaaaggagagaaa

SEQ ID NO: 2263742 - RNA, 19 nt, Homo sapiens
  misc_RNA (1)...(19): siRNA sense strand
ccgcaacgguauuggcgaa

SEQ ID NO: 2263743 - RNA, 19 nt, Homo sapiens
  misc_RNA (1)...(19): siRNA sense strand
ggacacaggaugcggccaa

SEQ ID NO: 2263744 - RNA, 19 nt, Homo sapiens
  misc_RNA (1)...(19): siRNA sense strand
acuaugaagaggugaagaa

SEQ ID NO: 2263745 - RNA, 19 nt, Homo sapiens
  misc_RNA (1)...(19): siRNA sense strand
cugcaaaggccgacgagau

SEQ ID NO: 2263746 - RNA, 19 nt, Homo sapiens
  misc_RNA (1)...(19): siRNA sense strand
gagagaaagcugcaggaga

SEQ ID NO: 2263747 - RNA, 19 nt, Homo sapiens
  misc_RNA (1)...(19): siRNA sense strand
gcggagaccuuaagggaac

SEQ ID NO: 2263748 - RNA, 19 nt, Homo sapiens
  misc_RNA (1)...(19): siRNA sense strand
gaguaaaagaagcaaggaa

SEQ ID NO: 2263749 - RNA, 19 nt, Homo sapiens
  misc_RNA (1)...(19): siRNA sense strand
agagaaagcugcaggagac

SEQ ID NO: 2263750 - RNA, 19 nt, Homo sapiens
  misc_RNA (1)...(19): siRNA sense strand
cgauaaaagcacuuaaaga

SEQ ID NO: 2263751 - RNA, 19 nt, Homo sapiens
  misc_RNA (1)...(19): siRNA sense strand
cagagguggcucagagaga

SEQ ID NO: 2263752 - RNA, 19 nt, Homo sapiens
  misc_RNA (1)...(19): siRNA sense strand
aggugaagaaagagcugaa

SEQ ID NO: 2263753 - RNA, 19 nt, Homo sapiens
  misc_RNA (1)...(19): siRNA sense strand
cgauauugaaacagagaac

SEQ ID NO: 2263754 - RNA, 19 nt, Homo sapiens
  misc_RNA (1)...(19): siRNA sense strand
ucgcacagcugguggagga

SEQ ID NO: 2263755 - RNA, 19 nt, Homo sapiens
  misc_RNA (1)...(19): siRNA sense strand
cuccagaggauuugcgcaa

SEQ ID NO: 2263756 - RNA, 19 nt, Homo sapiens
  misc_RNA (1)...(19): siRNA sense strand
aaaccaaauacgaugaaga

SEQ ID NO: 2263757 - RNA, 19 nt, Homo sapiens
  misc_RNA (1)...(19): siRNA sense strand
cugacuaugaagaggugaa

SEQ ID NO: 2263758 - RNA, 19 nt, Homo sapiens
  misc_RNA (1)...(19): siRNA sense strand
gaaccagaaacuuagggaa

SEQ ID NO: 2263759 - RNA, 19 nt, Homo sapiens
  misc_RNA (1)...(19): siRNA sense strand
aggaauuugcugaagugaa

SEQ ID NO: 2263760 - RNA, 19 nt, Homo sapiens
  misc_RNA (1)...(19): siRNA sense strand
gaacagaauuauuugaccu

SEQ ID NO: 2263761 - RNA, 19 nt, Homo sapiens
  misc_RNA (1)...(19): siRNA sense strand
augaacagacacugaagaa

SEQ ID NO: 2263762 - RNA, 19 nt, Homo sapiens
  misc_RNA (1)...(19): siRNA sense strand
ugcuguugcuggagaagaa

SEQ ID NO: 2263763 - RNA, 19 nt, Homo sapiens
  misc_RNA (1)...(19): siRNA sense strand
gguucagagccuacaaaca

SEQ ID NO: 2263764 - RNA, 19 nt, Homo sapiens
  misc_RNA (1)...(19): siRNA sense strand
gggcaaaccagagggcaga

SEQ ID NO: 2263765 - RNA, 19 nt, Homo sapiens
  misc_RNA (1)...(19): siRNA sense strand
uggaggacgugcagagacu

SEQ ID NO: 2263766 - RNA, 19 nt, Homo sapiens
  misc_RNA (1)...(19): siRNA sense strand
ccagaaacuuagggaaacu

SEQ ID NO: 2263767 - RNA, 19 nt, Homo sapiens
  misc_RNA (1)...(19): siRNA sense strand
cugaagaaccaagccgaaa

SEQ ID NO: 2263768 - RNA, 19 nt, Homo sapiens
  misc_RNA (1)...(19): siRNA sense strand
acucaaacaacuggaagaa

SEQ ID NO: 2263769 - RNA, 19 nt, Homo sapiens
  misc_RNA (1)...(19): siRNA sense strand
gugaagaaagagcugaaca

SEQ ID NO: 2263770 - RNA, 19 nt, Homo sapiens
  misc_RNA (1)...(19): siRNA sense strand
ugaagaguuuccaaggaga

SEQ ID NO: 2263771 - RNA, 19 nt, Homo sapiens
  misc_RNA (1)...(19): siRNA sense strand
uugagaaggaacagaaguu

SEQ ID NO: 2263772 - RNA, 19 nt, Homo sapiens
  misc_RNA (1)...(19): siRNA sense strand
augaagaaacuacugcaaa

SEQ ID NO: 2263773 - RNA, 19 nt, Homo sapiens
  misc_RNA (1)...(19): siRNA sense strand
gaguuuccaaggagagauu

SEQ ID NO: 2263774 - RNA, 19 nt, Homo sapiens
  misc_RNA (1)...(19): siRNA sense strand
auauugaaacagagaacca

SEQ ID NO: 2263775 - RNA, 19 nt, Homo sapiens
  misc_RNA (1)...(19): siRNA sense strand
gcauaagguucagagccua

SEQ ID NO: 2263776 - RNA, 19 nt, Homo sapiens
  misc_RNA (1)...(19): siRNA sense strand
uggcgaaccggcaggauga

SEQ ID NO: 2263777 - RNA, 19 nt, Homo sapiens
  misc_RNA (1)...(19): siRNA sense strand
cuaugaagaggugaagaaa

SEQ ID NO: 2263778 - RNA, 19 nt, Homo sapiens
  misc_RNA (1)...(19): siRNA sense strand
aggaacagaaguuacagaa

SEQ ID NO: 2263779 - RNA, 19 nt, Homo sapiens
  misc_RNA (1)...(19): siRNA sense strand
gagaauucggccagccaga

SEQ ID NO: 2263780 - RNA, 19 nt, Homo sapiens
  misc_RNA (1)...(19): siRNA sense strand
uggaagaauacaacaagga

SEQ ID NO: 2263781 - RNA, 19 nt, Homo sapiens
  misc_RNA (1)...(19): siRNA sense strand
uugaaaugaucaugacgga

SEQ ID NO: 2263782 - RNA, 19 nt, Homo sapiens
  misc_RNA (1)...(19): siRNA sense strand
cacucaaacaacuggaaga

SEQ ID NO: 2263783 - RNA, 19 nt, Homo sapiens
  misc_RNA (1)...(19): siRNA sense strand
agagaaaauccgagaauau

SEQ ID NO: 2263784 - RNA, 19 nt, Homo sapiens
  misc_RNA (1)...(19): siRNA sense strand
uugcagaaaaggagagaaa

SEQ ID NO: 2263785 - RNA, 19 nt, Homo sapiens
  misc_RNA (1)...(19): siRNA sense strand
ccgcaacgguauuggcgaa

SEQ ID NO: 2263786 - RNA, 19 nt, Homo sapiens
  misc_RNA (1)...(19): siRNA sense strand
ggacacaggaugcggccaa

SEQ ID NO: 2263787 - RNA, 19 nt, Homo sapiens
  misc_RNA (1)...(19): siRNA sense strand
acuaugaagaggugaagaa

SEQ ID NO: 2263788 - RNA, 19 nt, Homo sapiens
  misc_RNA (1)...(19): siRNA sense strand
cugcaaaggccgacgagau

SEQ ID NO: 2263789 - RNA, 19 nt, Homo sapiens
  misc_RNA (1)...(19): siRNA sense strand
gagagaaagcugcaggaga

SEQ ID NO: 2263790 - RNA, 19 nt, Homo sapiens
  misc_RNA (1)...(19): siRNA sense strand
gcggagaccuuaagggaac

SEQ ID NO: 2263791 - RNA, 19 nt, Homo sapiens
  misc_RNA (1)...(19): siRNA sense strand
gaguaaaagaagcaaggaa

SEQ ID NO: 2263792 - RNA, 19 nt, Homo sapiens
  misc_RNA (1)...(19): siRNA sense strand
agagaaagcugcaggagac

SEQ ID NO: 2263793 - RNA, 19 nt, Homo sapiens
  misc_RNA (1)...(19): siRNA sense strand
cgauaaaagcacuuaaaga

SEQ ID NO: 2263794 - RNA, 19 nt, Homo sapiens
  misc_RNA (1)...(19): siRNA sense strand
cagagguggcucagagaga

SEQ ID NO: 2263795 - RNA, 19 nt, Homo sapiens
  misc_RNA (1)...(19): siRNA sense strand
aggugaagaaagagcugaa

SEQ ID NO: 2263796 - RNA, 19 nt, Homo sapiens
  misc_RNA (1)...(19): siRNA sense strand
cgauauugaaacagagaac

SEQ ID NO: 2263797 - RNA, 19 nt, Homo sapiens
  misc_RNA (1)...(19): siRNA sense strand
ucgcacagcugguggagga

SEQ ID NO: 2263798 - RNA, 19 nt, Homo sapiens
  misc_RNA (1)...(19): siRNA sense strand
cuccagaggauuugcgcaa

SEQ ID NO: 2263799 - RNA, 19 nt, Homo sapiens
  misc_RNA (1)...(19): siRNA sense strand
aaaccaaauacgaugaaga

SEQ ID NO: 2263800 - RNA, 19 nt, Homo sapiens
  misc_RNA (1)...(19): siRNA sense strand
cugacuaugaagaggugaa

SEQ ID NO: 2263801 - RNA, 19 nt, Homo sapiens
  misc_RNA (1)...(19): siRNA sense strand
gaaccagaaacuuagggaa

SEQ ID NO: 2263802 - RNA, 19 nt, Homo sapiens
  misc_RNA (1)...(19): siRNA sense strand
aggaauuugcugaagugaa

SEQ ID NO: 2263803 - RNA, 19 nt, Homo sapiens
  misc_RNA (1)...(19): siRNA sense strand
gaacagaauuauuugaccu

SEQ ID NO: 2263804 - RNA, 19 nt, Homo sapiens
  misc_RNA (1)...(19): siRNA sense strand
augaacagacacugaagaa

SEQ ID NO: 2263805 - RNA, 19 nt, Homo sapiens
  misc_RNA (1)...(19): siRNA sense strand
ugcuguugcuggagaagaa

SEQ ID NO: 2263806 - RNA, 19 nt, Homo sapiens
  misc_RNA (1)...(19): siRNA sense strand
gguucagagccuacaaaca

SEQ ID NO: 2263807 - RNA, 19 nt, Homo sapiens
  misc_RNA (1)...(19): siRNA sense strand
gggcaaaccagagggcaga

SEQ ID NO: 2263808 - RNA, 19 nt, Homo sapiens
  misc_RNA (1)...(19): siRNA sense strand
uggaggacgugcagagacu

SEQ ID NO: 2263809 - RNA, 19 nt, Homo sapiens
  misc_RNA (1)...(19): siRNA sense strand
ccagaaacuuagggaaacu

SEQ ID NO: 2263810 - RNA, 19 nt, Homo sapiens
  misc_RNA (1)...(19): siRNA sense strand
cugaagaaccaagccgaaa

SEQ ID NO: 2263811 - RNA, 19 nt, Homo sapiens
  misc_RNA (1)...(19): siRNA sense strand
acucaaacaacuggaagaa

SEQ ID NO: 2263812 - RNA, 19 nt, Homo sapiens
  misc_RNA (1)...(19): siRNA sense strand
gugaagaaagagcugaaca

SEQ ID NO: 2263813 - RNA, 19 nt, Homo sapiens
  misc_RNA (1)...(19): siRNA sense strand
ugaagaguuuccaaggaga

SEQ ID NO: 2263814 - RNA, 19 nt, Homo sapiens
  misc_RNA (1)...(19): siRNA sense strand
uugagaaggaacagaaguu

SEQ ID NO: 2263815 - RNA, 19 nt, Homo sapiens
  misc_RNA (1)...(19): siRNA sense strand
augaagaaacuacugcaaa

SEQ ID NO: 2263816 - RNA, 19 nt, Homo sapiens
  misc_RNA (1)...(19): siRNA sense strand
gaguuuccaaggagagauu

SEQ ID NO: 2263817 - RNA, 19 nt, Homo sapiens
  misc_RNA (1)...(19): siRNA sense strand
auauugaaacagagaacca

SEQ ID NO: 2263818 - RNA, 19 nt, Homo sapiens
  misc_RNA (1)...(19): siRNA sense strand
gcauaagguucagagccua

SEQ ID NO: 2263819 - RNA, 19 nt, Homo sapiens
  misc_RNA (1)...(19): siRNA sense strand
uggcgaaccggcaggauga

SEQ ID NO: 2263820 - RNA, 19 nt, Homo sapiens
  misc_RNA (1)...(19): siRNA sense strand
cuaugaagaggugaagaaa

SEQ ID NO: 2263821 - RNA, 19 nt, Homo sapiens
  misc_RNA (1)...(19): siRNA sense strand
aggaacagaaguuacagaa

SEQ ID NO: 2263822 - RNA, 19 nt, Homo sapiens
  misc_RNA (1)...(19): siRNA sense strand
gagaauucggccagccaga

SEQ ID NO: 2263823 - RNA, 19 nt, Homo sapiens
  misc_RNA (1)...(19): siRNA sense strand
uggaagaauacaacaagga

SEQ ID NO: 2263824 - RNA, 19 nt, Homo sapiens
  misc_RNA (1)...(19): siRNA sense strand
uugaaaugaucaugacgga

SEQ ID NO: 2263825 - RNA, 19 nt, Homo sapiens
  misc_RNA (1)...(19): siRNA sense strand
cacucaaacaacuggaaga

SEQ ID NO: 2263826 - RNA, 19 nt, Homo sapiens
  misc_RNA (1)...(19): siRNA sense strand
agagaaaauccgagaauau

SEQ ID NO: 2263827 - RNA, 19 nt, Homo sapiens
  misc_RNA (1)...(19): siRNA sense strand
uugcagaaaaggagagaaa

SEQ ID NO: 2263828 - RNA, 19 nt, Homo sapiens
  misc_RNA (1)...(19): siRNA sense strand
ccgcaacgguauuggcgaa

SEQ ID NO: 2263829 - RNA, 19 nt, Homo sapiens
  misc_RNA (1)...(19): siRNA sense strand
ggacacaggaugcggccaa

SEQ ID NO: 2263830 - RNA, 19 nt, Homo sapiens
  misc_RNA (1)...(19): siRNA sense strand
acuaugaagaggugaagaa

SEQ ID NO: 2263831 - RNA, 19 nt, Homo sapiens
  misc_RNA (1)...(19): siRNA sense strand
cugcaaaggccgacgagau

SEQ ID NO: 2263832 - RNA, 19 nt, Homo sapiens
  misc_RNA (1)...(19): siRNA sense strand
gagagaaagcugcaggaga

SEQ ID NO: 2263833 - RNA, 19 nt, Homo sapiens
  misc_RNA (1)...(19): siRNA sense strand
gcggagaccuuaagggaac

SEQ ID NO: 2263834 - RNA, 19 nt, Homo sapiens
  misc_RNA (1)...(19): siRNA sense strand
gaguaaaagaagcaaggaa

SEQ ID NO: 2263835 - RNA, 19 nt, Homo sapiens
  misc_RNA (1)...(19): siRNA sense strand
agagaaagcugcaggagac

SEQ ID NO: 2263836 - RNA, 19 nt, Homo sapiens
  misc_RNA (1)...(19): siRNA sense strand
cgauaaaagcacuuaaaga

SEQ ID NO: 2263837 - RNA, 19 nt, Homo sapiens
  misc_RNA (1)...(19): siRNA sense strand
cagagguggcucagagaga

SEQ ID NO: 2263838 - RNA, 19 nt, Homo sapiens
  misc_RNA (1)...(19): siRNA sense strand
aggugaagaaagagcugaa

SEQ ID NO: 2263839 - RNA, 19 nt, Homo sapiens
  misc_RNA (1)...(19): siRNA sense strand
cgauauugaaacagagaac

SEQ ID NO: 2263840 - RNA, 19 nt, Homo sapiens
  misc_RNA (1)...(19): siRNA sense strand
ucgcacagcugguggagga

SEQ ID NO: 2263841 - RNA, 19 nt, Homo sapiens
  misc_RNA (1)...(19): siRNA sense strand
cuccagaggauuugcgcaa

SEQ ID NO: 2263842 - RNA, 19 nt, Homo sapiens
  misc_RNA (1)...(19): siRNA sense strand
aaaccaaauacgaugaaga

SEQ ID NO: 2263843 - RNA, 19 nt, Homo sapiens
  misc_RNA (1)...(19): siRNA sense strand
cugacuaugaagaggugaa

SEQ ID NO: 2263844 - RNA, 19 nt, Homo sapiens
  misc_RNA (1)...(19): siRNA sense strand
gaaccagaaacuuagggaa

SEQ ID NO: 2263845 - RNA, 19 nt, Homo sapiens
  misc_RNA (1)...(19): siRNA sense strand
aggaauuugcugaagugaa

SEQ ID NO: 2263846 - RNA, 19 nt, Homo sapiens
  misc_RNA (1)...(19): siRNA sense strand
gaacagaauuauuugaccu

SEQ ID NO: 2263847 - RNA, 19 nt, Homo sapiens
  misc_RNA (1)...(19): siRNA sense strand
augaacagacacugaagaa

SEQ ID NO: 2263848 - RNA, 19 nt, Homo sapiens
  misc_RNA (1)...(19): siRNA sense strand
ugcuguugcuggagaagaa

SEQ ID NO: 2263849 - RNA, 19 nt, Homo sapiens
  misc_RNA (1)...(19): siRNA sense strand
gguucagagccuacaaaca

SEQ ID NO: 2263850 - RNA, 19 nt, Homo sapiens
  misc_RNA (1)...(19): siRNA sense strand
gggcaaaccagagggcaga

SEQ ID NO: 2263851 - RNA, 19 nt, Homo sapiens
  misc_RNA (1)...(19): siRNA sense strand
uggaggacgugcagagacu

SEQ ID NO: 2263852 - RNA, 19 nt, Homo sapiens
  misc_RNA (1)...(19): siRNA sense strand
ccagaaacuuagggaaacu

SEQ ID NO: 2263853 - RNA, 19 nt, Homo sapiens
  misc_RNA (1)...(19): siRNA sense strand
cugaagaaccaagccgaaa

SEQ ID NO: 2263854 - RNA, 19 nt, Homo sapiens
  misc_RNA (1)...(19): siRNA sense strand
acucaaacaacuggaagaa

SEQ ID NO: 2263855 - RNA, 19 nt, Homo sapiens
  misc_RNA (1)...(19): siRNA sense strand
gugaagaaagagcugaaca

SEQ ID NO: 2263856 - RNA, 19 nt, Homo sapiens
  misc_RNA (1)...(19): siRNA sense strand
ugaagaguuuccaaggaga

SEQ ID NO: 2263857 - RNA, 19 nt, Homo sapiens
  misc_RNA (1)...(19): siRNA sense strand
uugagaaggaacagaaguu

SEQ ID NO: 2263858 - RNA, 19 nt, Homo sapiens
  misc_RNA (1)...(19): siRNA sense strand
augaagaaacuacugcaaa

SEQ ID NO: 2263859 - RNA, 19 nt, Homo sapiens
  misc_RNA (1)...(19): siRNA sense strand
gaguuuccaaggagagauu

SEQ ID NO: 2263860 - RNA, 19 nt, Homo sapiens
  misc_RNA (1)...(19): siRNA sense strand
auauugaaacagagaacca

SEQ ID NO: 2263861 - RNA, 19 nt, Homo sapiens
  misc_RNA (1)...(19): siRNA sense strand
gcauaagguucagagccua

SEQ ID NO: 2263862 - RNA, 19 nt, Homo sapiens
  misc_RNA (1)...(19): siRNA sense strand
uggcgaaccggcaggauga

SEQ ID NO: 2263863 - RNA, 19 nt, Homo sapiens
  misc_RNA (1)...(19): siRNA sense strand
cuaugaagaggugaagaaa

SEQ ID NO: 2263864 - RNA, 19 nt, Homo sapiens
  misc_RNA (1)...(19): siRNA sense strand
aggaacagaaguuacagaa

SEQ ID NO: 2263865 - RNA, 19 nt, Homo sapiens
  misc_RNA (1)...(19): siRNA sense strand
gagaauucggccagccaga

SEQ ID NO: 2263866 - RNA, 19 nt, Homo sapiens
  misc_RNA (1)...(19): siRNA sense strand
uggaagaauacaacaagga

SEQ ID NO: 2263867 - RNA, 19 nt, Homo sapiens
  misc_RNA (1)...(19): siRNA sense strand
uugaaaugaucaugacgga

SEQ ID NO: 2263868 - RNA, 19 nt, Homo sapiens
  misc_RNA (1)...(19): siRNA sense strand
cacucaaacaacuggaaga

SEQ ID NO: 2263869 - RNA, 19 nt, Homo sapiens
  misc_RNA (1)...(19): siRNA sense strand
cuucaaacacagaggucau

SEQ ID NO: 2263870 - RNA, 19 nt, Homo sapiens
  misc_RNA (1)...(19): siRNA sense strand
acauaaaggucuacgcgga

SEQ ID NO: 2263871 - RNA, 19 nt, Homo sapiens
  misc_RNA (1)...(19): siRNA sense strand
ccacaacaccauuugggaa

SEQ ID NO: 2263872 - RNA, 19 nt, Homo sapiens
  misc_RNA (1)...(19): siRNA sense strand
aggacacaguucugggauu

SEQ ID NO: 2263873 - RNA, 19 nt, Homo sapiens
  misc_RNA (1)...(19): siRNA sense strand
uaaacaauauccaggacca

SEQ ID NO: 2263874 - RNA, 19 nt, Homo sapiens
  misc_RNA (1)...(19): siRNA sense strand
augcaagaauuauugguga

SEQ ID NO: 2263875 - RNA, 19 nt, Homo sapiens
  misc_RNA (1)...(19): siRNA sense strand
uggcugacugaaagguuaa

SEQ ID NO: 2263876 - RNA, 19 nt, Homo sapiens
  misc_RNA (1)...(19): siRNA sense strand
gguggugauuggagcagga

SEQ ID NO: 2263877 - RNA, 19 nt, Homo sapiens
  misc_RNA (1)...(19): siRNA sense strand
ggccagaagaccaggacau

SEQ ID NO: 2263878 - RNA, 19 nt, Homo sapiens
  misc_RNA (1)...(19): siRNA sense strand
ggcaagaggugaugaggcu

SEQ ID NO: 2263879 - RNA, 19 nt, Homo sapiens
  misc_RNA (1)...(19): siRNA sense strand
ggauaaaagcucugcucuu

SEQ ID NO: 2263880 - RNA, 19 nt, Homo sapiens
  misc_RNA (1)...(19): siRNA sense strand
gcagaggaugcaagcucaa

SEQ ID NO: 2263881 - RNA, 19 nt, Homo sapiens
  misc_RNA (1)...(19): siRNA sense strand
ggcaaaagcuuaugaggcu

SEQ ID NO: 2263882 - RNA, 19 nt, Homo sapiens
  misc_RNA (1)...(19): siRNA sense strand
aggaagaagcagagaacaa

SEQ ID NO: 2263883 - RNA, 19 nt, Homo sapiens
  misc_RNA (1)...(19): siRNA sense strand
ggaagcugcuggagggaga

SEQ ID NO: 2263884 - RNA, 19 nt, Homo sapiens
  misc_RNA (1)...(19): siRNA sense strand
aggccaagcugcaggagga

SEQ ID NO: 2263885 - RNA, 19 nt, Homo sapiens
  misc_RNA (1)...(19): siRNA sense strand
aagcaggagaugauggaau

SEQ ID NO: 2263886 - RNA, 19 nt, Homo sapiens
  misc_RNA (1)...(19): siRNA sense strand
aggccaagcaggagaugau

SEQ ID NO: 2263887 - RNA, 19 nt, Homo sapiens
  misc_RNA (1)...(19): siRNA sense strand
acgagaagguggagcugca

SEQ ID NO: 2263888 - RNA, 19 nt, Homo sapiens
  misc_RNA (1)...(19): siRNA sense strand
agaaagugcaugaagagga

SEQ ID NO: 2263889 - RNA, 19 nt, Homo sapiens
  misc_RNA (1)...(19): siRNA sense strand
aguugaaggaagaagcaga

SEQ ID NO: 2263890 - RNA, 19 nt, Homo sapiens
  misc_RNA (1)...(19): siRNA sense strand
ugguacaagucgaaggugu

SEQ ID NO: 2263891 - RNA, 19 nt, Homo sapiens
  misc_RNA (1)...(19): siRNA sense strand
agaaaccagcccugagcaa

SEQ ID NO: 2263892 - RNA, 19 nt, Homo sapiens
  misc_RNA (1)...(19): siRNA sense strand
gcgacaaccugcucgacga

SEQ ID NO: 2263893 - RNA, 19 nt, Homo sapiens
  misc_RNA (1)...(19): siRNA sense strand
uggagauggacaugucuaa

SEQ ID NO: 2263894 - RNA, 19 nt, Homo sapiens
  misc_RNA (1)...(19): siRNA sense strand
aggcagccaacaagaacaa

SEQ ID NO: 2263895 - RNA, 19 nt, Homo sapiens
  misc_RNA (1)...(19): siRNA sense strand
gcauugaccuggagcgcag

SEQ ID NO: 2263896 - RNA, 19 nt, Homo sapiens
  misc_RNA (1)...(19): siRNA sense strand
gcucaaugaccguucgcca

SEQ ID NO: 2263897 - RNA, 19 nt, Homo sapiens
  misc_RNA (1)...(19): siRNA sense strand
ccaagcugcaggaggagau

SEQ ID NO: 2263898 - RNA, 19 nt, Homo sapiens
  misc_RNA (1)...(19): siRNA sense strand
cugaagcugaggaguggua

SEQ ID NO: 2263899 - RNA, 19 nt, Homo sapiens
  misc_RNA (1)...(19): siRNA sense strand
ugaugugcgcggagagcaa

SEQ ID NO: 2263900 - RNA, 19 nt, Homo sapiens
  misc_RNA (1)...(19): siRNA sense strand
gggacagcugcaaggguga

SEQ ID NO: 2263901 - RNA, 19 nt, Homo sapiens
  misc_RNA (1)...(19): siRNA sense strand
augccaugaucgagaagaa

SEQ ID NO: 2263902 - RNA, 19 nt, Homo sapiens
  misc_RNA (1)...(19): siRNA sense strand
agauggugauggagcagaa

SEQ ID NO: 2263903 - RNA, 19 nt, Homo sapiens
  misc_RNA (1)...(19): siRNA sense strand
gguguaaaguggacgccuu

SEQ ID NO: 2263904 - RNA, 19 nt, Homo sapiens
  misc_RNA (1)...(19): siRNA sense strand
ccgucaaggucuaugcuga

SEQ ID NO: 2263905 - RNA, 19 nt, Homo sapiens
  misc_RNA (1)...(19): siRNA sense strand
agaagaagcuggaaccacu

SEQ ID NO: 2263906 - RNA, 19 nt, Homo sapiens
  misc_RNA (1)...(19): siRNA sense strand
gaaaccugcuggugcccaa

SEQ ID NO: 2263907 - RNA, 19 nt, Homo sapiens
  misc_RNA (1)...(19): siRNA sense strand
augccaugaucgagaagaa

SEQ ID NO: 2263908 - RNA, 19 nt, Homo sapiens
  misc_RNA (1)...(19): siRNA sense strand
agauggugauggagcagaa

SEQ ID NO: 2263909 - RNA, 19 nt, Homo sapiens
  misc_RNA (1)...(19): siRNA sense strand
gguguaaaguggacgccuu

SEQ ID NO: 2263910 - RNA, 19 nt, Homo sapiens
  misc_RNA (1)...(19): siRNA sense strand
ccgucaaggucuaugcuga

SEQ ID NO: 2263911 - RNA, 19 nt, Homo sapiens
  misc_RNA (1)...(19): siRNA sense strand
agaagaagcuggaaccacu

SEQ ID NO: 2263912 - RNA, 19 nt, Homo sapiens
  misc_RNA (1)...(19): siRNA sense strand
gaaaccugcuggugcccaa

SEQ ID NO: 2263913 - RNA, 19 nt, Homo sapiens
  misc_RNA (1)...(19): siRNA sense strand
augccaugaucgagaagaa

SEQ ID NO: 2263914 - RNA, 19 nt, Homo sapiens
  misc_RNA (1)...(19): siRNA sense strand
agauggugauggagcagaa

SEQ ID NO: 2263915 - RNA, 19 nt, Homo sapiens
  misc_RNA (1)...(19): siRNA sense strand
gguguaaaguggacgccuu

SEQ ID NO: 2263916 - RNA, 19 nt, Homo sapiens
  misc_RNA (1)...(19): siRNA sense strand
ccgucaaggucuaugcuga

SEQ ID NO: 2263917 - RNA, 19 nt, Homo sapiens
  misc_RNA (1)...(19): siRNA sense strand
agaagaagcuggaaccacu

SEQ ID NO: 2263918 - RNA, 19 nt, Homo sapiens
  misc_RNA (1)...(19): siRNA sense strand
gaaaccugcuggugcccaa

SEQ ID NO: 2263919 - RNA, 19 nt, Homo sapiens
  misc_RNA (1)...(19): siRNA sense strand
ucuuagagaagcugagcaa

SEQ ID NO: 2263920 - RNA, 19 nt, Homo sapiens
  misc_RNA (1)...(19): siRNA sense strand
ccucagaauuuaaacccua

SEQ ID NO: 2263921 - RNA, 19 nt, Homo sapiens
  misc_RNA (1)...(19): siRNA sense strand
gaagaucgcuuaaaggaga

SEQ ID NO: 2263922 - RNA, 19 nt, Homo sapiens
  misc_RNA (1)...(19): siRNA sense strand
ccgaaagagccaugagaag

SEQ ID NO: 2263923 - RNA, 19 nt, Homo sapiens
  misc_RNA (1)...(19): siRNA sense strand
ugacaauaucgaugaggau

SEQ ID NO: 2263924 - RNA, 19 nt, Homo sapiens
  misc_RNA (1)...(19): siRNA sense strand
cggugaagaucguccgcuu

SEQ ID NO: 2263925 - RNA, 19 nt, Homo sapiens
  misc_RNA (1)...(19): siRNA sense strand
acaaggaggagaugggcuu

SEQ ID NO: 2263926 - RNA, 19 nt, Homo sapiens
  misc_RNA (1)...(19): siRNA sense strand
cugcacgagcugaagcaaa

SEQ ID NO: 2263927 - RNA, 19 nt, Homo sapiens
  misc_RNA (1)...(19): siRNA sense strand
agccagaagcacugaaaca

SEQ ID NO: 2263928 - RNA, 19 nt, Homo sapiens
  misc_RNA (1)...(19): siRNA sense strand
agcaaaaggugguggcuga

SEQ ID NO: 2263929 - RNA, 19 nt, Homo sapiens
  misc_RNA (1)...(19): siRNA sense strand
cgcuauuaugaaaggcaaa

SEQ ID NO: 2263930 - RNA, 19 nt, Homo sapiens
  misc_RNA (1)...(19): siRNA sense strand
aggacgugauggaggaguu

SEQ ID NO: 2263931 - RNA, 19 nt, Homo sapiens
  misc_RNA (1)...(19): siRNA sense strand
ccugugacugugagggcua

SEQ ID NO: 2263932 - RNA, 19 nt, Homo sapiens
  misc_RNA (1)...(19): siRNA sense strand
cugaggacgugauggagga

SEQ ID NO: 2263933 - RNA, 19 nt, Homo sapiens
  misc_RNA (1)...(19): siRNA sense strand
ccgacuuacaucacaacaa

SEQ ID NO: 2263934 - RNA, 19 nt, Homo sapiens
  misc_RNA (1)...(19): siRNA sense strand
ugguggauguggagccaga

SEQ ID NO: 2263935 - RNA, 19 nt, Homo sapiens
  misc_RNA (1)...(19): siRNA sense strand
augaggaaucggugaagau

SEQ ID NO: 2263936 - RNA, 19 nt, Homo sapiens
  misc_RNA (1)...(19): siRNA sense strand
ucgcuauuaugaaaggcaa

SEQ ID NO: 2263937 - RNA, 19 nt, Homo sapiens
  misc_RNA (1)...(19): siRNA sense strand
acacgguugcccagaagaa

SEQ ID NO: 2263938 - RNA, 19 nt, Homo sapiens
  misc_RNA (1)...(19): siRNA sense strand
guggcucgcaggaaggaaa

SEQ ID NO: 2263939 - RNA, 19 nt, Homo sapiens
  misc_RNA (1)...(19): siRNA sense strand
cugagaacccacagcacuu

SEQ ID NO: 2263940 - RNA, 19 nt, Homo sapiens
  misc_RNA (1)...(19): siRNA sense strand
cgacuaagcuaccggagag

SEQ ID NO: 2263941 - RNA, 19 nt, Homo sapiens
  misc_RNA (1)...(19): siRNA sense strand
ugcacgagcugaagcaaaa

SEQ ID NO: 2263942 - RNA, 19 nt, Homo sapiens
  misc_RNA (1)...(19): siRNA sense strand
cugacaauaucgaugagga

SEQ ID NO: 2263943 - RNA, 19 nt, Homo sapiens
  misc_RNA (1)...(19): siRNA sense strand
aggaaaaucuguauggaac

SEQ ID NO: 2263944 - RNA, 19 nt, Homo sapiens
  misc_RNA (1)...(19): siRNA sense strand
ccucagauguccuggcuuc

SEQ ID NO: 2263945 - RNA, 19 nt, Homo sapiens
  misc_RNA (1)...(19): siRNA sense strand
ccucagauguccuggcuuc

SEQ ID NO: 2263946 - RNA, 19 nt, Homo sapiens
  misc_RNA (1)...(19): siRNA sense strand
gggcaacacaagaaagaau

SEQ ID NO: 2263947 - RNA, 19 nt, Homo sapiens
  misc_RNA (1)...(19): siRNA sense strand
cggaaaggugucaguacua

SEQ ID NO: 2263948 - RNA, 19 nt, Homo sapiens
  misc_RNA (1)...(19): siRNA sense strand
ccucaaugguccugggauc

SEQ ID NO: 2263949 - RNA, 19 nt, Homo sapiens
  misc_RNA (1)...(19): siRNA sense strand
ggucgauguuggaguggau

SEQ ID NO: 2263950 - RNA, 19 nt, Homo sapiens
  misc_RNA (1)...(19): siRNA sense strand
cugggaagucaucgggaua

SEQ ID NO: 2263951 - RNA, 19 nt, Homo sapiens
  misc_RNA (1)...(19): siRNA sense strand
agucaugagcagagcugaa

SEQ ID NO: 2263952 - RNA, 19 nt, Homo sapiens
  misc_RNA (1)...(19): siRNA sense strand
uggaauagcuagcagcaca

SEQ ID NO: 2263953 - RNA, 19 nt, Homo sapiens
  misc_RNA (1)...(19): siRNA sense strand
uuaccaaguuacagaauca

SEQ ID NO: 2263954 - RNA, 19 nt, Homo sapiens
  misc_RNA (1)...(19): siRNA sense strand
aguaaagaggcgaaguauu

SEQ ID NO: 2263955 - RNA, 19 nt, Homo sapiens
  misc_RNA (1)...(19): siRNA sense strand
ucuacaagaucaucagcaa

SEQ ID NO: 2263956 - RNA, 19 nt, Homo sapiens
  misc_RNA (1)...(19): siRNA sense strand
caacagaagacugggaaca

SEQ ID NO: 2263957 - RNA, 19 nt, Homo sapiens
  misc_RNA (1)...(19): siRNA sense strand
ggguuuaugaagaggaagu

SEQ ID NO: 2263958 - RNA, 19 nt, Homo sapiens
  misc_RNA (1)...(19): siRNA sense strand
auucagaacuauucgguca

SEQ ID NO: 2263959 - RNA, 19 nt, Homo sapiens
  misc_RNA (1)...(19): siRNA sense strand
caguguacacagaacguua

SEQ ID NO: 2263960 - RNA, 19 nt, Homo sapiens
  misc_RNA (1)...(19): siRNA sense strand
aauaaaaggcagcugauua

SEQ ID NO: 2263961 - RNA, 19 nt, Homo sapiens
  misc_RNA (1)...(19): siRNA sense strand
ucagcaaugaagaagguua

SEQ ID NO: 2263962 - RNA, 19 nt, Homo sapiens
  misc_RNA (1)...(19): siRNA sense strand
caacauauauauacccaca

SEQ ID NO: 2263963 - RNA, 19 nt, Homo sapiens
  misc_RNA (1)...(19): siRNA sense strand
guuggaagauuuaggccuu

SEQ ID NO: 2263964 - RNA, 19 nt, Homo sapiens
  misc_RNA (1)...(19): siRNA sense strand
ggcugagaguccuggaaga

SEQ ID NO: 2263965 - RNA, 19 nt, Homo sapiens
  misc_RNA (1)...(19): siRNA sense strand
augaagaagguuacagaca

SEQ ID NO: 2263966 - RNA, 19 nt, Homo sapiens
  misc_RNA (1)...(19): siRNA sense strand
ccuccuuauucauggaaca

SEQ ID NO: 2263967 - RNA, 19 nt, Homo sapiens
  misc_RNA (1)...(19): siRNA sense strand
uggaauaacugacuggguu

SEQ ID NO: 2263968 - RNA, 19 nt, Homo sapiens
  misc_RNA (1)...(19): siRNA sense strand
cauggauauuugugacuau

SEQ ID NO: 2263969 - RNA, 19 nt, Homo sapiens
  misc_RNA (1)...(19): siRNA sense strand
ucauauggaggguacguaa

SEQ ID NO: 2263970 - RNA, 19 nt, Homo sapiens
  misc_RNA (1)...(19): siRNA sense strand
cugaugaagaccauggaau

SEQ ID NO: 2263971 - RNA, 19 nt, Homo sapiens
  misc_RNA (1)...(19): siRNA sense strand
cagcagcgugaaugauaaa

SEQ ID NO: 2263972 - RNA, 19 nt, Homo sapiens
  misc_RNA (1)...(19): siRNA sense strand
gauaaagggcugagagucc

SEQ ID NO: 2263973 - RNA, 19 nt, Homo sapiens
  misc_RNA (1)...(19): siRNA sense strand
cccaaagacuguacggguu

SEQ ID NO: 2263974 - RNA, 19 nt, Homo sapiens
  misc_RNA (1)...(19): siRNA sense strand
gggaagucaucgggauaga

SEQ ID NO: 2263975 - RNA, 19 nt, Homo sapiens
  misc_RNA (1)...(19): siRNA sense strand
cugacuggguuuaugaaga

SEQ ID NO: 2263976 - RNA, 19 nt, Homo sapiens
  misc_RNA (1)...(19): siRNA sense strand
ccaaauuuaccaaguuaca

SEQ ID NO: 2263977 - RNA, 19 nt, Homo sapiens
  misc_RNA (1)...(19): siRNA sense strand
aggcacagaugaugcuaca

SEQ ID NO: 2263978 - RNA, 19 nt, Homo sapiens
  misc_RNA (1)...(19): siRNA sense strand
auggaacagcagaugauaa

SEQ ID NO: 2263979 - RNA, 19 nt, Homo sapiens
  misc_RNA (1)...(19): siRNA sense strand
acagcagcgugaaugauaa

SEQ ID NO: 2263980 - RNA, 19 nt, Homo sapiens
  misc_RNA (1)...(19): siRNA sense strand
uggauaaaaugcugcagaa

SEQ ID NO: 2263981 - RNA, 19 nt, Homo sapiens
  misc_RNA (1)...(19): siRNA sense strand
cauuauaguagcuagcuuu

SEQ ID NO: 2263982 - RNA, 19 nt, Homo sapiens
  misc_RNA (1)...(19): siRNA sense strand
uagaauacaacuacgugaa

SEQ ID NO: 2263983 - RNA, 19 nt, Homo sapiens
  misc_RNA (1)...(19): siRNA sense strand
cugaugagucacugcagua

SEQ ID NO: 2263984 - RNA, 19 nt, Homo sapiens
  misc_RNA (1)...(19): siRNA sense strand
cguguucaaguguggaaua

SEQ ID NO: 2263985 - RNA, 19 nt, Homo sapiens
  misc_RNA (1)...(19): siRNA sense strand
aggcauuccuacacagcuu

SEQ ID NO: 2263986 - RNA, 19 nt, Homo sapiens
  misc_RNA (1)...(19): siRNA sense strand
gcgaaguauuaucagcuga

SEQ ID NO: 2263987 - RNA, 19 nt, Homo sapiens
  misc_RNA (1)...(19): siRNA sense strand
uggcagaggaagugguuac

SEQ ID NO: 2263988 - RNA, 19 nt, Homo sapiens
  misc_RNA (1)...(19): siRNA sense strand
ccggaaaggugucaguacu

SEQ ID NO: 2263989 - RNA, 19 nt, Homo sapiens
  misc_RNA (1)...(19): siRNA sense strand
auaaaaugcugcagaaugu

SEQ ID NO: 2263990 - RNA, 19 nt, Homo sapiens
  misc_RNA (1)...(19): siRNA sense strand
guauacugaugaagaccau

SEQ ID NO: 2263991 - RNA, 19 nt, Homo sapiens
  misc_RNA (1)...(19): siRNA sense strand
cuuugauggcagaggaagu

SEQ ID NO: 2263992 - RNA, 19 nt, Homo sapiens
  misc_RNA (1)...(19): siRNA sense strand
cgggaaguggcguguucaa

SEQ ID NO: 2263993 - RNA, 19 nt, Homo sapiens
  misc_RNA (1)...(19): siRNA sense strand
gacaauucagcuuuggaua

SEQ ID NO: 2263994 - RNA, 19 nt, Homo sapiens
  misc_RNA (1)...(19): siRNA sense strand
cuggguuuaugaagaggaa

SEQ ID NO: 2263995 - RNA, 19 nt, Homo sapiens
  misc_RNA (1)...(19): siRNA sense strand
cuacaagaucaucagcaau

SEQ ID NO: 2263996 - RNA, 19 nt, Homo sapiens
  misc_RNA (1)...(19): siRNA sense strand
cgugaaugauaaagggcug

SEQ ID NO: 2263997 - RNA, 19 nt, Homo sapiens
  misc_RNA (1)...(19): siRNA sense strand
ugauuacagaagagaggau

SEQ ID NO: 2263998 - RNA, 19 nt, Homo sapiens
  misc_RNA (1)...(19): siRNA sense strand
aaugcaacuuccauacaaa

SEQ ID NO: 2263999 - RNA, 19 nt, Homo sapiens
  misc_RNA (1)...(19): siRNA sense strand
cuacuugugugaugugaca

SEQ ID NO: 2264000 - RNA, 19 nt, Homo sapiens
  misc_RNA (1)...(19): siRNA sense strand
cugcuuaguggcacggcaa

SEQ ID NO: 2264001 - RNA, 19 nt, Homo sapiens
  misc_RNA (1)...(19): siRNA sense strand
cagcaaugaagaagguuac

SEQ ID NO: 2264002 - RNA, 19 nt, Homo sapiens
  misc_RNA (1)...(19): siRNA sense strand
cagcagaugauaacguuca

SEQ ID NO: 2264003 - RNA, 19 nt, Homo sapiens
  misc_RNA (1)...(19): siRNA sense strand
ccagggaggacgagggaaa

SEQ ID NO: 2264004 - RNA, 19 nt, Homo sapiens
  misc_RNA (1)...(19): siRNA sense strand
cgaaagaggacgaggagga

SEQ ID NO: 2264005 - RNA, 19 nt, Homo sapiens
  misc_RNA (1)...(19): siRNA sense strand
aggacgaggaggaggacua

SEQ ID NO: 2264006 - RNA, 19 nt, Homo sapiens
  misc_RNA (1)...(19): siRNA sense strand
gcuucaggauccaggacaa

SEQ ID NO: 2264007 - RNA, 19 nt, Homo sapiens
  misc_RNA (1)...(19): siRNA sense strand
ggaccaagcuccugcacga

SEQ ID NO: 2264008 - RNA, 19 nt, Homo sapiens
  misc_RNA (1)...(19): siRNA sense strand
acagaaaggaacagugaga

SEQ ID NO: 2264009 - RNA, 19 nt, Homo sapiens
  misc_RNA (1)...(19): siRNA sense strand
ugucuuaauagaaggcaaa

SEQ ID NO: 2264010 - RNA, 19 nt, Homo sapiens
  misc_RNA (1)...(19): siRNA sense strand
ccuagaaacaaaugaacau

SEQ ID NO: 2264011 - RNA, 19 nt, Homo sapiens
  misc_RNA (1)...(19): siRNA sense strand
gggacugggacgugaccaa

SEQ ID NO: 2264012 - RNA, 19 nt, Homo sapiens
  misc_RNA (1)...(19): siRNA sense strand
uggcaaggaaggugugauu

SEQ ID NO: 2264013 - RNA, 19 nt, Homo sapiens
  misc_RNA (1)...(19): siRNA sense strand
ggacuugacaacagagcau

SEQ ID NO: 2264014 - RNA, 19 nt, Homo sapiens
  misc_RNA (1)...(19): siRNA sense strand
auacagggacauugagauu

SEQ ID NO: 2264015 - RNA, 19 nt, Homo sapiens
  misc_RNA (1)...(19): siRNA sense strand
uuggaaaggaauagcaauu

SEQ ID NO: 2264016 - RNA, 19 nt, Homo sapiens
  misc_RNA (1)...(19): siRNA sense strand
agaaaggaacagugagacu

SEQ ID NO: 2264017 - RNA, 19 nt, Homo sapiens
  misc_RNA (1)...(19): siRNA sense strand
ccgcagaggaauuggaaag

SEQ ID NO: 2264018 - RNA, 19 nt, Homo sapiens
  misc_RNA (1)...(19): siRNA sense strand
ugggcuugcuggaggagaa

SEQ ID NO: 2264019 - RNA, 19 nt, Homo sapiens
  misc_RNA (1)...(19): siRNA sense strand
ccgugaagcccuaccacua

SEQ ID NO: 2264020 - RNA, 19 nt, Homo sapiens
  misc_RNA (1)...(19): siRNA sense strand
uggauaagugauacagaau

SEQ ID NO: 2264021 - RNA, 19 nt, Homo sapiens
  misc_RNA (1)...(19): siRNA sense strand
cagagaacagaaaggaaca

SEQ ID NO: 2264022 - RNA, 19 nt, Homo sapiens
  misc_RNA (1)...(19): siRNA sense strand
cagcaaagggagaaaauca

SEQ ID NO: 2264023 - RNA, 19 nt, Homo sapiens
  misc_RNA (1)...(19): siRNA sense strand
cugucuuaauagaaggcaa

SEQ ID NO: 2264024 - RNA, 19 nt, Homo sapiens
  misc_RNA (1)...(19): siRNA sense strand
ugaccaagauccuagccua

SEQ ID NO: 2264025 - RNA, 19 nt, Homo sapiens
  misc_RNA (1)...(19): siRNA sense strand
cgguggugguaaaguguga

SEQ ID NO: 2264026 - RNA, 19 nt, Homo sapiens
  misc_RNA (1)...(19): siRNA sense strand
caucuacagagaacagaaa

SEQ ID NO: 2264027 - RNA, 19 nt, Homo sapiens
  misc_RNA (1)...(19): siRNA sense strand
gaacaugucaagaaggcca

SEQ ID NO: 2264028 - RNA, 19 nt, Homo sapiens
  misc_RNA (1)...(19): siRNA sense strand
agccaucagauaugaaaua

SEQ ID NO: 2264029 - RNA, 19 nt, Homo sapiens
  misc_RNA (1)...(19): siRNA sense strand
caaaauuccucauggggau

SEQ ID NO: 2264030 - RNA, 19 nt, Homo sapiens
  misc_RNA (1)...(19): siRNA sense strand
ccguguuugggaaggauua

SEQ ID NO: 2264031 - RNA, 19 nt, Homo sapiens
  misc_RNA (1)...(19): siRNA sense strand
cugugcacaugucgggaaa

SEQ ID NO: 2264032 - RNA, 19 nt, Homo sapiens
  misc_RNA (1)...(19): siRNA sense strand
ucucaaaagaagaagguca

SEQ ID NO: 2264033 - RNA, 19 nt, Homo sapiens
  misc_RNA (1)...(19): siRNA sense strand
cgacaacucuacagugcca

SEQ ID NO: 2264034 - RNA, 19 nt, Homo sapiens
  misc_RNA (1)...(19): siRNA sense strand
aggagaaggaccagaugga

SEQ ID NO: 2264035 - RNA, 19 nt, Homo sapiens
  misc_RNA (1)...(19): siRNA sense strand
cagcgaaagaggacgagga

SEQ ID NO: 2264036 - RNA, 19 nt, Homo sapiens
  misc_RNA (1)...(19): siRNA sense strand
agauagagaguaugcacuu

SEQ ID NO: 2264037 - RNA, 19 nt, Homo sapiens
  misc_RNA (1)...(19): siRNA sense strand
aaucaaggccagacauuca

SEQ ID NO: 2264038 - RNA, 19 nt, Homo sapiens
  misc_RNA (1)...(19): siRNA sense strand
gugcacaugucgggaaaca

SEQ ID NO: 2264039 - RNA, 19 nt, Homo sapiens
  misc_RNA (1)...(19): siRNA sense strand
gcacgaagaaacacgagga

SEQ ID NO: 2264040 - RNA, 19 nt, Homo sapiens
  misc_RNA (1)...(19): siRNA sense strand
aaaguggaauacagggaca

SEQ ID NO: 2264041 - RNA, 19 nt, Homo sapiens
  misc_RNA (1)...(19): siRNA sense strand
gggucugcacgaagaaaca

SEQ ID NO: 2264042 - RNA, 19 nt, Homo sapiens
  misc_RNA (1)...(19): siRNA sense strand
cuauggugacggugcacaa

SEQ ID NO: 2264043 - RNA, 19 nt, Homo sapiens
  misc_RNA (1)...(19): siRNA sense strand
ccagaagucagcaaugcaa

SEQ ID NO: 2264044 - RNA, 19 nt, Homo sapiens
  misc_RNA (1)...(19): siRNA sense strand
cagaagucagcaaugcaaa

SEQ ID NO: 2264045 - RNA, 19 nt, Homo sapiens
  misc_RNA (1)...(19): siRNA sense strand
cccgaggcuaaguggauaa

SEQ ID NO: 2264046 - RNA, 19 nt, Homo sapiens
  misc_RNA (1)...(19): siRNA sense strand
aggccuggcuccacagaca

SEQ ID NO: 2264047 - RNA, 19 nt, Homo sapiens
  misc_RNA (1)...(19): siRNA sense strand
cuaaaguggaauacaggga

SEQ ID NO: 2264048 - RNA, 19 nt, Homo sapiens
  misc_RNA (1)...(19): siRNA sense strand
gcugagaaguucgagguga

SEQ ID NO: 2264049 - RNA, 19 nt, Homo sapiens
  misc_RNA (1)...(19): siRNA sense strand
uggaauacagggacauuga

SEQ ID NO: 2264050 - RNA, 19 nt, Homo sapiens
  misc_RNA (1)...(19): siRNA sense strand
ccagcaaccuucaccgaca

SEQ ID NO: 2264051 - RNA, 19 nt, Homo sapiens
  misc_RNA (1)...(19): siRNA sense strand
aggcuaaguggauaaguga

SEQ ID NO: 2264052 - RNA, 19 nt, Homo sapiens
  misc_RNA (1)...(19): siRNA sense strand
cauacaauguggaacccau

SEQ ID NO: 2264053 - RNA, 19 nt, Homo sapiens
  misc_RNA (1)...(19): siRNA sense strand
cguuauuggcuuaaaugga

SEQ ID NO: 2264054 - RNA, 19 nt, Homo sapiens
  misc_RNA (1)...(19): siRNA sense strand
ccagggaggacgagggaaa

SEQ ID NO: 2264055 - RNA, 19 nt, Homo sapiens
  misc_RNA (1)...(19): siRNA sense strand
cgaaagaggacgaggagga

SEQ ID NO: 2264056 - RNA, 19 nt, Homo sapiens
  misc_RNA (1)...(19): siRNA sense strand
aggacgaggaggaggacua

SEQ ID NO: 2264057 - RNA, 19 nt, Homo sapiens
  misc_RNA (1)...(19): siRNA sense strand
gcuucaggauccaggacaa

SEQ ID NO: 2264058 - RNA, 19 nt, Homo sapiens
  misc_RNA (1)...(19): siRNA sense strand
ggaccaagcuccugcacga

SEQ ID NO: 2264059 - RNA, 19 nt, Homo sapiens
  misc_RNA (1)...(19): siRNA sense strand
acagaaaggaacagugaga

SEQ ID NO: 2264060 - RNA, 19 nt, Homo sapiens
  misc_RNA (1)...(19): siRNA sense strand
ugucuuaauagaaggcaaa

SEQ ID NO: 2264061 - RNA, 19 nt, Homo sapiens
  misc_RNA (1)...(19): siRNA sense strand
ccuagaaacaaaugaacau

SEQ ID NO: 2264062 - RNA, 19 nt, Homo sapiens
  misc_RNA (1)...(19): siRNA sense strand
gggacugggacgugaccaa

SEQ ID NO: 2264063 - RNA, 19 nt, Homo sapiens
  misc_RNA (1)...(19): siRNA sense strand
uggcaaggaaggugugauu

SEQ ID NO: 2264064 - RNA, 19 nt, Homo sapiens
  misc_RNA (1)...(19): siRNA sense strand
ggacuugacaacagagcau

SEQ ID NO: 2264065 - RNA, 19 nt, Homo sapiens
  misc_RNA (1)...(19): siRNA sense strand
auacagggacauugagauu

SEQ ID NO: 2264066 - RNA, 19 nt, Homo sapiens
  misc_RNA (1)...(19): siRNA sense strand
uuggaaaggaauagcaauu

SEQ ID NO: 2264067 - RNA, 19 nt, Homo sapiens
  misc_RNA (1)...(19): siRNA sense strand
agaaaggaacagugagacu

SEQ ID NO: 2264068 - RNA, 19 nt, Homo sapiens
  misc_RNA (1)...(19): siRNA sense strand
ccgcagaggaauuggaaag

SEQ ID NO: 2264069 - RNA, 19 nt, Homo sapiens
  misc_RNA (1)...(19): siRNA sense strand
ugggcuugcuggaggagaa

SEQ ID NO: 2264070 - RNA, 19 nt, Homo sapiens
  misc_RNA (1)...(19): siRNA sense strand
ccgugaagcccuaccacua

SEQ ID NO: 2264071 - RNA, 19 nt, Homo sapiens
  misc_RNA (1)...(19): siRNA sense strand
uggauaagugauacagaau

SEQ ID NO: 2264072 - RNA, 19 nt, Homo sapiens
  misc_RNA (1)...(19): siRNA sense strand
cagagaacagaaaggaaca

SEQ ID NO: 2264073 - RNA, 19 nt, Homo sapiens
  misc_RNA (1)...(19): siRNA sense strand
cagcaaagggagaaaauca

SEQ ID NO: 2264074 - RNA, 19 nt, Homo sapiens
  misc_RNA (1)...(19): siRNA sense strand
cugucuuaauagaaggcaa

SEQ ID NO: 2264075 - RNA, 19 nt, Homo sapiens
  misc_RNA (1)...(19): siRNA sense strand
ugaccaagauccuagccua

SEQ ID NO: 2264076 - RNA, 19 nt, Homo sapiens
  misc_RNA (1)...(19): siRNA sense strand
cgguggugguaaaguguga

SEQ ID NO: 2264077 - RNA, 19 nt, Homo sapiens
  misc_RNA (1)...(19): siRNA sense strand
caucuacagagaacagaaa

SEQ ID NO: 2264078 - RNA, 19 nt, Homo sapiens
  misc_RNA (1)...(19): siRNA sense strand
gaacaugucaagaaggcca

SEQ ID NO: 2264079 - RNA, 19 nt, Homo sapiens
  misc_RNA (1)...(19): siRNA sense strand
agccaucagauaugaaaua

SEQ ID NO: 2264080 - RNA, 19 nt, Homo sapiens
  misc_RNA (1)...(19): siRNA sense strand
caaaauuccucauggggau

SEQ ID NO: 2264081 - RNA, 19 nt, Homo sapiens
  misc_RNA (1)...(19): siRNA sense strand
ccguguuugggaaggauua

SEQ ID NO: 2264082 - RNA, 19 nt, Homo sapiens
  misc_RNA (1)...(19): siRNA sense strand
cugugcacaugucgggaaa

SEQ ID NO: 2264083 - RNA, 19 nt, Homo sapiens
  misc_RNA (1)...(19): siRNA sense strand
ucucaaaagaagaagguca

SEQ ID NO: 2264084 - RNA, 19 nt, Homo sapiens
  misc_RNA (1)...(19): siRNA sense strand
cgacaacucuacagugcca

SEQ ID NO: 2264085 - RNA, 19 nt, Homo sapiens
  misc_RNA (1)...(19): siRNA sense strand
aggagaaggaccagaugga

SEQ ID NO: 2264086 - RNA, 19 nt, Homo sapiens
  misc_RNA (1)...(19): siRNA sense strand
cagcgaaagaggacgagga

SEQ ID NO: 2264087 - RNA, 19 nt, Homo sapiens
  misc_RNA (1)...(19): siRNA sense strand
agauagagaguaugcacuu

SEQ ID NO: 2264088 - RNA, 19 nt, Homo sapiens
  misc_RNA (1)...(19): siRNA sense strand
aaucaaggccagacauuca

SEQ ID NO: 2264089 - RNA, 19 nt, Homo sapiens
  misc_RNA (1)...(19): siRNA sense strand
gugcacaugucgggaaaca

SEQ ID NO: 2264090 - RNA, 19 nt, Homo sapiens
  misc_RNA (1)...(19): siRNA sense strand
gcacgaagaaacacgagga

SEQ ID NO: 2264091 - RNA, 19 nt, Homo sapiens
  misc_RNA (1)...(19): siRNA sense strand
aaaguggaauacagggaca

SEQ ID NO: 2264092 - RNA, 19 nt, Homo sapiens
  misc_RNA (1)...(19): siRNA sense strand
gggucugcacgaagaaaca

SEQ ID NO: 2264093 - RNA, 19 nt, Homo sapiens
  misc_RNA (1)...(19): siRNA sense strand
cuauggugacggugcacaa

SEQ ID NO: 2264094 - RNA, 19 nt, Homo sapiens
  misc_RNA (1)...(19): siRNA sense strand
ccagaagucagcaaugcaa

SEQ ID NO: 2264095 - RNA, 19 nt, Homo sapiens
  misc_RNA (1)...(19): siRNA sense strand
cagaagucagcaaugcaaa

SEQ ID NO: 2264096 - RNA, 19 nt, Homo sapiens
  misc_RNA (1)...(19): siRNA sense strand
cccgaggcuaaguggauaa

SEQ ID NO: 2264097 - RNA, 19 nt, Homo sapiens
  misc_RNA (1)...(19): siRNA sense strand
aggccuggcuccacagaca

SEQ ID NO: 2264098 - RNA, 19 nt, Homo sapiens
  misc_RNA (1)...(19): siRNA sense strand
cuaaaguggaauacaggga

SEQ ID NO: 2264099 - RNA, 19 nt, Homo sapiens
  misc_RNA (1)...(19): siRNA sense strand
gcugagaaguucgagguga

SEQ ID NO: 2264100 - RNA, 19 nt, Homo sapiens
  misc_RNA (1)...(19): siRNA sense strand
uggaauacagggacauuga

SEQ ID NO: 2264101 - RNA, 19 nt, Homo sapiens
  misc_RNA (1)...(19): siRNA sense strand
ccagcaaccuucaccgaca

SEQ ID NO: 2264102 - RNA, 19 nt, Homo sapiens
  misc_RNA (1)...(19): siRNA sense strand
aggcuaaguggauaaguga

SEQ ID NO: 2264103 - RNA, 19 nt, Homo sapiens
  misc_RNA (1)...(19): siRNA sense strand
cauacaauguggaacccau

SEQ ID NO: 2264104 - RNA, 19 nt, Homo sapiens
  misc_RNA (1)...(19): siRNA sense strand
cguuauuggcuuaaaugga

SEQ ID NO: 2264105 - RNA, 19 nt, Homo sapiens
  misc_RNA (1)...(19): siRNA sense strand
cuggcuaacaacagaauau

SEQ ID NO: 2264106 - RNA, 19 nt, Homo sapiens
  misc_RNA (1)...(19): siRNA sense strand
caacagaauauccagguca

SEQ ID NO: 2264107 - RNA, 19 nt, Homo sapiens
  misc_RNA (1)...(19): siRNA sense strand
aguauggcgauuauggaua

SEQ ID NO: 2264108 - RNA, 19 nt, Homo sapiens
  misc_RNA (1)...(19): siRNA sense strand
cgccaguggaaguucauaa

SEQ ID NO: 2264109 - RNA, 19 nt, Homo sapiens
  misc_RNA (1)...(19): siRNA sense strand
agucagugcuggaucggga

SEQ ID NO: 2264110 - RNA, 19 nt, Homo sapiens
  misc_RNA (1)...(19): siRNA sense strand
cuauauccgaggagcaaca

SEQ ID NO: 2264111 - RNA, 19 nt, Homo sapiens
  misc_RNA (1)...(19): siRNA sense strand
ccucagucuucucugggua

SEQ ID NO: 2264112 - RNA, 19 nt, Homo sapiens
  misc_RNA (1)...(19): siRNA sense strand
ugaagaagaugaugaugau

SEQ ID NO: 2264113 - RNA, 19 nt, Homo sapiens
  misc_RNA (1)...(19): siRNA sense strand
ugcaaaagcuagacagcaa

SEQ ID NO: 2264114 - RNA, 19 nt, Homo sapiens
  misc_RNA (1)...(19): siRNA sense strand
augaagaagaugaugauga

SEQ ID NO: 2264115 - RNA, 19 nt, Homo sapiens
  misc_RNA (1)...(19): siRNA sense strand
guaacaaaucggaaaagaa

SEQ ID NO: 2264116 - RNA, 19 nt, Homo sapiens
  misc_RNA (1)...(19): siRNA sense strand
cacuagaaaguuugggauu

SEQ ID NO: 2264117 - RNA, 19 nt, Homo sapiens
  misc_RNA (1)...(19): siRNA sense strand
aggaugaagaagaugauga

SEQ ID NO: 2264118 - RNA, 19 nt, Homo sapiens
  misc_RNA (1)...(19): siRNA sense strand
ccuuggcauuccugaagaa

SEQ ID NO: 2264119 - RNA, 19 nt, Homo sapiens
  misc_RNA (1)...(19): siRNA sense strand
cauuccugaagaagaguua

SEQ ID NO: 2264120 - RNA, 19 nt, Homo sapiens
  misc_RNA (1)...(19): siRNA sense strand
agaagaugaugaugauauc

SEQ ID NO: 2264121 - RNA, 19 nt, Homo sapiens
  misc_RNA (1)...(19): siRNA sense strand
agugagaacaugagggacu

SEQ ID NO: 2264122 - RNA, 19 nt, Homo sapiens
  misc_RNA (1)...(19): siRNA sense strand
aagugaagcaucagaccaa

SEQ ID NO: 2264123 - RNA, 19 nt, Homo sapiens
  misc_RNA (1)...(19): siRNA sense strand
gccaaaaggaugaggaguu

SEQ ID NO: 2264124 - RNA, 19 nt, Homo sapiens
  misc_RNA (1)...(19): siRNA sense strand
cauucugagagcaaagaua

SEQ ID NO: 2264125 - RNA, 19 nt, Homo sapiens
  misc_RNA (1)...(19): siRNA sense strand
ggacuuugggccuggguca

SEQ ID NO: 2264126 - RNA, 19 nt, Homo sapiens
  misc_RNA (1)...(19): siRNA sense strand
cauaagagccgccuggaga

SEQ ID NO: 2264127 - RNA, 19 nt, Homo sapiens
  misc_RNA (1)...(19): siRNA sense strand
gugcaacaggagaaggaga

SEQ ID NO: 2264128 - RNA, 19 nt, Homo sapiens
  misc_RNA (1)...(19): siRNA sense strand
ggaaaucuucaaugagcau

SEQ ID NO: 2264129 - RNA, 19 nt, Homo sapiens
  misc_RNA (1)...(19): siRNA sense strand
uggaugugguagaggucau

SEQ ID NO: 2264130 - RNA, 19 nt, Homo sapiens
  misc_RNA (1)...(19): siRNA sense strand
gauaguggucgcagcggaa

SEQ ID NO: 2264131 - RNA, 19 nt, Homo sapiens
  misc_RNA (1)...(19): siRNA sense strand
ucccaagaugacagaguua

SEQ ID NO: 2264132 - RNA, 19 nt, Homo sapiens
  misc_RNA (1)...(19): siRNA sense strand
ccuuuauggaagaagucaa

SEQ ID NO: 2264133 - RNA, 19 nt, Homo sapiens
  misc_RNA (1)...(19): siRNA sense strand
ggaaacaacuacaggcguc

SEQ ID NO: 2264134 - RNA, 19 nt, Homo sapiens
  misc_RNA (1)...(19): siRNA sense strand
gggugaaguggcagccuuu

SEQ ID NO: 2264135 - RNA, 19 nt, Homo sapiens
  misc_RNA (1)...(19): siRNA sense strand
aggacaucauggagaaacu

SEQ ID NO: 2264136 - RNA, 19 nt, Homo sapiens
  misc_RNA (1)...(19): siRNA sense strand
ggcacggaagugaaggaaa

SEQ ID NO: 2264137 - RNA, 19 nt, Homo sapiens
  misc_RNA (1)...(19): siRNA sense strand
cugagcaagugaagcauca

SEQ ID NO: 2264138 - RNA, 19 nt, Homo sapiens
  misc_RNA (1)...(19): siRNA sense strand
ccacauccagugagaacau

SEQ ID NO: 2264139 - RNA, 19 nt, Homo sapiens
  misc_RNA (1)...(19): siRNA sense strand
cagcaaacacccucagcga

SEQ ID NO: 2264140 - RNA, 19 nt, Homo sapiens
  misc_RNA (1)...(19): siRNA sense strand
aagcacuacucuaagccaa

SEQ ID NO: 2264141 - RNA, 19 nt, Homo sapiens
  misc_RNA (1)...(19): siRNA sense strand
acgugauggaugugguaga

SEQ ID NO: 2264142 - RNA, 19 nt, Homo sapiens
  misc_RNA (1)...(19): siRNA sense strand
cagcaacagaccaccgcaa

SEQ ID NO: 2264143 - RNA, 19 nt, Homo sapiens
  misc_RNA (1)...(19): siRNA sense strand
aggcuugcugagauggaaa

SEQ ID NO: 2264144 - RNA, 19 nt, Homo sapiens
  misc_RNA (1)...(19): siRNA sense strand
ggaggacaucauggagaaa

SEQ ID NO: 2264145 - RNA, 19 nt, Homo sapiens
  misc_RNA (1)...(19): siRNA sense strand
aagcauuauuucagcaaac

SEQ ID NO: 2264146 - RNA, 19 nt, Homo sapiens
  misc_RNA (1)...(19): siRNA sense strand
augacagaguuauaccaaa

SEQ ID NO: 2264147 - RNA, 19 nt, Homo sapiens
  misc_RNA (1)...(19): siRNA sense strand
ccgggaagccagucauuga

SEQ ID NO: 2264148 - RNA, 19 nt, Homo sapiens
  misc_RNA (1)...(19): siRNA sense strand
gggcaauggaggaacuaag

SEQ ID NO: 2264149 - RNA, 19 nt, Homo sapiens
  misc_RNA (1)...(19): siRNA sense strand
gcugagaaguccaggcaga

SEQ ID NO: 2264150 - RNA, 19 nt, Homo sapiens
  misc_RNA (1)...(19): siRNA sense strand
gugaaagugaggagaccaa

SEQ ID NO: 2264151 - RNA, 19 nt, Homo sapiens
  misc_RNA (1)...(19): siRNA sense strand
gggauaucgaccaggacaa

SEQ ID NO: 2264152 - RNA, 19 nt, Homo sapiens
  misc_RNA (1)...(19): siRNA sense strand
cugaagaaggaaagcgaca

SEQ ID NO: 2264153 - RNA, 19 nt, Homo sapiens
  misc_RNA (1)...(19): siRNA sense strand
cgagcgggaacgcgagaaa

SEQ ID NO: 2264154 - RNA, 19 nt, Homo sapiens
  misc_RNA (1)...(19): siRNA sense strand
cgggaagaacugagaucga

SEQ ID NO: 2264155 - RNA, 19 nt, Homo sapiens
  misc_RNA (1)...(19): siRNA sense strand
gcgaagaaaaggagcgcga

SEQ ID NO: 2264156 - RNA, 19 nt, Homo sapiens
  misc_RNA (1)...(19): siRNA sense strand
ggugaagccuagugagcug

SEQ ID NO: 2264157 - RNA, 19 nt, Homo sapiens
  misc_RNA (1)...(19): siRNA sense strand
gcgagaacgucuagcgcug

SEQ ID NO: 2264158 - RNA, 19 nt, Homo sapiens
  misc_RNA (1)...(19): siRNA sense strand
guaucaagcucuggggcua

SEQ ID NO: 2264159 - RNA, 19 nt, Homo sapiens
  misc_RNA (1)...(19): siRNA sense strand
gggacaggguaucggugga

SEQ ID NO: 2264160 - RNA, 19 nt, Homo sapiens
  misc_RNA (1)...(19): siRNA sense strand
acgccaugggacaggguau

SEQ ID NO: 2264161 - RNA, 19 nt, Homo sapiens
  misc_RNA (1)...(19): siRNA sense strand
cugccagguucaacaaaca

SEQ ID NO: 2264162 - RNA, 19 nt, Homo sapiens
  misc_RNA (1)...(19): siRNA sense strand
agcagcgacccuagggaua

SEQ ID NO: 2264163 - RNA, 19 nt, Homo sapiens
  misc_RNA (1)...(19): siRNA sense strand
gaguaugguggcagagaaa

SEQ ID NO: 2264164 - RNA, 19 nt, Homo sapiens
  misc_RNA (1)...(19): siRNA sense strand
aggaaauugguuugagaua

SEQ ID NO: 2264165 - RNA, 19 nt, Homo sapiens
  misc_RNA (1)...(19): siRNA sense strand
gguaaugacgacaggacua

SEQ ID NO: 2264166 - RNA, 19 nt, Homo sapiens
  misc_RNA (1)...(19): siRNA sense strand
ugguagaaguuaacaguga

SEQ ID NO: 2264167 - RNA, 19 nt, Homo sapiens
  misc_RNA (1)...(19): siRNA sense strand
caauaugcucggaggaaaa

SEQ ID NO: 2264168 - RNA, 19 nt, Homo sapiens
  misc_RNA (1)...(19): siRNA sense strand
agacaagaaccuucagauu

SEQ ID NO: 2264169 - RNA, 19 nt, Homo sapiens
  misc_RNA (1)...(19): siRNA sense strand
uuagguauguaaugggaaa

SEQ ID NO: 2264170 - RNA, 19 nt, Homo sapiens
  misc_RNA (1)...(19): siRNA sense strand
agacaucagccuaggaaaa

SEQ ID NO: 2264171 - RNA, 19 nt, Homo sapiens
  misc_RNA (1)...(19): siRNA sense strand
caaaugauaaagugggaga

SEQ ID NO: 2264172 - RNA, 19 nt, Homo sapiens
  misc_RNA (1)...(19): siRNA sense strand
gaguaauugauuuggauga

SEQ ID NO: 2264173 - RNA, 19 nt, Homo sapiens
  misc_RNA (1)...(19): siRNA sense strand
caguauuggugucagaaau

SEQ ID NO: 2264174 - RNA, 19 nt, Homo sapiens
  misc_RNA (1)...(19): siRNA sense strand
acaauaugcucggaggaaa

SEQ ID NO: 2264175 - RNA, 19 nt, Homo sapiens
  misc_RNA (1)...(19): siRNA sense strand
caaacgugguagugacaga

SEQ ID NO: 2264176 - RNA, 19 nt, Homo sapiens
  misc_RNA (1)...(19): siRNA sense strand
cucaaugggccaagauuua

SEQ ID NO: 2264177 - RNA, 19 nt, Homo sapiens
  misc_RNA (1)...(19): siRNA sense strand
caggacaaauagaagaaaa

SEQ ID NO: 2264178 - RNA, 19 nt, Homo sapiens
  misc_RNA (1)...(19): siRNA sense strand
ccuucaagauuauaagaca

SEQ ID NO: 2264179 - RNA, 19 nt, Homo sapiens
  misc_RNA (1)...(19): siRNA sense strand
acugaaagcaucugcaauu

SEQ ID NO: 2264180 - RNA, 19 nt, Homo sapiens
  misc_RNA (1)...(19): siRNA sense strand
agagagaaugacaggauuu

SEQ ID NO: 2264181 - RNA, 19 nt, Homo sapiens
  misc_RNA (1)...(19): siRNA sense strand
gcagaaacgugaauggauc

SEQ ID NO: 2264182 - RNA, 19 nt, Homo sapiens
  misc_RNA (1)...(19): siRNA sense strand
aagacaacucaaagaggaa

SEQ ID NO: 2264183 - RNA, 19 nt, Homo sapiens
  misc_RNA (1)...(19): siRNA sense strand
cagcggaaugugagugcaa

SEQ ID NO: 2264184 - RNA, 19 nt, Homo sapiens
  misc_RNA (1)...(19): siRNA sense strand
ugggaggaggagagagaau

SEQ ID NO: 2264185 - RNA, 19 nt, Homo sapiens
  misc_RNA (1)...(19): siRNA sense strand
guagugacagaaagaguaa

SEQ ID NO: 2264186 - RNA, 19 nt, Homo sapiens
  misc_RNA (1)...(19): siRNA sense strand
gauuauaagacaagaaccu

SEQ ID NO: 2264187 - RNA, 19 nt, Homo sapiens
  misc_RNA (1)...(19): siRNA sense strand
aguauaguaccgugcaaua

SEQ ID NO: 2264188 - RNA, 19 nt, Homo sapiens
  misc_RNA (1)...(19): siRNA sense strand
gauucuuggucuuaggauu

SEQ ID NO: 2264189 - RNA, 19 nt, Homo sapiens
  misc_RNA (1)...(19): siRNA sense strand
gcgcugauuugcauggaau

SEQ ID NO: 2264190 - RNA, 19 nt, Homo sapiens
  misc_RNA (1)...(19): siRNA sense strand
ugguggugguagaaguuaa

SEQ ID NO: 2264191 - RNA, 19 nt, Homo sapiens
  misc_RNA (1)...(19): siRNA sense strand
ccugaguggagcuggcaua

SEQ ID NO: 2264192 - RNA, 19 nt, Homo sapiens
  misc_RNA (1)...(19): siRNA sense strand
aaagaacaaaugugggaau

SEQ ID NO: 2264193 - RNA, 19 nt, Homo sapiens
  misc_RNA (1)...(19): siRNA sense strand
cgaauguuauagugacaga

SEQ ID NO: 2264194 - RNA, 19 nt, Homo sapiens
  misc_RNA (1)...(19): siRNA sense strand
ggcuacauuugcaggacaa

SEQ ID NO: 2264195 - RNA, 19 nt, Homo sapiens
  misc_RNA (1)...(19): siRNA sense strand
agucgaaucacaaaguaua

SEQ ID NO: 2264196 - RNA, 19 nt, Homo sapiens
  misc_RNA (1)...(19): siRNA sense strand
gggccaagauuuagagagg

SEQ ID NO: 2264197 - RNA, 19 nt, Homo sapiens
  misc_RNA (1)...(19): siRNA sense strand
aauugaaggcccaguguuu

SEQ ID NO: 2264198 - RNA, 19 nt, Homo sapiens
  misc_RNA (1)...(19): siRNA sense strand
ccaucauccuagagagucu

SEQ ID NO: 2264199 - RNA, 19 nt, Homo sapiens
  misc_RNA (1)...(19): siRNA sense strand
acgcagaugaaccgaacaa

SEQ ID NO: 2264200 - RNA, 19 nt, Homo sapiens
  misc_RNA (1)...(19): siRNA sense strand
ugaaagaacaaauguggga

SEQ ID NO: 2264201 - RNA, 19 nt, Homo sapiens
  misc_RNA (1)...(19): siRNA sense strand
ugauucaagaacaggcaaa

SEQ ID NO: 2264202 - RNA, 19 nt, Homo sapiens
  misc_RNA (1)...(19): siRNA sense strand
caauacuggcagacaagaa

SEQ ID NO: 2264203 - RNA, 19 nt, Homo sapiens
  misc_RNA (1)...(19): siRNA sense strand
ugggaucagcgguggcaua

SEQ ID NO: 2264204 - RNA, 19 nt, Homo sapiens
  misc_RNA (1)...(19): siRNA sense strand
gaagacaacucaaagagga

SEQ ID NO: 2264205 - RNA, 19 nt, Homo sapiens
  misc_RNA (1)...(19): siRNA sense strand
cauccauaguugaucgaga

SEQ ID NO: 2264206 - RNA, 19 nt, Homo sapiens
  misc_RNA (1)...(19): siRNA sense strand
gagucaggguuuuggauau

SEQ ID NO: 2264207 - RNA, 19 nt, Homo sapiens
  misc_RNA (1)...(19): siRNA sense strand
gcggaaugugagugcaaca

SEQ ID NO: 2264208 - RNA, 19 nt, Homo sapiens
  misc_RNA (1)...(19): siRNA sense strand
ucucuggaaaugaaggaaa

SEQ ID NO: 2264209 - RNA, 19 nt, Homo sapiens
  misc_RNA (1)...(19): siRNA sense strand
ucugggaggaggagagaga

SEQ ID NO: 2264210 - RNA, 19 nt, Homo sapiens
  misc_RNA (1)...(19): siRNA sense strand
aaugacaggauuugaacua

SEQ ID NO: 2264211 - RNA, 19 nt, Homo sapiens
  misc_RNA (1)...(19): siRNA sense strand
caagaauacucuggaacau

SEQ ID NO: 2264212 - RNA, 19 nt, Homo sapiens
  misc_RNA (1)...(19): siRNA sense strand
gguaauagcaccaagcucu

SEQ ID NO: 2264213 - RNA, 19 nt, Homo sapiens
  misc_RNA (1)...(19): siRNA sense strand
ggugaagacaacucaaaga

SEQ ID NO: 2264214 - RNA, 19 nt, Homo sapiens
  misc_RNA (1)...(19): siRNA sense strand
cucuggaaaugaaggaaau

SEQ ID NO: 2264215 - RNA, 19 nt, Homo sapiens
  misc_RNA (1)...(19): siRNA sense strand
uuaccaaggaacaguacaa

SEQ ID NO: 2264216 - RNA, 19 nt, Homo sapiens
  misc_RNA (1)...(19): siRNA sense strand
uggagaaguuacagacaaa

SEQ ID NO: 2264217 - RNA, 19 nt, Homo sapiens
  misc_RNA (1)...(19): siRNA sense strand
caucaaggucaaagugaaa

SEQ ID NO: 2264218 - RNA, 19 nt, Homo sapiens
  misc_RNA (1)...(19): siRNA sense strand
cuguaaagauuguggccau

SEQ ID NO: 2264219 - RNA, 19 nt, Homo sapiens
  misc_RNA (1)...(19): siRNA sense strand
gcugcaacaaagugagaaa

SEQ ID NO: 2264220 - RNA, 19 nt, Homo sapiens
  misc_RNA (1)...(19): siRNA sense strand
agaaaguaacucaggaaau

SEQ ID NO: 2264221 - RNA, 19 nt, Homo sapiens
  misc_RNA (1)...(19): siRNA sense strand
aggaaaugaaggagguuau

SEQ ID NO: 2264222 - RNA, 19 nt, Homo sapiens
  misc_RNA (1)...(19): siRNA sense strand
ggucacugaaagaguaaua

SEQ ID NO: 2264223 - RNA, 19 nt, Homo sapiens
  misc_RNA (1)...(19): siRNA sense strand
uaaagauacaggagagauu

SEQ ID NO: 2264224 - RNA, 19 nt, Homo sapiens
  misc_RNA (1)...(19): siRNA sense strand
agaagaaagaggacucaaa

SEQ ID NO: 2264225 - RNA, 19 nt, Homo sapiens
  misc_RNA (1)...(19): siRNA sense strand
gggcagucuaguaggaaga

SEQ ID NO: 2264226 - RNA, 19 nt, Homo sapiens
  misc_RNA (1)...(19): siRNA sense strand
aggaaauugagcagagaca

SEQ ID NO: 2264227 - RNA, 19 nt, Homo sapiens
  misc_RNA (1)...(19): siRNA sense strand
cagaggaccuggauggaca

SEQ ID NO: 2264228 - RNA, 19 nt, Homo sapiens
  misc_RNA (1)...(19): siRNA sense strand
gaauaaugaaggagcacca

SEQ ID NO: 2264229 - RNA, 19 nt, Homo sapiens
  misc_RNA (1)...(19): siRNA sense strand
auaaagugcuugaagggau

SEQ ID NO: 2264230 - RNA, 19 nt, Homo sapiens
  misc_RNA (1)...(19): siRNA sense strand
cauagaaacagaugcucaa

SEQ ID NO: 2264231 - RNA, 19 nt, Homo sapiens
  misc_RNA (1)...(19): siRNA sense strand
gcuugggagaagugaaauu

SEQ ID NO: 2264232 - RNA, 19 nt, Homo sapiens
  misc_RNA (1)...(19): siRNA sense strand
aguaggaagaaauggagua

SEQ ID NO: 2264233 - RNA, 19 nt, Homo sapiens
  misc_RNA (1)...(19): siRNA sense strand
agagaaaguaacucaggaa

SEQ ID NO: 2264234 - RNA, 19 nt, Homo sapiens
  misc_RNA (1)...(19): siRNA sense strand
cagaagauuauccuagaaa

SEQ ID NO: 2264235 - RNA, 19 nt, Homo sapiens
  misc_RNA (1)...(19): siRNA sense strand
aagcuugggagaagugaaa

SEQ ID NO: 2264236 - RNA, 19 nt, Homo sapiens
  misc_RNA (1)...(19): siRNA sense strand
cagucuaguaggaagaaau

SEQ ID NO: 2264237 - RNA, 19 nt, Homo sapiens
  misc_RNA (1)...(19): siRNA sense strand
agauuuugguuuagaggaa

SEQ ID NO: 2264238 - RNA, 19 nt, Homo sapiens
  misc_RNA (1)...(19): siRNA sense strand
aggaguaaauacaagccua

SEQ ID NO: 2264239 - RNA, 19 nt, Homo sapiens
  misc_RNA (1)...(19): siRNA sense strand
agaagccaaugcagagaaa

SEQ ID NO: 2264240 - RNA, 19 nt, Homo sapiens
  misc_RNA (1)...(19): siRNA sense strand
uggccauaucagaagauua

SEQ ID NO: 2264241 - RNA, 19 nt, Homo sapiens
  misc_RNA (1)...(19): siRNA sense strand
gccaaugcagagaaaguaa

SEQ ID NO: 2264242 - RNA, 19 nt, Homo sapiens
  misc_RNA (1)...(19): siRNA sense strand
aagagauggcaauggagaa

SEQ ID NO: 2264243 - RNA, 19 nt, Homo sapiens
  misc_RNA (1)...(19): siRNA sense strand
ugacaauauaccuguagua

SEQ ID NO: 2264244 - RNA, 19 nt, Homo sapiens
  misc_RNA (1)...(19): siRNA sense strand
ucugauaauuggcuggcaa

SEQ ID NO: 2264245 - RNA, 19 nt, Homo sapiens
  misc_RNA (1)...(19): siRNA sense strand
cuaauauagcaguaggaca

SEQ ID NO: 2264246 - RNA, 19 nt, Homo sapiens
  misc_RNA (1)...(19): siRNA sense strand
aaauaaagauacaggagag

SEQ ID NO: 2264247 - RNA, 19 nt, Homo sapiens
  misc_RNA (1)...(19): siRNA sense strand
aggaaguagauuaugaaga

SEQ ID NO: 2264248 - RNA, 19 nt, Homo sapiens
  misc_RNA (1)...(19): siRNA sense strand
gaguaggagguauggccaa

SEQ ID NO: 2264249 - RNA, 19 nt, Homo sapiens
  misc_RNA (1)...(19): siRNA sense strand
acacugaggaagaugaaaa

SEQ ID NO: 2264250 - RNA, 19 nt, Homo sapiens
  misc_RNA (1)...(19): siRNA sense strand
ucuagaaaugugauagcaa

SEQ ID NO: 2264251 - RNA, 19 nt, Homo sapiens
  misc_RNA (1)...(19): siRNA sense strand
gugagcaaacuaugguuaa

SEQ ID NO: 2264252 - RNA, 19 nt, Homo sapiens
  misc_RNA (1)...(19): siRNA sense strand
cauuaagguucuugauauc

SEQ ID NO: 2264253 - RNA, 19 nt, Homo sapiens
  misc_RNA (1)...(19): siRNA sense strand
ggauggaaggugggaagaa

SEQ ID NO: 2264254 - RNA, 19 nt, Homo sapiens
  misc_RNA (1)...(19): siRNA sense strand
ggaugcaagaggaaacaau

SEQ ID NO: 2264255 - RNA, 19 nt, Homo sapiens
  misc_RNA (1)...(19): siRNA sense strand
aagauacaggagagauuua

SEQ ID NO: 2264256 - RNA, 19 nt, Homo sapiens
  misc_RNA (1)...(19): siRNA sense strand
agggaugguugaagaaaau

SEQ ID NO: 2264257 - RNA, 19 nt, Homo sapiens
  misc_RNA (1)...(19): siRNA sense strand
cugauaauuggcuggcaaa

SEQ ID NO: 2264258 - RNA, 19 nt, Homo sapiens
  misc_RNA (1)...(19): siRNA sense strand
ucaaacuaacgaaggaauu

SEQ ID NO: 2264259 - RNA, 19 nt, Homo sapiens
  misc_RNA (1)...(19): siRNA sense strand
caggaaauagucacugaaa

SEQ ID NO: 2264260 - RNA, 19 nt, Homo sapiens
  misc_RNA (1)...(19): siRNA sense strand
uguaaagauuguggccaua

SEQ ID NO: 2264261 - RNA, 19 nt, Homo sapiens
  misc_RNA (1)...(19): siRNA sense strand
ccucauuuagugcggcaaa

SEQ ID NO: 2264262 - RNA, 19 nt, Homo sapiens
  misc_RNA (1)...(19): siRNA sense strand
caggaaaugaaggagguua

SEQ ID NO: 2264263 - RNA, 19 nt, Homo sapiens
  misc_RNA (1)...(19): siRNA sense strand
ugaugaggacacuggacua

SEQ ID NO: 2264264 - RNA, 19 nt, Homo sapiens
  misc_RNA (1)...(19): siRNA sense strand
auggagaaguuacagacaa

SEQ ID NO: 2264265 - RNA, 19 nt, Homo sapiens
  misc_RNA (1)...(19): siRNA sense strand
aagggaugguugaagaaaa

SEQ ID NO: 2264266 - RNA, 19 nt, Homo sapiens
  misc_RNA (1)...(19): siRNA sense strand
acauagaaacagaugcuca

SEQ ID NO: 2264267 - RNA, 19 nt, Homo sapiens
  misc_RNA (1)...(19): siRNA sense strand
agauagagauaauuggauc

SEQ ID NO: 2264268 - RNA, 19 nt, Homo sapiens
  misc_RNA (1)...(19): siRNA sense strand
uuucagacaaucaggguuu

SEQ ID NO: 2264269 - RNA, 19 nt, Homo sapiens
  misc_RNA (1)...(19): siRNA sense strand
acagaaacaaguaugaaca

SEQ ID NO: 2264270 - RNA, 19 nt, Homo sapiens
  misc_RNA (1)...(19): siRNA sense strand
uagaaaugugauagcaaca

SEQ ID NO: 2264271 - RNA, 19 nt, Homo sapiens
  misc_RNA (1)...(19): siRNA sense strand
ugugauagcaacagaaacu

SEQ ID NO: 2264272 - RNA, 19 nt, Homo sapiens
  misc_RNA (1)...(19): siRNA sense strand
gcuuuggaugcaagaggaa

SEQ ID NO: 2264273 - RNA, 19 nt, Homo sapiens
  misc_RNA (1)...(19): siRNA sense strand
uugaagggaugguugaaga

SEQ ID NO: 2264274 - RNA, 19 nt, Homo sapiens
  misc_RNA (1)...(19): siRNA sense strand
uggcaauggagaaguuaca

SEQ ID NO: 2264275 - RNA, 19 nt, Homo sapiens
  misc_RNA (1)...(19): siRNA sense strand
cacaagucgauuaggagua

SEQ ID NO: 2264276 - RNA, 19 nt, Homo sapiens
  misc_RNA (1)...(19): siRNA sense strand
gagcaccaccugaagacaa

SEQ ID NO: 2264277 - RNA, 19 nt, Homo sapiens
  misc_RNA (1)...(19): siRNA sense strand
acgaagaccgcaagggcca

SEQ ID NO: 2264278 - RNA, 19 nt, Homo sapiens
  misc_RNA (1)...(19): siRNA sense strand
gaaaauucuaugacggcua

SEQ ID NO: 2264279 - RNA, 19 nt, Homo sapiens
  misc_RNA (1)...(19): siRNA sense strand
agaaagaggacucaaaauu

SEQ ID NO: 2264280 - RNA, 19 nt, Homo sapiens
  misc_RNA (1)...(19): siRNA sense strand
ugacaguagaagcaagaga

SEQ ID NO: 2264281 - RNA, 19 nt, Homo sapiens
  misc_RNA (1)...(19): siRNA sense strand
ucuaaaugcccaaggacua

SEQ ID NO: 2264282 - RNA, 19 nt, Homo sapiens
  misc_RNA (1)...(19): siRNA sense strand
gggugaaauugaagaaaau

SEQ ID NO: 2264283 - RNA, 19 nt, Homo sapiens
  misc_RNA (1)...(19): siRNA sense strand
caaagauggagaaggacua

SEQ ID NO: 2264284 - RNA, 19 nt, Homo sapiens
  misc_RNA (1)...(19): siRNA sense strand
gaauagagacuaaagguca

SEQ ID NO: 2264285 - RNA, 19 nt, Homo sapiens
  misc_RNA (1)...(19): siRNA sense strand
ugugaguggugcagacaaa

SEQ ID NO: 2264286 - RNA, 19 nt, Homo sapiens
  misc_RNA (1)...(19): siRNA sense strand
ccgcuagaacacugaauaa

SEQ ID NO: 2264287 - RNA, 19 nt, Homo sapiens
  misc_RNA (1)...(19): siRNA sense strand
uguugauggugaaggcaaa

SEQ ID NO: 2264288 - RNA, 19 nt, Homo sapiens
  misc_RNA (1)...(19): siRNA sense strand
cugcagagaaggagaagau

SEQ ID NO: 2264289 - RNA, 19 nt, Homo sapiens
  misc_RNA (1)...(19): siRNA sense strand
caaacugauccuagaacua

SEQ ID NO: 2264290 - RNA, 19 nt, Homo sapiens
  misc_RNA (1)...(19): siRNA sense strand
ggcucuagauuaugaacaa

SEQ ID NO: 2264291 - RNA, 19 nt, Homo sapiens
  misc_RNA (1)...(19): siRNA sense strand
aauagagacuaaaggucaa

SEQ ID NO: 2264292 - RNA, 19 nt, Homo sapiens
  misc_RNA (1)...(19): siRNA sense strand
gugaaagaugucaacgaua

SEQ ID NO: 2264293 - RNA, 19 nt, Homo sapiens
  misc_RNA (1)...(19): siRNA sense strand
ccucugggaaugaaggaaa

SEQ ID NO: 2264294 - RNA, 19 nt, Homo sapiens
  misc_RNA (1)...(19): siRNA sense strand
aggucaauaugaugaagaa

SEQ ID NO: 2264295 - RNA, 19 nt, Homo sapiens
  misc_RNA (1)...(19): siRNA sense strand
uggugaaggcucuagauua

SEQ ID NO: 2264296 - RNA, 19 nt, Homo sapiens
  misc_RNA (1)...(19): siRNA sense strand
cagaacaaucggugugaga

SEQ ID NO: 2264297 - RNA, 19 nt, Homo sapiens
  misc_RNA (1)...(19): siRNA sense strand
ucauauugguucauggaga

SEQ ID NO: 2264298 - RNA, 19 nt, Homo sapiens
  misc_RNA (1)...(19): siRNA sense strand
auuuaguaacggagacuua

SEQ ID NO: 2264299 - RNA, 19 nt, Homo sapiens
  misc_RNA (1)...(19): siRNA sense strand
gugcagacaaagauggaga

SEQ ID NO: 2264300 - RNA, 19 nt, Homo sapiens
  misc_RNA (1)...(19): siRNA sense strand
gggaauugaaggagcccau

SEQ ID NO: 2264301 - RNA, 19 nt, Homo sapiens
  misc_RNA (1)...(19): siRNA sense strand
augaagaagagaugacuau

SEQ ID NO: 2264302 - RNA, 19 nt, Homo sapiens
  misc_RNA (1)...(19): siRNA sense strand
gguucuggccauagaugaa

SEQ ID NO: 2264303 - RNA, 19 nt, Homo sapiens
  misc_RNA (1)...(19): siRNA sense strand
ccaauaaggacuacgcuga

SEQ ID NO: 2264304 - RNA, 19 nt, Homo sapiens
  misc_RNA (1)...(19): siRNA sense strand
agagauaagccuugguguu

SEQ ID NO: 2264305 - RNA, 19 nt, Homo sapiens
  misc_RNA (1)...(19): siRNA sense strand
cagauuuggaugaagagua

SEQ ID NO: 2264306 - RNA, 19 nt, Homo sapiens
  misc_RNA (1)...(19): siRNA sense strand
ucuggaaccaugagaacaa

SEQ ID NO: 2264307 - RNA, 19 nt, Homo sapiens
  misc_RNA (1)...(19): siRNA sense strand
acuuaguauugcugucaaa

SEQ ID NO: 2264308 - RNA, 19 nt, Homo sapiens
  misc_RNA (1)...(19): siRNA sense strand
acaacuacaaagcgugaaa

SEQ ID NO: 2264309 - RNA, 19 nt, Homo sapiens
  misc_RNA (1)...(19): siRNA sense strand
uagaugaauacacggguaa

SEQ ID NO: 2264310 - RNA, 19 nt, Homo sapiens
  misc_RNA (1)...(19): siRNA sense strand
uuacagacagucagaacaa

SEQ ID NO: 2264311 - RNA, 19 nt, Homo sapiens
  misc_RNA (1)...(19): siRNA sense strand
gggcgauaagcaugaauuu

SEQ ID NO: 2264312 - RNA, 19 nt, Homo sapiens
  misc_RNA (1)...(19): siRNA sense strand
gaugaagaagagaugacua

SEQ ID NO: 2264313 - RNA, 19 nt, Homo sapiens
  misc_RNA (1)...(19): siRNA sense strand
augaagaguacacagauaa

SEQ ID NO: 2264314 - RNA, 19 nt, Homo sapiens
  misc_RNA (1)...(19): siRNA sense strand
cgaugaggacacuaacaaa

SEQ ID NO: 2264315 - RNA, 19 nt, Homo sapiens
  misc_RNA (1)...(19): siRNA sense strand
cagcugagguucuggccau

SEQ ID NO: 2264316 - RNA, 19 nt, Homo sapiens
  misc_RNA (1)...(19): siRNA sense strand
aagacaaggaaaucacaaa

SEQ ID NO: 2264317 - RNA, 19 nt, Homo sapiens
  misc_RNA (1)...(19): siRNA sense strand
uggugaaggcaaagaaguu

SEQ ID NO: 2264318 - RNA, 19 nt, Homo sapiens
  misc_RNA (1)...(19): siRNA sense strand
gucaauaugaugaagaaga

SEQ ID NO: 2264319 - RNA, 19 nt, Homo sapiens
  misc_RNA (1)...(19): siRNA sense strand
agacauuuacugugcaaaa

SEQ ID NO: 2264320 - RNA, 19 nt, Homo sapiens
  misc_RNA (1)...(19): siRNA sense strand
ugggugaaauugaagaaaa

SEQ ID NO: 2264321 - RNA, 19 nt, Homo sapiens
  misc_RNA (1)...(19): siRNA sense strand
ccauagaaguccagcagac

SEQ ID NO: 2264322 - RNA, 19 nt, Homo sapiens
  misc_RNA (1)...(19): siRNA sense strand
gguaaaacuucuacaggca

SEQ ID NO: 2264323 - RNA, 19 nt, Homo sapiens
  misc_RNA (1)...(19): siRNA sense strand
ugaaaguggugaaggcucu

SEQ ID NO: 2264324 - RNA, 19 nt, Homo sapiens
  misc_RNA (1)...(19): siRNA sense strand
ccaucgaugaggacacuaa

SEQ ID NO: 2264325 - RNA, 19 nt, Homo sapiens
  misc_RNA (1)...(19): siRNA sense strand
aggcaaagaaguucagcca

SEQ ID NO: 2264326 - RNA, 19 nt, Homo sapiens
  misc_RNA (1)...(19): siRNA sense strand
cagagaaggagaagauaac

SEQ ID NO: 2264327 - RNA, 19 nt, Homo sapiens
  misc_RNA (1)...(19): siRNA sense strand
guacacagauaauuggcuu

SEQ ID NO: 2264328 - RNA, 19 nt, Homo sapiens
  misc_RNA (1)...(19): siRNA sense strand
agauaauuggcuugcagua

SEQ ID NO: 2264329 - RNA, 19 nt, Homo sapiens
  misc_RNA (1)...(19): siRNA sense strand
ugacuaugcaacaagcuaa

SEQ ID NO: 2264330 - RNA, 19 nt, Homo sapiens
  misc_RNA (1)...(19): siRNA sense strand
gaacaacuacaaagcguga

SEQ ID NO: 2264331 - RNA, 19 nt, Homo sapiens
  misc_RNA (1)...(19): siRNA sense strand
cuaacaaagcugccucaaa

SEQ ID NO: 2264332 - RNA, 19 nt, Homo sapiens
  misc_RNA (1)...(19): siRNA sense strand
gaggaaccaauaaggacua

SEQ ID NO: 2264333 - RNA, 19 nt, Homo sapiens
  misc_RNA (1)...(19): siRNA sense strand
cggaggaagacgauggcca

SEQ ID NO: 2264334 - RNA, 19 nt, Homo sapiens
  misc_RNA (1)...(19): siRNA sense strand
cccaaggacuagauguaga

SEQ ID NO: 2264335 - RNA, 19 nt, Homo sapiens
  misc_RNA (1)...(19): siRNA sense strand
aagcagaaacacuggggaa

SEQ ID NO: 2264336 - RNA, 19 nt, Homo sapiens
  misc_RNA (1)...(19): siRNA sense strand
uaaugaaggcauccugaaa

SEQ ID NO: 2264337 - RNA, 19 nt, Homo sapiens
  misc_RNA (1)...(19): siRNA sense strand
agucacaauucagguaaua

SEQ ID NO: 2264338 - RNA, 19 nt, Homo sapiens
  misc_RNA (1)...(19): siRNA sense strand
gauuauauccugggaacau

SEQ ID NO: 2264339 - RNA, 19 nt, Homo sapiens
  misc_RNA (1)...(19): siRNA sense strand
aggcuuugcaacagggaca

SEQ ID NO: 2264340 - RNA, 19 nt, Homo sapiens
  misc_RNA (1)...(19): siRNA sense strand
aaguaacagauuuggauga

SEQ ID NO: 2264341 - RNA, 19 nt, Homo sapiens
  misc_RNA (1)...(19): siRNA sense strand
gcacuucaggaauggaaau

SEQ ID NO: 2264342 - RNA, 19 nt, Homo sapiens
  misc_RNA (1)...(19): siRNA sense strand
cggaaauggcgaucagcaa

SEQ ID NO: 2264343 - RNA, 19 nt, Homo sapiens
  misc_RNA (1)...(19): siRNA sense strand
ucaagaagcucaaggacga

SEQ ID NO: 2264344 - RNA, 19 nt, Homo sapiens
  misc_RNA (1)...(19): siRNA sense strand
gaacgaugccuaugacauu

SEQ ID NO: 2264345 - RNA, 19 nt, Homo sapiens
  misc_RNA (1)...(19): siRNA sense strand
ccgacacaguggugcucua

SEQ ID NO: 2264346 - RNA, 19 nt, Homo sapiens
  misc_RNA (1)...(19): siRNA sense strand
acuucaacuucauggguca

SEQ ID NO: 2264347 - RNA, 19 nt, Homo sapiens
  misc_RNA (1)...(19): siRNA sense strand
gcgacuggaacgagaauac

SEQ ID NO: 2264348 - RNA, 19 nt, Homo sapiens
  misc_RNA (1)...(19): siRNA sense strand
gggcaagaacugugguguc

SEQ ID NO: 2264349 - RNA, 19 nt, Homo sapiens
  misc_RNA (1)...(19): siRNA sense strand
cggaaauggcgaucagcaa

SEQ ID NO: 2264350 - RNA, 19 nt, Homo sapiens
  misc_RNA (1)...(19): siRNA sense strand
ucaagaagcucaaggacga

SEQ ID NO: 2264351 - RNA, 19 nt, Homo sapiens
  misc_RNA (1)...(19): siRNA sense strand
gaacgaugccuaugacauu

SEQ ID NO: 2264352 - RNA, 19 nt, Homo sapiens
  misc_RNA (1)...(19): siRNA sense strand
ccgacacaguggugcucua

SEQ ID NO: 2264353 - RNA, 19 nt, Homo sapiens
  misc_RNA (1)...(19): siRNA sense strand
acuucaacuucauggguca

SEQ ID NO: 2264354 - RNA, 19 nt, Homo sapiens
  misc_RNA (1)...(19): siRNA sense strand
gcgacuggaacgagaauac

SEQ ID NO: 2264355 - RNA, 19 nt, Homo sapiens
  misc_RNA (1)...(19): siRNA sense strand
gggcaagaacugugguguc

SEQ ID NO: 2264356 - RNA, 19 nt, Homo sapiens
  misc_RNA (1)...(19): siRNA sense strand
ggguauuggauuugaacaa

SEQ ID NO: 2264357 - RNA, 19 nt, Homo sapiens
  misc_RNA (1)...(19): siRNA sense strand
gggcaaaggaagagcugca

SEQ ID NO: 2264358 - RNA, 19 nt, Homo sapiens
  misc_RNA (1)...(19): siRNA sense strand
gugcaaaagagaaggauuu

SEQ ID NO: 2264359 - RNA, 19 nt, Homo sapiens
  misc_RNA (1)...(19): siRNA sense strand
gcuaaaagugcaaaagaga

SEQ ID NO: 2264360 - RNA, 19 nt, Homo sapiens
  misc_RNA (1)...(19): siRNA sense strand
ccaaaaucucccucagaaa

SEQ ID NO: 2264361 - RNA, 19 nt, Homo sapiens
  misc_RNA (1)...(19): siRNA sense strand
agucaggaagagaagaaau

SEQ ID NO: 2264362 - RNA, 19 nt, Homo sapiens
  misc_RNA (1)...(19): siRNA sense strand
ccgaugggguauuggauuu

SEQ ID NO: 2264363 - RNA, 19 nt, Homo sapiens
  misc_RNA (1)...(19): siRNA sense strand
ccaacguucuggaaggcau

SEQ ID NO: 2264364 - RNA, 19 nt, Homo sapiens
  misc_RNA (1)...(19): siRNA sense strand
ccaagaccacaaugggaau

SEQ ID NO: 2264365 - RNA, 19 nt, Homo sapiens
  misc_RNA (1)...(19): siRNA sense strand
acacacaguccaaugaaaa

SEQ ID NO: 2264366 - RNA, 19 nt, Homo sapiens
  misc_RNA (1)...(19): siRNA sense strand
gugaaagccccuccagaaa

SEQ ID NO: 2264367 - RNA, 19 nt, Homo sapiens
  misc_RNA (1)...(19): siRNA sense strand
aaacaaacaaccaagacca

SEQ ID NO: 2264368 - RNA, 19 nt, Homo sapiens
  misc_RNA (1)...(19): siRNA sense strand
augcuuacgauuuggaaaa

SEQ ID NO: 2264369 - RNA, 19 nt, Homo sapiens
  misc_RNA (1)...(19): siRNA sense strand
gcuaggagaaagcggucau

SEQ ID NO: 2264370 - RNA, 19 nt, Homo sapiens
  misc_RNA (1)...(19): siRNA sense strand
aggcuggagcuaggagaaa

SEQ ID NO: 2264371 - RNA, 19 nt, Homo sapiens
  misc_RNA (1)...(19): siRNA sense strand
gaggaaggcaucagcgauc

SEQ ID NO: 2264372 - RNA, 19 nt, Homo sapiens
  misc_RNA (1)...(19): siRNA sense strand
gaugcuuacgauuuggaaa

SEQ ID NO: 2264373 - RNA, 19 nt, Homo sapiens
  misc_RNA (1)...(19): siRNA sense strand
ccaaugucuuagagggaau

SEQ ID NO: 2264374 - RNA, 19 nt, Homo sapiens
  misc_RNA (1)...(19): siRNA sense strand
cagaaauccagcauggcaa

SEQ ID NO: 2264375 - RNA, 19 nt, Homo sapiens
  misc_RNA (1)...(19): siRNA sense strand
guggaaagguguaggugcu

SEQ ID NO: 2264376 - RNA, 19 nt, Homo sapiens
  misc_RNA (1)...(19): siRNA sense strand
agcugaaauugaagaucua

SEQ ID NO: 2264377 - RNA, 19 nt, Homo sapiens
  misc_RNA (1)...(19): siRNA sense strand
acugaaggaaagagaacuu

SEQ ID NO: 2264378 - RNA, 19 nt, Homo sapiens
  misc_RNA (1)...(19): siRNA sense strand
ucagaauggacaaaagaaa

SEQ ID NO: 2264379 - RNA, 19 nt, Homo sapiens
  misc_RNA (1)...(19): siRNA sense strand
cagacaucagcuacagaua

SEQ ID NO: 2264380 - RNA, 19 nt, Homo sapiens
  misc_RNA (1)...(19): siRNA sense strand
ggacaaaagaaauaccaga

SEQ ID NO: 2264381 - RNA, 19 nt, Homo sapiens
  misc_RNA (1)...(19): siRNA sense strand
aggaaagagaacuugauca

SEQ ID NO: 2264382 - RNA, 19 nt, Homo sapiens
  misc_RNA (1)...(19): siRNA sense strand
aaagagaacuugaucagca

SEQ ID NO: 2264383 - RNA, 19 nt, Homo sapiens
  misc_RNA (1)...(19): siRNA sense strand
cuguaauacuaaagaaguc

SEQ ID NO: 2264384 - RNA, 19 nt, Homo sapiens
  misc_RNA (1)...(19): siRNA sense strand
cagaauggacaaaagaaau

SEQ ID NO: 2264385 - RNA, 19 nt, Homo sapiens
  misc_RNA (1)...(19): siRNA sense strand
caccaaugucuuagaggga

SEQ ID NO: 2264386 - RNA, 19 nt, Homo sapiens
  misc_RNA (1)...(19): siRNA sense strand
guaauugcuuuaaugguga

SEQ ID NO: 2264387 - RNA, 19 nt, Homo sapiens
  misc_RNA (1)...(19): siRNA sense strand
cuuuaauggugauacacuu

SEQ ID NO: 2264388 - RNA, 19 nt, Homo sapiens
  misc_RNA (1)...(19): siRNA sense strand
agaugauaacgaaggaguu

SEQ ID NO: 2264389 - RNA, 19 nt, Homo sapiens
  misc_RNA (1)...(19): siRNA sense strand
ccacagaaauccagcaugg

SEQ ID NO: 2264390 - RNA, 19 nt, Homo sapiens
  misc_RNA (1)...(19): siRNA sense strand
uugcuuuaauggugauaca

SEQ ID NO: 2264391 - RNA, 19 nt, Homo sapiens
  misc_RNA (1)...(19): siRNA sense strand
ccgaaagcggagaguguau

SEQ ID NO: 2264392 - RNA, 19 nt, Homo sapiens
  misc_RNA (1)...(19): siRNA sense strand
gugaaguggagcaggguca

SEQ ID NO: 2264393 - RNA, 19 nt, Homo sapiens
  misc_RNA (1)...(19): siRNA sense strand
cgaaacugggaguccgaaa

SEQ ID NO: 2264394 - RNA, 19 nt, Homo sapiens
  misc_RNA (1)...(19): siRNA sense strand
ccaucaacguggagggccu

SEQ ID NO: 2264395 - RNA, 19 nt, Homo sapiens
  misc_RNA (1)...(19): siRNA sense strand
aaaagaagcuacaggagga

SEQ ID NO: 2264396 - RNA, 19 nt, Homo sapiens
  misc_RNA (1)...(19): siRNA sense strand
uccagaaggcccugaggaa

SEQ ID NO: 2264397 - RNA, 19 nt, Homo sapiens
  misc_RNA (1)...(19): siRNA sense strand
aguuaacagaugacaaaga

SEQ ID NO: 2264398 - RNA, 19 nt, Homo sapiens
  misc_RNA (1)...(19): siRNA sense strand
gcccugaggaagaagaaaa

SEQ ID NO: 2264399 - RNA, 19 nt, Homo sapiens
  misc_RNA (1)...(19): siRNA sense strand
acuuaucagcaauggaaga

SEQ ID NO: 2264400 - RNA, 19 nt, Homo sapiens
  misc_RNA (1)...(19): siRNA sense strand
guuaaagcuccagcagaaa

SEQ ID NO: 2264401 - RNA, 19 nt, Homo sapiens
  misc_RNA (1)...(19): siRNA sense strand
ccaucaacguggagggccu

SEQ ID NO: 2264402 - RNA, 19 nt, Homo sapiens
  misc_RNA (1)...(19): siRNA sense strand
ccaucaacguggagggccu

SEQ ID NO: 2264403 - RNA, 19 nt, Homo sapiens
  misc_RNA (1)...(19): siRNA sense strand
ccaucaacguggagggccu

SEQ ID NO: 2264404 - RNA, 19 nt, Homo sapiens
  misc_RNA (1)...(19): siRNA sense strand
ccaucaacguggagggccu

SEQ ID NO: 2264405 - RNA, 19 nt, Homo sapiens
  misc_RNA (1)...(19): siRNA sense strand
gcauggaucuggaggagac

SEQ ID NO: 2264406 - RNA, 19 nt, Homo sapiens
  misc_RNA (1)...(19): siRNA sense strand
ccgcaugaagcgagacgga

SEQ ID NO: 2264407 - RNA, 19 nt, Homo sapiens
  misc_RNA (1)...(19): siRNA sense strand
gcugcuguaucguggguca

SEQ ID NO: 2264408 - RNA, 19 nt, Homo sapiens
  misc_RNA (1)...(19): siRNA sense strand
ucaucaagaacguggagaa

SEQ ID NO: 2264409 - RNA, 19 nt, Homo sapiens
  misc_RNA (1)...(19): siRNA sense strand
gugaagaacgugucgguga

SEQ ID NO: 2264410 - RNA, 19 nt, Homo sapiens
  misc_RNA (1)...(19): siRNA sense strand
aggugaagucaguggagau

SEQ ID NO: 2264411 - RNA, 19 nt, Homo sapiens
  misc_RNA (1)...(19): siRNA sense strand
aggagaagacccacaucaa

SEQ ID NO: 2264412 - RNA, 19 nt, Homo sapiens
  misc_RNA (1)...(19): siRNA sense strand
uggacaagcugaaggcgga

SEQ ID NO: 2264413 - RNA, 19 nt, Homo sapiens
  misc_RNA (1)...(19): siRNA sense strand
acaucaacaucguggucau

SEQ ID NO: 2264414 - RNA, 19 nt, Homo sapiens
  misc_RNA (1)...(19): siRNA sense strand
cguaaggagggcaacgcaa

SEQ ID NO: 2264415 - RNA, 19 nt, Homo sapiens
  misc_RNA (1)...(19): siRNA sense strand
gcgagaagcgcuacgacga

SEQ ID NO: 2264416 - RNA, 19 nt, Homo sapiens
  misc_RNA (1)...(19): siRNA sense strand
augccugggugcuggacaa

SEQ ID NO: 2264417 - RNA, 19 nt, Homo sapiens
  misc_RNA (1)...(19): siRNA sense strand
cgggcaugguggugaccuu

SEQ ID NO: 2264418 - RNA, 19 nt, Homo sapiens
  misc_RNA (1)...(19): siRNA sense strand
agcugaaggcggagcguga

SEQ ID NO: 2264419 - RNA, 19 nt, Homo sapiens
  misc_RNA (1)...(19): siRNA sense strand
acaucaagaagaucggcua

SEQ ID NO: 2264420 - RNA, 19 nt, Homo sapiens
  misc_RNA (1)...(19): siRNA sense strand
ucgagaaggaggcggcuga

SEQ ID NO: 2264421 - RNA, 19 nt, Homo sapiens
  misc_RNA (1)...(19): siRNA sense strand
ucaucgugggcgugaacaa

SEQ ID NO: 2264422 - RNA, 19 nt, Homo sapiens
  misc_RNA (1)...(19): siRNA sense strand
ggcaagaagcuggaggaca

SEQ ID NO: 2264423 - RNA, 19 nt, Homo sapiens
  misc_RNA (1)...(19): siRNA sense strand
ugaagaaagcuuugggcaa

SEQ ID NO: 2264424 - RNA, 19 nt, Homo sapiens
  misc_RNA (1)...(19): siRNA sense strand
gcaaagaggcuaagggaag

SEQ ID NO: 2264425 - RNA, 19 nt, Homo sapiens
  misc_RNA (1)...(19): siRNA sense strand
aggaaagugaagaagcaaa

SEQ ID NO: 2264426 - RNA, 19 nt, Homo sapiens
  misc_RNA (1)...(19): siRNA sense strand
gaacagauaugcuggagga

SEQ ID NO: 2264427 - RNA, 19 nt, Homo sapiens
  misc_RNA (1)...(19): siRNA sense strand
guguaguugaagaugauaa

SEQ ID NO: 2264428 - RNA, 19 nt, Homo sapiens
  misc_RNA (1)...(19): siRNA sense strand
gugaagaagcaaagaggcu

SEQ ID NO: 2264429 - RNA, 19 nt, Homo sapiens
  misc_RNA (1)...(19): siRNA sense strand
ugggaugaugagacagaua

SEQ ID NO: 2264430 - RNA, 19 nt, Homo sapiens
  misc_RNA (1)...(19): siRNA sense strand
agucuuacgaaaaggaaaa

SEQ ID NO: 2264431 - RNA, 19 nt, Homo sapiens
  misc_RNA (1)...(19): siRNA sense strand
aacuaguuccagugggaua

SEQ ID NO: 2264432 - RNA, 19 nt, Homo sapiens
  misc_RNA (1)...(19): siRNA sense strand
gaucugaugaugaggagga

SEQ ID NO: 2264433 - RNA, 19 nt, Homo sapiens
  misc_RNA (1)...(19): siRNA sense strand
agaugauaaaguuggaaca

SEQ ID NO: 2264434 - RNA, 19 nt, Homo sapiens
  misc_RNA (1)...(19): siRNA sense strand
acaucaagucuuacgaaaa

SEQ ID NO: 2264435 - RNA, 19 nt, Homo sapiens
  misc_RNA (1)...(19): siRNA sense strand
augaugaggaggaaaguga

SEQ ID NO: 2264436 - RNA, 19 nt, Homo sapiens
  misc_RNA (1)...(19): siRNA sense strand
cgacuugugucaugcccua

SEQ ID NO: 2264437 - RNA, 19 nt, Homo sapiens
  misc_RNA (1)...(19): siRNA sense strand
agagcuacaucgaggggua

SEQ ID NO: 2264438 - RNA, 19 nt, Homo sapiens
  misc_RNA (1)...(19): siRNA sense strand
agcaaagaggcuaagggaa

SEQ ID NO: 2264439 - RNA, 19 nt, Homo sapiens
  misc_RNA (1)...(19): siRNA sense strand
caaauaugguccugccgau

SEQ ID NO: 2264440 - RNA, 19 nt, Homo sapiens
  misc_RNA (1)...(19): siRNA sense strand
uaaacuaguuccaguggga

SEQ ID NO: 2264441 - RNA, 19 nt, Homo sapiens
  misc_RNA (1)...(19): siRNA sense strand
uggcgaaauuagaggagug

SEQ ID NO: 2264442 - RNA, 19 nt, Homo sapiens
  misc_RNA (1)...(19): siRNA sense strand
aguguguaguugaagauga

SEQ ID NO: 2264443 - RNA, 19 nt, Homo sapiens
  misc_RNA (1)...(19): siRNA sense strand
ugaagaaagcuuugggcaa

SEQ ID NO: 2264444 - RNA, 19 nt, Homo sapiens
  misc_RNA (1)...(19): siRNA sense strand
gcaaagaggcuaagggaag

SEQ ID NO: 2264445 - RNA, 19 nt, Homo sapiens
  misc_RNA (1)...(19): siRNA sense strand
aggaaagugaagaagcaaa

SEQ ID NO: 2264446 - RNA, 19 nt, Homo sapiens
  misc_RNA (1)...(19): siRNA sense strand
gaacagauaugcuggagga

SEQ ID NO: 2264447 - RNA, 19 nt, Homo sapiens
  misc_RNA (1)...(19): siRNA sense strand
guguaguugaagaugauaa

SEQ ID NO: 2264448 - RNA, 19 nt, Homo sapiens
  misc_RNA (1)...(19): siRNA sense strand
gugaagaagcaaagaggcu

SEQ ID NO: 2264449 - RNA, 19 nt, Homo sapiens
  misc_RNA (1)...(19): siRNA sense strand
ugggaugaugagacagaua

SEQ ID NO: 2264450 - RNA, 19 nt, Homo sapiens
  misc_RNA (1)...(19): siRNA sense strand
agucuuacgaaaaggaaaa

SEQ ID NO: 2264451 - RNA, 19 nt, Homo sapiens
  misc_RNA (1)...(19): siRNA sense strand
aacuaguuccagugggaua

SEQ ID NO: 2264452 - RNA, 19 nt, Homo sapiens
  misc_RNA (1)...(19): siRNA sense strand
gaucugaugaugaggagga

SEQ ID NO: 2264453 - RNA, 19 nt, Homo sapiens
  misc_RNA (1)...(19): siRNA sense strand
agaugauaaaguuggaaca

SEQ ID NO: 2264454 - RNA, 19 nt, Homo sapiens
  misc_RNA (1)...(19): siRNA sense strand
acaucaagucuuacgaaaa

SEQ ID NO: 2264455 - RNA, 19 nt, Homo sapiens
  misc_RNA (1)...(19): siRNA sense strand
augaugaggaggaaaguga

SEQ ID NO: 2264456 - RNA, 19 nt, Homo sapiens
  misc_RNA (1)...(19): siRNA sense strand
cgacuugugucaugcccua

SEQ ID NO: 2264457 - RNA, 19 nt, Homo sapiens
  misc_RNA (1)...(19): siRNA sense strand
agagcuacaucgaggggua

SEQ ID NO: 2264458 - RNA, 19 nt, Homo sapiens
  misc_RNA (1)...(19): siRNA sense strand
agcaaagaggcuaagggaa

SEQ ID NO: 2264459 - RNA, 19 nt, Homo sapiens
  misc_RNA (1)...(19): siRNA sense strand
caaauaugguccugccgau

SEQ ID NO: 2264460 - RNA, 19 nt, Homo sapiens
  misc_RNA (1)...(19): siRNA sense strand
uaaacuaguuccaguggga

SEQ ID NO: 2264461 - RNA, 19 nt, Homo sapiens
  misc_RNA (1)...(19): siRNA sense strand
uggcgaaauuagaggagug

SEQ ID NO: 2264462 - RNA, 19 nt, Homo sapiens
  misc_RNA (1)...(19): siRNA sense strand
aguguguaguugaagauga

SEQ ID NO: 2264463 - RNA, 19 nt, Homo sapiens
  misc_RNA (1)...(19): siRNA sense strand
ggacagacuugcuggagga

SEQ ID NO: 2264464 - RNA, 19 nt, Homo sapiens
  misc_RNA (1)...(19): siRNA sense strand
gagaagaucugguucgaca

SEQ ID NO: 2264465 - RNA, 19 nt, Homo sapiens
  misc_RNA (1)...(19): siRNA sense strand
ucaccaaguuugaggagca

SEQ ID NO: 2264466 - RNA, 19 nt, Homo sapiens
  misc_RNA (1)...(19): siRNA sense strand
cagacuugcuggaggagga

SEQ ID NO: 2264467 - RNA, 19 nt, Homo sapiens
  misc_RNA (1)...(19): siRNA sense strand
cuacaaacuuccuagcaca

SEQ ID NO: 2264468 - RNA, 19 nt, Homo sapiens
  misc_RNA (1)...(19): siRNA sense strand
cagcagaggaugacgagga

SEQ ID NO: 2264469 - RNA, 19 nt, Homo sapiens
  misc_RNA (1)...(19): siRNA sense strand
ucaaauaugacgacgcaga

SEQ ID NO: 2264470 - RNA, 19 nt, Homo sapiens
  misc_RNA (1)...(19): siRNA sense strand
gugacaaugaggaggagga

SEQ ID NO: 2264471 - RNA, 19 nt, Homo sapiens
  misc_RNA (1)...(19): siRNA sense strand
gauucuacgagcagaugaa

SEQ ID NO: 2264472 - RNA, 19 nt, Homo sapiens
  misc_RNA (1)...(19): siRNA sense strand
ugacauugcgagagccaga

SEQ ID NO: 2264473 - RNA, 19 nt, Homo sapiens
  misc_RNA (1)...(19): siRNA sense strand
ggagauucuacgagcagau

SEQ ID NO: 2264474 - RNA, 19 nt, Homo sapiens
  misc_RNA (1)...(19): siRNA sense strand
gucuggaaguggagaacca

SEQ ID NO: 2264475 - RNA, 19 nt, Homo sapiens
  misc_RNA (1)...(19): siRNA sense strand
aggacaaggaggcggcaca

SEQ ID NO: 2264476 - RNA, 19 nt, Homo sapiens
  misc_RNA (1)...(19): siRNA sense strand
acgcggagaagaaggccaa

SEQ ID NO: 2264477 - RNA, 19 nt, Homo sapiens
  misc_RNA (1)...(19): siRNA sense strand
ccuguuuggcagugacaau

SEQ ID NO: 2264478 - RNA, 19 nt, Homo sapiens
  misc_RNA (1)...(19): siRNA sense strand
gcagugacaaugaggagga

SEQ ID NO: 2264479 - RNA, 19 nt, Homo sapiens
  misc_RNA (1)...(19): siRNA sense strand
aggaugacgaggaugauga

SEQ ID NO: 2264480 - RNA, 19 nt, Homo sapiens
  misc_RNA (1)...(19): siRNA sense strand
gggaugaugagacggacau

SEQ ID NO: 2264481 - RNA, 19 nt, Homo sapiens
  misc_RNA (1)...(19): siRNA sense strand
guucaaauaugacgacgca

SEQ ID NO: 2264482 - RNA, 19 nt, Homo sapiens
  misc_RNA (1)...(19): siRNA sense strand
cggcugaacgugcuggaga

SEQ ID NO: 2264483 - RNA, 19 nt, Homo sapiens
  misc_RNA (1)...(19): siRNA sense strand
ggacagacuugcuggagga

SEQ ID NO: 2264484 - RNA, 19 nt, Homo sapiens
  misc_RNA (1)...(19): siRNA sense strand
gagaagaucugguucgaca

SEQ ID NO: 2264485 - RNA, 19 nt, Homo sapiens
  misc_RNA (1)...(19): siRNA sense strand
ucaccaaguuugaggagca

SEQ ID NO: 2264486 - RNA, 19 nt, Homo sapiens
  misc_RNA (1)...(19): siRNA sense strand
cagacuugcuggaggagga

SEQ ID NO: 2264487 - RNA, 19 nt, Homo sapiens
  misc_RNA (1)...(19): siRNA sense strand
cuacaaacuuccuagcaca

SEQ ID NO: 2264488 - RNA, 19 nt, Homo sapiens
  misc_RNA (1)...(19): siRNA sense strand
cagcagaggaugacgagga

SEQ ID NO: 2264489 - RNA, 19 nt, Homo sapiens
  misc_RNA (1)...(19): siRNA sense strand
ucaaauaugacgacgcaga

SEQ ID NO: 2264490 - RNA, 19 nt, Homo sapiens
  misc_RNA (1)...(19): siRNA sense strand
gugacaaugaggaggagga

SEQ ID NO: 2264491 - RNA, 19 nt, Homo sapiens
  misc_RNA (1)...(19): siRNA sense strand
gauucuacgagcagaugaa

SEQ ID NO: 2264492 - RNA, 19 nt, Homo sapiens
  misc_RNA (1)...(19): siRNA sense strand
ugacauugcgagagccaga

SEQ ID NO: 2264493 - RNA, 19 nt, Homo sapiens
  misc_RNA (1)...(19): siRNA sense strand
ggagauucuacgagcagau

SEQ ID NO: 2264494 - RNA, 19 nt, Homo sapiens
  misc_RNA (1)...(19): siRNA sense strand
gucuggaaguggagaacca

SEQ ID NO: 2264495 - RNA, 19 nt, Homo sapiens
  misc_RNA (1)...(19): siRNA sense strand
aggacaaggaggcggcaca

SEQ ID NO: 2264496 - RNA, 19 nt, Homo sapiens
  misc_RNA (1)...(19): siRNA sense strand
acgcggagaagaaggccaa

SEQ ID NO: 2264497 - RNA, 19 nt, Homo sapiens
  misc_RNA (1)...(19): siRNA sense strand
ccuguuuggcagugacaau

SEQ ID NO: 2264498 - RNA, 19 nt, Homo sapiens
  misc_RNA (1)...(19): siRNA sense strand
gcagugacaaugaggagga

SEQ ID NO: 2264499 - RNA, 19 nt, Homo sapiens
  misc_RNA (1)...(19): siRNA sense strand
aggaugacgaggaugauga

SEQ ID NO: 2264500 - RNA, 19 nt, Homo sapiens
  misc_RNA (1)...(19): siRNA sense strand
gggaugaugagacggacau

SEQ ID NO: 2264501 - RNA, 19 nt, Homo sapiens
  misc_RNA (1)...(19): siRNA sense strand
guucaaauaugacgacgca

SEQ ID NO: 2264502 - RNA, 19 nt, Homo sapiens
  misc_RNA (1)...(19): siRNA sense strand
cggcugaacgugcuggaga

SEQ ID NO: 2264503 - RNA, 19 nt, Homo sapiens
  misc_RNA (1)...(19): siRNA sense strand
aagauaagacugagcgcua

SEQ ID NO: 2264504 - RNA, 19 nt, Homo sapiens
  misc_RNA (1)...(19): siRNA sense strand
uggugaacuuugauggcua

SEQ ID NO: 2264505 - RNA, 19 nt, Homo sapiens
  misc_RNA (1)...(19): siRNA sense strand
ggguucaagagaugggaau

SEQ ID NO: 2264506 - RNA, 19 nt, Homo sapiens
  misc_RNA (1)...(19): siRNA sense strand
agaccaacaaauagcugua

SEQ ID NO: 2264507 - RNA, 19 nt, Homo sapiens
  misc_RNA (1)...(19): siRNA sense strand
uuucgauguuaacgacaaa

SEQ ID NO: 2264508 - RNA, 19 nt, Homo sapiens
  misc_RNA (1)...(19): siRNA sense strand
uguuaacgacaaaguagaa

SEQ ID NO: 2264509 - RNA, 19 nt, Homo sapiens
  misc_RNA (1)...(19): siRNA sense strand
acuccgucccagaagauaa

SEQ ID NO: 2264510 - RNA, 19 nt, Homo sapiens
  misc_RNA (1)...(19): siRNA sense strand
gcaugugugcagagggaua

SEQ ID NO: 2264511 - RNA, 19 nt, Homo sapiens
  misc_RNA (1)...(19): siRNA sense strand
ggucaaggcaagagagagu

SEQ ID NO: 2264512 - RNA, 19 nt, Homo sapiens
  misc_RNA (1)...(19): siRNA sense strand
agaaaggcuuauugaggaa

SEQ ID NO: 2264513 - RNA, 19 nt, Homo sapiens
  misc_RNA (1)...(19): siRNA sense strand
uggaaugggcacagagcaa

SEQ ID NO: 2264514 - RNA, 19 nt, Homo sapiens
  misc_RNA (1)...(19): siRNA sense strand
gggaaugguuuaugcccua

SEQ ID NO: 2264515 - RNA, 19 nt, Homo sapiens
  misc_RNA (1)...(19): siRNA sense strand
cguaagaaauagugacucu

SEQ ID NO: 2264516 - RNA, 19 nt, Homo sapiens
  misc_RNA (1)...(19): siRNA sense strand
gauuggaaggagugauuua

SEQ ID NO: 2264517 - RNA, 19 nt, Homo sapiens
  misc_RNA (1)...(19): siRNA sense strand
cuaccaaggagaugggauu

SEQ ID NO: 2264518 - RNA, 19 nt, Homo sapiens
  misc_RNA (1)...(19): siRNA sense strand
ccaacaaacacacuggaaa

SEQ ID NO: 2264519 - RNA, 19 nt, Homo sapiens
  misc_RNA (1)...(19): siRNA sense strand
aaacaagaggacuggcaaa

SEQ ID NO: 2264520 - RNA, 19 nt, Homo sapiens
  misc_RNA (1)...(19): siRNA sense strand
guuggagacaucagagaaa

SEQ ID NO: 2264521 - RNA, 19 nt, Homo sapiens
  misc_RNA (1)...(19): siRNA sense strand
gggaaaacauguagcgguu

SEQ ID NO: 2264522 - RNA, 19 nt, Homo sapiens
  misc_RNA (1)...(19): siRNA sense strand
uuggacagacagagggaaa

SEQ ID NO: 2264523 - RNA, 19 nt, Homo sapiens
  misc_RNA (1)...(19): siRNA sense strand
cuagagugucagaagauaa

SEQ ID NO: 2264524 - RNA, 19 nt, Homo sapiens
  misc_RNA (1)...(19): siRNA sense strand
ggguggauuuagaaagaca

SEQ ID NO: 2264525 - RNA, 19 nt, Homo sapiens
  misc_RNA (1)...(19): siRNA sense strand
gagcagaucucgauggugu

SEQ ID NO: 2264526 - RNA, 19 nt, Homo sapiens
  misc_RNA (1)...(19): siRNA sense strand
gcuuauugaggaaggagua

SEQ ID NO: 2264527 - RNA, 19 nt, Homo sapiens
  misc_RNA (1)...(19): siRNA sense strand
guccaagacuagaguguca

SEQ ID NO: 2264528 - RNA, 19 nt, Homo sapiens
  misc_RNA (1)...(19): siRNA sense strand
ugaagaaguuauuugguca

SEQ ID NO: 2264529 - RNA, 19 nt, Homo sapiens
  misc_RNA (1)...(19): siRNA sense strand
caaaucaacaggaaggaau

SEQ ID NO: 2264530 - RNA, 19 nt, Homo sapiens
  misc_RNA (1)...(19): siRNA sense strand
gagugauuuaaaugggaaa

SEQ ID NO: 2264531 - RNA, 19 nt, Homo sapiens
  misc_RNA (1)...(19): siRNA sense strand
uggcaaagauagaguacgu

SEQ ID NO: 2264532 - RNA, 19 nt, Homo sapiens
  misc_RNA (1)...(19): siRNA sense strand
gagaaaggcuuauugagga

SEQ ID NO: 2264533 - RNA, 19 nt, Homo sapiens
  misc_RNA (1)...(19): siRNA sense strand
gggaagaugaccaccacua

SEQ ID NO: 2264534 - RNA, 19 nt, Homo sapiens
  misc_RNA (1)...(19): siRNA sense strand
auauugaagcauuggacaa

SEQ ID NO: 2264535 - RNA, 19 nt, Homo sapiens
  misc_RNA (1)...(19): siRNA sense strand
ggauuuagaaagacaacuu

SEQ ID NO: 2264536 - RNA, 19 nt, Homo sapiens
  misc_RNA (1)...(19): siRNA sense strand
guaacagauaugaaaggaa

SEQ ID NO: 2264537 - RNA, 19 nt, Homo sapiens
  misc_RNA (1)...(19): siRNA sense strand
aaacggaggcugugaacau

SEQ ID NO: 2264538 - RNA, 19 nt, Homo sapiens
  misc_RNA (1)...(19): siRNA sense strand
gagaaugccagcugcacaa

SEQ ID NO: 2264539 - RNA, 19 nt, Homo sapiens
  misc_RNA (1)...(19): siRNA sense strand
guggauagagagagcuaau

SEQ ID NO: 2264540 - RNA, 19 nt, Homo sapiens
  misc_RNA (1)...(19): siRNA sense strand
ccgaagacuuacccagaau

SEQ ID NO: 2264541 - RNA, 19 nt, Homo sapiens
  misc_RNA (1)...(19): siRNA sense strand
gcaagagagaguauguaau

SEQ ID NO: 2264542 - RNA, 19 nt, Homo sapiens
  misc_RNA (1)...(19): siRNA sense strand
gaagaaguuauuuggucaa

SEQ ID NO: 2264543 - RNA, 19 nt, Homo sapiens
  misc_RNA (1)...(19): siRNA sense strand
cugugaagauguuaaugaa

SEQ ID NO: 2264544 - RNA, 19 nt, Homo sapiens
  misc_RNA (1)...(19): siRNA sense strand
gguuuaugcccuagaucau

SEQ ID NO: 2264545 - RNA, 19 nt, Homo sapiens
  misc_RNA (1)...(19): siRNA sense strand
ggagugauuuaaaugggaa

SEQ ID NO: 2264546 - RNA, 19 nt, Homo sapiens
  misc_RNA (1)...(19): siRNA sense strand
gggcagcagcagaagguca

SEQ ID NO: 2264547 - RNA, 19 nt, Homo sapiens
  misc_RNA (1)...(19): siRNA sense strand
caacaaacacacuggaaag

SEQ ID NO: 2264548 - RNA, 19 nt, Homo sapiens
  misc_RNA (1)...(19): siRNA sense strand
cugugaacauauuugcaaa

SEQ ID NO: 2264549 - RNA, 19 nt, Homo sapiens
  misc_RNA (1)...(19): siRNA sense strand
gcacaaauacagagggagg

SEQ ID NO: 2264550 - RNA, 19 nt, Homo sapiens
  misc_RNA (1)...(19): siRNA sense strand
ugucaguguuugaaaggau

SEQ ID NO: 2264551 - RNA, 19 nt, Homo sapiens
  misc_RNA (1)...(19): siRNA sense strand
ccugaaguggauagagaga

SEQ ID NO: 2264552 - RNA, 19 nt, Homo sapiens
  misc_RNA (1)...(19): siRNA sense strand
gaugguucccagcgagaaa

SEQ ID NO: 2264553 - RNA, 19 nt, Homo sapiens
  misc_RNA (1)...(19): siRNA sense strand
ccaauggccaagagauuau

SEQ ID NO: 2264554 - RNA, 19 nt, Homo sapiens
  misc_RNA (1)...(19): siRNA sense strand
caucacugguugugguuca

SEQ ID NO: 2264555 - RNA, 19 nt, Homo sapiens
  misc_RNA (1)...(19): siRNA sense strand
cugcacaaauacagaggga

SEQ ID NO: 2264556 - RNA, 19 nt, Homo sapiens
  misc_RNA (1)...(19): siRNA sense strand
ccacuauuccguaagaaau

SEQ ID NO: 2264557 - RNA, 19 nt, Homo sapiens
  misc_RNA (1)...(19): siRNA sense strand
ucuaaagaaccaaguaaca

SEQ ID NO: 2264558 - RNA, 19 nt, Homo sapiens
  misc_RNA (1)...(19): siRNA sense strand
aggaaccaauuaugagcaa

SEQ ID NO: 2264559 - RNA, 19 nt, Homo sapiens
  misc_RNA (1)...(19): siRNA sense strand
gguguauuucagagggaga

SEQ ID NO: 2264560 - RNA, 19 nt, Homo sapiens
  misc_RNA (1)...(19): siRNA sense strand
agaaauagugacucugaau

SEQ ID NO: 2264561 - RNA, 19 nt, Homo sapiens
  misc_RNA (1)...(19): siRNA sense strand
ccacauuaguaaacaucca

SEQ ID NO: 2264562 - RNA, 19 nt, Homo sapiens
  misc_RNA (1)...(19): siRNA sense strand
cagcacugugugugggcaa

SEQ ID NO: 2264563 - RNA, 19 nt, Homo sapiens
  misc_RNA (1)...(19): siRNA sense strand
auccaauggccaagagauu

SEQ ID NO: 2264564 - RNA, 19 nt, Homo sapiens
  misc_RNA (1)...(19): siRNA sense strand
aaggacaugguuagaauua

SEQ ID NO: 2264565 - RNA, 19 nt, Homo sapiens
  misc_RNA (1)...(19): siRNA sense strand
cuugggagccugagcagaa

SEQ ID NO: 2264566 - RNA, 19 nt, Homo sapiens
  misc_RNA (1)...(19): siRNA sense strand
cugauuggaaggagugauu

SEQ ID NO: 2264567 - RNA, 19 nt, Homo sapiens
  misc_RNA (1)...(19): siRNA sense strand
ucgugaagguuuuaugaaa

SEQ ID NO: 2264568 - RNA, 19 nt, Homo sapiens
  misc_RNA (1)...(19): siRNA sense strand
cugaaugggucaaggcaag

SEQ ID NO: 2264569 - RNA, 19 nt, Homo sapiens
  misc_RNA (1)...(19): siRNA sense strand
ugccaauucucaagauauu

SEQ ID NO: 2264570 - RNA, 19 nt, Homo sapiens
  misc_RNA (1)...(19): siRNA sense strand
cagcagaugggaaugguuu

SEQ ID NO: 2264571 - RNA, 19 nt, Homo sapiens
  misc_RNA (1)...(19): siRNA sense strand
gugcauguauauugaagca

SEQ ID NO: 2264572 - RNA, 19 nt, Homo sapiens
  misc_RNA (1)...(19): siRNA sense strand
gaccugaaguggugggaac

SEQ ID NO: 2264573 - RNA, 19 nt, Homo sapiens
  misc_RNA (1)...(19): siRNA sense strand
acaccaagaccucaagaau

SEQ ID NO: 2264574 - RNA, 19 nt, Homo sapiens
  misc_RNA (1)...(19): siRNA sense strand
ccaagcagucugugauuga

SEQ ID NO: 2264575 - RNA, 19 nt, Homo sapiens
  misc_RNA (1)...(19): siRNA sense strand
aaauacagagggaggcuau

SEQ ID NO: 2264576 - RNA, 19 nt, Homo sapiens
  misc_RNA (1)...(19): siRNA sense strand
cuggacugauacagggauu

SEQ ID NO: 2264577 - RNA, 19 nt, Homo sapiens
  misc_RNA (1)...(19): siRNA sense strand
gcgaugaacgcaagaggca

SEQ ID NO: 2264578 - RNA, 19 nt, Homo sapiens
  misc_RNA (1)...(19): siRNA sense strand
acgagaaggugcuggugga

SEQ ID NO: 2264579 - RNA, 19 nt, Homo sapiens
  misc_RNA (1)...(19): siRNA sense strand
aggacaagaaagcagacaa

SEQ ID NO: 2264580 - RNA, 19 nt, Homo sapiens
  misc_RNA (1)...(19): siRNA sense strand
cagcuuggucaguggccua

SEQ ID NO: 2264581 - RNA, 19 nt, Homo sapiens
  misc_RNA (1)...(19): siRNA sense strand
cggcagaaggacaagaaag

SEQ ID NO: 2264582 - RNA, 19 nt, Homo sapiens
  misc_RNA (1)...(19): siRNA sense strand
cugacaucucucugaacaa

SEQ ID NO: 2264583 - RNA, 19 nt, Homo sapiens
  misc_RNA (1)...(19): siRNA sense strand
cuagaaaaggacaaaguaa

SEQ ID NO: 2264584 - RNA, 19 nt, Homo sapiens
  misc_RNA (1)...(19): siRNA sense strand
ugggcaggauugaggguga

SEQ ID NO: 2264585 - RNA, 19 nt, Homo sapiens
  misc_RNA (1)...(19): siRNA sense strand
cugcagaagccucagaaca

SEQ ID NO: 2264586 - RNA, 19 nt, Homo sapiens
  misc_RNA (1)...(19): siRNA sense strand
cagaagagguggcucgucu

SEQ ID NO: 2264587 - RNA, 19 nt, Homo sapiens
  misc_RNA (1)...(19): siRNA sense strand
gccaagaccucuagccgca

SEQ ID NO: 2264588 - RNA, 19 nt, Homo sapiens
  misc_RNA (1)...(19): siRNA sense strand
gagcagugauccaagccca

SEQ ID NO: 2264589 - RNA, 19 nt, Homo sapiens
  misc_RNA (1)...(19): siRNA sense strand
cuagaaaaggacaaaguaa

SEQ ID NO: 2264590 - RNA, 19 nt, Homo sapiens
  misc_RNA (1)...(19): siRNA sense strand
ugggcaggauugaggguga

SEQ ID NO: 2264591 - RNA, 19 nt, Homo sapiens
  misc_RNA (1)...(19): siRNA sense strand
cugcagaagccucagaaca

SEQ ID NO: 2264592 - RNA, 19 nt, Homo sapiens
  misc_RNA (1)...(19): siRNA sense strand
cagaagagguggcucgucu

SEQ ID NO: 2264593 - RNA, 19 nt, Homo sapiens
  misc_RNA (1)...(19): siRNA sense strand
gccaagaccucuagccgca

SEQ ID NO: 2264594 - RNA, 19 nt, Homo sapiens
  misc_RNA (1)...(19): siRNA sense strand
gagcagugauccaagccca

SEQ ID NO: 2264595 - RNA, 19 nt, Homo sapiens
  misc_RNA (1)...(19): siRNA sense strand
acuuagacauugagagcaa

SEQ ID NO: 2264596 - RNA, 19 nt, Homo sapiens
  misc_RNA (1)...(19): siRNA sense strand
gcacaguuauagugaucaa

SEQ ID NO: 2264597 - RNA, 19 nt, Homo sapiens
  misc_RNA (1)...(19): siRNA sense strand
gaauacaagagguggauca

SEQ ID NO: 2264598 - RNA, 19 nt, Homo sapiens
  misc_RNA (1)...(19): siRNA sense strand
aaccaaacacaaaggguaa

SEQ ID NO: 2264599 - RNA, 19 nt, Homo sapiens
  misc_RNA (1)...(19): siRNA sense strand
cggccagguacgagaagaa

SEQ ID NO: 2264600 - RNA, 19 nt, Homo sapiens
  misc_RNA (1)...(19): siRNA sense strand
aguggaauguagagauauu

SEQ ID NO: 2264601 - RNA, 19 nt, Homo sapiens
  misc_RNA (1)...(19): siRNA sense strand
cuaaauucaccaaggaaga

SEQ ID NO: 2264602 - RNA, 19 nt, Homo sapiens
  misc_RNA (1)...(19): siRNA sense strand
uggcaggugucauggcuua

SEQ ID NO: 2264603 - RNA, 19 nt, Homo sapiens
  misc_RNA (1)...(19): siRNA sense strand
gggccaguuugcacaguua

SEQ ID NO: 2264604 - RNA, 19 nt, Homo sapiens
  misc_RNA (1)...(19): siRNA sense strand
gcuaaaagacaccagguua

SEQ ID NO: 2264605 - RNA, 19 nt, Homo sapiens
  misc_RNA (1)...(19): siRNA sense strand
gagagaagaaagacggcuu

SEQ ID NO: 2264606 - RNA, 19 nt, Homo sapiens
  misc_RNA (1)...(19): siRNA sense strand
auguaaggaagaugugaua

SEQ ID NO: 2264607 - RNA, 19 nt, Homo sapiens
  misc_RNA (1)...(19): siRNA sense strand
aaaccaaacacaaagggua

SEQ ID NO: 2264608 - RNA, 19 nt, Homo sapiens
  misc_RNA (1)...(19): siRNA sense strand
gaagaauacaagaggugga

SEQ ID NO: 2264609 - RNA, 19 nt, Homo sapiens
  misc_RNA (1)...(19): siRNA sense strand
cagaaggcucccagaaaga

SEQ ID NO: 2264610 - RNA, 19 nt, Homo sapiens
  misc_RNA (1)...(19): siRNA sense strand
ccugugaagacguggauga

SEQ ID NO: 2264611 - RNA, 19 nt, Homo sapiens
  misc_RNA (1)...(19): siRNA sense strand
cuggacaaagugugugaaa

SEQ ID NO: 2264612 - RNA, 19 nt, Homo sapiens
  misc_RNA (1)...(19): siRNA sense strand
augugauacccgauaauaa

SEQ ID NO: 2264613 - RNA, 19 nt, Homo sapiens
  misc_RNA (1)...(19): siRNA sense strand
uggaagcuucugagacaua

SEQ ID NO: 2264614 - RNA, 19 nt, Homo sapiens
  misc_RNA (1)...(19): siRNA sense strand
ggacggaauacuuagacau

SEQ ID NO: 2264615 - RNA, 19 nt, Homo sapiens
  misc_RNA (1)...(19): siRNA sense strand
cauaaucgcugcuggcuga

SEQ ID NO: 2264616 - RNA, 19 nt, Homo sapiens
  misc_RNA (1)...(19): siRNA sense strand
agaauacaacugagagcuu

SEQ ID NO: 2264617 - RNA, 19 nt, Homo sapiens
  misc_RNA (1)...(19): siRNA sense strand
gcauaaugacuggagagaa

SEQ ID NO: 2264618 - RNA, 19 nt, Homo sapiens
  misc_RNA (1)...(19): siRNA sense strand
ugacuggagagaagaaaga

SEQ ID NO: 2264619 - RNA, 19 nt, Homo sapiens
  misc_RNA (1)...(19): siRNA sense strand
uuggaaacccucagcaaau

SEQ ID NO: 2264620 - RNA, 19 nt, Homo sapiens
  misc_RNA (1)...(19): siRNA sense strand
cugaagaauacaacugaga

SEQ ID NO: 2264621 - RNA, 19 nt, Homo sapiens
  misc_RNA (1)...(19): siRNA sense strand
gagaagaauacaagaggug

SEQ ID NO: 2264622 - RNA, 19 nt, Homo sapiens
  misc_RNA (1)...(19): siRNA sense strand
gcuuugucccugugcuuaa

SEQ ID NO: 2264623 - RNA, 19 nt, Homo sapiens
  misc_RNA (1)...(19): siRNA sense strand
auugaugaaugcacugaaa

SEQ ID NO: 2264624 - RNA, 19 nt, Homo sapiens
  misc_RNA (1)...(19): siRNA sense strand
uggagaguguggaaagcau

SEQ ID NO: 2264625 - RNA, 19 nt, Homo sapiens
  misc_RNA (1)...(19): siRNA sense strand
gccagguacgagaagaaua

SEQ ID NO: 2264626 - RNA, 19 nt, Homo sapiens
  misc_RNA (1)...(19): siRNA sense strand
acacggaaaccaaacacaa

SEQ ID NO: 2264627 - RNA, 19 nt, Homo sapiens
  misc_RNA (1)...(19): siRNA sense strand
aagaaugcagugaagagaa

SEQ ID NO: 2264628 - RNA, 19 nt, Homo sapiens
  misc_RNA (1)...(19): siRNA sense strand
ccgaagucucaacgcuaaa

SEQ ID NO: 2264629 - RNA, 19 nt, Homo sapiens
  misc_RNA (1)...(19): siRNA sense strand
caucugugccuuugguuau

SEQ ID NO: 2264630 - RNA, 19 nt, Homo sapiens
  misc_RNA (1)...(19): siRNA sense strand
gcucccagaaagauggcaa

SEQ ID NO: 2264631 - RNA, 19 nt, Homo sapiens
  misc_RNA (1)...(19): siRNA sense strand
ucuucagcguucuggacaa

SEQ ID NO: 2264632 - RNA, 19 nt, Homo sapiens
  misc_RNA (1)...(19): siRNA sense strand
cagucuuccuggagagugu

SEQ ID NO: 2264633 - RNA, 19 nt, Homo sapiens
  misc_RNA (1)...(19): siRNA sense strand
gccgaagucucaacgcuaa

SEQ ID NO: 2264634 - RNA, 19 nt, Homo sapiens
  misc_RNA (1)...(19): siRNA sense strand
ccagcaaugccaagaggga

SEQ ID NO: 2264635 - RNA, 19 nt, Homo sapiens
  misc_RNA (1)...(19): siRNA sense strand
agaaugugacguuggacuu

SEQ ID NO: 2264636 - RNA, 19 nt, Homo sapiens
  misc_RNA (1)...(19): siRNA sense strand
cagaggcuuuccaguguua

SEQ ID NO: 2264637 - RNA, 19 nt, Homo sapiens
  misc_RNA (1)...(19): siRNA sense strand
ucaucuacacucuggagaa

SEQ ID NO: 2264638 - RNA, 19 nt, Homo sapiens
  misc_RNA (1)...(19): siRNA sense strand
acauucagccaaagcagaa

SEQ ID NO: 2264639 - RNA, 19 nt, Homo sapiens
  misc_RNA (1)...(19): siRNA sense strand
cuggcugaauacagagaca

SEQ ID NO: 2264640 - RNA, 19 nt, Homo sapiens
  misc_RNA (1)...(19): siRNA sense strand
agguacaagugcagcuguu

SEQ ID NO: 2264641 - RNA, 19 nt, Homo sapiens
  misc_RNA (1)...(19): siRNA sense strand
acauaagacccacacggaa

SEQ ID NO: 2264642 - RNA, 19 nt, Homo sapiens
  misc_RNA (1)...(19): siRNA sense strand
ccacaauugaggaaucuga

SEQ ID NO: 2264643 - RNA, 19 nt, Homo sapiens
  misc_RNA (1)...(19): siRNA sense strand
ugaugugaaggguggaaga

SEQ ID NO: 2264644 - RNA, 19 nt, Homo sapiens
  misc_RNA (1)...(19): siRNA sense strand
cggcuguucggacggaaua

SEQ ID NO: 2264645 - RNA, 19 nt, Homo sapiens
  misc_RNA (1)...(19): siRNA sense strand
cggacggaauacuuagaca

SEQ ID NO: 2264646 - RNA, 19 nt, Homo sapiens
  misc_RNA (1)...(19): siRNA sense strand
ggauccagauuguggguga

SEQ ID NO: 2264647 - RNA, 19 nt, Homo sapiens
  misc_RNA (1)...(19): siRNA sense strand
agggagucaucaaggacaa

SEQ ID NO: 2264648 - RNA, 19 nt, Homo sapiens
  misc_RNA (1)...(19): siRNA sense strand
agcaagagaaacuggacaa

SEQ ID NO: 2264649 - RNA, 19 nt, Homo sapiens
  misc_RNA (1)...(19): siRNA sense strand
gcugagagcuuucgggaug

SEQ ID NO: 2264650 - RNA, 19 nt, Homo sapiens
  misc_RNA (1)...(19): siRNA sense strand
gguccaaguucacagccaa

SEQ ID NO: 2264651 - RNA, 19 nt, Homo sapiens
  misc_RNA (1)...(19): siRNA sense strand
gcgacuaggugcagagguc

SEQ ID NO: 2264652 - RNA, 19 nt, Homo sapiens
  misc_RNA (1)...(19): siRNA sense strand
auggagacaaacagcguua

SEQ ID NO: 2264653 - RNA, 19 nt, Homo sapiens
  misc_RNA (1)...(19): siRNA sense strand
ugugguggagcaagagaaa

SEQ ID NO: 2264654 - RNA, 19 nt, Homo sapiens
  misc_RNA (1)...(19): siRNA sense strand
gagcaagagaaacuggaca

SEQ ID NO: 2264655 - RNA, 19 nt, Homo sapiens
  misc_RNA (1)...(19): siRNA sense strand
cuaaauacaaccagcucau

SEQ ID NO: 2264656 - RNA, 19 nt, Homo sapiens
  misc_RNA (1)...(19): siRNA sense strand
ugguggagcaagagaaacu

SEQ ID NO: 2264657 - RNA, 19 nt, Homo sapiens
  misc_RNA (1)...(19): siRNA sense strand
ccucagaguuuuaucguga

SEQ ID NO: 2264658 - RNA, 19 nt, Homo sapiens
  misc_RNA (1)...(19): siRNA sense strand
gacuaggugcagaggucua

SEQ ID NO: 2264659 - RNA, 19 nt, Homo sapiens
  misc_RNA (1)...(19): siRNA sense strand
caggagagacugaggacac

SEQ ID NO: 2264660 - RNA, 19 nt, Homo sapiens
  misc_RNA (1)...(19): siRNA sense strand
cggccuucaacgugaucaa

SEQ ID NO: 2264661 - RNA, 19 nt, Homo sapiens
  misc_RNA (1)...(19): siRNA sense strand
ucaaggacaaauacggcaa

SEQ ID NO: 2264662 - RNA, 19 nt, Homo sapiens
  misc_RNA (1)...(19): siRNA sense strand
guuuuaucgugauggcaaa

SEQ ID NO: 2264663 - RNA, 19 nt, Homo sapiens
  misc_RNA (1)...(19): siRNA sense strand
caucugaguucuaucgcaa

SEQ ID NO: 2264664 - RNA, 19 nt, Homo sapiens
  misc_RNA (1)...(19): siRNA sense strand
uguccuuggccguguguaa

SEQ ID NO: 2264665 - RNA, 19 nt, Homo sapiens
  misc_RNA (1)...(19): siRNA sense strand
ucgcagaucucgcugggaa

SEQ ID NO: 2264666 - RNA, 19 nt, Homo sapiens
  misc_RNA (1)...(19): siRNA sense strand
gcuagaugggaccgagaau

SEQ ID NO: 2264667 - RNA, 19 nt, Homo sapiens
  misc_RNA (1)...(19): siRNA sense strand
uccugaaggcuguggagaa

SEQ ID NO: 2264668 - RNA, 19 nt, Homo sapiens
  misc_RNA (1)...(19): siRNA sense strand
ccucauacucccagugcca

SEQ ID NO: 2264669 - RNA, 19 nt, Homo sapiens
  misc_RNA (1)...(19): siRNA sense strand
ucaaggaagccaugcgcau

SEQ ID NO: 2264670 - RNA, 19 nt, Homo sapiens
  misc_RNA (1)...(19): siRNA sense strand
caucugaguucuaucgcaa

SEQ ID NO: 2264671 - RNA, 19 nt, Homo sapiens
  misc_RNA (1)...(19): siRNA sense strand
uguccuuggccguguguaa

SEQ ID NO: 2264672 - RNA, 19 nt, Homo sapiens
  misc_RNA (1)...(19): siRNA sense strand
ucgcagaucucgcugggaa

SEQ ID NO: 2264673 - RNA, 19 nt, Homo sapiens
  misc_RNA (1)...(19): siRNA sense strand
gcuagaugggaccgagaau

SEQ ID NO: 2264674 - RNA, 19 nt, Homo sapiens
  misc_RNA (1)...(19): siRNA sense strand
uccugaaggcuguggagaa

SEQ ID NO: 2264675 - RNA, 19 nt, Homo sapiens
  misc_RNA (1)...(19): siRNA sense strand
ccucauacucccagugcca

SEQ ID NO: 2264676 - RNA, 19 nt, Homo sapiens
  misc_RNA (1)...(19): siRNA sense strand
ucaaggaagccaugcgcau

SEQ ID NO: 2264677 - RNA, 19 nt, Homo sapiens
  misc_RNA (1)...(19): siRNA sense strand
cugaggaccugguggccaa

SEQ ID NO: 2264678 - RNA, 19 nt, Homo sapiens
  misc_RNA (1)...(19): siRNA sense strand
aguugaaaguggagcggga

SEQ ID NO: 2264679 - RNA, 19 nt, Homo sapiens
  misc_RNA (1)...(19): siRNA sense strand
aggagaagaagcuggugaa

SEQ ID NO: 2264680 - RNA, 19 nt, Homo sapiens
  misc_RNA (1)...(19): siRNA sense strand
gggacaaguugaaagugga

SEQ ID NO: 2264681 - RNA, 19 nt, Homo sapiens
  misc_RNA (1)...(19): siRNA sense strand
cagagaaggagaaggugga

SEQ ID NO: 2264682 - RNA, 19 nt, Homo sapiens
  misc_RNA (1)...(19): siRNA sense strand
augaaagccaagaagaaga

SEQ ID NO: 2264683 - RNA, 19 nt, Homo sapiens
  misc_RNA (1)...(19): siRNA sense strand
gaugaugacuguaaccaga

SEQ ID NO: 2264684 - RNA, 19 nt, Homo sapiens
  misc_RNA (1)...(19): siRNA sense strand
uggcagagaaggagaaggu

SEQ ID NO: 2264685 - RNA, 19 nt, Homo sapiens
  misc_RNA (1)...(19): siRNA sense strand
ccaacaucaugaaagccaa

SEQ ID NO: 2264686 - RNA, 19 nt, Homo sapiens
  misc_RNA (1)...(19): siRNA sense strand
aagccaagaagaagaagau

SEQ ID NO: 2264687 - RNA, 19 nt, Homo sapiens
  misc_RNA (1)...(19): siRNA sense strand
ucgacuacgccgugaagau

SEQ ID NO: 2264688 - RNA, 19 nt, Homo sapiens
  misc_RNA (1)...(19): siRNA sense strand
cugugcggcucaaggagaa

SEQ ID NO: 2264689 - RNA, 19 nt, Homo sapiens
  misc_RNA (1)...(19): siRNA sense strand
cgugaagauccgagugaag

SEQ ID NO: 2264690 - RNA, 19 nt, Homo sapiens
  misc_RNA (1)...(19): siRNA sense strand
cguuugaaaugaauggcaa

SEQ ID NO: 2264691 - RNA, 19 nt, Homo sapiens
  misc_RNA (1)...(19): siRNA sense strand
aaccauaagaacagaacaa

SEQ ID NO: 2264692 - RNA, 19 nt, Homo sapiens
  misc_RNA (1)...(19): siRNA sense strand
ccaagaagaugaaugcuga

SEQ ID NO: 2264693 - RNA, 19 nt, Homo sapiens
  misc_RNA (1)...(19): siRNA sense strand
caggaaggagccaggacaa

SEQ ID NO: 2264694 - RNA, 19 nt, Homo sapiens
  misc_RNA (1)...(19): siRNA sense strand
cgcucaggauggaggaaga

SEQ ID NO: 2264695 - RNA, 19 nt, Homo sapiens
  misc_RNA (1)...(19): siRNA sense strand
agaaccaugaagaagauaa

SEQ ID NO: 2264696 - RNA, 19 nt, Homo sapiens
  misc_RNA (1)...(19): siRNA sense strand
aggaaggagccaggacaaa

SEQ ID NO: 2264697 - RNA, 19 nt, Homo sapiens
  misc_RNA (1)...(19): siRNA sense strand
caggagagcacacgcguga

SEQ ID NO: 2264698 - RNA, 19 nt, Homo sapiens
  misc_RNA (1)...(19): siRNA sense strand
ggccgcaccaggagaacaa

SEQ ID NO: 2264699 - RNA, 19 nt, Homo sapiens
  misc_RNA (1)...(19): siRNA sense strand
cgaugggaggacaaagaau

SEQ ID NO: 2264700 - RNA, 19 nt, Homo sapiens
  misc_RNA (1)...(19): siRNA sense strand
ccauaagaacagaacaaac

SEQ ID NO: 2264701 - RNA, 19 nt, Homo sapiens
  misc_RNA (1)...(19): siRNA sense strand
uaugaaaaccccagaugaa

SEQ ID NO: 2264702 - RNA, 19 nt, Homo sapiens
  misc_RNA (1)...(19): siRNA sense strand
gggaggacaaagaauccaa

SEQ ID NO: 2264703 - RNA, 19 nt, Homo sapiens
  misc_RNA (1)...(19): siRNA sense strand
cagccaauuuacuggagca

SEQ ID NO: 2264704 - RNA, 19 nt, Homo sapiens
  misc_RNA (1)...(19): siRNA sense strand
gcucaagugggcugaaaau

SEQ ID NO: 2264705 - RNA, 19 nt, Homo sapiens
  misc_RNA (1)...(19): siRNA sense strand
gcaugaaggacaagcggca

SEQ ID NO: 2264706 - RNA, 19 nt, Homo sapiens
  misc_RNA (1)...(19): siRNA sense strand
ccgaguaccagcacagcaa

SEQ ID NO: 2264707 - RNA, 19 nt, Homo sapiens
  misc_RNA (1)...(19): siRNA sense strand
acacuuacaugaugagcca

SEQ ID NO: 2264708 - RNA, 19 nt, Homo sapiens
  misc_RNA (1)...(19): siRNA sense strand
aaggaauucuaccgggaga

SEQ ID NO: 2264709 - RNA, 19 nt, Homo sapiens
  misc_RNA (1)...(19): siRNA sense strand
augaagaaaucgaggugag

SEQ ID NO: 2264710 - RNA, 19 nt, Homo sapiens
  misc_RNA (1)...(19): siRNA sense strand
auauggacuaggagaaaua

SEQ ID NO: 2264711 - RNA, 19 nt, Homo sapiens
  misc_RNA (1)...(19): siRNA sense strand
gcaagauuuaccagagcaa

SEQ ID NO: 2264712 - RNA, 19 nt, Homo sapiens
  misc_RNA (1)...(19): siRNA sense strand
cuauaagucaaguaagcaa

SEQ ID NO: 2264713 - RNA, 19 nt, Homo sapiens
  misc_RNA (1)...(19): siRNA sense strand
cuauauggacuaggagaaa

SEQ ID NO: 2264714 - RNA, 19 nt, Homo sapiens
  misc_RNA (1)...(19): siRNA sense strand
ccggaaagugagagaaauc

SEQ ID NO: 2264715 - RNA, 19 nt, Homo sapiens
  misc_RNA (1)...(19): siRNA sense strand
gaggaaagcugaugccacu

SEQ ID NO: 2264716 - RNA, 19 nt, Homo sapiens
  misc_RNA (1)...(19): siRNA sense strand
gguuuaacaauggaagaaa

SEQ ID NO: 2264717 - RNA, 19 nt, Homo sapiens
  misc_RNA (1)...(19): siRNA sense strand
uaccggaaagugagagaaa

SEQ ID NO: 2264718 - RNA, 19 nt, Homo sapiens
  misc_RNA (1)...(19): siRNA sense strand
cugguuaggaacugcauua

SEQ ID NO: 2264719 - RNA, 19 nt, Homo sapiens
  misc_RNA (1)...(19): siRNA sense strand
ucggagaagccuaguguca

SEQ ID NO: 2264720 - RNA, 19 nt, Homo sapiens
  misc_RNA (1)...(19): siRNA sense strand
gggcaagaggaaagcugau

SEQ ID NO: 2264721 - RNA, 19 nt, Homo sapiens
  misc_RNA (1)...(19): siRNA sense strand
cauccaguccagaaagaau

SEQ ID NO: 2264722 - RNA, 19 nt, Homo sapiens
  misc_RNA (1)...(19): siRNA sense strand
ccagaaauauggaaaggac

SEQ ID NO: 2264723 - RNA, 19 nt, Homo sapiens
  misc_RNA (1)...(19): siRNA sense strand
ggacagacucaauaccaga

SEQ ID NO: 2264724 - RNA, 19 nt, Homo sapiens
  misc_RNA (1)...(19): siRNA sense strand
ccagacuacaccaaguaaa

SEQ ID NO: 2264725 - RNA, 19 nt, Homo sapiens
  misc_RNA (1)...(19): siRNA sense strand
acuacaggguuaaccacaa

SEQ ID NO: 2264726 - RNA, 19 nt, Homo sapiens
  misc_RNA (1)...(19): siRNA sense strand
gagaaaucuaugauaagca

SEQ ID NO: 2264727 - RNA, 19 nt, Homo sapiens
  misc_RNA (1)...(19): siRNA sense strand
ggguauuucugugggacuu

SEQ ID NO: 2264728 - RNA, 19 nt, Homo sapiens
  misc_RNA (1)...(19): siRNA sense strand
cagugaauuagaacgggua

SEQ ID NO: 2264729 - RNA, 19 nt, Homo sapiens
  misc_RNA (1)...(19): siRNA sense strand
gcacauuauucuuauccca

SEQ ID NO: 2264730 - RNA, 19 nt, Homo sapiens
  misc_RNA (1)...(19): siRNA sense strand
gggacuuggaugaaaccau

SEQ ID NO: 2264731 - RNA, 19 nt, Homo sapiens
  misc_RNA (1)...(19): siRNA sense strand
agguuuaacaauggaagaa

SEQ ID NO: 2264732 - RNA, 19 nt, Homo sapiens
  misc_RNA (1)...(19): siRNA sense strand
guguggacuggaugaggaa

SEQ ID NO: 2264733 - RNA, 19 nt, Homo sapiens
  misc_RNA (1)...(19): siRNA sense strand
ccuauugagaacaucuaua

SEQ ID NO: 2264734 - RNA, 19 nt, Homo sapiens
  misc_RNA (1)...(19): siRNA sense strand
gcaagauuuaccagagcaa

SEQ ID NO: 2264735 - RNA, 19 nt, Homo sapiens
  misc_RNA (1)...(19): siRNA sense strand
cuauaagucaaguaagcaa

SEQ ID NO: 2264736 - RNA, 19 nt, Homo sapiens
  misc_RNA (1)...(19): siRNA sense strand
gaggaaagcugaugccacu

SEQ ID NO: 2264737 - RNA, 19 nt, Homo sapiens
  misc_RNA (1)...(19): siRNA sense strand
gguuuaacaauggaagaaa

SEQ ID NO: 2264738 - RNA, 19 nt, Homo sapiens
  misc_RNA (1)...(19): siRNA sense strand
ucggagaagccuaguguca

SEQ ID NO: 2264739 - RNA, 19 nt, Homo sapiens
  misc_RNA (1)...(19): siRNA sense strand
gggcaagaggaaagcugau

SEQ ID NO: 2264740 - RNA, 19 nt, Homo sapiens
  misc_RNA (1)...(19): siRNA sense strand
ccagaaauauggaaaggac

SEQ ID NO: 2264741 - RNA, 19 nt, Homo sapiens
  misc_RNA (1)...(19): siRNA sense strand
ggacagacucaauaccaga

SEQ ID NO: 2264742 - RNA, 19 nt, Homo sapiens
  misc_RNA (1)...(19): siRNA sense strand
ccagacuacaccaaguaaa

SEQ ID NO: 2264743 - RNA, 19 nt, Homo sapiens
  misc_RNA (1)...(19): siRNA sense strand
acuacaggguuaaccacaa

SEQ ID NO: 2264744 - RNA, 19 nt, Homo sapiens
  misc_RNA (1)...(19): siRNA sense strand
ggguauuucugugggacuu

SEQ ID NO: 2264745 - RNA, 19 nt, Homo sapiens
  misc_RNA (1)...(19): siRNA sense strand
cagugaauuagaacgggua

SEQ ID NO: 2264746 - RNA, 19 nt, Homo sapiens
  misc_RNA (1)...(19): siRNA sense strand
gcacauuauucuuauccca

SEQ ID NO: 2264747 - RNA, 19 nt, Homo sapiens
  misc_RNA (1)...(19): siRNA sense strand
gggacuuggaugaaaccau

SEQ ID NO: 2264748 - RNA, 19 nt, Homo sapiens
  misc_RNA (1)...(19): siRNA sense strand
agguuuaacaauggaagaa

SEQ ID NO: 2264749 - RNA, 19 nt, Homo sapiens
  misc_RNA (1)...(19): siRNA sense strand
acagaggagaagugaaaua

SEQ ID NO: 2264750 - RNA, 19 nt, Homo sapiens
  misc_RNA (1)...(19): siRNA sense strand
uggaagacaagaagagcaa

SEQ ID NO: 2264751 - RNA, 19 nt, Homo sapiens
  misc_RNA (1)...(19): siRNA sense strand
gcauugaaggacaggagaa

SEQ ID NO: 2264752 - RNA, 19 nt, Homo sapiens
  misc_RNA (1)...(19): siRNA sense strand
ggaaagucuuacauggaga

SEQ ID NO: 2264753 - RNA, 19 nt, Homo sapiens
  misc_RNA (1)...(19): siRNA sense strand
ugaaaauggugcagcaaau

SEQ ID NO: 2264754 - RNA, 19 nt, Homo sapiens
  misc_RNA (1)...(19): siRNA sense strand
guuuauuuguagaggagau

SEQ ID NO: 2264755 - RNA, 19 nt, Homo sapiens
  misc_RNA (1)...(19): siRNA sense strand
ugaaaguggaagacaagaa

SEQ ID NO: 2264756 - RNA, 19 nt, Homo sapiens
  misc_RNA (1)...(19): siRNA sense strand
agauguauuccaagacaaa

SEQ ID NO: 2264757 - RNA, 19 nt, Homo sapiens
  misc_RNA (1)...(19): siRNA sense strand
cgaaggaagaagaaacaga

SEQ ID NO: 2264758 - RNA, 19 nt, Homo sapiens
  misc_RNA (1)...(19): siRNA sense strand
caggagaacucuaugcaga

SEQ ID NO: 2264759 - RNA, 19 nt, Homo sapiens
  misc_RNA (1)...(19): siRNA sense strand
gaaagaagacagaggaggu

SEQ ID NO: 2264760 - RNA, 19 nt, Homo sapiens
  misc_RNA (1)...(19): siRNA sense strand
uuaucgucauggagaaaua

SEQ ID NO: 2264761 - RNA, 19 nt, Homo sapiens
  misc_RNA (1)...(19): siRNA sense strand
ucaaccaaccuguaggaaa

SEQ ID NO: 2264762 - RNA, 19 nt, Homo sapiens
  misc_RNA (1)...(19): siRNA sense strand
caggauccucaguggaaua

SEQ ID NO: 2264763 - RNA, 19 nt, Homo sapiens
  misc_RNA (1)...(19): siRNA sense strand
caaaaugcauugaaggaca

SEQ ID NO: 2264764 - RNA, 19 nt, Homo sapiens
  misc_RNA (1)...(19): siRNA sense strand
agugaaggacaaaguacaa

SEQ ID NO: 2264765 - RNA, 19 nt, Homo sapiens
  misc_RNA (1)...(19): siRNA sense strand
gcaacagaggagaagugaa

SEQ ID NO: 2264766 - RNA, 19 nt, Homo sapiens
  misc_RNA (1)...(19): siRNA sense strand
aguggaaauaugaagggaa

SEQ ID NO: 2264767 - RNA, 19 nt, Homo sapiens
  misc_RNA (1)...(19): siRNA sense strand
uuguauguaaacagggaua

SEQ ID NO: 2264768 - RNA, 19 nt, Homo sapiens
  misc_RNA (1)...(19): siRNA sense strand
aggagaacucuaugcagaa

SEQ ID NO: 2264769 - RNA, 19 nt, Homo sapiens
  misc_RNA (1)...(19): siRNA sense strand
gugacagagggcaguuaaa

SEQ ID NO: 2264770 - RNA, 19 nt, Homo sapiens
  misc_RNA (1)...(19): siRNA sense strand
agaagacagaggagguaga

SEQ ID NO: 2264771 - RNA, 19 nt, Homo sapiens
  misc_RNA (1)...(19): siRNA sense strand
guggauuacaugaacagaa

SEQ ID NO: 2264772 - RNA, 19 nt, Homo sapiens
  misc_RNA (1)...(19): siRNA sense strand
gagggaaggaugaagaagu

SEQ ID NO: 2264773 - RNA, 19 nt, Homo sapiens
  misc_RNA (1)...(19): siRNA sense strand
auaugaagggaaagucuua

SEQ ID NO: 2264774 - RNA, 19 nt, Homo sapiens
  misc_RNA (1)...(19): siRNA sense strand
ccacuggagggaaggauga

SEQ ID NO: 2264775 - RNA, 19 nt, Homo sapiens
  misc_RNA (1)...(19): siRNA sense strand
aaaccuaugaagaaggaga

SEQ ID NO: 2264776 - RNA, 19 nt, Homo sapiens
  misc_RNA (1)...(19): siRNA sense strand
gcagugcaacagaggagaa

SEQ ID NO: 2264777 - RNA, 19 nt, Homo sapiens
  misc_RNA (1)...(19): siRNA sense strand
aagauguauuccaagacaa

SEQ ID NO: 2264778 - RNA, 19 nt, Homo sapiens
  misc_RNA (1)...(19): siRNA sense strand
ggauaaagugacauaugca

SEQ ID NO: 2264779 - RNA, 19 nt, Homo sapiens
  misc_RNA (1)...(19): siRNA sense strand
gauccaugggucagcagaa

SEQ ID NO: 2264780 - RNA, 19 nt, Homo sapiens
  misc_RNA (1)...(19): siRNA sense strand
gaagacaagaagagcaaac

SEQ ID NO: 2264781 - RNA, 19 nt, Homo sapiens
  misc_RNA (1)...(19): siRNA sense strand
ggcuguugcagacgggaua

SEQ ID NO: 2264782 - RNA, 19 nt, Homo sapiens
  misc_RNA (1)...(19): siRNA sense strand
aggacaaaguacaauacga

SEQ ID NO: 2264783 - RNA, 19 nt, Homo sapiens
  misc_RNA (1)...(19): siRNA sense strand
ggaucgaaugagauaacuu

SEQ ID NO: 2264784 - RNA, 19 nt, Homo sapiens
  misc_RNA (1)...(19): siRNA sense strand
cuuagaaugcaaugugaca

SEQ ID NO: 2264785 - RNA, 19 nt, Homo sapiens
  misc_RNA (1)...(19): siRNA sense strand
aaauggaagaauugcccaa

SEQ ID NO: 2264786 - RNA, 19 nt, Homo sapiens
  misc_RNA (1)...(19): siRNA sense strand
uagaaugcaaugugacaga

SEQ ID NO: 2264787 - RNA, 19 nt, Homo sapiens
  misc_RNA (1)...(19): siRNA sense strand
cuccauggaucgaaugaga

SEQ ID NO: 2264788 - RNA, 19 nt, Homo sapiens
  misc_RNA (1)...(19): siRNA sense strand
uguggaaaauggaagaauu

SEQ ID NO: 2264789 - RNA, 19 nt, Homo sapiens
  misc_RNA (1)...(19): siRNA sense strand
caacuuaucgucauggaga

SEQ ID NO: 2264790 - RNA, 19 nt, Homo sapiens
  misc_RNA (1)...(19): siRNA sense strand
aguggaauauagaugcaau

SEQ ID NO: 2264791 - RNA, 19 nt, Homo sapiens
  misc_RNA (1)...(19): siRNA sense strand
cgaacaaggaaaaugguca

SEQ ID NO: 2264792 - RNA, 19 nt, Homo sapiens
  misc_RNA (1)...(19): siRNA sense strand
guggaagacaagaagagca

SEQ ID NO: 2264793 - RNA, 19 nt, Homo sapiens
  misc_RNA (1)...(19): siRNA sense strand
aggagaugucguucaguuu

SEQ ID NO: 2264794 - RNA, 19 nt, Homo sapiens
  misc_RNA (1)...(19): siRNA sense strand
ccacuaaacaucauggcca

SEQ ID NO: 2264795 - RNA, 19 nt, Homo sapiens
  misc_RNA (1)...(19): siRNA sense strand
uuugggaggaugaggagaa

SEQ ID NO: 2264796 - RNA, 19 nt, Homo sapiens
  misc_RNA (1)...(19): siRNA sense strand
cacuaaacaucauggccau

SEQ ID NO: 2264797 - RNA, 19 nt, Homo sapiens
  misc_RNA (1)...(19): siRNA sense strand
aaacccugcucgaaggcua

SEQ ID NO: 2264798 - RNA, 19 nt, Homo sapiens
  misc_RNA (1)...(19): siRNA sense strand
ugaaaaugaaggucaagaa

SEQ ID NO: 2264799 - RNA, 19 nt, Homo sapiens
  misc_RNA (1)...(19): siRNA sense strand
aggaggaggaggagagaga

SEQ ID NO: 2264800 - RNA, 19 nt, Homo sapiens
  misc_RNA (1)...(19): siRNA sense strand
aggaagaagaggaggagga

SEQ ID NO: 2264801 - RNA, 19 nt, Homo sapiens
  misc_RNA (1)...(19): siRNA sense strand
aagaagaggaggaggagga

SEQ ID NO: 2264802 - RNA, 19 nt, Homo sapiens
  misc_RNA (1)...(19): siRNA sense strand
aggaggagagagaggaaau

SEQ ID NO: 2264803 - RNA, 19 nt, Homo sapiens
  misc_RNA (1)...(19): siRNA sense strand
ugaacaucaucaagggcaa

SEQ ID NO: 2264804 - RNA, 19 nt, Homo sapiens
  misc_RNA (1)...(19): siRNA sense strand
cgugaaugagugugagaca

SEQ ID NO: 2264805 - RNA, 19 nt, Homo sapiens
  misc_RNA (1)...(19): siRNA sense strand
ccugcaaggacguggauga

SEQ ID NO: 2264806 - RNA, 19 nt, Homo sapiens
  misc_RNA (1)...(19): siRNA sense strand
gccaaagcuaggagaguga

SEQ ID NO: 2264807 - RNA, 19 nt, Homo sapiens
  misc_RNA (1)...(19): siRNA sense strand
agggcaaugaggagggcua

SEQ ID NO: 2264808 - RNA, 19 nt, Homo sapiens
  misc_RNA (1)...(19): siRNA sense strand
acggagaguuucagaggca

SEQ ID NO: 2264809 - RNA, 19 nt, Homo sapiens
  misc_RNA (1)...(19): siRNA sense strand
aggaggaagaagaggagga

SEQ ID NO: 2264810 - RNA, 19 nt, Homo sapiens
  misc_RNA (1)...(19): siRNA sense strand
ggacaacgucugcaggaca

SEQ ID NO: 2264811 - RNA, 19 nt, Homo sapiens
  misc_RNA (1)...(19): siRNA sense strand
ggagaguuucagaggcaga

SEQ ID NO: 2264812 - RNA, 19 nt, Homo sapiens
  misc_RNA (1)...(19): siRNA sense strand
aggacagugaggaggaaga

SEQ ID NO: 2264813 - RNA, 19 nt, Homo sapiens
  misc_RNA (1)...(19): siRNA sense strand
aggaaauggcugucacuga

SEQ ID NO: 2264814 - RNA, 19 nt, Homo sapiens
  misc_RNA (1)...(19): siRNA sense strand
gugaaugagugcugggccu

SEQ ID NO: 2264815 - RNA, 19 nt, Homo sapiens
  misc_RNA (1)...(19): siRNA sense strand
aggcuguagugguggcuga

SEQ ID NO: 2264816 - RNA, 19 nt, Homo sapiens
  misc_RNA (1)...(19): siRNA sense strand
ccaccaaggaccugaucga

SEQ ID NO: 2264817 - RNA, 19 nt, Homo sapiens
  misc_RNA (1)...(19): siRNA sense strand
gcaucaauacuguggguuc

SEQ ID NO: 2264818 - RNA, 19 nt, Homo sapiens
  misc_RNA (1)...(19): siRNA sense strand
gcgaagacguggaugagug

SEQ ID NO: 2264819 - RNA, 19 nt, Homo sapiens
  misc_RNA (1)...(19): siRNA sense strand
gugaggaggaagaagagga

SEQ ID NO: 2264820 - RNA, 19 nt, Homo sapiens
  misc_RNA (1)...(19): siRNA sense strand
agugcgaagacguggauga

SEQ ID NO: 2264821 - RNA, 19 nt, Homo sapiens
  misc_RNA (1)...(19): siRNA sense strand
acgaagaccccuacagcua

SEQ ID NO: 2264822 - RNA, 19 nt, Homo sapiens
  misc_RNA (1)...(19): siRNA sense strand
gcacagacaucgacgagug

SEQ ID NO: 2264823 - RNA, 19 nt, Homo sapiens
  misc_RNA (1)...(19): siRNA sense strand
agaugaagcucuggaggca

SEQ ID NO: 2264824 - RNA, 19 nt, Homo sapiens
  misc_RNA (1)...(19): siRNA sense strand
gggccaaguguguggacgu

SEQ ID NO: 2264825 - RNA, 19 nt, Homo sapiens
  misc_RNA (1)...(19): siRNA sense strand
ggagagugaccgaggacag

SEQ ID NO: 2264826 - RNA, 19 nt, Homo sapiens
  misc_RNA (1)...(19): siRNA sense strand
cggcaagcgcugugaagac

SEQ ID NO: 2264827 - RNA, 19 nt, Homo sapiens
  misc_RNA (1)...(19): siRNA sense strand
gcugcaucgacgugaauga

SEQ ID NO: 2264828 - RNA, 19 nt, Homo sapiens
  misc_RNA (1)...(19): siRNA sense strand
ggacagaacaggagggaac

SEQ ID NO: 2264829 - RNA, 19 nt, Homo sapiens
  misc_RNA (1)...(19): siRNA sense strand
gcuauaacacccugggaaa

SEQ ID NO: 2264830 - RNA, 19 nt, Homo sapiens
  misc_RNA (1)...(19): siRNA sense strand
gcacauacacacuggaaau

SEQ ID NO: 2264831 - RNA, 19 nt, Homo sapiens
  misc_RNA (1)...(19): siRNA sense strand
uggaagagauauugaugaa

SEQ ID NO: 2264832 - RNA, 19 nt, Homo sapiens
  misc_RNA (1)...(19): siRNA sense strand
gaaagaaacugcacggaca

SEQ ID NO: 2264833 - RNA, 19 nt, Homo sapiens
  misc_RNA (1)...(19): siRNA sense strand
cagcaucauuccugggaua

SEQ ID NO: 2264834 - RNA, 19 nt, Homo sapiens
  misc_RNA (1)...(19): siRNA sense strand
acaagaagaaggagcuuaa

SEQ ID NO: 2264835 - RNA, 19 nt, Homo sapiens
  misc_RNA (1)...(19): siRNA sense strand
aggaaaagcuguugacauu

SEQ ID NO: 2264836 - RNA, 19 nt, Homo sapiens
  misc_RNA (1)...(19): siRNA sense strand
guuauaagcaggaugcaaa

SEQ ID NO: 2264837 - RNA, 19 nt, Homo sapiens
  misc_RNA (1)...(19): siRNA sense strand
gcacaaauucagagggaag

SEQ ID NO: 2264838 - RNA, 19 nt, Homo sapiens
  misc_RNA (1)...(19): siRNA sense strand
uagaaauaguuguggagau

SEQ ID NO: 2264839 - RNA, 19 nt, Homo sapiens
  misc_RNA (1)...(19): siRNA sense strand
cgcaaugaauguuuagaaa

SEQ ID NO: 2264840 - RNA, 19 nt, Homo sapiens
  misc_RNA (1)...(19): siRNA sense strand
ggaaauggaacuuguaaaa

SEQ ID NO: 2264841 - RNA, 19 nt, Homo sapiens
  misc_RNA (1)...(19): siRNA sense strand
cggcaauccguguggaaau

SEQ ID NO: 2264842 - RNA, 19 nt, Homo sapiens
  misc_RNA (1)...(19): siRNA sense strand
agaaacuggaagagagcaa

SEQ ID NO: 2264843 - RNA, 19 nt, Homo sapiens
  misc_RNA (1)...(19): siRNA sense strand
gcuauagaugugaguguaa

SEQ ID NO: 2264844 - RNA, 19 nt, Homo sapiens
  misc_RNA (1)...(19): siRNA sense strand
gugaaugcaacauggguua

SEQ ID NO: 2264845 - RNA, 19 nt, Homo sapiens
  misc_RNA (1)...(19): siRNA sense strand
gggaggaauuccagggagu

SEQ ID NO: 2264846 - RNA, 19 nt, Homo sapiens
  misc_RNA (1)...(19): siRNA sense strand
gccaaugggauuugugaaa

SEQ ID NO: 2264847 - RNA, 19 nt, Homo sapiens
  misc_RNA (1)...(19): siRNA sense strand
augcaaagaccuugaugaa

SEQ ID NO: 2264848 - RNA, 19 nt, Homo sapiens
  misc_RNA (1)...(19): siRNA sense strand
gugcaaagaucuggaugaa

SEQ ID NO: 2264849 - RNA, 19 nt, Homo sapiens
  misc_RNA (1)...(19): siRNA sense strand
cugugaagauguugaugaa

SEQ ID NO: 2264850 - RNA, 19 nt, Homo sapiens
  misc_RNA (1)...(19): siRNA sense strand
cugccaagauauugaugaa

SEQ ID NO: 2264851 - RNA, 19 nt, Homo sapiens
  misc_RNA (1)...(19): siRNA sense strand
gggcaugauguguaagaau

SEQ ID NO: 2264852 - RNA, 19 nt, Homo sapiens
  misc_RNA (1)...(19): siRNA sense strand
ccuuuguaguaguggagua

SEQ ID NO: 2264853 - RNA, 19 nt, Homo sapiens
  misc_RNA (1)...(19): siRNA sense strand
gauuaaagguguuacgugu

SEQ ID NO: 2264854 - RNA, 19 nt, Homo sapiens
  misc_RNA (1)...(19): siRNA sense strand
ugucaauagcacugaauau

SEQ ID NO: 2264855 - RNA, 19 nt, Homo sapiens
  misc_RNA (1)...(19): siRNA sense strand
gugaauguccaaugggcua

SEQ ID NO: 2264856 - RNA, 19 nt, Homo sapiens
  misc_RNA (1)...(19): siRNA sense strand
ggaagagagcaaugaggau

SEQ ID NO: 2264857 - RNA, 19 nt, Homo sapiens
  misc_RNA (1)...(19): siRNA sense strand
uagacauggaggaaagaaa

SEQ ID NO: 2264858 - RNA, 19 nt, Homo sapiens
  misc_RNA (1)...(19): siRNA sense strand
augaagaacugcauggaca

SEQ ID NO: 2264859 - RNA, 19 nt, Homo sapiens
  misc_RNA (1)...(19): siRNA sense strand
ugaaagagauuacaggaca

SEQ ID NO: 2264860 - RNA, 19 nt, Homo sapiens
  misc_RNA (1)...(19): siRNA sense strand
gcgagugcuucgaaggcua

SEQ ID NO: 2264861 - RNA, 19 nt, Homo sapiens
  misc_RNA (1)...(19): siRNA sense strand
gugcagcaauggugauaau

SEQ ID NO: 2264862 - RNA, 19 nt, Homo sapiens
  misc_RNA (1)...(19): siRNA sense strand
cgagaacugcauugauaua

SEQ ID NO: 2264863 - RNA, 19 nt, Homo sapiens
  misc_RNA (1)...(19): siRNA sense strand
auauacaacugauggaaga

SEQ ID NO: 2264864 - RNA, 19 nt, Homo sapiens
  misc_RNA (1)...(19): siRNA sense strand
aauguaagguaaugccaaa

SEQ ID NO: 2264865 - RNA, 19 nt, Homo sapiens
  misc_RNA (1)...(19): siRNA sense strand
gggaagugcagaaauacaa

SEQ ID NO: 2264866 - RNA, 19 nt, Homo sapiens
  misc_RNA (1)...(19): siRNA sense strand
caugaugaauugugaagau

SEQ ID NO: 2264867 - RNA, 19 nt, Homo sapiens
  misc_RNA (1)...(19): siRNA sense strand
gguauuacagagugggaca

SEQ ID NO: 2264868 - RNA, 19 nt, Homo sapiens
  misc_RNA (1)...(19): siRNA sense strand
cuguacagauauugaugaa

SEQ ID NO: 2264869 - RNA, 19 nt, Homo sapiens
  misc_RNA (1)...(19): siRNA sense strand
gggagaagacggaggcugu

SEQ ID NO: 2264870 - RNA, 19 nt, Homo sapiens
  misc_RNA (1)...(19): siRNA sense strand
guaaagagauuccaggcau

SEQ ID NO: 2264871 - RNA, 19 nt, Homo sapiens
  misc_RNA (1)...(19): siRNA sense strand
ccgaaggcccgauggagaa

SEQ ID NO: 2264872 - RNA, 19 nt, Homo sapiens
  misc_RNA (1)...(19): siRNA sense strand
acaacugauggaagagaua

SEQ ID NO: 2264873 - RNA, 19 nt, Homo sapiens
  misc_RNA (1)...(19): siRNA sense strand
cugaguacaugcaggucaa

SEQ ID NO: 2264874 - RNA, 19 nt, Homo sapiens
  misc_RNA (1)...(19): siRNA sense strand
auacagaggucgaugagga

SEQ ID NO: 2264875 - RNA, 19 nt, Homo sapiens
  misc_RNA (1)...(19): siRNA sense strand
cagagguacugcagacaau

SEQ ID NO: 2264876 - RNA, 19 nt, Homo sapiens
  misc_RNA (1)...(19): siRNA sense strand
acuaauggagauuguguua

SEQ ID NO: 2264877 - RNA, 19 nt, Homo sapiens
  misc_RNA (1)...(19): siRNA sense strand
guuuggaccucgaggagau

SEQ ID NO: 2264878 - RNA, 19 nt, Homo sapiens
  misc_RNA (1)...(19): siRNA sense strand
uggaaccacuugugagaau

SEQ ID NO: 2264879 - RNA, 19 nt, Homo sapiens
  misc_RNA (1)...(19): siRNA sense strand
uggaaauggaacuuguaaa

SEQ ID NO: 2264880 - RNA, 19 nt, Homo sapiens
  misc_RNA (1)...(19): siRNA sense strand
ggauaugccaaggaggaaa

SEQ ID NO: 2264881 - RNA, 19 nt, Homo sapiens
  misc_RNA (1)...(19): siRNA sense strand
gaauauuaauggagccacu

SEQ ID NO: 2264882 - RNA, 19 nt, Homo sapiens
  misc_RNA (1)...(19): siRNA sense strand
gugcacaaauucagaggga

SEQ ID NO: 2264883 - RNA, 19 nt, Homo sapiens
  misc_RNA (1)...(19): siRNA sense strand
caucaauaguccugguagu

SEQ ID NO: 2264884 - RNA, 19 nt, Homo sapiens
  misc_RNA (1)...(19): siRNA sense strand
ggacguuguuuuaaugaaa

SEQ ID NO: 2264885 - RNA, 19 nt, Homo sapiens
  misc_RNA (1)...(19): siRNA sense strand
agaagaaggagcuuaagaa

SEQ ID NO: 2264886 - RNA, 19 nt, Homo sapiens
  misc_RNA (1)...(19): siRNA sense strand
cuauggaggaaucaagaaa

SEQ ID NO: 2264887 - RNA, 19 nt, Homo sapiens
  misc_RNA (1)...(19): siRNA sense strand
uggaagagauaucaaugaa

SEQ ID NO: 2264888 - RNA, 19 nt, Homo sapiens
  misc_RNA (1)...(19): siRNA sense strand
caauaguggcuuugcucua

SEQ ID NO: 2264889 - RNA, 19 nt, Homo sapiens
  misc_RNA (1)...(19): siRNA sense strand
uuguauagaccuugaugaa

SEQ ID NO: 2264890 - RNA, 19 nt, Homo sapiens
  misc_RNA (1)...(19): siRNA sense strand
aagaaagacagcaggcaga

SEQ ID NO: 2264891 - RNA, 19 nt, Homo sapiens
  misc_RNA (1)...(19): siRNA sense strand
agacuaugguuuuggagaa

SEQ ID NO: 2264892 - RNA, 19 nt, Homo sapiens
  misc_RNA (1)...(19): siRNA sense strand
ccaaauggacgcuguguca

SEQ ID NO: 2264893 - RNA, 19 nt, Homo sapiens
  misc_RNA (1)...(19): siRNA sense strand
uugccaagauguugaugaa

SEQ ID NO: 2264894 - RNA, 19 nt, Homo sapiens
  misc_RNA (1)...(19): siRNA sense strand
gaggaauaucgcagacuuu

SEQ ID NO: 2264895 - RNA, 19 nt, Homo sapiens
  misc_RNA (1)...(19): siRNA sense strand
uggcaauggcaauggcuau

SEQ ID NO: 2264896 - RNA, 19 nt, Homo sapiens
  misc_RNA (1)...(19): siRNA sense strand
ccuccauggaauagaauau

SEQ ID NO: 2264897 - RNA, 19 nt, Homo sapiens
  misc_RNA (1)...(19): siRNA sense strand
auuugaagacaguggagaa

SEQ ID NO: 2264898 - RNA, 19 nt, Homo sapiens
  misc_RNA (1)...(19): siRNA sense strand
cgugagaaguacuggcuac

SEQ ID NO: 2264899 - RNA, 19 nt, Homo sapiens
  misc_RNA (1)...(19): siRNA sense strand
agguggugauggagggcca

SEQ ID NO: 2264900 - RNA, 19 nt, Homo sapiens
  misc_RNA (1)...(19): siRNA sense strand
ugccaugguuggaggaacu

SEQ ID NO: 2264901 - RNA, 19 nt, Homo sapiens
  misc_RNA (1)...(19): siRNA sense strand
uugaagauuaagagaacca

SEQ ID NO: 2264902 - RNA, 19 nt, Homo sapiens
  misc_RNA (1)...(19): siRNA sense strand
gccuuucagaagagacaaa

SEQ ID NO: 2264903 - RNA, 19 nt, Homo sapiens
  misc_RNA (1)...(19): siRNA sense strand
acauguaaugggaacaauu

SEQ ID NO: 2264904 - RNA, 19 nt, Homo sapiens
  misc_RNA (1)...(19): siRNA sense strand
auuaagagaaccaggaaag

SEQ ID NO: 2264905 - RNA, 19 nt, Homo sapiens
  misc_RNA (1)...(19): siRNA sense strand
cuguguaccuggaagucuu

SEQ ID NO: 2264906 - RNA, 19 nt, Homo sapiens
  misc_RNA (1)...(19): siRNA sense strand
aaguguggcagcuggacua

SEQ ID NO: 2264907 - RNA, 19 nt, Homo sapiens
  misc_RNA (1)...(19): siRNA sense strand
ugguggacuuugagggcaa

SEQ ID NO: 2264908 - RNA, 19 nt, Homo sapiens
  misc_RNA (1)...(19): siRNA sense strand
cauuggagagagaggagaa

SEQ ID NO: 2264909 - RNA, 19 nt, Homo sapiens
  misc_RNA (1)...(19): siRNA sense strand
aggugaagguggugggccu

SEQ ID NO: 2264910 - RNA, 19 nt, Homo sapiens
  misc_RNA (1)...(19): siRNA sense strand
aggugucauuggagagaga

SEQ ID NO: 2264911 - RNA, 19 nt, Homo sapiens
  misc_RNA (1)...(19): siRNA sense strand
cuucaaaccucaauggucu

SEQ ID NO: 2264912 - RNA, 19 nt, Homo sapiens
  misc_RNA (1)...(19): siRNA sense strand
aggcaggugucauuggaga

SEQ ID NO: 2264913 - RNA, 19 nt, Homo sapiens
  misc_RNA (1)...(19): siRNA sense strand
ccaugagagcuaugccaau

SEQ ID NO: 2264914 - RNA, 19 nt, Homo sapiens
  misc_RNA (1)...(19): siRNA sense strand
caaaggagaccgaggagag

SEQ ID NO: 2264915 - RNA, 19 nt, Homo sapiens
  misc_RNA (1)...(19): siRNA sense strand
cauucaagguggcugacga

SEQ ID NO: 2264916 - RNA, 19 nt, Homo sapiens
  misc_RNA (1)...(19): siRNA sense strand
gugacaaggccaaggacaa

SEQ ID NO: 2264917 - RNA, 19 nt, Homo sapiens
  misc_RNA (1)...(19): siRNA sense strand
gcaaagacaaggaccguga

SEQ ID NO: 2264918 - RNA, 19 nt, Homo sapiens
  misc_RNA (1)...(19): siRNA sense strand
aggaugaggugguggccau

SEQ ID NO: 2264919 - RNA, 19 nt, Homo sapiens
  misc_RNA (1)...(19): siRNA sense strand
uugagaagcugaagagcca

SEQ ID NO: 2264920 - RNA, 19 nt, Homo sapiens
  misc_RNA (1)...(19): siRNA sense strand
agaccaagcuggagcaccu

SEQ ID NO: 2264921 - RNA, 19 nt, Homo sapiens
  misc_RNA (1)...(19): siRNA sense strand
aggacaagugggugcugaa

SEQ ID NO: 2264922 - RNA, 19 nt, Homo sapiens
  misc_RNA (1)...(19): siRNA sense strand
uggagauccuuaagagcca

SEQ ID NO: 2264923 - RNA, 19 nt, Homo sapiens
  misc_RNA (1)...(19): siRNA sense strand
caccugaccucaaggccaa

SEQ ID NO: 2264924 - RNA, 19 nt, Homo sapiens
  misc_RNA (1)...(19): siRNA sense strand
cuggagggcaugagaaagu

SEQ ID NO: 2264925 - RNA, 19 nt, Homo sapiens
  misc_RNA (1)...(19): siRNA sense strand
gugcccaagccaagcgcaa

SEQ ID NO: 2264926 - RNA, 19 nt, Homo sapiens
  misc_RNA (1)...(19): siRNA sense strand
gcucggaacugccugguga

SEQ ID NO: 2264927 - RNA, 19 nt, Homo sapiens
  misc_RNA (1)...(19): siRNA sense strand
gaucagugacuuugggaug

SEQ ID NO: 2264928 - RNA, 19 nt, Homo sapiens
  misc_RNA (1)...(19): siRNA sense strand
gccuggugacagagaagaa

SEQ ID NO: 2264929 - RNA, 19 nt, Homo sapiens
  misc_RNA (1)...(19): siRNA sense strand
uacuggagggcaugagaaa

SEQ ID NO: 2264930 - RNA, 19 nt, Homo sapiens
  misc_RNA (1)...(19): siRNA sense strand
ggacagugcccaagccaag

SEQ ID NO: 2264931 - RNA, 19 nt, Homo sapiens
  misc_RNA (1)...(19): siRNA sense strand
aggaccugguguuggguga

SEQ ID NO: 2264932 - RNA, 19 nt, Homo sapiens
  misc_RNA (1)...(19): siRNA sense strand
ggguggagauguagaagau

SEQ ID NO: 2264933 - RNA, 19 nt, Homo sapiens
  misc_RNA (1)...(19): siRNA sense strand
cuacaauacuuaccgguca

SEQ ID NO: 2264934 - RNA, 19 nt, Homo sapiens
  misc_RNA (1)...(19): siRNA sense strand
guggagauguagaagaugu

SEQ ID NO: 2264935 - RNA, 19 nt, Homo sapiens
  misc_RNA (1)...(19): siRNA sense strand
acuuaccggucaaggaaau

SEQ ID NO: 2264936 - RNA, 19 nt, Homo sapiens
  misc_RNA (1)...(19): siRNA sense strand
gggagaagagcgacccuca

SEQ ID NO: 2264937 - RNA, 19 nt, Homo sapiens
  misc_RNA (1)...(19): siRNA sense strand
gcgacuaccugcugggcau

SEQ ID NO: 2264938 - RNA, 19 nt, Homo sapiens
  misc_RNA (1)...(19): siRNA sense strand
ccaugagcagcaagggcaa

SEQ ID NO: 2264939 - RNA, 19 nt, Homo sapiens
  misc_RNA (1)...(19): siRNA sense strand
aagaaugggaagaccaaga

SEQ ID NO: 2264940 - RNA, 19 nt, Homo sapiens
  misc_RNA (1)...(19): siRNA sense strand
gggaagaccaagaagggga

SEQ ID NO: 2264941 - RNA, 19 nt, Homo sapiens
  misc_RNA (1)...(19): siRNA sense strand
gagugcacguucaaggaga

SEQ ID NO: 2264942 - RNA, 19 nt, Homo sapiens
  misc_RNA (1)...(19): siRNA sense strand
ccaacaacuacaacgccua

SEQ ID NO: 2264943 - RNA, 19 nt, Homo sapiens
  misc_RNA (1)...(19): siRNA sense strand
acccaagagaugaagaaua

SEQ ID NO: 2264944 - RNA, 19 nt, Homo sapiens
  misc_RNA (1)...(19): siRNA sense strand
gggaaauguuuguugccuu

SEQ ID NO: 2264945 - RNA, 19 nt, Homo sapiens
  misc_RNA (1)...(19): siRNA sense strand
gaucgauaaaagaggcaaa

SEQ ID NO: 2264946 - RNA, 19 nt, Homo sapiens
  misc_RNA (1)...(19): siRNA sense strand
gggauauaagagugagaag

SEQ ID NO: 2264947 - RNA, 19 nt, Homo sapiens
  misc_RNA (1)...(19): siRNA sense strand
guuccagcccugagcgaca

SEQ ID NO: 2264948 - RNA, 19 nt, Homo sapiens
  misc_RNA (1)...(19): siRNA sense strand
guuuguugccuuaaaucaa

SEQ ID NO: 2264949 - RNA, 19 nt, Homo sapiens
  misc_RNA (1)...(19): siRNA sense strand
cugaacuguauaaggauau

SEQ ID NO: 2264950 - RNA, 19 nt, Homo sapiens
  misc_RNA (1)...(19): siRNA sense strand
aggaaagaccacagccgau

SEQ ID NO: 2264951 - RNA, 19 nt, Homo sapiens
  misc_RNA (1)...(19): siRNA sense strand
ccuuaggugaaguugggaa

SEQ ID NO: 2264952 - RNA, 19 nt, Homo sapiens
  misc_RNA (1)...(19): siRNA sense strand
cggacuuggaucauuuaaa

SEQ ID NO: 2264953 - RNA, 19 nt, Homo sapiens
  misc_RNA (1)...(19): siRNA sense strand
gagagaagggacuaggacu

SEQ ID NO: 2264954 - RNA, 19 nt, Homo sapiens
  misc_RNA (1)...(19): siRNA sense strand
gcucagagguggagguccu

SEQ ID NO: 2264955 - RNA, 19 nt, Homo sapiens
  misc_RNA (1)...(19): siRNA sense strand
cggagauggaggugaugaa

SEQ ID NO: 2264956 - RNA, 19 nt, Homo sapiens
  misc_RNA (1)...(19): siRNA sense strand
gugcagaggccuuuggcau

SEQ ID NO: 2264957 - RNA, 19 nt, Homo sapiens
  misc_RNA (1)...(19): siRNA sense strand
ugguggaggcgcuggacaa

SEQ ID NO: 2264958 - RNA, 19 nt, Homo sapiens
  misc_RNA (1)...(19): siRNA sense strand
cugaggacaaugugaugaa

SEQ ID NO: 2264959 - RNA, 19 nt, Homo sapiens
  misc_RNA (1)...(19): siRNA sense strand
ccuaugugcaaguccuaaa

SEQ ID NO: 2264960 - RNA, 19 nt, Homo sapiens
  misc_RNA (1)...(19): siRNA sense strand
gcucagagguggagguccu

SEQ ID NO: 2264961 - RNA, 19 nt, Homo sapiens
  misc_RNA (1)...(19): siRNA sense strand
cggagauggaggugaugaa

SEQ ID NO: 2264962 - RNA, 19 nt, Homo sapiens
  misc_RNA (1)...(19): siRNA sense strand
gugcagaggccuuuggcau

SEQ ID NO: 2264963 - RNA, 19 nt, Homo sapiens
  misc_RNA (1)...(19): siRNA sense strand
ugguggaggcgcuggacaa

SEQ ID NO: 2264964 - RNA, 19 nt, Homo sapiens
  misc_RNA (1)...(19): siRNA sense strand
cugaggacaaugugaugaa

SEQ ID NO: 2264965 - RNA, 19 nt, Homo sapiens
  misc_RNA (1)...(19): siRNA sense strand
ccuaugugcaaguccuaaa

SEQ ID NO: 2264966 - RNA, 19 nt, Homo sapiens
  misc_RNA (1)...(19): siRNA sense strand
agaaacaugacaaggagga

SEQ ID NO: 2264967 - RNA, 19 nt, Homo sapiens
  misc_RNA (1)...(19): siRNA sense strand
aggaggaaauggcagcaga

SEQ ID NO: 2264968 - RNA, 19 nt, Homo sapiens
  misc_RNA (1)...(19): siRNA sense strand
gugucaugauagaggaaau

SEQ ID NO: 2264969 - RNA, 19 nt, Homo sapiens
  misc_RNA (1)...(19): siRNA sense strand
ccagauauauuuaaggaca

SEQ ID NO: 2264970 - RNA, 19 nt, Homo sapiens
  misc_RNA (1)...(19): siRNA sense strand
cuugguugauggagcgaaa

SEQ ID NO: 2264971 - RNA, 19 nt, Homo sapiens
  misc_RNA (1)...(19): siRNA sense strand
acgcaucaucacugggaaa

SEQ ID NO: 2264972 - RNA, 19 nt, Homo sapiens
  misc_RNA (1)...(19): siRNA sense strand
cauaaaagagguaaaggaa

SEQ ID NO: 2264973 - RNA, 19 nt, Homo sapiens
  misc_RNA (1)...(19): siRNA sense strand
gcauaaaagagguaaagga

SEQ ID NO: 2264974 - RNA, 19 nt, Homo sapiens
  misc_RNA (1)...(19): siRNA sense strand
acauucaauucaagaccaa

SEQ ID NO: 2264975 - RNA, 19 nt, Homo sapiens
  misc_RNA (1)...(19): siRNA sense strand
ugaagaaggcagagccagu

SEQ ID NO: 2264976 - RNA, 19 nt, Homo sapiens
  misc_RNA (1)...(19): siRNA sense strand
ugaagagaagcaagaguca

SEQ ID NO: 2264977 - RNA, 19 nt, Homo sapiens
  misc_RNA (1)...(19): siRNA sense strand
uauuuaaggacaagagagu

SEQ ID NO: 2264978 - RNA, 19 nt, Homo sapiens
  misc_RNA (1)...(19): siRNA sense strand
aagauaaacaacuggcuca

SEQ ID NO: 2264979 - RNA, 19 nt, Homo sapiens
  misc_RNA (1)...(19): siRNA sense strand
aggaaauuaaugcaaggaa

SEQ ID NO: 2264980 - RNA, 19 nt, Homo sapiens
  misc_RNA (1)...(19): siRNA sense strand
auccaaacuaugugccaaa

SEQ ID NO: 2264981 - RNA, 19 nt, Homo sapiens
  misc_RNA (1)...(19): siRNA sense strand
caagcauaaaagagguaaa

SEQ ID NO: 2264982 - RNA, 19 nt, Homo sapiens
  misc_RNA (1)...(19): siRNA sense strand
gauaccuacaggagaaaca

SEQ ID NO: 2264983 - RNA, 19 nt, Homo sapiens
  misc_RNA (1)...(19): siRNA sense strand
cauuauuggccucaucaaa

SEQ ID NO: 2264984 - RNA, 19 nt, Homo sapiens
  misc_RNA (1)...(19): siRNA sense strand
uugauggagcgaaagauaa

SEQ ID NO: 2264985 - RNA, 19 nt, Homo sapiens
  misc_RNA (1)...(19): siRNA sense strand
guacuuucauagccggcaa

SEQ ID NO: 2264986 - RNA, 19 nt, Homo sapiens
  misc_RNA (1)...(19): siRNA sense strand
gaaucuuugacucgggcua

SEQ ID NO: 2264987 - RNA, 19 nt, Homo sapiens
  misc_RNA (1)...(19): siRNA sense strand
aggaaaacucugucauauu

SEQ ID NO: 2264988 - RNA, 19 nt, Homo sapiens
  misc_RNA (1)...(19): siRNA sense strand
ucacagagacagagggcaa

SEQ ID NO: 2264989 - RNA, 19 nt, Homo sapiens
  misc_RNA (1)...(19): siRNA sense strand
aaguauuaccaaagggaaa

SEQ ID NO: 2264990 - RNA, 19 nt, Homo sapiens
  misc_RNA (1)...(19): siRNA sense strand
cagaaggcuuucagggcaa

SEQ ID NO: 2264991 - RNA, 19 nt, Homo sapiens
  misc_RNA (1)...(19): siRNA sense strand
uugaaauuggugagagaua

SEQ ID NO: 2264992 - RNA, 19 nt, Homo sapiens
  misc_RNA (1)...(19): siRNA sense strand
ucuugaaauuggugagaga

SEQ ID NO: 2264993 - RNA, 19 nt, Homo sapiens
  misc_RNA (1)...(19): siRNA sense strand
agacagagggcaagcaaaa

SEQ ID NO: 2264994 - RNA, 19 nt, Homo sapiens
  misc_RNA (1)...(19): siRNA sense strand
ccucaugggcccuggaaaa

SEQ ID NO: 2264995 - RNA, 19 nt, Homo sapiens
  misc_RNA (1)...(19): siRNA sense strand
ggugauuggucuugggaac

SEQ ID NO: 2264996 - RNA, 19 nt, Homo sapiens
  misc_RNA (1)...(19): siRNA sense strand
ccuuaaaccuagagagagc

SEQ ID NO: 2264997 - RNA, 19 nt, Homo sapiens
  misc_RNA (1)...(19): siRNA sense strand
guuuaaagacaccagcaaa

SEQ ID NO: 2264998 - RNA, 19 nt, Homo sapiens
  misc_RNA (1)...(19): siRNA sense strand
cauuaaaaggggaguguuu

SEQ ID NO: 2264999 - RNA, 19 nt, Homo sapiens
  misc_RNA (1)...(19): siRNA sense strand
gagauaaacuacaggacag

SEQ ID NO: 2265000 - RNA, 19 nt, Homo sapiens
  misc_RNA (1)...(19): siRNA sense strand
cuuaaaagccucuguacaa

SEQ ID NO: 2265001 - RNA, 19 nt, Homo sapiens
  misc_RNA (1)...(19): siRNA sense strand
ccuaguaagucuuuggcga

SEQ ID NO: 2265002 - RNA, 19 nt, Homo sapiens
  misc_RNA (1)...(19): siRNA sense strand
cuaaacuggauucaagaaa

SEQ ID NO: 2265003 - RNA, 19 nt, Homo sapiens
  misc_RNA (1)...(19): siRNA sense strand
agacaccagcaaagacaaa

SEQ ID NO: 2265004 - RNA, 19 nt, Homo sapiens
  misc_RNA (1)...(19): siRNA sense strand
gagacagagggcaagcaaa

SEQ ID NO: 2265005 - RNA, 19 nt, Homo sapiens
  misc_RNA (1)...(19): siRNA sense strand
cgaugggucacaagaguau

SEQ ID NO: 2265006 - RNA, 19 nt, Homo sapiens
  misc_RNA (1)...(19): siRNA sense strand
aaaccuagagagagcgaca

SEQ ID NO: 2265007 - RNA, 19 nt, Homo sapiens
  misc_RNA (1)...(19): siRNA sense strand
ggacaguggaagaaaacau

SEQ ID NO: 2265008 - RNA, 19 nt, Homo sapiens
  misc_RNA (1)...(19): siRNA sense strand
ucaaaugcuguguggauga

SEQ ID NO: 2265009 - RNA, 19 nt, Homo sapiens
  misc_RNA (1)...(19): siRNA sense strand
aagaugggacaguggaaga

SEQ ID NO: 2265010 - RNA, 19 nt, Homo sapiens
  misc_RNA (1)...(19): siRNA sense strand
ccuggaauucauaaguuua

SEQ ID NO: 2265011 - RNA, 19 nt, Homo sapiens
  misc_RNA (1)...(19): siRNA sense strand
ugaagaugggacaguggaa

SEQ ID NO: 2265012 - RNA, 19 nt, Homo sapiens
  misc_RNA (1)...(19): siRNA sense strand
agagauaaacuacaggaca

SEQ ID NO: 2265013 - RNA, 19 nt, Homo sapiens
  misc_RNA (1)...(19): siRNA sense strand
caaaugucuguaaggaaau

SEQ ID NO: 2265014 - RNA, 19 nt, Homo sapiens
  misc_RNA (1)...(19): siRNA sense strand
auaaacuacaggacagaau

SEQ ID NO: 2265015 - RNA, 19 nt, Homo sapiens
  misc_RNA (1)...(19): siRNA sense strand
ccaccugcuuugagagaag

SEQ ID NO: 2265016 - RNA, 19 nt, Homo sapiens
  misc_RNA (1)...(19): siRNA sense strand
ccagaaggcuuucagggca

SEQ ID NO: 2265017 - RNA, 19 nt, Homo sapiens
  misc_RNA (1)...(19): siRNA sense strand
ggggcaaucacuaugaaaa

SEQ ID NO: 2265018 - RNA, 19 nt, Homo sapiens
  misc_RNA (1)...(19): siRNA sense strand
ucccuuaaaccuagagaga

SEQ ID NO: 2265019 - RNA, 19 nt, Homo sapiens
  misc_RNA (1)...(19): siRNA sense strand
caagaguauucaaaggacu

SEQ ID NO: 2265020 - RNA, 19 nt, Homo sapiens
  misc_RNA (1)...(19): siRNA sense strand
gcaaaauagagcugucuuu

SEQ ID NO: 2265021 - RNA, 19 nt, Homo sapiens
  misc_RNA (1)...(19): siRNA sense strand
aggagacauugcuguggaa

SEQ ID NO: 2265022 - RNA, 19 nt, Homo sapiens
  misc_RNA (1)...(19): siRNA sense strand
gagacauugcuguggaacu

SEQ ID NO: 2265023 - RNA, 19 nt, Homo sapiens
  misc_RNA (1)...(19): siRNA sense strand
uaagauaccuccaucccaa

SEQ ID NO: 2265024 - RNA, 19 nt, Homo sapiens
  misc_RNA (1)...(19): siRNA sense strand
cgugauugaauuuacagaa

SEQ ID NO: 2265025 - RNA, 19 nt, Homo sapiens
  misc_RNA (1)...(19): siRNA sense strand
auguguacuuccagaacaa

SEQ ID NO: 2265026 - RNA, 19 nt, Homo sapiens
  misc_RNA (1)...(19): siRNA sense strand
ugguggacgucgugaacuu

SEQ ID NO: 2265027 - RNA, 19 nt, Homo sapiens
  misc_RNA (1)...(19): siRNA sense strand
ccuacaaccagcugcagaa

SEQ ID NO: 2265028 - RNA, 19 nt, Homo sapiens
  misc_RNA (1)...(19): siRNA sense strand
cuccaaggcaauaggauca

SEQ ID NO: 2265029 - RNA, 19 nt, Homo sapiens
  misc_RNA (1)...(19): siRNA sense strand
agcuguacauggagcacaa

SEQ ID NO: 2265030 - RNA, 19 nt, Homo sapiens
  misc_RNA (1)...(19): siRNA sense strand
uggacgggaacgagaucaa

SEQ ID NO: 2265031 - RNA, 19 nt, Homo sapiens
  misc_RNA (1)...(19): siRNA sense strand
ggaacgagaucaagcgcag

SEQ ID NO: 2265032 - RNA, 19 nt, Homo sapiens
  misc_RNA (1)...(19): siRNA sense strand
gguucagacucgaggagga

SEQ ID NO: 2265033 - RNA, 19 nt, Homo sapiens
  misc_RNA (1)...(19): siRNA sense strand
ggagaguggaagugugaga

SEQ ID NO: 2265034 - RNA, 19 nt, Homo sapiens
  misc_RNA (1)...(19): siRNA sense strand
ggcugaagacacaaggaaa

SEQ ID NO: 2265035 - RNA, 19 nt, Homo sapiens
  misc_RNA (1)...(19): siRNA sense strand
caacucaaauggagagcca

SEQ ID NO: 2265036 - RNA, 19 nt, Homo sapiens
  misc_RNA (1)...(19): siRNA sense strand
ugggaauggucguggggaa

SEQ ID NO: 2265037 - RNA, 19 nt, Homo sapiens
  misc_RNA (1)...(19): siRNA sense strand
gugcacguguguugggaau

SEQ ID NO: 2265038 - RNA, 19 nt, Homo sapiens
  misc_RNA (1)...(19): siRNA sense strand
agaaauagaugcaacgauc

SEQ ID NO: 2265039 - RNA, 19 nt, Homo sapiens
  misc_RNA (1)...(19): siRNA sense strand
augagcaggaccagaaaua

SEQ ID NO: 2265040 - RNA, 19 nt, Homo sapiens
  misc_RNA (1)...(19): siRNA sense strand
guuuuaacugcgagaguaa

SEQ ID NO: 2265041 - RNA, 19 nt, Homo sapiens
  misc_RNA (1)...(19): siRNA sense strand
gugucuugguaauggaaaa

SEQ ID NO: 2265042 - RNA, 19 nt, Homo sapiens
  misc_RNA (1)...(19): siRNA sense strand
cgaauuaugagcaggacca

SEQ ID NO: 2265043 - RNA, 19 nt, Homo sapiens
  misc_RNA (1)...(19): siRNA sense strand
auuggagaucagugggaua

SEQ ID NO: 2265044 - RNA, 19 nt, Homo sapiens
  misc_RNA (1)...(19): siRNA sense strand
cugcuauggccguggcauu

SEQ ID NO: 2265045 - RNA, 19 nt, Homo sapiens
  misc_RNA (1)...(19): siRNA sense strand
aagaaggauaaucgaggaa

SEQ ID NO: 2265046 - RNA, 19 nt, Homo sapiens
  misc_RNA (1)...(19): siRNA sense strand
agauaaaucaacaguggga

SEQ ID NO: 2265047 - RNA, 19 nt, Homo sapiens
  misc_RNA (1)...(19): siRNA sense strand
ccuggagcaagaaggauaa

SEQ ID NO: 2265048 - RNA, 19 nt, Homo sapiens
  misc_RNA (1)...(19): siRNA sense strand
gacacaaggaaauaagcaa

SEQ ID NO: 2265049 - RNA, 19 nt, Homo sapiens
  misc_RNA (1)...(19): siRNA sense strand
accuggagcaagaaggaua

SEQ ID NO: 2265050 - RNA, 19 nt, Homo sapiens
  misc_RNA (1)...(19): siRNA sense strand
agaguaaaccugaagcuga

SEQ ID NO: 2265051 - RNA, 19 nt, Homo sapiens
  misc_RNA (1)...(19): siRNA sense strand
gugugugugucuugguaau

SEQ ID NO: 2265052 - RNA, 19 nt, Homo sapiens
  misc_RNA (1)...(19): siRNA sense strand
ugguaauggaaaaggagaa

SEQ ID NO: 2265053 - RNA, 19 nt, Homo sapiens
  misc_RNA (1)...(19): siRNA sense strand
cuuccuauguggucggaga

SEQ ID NO: 2265054 - RNA, 19 nt, Homo sapiens
  misc_RNA (1)...(19): siRNA sense strand
acacauuccacaagcguca

SEQ ID NO: 2265055 - RNA, 19 nt, Homo sapiens
  misc_RNA (1)...(19): siRNA sense strand
gagaauaagcuguaccauc

SEQ ID NO: 2265056 - RNA, 19 nt, Homo sapiens
  misc_RNA (1)...(19): siRNA sense strand
guuacauguuagagugugu

SEQ ID NO: 2265057 - RNA, 19 nt, Homo sapiens
  misc_RNA (1)...(19): siRNA sense strand
cgaucaggacacaaggaca

SEQ ID NO: 2265058 - RNA, 19 nt, Homo sapiens
  misc_RNA (1)...(19): siRNA sense strand
cgggagccucgaagagcaa

SEQ ID NO: 2265059 - RNA, 19 nt, Homo sapiens
  misc_RNA (1)...(19): siRNA sense strand
cacaaggaaauaagcaaau

SEQ ID NO: 2265060 - RNA, 19 nt, Homo sapiens
  misc_RNA (1)...(19): siRNA sense strand
ggucacaugaugaggugca

SEQ ID NO: 2265061 - RNA, 19 nt, Homo sapiens
  misc_RNA (1)...(19): siRNA sense strand
accugaagcugaagagacu

SEQ ID NO: 2265062 - RNA, 19 nt, Homo sapiens
  misc_RNA (1)...(19): siRNA sense strand
cuauagaauuggagacacc

SEQ ID NO: 2265063 - RNA, 19 nt, Homo sapiens
  misc_RNA (1)...(19): siRNA sense strand
caagaaggauaaucgagga

SEQ ID NO: 2265064 - RNA, 19 nt, Homo sapiens
  misc_RNA (1)...(19): siRNA sense strand
uggaggaagccgagguuuu

SEQ ID NO: 2265065 - RNA, 19 nt, Homo sapiens
  misc_RNA (1)...(19): siRNA sense strand
ugaucaugcugcugggacu

SEQ ID NO: 2265066 - RNA, 19 nt, Homo sapiens
  misc_RNA (1)...(19): siRNA sense strand
guucagacucgaggaggaa

SEQ ID NO: 2265067 - RNA, 19 nt, Homo sapiens
  misc_RNA (1)...(19): siRNA sense strand
agucagcugccaagagaca

SEQ ID NO: 2265068 - RNA, 19 nt, Homo sapiens
  misc_RNA (1)...(19): siRNA sense strand
agaaguaugugcauggugu

SEQ ID NO: 2265069 - RNA, 19 nt, Homo sapiens
  misc_RNA (1)...(19): siRNA sense strand
gugucagauaccagugcua

SEQ ID NO: 2265070 - RNA, 19 nt, Homo sapiens
  misc_RNA (1)...(19): siRNA sense strand
gguucagacucgaggagga

SEQ ID NO: 2265071 - RNA, 19 nt, Homo sapiens
  misc_RNA (1)...(19): siRNA sense strand
ggagaguggaagugugaga

SEQ ID NO: 2265072 - RNA, 19 nt, Homo sapiens
  misc_RNA (1)...(19): siRNA sense strand
ggcugaagacacaaggaaa

SEQ ID NO: 2265073 - RNA, 19 nt, Homo sapiens
  misc_RNA (1)...(19): siRNA sense strand
caacucaaauggagagcca

SEQ ID NO: 2265074 - RNA, 19 nt, Homo sapiens
  misc_RNA (1)...(19): siRNA sense strand
ugggaauggucguggggaa

SEQ ID NO: 2265075 - RNA, 19 nt, Homo sapiens
  misc_RNA (1)...(19): siRNA sense strand
gugcacguguguugggaau

SEQ ID NO: 2265076 - RNA, 19 nt, Homo sapiens
  misc_RNA (1)...(19): siRNA sense strand
agaaauagaugcaacgauc

SEQ ID NO: 2265077 - RNA, 19 nt, Homo sapiens
  misc_RNA (1)...(19): siRNA sense strand
augagcaggaccagaaaua

SEQ ID NO: 2265078 - RNA, 19 nt, Homo sapiens
  misc_RNA (1)...(19): siRNA sense strand
guuuuaacugcgagaguaa

SEQ ID NO: 2265079 - RNA, 19 nt, Homo sapiens
  misc_RNA (1)...(19): siRNA sense strand
gugucuugguaauggaaaa

SEQ ID NO: 2265080 - RNA, 19 nt, Homo sapiens
  misc_RNA (1)...(19): siRNA sense strand
cgaauuaugagcaggacca

SEQ ID NO: 2265081 - RNA, 19 nt, Homo sapiens
  misc_RNA (1)...(19): siRNA sense strand
auuggagaucagugggaua

SEQ ID NO: 2265082 - RNA, 19 nt, Homo sapiens
  misc_RNA (1)...(19): siRNA sense strand
cugcuauggccguggcauu

SEQ ID NO: 2265083 - RNA, 19 nt, Homo sapiens
  misc_RNA (1)...(19): siRNA sense strand
aagaaggauaaucgaggaa

SEQ ID NO: 2265084 - RNA, 19 nt, Homo sapiens
  misc_RNA (1)...(19): siRNA sense strand
agauaaaucaacaguggga

SEQ ID NO: 2265085 - RNA, 19 nt, Homo sapiens
  misc_RNA (1)...(19): siRNA sense strand
ccuggagcaagaaggauaa

SEQ ID NO: 2265086 - RNA, 19 nt, Homo sapiens
  misc_RNA (1)...(19): siRNA sense strand
gacacaaggaaauaagcaa

SEQ ID NO: 2265087 - RNA, 19 nt, Homo sapiens
  misc_RNA (1)...(19): siRNA sense strand
accuggagcaagaaggaua

SEQ ID NO: 2265088 - RNA, 19 nt, Homo sapiens
  misc_RNA (1)...(19): siRNA sense strand
agaguaaaccugaagcuga

SEQ ID NO: 2265089 - RNA, 19 nt, Homo sapiens
  misc_RNA (1)...(19): siRNA sense strand
gugugugugucuugguaau

SEQ ID NO: 2265090 - RNA, 19 nt, Homo sapiens
  misc_RNA (1)...(19): siRNA sense strand
ugguaauggaaaaggagaa

SEQ ID NO: 2265091 - RNA, 19 nt, Homo sapiens
  misc_RNA (1)...(19): siRNA sense strand
cuuccuauguggucggaga

SEQ ID NO: 2265092 - RNA, 19 nt, Homo sapiens
  misc_RNA (1)...(19): siRNA sense strand
acacauuccacaagcguca

SEQ ID NO: 2265093 - RNA, 19 nt, Homo sapiens
  misc_RNA (1)...(19): siRNA sense strand
gagaauaagcuguaccauc

SEQ ID NO: 2265094 - RNA, 19 nt, Homo sapiens
  misc_RNA (1)...(19): siRNA sense strand
guuacauguuagagugugu

SEQ ID NO: 2265095 - RNA, 19 nt, Homo sapiens
  misc_RNA (1)...(19): siRNA sense strand
cgaucaggacacaaggaca

SEQ ID NO: 2265096 - RNA, 19 nt, Homo sapiens
  misc_RNA (1)...(19): siRNA sense strand
cgggagccucgaagagcaa

SEQ ID NO: 2265097 - RNA, 19 nt, Homo sapiens
  misc_RNA (1)...(19): siRNA sense strand
cacaaggaaauaagcaaau

SEQ ID NO: 2265098 - RNA, 19 nt, Homo sapiens
  misc_RNA (1)...(19): siRNA sense strand
ggucacaugaugaggugca

SEQ ID NO: 2265099 - RNA, 19 nt, Homo sapiens
  misc_RNA (1)...(19): siRNA sense strand
accugaagcugaagagacu

SEQ ID NO: 2265100 - RNA, 19 nt, Homo sapiens
  misc_RNA (1)...(19): siRNA sense strand
cuauagaauuggagacacc

SEQ ID NO: 2265101 - RNA, 19 nt, Homo sapiens
  misc_RNA (1)...(19): siRNA sense strand
caagaaggauaaucgagga

SEQ ID NO: 2265102 - RNA, 19 nt, Homo sapiens
  misc_RNA (1)...(19): siRNA sense strand
uggaggaagccgagguuuu

SEQ ID NO: 2265103 - RNA, 19 nt, Homo sapiens
  misc_RNA (1)...(19): siRNA sense strand
ugaucaugcugcugggacu

SEQ ID NO: 2265104 - RNA, 19 nt, Homo sapiens
  misc_RNA (1)...(19): siRNA sense strand
guucagacucgaggaggaa

SEQ ID NO: 2265105 - RNA, 19 nt, Homo sapiens
  misc_RNA (1)...(19): siRNA sense strand
agucagcugccaagagaca

SEQ ID NO: 2265106 - RNA, 19 nt, Homo sapiens
  misc_RNA (1)...(19): siRNA sense strand
agaaguaugugcauggugu

SEQ ID NO: 2265107 - RNA, 19 nt, Homo sapiens
  misc_RNA (1)...(19): siRNA sense strand
gugucagauaccagugcua

SEQ ID NO: 2265108 - RNA, 19 nt, Homo sapiens
  misc_RNA (1)...(19): siRNA sense strand
cagagaaagugaaagccaa

SEQ ID NO: 2265109 - RNA, 19 nt, Homo sapiens
  misc_RNA (1)...(19): siRNA sense strand
agagaaagugaaagccaaa

SEQ ID NO: 2265110 - RNA, 19 nt, Homo sapiens
  misc_RNA (1)...(19): siRNA sense strand
cuuccgagcaggugacaaa

SEQ ID NO: 2265111 - RNA, 19 nt, Homo sapiens
  misc_RNA (1)...(19): siRNA sense strand
gggaguaccuagaacccua

SEQ ID NO: 2265112 - RNA, 19 nt, Homo sapiens
  misc_RNA (1)...(19): siRNA sense strand
gaaauaaagcugccgguga

SEQ ID NO: 2265113 - RNA, 19 nt, Homo sapiens
  misc_RNA (1)...(19): siRNA sense strand
cuucauauucagaugcaaa

SEQ ID NO: 2265114 - RNA, 19 nt, Homo sapiens
  misc_RNA (1)...(19): siRNA sense strand
ugaacgaauuugugagcca

SEQ ID NO: 2265115 - RNA, 19 nt, Homo sapiens
  misc_RNA (1)...(19): siRNA sense strand
ugggaaggucuguggaaca

SEQ ID NO: 2265116 - RNA, 19 nt, Homo sapiens
  misc_RNA (1)...(19): siRNA sense strand
agccauucguaguaauaaa

SEQ ID NO: 2265117 - RNA, 19 nt, Homo sapiens
  misc_RNA (1)...(19): siRNA sense strand
gcagacaagucaaccguga

SEQ ID NO: 2265118 - RNA, 19 nt, Homo sapiens
  misc_RNA (1)...(19): siRNA sense strand
caaaugacuuccugaggga

SEQ ID NO: 2265119 - RNA, 19 nt, Homo sapiens
  misc_RNA (1)...(19): siRNA sense strand
gaaauguccucguugguga

SEQ ID NO: 2265120 - RNA, 19 nt, Homo sapiens
  misc_RNA (1)...(19): siRNA sense strand
agguagacauggcggcaca

SEQ ID NO: 2265121 - RNA, 19 nt, Homo sapiens
  misc_RNA (1)...(19): siRNA sense strand
cugcugaggacuugagcuu

SEQ ID NO: 2265122 - RNA, 19 nt, Homo sapiens
  misc_RNA (1)...(19): siRNA sense strand
ugacaggugcccagguaau

SEQ ID NO: 2265123 - RNA, 19 nt, Homo sapiens
  misc_RNA (1)...(19): siRNA sense strand
agauggagcaguuguaaaa

SEQ ID NO: 2265124 - RNA, 19 nt, Homo sapiens
  misc_RNA (1)...(19): siRNA sense strand
ugagggaggcacagauaau

SEQ ID NO: 2265125 - RNA, 19 nt, Homo sapiens
  misc_RNA (1)...(19): siRNA sense strand
ccaaaaugacacuggauca

SEQ ID NO: 2265126 - RNA, 19 nt, Homo sapiens
  misc_RNA (1)...(19): siRNA sense strand
ccugagggaggcacagaua

SEQ ID NO: 2265127 - RNA, 19 nt, Homo sapiens
  misc_RNA (1)...(19): siRNA sense strand
cauggaagucugcaagaau

SEQ ID NO: 2265128 - RNA, 19 nt, Homo sapiens
  misc_RNA (1)...(19): siRNA sense strand
agguagauaaugaagacau

SEQ ID NO: 2265129 - RNA, 19 nt, Homo sapiens
  misc_RNA (1)...(19): siRNA sense strand
uggaagucugcaagaauau

SEQ ID NO: 2265130 - RNA, 19 nt, Homo sapiens
  misc_RNA (1)...(19): siRNA sense strand
cguauaaaaccguggacca

SEQ ID NO: 2265131 - RNA, 19 nt, Homo sapiens
  misc_RNA (1)...(19): siRNA sense strand
aaugggagauagaccgcaa

SEQ ID NO: 2265132 - RNA, 19 nt, Homo sapiens
  misc_RNA (1)...(19): siRNA sense strand
uagauggagcaguuguaaa

SEQ ID NO: 2265133 - RNA, 19 nt, Homo sapiens
  misc_RNA (1)...(19): siRNA sense strand
guauaaaaccguggaccaa

SEQ ID NO: 2265134 - RNA, 19 nt, Homo sapiens
  misc_RNA (1)...(19): siRNA sense strand
augaagaaccuaagacauc

SEQ ID NO: 2265135 - RNA, 19 nt, Homo sapiens
  misc_RNA (1)...(19): siRNA sense strand
gcacuuuagaagauccaau

SEQ ID NO: 2265136 - RNA, 19 nt, Homo sapiens
  misc_RNA (1)...(19): siRNA sense strand
gagccuaaggaacgaccua

SEQ ID NO: 2265137 - RNA, 19 nt, Homo sapiens
  misc_RNA (1)...(19): siRNA sense strand
uaaugaagaaccuaagaca

SEQ ID NO: 2265138 - RNA, 19 nt, Homo sapiens
  misc_RNA (1)...(19): siRNA sense strand
cuucuaacuacguggcuga

SEQ ID NO: 2265139 - RNA, 19 nt, Homo sapiens
  misc_RNA (1)...(19): siRNA sense strand
gcgaaguaugggaaggucu

SEQ ID NO: 2265140 - RNA, 19 nt, Homo sapiens
  misc_RNA (1)...(19): siRNA sense strand
ugagacacugcguuggaaa

SEQ ID NO: 2265141 - RNA, 19 nt, Homo sapiens
  misc_RNA (1)...(19): siRNA sense strand
gaauuaaaagacuggauga

SEQ ID NO: 2265142 - RNA, 19 nt, Homo sapiens
  misc_RNA (1)...(19): siRNA sense strand
aggcaggacaguugggauu

SEQ ID NO: 2265143 - RNA, 19 nt, Homo sapiens
  misc_RNA (1)...(19): siRNA sense strand
cugcaggcaaagaaagaaa

SEQ ID NO: 2265144 - RNA, 19 nt, Homo sapiens
  misc_RNA (1)...(19): siRNA sense strand
uugaaagguuaaugagcau

SEQ ID NO: 2265145 - RNA, 19 nt, Homo sapiens
  misc_RNA (1)...(19): siRNA sense strand
cuauaaccaaguagagaau

SEQ ID NO: 2265146 - RNA, 19 nt, Homo sapiens
  misc_RNA (1)...(19): siRNA sense strand
uugcacgaaaugaggauaa

SEQ ID NO: 2265147 - RNA, 19 nt, Homo sapiens
  misc_RNA (1)...(19): siRNA sense strand
acuauaaccaaguagagaa

SEQ ID NO: 2265148 - RNA, 19 nt, Homo sapiens
  misc_RNA (1)...(19): siRNA sense strand
aaccagaacagguggccaa

SEQ ID NO: 2265149 - RNA, 19 nt, Homo sapiens
  misc_RNA (1)...(19): siRNA sense strand
cuuugcagauggaggugaa

SEQ ID NO: 2265150 - RNA, 19 nt, Homo sapiens
  misc_RNA (1)...(19): siRNA sense strand
gcugguaaauugugcagga

SEQ ID NO: 2265151 - RNA, 19 nt, Homo sapiens
  misc_RNA (1)...(19): siRNA sense strand
uaaaacaagcacaggagaa

SEQ ID NO: 2265152 - RNA, 19 nt, Homo sapiens
  misc_RNA (1)...(19): siRNA sense strand
caacaguucccuuggcuca

SEQ ID NO: 2265153 - RNA, 19 nt, Homo sapiens
  misc_RNA (1)...(19): siRNA sense strand
ugguaaauugugcaggaau

SEQ ID NO: 2265154 - RNA, 19 nt, Homo sapiens
  misc_RNA (1)...(19): siRNA sense strand
caggaaaauuugaagaucu

SEQ ID NO: 2265155 - RNA, 19 nt, Homo sapiens
  misc_RNA (1)...(19): siRNA sense strand
cuauaaacaaggagcuuuu

SEQ ID NO: 2265156 - RNA, 19 nt, Homo sapiens
  misc_RNA (1)...(19): siRNA sense strand
aaaacaagcacaggagaaa

SEQ ID NO: 2265157 - RNA, 19 nt, Homo sapiens
  misc_RNA (1)...(19): siRNA sense strand
gaaagaaauugaaaugcac

SEQ ID NO: 2265158 - RNA, 19 nt, Homo sapiens
  misc_RNA (1)...(19): siRNA sense strand
ccuuuggagacucgacuua

SEQ ID NO: 2265159 - RNA, 19 nt, Homo sapiens
  misc_RNA (1)...(19): siRNA sense strand
ccgaaaagaugcugagcga

SEQ ID NO: 2265160 - RNA, 19 nt, Homo sapiens
  misc_RNA (1)...(19): siRNA sense strand
gggaugauaugaaaggaga

SEQ ID NO: 2265161 - RNA, 19 nt, Homo sapiens
  misc_RNA (1)...(19): siRNA sense strand
ugaagaagcugaagcacga

SEQ ID NO: 2265162 - RNA, 19 nt, Homo sapiens
  misc_RNA (1)...(19): siRNA sense strand
gaaaagaugcugagcgaca

SEQ ID NO: 2265163 - RNA, 19 nt, Homo sapiens
  misc_RNA (1)...(19): siRNA sense strand
aggauaaagaagcaacaaa

SEQ ID NO: 2265164 - RNA, 19 nt, Homo sapiens
  misc_RNA (1)...(19): siRNA sense strand
gcguacgagaggaggaaca

SEQ ID NO: 2265165 - RNA, 19 nt, Homo sapiens
  misc_RNA (1)...(19): siRNA sense strand
aggaggaacaggagugaca

SEQ ID NO: 2265166 - RNA, 19 nt, Homo sapiens
  misc_RNA (1)...(19): siRNA sense strand
uggaaaacuuggccgaaaa

SEQ ID NO: 2265167 - RNA, 19 nt, Homo sapiens
  misc_RNA (1)...(19): siRNA sense strand
ggaaggagauuggugggaa

SEQ ID NO: 2265168 - RNA, 19 nt, Homo sapiens
  misc_RNA (1)...(19): siRNA sense strand
caacaaaacugacggagga

SEQ ID NO: 2265169 - RNA, 19 nt, Homo sapiens
  misc_RNA (1)...(19): siRNA sense strand
guauaugaacaaaggaagu

SEQ ID NO: 2265170 - RNA, 19 nt, Homo sapiens
  misc_RNA (1)...(19): siRNA sense strand
uggcuuacaucgagcgcau

SEQ ID NO: 2265171 - RNA, 19 nt, Homo sapiens
  misc_RNA (1)...(19): siRNA sense strand
caaacauucuaguggggaa

SEQ ID NO: 2265172 - RNA, 19 nt, Homo sapiens
  misc_RNA (1)...(19): siRNA sense strand
caccaaaggaagagugcca

SEQ ID NO: 2265173 - RNA, 19 nt, Homo sapiens
  misc_RNA (1)...(19): siRNA sense strand
cccgauugauagaagacaa

SEQ ID NO: 2265174 - RNA, 19 nt, Homo sapiens
  misc_RNA (1)...(19): siRNA sense strand
ugauaugaaaggagaccau

SEQ ID NO: 2265175 - RNA, 19 nt, Homo sapiens
  misc_RNA (1)...(19): siRNA sense strand
gugugcaauguaaggauaa

SEQ ID NO: 2265176 - RNA, 19 nt, Homo sapiens
  misc_RNA (1)...(19): siRNA sense strand
auguaaggauaaagaagca

SEQ ID NO: 2265177 - RNA, 19 nt, Homo sapiens
  misc_RNA (1)...(19): siRNA sense strand
gaaggagauuggugggaag

SEQ ID NO: 2265178 - RNA, 19 nt, Homo sapiens
  misc_RNA (1)...(19): siRNA sense strand
aagagugguacuuuggaaa

SEQ ID NO: 2265179 - RNA, 19 nt, Homo sapiens
  misc_RNA (1)...(19): siRNA sense strand
ugaaaggagaccaugucaa

SEQ ID NO: 2265180 - RNA, 19 nt, Homo sapiens
  misc_RNA (1)...(19): siRNA sense strand
agcuauuguccuuuggaaa

SEQ ID NO: 2265181 - RNA, 19 nt, Homo sapiens
  misc_RNA (1)...(19): siRNA sense strand
cagcaagacaaggugcaaa

SEQ ID NO: 2265182 - RNA, 19 nt, Homo sapiens
  misc_RNA (1)...(19): siRNA sense strand
cgacagagccccaguacca

SEQ ID NO: 2265183 - RNA, 19 nt, Homo sapiens
  misc_RNA (1)...(19): siRNA sense strand
uugaguacuugcagagcuu

SEQ ID NO: 2265184 - RNA, 19 nt, Homo sapiens
  misc_RNA (1)...(19): siRNA sense strand
gugcaaaguuccccaucaa

SEQ ID NO: 2265185 - RNA, 19 nt, Homo sapiens
  misc_RNA (1)...(19): siRNA sense strand
ugaacagcucggaaggaga

SEQ ID NO: 2265186 - RNA, 19 nt, Homo sapiens
  misc_RNA (1)...(19): siRNA sense strand
aaacacaaaaguagccaua

SEQ ID NO: 2265187 - RNA, 19 nt, Homo sapiens
  misc_RNA (1)...(19): siRNA sense strand
ccgaaaagaugcugagcga

SEQ ID NO: 2265188 - RNA, 19 nt, Homo sapiens
  misc_RNA (1)...(19): siRNA sense strand
gggaugauaugaaaggaga

SEQ ID NO: 2265189 - RNA, 19 nt, Homo sapiens
  misc_RNA (1)...(19): siRNA sense strand
ugaagaagcugaagcacga

SEQ ID NO: 2265190 - RNA, 19 nt, Homo sapiens
  misc_RNA (1)...(19): siRNA sense strand
gaaaagaugcugagcgaca

SEQ ID NO: 2265191 - RNA, 19 nt, Homo sapiens
  misc_RNA (1)...(19): siRNA sense strand
aggauaaagaagcaacaaa

SEQ ID NO: 2265192 - RNA, 19 nt, Homo sapiens
  misc_RNA (1)...(19): siRNA sense strand
gcguacgagaggaggaaca

SEQ ID NO: 2265193 - RNA, 19 nt, Homo sapiens
  misc_RNA (1)...(19): siRNA sense strand
aggaggaacaggagugaca

SEQ ID NO: 2265194 - RNA, 19 nt, Homo sapiens
  misc_RNA (1)...(19): siRNA sense strand
uggaaaacuuggccgaaaa

SEQ ID NO: 2265195 - RNA, 19 nt, Homo sapiens
  misc_RNA (1)...(19): siRNA sense strand
ggaaggagauuggugggaa

SEQ ID NO: 2265196 - RNA, 19 nt, Homo sapiens
  misc_RNA (1)...(19): siRNA sense strand
caacaaaacugacggagga

SEQ ID NO: 2265197 - RNA, 19 nt, Homo sapiens
  misc_RNA (1)...(19): siRNA sense strand
guauaugaacaaaggaagu

SEQ ID NO: 2265198 - RNA, 19 nt, Homo sapiens
  misc_RNA (1)...(19): siRNA sense strand
uggcuuacaucgagcgcau

SEQ ID NO: 2265199 - RNA, 19 nt, Homo sapiens
  misc_RNA (1)...(19): siRNA sense strand
caaacauucuaguggggaa

SEQ ID NO: 2265200 - RNA, 19 nt, Homo sapiens
  misc_RNA (1)...(19): siRNA sense strand
caccaaaggaagagugcca

SEQ ID NO: 2265201 - RNA, 19 nt, Homo sapiens
  misc_RNA (1)...(19): siRNA sense strand
cccgauugauagaagacaa

SEQ ID NO: 2265202 - RNA, 19 nt, Homo sapiens
  misc_RNA (1)...(19): siRNA sense strand
ugauaugaaaggagaccau

SEQ ID NO: 2265203 - RNA, 19 nt, Homo sapiens
  misc_RNA (1)...(19): siRNA sense strand
gugugcaauguaaggauaa

SEQ ID NO: 2265204 - RNA, 19 nt, Homo sapiens
  misc_RNA (1)...(19): siRNA sense strand
auguaaggauaaagaagca

SEQ ID NO: 2265205 - RNA, 19 nt, Homo sapiens
  misc_RNA (1)...(19): siRNA sense strand
gaaggagauuggugggaag

SEQ ID NO: 2265206 - RNA, 19 nt, Homo sapiens
  misc_RNA (1)...(19): siRNA sense strand
aagagugguacuuuggaaa

SEQ ID NO: 2265207 - RNA, 19 nt, Homo sapiens
  misc_RNA (1)...(19): siRNA sense strand
ugaaaggagaccaugucaa

SEQ ID NO: 2265208 - RNA, 19 nt, Homo sapiens
  misc_RNA (1)...(19): siRNA sense strand
agcuauuguccuuuggaaa

SEQ ID NO: 2265209 - RNA, 19 nt, Homo sapiens
  misc_RNA (1)...(19): siRNA sense strand
cagcaagacaaggugcaaa

SEQ ID NO: 2265210 - RNA, 19 nt, Homo sapiens
  misc_RNA (1)...(19): siRNA sense strand
cgacagagccccaguacca

SEQ ID NO: 2265211 - RNA, 19 nt, Homo sapiens
  misc_RNA (1)...(19): siRNA sense strand
uugaguacuugcagagcuu

SEQ ID NO: 2265212 - RNA, 19 nt, Homo sapiens
  misc_RNA (1)...(19): siRNA sense strand
gugcaaaguuccccaucaa

SEQ ID NO: 2265213 - RNA, 19 nt, Homo sapiens
  misc_RNA (1)...(19): siRNA sense strand
ugaacagcucggaaggaga

SEQ ID NO: 2265214 - RNA, 19 nt, Homo sapiens
  misc_RNA (1)...(19): siRNA sense strand
aaacacaaaaguagccaua

SEQ ID NO: 2265215 - RNA, 19 nt, Homo sapiens
  misc_RNA (1)...(19): siRNA sense strand
ccgaaaagaugcugagcga

SEQ ID NO: 2265216 - RNA, 19 nt, Homo sapiens
  misc_RNA (1)...(19): siRNA sense strand
gggaugauaugaaaggaga

SEQ ID NO: 2265217 - RNA, 19 nt, Homo sapiens
  misc_RNA (1)...(19): siRNA sense strand
ugaagaagcugaagcacga

SEQ ID NO: 2265218 - RNA, 19 nt, Homo sapiens
  misc_RNA (1)...(19): siRNA sense strand
gaaaagaugcugagcgaca

SEQ ID NO: 2265219 - RNA, 19 nt, Homo sapiens
  misc_RNA (1)...(19): siRNA sense strand
aggauaaagaagcaacaaa

SEQ ID NO: 2265220 - RNA, 19 nt, Homo sapiens
  misc_RNA (1)...(19): siRNA sense strand
gcguacgagaggaggaaca

SEQ ID NO: 2265221 - RNA, 19 nt, Homo sapiens
  misc_RNA (1)...(19): siRNA sense strand
aggaggaacaggagugaca

SEQ ID NO: 2265222 - RNA, 19 nt, Homo sapiens
  misc_RNA (1)...(19): siRNA sense strand
uggaaaacuuggccgaaaa

SEQ ID NO: 2265223 - RNA, 19 nt, Homo sapiens
  misc_RNA (1)...(19): siRNA sense strand
ggaaggagauuggugggaa

SEQ ID NO: 2265224 - RNA, 19 nt, Homo sapiens
  misc_RNA (1)...(19): siRNA sense strand
caacaaaacugacggagga

SEQ ID NO: 2265225 - RNA, 19 nt, Homo sapiens
  misc_RNA (1)...(19): siRNA sense strand
guauaugaacaaaggaagu

SEQ ID NO: 2265226 - RNA, 19 nt, Homo sapiens
  misc_RNA (1)...(19): siRNA sense strand
uggcuuacaucgagcgcau

SEQ ID NO: 2265227 - RNA, 19 nt, Homo sapiens
  misc_RNA (1)...(19): siRNA sense strand
caaacauucuaguggggaa

SEQ ID NO: 2265228 - RNA, 19 nt, Homo sapiens
  misc_RNA (1)...(19): siRNA sense strand
caccaaaggaagagugcca

SEQ ID NO: 2265229 - RNA, 19 nt, Homo sapiens
  misc_RNA (1)...(19): siRNA sense strand
cccgauugauagaagacaa

SEQ ID NO: 2265230 - RNA, 19 nt, Homo sapiens
  misc_RNA (1)...(19): siRNA sense strand
ugauaugaaaggagaccau

SEQ ID NO: 2265231 - RNA, 19 nt, Homo sapiens
  misc_RNA (1)...(19): siRNA sense strand
gugugcaauguaaggauaa

SEQ ID NO: 2265232 - RNA, 19 nt, Homo sapiens
  misc_RNA (1)...(19): siRNA sense strand
auguaaggauaaagaagca

SEQ ID NO: 2265233 - RNA, 19 nt, Homo sapiens
  misc_RNA (1)...(19): siRNA sense strand
gaaggagauuggugggaag

SEQ ID NO: 2265234 - RNA, 19 nt, Homo sapiens
  misc_RNA (1)...(19): siRNA sense strand
aagagugguacuuuggaaa

SEQ ID NO: 2265235 - RNA, 19 nt, Homo sapiens
  misc_RNA (1)...(19): siRNA sense strand
ugaaaggagaccaugucaa

SEQ ID NO: 2265236 - RNA, 19 nt, Homo sapiens
  misc_RNA (1)...(19): siRNA sense strand
agcuauuguccuuuggaaa

SEQ ID NO: 2265237 - RNA, 19 nt, Homo sapiens
  misc_RNA (1)...(19): siRNA sense strand
cagcaagacaaggugcaaa

SEQ ID NO: 2265238 - RNA, 19 nt, Homo sapiens
  misc_RNA (1)...(19): siRNA sense strand
cgacagagccccaguacca

SEQ ID NO: 2265239 - RNA, 19 nt, Homo sapiens
  misc_RNA (1)...(19): siRNA sense strand
uugaguacuugcagagcuu

SEQ ID NO: 2265240 - RNA, 19 nt, Homo sapiens
  misc_RNA (1)...(19): siRNA sense strand
gugcaaaguuccccaucaa

SEQ ID NO: 2265241 - RNA, 19 nt, Homo sapiens
  misc_RNA (1)...(19): siRNA sense strand
ugaacagcucggaaggaga

SEQ ID NO: 2265242 - RNA, 19 nt, Homo sapiens
  misc_RNA (1)...(19): siRNA sense strand
aaacacaaaaguagccaua

SEQ ID NO: 2265243 - RNA, 19 nt, Homo sapiens
  misc_RNA (1)...(19): siRNA sense strand
cgacuuagauucugggaaa

SEQ ID NO: 2265244 - RNA, 19 nt, Homo sapiens
  misc_RNA (1)...(19): siRNA sense strand
gaaacagacugcaaugaua

SEQ ID NO: 2265245 - RNA, 19 nt, Homo sapiens
  misc_RNA (1)...(19): siRNA sense strand
guacugaagcagauggaga

SEQ ID NO: 2265246 - RNA, 19 nt, Homo sapiens
  misc_RNA (1)...(19): siRNA sense strand
acgacagugaagagaauua

SEQ ID NO: 2265247 - RNA, 19 nt, Homo sapiens
  misc_RNA (1)...(19): siRNA sense strand
auacuuagaucucgacuua

SEQ ID NO: 2265248 - RNA, 19 nt, Homo sapiens
  misc_RNA (1)...(19): siRNA sense strand
guuuaauccaacagaagaa

SEQ ID NO: 2265249 - RNA, 19 nt, Homo sapiens
  misc_RNA (1)...(19): siRNA sense strand
caguguagcagaugagaga

SEQ ID NO: 2265250 - RNA, 19 nt, Homo sapiens
  misc_RNA (1)...(19): siRNA sense strand
gggacagacaucaaagcua

SEQ ID NO: 2265251 - RNA, 19 nt, Homo sapiens
  misc_RNA (1)...(19): siRNA sense strand
aaacagacugcaaugauaa

SEQ ID NO: 2265252 - RNA, 19 nt, Homo sapiens
  misc_RNA (1)...(19): siRNA sense strand
agacacuauuccagauauu

SEQ ID NO: 2265253 - RNA, 19 nt, Homo sapiens
  misc_RNA (1)...(19): siRNA sense strand
ugauauuccacgagcauuu

SEQ ID NO: 2265254 - RNA, 19 nt, Homo sapiens
  misc_RNA (1)...(19): siRNA sense strand
ugaucaagcccaaaggaga

SEQ ID NO: 2265255 - RNA, 19 nt, Homo sapiens
  misc_RNA (1)...(19): siRNA sense strand
accucaagccagacagaaa

SEQ ID NO: 2265256 - RNA, 19 nt, Homo sapiens
  misc_RNA (1)...(19): siRNA sense strand
aagcaaauuaugugccaau

SEQ ID NO: 2265257 - RNA, 19 nt, Homo sapiens
  misc_RNA (1)...(19): siRNA sense strand
gaucaugccaagaagccua

SEQ ID NO: 2265258 - RNA, 19 nt, Homo sapiens
  misc_RNA (1)...(19): siRNA sense strand
acagcgaggaggagaugaa

SEQ ID NO: 2265259 - RNA, 19 nt, Homo sapiens
  misc_RNA (1)...(19): siRNA sense strand
cgagcauuuccaagugaua

SEQ ID NO: 2265260 - RNA, 19 nt, Homo sapiens
  misc_RNA (1)...(19): siRNA sense strand
ucuaaagaguacccgggaa

SEQ ID NO: 2265261 - RNA, 19 nt, Homo sapiens
  misc_RNA (1)...(19): siRNA sense strand
aguagaugcuggauugaca

SEQ ID NO: 2265262 - RNA, 19 nt, Homo sapiens
  misc_RNA (1)...(19): siRNA sense strand
caguaacagucuugaugga

SEQ ID NO: 2265263 - RNA, 19 nt, Homo sapiens
  misc_RNA (1)...(19): siRNA sense strand
cguuaugcauggaagagga

SEQ ID NO: 2265264 - RNA, 19 nt, Homo sapiens
  misc_RNA (1)...(19): siRNA sense strand
gagaugaauaaguggguuc

SEQ ID NO: 2265265 - RNA, 19 nt, Homo sapiens
  misc_RNA (1)...(19): siRNA sense strand
cagaaugggaagaauuaca

SEQ ID NO: 2265266 - RNA, 19 nt, Homo sapiens
  misc_RNA (1)...(19): siRNA sense strand
ggacagacaucaaagcuag

SEQ ID NO: 2265267 - RNA, 19 nt, Homo sapiens
  misc_RNA (1)...(19): siRNA sense strand
ggaagcaaauuaugugcca

SEQ ID NO: 2265268 - RNA, 19 nt, Homo sapiens
  misc_RNA (1)...(19): siRNA sense strand
aggcagcaguguagcagau

SEQ ID NO: 2265269 - RNA, 19 nt, Homo sapiens
  misc_RNA (1)...(19): siRNA sense strand
cagaagaagauccugugaa

SEQ ID NO: 2265270 - RNA, 19 nt, Homo sapiens
  misc_RNA (1)...(19): siRNA sense strand
caucaaguacugaagcaga

SEQ ID NO: 2265271 - RNA, 19 nt, Homo sapiens
  misc_RNA (1)...(19): siRNA sense strand
guguagcagaugagagagu

SEQ ID NO: 2265272 - RNA, 19 nt, Homo sapiens
  misc_RNA (1)...(19): siRNA sense strand
cagacagcgaggaggagau

SEQ ID NO: 2265273 - RNA, 19 nt, Homo sapiens
  misc_RNA (1)...(19): siRNA sense strand
aaauaaaaccuuugccaga

SEQ ID NO: 2265274 - RNA, 19 nt, Homo sapiens
  misc_RNA (1)...(19): siRNA sense strand
acuuagaucucgacuuaga

SEQ ID NO: 2265275 - RNA, 19 nt, Homo sapiens
  misc_RNA (1)...(19): siRNA sense strand
aagccagcgccuuuagaaa

SEQ ID NO: 2265276 - RNA, 19 nt, Homo sapiens
  misc_RNA (1)...(19): siRNA sense strand
acgaacauuuccagaagga

SEQ ID NO: 2265277 - RNA, 19 nt, Homo sapiens
  misc_RNA (1)...(19): siRNA sense strand
ugccagaaugggaagaauu

SEQ ID NO: 2265278 - RNA, 19 nt, Homo sapiens
  misc_RNA (1)...(19): siRNA sense strand
gcccuaugaucaagcccaa

SEQ ID NO: 2265279 - RNA, 19 nt, Homo sapiens
  misc_RNA (1)...(19): siRNA sense strand
uuauguuguuguugaccaa

SEQ ID NO: 2265280 - RNA, 19 nt, Homo sapiens
  misc_RNA (1)...(19): siRNA sense strand
gcauggaagaggagauggu

SEQ ID NO: 2265281 - RNA, 19 nt, Homo sapiens
  misc_RNA (1)...(19): siRNA sense strand
cuggauugacauuuaacaa

SEQ ID NO: 2265282 - RNA, 19 nt, Homo sapiens
  misc_RNA (1)...(19): siRNA sense strand
gguuuaauccaacagaaga

SEQ ID NO: 2265283 - RNA, 19 nt, Homo sapiens
  misc_RNA (1)...(19): siRNA sense strand
gcugauuuaccuuuagcua

SEQ ID NO: 2265284 - RNA, 19 nt, Homo sapiens
  misc_RNA (1)...(19): siRNA sense strand
agcuauaaauacagcacca

SEQ ID NO: 2265285 - RNA, 19 nt, Homo sapiens
  misc_RNA (1)...(19): siRNA sense strand
uagcagacagcgaggagga

SEQ ID NO: 2265286 - RNA, 19 nt, Homo sapiens
  misc_RNA (1)...(19): siRNA sense strand
aaccaauucaggaagcaaa

SEQ ID NO: 2265287 - RNA, 19 nt, Homo sapiens
  misc_RNA (1)...(19): siRNA sense strand
cauaugggcuucaggucca

SEQ ID NO: 2265288 - RNA, 19 nt, Homo sapiens
  misc_RNA (1)...(19): siRNA sense strand
cuaaagaguacccgggaag

SEQ ID NO: 2265289 - RNA, 19 nt, Homo sapiens
  misc_RNA (1)...(19): siRNA sense strand
gcgaaaagaugcuaguucu

SEQ ID NO: 2265290 - RNA, 19 nt, Homo sapiens
  misc_RNA (1)...(19): siRNA sense strand
uuuccaagugauagaucua

SEQ ID NO: 2265291 - RNA, 19 nt, Homo sapiens
  misc_RNA (1)...(19): siRNA sense strand
ccgaccagauucagugcau

SEQ ID NO: 2265292 - RNA, 19 nt, Homo sapiens
  misc_RNA (1)...(19): siRNA sense strand
uggaauacuuagaucucga

SEQ ID NO: 2265293 - RNA, 19 nt, Homo sapiens
  misc_RNA (1)...(19): siRNA sense strand
gauugauggaacagagaaa

SEQ ID NO: 2265294 - RNA, 19 nt, Homo sapiens
  misc_RNA (1)...(19): siRNA sense strand
cagaaugugaacagaagaa

SEQ ID NO: 2265295 - RNA, 19 nt, Homo sapiens
  misc_RNA (1)...(19): siRNA sense strand
caaugaaccaauaggcaau

SEQ ID NO: 2265296 - RNA, 19 nt, Homo sapiens
  misc_RNA (1)...(19): siRNA sense strand
acuggaaggcuauaggaaa

SEQ ID NO: 2265297 - RNA, 19 nt, Homo sapiens
  misc_RNA (1)...(19): siRNA sense strand
aggagaagauagaagcuca

SEQ ID NO: 2265298 - RNA, 19 nt, Homo sapiens
  misc_RNA (1)...(19): siRNA sense strand
aagcagaggagcugauaga

SEQ ID NO: 2265299 - RNA, 19 nt, Homo sapiens
  misc_RNA (1)...(19): siRNA sense strand
gucaagaacaacagaugaa

SEQ ID NO: 2265300 - RNA, 19 nt, Homo sapiens
  misc_RNA (1)...(19): siRNA sense strand
cgaugaacuaugagaaacu

SEQ ID NO: 2265301 - RNA, 19 nt, Homo sapiens
  misc_RNA (1)...(19): siRNA sense strand
aggcuauaggaaagaacaa

SEQ ID NO: 2265302 - RNA, 19 nt, Homo sapiens
  misc_RNA (1)...(19): siRNA sense strand
ggaaagaacaagaacgccu

SEQ ID NO: 2265303 - RNA, 19 nt, Homo sapiens
  misc_RNA (1)...(19): siRNA sense strand
ucaaugaaccaauaggcaa

SEQ ID NO: 2265304 - RNA, 19 nt, Homo sapiens
  misc_RNA (1)...(19): siRNA sense strand
cugcaaacggaaaaggaua

SEQ ID NO: 2265305 - RNA, 19 nt, Homo sapiens
  misc_RNA (1)...(19): siRNA sense strand
cuggaaggcuauaggaaag

SEQ ID NO: 2265306 - RNA, 19 nt, Homo sapiens
  misc_RNA (1)...(19): siRNA sense strand
gccgaggauuucaggagaa

SEQ ID NO: 2265307 - RNA, 19 nt, Homo sapiens
  misc_RNA (1)...(19): siRNA sense strand
gaggauuucaggagaagau

SEQ ID NO: 2265308 - RNA, 19 nt, Homo sapiens
  misc_RNA (1)...(19): siRNA sense strand
uuuguaaaguucaaggcaa

SEQ ID NO: 2265309 - RNA, 19 nt, Homo sapiens
  misc_RNA (1)...(19): siRNA sense strand
gcuauaggaaagaacaaga

SEQ ID NO: 2265310 - RNA, 19 nt, Homo sapiens
  misc_RNA (1)...(19): siRNA sense strand
accaaggaauugaaccaaa

SEQ ID NO: 2265311 - RNA, 19 nt, Homo sapiens
  misc_RNA (1)...(19): siRNA sense strand
aauugagauugauggaaca

SEQ ID NO: 2265312 - RNA, 19 nt, Homo sapiens
  misc_RNA (1)...(19): siRNA sense strand
cuauaggaaagaacaagaa

SEQ ID NO: 2265313 - RNA, 19 nt, Homo sapiens
  misc_RNA (1)...(19): siRNA sense strand
gaguugaaccguuugguca

SEQ ID NO: 2265314 - RNA, 19 nt, Homo sapiens
  misc_RNA (1)...(19): siRNA sense strand
cugcugcacuggaaggcua

SEQ ID NO: 2265315 - RNA, 19 nt, Homo sapiens
  misc_RNA (1)...(19): siRNA sense strand
aaagaaacugcuagaacca

SEQ ID NO: 2265316 - RNA, 19 nt, Homo sapiens
  misc_RNA (1)...(19): siRNA sense strand
uacgaugaacuaugagaaa

SEQ ID NO: 2265317 - RNA, 19 nt, Homo sapiens
  misc_RNA (1)...(19): siRNA sense strand
uuguaaaguucaaggcaag

SEQ ID NO: 2265318 - RNA, 19 nt, Homo sapiens
  misc_RNA (1)...(19): siRNA sense strand
cauugggugguuuggguaa

SEQ ID NO: 2265319 - RNA, 19 nt, Homo sapiens
  misc_RNA (1)...(19): siRNA sense strand
cuucagaacaagugacaag

SEQ ID NO: 2265320 - RNA, 19 nt, Homo sapiens
  misc_RNA (1)...(19): siRNA sense strand
auuggcaagucaagaacaa

SEQ ID NO: 2265321 - RNA, 19 nt, Homo sapiens
  misc_RNA (1)...(19): siRNA sense strand
aaagagaagcagaggagcu

SEQ ID NO: 2265322 - RNA, 19 nt, Homo sapiens
  misc_RNA (1)...(19): siRNA sense strand
cuacgaugaacuaugagaa

SEQ ID NO: 2265323 - RNA, 19 nt, Homo sapiens
  misc_RNA (1)...(19): siRNA sense strand
cgauauagaccucaccaca

SEQ ID NO: 2265324 - RNA, 19 nt, Homo sapiens
  misc_RNA (1)...(19): siRNA sense strand
gauuucaggagaagauaga

SEQ ID NO: 2265325 - RNA, 19 nt, Homo sapiens
  misc_RNA (1)...(19): siRNA sense strand
gggaacagaacaggaaaca

SEQ ID NO: 2265326 - RNA, 19 nt, Homo sapiens
  misc_RNA (1)...(19): siRNA sense strand
cagagaaagcagagugcac

SEQ ID NO: 2265327 - RNA, 19 nt, Homo sapiens
  misc_RNA (1)...(19): siRNA sense strand
acagcuuaguguacaggua

SEQ ID NO: 2265328 - RNA, 19 nt, Homo sapiens
  misc_RNA (1)...(19): siRNA sense strand
aaauugagauugauggaac

SEQ ID NO: 2265329 - RNA, 19 nt, Homo sapiens
  misc_RNA (1)...(19): siRNA sense strand
guacaaagagcgccgagga

SEQ ID NO: 2265330 - RNA, 19 nt, Homo sapiens
  misc_RNA (1)...(19): siRNA sense strand
ggaacagaacaggaaacaa

SEQ ID NO: 2265331 - RNA, 19 nt, Homo sapiens
  misc_RNA (1)...(19): siRNA sense strand
gcgccagcugaauguguaa

SEQ ID NO: 2265332 - RNA, 19 nt, Homo sapiens
  misc_RNA (1)...(19): siRNA sense strand
acgaaguuuauuugaccaa

SEQ ID NO: 2265333 - RNA, 19 nt, Homo sapiens
  misc_RNA (1)...(19): siRNA sense strand
gaacaggaaacaauggcca

SEQ ID NO: 2265334 - RNA, 19 nt, Homo sapiens
  misc_RNA (1)...(19): siRNA sense strand
gauaaggacgcucgagacu

SEQ ID NO: 2265335 - RNA, 19 nt, Homo sapiens
  misc_RNA (1)...(19): siRNA sense strand
uuaccaaggaauugaacca

SEQ ID NO: 2265336 - RNA, 19 nt, Homo sapiens
  misc_RNA (1)...(19): siRNA sense strand
uggcaagucaagaacaaca

SEQ ID NO: 2265337 - RNA, 19 nt, Homo sapiens
  misc_RNA (1)...(19): siRNA sense strand
gagaagcagaggagcugau

SEQ ID NO: 2265338 - RNA, 19 nt, Homo sapiens
  misc_RNA (1)...(19): siRNA sense strand
uguauuggcaagucaagaa

SEQ ID NO: 2265339 - RNA, 19 nt, Homo sapiens
  misc_RNA (1)...(19): siRNA sense strand
agaaauugagauugaugga

SEQ ID NO: 2265340 - RNA, 19 nt, Homo sapiens
  misc_RNA (1)...(19): siRNA sense strand
aaguucaaggcaagagauu

SEQ ID NO: 2265341 - RNA, 19 nt, Homo sapiens
  misc_RNA (1)...(19): siRNA sense strand
gaacagaagcugcgggaga

SEQ ID NO: 2265342 - RNA, 19 nt, Homo sapiens
  misc_RNA (1)...(19): siRNA sense strand
cucuauagucucaggguua

SEQ ID NO: 2265343 - RNA, 19 nt, Homo sapiens
  misc_RNA (1)...(19): siRNA sense strand
cugcgaugcuggacggcaa

SEQ ID NO: 2265344 - RNA, 19 nt, Homo sapiens
  misc_RNA (1)...(19): siRNA sense strand
acaucaaggccguggacau

SEQ ID NO: 2265345 - RNA, 19 nt, Homo sapiens
  misc_RNA (1)...(19): siRNA sense strand
augugcagguggagaguuu

SEQ ID NO: 2265346 - RNA, 19 nt, Homo sapiens
  misc_RNA (1)...(19): siRNA sense strand
aggaaaagucagagaagca

SEQ ID NO: 2265347 - RNA, 19 nt, Homo sapiens
  misc_RNA (1)...(19): siRNA sense strand
gcuaugugagcaugagaau

SEQ ID NO: 2265348 - RNA, 19 nt, Homo sapiens
  misc_RNA (1)...(19): siRNA sense strand
acgagaaguacaugaagau

SEQ ID NO: 2265349 - RNA, 19 nt, Homo sapiens
  misc_RNA (1)...(19): siRNA sense strand
ggguccagccugaugggaa

SEQ ID NO: 2265350 - RNA, 19 nt, Homo sapiens
  misc_RNA (1)...(19): siRNA sense strand
cucuugaaauugaaagcua

SEQ ID NO: 2265351 - RNA, 19 nt, Homo sapiens
  misc_RNA (1)...(19): siRNA sense strand
ccacagaggaaaagucaga

SEQ ID NO: 2265352 - RNA, 19 nt, Homo sapiens
  misc_RNA (1)...(19): siRNA sense strand
gacaaagacgagaaguaca

SEQ ID NO: 2265353 - RNA, 19 nt, Homo sapiens
  misc_RNA (1)...(19): siRNA sense strand
aggagaggaaggaacagaa

SEQ ID NO: 2265354 - RNA, 19 nt, Homo sapiens
  misc_RNA (1)...(19): siRNA sense strand
cagguggagaguuuggaua

SEQ ID NO: 2265355 - RNA, 19 nt, Homo sapiens
  misc_RNA (1)...(19): siRNA sense strand
gcucuauagucucaggguu

SEQ ID NO: 2265356 - RNA, 19 nt, Homo sapiens
  misc_RNA (1)...(19): siRNA sense strand
gugcaggagaggaaggaac

SEQ ID NO: 2265357 - RNA, 19 nt, Homo sapiens
  misc_RNA (1)...(19): siRNA sense strand
gcaugagaaucgacaccca

SEQ ID NO: 2265358 - RNA, 19 nt, Homo sapiens
  misc_RNA (1)...(19): siRNA sense strand
aauugaaagcuaugccuau

SEQ ID NO: 2265359 - RNA, 19 nt, Homo sapiens
  misc_RNA (1)...(19): siRNA sense strand
gaacggaagcugcgggaga

SEQ ID NO: 2265360 - RNA, 19 nt, Homo sapiens
  misc_RNA (1)...(19): siRNA sense strand
cggcauuacuggaaggaug

SEQ ID NO: 2265361 - RNA, 19 nt, Homo sapiens
  misc_RNA (1)...(19): siRNA sense strand
ugacagaagaagaaaggca

SEQ ID NO: 2265362 - RNA, 19 nt, Homo sapiens
  misc_RNA (1)...(19): siRNA sense strand
acgucaaggccguggacau

SEQ ID NO: 2265363 - RNA, 19 nt, Homo sapiens
  misc_RNA (1)...(19): siRNA sense strand
acagugagucugaggccaa

SEQ ID NO: 2265364 - RNA, 19 nt, Homo sapiens
  misc_RNA (1)...(19): siRNA sense strand
gacagaagaagaaaggcaa

SEQ ID NO: 2265365 - RNA, 19 nt, Homo sapiens
  misc_RNA (1)...(19): siRNA sense strand
aagccaacgcugccagaaa

SEQ ID NO: 2265366 - RNA, 19 nt, Homo sapiens
  misc_RNA (1)...(19): siRNA sense strand
guggaaaugcccaagccaa

SEQ ID NO: 2265367 - RNA, 19 nt, Homo sapiens
  misc_RNA (1)...(19): siRNA sense strand
accaagauccggaagggaa

SEQ ID NO: 2265368 - RNA, 19 nt, Homo sapiens
  misc_RNA (1)...(19): siRNA sense strand
aagaaaggcaagacaaaau

SEQ ID NO: 2265369 - RNA, 19 nt, Homo sapiens
  misc_RNA (1)...(19): siRNA sense strand
cagaagaagaaaggcaaga

SEQ ID NO: 2265370 - RNA, 19 nt, Homo sapiens
  misc_RNA (1)...(19): siRNA sense strand
uggagagccuggacagcau

SEQ ID NO: 2265371 - RNA, 19 nt, Homo sapiens
  misc_RNA (1)...(19): siRNA sense strand
ccauauccugacagaagaa

SEQ ID NO: 2265372 - RNA, 19 nt, Homo sapiens
  misc_RNA (1)...(19): siRNA sense strand
caagaggaagcgauggaca

SEQ ID NO: 2265373 - RNA, 19 nt, Homo sapiens
  misc_RNA (1)...(19): siRNA sense strand
ggguguucccagauggaca

SEQ ID NO: 2265374 - RNA, 19 nt, Homo sapiens
  misc_RNA (1)...(19): siRNA sense strand
gcgccagcaacaagagcau

SEQ ID NO: 2265375 - RNA, 19 nt, Homo sapiens
  misc_RNA (1)...(19): siRNA sense strand
agggauuagucuagaagaa

SEQ ID NO: 2265376 - RNA, 19 nt, Homo sapiens
  misc_RNA (1)...(19): siRNA sense strand
acuuaaaggaauucaggaa

SEQ ID NO: 2265377 - RNA, 19 nt, Homo sapiens
  misc_RNA (1)...(19): siRNA sense strand
ccuauaacccugaggagau

SEQ ID NO: 2265378 - RNA, 19 nt, Homo sapiens
  misc_RNA (1)...(19): siRNA sense strand
acauaauaggagagcauau

SEQ ID NO: 2265379 - RNA, 19 nt, Homo sapiens
  misc_RNA (1)...(19): siRNA sense strand
gggaauuagccuggaggaa

SEQ ID NO: 2265380 - RNA, 19 nt, Homo sapiens
  misc_RNA (1)...(19): siRNA sense strand
cuucaguacuagugcuaau

SEQ ID NO: 2265381 - RNA, 19 nt, Homo sapiens
  misc_RNA (1)...(19): siRNA sense strand
gaagaaaugcuguugguca

SEQ ID NO: 2265382 - RNA, 19 nt, Homo sapiens
  misc_RNA (1)...(19): siRNA sense strand
gggacaaaguacugaggcu

SEQ ID NO: 2265383 - RNA, 19 nt, Homo sapiens
  misc_RNA (1)...(19): siRNA sense strand
gcauauagauuauugugga

SEQ ID NO: 2265384 - RNA, 19 nt, Homo sapiens
  misc_RNA (1)...(19): siRNA sense strand
aggagagcauauagauuau

SEQ ID NO: 2265385 - RNA, 19 nt, Homo sapiens
  misc_RNA (1)...(19): siRNA sense strand
agguggaacuugcagaaau

SEQ ID NO: 2265386 - RNA, 19 nt, Homo sapiens
  misc_RNA (1)...(19): siRNA sense strand
gagucaacauaauaggaga

SEQ ID NO: 2265387 - RNA, 19 nt, Homo sapiens
  misc_RNA (1)...(19): siRNA sense strand
ugggagaguugaugaacca

SEQ ID NO: 2265388 - RNA, 19 nt, Homo sapiens
  misc_RNA (1)...(19): siRNA sense strand
caaugguaccugcggacaa

SEQ ID NO: 2265389 - RNA, 19 nt, Homo sapiens
  misc_RNA (1)...(19): siRNA sense strand
guuguguggagaugaauaa

SEQ ID NO: 2265390 - RNA, 19 nt, Homo sapiens
  misc_RNA (1)...(19): siRNA sense strand
auguggacuuaaaggaauu

SEQ ID NO: 2265391 - RNA, 19 nt, Homo sapiens
  misc_RNA (1)...(19): siRNA sense strand
gugaagaagcaccugaaaa

SEQ ID NO: 2265392 - RNA, 19 nt, Homo sapiens
  misc_RNA (1)...(19): siRNA sense strand
uagaacaagaugugcuaau

SEQ ID NO: 2265393 - RNA, 19 nt, Homo sapiens
  misc_RNA (1)...(19): siRNA sense strand
gcacaaagcuuauuaccag

SEQ ID NO: 2265394 - RNA, 19 nt, Homo sapiens
  misc_RNA (1)...(19): siRNA sense strand
uguucgagcaccaggaaga

SEQ ID NO: 2265395 - RNA, 19 nt, Homo sapiens
  misc_RNA (1)...(19): siRNA sense strand
acccaaauccugaguccaa

SEQ ID NO: 2265396 - RNA, 19 nt, Homo sapiens
  misc_RNA (1)...(19): siRNA sense strand
gaaugaacugccugguaga

SEQ ID NO: 2265397 - RNA, 19 nt, Homo sapiens
  misc_RNA (1)...(19): siRNA sense strand
uuacugaagcuaaaggaga

SEQ ID NO: 2265398 - RNA, 19 nt, Homo sapiens
  misc_RNA (1)...(19): siRNA sense strand
uguagaacaagaugugcua

SEQ ID NO: 2265399 - RNA, 19 nt, Homo sapiens
  misc_RNA (1)...(19): siRNA sense strand
cacaugagcugccgggaca

SEQ ID NO: 2265400 - RNA, 19 nt, Homo sapiens
  misc_RNA (1)...(19): siRNA sense strand
agcuguagaaccugugaaa

SEQ ID NO: 2265401 - RNA, 19 nt, Homo sapiens
  misc_RNA (1)...(19): siRNA sense strand
ggguccagguggcagaaca

SEQ ID NO: 2265402 - RNA, 19 nt, Homo sapiens
  misc_RNA (1)...(19): siRNA sense strand
gguccagguggcagaacau

SEQ ID NO: 2265403 - RNA, 19 nt, Homo sapiens
  misc_RNA (1)...(19): siRNA sense strand
aagaaaugcuguuggucac

SEQ ID NO: 2265404 - RNA, 19 nt, Homo sapiens
  misc_RNA (1)...(19): siRNA sense strand
acgacuuacuggagcagga

SEQ ID NO: 2265405 - RNA, 19 nt, Homo sapiens
  misc_RNA (1)...(19): siRNA sense strand
uacugaagcuaaaggagau

SEQ ID NO: 2265406 - RNA, 19 nt, Homo sapiens
  misc_RNA (1)...(19): siRNA sense strand
gcuuauuaccagaggagug

SEQ ID NO: 2265407 - RNA, 19 nt, Homo sapiens
  misc_RNA (1)...(19): siRNA sense strand
cagaagaaggaacugccaa

SEQ ID NO: 2265408 - RNA, 19 nt, Homo sapiens
  misc_RNA (1)...(19): siRNA sense strand
cccaaguggagcaguguuu

SEQ ID NO: 2265409 - RNA, 19 nt, Homo sapiens
  misc_RNA (1)...(19): siRNA sense strand
cugcaggugucugggaauu

SEQ ID NO: 2265410 - RNA, 19 nt, Homo sapiens
  misc_RNA (1)...(19): siRNA sense strand
ccuagguuacugaagcuaa

SEQ ID NO: 2265411 - RNA, 19 nt, Homo sapiens
  misc_RNA (1)...(19): siRNA sense strand
aaaccaagccuuuguggca

SEQ ID NO: 2265412 - RNA, 19 nt, Homo sapiens
  misc_RNA (1)...(19): siRNA sense strand
gcaggcuaaacuagggauu

SEQ ID NO: 2265413 - RNA, 19 nt, Homo sapiens
  misc_RNA (1)...(19): siRNA sense strand
ggguggagaagaagggaga

SEQ ID NO: 2265414 - RNA, 19 nt, Homo sapiens
  misc_RNA (1)...(19): siRNA sense strand
ccgaugggguggagaagaa

SEQ ID NO: 2265415 - RNA, 19 nt, Homo sapiens
  misc_RNA (1)...(19): siRNA sense strand
guaaagaagaggaaccuga

SEQ ID NO: 2265416 - RNA, 19 nt, Homo sapiens
  misc_RNA (1)...(19): siRNA sense strand
cuguaugagaagaaccaaa

SEQ ID NO: 2265417 - RNA, 19 nt, Homo sapiens
  misc_RNA (1)...(19): siRNA sense strand
aagaggaaccugaggcuga

SEQ ID NO: 2265418 - RNA, 19 nt, Homo sapiens
  misc_RNA (1)...(19): siRNA sense strand
cgaccaaaagauugaacaa

SEQ ID NO: 2265419 - RNA, 19 nt, Homo sapiens
  misc_RNA (1)...(19): siRNA sense strand
cgaggguaaagaagaggaa

SEQ ID NO: 2265420 - RNA, 19 nt, Homo sapiens
  misc_RNA (1)...(19): siRNA sense strand
agcucaaaggagagaagaa

SEQ ID NO: 2265421 - RNA, 19 nt, Homo sapiens
  misc_RNA (1)...(19): siRNA sense strand
aggacgaggguaaagaaga

SEQ ID NO: 2265422 - RNA, 19 nt, Homo sapiens
  misc_RNA (1)...(19): siRNA sense strand
caauugaaacugaagggaa

SEQ ID NO: 2265423 - RNA, 19 nt, Homo sapiens
  misc_RNA (1)...(19): siRNA sense strand
ggaaaaugcgccugggaga

SEQ ID NO: 2265424 - RNA, 19 nt, Homo sapiens
  misc_RNA (1)...(19): siRNA sense strand
uugaacagggugugauuaa

SEQ ID NO: 2265425 - RNA, 19 nt, Homo sapiens
  misc_RNA (1)...(19): siRNA sense strand
aagcaguggcugagcucaa

SEQ ID NO: 2265426 - RNA, 19 nt, Homo sapiens
  misc_RNA (1)...(19): siRNA sense strand
ccucacgaagguuggaaua

SEQ ID NO: 2265427 - RNA, 19 nt, Homo sapiens
  misc_RNA (1)...(19): siRNA sense strand
gaagauacccugaagagga

SEQ ID NO: 2265428 - RNA, 19 nt, Homo sapiens
  misc_RNA (1)...(19): siRNA sense strand
gcgaaaacucaaagaagau

SEQ ID NO: 2265429 - RNA, 19 nt, Homo sapiens
  misc_RNA (1)...(19): siRNA sense strand
uguacgagaaggagaugaa

SEQ ID NO: 2265430 - RNA, 19 nt, Homo sapiens
  misc_RNA (1)...(19): siRNA sense strand
gaggaaacaugccugggua

SEQ ID NO: 2265431 - RNA, 19 nt, Homo sapiens
  misc_RNA (1)...(19): siRNA sense strand
acuuugacacagugaacaa

SEQ ID NO: 2265432 - RNA, 19 nt, Homo sapiens
  misc_RNA (1)...(19): siRNA sense strand
uagacaaagcaguggcuga

SEQ ID NO: 2265433 - RNA, 19 nt, Homo sapiens
  misc_RNA (1)...(19): siRNA sense strand
aagcaaaggagcuggcguu

SEQ ID NO: 2265434 - RNA, 19 nt, Homo sapiens
  misc_RNA (1)...(19): siRNA sense strand
gagaauucacaauggcaga

SEQ ID NO: 2265435 - RNA, 19 nt, Homo sapiens
  misc_RNA (1)...(19): siRNA sense strand
ggauugagauuguuggaug

SEQ ID NO: 2265436 - RNA, 19 nt, Homo sapiens
  misc_RNA (1)...(19): siRNA sense strand
ccauuugugaugagugcua

SEQ ID NO: 2265437 - RNA, 19 nt, Homo sapiens
  misc_RNA (1)...(19): siRNA sense strand
ugccauuugucaaggaauu

SEQ ID NO: 2265438 - RNA, 19 nt, Homo sapiens
  misc_RNA (1)...(19): siRNA sense strand
aguccaagaccuagccaau

SEQ ID NO: 2265439 - RNA, 19 nt, Homo sapiens
  misc_RNA (1)...(19): siRNA sense strand
gcagggagaucuugugcga

SEQ ID NO: 2265440 - RNA, 19 nt, Homo sapiens
  misc_RNA (1)...(19): siRNA sense strand
ugugaagagauuccagaaa

SEQ ID NO: 2265441 - RNA, 19 nt, Homo sapiens
  misc_RNA (1)...(19): siRNA sense strand
ccauguacgagaaggagau

SEQ ID NO: 2265442 - RNA, 19 nt, Homo sapiens
  misc_RNA (1)...(19): siRNA sense strand
agggcaagagacugguaaa

SEQ ID NO: 2265443 - RNA, 19 nt, Homo sapiens
  misc_RNA (1)...(19): siRNA sense strand
uauuguagaccgagcaaaa

SEQ ID NO: 2265444 - RNA, 19 nt, Homo sapiens
  misc_RNA (1)...(19): siRNA sense strand
cccaaguagacguagacaa

SEQ ID NO: 2265445 - RNA, 19 nt, Homo sapiens
  misc_RNA (1)...(19): siRNA sense strand
augcaaaacuggugaugga

SEQ ID NO: 2265446 - RNA, 19 nt, Homo sapiens
  misc_RNA (1)...(19): siRNA sense strand
guuugaagggcaagagacu

SEQ ID NO: 2265447 - RNA, 19 nt, Homo sapiens
  misc_RNA (1)...(19): siRNA sense strand
aaacacuauauguggaaga

SEQ ID NO: 2265448 - RNA, 19 nt, Homo sapiens
  misc_RNA (1)...(19): siRNA sense strand
gggcaagagacugguaaaa

SEQ ID NO: 2265449 - RNA, 19 nt, Homo sapiens
  misc_RNA (1)...(19): siRNA sense strand
ccgcaagaggguucuggaa

SEQ ID NO: 2265450 - RNA, 19 nt, Homo sapiens
  misc_RNA (1)...(19): siRNA sense strand
gagugcuacauuacagaaa

SEQ ID NO: 2265451 - RNA, 19 nt, Homo sapiens
  misc_RNA (1)...(19): siRNA sense strand
cacuauauguggaagaagu

SEQ ID NO: 2265452 - RNA, 19 nt, Homo sapiens
  misc_RNA (1)...(19): siRNA sense strand
agaugauauuguagaccga

SEQ ID NO: 2265453 - RNA, 19 nt, Homo sapiens
  misc_RNA (1)...(19): siRNA sense strand
cccacuuguagcugagaaa

SEQ ID NO: 2265454 - RNA, 19 nt, Homo sapiens
  misc_RNA (1)...(19): siRNA sense strand
ugucaaggaauuaucggaa

SEQ ID NO: 2265455 - RNA, 19 nt, Homo sapiens
  misc_RNA (1)...(19): siRNA sense strand
gggagcaauugguaaggca

SEQ ID NO: 2265456 - RNA, 19 nt, Homo sapiens
  misc_RNA (1)...(19): siRNA sense strand
ugaucaagcuuuugcuauu

SEQ ID NO: 2265457 - RNA, 19 nt, Homo sapiens
  misc_RNA (1)...(19): siRNA sense strand
acuuuauccaagaggaaca

SEQ ID NO: 2265458 - RNA, 19 nt, Homo sapiens
  misc_RNA (1)...(19): siRNA sense strand
cuggguaggaucauguaua

SEQ ID NO: 2265459 - RNA, 19 nt, Homo sapiens
  misc_RNA (1)...(19): siRNA sense strand
uggaguucaaccaaggaaa

SEQ ID NO: 2265460 - RNA, 19 nt, Homo sapiens
  misc_RNA (1)...(19): siRNA sense strand
gcugaaugagaaaggggaa

SEQ ID NO: 2265461 - RNA, 19 nt, Homo sapiens
  misc_RNA (1)...(19): siRNA sense strand
guacuugagaccagaaacu

SEQ ID NO: 2265462 - RNA, 19 nt, Homo sapiens
  misc_RNA (1)...(19): siRNA sense strand
auucacaauggcagaaauu

SEQ ID NO: 2265463 - RNA, 19 nt, Homo sapiens
  misc_RNA (1)...(19): siRNA sense strand
auaacacaguauuaggcua

SEQ ID NO: 2265464 - RNA, 19 nt, Homo sapiens
  misc_RNA (1)...(19): siRNA sense strand
uguaguugcuccauucaaa

SEQ ID NO: 2265465 - RNA, 19 nt, Homo sapiens
  misc_RNA (1)...(19): siRNA sense strand
acucaaagaagauaaagca

SEQ ID NO: 2265466 - RNA, 19 nt, Homo sapiens
  misc_RNA (1)...(19): siRNA sense strand
gcaagaggguucuggaagc

SEQ ID NO: 2265467 - RNA, 19 nt, Homo sapiens
  misc_RNA (1)...(19): siRNA sense strand
ccauuaugccugugacugu

SEQ ID NO: 2265468 - RNA, 19 nt, Homo sapiens
  misc_RNA (1)...(19): siRNA sense strand
cgaaaagaaaucagaaaug

SEQ ID NO: 2265469 - RNA, 19 nt, Homo sapiens
  misc_RNA (1)...(19): siRNA sense strand
gaugcugcugaaugagaaa

SEQ ID NO: 2265470 - RNA, 19 nt, Homo sapiens
  misc_RNA (1)...(19): siRNA sense strand
agacgauuccucuggguca

SEQ ID NO: 2265471 - RNA, 19 nt, Homo sapiens
  misc_RNA (1)...(19): siRNA sense strand
acuacuacgaugaggacua

SEQ ID NO: 2265472 - RNA, 19 nt, Homo sapiens
  misc_RNA (1)...(19): siRNA sense strand
ccaagguggcgcugcucaa

SEQ ID NO: 2265473 - RNA, 19 nt, Homo sapiens
  misc_RNA (1)...(19): siRNA sense strand
ccgcaaggcaucuggaaaa

SEQ ID NO: 2265474 - RNA, 19 nt, Homo sapiens
  misc_RNA (1)...(19): siRNA sense strand
gagaaaugccaguggggau

SEQ ID NO: 2265475 - RNA, 19 nt, Homo sapiens
  misc_RNA (1)...(19): siRNA sense strand
ggaagaucuggauggaaaa

SEQ ID NO: 2265476 - RNA, 19 nt, Homo sapiens
  misc_RNA (1)...(19): siRNA sense strand
acgcugaggccuacagaca

SEQ ID NO: 2265477 - RNA, 19 nt, Homo sapiens
  misc_RNA (1)...(19): siRNA sense strand
acagggacgcugaggccua

SEQ ID NO: 2265478 - RNA, 19 nt, Homo sapiens
  misc_RNA (1)...(19): siRNA sense strand
acucgaaaccgcaaggcau

SEQ ID NO: 2265479 - RNA, 19 nt, Homo sapiens
  misc_RNA (1)...(19): siRNA sense strand
ccucaauucagcagccuau

SEQ ID NO: 2265480 - RNA, 19 nt, Homo sapiens
  misc_RNA (1)...(19): siRNA sense strand
aggcacaggagcagccgaa

SEQ ID NO: 2265481 - RNA, 19 nt, Homo sapiens
  misc_RNA (1)...(19): siRNA sense strand
agguguacccauugcucaa

SEQ ID NO: 2265482 - RNA, 19 nt, Homo sapiens
  misc_RNA (1)...(19): siRNA sense strand
cgacacuguggcggagaaa

SEQ ID NO: 2265483 - RNA, 19 nt, Homo sapiens
  misc_RNA (1)...(19): siRNA sense strand
agcccaagaaccugaauaa

SEQ ID NO: 2265484 - RNA, 19 nt, Homo sapiens
  misc_RNA (1)...(19): siRNA sense strand
cugaauaaaucuaagacac

SEQ ID NO: 2265485 - RNA, 19 nt, Homo sapiens
  misc_RNA (1)...(19): siRNA sense strand
agggcgagccugugugcaa

SEQ ID NO: 2265486 - RNA, 19 nt, Homo sapiens
  misc_RNA (1)...(19): siRNA sense strand
cggaaagaggggauccaaa

SEQ ID NO: 2265487 - RNA, 19 nt, Homo sapiens
  misc_RNA (1)...(19): siRNA sense strand
cucagaaggcagagagugu

SEQ ID NO: 2265488 - RNA, 19 nt, Homo sapiens
  misc_RNA (1)...(19): siRNA sense strand
ccagaaaacggaagcccaa

SEQ ID NO: 2265489 - RNA, 19 nt, Homo sapiens
  misc_RNA (1)...(19): siRNA sense strand
ucgauauguuugacgacuu

SEQ ID NO: 2265490 - RNA, 19 nt, Homo sapiens
  misc_RNA (1)...(19): siRNA sense strand
ccugaauaaaucuaagaca

SEQ ID NO: 2265491 - RNA, 19 nt, Homo sapiens
  misc_RNA (1)...(19): siRNA sense strand
gaagaaagguaccagucaa

SEQ ID NO: 2265492 - RNA, 19 nt, Homo sapiens
  misc_RNA (1)...(19): siRNA sense strand
aagaaagguaccagucaaa

SEQ ID NO: 2265493 - RNA, 19 nt, Homo sapiens
  misc_RNA (1)...(19): siRNA sense strand
gagaagauggagaacgaca

SEQ ID NO: 2265494 - RNA, 19 nt, Homo sapiens
  misc_RNA (1)...(19): siRNA sense strand
cuaugguggugguggcaau

SEQ ID NO: 2265495 - RNA, 19 nt, Homo sapiens
  misc_RNA (1)...(19): siRNA sense strand
gagauguagagaaggguga

SEQ ID NO: 2265496 - RNA, 19 nt, Homo sapiens
  misc_RNA (1)...(19): siRNA sense strand
ugaaagagcaagagaggac

SEQ ID NO: 2265497 - RNA, 19 nt, Homo sapiens
  misc_RNA (1)...(19): siRNA sense strand
cuuggaagcagauggacaa

SEQ ID NO: 2265498 - RNA, 19 nt, Homo sapiens
  misc_RNA (1)...(19): siRNA sense strand
aagaagugaaggcgggaau

SEQ ID NO: 2265499 - RNA, 19 nt, Homo sapiens
  misc_RNA (1)...(19): siRNA sense strand
cucuuaaacuucaggaaca

SEQ ID NO: 2265500 - RNA, 19 nt, Homo sapiens
  misc_RNA (1)...(19): siRNA sense strand
acauagaauccgaucaaaa

SEQ ID NO: 2265501 - RNA, 19 nt, Homo sapiens
  misc_RNA (1)...(19): siRNA sense strand
ccuucaaagauguggacca

SEQ ID NO: 2265502 - RNA, 19 nt, Homo sapiens
  misc_RNA (1)...(19): siRNA sense strand
caggaggcauccaggucaa

SEQ ID NO: 2265503 - RNA, 19 nt, Homo sapiens
  misc_RNA (1)...(19): siRNA sense strand
ccaucaaccagcaggcuau

SEQ ID NO: 2265504 - RNA, 19 nt, Homo sapiens
  misc_RNA (1)...(19): siRNA sense strand
acuaugaggaaccgaggaa

SEQ ID NO: 2265505 - RNA, 19 nt, Homo sapiens
  misc_RNA (1)...(19): siRNA sense strand
acaccgagggucugggaga

SEQ ID NO: 2265506 - RNA, 19 nt, Homo sapiens
  misc_RNA (1)...(19): siRNA sense strand
agaaacuacaagaugaaga

SEQ ID NO: 2265507 - RNA, 19 nt, Homo sapiens
  misc_RNA (1)...(19): siRNA sense strand
cuucaaagauguggaccau

SEQ ID NO: 2265508 - RNA, 19 nt, Homo sapiens
  misc_RNA (1)...(19): siRNA sense strand
agauugaaguggaacgugu

SEQ ID NO: 2265509 - RNA, 19 nt, Homo sapiens
  misc_RNA (1)...(19): siRNA sense strand
ugagaacacuaaugggcga

SEQ ID NO: 2265510 - RNA, 19 nt, Homo sapiens
  misc_RNA (1)...(19): siRNA sense strand
cugcacaggcuucagcaaa

SEQ ID NO: 2265511 - RNA, 19 nt, Homo sapiens
  misc_RNA (1)...(19): siRNA sense strand
cgacgaaaggcauguacca

SEQ ID NO: 2265512 - RNA, 19 nt, Homo sapiens
  misc_RNA (1)...(19): siRNA sense strand
ccucuaccgcacaggcaaa

SEQ ID NO: 2265513 - RNA, 19 nt, Homo sapiens
  misc_RNA (1)...(19): siRNA sense strand
cagacauacuugaaaucca

SEQ ID NO: 2265514 - RNA, 19 nt, Homo sapiens
  misc_RNA (1)...(19): siRNA sense strand
guguacaauagcauaggaa

SEQ ID NO: 2265515 - RNA, 19 nt, Homo sapiens
  misc_RNA (1)...(19): siRNA sense strand
acuuggaagcagauggaca

SEQ ID NO: 2265516 - RNA, 19 nt, Homo sapiens
  misc_RNA (1)...(19): siRNA sense strand
aggcauguaccauaagcua

SEQ ID NO: 2265517 - RNA, 19 nt, Homo sapiens
  misc_RNA (1)...(19): siRNA sense strand
guacaauagcauaggaacc

SEQ ID NO: 2265518 - RNA, 19 nt, Homo sapiens
  misc_RNA (1)...(19): siRNA sense strand
ugagaaugagguugaggau

SEQ ID NO: 2265519 - RNA, 19 nt, Homo sapiens
  misc_RNA (1)...(19): siRNA sense strand
cucuagaagaagaagugaa

SEQ ID NO: 2265520 - RNA, 19 nt, Homo sapiens
  misc_RNA (1)...(19): siRNA sense strand
cugcacagggacagugaga

SEQ ID NO: 2265521 - RNA, 19 nt, Homo sapiens
  misc_RNA (1)...(19): siRNA sense strand
acagggacagugagagaga

SEQ ID NO: 2265522 - RNA, 19 nt, Homo sapiens
  misc_RNA (1)...(19): siRNA sense strand
ggcauguaccauaagcuaa

SEQ ID NO: 2265523 - RNA, 19 nt, Homo sapiens
  misc_RNA (1)...(19): siRNA sense strand
agaucguugcucagguuua

SEQ ID NO: 2265524 - RNA, 19 nt, Homo sapiens
  misc_RNA (1)...(19): siRNA sense strand
acuugaaacaacugacuga

SEQ ID NO: 2265525 - RNA, 19 nt, Homo sapiens
  misc_RNA (1)...(19): siRNA sense strand
cagguuuacuucaggucau

SEQ ID NO: 2265526 - RNA, 19 nt, Homo sapiens
  misc_RNA (1)...(19): siRNA sense strand
augagcagaugauggaaca

SEQ ID NO: 2265527 - RNA, 19 nt, Homo sapiens
  misc_RNA (1)...(19): siRNA sense strand
aguccaagcaggagcacaa

SEQ ID NO: 2265528 - RNA, 19 nt, Homo sapiens
  misc_RNA (1)...(19): siRNA sense strand
gggcagagaugauggagcu

SEQ ID NO: 2265529 - RNA, 19 nt, Homo sapiens
  misc_RNA (1)...(19): siRNA sense strand
ggaagcugcuagagggcga

SEQ ID NO: 2265530 - RNA, 19 nt, Homo sapiens
  misc_RNA (1)...(19): siRNA sense strand
caacaugcaugaagccgaa

SEQ ID NO: 2265531 - RNA, 19 nt, Homo sapiens
  misc_RNA (1)...(19): siRNA sense strand
ggcuggagguugagaggga

SEQ ID NO: 2265532 - RNA, 19 nt, Homo sapiens
  misc_RNA (1)...(19): siRNA sense strand
ggaagauccacgaggagga

SEQ ID NO: 2265533 - RNA, 19 nt, Homo sapiens
  misc_RNA (1)...(19): siRNA sense strand
gcacgcaguaugaggcaau

SEQ ID NO: 2265534 - RNA, 19 nt, Homo sapiens
  misc_RNA (1)...(19): siRNA sense strand
ugcuagagggcgaggagaa

SEQ ID NO: 2265535 - RNA, 19 nt, Homo sapiens
  misc_RNA (1)...(19): siRNA sense strand
aggccaagcacgaagccaa

SEQ ID NO: 2265536 - RNA, 19 nt, Homo sapiens
  misc_RNA (1)...(19): siRNA sense strand
aggcaauggcguccagcaa

SEQ ID NO: 2265537 - RNA, 19 nt, Homo sapiens
  misc_RNA (1)...(19): siRNA sense strand
uggugaagaccguggagau

SEQ ID NO: 2265538 - RNA, 19 nt, Homo sapiens
  misc_RNA (1)...(19): siRNA sense strand
agaacaaccuggcugccua

SEQ ID NO: 2265539 - RNA, 19 nt, Homo sapiens
  misc_RNA (1)...(19): siRNA sense strand
ccuauagacaggaagcaga

SEQ ID NO: 2265540 - RNA, 19 nt, Homo sapiens
  misc_RNA (1)...(19): siRNA sense strand
agauccgguucuugaggaa

SEQ ID NO: 2265541 - RNA, 19 nt, Homo sapiens
  misc_RNA (1)...(19): siRNA sense strand
gaggagaaccggaucacca

SEQ ID NO: 2265542 - RNA, 19 nt, Homo sapiens
  misc_RNA (1)...(19): siRNA sense strand
ggcagagccucaaggacga

SEQ ID NO: 2265543 - RNA, 19 nt, Homo sapiens
  misc_RNA (1)...(19): siRNA sense strand
ccaccaagcuggcagacgu

SEQ ID NO: 2265544 - RNA, 19 nt, Homo sapiens
  misc_RNA (1)...(19): siRNA sense strand
gcaacaugcaugaagccga

SEQ ID NO: 2265545 - RNA, 19 nt, Homo sapiens
  misc_RNA (1)...(19): siRNA sense strand
gcaugaagccgaagagugg

SEQ ID NO: 2265546 - RNA, 19 nt, Homo sapiens
  misc_RNA (1)...(19): siRNA sense strand
uggagaugcgggauggaga

SEQ ID NO: 2265547 - RNA, 19 nt, Homo sapiens
  misc_RNA (1)...(19): siRNA sense strand
gcucauacccguugggcaa

SEQ ID NO: 2265548 - RNA, 19 nt, Homo sapiens
  misc_RNA (1)...(19): siRNA sense strand
ucuuauugcuuguggaaca

SEQ ID NO: 2265549 - RNA, 19 nt, Homo sapiens
  misc_RNA (1)...(19): siRNA sense strand
ggcaaagacaagaaaggaa

SEQ ID NO: 2265550 - RNA, 19 nt, Homo sapiens
  misc_RNA (1)...(19): siRNA sense strand
gugacuuccuggacagaaa

SEQ ID NO: 2265551 - RNA, 19 nt, Homo sapiens
  misc_RNA (1)...(19): siRNA sense strand
ugauggaggcaaugauaaa

SEQ ID NO: 2265552 - RNA, 19 nt, Homo sapiens
  misc_RNA (1)...(19): siRNA sense strand
ucauuuaugcagaaggaaa

SEQ ID NO: 2265553 - RNA, 19 nt, Homo sapiens
  misc_RNA (1)...(19): siRNA sense strand
gugaacacaaugagaggaa

SEQ ID NO: 2265554 - RNA, 19 nt, Homo sapiens
  misc_RNA (1)...(19): siRNA sense strand
ugaaacagacacagagaca

SEQ ID NO: 2265555 - RNA, 19 nt, Homo sapiens
  misc_RNA (1)...(19): siRNA sense strand
auguaugacaaucgggaaa

SEQ ID NO: 2265556 - RNA, 19 nt, Homo sapiens
  misc_RNA (1)...(19): siRNA sense strand
guuugaaggaucacauaaa

SEQ ID NO: 2265557 - RNA, 19 nt, Homo sapiens
  misc_RNA (1)...(19): siRNA sense strand
agucaagauaccagcuuua

SEQ ID NO: 2265558 - RNA, 19 nt, Homo sapiens
  misc_RNA (1)...(19): siRNA sense strand
agaaagacgcaaagagauc

SEQ ID NO: 2265559 - RNA, 19 nt, Homo sapiens
  misc_RNA (1)...(19): siRNA sense strand
gcacugaaaaucaaagaaa

SEQ ID NO: 2265560 - RNA, 19 nt, Homo sapiens
  misc_RNA (1)...(19): siRNA sense strand
cuaccuugguggagagagu

SEQ ID NO: 2265561 - RNA, 19 nt, Homo sapiens
  misc_RNA (1)...(19): siRNA sense strand
ggaugacgaaauucagaaa

SEQ ID NO: 2265562 - RNA, 19 nt, Homo sapiens
  misc_RNA (1)...(19): siRNA sense strand
uuaaggaaguacugagcau

SEQ ID NO: 2265563 - RNA, 19 nt, Homo sapiens
  misc_RNA (1)...(19): siRNA sense strand
agacuggaguacagaggau

SEQ ID NO: 2265564 - RNA, 19 nt, Homo sapiens
  misc_RNA (1)...(19): siRNA sense strand
gagaaauccuggagacccu

SEQ ID NO: 2265565 - RNA, 19 nt, Homo sapiens
  misc_RNA (1)...(19): siRNA sense strand
aaguuaaggcacuggauga

SEQ ID NO: 2265566 - RNA, 19 nt, Homo sapiens
  misc_RNA (1)...(19): siRNA sense strand
caagaaaggaagcugcaau

SEQ ID NO: 2265567 - RNA, 19 nt, Homo sapiens
  misc_RNA (1)...(19): siRNA sense strand
ugaugauguugcagcagua

SEQ ID NO: 2265568 - RNA, 19 nt, Homo sapiens
  misc_RNA (1)...(19): siRNA sense strand
acaaugagaggaagaguca

SEQ ID NO: 2265569 - RNA, 19 nt, Homo sapiens
  misc_RNA (1)...(19): siRNA sense strand
caugcaagaaagacgcaaa

SEQ ID NO: 2265570 - RNA, 19 nt, Homo sapiens
  misc_RNA (1)...(19): siRNA sense strand
ccauaucacgggagacaga

SEQ ID NO: 2265571 - RNA, 19 nt, Homo sapiens
  misc_RNA (1)...(19): siRNA sense strand
acacagagacaauugccaa

SEQ ID NO: 2265572 - RNA, 19 nt, Homo sapiens
  misc_RNA (1)...(19): siRNA sense strand
uguacggagugaacauaaa

SEQ ID NO: 2265573 - RNA, 19 nt, Homo sapiens
  misc_RNA (1)...(19): siRNA sense strand
cuuucuauccaucgaauua

SEQ ID NO: 2265574 - RNA, 19 nt, Homo sapiens
  misc_RNA (1)...(19): siRNA sense strand
cgggcaagcaguuggcaca

SEQ ID NO: 2265575 - RNA, 19 nt, Homo sapiens
  misc_RNA (1)...(19): siRNA sense strand
gcaaagacaagaaaggaag

SEQ ID NO: 2265576 - RNA, 19 nt, Homo sapiens
  misc_RNA (1)...(19): siRNA sense strand
cagcagaucaugaagggca

SEQ ID NO: 2265577 - RNA, 19 nt, Homo sapiens
  misc_RNA (1)...(19): siRNA sense strand
cugauuugauuaaggaagu

SEQ ID NO: 2265578 - RNA, 19 nt, Homo sapiens
  misc_RNA (1)...(19): siRNA sense strand
uagucaaucaggugagaca

SEQ ID NO: 2265579 - RNA, 19 nt, Homo sapiens
  misc_RNA (1)...(19): siRNA sense strand
cuuuacaguugcuggcuuu

SEQ ID NO: 2265580 - RNA, 19 nt, Homo sapiens
  misc_RNA (1)...(19): siRNA sense strand
gguuugaaggaucacauaa

SEQ ID NO: 2265581 - RNA, 19 nt, Homo sapiens
  misc_RNA (1)...(19): siRNA sense strand
agcagaucaugaagggcaa

SEQ ID NO: 2265582 - RNA, 19 nt, Homo sapiens
  misc_RNA (1)...(19): siRNA sense strand
ugguggaacuagcaaguga

SEQ ID NO: 2265583 - RNA, 19 nt, Homo sapiens
  misc_RNA (1)...(19): siRNA sense strand
guugauugguguacggagu

SEQ ID NO: 2265584 - RNA, 19 nt, Homo sapiens
  misc_RNA (1)...(19): siRNA sense strand
gauaaggaggauacugaga

SEQ ID NO: 2265585 - RNA, 19 nt, Homo sapiens
  misc_RNA (1)...(19): siRNA sense strand
acucuacagaacaggcaaa

SEQ ID NO: 2265586 - RNA, 19 nt, Homo sapiens
  misc_RNA (1)...(19): siRNA sense strand
gcauggaugacgaaauuca

SEQ ID NO: 2265587 - RNA, 19 nt, Homo sapiens
  misc_RNA (1)...(19): siRNA sense strand
gauaaagauugggaagcca

SEQ ID NO: 2265588 - RNA, 19 nt, Homo sapiens
  misc_RNA (1)...(19): siRNA sense strand
agcaacaagauauggauuu

SEQ ID NO: 2265589 - RNA, 19 nt, Homo sapiens
  misc_RNA (1)...(19): siRNA sense strand
augacgaaauucagaaacu

SEQ ID NO: 2265590 - RNA, 19 nt, Homo sapiens
  misc_RNA (1)...(19): siRNA sense strand
agaaggaaauauuugagca

SEQ ID NO: 2265591 - RNA, 19 nt, Homo sapiens
  misc_RNA (1)...(19): siRNA sense strand
ccuuaugaugugugaugau

SEQ ID NO: 2265592 - RNA, 19 nt, Homo sapiens
  misc_RNA (1)...(19): siRNA sense strand
aagaaagacgcaaagagau

SEQ ID NO: 2265593 - RNA, 19 nt, Homo sapiens
  misc_RNA (1)...(19): siRNA sense strand
acugagaccauuaagaaca

SEQ ID NO: 2265594 - RNA, 19 nt, Homo sapiens
  misc_RNA (1)...(19): siRNA sense strand
cggagugaacauaaacuuu

SEQ ID NO: 2265595 - RNA, 19 nt, Homo sapiens
  misc_RNA (1)...(19): siRNA sense strand
gaacacaccaaucgcguca

SEQ ID NO: 2265596 - RNA, 19 nt, Homo sapiens
  misc_RNA (1)...(19): siRNA sense strand
ggaaauauuugagcagcca

SEQ ID NO: 2265597 - RNA, 19 nt, Homo sapiens
  misc_RNA (1)...(19): siRNA sense strand
cauaaaggagauccagaga

SEQ ID NO: 2265598 - RNA, 19 nt, Homo sapiens
  misc_RNA (1)...(19): siRNA sense strand
gcagauacuuugauggguc

SEQ ID NO: 2265599 - RNA, 19 nt, Homo sapiens
  misc_RNA (1)...(19): siRNA sense strand
aggcauccuugcuggugaa

SEQ ID NO: 2265600 - RNA, 19 nt, Homo sapiens
  misc_RNA (1)...(19): siRNA sense strand
aagaaguucacaagcaaca

SEQ ID NO: 2265601 - RNA, 19 nt, Homo sapiens
  misc_RNA (1)...(19): siRNA sense strand
guguacggagugaacauaa

SEQ ID NO: 2265602 - RNA, 19 nt, Homo sapiens
  misc_RNA (1)...(19): siRNA sense strand
aggaggauacugagaccau

SEQ ID NO: 2265603 - RNA, 19 nt, Homo sapiens
  misc_RNA (1)...(19): siRNA sense strand
gggugaaaacgcagcagaa

SEQ ID NO: 2265604 - RNA, 19 nt, Homo sapiens
  misc_RNA (1)...(19): siRNA sense strand
gugaaaacgcagcagaaau

SEQ ID NO: 2265605 - RNA, 19 nt, Homo sapiens
  misc_RNA (1)...(19): siRNA sense strand
gggugaaaacgcagcagaa

SEQ ID NO: 2265606 - RNA, 19 nt, Homo sapiens
  misc_RNA (1)...(19): siRNA sense strand
gugaaaacgcagcagaaau

SEQ ID NO: 2265607 - RNA, 19 nt, Homo sapiens
  misc_RNA (1)...(19): siRNA sense strand
gggugaaaacgcagcagaa

SEQ ID NO: 2265608 - RNA, 19 nt, Homo sapiens
  misc_RNA (1)...(19): siRNA sense strand
gugaaaacgcagcagaaau

SEQ ID NO: 2265609 - RNA, 19 nt, Homo sapiens
  misc_RNA (1)...(19): siRNA sense strand
gggugaaaacgcagcagaa

SEQ ID NO: 2265610 - RNA, 19 nt, Homo sapiens
  misc_RNA (1)...(19): siRNA sense strand
gugaaaacgcagcagaaau

SEQ ID NO: 2265611 - RNA, 19 nt, Homo sapiens
  misc_RNA (1)...(19): siRNA sense strand
uggagaaguugcuggacca

SEQ ID NO: 2265612 - RNA, 19 nt, Homo sapiens
  misc_RNA (1)...(19): siRNA sense strand
ccaagaucucgguggcaga

SEQ ID NO: 2265613 - RNA, 19 nt, Homo sapiens
  misc_RNA (1)...(19): siRNA sense strand
ugugaaaaguagaggaauu

SEQ ID NO: 2265614 - RNA, 19 nt, Homo sapiens
  misc_RNA (1)...(19): siRNA sense strand
cugaugaaagagaagaaau

SEQ ID NO: 2265615 - RNA, 19 nt, Homo sapiens
  misc_RNA (1)...(19): siRNA sense strand
gggaggaauuagaaaacuu

SEQ ID NO: 2265616 - RNA, 19 nt, Homo sapiens
  misc_RNA (1)...(19): siRNA sense strand
cggaagaagugcccgucca

SEQ ID NO: 2265617 - RNA, 19 nt, Homo sapiens
  misc_RNA (1)...(19): siRNA sense strand
guauucggucauugugaaa

SEQ ID NO: 2265618 - RNA, 19 nt, Homo sapiens
  misc_RNA (1)...(19): siRNA sense strand
ggcaaagcucagaggaaaa

SEQ ID NO: 2265619 - RNA, 19 nt, Homo sapiens
  misc_RNA (1)...(19): siRNA sense strand
ugaaacucuacgaggauaa

SEQ ID NO: 2265620 - RNA, 19 nt, Homo sapiens
  misc_RNA (1)...(19): siRNA sense strand
aguaccaccuggaggacaa

SEQ ID NO: 2265621 - RNA, 19 nt, Homo sapiens
  misc_RNA (1)...(19): siRNA sense strand
ugaacgaccuggagcgcau

SEQ ID NO: 2265622 - RNA, 19 nt, Homo sapiens
  misc_RNA (1)...(19): siRNA sense strand
ucggcaaagcucagaggaa

SEQ ID NO: 2265623 - RNA, 19 nt, Homo sapiens
  misc_RNA (1)...(19): siRNA sense strand
ggcagaggucagagcgcaa

SEQ ID NO: 2265624 - RNA, 19 nt, Homo sapiens
  misc_RNA (1)...(19): siRNA sense strand
uugaagaccugaaccgcaa

SEQ ID NO: 2265625 - RNA, 19 nt, Homo sapiens
  misc_RNA (1)...(19): siRNA sense strand
ccuucaagaugguggacgu

SEQ ID NO: 2265626 - RNA, 19 nt, Homo sapiens
  misc_RNA (1)...(19): siRNA sense strand
acgucaucauacagaacaa

SEQ ID NO: 2265627 - RNA, 19 nt, Homo sapiens
  misc_RNA (1)...(19): siRNA sense strand
guacauuggccuuugcuga

SEQ ID NO: 2265628 - RNA, 19 nt, Homo sapiens
  misc_RNA (1)...(19): siRNA sense strand
gcugagagcaagggcgaga

SEQ ID NO: 2265629 - RNA, 19 nt, Homo sapiens
  misc_RNA (1)...(19): siRNA sense strand
gcgaguaccaccuggagga

SEQ ID NO: 2265630 - RNA, 19 nt, Homo sapiens
  misc_RNA (1)...(19): siRNA sense strand
agacaagucggauggcaga

SEQ ID NO: 2265631 - RNA, 19 nt, Homo sapiens
  misc_RNA (1)...(19): siRNA sense strand
ggcaagagcaccaucguca

SEQ ID NO: 2265632 - RNA, 19 nt, Homo sapiens
  misc_RNA (1)...(19): siRNA sense strand
gggacaugaccacgggcau

SEQ ID NO: 2265633 - RNA, 19 nt, Homo sapiens
  misc_RNA (1)...(19): siRNA sense strand
ccugaaacucuacgaggau

SEQ ID NO: 2265634 - RNA, 19 nt, Homo sapiens
  misc_RNA (1)...(19): siRNA sense strand
cagaacaaucucaaguaca

SEQ ID NO: 2265635 - RNA, 19 nt, Homo sapiens
  misc_RNA (1)...(19): siRNA sense strand
ucgucaaacagaugaagau

SEQ ID NO: 2265636 - RNA, 19 nt, Homo sapiens
  misc_RNA (1)...(19): siRNA sense strand
agacuguauuugugggaca

SEQ ID NO: 2265637 - RNA, 19 nt, Homo sapiens
  misc_RNA (1)...(19): siRNA sense strand
ccaugaagucugagcgugu

SEQ ID NO: 2265638 - RNA, 19 nt, Homo sapiens
  misc_RNA (1)...(19): siRNA sense strand
ucaaaucccgugagggcaa

SEQ ID NO: 2265639 - RNA, 19 nt, Homo sapiens
  misc_RNA (1)...(19): siRNA sense strand
ccaacaaggugcacgccau

SEQ ID NO: 2265640 - RNA, 19 nt, Homo sapiens
  misc_RNA (1)...(19): siRNA sense strand
acgugugccuugugggaca

SEQ ID NO: 2265641 - RNA, 19 nt, Homo sapiens
  misc_RNA (1)...(19): siRNA sense strand
agucugagcgugugggcau

SEQ ID NO: 2265642 - RNA, 19 nt, Homo sapiens
  misc_RNA (1)...(19): siRNA sense strand
aagcugaucgugugggaca

SEQ ID NO: 2265643 - RNA, 19 nt, Homo sapiens
  misc_RNA (1)...(19): siRNA sense strand
agauggagcaacugcguca

SEQ ID NO: 2265644 - RNA, 19 nt, Homo sapiens
  misc_RNA (1)...(19): siRNA sense strand
acgaacaagcacugguuaa

SEQ ID NO: 2265645 - RNA, 19 nt, Homo sapiens
  misc_RNA (1)...(19): siRNA sense strand
aguaguaaguccuggcaga

SEQ ID NO: 2265646 - RNA, 19 nt, Homo sapiens
  misc_RNA (1)...(19): siRNA sense strand
gcagaagauccaagaacca

SEQ ID NO: 2265647 - RNA, 19 nt, Homo sapiens
  misc_RNA (1)...(19): siRNA sense strand
ggagaaggccguaacguca

SEQ ID NO: 2265648 - RNA, 19 nt, Homo sapiens
  misc_RNA (1)...(19): siRNA sense strand
ccuuggacuuucuggacua

SEQ ID NO: 2265649 - RNA, 19 nt, Homo sapiens
  misc_RNA (1)...(19): siRNA sense strand
agacacagauggaugggau

SEQ ID NO: 2265650 - RNA, 19 nt, Homo sapiens
  misc_RNA (1)...(19): siRNA sense strand
gaucagauguccuggugga

SEQ ID NO: 2265651 - RNA, 19 nt, Homo sapiens
  misc_RNA (1)...(19): siRNA sense strand
acccagagcuuuuaggaaa

SEQ ID NO: 2265652 - RNA, 19 nt, Homo sapiens
  misc_RNA (1)...(19): siRNA sense strand
ccucaguaccagaaggcuu

SEQ ID NO: 2265653 - RNA, 19 nt, Homo sapiens
  misc_RNA (1)...(19): siRNA sense strand
gaucacuaacauugcuaaa

SEQ ID NO: 2265654 - RNA, 19 nt, Homo sapiens
  misc_RNA (1)...(19): siRNA sense strand
caugacaccgcuaaagaaa

SEQ ID NO: 2265655 - RNA, 19 nt, Homo sapiens
  misc_RNA (1)...(19): siRNA sense strand
cccagaugcagguggacua

SEQ ID NO: 2265656 - RNA, 19 nt, Homo sapiens
  misc_RNA (1)...(19): siRNA sense strand
guguaugugaagaugcuua

SEQ ID NO: 2265657 - RNA, 19 nt, Homo sapiens
  misc_RNA (1)...(19): siRNA sense strand
ugccaauagacaagagaca

SEQ ID NO: 2265658 - RNA, 19 nt, Homo sapiens
  misc_RNA (1)...(19): siRNA sense strand
ccagcaauucucagaucaa

SEQ ID NO: 2265659 - RNA, 19 nt, Homo sapiens
  misc_RNA (1)...(19): siRNA sense strand
agaagauccaagaaccaaa

SEQ ID NO: 2265660 - RNA, 19 nt, Homo sapiens
  misc_RNA (1)...(19): siRNA sense strand
cuucuauaccucagacaau

SEQ ID NO: 2265661 - RNA, 19 nt, Homo sapiens
  misc_RNA (1)...(19): siRNA sense strand
aguaaguccuggcagaaga

SEQ ID NO: 2265662 - RNA, 19 nt, Homo sapiens
  misc_RNA (1)...(19): siRNA sense strand
aaccauagacccagagcuu

SEQ ID NO: 2265663 - RNA, 19 nt, Homo sapiens
  misc_RNA (1)...(19): siRNA sense strand
ccauagacccagagcuuuu

SEQ ID NO: 2265664 - RNA, 19 nt, Homo sapiens
  misc_RNA (1)...(19): siRNA sense strand
agacaauggcuaucacaca

SEQ ID NO: 2265665 - RNA, 19 nt, Homo sapiens
  misc_RNA (1)...(19): siRNA sense strand
gcaccaagaaacaagaacu

SEQ ID NO: 2265666 - RNA, 19 nt, Homo sapiens
  misc_RNA (1)...(19): siRNA sense strand
augucagcauuguggaauu

SEQ ID NO: 2265667 - RNA, 19 nt, Homo sapiens
  misc_RNA (1)...(19): siRNA sense strand
caccaagaaacaagaacuu

SEQ ID NO: 2265668 - RNA, 19 nt, Homo sapiens
  misc_RNA (1)...(19): siRNA sense strand
gcuaaugucuccuuggacu

SEQ ID NO: 2265669 - RNA, 19 nt, Homo sapiens
  misc_RNA (1)...(19): siRNA sense strand
ccagaaugucuuugcacca

SEQ ID NO: 2265670 - RNA, 19 nt, Homo sapiens
  misc_RNA (1)...(19): siRNA sense strand
aggaaaguacccacauaau

SEQ ID NO: 2265671 - RNA, 19 nt, Homo sapiens
  misc_RNA (1)...(19): siRNA sense strand
gggaacugcaguaguaagu

SEQ ID NO: 2265672 - RNA, 19 nt, Homo sapiens
  misc_RNA (1)...(19): siRNA sense strand
aguccaacuuugagcccuu

SEQ ID NO: 2265673 - RNA, 19 nt, Homo sapiens
  misc_RNA (1)...(19): siRNA sense strand
gcaugacaccgcuaaagaa

SEQ ID NO: 2265674 - RNA, 19 nt, Homo sapiens
  misc_RNA (1)...(19): siRNA sense strand
agacuguguaugugaagau

SEQ ID NO: 2265675 - RNA, 19 nt, Homo sapiens
  misc_RNA (1)...(19): siRNA sense strand
agaaacuggucaagaggcu

SEQ ID NO: 2265676 - RNA, 19 nt, Homo sapiens
  misc_RNA (1)...(19): siRNA sense strand
ugcugaaacucaagagaaa

SEQ ID NO: 2265677 - RNA, 19 nt, Homo sapiens
  misc_RNA (1)...(19): siRNA sense strand
aaggaagaauggagccaaa

SEQ ID NO: 2265678 - RNA, 19 nt, Homo sapiens
  misc_RNA (1)...(19): siRNA sense strand
ccauaauagacgagaagga

SEQ ID NO: 2265679 - RNA, 19 nt, Homo sapiens
  misc_RNA (1)...(19): siRNA sense strand
uugcaaaacugaagaagaa

SEQ ID NO: 2265680 - RNA, 19 nt, Homo sapiens
  misc_RNA (1)...(19): siRNA sense strand
ccuuaaagaaugcaggaau

SEQ ID NO: 2265681 - RNA, 19 nt, Homo sapiens
  misc_RNA (1)...(19): siRNA sense strand
cgaaacuugcagaagauaa

SEQ ID NO: 2265682 - RNA, 19 nt, Homo sapiens
  misc_RNA (1)...(19): siRNA sense strand
aaaugaagaaccagaguau

SEQ ID NO: 2265683 - RNA, 19 nt, Homo sapiens
  misc_RNA (1)...(19): siRNA sense strand
cccaagaggaggagaacau

SEQ ID NO: 2265684 - RNA, 19 nt, Homo sapiens
  misc_RNA (1)...(19): siRNA sense strand
augaagaaccagaguauga

SEQ ID NO: 2265685 - RNA, 19 nt, Homo sapiens
  misc_RNA (1)...(19): siRNA sense strand
cuucgaaguccgggagaaa

SEQ ID NO: 2265686 - RNA, 19 nt, Homo sapiens
  misc_RNA (1)...(19): siRNA sense strand
ggaaaauggaacaagaauu

SEQ ID NO: 2265687 - RNA, 19 nt, Homo sapiens
  misc_RNA (1)...(19): siRNA sense strand
ggaaugaacagauacggaa

SEQ ID NO: 2265688 - RNA, 19 nt, Homo sapiens
  misc_RNA (1)...(19): siRNA sense strand
cuaaagaagcugaaggaag

SEQ ID NO: 2265689 - RNA, 19 nt, Homo sapiens
  misc_RNA (1)...(19): siRNA sense strand
ccauaaagcagaugcagca

SEQ ID NO: 2265690 - RNA, 19 nt, Homo sapiens
  misc_RNA (1)...(19): siRNA sense strand
gcaaaacugaagaagaaaa

SEQ ID NO: 2265691 - RNA, 19 nt, Homo sapiens
  misc_RNA (1)...(19): siRNA sense strand
uaauagacgagaaggaaca

SEQ ID NO: 2265692 - RNA, 19 nt, Homo sapiens
  misc_RNA (1)...(19): siRNA sense strand
gagcaagggaugagacaac

SEQ ID NO: 2265693 - RNA, 19 nt, Homo sapiens
  misc_RNA (1)...(19): siRNA sense strand
cagccauaauagacgagaa

SEQ ID NO: 2265694 - RNA, 19 nt, Homo sapiens
  misc_RNA (1)...(19): siRNA sense strand
cagcccaguuacaggaaau

SEQ ID NO: 2265695 - RNA, 19 nt, Homo sapiens
  misc_RNA (1)...(19): siRNA sense strand
aguuacaggaaaugaagaa

SEQ ID NO: 2265696 - RNA, 19 nt, Homo sapiens
  misc_RNA (1)...(19): siRNA sense strand
cugaaacucaagagaaaga

SEQ ID NO: 2265697 - RNA, 19 nt, Homo sapiens
  misc_RNA (1)...(19): siRNA sense strand
gaggaggugcggaagcaaa

SEQ ID NO: 2265698 - RNA, 19 nt, Homo sapiens
  misc_RNA (1)...(19): siRNA sense strand
aaagagaaauugugagcgu

SEQ ID NO: 2265699 - RNA, 19 nt, Homo sapiens
  misc_RNA (1)...(19): siRNA sense strand
gcagcaggaacuaaguaaa

SEQ ID NO: 2265700 - RNA, 19 nt, Homo sapiens
  misc_RNA (1)...(19): siRNA sense strand
ggcacgaaccagagaacuu

SEQ ID NO: 2265701 - RNA, 19 nt, Homo sapiens
  misc_RNA (1)...(19): siRNA sense strand
agaacaugcucaaggaaac

SEQ ID NO: 2265702 - RNA, 19 nt, Homo sapiens
  misc_RNA (1)...(19): siRNA sense strand
cagcaggaacuaaguaaaa

SEQ ID NO: 2265703 - RNA, 19 nt, Homo sapiens
  misc_RNA (1)...(19): siRNA sense strand
aaagaaugcaggaaugaau

SEQ ID NO: 2265704 - RNA, 19 nt, Homo sapiens
  misc_RNA (1)...(19): siRNA sense strand
ggucagaaaagauggauca

SEQ ID NO: 2265705 - RNA, 19 nt, Homo sapiens
  misc_RNA (1)...(19): siRNA sense strand
aagagaaagaagacguuau

SEQ ID NO: 2265706 - RNA, 19 nt, Homo sapiens
  misc_RNA (1)...(19): siRNA sense strand
agaaggagaaacaggacuu

SEQ ID NO: 2265707 - RNA, 19 nt, Homo sapiens
  misc_RNA (1)...(19): siRNA sense strand
aagaagaaagucuagggaa

SEQ ID NO: 2265708 - RNA, 19 nt, Homo sapiens
  misc_RNA (1)...(19): siRNA sense strand
agaaacaggacuuggagca

SEQ ID NO: 2265709 - RNA, 19 nt, Homo sapiens
  misc_RNA (1)...(19): siRNA sense strand
gcggaaauuucaagagcag

SEQ ID NO: 2265710 - RNA, 19 nt, Homo sapiens
  misc_RNA (1)...(19): siRNA sense strand
cuggaagagcagagagauc

SEQ ID NO: 2265711 - RNA, 19 nt, Homo sapiens
  misc_RNA (1)...(19): siRNA sense strand
uggcagaaggacuggcuuu

SEQ ID NO: 2265712 - RNA, 19 nt, Homo sapiens
  misc_RNA (1)...(19): siRNA sense strand
aggagaagaacacgugcaa

SEQ ID NO: 2265713 - RNA, 19 nt, Homo sapiens
  misc_RNA (1)...(19): siRNA sense strand
gaaaauugcagaagagacu

SEQ ID NO: 2265714 - RNA, 19 nt, Homo sapiens
  misc_RNA (1)...(19): siRNA sense strand
augcugaacagguccgaaa

SEQ ID NO: 2265715 - RNA, 19 nt, Homo sapiens
  misc_RNA (1)...(19): siRNA sense strand
ggagaagagacuagaacag

SEQ ID NO: 2265716 - RNA, 19 nt, Homo sapiens
  misc_RNA (1)...(19): siRNA sense strand
agaauggagccaaagagaa

SEQ ID NO: 2265717 - RNA, 19 nt, Homo sapiens
  misc_RNA (1)...(19): siRNA sense strand
gcaggaacuaaguaaaaua

SEQ ID NO: 2265718 - RNA, 19 nt, Homo sapiens
  misc_RNA (1)...(19): siRNA sense strand
ggaagagcagagagaucau

SEQ ID NO: 2265719 - RNA, 19 nt, Homo sapiens
  misc_RNA (1)...(19): siRNA sense strand
gaacagaacuuaucaggag

SEQ ID NO: 2265720 - RNA, 19 nt, Homo sapiens
  misc_RNA (1)...(19): siRNA sense strand
agacaacuggagcaagaaa

SEQ ID NO: 2265721 - RNA, 19 nt, Homo sapiens
  misc_RNA (1)...(19): siRNA sense strand
uuuccaaaggagagaugaa

SEQ ID NO: 2265722 - RNA, 19 nt, Homo sapiens
  misc_RNA (1)...(19): siRNA sense strand
gaagaauugcagagacacu

SEQ ID NO: 2265723 - RNA, 19 nt, Homo sapiens
  misc_RNA (1)...(19): siRNA sense strand
acgagaaggaacagaaucu

SEQ ID NO: 2265724 - RNA, 19 nt, Homo sapiens
  misc_RNA (1)...(19): siRNA sense strand
agauaaaagagaagcuuga

SEQ ID NO: 2265725 - RNA, 19 nt, Homo sapiens
  misc_RNA (1)...(19): siRNA sense strand
ccaaaauggcagaaggacu

SEQ ID NO: 2265726 - RNA, 19 nt, Homo sapiens
  misc_RNA (1)...(19): siRNA sense strand
agaagaaaauugcagaaga

SEQ ID NO: 2265727 - RNA, 19 nt, Homo sapiens
  misc_RNA (1)...(19): siRNA sense strand
cgcuggaagagcagagaga

SEQ ID NO: 2265728 - RNA, 19 nt, Homo sapiens
  misc_RNA (1)...(19): siRNA sense strand
cugcugaaacucaagagaa

SEQ ID NO: 2265729 - RNA, 19 nt, Homo sapiens
  misc_RNA (1)...(19): siRNA sense strand
gcucaaggaaacucuggaa

SEQ ID NO: 2265730 - RNA, 19 nt, Homo sapiens
  misc_RNA (1)...(19): siRNA sense strand
uggaugaauuagagggguu

SEQ ID NO: 2265731 - RNA, 19 nt, Homo sapiens
  misc_RNA (1)...(19): siRNA sense strand
gcaaaaggucacugcugaa

SEQ ID NO: 2265732 - RNA, 19 nt, Homo sapiens
  misc_RNA (1)...(19): siRNA sense strand
gcagcuaaccugacagcca

SEQ ID NO: 2265733 - RNA, 19 nt, Homo sapiens
  misc_RNA (1)...(19): siRNA sense strand
aagccagaagcuagaagaa

SEQ ID NO: 2265734 - RNA, 19 nt, Homo sapiens
  misc_RNA (1)...(19): siRNA sense strand
uggagaagaucgugcggau

SEQ ID NO: 2265735 - RNA, 19 nt, Homo sapiens
  misc_RNA (1)...(19): siRNA sense strand
agaaaguggagcagaagau

SEQ ID NO: 2265736 - RNA, 19 nt, Homo sapiens
  misc_RNA (1)...(19): siRNA sense strand
caaugagagagucgggaau

SEQ ID NO: 2265737 - RNA, 19 nt, Homo sapiens
  misc_RNA (1)...(19): siRNA sense strand
agacaauggcugaccggau

SEQ ID NO: 2265738 - RNA, 19 nt, Homo sapiens
  misc_RNA (1)...(19): siRNA sense strand
gaugcagagaagagaggau

SEQ ID NO: 2265739 - RNA, 19 nt, Homo sapiens
  misc_RNA (1)...(19): siRNA sense strand
acaaugagagagucgggaa

SEQ ID NO: 2265740 - RNA, 19 nt, Homo sapiens
  misc_RNA (1)...(19): siRNA sense strand
acagguaaugugaagacaa

SEQ ID NO: 2265741 - RNA, 19 nt, Homo sapiens
  misc_RNA (1)...(19): siRNA sense strand
agaagauugcuaaugacaa

SEQ ID NO: 2265742 - RNA, 19 nt, Homo sapiens
  misc_RNA (1)...(19): siRNA sense strand
ccugggagugggagcauau

SEQ ID NO: 2265743 - RNA, 19 nt, Homo sapiens
  misc_RNA (1)...(19): siRNA sense strand
ccggagcaguggaagcaga

SEQ ID NO: 2265744 - RNA, 19 nt, Homo sapiens
  misc_RNA (1)...(19): siRNA sense strand
ugccaguagugaagaaagu

SEQ ID NO: 2265745 - RNA, 19 nt, Homo sapiens
  misc_RNA (1)...(19): siRNA sense strand
ggguaggaggugugcaauc

SEQ ID NO: 2265746 - RNA, 19 nt, Homo sapiens
  misc_RNA (1)...(19): siRNA sense strand
cggaacaguggaaggaaau

SEQ ID NO: 2265747 - RNA, 19 nt, Homo sapiens
  misc_RNA (1)...(19): siRNA sense strand
ggaugaagccaaaagggua

SEQ ID NO: 2265748 - RNA, 19 nt, Homo sapiens
  misc_RNA (1)...(19): siRNA sense strand
gggcuuauauggugagcgu

SEQ ID NO: 2265749 - RNA, 19 nt, Homo sapiens
  misc_RNA (1)...(19): siRNA sense strand
guggaaggaaauagcaaca

SEQ ID NO: 2265750 - RNA, 19 nt, Homo sapiens
  misc_RNA (1)...(19): siRNA sense strand
ggaaauagcaacaguggug

SEQ ID NO: 2265751 - RNA, 19 nt, Homo sapiens
  misc_RNA (1)...(19): siRNA sense strand
gcuuauauggugagcgugu

SEQ ID NO: 2265752 - RNA, 19 nt, Homo sapiens
  misc_RNA (1)...(19): siRNA sense strand
ccuccagcaacgugggcua

SEQ ID NO: 2265753 - RNA, 19 nt, Homo sapiens
  misc_RNA (1)...(19): siRNA sense strand
cagaacuagcccuggguga

SEQ ID NO: 2265754 - RNA, 19 nt, Homo sapiens
  misc_RNA (1)...(19): siRNA sense strand
ccuuuaagagggacaccaa

SEQ ID NO: 2265755 - RNA, 19 nt, Homo sapiens
  misc_RNA (1)...(19): siRNA sense strand
ggaugauaauggaaagccu

SEQ ID NO: 2265756 - RNA, 19 nt, Homo sapiens
  misc_RNA (1)...(19): siRNA sense strand
caguggaaggaaauagcaa

SEQ ID NO: 2265757 - RNA, 19 nt, Homo sapiens
  misc_RNA (1)...(19): siRNA sense strand
gcaacaguggugaagaaaa

SEQ ID NO: 2265758 - RNA, 19 nt, Homo sapiens
  misc_RNA (1)...(19): siRNA sense strand
aaauagcaacaguggugaa

SEQ ID NO: 2265759 - RNA, 19 nt, Homo sapiens
  misc_RNA (1)...(19): siRNA sense strand
cugaacagguggagcggcu

SEQ ID NO: 2265760 - RNA, 19 nt, Homo sapiens
  misc_RNA (1)...(19): siRNA sense strand
agguggagcggcugaucaa

SEQ ID NO: 2265761 - RNA, 19 nt, Homo sapiens
  misc_RNA (1)...(19): siRNA sense strand
augauaauggaaagccuua

SEQ ID NO: 2265762 - RNA, 19 nt, Homo sapiens
  misc_RNA (1)...(19): siRNA sense strand
agccaaaaggguagaguca

SEQ ID NO: 2265763 - RNA, 19 nt, Homo sapiens
  misc_RNA (1)...(19): siRNA sense strand
aggcggagaucucggguga

SEQ ID NO: 2265764 - RNA, 19 nt, Homo sapiens
  misc_RNA (1)...(19): siRNA sense strand
agcugaagaucaugaccaa

SEQ ID NO: 2265765 - RNA, 19 nt, Homo sapiens
  misc_RNA (1)...(19): siRNA sense strand
ccgagguggagguggacau

SEQ ID NO: 2265766 - RNA, 19 nt, Homo sapiens
  misc_RNA (1)...(19): siRNA sense strand
cuucaggcacgcuggagaa

SEQ ID NO: 2265767 - RNA, 19 nt, Homo sapiens
  misc_RNA (1)...(19): siRNA sense strand
gaaaugugcucaagggcug

SEQ ID NO: 2265768 - RNA, 19 nt, Homo sapiens
  misc_RNA (1)...(19): siRNA sense strand
aggagaacugucagaauga

SEQ ID NO: 2265769 - RNA, 19 nt, Homo sapiens
  misc_RNA (1)...(19): siRNA sense strand
ccuccuuaaaguugccaua

SEQ ID NO: 2265770 - RNA, 19 nt, Homo sapiens
  misc_RNA (1)...(19): siRNA sense strand
aauuuggacaucaggagaa

SEQ ID NO: 2265771 - RNA, 19 nt, Homo sapiens
  misc_RNA (1)...(19): siRNA sense strand
acugaaugcacuacaggaa

SEQ ID NO: 2265772 - RNA, 19 nt, Homo sapiens
  misc_RNA (1)...(19): siRNA sense strand
acaggaaccaggagagaac

SEQ ID NO: 2265773 - RNA, 19 nt, Homo sapiens
  misc_RNA (1)...(19): siRNA sense strand
caagagaagucgaagaugg

SEQ ID NO: 2265774 - RNA, 19 nt, Homo sapiens
  misc_RNA (1)...(19): siRNA sense strand
agauccaacccaagggcaa

SEQ ID NO: 2265775 - RNA, 19 nt, Homo sapiens
  misc_RNA (1)...(19): siRNA sense strand
ccaaguuccucaucgacaa

SEQ ID NO: 2265776 - RNA, 19 nt, Homo sapiens
  misc_RNA (1)...(19): siRNA sense strand
ccgcuguggaaguggauga

SEQ ID NO: 2265777 - RNA, 19 nt, Homo sapiens
  misc_RNA (1)...(19): siRNA sense strand
gcugcguggugaagcgcua

SEQ ID NO: 2265778 - RNA, 19 nt, Homo sapiens
  misc_RNA (1)...(19): siRNA sense strand
ccaaggacaucgacgggca

SEQ ID NO: 2265779 - RNA, 19 nt, Homo sapiens
  misc_RNA (1)...(19): siRNA sense strand
aggcaagaccgaaguaaac

SEQ ID NO: 2265780 - RNA, 19 nt, Homo sapiens
  misc_RNA (1)...(19): siRNA sense strand
cguguaaccaguucgggaa

SEQ ID NO: 2265781 - RNA, 19 nt, Homo sapiens
  misc_RNA (1)...(19): siRNA sense strand
ucgacgggcacaugguuaa

SEQ ID NO: 2265782 - RNA, 19 nt, Homo sapiens
  misc_RNA (1)...(19): siRNA sense strand
agcaggagccagggaguaa

SEQ ID NO: 2265783 - RNA, 19 nt, Homo sapiens
  misc_RNA (1)...(19): siRNA sense strand
acgucaaauucgauauguu

SEQ ID NO: 2265784 - RNA, 19 nt, Homo sapiens
  misc_RNA (1)...(19): siRNA sense strand
ggaaaugccaucaagugga

SEQ ID NO: 2265785 - RNA, 19 nt, Homo sapiens
  misc_RNA (1)...(19): siRNA sense strand
ccuaaacagagaugggaaa

SEQ ID NO: 2265786 - RNA, 19 nt, Homo sapiens
  misc_RNA (1)...(19): siRNA sense strand
aggaaauagaauugccuaa

SEQ ID NO: 2265787 - RNA, 19 nt, Homo sapiens
  misc_RNA (1)...(19): siRNA sense strand
uuugaaagugagaaggaaa

SEQ ID NO: 2265788 - RNA, 19 nt, Homo sapiens
  misc_RNA (1)...(19): siRNA sense strand
cuauggaagaugugcuuaa

SEQ ID NO: 2265789 - RNA, 19 nt, Homo sapiens
  misc_RNA (1)...(19): siRNA sense strand
acaugaaguaaaugaggua

SEQ ID NO: 2265790 - RNA, 19 nt, Homo sapiens
  misc_RNA (1)...(19): siRNA sense strand
ccuaaggaggugccagaaa

SEQ ID NO: 2265791 - RNA, 19 nt, Homo sapiens
  misc_RNA (1)...(19): siRNA sense strand
gaauacagcuccaguggga

SEQ ID NO: 2265792 - RNA, 19 nt, Homo sapiens
  misc_RNA (1)...(19): siRNA sense strand
cguccaaguuagaagagga

SEQ ID NO: 2265793 - RNA, 19 nt, Homo sapiens
  misc_RNA (1)...(19): siRNA sense strand
augaagagcuugcagguca

SEQ ID NO: 2265794 - RNA, 19 nt, Homo sapiens
  misc_RNA (1)...(19): siRNA sense strand
caacggugagaauggaaua

SEQ ID NO: 2265795 - RNA, 19 nt, Homo sapiens
  misc_RNA (1)...(19): siRNA sense strand
gacuauagagggaggcgaa

SEQ ID NO: 2265796 - RNA, 19 nt, Homo sapiens
  misc_RNA (1)...(19): siRNA sense strand
cgagauauuuccaagcaga

SEQ ID NO: 2265797 - RNA, 19 nt, Homo sapiens
  misc_RNA (1)...(19): siRNA sense strand
cuuugaagaacaugaagua

SEQ ID NO: 2265798 - RNA, 19 nt, Homo sapiens
  misc_RNA (1)...(19): siRNA sense strand
ccaaguuagaagaggaagu

SEQ ID NO: 2265799 - RNA, 19 nt, Homo sapiens
  misc_RNA (1)...(19): siRNA sense strand
gugauggacuauagaggga

SEQ ID NO: 2265800 - RNA, 19 nt, Homo sapiens
  misc_RNA (1)...(19): siRNA sense strand
ugggaaggccacuggagaa

SEQ ID NO: 2265801 - RNA, 19 nt, Homo sapiens
  misc_RNA (1)...(19): siRNA sense strand
uugaaagugagaaggaaau

SEQ ID NO: 2265802 - RNA, 19 nt, Homo sapiens
  misc_RNA (1)...(19): siRNA sense strand
ugaagagcuugcaggucaa

SEQ ID NO: 2265803 - RNA, 19 nt, Homo sapiens
  misc_RNA (1)...(19): siRNA sense strand
cagggaagaaauugguaau

SEQ ID NO: 2265804 - RNA, 19 nt, Homo sapiens
  misc_RNA (1)...(19): siRNA sense strand
aagcagaaggaaugaaguu

SEQ ID NO: 2265805 - RNA, 19 nt, Homo sapiens
  misc_RNA (1)...(19): siRNA sense strand
agugagaaggaaauagaau

SEQ ID NO: 2265806 - RNA, 19 nt, Homo sapiens
  misc_RNA (1)...(19): siRNA sense strand
cagagcaggaugugcagaa

SEQ ID NO: 2265807 - RNA, 19 nt, Homo sapiens
  misc_RNA (1)...(19): siRNA sense strand
agaaagccuuagagaagca

SEQ ID NO: 2265808 - RNA, 19 nt, Homo sapiens
  misc_RNA (1)...(19): siRNA sense strand
acagggaagaaauugguaa

SEQ ID NO: 2265809 - RNA, 19 nt, Homo sapiens
  misc_RNA (1)...(19): siRNA sense strand
guugaaacacagggaagaa

SEQ ID NO: 2265810 - RNA, 19 nt, Homo sapiens
  misc_RNA (1)...(19): siRNA sense strand
cggugagaauggaauacau

SEQ ID NO: 2265811 - RNA, 19 nt, Homo sapiens
  misc_RNA (1)...(19): siRNA sense strand
gcuacagccaggaguccaa

SEQ ID NO: 2265812 - RNA, 19 nt, Homo sapiens
  misc_RNA (1)...(19): siRNA sense strand
guccaaguuagaagaggaa

SEQ ID NO: 2265813 - RNA, 19 nt, Homo sapiens
  misc_RNA (1)...(19): siRNA sense strand
uguccacaugagaggauua

SEQ ID NO: 2265814 - RNA, 19 nt, Homo sapiens
  misc_RNA (1)...(19): siRNA sense strand
cacucaagccuguuagaau

SEQ ID NO: 2265815 - RNA, 19 nt, Homo sapiens
  misc_RNA (1)...(19): siRNA sense strand
aaacaaugaagauguggau

SEQ ID NO: 2265816 - RNA, 19 nt, Homo sapiens
  misc_RNA (1)...(19): siRNA sense strand
aguauauaacugagccaga

SEQ ID NO: 2265817 - RNA, 19 nt, Homo sapiens
  misc_RNA (1)...(19): siRNA sense strand
gggugaugccuuaauugaa

SEQ ID NO: 2265818 - RNA, 19 nt, Homo sapiens
  misc_RNA (1)...(19): siRNA sense strand
aguuagaagaggaagugga

SEQ ID NO: 2265819 - RNA, 19 nt, Homo sapiens
  misc_RNA (1)...(19): siRNA sense strand
guuagaagaggaaguggau

SEQ ID NO: 2265820 - RNA, 19 nt, Homo sapiens
  misc_RNA (1)...(19): siRNA sense strand
gcagaauccgcaacgguga

SEQ ID NO: 2265821 - RNA, 19 nt, Homo sapiens
  misc_RNA (1)...(19): siRNA sense strand
ugcagaaagccuuagagaa

SEQ ID NO: 2265822 - RNA, 19 nt, Homo sapiens
  misc_RNA (1)...(19): siRNA sense strand
uauauaacugagccagaaa

SEQ ID NO: 2265823 - RNA, 19 nt, Homo sapiens
  misc_RNA (1)...(19): siRNA sense strand
cuaugugcaauuugaagaa

SEQ ID NO: 2265824 - RNA, 19 nt, Homo sapiens
  misc_RNA (1)...(19): siRNA sense strand
cgguauucgccgacugaua

SEQ ID NO: 2265825 - RNA, 19 nt, Homo sapiens
  misc_RNA (1)...(19): siRNA sense strand
aauagaaaauccagagaca

SEQ ID NO: 2265826 - RNA, 19 nt, Homo sapiens
  misc_RNA (1)...(19): siRNA sense strand
ugucagcaauugugagcau

SEQ ID NO: 2265827 - RNA, 19 nt, Homo sapiens
  misc_RNA (1)...(19): siRNA sense strand
guauuacuauugucagcaa

SEQ ID NO: 2265828 - RNA, 19 nt, Homo sapiens
  misc_RNA (1)...(19): siRNA sense strand
ucgccgacugauaaagaaa

SEQ ID NO: 2265829 - RNA, 19 nt, Homo sapiens
  misc_RNA (1)...(19): siRNA sense strand
ggacacauaugcagccacu

SEQ ID NO: 2265830 - RNA, 19 nt, Homo sapiens
  misc_RNA (1)...(19): siRNA sense strand
caucacagacaaauggaga

SEQ ID NO: 2265831 - RNA, 19 nt, Homo sapiens
  misc_RNA (1)...(19): siRNA sense strand
caaauggagaaacgggaca

SEQ ID NO: 2265832 - RNA, 19 nt, Homo sapiens
  misc_RNA (1)...(19): siRNA sense strand
cacuauucgccgacugaua

SEQ ID NO: 2265833 - RNA, 19 nt, Homo sapiens
  misc_RNA (1)...(19): siRNA sense strand
ccggauggcagaauggaga

SEQ ID NO: 2265834 - RNA, 19 nt, Homo sapiens
  misc_RNA (1)...(19): siRNA sense strand
ccaaugaggccaagggcac

SEQ ID NO: 2265835 - RNA, 19 nt, Homo sapiens
  misc_RNA (1)...(19): siRNA sense strand
ccggauggcagaauggaga

SEQ ID NO: 2265836 - RNA, 19 nt, Homo sapiens
  misc_RNA (1)...(19): siRNA sense strand
ccaaugaggccaagggcac

SEQ ID NO: 2265837 - RNA, 19 nt, Homo sapiens
  misc_RNA (1)...(19): siRNA sense strand
cucauuaauuggugggcga

SEQ ID NO: 2265838 - RNA, 19 nt, Homo sapiens
  misc_RNA (1)...(19): siRNA sense strand
cucauuaauuggugggcga

SEQ ID NO: 2265839 - RNA, 19 nt, Homo sapiens
  misc_RNA (1)...(19): siRNA sense strand
ggaaagaagugucaccuca

SEQ ID NO: 2265840 - RNA, 19 nt, Homo sapiens
  misc_RNA (1)...(19): siRNA sense strand
cccuguuaaccaagaaaua

SEQ ID NO: 2265841 - RNA, 19 nt, Homo sapiens
  misc_RNA (1)...(19): siRNA sense strand
gcuucaaacagccgcaaaa

SEQ ID NO: 2265842 - RNA, 19 nt, Homo sapiens
  misc_RNA (1)...(19): siRNA sense strand
uggaaauuauuggagggaa

SEQ ID NO: 2265843 - RNA, 19 nt, Homo sapiens
  misc_RNA (1)...(19): siRNA sense strand
cggcagugcuggaguaccu

SEQ ID NO: 2265844 - RNA, 19 nt, Homo sapiens
  misc_RNA (1)...(19): siRNA sense strand
acaacaagaagacgcgaau

SEQ ID NO: 2265845 - RNA, 19 nt, Homo sapiens
  misc_RNA (1)...(19): siRNA sense strand
cccaagaagaccagcgcca

SEQ ID NO: 2265846 - RNA, 19 nt, Homo sapiens
  misc_RNA (1)...(19): siRNA sense strand
acgacgaggagcucaacaa

SEQ ID NO: 2265847 - RNA, 19 nt, Homo sapiens
  misc_RNA (1)...(19): siRNA sense strand
cuggaaaggacuccggaaa

SEQ ID NO: 2265848 - RNA, 19 nt, Homo sapiens
  misc_RNA (1)...(19): siRNA sense strand
cgguaaggcuggaaaggac

SEQ ID NO: 2265849 - RNA, 19 nt, Homo sapiens
  misc_RNA (1)...(19): siRNA sense strand
ugcuauucguggagaugaa

SEQ ID NO: 2265850 - RNA, 19 nt, Homo sapiens
  misc_RNA (1)...(19): siRNA sense strand
gauugggaagaaaggacaa

SEQ ID NO: 2265851 - RNA, 19 nt, Homo sapiens
  misc_RNA (1)...(19): siRNA sense strand
acuugaacuggcaggaaau

SEQ ID NO: 2265852 - RNA, 19 nt, Homo sapiens
  misc_RNA (1)...(19): siRNA sense strand
cuacaaaagccgcucgcaa

SEQ ID NO: 2265853 - RNA, 19 nt, Homo sapiens
  misc_RNA (1)...(19): siRNA sense strand
cagaaauagcagagaguca

SEQ ID NO: 2265854 - RNA, 19 nt, Homo sapiens
  misc_RNA (1)...(19): siRNA sense strand
cugugaagcuguagagcga

SEQ ID NO: 2265855 - RNA, 19 nt, Homo sapiens
  misc_RNA (1)...(19): siRNA sense strand
ggaucaaugucuuagccaa

SEQ ID NO: 2265856 - RNA, 19 nt, Homo sapiens
  misc_RNA (1)...(19): siRNA sense strand
gcccuaugucccagagaaa

SEQ ID NO: 2265857 - RNA, 19 nt, Homo sapiens
  misc_RNA (1)...(19): siRNA sense strand
ccacggaggaucuggucaa

SEQ ID NO: 2265858 - RNA, 19 nt, Homo sapiens
  misc_RNA (1)...(19): siRNA sense strand
ucaucuugcucuugggcua

SEQ ID NO: 2265859 - RNA, 19 nt, Homo sapiens
  misc_RNA (1)...(19): siRNA sense strand
gagcagaagguuugggaag

SEQ ID NO: 2265860 - RNA, 19 nt, Homo sapiens
  misc_RNA (1)...(19): siRNA sense strand
cagccaaagcccuagacua

SEQ ID NO: 2265861 - RNA, 19 nt, Homo sapiens
  misc_RNA (1)...(19): siRNA sense strand
cugagaagagggugcagaa

SEQ ID NO: 2265862 - RNA, 19 nt, Homo sapiens
  misc_RNA (1)...(19): siRNA sense strand
aggaugggcagcaaggaaa

SEQ ID NO: 2265863 - RNA, 19 nt, Homo sapiens
  misc_RNA (1)...(19): siRNA sense strand
ggaagugguuauagagggu

SEQ ID NO: 2265864 - RNA, 19 nt, Homo sapiens
  misc_RNA (1)...(19): siRNA sense strand
cgguauuacuacagguuuu

SEQ ID NO: 2265865 - RNA, 19 nt, Homo sapiens
  misc_RNA (1)...(19): siRNA sense strand
gcaaguaccgggagccuga

SEQ ID NO: 2265866 - RNA, 19 nt, Homo sapiens
  misc_RNA (1)...(19): siRNA sense strand
agguggcccuagagaacaa

SEQ ID NO: 2265867 - RNA, 19 nt, Homo sapiens
  misc_RNA (1)...(19): siRNA sense strand
ugaaaaguacaucgaguua

SEQ ID NO: 2265868 - RNA, 19 nt, Homo sapiens
  misc_RNA (1)...(19): siRNA sense strand
gcagagagucacagguucu

SEQ ID NO: 2265869 - RNA, 19 nt, Homo sapiens
  misc_RNA (1)...(19): siRNA sense strand
cgaguuagauggagaccgu

SEQ ID NO: 2265870 - RNA, 19 nt, Homo sapiens
  misc_RNA (1)...(19): siRNA sense strand
uggugaauacccagccaaa

SEQ ID NO: 2265871 - RNA, 19 nt, Homo sapiens
  misc_RNA (1)...(19): siRNA sense strand
gugcagaaauccagggagg

SEQ ID NO: 2265872 - RNA, 19 nt, Homo sapiens
  misc_RNA (1)...(19): siRNA sense strand
gggaggucauagauagcau

SEQ ID NO: 2265873 - RNA, 19 nt, Homo sapiens
  misc_RNA (1)...(19): siRNA sense strand
gggaagauguggucuccga

SEQ ID NO: 2265874 - RNA, 19 nt, Homo sapiens
  misc_RNA (1)...(19): siRNA sense strand
gugaaugauacaauagcau

SEQ ID NO: 2265875 - RNA, 19 nt, Homo sapiens
  misc_RNA (1)...(19): siRNA sense strand
uacuacagguuuugggaaa

SEQ ID NO: 2265876 - RNA, 19 nt, Homo sapiens
  misc_RNA (1)...(19): siRNA sense strand
gguccaugguguggugaau

SEQ ID NO: 2265877 - RNA, 19 nt, Homo sapiens
  misc_RNA (1)...(19): siRNA sense strand
gcucuuggcuuuaaggauc

SEQ ID NO: 2265878 - RNA, 19 nt, Homo sapiens
  misc_RNA (1)...(19): siRNA sense strand
agaacaaggcucugugcca

SEQ ID NO: 2265879 - RNA, 19 nt, Homo sapiens
  misc_RNA (1)...(19): siRNA sense strand
ccucagggucaucgagcau

SEQ ID NO: 2265880 - RNA, 19 nt, Homo sapiens
  misc_RNA (1)...(19): siRNA sense strand
uucuucagguguugggaaa

SEQ ID NO: 2265881 - RNA, 19 nt, Homo sapiens
  misc_RNA (1)...(19): siRNA sense strand
agagaagaaucgagcggcu

SEQ ID NO: 2265882 - RNA, 19 nt, Homo sapiens
  misc_RNA (1)...(19): siRNA sense strand
uuguaaggcccuggauaaa

SEQ ID NO: 2265883 - RNA, 19 nt, Homo sapiens
  misc_RNA (1)...(19): siRNA sense strand
ucguggaagugguuauaga

SEQ ID NO: 2265884 - RNA, 19 nt, Homo sapiens
  misc_RNA (1)...(19): siRNA sense strand
augucuuagccaaaggaua

SEQ ID NO: 2265885 - RNA, 19 nt, Homo sapiens
  misc_RNA (1)...(19): siRNA sense strand
agagcgagccagugcuauu

SEQ ID NO: 2265886 - RNA, 19 nt, Homo sapiens
  misc_RNA (1)...(19): siRNA sense strand
agagacaguuucuggagga

SEQ ID NO: 2265887 - RNA, 19 nt, Homo sapiens
  misc_RNA (1)...(19): siRNA sense strand
cgagguggcccuagagaac

SEQ ID NO: 2265888 - RNA, 19 nt, Homo sapiens
  misc_RNA (1)...(19): siRNA sense strand
aagugguuauagaggguga

SEQ ID NO: 2265889 - RNA, 19 nt, Homo sapiens
  misc_RNA (1)...(19): siRNA sense strand
cuuuaaggaucaaugucuu

SEQ ID NO: 2265890 - RNA, 19 nt, Homo sapiens
  misc_RNA (1)...(19): siRNA sense strand
augcuaaauacgugcuaga

SEQ ID NO: 2265891 - RNA, 19 nt, Homo sapiens
  misc_RNA (1)...(19): siRNA sense strand
ugcuagaagcccauggauu

SEQ ID NO: 2265892 - RNA, 19 nt, Homo sapiens
  misc_RNA (1)...(19): siRNA sense strand
gcugaagggcaccaccaaa

SEQ ID NO: 2265893 - RNA, 19 nt, Homo sapiens
  misc_RNA (1)...(19): siRNA sense strand
gagacaguuucuggaggaa

SEQ ID NO: 2265894 - RNA, 19 nt, Homo sapiens
  misc_RNA (1)...(19): siRNA sense strand
gcuaguuggagaagggaag

SEQ ID NO: 2265895 - RNA, 19 nt, Homo sapiens
  misc_RNA (1)...(19): siRNA sense strand
agccaaagcccuagacuac

SEQ ID NO: 2265896 - RNA, 19 nt, Homo sapiens
  misc_RNA (1)...(19): siRNA sense strand
gcacagaugcggaaggcca

SEQ ID NO: 2265897 - RNA, 19 nt, Homo sapiens
  misc_RNA (1)...(19): siRNA sense strand
gugcagaucaccagcgaga

SEQ ID NO: 2265898 - RNA, 19 nt, Homo sapiens
  misc_RNA (1)...(19): siRNA sense strand
ugacaagggcacagcuaca

SEQ ID NO: 2265899 - RNA, 19 nt, Homo sapiens
  misc_RNA (1)...(19): siRNA sense strand
caucagacugcgagggcca

SEQ ID NO: 2265900 - RNA, 19 nt, Homo sapiens
  misc_RNA (1)...(19): siRNA sense strand
cugccgugguggagaagau

SEQ ID NO: 2265901 - RNA, 19 nt, Homo sapiens
  misc_RNA (1)...(19): siRNA sense strand
augcgcagccugugaacaa

SEQ ID NO: 2265902 - RNA, 19 nt, Homo sapiens
  misc_RNA (1)...(19): siRNA sense strand
cccacauggcacugagcaa

SEQ ID NO: 2265903 - RNA, 19 nt, Homo sapiens
  misc_RNA (1)...(19): siRNA sense strand
agaaagaugcugaguggca

SEQ ID NO: 2265904 - RNA, 19 nt, Homo sapiens
  misc_RNA (1)...(19): siRNA sense strand
ggagaaagaugcugagugg

SEQ ID NO: 2265905 - RNA, 19 nt, Homo sapiens
  misc_RNA (1)...(19): siRNA sense strand
cagaagauuuugugauuca

SEQ ID NO: 2265906 - RNA, 19 nt, Homo sapiens
  misc_RNA (1)...(19): siRNA sense strand
ggagaaaagugcaaccaga

SEQ ID NO: 2265907 - RNA, 19 nt, Homo sapiens
  misc_RNA (1)...(19): siRNA sense strand
ggauaugugaggacgcaga

SEQ ID NO: 2265908 - RNA, 19 nt, Homo sapiens
  misc_RNA (1)...(19): siRNA sense strand
cuccaugacucaaggcaca

SEQ ID NO: 2265909 - RNA, 19 nt, Homo sapiens
  misc_RNA (1)...(19): siRNA sense strand
gagaagagaucgugcgcuu

SEQ ID NO: 2265910 - RNA, 19 nt, Homo sapiens
  misc_RNA (1)...(19): siRNA sense strand
uggaacagccagaaggaca

SEQ ID NO: 2265911 - RNA, 19 nt, Homo sapiens
  misc_RNA (1)...(19): siRNA sense strand
gaucaaaguccggugguuu

SEQ ID NO: 2265912 - RNA, 19 nt, Homo sapiens
  misc_RNA (1)...(19): siRNA sense strand
aguuuaagggcaugugcua

SEQ ID NO: 2265913 - RNA, 19 nt, Homo sapiens
  misc_RNA (1)...(19): siRNA sense strand
ccaucacaggagucagaaa

SEQ ID NO: 2265914 - RNA, 19 nt, Homo sapiens
  misc_RNA (1)...(19): siRNA sense strand
uguaccaguuuaagggcau

SEQ ID NO: 2265915 - RNA, 19 nt, Homo sapiens
  misc_RNA (1)...(19): siRNA sense strand
gaaaggacacucuggacuu

SEQ ID NO: 2265916 - RNA, 19 nt, Homo sapiens
  misc_RNA (1)...(19): siRNA sense strand
aagaggaguccgugcgcuu

SEQ ID NO: 2265917 - RNA, 19 nt, Homo sapiens
  misc_RNA (1)...(19): siRNA sense strand
gcuuaaguuugaaugucau

SEQ ID NO: 2265918 - RNA, 19 nt, Homo sapiens
  misc_RNA (1)...(19): siRNA sense strand
cugcaaagaaauuggguga

SEQ ID NO: 2265919 - RNA, 19 nt, Homo sapiens
  misc_RNA (1)...(19): siRNA sense strand
aggaagaagaagaugaaga

SEQ ID NO: 2265920 - RNA, 19 nt, Homo sapiens
  misc_RNA (1)...(19): siRNA sense strand
aggaggaggaggaggaaga

SEQ ID NO: 2265921 - RNA, 19 nt, Homo sapiens
  misc_RNA (1)...(19): siRNA sense strand
gggcaaaagugaagcagga

SEQ ID NO: 2265922 - RNA, 19 nt, Homo sapiens
  misc_RNA (1)...(19): siRNA sense strand
augaagaugaggaggaaga

SEQ ID NO: 2265923 - RNA, 19 nt, Homo sapiens
  misc_RNA (1)...(19): siRNA sense strand
cagaagaugaggaggagga

SEQ ID NO: 2265924 - RNA, 19 nt, Homo sapiens
  misc_RNA (1)...(19): siRNA sense strand
gcaaaagugaagcaggaaa

SEQ ID NO: 2265925 - RNA, 19 nt, Homo sapiens
  misc_RNA (1)...(19): siRNA sense strand
aggaggaggaggaagaaga

SEQ ID NO: 2265926 - RNA, 19 nt, Homo sapiens
  misc_RNA (1)...(19): siRNA sense strand
aggaggaggaagaagaaga

SEQ ID NO: 2265927 - RNA, 19 nt, Homo sapiens
  misc_RNA (1)...(19): siRNA sense strand
cgggaagagcacaagaaga

SEQ ID NO: 2265928 - RNA, 19 nt, Homo sapiens
  misc_RNA (1)...(19): siRNA sense strand
augaggaggaagaggauga

SEQ ID NO: 2265929 - RNA, 19 nt, Homo sapiens
  misc_RNA (1)...(19): siRNA sense strand
aggaggaagaagaagauga

SEQ ID NO: 2265930 - RNA, 19 nt, Homo sapiens
  misc_RNA (1)...(19): siRNA sense strand
aggaggaagaggaugaaga

SEQ ID NO: 2265931 - RNA, 19 nt, Homo sapiens
  misc_RNA (1)...(19): siRNA sense strand
aagaugaagaugaggagga

SEQ ID NO: 2265932 - RNA, 19 nt, Homo sapiens
  misc_RNA (1)...(19): siRNA sense strand
uccaagaaguguucggaga

SEQ ID NO: 2265933 - RNA, 19 nt, Homo sapiens
  misc_RNA (1)...(19): siRNA sense strand
aagaugaggaggaggagga

SEQ ID NO: 2265934 - RNA, 19 nt, Homo sapiens
  misc_RNA (1)...(19): siRNA sense strand
agaagaagaacgaaccaga

SEQ ID NO: 2265935 - RNA, 19 nt, Homo sapiens
  misc_RNA (1)...(19): siRNA sense strand
ucggagagauggaagacca

SEQ ID NO: 2265936 - RNA, 19 nt, Homo sapiens
  misc_RNA (1)...(19): siRNA sense strand
ucaaagaagaagaacgaac

SEQ ID NO: 2265937 - RNA, 19 nt, Homo sapiens
  misc_RNA (1)...(19): siRNA sense strand
aaccagaagaugaggagga

SEQ ID NO: 2265938 - RNA, 19 nt, Homo sapiens
  misc_RNA (1)...(19): siRNA sense strand
agaggaugaagaugaagaa

SEQ ID NO: 2265939 - RNA, 19 nt, Homo sapiens
  misc_RNA (1)...(19): siRNA sense strand
augaggaggaggaggagga

SEQ ID NO: 2265940 - RNA, 19 nt, Homo sapiens
  misc_RNA (1)...(19): siRNA sense strand
uggggauacugcaaagaaa

SEQ ID NO: 2265941 - RNA, 19 nt, Homo sapiens
  misc_RNA (1)...(19): siRNA sense strand
aggaggagauugagcgcaa

SEQ ID NO: 2265942 - RNA, 19 nt, Homo sapiens
  misc_RNA (1)...(19): siRNA sense strand
cagaagagcugcaccgcaa

SEQ ID NO: 2265943 - RNA, 19 nt, Homo sapiens
  misc_RNA (1)...(19): siRNA sense strand
gcagucaggcagaggguga

SEQ ID NO: 2265944 - RNA, 19 nt, Homo sapiens
  misc_RNA (1)...(19): siRNA sense strand
ccagcaacaaagugcaaga

SEQ ID NO: 2265945 - RNA, 19 nt, Homo sapiens
  misc_RNA (1)...(19): siRNA sense strand
ccaccaaguucaagcagcu

SEQ ID NO: 2265946 - RNA, 19 nt, Homo sapiens
  misc_RNA (1)...(19): siRNA sense strand
ggaacuuucagaagggcca

SEQ ID NO: 2265947 - RNA, 19 nt, Homo sapiens
  misc_RNA (1)...(19): siRNA sense strand
cuacaaugauuuugggaau

SEQ ID NO: 2265948 - RNA, 19 nt, Homo sapiens
  misc_RNA (1)...(19): siRNA sense strand
ggauggaagaguuguggaa

SEQ ID NO: 2265949 - RNA, 19 nt, Homo sapiens
  misc_RNA (1)...(19): siRNA sense strand
ccgugguggugguggauau

SEQ ID NO: 2265950 - RNA, 19 nt, Homo sapiens
  misc_RNA (1)...(19): siRNA sense strand
cuauaauggauuuggcaau

SEQ ID NO: 2265951 - RNA, 19 nt, Homo sapiens
  misc_RNA (1)...(19): siRNA sense strand
gaagaguuguggaaccaaa

SEQ ID NO: 2265952 - RNA, 19 nt, Homo sapiens
  misc_RNA (1)...(19): siRNA sense strand
ccaaagaggucgaaguggu

SEQ ID NO: 2265953 - RNA, 19 nt, Homo sapiens
  misc_RNA (1)...(19): siRNA sense strand
gcuuuggguuugucacaua

SEQ ID NO: 2265954 - RNA, 19 nt, Homo sapiens
  misc_RNA (1)...(19): siRNA sense strand
cagaaauaccauacuguga

SEQ ID NO: 2265955 - RNA, 19 nt, Homo sapiens
  misc_RNA (1)...(19): siRNA sense strand
uggauaagauugucauuca

SEQ ID NO: 2265956 - RNA, 19 nt, Homo sapiens
  misc_RNA (1)...(19): siRNA sense strand
gcuauaauggauuuggcaa

SEQ ID NO: 2265957 - RNA, 19 nt, Homo sapiens
  misc_RNA (1)...(19): siRNA sense strand
gaaauaccauacugugaau

SEQ ID NO: 2265958 - RNA, 19 nt, Homo sapiens
  misc_RNA (1)...(19): siRNA sense strand
accaugacuccguggauaa

SEQ ID NO: 2265959 - RNA, 19 nt, Homo sapiens
  misc_RNA (1)...(19): siRNA sense strand
aggaaauuuuggaggcaga

SEQ ID NO: 2265960 - RNA, 19 nt, Homo sapiens
  misc_RNA (1)...(19): siRNA sense strand
caacuucggucguggagga

SEQ ID NO: 2265961 - RNA, 19 nt, Homo sapiens
  misc_RNA (1)...(19): siRNA sense strand
ucgaagugguucuggaaac

SEQ ID NO: 2265962 - RNA, 19 nt, Homo sapiens
  misc_RNA (1)...(19): siRNA sense strand
acccaugaagggaggaaau

SEQ ID NO: 2265963 - RNA, 19 nt, Homo sapiens
  misc_RNA (1)...(19): siRNA sense strand
ugguaaugagagauccaaa

SEQ ID NO: 2265964 - RNA, 19 nt, Homo sapiens
  misc_RNA (1)...(19): siRNA sense strand
ggucgaagugguucuggaa

SEQ ID NO: 2265965 - RNA, 19 nt, Homo sapiens
  misc_RNA (1)...(19): siRNA sense strand
ccaaacaccaagcgcucua

SEQ ID NO: 2265966 - RNA, 19 nt, Homo sapiens
  misc_RNA (1)...(19): siRNA sense strand
uggaagaguuguggaacca

SEQ ID NO: 2265967 - RNA, 19 nt, Homo sapiens
  misc_RNA (1)...(19): siRNA sense strand
agaaauaccauacugugaa

SEQ ID NO: 2265968 - RNA, 19 nt, Homo sapiens
  misc_RNA (1)...(19): siRNA sense strand
acugugugguaaugagaga

SEQ ID NO: 2265969 - RNA, 19 nt, Homo sapiens
  misc_RNA (1)...(19): siRNA sense strand
caaagaggucgaagugguu

SEQ ID NO: 2265970 - RNA, 19 nt, Homo sapiens
  misc_RNA (1)...(19): siRNA sense strand
ggaggaaacuucagugguc

SEQ ID NO: 2265971 - RNA, 19 nt, Homo sapiens
  misc_RNA (1)...(19): siRNA sense strand
caguggucgugguggcuuu

SEQ ID NO: 2265972 - RNA, 19 nt, Homo sapiens
  misc_RNA (1)...(19): siRNA sense strand
cgguggaggccaauacuuu

SEQ ID NO: 2265973 - RNA, 19 nt, Homo sapiens
  misc_RNA (1)...(19): siRNA sense strand
aggccaauacuuugcaaaa

SEQ ID NO: 2265974 - RNA, 19 nt, Homo sapiens
  misc_RNA (1)...(19): siRNA sense strand
uagcuauggcaguggcaga

SEQ ID NO: 2265975 - RNA, 19 nt, Homo sapiens
  misc_RNA (1)...(19): siRNA sense strand
caagguggauggaagaguu

SEQ ID NO: 2265976 - RNA, 19 nt, Homo sapiens
  misc_RNA (1)...(19): siRNA sense strand
uuagaaaagcccugucaaa

SEQ ID NO: 2265977 - RNA, 19 nt, Homo sapiens
  misc_RNA (1)...(19): siRNA sense strand
cagccaaagaggucgaagu

SEQ ID NO: 2265978 - RNA, 19 nt, Homo sapiens
  misc_RNA (1)...(19): siRNA sense strand
aggguugagcuuugaaaca

SEQ ID NO: 2265979 - RNA, 19 nt, Homo sapiens
  misc_RNA (1)...(19): siRNA sense strand
gguuccagcagcagcagua

SEQ ID NO: 2265980 - RNA, 19 nt, Homo sapiens
  misc_RNA (1)...(19): siRNA sense strand
cuacaaugauuuugggaau

SEQ ID NO: 2265981 - RNA, 19 nt, Homo sapiens
  misc_RNA (1)...(19): siRNA sense strand
ggauggaagaguuguggaa

SEQ ID NO: 2265982 - RNA, 19 nt, Homo sapiens
  misc_RNA (1)...(19): siRNA sense strand
ccgugguggugguggauau

SEQ ID NO: 2265983 - RNA, 19 nt, Homo sapiens
  misc_RNA (1)...(19): siRNA sense strand
cuauaauggauuuggcaau

SEQ ID NO: 2265984 - RNA, 19 nt, Homo sapiens
  misc_RNA (1)...(19): siRNA sense strand
gaagaguuguggaaccaaa

SEQ ID NO: 2265985 - RNA, 19 nt, Homo sapiens
  misc_RNA (1)...(19): siRNA sense strand
ccaaagaggucgaaguggu

SEQ ID NO: 2265986 - RNA, 19 nt, Homo sapiens
  misc_RNA (1)...(19): siRNA sense strand
gcuuuggguuugucacaua

SEQ ID NO: 2265987 - RNA, 19 nt, Homo sapiens
  misc_RNA (1)...(19): siRNA sense strand
cagaaauaccauacuguga

SEQ ID NO: 2265988 - RNA, 19 nt, Homo sapiens
  misc_RNA (1)...(19): siRNA sense strand
uggauaagauugucauuca

SEQ ID NO: 2265989 - RNA, 19 nt, Homo sapiens
  misc_RNA (1)...(19): siRNA sense strand
gcuauaauggauuuggcaa

SEQ ID NO: 2265990 - RNA, 19 nt, Homo sapiens
  misc_RNA (1)...(19): siRNA sense strand
gaaauaccauacugugaau

SEQ ID NO: 2265991 - RNA, 19 nt, Homo sapiens
  misc_RNA (1)...(19): siRNA sense strand
accaugacuccguggauaa

SEQ ID NO: 2265992 - RNA, 19 nt, Homo sapiens
  misc_RNA (1)...(19): siRNA sense strand
aggaaauuuuggaggcaga

SEQ ID NO: 2265993 - RNA, 19 nt, Homo sapiens
  misc_RNA (1)...(19): siRNA sense strand
caacuucggucguggagga

SEQ ID NO: 2265994 - RNA, 19 nt, Homo sapiens
  misc_RNA (1)...(19): siRNA sense strand
ucgaagugguucuggaaac

SEQ ID NO: 2265995 - RNA, 19 nt, Homo sapiens
  misc_RNA (1)...(19): siRNA sense strand
acccaugaagggaggaaau

SEQ ID NO: 2265996 - RNA, 19 nt, Homo sapiens
  misc_RNA (1)...(19): siRNA sense strand
ugguaaugagagauccaaa

SEQ ID NO: 2265997 - RNA, 19 nt, Homo sapiens
  misc_RNA (1)...(19): siRNA sense strand
ggucgaagugguucuggaa

SEQ ID NO: 2265998 - RNA, 19 nt, Homo sapiens
  misc_RNA (1)...(19): siRNA sense strand
ccaaacaccaagcgcucua

SEQ ID NO: 2265999 - RNA, 19 nt, Homo sapiens
  misc_RNA (1)...(19): siRNA sense strand
uggaagaguuguggaacca

SEQ ID NO: 2266000 - RNA, 19 nt, Homo sapiens
  misc_RNA (1)...(19): siRNA sense strand
agaaauaccauacugugaa

SEQ ID NO: 2266001 - RNA, 19 nt, Homo sapiens
  misc_RNA (1)...(19): siRNA sense strand
acugugugguaaugagaga

SEQ ID NO: 2266002 - RNA, 19 nt, Homo sapiens
  misc_RNA (1)...(19): siRNA sense strand
caaagaggucgaagugguu

SEQ ID NO: 2266003 - RNA, 19 nt, Homo sapiens
  misc_RNA (1)...(19): siRNA sense strand
ggaggaaacuucagugguc

SEQ ID NO: 2266004 - RNA, 19 nt, Homo sapiens
  misc_RNA (1)...(19): siRNA sense strand
caguggucgugguggcuuu

SEQ ID NO: 2266005 - RNA, 19 nt, Homo sapiens
  misc_RNA (1)...(19): siRNA sense strand
cgguggaggccaauacuuu

SEQ ID NO: 2266006 - RNA, 19 nt, Homo sapiens
  misc_RNA (1)...(19): siRNA sense strand
aggccaauacuuugcaaaa

SEQ ID NO: 2266007 - RNA, 19 nt, Homo sapiens
  misc_RNA (1)...(19): siRNA sense strand
uagcuauggcaguggcaga

SEQ ID NO: 2266008 - RNA, 19 nt, Homo sapiens
  misc_RNA (1)...(19): siRNA sense strand
caagguggauggaagaguu

SEQ ID NO: 2266009 - RNA, 19 nt, Homo sapiens
  misc_RNA (1)...(19): siRNA sense strand
uuagaaaagcccugucaaa

SEQ ID NO: 2266010 - RNA, 19 nt, Homo sapiens
  misc_RNA (1)...(19): siRNA sense strand
cagccaaagaggucgaagu

SEQ ID NO: 2266011 - RNA, 19 nt, Homo sapiens
  misc_RNA (1)...(19): siRNA sense strand
aggguugagcuuugaaaca

SEQ ID NO: 2266012 - RNA, 19 nt, Homo sapiens
  misc_RNA (1)...(19): siRNA sense strand
gguuccagcagcagcagua

SEQ ID NO: 2266013 - RNA, 19 nt, Homo sapiens
  misc_RNA (1)...(19): siRNA sense strand
aggaggaagaggaggauau

SEQ ID NO: 2266014 - RNA, 19 nt, Homo sapiens
  misc_RNA (1)...(19): siRNA sense strand
cgguuauggaggaggaaga

SEQ ID NO: 2266015 - RNA, 19 nt, Homo sapiens
  misc_RNA (1)...(19): siRNA sense strand
cuuugaaaccacagaagaa

SEQ ID NO: 2266016 - RNA, 19 nt, Homo sapiens
  misc_RNA (1)...(19): siRNA sense strand
uggcaguggacguggauuu

SEQ ID NO: 2266017 - RNA, 19 nt, Homo sapiens
  misc_RNA (1)...(19): siRNA sense strand
acuuugaggaauauggaaa

SEQ ID NO: 2266018 - RNA, 19 nt, Homo sapiens
  misc_RNA (1)...(19): siRNA sense strand
aggauauggugguggagga

SEQ ID NO: 2266019 - RNA, 19 nt, Homo sapiens
  misc_RNA (1)...(19): siRNA sense strand
uggucauaaugcagaagua

SEQ ID NO: 2266020 - RNA, 19 nt, Homo sapiens
  misc_RNA (1)...(19): siRNA sense strand
cauccauggcugagguuga

SEQ ID NO: 2266021 - RNA, 19 nt, Homo sapiens
  misc_RNA (1)...(19): siRNA sense strand
aagaaaugcaggaaguuca

SEQ ID NO: 2266022 - RNA, 19 nt, Homo sapiens
  misc_RNA (1)...(19): siRNA sense strand
agcaaaagaucaagaggau

SEQ ID NO: 2266023 - RNA, 19 nt, Homo sapiens
  misc_RNA (1)...(19): siRNA sense strand
guucagaguucuaggagug

SEQ ID NO: 2266024 - RNA, 19 nt, Homo sapiens
  misc_RNA (1)...(19): siRNA sense strand
cggaauuaaagaagauacu

SEQ ID NO: 2266025 - RNA, 19 nt, Homo sapiens
  misc_RNA (1)...(19): siRNA sense strand
uggaggaggaagaggagga

SEQ ID NO: 2266026 - RNA, 19 nt, Homo sapiens
  misc_RNA (1)...(19): siRNA sense strand
ugacaacuauggaggagga

SEQ ID NO: 2266027 - RNA, 19 nt, Homo sapiens
  misc_RNA (1)...(19): siRNA sense strand
cugauaggcagucuggaaa

SEQ ID NO: 2266028 - RNA, 19 nt, Homo sapiens
  misc_RNA (1)...(19): siRNA sense strand
acgugguggcgguggaaau

SEQ ID NO: 2266029 - RNA, 19 nt, Homo sapiens
  misc_RNA (1)...(19): siRNA sense strand
ugguggaggaccuggauau

SEQ ID NO: 2266030 - RNA, 19 nt, Homo sapiens
  misc_RNA (1)...(19): siRNA sense strand
ucauucaauugaugggaga

SEQ ID NO: 2266031 - RNA, 19 nt, Homo sapiens
  misc_RNA (1)...(19): siRNA sense strand
cgguggaaauuucggacca

SEQ ID NO: 2266032 - RNA, 19 nt, Homo sapiens
  misc_RNA (1)...(19): siRNA sense strand
guuuguuggcggaauuaaa

SEQ ID NO: 2266033 - RNA, 19 nt, Homo sapiens
  misc_RNA (1)...(19): siRNA sense strand
uggaaauuauaaccagcaa

SEQ ID NO: 2266034 - RNA, 19 nt, Homo sapiens
  misc_RNA (1)...(19): siRNA sense strand
caggaaguucagaguucua

SEQ ID NO: 2266035 - RNA, 19 nt, Homo sapiens
  misc_RNA (1)...(19): siRNA sense strand
cuauaauggguauggagga

SEQ ID NO: 2266036 - RNA, 19 nt, Homo sapiens
  misc_RNA (1)...(19): siRNA sense strand
cagaguucuaggaguggaa

SEQ ID NO: 2266037 - RNA, 19 nt, Homo sapiens
  misc_RNA (1)...(19): siRNA sense strand
ugggagaguaguugagcca

SEQ ID NO: 2266038 - RNA, 19 nt, Homo sapiens
  misc_RNA (1)...(19): siRNA sense strand
aggaaauuauggaagugga

SEQ ID NO: 2266039 - RNA, 19 nt, Homo sapiens
  misc_RNA (1)...(19): siRNA sense strand
gaguggaagaggaggcaac

SEQ ID NO: 2266040 - RNA, 19 nt, Homo sapiens
  misc_RNA (1)...(19): siRNA sense strand
aagagaggaaucuggaaaa

SEQ ID NO: 2266041 - RNA, 19 nt, Homo sapiens
  misc_RNA (1)...(19): siRNA sense strand
uagagauuacuuugaggaa

SEQ ID NO: 2266042 - RNA, 19 nt, Homo sapiens
  misc_RNA (1)...(19): siRNA sense strand
aggaggcaguggaggaagu

SEQ ID NO: 2266043 - RNA, 19 nt, Homo sapiens
  misc_RNA (1)...(19): siRNA sense strand
gcagaaguaagaaaggcuu

SEQ ID NO: 2266044 - RNA, 19 nt, Homo sapiens
  misc_RNA (1)...(19): siRNA sense strand
aggaggaagaggaggauau

SEQ ID NO: 2266045 - RNA, 19 nt, Homo sapiens
  misc_RNA (1)...(19): siRNA sense strand
cgguuauggaggaggaaga

SEQ ID NO: 2266046 - RNA, 19 nt, Homo sapiens
  misc_RNA (1)...(19): siRNA sense strand
cuuugaaaccacagaagaa

SEQ ID NO: 2266047 - RNA, 19 nt, Homo sapiens
  misc_RNA (1)...(19): siRNA sense strand
uggcaguggacguggauuu

SEQ ID NO: 2266048 - RNA, 19 nt, Homo sapiens
  misc_RNA (1)...(19): siRNA sense strand
acuuugaggaauauggaaa

SEQ ID NO: 2266049 - RNA, 19 nt, Homo sapiens
  misc_RNA (1)...(19): siRNA sense strand
aggauauggugguggagga

SEQ ID NO: 2266050 - RNA, 19 nt, Homo sapiens
  misc_RNA (1)...(19): siRNA sense strand
uggucauaaugcagaagua

SEQ ID NO: 2266051 - RNA, 19 nt, Homo sapiens
  misc_RNA (1)...(19): siRNA sense strand
cauccauggcugagguuga

SEQ ID NO: 2266052 - RNA, 19 nt, Homo sapiens
  misc_RNA (1)...(19): siRNA sense strand
aagaaaugcaggaaguuca

SEQ ID NO: 2266053 - RNA, 19 nt, Homo sapiens
  misc_RNA (1)...(19): siRNA sense strand
agcaaaagaucaagaggau

SEQ ID NO: 2266054 - RNA, 19 nt, Homo sapiens
  misc_RNA (1)...(19): siRNA sense strand
guucagaguucuaggagug

SEQ ID NO: 2266055 - RNA, 19 nt, Homo sapiens
  misc_RNA (1)...(19): siRNA sense strand
cggaauuaaagaagauacu

SEQ ID NO: 2266056 - RNA, 19 nt, Homo sapiens
  misc_RNA (1)...(19): siRNA sense strand
uggaggaggaagaggagga

SEQ ID NO: 2266057 - RNA, 19 nt, Homo sapiens
  misc_RNA (1)...(19): siRNA sense strand
ugacaacuauggaggagga

SEQ ID NO: 2266058 - RNA, 19 nt, Homo sapiens
  misc_RNA (1)...(19): siRNA sense strand
cugauaggcagucuggaaa

SEQ ID NO: 2266059 - RNA, 19 nt, Homo sapiens
  misc_RNA (1)...(19): siRNA sense strand
acgugguggcgguggaaau

SEQ ID NO: 2266060 - RNA, 19 nt, Homo sapiens
  misc_RNA (1)...(19): siRNA sense strand
ugguggaggaccuggauau

SEQ ID NO: 2266061 - RNA, 19 nt, Homo sapiens
  misc_RNA (1)...(19): siRNA sense strand
ucauucaauugaugggaga

SEQ ID NO: 2266062 - RNA, 19 nt, Homo sapiens
  misc_RNA (1)...(19): siRNA sense strand
cgguggaaauuucggacca

SEQ ID NO: 2266063 - RNA, 19 nt, Homo sapiens
  misc_RNA (1)...(19): siRNA sense strand
guuuguuggcggaauuaaa

SEQ ID NO: 2266064 - RNA, 19 nt, Homo sapiens
  misc_RNA (1)...(19): siRNA sense strand
uggaaauuauaaccagcaa

SEQ ID NO: 2266065 - RNA, 19 nt, Homo sapiens
  misc_RNA (1)...(19): siRNA sense strand
caggaaguucagaguucua

SEQ ID NO: 2266066 - RNA, 19 nt, Homo sapiens
  misc_RNA (1)...(19): siRNA sense strand
cuauaauggguauggagga

SEQ ID NO: 2266067 - RNA, 19 nt, Homo sapiens
  misc_RNA (1)...(19): siRNA sense strand
cagaguucuaggaguggaa

SEQ ID NO: 2266068 - RNA, 19 nt, Homo sapiens
  misc_RNA (1)...(19): siRNA sense strand
ugggagaguaguugagcca

SEQ ID NO: 2266069 - RNA, 19 nt, Homo sapiens
  misc_RNA (1)...(19): siRNA sense strand
aggaaauuauggaagugga

SEQ ID NO: 2266070 - RNA, 19 nt, Homo sapiens
  misc_RNA (1)...(19): siRNA sense strand
gaguggaagaggaggcaac

SEQ ID NO: 2266071 - RNA, 19 nt, Homo sapiens
  misc_RNA (1)...(19): siRNA sense strand
aagagaggaaucuggaaaa

SEQ ID NO: 2266072 - RNA, 19 nt, Homo sapiens
  misc_RNA (1)...(19): siRNA sense strand
uagagauuacuuugaggaa

SEQ ID NO: 2266073 - RNA, 19 nt, Homo sapiens
  misc_RNA (1)...(19): siRNA sense strand
aggaggcaguggaggaagu

SEQ ID NO: 2266074 - RNA, 19 nt, Homo sapiens
  misc_RNA (1)...(19): siRNA sense strand
gcagaaguaagaaaggcuu

SEQ ID NO: 2266075 - RNA, 19 nt, Homo sapiens
  misc_RNA (1)...(19): siRNA sense strand
cagacaagaaagagggcuu

SEQ ID NO: 2266076 - RNA, 19 nt, Homo sapiens
  misc_RNA (1)...(19): siRNA sense strand
ucgugauacuagagauuau

SEQ ID NO: 2266077 - RNA, 19 nt, Homo sapiens
  misc_RNA (1)...(19): siRNA sense strand
cgugaaaccaacaaaucaa

SEQ ID NO: 2266078 - RNA, 19 nt, Homo sapiens
  misc_RNA (1)...(19): siRNA sense strand
caguggaaugggaggaaga

SEQ ID NO: 2266079 - RNA, 19 nt, Homo sapiens
  misc_RNA (1)...(19): siRNA sense strand
gcuuaauacggaaacaaau

SEQ ID NO: 2266080 - RNA, 19 nt, Homo sapiens
  misc_RNA (1)...(19): siRNA sense strand
ggguauucuacuaaagaca

SEQ ID NO: 2266081 - RNA, 19 nt, Homo sapiens
  misc_RNA (1)...(19): siRNA sense strand
cggauaugguggaagucga

SEQ ID NO: 2266082 - RNA, 19 nt, Homo sapiens
  misc_RNA (1)...(19): siRNA sense strand
ugguggaagucgagacagu

SEQ ID NO: 2266083 - RNA, 19 nt, Homo sapiens
  misc_RNA (1)...(19): siRNA sense strand
agguggaagaggaggaagu

SEQ ID NO: 2266084 - RNA, 19 nt, Homo sapiens
  misc_RNA (1)...(19): siRNA sense strand
caucaagagaauauagcga

SEQ ID NO: 2266085 - RNA, 19 nt, Homo sapiens
  misc_RNA (1)...(19): siRNA sense strand
uacggaaacaaaugagaaa

SEQ ID NO: 2266086 - RNA, 19 nt, Homo sapiens
  misc_RNA (1)...(19): siRNA sense strand
cauggaugacgguggauau

SEQ ID NO: 2266087 - RNA, 19 nt, Homo sapiens
  misc_RNA (1)...(19): siRNA sense strand
gcucuucauuggugggcuu

SEQ ID NO: 2266088 - RNA, 19 nt, Homo sapiens
  misc_RNA (1)...(19): siRNA sense strand
ugaaagugguagacgugga

SEQ ID NO: 2266089 - RNA, 19 nt, Homo sapiens
  misc_RNA (1)...(19): siRNA sense strand
uggaagaggaggaagugga

SEQ ID NO: 2266090 - RNA, 19 nt, Homo sapiens
  misc_RNA (1)...(19): siRNA sense strand
gggcuuaauacggaaacaa

SEQ ID NO: 2266091 - RNA, 19 nt, Homo sapiens
  misc_RNA (1)...(19): siRNA sense strand
cgcuaaggaugcagccaga

SEQ ID NO: 2266092 - RNA, 19 nt, Homo sapiens
  misc_RNA (1)...(19): siRNA sense strand
aagaggaggaaguggagga

SEQ ID NO: 2266093 - RNA, 19 nt, Homo sapiens
  misc_RNA (1)...(19): siRNA sense strand
accaacaaaucaagaggau

SEQ ID NO: 2266094 - RNA, 19 nt, Homo sapiens
  misc_RNA (1)...(19): siRNA sense strand
uagcgauagagauggauau

SEQ ID NO: 2266095 - RNA, 19 nt, Homo sapiens
  misc_RNA (1)...(19): siRNA sense strand
aggaggaaguggaggaacc

SEQ ID NO: 2266096 - RNA, 19 nt, Homo sapiens
  misc_RNA (1)...(19): siRNA sense strand
gguuggcagacaagaaaga

SEQ ID NO: 2266097 - RNA, 19 nt, Homo sapiens
  misc_RNA (1)...(19): siRNA sense strand
uugaagcaguauuuggcaa

SEQ ID NO: 2266098 - RNA, 19 nt, Homo sapiens
  misc_RNA (1)...(19): siRNA sense strand
cuauccaucaagagaauau

SEQ ID NO: 2266099 - RNA, 19 nt, Homo sapiens
  misc_RNA (1)...(19): siRNA sense strand
uggaaagucauuagaugga

SEQ ID NO: 2266100 - RNA, 19 nt, Homo sapiens
  misc_RNA (1)...(19): siRNA sense strand
gagauuauacuuaccguga

SEQ ID NO: 2266101 - RNA, 19 nt, Homo sapiens
  misc_RNA (1)...(19): siRNA sense strand
uggucgugaucgugacuau

SEQ ID NO: 2266102 - RNA, 19 nt, Homo sapiens
  misc_RNA (1)...(19): siRNA sense strand
auauggacgaauaguggaa

SEQ ID NO: 2266103 - RNA, 19 nt, Homo sapiens
  misc_RNA (1)...(19): siRNA sense strand
ccgugaaaccaacaaauca

SEQ ID NO: 2266104 - RNA, 19 nt, Homo sapiens
  misc_RNA (1)...(19): siRNA sense strand
cugcagaagauauggaaga

SEQ ID NO: 2266105 - RNA, 19 nt, Homo sapiens
  misc_RNA (1)...(19): siRNA sense strand
cagaagauauggaagagga

SEQ ID NO: 2266106 - RNA, 19 nt, Homo sapiens
  misc_RNA (1)...(19): siRNA sense strand
ugguaaacgcccugcagaa

SEQ ID NO: 2266107 - RNA, 19 nt, Homo sapiens
  misc_RNA (1)...(19): siRNA sense strand
aagauauggaagaggaaca

SEQ ID NO: 2266108 - RNA, 19 nt, Homo sapiens
  misc_RNA (1)...(19): siRNA sense strand
caauggugaauuugguaaa

SEQ ID NO: 2266109 - RNA, 19 nt, Homo sapiens
  misc_RNA (1)...(19): siRNA sense strand
agaagauauggaagaggaa

SEQ ID NO: 2266110 - RNA, 19 nt, Homo sapiens
  misc_RNA (1)...(19): siRNA sense strand
cgucaugagucgggagcuu

SEQ ID NO: 2266111 - RNA, 19 nt, Homo sapiens
  misc_RNA (1)...(19): siRNA sense strand
gcuuaaauuaccaacacua

SEQ ID NO: 2266112 - RNA, 19 nt, Homo sapiens
  misc_RNA (1)...(19): siRNA sense strand
uggaagaggaacaagcauu

SEQ ID NO: 2266113 - RNA, 19 nt, Homo sapiens
  misc_RNA (1)...(19): siRNA sense strand
gcaagaauauuaaggcucu

SEQ ID NO: 2266114 - RNA, 19 nt, Homo sapiens
  misc_RNA (1)...(19): siRNA sense strand
uguucuuauuggaggaaaa

SEQ ID NO: 2266115 - RNA, 19 nt, Homo sapiens
  misc_RNA (1)...(19): siRNA sense strand
uggaaaaggaggcaagaau

SEQ ID NO: 2266116 - RNA, 19 nt, Homo sapiens
  misc_RNA (1)...(19): siRNA sense strand
ggggagaccucauggccua

SEQ ID NO: 2266117 - RNA, 19 nt, Homo sapiens
  misc_RNA (1)...(19): siRNA sense strand
gcacaguauuugcugcaga

SEQ ID NO: 2266118 - RNA, 19 nt, Homo sapiens
  misc_RNA (1)...(19): siRNA sense strand
cuaugacagaagagggaga

SEQ ID NO: 2266119 - RNA, 19 nt, Homo sapiens
  misc_RNA (1)...(19): siRNA sense strand
uggaucuauuauuggcaaa

SEQ ID NO: 2266120 - RNA, 19 nt, Homo sapiens
  misc_RNA (1)...(19): siRNA sense strand
cuguggaaugcuuaaauua

SEQ ID NO: 2266121 - RNA, 19 nt, Homo sapiens
  misc_RNA (1)...(19): siRNA sense strand
caucaaaggacgugcacag

SEQ ID NO: 2266122 - RNA, 19 nt, Homo sapiens
  misc_RNA (1)...(19): siRNA sense strand
cgauaggguuguagagugc

SEQ ID NO: 2266123 - RNA, 19 nt, Homo sapiens
  misc_RNA (1)...(19): siRNA sense strand
gcugaugaaacuugggacu

SEQ ID NO: 2266124 - RNA, 19 nt, Homo sapiens
  misc_RNA (1)...(19): siRNA sense strand
ggacucugcaauagauaca

SEQ ID NO: 2266125 - RNA, 19 nt, Homo sapiens
  misc_RNA (1)...(19): siRNA sense strand
ucagaauggcagauggcuu

SEQ ID NO: 2266126 - RNA, 19 nt, Homo sapiens
  misc_RNA (1)...(19): siRNA sense strand
gcaaagguggucagcggau

SEQ ID NO: 2266127 - RNA, 19 nt, Homo sapiens
  misc_RNA (1)...(19): siRNA sense strand
uggaagagggccugcaguu

SEQ ID NO: 2266128 - RNA, 19 nt, Homo sapiens
  misc_RNA (1)...(19): siRNA sense strand
agauauggaagaggaacaa

SEQ ID NO: 2266129 - RNA, 19 nt, Homo sapiens
  misc_RNA (1)...(19): siRNA sense strand
ccgagcgcauauugaguau

SEQ ID NO: 2266130 - RNA, 19 nt, Homo sapiens
  misc_RNA (1)...(19): siRNA sense strand
cugaacagccagaagaaac

SEQ ID NO: 2266131 - RNA, 19 nt, Homo sapiens
  misc_RNA (1)...(19): siRNA sense strand
gccuaugacagaagaggga

SEQ ID NO: 2266132 - RNA, 19 nt, Homo sapiens
  misc_RNA (1)...(19): siRNA sense strand
agggagaccuggagaccgu

SEQ ID NO: 2266133 - RNA, 19 nt, Homo sapiens
  misc_RNA (1)...(19): siRNA sense strand
cugcagaagauauggaaga

SEQ ID NO: 2266134 - RNA, 19 nt, Homo sapiens
  misc_RNA (1)...(19): siRNA sense strand
cagaagauauggaagagga

SEQ ID NO: 2266135 - RNA, 19 nt, Homo sapiens
  misc_RNA (1)...(19): siRNA sense strand
ugguaaacgcccugcagaa

SEQ ID NO: 2266136 - RNA, 19 nt, Homo sapiens
  misc_RNA (1)...(19): siRNA sense strand
aagauauggaagaggaaca

SEQ ID NO: 2266137 - RNA, 19 nt, Homo sapiens
  misc_RNA (1)...(19): siRNA sense strand
caauggugaauuugguaaa

SEQ ID NO: 2266138 - RNA, 19 nt, Homo sapiens
  misc_RNA (1)...(19): siRNA sense strand
agaagauauggaagaggaa

SEQ ID NO: 2266139 - RNA, 19 nt, Homo sapiens
  misc_RNA (1)...(19): siRNA sense strand
cgucaugagucgggagcuu

SEQ ID NO: 2266140 - RNA, 19 nt, Homo sapiens
  misc_RNA (1)...(19): siRNA sense strand
gcuuaaauuaccaacacua

SEQ ID NO: 2266141 - RNA, 19 nt, Homo sapiens
  misc_RNA (1)...(19): siRNA sense strand
uggaagaggaacaagcauu

SEQ ID NO: 2266142 - RNA, 19 nt, Homo sapiens
  misc_RNA (1)...(19): siRNA sense strand
gcaagaauauuaaggcucu

SEQ ID NO: 2266143 - RNA, 19 nt, Homo sapiens
  misc_RNA (1)...(19): siRNA sense strand
uguucuuauuggaggaaaa

SEQ ID NO: 2266144 - RNA, 19 nt, Homo sapiens
  misc_RNA (1)...(19): siRNA sense strand
uggaaaaggaggcaagaau

SEQ ID NO: 2266145 - RNA, 19 nt, Homo sapiens
  misc_RNA (1)...(19): siRNA sense strand
ggggagaccucauggccua

SEQ ID NO: 2266146 - RNA, 19 nt, Homo sapiens
  misc_RNA (1)...(19): siRNA sense strand
gcacaguauuugcugcaga

SEQ ID NO: 2266147 - RNA, 19 nt, Homo sapiens
  misc_RNA (1)...(19): siRNA sense strand
cuaugacagaagagggaga

SEQ ID NO: 2266148 - RNA, 19 nt, Homo sapiens
  misc_RNA (1)...(19): siRNA sense strand
uggaucuauuauuggcaaa

SEQ ID NO: 2266149 - RNA, 19 nt, Homo sapiens
  misc_RNA (1)...(19): siRNA sense strand
cuguggaaugcuuaaauua

SEQ ID NO: 2266150 - RNA, 19 nt, Homo sapiens
  misc_RNA (1)...(19): siRNA sense strand
caucaaaggacgugcacag

SEQ ID NO: 2266151 - RNA, 19 nt, Homo sapiens
  misc_RNA (1)...(19): siRNA sense strand
cgauaggguuguagagugc

SEQ ID NO: 2266152 - RNA, 19 nt, Homo sapiens
  misc_RNA (1)...(19): siRNA sense strand
gcugaugaaacuugggacu

SEQ ID NO: 2266153 - RNA, 19 nt, Homo sapiens
  misc_RNA (1)...(19): siRNA sense strand
ggacucugcaauagauaca

SEQ ID NO: 2266154 - RNA, 19 nt, Homo sapiens
  misc_RNA (1)...(19): siRNA sense strand
ucagaauggcagauggcuu

SEQ ID NO: 2266155 - RNA, 19 nt, Homo sapiens
  misc_RNA (1)...(19): siRNA sense strand
gcaaagguggucagcggau

SEQ ID NO: 2266156 - RNA, 19 nt, Homo sapiens
  misc_RNA (1)...(19): siRNA sense strand
uggaagagggccugcaguu

SEQ ID NO: 2266157 - RNA, 19 nt, Homo sapiens
  misc_RNA (1)...(19): siRNA sense strand
agauauggaagaggaacaa

SEQ ID NO: 2266158 - RNA, 19 nt, Homo sapiens
  misc_RNA (1)...(19): siRNA sense strand
ccgagcgcauauugaguau

SEQ ID NO: 2266159 - RNA, 19 nt, Homo sapiens
  misc_RNA (1)...(19): siRNA sense strand
cugaacagccagaagaaac

SEQ ID NO: 2266160 - RNA, 19 nt, Homo sapiens
  misc_RNA (1)...(19): siRNA sense strand
gccuaugacagaagaggga

SEQ ID NO: 2266161 - RNA, 19 nt, Homo sapiens
  misc_RNA (1)...(19): siRNA sense strand
agggagaccuggagaccgu

SEQ ID NO: 2266162 - RNA, 19 nt, Homo sapiens
  misc_RNA (1)...(19): siRNA sense strand
cugcagaagauauggaaga

SEQ ID NO: 2266163 - RNA, 19 nt, Homo sapiens
  misc_RNA (1)...(19): siRNA sense strand
cagaagauauggaagagga

SEQ ID NO: 2266164 - RNA, 19 nt, Homo sapiens
  misc_RNA (1)...(19): siRNA sense strand
ugguaaacgcccugcagaa

SEQ ID NO: 2266165 - RNA, 19 nt, Homo sapiens
  misc_RNA (1)...(19): siRNA sense strand
aagauauggaagaggaaca

SEQ ID NO: 2266166 - RNA, 19 nt, Homo sapiens
  misc_RNA (1)...(19): siRNA sense strand
caauggugaauuugguaaa

SEQ ID NO: 2266167 - RNA, 19 nt, Homo sapiens
  misc_RNA (1)...(19): siRNA sense strand
agaagauauggaagaggaa

SEQ ID NO: 2266168 - RNA, 19 nt, Homo sapiens
  misc_RNA (1)...(19): siRNA sense strand
cgucaugagucgggagcuu

SEQ ID NO: 2266169 - RNA, 19 nt, Homo sapiens
  misc_RNA (1)...(19): siRNA sense strand
gcuuaaauuaccaacacua

SEQ ID NO: 2266170 - RNA, 19 nt, Homo sapiens
  misc_RNA (1)...(19): siRNA sense strand
uggaagaggaacaagcauu

SEQ ID NO: 2266171 - RNA, 19 nt, Homo sapiens
  misc_RNA (1)...(19): siRNA sense strand
gcaagaauauuaaggcucu

SEQ ID NO: 2266172 - RNA, 19 nt, Homo sapiens
  misc_RNA (1)...(19): siRNA sense strand
uguucuuauuggaggaaaa

SEQ ID NO: 2266173 - RNA, 19 nt, Homo sapiens
  misc_RNA (1)...(19): siRNA sense strand
uggaaaaggaggcaagaau

SEQ ID NO: 2266174 - RNA, 19 nt, Homo sapiens
  misc_RNA (1)...(19): siRNA sense strand
ggggagaccucauggccua

SEQ ID NO: 2266175 - RNA, 19 nt, Homo sapiens
  misc_RNA (1)...(19): siRNA sense strand
gcacaguauuugcugcaga

SEQ ID NO: 2266176 - RNA, 19 nt, Homo sapiens
  misc_RNA (1)...(19): siRNA sense strand
cuaugacagaagagggaga

SEQ ID NO: 2266177 - RNA, 19 nt, Homo sapiens
  misc_RNA (1)...(19): siRNA sense strand
uggaucuauuauuggcaaa

SEQ ID NO: 2266178 - RNA, 19 nt, Homo sapiens
  misc_RNA (1)...(19): siRNA sense strand
cuguggaaugcuuaaauua

SEQ ID NO: 2266179 - RNA, 19 nt, Homo sapiens
  misc_RNA (1)...(19): siRNA sense strand
caucaaaggacgugcacag

SEQ ID NO: 2266180 - RNA, 19 nt, Homo sapiens
  misc_RNA (1)...(19): siRNA sense strand
cgauaggguuguagagugc

SEQ ID NO: 2266181 - RNA, 19 nt, Homo sapiens
  misc_RNA (1)...(19): siRNA sense strand
gcugaugaaacuugggacu

SEQ ID NO: 2266182 - RNA, 19 nt, Homo sapiens
  misc_RNA (1)...(19): siRNA sense strand
ggacucugcaauagauaca

SEQ ID NO: 2266183 - RNA, 19 nt, Homo sapiens
  misc_RNA (1)...(19): siRNA sense strand
ucagaauggcagauggcuu

SEQ ID NO: 2266184 - RNA, 19 nt, Homo sapiens
  misc_RNA (1)...(19): siRNA sense strand
gcaaagguggucagcggau

SEQ ID NO: 2266185 - RNA, 19 nt, Homo sapiens
  misc_RNA (1)...(19): siRNA sense strand
uggaagagggccugcaguu

SEQ ID NO: 2266186 - RNA, 19 nt, Homo sapiens
  misc_RNA (1)...(19): siRNA sense strand
agauauggaagaggaacaa

SEQ ID NO: 2266187 - RNA, 19 nt, Homo sapiens
  misc_RNA (1)...(19): siRNA sense strand
ccgagcgcauauugaguau

SEQ ID NO: 2266188 - RNA, 19 nt, Homo sapiens
  misc_RNA (1)...(19): siRNA sense strand
cugaacagccagaagaaac

SEQ ID NO: 2266189 - RNA, 19 nt, Homo sapiens
  misc_RNA (1)...(19): siRNA sense strand
gccuaugacagaagaggga

SEQ ID NO: 2266190 - RNA, 19 nt, Homo sapiens
  misc_RNA (1)...(19): siRNA sense strand
agggagaccuggagaccgu

SEQ ID NO: 2266191 - RNA, 19 nt, Homo sapiens
  misc_RNA (1)...(19): siRNA sense strand
ccaacuacaucgagcccaa

SEQ ID NO: 2266192 - RNA, 19 nt, Homo sapiens
  misc_RNA (1)...(19): siRNA sense strand
ugucugagcgccaggucaa

SEQ ID NO: 2266193 - RNA, 19 nt, Homo sapiens
  misc_RNA (1)...(19): siRNA sense strand
gcacaaacucagagcccac

SEQ ID NO: 2266194 - RNA, 19 nt, Homo sapiens
  misc_RNA (1)...(19): siRNA sense strand
agaagaagcgcgagcgaga

SEQ ID NO: 2266195 - RNA, 19 nt, Homo sapiens
  misc_RNA (1)...(19): siRNA sense strand
ccaaggaggcagcuggaga

SEQ ID NO: 2266196 - RNA, 19 nt, Homo sapiens
  misc_RNA (1)...(19): siRNA sense strand
gcagaagaagcgcgagcga

SEQ ID NO: 2266197 - RNA, 19 nt, Homo sapiens
  misc_RNA (1)...(19): siRNA sense strand
cagaaggagacggaggcua

SEQ ID NO: 2266198 - RNA, 19 nt, Homo sapiens
  misc_RNA (1)...(19): siRNA sense strand
gcaugaagcacaagcggca

SEQ ID NO: 2266199 - RNA, 19 nt, Homo sapiens
  misc_RNA (1)...(19): siRNA sense strand
uggaugaaagagaagaaau

SEQ ID NO: 2266200 - RNA, 19 nt, Homo sapiens
  misc_RNA (1)...(19): siRNA sense strand
uggaacuggagaaggaauu

SEQ ID NO: 2266201 - RNA, 19 nt, Homo sapiens
  misc_RNA (1)...(19): siRNA sense strand
cuuggaugaaagagaagaa

SEQ ID NO: 2266202 - RNA, 19 nt, Homo sapiens
  misc_RNA (1)...(19): siRNA sense strand
ucaccgaaaggcaggucaa

SEQ ID NO: 2266203 - RNA, 19 nt, Homo sapiens
  misc_RNA (1)...(19): siRNA sense strand
aggaaagcaaagaggaaau

SEQ ID NO: 2266204 - RNA, 19 nt, Homo sapiens
  misc_RNA (1)...(19): siRNA sense strand
agaaagaagaggugcccuu

SEQ ID NO: 2266205 - RNA, 19 nt, Homo sapiens
  misc_RNA (1)...(19): siRNA sense strand
ccaaaagagaagugaacca

SEQ ID NO: 2266206 - RNA, 19 nt, Homo sapiens
  misc_RNA (1)...(19): siRNA sense strand
aaagcaaagaggaaaucaa

SEQ ID NO: 2266207 - RNA, 19 nt, Homo sapiens
  misc_RNA (1)...(19): siRNA sense strand
aaggaaagcaaagaggaaa

SEQ ID NO: 2266208 - RNA, 19 nt, Homo sapiens
  misc_RNA (1)...(19): siRNA sense strand
ucaaguagacaguuggaca

SEQ ID NO: 2266209 - RNA, 19 nt, Homo sapiens
  misc_RNA (1)...(19): siRNA sense strand
acauuaaggaagaauccaa

SEQ ID NO: 2266210 - RNA, 19 nt, Homo sapiens
  misc_RNA (1)...(19): siRNA sense strand
cugucaugcuccagcucaa

SEQ ID NO: 2266211 - RNA, 19 nt, Homo sapiens
  misc_RNA (1)...(19): siRNA sense strand
cgggaaaacccaagaguac

SEQ ID NO: 2266212 - RNA, 19 nt, Homo sapiens
  misc_RNA (1)...(19): siRNA sense strand
uggaaaagaagaugaacga

SEQ ID NO: 2266213 - RNA, 19 nt, Homo sapiens
  misc_RNA (1)...(19): siRNA sense strand
gagaagugaaccaccaaaa

SEQ ID NO: 2266214 - RNA, 19 nt, Homo sapiens
  misc_RNA (1)...(19): siRNA sense strand
gcccagcugcagauggaaa

SEQ ID NO: 2266215 - RNA, 19 nt, Homo sapiens
  misc_RNA (1)...(19): siRNA sense strand
aaagagaagugaaccacca

SEQ ID NO: 2266216 - RNA, 19 nt, Homo sapiens
  misc_RNA (1)...(19): siRNA sense strand
ccaaaauauggguaugaau

SEQ ID NO: 2266217 - RNA, 19 nt, Homo sapiens
  misc_RNA (1)...(19): siRNA sense strand
ugcaggagaaggaaagcaa

SEQ ID NO: 2266218 - RNA, 19 nt, Homo sapiens
  misc_RNA (1)...(19): siRNA sense strand
aggaagaagaggaagacaa

SEQ ID NO: 2266219 - RNA, 19 nt, Homo sapiens
  misc_RNA (1)...(19): siRNA sense strand
gagaagaggaggaggagga

SEQ ID NO: 2266220 - RNA, 19 nt, Homo sapiens
  misc_RNA (1)...(19): siRNA sense strand
gggaagaugaugaaggaga

SEQ ID NO: 2266221 - RNA, 19 nt, Homo sapiens
  misc_RNA (1)...(19): siRNA sense strand
acagaaaggaagagguuga

SEQ ID NO: 2266222 - RNA, 19 nt, Homo sapiens
  misc_RNA (1)...(19): siRNA sense strand
aggaagagguugaggcugu

SEQ ID NO: 2266223 - RNA, 19 nt, Homo sapiens
  misc_RNA (1)...(19): siRNA sense strand
aggaagaugaggaggauga

SEQ ID NO: 2266224 - RNA, 19 nt, Homo sapiens
  misc_RNA (1)...(19): siRNA sense strand
aggaagaggaggaggagga

SEQ ID NO: 2266225 - RNA, 19 nt, Homo sapiens
  misc_RNA (1)...(19): siRNA sense strand
aggaggaggaggaggaaga

SEQ ID NO: 2266226 - RNA, 19 nt, Homo sapiens
  misc_RNA (1)...(19): siRNA sense strand
aggaagaagaugaggaugu

SEQ ID NO: 2266227 - RNA, 19 nt, Homo sapiens
  misc_RNA (1)...(19): siRNA sense strand
aggaggaagaagaggaaga

SEQ ID NO: 2266228 - RNA, 19 nt, Homo sapiens
  misc_RNA (1)...(19): siRNA sense strand
aggaggaggaggaggaaga

SEQ ID NO: 2266229 - RNA, 19 nt, Homo sapiens
  misc_RNA (1)...(19): siRNA sense strand
ggucaaggauagaagccau

SEQ ID NO: 2266230 - RNA, 19 nt, Homo sapiens
  misc_RNA (1)...(19): siRNA sense strand
aggaaaaggagaaggaaga

SEQ ID NO: 2266231 - RNA, 19 nt, Homo sapiens
  misc_RNA (1)...(19): siRNA sense strand
uagaugaggaagaggaaga

SEQ ID NO: 2266232 - RNA, 19 nt, Homo sapiens
  misc_RNA (1)...(19): siRNA sense strand
gcgaggaggaagaggagga

SEQ ID NO: 2266233 - RNA, 19 nt, Homo sapiens
  misc_RNA (1)...(19): siRNA sense strand
ccaugaagaagaugacaau

SEQ ID NO: 2266234 - RNA, 19 nt, Homo sapiens
  misc_RNA (1)...(19): siRNA sense strand
ggauguuuccacagagaau

SEQ ID NO: 2266235 - RNA, 19 nt, Homo sapiens
  misc_RNA (1)...(19): siRNA sense strand
gugaaaaggaggaugaaga

SEQ ID NO: 2266236 - RNA, 19 nt, Homo sapiens
  misc_RNA (1)...(19): siRNA sense strand
aagacgaggaugaggauga

SEQ ID NO: 2266237 - RNA, 19 nt, Homo sapiens
  misc_RNA (1)...(19): siRNA sense strand
augaagaagaugacaauga

SEQ ID NO: 2266238 - RNA, 19 nt, Homo sapiens
  misc_RNA (1)...(19): siRNA sense strand
gcucagaggggaugggcua

SEQ ID NO: 2266239 - RNA, 19 nt, Homo sapiens
  misc_RNA (1)...(19): siRNA sense strand
aggaagaggaagaagagga

SEQ ID NO: 2266240 - RNA, 19 nt, Homo sapiens
  misc_RNA (1)...(19): siRNA sense strand
ccaugggagugaagaggau

SEQ ID NO: 2266241 - RNA, 19 nt, Homo sapiens
  misc_RNA (1)...(19): siRNA sense strand
augaagaagaugacgauga

SEQ ID NO: 2266242 - RNA, 19 nt, Homo sapiens
  misc_RNA (1)...(19): siRNA sense strand
aggaggaggaggaagaaga

SEQ ID NO: 2266243 - RNA, 19 nt, Homo sapiens
  misc_RNA (1)...(19): siRNA sense strand
aggaagacaaggaggagga

SEQ ID NO: 2266244 - RNA, 19 nt, Homo sapiens
  misc_RNA (1)...(19): siRNA sense strand
acaaggaggaggaggagga

SEQ ID NO: 2266245 - RNA, 19 nt, Homo sapiens
  misc_RNA (1)...(19): siRNA sense strand
aagaggaagaagaggagau

SEQ ID NO: 2266246 - RNA, 19 nt, Homo sapiens
  misc_RNA (1)...(19): siRNA sense strand
aggaugaggaggaagguca

SEQ ID NO: 2266247 - RNA, 19 nt, Homo sapiens
  misc_RNA (1)...(19): siRNA sense strand
aagacaaggaggaggagga

SEQ ID NO: 2266248 - RNA, 19 nt, Homo sapiens
  misc_RNA (1)...(19): siRNA sense strand
cgaggaagaagaugaggau

SEQ ID NO: 2266249 - RNA, 19 nt, Homo sapiens
  misc_RNA (1)...(19): siRNA sense strand
aggaggaggaggaggagga

SEQ ID NO: 2266250 - RNA, 19 nt, Homo sapiens
  misc_RNA (1)...(19): siRNA sense strand
aggaggaggaggaggagga

SEQ ID NO: 2266251 - RNA, 19 nt, Homo sapiens
  misc_RNA (1)...(19): siRNA sense strand
aggaggaggaggaggagga

SEQ ID NO: 2266252 - RNA, 19 nt, Homo sapiens
  misc_RNA (1)...(19): siRNA sense strand
acagagacgaggaagaaga

SEQ ID NO: 2266253 - RNA, 19 nt, Homo sapiens
  misc_RNA (1)...(19): siRNA sense strand
ugaaccaggaggaggaaga

SEQ ID NO: 2266254 - RNA, 19 nt, Homo sapiens
  misc_RNA (1)...(19): siRNA sense strand
aggaggaggaggaggagga

SEQ ID NO: 2266255 - RNA, 19 nt, Homo sapiens
  misc_RNA (1)...(19): siRNA sense strand
aggaggaagaggaggagga

SEQ ID NO: 2266256 - RNA, 19 nt, Homo sapiens
  misc_RNA (1)...(19): siRNA sense strand
aaggagaagaggaggagga

SEQ ID NO: 2266257 - RNA, 19 nt, Homo sapiens
  misc_RNA (1)...(19): siRNA sense strand
gggaggaagaugaggaggu

SEQ ID NO: 2266258 - RNA, 19 nt, Homo sapiens
  misc_RNA (1)...(19): siRNA sense strand
aagaugucuccaaggaaua

SEQ ID NO: 2266259 - RNA, 19 nt, Homo sapiens
  misc_RNA (1)...(19): siRNA sense strand
gccacagagacgaggaaga

SEQ ID NO: 2266260 - RNA, 19 nt, Homo sapiens
  misc_RNA (1)...(19): siRNA sense strand
gccaugaagaagaugacaa

SEQ ID NO: 2266261 - RNA, 19 nt, Homo sapiens
  misc_RNA (1)...(19): siRNA sense strand
agaaacuggccauggucaa

SEQ ID NO: 2266262 - RNA, 19 nt, Homo sapiens
  misc_RNA (1)...(19): siRNA sense strand
auagaagccauuugaggaa

SEQ ID NO: 2266263 - RNA, 19 nt, Homo sapiens
  misc_RNA (1)...(19): siRNA sense strand
aagaagaggaagacaagga

SEQ ID NO: 2266264 - RNA, 19 nt, Homo sapiens
  misc_RNA (1)...(19): siRNA sense strand
gugaggaggucuuugcaga

SEQ ID NO: 2266265 - RNA, 19 nt, Homo sapiens
  misc_RNA (1)...(19): siRNA sense strand
gagugaagaggaugaggau

SEQ ID NO: 2266266 - RNA, 19 nt, Homo sapiens
  misc_RNA (1)...(19): siRNA sense strand
aagaggaggaggaggagga

SEQ ID NO: 2266267 - RNA, 19 nt, Homo sapiens
  misc_RNA (1)...(19): siRNA sense strand
aggaagaagacgaggagag

SEQ ID NO: 2266268 - RNA, 19 nt, Homo sapiens
  misc_RNA (1)...(19): siRNA sense strand
aggaggggcuggaggaaga

SEQ ID NO: 2266269 - RNA, 19 nt, Homo sapiens
  misc_RNA (1)...(19): siRNA sense strand
uguagaugaggaagaggaa

SEQ ID NO: 2266270 - RNA, 19 nt, Homo sapiens
  misc_RNA (1)...(19): siRNA sense strand
ggaggaaagcggugaggac

SEQ ID NO: 2266271 - RNA, 19 nt, Homo sapiens
  misc_RNA (1)...(19): siRNA sense strand
augaggaagaggaagaaga

SEQ ID NO: 2266272 - RNA, 19 nt, Homo sapiens
  misc_RNA (1)...(19): siRNA sense strand
aggaagaagaggagaucac

SEQ ID NO: 2266273 - RNA, 19 nt, Homo sapiens
  misc_RNA (1)...(19): siRNA sense strand
acuuccaagaugaguauaa

SEQ ID NO: 2266274 - RNA, 19 nt, Homo sapiens
  misc_RNA (1)...(19): siRNA sense strand
gauagaagccauuugagga

SEQ ID NO: 2266275 - RNA, 19 nt, Homo sapiens
  misc_RNA (1)...(19): siRNA sense strand
uggcagacaugcuggaaac

SEQ ID NO: 2266276 - RNA, 19 nt, Homo sapiens
  misc_RNA (1)...(19): siRNA sense strand
augaaggagaagaggagga

SEQ ID NO: 2266277 - RNA, 19 nt, Homo sapiens
  misc_RNA (1)...(19): siRNA sense strand
ccaugaagaagaugacgau

SEQ ID NO: 2266278 - RNA, 19 nt, Homo sapiens
  misc_RNA (1)...(19): siRNA sense strand
aggaagacgaugaaaguuc

SEQ ID NO: 2266279 - RNA, 19 nt, Homo sapiens
  misc_RNA (1)...(19): siRNA sense strand
uugaagaggaugaagaugu

SEQ ID NO: 2266280 - RNA, 19 nt, Homo sapiens
  misc_RNA (1)...(19): siRNA sense strand
ccaagaccacagaaaggaa

SEQ ID NO: 2266281 - RNA, 19 nt, Homo sapiens
  misc_RNA (1)...(19): siRNA sense strand
caggacacacaguggucaa

SEQ ID NO: 2266282 - RNA, 19 nt, Homo sapiens
  misc_RNA (1)...(19): siRNA sense strand
gcacuaaucuucuaacaaa

SEQ ID NO: 2266283 - RNA, 19 nt, Homo sapiens
  misc_RNA (1)...(19): siRNA sense strand
ugaaaagauugcaggauua

SEQ ID NO: 2266284 - RNA, 19 nt, Homo sapiens
  misc_RNA (1)...(19): siRNA sense strand
uggcaagguuaauggaaaa

SEQ ID NO: 2266285 - RNA, 19 nt, Homo sapiens
  misc_RNA (1)...(19): siRNA sense strand
aaucaaaagcaacggaaaa

SEQ ID NO: 2266286 - RNA, 19 nt, Homo sapiens
  misc_RNA (1)...(19): siRNA sense strand
ggaaagaagccauggcaag

SEQ ID NO: 2266287 - RNA, 19 nt, Homo sapiens
  misc_RNA (1)...(19): siRNA sense strand
ugacauagagggagaugau

SEQ ID NO: 2266288 - RNA, 19 nt, Homo sapiens
  misc_RNA (1)...(19): siRNA sense strand
cugaaaagauugcaggauu

SEQ ID NO: 2266289 - RNA, 19 nt, Homo sapiens
  misc_RNA (1)...(19): siRNA sense strand
cuucuguggaugagguaua

SEQ ID NO: 2266290 - RNA, 19 nt, Homo sapiens
  misc_RNA (1)...(19): siRNA sense strand
ggauuaagccagauuuaca

SEQ ID NO: 2266291 - RNA, 19 nt, Homo sapiens
  misc_RNA (1)...(19): siRNA sense strand
agcagaaccaggugcgaaa

SEQ ID NO: 2266292 - RNA, 19 nt, Homo sapiens
  misc_RNA (1)...(19): siRNA sense strand
caggauuaagccagauuua

SEQ ID NO: 2266293 - RNA, 19 nt, Homo sapiens
  misc_RNA (1)...(19): siRNA sense strand
ggaagaauucuguucgaca

SEQ ID NO: 2266294 - RNA, 19 nt, Homo sapiens
  misc_RNA (1)...(19): siRNA sense strand
uggaaagaagccauggcaa

SEQ ID NO: 2266295 - RNA, 19 nt, Homo sapiens
  misc_RNA (1)...(19): siRNA sense strand
ggacagugagucagcagau

SEQ ID NO: 2266296 - RNA, 19 nt, Homo sapiens
  misc_RNA (1)...(19): siRNA sense strand
cguugugcauccaggucua

SEQ ID NO: 2266297 - RNA, 19 nt, Homo sapiens
  misc_RNA (1)...(19): siRNA sense strand
gcucaaagaggcagcugga

SEQ ID NO: 2266298 - RNA, 19 nt, Homo sapiens
  misc_RNA (1)...(19): siRNA sense strand
cggcaaugcauuucaucau

SEQ ID NO: 2266299 - RNA, 19 nt, Homo sapiens
  misc_RNA (1)...(19): siRNA sense strand
cgauuacaagagagugauu

SEQ ID NO: 2266300 - RNA, 19 nt, Homo sapiens
  misc_RNA (1)...(19): siRNA sense strand
gcauccaggucuagcgugu

SEQ ID NO: 2266301 - RNA, 19 nt, Homo sapiens
  misc_RNA (1)...(19): siRNA sense strand
ccagauaagagagcugaaa

SEQ ID NO: 2266302 - RNA, 19 nt, Homo sapiens
  misc_RNA (1)...(19): siRNA sense strand
cagaugaugaacucacaaa

SEQ ID NO: 2266303 - RNA, 19 nt, Homo sapiens
  misc_RNA (1)...(19): siRNA sense strand
ucuaguggacagugaguca

SEQ ID NO: 2266304 - RNA, 19 nt, Homo sapiens
  misc_RNA (1)...(19): siRNA sense strand
aagaauucuguucgacaua

SEQ ID NO: 2266305 - RNA, 19 nt, Homo sapiens
  misc_RNA (1)...(19): siRNA sense strand
cugcaaagacacaaaauca

SEQ ID NO: 2266306 - RNA, 19 nt, Homo sapiens
  misc_RNA (1)...(19): siRNA sense strand
gauuaagccagauuuacaa

SEQ ID NO: 2266307 - RNA, 19 nt, Homo sapiens
  misc_RNA (1)...(19): siRNA sense strand
gagagugauucuuuagcca

SEQ ID NO: 2266308 - RNA, 19 nt, Homo sapiens
  misc_RNA (1)...(19): siRNA sense strand
ucuuggagacaguggcuau

SEQ ID NO: 2266309 - RNA, 19 nt, Homo sapiens
  misc_RNA (1)...(19): siRNA sense strand
gagaacacgguuagagaaa

SEQ ID NO: 2266310 - RNA, 19 nt, Homo sapiens
  misc_RNA (1)...(19): siRNA sense strand
gcagaagauuaaaggguga

SEQ ID NO: 2266311 - RNA, 19 nt, Homo sapiens
  misc_RNA (1)...(19): siRNA sense strand
gaguauugcuccuggaaaa

SEQ ID NO: 2266312 - RNA, 19 nt, Homo sapiens
  misc_RNA (1)...(19): siRNA sense strand
caucaaucgcauacagaaa

SEQ ID NO: 2266313 - RNA, 19 nt, Homo sapiens
  misc_RNA (1)...(19): siRNA sense strand
ccugaaguguaaagagaau

SEQ ID NO: 2266314 - RNA, 19 nt, Homo sapiens
  misc_RNA (1)...(19): siRNA sense strand
ccaugaugaaacagaaaua

SEQ ID NO: 2266315 - RNA, 19 nt, Homo sapiens
  misc_RNA (1)...(19): siRNA sense strand
ccgugaagacuuugaauau

SEQ ID NO: 2266316 - RNA, 19 nt, Homo sapiens
  misc_RNA (1)...(19): siRNA sense strand
gcuuuaaagaagagggugu

SEQ ID NO: 2266317 - RNA, 19 nt, Homo sapiens
  misc_RNA (1)...(19): siRNA sense strand
aauuaaagauguugccaga

SEQ ID NO: 2266318 - RNA, 19 nt, Homo sapiens
  misc_RNA (1)...(19): siRNA sense strand
gggcagaaccagaucacau

SEQ ID NO: 2266319 - RNA, 19 nt, Homo sapiens
  misc_RNA (1)...(19): siRNA sense strand
gaccagaggauguggccaa

SEQ ID NO: 2266320 - RNA, 19 nt, Homo sapiens
  misc_RNA (1)...(19): siRNA sense strand
ugcaaauggcagugaacaa

SEQ ID NO: 2266321 - RNA, 19 nt, Homo sapiens
  misc_RNA (1)...(19): siRNA sense strand
cagaagauuuggaugggau

SEQ ID NO: 2266322 - RNA, 19 nt, Homo sapiens
  misc_RNA (1)...(19): siRNA sense strand
aaucagaggaccagaggau

SEQ ID NO: 2266323 - RNA, 19 nt, Homo sapiens
  misc_RNA (1)...(19): siRNA sense strand
uguuuauagaggugugaaa

SEQ ID NO: 2266324 - RNA, 19 nt, Homo sapiens
  misc_RNA (1)...(19): siRNA sense strand
gaaguauaucauugaggaa

SEQ ID NO: 2266325 - RNA, 19 nt, Homo sapiens
  misc_RNA (1)...(19): siRNA sense strand
cagaaaugcaauaugugaa

SEQ ID NO: 2266326 - RNA, 19 nt, Homo sapiens
  misc_RNA (1)...(19): siRNA sense strand
uggucaaguuuguagauau

SEQ ID NO: 2266327 - RNA, 19 nt, Homo sapiens
  misc_RNA (1)...(19): siRNA sense strand
cagugaacaagguggagua

SEQ ID NO: 2266328 - RNA, 19 nt, Homo sapiens
  misc_RNA (1)...(19): siRNA sense strand
agaaugaaccgcagaagau

SEQ ID NO: 2266329 - RNA, 19 nt, Homo sapiens
  misc_RNA (1)...(19): siRNA sense strand
cugaauugauguaccagaa

SEQ ID NO: 2266330 - RNA, 19 nt, Homo sapiens
  misc_RNA (1)...(19): siRNA sense strand
uugauaagacacugggaau

SEQ ID NO: 2266331 - RNA, 19 nt, Homo sapiens
  misc_RNA (1)...(19): siRNA sense strand
guucaagauccuucaguau

SEQ ID NO: 2266332 - RNA, 19 nt, Homo sapiens
  misc_RNA (1)...(19): siRNA sense strand
auaucaagucuuuggagaa

SEQ ID NO: 2266333 - RNA, 19 nt, Homo sapiens
  misc_RNA (1)...(19): siRNA sense strand
agaaggaggaagaaauaga

SEQ ID NO: 2266334 - RNA, 19 nt, Homo sapiens
  misc_RNA (1)...(19): siRNA sense strand
aagcaaagucugaaggaac

SEQ ID NO: 2266335 - RNA, 19 nt, Homo sapiens
  misc_RNA (1)...(19): siRNA sense strand
cuuaaaggcaagaaguaca

SEQ ID NO: 2266336 - RNA, 19 nt, Homo sapiens
  misc_RNA (1)...(19): siRNA sense strand
ugacagauuucgcaggaca

SEQ ID NO: 2266337 - RNA, 19 nt, Homo sapiens
  misc_RNA (1)...(19): siRNA sense strand
agcaaagucugaaggaaca

SEQ ID NO: 2266338 - RNA, 19 nt, Homo sapiens
  misc_RNA (1)...(19): siRNA sense strand
gaaggaagaagaaggcaca

SEQ ID NO: 2266339 - RNA, 19 nt, Homo sapiens
  misc_RNA (1)...(19): siRNA sense strand
gguuugugcgaguggagaa

SEQ ID NO: 2266340 - RNA, 19 nt, Homo sapiens
  misc_RNA (1)...(19): siRNA sense strand
ccaauugguauguuagaau

SEQ ID NO: 2266341 - RNA, 19 nt, Homo sapiens
  misc_RNA (1)...(19): siRNA sense strand
gauaucaagucuuuggaga

SEQ ID NO: 2266342 - RNA, 19 nt, Homo sapiens
  misc_RNA (1)...(19): siRNA sense strand
caaugguagaugaaggaau

SEQ ID NO: 2266343 - RNA, 19 nt, Homo sapiens
  misc_RNA (1)...(19): siRNA sense strand
augagauccuugaaagauu

SEQ ID NO: 2266344 - RNA, 19 nt, Homo sapiens
  misc_RNA (1)...(19): siRNA sense strand
gaauaugaagacuguguau

SEQ ID NO: 2266345 - RNA, 19 nt, Homo sapiens
  misc_RNA (1)...(19): siRNA sense strand
aaguauggcauucggcuaa

SEQ ID NO: 2266346 - RNA, 19 nt, Homo sapiens
  misc_RNA (1)...(19): siRNA sense strand
ggauuacagaguauaacaa

SEQ ID NO: 2266347 - RNA, 19 nt, Homo sapiens
  misc_RNA (1)...(19): siRNA sense strand
cagacuuggccgauggauu

SEQ ID NO: 2266348 - RNA, 19 nt, Homo sapiens
  misc_RNA (1)...(19): siRNA sense strand
cuaugagauccuugaaaga

SEQ ID NO: 2266349 - RNA, 19 nt, Homo sapiens
  misc_RNA (1)...(19): siRNA sense strand
cugcugaagaagagaaaau

SEQ ID NO: 2266350 - RNA, 19 nt, Homo sapiens
  misc_RNA (1)...(19): siRNA sense strand
ccagaguugguacgagaaa

SEQ ID NO: 2266351 - RNA, 19 nt, Homo sapiens
  misc_RNA (1)...(19): siRNA sense strand
cguaauugugaaugggcuu

SEQ ID NO: 2266352 - RNA, 19 nt, Homo sapiens
  misc_RNA (1)...(19): siRNA sense strand
aaacacaguugaagggauc

SEQ ID NO: 2266353 - RNA, 19 nt, Homo sapiens
  misc_RNA (1)...(19): siRNA sense strand
caaucagugccgagcaauu

SEQ ID NO: 2266354 - RNA, 19 nt, Homo sapiens
  misc_RNA (1)...(19): siRNA sense strand
acaguguacuauaaagcaa

SEQ ID NO: 2266355 - RNA, 19 nt, Homo sapiens
  misc_RNA (1)...(19): siRNA sense strand
augaauugcacgaugaaga

SEQ ID NO: 2266356 - RNA, 19 nt, Homo sapiens
  misc_RNA (1)...(19): siRNA sense strand
acucagaugcucaggcuuu

SEQ ID NO: 2266357 - RNA, 19 nt, Homo sapiens
  misc_RNA (1)...(19): siRNA sense strand
gcgaugacuuugaggaggu

SEQ ID NO: 2266358 - RNA, 19 nt, Homo sapiens
  misc_RNA (1)...(19): siRNA sense strand
ggugguaugcauuggguca

SEQ ID NO: 2266359 - RNA, 19 nt, Homo sapiens
  misc_RNA (1)...(19): siRNA sense strand
ggucaguggcggaacuuga

SEQ ID NO: 2266360 - RNA, 19 nt, Homo sapiens
  misc_RNA (1)...(19): siRNA sense strand
aggaggaagaaauagaauu

SEQ ID NO: 2266361 - RNA, 19 nt, Homo sapiens
  misc_RNA (1)...(19): siRNA sense strand
aucuaaaggugcugauuga

SEQ ID NO: 2266362 - RNA, 19 nt, Homo sapiens
  misc_RNA (1)...(19): siRNA sense strand
augaaaucacaguguacua

SEQ ID NO: 2266363 - RNA, 19 nt, Homo sapiens
  misc_RNA (1)...(19): siRNA sense strand
auggcuuaccuguggaaua

SEQ ID NO: 2266364 - RNA, 19 nt, Homo sapiens
  misc_RNA (1)...(19): siRNA sense strand
gaaucagucuggugggucu

SEQ ID NO: 2266365 - RNA, 19 nt, Homo sapiens
  misc_RNA (1)...(19): siRNA sense strand
uggcggaacuugaagaacu

SEQ ID NO: 2266366 - RNA, 19 nt, Homo sapiens
  misc_RNA (1)...(19): siRNA sense strand
aaaaugagcaaacggaaaa

SEQ ID NO: 2266367 - RNA, 19 nt, Homo sapiens
  misc_RNA (1)...(19): siRNA sense strand
aagaagagggugugcggga

SEQ ID NO: 2266368 - RNA, 19 nt, Homo sapiens
  misc_RNA (1)...(19): siRNA sense strand
uuguagauauucugaccaa

SEQ ID NO: 2266369 - RNA, 19 nt, Homo sapiens
  misc_RNA (1)...(19): siRNA sense strand
ccaucaagauccagaagcu

SEQ ID NO: 2266370 - RNA, 19 nt, Homo sapiens
  misc_RNA (1)...(19): siRNA sense strand
aguauaucauugaggaacu

SEQ ID NO: 2266371 - RNA, 19 nt, Homo sapiens
  misc_RNA (1)...(19): siRNA sense strand
uguguauguuucuguguua

SEQ ID NO: 2266372 - RNA, 19 nt, Homo sapiens
  misc_RNA (1)...(19): siRNA sense strand
gugugaaagucaugcccuu

SEQ ID NO: 2266373 - RNA, 19 nt, Homo sapiens
  misc_RNA (1)...(19): siRNA sense strand
auacagaaacuucgcaaaa

SEQ ID NO: 2266374 - RNA, 19 nt, Homo sapiens
  misc_RNA (1)...(19): siRNA sense strand
uuacugagucuuaguggaa

SEQ ID NO: 2266375 - RNA, 19 nt, Homo sapiens
  misc_RNA (1)...(19): siRNA sense strand
gagaacacgguuagagaaa

SEQ ID NO: 2266376 - RNA, 19 nt, Homo sapiens
  misc_RNA (1)...(19): siRNA sense strand
gcagaagauuaaaggguga

SEQ ID NO: 2266377 - RNA, 19 nt, Homo sapiens
  misc_RNA (1)...(19): siRNA sense strand
gaguauugcuccuggaaaa

SEQ ID NO: 2266378 - RNA, 19 nt, Homo sapiens
  misc_RNA (1)...(19): siRNA sense strand
caucaaucgcauacagaaa

SEQ ID NO: 2266379 - RNA, 19 nt, Homo sapiens
  misc_RNA (1)...(19): siRNA sense strand
ccugaaguguaaagagaau

SEQ ID NO: 2266380 - RNA, 19 nt, Homo sapiens
  misc_RNA (1)...(19): siRNA sense strand
ccaugaugaaacagaaaua

SEQ ID NO: 2266381 - RNA, 19 nt, Homo sapiens
  misc_RNA (1)...(19): siRNA sense strand
ccgugaagacuuugaauau

SEQ ID NO: 2266382 - RNA, 19 nt, Homo sapiens
  misc_RNA (1)...(19): siRNA sense strand
gcuuuaaagaagagggugu

SEQ ID NO: 2266383 - RNA, 19 nt, Homo sapiens
  misc_RNA (1)...(19): siRNA sense strand
aauuaaagauguugccaga

SEQ ID NO: 2266384 - RNA, 19 nt, Homo sapiens
  misc_RNA (1)...(19): siRNA sense strand
gggcagaaccagaucacau

SEQ ID NO: 2266385 - RNA, 19 nt, Homo sapiens
  misc_RNA (1)...(19): siRNA sense strand
gaccagaggauguggccaa

SEQ ID NO: 2266386 - RNA, 19 nt, Homo sapiens
  misc_RNA (1)...(19): siRNA sense strand
ugcaaauggcagugaacaa

SEQ ID NO: 2266387 - RNA, 19 nt, Homo sapiens
  misc_RNA (1)...(19): siRNA sense strand
cagaagauuuggaugggau

SEQ ID NO: 2266388 - RNA, 19 nt, Homo sapiens
  misc_RNA (1)...(19): siRNA sense strand
aaucagaggaccagaggau

SEQ ID NO: 2266389 - RNA, 19 nt, Homo sapiens
  misc_RNA (1)...(19): siRNA sense strand
uguuuauagaggugugaaa

SEQ ID NO: 2266390 - RNA, 19 nt, Homo sapiens
  misc_RNA (1)...(19): siRNA sense strand
gaaguauaucauugaggaa

SEQ ID NO: 2266391 - RNA, 19 nt, Homo sapiens
  misc_RNA (1)...(19): siRNA sense strand
cagaaaugcaauaugugaa

SEQ ID NO: 2266392 - RNA, 19 nt, Homo sapiens
  misc_RNA (1)...(19): siRNA sense strand
uggucaaguuuguagauau

SEQ ID NO: 2266393 - RNA, 19 nt, Homo sapiens
  misc_RNA (1)...(19): siRNA sense strand
cagugaacaagguggagua

SEQ ID NO: 2266394 - RNA, 19 nt, Homo sapiens
  misc_RNA (1)...(19): siRNA sense strand
agaaugaaccgcagaagau

SEQ ID NO: 2266395 - RNA, 19 nt, Homo sapiens
  misc_RNA (1)...(19): siRNA sense strand
cugaauugauguaccagaa

SEQ ID NO: 2266396 - RNA, 19 nt, Homo sapiens
  misc_RNA (1)...(19): siRNA sense strand
uugauaagacacugggaau

SEQ ID NO: 2266397 - RNA, 19 nt, Homo sapiens
  misc_RNA (1)...(19): siRNA sense strand
guucaagauccuucaguau

SEQ ID NO: 2266398 - RNA, 19 nt, Homo sapiens
  misc_RNA (1)...(19): siRNA sense strand
auaucaagucuuuggagaa

SEQ ID NO: 2266399 - RNA, 19 nt, Homo sapiens
  misc_RNA (1)...(19): siRNA sense strand
agaaggaggaagaaauaga

SEQ ID NO: 2266400 - RNA, 19 nt, Homo sapiens
  misc_RNA (1)...(19): siRNA sense strand
aagcaaagucugaaggaac

SEQ ID NO: 2266401 - RNA, 19 nt, Homo sapiens
  misc_RNA (1)...(19): siRNA sense strand
cuuaaaggcaagaaguaca

SEQ ID NO: 2266402 - RNA, 19 nt, Homo sapiens
  misc_RNA (1)...(19): siRNA sense strand
ugacagauuucgcaggaca

SEQ ID NO: 2266403 - RNA, 19 nt, Homo sapiens
  misc_RNA (1)...(19): siRNA sense strand
agcaaagucugaaggaaca

SEQ ID NO: 2266404 - RNA, 19 nt, Homo sapiens
  misc_RNA (1)...(19): siRNA sense strand
gaaggaagaagaaggcaca

SEQ ID NO: 2266405 - RNA, 19 nt, Homo sapiens
  misc_RNA (1)...(19): siRNA sense strand
gguuugugcgaguggagaa

SEQ ID NO: 2266406 - RNA, 19 nt, Homo sapiens
  misc_RNA (1)...(19): siRNA sense strand
ccaauugguauguuagaau

SEQ ID NO: 2266407 - RNA, 19 nt, Homo sapiens
  misc_RNA (1)...(19): siRNA sense strand
gauaucaagucuuuggaga

SEQ ID NO: 2266408 - RNA, 19 nt, Homo sapiens
  misc_RNA (1)...(19): siRNA sense strand
caaugguagaugaaggaau

SEQ ID NO: 2266409 - RNA, 19 nt, Homo sapiens
  misc_RNA (1)...(19): siRNA sense strand
augagauccuugaaagauu

SEQ ID NO: 2266410 - RNA, 19 nt, Homo sapiens
  misc_RNA (1)...(19): siRNA sense strand
gaauaugaagacuguguau

SEQ ID NO: 2266411 - RNA, 19 nt, Homo sapiens
  misc_RNA (1)...(19): siRNA sense strand
aaguauggcauucggcuaa

SEQ ID NO: 2266412 - RNA, 19 nt, Homo sapiens
  misc_RNA (1)...(19): siRNA sense strand
ggauuacagaguauaacaa

SEQ ID NO: 2266413 - RNA, 19 nt, Homo sapiens
  misc_RNA (1)...(19): siRNA sense strand
cagacuuggccgauggauu

SEQ ID NO: 2266414 - RNA, 19 nt, Homo sapiens
  misc_RNA (1)...(19): siRNA sense strand
cuaugagauccuugaaaga

SEQ ID NO: 2266415 - RNA, 19 nt, Homo sapiens
  misc_RNA (1)...(19): siRNA sense strand
cugcugaagaagagaaaau

SEQ ID NO: 2266416 - RNA, 19 nt, Homo sapiens
  misc_RNA (1)...(19): siRNA sense strand
ccagaguugguacgagaaa

SEQ ID NO: 2266417 - RNA, 19 nt, Homo sapiens
  misc_RNA (1)...(19): siRNA sense strand
cguaauugugaaugggcuu

SEQ ID NO: 2266418 - RNA, 19 nt, Homo sapiens
  misc_RNA (1)...(19): siRNA sense strand
aaacacaguugaagggauc

SEQ ID NO: 2266419 - RNA, 19 nt, Homo sapiens
  misc_RNA (1)...(19): siRNA sense strand
caaucagugccgagcaauu

SEQ ID NO: 2266420 - RNA, 19 nt, Homo sapiens
  misc_RNA (1)...(19): siRNA sense strand
acaguguacuauaaagcaa

SEQ ID NO: 2266421 - RNA, 19 nt, Homo sapiens
  misc_RNA (1)...(19): siRNA sense strand
augaauugcacgaugaaga

SEQ ID NO: 2266422 - RNA, 19 nt, Homo sapiens
  misc_RNA (1)...(19): siRNA sense strand
acucagaugcucaggcuuu

SEQ ID NO: 2266423 - RNA, 19 nt, Homo sapiens
  misc_RNA (1)...(19): siRNA sense strand
gcgaugacuuugaggaggu

SEQ ID NO: 2266424 - RNA, 19 nt, Homo sapiens
  misc_RNA (1)...(19): siRNA sense strand
ggugguaugcauuggguca

SEQ ID NO: 2266425 - RNA, 19 nt, Homo sapiens
  misc_RNA (1)...(19): siRNA sense strand
ggucaguggcggaacuuga

SEQ ID NO: 2266426 - RNA, 19 nt, Homo sapiens
  misc_RNA (1)...(19): siRNA sense strand
aggaggaagaaauagaauu

SEQ ID NO: 2266427 - RNA, 19 nt, Homo sapiens
  misc_RNA (1)...(19): siRNA sense strand
aucuaaaggugcugauuga

SEQ ID NO: 2266428 - RNA, 19 nt, Homo sapiens
  misc_RNA (1)...(19): siRNA sense strand
augaaaucacaguguacua

SEQ ID NO: 2266429 - RNA, 19 nt, Homo sapiens
  misc_RNA (1)...(19): siRNA sense strand
auggcuuaccuguggaaua

SEQ ID NO: 2266430 - RNA, 19 nt, Homo sapiens
  misc_RNA (1)...(19): siRNA sense strand
gaaucagucuggugggucu

SEQ ID NO: 2266431 - RNA, 19 nt, Homo sapiens
  misc_RNA (1)...(19): siRNA sense strand
uggcggaacuugaagaacu

SEQ ID NO: 2266432 - RNA, 19 nt, Homo sapiens
  misc_RNA (1)...(19): siRNA sense strand
aaaaugagcaaacggaaaa

SEQ ID NO: 2266433 - RNA, 19 nt, Homo sapiens
  misc_RNA (1)...(19): siRNA sense strand
aagaagagggugugcggga

SEQ ID NO: 2266434 - RNA, 19 nt, Homo sapiens
  misc_RNA (1)...(19): siRNA sense strand
uuguagauauucugaccaa

SEQ ID NO: 2266435 - RNA, 19 nt, Homo sapiens
  misc_RNA (1)...(19): siRNA sense strand
ccaucaagauccagaagcu

SEQ ID NO: 2266436 - RNA, 19 nt, Homo sapiens
  misc_RNA (1)...(19): siRNA sense strand
aguauaucauugaggaacu

SEQ ID NO: 2266437 - RNA, 19 nt, Homo sapiens
  misc_RNA (1)...(19): siRNA sense strand
uguguauguuucuguguua

SEQ ID NO: 2266438 - RNA, 19 nt, Homo sapiens
  misc_RNA (1)...(19): siRNA sense strand
gugugaaagucaugcccuu

SEQ ID NO: 2266439 - RNA, 19 nt, Homo sapiens
  misc_RNA (1)...(19): siRNA sense strand
auacagaaacuucgcaaaa

SEQ ID NO: 2266440 - RNA, 19 nt, Homo sapiens
  misc_RNA (1)...(19): siRNA sense strand
uuacugagucuuaguggaa

SEQ ID NO: 2266441 - RNA, 19 nt, Homo sapiens
  misc_RNA (1)...(19): siRNA sense strand
cgggagaacuugacggucu

SEQ ID NO: 2266442 - RNA, 19 nt, Homo sapiens
  misc_RNA (1)...(19): siRNA sense strand
ggaaagauaaaacgagaca

SEQ ID NO: 2266443 - RNA, 19 nt, Homo sapiens
  misc_RNA (1)...(19): siRNA sense strand
gcaaauacacccuggucgu

SEQ ID NO: 2266444 - RNA, 19 nt, Homo sapiens
  misc_RNA (1)...(19): siRNA sense strand
cagcuaaaugcuaccgaga

SEQ ID NO: 2266445 - RNA, 19 nt, Homo sapiens
  misc_RNA (1)...(19): siRNA sense strand
caaaauugaccgagccaca

SEQ ID NO: 2266446 - RNA, 19 nt, Homo sapiens
  misc_RNA (1)...(19): siRNA sense strand
cguaacacauaaugguacu

SEQ ID NO: 2266447 - RNA, 19 nt, Homo sapiens
  misc_RNA (1)...(19): siRNA sense strand
cgucaacguaacacauaau

SEQ ID NO: 2266448 - RNA, 19 nt, Homo sapiens
  misc_RNA (1)...(19): siRNA sense strand
ccaacaagcuggagcguga

SEQ ID NO: 2266449 - RNA, 19 nt, Homo sapiens
  misc_RNA (1)...(19): siRNA sense strand
uggcagaagaggcugggaa

SEQ ID NO: 2266450 - RNA, 19 nt, Homo sapiens
  misc_RNA (1)...(19): siRNA sense strand
gagaaugaggagaagagca

SEQ ID NO: 2266451 - RNA, 19 nt, Homo sapiens
  misc_RNA (1)...(19): siRNA sense strand
guuuaaagaaggggacaaa

SEQ ID NO: 2266452 - RNA, 19 nt, Homo sapiens
  misc_RNA (1)...(19): siRNA sense strand
aggacugauuugggagaau

SEQ ID NO: 2266453 - RNA, 19 nt, Homo sapiens
  misc_RNA (1)...(19): siRNA sense strand
uggacauuuccgagccaua

SEQ ID NO: 2266454 - RNA, 19 nt, Homo sapiens
  misc_RNA (1)...(19): siRNA sense strand
cugaaaucgacgagcugau

SEQ ID NO: 2266455 - RNA, 19 nt, Homo sapiens
  misc_RNA (1)...(19): siRNA sense strand
uuugggagaaugaggagaa

SEQ ID NO: 2266456 - RNA, 19 nt, Homo sapiens
  misc_RNA (1)...(19): siRNA sense strand
gcgugaaugaaguuacaga

SEQ ID NO: 2266457 - RNA, 19 nt, Homo sapiens
  misc_RNA (1)...(19): siRNA sense strand
cugaagaagauguggaaaa

SEQ ID NO: 2266458 - RNA, 19 nt, Homo sapiens
  misc_RNA (1)...(19): siRNA sense strand
ggaagacgauugaggcuga

SEQ ID NO: 2266459 - RNA, 19 nt, Homo sapiens
  misc_RNA (1)...(19): siRNA sense strand
gcaagaacuaugacggaga

SEQ ID NO: 2266460 - RNA, 19 nt, Homo sapiens
  misc_RNA (1)...(19): siRNA sense strand
ccgacuucgacaagaauaa

SEQ ID NO: 2266461 - RNA, 19 nt, Homo sapiens
  misc_RNA (1)...(19): siRNA sense strand
ugguggagauggaugguga

SEQ ID NO: 2266462 - RNA, 19 nt, Homo sapiens
  misc_RNA (1)...(19): siRNA sense strand
aggagugggaaguguacaa

SEQ ID NO: 2266463 - RNA, 19 nt, Homo sapiens
  misc_RNA (1)...(19): siRNA sense strand
guggaagaguucaagcuga

SEQ ID NO: 2266464 - RNA, 19 nt, Homo sapiens
  misc_RNA (1)...(19): siRNA sense strand
acaccauacugaaagccua

SEQ ID NO: 2266465 - RNA, 19 nt, Homo sapiens
  misc_RNA (1)...(19): siRNA sense strand
ucgacaccaucaagagcaa

SEQ ID NO: 2266466 - RNA, 19 nt, Homo sapiens
  misc_RNA (1)...(19): siRNA sense strand
uggaaaagucccaauggaa

SEQ ID NO: 2266467 - RNA, 19 nt, Homo sapiens
  misc_RNA (1)...(19): siRNA sense strand
agucagacauccuggccca

SEQ ID NO: 2266468 - RNA, 19 nt, Homo sapiens
  misc_RNA (1)...(19): siRNA sense strand
ggugaugagaugacccgua

SEQ ID NO: 2266469 - RNA, 19 nt, Homo sapiens
  misc_RNA (1)...(19): siRNA sense strand
cagaagaaauggccgcugu

SEQ ID NO: 2266470 - RNA, 19 nt, Homo sapiens
  misc_RNA (1)...(19): siRNA sense strand
gcguucagguccagggcaa

SEQ ID NO: 2266471 - RNA, 19 nt, Homo sapiens
  misc_RNA (1)...(19): siRNA sense strand
gcaagagagaaaagaaaga

SEQ ID NO: 2266472 - RNA, 19 nt, Homo sapiens
  misc_RNA (1)...(19): siRNA sense strand
gagaaaagaaagauagagu

SEQ ID NO: 2266473 - RNA, 19 nt, Homo sapiens
  misc_RNA (1)...(19): siRNA sense strand
gauagagucuucacggaca

SEQ ID NO: 2266474 - RNA, 19 nt, Homo sapiens
  misc_RNA (1)...(19): siRNA sense strand
agggcaagagcaagagaga

SEQ ID NO: 2266475 - RNA, 19 nt, Homo sapiens
  misc_RNA (1)...(19): siRNA sense strand
uuuuaaaggaccagaaaga

SEQ ID NO: 2266476 - RNA, 19 nt, Homo sapiens
  misc_RNA (1)...(19): siRNA sense strand
gggcaagagcaagagagaa

SEQ ID NO: 2266477 - RNA, 19 nt, Homo sapiens
  misc_RNA (1)...(19): siRNA sense strand
ccucguggccauaugggaa

SEQ ID NO: 2266478 - RNA, 19 nt, Homo sapiens
  misc_RNA (1)...(19): siRNA sense strand
guccagggcaagagcaaga

SEQ ID NO: 2266479 - RNA, 19 nt, Homo sapiens
  misc_RNA (1)...(19): siRNA sense strand
gagagaaaagaaagauaga

SEQ ID NO: 2266480 - RNA, 19 nt, Homo sapiens
  misc_RNA (1)...(19): siRNA sense strand
acaaaggaggcgagguucu

SEQ ID NO: 2266481 - RNA, 19 nt, Homo sapiens
  misc_RNA (1)...(19): siRNA sense strand
agguccagggcaagagcaa

SEQ ID NO: 2266482 - RNA, 19 nt, Homo sapiens
  misc_RNA (1)...(19): siRNA sense strand
agagaugaagacuuggaaa

SEQ ID NO: 2266483 - RNA, 19 nt, Homo sapiens
  misc_RNA (1)...(19): siRNA sense strand
gcagcagagaugaagacuu

SEQ ID NO: 2266484 - RNA, 19 nt, Homo sapiens
  misc_RNA (1)...(19): siRNA sense strand
agagaugaagacuuggaaa

SEQ ID NO: 2266485 - RNA, 19 nt, Homo sapiens
  misc_RNA (1)...(19): siRNA sense strand
gcagcagagaugaagacuu

SEQ ID NO: 2266486 - RNA, 19 nt, Homo sapiens
  misc_RNA (1)...(19): siRNA sense strand
gggaagaccucauuggugu

SEQ ID NO: 2266487 - RNA, 19 nt, Homo sapiens
  misc_RNA (1)...(19): siRNA sense strand
ccauagugaaggcaggaau

SEQ ID NO: 2266488 - RNA, 19 nt, Homo sapiens
  misc_RNA (1)...(19): siRNA sense strand
cugaugggaacguggacua

SEQ ID NO: 2266489 - RNA, 19 nt, Homo sapiens
  misc_RNA (1)...(19): siRNA sense strand
cugugaucugggaggcaaa

SEQ ID NO: 2266490 - RNA, 19 nt, Homo sapiens
  misc_RNA (1)...(19): siRNA sense strand
aaucacaaucccacgaaau

SEQ ID NO: 2266491 - RNA, 19 nt, Homo sapiens
  misc_RNA (1)...(19): siRNA sense strand
ccgcauuaguaaggagaaa

SEQ ID NO: 2266492 - RNA, 19 nt, Homo sapiens
  misc_RNA (1)...(19): siRNA sense strand
uagaagugccaaaggcgaa

SEQ ID NO: 2266493 - RNA, 19 nt, Homo sapiens
  misc_RNA (1)...(19): siRNA sense strand
cuguaaagguaguaggcuc

SEQ ID NO: 2266494 - RNA, 19 nt, Homo sapiens
  misc_RNA (1)...(19): siRNA sense strand
ccuuggaaguuguucaaaa

SEQ ID NO: 2266495 - RNA, 19 nt, Homo sapiens
  misc_RNA (1)...(19): siRNA sense strand
cugaucugguauuggacua

SEQ ID NO: 2266496 - RNA, 19 nt, Homo sapiens
  misc_RNA (1)...(19): siRNA sense strand
gaaagaaccaggagaggag

SEQ ID NO: 2266497 - RNA, 19 nt, Homo sapiens
  misc_RNA (1)...(19): siRNA sense strand
ccaaaggcgaaguugccaa

SEQ ID NO: 2266498 - RNA, 19 nt, Homo sapiens
  misc_RNA (1)...(19): siRNA sense strand
caugaaacucccagugcau

SEQ ID NO: 2266499 - RNA, 19 nt, Homo sapiens
  misc_RNA (1)...(19): siRNA sense strand
aagucauaguagaacagaa

SEQ ID NO: 2266500 - RNA, 19 nt, Homo sapiens
  misc_RNA (1)...(19): siRNA sense strand
ucauaguagaacagaagau

SEQ ID NO: 2266501 - RNA, 19 nt, Homo sapiens
  misc_RNA (1)...(19): siRNA sense strand
agaaaauggacguacguuu

SEQ ID NO: 2266502 - RNA, 19 nt, Homo sapiens
  misc_RNA (1)...(19): siRNA sense strand
ggucuaugagaaagaacca

SEQ ID NO: 2266503 - RNA, 19 nt, Homo sapiens
  misc_RNA (1)...(19): siRNA sense strand
ccugcaaagugaugccuca

SEQ ID NO: 2266504 - RNA, 19 nt, Homo sapiens
  misc_RNA (1)...(19): siRNA sense strand
acagaagaugaaacaagaa

SEQ ID NO: 2266505 - RNA, 19 nt, Homo sapiens
  misc_RNA (1)...(19): siRNA sense strand
ccgcauuaguaaggagaaa

SEQ ID NO: 2266506 - RNA, 19 nt, Homo sapiens
  misc_RNA (1)...(19): siRNA sense strand
uagaagugccaaaggcgaa

SEQ ID NO: 2266507 - RNA, 19 nt, Homo sapiens
  misc_RNA (1)...(19): siRNA sense strand
cuguaaagguaguaggcuc

SEQ ID NO: 2266508 - RNA, 19 nt, Homo sapiens
  misc_RNA (1)...(19): siRNA sense strand
ccuuggaaguuguucaaaa

SEQ ID NO: 2266509 - RNA, 19 nt, Homo sapiens
  misc_RNA (1)...(19): siRNA sense strand
cugaucugguauuggacua

SEQ ID NO: 2266510 - RNA, 19 nt, Homo sapiens
  misc_RNA (1)...(19): siRNA sense strand
gaaagaaccaggagaggag

SEQ ID NO: 2266511 - RNA, 19 nt, Homo sapiens
  misc_RNA (1)...(19): siRNA sense strand
ccaaaggcgaaguugccaa

SEQ ID NO: 2266512 - RNA, 19 nt, Homo sapiens
  misc_RNA (1)...(19): siRNA sense strand
caugaaacucccagugcau

SEQ ID NO: 2266513 - RNA, 19 nt, Homo sapiens
  misc_RNA (1)...(19): siRNA sense strand
aagucauaguagaacagaa

SEQ ID NO: 2266514 - RNA, 19 nt, Homo sapiens
  misc_RNA (1)...(19): siRNA sense strand
ucauaguagaacagaagau

SEQ ID NO: 2266515 - RNA, 19 nt, Homo sapiens
  misc_RNA (1)...(19): siRNA sense strand
agaaaauggacguacguuu

SEQ ID NO: 2266516 - RNA, 19 nt, Homo sapiens
  misc_RNA (1)...(19): siRNA sense strand
ggucuaugagaaagaacca

SEQ ID NO: 2266517 - RNA, 19 nt, Homo sapiens
  misc_RNA (1)...(19): siRNA sense strand
ccugcaaagugaugccuca

SEQ ID NO: 2266518 - RNA, 19 nt, Homo sapiens
  misc_RNA (1)...(19): siRNA sense strand
acagaagaugaaacaagaa

SEQ ID NO: 2266519 - RNA, 19 nt, Homo sapiens
  misc_RNA (1)...(19): siRNA sense strand
ggaacuuagcagagagcaa

SEQ ID NO: 2266520 - RNA, 19 nt, Homo sapiens
  misc_RNA (1)...(19): siRNA sense strand
agggacaaguagaaagauu

SEQ ID NO: 2266521 - RNA, 19 nt, Homo sapiens
  misc_RNA (1)...(19): siRNA sense strand
uauauaaagugaagcccaa

SEQ ID NO: 2266522 - RNA, 19 nt, Homo sapiens
  misc_RNA (1)...(19): siRNA sense strand
cugaauccauaaaggcaua

SEQ ID NO: 2266523 - RNA, 19 nt, Homo sapiens
  misc_RNA (1)...(19): siRNA sense strand
caucagucaaugaggaaga

SEQ ID NO: 2266524 - RNA, 19 nt, Homo sapiens
  misc_RNA (1)...(19): siRNA sense strand
gaaggaagaugguaaggga

SEQ ID NO: 2266525 - RNA, 19 nt, Homo sapiens
  misc_RNA (1)...(19): siRNA sense strand
cuuuaauaagcgagaccua

SEQ ID NO: 2266526 - RNA, 19 nt, Homo sapiens
  misc_RNA (1)...(19): siRNA sense strand
ugaagaagcaagugggauc

SEQ ID NO: 2266527 - RNA, 19 nt, Homo sapiens
  misc_RNA (1)...(19): siRNA sense strand
ggguagaagcagagaaugc

SEQ ID NO: 2266528 - RNA, 19 nt, Homo sapiens
  misc_RNA (1)...(19): siRNA sense strand
cggacagcuugaacagaau

SEQ ID NO: 2266529 - RNA, 19 nt, Homo sapiens
  misc_RNA (1)...(19): siRNA sense strand
cuggguagaagcagagaau

SEQ ID NO: 2266530 - RNA, 19 nt, Homo sapiens
  misc_RNA (1)...(19): siRNA sense strand
ggaccuacuguucggacaa

SEQ ID NO: 2266531 - RNA, 19 nt, Homo sapiens
  misc_RNA (1)...(19): siRNA sense strand
cagucaaugaggaagauuu

SEQ ID NO: 2266532 - RNA, 19 nt, Homo sapiens
  misc_RNA (1)...(19): siRNA sense strand
aguauaugcugauggacca

SEQ ID NO: 2266533 - RNA, 19 nt, Homo sapiens
  misc_RNA (1)...(19): siRNA sense strand
cagagaaugcccuugggaa

SEQ ID NO: 2266534 - RNA, 19 nt, Homo sapiens
  misc_RNA (1)...(19): siRNA sense strand
guuugugugcuaaaggaaa

SEQ ID NO: 2266535 - RNA, 19 nt, Homo sapiens
  misc_RNA (1)...(19): siRNA sense strand
aaggagaaauugaagccau

SEQ ID NO: 2266536 - RNA, 19 nt, Homo sapiens
  misc_RNA (1)...(19): siRNA sense strand
uggaaauagaagcaaauga

SEQ ID NO: 2266537 - RNA, 19 nt, Homo sapiens
  misc_RNA (1)...(19): siRNA sense strand
ugacaguaaaucucacaaa

SEQ ID NO: 2266538 - RNA, 19 nt, Homo sapiens
  misc_RNA (1)...(19): siRNA sense strand
ugggaaggaugguccagaa

SEQ ID NO: 2266539 - RNA, 19 nt, Homo sapiens
  misc_RNA (1)...(19): siRNA sense strand
ucacaauaauuucaggcuu

SEQ ID NO: 2266540 - RNA, 19 nt, Homo sapiens
  misc_RNA (1)...(19): siRNA sense strand
gcauugugaacgaggggaa

SEQ ID NO: 2266541 - RNA, 19 nt, Homo sapiens
  misc_RNA (1)...(19): siRNA sense strand
agagaaugcccuugggaag

SEQ ID NO: 2266542 - RNA, 19 nt, Homo sapiens
  misc_RNA (1)...(19): siRNA sense strand
caacccuaacaguaagaaa

SEQ ID NO: 2266543 - RNA, 19 nt, Homo sapiens
  misc_RNA (1)...(19): siRNA sense strand
gggaaggaugguccagaau

SEQ ID NO: 2266544 - RNA, 19 nt, Homo sapiens
  misc_RNA (1)...(19): siRNA sense strand
aaauguauucagauggcaa

SEQ ID NO: 2266545 - RNA, 19 nt, Homo sapiens
  misc_RNA (1)...(19): siRNA sense strand
caacauugaagucugggua

SEQ ID NO: 2266546 - RNA, 19 nt, Homo sapiens
  misc_RNA (1)...(19): siRNA sense strand
caugaauccaguccagaua

SEQ ID NO: 2266547 - RNA, 19 nt, Homo sapiens
  misc_RNA (1)...(19): siRNA sense strand
aggugaacuucuagaucca

SEQ ID NO: 2266548 - RNA, 19 nt, Homo sapiens
  misc_RNA (1)...(19): siRNA sense strand
ggaucugggcaaaugaaaa

SEQ ID NO: 2266549 - RNA, 19 nt, Homo sapiens
  misc_RNA (1)...(19): siRNA sense strand
cuuuacagauauagcuuca

SEQ ID NO: 2266550 - RNA, 19 nt, Homo sapiens
  misc_RNA (1)...(19): siRNA sense strand
guauauaaagugaagccca

SEQ ID NO: 2266551 - RNA, 19 nt, Homo sapiens
  misc_RNA (1)...(19): siRNA sense strand
uguggaaauagaagcaaau

SEQ ID NO: 2266552 - RNA, 19 nt, Homo sapiens
  misc_RNA (1)...(19): siRNA sense strand
cugcaguuugugugcuaaa

SEQ ID NO: 2266553 - RNA, 19 nt, Homo sapiens
  misc_RNA (1)...(19): siRNA sense strand
agugaucaacucagaggaa

SEQ ID NO: 2266554 - RNA, 19 nt, Homo sapiens
  misc_RNA (1)...(19): siRNA sense strand
gauccuucaaagagucaua

SEQ ID NO: 2266555 - RNA, 19 nt, Homo sapiens
  misc_RNA (1)...(19): siRNA sense strand
auagaaccaucauuggaaa

SEQ ID NO: 2266556 - RNA, 19 nt, Homo sapiens
  misc_RNA (1)...(19): siRNA sense strand
aauuaauacugaaggacac

SEQ ID NO: 2266557 - RNA, 19 nt, Homo sapiens
  misc_RNA (1)...(19): siRNA sense strand
ucuucuaggccaagcauuu

SEQ ID NO: 2266558 - RNA, 19 nt, Homo sapiens
  misc_RNA (1)...(19): siRNA sense strand
ugaucaacucagaggaacu

SEQ ID NO: 2266559 - RNA, 19 nt, Homo sapiens
  misc_RNA (1)...(19): siRNA sense strand
gauuugaaacaguuggcau

SEQ ID NO: 2266560 - RNA, 19 nt, Homo sapiens
  misc_RNA (1)...(19): siRNA sense strand
uggcaauuucacugaugua

SEQ ID NO: 2266561 - RNA, 19 nt, Homo sapiens
  misc_RNA (1)...(19): siRNA sense strand
aaucauuggaccuguucaa

SEQ ID NO: 2266562 - RNA, 19 nt, Homo sapiens
  misc_RNA (1)...(19): siRNA sense strand
ugagggacaaguagaaaga

SEQ ID NO: 2266563 - RNA, 19 nt, Homo sapiens
  misc_RNA (1)...(19): siRNA sense strand
gugaacgaggggaagaaaa

SEQ ID NO: 2266564 - RNA, 19 nt, Homo sapiens
  misc_RNA (1)...(19): siRNA sense strand
ugaacgaggggaagaaaau

SEQ ID NO: 2266565 - RNA, 19 nt, Homo sapiens
  misc_RNA (1)...(19): siRNA sense strand
cuuuugaagccaauggaaa

SEQ ID NO: 2266566 - RNA, 19 nt, Homo sapiens
  misc_RNA (1)...(19): siRNA sense strand
guaauggaucuuaaagcau

SEQ ID NO: 2266567 - RNA, 19 nt, Homo sapiens
  misc_RNA (1)...(19): siRNA sense strand
agaagaugguaccgugcau

SEQ ID NO: 2266568 - RNA, 19 nt, Homo sapiens
  misc_RNA (1)...(19): siRNA sense strand
agaugaaggugggaaggau

SEQ ID NO: 2266569 - RNA, 19 nt, Homo sapiens
  misc_RNA (1)...(19): siRNA sense strand
aggacacagcagugguauu

SEQ ID NO: 2266570 - RNA, 19 nt, Homo sapiens
  misc_RNA (1)...(19): siRNA sense strand
ucauguagauggcggugau

SEQ ID NO: 2266571 - RNA, 19 nt, Homo sapiens
  misc_RNA (1)...(19): siRNA sense strand
aagcaaguuucaucaguca

SEQ ID NO: 2266572 - RNA, 19 nt, Homo sapiens
  misc_RNA (1)...(19): siRNA sense strand
gguaagggauacuggagug

SEQ ID NO: 2266573 - RNA, 19 nt, Homo sapiens
  misc_RNA (1)...(19): siRNA sense strand
acuccaagggaaucuguaa

SEQ ID NO: 2266574 - RNA, 19 nt, Homo sapiens
  misc_RNA (1)...(19): siRNA sense strand
uauauaaagugaagcccaa

SEQ ID NO: 2266575 - RNA, 19 nt, Homo sapiens
  misc_RNA (1)...(19): siRNA sense strand
gaaggaagaugguaaggga

SEQ ID NO: 2266576 - RNA, 19 nt, Homo sapiens
  misc_RNA (1)...(19): siRNA sense strand
ugaagaagcaagugggauc

SEQ ID NO: 2266577 - RNA, 19 nt, Homo sapiens
  misc_RNA (1)...(19): siRNA sense strand
ggguagaagcagagaaugc

SEQ ID NO: 2266578 - RNA, 19 nt, Homo sapiens
  misc_RNA (1)...(19): siRNA sense strand
cggacagcuugaacagaau

SEQ ID NO: 2266579 - RNA, 19 nt, Homo sapiens
  misc_RNA (1)...(19): siRNA sense strand
cuggguagaagcagagaau

SEQ ID NO: 2266580 - RNA, 19 nt, Homo sapiens
  misc_RNA (1)...(19): siRNA sense strand
cagagaaugcccuugggaa

SEQ ID NO: 2266581 - RNA, 19 nt, Homo sapiens
  misc_RNA (1)...(19): siRNA sense strand
guuugugugcuaaaggaaa

SEQ ID NO: 2266582 - RNA, 19 nt, Homo sapiens
  misc_RNA (1)...(19): siRNA sense strand
ucacaauaauuucaggcuu

SEQ ID NO: 2266583 - RNA, 19 nt, Homo sapiens
  misc_RNA (1)...(19): siRNA sense strand
gcauugugaacgaggggaa

SEQ ID NO: 2266584 - RNA, 19 nt, Homo sapiens
  misc_RNA (1)...(19): siRNA sense strand
agagaaugcccuugggaag

SEQ ID NO: 2266585 - RNA, 19 nt, Homo sapiens
  misc_RNA (1)...(19): siRNA sense strand
aggugaacuucuagaucca

SEQ ID NO: 2266586 - RNA, 19 nt, Homo sapiens
  misc_RNA (1)...(19): siRNA sense strand
caacauugaagucugggua

SEQ ID NO: 2266587 - RNA, 19 nt, Homo sapiens
  misc_RNA (1)...(19): siRNA sense strand
cuuuacagauauagcuuca

SEQ ID NO: 2266588 - RNA, 19 nt, Homo sapiens
  misc_RNA (1)...(19): siRNA sense strand
guauauaaagugaagccca

SEQ ID NO: 2266589 - RNA, 19 nt, Homo sapiens
  misc_RNA (1)...(19): siRNA sense strand
cugcaguuugugugcuaaa

SEQ ID NO: 2266590 - RNA, 19 nt, Homo sapiens
  misc_RNA (1)...(19): siRNA sense strand
agugaucaacucagaggaa

SEQ ID NO: 2266591 - RNA, 19 nt, Homo sapiens
  misc_RNA (1)...(19): siRNA sense strand
ugaucaacucagaggaacu

SEQ ID NO: 2266592 - RNA, 19 nt, Homo sapiens
  misc_RNA (1)...(19): siRNA sense strand
gugaacgaggggaagaaaa

SEQ ID NO: 2266593 - RNA, 19 nt, Homo sapiens
  misc_RNA (1)...(19): siRNA sense strand
ugaacgaggggaagaaaau

SEQ ID NO: 2266594 - RNA, 19 nt, Homo sapiens
  misc_RNA (1)...(19): siRNA sense strand
gguaagggauacuggagug

SEQ ID NO: 2266595 - RNA, 19 nt, Homo sapiens
  misc_RNA (1)...(19): siRNA sense strand
aggaaaaggaugaaaacaa

SEQ ID NO: 2266596 - RNA, 19 nt, Homo sapiens
  misc_RNA (1)...(19): siRNA sense strand
agguaaagugccugaauuu

SEQ ID NO: 2266597 - RNA, 19 nt, Homo sapiens
  misc_RNA (1)...(19): siRNA sense strand
agaaaguggcuaugcucaa

SEQ ID NO: 2266598 - RNA, 19 nt, Homo sapiens
  misc_RNA (1)...(19): siRNA sense strand
aggauuaagccuaucguau

SEQ ID NO: 2266599 - RNA, 19 nt, Homo sapiens
  misc_RNA (1)...(19): siRNA sense strand
gagauauauuucaucgaga

SEQ ID NO: 2266600 - RNA, 19 nt, Homo sapiens
  misc_RNA (1)...(19): siRNA sense strand
gauuaaaguucgauccauc

SEQ ID NO: 2266601 - RNA, 19 nt, Homo sapiens
  misc_RNA (1)...(19): siRNA sense strand
ucacaugccuggcugggaa

SEQ ID NO: 2266602 - RNA, 19 nt, Homo sapiens
  misc_RNA (1)...(19): siRNA sense strand
gagcaauauaugugugaag

SEQ ID NO: 2266603 - RNA, 19 nt, Homo sapiens
  misc_RNA (1)...(19): siRNA sense strand
ccacuauaguuaaaccuga

SEQ ID NO: 2266604 - RNA, 19 nt, Homo sapiens
  misc_RNA (1)...(19): siRNA sense strand
aauaauagcucaggggaga

SEQ ID NO: 2266605 - RNA, 19 nt, Homo sapiens
  misc_RNA (1)...(19): siRNA sense strand
gcagaggcuuggaggggau

SEQ ID NO: 2266606 - RNA, 19 nt, Homo sapiens
  misc_RNA (1)...(19): siRNA sense strand
aagcuuuggaagagauuca

SEQ ID NO: 2266607 - RNA, 19 nt, Homo sapiens
  misc_RNA (1)...(19): siRNA sense strand
gauauauuucaucgagaca

SEQ ID NO: 2266608 - RNA, 19 nt, Homo sapiens
  misc_RNA (1)...(19): siRNA sense strand
acuccagagaucaauaaua

SEQ ID NO: 2266609 - RNA, 19 nt, Homo sapiens
  misc_RNA (1)...(19): siRNA sense strand
uggaggaugaugugguaga

SEQ ID NO: 2266610 - RNA, 19 nt, Homo sapiens
  misc_RNA (1)...(19): siRNA sense strand
aggaugaugugguagagga

SEQ ID NO: 2266611 - RNA, 19 nt, Homo sapiens
  misc_RNA (1)...(19): siRNA sense strand
ccggugugcuguugagcca

SEQ ID NO: 2266612 - RNA, 19 nt, Homo sapiens
  misc_RNA (1)...(19): siRNA sense strand
ggguacagacgcuugccua

SEQ ID NO: 2266613 - RNA, 19 nt, Homo sapiens
  misc_RNA (1)...(19): siRNA sense strand
uggaggaugaugugguaga

SEQ ID NO: 2266614 - RNA, 19 nt, Homo sapiens
  misc_RNA (1)...(19): siRNA sense strand
aggaugaugugguagagga

SEQ ID NO: 2266615 - RNA, 19 nt, Homo sapiens
  misc_RNA (1)...(19): siRNA sense strand
ccgaggaagaggaggaugu

SEQ ID NO: 2266616 - RNA, 19 nt, Homo sapiens
  misc_RNA (1)...(19): siRNA sense strand
ggacaagucagcugccaga

SEQ ID NO: 2266617 - RNA, 19 nt, Homo sapiens
  misc_RNA (1)...(19): siRNA sense strand
aguaugagacagugcccaa

SEQ ID NO: 2266618 - RNA, 19 nt, Homo sapiens
  misc_RNA (1)...(19): siRNA sense strand
acagaguagcacugaacau

SEQ ID NO: 2266619 - RNA, 19 nt, Homo sapiens
  misc_RNA (1)...(19): siRNA sense strand
auguggagauagaggauga

SEQ ID NO: 2266620 - RNA, 19 nt, Homo sapiens
  misc_RNA (1)...(19): siRNA sense strand
ccaacuacugcgaggguga

SEQ ID NO: 2266621 - RNA, 19 nt, Homo sapiens
  misc_RNA (1)...(19): siRNA sense strand
ugaaugaacuuauggagca

SEQ ID NO: 2266622 - RNA, 19 nt, Homo sapiens
  misc_RNA (1)...(19): siRNA sense strand
agaacaugaucguggagga

SEQ ID NO: 2266623 - RNA, 19 nt, Homo sapiens
  misc_RNA (1)...(19): siRNA sense strand
gcuugguucuccugggcaa

SEQ ID NO: 2266624 - RNA, 19 nt, Homo sapiens
  misc_RNA (1)...(19): siRNA sense strand
gcuuggagugugauggcaa

SEQ ID NO: 2266625 - RNA, 19 nt, Homo sapiens
  misc_RNA (1)...(19): siRNA sense strand
ugggcaagaagaagaagaa

SEQ ID NO: 2266626 - RNA, 19 nt, Homo sapiens
  misc_RNA (1)...(19): siRNA sense strand
aagaagaagaagaaagaag

SEQ ID NO: 2266627 - RNA, 19 nt, Homo sapiens
  misc_RNA (1)...(19): siRNA sense strand
agaagaagaaagaagagga

SEQ ID NO: 2266628 - RNA, 19 nt, Homo sapiens
  misc_RNA (1)...(19): siRNA sense strand
gggcaggagcagaugagga

SEQ ID NO: 2266629 - RNA, 19 nt, Homo sapiens
  misc_RNA (1)...(19): siRNA sense strand
aggccgaggaagugggcuu

SEQ ID NO: 2266630 - RNA, 19 nt, Homo sapiens
  misc_RNA (1)...(19): siRNA sense strand
caggagcagaugaggaaaa

SEQ ID NO: 2266631 - RNA, 19 nt, Homo sapiens
  misc_RNA (1)...(19): siRNA sense strand
gaaagcuucaugugggcaa

SEQ ID NO: 2266632 - RNA, 19 nt, Homo sapiens
  misc_RNA (1)...(19): siRNA sense strand
cggaagagcaccuggcaug

SEQ ID NO: 2266633 - RNA, 19 nt, Homo sapiens
  misc_RNA (1)...(19): siRNA sense strand
ugguggaggccgucaagaa

SEQ ID NO: 2266634 - RNA, 19 nt, Homo sapiens
  misc_RNA (1)...(19): siRNA sense strand
ggcaagaagaagaagaaag

SEQ ID NO: 2266635 - RNA, 19 nt, Homo sapiens
  misc_RNA (1)...(19): siRNA sense strand
cagagaugguggaggccgu

SEQ ID NO: 2266636 - RNA, 19 nt, Homo sapiens
  misc_RNA (1)...(19): siRNA sense strand
gagcagucgcacagaccuu

SEQ ID NO: 2266637 - RNA, 19 nt, Homo sapiens
  misc_RNA (1)...(19): siRNA sense strand
ggcagaaaugaaugaacuu

SEQ ID NO: 2266638 - RNA, 19 nt, Homo sapiens
  misc_RNA (1)...(19): siRNA sense strand
agucaggaacagccaggaa

SEQ ID NO: 2266639 - RNA, 19 nt, Homo sapiens
  misc_RNA (1)...(19): siRNA sense strand
ccaacaugauuguggagga

SEQ ID NO: 2266640 - RNA, 19 nt, Homo sapiens
  misc_RNA (1)...(19): siRNA sense strand
acuucgaugaugaguacaa

SEQ ID NO: 2266641 - RNA, 19 nt, Homo sapiens
  misc_RNA (1)...(19): siRNA sense strand
aagaaaagaaagagggaga

SEQ ID NO: 2266642 - RNA, 19 nt, Homo sapiens
  misc_RNA (1)...(19): siRNA sense strand
aagaaacggcagugaaaca

SEQ ID NO: 2266643 - RNA, 19 nt, Homo sapiens
  misc_RNA (1)...(19): siRNA sense strand
agaaagagggagaaaagaa

SEQ ID NO: 2266644 - RNA, 19 nt, Homo sapiens
  misc_RNA (1)...(19): siRNA sense strand
uggaaaggacagugcuauu

SEQ ID NO: 2266645 - RNA, 19 nt, Homo sapiens
  misc_RNA (1)...(19): siRNA sense strand
gguggaaaggacagugcua

SEQ ID NO: 2266646 - RNA, 19 nt, Homo sapiens
  misc_RNA (1)...(19): siRNA sense strand
ugguacaggaaguuauaaa

SEQ ID NO: 2266647 - RNA, 19 nt, Homo sapiens
  misc_RNA (1)...(19): siRNA sense strand
agaacaaguuuccaggcuu

SEQ ID NO: 2266648 - RNA, 19 nt, Homo sapiens
  misc_RNA (1)...(19): siRNA sense strand
ggagaaaagaacaagaagu

SEQ ID NO: 2266649 - RNA, 19 nt, Homo sapiens
  misc_RNA (1)...(19): siRNA sense strand
cagaauauggagaacaagu

SEQ ID NO: 2266650 - RNA, 19 nt, Homo sapiens
  misc_RNA (1)...(19): siRNA sense strand
ggggaauaguagacuugaa

SEQ ID NO: 2266651 - RNA, 19 nt, Homo sapiens
  misc_RNA (1)...(19): siRNA sense strand
gcauacagauccaggaagc

SEQ ID NO: 2266652 - RNA, 19 nt, Homo sapiens
  misc_RNA (1)...(19): siRNA sense strand
cuuagaaagaaauccagaa

SEQ ID NO: 2266653 - RNA, 19 nt, Homo sapiens
  misc_RNA (1)...(19): siRNA sense strand
cgaagaaaagaaagaggga

SEQ ID NO: 2266654 - RNA, 19 nt, Homo sapiens
  misc_RNA (1)...(19): siRNA sense strand
cugagaaggcugcuaacau

SEQ ID NO: 2266655 - RNA, 19 nt, Homo sapiens
  misc_RNA (1)...(19): siRNA sense strand
uuaaauccaaccagggaau

SEQ ID NO: 2266656 - RNA, 19 nt, Homo sapiens
  misc_RNA (1)...(19): siRNA sense strand
gagaaagccuagcagcaga

SEQ ID NO: 2266657 - RNA, 19 nt, Homo sapiens
  misc_RNA (1)...(19): siRNA sense strand
ccaacaacaaagauggaca

SEQ ID NO: 2266658 - RNA, 19 nt, Homo sapiens
  misc_RNA (1)...(19): siRNA sense strand
aaauaauacuuucccgcaa

SEQ ID NO: 2266659 - RNA, 19 nt, Homo sapiens
  misc_RNA (1)...(19): siRNA sense strand
cagccaucauugaagaaaa

SEQ ID NO: 2266660 - RNA, 19 nt, Homo sapiens
  misc_RNA (1)...(19): siRNA sense strand
gagaagacauucaccacca

SEQ ID NO: 2266661 - RNA, 19 nt, Homo sapiens
  misc_RNA (1)...(19): siRNA sense strand
ccaagaagcccaaggccau

SEQ ID NO: 2266662 - RNA, 19 nt, Homo sapiens
  misc_RNA (1)...(19): siRNA sense strand
gcgagcacgagaagcacaa

SEQ ID NO: 2266663 - RNA, 19 nt, Homo sapiens
  misc_RNA (1)...(19): siRNA sense strand
gccaagaagcccaaggcca

SEQ ID NO: 2266664 - RNA, 19 nt, Homo sapiens
  misc_RNA (1)...(19): siRNA sense strand
ccgaggaccuacuggccuu

SEQ ID NO: 2266665 - RNA, 19 nt, Homo sapiens
  misc_RNA (1)...(19): siRNA sense strand
gcaaggaggaguacgccga

SEQ ID NO: 2266666 - RNA, 19 nt, Homo sapiens
  misc_RNA (1)...(19): siRNA sense strand
ugaaagaaauagagagcga

SEQ ID NO: 2266667 - RNA, 19 nt, Homo sapiens
  misc_RNA (1)...(19): siRNA sense strand
gguuugacguggugggcua

SEQ ID NO: 2266668 - RNA, 19 nt, Homo sapiens
  misc_RNA (1)...(19): siRNA sense strand
gaguaaaugcaaagggaca

SEQ ID NO: 2266669 - RNA, 19 nt, Homo sapiens
  misc_RNA (1)...(19): siRNA sense strand
aaaugaaaguccaggucaa

SEQ ID NO: 2266670 - RNA, 19 nt, Homo sapiens
  misc_RNA (1)...(19): siRNA sense strand
agaaagagccauugggagu

SEQ ID NO: 2266671 - RNA, 19 nt, Homo sapiens
  misc_RNA (1)...(19): siRNA sense strand
uguacaaccaggaaagaaa

SEQ ID NO: 2266672 - RNA, 19 nt, Homo sapiens
  misc_RNA (1)...(19): siRNA sense strand
ccaaaaggccucaggacaa

SEQ ID NO: 2266673 - RNA, 19 nt, Homo sapiens
  misc_RNA (1)...(19): siRNA sense strand
accuggaauuugaaagaaa

SEQ ID NO: 2266674 - RNA, 19 nt, Homo sapiens
  misc_RNA (1)...(19): siRNA sense strand
gggaguaaaugcaaaggga

SEQ ID NO: 2266675 - RNA, 19 nt, Homo sapiens
  misc_RNA (1)...(19): siRNA sense strand
cugcuaaauuugggagauu

SEQ ID NO: 2266676 - RNA, 19 nt, Homo sapiens
  misc_RNA (1)...(19): siRNA sense strand
gaggagauccagagaaaau

SEQ ID NO: 2266677 - RNA, 19 nt, Homo sapiens
  misc_RNA (1)...(19): siRNA sense strand
acagaagggcagacaguuu

SEQ ID NO: 2266678 - RNA, 19 nt, Homo sapiens
  misc_RNA (1)...(19): siRNA sense strand
aaagaaauagagagcgauu

SEQ ID NO: 2266679 - RNA, 19 nt, Homo sapiens
  misc_RNA (1)...(19): siRNA sense strand
aggccuaacuccacgagaa

SEQ ID NO: 2266680 - RNA, 19 nt, Homo sapiens
  misc_RNA (1)...(19): siRNA sense strand
cagacaguuuacagaagaa

SEQ ID NO: 2266681 - RNA, 19 nt, Homo sapiens
  misc_RNA (1)...(19): siRNA sense strand
uggugaagaaacaggauau

SEQ ID NO: 2266682 - RNA, 19 nt, Homo sapiens
  misc_RNA (1)...(19): siRNA sense strand
ggauauuauuacccagaca

SEQ ID NO: 2266683 - RNA, 19 nt, Homo sapiens
  misc_RNA (1)...(19): siRNA sense strand
ucggaauugugaugaguuu

SEQ ID NO: 2266684 - RNA, 19 nt, Homo sapiens
  misc_RNA (1)...(19): siRNA sense strand
gcuacaggcugauggggaa

SEQ ID NO: 2266685 - RNA, 19 nt, Homo sapiens
  misc_RNA (1)...(19): siRNA sense strand
cgacuagagacgagaucca

SEQ ID NO: 2266686 - RNA, 19 nt, Homo sapiens
  misc_RNA (1)...(19): siRNA sense strand
cccuaaaucuauaguggau

SEQ ID NO: 2266687 - RNA, 19 nt, Homo sapiens
  misc_RNA (1)...(19): siRNA sense strand
cggugguauugaagcagaa

SEQ ID NO: 2266688 - RNA, 19 nt, Homo sapiens
  misc_RNA (1)...(19): siRNA sense strand
gugauuggcuacaggcuga

SEQ ID NO: 2266689 - RNA, 19 nt, Homo sapiens
  misc_RNA (1)...(19): siRNA sense strand
caggauuguuagcaaagaa

SEQ ID NO: 2266690 - RNA, 19 nt, Homo sapiens
  misc_RNA (1)...(19): siRNA sense strand
ggaaugucacucagcacaa

SEQ ID NO: 2266691 - RNA, 19 nt, Homo sapiens
  misc_RNA (1)...(19): siRNA sense strand
agaaucaagaccuggaauu

SEQ ID NO: 2266692 - RNA, 19 nt, Homo sapiens
  misc_RNA (1)...(19): siRNA sense strand
gcucacagggcaagaacga

SEQ ID NO: 2266693 - RNA, 19 nt, Homo sapiens
  misc_RNA (1)...(19): siRNA sense strand
gagacgagauccaggcagu

SEQ ID NO: 2266694 - RNA, 19 nt, Homo sapiens
  misc_RNA (1)...(19): siRNA sense strand
uauuugaucaggauggaua

SEQ ID NO: 2266695 - RNA, 19 nt, Homo sapiens
  misc_RNA (1)...(19): siRNA sense strand
agcaaggauuuaaaggauu

SEQ ID NO: 2266696 - RNA, 19 nt, Homo sapiens
  misc_RNA (1)...(19): siRNA sense strand
aauuggaggauucaagaua

SEQ ID NO: 2266697 - RNA, 19 nt, Homo sapiens
  misc_RNA (1)...(19): siRNA sense strand
aaucuauaguggaugccua

SEQ ID NO: 2266698 - RNA, 19 nt, Homo sapiens
  misc_RNA (1)...(19): siRNA sense strand
augccuaugugcugcuaaa

SEQ ID NO: 2266699 - RNA, 19 nt, Homo sapiens
  misc_RNA (1)...(19): siRNA sense strand
agaccuggaauuugaaaga

SEQ ID NO: 2266700 - RNA, 19 nt, Homo sapiens
  misc_RNA (1)...(19): siRNA sense strand
auagagacugugaaugaaa

SEQ ID NO: 2266701 - RNA, 19 nt, Homo sapiens
  misc_RNA (1)...(19): siRNA sense strand
agguugggguagugggcaa

SEQ ID NO: 2266702 - RNA, 19 nt, Homo sapiens
  misc_RNA (1)...(19): siRNA sense strand
agaacauagaagugccauu

SEQ ID NO: 2266703 - RNA, 19 nt, Homo sapiens
  misc_RNA (1)...(19): siRNA sense strand
uggaauauuuggcaagagu

SEQ ID NO: 2266704 - RNA, 19 nt, Homo sapiens
  misc_RNA (1)...(19): siRNA sense strand
auuacuagcugcacaaaca

SEQ ID NO: 2266705 - RNA, 19 nt, Homo sapiens
  misc_RNA (1)...(19): siRNA sense strand
aggauuguuagcaaagaaa

SEQ ID NO: 2266706 - RNA, 19 nt, Homo sapiens
  misc_RNA (1)...(19): siRNA sense strand
uggaaauauugcaagaaac

SEQ ID NO: 2266707 - RNA, 19 nt, Homo sapiens
  misc_RNA (1)...(19): siRNA sense strand
cuuaacuaacagaggccua

SEQ ID NO: 2266708 - RNA, 19 nt, Homo sapiens
  misc_RNA (1)...(19): siRNA sense strand
aggaauguuucgagauuuc

SEQ ID NO: 2266709 - RNA, 19 nt, Homo sapiens
  misc_RNA (1)...(19): siRNA sense strand
caaagaaagcuguggaugc

SEQ ID NO: 2266710 - RNA, 19 nt, Homo sapiens
  misc_RNA (1)...(19): siRNA sense strand
uuggaguacuaucuggaaa

SEQ ID NO: 2266711 - RNA, 19 nt, Homo sapiens
  misc_RNA (1)...(19): siRNA sense strand
cuaucuggaaacaggaauu

SEQ ID NO: 2266712 - RNA, 19 nt, Homo sapiens
  misc_RNA (1)...(19): siRNA sense strand
ggccuaacuccacgagaau

SEQ ID NO: 2266713 - RNA, 19 nt, Homo sapiens
  misc_RNA (1)...(19): siRNA sense strand
auauuuggcaagaguggua

SEQ ID NO: 2266714 - RNA, 19 nt, Homo sapiens
  misc_RNA (1)...(19): siRNA sense strand
cagaaaaccucaaaccaca

SEQ ID NO: 2266715 - RNA, 19 nt, Homo sapiens
  misc_RNA (1)...(19): siRNA sense strand
caguugaugaaguuaguau

SEQ ID NO: 2266716 - RNA, 19 nt, Homo sapiens
  misc_RNA (1)...(19): siRNA sense strand
auagagagcgauuugaauu

SEQ ID NO: 2266717 - RNA, 19 nt, Homo sapiens
  misc_RNA (1)...(19): siRNA sense strand
uagagagcgauuugaauuu

SEQ ID NO: 2266718 - RNA, 19 nt, Homo sapiens
  misc_RNA (1)...(19): siRNA sense strand
cuguaggaauguuucgaga

SEQ ID NO: 2266719 - RNA, 19 nt, Homo sapiens
  misc_RNA (1)...(19): siRNA sense strand
ggauguuuaaggaagucua

SEQ ID NO: 2266720 - RNA, 19 nt, Homo sapiens
  misc_RNA (1)...(19): siRNA sense strand
gugugaucccacuugaaua

SEQ ID NO: 2266721 - RNA, 19 nt, Homo sapiens
  misc_RNA (1)...(19): siRNA sense strand
aaaguuaggaggagaucca

SEQ ID NO: 2266722 - RNA, 19 nt, Homo sapiens
  misc_RNA (1)...(19): siRNA sense strand
caacaaacguggaugggaa

SEQ ID NO: 2266723 - RNA, 19 nt, Homo sapiens
  misc_RNA (1)...(19): siRNA sense strand
gaaagaaagucgaagucca

SEQ ID NO: 2266724 - RNA, 19 nt, Homo sapiens
  misc_RNA (1)...(19): siRNA sense strand
gugaaagaccagagcagga

SEQ ID NO: 2266725 - RNA, 19 nt, Homo sapiens
  misc_RNA (1)...(19): siRNA sense strand
ugaggaugaggaagggaaa

SEQ ID NO: 2266726 - RNA, 19 nt, Homo sapiens
  misc_RNA (1)...(19): siRNA sense strand
cagauaucgaggaggugaa

SEQ ID NO: 2266727 - RNA, 19 nt, Homo sapiens
  misc_RNA (1)...(19): siRNA sense strand
gcuguaaggaggagccaga

SEQ ID NO: 2266728 - RNA, 19 nt, Homo sapiens
  misc_RNA (1)...(19): siRNA sense strand
gauacaaagcaggggaaaa

SEQ ID NO: 2266729 - RNA, 19 nt, Homo sapiens
  misc_RNA (1)...(19): siRNA sense strand
auaucgaggaggugaaaga

SEQ ID NO: 2266730 - RNA, 19 nt, Homo sapiens
  misc_RNA (1)...(19): siRNA sense strand
uguaaggaggagccagaaa

SEQ ID NO: 2266731 - RNA, 19 nt, Homo sapiens
  misc_RNA (1)...(19): siRNA sense strand
cccaagacguggaaggcca

SEQ ID NO: 2266732 - RNA, 19 nt, Homo sapiens
  misc_RNA (1)...(19): siRNA sense strand
caacagaugaggaugagga

SEQ ID NO: 2266733 - RNA, 19 nt, Homo sapiens
  misc_RNA (1)...(19): siRNA sense strand
gcgcaugagacccuggcua

SEQ ID NO: 2266734 - RNA, 19 nt, Homo sapiens
  misc_RNA (1)...(19): siRNA sense strand
aggaugaggaagggaaauu

SEQ ID NO: 2266735 - RNA, 19 nt, Homo sapiens
  misc_RNA (1)...(19): siRNA sense strand
gaaccagagaaaagaaaga

SEQ ID NO: 2266736 - RNA, 19 nt, Homo sapiens
  misc_RNA (1)...(19): siRNA sense strand
ucgaggaggugaaagacca

SEQ ID NO: 2266737 - RNA, 19 nt, Homo sapiens
  misc_RNA (1)...(19): siRNA sense strand
caguggaaguugugccgga

SEQ ID NO: 2266738 - RNA, 19 nt, Homo sapiens
  misc_RNA (1)...(19): siRNA sense strand
augaggaugaggaagggaa

SEQ ID NO: 2266739 - RNA, 19 nt, Homo sapiens
  misc_RNA (1)...(19): siRNA sense strand
ccaucaaagaggagagcaa

SEQ ID NO: 2266740 - RNA, 19 nt, Homo sapiens
  misc_RNA (1)...(19): siRNA sense strand
agaggaauauugaaggcaa

SEQ ID NO: 2266741 - RNA, 19 nt, Homo sapiens
  misc_RNA (1)...(19): siRNA sense strand
ggcuggaggagcagauaaa

SEQ ID NO: 2266742 - RNA, 19 nt, Homo sapiens
  misc_RNA (1)...(19): siRNA sense strand
caucauaguuguaggacag

SEQ ID NO: 2266743 - RNA, 19 nt, Homo sapiens
  misc_RNA (1)...(19): siRNA sense strand
aagaaaggaaagaaaccaa

SEQ ID NO: 2266744 - RNA, 19 nt, Homo sapiens
  misc_RNA (1)...(19): siRNA sense strand
aggaaagaaaccaaagaca

SEQ ID NO: 2266745 - RNA, 19 nt, Homo sapiens
  misc_RNA (1)...(19): siRNA sense strand
aagaaaccaaagacagaaa

SEQ ID NO: 2266746 - RNA, 19 nt, Homo sapiens
  misc_RNA (1)...(19): siRNA sense strand
cagauaaacuccaacacga

SEQ ID NO: 2266747 - RNA, 19 nt, Homo sapiens
  misc_RNA (1)...(19): siRNA sense strand
acaucauaguuguaggaca

SEQ ID NO: 2266748 - RNA, 19 nt, Homo sapiens
  misc_RNA (1)...(19): siRNA sense strand
ccuucagggucuaccgaau

SEQ ID NO: 2266749 - RNA, 19 nt, Homo sapiens
  misc_RNA (1)...(19): siRNA sense strand
ggaaagaaaccaaagacag

SEQ ID NO: 2266750 - RNA, 19 nt, Homo sapiens
  misc_RNA (1)...(19): siRNA sense strand
aauaaugccuucagggucu

SEQ ID NO: 2266751 - RNA, 19 nt, Homo sapiens
  misc_RNA (1)...(19): siRNA sense strand
cgggcaauccauacaggaa

SEQ ID NO: 2266752 - RNA, 19 nt, Homo sapiens
  misc_RNA (1)...(19): siRNA sense strand
uagauaaaccugaucccaa

SEQ ID NO: 2266753 - RNA, 19 nt, Homo sapiens
  misc_RNA (1)...(19): siRNA sense strand
gcgaauuucagaugcgcca

SEQ ID NO: 2266754 - RNA, 19 nt, Homo sapiens
  misc_RNA (1)...(19): siRNA sense strand
cacuggcggaagaggaaua

SEQ ID NO: 2266755 - RNA, 19 nt, Homo sapiens
  misc_RNA (1)...(19): siRNA sense strand
ggccaaggagacagggaaa

SEQ ID NO: 2266756 - RNA, 19 nt, Homo sapiens
  misc_RNA (1)...(19): siRNA sense strand
aggaggaagaagaggaaga

SEQ ID NO: 2266757 - RNA, 19 nt, Homo sapiens
  misc_RNA (1)...(19): siRNA sense strand
gcgaacagcuccugccaga

SEQ ID NO: 2266758 - RNA, 19 nt, Homo sapiens
  misc_RNA (1)...(19): siRNA sense strand
ggaaauacaccgaaggcgu

SEQ ID NO: 2266759 - RNA, 19 nt, Homo sapiens
  misc_RNA (1)...(19): siRNA sense strand
aagaauggccugaccgcaa

SEQ ID NO: 2266760 - RNA, 19 nt, Homo sapiens
  misc_RNA (1)...(19): siRNA sense strand
cugcagaggauguugccaa

SEQ ID NO: 2266761 - RNA, 19 nt, Homo sapiens
  misc_RNA (1)...(19): siRNA sense strand
gugcaggagaggaggagga

SEQ ID NO: 2266762 - RNA, 19 nt, Homo sapiens
  misc_RNA (1)...(19): siRNA sense strand
gggccaaggagacagggaa

SEQ ID NO: 2266763 - RNA, 19 nt, Homo sapiens
  misc_RNA (1)...(19): siRNA sense strand
acaccgaaggcguggauga

SEQ ID NO: 2266764 - RNA, 19 nt, Homo sapiens
  misc_RNA (1)...(19): siRNA sense strand
ccgcaaaccccgagagaag

SEQ ID NO: 2266765 - RNA, 19 nt, Homo sapiens
  misc_RNA (1)...(19): siRNA sense strand
ucucaaacccagaccucaa

SEQ ID NO: 2266766 - RNA, 19 nt, Homo sapiens
  misc_RNA (1)...(19): siRNA sense strand
aagaagaggaagagcugca

SEQ ID NO: 2266767 - RNA, 19 nt, Homo sapiens
  misc_RNA (1)...(19): siRNA sense strand
ccauccagcgggaggucaa

SEQ ID NO: 2266768 - RNA, 19 nt, Homo sapiens
  misc_RNA (1)...(19): siRNA sense strand
ggaagaagaggaagagcug

SEQ ID NO: 2266769 - RNA, 19 nt, Homo sapiens
  misc_RNA (1)...(19): siRNA sense strand
aggaagaagaggaagagcu

SEQ ID NO: 2266770 - RNA, 19 nt, Homo sapiens
  misc_RNA (1)...(19): siRNA sense strand
aggaggaggaagaagagga

SEQ ID NO: 2266771 - RNA, 19 nt, Homo sapiens
  misc_RNA (1)...(19): siRNA sense strand
ggccaaggagacagggaaa

SEQ ID NO: 2266772 - RNA, 19 nt, Homo sapiens
  misc_RNA (1)...(19): siRNA sense strand
aggaggaagaagaggaaga

SEQ ID NO: 2266773 - RNA, 19 nt, Homo sapiens
  misc_RNA (1)...(19): siRNA sense strand
gcgaacagcuccugccaga

SEQ ID NO: 2266774 - RNA, 19 nt, Homo sapiens
  misc_RNA (1)...(19): siRNA sense strand
ggaaauacaccgaaggcgu

SEQ ID NO: 2266775 - RNA, 19 nt, Homo sapiens
  misc_RNA (1)...(19): siRNA sense strand
aagaauggccugaccgcaa

SEQ ID NO: 2266776 - RNA, 19 nt, Homo sapiens
  misc_RNA (1)...(19): siRNA sense strand
cugcagaggauguugccaa

SEQ ID NO: 2266777 - RNA, 19 nt, Homo sapiens
  misc_RNA (1)...(19): siRNA sense strand
gugcaggagaggaggagga

SEQ ID NO: 2266778 - RNA, 19 nt, Homo sapiens
  misc_RNA (1)...(19): siRNA sense strand
gggccaaggagacagggaa

SEQ ID NO: 2266779 - RNA, 19 nt, Homo sapiens
  misc_RNA (1)...(19): siRNA sense strand
acaccgaaggcguggauga

SEQ ID NO: 2266780 - RNA, 19 nt, Homo sapiens
  misc_RNA (1)...(19): siRNA sense strand
ccgcaaaccccgagagaag

SEQ ID NO: 2266781 - RNA, 19 nt, Homo sapiens
  misc_RNA (1)...(19): siRNA sense strand
ucucaaacccagaccucaa

SEQ ID NO: 2266782 - RNA, 19 nt, Homo sapiens
  misc_RNA (1)...(19): siRNA sense strand
aagaagaggaagagcugca

SEQ ID NO: 2266783 - RNA, 19 nt, Homo sapiens
  misc_RNA (1)...(19): siRNA sense strand
ccauccagcgggaggucaa

SEQ ID NO: 2266784 - RNA, 19 nt, Homo sapiens
  misc_RNA (1)...(19): siRNA sense strand
ggaagaagaggaagagcug

SEQ ID NO: 2266785 - RNA, 19 nt, Homo sapiens
  misc_RNA (1)...(19): siRNA sense strand
aggaagaagaggaagagcu

SEQ ID NO: 2266786 - RNA, 19 nt, Homo sapiens
  misc_RNA (1)...(19): siRNA sense strand
aggaggaggaagaagagga

SEQ ID NO: 2266787 - RNA, 19 nt, Homo sapiens
  misc_RNA (1)...(19): siRNA sense strand
cuuuguuagggaugggaaa

SEQ ID NO: 2266788 - RNA, 19 nt, Homo sapiens
  misc_RNA (1)...(19): siRNA sense strand
aggcuaacccaguggaagu

SEQ ID NO: 2266789 - RNA, 19 nt, Homo sapiens
  misc_RNA (1)...(19): siRNA sense strand
cuuggaaaguacugagcga

SEQ ID NO: 2266790 - RNA, 19 nt, Homo sapiens
  misc_RNA (1)...(19): siRNA sense strand
cugccaguccagagagaca

SEQ ID NO: 2266791 - RNA, 19 nt, Homo sapiens
  misc_RNA (1)...(19): siRNA sense strand
guacaugcuuuguuaggga

SEQ ID NO: 2266792 - RNA, 19 nt, Homo sapiens
  misc_RNA (1)...(19): siRNA sense strand
ggacaagaagcgaagcauc

SEQ ID NO: 2266793 - RNA, 19 nt, Homo sapiens
  misc_RNA (1)...(19): siRNA sense strand
uggcagugaaguagcauca

SEQ ID NO: 2266794 - RNA, 19 nt, Homo sapiens
  misc_RNA (1)...(19): siRNA sense strand
uggaaaguacugagcgacu

SEQ ID NO: 2266795 - RNA, 19 nt, Homo sapiens
  misc_RNA (1)...(19): siRNA sense strand
agaaaugauuguagcaaca

SEQ ID NO: 2266796 - RNA, 19 nt, Homo sapiens
  misc_RNA (1)...(19): siRNA sense strand
guucaguugauguggauaa

SEQ ID NO: 2266797 - RNA, 19 nt, Homo sapiens
  misc_RNA (1)...(19): siRNA sense strand
ggacauuaggagaacaaau

SEQ ID NO: 2266798 - RNA, 19 nt, Homo sapiens
  misc_RNA (1)...(19): siRNA sense strand
ccucaguauaccaaagaaa

SEQ ID NO: 2266799 - RNA, 19 nt, Homo sapiens
  misc_RNA (1)...(19): siRNA sense strand
aagugaaagccaagaagaa

SEQ ID NO: 2266800 - RNA, 19 nt, Homo sapiens
  misc_RNA (1)...(19): siRNA sense strand
gcuaguauuccaacagaaa

SEQ ID NO: 2266801 - RNA, 19 nt, Homo sapiens
  misc_RNA (1)...(19): siRNA sense strand
caugagugaccuaaagaaa

SEQ ID NO: 2266802 - RNA, 19 nt, Homo sapiens
  misc_RNA (1)...(19): siRNA sense strand
cugccaaggucuucaguau

SEQ ID NO: 2266803 - RNA, 19 nt, Homo sapiens
  misc_RNA (1)...(19): siRNA sense strand
ccgaaugggagauguguau

SEQ ID NO: 2266804 - RNA, 19 nt, Homo sapiens
  misc_RNA (1)...(19): siRNA sense strand
acaagaaugcucagauaau

SEQ ID NO: 2266805 - RNA, 19 nt, Homo sapiens
  misc_RNA (1)...(19): siRNA sense strand
gugaaagccaagaagaaaa

SEQ ID NO: 2266806 - RNA, 19 nt, Homo sapiens
  misc_RNA (1)...(19): siRNA sense strand
ccaaagaagaaaugauugu

SEQ ID NO: 2266807 - RNA, 19 nt, Homo sapiens
  misc_RNA (1)...(19): siRNA sense strand
agugcaaaguucagaccua

SEQ ID NO: 2266808 - RNA, 19 nt, Homo sapiens
  misc_RNA (1)...(19): siRNA sense strand
cagaagaauaugguaguaa

SEQ ID NO: 2266809 - RNA, 19 nt, Homo sapiens
  misc_RNA (1)...(19): siRNA sense strand
acaaauaccagcugcucaa

SEQ ID NO: 2266810 - RNA, 19 nt, Homo sapiens
  misc_RNA (1)...(19): siRNA sense strand
ugaccuaaagaaagaggaa

SEQ ID NO: 2266811 - RNA, 19 nt, Homo sapiens
  misc_RNA (1)...(19): siRNA sense strand
gguugaugggacagaagua

SEQ ID NO: 2266812 - RNA, 19 nt, Homo sapiens
  misc_RNA (1)...(19): siRNA sense strand
cuauauagugugaaugaga

SEQ ID NO: 2266813 - RNA, 19 nt, Homo sapiens
  misc_RNA (1)...(19): siRNA sense strand
auccaagaguuguguuuaa

SEQ ID NO: 2266814 - RNA, 19 nt, Homo sapiens
  misc_RNA (1)...(19): siRNA sense strand
ccuguaugaugcugaaauu

SEQ ID NO: 2266815 - RNA, 19 nt, Homo sapiens
  misc_RNA (1)...(19): siRNA sense strand
cuucaaucgugcacaguuu

SEQ ID NO: 2266816 - RNA, 19 nt, Homo sapiens
  misc_RNA (1)...(19): siRNA sense strand
cgaaguaccaacaggaguu

SEQ ID NO: 2266817 - RNA, 19 nt, Homo sapiens
  misc_RNA (1)...(19): siRNA sense strand
uguugaaagcugugauuga

SEQ ID NO: 2266818 - RNA, 19 nt, Homo sapiens
  misc_RNA (1)...(19): siRNA sense strand
gcauagcaguucuugggua

SEQ ID NO: 2266819 - RNA, 19 nt, Homo sapiens
  misc_RNA (1)...(19): siRNA sense strand
ggacagaaguaacaugcca

SEQ ID NO: 2266820 - RNA, 19 nt, Homo sapiens
  misc_RNA (1)...(19): siRNA sense strand
agugaaagccaagaagaaa

SEQ ID NO: 2266821 - RNA, 19 nt, Homo sapiens
  misc_RNA (1)...(19): siRNA sense strand
gugaaugagaauggcaaua

SEQ ID NO: 2266822 - RNA, 19 nt, Homo sapiens
  misc_RNA (1)...(19): siRNA sense strand
aaguauaauugcuggaauc

SEQ ID NO: 2266823 - RNA, 19 nt, Homo sapiens
  misc_RNA (1)...(19): siRNA sense strand
ucgauuugguucagcaauu

SEQ ID NO: 2266824 - RNA, 19 nt, Homo sapiens
  misc_RNA (1)...(19): siRNA sense strand
caguauuccuuuccacaaa

SEQ ID NO: 2266825 - RNA, 19 nt, Homo sapiens
  misc_RNA (1)...(19): siRNA sense strand
uuccaagccuuaagugaaa

SEQ ID NO: 2266826 - RNA, 19 nt, Homo sapiens
  misc_RNA (1)...(19): siRNA sense strand
cuuuaaagagagaacaaca

SEQ ID NO: 2266827 - RNA, 19 nt, Homo sapiens
  misc_RNA (1)...(19): siRNA sense strand
caccuauaacccugagaua

SEQ ID NO: 2266828 - RNA, 19 nt, Homo sapiens
  misc_RNA (1)...(19): siRNA sense strand
ucauagauguugugguugu

SEQ ID NO: 2266829 - RNA, 19 nt, Homo sapiens
  misc_RNA (1)...(19): siRNA sense strand
ggaaaugucacaaguggga

SEQ ID NO: 2266830 - RNA, 19 nt, Homo sapiens
  misc_RNA (1)...(19): siRNA sense strand
aaauuauaccggccagaua

SEQ ID NO: 2266831 - RNA, 19 nt, Homo sapiens
  misc_RNA (1)...(19): siRNA sense strand
caaauguuacugagaugaa

SEQ ID NO: 2266832 - RNA, 19 nt, Homo sapiens
  misc_RNA (1)...(19): siRNA sense strand
gguuaauucaguaugccaa

SEQ ID NO: 2266833 - RNA, 19 nt, Homo sapiens
  misc_RNA (1)...(19): siRNA sense strand
gaagguaacaacaggaagu

SEQ ID NO: 2266834 - RNA, 19 nt, Homo sapiens
  misc_RNA (1)...(19): siRNA sense strand
cugagaaccgaaugggaga

SEQ ID NO: 2266835 - RNA, 19 nt, Homo sapiens
  misc_RNA (1)...(19): siRNA sense strand
guggauaaagacaccauua

SEQ ID NO: 2266836 - RNA, 19 nt, Homo sapiens
  misc_RNA (1)...(19): siRNA sense strand
aguaccaacaggaguuaua

SEQ ID NO: 2266837 - RNA, 19 nt, Homo sapiens
  misc_RNA (1)...(19): siRNA sense strand
cuggaauuguuguugauuu

SEQ ID NO: 2266838 - RNA, 19 nt, Homo sapiens
  misc_RNA (1)...(19): siRNA sense strand
gccaauaauccaagaguug

SEQ ID NO: 2266839 - RNA, 19 nt, Homo sapiens
  misc_RNA (1)...(19): siRNA sense strand
gugugaaugagaauggcaa

SEQ ID NO: 2266840 - RNA, 19 nt, Homo sapiens
  misc_RNA (1)...(19): siRNA sense strand
ggauaaagacaccauuaca

SEQ ID NO: 2266841 - RNA, 19 nt, Homo sapiens
  misc_RNA (1)...(19): siRNA sense strand
caaaguauucccagaaaau

SEQ ID NO: 2266842 - RNA, 19 nt, Homo sapiens
  misc_RNA (1)...(19): siRNA sense strand
ugggacauuaggagaacaa

SEQ ID NO: 2266843 - RNA, 19 nt, Homo sapiens
  misc_RNA (1)...(19): siRNA sense strand
uggcuuuaaugaugugauu

SEQ ID NO: 2266844 - RNA, 19 nt, Homo sapiens
  misc_RNA (1)...(19): siRNA sense strand
ucacaugaaaggagaauac

SEQ ID NO: 2266845 - RNA, 19 nt, Homo sapiens
  misc_RNA (1)...(19): siRNA sense strand
cagaaaucacaguucauau

SEQ ID NO: 2266846 - RNA, 19 nt, Homo sapiens
  misc_RNA (1)...(19): siRNA sense strand
agugcuauauagugugaau

SEQ ID NO: 2266847 - RNA, 19 nt, Homo sapiens
  misc_RNA (1)...(19): siRNA sense strand
caccaauguacaugaguga

SEQ ID NO: 2266848 - RNA, 19 nt, Homo sapiens
  misc_RNA (1)...(19): siRNA sense strand
acaaaguauucccagaaaa

SEQ ID NO: 2266849 - RNA, 19 nt, Homo sapiens
  misc_RNA (1)...(19): siRNA sense strand
uuaacaagaucuaccaaca

SEQ ID NO: 2266850 - RNA, 19 nt, Homo sapiens
  misc_RNA (1)...(19): siRNA sense strand
guuccagacaguacagcua

SEQ ID NO: 2266851 - RNA, 19 nt, Homo sapiens
  misc_RNA (1)...(19): siRNA sense strand
gcuaacggcagcugcagaa

SEQ ID NO: 2266852 - RNA, 19 nt, Homo sapiens
  misc_RNA (1)...(19): siRNA sense strand
uaguauuccaacagaaaga

SEQ ID NO: 2266853 - RNA, 19 nt, Homo sapiens
  misc_RNA (1)...(19): siRNA sense strand
caagugaacaguuugggua

SEQ ID NO: 2266854 - RNA, 19 nt, Homo sapiens
  misc_RNA (1)...(19): siRNA sense strand
caugggaacuggagguuuu

SEQ ID NO: 2266855 - RNA, 19 nt, Homo sapiens
  misc_RNA (1)...(19): siRNA sense strand
uuggguacuuaaacagaaa

SEQ ID NO: 2266856 - RNA, 19 nt, Homo sapiens
  misc_RNA (1)...(19): siRNA sense strand
gaagacaucucauggccau

SEQ ID NO: 2266857 - RNA, 19 nt, Homo sapiens
  misc_RNA (1)...(19): siRNA sense strand
gugcauacaacacuggaau

SEQ ID NO: 2266858 - RNA, 19 nt, Homo sapiens
  misc_RNA (1)...(19): siRNA sense strand
ggauagaggacaaggcuca

SEQ ID NO: 2266859 - RNA, 19 nt, Homo sapiens
  misc_RNA (1)...(19): siRNA sense strand
cuacauuaucagagcaaga

SEQ ID NO: 2266860 - RNA, 19 nt, Homo sapiens
  misc_RNA (1)...(19): siRNA sense strand
gccgagaccuggauggcaa

SEQ ID NO: 2266861 - RNA, 19 nt, Homo sapiens
  misc_RNA (1)...(19): siRNA sense strand
gcacagagaaggagccacu

SEQ ID NO: 2266862 - RNA, 19 nt, Homo sapiens
  misc_RNA (1)...(19): siRNA sense strand
ugaaaugcccggaggcuga

SEQ ID NO: 2266863 - RNA, 19 nt, Homo sapiens
  misc_RNA (1)...(19): siRNA sense strand
gagucagaauuucgagaca

SEQ ID NO: 2266864 - RNA, 19 nt, Homo sapiens
  misc_RNA (1)...(19): siRNA sense strand
agaaggagccacugagcga

SEQ ID NO: 2266865 - RNA, 19 nt, Homo sapiens
  misc_RNA (1)...(19): siRNA sense strand
aggacaaggcucagaucuu

SEQ ID NO: 2266866 - RNA, 19 nt, Homo sapiens
  misc_RNA (1)...(19): siRNA sense strand
cgucagacacccagggaac

SEQ ID NO: 2266867 - RNA, 19 nt, Homo sapiens
  misc_RNA (1)...(19): siRNA sense strand
acagauaacuucacccgaa

SEQ ID NO: 2266868 - RNA, 19 nt, Homo sapiens
  misc_RNA (1)...(19): siRNA sense strand
agugugaggcuguguacaa

SEQ ID NO: 2266869 - RNA, 19 nt, Homo sapiens
  misc_RNA (1)...(19): siRNA sense strand
gcuacaaugauguggccau

SEQ ID NO: 2266870 - RNA, 19 nt, Homo sapiens
  misc_RNA (1)...(19): siRNA sense strand
uguacaaagcccugaagau

SEQ ID NO: 2266871 - RNA, 19 nt, Homo sapiens
  misc_RNA (1)...(19): siRNA sense strand
gcucagaucuugcuggacu

SEQ ID NO: 2266872 - RNA, 19 nt, Homo sapiens
  misc_RNA (1)...(19): siRNA sense strand
ggcaacaguucgagcccau

SEQ ID NO: 2266873 - RNA, 19 nt, Homo sapiens
  misc_RNA (1)...(19): siRNA sense strand
auucaguggugaugacaca

SEQ ID NO: 2266874 - RNA, 19 nt, Homo sapiens
  misc_RNA (1)...(19): siRNA sense strand
ugaagaugcccuaccgaau

SEQ ID NO: 2266875 - RNA, 19 nt, Homo sapiens
  misc_RNA (1)...(19): siRNA sense strand
ccuggauggcaauggauau

SEQ ID NO: 2266876 - RNA, 19 nt, Homo sapiens
  misc_RNA (1)...(19): siRNA sense strand
agucagaauuucgagacaa

SEQ ID NO: 2266877 - RNA, 19 nt, Homo sapiens
  misc_RNA (1)...(19): siRNA sense strand
ggaccaaggcagaaggcag

SEQ ID NO: 2266878 - RNA, 19 nt, Homo sapiens
  misc_RNA (1)...(19): siRNA sense strand
agagccggauagaggacaa

SEQ ID NO: 2266879 - RNA, 19 nt, Homo sapiens
  misc_RNA (1)...(19): siRNA sense strand
agggaguaguguuuguauu

SEQ ID NO: 2266880 - RNA, 19 nt, Homo sapiens
  misc_RNA (1)...(19): siRNA sense strand
uguccagcucagagggaga

SEQ ID NO: 2266881 - RNA, 19 nt, Homo sapiens
  misc_RNA (1)...(19): siRNA sense strand
gggaacuucuccagccuga

SEQ ID NO: 2266882 - RNA, 19 nt, Homo sapiens
  misc_RNA (1)...(19): siRNA sense strand
ggacaggguuacugccaag

SEQ ID NO: 2266883 - RNA, 19 nt, Homo sapiens
  misc_RNA (1)...(19): siRNA sense strand
gugaugacacagaagacuu

SEQ ID NO: 2266884 - RNA, 19 nt, Homo sapiens
  misc_RNA (1)...(19): siRNA sense strand
ccauuaacccaaagggccu

SEQ ID NO: 2266885 - RNA, 19 nt, Homo sapiens
  misc_RNA (1)...(19): siRNA sense strand
uggacuggcagaagcagaa

SEQ ID NO: 2266886 - RNA, 19 nt, Homo sapiens
  misc_RNA (1)...(19): siRNA sense strand
caccaacaagagagccaaa

SEQ ID NO: 2266887 - RNA, 19 nt, Homo sapiens
  misc_RNA (1)...(19): siRNA sense strand
ccacggaacuggagguaga

SEQ ID NO: 2266888 - RNA, 19 nt, Homo sapiens
  misc_RNA (1)...(19): siRNA sense strand
cuuugauggugaugggaaa

SEQ ID NO: 2266889 - RNA, 19 nt, Homo sapiens
  misc_RNA (1)...(19): siRNA sense strand
gcaccuuucuggaggagua

SEQ ID NO: 2266890 - RNA, 19 nt, Homo sapiens
  misc_RNA (1)...(19): siRNA sense strand
caagauggcuuuccagaua

SEQ ID NO: 2266891 - RNA, 19 nt, Homo sapiens
  misc_RNA (1)...(19): siRNA sense strand
gcagcaaggucaaguauga

SEQ ID NO: 2266892 - RNA, 19 nt, Homo sapiens
  misc_RNA (1)...(19): siRNA sense strand
gaagcaaggcuguggugaa

SEQ ID NO: 2266893 - RNA, 19 nt, Homo sapiens
  misc_RNA (1)...(19): siRNA sense strand
gauguggacaguagggaua

SEQ ID NO: 2266894 - RNA, 19 nt, Homo sapiens
  misc_RNA (1)...(19): siRNA sense strand
gcuuggauauggaugggaa

SEQ ID NO: 2266895 - RNA, 19 nt, Homo sapiens
  misc_RNA (1)...(19): siRNA sense strand
ggauguggauggaacaaca

SEQ ID NO: 2266896 - RNA, 19 nt, Homo sapiens
  misc_RNA (1)...(19): siRNA sense strand
gcugauaugcaaaaggaaa

SEQ ID NO: 2266897 - RNA, 19 nt, Homo sapiens
  misc_RNA (1)...(19): siRNA sense strand
gcaucaagagcuucggcua

SEQ ID NO: 2266898 - RNA, 19 nt, Homo sapiens
  misc_RNA (1)...(19): siRNA sense strand
gugaaguccuccauaaaga

SEQ ID NO: 2266899 - RNA, 19 nt, Homo sapiens
  misc_RNA (1)...(19): siRNA sense strand
cgagaugccuccacaguga

SEQ ID NO: 2266900 - RNA, 19 nt, Homo sapiens
  misc_RNA (1)...(19): siRNA sense strand
uggaagaacccaagcacca

SEQ ID NO: 2266901 - RNA, 19 nt, Homo sapiens
  misc_RNA (1)...(19): siRNA sense strand
aggaaagcaaggagaacca

SEQ ID NO: 2266902 - RNA, 19 nt, Homo sapiens
  misc_RNA (1)...(19): siRNA sense strand
gggaagaccgacagcaguu

SEQ ID NO: 2266903 - RNA, 19 nt, Homo sapiens
  misc_RNA (1)...(19): siRNA sense strand
ccagggagcugauaugcaa

SEQ ID NO: 2266904 - RNA, 19 nt, Homo sapiens
  misc_RNA (1)...(19): siRNA sense strand
ggauauggaugggaaccaa

SEQ ID NO: 2266905 - RNA, 19 nt, Homo sapiens
  misc_RNA (1)...(19): siRNA sense strand
cagugaaguccuccauaaa

SEQ ID NO: 2266906 - RNA, 19 nt, Homo sapiens
  misc_RNA (1)...(19): siRNA sense strand
acagugaaguccuccauaa

SEQ ID NO: 2266907 - RNA, 19 nt, Homo sapiens
  misc_RNA (1)...(19): siRNA sense strand
cuacuguggcccuggacua

SEQ ID NO: 2266908 - RNA, 19 nt, Homo sapiens
  misc_RNA (1)...(19): siRNA sense strand
gggccauuguagugaccuu

SEQ ID NO: 2266909 - RNA, 19 nt, Homo sapiens
  misc_RNA (1)...(19): siRNA sense strand
gggaauggaaguucuguga

SEQ ID NO: 2266910 - RNA, 19 nt, Homo sapiens
  misc_RNA (1)...(19): siRNA sense strand
ccauaaagaacuugaugcu

SEQ ID NO: 2266911 - RNA, 19 nt, Homo sapiens
  misc_RNA (1)...(19): siRNA sense strand
gcuacagaguggacaucga

SEQ ID NO: 2266912 - RNA, 19 nt, Homo sapiens
  misc_RNA (1)...(19): siRNA sense strand
uggaggagacugacugcua

SEQ ID NO: 2266913 - RNA, 19 nt, Homo sapiens
  misc_RNA (1)...(19): siRNA sense strand
uggcugaccucaacaguga

SEQ ID NO: 2266914 - RNA, 19 nt, Homo sapiens
  misc_RNA (1)...(19): siRNA sense strand
ggauguggacaguagggau

SEQ ID NO: 2266915 - RNA, 19 nt, Homo sapiens
  misc_RNA (1)...(19): siRNA sense strand
ccucccauguugaguguga

SEQ ID NO: 2266916 - RNA, 19 nt, Homo sapiens
  misc_RNA (1)...(19): siRNA sense strand
augggaaagucuucaucua

SEQ ID NO: 2266917 - RNA, 19 nt, Homo sapiens
  misc_RNA (1)...(19): siRNA sense strand
cugucaggcagcuuggaua

SEQ ID NO: 2266918 - RNA, 19 nt, Homo sapiens
  misc_RNA (1)...(19): siRNA sense strand
gggcaagauuguuaccugu

SEQ ID NO: 2266919 - RNA, 19 nt, Homo sapiens
  misc_RNA (1)...(19): siRNA sense strand
uguuagaugcggacacaga

SEQ ID NO: 2266920 - RNA, 19 nt, Homo sapiens
  misc_RNA (1)...(19): siRNA sense strand
ccuuugauggugaugggaa

SEQ ID NO: 2266921 - RNA, 19 nt, Homo sapiens
  misc_RNA (1)...(19): siRNA sense strand
ccuucaaucuggacgugau

SEQ ID NO: 2266922 - RNA, 19 nt, Homo sapiens
  misc_RNA (1)...(19): siRNA sense strand
ccguguggcugaagcacca

SEQ ID NO: 2266923 - RNA, 19 nt, Homo sapiens
  misc_RNA (1)...(19): siRNA sense strand
gggucagcgacacggaauu

SEQ ID NO: 2266924 - RNA, 19 nt, Homo sapiens
  misc_RNA (1)...(19): siRNA sense strand
cugugaagucccuggaagu

SEQ ID NO: 2266925 - RNA, 19 nt, Homo sapiens
  misc_RNA (1)...(19): siRNA sense strand
caaagaaggcgguggagaa

SEQ ID NO: 2266926 - RNA, 19 nt, Homo sapiens
  misc_RNA (1)...(19): siRNA sense strand
gcagagaaccacagaacua

SEQ ID NO: 2266927 - RNA, 19 nt, Homo sapiens
  misc_RNA (1)...(19): siRNA sense strand
gagaaggccugcaagaaua

SEQ ID NO: 2266928 - RNA, 19 nt, Homo sapiens
  misc_RNA (1)...(19): siRNA sense strand
gcagauccuuggugaaaua

SEQ ID NO: 2266929 - RNA, 19 nt, Homo sapiens
  misc_RNA (1)...(19): siRNA sense strand
agaaggaggaggaggaaga

SEQ ID NO: 2266930 - RNA, 19 nt, Homo sapiens
  misc_RNA (1)...(19): siRNA sense strand
cagaauaccaguugcaaau

SEQ ID NO: 2266931 - RNA, 19 nt, Homo sapiens
  misc_RNA (1)...(19): siRNA sense strand
ugucaucgcuucagauaaa

SEQ ID NO: 2266932 - RNA, 19 nt, Homo sapiens
  misc_RNA (1)...(19): siRNA sense strand
gcagaauaccaguugcaaa

SEQ ID NO: 2266933 - RNA, 19 nt, Homo sapiens
  misc_RNA (1)...(19): siRNA sense strand
ccagaaaccugcaguugaa

SEQ ID NO: 2266934 - RNA, 19 nt, Homo sapiens
  misc_RNA (1)...(19): siRNA sense strand
ccacguucauggagaagaa

SEQ ID NO: 2266935 - RNA, 19 nt, Homo sapiens
  misc_RNA (1)...(19): siRNA sense strand
aggaggaggaggaagacaa

SEQ ID NO: 2266936 - RNA, 19 nt, Homo sapiens
  misc_RNA (1)...(19): siRNA sense strand
gagcugacccugaacauua

SEQ ID NO: 2266937 - RNA, 19 nt, Homo sapiens
  misc_RNA (1)...(19): siRNA sense strand
gaagaauuuaagagugcua

SEQ ID NO: 2266938 - RNA, 19 nt, Homo sapiens
  misc_RNA (1)...(19): siRNA sense strand
gaagauuccuacaugacaa

SEQ ID NO: 2266939 - RNA, 19 nt, Homo sapiens
  misc_RNA (1)...(19): siRNA sense strand
caguugaagaggaugcaaa

SEQ ID NO: 2266940 - RNA, 19 nt, Homo sapiens
  misc_RNA (1)...(19): siRNA sense strand
aggaagacgaggaggagga

SEQ ID NO: 2266941 - RNA, 19 nt, Homo sapiens
  misc_RNA (1)...(19): siRNA sense strand
gugaagaagcugacgagga

SEQ ID NO: 2266942 - RNA, 19 nt, Homo sapiens
  misc_RNA (1)...(19): siRNA sense strand
uggagaaggaggaggagga

SEQ ID NO: 2266943 - RNA, 19 nt, Homo sapiens
  misc_RNA (1)...(19): siRNA sense strand
augaggaacuucuaugaaa

SEQ ID NO: 2266944 - RNA, 19 nt, Homo sapiens
  misc_RNA (1)...(19): siRNA sense strand
gagaagaauuuaagagugc

SEQ ID NO: 2266945 - RNA, 19 nt, Homo sapiens
  misc_RNA (1)...(19): siRNA sense strand
caacaaagaaggcggugga

SEQ ID NO: 2266946 - RNA, 19 nt, Homo sapiens
  misc_RNA (1)...(19): siRNA sense strand
ucuccaacaugaugaggaa

SEQ ID NO: 2266947 - RNA, 19 nt, Homo sapiens
  misc_RNA (1)...(19): siRNA sense strand
aggaagacaaggaggagga

SEQ ID NO: 2266948 - RNA, 19 nt, Homo sapiens
  misc_RNA (1)...(19): siRNA sense strand
gaucaugaacugcaggauu

SEQ ID NO: 2266949 - RNA, 19 nt, Homo sapiens
  misc_RNA (1)...(19): siRNA sense strand
guggagaagacgaugugaa

SEQ ID NO: 2266950 - RNA, 19 nt, Homo sapiens
  misc_RNA (1)...(19): siRNA sense strand
gaggagugauccagacuga

SEQ ID NO: 2266951 - RNA, 19 nt, Homo sapiens
  misc_RNA (1)...(19): siRNA sense strand
gggagaagaauuuaagagu

SEQ ID NO: 2266952 - RNA, 19 nt, Homo sapiens
  misc_RNA (1)...(19): siRNA sense strand
guccauggcugguggcuuu

SEQ ID NO: 2266953 - RNA, 19 nt, Homo sapiens
  misc_RNA (1)...(19): siRNA sense strand
aagacaaggaggaggagga

SEQ ID NO: 2266954 - RNA, 19 nt, Homo sapiens
  misc_RNA (1)...(19): siRNA sense strand
aggaggaagacgaggagga

SEQ ID NO: 2266955 - RNA, 19 nt, Homo sapiens
  misc_RNA (1)...(19): siRNA sense strand
cgguucagcauguggaaga

SEQ ID NO: 2266956 - RNA, 19 nt, Homo sapiens
  misc_RNA (1)...(19): siRNA sense strand
ugcucgaagaagagaauua

SEQ ID NO: 2266957 - RNA, 19 nt, Homo sapiens
  misc_RNA (1)...(19): siRNA sense strand
ccaaagacuucaucuccaa

SEQ ID NO: 2266958 - RNA, 19 nt, Homo sapiens
  misc_RNA (1)...(19): siRNA sense strand
gguacaacaucaucagcau

SEQ ID NO: 2266959 - RNA, 19 nt, Homo sapiens
  misc_RNA (1)...(19): siRNA sense strand
gagaaugccuuuccaaaca

SEQ ID NO: 2266960 - RNA, 19 nt, Homo sapiens
  misc_RNA (1)...(19): siRNA sense strand
agaaaggcauccaagguca

SEQ ID NO: 2266961 - RNA, 19 nt, Homo sapiens
  misc_RNA (1)...(19): siRNA sense strand
cuccaaugccagugucaaa

SEQ ID NO: 2266962 - RNA, 19 nt, Homo sapiens
  misc_RNA (1)...(19): siRNA sense strand
ugagaaggccugcaagaau

SEQ ID NO: 2266963 - RNA, 19 nt, Homo sapiens
  misc_RNA (1)...(19): siRNA sense strand
gggacugaaugcagagaac

SEQ ID NO: 2266964 - RNA, 19 nt, Homo sapiens
  misc_RNA (1)...(19): siRNA sense strand
gagaagacgaugugaacac

SEQ ID NO: 2266965 - RNA, 19 nt, Homo sapiens
  misc_RNA (1)...(19): siRNA sense strand
gcucaugcccacagaggga

SEQ ID NO: 2266966 - RNA, 19 nt, Homo sapiens
  misc_RNA (1)...(19): siRNA sense strand
uccugaaagaugagaagua

SEQ ID NO: 2266967 - RNA, 19 nt, Homo sapiens
  misc_RNA (1)...(19): siRNA sense strand
aggcagcguugguggacuu

SEQ ID NO: 2266968 - RNA, 19 nt, Homo sapiens
  misc_RNA (1)...(19): siRNA sense strand
uguuugagcuccagaagga

SEQ ID NO: 2266969 - RNA, 19 nt, Homo sapiens
  misc_RNA (1)...(19): siRNA sense strand
aggaguugguggugggucu

SEQ ID NO: 2266970 - RNA, 19 nt, Homo sapiens
  misc_RNA (1)...(19): siRNA sense strand
cugcagauccuuggugaaa

SEQ ID NO: 2266971 - RNA, 19 nt, Homo sapiens
  misc_RNA (1)...(19): siRNA sense strand
ggagaagaaggcagagucu

SEQ ID NO: 2266972 - RNA, 19 nt, Homo sapiens
  misc_RNA (1)...(19): siRNA sense strand
agaaucugcucgaagaaga

SEQ ID NO: 2266973 - RNA, 19 nt, Homo sapiens
  misc_RNA (1)...(19): siRNA sense strand
ucgccagaguccagaacau

SEQ ID NO: 2266974 - RNA, 19 nt, Homo sapiens
  misc_RNA (1)...(19): siRNA sense strand
gggugggagaagaauuuaa

SEQ ID NO: 2266975 - RNA, 19 nt, Homo sapiens
  misc_RNA (1)...(19): siRNA sense strand
aguacagcuaccuggguua

SEQ ID NO: 2266976 - RNA, 19 nt, Homo sapiens
  misc_RNA (1)...(19): siRNA sense strand
aggaggaagacaaggagga

SEQ ID NO: 2266977 - RNA, 19 nt, Homo sapiens
  misc_RNA (1)...(19): siRNA sense strand
gaaccucuuuggagcagaa

SEQ ID NO: 2266978 - RNA, 19 nt, Homo sapiens
  misc_RNA (1)...(19): siRNA sense strand
aagacgaggaggaggagga

SEQ ID NO: 2266979 - RNA, 19 nt, Homo sapiens
  misc_RNA (1)...(19): siRNA sense strand
ugaggaacuucuaugaaaa

SEQ ID NO: 2266980 - RNA, 19 nt, Homo sapiens
  misc_RNA (1)...(19): siRNA sense strand
gaguuugaccuucgggaca

SEQ ID NO: 2266981 - RNA, 19 nt, Homo sapiens
  misc_RNA (1)...(19): siRNA sense strand
cuuucaaggugaccaacua

SEQ ID NO: 2266982 - RNA, 19 nt, Homo sapiens
  misc_RNA (1)...(19): siRNA sense strand
aggagaaugccuuuccaaa

SEQ ID NO: 2266983 - RNA, 19 nt, Homo sapiens
  misc_RNA (1)...(19): siRNA sense strand
ccauaauguacgugaacac

SEQ ID NO: 2266984 - RNA, 19 nt, Homo sapiens
  misc_RNA (1)...(19): siRNA sense strand
cauccauaauguacgugaa

SEQ ID NO: 2266985 - RNA, 19 nt, Homo sapiens
  misc_RNA (1)...(19): siRNA sense strand
ugaaagaugagaaguacca

SEQ ID NO: 2266986 - RNA, 19 nt, Homo sapiens
  misc_RNA (1)...(19): siRNA sense strand
aggaggaggaggaagacga

SEQ ID NO: 2266987 - RNA, 19 nt, Homo sapiens
  misc_RNA (1)...(19): siRNA sense strand
agacuuucagagagccaaa

SEQ ID NO: 2266988 - RNA, 19 nt, Homo sapiens
  misc_RNA (1)...(19): siRNA sense strand
cgucgugaauguccguuua

SEQ ID NO: 2266989 - RNA, 19 nt, Homo sapiens
  misc_RNA (1)...(19): siRNA sense strand
uuuggcagcuagaggagaa

SEQ ID NO: 2266990 - RNA, 19 nt, Homo sapiens
  misc_RNA (1)...(19): siRNA sense strand
caccaauuccaaugaaaga

SEQ ID NO: 2266991 - RNA, 19 nt, Homo sapiens
  misc_RNA (1)...(19): siRNA sense strand
aacugaacuuggagagcau

SEQ ID NO: 2266992 - RNA, 19 nt, Homo sapiens
  misc_RNA (1)...(19): siRNA sense strand
ggaagcuggcaccgagauu

SEQ ID NO: 2266993 - RNA, 19 nt, Homo sapiens
  misc_RNA (1)...(19): siRNA sense strand
agaagaaggcagagucuac

SEQ ID NO: 2266994 - RNA, 19 nt, Homo sapiens
  misc_RNA (1)...(19): siRNA sense strand
gggaucucagucaggauaa

SEQ ID NO: 2266995 - RNA, 19 nt, Homo sapiens
  misc_RNA (1)...(19): siRNA sense strand
agacaaggaggaggaggaa

SEQ ID NO: 2266996 - RNA, 19 nt, Homo sapiens
  misc_RNA (1)...(19): siRNA sense strand
cggaugagacccaugcuuu

SEQ ID NO: 2266997 - RNA, 19 nt, Homo sapiens
  misc_RNA (1)...(19): siRNA sense strand
gcugcaguguucagacgua

SEQ ID NO: 2266998 - RNA, 19 nt, Homo sapiens
  misc_RNA (1)...(19): siRNA sense strand
gagcagaauaccaguugca

SEQ ID NO: 2266999 - RNA, 19 nt, Homo sapiens
  misc_RNA (1)...(19): siRNA sense strand
gcaccgagauugccaucau

SEQ ID NO: 2267000 - RNA, 19 nt, Homo sapiens
  misc_RNA (1)...(19): siRNA sense strand
aggauaagcucacagaugu

SEQ ID NO: 2267001 - RNA, 19 nt, Homo sapiens
  misc_RNA (1)...(19): siRNA sense strand
gaauaccaguugcaaauuu

SEQ ID NO: 2267002 - RNA, 19 nt, Homo sapiens
  misc_RNA (1)...(19): siRNA sense strand
ggagaagaauuuaagagug

SEQ ID NO: 2267003 - RNA, 19 nt, Homo sapiens
  misc_RNA (1)...(19): siRNA sense strand
gcuaggacugcgagggaac

SEQ ID NO: 2267004 - RNA, 19 nt, Homo sapiens
  misc_RNA (1)...(19): siRNA sense strand
ucauggagaagaaggcaga

SEQ ID NO: 2267005 - RNA, 19 nt, Homo sapiens
  misc_RNA (1)...(19): siRNA sense strand
caaaggagcugacccugaa

SEQ ID NO: 2267006 - RNA, 19 nt, Homo sapiens
  misc_RNA (1)...(19): siRNA sense strand
agguugcagcagugaagaa

SEQ ID NO: 2267007 - RNA, 19 nt, Homo sapiens
  misc_RNA (1)...(19): siRNA sense strand
caacaaaucucuauaugag

SEQ ID NO: 2267008 - RNA, 19 nt, Homo sapiens
  misc_RNA (1)...(19): siRNA sense strand
acaagaagugugaggcaaa

SEQ ID NO: 2267009 - RNA, 19 nt, Homo sapiens
  misc_RNA (1)...(19): siRNA sense strand
aggaauguaucaagggcaa

SEQ ID NO: 2267010 - RNA, 19 nt, Homo sapiens
  misc_RNA (1)...(19): siRNA sense strand
ucacugagcugcagaagaa

SEQ ID NO: 2267011 - RNA, 19 nt, Homo sapiens
  misc_RNA (1)...(19): siRNA sense strand
gaugaaagaaggaguuaau

SEQ ID NO: 2267012 - RNA, 19 nt, Homo sapiens
  misc_RNA (1)...(19): siRNA sense strand
gagcaggcuauuuggguua

SEQ ID NO: 2267013 - RNA, 19 nt, Homo sapiens
  misc_RNA (1)...(19): siRNA sense strand
gaggcaaacuugagagugu

SEQ ID NO: 2267014 - RNA, 19 nt, Homo sapiens
  misc_RNA (1)...(19): siRNA sense strand
ugaaggaugugaugaagaa

SEQ ID NO: 2267015 - RNA, 19 nt, Homo sapiens
  misc_RNA (1)...(19): siRNA sense strand
ccaaagacaucauccgcua

SEQ ID NO: 2267016 - RNA, 19 nt, Homo sapiens
  misc_RNA (1)...(19): siRNA sense strand
ugacacauuuauugggaau

SEQ ID NO: 2267017 - RNA, 19 nt, Homo sapiens
  misc_RNA (1)...(19): siRNA sense strand
ggacaagaagugugaggca

SEQ ID NO: 2267018 - RNA, 19 nt, Homo sapiens
  misc_RNA (1)...(19): siRNA sense strand
cgacagagguguuccggga

SEQ ID NO: 2267019 - RNA, 19 nt, Homo sapiens
  misc_RNA (1)...(19): siRNA sense strand
agacagagcugcugcugau

SEQ ID NO: 2267020 - RNA, 19 nt, Homo sapiens
  misc_RNA (1)...(19): siRNA sense strand
aaacggaaccugaaggaga

SEQ ID NO: 2267021 - RNA, 19 nt, Homo sapiens
  misc_RNA (1)...(19): siRNA sense strand
accaaagggcgcagggcaa

SEQ ID NO: 2267022 - RNA, 19 nt, Homo sapiens
  misc_RNA (1)...(19): siRNA sense strand
cugcagaugauguuuaaua

SEQ ID NO: 2267023 - RNA, 19 nt, Homo sapiens
  misc_RNA (1)...(19): siRNA sense strand
cgagcgaguuugugaaaau

SEQ ID NO: 2267024 - RNA, 19 nt, Homo sapiens
  misc_RNA (1)...(19): siRNA sense strand
agaagaagaucuaugucau

SEQ ID NO: 2267025 - RNA, 19 nt, Homo sapiens
  misc_RNA (1)...(19): siRNA sense strand
caugaacucagaaggaaua

SEQ ID NO: 2267026 - RNA, 19 nt, Homo sapiens
  misc_RNA (1)...(19): siRNA sense strand
acauguugcuguugaccaa

SEQ ID NO: 2267027 - RNA, 19 nt, Homo sapiens
  misc_RNA (1)...(19): siRNA sense strand
ggagccagguccagacaau

SEQ ID NO: 2267028 - RNA, 19 nt, Homo sapiens
  misc_RNA (1)...(19): siRNA sense strand
acaugaacucagaaggaau

SEQ ID NO: 2267029 - RNA, 19 nt, Homo sapiens
  misc_RNA (1)...(19): siRNA sense strand
gaauggaaucccugcagaa

SEQ ID NO: 2267030 - RNA, 19 nt, Homo sapiens
  misc_RNA (1)...(19): siRNA sense strand
uggcagaggugucccgaau

SEQ ID NO: 2267031 - RNA, 19 nt, Homo sapiens
  misc_RNA (1)...(19): siRNA sense strand
augaagaaacucagcaaca

SEQ ID NO: 2267032 - RNA, 19 nt, Homo sapiens
  misc_RNA (1)...(19): siRNA sense strand
ccaaagugcuuaucaucau

SEQ ID NO: 2267033 - RNA, 19 nt, Homo sapiens
  misc_RNA (1)...(19): siRNA sense strand
ccaagugcucucaggaauu

SEQ ID NO: 2267034 - RNA, 19 nt, Homo sapiens
  misc_RNA (1)...(19): siRNA sense strand
agacaugaacucagaagga

SEQ ID NO: 2267035 - RNA, 19 nt, Homo sapiens
  misc_RNA (1)...(19): siRNA sense strand
cucuggagcuggugggaga

SEQ ID NO: 2267036 - RNA, 19 nt, Homo sapiens
  misc_RNA (1)...(19): siRNA sense strand
ccaguaacaagaugaaaga

SEQ ID NO: 2267037 - RNA, 19 nt, Homo sapiens
  misc_RNA (1)...(19): siRNA sense strand
cugagagguuccaacuaua

SEQ ID NO: 2267038 - RNA, 19 nt, Homo sapiens
  misc_RNA (1)...(19): siRNA sense strand
gacaagaagugugaggcaa

SEQ ID NO: 2267039 - RNA, 19 nt, Homo sapiens
  misc_RNA (1)...(19): siRNA sense strand
gcagcuggcaucugggcaa

SEQ ID NO: 2267040 - RNA, 19 nt, Homo sapiens
  misc_RNA (1)...(19): siRNA sense strand
cauuugagaagcugaaaga

SEQ ID NO: 2267041 - RNA, 19 nt, Homo sapiens
  misc_RNA (1)...(19): siRNA sense strand
cagaagaagaucuauguca

SEQ ID NO: 2267042 - RNA, 19 nt, Homo sapiens
  misc_RNA (1)...(19): siRNA sense strand
gaagaagaucuaugucauu

SEQ ID NO: 2267043 - RNA, 19 nt, Homo sapiens
  misc_RNA (1)...(19): siRNA sense strand
ccgggaggcacuuuggaua

SEQ ID NO: 2267044 - RNA, 19 nt, Homo sapiens
  misc_RNA (1)...(19): siRNA sense strand
agguugacgugguguauga

SEQ ID NO: 2267045 - RNA, 19 nt, Homo sapiens
  misc_RNA (1)...(19): siRNA sense strand
ccaccaaagugcuuaucau

SEQ ID NO: 2267046 - RNA, 19 nt, Homo sapiens
  misc_RNA (1)...(19): siRNA sense strand
cauugagggcacaagcaaa

SEQ ID NO: 2267047 - RNA, 19 nt, Homo sapiens
  misc_RNA (1)...(19): siRNA sense strand
ggaccaagauggggagaca

SEQ ID NO: 2267048 - RNA, 19 nt, Homo sapiens
  misc_RNA (1)...(19): siRNA sense strand
ugacagacaucaacggcga

SEQ ID NO: 2267049 - RNA, 19 nt, Homo sapiens
  misc_RNA (1)...(19): siRNA sense strand
gcaacguagaccugguauu

SEQ ID NO: 2267050 - RNA, 19 nt, Homo sapiens
  misc_RNA (1)...(19): siRNA sense strand
gggaggacaagaaguguga

SEQ ID NO: 2267051 - RNA, 19 nt, Homo sapiens
  misc_RNA (1)...(19): siRNA sense strand
ugaugaagaaacucagcaa

SEQ ID NO: 2267052 - RNA, 19 nt, Homo sapiens
  misc_RNA (1)...(19): siRNA sense strand
gcgucgacguggaccaaga

SEQ ID NO: 2267053 - RNA, 19 nt, Homo sapiens
  misc_RNA (1)...(19): siRNA sense strand
caagaugaaagaaggaguu

SEQ ID NO: 2267054 - RNA, 19 nt, Homo sapiens
  misc_RNA (1)...(19): siRNA sense strand
gggaaugaccuuggcaaca

SEQ ID NO: 2267055 - RNA, 19 nt, Homo sapiens
  misc_RNA (1)...(19): siRNA sense strand
cccaagugcucucaggaau

SEQ ID NO: 2267056 - RNA, 19 nt, Homo sapiens
  misc_RNA (1)...(19): siRNA sense strand
acauguaccaggugaggau

SEQ ID NO: 2267057 - RNA, 19 nt, Homo sapiens
  misc_RNA (1)...(19): siRNA sense strand
gcuugcagccagaugaauu

SEQ ID NO: 2267058 - RNA, 19 nt, Homo sapiens
  misc_RNA (1)...(19): siRNA sense strand
gcaacaucgaugcggccaa

SEQ ID NO: 2267059 - RNA, 19 nt, Homo sapiens
  misc_RNA (1)...(19): siRNA sense strand
agaagugagagcaggcuau

SEQ ID NO: 2267060 - RNA, 19 nt, Homo sapiens
  misc_RNA (1)...(19): siRNA sense strand
ccugagagguuccaacuau

SEQ ID NO: 2267061 - RNA, 19 nt, Homo sapiens
  misc_RNA (1)...(19): siRNA sense strand
caucgggauuggaaagcau

SEQ ID NO: 2267062 - RNA, 19 nt, Homo sapiens
  misc_RNA (1)...(19): siRNA sense strand
caucaauguuucccugaau

SEQ ID NO: 2267063 - RNA, 19 nt, Homo sapiens
  misc_RNA (1)...(19): siRNA sense strand
cagaagugagagcaggcua

SEQ ID NO: 2267064 - RNA, 19 nt, Homo sapiens
  misc_RNA (1)...(19): siRNA sense strand
gaaagaaggaguuaauauc

SEQ ID NO: 2267065 - RNA, 19 nt, Homo sapiens
  misc_RNA (1)...(19): siRNA sense strand
gcaagguggagaugcugaa

SEQ ID NO: 2267066 - RNA, 19 nt, Homo sapiens
  misc_RNA (1)...(19): siRNA sense strand
caaugugaccuguaacaau

SEQ ID NO: 2267067 - RNA, 19 nt, Homo sapiens
  misc_RNA (1)...(19): siRNA sense strand
aggaugugaugaagaaacu

SEQ ID NO: 2267068 - RNA, 19 nt, Homo sapiens
  misc_RNA (1)...(19): siRNA sense strand
ugaaaauucuggacacauu

SEQ ID NO: 2267069 - RNA, 19 nt, Homo sapiens
  misc_RNA (1)...(19): siRNA sense strand
agaugaaagaaggaguuaa

SEQ ID NO: 2267070 - RNA, 19 nt, Homo sapiens
  misc_RNA (1)...(19): siRNA sense strand
acacauuugagaagcugaa

SEQ ID NO: 2267071 - RNA, 19 nt, Homo sapiens
  misc_RNA (1)...(19): siRNA sense strand
uaacaagaugaaagaagga

SEQ ID NO: 2267072 - RNA, 19 nt, Homo sapiens
  misc_RNA (1)...(19): siRNA sense strand
cgaugagcuugcagccaga

SEQ ID NO: 2267073 - RNA, 19 nt, Homo sapiens
  misc_RNA (1)...(19): siRNA sense strand
caaccaguaacaagaugaa

SEQ ID NO: 2267074 - RNA, 19 nt, Homo sapiens
  misc_RNA (1)...(19): siRNA sense strand
ccaagauccaccaagucaa

SEQ ID NO: 2267075 - RNA, 19 nt, Homo sapiens
  misc_RNA (1)...(19): siRNA sense strand
aacggaaccugaaggagaa

SEQ ID NO: 2267076 - RNA, 19 nt, Homo sapiens
  misc_RNA (1)...(19): siRNA sense strand
ggaaccugaaggagaagau

SEQ ID NO: 2267077 - RNA, 19 nt, Homo sapiens
  misc_RNA (1)...(19): siRNA sense strand
gaagauggaggcuggcaga

SEQ ID NO: 2267078 - RNA, 19 nt, Homo sapiens
  misc_RNA (1)...(19): siRNA sense strand
gcuccuauucaaccaguaa

SEQ ID NO: 2267079 - RNA, 19 nt, Homo sapiens
  misc_RNA (1)...(19): siRNA sense strand
guguuuaucuaccagagaa

SEQ ID NO: 2267080 - RNA, 19 nt, Homo sapiens
  misc_RNA (1)...(19): siRNA sense strand
ucucaggaauucagugguu

SEQ ID NO: 2267081 - RNA, 19 nt, Homo sapiens
  misc_RNA (1)...(19): siRNA sense strand
gcguccugcaggucggaaa

SEQ ID NO: 2267082 - RNA, 19 nt, Homo sapiens
  misc_RNA (1)...(19): siRNA sense strand
guaucaagggcaacguaga

SEQ ID NO: 2267083 - RNA, 19 nt, Homo sapiens
  misc_RNA (1)...(19): siRNA sense strand
caacaucgaugcggccaaa

SEQ ID NO: 2267084 - RNA, 19 nt, Homo sapiens
  misc_RNA (1)...(19): siRNA sense strand
ugagaagcugaaagaucua

SEQ ID NO: 2267085 - RNA, 19 nt, Homo sapiens
  misc_RNA (1)...(19): siRNA sense strand
gcacaagcaaacaggaccu

SEQ ID NO: 2267086 - RNA, 19 nt, Homo sapiens
  misc_RNA (1)...(19): siRNA sense strand
aguaacaagaugaaagaag

SEQ ID NO: 2267087 - RNA, 19 nt, Homo sapiens
  misc_RNA (1)...(19): siRNA sense strand
gcucugcagaugauguuua

SEQ ID NO: 2267088 - RNA, 19 nt, Homo sapiens
  misc_RNA (1)...(19): siRNA sense strand
cgacaaagcugaauggauu

SEQ ID NO: 2267089 - RNA, 19 nt, Homo sapiens
  misc_RNA (1)...(19): siRNA sense strand
gcuuaaaggcagauggcaa

SEQ ID NO: 2267090 - RNA, 19 nt, Homo sapiens
  misc_RNA (1)...(19): siRNA sense strand
gaaaggagccacagauaua

SEQ ID NO: 2267091 - RNA, 19 nt, Homo sapiens
  misc_RNA (1)...(19): siRNA sense strand
gcaacaggcaauagagauu

SEQ ID NO: 2267092 - RNA, 19 nt, Homo sapiens
  misc_RNA (1)...(19): siRNA sense strand
cagcaaggacuuugggaau

SEQ ID NO: 2267093 - RNA, 19 nt, Homo sapiens
  misc_RNA (1)...(19): siRNA sense strand
cuucagauauggagaucaa

SEQ ID NO: 2267094 - RNA, 19 nt, Homo sapiens
  misc_RNA (1)...(19): siRNA sense strand
uggaauaucgguuggauua

SEQ ID NO: 2267095 - RNA, 19 nt, Homo sapiens
  misc_RNA (1)...(19): siRNA sense strand
cuuaaaggcagauggcaaa

SEQ ID NO: 2267096 - RNA, 19 nt, Homo sapiens
  misc_RNA (1)...(19): siRNA sense strand
ccauguagaucacaagaua

SEQ ID NO: 2267097 - RNA, 19 nt, Homo sapiens
  misc_RNA (1)...(19): siRNA sense strand
uggauaaacucaagcaaaa

SEQ ID NO: 2267098 - RNA, 19 nt, Homo sapiens
  misc_RNA (1)...(19): siRNA sense strand
uuucaauggugauggcaua

SEQ ID NO: 2267099 - RNA, 19 nt, Homo sapiens
  misc_RNA (1)...(19): siRNA sense strand
caaugaagccuuagcaaga

SEQ ID NO: 2267100 - RNA, 19 nt, Homo sapiens
  misc_RNA (1)...(19): siRNA sense strand
gaaucugaauuuagagaca

SEQ ID NO: 2267101 - RNA, 19 nt, Homo sapiens
  misc_RNA (1)...(19): siRNA sense strand
gugcaaucuuguacguaaa

SEQ ID NO: 2267102 - RNA, 19 nt, Homo sapiens
  misc_RNA (1)...(19): siRNA sense strand
agaugaaacaggagcgaga

SEQ ID NO: 2267103 - RNA, 19 nt, Homo sapiens
  misc_RNA (1)...(19): siRNA sense strand
ccgaaacaaugaagccuua

SEQ ID NO: 2267104 - RNA, 19 nt, Homo sapiens
  misc_RNA (1)...(19): siRNA sense strand
gauggauacuucugugaaa

SEQ ID NO: 2267105 - RNA, 19 nt, Homo sapiens
  misc_RNA (1)...(19): siRNA sense strand
uggcagaaaucguaucuaa

SEQ ID NO: 2267106 - RNA, 19 nt, Homo sapiens
  misc_RNA (1)...(19): siRNA sense strand
gcaaacaacugaaaagaau

SEQ ID NO: 2267107 - RNA, 19 nt, Homo sapiens
  misc_RNA (1)...(19): siRNA sense strand
ugacauuaauggagaugau

SEQ ID NO: 2267108 - RNA, 19 nt, Homo sapiens
  misc_RNA (1)...(19): siRNA sense strand
ugaagaagauguugggcca

SEQ ID NO: 2267109 - RNA, 19 nt, Homo sapiens
  misc_RNA (1)...(19): siRNA sense strand
ggugaaggaaacucagaaa

SEQ ID NO: 2267110 - RNA, 19 nt, Homo sapiens
  misc_RNA (1)...(19): siRNA sense strand
ccucagugaaggagauauu

SEQ ID NO: 2267111 - RNA, 19 nt, Homo sapiens
  misc_RNA (1)...(19): siRNA sense strand
gagauuaugccaaggauga

SEQ ID NO: 2267112 - RNA, 19 nt, Homo sapiens
  misc_RNA (1)...(19): siRNA sense strand
agccacagauauagacaaa

SEQ ID NO: 2267113 - RNA, 19 nt, Homo sapiens
  misc_RNA (1)...(19): siRNA sense strand
ggacuuugggaaugguuua

SEQ ID NO: 2267114 - RNA, 19 nt, Homo sapiens
  misc_RNA (1)...(19): siRNA sense strand
caggaugguuucaaugaua

SEQ ID NO: 2267115 - RNA, 19 nt, Homo sapiens
  misc_RNA (1)...(19): siRNA sense strand
acaucuaugagcugagaaa

SEQ ID NO: 2267116 - RNA, 19 nt, Homo sapiens
  misc_RNA (1)...(19): siRNA sense strand
ccucugacauugauuguua

SEQ ID NO: 2267117 - RNA, 19 nt, Homo sapiens
  misc_RNA (1)...(19): siRNA sense strand
caaaguaagcccaguugua

SEQ ID NO: 2267118 - RNA, 19 nt, Homo sapiens
  misc_RNA (1)...(19): siRNA sense strand
gagauuagacagaggaaag

SEQ ID NO: 2267119 - RNA, 19 nt, Homo sapiens
  misc_RNA (1)...(19): siRNA sense strand
aggagaacccugagacuga

SEQ ID NO: 2267120 - RNA, 19 nt, Homo sapiens
  misc_RNA (1)...(19): siRNA sense strand
aaggaaacucagaaacuua

SEQ ID NO: 2267121 - RNA, 19 nt, Homo sapiens
  misc_RNA (1)...(19): siRNA sense strand
aaacaaugguccaaguuca

SEQ ID NO: 2267122 - RNA, 19 nt, Homo sapiens
  misc_RNA (1)...(19): siRNA sense strand
ccucaagaagaacaagaaa

SEQ ID NO: 2267123 - RNA, 19 nt, Homo sapiens
  misc_RNA (1)...(19): siRNA sense strand
ccauuguaccauuggagaa

SEQ ID NO: 2267124 - RNA, 19 nt, Homo sapiens
  misc_RNA (1)...(19): siRNA sense strand
ugacuguggugaagacaau

SEQ ID NO: 2267125 - RNA, 19 nt, Homo sapiens
  misc_RNA (1)...(19): siRNA sense strand
augaaaauggugaaggaaa

SEQ ID NO: 2267126 - RNA, 19 nt, Homo sapiens
  misc_RNA (1)...(19): siRNA sense strand
ggucgaaacaggauaaaau

SEQ ID NO: 2267127 - RNA, 19 nt, Homo sapiens
  misc_RNA (1)...(19): siRNA sense strand
gcagcaaggacuuugggaa

SEQ ID NO: 2267128 - RNA, 19 nt, Homo sapiens
  misc_RNA (1)...(19): siRNA sense strand
augaaaggagccacagaua

SEQ ID NO: 2267129 - RNA, 19 nt, Homo sapiens
  misc_RNA (1)...(19): siRNA sense strand
cagcagucagagauggaua

SEQ ID NO: 2267130 - RNA, 19 nt, Homo sapiens
  misc_RNA (1)...(19): siRNA sense strand
uuacaaauccaaagcucaa

SEQ ID NO: 2267131 - RNA, 19 nt, Homo sapiens
  misc_RNA (1)...(19): siRNA sense strand
aagaagaacaagaaaggga

SEQ ID NO: 2267132 - RNA, 19 nt, Homo sapiens
  misc_RNA (1)...(19): siRNA sense strand
gcaauagagauuaugccaa

SEQ ID NO: 2267133 - RNA, 19 nt, Homo sapiens
  misc_RNA (1)...(19): siRNA sense strand
guuuacagcaucaaguaua

SEQ ID NO: 2267134 - RNA, 19 nt, Homo sapiens
  misc_RNA (1)...(19): siRNA sense strand
ccacugacauuaauggaga

SEQ ID NO: 2267135 - RNA, 19 nt, Homo sapiens
  misc_RNA (1)...(19): siRNA sense strand
cggaucaaguggcagaaau

SEQ ID NO: 2267136 - RNA, 19 nt, Homo sapiens
  misc_RNA (1)...(19): siRNA sense strand
aauguuagguucugcuuaa

SEQ ID NO: 2267137 - RNA, 19 nt, Homo sapiens
  misc_RNA (1)...(19): siRNA sense strand
ggaaguuucuguagauagu

SEQ ID NO: 2267138 - RNA, 19 nt, Homo sapiens
  misc_RNA (1)...(19): siRNA sense strand
agugcaaucuuguacguaa

SEQ ID NO: 2267139 - RNA, 19 nt, Homo sapiens
  misc_RNA (1)...(19): siRNA sense strand
ggcagauggcaaaggagua

SEQ ID NO: 2267140 - RNA, 19 nt, Homo sapiens
  misc_RNA (1)...(19): siRNA sense strand
ggcucagaaucaaggagaa

SEQ ID NO: 2267141 - RNA, 19 nt, Homo sapiens
  misc_RNA (1)...(19): siRNA sense strand
uguaaaugcuggucuugaa

SEQ ID NO: 2267142 - RNA, 19 nt, Homo sapiens
  misc_RNA (1)...(19): siRNA sense strand
ggagauuagacagaggaaa

SEQ ID NO: 2267143 - RNA, 19 nt, Homo sapiens
  misc_RNA (1)...(19): siRNA sense strand
aaugaaggcuggaacucaa

SEQ ID NO: 2267144 - RNA, 19 nt, Homo sapiens
  misc_RNA (1)...(19): siRNA sense strand
gcucagugcuugaagauug

SEQ ID NO: 2267145 - RNA, 19 nt, Homo sapiens
  misc_RNA (1)...(19): siRNA sense strand
gggagauuagacagaggaa

SEQ ID NO: 2267146 - RNA, 19 nt, Homo sapiens
  misc_RNA (1)...(19): siRNA sense strand
ggcagaaaucguaucuaaa

SEQ ID NO: 2267147 - RNA, 19 nt, Homo sapiens
  misc_RNA (1)...(19): siRNA sense strand
ggaugaaucugaauuuaga

SEQ ID NO: 2267148 - RNA, 19 nt, Homo sapiens
  misc_RNA (1)...(19): siRNA sense strand
ugaauggauuugaggucuu

SEQ ID NO: 2267149 - RNA, 19 nt, Homo sapiens
  misc_RNA (1)...(19): siRNA sense strand
agacaaacucacuccaauu

SEQ ID NO: 2267150 - RNA, 19 nt, Homo sapiens
  misc_RNA (1)...(19): siRNA sense strand
ugaaaauggugaaggaaac

SEQ ID NO: 2267151 - RNA, 19 nt, Homo sapiens
  misc_RNA (1)...(19): siRNA sense strand
ggagaacugagaugaaaca

SEQ ID NO: 2267152 - RNA, 19 nt, Homo sapiens
  misc_RNA (1)...(19): siRNA sense strand
agacuuaauuguaggagcu

SEQ ID NO: 2267153 - RNA, 19 nt, Homo sapiens
  misc_RNA (1)...(19): siRNA sense strand
ggaacagcucucaaaguuu

SEQ ID NO: 2267154 - RNA, 19 nt, Homo sapiens
  misc_RNA (1)...(19): siRNA sense strand
uuggauaaacucaagcaaa

SEQ ID NO: 2267155 - RNA, 19 nt, Homo sapiens
  misc_RNA (1)...(19): siRNA sense strand
uuguuaaggcucagaauca

SEQ ID NO: 2267156 - RNA, 19 nt, Homo sapiens
  misc_RNA (1)...(19): siRNA sense strand
gcucgaagcaugccaccaa

SEQ ID NO: 2267157 - RNA, 19 nt, Homo sapiens
  misc_RNA (1)...(19): siRNA sense strand
agauauugaugcugaugga

SEQ ID NO: 2267158 - RNA, 19 nt, Homo sapiens
  misc_RNA (1)...(19): siRNA sense strand
ggaucaaguggcagaaauc

SEQ ID NO: 2267159 - RNA, 19 nt, Homo sapiens
  misc_RNA (1)...(19): siRNA sense strand
gaaguguacccuagcauuu

SEQ ID NO: 2267160 - RNA, 19 nt, Homo sapiens
  misc_RNA (1)...(19): siRNA sense strand
gugaggaauugauagcgua

SEQ ID NO: 2267161 - RNA, 19 nt, Homo sapiens
  misc_RNA (1)...(19): siRNA sense strand
acugggagcacaaggagaa

SEQ ID NO: 2267162 - RNA, 19 nt, Homo sapiens
  misc_RNA (1)...(19): siRNA sense strand
gcagaaaucguaucuaaau

SEQ ID NO: 2267163 - RNA, 19 nt, Homo sapiens
  misc_RNA (1)...(19): siRNA sense strand
ugacuuuguuucaggaguu

SEQ ID NO: 2267164 - RNA, 19 nt, Homo sapiens
  misc_RNA (1)...(19): siRNA sense strand
ccaagucacuccaagaaca

SEQ ID NO: 2267165 - RNA, 19 nt, Homo sapiens
  misc_RNA (1)...(19): siRNA sense strand
gcuggaaguuucuguagau

SEQ ID NO: 2267166 - RNA, 19 nt, Homo sapiens
  misc_RNA (1)...(19): siRNA sense strand
ugguaugugaccuuggaaa

SEQ ID NO: 2267167 - RNA, 19 nt, Homo sapiens
  misc_RNA (1)...(19): siRNA sense strand
gacagaggaaagagugcaa

SEQ ID NO: 2267168 - RNA, 19 nt, Homo sapiens
  misc_RNA (1)...(19): siRNA sense strand
caauagagauuaugccaag

SEQ ID NO: 2267169 - RNA, 19 nt, Homo sapiens
  misc_RNA (1)...(19): siRNA sense strand
caucagugguuuggagcau

SEQ ID NO: 2267170 - RNA, 19 nt, Homo sapiens
  misc_RNA (1)...(19): siRNA sense strand
gaacugagaugaaacagga

SEQ ID NO: 2267171 - RNA, 19 nt, Homo sapiens
  misc_RNA (1)...(19): siRNA sense strand
ggaccaaugaacugcacuu

SEQ ID NO: 2267172 - RNA, 19 nt, Homo sapiens
  misc_RNA (1)...(19): siRNA sense strand
gggaccaucucaucacuaa

SEQ ID NO: 2267173 - RNA, 19 nt, Homo sapiens
  misc_RNA (1)...(19): siRNA sense strand
ugaaggaaacucagaaacu

SEQ ID NO: 2267174 - RNA, 19 nt, Homo sapiens
  misc_RNA (1)...(19): siRNA sense strand
aauccaaagcucaaaucua

SEQ ID NO: 2267175 - RNA, 19 nt, Homo sapiens
  misc_RNA (1)...(19): siRNA sense strand
gcuugaagauugucugcca

SEQ ID NO: 2267176 - RNA, 19 nt, Homo sapiens
  misc_RNA (1)...(19): siRNA sense strand
aagaaagggagcagcuuca

SEQ ID NO: 2267177 - RNA, 19 nt, Homo sapiens
  misc_RNA (1)...(19): siRNA sense strand
augacagcuauuuggguua

SEQ ID NO: 2267178 - RNA, 19 nt, Homo sapiens
  misc_RNA (1)...(19): siRNA sense strand
cuucauggaucguggcucu

SEQ ID NO: 2267179 - RNA, 19 nt, Homo sapiens
  misc_RNA (1)...(19): siRNA sense strand
acagagagcuucaggagac

SEQ ID NO: 2267180 - RNA, 19 nt, Homo sapiens
  misc_RNA (1)...(19): siRNA sense strand
uggaacuucuuuuggauaa

SEQ ID NO: 2267181 - RNA, 19 nt, Homo sapiens
  misc_RNA (1)...(19): siRNA sense strand
ugaugcagugugaggaauu

SEQ ID NO: 2267182 - RNA, 19 nt, Homo sapiens
  misc_RNA (1)...(19): siRNA sense strand
gcgggaugaaucugaauuu

SEQ ID NO: 2267183 - RNA, 19 nt, Homo sapiens
  misc_RNA (1)...(19): siRNA sense strand
gagacaaacucacuccaau

SEQ ID NO: 2267184 - RNA, 19 nt, Homo sapiens
  misc_RNA (1)...(19): siRNA sense strand
aggagaaggugccuacgaa

SEQ ID NO: 2267185 - RNA, 19 nt, Homo sapiens
  misc_RNA (1)...(19): siRNA sense strand
ccggccaccucaagaagaa

SEQ ID NO: 2267186 - RNA, 19 nt, Homo sapiens
  misc_RNA (1)...(19): siRNA sense strand
ugaaaggagccacagauau

SEQ ID NO: 2267187 - RNA, 19 nt, Homo sapiens
  misc_RNA (1)...(19): siRNA sense strand
uguaggagcuuuuggugua

SEQ ID NO: 2267188 - RNA, 19 nt, Homo sapiens
  misc_RNA (1)...(19): siRNA sense strand
guuuguaggaagagggaua

SEQ ID NO: 2267189 - RNA, 19 nt, Homo sapiens
  misc_RNA (1)...(19): siRNA sense strand
cggaggaaguagagguuau

SEQ ID NO: 2267190 - RNA, 19 nt, Homo sapiens
  misc_RNA (1)...(19): siRNA sense strand
guccagaaacugagugaaa

SEQ ID NO: 2267191 - RNA, 19 nt, Homo sapiens
  misc_RNA (1)...(19): siRNA sense strand
cagagaagcucaagccaga

SEQ ID NO: 2267192 - RNA, 19 nt, Homo sapiens
  misc_RNA (1)...(19): siRNA sense strand
gcuuacugcaggaaagaaa

SEQ ID NO: 2267193 - RNA, 19 nt, Homo sapiens
  misc_RNA (1)...(19): siRNA sense strand
ugggaaacuugguggcauu

SEQ ID NO: 2267194 - RNA, 19 nt, Homo sapiens
  misc_RNA (1)...(19): siRNA sense strand
gcaaauucuagcaauguaa

SEQ ID NO: 2267195 - RNA, 19 nt, Homo sapiens
  misc_RNA (1)...(19): siRNA sense strand
ggggaaaauggaagaaaau

SEQ ID NO: 2267196 - RNA, 19 nt, Homo sapiens
  misc_RNA (1)...(19): siRNA sense strand
ucuuauuggccuugcauua

SEQ ID NO: 2267197 - RNA, 19 nt, Homo sapiens
  misc_RNA (1)...(19): siRNA sense strand
aggggaaaauggaagaaaa

SEQ ID NO: 2267198 - RNA, 19 nt, Homo sapiens
  misc_RNA (1)...(19): siRNA sense strand
cagaagggaguuugcuaaa

SEQ ID NO: 2267199 - RNA, 19 nt, Homo sapiens
  misc_RNA (1)...(19): siRNA sense strand
aggaagagggauaauacaa

SEQ ID NO: 2267200 - RNA, 19 nt, Homo sapiens
  misc_RNA (1)...(19): siRNA sense strand
gcaaauucugcgaguguga

SEQ ID NO: 2267201 - RNA, 19 nt, Homo sapiens
  misc_RNA (1)...(19): siRNA sense strand
ugccaaaucauguggagaa

SEQ ID NO: 2267202 - RNA, 19 nt, Homo sapiens
  misc_RNA (1)...(19): siRNA sense strand
ucaagagagcugaagacua

SEQ ID NO: 2267203 - RNA, 19 nt, Homo sapiens
  misc_RNA (1)...(19): siRNA sense strand
ucaugaaggaaaugggaca

SEQ ID NO: 2267204 - RNA, 19 nt, Homo sapiens
  misc_RNA (1)...(19): siRNA sense strand
uggcuuaauuuguggagga

SEQ ID NO: 2267205 - RNA, 19 nt, Homo sapiens
  misc_RNA (1)...(19): siRNA sense strand
ggagaaaaugaaugccaaa

SEQ ID NO: 2267206 - RNA, 19 nt, Homo sapiens
  misc_RNA (1)...(19): siRNA sense strand
cagaauuggauuuggcuca

SEQ ID NO: 2267207 - RNA, 19 nt, Homo sapiens
  misc_RNA (1)...(19): siRNA sense strand
agcucaagccagaggauau

SEQ ID NO: 2267208 - RNA, 19 nt, Homo sapiens
  misc_RNA (1)...(19): siRNA sense strand
ggugaauggaacaggggaa

SEQ ID NO: 2267209 - RNA, 19 nt, Homo sapiens
  misc_RNA (1)...(19): siRNA sense strand
acucaaugaaagacgauuu

SEQ ID NO: 2267210 - RNA, 19 nt, Homo sapiens
  misc_RNA (1)...(19): siRNA sense strand
ccagaaacugagugaaaau

SEQ ID NO: 2267211 - RNA, 19 nt, Homo sapiens
  misc_RNA (1)...(19): siRNA sense strand
guuacaaaucuuacugcaa

SEQ ID NO: 2267212 - RNA, 19 nt, Homo sapiens
  misc_RNA (1)...(19): siRNA sense strand
caguguguuuguaggaaga

SEQ ID NO: 2267213 - RNA, 19 nt, Homo sapiens
  misc_RNA (1)...(19): siRNA sense strand
caaccguagcaaaggaaca

SEQ ID NO: 2267214 - RNA, 19 nt, Homo sapiens
  misc_RNA (1)...(19): siRNA sense strand
ggaaaauggaagaaaaugu

SEQ ID NO: 2267215 - RNA, 19 nt, Homo sapiens
  misc_RNA (1)...(19): siRNA sense strand
acagaagggaguuugcuaa

SEQ ID NO: 2267216 - RNA, 19 nt, Homo sapiens
  misc_RNA (1)...(19): siRNA sense strand
cugaaagucccaaguguca

SEQ ID NO: 2267217 - RNA, 19 nt, Homo sapiens
  misc_RNA (1)...(19): siRNA sense strand
gguucauguuguggagaau

SEQ ID NO: 2267218 - RNA, 19 nt, Homo sapiens
  misc_RNA (1)...(19): siRNA sense strand
ugguucauguuguggagaa

SEQ ID NO: 2267219 - RNA, 19 nt, Homo sapiens
  misc_RNA (1)...(19): siRNA sense strand
uggugugguugcuggaauu

SEQ ID NO: 2267220 - RNA, 19 nt, Homo sapiens
  misc_RNA (1)...(19): siRNA sense strand
ccauuggagaugagguuca

SEQ ID NO: 2267221 - RNA, 19 nt, Homo sapiens
  misc_RNA (1)...(19): siRNA sense strand
ggauacuaguacuugugaa

SEQ ID NO: 2267222 - RNA, 19 nt, Homo sapiens
  misc_RNA (1)...(19): siRNA sense strand
guugguagacauugugaau

SEQ ID NO: 2267223 - RNA, 19 nt, Homo sapiens
  misc_RNA (1)...(19): siRNA sense strand
ccuccagaugacauagaaa

SEQ ID NO: 2267224 - RNA, 19 nt, Homo sapiens
  misc_RNA (1)...(19): siRNA sense strand
augaaugaaaugaggagga

SEQ ID NO: 2267225 - RNA, 19 nt, Homo sapiens
  misc_RNA (1)...(19): siRNA sense strand
aguugcaguuuguggauca

SEQ ID NO: 2267226 - RNA, 19 nt, Homo sapiens
  misc_RNA (1)...(19): siRNA sense strand
agaugaaguuaacagugaa

SEQ ID NO: 2267227 - RNA, 19 nt, Homo sapiens
  misc_RNA (1)...(19): siRNA sense strand
gcagcacagaugaaguuaa

SEQ ID NO: 2267228 - RNA, 19 nt, Homo sapiens
  misc_RNA (1)...(19): siRNA sense strand
guauacaagcagggccaaa

SEQ ID NO: 2267229 - RNA, 19 nt, Homo sapiens
  misc_RNA (1)...(19): siRNA sense strand
gccaaaucauguggagaau

SEQ ID NO: 2267230 - RNA, 19 nt, Homo sapiens
  misc_RNA (1)...(19): siRNA sense strand
acgauuuggagaauguaaa

SEQ ID NO: 2267231 - RNA, 19 nt, Homo sapiens
  misc_RNA (1)...(19): siRNA sense strand
uggcaaauucugcgagugu

SEQ ID NO: 2267232 - RNA, 19 nt, Homo sapiens
  misc_RNA (1)...(19): siRNA sense strand
agacacaugcacacaggaa

SEQ ID NO: 2267233 - RNA, 19 nt, Homo sapiens
  misc_RNA (1)...(19): siRNA sense strand
cugugaaugugaaugccaa

SEQ ID NO: 2267234 - RNA, 19 nt, Homo sapiens
  misc_RNA (1)...(19): siRNA sense strand
ugaagggcguguugguaga

SEQ ID NO: 2267235 - RNA, 19 nt, Homo sapiens
  misc_RNA (1)...(19): siRNA sense strand
aggagaaggauguugacga

SEQ ID NO: 2267236 - RNA, 19 nt, Homo sapiens
  misc_RNA (1)...(19): siRNA sense strand
ccaaauuguggguggugca

SEQ ID NO: 2267237 - RNA, 19 nt, Homo sapiens
  misc_RNA (1)...(19): siRNA sense strand
aagacgauuuggagaaugu

SEQ ID NO: 2267238 - RNA, 19 nt, Homo sapiens
  misc_RNA (1)...(19): siRNA sense strand
guuuaaaagcaaaugccaa

SEQ ID NO: 2267239 - RNA, 19 nt, Homo sapiens
  misc_RNA (1)...(19): siRNA sense strand
gaaagaaaacaguucagaa

SEQ ID NO: 2267240 - RNA, 19 nt, Homo sapiens
  misc_RNA (1)...(19): siRNA sense strand
gagggauaauacaaaugaa

SEQ ID NO: 2267241 - RNA, 19 nt, Homo sapiens
  misc_RNA (1)...(19): siRNA sense strand
augaaugccaaaugggaca

SEQ ID NO: 2267242 - RNA, 19 nt, Homo sapiens
  misc_RNA (1)...(19): siRNA sense strand
ugugacuguucuuuggaua

SEQ ID NO: 2267243 - RNA, 19 nt, Homo sapiens
  misc_RNA (1)...(19): siRNA sense strand
guaggaacauuaucugcaa

SEQ ID NO: 2267244 - RNA, 19 nt, Homo sapiens
  misc_RNA (1)...(19): siRNA sense strand
gcauaaagaauguguucag

SEQ ID NO: 2267245 - RNA, 19 nt, Homo sapiens
  misc_RNA (1)...(19): siRNA sense strand
aaagaaagacacaugcaca

SEQ ID NO: 2267246 - RNA, 19 nt, Homo sapiens
  misc_RNA (1)...(19): siRNA sense strand
guuuguaggaagagggaua

SEQ ID NO: 2267247 - RNA, 19 nt, Homo sapiens
  misc_RNA (1)...(19): siRNA sense strand
cggaggaaguagagguuau

SEQ ID NO: 2267248 - RNA, 19 nt, Homo sapiens
  misc_RNA (1)...(19): siRNA sense strand
guccagaaacugagugaaa

SEQ ID NO: 2267249 - RNA, 19 nt, Homo sapiens
  misc_RNA (1)...(19): siRNA sense strand
cagagaagcucaagccaga

SEQ ID NO: 2267250 - RNA, 19 nt, Homo sapiens
  misc_RNA (1)...(19): siRNA sense strand
gcuuacugcaggaaagaaa

SEQ ID NO: 2267251 - RNA, 19 nt, Homo sapiens
  misc_RNA (1)...(19): siRNA sense strand
ugggaaacuugguggcauu

SEQ ID NO: 2267252 - RNA, 19 nt, Homo sapiens
  misc_RNA (1)...(19): siRNA sense strand
gcaaauucuagcaauguaa

SEQ ID NO: 2267253 - RNA, 19 nt, Homo sapiens
  misc_RNA (1)...(19): siRNA sense strand
ggggaaaauggaagaaaau

SEQ ID NO: 2267254 - RNA, 19 nt, Homo sapiens
  misc_RNA (1)...(19): siRNA sense strand
ucuuauuggccuugcauua

SEQ ID NO: 2267255 - RNA, 19 nt, Homo sapiens
  misc_RNA (1)...(19): siRNA sense strand
aggggaaaauggaagaaaa

SEQ ID NO: 2267256 - RNA, 19 nt, Homo sapiens
  misc_RNA (1)...(19): siRNA sense strand
cagaagggaguuugcuaaa

SEQ ID NO: 2267257 - RNA, 19 nt, Homo sapiens
  misc_RNA (1)...(19): siRNA sense strand
aggaagagggauaauacaa

SEQ ID NO: 2267258 - RNA, 19 nt, Homo sapiens
  misc_RNA (1)...(19): siRNA sense strand
gcaaauucugcgaguguga

SEQ ID NO: 2267259 - RNA, 19 nt, Homo sapiens
  misc_RNA (1)...(19): siRNA sense strand
ugccaaaucauguggagaa

SEQ ID NO: 2267260 - RNA, 19 nt, Homo sapiens
  misc_RNA (1)...(19): siRNA sense strand
ucaagagagcugaagacua

SEQ ID NO: 2267261 - RNA, 19 nt, Homo sapiens
  misc_RNA (1)...(19): siRNA sense strand
ucaugaaggaaaugggaca

SEQ ID NO: 2267262 - RNA, 19 nt, Homo sapiens
  misc_RNA (1)...(19): siRNA sense strand
uggcuuaauuuguggagga

SEQ ID NO: 2267263 - RNA, 19 nt, Homo sapiens
  misc_RNA (1)...(19): siRNA sense strand
ggagaaaaugaaugccaaa

SEQ ID NO: 2267264 - RNA, 19 nt, Homo sapiens
  misc_RNA (1)...(19): siRNA sense strand
cagaauuggauuuggcuca

SEQ ID NO: 2267265 - RNA, 19 nt, Homo sapiens
  misc_RNA (1)...(19): siRNA sense strand
agcucaagccagaggauau

SEQ ID NO: 2267266 - RNA, 19 nt, Homo sapiens
  misc_RNA (1)...(19): siRNA sense strand
ggugaauggaacaggggaa

SEQ ID NO: 2267267 - RNA, 19 nt, Homo sapiens
  misc_RNA (1)...(19): siRNA sense strand
acucaaugaaagacgauuu

SEQ ID NO: 2267268 - RNA, 19 nt, Homo sapiens
  misc_RNA (1)...(19): siRNA sense strand
ccagaaacugagugaaaau

SEQ ID NO: 2267269 - RNA, 19 nt, Homo sapiens
  misc_RNA (1)...(19): siRNA sense strand
guuacaaaucuuacugcaa

SEQ ID NO: 2267270 - RNA, 19 nt, Homo sapiens
  misc_RNA (1)...(19): siRNA sense strand
caguguguuuguaggaaga

SEQ ID NO: 2267271 - RNA, 19 nt, Homo sapiens
  misc_RNA (1)...(19): siRNA sense strand
caaccguagcaaaggaaca

SEQ ID NO: 2267272 - RNA, 19 nt, Homo sapiens
  misc_RNA (1)...(19): siRNA sense strand
ggaaaauggaagaaaaugu

SEQ ID NO: 2267273 - RNA, 19 nt, Homo sapiens
  misc_RNA (1)...(19): siRNA sense strand
acagaagggaguuugcuaa

SEQ ID NO: 2267274 - RNA, 19 nt, Homo sapiens
  misc_RNA (1)...(19): siRNA sense strand
cugaaagucccaaguguca

SEQ ID NO: 2267275 - RNA, 19 nt, Homo sapiens
  misc_RNA (1)...(19): siRNA sense strand
gguucauguuguggagaau

SEQ ID NO: 2267276 - RNA, 19 nt, Homo sapiens
  misc_RNA (1)...(19): siRNA sense strand
ugguucauguuguggagaa

SEQ ID NO: 2267277 - RNA, 19 nt, Homo sapiens
  misc_RNA (1)...(19): siRNA sense strand
uggugugguugcuggaauu

SEQ ID NO: 2267278 - RNA, 19 nt, Homo sapiens
  misc_RNA (1)...(19): siRNA sense strand
ccauuggagaugagguuca

SEQ ID NO: 2267279 - RNA, 19 nt, Homo sapiens
  misc_RNA (1)...(19): siRNA sense strand
ggauacuaguacuugugaa

SEQ ID NO: 2267280 - RNA, 19 nt, Homo sapiens
  misc_RNA (1)...(19): siRNA sense strand
guugguagacauugugaau

SEQ ID NO: 2267281 - RNA, 19 nt, Homo sapiens
  misc_RNA (1)...(19): siRNA sense strand
ccuccagaugacauagaaa

SEQ ID NO: 2267282 - RNA, 19 nt, Homo sapiens
  misc_RNA (1)...(19): siRNA sense strand
augaaugaaaugaggagga

SEQ ID NO: 2267283 - RNA, 19 nt, Homo sapiens
  misc_RNA (1)...(19): siRNA sense strand
aguugcaguuuguggauca

SEQ ID NO: 2267284 - RNA, 19 nt, Homo sapiens
  misc_RNA (1)...(19): siRNA sense strand
agaugaaguuaacagugaa

SEQ ID NO: 2267285 - RNA, 19 nt, Homo sapiens
  misc_RNA (1)...(19): siRNA sense strand
gcagcacagaugaaguuaa

SEQ ID NO: 2267286 - RNA, 19 nt, Homo sapiens
  misc_RNA (1)...(19): siRNA sense strand
guauacaagcagggccaaa

SEQ ID NO: 2267287 - RNA, 19 nt, Homo sapiens
  misc_RNA (1)...(19): siRNA sense strand
gccaaaucauguggagaau

SEQ ID NO: 2267288 - RNA, 19 nt, Homo sapiens
  misc_RNA (1)...(19): siRNA sense strand
acgauuuggagaauguaaa

SEQ ID NO: 2267289 - RNA, 19 nt, Homo sapiens
  misc_RNA (1)...(19): siRNA sense strand
uggcaaauucugcgagugu

SEQ ID NO: 2267290 - RNA, 19 nt, Homo sapiens
  misc_RNA (1)...(19): siRNA sense strand
agacacaugcacacaggaa

SEQ ID NO: 2267291 - RNA, 19 nt, Homo sapiens
  misc_RNA (1)...(19): siRNA sense strand
cugugaaugugaaugccaa

SEQ ID NO: 2267292 - RNA, 19 nt, Homo sapiens
  misc_RNA (1)...(19): siRNA sense strand
ugaagggcguguugguaga

SEQ ID NO: 2267293 - RNA, 19 nt, Homo sapiens
  misc_RNA (1)...(19): siRNA sense strand
aggagaaggauguugacga

SEQ ID NO: 2267294 - RNA, 19 nt, Homo sapiens
  misc_RNA (1)...(19): siRNA sense strand
ccaaauuguggguggugca

SEQ ID NO: 2267295 - RNA, 19 nt, Homo sapiens
  misc_RNA (1)...(19): siRNA sense strand
aagacgauuuggagaaugu

SEQ ID NO: 2267296 - RNA, 19 nt, Homo sapiens
  misc_RNA (1)...(19): siRNA sense strand
guuuaaaagcaaaugccaa

SEQ ID NO: 2267297 - RNA, 19 nt, Homo sapiens
  misc_RNA (1)...(19): siRNA sense strand
gaaagaaaacaguucagaa

SEQ ID NO: 2267298 - RNA, 19 nt, Homo sapiens
  misc_RNA (1)...(19): siRNA sense strand
gagggauaauacaaaugaa

SEQ ID NO: 2267299 - RNA, 19 nt, Homo sapiens
  misc_RNA (1)...(19): siRNA sense strand
augaaugccaaaugggaca

SEQ ID NO: 2267300 - RNA, 19 nt, Homo sapiens
  misc_RNA (1)...(19): siRNA sense strand
ugugacuguucuuuggaua

SEQ ID NO: 2267301 - RNA, 19 nt, Homo sapiens
  misc_RNA (1)...(19): siRNA sense strand
guaggaacauuaucugcaa

SEQ ID NO: 2267302 - RNA, 19 nt, Homo sapiens
  misc_RNA (1)...(19): siRNA sense strand
gcauaaagaauguguucag

SEQ ID NO: 2267303 - RNA, 19 nt, Homo sapiens
  misc_RNA (1)...(19): siRNA sense strand
aaagaaagacacaugcaca

SEQ ID NO: 2267304 - RNA, 19 nt, Homo sapiens
  misc_RNA (1)...(19): siRNA sense strand
guuuguaggaagagggaua

SEQ ID NO: 2267305 - RNA, 19 nt, Homo sapiens
  misc_RNA (1)...(19): siRNA sense strand
cggaggaaguagagguuau

SEQ ID NO: 2267306 - RNA, 19 nt, Homo sapiens
  misc_RNA (1)...(19): siRNA sense strand
guccagaaacugagugaaa

SEQ ID NO: 2267307 - RNA, 19 nt, Homo sapiens
  misc_RNA (1)...(19): siRNA sense strand
cagagaagcucaagccaga

SEQ ID NO: 2267308 - RNA, 19 nt, Homo sapiens
  misc_RNA (1)...(19): siRNA sense strand
gcuuacugcaggaaagaaa

SEQ ID NO: 2267309 - RNA, 19 nt, Homo sapiens
  misc_RNA (1)...(19): siRNA sense strand
ugggaaacuugguggcauu

SEQ ID NO: 2267310 - RNA, 19 nt, Homo sapiens
  misc_RNA (1)...(19): siRNA sense strand
gcaaauucuagcaauguaa

SEQ ID NO: 2267311 - RNA, 19 nt, Homo sapiens
  misc_RNA (1)...(19): siRNA sense strand
ggggaaaauggaagaaaau

SEQ ID NO: 2267312 - RNA, 19 nt, Homo sapiens
  misc_RNA (1)...(19): siRNA sense strand
ucuuauuggccuugcauua

SEQ ID NO: 2267313 - RNA, 19 nt, Homo sapiens
  misc_RNA (1)...(19): siRNA sense strand
aggggaaaauggaagaaaa

SEQ ID NO: 2267314 - RNA, 19 nt, Homo sapiens
  misc_RNA (1)...(19): siRNA sense strand
cagaagggaguuugcuaaa

SEQ ID NO: 2267315 - RNA, 19 nt, Homo sapiens
  misc_RNA (1)...(19): siRNA sense strand
aggaagagggauaauacaa

SEQ ID NO: 2267316 - RNA, 19 nt, Homo sapiens
  misc_RNA (1)...(19): siRNA sense strand
gcaaauucugcgaguguga

SEQ ID NO: 2267317 - RNA, 19 nt, Homo sapiens
  misc_RNA (1)...(19): siRNA sense strand
ugccaaaucauguggagaa

SEQ ID NO: 2267318 - RNA, 19 nt, Homo sapiens
  misc_RNA (1)...(19): siRNA sense strand
ucaagagagcugaagacua

SEQ ID NO: 2267319 - RNA, 19 nt, Homo sapiens
  misc_RNA (1)...(19): siRNA sense strand
ucaugaaggaaaugggaca

SEQ ID NO: 2267320 - RNA, 19 nt, Homo sapiens
  misc_RNA (1)...(19): siRNA sense strand
uggcuuaauuuguggagga

SEQ ID NO: 2267321 - RNA, 19 nt, Homo sapiens
  misc_RNA (1)...(19): siRNA sense strand
ggagaaaaugaaugccaaa

SEQ ID NO: 2267322 - RNA, 19 nt, Homo sapiens
  misc_RNA (1)...(19): siRNA sense strand
cagaauuggauuuggcuca

SEQ ID NO: 2267323 - RNA, 19 nt, Homo sapiens
  misc_RNA (1)...(19): siRNA sense strand
agcucaagccagaggauau

SEQ ID NO: 2267324 - RNA, 19 nt, Homo sapiens
  misc_RNA (1)...(19): siRNA sense strand
ggugaauggaacaggggaa

SEQ ID NO: 2267325 - RNA, 19 nt, Homo sapiens
  misc_RNA (1)...(19): siRNA sense strand
acucaaugaaagacgauuu

SEQ ID NO: 2267326 - RNA, 19 nt, Homo sapiens
  misc_RNA (1)...(19): siRNA sense strand
ccagaaacugagugaaaau

SEQ ID NO: 2267327 - RNA, 19 nt, Homo sapiens
  misc_RNA (1)...(19): siRNA sense strand
guuacaaaucuuacugcaa

SEQ ID NO: 2267328 - RNA, 19 nt, Homo sapiens
  misc_RNA (1)...(19): siRNA sense strand
caguguguuuguaggaaga

SEQ ID NO: 2267329 - RNA, 19 nt, Homo sapiens
  misc_RNA (1)...(19): siRNA sense strand
caaccguagcaaaggaaca

SEQ ID NO: 2267330 - RNA, 19 nt, Homo sapiens
  misc_RNA (1)...(19): siRNA sense strand
ggaaaauggaagaaaaugu

SEQ ID NO: 2267331 - RNA, 19 nt, Homo sapiens
  misc_RNA (1)...(19): siRNA sense strand
acagaagggaguuugcuaa

SEQ ID NO: 2267332 - RNA, 19 nt, Homo sapiens
  misc_RNA (1)...(19): siRNA sense strand
cugaaagucccaaguguca

SEQ ID NO: 2267333 - RNA, 19 nt, Homo sapiens
  misc_RNA (1)...(19): siRNA sense strand
gguucauguuguggagaau

SEQ ID NO: 2267334 - RNA, 19 nt, Homo sapiens
  misc_RNA (1)...(19): siRNA sense strand
ugguucauguuguggagaa

SEQ ID NO: 2267335 - RNA, 19 nt, Homo sapiens
  misc_RNA (1)...(19): siRNA sense strand
uggugugguugcuggaauu

SEQ ID NO: 2267336 - RNA, 19 nt, Homo sapiens
  misc_RNA (1)...(19): siRNA sense strand
ccauuggagaugagguuca

SEQ ID NO: 2267337 - RNA, 19 nt, Homo sapiens
  misc_RNA (1)...(19): siRNA sense strand
ggauacuaguacuugugaa

SEQ ID NO: 2267338 - RNA, 19 nt, Homo sapiens
  misc_RNA (1)...(19): siRNA sense strand
guugguagacauugugaau

SEQ ID NO: 2267339 - RNA, 19 nt, Homo sapiens
  misc_RNA (1)...(19): siRNA sense strand
ccuccagaugacauagaaa

SEQ ID NO: 2267340 - RNA, 19 nt, Homo sapiens
  misc_RNA (1)...(19): siRNA sense strand
augaaugaaaugaggagga

SEQ ID NO: 2267341 - RNA, 19 nt, Homo sapiens
  misc_RNA (1)...(19): siRNA sense strand
aguugcaguuuguggauca

SEQ ID NO: 2267342 - RNA, 19 nt, Homo sapiens
  misc_RNA (1)...(19): siRNA sense strand
agaugaaguuaacagugaa

SEQ ID NO: 2267343 - RNA, 19 nt, Homo sapiens
  misc_RNA (1)...(19): siRNA sense strand
gcagcacagaugaaguuaa

SEQ ID NO: 2267344 - RNA, 19 nt, Homo sapiens
  misc_RNA (1)...(19): siRNA sense strand
guauacaagcagggccaaa

SEQ ID NO: 2267345 - RNA, 19 nt, Homo sapiens
  misc_RNA (1)...(19): siRNA sense strand
gccaaaucauguggagaau

SEQ ID NO: 2267346 - RNA, 19 nt, Homo sapiens
  misc_RNA (1)...(19): siRNA sense strand
acgauuuggagaauguaaa

SEQ ID NO: 2267347 - RNA, 19 nt, Homo sapiens
  misc_RNA (1)...(19): siRNA sense strand
uggcaaauucugcgagugu

SEQ ID NO: 2267348 - RNA, 19 nt, Homo sapiens
  misc_RNA (1)...(19): siRNA sense strand
agacacaugcacacaggaa

SEQ ID NO: 2267349 - RNA, 19 nt, Homo sapiens
  misc_RNA (1)...(19): siRNA sense strand
cugugaaugugaaugccaa

SEQ ID NO: 2267350 - RNA, 19 nt, Homo sapiens
  misc_RNA (1)...(19): siRNA sense strand
ugaagggcguguugguaga

SEQ ID NO: 2267351 - RNA, 19 nt, Homo sapiens
  misc_RNA (1)...(19): siRNA sense strand
aggagaaggauguugacga

SEQ ID NO: 2267352 - RNA, 19 nt, Homo sapiens
  misc_RNA (1)...(19): siRNA sense strand
ccaaauuguggguggugca

SEQ ID NO: 2267353 - RNA, 19 nt, Homo sapiens
  misc_RNA (1)...(19): siRNA sense strand
aagacgauuuggagaaugu

SEQ ID NO: 2267354 - RNA, 19 nt, Homo sapiens
  misc_RNA (1)...(19): siRNA sense strand
guuuaaaagcaaaugccaa

SEQ ID NO: 2267355 - RNA, 19 nt, Homo sapiens
  misc_RNA (1)...(19): siRNA sense strand
gaaagaaaacaguucagaa

SEQ ID NO: 2267356 - RNA, 19 nt, Homo sapiens
  misc_RNA (1)...(19): siRNA sense strand
gagggauaauacaaaugaa

SEQ ID NO: 2267357 - RNA, 19 nt, Homo sapiens
  misc_RNA (1)...(19): siRNA sense strand
augaaugccaaaugggaca

SEQ ID NO: 2267358 - RNA, 19 nt, Homo sapiens
  misc_RNA (1)...(19): siRNA sense strand
ugugacuguucuuuggaua

SEQ ID NO: 2267359 - RNA, 19 nt, Homo sapiens
  misc_RNA (1)...(19): siRNA sense strand
guaggaacauuaucugcaa

SEQ ID NO: 2267360 - RNA, 19 nt, Homo sapiens
  misc_RNA (1)...(19): siRNA sense strand
gcauaaagaauguguucag

SEQ ID NO: 2267361 - RNA, 19 nt, Homo sapiens
  misc_RNA (1)...(19): siRNA sense strand
aaagaaagacacaugcaca

SEQ ID NO: 2267362 - RNA, 19 nt, Homo sapiens
  misc_RNA (1)...(19): siRNA sense strand
guuuguaggaagagggaua

SEQ ID NO: 2267363 - RNA, 19 nt, Homo sapiens
  misc_RNA (1)...(19): siRNA sense strand
cggaggaaguagagguuau

SEQ ID NO: 2267364 - RNA, 19 nt, Homo sapiens
  misc_RNA (1)...(19): siRNA sense strand
guccagaaacugagugaaa

SEQ ID NO: 2267365 - RNA, 19 nt, Homo sapiens
  misc_RNA (1)...(19): siRNA sense strand
cagagaagcucaagccaga

SEQ ID NO: 2267366 - RNA, 19 nt, Homo sapiens
  misc_RNA (1)...(19): siRNA sense strand
gcuuacugcaggaaagaaa

SEQ ID NO: 2267367 - RNA, 19 nt, Homo sapiens
  misc_RNA (1)...(19): siRNA sense strand
ugggaaacuugguggcauu

SEQ ID NO: 2267368 - RNA, 19 nt, Homo sapiens
  misc_RNA (1)...(19): siRNA sense strand
gcaaauucuagcaauguaa

SEQ ID NO: 2267369 - RNA, 19 nt, Homo sapiens
  misc_RNA (1)...(19): siRNA sense strand
ggggaaaauggaagaaaau

SEQ ID NO: 2267370 - RNA, 19 nt, Homo sapiens
  misc_RNA (1)...(19): siRNA sense strand
ucuuauuggccuugcauua

SEQ ID NO: 2267371 - RNA, 19 nt, Homo sapiens
  misc_RNA (1)...(19): siRNA sense strand
aggggaaaauggaagaaaa

SEQ ID NO: 2267372 - RNA, 19 nt, Homo sapiens
  misc_RNA (1)...(19): siRNA sense strand
cagaagggaguuugcuaaa

SEQ ID NO: 2267373 - RNA, 19 nt, Homo sapiens
  misc_RNA (1)...(19): siRNA sense strand
aggaagagggauaauacaa

SEQ ID NO: 2267374 - RNA, 19 nt, Homo sapiens
  misc_RNA (1)...(19): siRNA sense strand
gcaaauucugcgaguguga

SEQ ID NO: 2267375 - RNA, 19 nt, Homo sapiens
  misc_RNA (1)...(19): siRNA sense strand
ugccaaaucauguggagaa

SEQ ID NO: 2267376 - RNA, 19 nt, Homo sapiens
  misc_RNA (1)...(19): siRNA sense strand
ucaagagagcugaagacua

SEQ ID NO: 2267377 - RNA, 19 nt, Homo sapiens
  misc_RNA (1)...(19): siRNA sense strand
ucaugaaggaaaugggaca

SEQ ID NO: 2267378 - RNA, 19 nt, Homo sapiens
  misc_RNA (1)...(19): siRNA sense strand
uggcuuaauuuguggagga

SEQ ID NO: 2267379 - RNA, 19 nt, Homo sapiens
  misc_RNA (1)...(19): siRNA sense strand
ggagaaaaugaaugccaaa

SEQ ID NO: 2267380 - RNA, 19 nt, Homo sapiens
  misc_RNA (1)...(19): siRNA sense strand
cagaauuggauuuggcuca

SEQ ID NO: 2267381 - RNA, 19 nt, Homo sapiens
  misc_RNA (1)...(19): siRNA sense strand
agcucaagccagaggauau

SEQ ID NO: 2267382 - RNA, 19 nt, Homo sapiens
  misc_RNA (1)...(19): siRNA sense strand
ggugaauggaacaggggaa

SEQ ID NO: 2267383 - RNA, 19 nt, Homo sapiens
  misc_RNA (1)...(19): siRNA sense strand
acucaaugaaagacgauuu

SEQ ID NO: 2267384 - RNA, 19 nt, Homo sapiens
  misc_RNA (1)...(19): siRNA sense strand
ccagaaacugagugaaaau

SEQ ID NO: 2267385 - RNA, 19 nt, Homo sapiens
  misc_RNA (1)...(19): siRNA sense strand
guuacaaaucuuacugcaa

SEQ ID NO: 2267386 - RNA, 19 nt, Homo sapiens
  misc_RNA (1)...(19): siRNA sense strand
caguguguuuguaggaaga

SEQ ID NO: 2267387 - RNA, 19 nt, Homo sapiens
  misc_RNA (1)...(19): siRNA sense strand
caaccguagcaaaggaaca

SEQ ID NO: 2267388 - RNA, 19 nt, Homo sapiens
  misc_RNA (1)...(19): siRNA sense strand
ggaaaauggaagaaaaugu

SEQ ID NO: 2267389 - RNA, 19 nt, Homo sapiens
  misc_RNA (1)...(19): siRNA sense strand
acagaagggaguuugcuaa

SEQ ID NO: 2267390 - RNA, 19 nt, Homo sapiens
  misc_RNA (1)...(19): siRNA sense strand
cugaaagucccaaguguca

SEQ ID NO: 2267391 - RNA, 19 nt, Homo sapiens
  misc_RNA (1)...(19): siRNA sense strand
gguucauguuguggagaau

SEQ ID NO: 2267392 - RNA, 19 nt, Homo sapiens
  misc_RNA (1)...(19): siRNA sense strand
ugguucauguuguggagaa

SEQ ID NO: 2267393 - RNA, 19 nt, Homo sapiens
  misc_RNA (1)...(19): siRNA sense strand
uggugugguugcuggaauu

SEQ ID NO: 2267394 - RNA, 19 nt, Homo sapiens
  misc_RNA (1)...(19): siRNA sense strand
ccauuggagaugagguuca

SEQ ID NO: 2267395 - RNA, 19 nt, Homo sapiens
  misc_RNA (1)...(19): siRNA sense strand
ggauacuaguacuugugaa

SEQ ID NO: 2267396 - RNA, 19 nt, Homo sapiens
  misc_RNA (1)...(19): siRNA sense strand
guugguagacauugugaau

SEQ ID NO: 2267397 - RNA, 19 nt, Homo sapiens
  misc_RNA (1)...(19): siRNA sense strand
ccuccagaugacauagaaa

SEQ ID NO: 2267398 - RNA, 19 nt, Homo sapiens
  misc_RNA (1)...(19): siRNA sense strand
augaaugaaaugaggagga

SEQ ID NO: 2267399 - RNA, 19 nt, Homo sapiens
  misc_RNA (1)...(19): siRNA sense strand
aguugcaguuuguggauca

SEQ ID NO: 2267400 - RNA, 19 nt, Homo sapiens
  misc_RNA (1)...(19): siRNA sense strand
agaugaaguuaacagugaa

SEQ ID NO: 2267401 - RNA, 19 nt, Homo sapiens
  misc_RNA (1)...(19): siRNA sense strand
gcagcacagaugaaguuaa

SEQ ID NO: 2267402 - RNA, 19 nt, Homo sapiens
  misc_RNA (1)...(19): siRNA sense strand
guauacaagcagggccaaa

SEQ ID NO: 2267403 - RNA, 19 nt, Homo sapiens
  misc_RNA (1)...(19): siRNA sense strand
gccaaaucauguggagaau

SEQ ID NO: 2267404 - RNA, 19 nt, Homo sapiens
  misc_RNA (1)...(19): siRNA sense strand
acgauuuggagaauguaaa

SEQ ID NO: 2267405 - RNA, 19 nt, Homo sapiens
  misc_RNA (1)...(19): siRNA sense strand
uggcaaauucugcgagugu

SEQ ID NO: 2267406 - RNA, 19 nt, Homo sapiens
  misc_RNA (1)...(19): siRNA sense strand
agacacaugcacacaggaa

SEQ ID NO: 2267407 - RNA, 19 nt, Homo sapiens
  misc_RNA (1)...(19): siRNA sense strand
cugugaaugugaaugccaa

SEQ ID NO: 2267408 - RNA, 19 nt, Homo sapiens
  misc_RNA (1)...(19): siRNA sense strand
ugaagggcguguugguaga

SEQ ID NO: 2267409 - RNA, 19 nt, Homo sapiens
  misc_RNA (1)...(19): siRNA sense strand
aggagaaggauguugacga

SEQ ID NO: 2267410 - RNA, 19 nt, Homo sapiens
  misc_RNA (1)...(19): siRNA sense strand
ccaaauuguggguggugca

SEQ ID NO: 2267411 - RNA, 19 nt, Homo sapiens
  misc_RNA (1)...(19): siRNA sense strand
aagacgauuuggagaaugu

SEQ ID NO: 2267412 - RNA, 19 nt, Homo sapiens
  misc_RNA (1)...(19): siRNA sense strand
guuuaaaagcaaaugccaa

SEQ ID NO: 2267413 - RNA, 19 nt, Homo sapiens
  misc_RNA (1)...(19): siRNA sense strand
gaaagaaaacaguucagaa

SEQ ID NO: 2267414 - RNA, 19 nt, Homo sapiens
  misc_RNA (1)...(19): siRNA sense strand
gagggauaauacaaaugaa

SEQ ID NO: 2267415 - RNA, 19 nt, Homo sapiens
  misc_RNA (1)...(19): siRNA sense strand
augaaugccaaaugggaca

SEQ ID NO: 2267416 - RNA, 19 nt, Homo sapiens
  misc_RNA (1)...(19): siRNA sense strand
ugugacuguucuuuggaua

SEQ ID NO: 2267417 - RNA, 19 nt, Homo sapiens
  misc_RNA (1)...(19): siRNA sense strand
guaggaacauuaucugcaa

SEQ ID NO: 2267418 - RNA, 19 nt, Homo sapiens
  misc_RNA (1)...(19): siRNA sense strand
gcauaaagaauguguucag

SEQ ID NO: 2267419 - RNA, 19 nt, Homo sapiens
  misc_RNA (1)...(19): siRNA sense strand
aaagaaagacacaugcaca

SEQ ID NO: 2267420 - RNA, 19 nt, Homo sapiens
  misc_RNA (1)...(19): siRNA sense strand
guuuguaggaagagggaua

SEQ ID NO: 2267421 - RNA, 19 nt, Homo sapiens
  misc_RNA (1)...(19): siRNA sense strand
cggaggaaguagagguuau

SEQ ID NO: 2267422 - RNA, 19 nt, Homo sapiens
  misc_RNA (1)...(19): siRNA sense strand
guccagaaacugagugaaa

SEQ ID NO: 2267423 - RNA, 19 nt, Homo sapiens
  misc_RNA (1)...(19): siRNA sense strand
cagagaagcucaagccaga

SEQ ID NO: 2267424 - RNA, 19 nt, Homo sapiens
  misc_RNA (1)...(19): siRNA sense strand
gcuuacugcaggaaagaaa

SEQ ID NO: 2267425 - RNA, 19 nt, Homo sapiens
  misc_RNA (1)...(19): siRNA sense strand
ugggaaacuugguggcauu

SEQ ID NO: 2267426 - RNA, 19 nt, Homo sapiens
  misc_RNA (1)...(19): siRNA sense strand
gcaaauucuagcaauguaa

SEQ ID NO: 2267427 - RNA, 19 nt, Homo sapiens
  misc_RNA (1)...(19): siRNA sense strand
ggggaaaauggaagaaaau

SEQ ID NO: 2267428 - RNA, 19 nt, Homo sapiens
  misc_RNA (1)...(19): siRNA sense strand
ucuuauuggccuugcauua

SEQ ID NO: 2267429 - RNA, 19 nt, Homo sapiens
  misc_RNA (1)...(19): siRNA sense strand
aggggaaaauggaagaaaa

SEQ ID NO: 2267430 - RNA, 19 nt, Homo sapiens
  misc_RNA (1)...(19): siRNA sense strand
cagaagggaguuugcuaaa

SEQ ID NO: 2267431 - RNA, 19 nt, Homo sapiens
  misc_RNA (1)...(19): siRNA sense strand
aggaagagggauaauacaa

SEQ ID NO: 2267432 - RNA, 19 nt, Homo sapiens
  misc_RNA (1)...(19): siRNA sense strand
gcaaauucugcgaguguga

SEQ ID NO: 2267433 - RNA, 19 nt, Homo sapiens
  misc_RNA (1)...(19): siRNA sense strand
ugccaaaucauguggagaa

SEQ ID NO: 2267434 - RNA, 19 nt, Homo sapiens
  misc_RNA (1)...(19): siRNA sense strand
ucaagagagcugaagacua

SEQ ID NO: 2267435 - RNA, 19 nt, Homo sapiens
  misc_RNA (1)...(19): siRNA sense strand
ucaugaaggaaaugggaca

SEQ ID NO: 2267436 - RNA, 19 nt, Homo sapiens
  misc_RNA (1)...(19): siRNA sense strand
uggcuuaauuuguggagga

SEQ ID NO: 2267437 - RNA, 19 nt, Homo sapiens
  misc_RNA (1)...(19): siRNA sense strand
ggagaaaaugaaugccaaa

SEQ ID NO: 2267438 - RNA, 19 nt, Homo sapiens
  misc_RNA (1)...(19): siRNA sense strand
cagaauuggauuuggcuca

SEQ ID NO: 2267439 - RNA, 19 nt, Homo sapiens
  misc_RNA (1)...(19): siRNA sense strand
agcucaagccagaggauau

SEQ ID NO: 2267440 - RNA, 19 nt, Homo sapiens
  misc_RNA (1)...(19): siRNA sense strand
ggugaauggaacaggggaa

SEQ ID NO: 2267441 - RNA, 19 nt, Homo sapiens
  misc_RNA (1)...(19): siRNA sense strand
acucaaugaaagacgauuu

SEQ ID NO: 2267442 - RNA, 19 nt, Homo sapiens
  misc_RNA (1)...(19): siRNA sense strand
ccagaaacugagugaaaau

SEQ ID NO: 2267443 - RNA, 19 nt, Homo sapiens
  misc_RNA (1)...(19): siRNA sense strand
guuacaaaucuuacugcaa

SEQ ID NO: 2267444 - RNA, 19 nt, Homo sapiens
  misc_RNA (1)...(19): siRNA sense strand
caguguguuuguaggaaga

SEQ ID NO: 2267445 - RNA, 19 nt, Homo sapiens
  misc_RNA (1)...(19): siRNA sense strand
caaccguagcaaaggaaca

SEQ ID NO: 2267446 - RNA, 19 nt, Homo sapiens
  misc_RNA (1)...(19): siRNA sense strand
ggaaaauggaagaaaaugu

SEQ ID NO: 2267447 - RNA, 19 nt, Homo sapiens
  misc_RNA (1)...(19): siRNA sense strand
acagaagggaguuugcuaa

SEQ ID NO: 2267448 - RNA, 19 nt, Homo sapiens
  misc_RNA (1)...(19): siRNA sense strand
cugaaagucccaaguguca

SEQ ID NO: 2267449 - RNA, 19 nt, Homo sapiens
  misc_RNA (1)...(19): siRNA sense strand
gguucauguuguggagaau

SEQ ID NO: 2267450 - RNA, 19 nt, Homo sapiens
  misc_RNA (1)...(19): siRNA sense strand
ugguucauguuguggagaa

SEQ ID NO: 2267451 - RNA, 19 nt, Homo sapiens
  misc_RNA (1)...(19): siRNA sense strand
uggugugguugcuggaauu

SEQ ID NO: 2267452 - RNA, 19 nt, Homo sapiens
  misc_RNA (1)...(19): siRNA sense strand
ccauuggagaugagguuca

SEQ ID NO: 2267453 - RNA, 19 nt, Homo sapiens
  misc_RNA (1)...(19): siRNA sense strand
ggauacuaguacuugugaa

SEQ ID NO: 2267454 - RNA, 19 nt, Homo sapiens
  misc_RNA (1)...(19): siRNA sense strand
guugguagacauugugaau

SEQ ID NO: 2267455 - RNA, 19 nt, Homo sapiens
  misc_RNA (1)...(19): siRNA sense strand
ccuccagaugacauagaaa

SEQ ID NO: 2267456 - RNA, 19 nt, Homo sapiens
  misc_RNA (1)...(19): siRNA sense strand
augaaugaaaugaggagga

SEQ ID NO: 2267457 - RNA, 19 nt, Homo sapiens
  misc_RNA (1)...(19): siRNA sense strand
aguugcaguuuguggauca

SEQ ID NO: 2267458 - RNA, 19 nt, Homo sapiens
  misc_RNA (1)...(19): siRNA sense strand
agaugaaguuaacagugaa

SEQ ID NO: 2267459 - RNA, 19 nt, Homo sapiens
  misc_RNA (1)...(19): siRNA sense strand
gcagcacagaugaaguuaa

SEQ ID NO: 2267460 - RNA, 19 nt, Homo sapiens
  misc_RNA (1)...(19): siRNA sense strand
guauacaagcagggccaaa

SEQ ID NO: 2267461 - RNA, 19 nt, Homo sapiens
  misc_RNA (1)...(19): siRNA sense strand
gccaaaucauguggagaau

SEQ ID NO: 2267462 - RNA, 19 nt, Homo sapiens
  misc_RNA (1)...(19): siRNA sense strand
acgauuuggagaauguaaa

SEQ ID NO: 2267463 - RNA, 19 nt, Homo sapiens
  misc_RNA (1)...(19): siRNA sense strand
uggcaaauucugcgagugu

SEQ ID NO: 2267464 - RNA, 19 nt, Homo sapiens
  misc_RNA (1)...(19): siRNA sense strand
agacacaugcacacaggaa

SEQ ID NO: 2267465 - RNA, 19 nt, Homo sapiens
  misc_RNA (1)...(19): siRNA sense strand
cugugaaugugaaugccaa

SEQ ID NO: 2267466 - RNA, 19 nt, Homo sapiens
  misc_RNA (1)...(19): siRNA sense strand
ugaagggcguguugguaga

SEQ ID NO: 2267467 - RNA, 19 nt, Homo sapiens
  misc_RNA (1)...(19): siRNA sense strand
aggagaaggauguugacga

SEQ ID NO: 2267468 - RNA, 19 nt, Homo sapiens
  misc_RNA (1)...(19): siRNA sense strand
ccaaauuguggguggugca

SEQ ID NO: 2267469 - RNA, 19 nt, Homo sapiens
  misc_RNA (1)...(19): siRNA sense strand
aagacgauuuggagaaugu

SEQ ID NO: 2267470 - RNA, 19 nt, Homo sapiens
  misc_RNA (1)...(19): siRNA sense strand
guuuaaaagcaaaugccaa

SEQ ID NO: 2267471 - RNA, 19 nt, Homo sapiens
  misc_RNA (1)...(19): siRNA sense strand
gaaagaaaacaguucagaa

SEQ ID NO: 2267472 - RNA, 19 nt, Homo sapiens
  misc_RNA (1)...(19): siRNA sense strand
gagggauaauacaaaugaa

SEQ ID NO: 2267473 - RNA, 19 nt, Homo sapiens
  misc_RNA (1)...(19): siRNA sense strand
augaaugccaaaugggaca

SEQ ID NO: 2267474 - RNA, 19 nt, Homo sapiens
  misc_RNA (1)...(19): siRNA sense strand
ugugacuguucuuuggaua

SEQ ID NO: 2267475 - RNA, 19 nt, Homo sapiens
  misc_RNA (1)...(19): siRNA sense strand
guaggaacauuaucugcaa

SEQ ID NO: 2267476 - RNA, 19 nt, Homo sapiens
  misc_RNA (1)...(19): siRNA sense strand
gcauaaagaauguguucag

SEQ ID NO: 2267477 - RNA, 19 nt, Homo sapiens
  misc_RNA (1)...(19): siRNA sense strand
aaagaaagacacaugcaca

SEQ ID NO: 2267478 - RNA, 19 nt, Homo sapiens
  misc_RNA (1)...(19): siRNA sense strand
guuuguaggaagagggaua

SEQ ID NO: 2267479 - RNA, 19 nt, Homo sapiens
  misc_RNA (1)...(19): siRNA sense strand
cggaggaaguagagguuau

SEQ ID NO: 2267480 - RNA, 19 nt, Homo sapiens
  misc_RNA (1)...(19): siRNA sense strand
guccagaaacugagugaaa

SEQ ID NO: 2267481 - RNA, 19 nt, Homo sapiens
  misc_RNA (1)...(19): siRNA sense strand
cagagaagcucaagccaga

SEQ ID NO: 2267482 - RNA, 19 nt, Homo sapiens
  misc_RNA (1)...(19): siRNA sense strand
gcuuacugcaggaaagaaa

SEQ ID NO: 2267483 - RNA, 19 nt, Homo sapiens
  misc_RNA (1)...(19): siRNA sense strand
ugggaaacuugguggcauu

SEQ ID NO: 2267484 - RNA, 19 nt, Homo sapiens
  misc_RNA (1)...(19): siRNA sense strand
gcaaauucuagcaauguaa

SEQ ID NO: 2267485 - RNA, 19 nt, Homo sapiens
  misc_RNA (1)...(19): siRNA sense strand
ggggaaaauggaagaaaau

SEQ ID NO: 2267486 - RNA, 19 nt, Homo sapiens
  misc_RNA (1)...(19): siRNA sense strand
ucuuauuggccuugcauua

SEQ ID NO: 2267487 - RNA, 19 nt, Homo sapiens
  misc_RNA (1)...(19): siRNA sense strand
aggggaaaauggaagaaaa

SEQ ID NO: 2267488 - RNA, 19 nt, Homo sapiens
  misc_RNA (1)...(19): siRNA sense strand
cagaagggaguuugcuaaa

SEQ ID NO: 2267489 - RNA, 19 nt, Homo sapiens
  misc_RNA (1)...(19): siRNA sense strand
aggaagagggauaauacaa

SEQ ID NO: 2267490 - RNA, 19 nt, Homo sapiens
  misc_RNA (1)...(19): siRNA sense strand
gcaaauucugcgaguguga

SEQ ID NO: 2267491 - RNA, 19 nt, Homo sapiens
  misc_RNA (1)...(19): siRNA sense strand
ugccaaaucauguggagaa

SEQ ID NO: 2267492 - RNA, 19 nt, Homo sapiens
  misc_RNA (1)...(19): siRNA sense strand
ucaagagagcugaagacua

SEQ ID NO: 2267493 - RNA, 19 nt, Homo sapiens
  misc_RNA (1)...(19): siRNA sense strand
ucaugaaggaaaugggaca

SEQ ID NO: 2267494 - RNA, 19 nt, Homo sapiens
  misc_RNA (1)...(19): siRNA sense strand
uggcuuaauuuguggagga

SEQ ID NO: 2267495 - RNA, 19 nt, Homo sapiens
  misc_RNA (1)...(19): siRNA sense strand
ggagaaaaugaaugccaaa

SEQ ID NO: 2267496 - RNA, 19 nt, Homo sapiens
  misc_RNA (1)...(19): siRNA sense strand
cagaauuggauuuggcuca

SEQ ID NO: 2267497 - RNA, 19 nt, Homo sapiens
  misc_RNA (1)...(19): siRNA sense strand
agcucaagccagaggauau

SEQ ID NO: 2267498 - RNA, 19 nt, Homo sapiens
  misc_RNA (1)...(19): siRNA sense strand
ggugaauggaacaggggaa

SEQ ID NO: 2267499 - RNA, 19 nt, Homo sapiens
  misc_RNA (1)...(19): siRNA sense strand
acucaaugaaagacgauuu

SEQ ID NO: 2267500 - RNA, 19 nt, Homo sapiens
  misc_RNA (1)...(19): siRNA sense strand
ccagaaacugagugaaaau

SEQ ID NO: 2267501 - RNA, 19 nt, Homo sapiens
  misc_RNA (1)...(19): siRNA sense strand
guuacaaaucuuacugcaa

SEQ ID NO: 2267502 - RNA, 19 nt, Homo sapiens
  misc_RNA (1)...(19): siRNA sense strand
caguguguuuguaggaaga

SEQ ID NO: 2267503 - RNA, 19 nt, Homo sapiens
  misc_RNA (1)...(19): siRNA sense strand
caaccguagcaaaggaaca

SEQ ID NO: 2267504 - RNA, 19 nt, Homo sapiens
  misc_RNA (1)...(19): siRNA sense strand
ggaaaauggaagaaaaugu

SEQ ID NO: 2267505 - RNA, 19 nt, Homo sapiens
  misc_RNA (1)...(19): siRNA sense strand
acagaagggaguuugcuaa

SEQ ID NO: 2267506 - RNA, 19 nt, Homo sapiens
  misc_RNA (1)...(19): siRNA sense strand
cugaaagucccaaguguca

SEQ ID NO: 2267507 - RNA, 19 nt, Homo sapiens
  misc_RNA (1)...(19): siRNA sense strand
gguucauguuguggagaau

SEQ ID NO: 2267508 - RNA, 19 nt, Homo sapiens
  misc_RNA (1)...(19): siRNA sense strand
ugguucauguuguggagaa

SEQ ID NO: 2267509 - RNA, 19 nt, Homo sapiens
  misc_RNA (1)...(19): siRNA sense strand
uggugugguugcuggaauu

SEQ ID NO: 2267510 - RNA, 19 nt, Homo sapiens
  misc_RNA (1)...(19): siRNA sense strand
ccauuggagaugagguuca

SEQ ID NO: 2267511 - RNA, 19 nt, Homo sapiens
  misc_RNA (1)...(19): siRNA sense strand
ggauacuaguacuugugaa

SEQ ID NO: 2267512 - RNA, 19 nt, Homo sapiens
  misc_RNA (1)...(19): siRNA sense strand
guugguagacauugugaau

SEQ ID NO: 2267513 - RNA, 19 nt, Homo sapiens
  misc_RNA (1)...(19): siRNA sense strand
ccuccagaugacauagaaa

SEQ ID NO: 2267514 - RNA, 19 nt, Homo sapiens
  misc_RNA (1)...(19): siRNA sense strand
augaaugaaaugaggagga

SEQ ID NO: 2267515 - RNA, 19 nt, Homo sapiens
  misc_RNA (1)...(19): siRNA sense strand
aguugcaguuuguggauca

SEQ ID NO: 2267516 - RNA, 19 nt, Homo sapiens
  misc_RNA (1)...(19): siRNA sense strand
agaugaaguuaacagugaa

SEQ ID NO: 2267517 - RNA, 19 nt, Homo sapiens
  misc_RNA (1)...(19): siRNA sense strand
gcagcacagaugaaguuaa

SEQ ID NO: 2267518 - RNA, 19 nt, Homo sapiens
  misc_RNA (1)...(19): siRNA sense strand
guauacaagcagggccaaa

SEQ ID NO: 2267519 - RNA, 19 nt, Homo sapiens
  misc_RNA (1)...(19): siRNA sense strand
gccaaaucauguggagaau

SEQ ID NO: 2267520 - RNA, 19 nt, Homo sapiens
  misc_RNA (1)...(19): siRNA sense strand
acgauuuggagaauguaaa

SEQ ID NO: 2267521 - RNA, 19 nt, Homo sapiens
  misc_RNA (1)...(19): siRNA sense strand
uggcaaauucugcgagugu

SEQ ID NO: 2267522 - RNA, 19 nt, Homo sapiens
  misc_RNA (1)...(19): siRNA sense strand
agacacaugcacacaggaa

SEQ ID NO: 2267523 - RNA, 19 nt, Homo sapiens
  misc_RNA (1)...(19): siRNA sense strand
cugugaaugugaaugccaa

SEQ ID NO: 2267524 - RNA, 19 nt, Homo sapiens
  misc_RNA (1)...(19): siRNA sense strand
ugaagggcguguugguaga

SEQ ID NO: 2267525 - RNA, 19 nt, Homo sapiens
  misc_RNA (1)...(19): siRNA sense strand
aggagaaggauguugacga

SEQ ID NO: 2267526 - RNA, 19 nt, Homo sapiens
  misc_RNA (1)...(19): siRNA sense strand
ccaaauuguggguggugca

SEQ ID NO: 2267527 - RNA, 19 nt, Homo sapiens
  misc_RNA (1)...(19): siRNA sense strand
aagacgauuuggagaaugu

SEQ ID NO: 2267528 - RNA, 19 nt, Homo sapiens
  misc_RNA (1)...(19): siRNA sense strand
guuuaaaagcaaaugccaa

SEQ ID NO: 2267529 - RNA, 19 nt, Homo sapiens
  misc_RNA (1)...(19): siRNA sense strand
gaaagaaaacaguucagaa

SEQ ID NO: 2267530 - RNA, 19 nt, Homo sapiens
  misc_RNA (1)...(19): siRNA sense strand
gagggauaauacaaaugaa

SEQ ID NO: 2267531 - RNA, 19 nt, Homo sapiens
  misc_RNA (1)...(19): siRNA sense strand
augaaugccaaaugggaca

SEQ ID NO: 2267532 - RNA, 19 nt, Homo sapiens
  misc_RNA (1)...(19): siRNA sense strand
ugugacuguucuuuggaua

SEQ ID NO: 2267533 - RNA, 19 nt, Homo sapiens
  misc_RNA (1)...(19): siRNA sense strand
guaggaacauuaucugcaa

SEQ ID NO: 2267534 - RNA, 19 nt, Homo sapiens
  misc_RNA (1)...(19): siRNA sense strand
gcauaaagaauguguucag

SEQ ID NO: 2267535 - RNA, 19 nt, Homo sapiens
  misc_RNA (1)...(19): siRNA sense strand
aaagaaagacacaugcaca

SEQ ID NO: 2267536 - RNA, 19 nt, Homo sapiens
  misc_RNA (1)...(19): siRNA sense strand
ggacuuaccuagaggagga

SEQ ID NO: 2267537 - RNA, 19 nt, Homo sapiens
  misc_RNA (1)...(19): siRNA sense strand
ugugcaaggagaugaggaa

SEQ ID NO: 2267538 - RNA, 19 nt, Homo sapiens
  misc_RNA (1)...(19): siRNA sense strand
cuuugaagaguuugugcaa

SEQ ID NO: 2267539 - RNA, 19 nt, Homo sapiens
  misc_RNA (1)...(19): siRNA sense strand
aggacgaccugcugagcga

SEQ ID NO: 2267540 - RNA, 19 nt, Homo sapiens
  misc_RNA (1)...(19): siRNA sense strand
aggaagugcugaggcggua

SEQ ID NO: 2267541 - RNA, 19 nt, Homo sapiens
  misc_RNA (1)...(19): siRNA sense strand
cugcugagcgacagugaga

SEQ ID NO: 2267542 - RNA, 19 nt, Homo sapiens
  misc_RNA (1)...(19): siRNA sense strand
uggcagaagauccggacca

SEQ ID NO: 2267543 - RNA, 19 nt, Homo sapiens
  misc_RNA (1)...(19): siRNA sense strand
agaaaaugcuggcggugga

SEQ ID NO: 2267544 - RNA, 19 nt, Homo sapiens
  misc_RNA (1)...(19): siRNA sense strand
ggaccuaccuggaggagga

SEQ ID NO: 2267545 - RNA, 19 nt, Homo sapiens
  misc_RNA (1)...(19): siRNA sense strand
acaagaaggaacaggccaa

SEQ ID NO: 2267546 - RNA, 19 nt, Homo sapiens
  misc_RNA (1)...(19): siRNA sense strand
agcaaaucauggaggaaga

SEQ ID NO: 2267547 - RNA, 19 nt, Homo sapiens
  misc_RNA (1)...(19): siRNA sense strand
cugcgaaagaucugaaaga

SEQ ID NO: 2267548 - RNA, 19 nt, Homo sapiens
  misc_RNA (1)...(19): siRNA sense strand
gcgaaagaucugaaagaac

SEQ ID NO: 2267549 - RNA, 19 nt, Homo sapiens
  misc_RNA (1)...(19): siRNA sense strand
aaaucauggaggaagauaa

SEQ ID NO: 2267550 - RNA, 19 nt, Homo sapiens
  misc_RNA (1)...(19): siRNA sense strand
cggaaguggcagcgagagu

SEQ ID NO: 2267551 - RNA, 19 nt, Homo sapiens
  misc_RNA (1)...(19): siRNA sense strand
agaagaugaucgaggugga

SEQ ID NO: 2267552 - RNA, 19 nt, Homo sapiens
  misc_RNA (1)...(19): siRNA sense strand
acgaagacucagaggagga

SEQ ID NO: 2267553 - RNA, 19 nt, Homo sapiens
  misc_RNA (1)...(19): siRNA sense strand
cuacaggaucagaggcuca

SEQ ID NO: 2267554 - RNA, 19 nt, Homo sapiens
  misc_RNA (1)...(19): siRNA sense strand
gcagaaaccuagagugagc

SEQ ID NO: 2267555 - RNA, 19 nt, Homo sapiens
  misc_RNA (1)...(19): siRNA sense strand
guaaggauggagaagggua

SEQ ID NO: 2267556 - RNA, 19 nt, Homo sapiens
  misc_RNA (1)...(19): siRNA sense strand
ucagaggggacuugggaaa

SEQ ID NO: 2267557 - RNA, 19 nt, Homo sapiens
  misc_RNA (1)...(19): siRNA sense strand
guuucugggcagugagaca

SEQ ID NO: 2267558 - RNA, 19 nt, Homo sapiens
  misc_RNA (1)...(19): siRNA sense strand
cugaagaagcacugugagu

SEQ ID NO: 2267559 - RNA, 19 nt, Homo sapiens
  misc_RNA (1)...(19): siRNA sense strand
cugaauaguagcagcggca

SEQ ID NO: 2267560 - RNA, 19 nt, Homo sapiens
  misc_RNA (1)...(19): siRNA sense strand
agcuauggaaauugacaaa

SEQ ID NO: 2267561 - RNA, 19 nt, Homo sapiens
  misc_RNA (1)...(19): siRNA sense strand
ggauccagcuggcaggaca

SEQ ID NO: 2267562 - RNA, 19 nt, Homo sapiens
  misc_RNA (1)...(19): siRNA sense strand
gcuacaaccagauggacga

SEQ ID NO: 2267563 - RNA, 19 nt, Homo sapiens
  misc_RNA (1)...(19): siRNA sense strand
ggaugaucgacuuugggaa

SEQ ID NO: 2267564 - RNA, 19 nt, Homo sapiens
  misc_RNA (1)...(19): siRNA sense strand
augaauagcgccaacgaga

SEQ ID NO: 2267565 - RNA, 19 nt, Homo sapiens
  misc_RNA (1)...(19): siRNA sense strand
ucgcaggugaagaaaggaa

SEQ ID NO: 2267566 - RNA, 19 nt, Homo sapiens
  misc_RNA (1)...(19): siRNA sense strand
ggaaccgggaggauggcua

SEQ ID NO: 2267567 - RNA, 19 nt, Homo sapiens
  misc_RNA (1)...(19): siRNA sense strand
uaaggauggagaaggguau

SEQ ID NO: 2267568 - RNA, 19 nt, Homo sapiens
  misc_RNA (1)...(19): siRNA sense strand
cuguugggacgcugcgaaa

SEQ ID NO: 2267569 - RNA, 19 nt, Homo sapiens
  misc_RNA (1)...(19): siRNA sense strand
cggaaggacauguaccaga

SEQ ID NO: 2267570 - RNA, 19 nt, Homo sapiens
  misc_RNA (1)...(19): siRNA sense strand
agcgaggaacggaggacaa

SEQ ID NO: 2267571 - RNA, 19 nt, Homo sapiens
  misc_RNA (1)...(19): siRNA sense strand
cagcuauggaaauugacaa

SEQ ID NO: 2267572 - RNA, 19 nt, Homo sapiens
  misc_RNA (1)...(19): siRNA sense strand
gcaaaaggccagaggagac

SEQ ID NO: 2267573 - RNA, 19 nt, Homo sapiens
  misc_RNA (1)...(19): siRNA sense strand
cgaaagaucugaaagaacc

SEQ ID NO: 2267574 - RNA, 19 nt, Homo sapiens
  misc_RNA (1)...(19): siRNA sense strand
gaauaguagcagcggcagu

SEQ ID NO: 2267575 - RNA, 19 nt, Homo sapiens
  misc_RNA (1)...(19): siRNA sense strand
gggaagauggggaaaggau

SEQ ID NO: 2267576 - RNA, 19 nt, Homo sapiens
  misc_RNA (1)...(19): siRNA sense strand
uggcagggcaccauggaga

SEQ ID NO: 2267577 - RNA, 19 nt, Homo sapiens
  misc_RNA (1)...(19): siRNA sense strand
gaucagaggcucagggucc

SEQ ID NO: 2267578 - RNA, 19 nt, Homo sapiens
  misc_RNA (1)...(19): siRNA sense strand
ccuucagagaguucacuaa

SEQ ID NO: 2267579 - RNA, 19 nt, Homo sapiens
  misc_RNA (1)...(19): siRNA sense strand
ccucuaagaagcuggacaa

SEQ ID NO: 2267580 - RNA, 19 nt, Homo sapiens
  misc_RNA (1)...(19): siRNA sense strand
gcuuguacgcaaugggaau

SEQ ID NO: 2267581 - RNA, 19 nt, Homo sapiens
  misc_RNA (1)...(19): siRNA sense strand
cauccugggccaugagaau

SEQ ID NO: 2267582 - RNA, 19 nt, Homo sapiens
  misc_RNA (1)...(19): siRNA sense strand
cgaugcaaucaaugggcua

SEQ ID NO: 2267583 - RNA, 19 nt, Homo sapiens
  misc_RNA (1)...(19): siRNA sense strand
uucaagaaccugcgagaau

SEQ ID NO: 2267584 - RNA, 19 nt, Homo sapiens
  misc_RNA (1)...(19): siRNA sense strand
aggcccagaaagagaagua

SEQ ID NO: 2267585 - RNA, 19 nt, Homo sapiens
  misc_RNA (1)...(19): siRNA sense strand
ggaaaucacuacauccuga

SEQ ID NO: 2267586 - RNA, 19 nt, Homo sapiens
  misc_RNA (1)...(19): siRNA sense strand
cucuaacaccugugagcua

SEQ ID NO: 2267587 - RNA, 19 nt, Homo sapiens
  misc_RNA (1)...(19): siRNA sense strand
ucaaccagcuuguacgcaa

SEQ ID NO: 2267588 - RNA, 19 nt, Homo sapiens
  misc_RNA (1)...(19): siRNA sense strand
ucauuguggagaaggguau

SEQ ID NO: 2267589 - RNA, 19 nt, Homo sapiens
  misc_RNA (1)...(19): siRNA sense strand
ugccaagcuguaugagaua

SEQ ID NO: 2267590 - RNA, 19 nt, Homo sapiens
  misc_RNA (1)...(19): siRNA sense strand
acuacauccugaauggcaa

SEQ ID NO: 2267591 - RNA, 19 nt, Homo sapiens
  misc_RNA (1)...(19): siRNA sense strand
cuaugaagcucaaagcgga

SEQ ID NO: 2267592 - RNA, 19 nt, Homo sapiens
  misc_RNA (1)...(19): siRNA sense strand
cugccaacauccugggcca

SEQ ID NO: 2267593 - RNA, 19 nt, Homo sapiens
  misc_RNA (1)...(19): siRNA sense strand
cugaagagaagaagauaaa

SEQ ID NO: 2267594 - RNA, 19 nt, Homo sapiens
  misc_RNA (1)...(19): siRNA sense strand
acaagaaggaugaggagaa

SEQ ID NO: 2267595 - RNA, 19 nt, Homo sapiens
  misc_RNA (1)...(19): siRNA sense strand
gcgauauauuccagaaaca

SEQ ID NO: 2267596 - RNA, 19 nt, Homo sapiens
  misc_RNA (1)...(19): siRNA sense strand
cgggaagaguggaacaauu

SEQ ID NO: 2267597 - RNA, 19 nt, Homo sapiens
  misc_RNA (1)...(19): siRNA sense strand
gcauuaacaagcaggacaa

SEQ ID NO: 2267598 - RNA, 19 nt, Homo sapiens
  misc_RNA (1)...(19): siRNA sense strand
ggaaccacgcucugggaaa

SEQ ID NO: 2267599 - RNA, 19 nt, Homo sapiens
  misc_RNA (1)...(19): siRNA sense strand
ugauugagaaagagagauu

SEQ ID NO: 2267600 - RNA, 19 nt, Homo sapiens
  misc_RNA (1)...(19): siRNA sense strand
cacagaagacggaggaaau

SEQ ID NO: 2267601 - RNA, 19 nt, Homo sapiens
  misc_RNA (1)...(19): siRNA sense strand
agaauaucaugguggaaga

SEQ ID NO: 2267602 - RNA, 19 nt, Homo sapiens
  misc_RNA (1)...(19): siRNA sense strand
ucugaagagaagaagauaa

SEQ ID NO: 2267603 - RNA, 19 nt, Homo sapiens
  misc_RNA (1)...(19): siRNA sense strand
aaaauaaacugaagcggaa

SEQ ID NO: 2267604 - RNA, 19 nt, Homo sapiens
  misc_RNA (1)...(19): siRNA sense strand
aagaaugcauugaacgaau

SEQ ID NO: 2267605 - RNA, 19 nt, Homo sapiens
  misc_RNA (1)...(19): siRNA sense strand
uuaacaagcaggacaacaa

SEQ ID NO: 2267606 - RNA, 19 nt, Homo sapiens
  misc_RNA (1)...(19): siRNA sense strand
ggaaaugguauuaagcuca

SEQ ID NO: 2267607 - RNA, 19 nt, Homo sapiens
  misc_RNA (1)...(19): siRNA sense strand
ccagaauguuuaaugcaau

SEQ ID NO: 2267608 - RNA, 19 nt, Homo sapiens
  misc_RNA (1)...(19): siRNA sense strand
auaaagacaagaaggauga

SEQ ID NO: 2267609 - RNA, 19 nt, Homo sapiens
  misc_RNA (1)...(19): siRNA sense strand
cagcagaggaacugugcau

SEQ ID NO: 2267610 - RNA, 19 nt, Homo sapiens
  misc_RNA (1)...(19): siRNA sense strand
gcugauugagaaagagaga

SEQ ID NO: 2267611 - RNA, 19 nt, Homo sapiens
  misc_RNA (1)...(19): siRNA sense strand
cugaaauauuugagacuuc

SEQ ID NO: 2267612 - RNA, 19 nt, Homo sapiens
  misc_RNA (1)...(19): siRNA sense strand
gagaagaagauaaaaguga

SEQ ID NO: 2267613 - RNA, 19 nt, Homo sapiens
  misc_RNA (1)...(19): siRNA sense strand
ggaaauucaaaguugccaa

SEQ ID NO: 2267614 - RNA, 19 nt, Homo sapiens
  misc_RNA (1)...(19): siRNA sense strand
uuaauaagcuugaagagca

SEQ ID NO: 2267615 - RNA, 19 nt, Homo sapiens
  misc_RNA (1)...(19): siRNA sense strand
agacggaggaaaugguauu

SEQ ID NO: 2267616 - RNA, 19 nt, Homo sapiens
  misc_RNA (1)...(19): siRNA sense strand
guacagaauacgccaucaa

SEQ ID NO: 2267617 - RNA, 19 nt, Homo sapiens
  misc_RNA (1)...(19): siRNA sense strand
gggaaucgacagugagugu

SEQ ID NO: 2267618 - RNA, 19 nt, Homo sapiens
  misc_RNA (1)...(19): siRNA sense strand
agacgcugauugagaaaga

SEQ ID NO: 2267619 - RNA, 19 nt, Homo sapiens
  misc_RNA (1)...(19): siRNA sense strand
gcauggaaccaacgacaau

SEQ ID NO: 2267620 - RNA, 19 nt, Homo sapiens
  misc_RNA (1)...(19): siRNA sense strand
uggaaauguguguacuaaa

SEQ ID NO: 2267621 - RNA, 19 nt, Homo sapiens
  misc_RNA (1)...(19): siRNA sense strand
gaacgagugucuagggaug

SEQ ID NO: 2267622 - RNA, 19 nt, Homo sapiens
  misc_RNA (1)...(19): siRNA sense strand
gguggaagaguuuguggaa

SEQ ID NO: 2267623 - RNA, 19 nt, Homo sapiens
  misc_RNA (1)...(19): siRNA sense strand
ugaauaaguccaucagaca

SEQ ID NO: 2267624 - RNA, 19 nt, Homo sapiens
  misc_RNA (1)...(19): siRNA sense strand
agaccgagcaggauggaca

SEQ ID NO: 2267625 - RNA, 19 nt, Homo sapiens
  misc_RNA (1)...(19): siRNA sense strand
gcaggauggacaugauauu

SEQ ID NO: 2267626 - RNA, 19 nt, Homo sapiens
  misc_RNA (1)...(19): siRNA sense strand
guacaaaggaaucugcaca

SEQ ID NO: 2267627 - RNA, 19 nt, Homo sapiens
  misc_RNA (1)...(19): siRNA sense strand
ucgggaagccuuaaggaau

SEQ ID NO: 2267628 - RNA, 19 nt, Homo sapiens
  misc_RNA (1)...(19): siRNA sense strand
agagcagaauccagauauu

SEQ ID NO: 2267629 - RNA, 19 nt, Homo sapiens
  misc_RNA (1)...(19): siRNA sense strand
caguggaggcauaaaccaa

SEQ ID NO: 2267630 - RNA, 19 nt, Homo sapiens
  misc_RNA (1)...(19): siRNA sense strand
cagccagcaugaugagaca

SEQ ID NO: 2267631 - RNA, 19 nt, Homo sapiens
  misc_RNA (1)...(19): siRNA sense strand
cuuccaaagaauaagaaca

SEQ ID NO: 2267632 - RNA, 19 nt, Homo sapiens
  misc_RNA (1)...(19): siRNA sense strand
augagaaaaugcugggaau

SEQ ID NO: 2267633 - RNA, 19 nt, Homo sapiens
  misc_RNA (1)...(19): siRNA sense strand
ggacaguaugauuugguga

SEQ ID NO: 2267634 - RNA, 19 nt, Homo sapiens
  misc_RNA (1)...(19): siRNA sense strand
ugggagaccucaugagcca

SEQ ID NO: 2267635 - RNA, 19 nt, Homo sapiens
  misc_RNA (1)...(19): siRNA sense strand
uaucaugguggaagaguuu

SEQ ID NO: 2267636 - RNA, 19 nt, Homo sapiens
  misc_RNA (1)...(19): siRNA sense strand
gcuacuuggaggauaaaga

SEQ ID NO: 2267637 - RNA, 19 nt, Homo sapiens
  misc_RNA (1)...(19): siRNA sense strand
gguaugaccccgaagacaa

SEQ ID NO: 2267638 - RNA, 19 nt, Homo sapiens
  misc_RNA (1)...(19): siRNA sense strand
cuauuuggguucucggcaa

SEQ ID NO: 2267639 - RNA, 19 nt, Homo sapiens
  misc_RNA (1)...(19): siRNA sense strand
cagaacugcccaaggacau

SEQ ID NO: 2267640 - RNA, 19 nt, Homo sapiens
  misc_RNA (1)...(19): siRNA sense strand
gugcugagguggagcugca

SEQ ID NO: 2267641 - RNA, 19 nt, Homo sapiens
  misc_RNA (1)...(19): siRNA sense strand
agauaaaagugauccucaa

SEQ ID NO: 2267642 - RNA, 19 nt, Homo sapiens
  misc_RNA (1)...(19): siRNA sense strand
aaauaaaccucaaacagca

SEQ ID NO: 2267643 - RNA, 19 nt, Homo sapiens
  misc_RNA (1)...(19): siRNA sense strand
acagaauacgccaucaaua

SEQ ID NO: 2267644 - RNA, 19 nt, Homo sapiens
  misc_RNA (1)...(19): siRNA sense strand
ccaugagccagcugaguuu

SEQ ID NO: 2267645 - RNA, 19 nt, Homo sapiens
  misc_RNA (1)...(19): siRNA sense strand
ccaucaugagagacauuaa

SEQ ID NO: 2267646 - RNA, 19 nt, Homo sapiens
  misc_RNA (1)...(19): siRNA sense strand
ucaagaacuuucagaucga

SEQ ID NO: 2267647 - RNA, 19 nt, Homo sapiens
  misc_RNA (1)...(19): siRNA sense strand
acaucagcuucaugcuaaa

SEQ ID NO: 2267648 - RNA, 19 nt, Homo sapiens
  misc_RNA (1)...(19): siRNA sense strand
cauggaaauguguguacua

SEQ ID NO: 2267649 - RNA, 19 nt, Homo sapiens
  misc_RNA (1)...(19): siRNA sense strand
gggauggacuauuuggguu

SEQ ID NO: 2267650 - RNA, 19 nt, Homo sapiens
  misc_RNA (1)...(19): siRNA sense strand
acaucagcuacaagcgaua

SEQ ID NO: 2267651 - RNA, 19 nt, Homo sapiens
  misc_RNA (1)...(19): siRNA sense strand
gggagaggcacgagaacac

SEQ ID NO: 2267652 - RNA, 19 nt, Homo sapiens
  misc_RNA (1)...(19): siRNA sense strand
uggaagaguuuguggaagg

SEQ ID NO: 2267653 - RNA, 19 nt, Homo sapiens
  misc_RNA (1)...(19): siRNA sense strand
caagacgcugauugagaaa

SEQ ID NO: 2267654 - RNA, 19 nt, Homo sapiens
  misc_RNA (1)...(19): siRNA sense strand
gugaacaccaagugaaaau

SEQ ID NO: 2267655 - RNA, 19 nt, Homo sapiens
  misc_RNA (1)...(19): siRNA sense strand
gaauuuaacaacaagacca

SEQ ID NO: 2267656 - RNA, 19 nt, Homo sapiens
  misc_RNA (1)...(19): siRNA sense strand
gcccagaagcaguucaaga

SEQ ID NO: 2267657 - RNA, 19 nt, Homo sapiens
  misc_RNA (1)...(19): siRNA sense strand
cugcugacuuacugugauu

SEQ ID NO: 2267658 - RNA, 19 nt, Homo sapiens
  misc_RNA (1)...(19): siRNA sense strand
aauucaaaguugccaaaca

SEQ ID NO: 2267659 - RNA, 19 nt, Homo sapiens
  misc_RNA (1)...(19): siRNA sense strand
aagacaagacgcugauuga

SEQ ID NO: 2267660 - RNA, 19 nt, Homo sapiens
  misc_RNA (1)...(19): siRNA sense strand
cagaugagcaggagggcuu

SEQ ID NO: 2267661 - RNA, 19 nt, Homo sapiens
  misc_RNA (1)...(19): siRNA sense strand
aaacagagcaugacccuga

SEQ ID NO: 2267662 - RNA, 19 nt, Homo sapiens
  misc_RNA (1)...(19): siRNA sense strand
cugcaaagauggaaacgac

SEQ ID NO: 2267663 - RNA, 19 nt, Homo sapiens
  misc_RNA (1)...(19): siRNA sense strand
ugauaauccaguccagcaa

SEQ ID NO: 2267664 - RNA, 19 nt, Homo sapiens
  misc_RNA (1)...(19): siRNA sense strand
ccacguagcugcaggcaca

SEQ ID NO: 2267665 - RNA, 19 nt, Homo sapiens
  misc_RNA (1)...(19): siRNA sense strand
acggcaaccaggagagcaa

SEQ ID NO: 2267666 - RNA, 19 nt, Homo sapiens
  misc_RNA (1)...(19): siRNA sense strand
cggccaugauugugaacca

SEQ ID NO: 2267667 - RNA, 19 nt, Homo sapiens
  misc_RNA (1)...(19): siRNA sense strand
ucaaugagcccuauggaga

SEQ ID NO: 2267668 - RNA, 19 nt, Homo sapiens
  misc_RNA (1)...(19): siRNA sense strand
ccaccaaccugcagcgacu

SEQ ID NO: 2267669 - RNA, 19 nt, Homo sapiens
  misc_RNA (1)...(19): siRNA sense strand
ugaugaaccugauggagca

SEQ ID NO: 2267670 - RNA, 19 nt, Homo sapiens
  misc_RNA (1)...(19): siRNA sense strand
ccaaacugcucaacgacga

SEQ ID NO: 2267671 - RNA, 19 nt, Homo sapiens
  misc_RNA (1)...(19): siRNA sense strand
acaccuacgacucggguau

SEQ ID NO: 2267672 - RNA, 19 nt, Homo sapiens
  misc_RNA (1)...(19): siRNA sense strand
gcaagggcaucauggagga

SEQ ID NO: 2267673 - RNA, 19 nt, Homo sapiens
  misc_RNA (1)...(19): siRNA sense strand
cagcaauaagccugccauu

SEQ ID NO: 2267674 - RNA, 19 nt, Homo sapiens
  misc_RNA (1)...(19): siRNA sense strand
ugcugaagauucuggugaa

SEQ ID NO: 2267675 - RNA, 19 nt, Homo sapiens
  misc_RNA (1)...(19): siRNA sense strand
uggagaugcacauggacau

SEQ ID NO: 2267676 - RNA, 19 nt, Homo sapiens
  misc_RNA (1)...(19): siRNA sense strand
caguacacgcucaagaaaa

SEQ ID NO: 2267677 - RNA, 19 nt, Homo sapiens
  misc_RNA (1)...(19): siRNA sense strand
ccacguagcugcaggcaca

SEQ ID NO: 2267678 - RNA, 19 nt, Homo sapiens
  misc_RNA (1)...(19): siRNA sense strand
acggcaaccaggagagcaa

SEQ ID NO: 2267679 - RNA, 19 nt, Homo sapiens
  misc_RNA (1)...(19): siRNA sense strand
cggccaugauugugaacca

SEQ ID NO: 2267680 - RNA, 19 nt, Homo sapiens
  misc_RNA (1)...(19): siRNA sense strand
ucaaugagcccuauggaga

SEQ ID NO: 2267681 - RNA, 19 nt, Homo sapiens
  misc_RNA (1)...(19): siRNA sense strand
ccaccaaccugcagcgacu

SEQ ID NO: 2267682 - RNA, 19 nt, Homo sapiens
  misc_RNA (1)...(19): siRNA sense strand
ugaugaaccugauggagca

SEQ ID NO: 2267683 - RNA, 19 nt, Homo sapiens
  misc_RNA (1)...(19): siRNA sense strand
ccaaacugcucaacgacga

SEQ ID NO: 2267684 - RNA, 19 nt, Homo sapiens
  misc_RNA (1)...(19): siRNA sense strand
acaccuacgacucggguau

SEQ ID NO: 2267685 - RNA, 19 nt, Homo sapiens
  misc_RNA (1)...(19): siRNA sense strand
gcaagggcaucauggagga

SEQ ID NO: 2267686 - RNA, 19 nt, Homo sapiens
  misc_RNA (1)...(19): siRNA sense strand
cagcaauaagccugccauu

SEQ ID NO: 2267687 - RNA, 19 nt, Homo sapiens
  misc_RNA (1)...(19): siRNA sense strand
ugcugaagauucuggugaa

SEQ ID NO: 2267688 - RNA, 19 nt, Homo sapiens
  misc_RNA (1)...(19): siRNA sense strand
uggagaugcacauggacau

SEQ ID NO: 2267689 - RNA, 19 nt, Homo sapiens
  misc_RNA (1)...(19): siRNA sense strand
caguacacgcucaagaaaa

SEQ ID NO: 2267690 - RNA, 19 nt, Homo sapiens
  misc_RNA (1)...(19): siRNA sense strand
aggagaagugucagggaaa

SEQ ID NO: 2267691 - RNA, 19 nt, Homo sapiens
  misc_RNA (1)...(19): siRNA sense strand
aggaggaagaggaggaaga

SEQ ID NO: 2267692 - RNA, 19 nt, Homo sapiens
  misc_RNA (1)...(19): siRNA sense strand
gaggagaagugucagggaa

SEQ ID NO: 2267693 - RNA, 19 nt, Homo sapiens
  misc_RNA (1)...(19): siRNA sense strand
gauaaaugugucaggccua

SEQ ID NO: 2267694 - RNA, 19 nt, Homo sapiens
  misc_RNA (1)...(19): siRNA sense strand
aggaagaugaggaggagga

SEQ ID NO: 2267695 - RNA, 19 nt, Homo sapiens
  misc_RNA (1)...(19): siRNA sense strand
augaggaggaggaggaaga

SEQ ID NO: 2267696 - RNA, 19 nt, Homo sapiens
  misc_RNA (1)...(19): siRNA sense strand
aggaagaggaggaagagga

SEQ ID NO: 2267697 - RNA, 19 nt, Homo sapiens
  misc_RNA (1)...(19): siRNA sense strand
ccaugacaacugugggcua

SEQ ID NO: 2267698 - RNA, 19 nt, Homo sapiens
  misc_RNA (1)...(19): siRNA sense strand
ccacagagagacugaaaau

SEQ ID NO: 2267699 - RNA, 19 nt, Homo sapiens
  misc_RNA (1)...(19): siRNA sense strand
gggacaagucagaguaucu

SEQ ID NO: 2267700 - RNA, 19 nt, Homo sapiens
  misc_RNA (1)...(19): siRNA sense strand
aggaggaagaugaggagga

SEQ ID NO: 2267701 - RNA, 19 nt, Homo sapiens
  misc_RNA (1)...(19): siRNA sense strand
aggaggaggaagaggagga

SEQ ID NO: 2267702 - RNA, 19 nt, Homo sapiens
  misc_RNA (1)...(19): siRNA sense strand
gugaagaugaccaugguga

SEQ ID NO: 2267703 - RNA, 19 nt, Homo sapiens
  misc_RNA (1)...(19): siRNA sense strand
aagaaauuucggagcucua

SEQ ID NO: 2267704 - RNA, 19 nt, Homo sapiens
  misc_RNA (1)...(19): siRNA sense strand
aagaugaggaggaggagga

SEQ ID NO: 2267705 - RNA, 19 nt, Homo sapiens
  misc_RNA (1)...(19): siRNA sense strand
gagaagauccugagggagc

SEQ ID NO: 2267706 - RNA, 19 nt, Homo sapiens
  misc_RNA (1)...(19): siRNA sense strand
acgagggcuuugugagaga

SEQ ID NO: 2267707 - RNA, 19 nt, Homo sapiens
  misc_RNA (1)...(19): siRNA sense strand
aggaggaagaggagggaag

SEQ ID NO: 2267708 - RNA, 19 nt, Homo sapiens
  misc_RNA (1)...(19): siRNA sense strand
cuuugugagagaagaggaa

SEQ ID NO: 2267709 - RNA, 19 nt, Homo sapiens
  misc_RNA (1)...(19): siRNA sense strand
agacugaaaaugaggaaca

SEQ ID NO: 2267710 - RNA, 19 nt, Homo sapiens
  misc_RNA (1)...(19): siRNA sense strand
cagagacuuuguugggaga

SEQ ID NO: 2267711 - RNA, 19 nt, Homo sapiens
  misc_RNA (1)...(19): siRNA sense strand
ccaguggcucugaggagaa

SEQ ID NO: 2267712 - RNA, 19 nt, Homo sapiens
  misc_RNA (1)...(19): siRNA sense strand
uugugagagaagaggaaga

SEQ ID NO: 2267713 - RNA, 19 nt, Homo sapiens
  misc_RNA (1)...(19): siRNA sense strand
agagauggaagaaggaguu

SEQ ID NO: 2267714 - RNA, 19 nt, Homo sapiens
  misc_RNA (1)...(19): siRNA sense strand
aaggaaucucugugugcaa

SEQ ID NO: 2267715 - RNA, 19 nt, Homo sapiens
  misc_RNA (1)...(19): siRNA sense strand
augcaaaggcuguggagac

SEQ ID NO: 2267716 - RNA, 19 nt, Homo sapiens
  misc_RNA (1)...(19): siRNA sense strand
acuuugacccuuugcgcaa

SEQ ID NO: 2267717 - RNA, 19 nt, Homo sapiens
  misc_RNA (1)...(19): siRNA sense strand
agucuguauuguaugguuu

SEQ ID NO: 2267718 - RNA, 19 nt, Homo sapiens
  misc_RNA (1)...(19): siRNA sense strand
aggaggaggaggaagagga

SEQ ID NO: 2267719 - RNA, 19 nt, Homo sapiens
  misc_RNA (1)...(19): siRNA sense strand
ccuacuacccauuuccaaa

SEQ ID NO: 2267720 - RNA, 19 nt, Homo sapiens
  misc_RNA (1)...(19): siRNA sense strand
uggaagaaggaguuaagga

SEQ ID NO: 2267721 - RNA, 19 nt, Homo sapiens
  misc_RNA (1)...(19): siRNA sense strand
gcucagggugcaacaguca

SEQ ID NO: 2267722 - RNA, 19 nt, Homo sapiens
  misc_RNA (1)...(19): siRNA sense strand
ccugaagaggccagucaau

SEQ ID NO: 2267723 - RNA, 19 nt, Homo sapiens
  misc_RNA (1)...(19): siRNA sense strand
aggugaaguucuaucaguu

SEQ ID NO: 2267724 - RNA, 19 nt, Homo sapiens
  misc_RNA (1)...(19): siRNA sense strand
gggcauagccauugugucc

SEQ ID NO: 2267725 - RNA, 19 nt, Homo sapiens
  misc_RNA (1)...(19): siRNA sense strand
ggaugaaccuacuacccau

SEQ ID NO: 2267726 - RNA, 19 nt, Homo sapiens
  misc_RNA (1)...(19): siRNA sense strand
ucauuaaagaagaggagaa

SEQ ID NO: 2267727 - RNA, 19 nt, Homo sapiens
  misc_RNA (1)...(19): siRNA sense strand
acgucaaggccaagagcaa

SEQ ID NO: 2267728 - RNA, 19 nt, Homo sapiens
  misc_RNA (1)...(19): siRNA sense strand
ccgaggacgaggaggaaga

SEQ ID NO: 2267729 - RNA, 19 nt, Homo sapiens
  misc_RNA (1)...(19): siRNA sense strand
acagaggaguccagcggaa

SEQ ID NO: 2267730 - RNA, 19 nt, Homo sapiens
  misc_RNA (1)...(19): siRNA sense strand
cuagagaaguguaacguca

SEQ ID NO: 2267731 - RNA, 19 nt, Homo sapiens
  misc_RNA (1)...(19): siRNA sense strand
gcaacgaguuccagcgcca

SEQ ID NO: 2267732 - RNA, 19 nt, Homo sapiens
  misc_RNA (1)...(19): siRNA sense strand
aguguaacgucaaggccaa

SEQ ID NO: 2267733 - RNA, 19 nt, Homo sapiens
  misc_RNA (1)...(19): siRNA sense strand
ucgcagaggcugacaacca

SEQ ID NO: 2267734 - RNA, 19 nt, Homo sapiens
  misc_RNA (1)...(19): siRNA sense strand
ccaagagcaacguggacuu

SEQ ID NO: 2267735 - RNA, 19 nt, Homo sapiens
  misc_RNA (1)...(19): siRNA sense strand
ggcugcagauccugggcaa

SEQ ID NO: 2267736 - RNA, 19 nt, Homo sapiens
  misc_RNA (1)...(19): siRNA sense strand
gcaccgaacuggcagagca

SEQ ID NO: 2267737 - RNA, 19 nt, Homo sapiens
  misc_RNA (1)...(19): siRNA sense strand
acgaggaggaagaaggcga

SEQ ID NO: 2267738 - RNA, 19 nt, Homo sapiens
  misc_RNA (1)...(19): siRNA sense strand
cagaaugggcagcaggcca

SEQ ID NO: 2267739 - RNA, 19 nt, Homo sapiens
  misc_RNA (1)...(19): siRNA sense strand
gggaaacggaucacgagga

SEQ ID NO: 2267740 - RNA, 19 nt, Homo sapiens
  misc_RNA (1)...(19): siRNA sense strand
aggaggaagaggaggauga

SEQ ID NO: 2267741 - RNA, 19 nt, Homo sapiens
  misc_RNA (1)...(19): siRNA sense strand
uggucgagguggaaacaau

SEQ ID NO: 2267742 - RNA, 19 nt, Homo sapiens
  misc_RNA (1)...(19): siRNA sense strand
agacggagcaggaggagca

SEQ ID NO: 2267743 - RNA, 19 nt, Homo sapiens
  misc_RNA (1)...(19): siRNA sense strand
uguagauggucgaggugga

SEQ ID NO: 2267744 - RNA, 19 nt, Homo sapiens
  misc_RNA (1)...(19): siRNA sense strand
gcaaccagccaguggagga

SEQ ID NO: 2267745 - RNA, 19 nt, Homo sapiens
  misc_RNA (1)...(19): siRNA sense strand
ggggaaagaucgugggcuc

SEQ ID NO: 2267746 - RNA, 19 nt, Homo sapiens
  misc_RNA (1)...(19): siRNA sense strand
ggcugcagauccugggcaa

SEQ ID NO: 2267747 - RNA, 19 nt, Homo sapiens
  misc_RNA (1)...(19): siRNA sense strand
aagaggaggaugaagacga

SEQ ID NO: 2267748 - RNA, 19 nt, Homo sapiens
  misc_RNA (1)...(19): siRNA sense strand
cagaaugggcagcaggcca

SEQ ID NO: 2267749 - RNA, 19 nt, Homo sapiens
  misc_RNA (1)...(19): siRNA sense strand
gcucauugcaucagcgaca

SEQ ID NO: 2267750 - RNA, 19 nt, Homo sapiens
  misc_RNA (1)...(19): siRNA sense strand
aggccauggcagagaggaa

SEQ ID NO: 2267751 - RNA, 19 nt, Homo sapiens
  misc_RNA (1)...(19): siRNA sense strand
agaugaaggaauuuagcaa

SEQ ID NO: 2267752 - RNA, 19 nt, Homo sapiens
  misc_RNA (1)...(19): siRNA sense strand
gcguggaggccgacaucaa

SEQ ID NO: 2267753 - RNA, 19 nt, Homo sapiens
  misc_RNA (1)...(19): siRNA sense strand
gcagugagauggagugcca

SEQ ID NO: 2267754 - RNA, 19 nt, Homo sapiens
  misc_RNA (1)...(19): siRNA sense strand
ccaagagugcagagcugaa

SEQ ID NO: 2267755 - RNA, 19 nt, Homo sapiens
  misc_RNA (1)...(19): siRNA sense strand
aggucaacguggagaugga

SEQ ID NO: 2267756 - RNA, 19 nt, Homo sapiens
  misc_RNA (1)...(19): siRNA sense strand
augaagaggagaugaagga

SEQ ID NO: 2267757 - RNA, 19 nt, Homo sapiens
  misc_RNA (1)...(19): siRNA sense strand
gagaagaucaccaugcaga

SEQ ID NO: 2267758 - RNA, 19 nt, Homo sapiens
  misc_RNA (1)...(19): siRNA sense strand
uggagaacacgguggcaga

SEQ ID NO: 2267759 - RNA, 19 nt, Homo sapiens
  misc_RNA (1)...(19): siRNA sense strand
agaagaaccaugaagagga

SEQ ID NO: 2267760 - RNA, 19 nt, Homo sapiens
  misc_RNA (1)...(19): siRNA sense strand
ggguuuugcugguggcuuu

SEQ ID NO: 2267761 - RNA, 19 nt, Homo sapiens
  misc_RNA (1)...(19): siRNA sense strand
accaugaagaggagaugaa

SEQ ID NO: 2267762 - RNA, 19 nt, Homo sapiens
  misc_RNA (1)...(19): siRNA sense strand
gggagcaguacgaggccau

SEQ ID NO: 2267763 - RNA, 19 nt, Homo sapiens
  misc_RNA (1)...(19): siRNA sense strand
aguacgaggccauggcaga

SEQ ID NO: 2267764 - RNA, 19 nt, Homo sapiens
  misc_RNA (1)...(19): siRNA sense strand
agacagagaucacggagcu

SEQ ID NO: 2267765 - RNA, 19 nt, Homo sapiens
  misc_RNA (1)...(19): siRNA sense strand
cagaccagcaagacagaga

SEQ ID NO: 2267766 - RNA, 19 nt, Homo sapiens
  misc_RNA (1)...(19): siRNA sense strand
agaagaucaccaugcagaa

SEQ ID NO: 2267767 - RNA, 19 nt, Homo sapiens
  misc_RNA (1)...(19): siRNA sense strand
uggcuuuggagguggcuau

SEQ ID NO: 2267768 - RNA, 19 nt, Homo sapiens
  misc_RNA (1)...(19): siRNA sense strand
ugaaugaagagcuagccua

SEQ ID NO: 2267769 - RNA, 19 nt, Homo sapiens
  misc_RNA (1)...(19): siRNA sense strand
aggccauggcagagaggaa

SEQ ID NO: 2267770 - RNA, 19 nt, Homo sapiens
  misc_RNA (1)...(19): siRNA sense strand
agaugaaggaauuuagcaa

SEQ ID NO: 2267771 - RNA, 19 nt, Homo sapiens
  misc_RNA (1)...(19): siRNA sense strand
gcguggaggccgacaucaa

SEQ ID NO: 2267772 - RNA, 19 nt, Homo sapiens
  misc_RNA (1)...(19): siRNA sense strand
gcagugagauggagugcca

SEQ ID NO: 2267773 - RNA, 19 nt, Homo sapiens
  misc_RNA (1)...(19): siRNA sense strand
ccaagagugcagagcugaa

SEQ ID NO: 2267774 - RNA, 19 nt, Homo sapiens
  misc_RNA (1)...(19): siRNA sense strand
aggucaacguggagaugga

SEQ ID NO: 2267775 - RNA, 19 nt, Homo sapiens
  misc_RNA (1)...(19): siRNA sense strand
augaagaggagaugaagga

SEQ ID NO: 2267776 - RNA, 19 nt, Homo sapiens
  misc_RNA (1)...(19): siRNA sense strand
gagaagaucaccaugcaga

SEQ ID NO: 2267777 - RNA, 19 nt, Homo sapiens
  misc_RNA (1)...(19): siRNA sense strand
uggagaacacgguggcaga

SEQ ID NO: 2267778 - RNA, 19 nt, Homo sapiens
  misc_RNA (1)...(19): siRNA sense strand
agaagaaccaugaagagga

SEQ ID NO: 2267779 - RNA, 19 nt, Homo sapiens
  misc_RNA (1)...(19): siRNA sense strand
ggguuuugcugguggcuuu

SEQ ID NO: 2267780 - RNA, 19 nt, Homo sapiens
  misc_RNA (1)...(19): siRNA sense strand
accaugaagaggagaugaa

SEQ ID NO: 2267781 - RNA, 19 nt, Homo sapiens
  misc_RNA (1)...(19): siRNA sense strand
gggagcaguacgaggccau

SEQ ID NO: 2267782 - RNA, 19 nt, Homo sapiens
  misc_RNA (1)...(19): siRNA sense strand
aguacgaggccauggcaga

SEQ ID NO: 2267783 - RNA, 19 nt, Homo sapiens
  misc_RNA (1)...(19): siRNA sense strand
agacagagaucacggagcu

SEQ ID NO: 2267784 - RNA, 19 nt, Homo sapiens
  misc_RNA (1)...(19): siRNA sense strand
cagaccagcaagacagaga

SEQ ID NO: 2267785 - RNA, 19 nt, Homo sapiens
  misc_RNA (1)...(19): siRNA sense strand
agaagaucaccaugcagaa

SEQ ID NO: 2267786 - RNA, 19 nt, Homo sapiens
  misc_RNA (1)...(19): siRNA sense strand
uggcuuuggagguggcuau

SEQ ID NO: 2267787 - RNA, 19 nt, Homo sapiens
  misc_RNA (1)...(19): siRNA sense strand
ugaaugaagagcuagccua

SEQ ID NO: 2267788 - RNA, 19 nt, Homo sapiens
  misc_RNA (1)...(19): siRNA sense strand
caucaauguagaagaguca

SEQ ID NO: 2267789 - RNA, 19 nt, Homo sapiens
  misc_RNA (1)...(19): siRNA sense strand
aggccauggcggagaagaa

SEQ ID NO: 2267790 - RNA, 19 nt, Homo sapiens
  misc_RNA (1)...(19): siRNA sense strand
gaugcgagauggaggcuca

SEQ ID NO: 2267791 - RNA, 19 nt, Homo sapiens
  misc_RNA (1)...(19): siRNA sense strand
gggucauccuggagaucga

SEQ ID NO: 2267792 - RNA, 19 nt, Homo sapiens
  misc_RNA (1)...(19): siRNA sense strand
gaagaggagaugaaggagu

SEQ ID NO: 2267793 - RNA, 19 nt, Homo sapiens
  misc_RNA (1)...(19): siRNA sense strand
aggucaauguggagaugga

SEQ ID NO: 2267794 - RNA, 19 nt, Homo sapiens
  misc_RNA (1)...(19): siRNA sense strand
agauggaggcucagaacca

SEQ ID NO: 2267795 - RNA, 19 nt, Homo sapiens
  misc_RNA (1)...(19): siRNA sense strand
agacacggcuggagcagga

SEQ ID NO: 2267796 - RNA, 19 nt, Homo sapiens
  misc_RNA (1)...(19): siRNA sense strand
agaagaaccacgaagagga

SEQ ID NO: 2267797 - RNA, 19 nt, Homo sapiens
  misc_RNA (1)...(19): siRNA sense strand
ggguuuuggugguggcuuu

SEQ ID NO: 2267798 - RNA, 19 nt, Homo sapiens
  misc_RNA (1)...(19): siRNA sense strand
aggccugguucuucagcaa

SEQ ID NO: 2267799 - RNA, 19 nt, Homo sapiens
  misc_RNA (1)...(19): siRNA sense strand
agggucaggaggaggauau

SEQ ID NO: 2267800 - RNA, 19 nt, Homo sapiens
  misc_RNA (1)...(19): siRNA sense strand
gggagcaguacgaggccau

SEQ ID NO: 2267801 - RNA, 19 nt, Homo sapiens
  misc_RNA (1)...(19): siRNA sense strand
uggcauuggcaucagggaa

SEQ ID NO: 2267802 - RNA, 19 nt, Homo sapiens
  misc_RNA (1)...(19): siRNA sense strand
agaucgagggccugaauga

SEQ ID NO: 2267803 - RNA, 19 nt, Homo sapiens
  misc_RNA (1)...(19): siRNA sense strand
cucagaaccaggaguacaa

SEQ ID NO: 2267804 - RNA, 19 nt, Homo sapiens
  misc_RNA (1)...(19): siRNA sense strand
gggacaagaucauggccac

SEQ ID NO: 2267805 - RNA, 19 nt, Homo sapiens
  misc_RNA (1)...(19): siRNA sense strand
gcacgaugcaggagcugga

SEQ ID NO: 2267806 - RNA, 19 nt, Homo sapiens
  misc_RNA (1)...(19): siRNA sense strand
acucacuggccgagacaga

SEQ ID NO: 2267807 - RNA, 19 nt, Homo sapiens
  misc_RNA (1)...(19): siRNA sense strand
gcggacgacuucaggcuca

SEQ ID NO: 2267808 - RNA, 19 nt, Homo sapiens
  misc_RNA (1)...(19): siRNA sense strand
aggcucagaaccaggagua

SEQ ID NO: 2267809 - RNA, 19 nt, Homo sapiens
  misc_RNA (1)...(19): siRNA sense strand
uggcuuuggugguggcgau

SEQ ID NO: 2267810 - RNA, 19 nt, Homo sapiens
  misc_RNA (1)...(19): siRNA sense strand
cagaaaugauccagaccag

SEQ ID NO: 2267811 - RNA, 19 nt, Homo sapiens
  misc_RNA (1)...(19): siRNA sense strand
ugaaugaggagcuagccua

SEQ ID NO: 2267812 - RNA, 19 nt, Homo sapiens
  misc_RNA (1)...(19): siRNA sense strand
accacgaagaggagaugaa

SEQ ID NO: 2267813 - RNA, 19 nt, Homo sapiens
  misc_RNA (1)...(19): siRNA sense strand
cagaccagcaagacggaga

SEQ ID NO: 2267814 - RNA, 19 nt, Homo sapiens
  misc_RNA (1)...(19): siRNA sense strand
gcaaacugcuggagggcga

SEQ ID NO: 2267815 - RNA, 19 nt, Homo sapiens
  misc_RNA (1)...(19): siRNA sense strand
aguaugaagaggagaucaa

SEQ ID NO: 2267816 - RNA, 19 nt, Homo sapiens
  misc_RNA (1)...(19): siRNA sense strand
ggagcaaggcugaggcuga

SEQ ID NO: 2267817 - RNA, 19 nt, Homo sapiens
  misc_RNA (1)...(19): siRNA sense strand
gugaaauugcagagcucaa

SEQ ID NO: 2267818 - RNA, 19 nt, Homo sapiens
  misc_RNA (1)...(19): siRNA sense strand
aggacagcguggaggacuu

SEQ ID NO: 2267819 - RNA, 19 nt, Homo sapiens
  misc_RNA (1)...(19): siRNA sense strand
cuaaguaugaagaggagau

SEQ ID NO: 2267820 - RNA, 19 nt, Homo sapiens
  misc_RNA (1)...(19): siRNA sense strand
augaagaggagaucaacaa

SEQ ID NO: 2267821 - RNA, 19 nt, Homo sapiens
  misc_RNA (1)...(19): siRNA sense strand
aggccaagguggacagucu

SEQ ID NO: 2267822 - RNA, 19 nt, Homo sapiens
  misc_RNA (1)...(19): siRNA sense strand
aggaaguggcuccggguuu

SEQ ID NO: 2267823 - RNA, 19 nt, Homo sapiens
  misc_RNA (1)...(19): siRNA sense strand
ggugcaguucuuagagcaa

SEQ ID NO: 2267824 - RNA, 19 nt, Homo sapiens
  misc_RNA (1)...(19): siRNA sense strand
agaauaagguccuggagac

SEQ ID NO: 2267825 - RNA, 19 nt, Homo sapiens
  misc_RNA (1)...(19): siRNA sense strand
cagaauaagguccuggaga

SEQ ID NO: 2267826 - RNA, 19 nt, Homo sapiens
  misc_RNA (1)...(19): siRNA sense strand
agacuaaguaugaagagga

SEQ ID NO: 2267827 - RNA, 19 nt, Homo sapiens
  misc_RNA (1)...(19): siRNA sense strand
gagugaaauugcagagcuc

SEQ ID NO: 2267828 - RNA, 19 nt, Homo sapiens
  misc_RNA (1)...(19): siRNA sense strand
agcuagauaccuugggcaa

SEQ ID NO: 2267829 - RNA, 19 nt, Homo sapiens
  misc_RNA (1)...(19): siRNA sense strand
acgcacagcagccgagaau

SEQ ID NO: 2267830 - RNA, 19 nt, Homo sapiens
  misc_RNA (1)...(19): siRNA sense strand
uggccugaguaguggcuuu

SEQ ID NO: 2267831 - RNA, 19 nt, Homo sapiens
  misc_RNA (1)...(19): siRNA sense strand
cugaagaccaugcaggaca

SEQ ID NO: 2267832 - RNA, 19 nt, Homo sapiens
  misc_RNA (1)...(19): siRNA sense strand
gucuuaaugacgagaucaa

SEQ ID NO: 2267833 - RNA, 19 nt, Homo sapiens
  misc_RNA (1)...(19): siRNA sense strand
agagcagcgaggugagaau

SEQ ID NO: 2267834 - RNA, 19 nt, Homo sapiens
  misc_RNA (1)...(19): siRNA sense strand
gagauugcccagaggagca

SEQ ID NO: 2267835 - RNA, 19 nt, Homo sapiens
  misc_RNA (1)...(19): siRNA sense strand
agauugacccugagaucca

SEQ ID NO: 2267836 - RNA, 19 nt, Homo sapiens
  misc_RNA (1)...(19): siRNA sense strand
agggcgaggaguacagaau

SEQ ID NO: 2267837 - RNA, 19 nt, Homo sapiens
  misc_RNA (1)...(19): siRNA sense strand
gacuagaggaugugagcca

SEQ ID NO: 2267838 - RNA, 19 nt, Homo sapiens
  misc_RNA (1)...(19): siRNA sense strand
agauagaggagcuggagca

SEQ ID NO: 2267839 - RNA, 19 nt, Homo sapiens
  misc_RNA (1)...(19): siRNA sense strand
ggagaggcuucuuggagca

SEQ ID NO: 2267840 - RNA, 19 nt, Homo sapiens
  misc_RNA (1)...(19): siRNA sense strand
gaccuuggcuggaggcaca

SEQ ID NO: 2267841 - RNA, 19 nt, Homo sapiens
  misc_RNA (1)...(19): siRNA sense strand
gcaagauagaggagcugga

SEQ ID NO: 2267842 - RNA, 19 nt, Homo sapiens
  misc_RNA (1)...(19): siRNA sense strand
guguggagcucucuggaca

SEQ ID NO: 2267843 - RNA, 19 nt, Homo sapiens
  misc_RNA (1)...(19): siRNA sense strand
agagcaagauagaggagcu

SEQ ID NO: 2267844 - RNA, 19 nt, Homo sapiens
  misc_RNA (1)...(19): siRNA sense strand
aggcucaguuccugggcuu

SEQ ID NO: 2267845 - RNA, 19 nt, Homo sapiens
  misc_RNA (1)...(19): siRNA sense strand
caucacaaggagagggaaa

SEQ ID NO: 2267846 - RNA, 19 nt, Homo sapiens
  misc_RNA (1)...(19): siRNA sense strand
gcccaugauaugagggaua

SEQ ID NO: 2267847 - RNA, 19 nt, Homo sapiens
  misc_RNA (1)...(19): siRNA sense strand
agauugaaagggugggaaa

SEQ ID NO: 2267848 - RNA, 19 nt, Homo sapiens
  misc_RNA (1)...(19): siRNA sense strand
gauuagaagccaggagaaa

SEQ ID NO: 2267849 - RNA, 19 nt, Homo sapiens
  misc_RNA (1)...(19): siRNA sense strand
guuuaauguuggucacaaa

SEQ ID NO: 2267850 - RNA, 19 nt, Homo sapiens
  misc_RNA (1)...(19): siRNA sense strand
ggaaagagugagggaacaa

SEQ ID NO: 2267851 - RNA, 19 nt, Homo sapiens
  misc_RNA (1)...(19): siRNA sense strand
cuuugaagauugugaugaa

SEQ ID NO: 2267852 - RNA, 19 nt, Homo sapiens
  misc_RNA (1)...(19): siRNA sense strand
ugucugacguagaggaauu

SEQ ID NO: 2267853 - RNA, 19 nt, Homo sapiens
  misc_RNA (1)...(19): siRNA sense strand
gagcauauuucaauggaca

SEQ ID NO: 2267854 - RNA, 19 nt, Homo sapiens
  misc_RNA (1)...(19): siRNA sense strand
gcuaaugaauugagcagga

SEQ ID NO: 2267855 - RNA, 19 nt, Homo sapiens
  misc_RNA (1)...(19): siRNA sense strand
uuagaagccaggagaaaua

SEQ ID NO: 2267856 - RNA, 19 nt, Homo sapiens
  misc_RNA (1)...(19): siRNA sense strand
cuaucaauauggaggaaca

SEQ ID NO: 2267857 - RNA, 19 nt, Homo sapiens
  misc_RNA (1)...(19): siRNA sense strand
aauaauggcaucagagauu

SEQ ID NO: 2267858 - RNA, 19 nt, Homo sapiens
  misc_RNA (1)...(19): siRNA sense strand
aaauggaaguggugaacau

SEQ ID NO: 2267859 - RNA, 19 nt, Homo sapiens
  misc_RNA (1)...(19): siRNA sense strand
gccuaaagcaagucagaau

SEQ ID NO: 2267860 - RNA, 19 nt, Homo sapiens
  misc_RNA (1)...(19): siRNA sense strand
ggcagauggcacagaauua

SEQ ID NO: 2267861 - RNA, 19 nt, Homo sapiens
  misc_RNA (1)...(19): siRNA sense strand
gcugagaacacgaugaaaa

SEQ ID NO: 2267862 - RNA, 19 nt, Homo sapiens
  misc_RNA (1)...(19): siRNA sense strand
uggaaaugcgcaaugguua

SEQ ID NO: 2267863 - RNA, 19 nt, Homo sapiens
  misc_RNA (1)...(19): siRNA sense strand
cggaauacuccaagaaacu

SEQ ID NO: 2267864 - RNA, 19 nt, Homo sapiens
  misc_RNA (1)...(19): siRNA sense strand
ggucauagugaaagucaau

SEQ ID NO: 2267865 - RNA, 19 nt, Homo sapiens
  misc_RNA (1)...(19): siRNA sense strand
uggaagcaccuguaagaaa

SEQ ID NO: 2267866 - RNA, 19 nt, Homo sapiens
  misc_RNA (1)...(19): siRNA sense strand
ggucaauggaaguauguuu

SEQ ID NO: 2267867 - RNA, 19 nt, Homo sapiens
  misc_RNA (1)...(19): siRNA sense strand
ucauggauguaaagggaau

SEQ ID NO: 2267868 - RNA, 19 nt, Homo sapiens
  misc_RNA (1)...(19): siRNA sense strand
acuacaagcagcagagaga

SEQ ID NO: 2267869 - RNA, 19 nt, Homo sapiens
  misc_RNA (1)...(19): siRNA sense strand
cuauuaugcuucaggguca

SEQ ID NO: 2267870 - RNA, 19 nt, Homo sapiens
  misc_RNA (1)...(19): siRNA sense strand
caacuuguucagaaggaaa

SEQ ID NO: 2267871 - RNA, 19 nt, Homo sapiens
  misc_RNA (1)...(19): siRNA sense strand
gcagcgggaccaugagaaa

SEQ ID NO: 2267872 - RNA, 19 nt, Homo sapiens
  misc_RNA (1)...(19): siRNA sense strand
ggauguaaagggaaucaaa

SEQ ID NO: 2267873 - RNA, 19 nt, Homo sapiens
  misc_RNA (1)...(19): siRNA sense strand
uggacaggucauagugaaa

SEQ ID NO: 2267874 - RNA, 19 nt, Homo sapiens
  misc_RNA (1)...(19): siRNA sense strand
agaagaugcuugaagagau

SEQ ID NO: 2267875 - RNA, 19 nt, Homo sapiens
  misc_RNA (1)...(19): siRNA sense strand
gaauccuaccaaagggaaa

SEQ ID NO: 2267876 - RNA, 19 nt, Homo sapiens
  misc_RNA (1)...(19): siRNA sense strand
agacagaaacccugggagu

SEQ ID NO: 2267877 - RNA, 19 nt, Homo sapiens
  misc_RNA (1)...(19): siRNA sense strand
caugagaaacaacaggaaa

SEQ ID NO: 2267878 - RNA, 19 nt, Homo sapiens
  misc_RNA (1)...(19): siRNA sense strand
aaagaaugcgucagggauu

SEQ ID NO: 2267879 - RNA, 19 nt, Homo sapiens
  misc_RNA (1)...(19): siRNA sense strand
auagagauguggagguuga

SEQ ID NO: 2267880 - RNA, 19 nt, Homo sapiens
  misc_RNA (1)...(19): siRNA sense strand
ccggagaaugcuuggaaga

SEQ ID NO: 2267881 - RNA, 19 nt, Homo sapiens
  misc_RNA (1)...(19): siRNA sense strand
caggaaagagugagggaac

SEQ ID NO: 2267882 - RNA, 19 nt, Homo sapiens
  misc_RNA (1)...(19): siRNA sense strand
uggcacagaauuacaguua

SEQ ID NO: 2267883 - RNA, 19 nt, Homo sapiens
  misc_RNA (1)...(19): siRNA sense strand
caacaagaagcuaaugaau

SEQ ID NO: 2267884 - RNA, 19 nt, Homo sapiens
  misc_RNA (1)...(19): siRNA sense strand
gcaucaaaugucuaugaaa

SEQ ID NO: 2267885 - RNA, 19 nt, Homo sapiens
  misc_RNA (1)...(19): siRNA sense strand
ugacauagaaguucgaaca

SEQ ID NO: 2267886 - RNA, 19 nt, Homo sapiens
  misc_RNA (1)...(19): siRNA sense strand
ggaaaauagaacagacaca

SEQ ID NO: 2267887 - RNA, 19 nt, Homo sapiens
  misc_RNA (1)...(19): siRNA sense strand
cagaucaagaagagaauga

SEQ ID NO: 2267888 - RNA, 19 nt, Homo sapiens
  misc_RNA (1)...(19): siRNA sense strand
accaauacgcccuaagaaa

SEQ ID NO: 2267889 - RNA, 19 nt, Homo sapiens
  misc_RNA (1)...(19): siRNA sense strand
ccuaaagcaagucagaaua

SEQ ID NO: 2267890 - RNA, 19 nt, Homo sapiens
  misc_RNA (1)...(19): siRNA sense strand
gcccuaagaaagauacaaa

SEQ ID NO: 2267891 - RNA, 19 nt, Homo sapiens
  misc_RNA (1)...(19): siRNA sense strand
cauaaagaugaaagugaga

SEQ ID NO: 2267892 - RNA, 19 nt, Homo sapiens
  misc_RNA (1)...(19): siRNA sense strand
gugaugaagcaguggcuga

SEQ ID NO: 2267893 - RNA, 19 nt, Homo sapiens
  misc_RNA (1)...(19): siRNA sense strand
cguuaaagaaagcucaaau

SEQ ID NO: 2267894 - RNA, 19 nt, Homo sapiens
  misc_RNA (1)...(19): siRNA sense strand
cuagggaugcaguaagaaa

SEQ ID NO: 2267895 - RNA, 19 nt, Homo sapiens
  misc_RNA (1)...(19): siRNA sense strand
gaggaugcaugaagggcuu

SEQ ID NO: 2267896 - RNA, 19 nt, Homo sapiens
  misc_RNA (1)...(19): siRNA sense strand
caguagauaagcaguacaa

SEQ ID NO: 2267897 - RNA, 19 nt, Homo sapiens
  misc_RNA (1)...(19): siRNA sense strand
auguggagguugaagauuu

SEQ ID NO: 2267898 - RNA, 19 nt, Homo sapiens
  misc_RNA (1)...(19): siRNA sense strand
gauuagaagccgucaacca

SEQ ID NO: 2267899 - RNA, 19 nt, Homo sapiens
  misc_RNA (1)...(19): siRNA sense strand
aggaaagagugagggaaca

SEQ ID NO: 2267900 - RNA, 19 nt, Homo sapiens
  misc_RNA (1)...(19): siRNA sense strand
ccaaugaaacagcagaauu

SEQ ID NO: 2267901 - RNA, 19 nt, Homo sapiens
  misc_RNA (1)...(19): siRNA sense strand
cgucagggauuuaugcaga

SEQ ID NO: 2267902 - RNA, 19 nt, Homo sapiens
  misc_RNA (1)...(19): siRNA sense strand
gagcaauagagcacgccua

SEQ ID NO: 2267903 - RNA, 19 nt, Homo sapiens
  misc_RNA (1)...(19): siRNA sense strand
uagugaagccaaugaaaca

SEQ ID NO: 2267904 - RNA, 19 nt, Homo sapiens
  misc_RNA (1)...(19): siRNA sense strand
gucuauaauuugggaacua

SEQ ID NO: 2267905 - RNA, 19 nt, Homo sapiens
  misc_RNA (1)...(19): siRNA sense strand
cauagaaguucgaacacca

SEQ ID NO: 2267906 - RNA, 19 nt, Homo sapiens
  misc_RNA (1)...(19): siRNA sense strand
agucaguagauaagcagua

SEQ ID NO: 2267907 - RNA, 19 nt, Homo sapiens
  misc_RNA (1)...(19): siRNA sense strand
aaaugugacugcaguggaa

SEQ ID NO: 2267908 - RNA, 19 nt, Homo sapiens
  misc_RNA (1)...(19): siRNA sense strand
caaaauugucagaaagaga

SEQ ID NO: 2267909 - RNA, 19 nt, Homo sapiens
  misc_RNA (1)...(19): siRNA sense strand
uggagcagcuggaugacua

SEQ ID NO: 2267910 - RNA, 19 nt, Homo sapiens
  misc_RNA (1)...(19): siRNA sense strand
agaaacaacaggaaagagu

SEQ ID NO: 2267911 - RNA, 19 nt, Homo sapiens
  misc_RNA (1)...(19): siRNA sense strand
augucaagagcauggauaa

SEQ ID NO: 2267912 - RNA, 19 nt, Homo sapiens
  misc_RNA (1)...(19): siRNA sense strand
uuacuggagcagacagaaa

SEQ ID NO: 2267913 - RNA, 19 nt, Homo sapiens
  misc_RNA (1)...(19): siRNA sense strand
uccaacagcccuagagcaa

SEQ ID NO: 2267914 - RNA, 19 nt, Homo sapiens
  misc_RNA (1)...(19): siRNA sense strand
ucuccgaguccuagaagaa

SEQ ID NO: 2267915 - RNA, 19 nt, Homo sapiens
  misc_RNA (1)...(19): siRNA sense strand
auacgugguucuagaugaa

SEQ ID NO: 2267916 - RNA, 19 nt, Homo sapiens
  misc_RNA (1)...(19): siRNA sense strand
cagcagaagcguugugaaa

SEQ ID NO: 2267917 - RNA, 19 nt, Homo sapiens
  misc_RNA (1)...(19): siRNA sense strand
cgaaaugaccuguggaaca

SEQ ID NO: 2267918 - RNA, 19 nt, Homo sapiens
  misc_RNA (1)...(19): siRNA sense strand
uggaagaacuuaagcggaa

SEQ ID NO: 2267919 - RNA, 19 nt, Homo sapiens
  misc_RNA (1)...(19): siRNA sense strand
augaagaaguggaaggaau

SEQ ID NO: 2267920 - RNA, 19 nt, Homo sapiens
  misc_RNA (1)...(19): siRNA sense strand
ggaaagucagcgagauaaa

SEQ ID NO: 2267921 - RNA, 19 nt, Homo sapiens
  misc_RNA (1)...(19): siRNA sense strand
ggaacaaacuacacgguga

SEQ ID NO: 2267922 - RNA, 19 nt, Homo sapiens
  misc_RNA (1)...(19): siRNA sense strand
gcuaaaagagcaagcaaaa

SEQ ID NO: 2267923 - RNA, 19 nt, Homo sapiens
  misc_RNA (1)...(19): siRNA sense strand
cugcauacuuugggagaua

SEQ ID NO: 2267924 - RNA, 19 nt, Homo sapiens
  misc_RNA (1)...(19): siRNA sense strand
aauuaaauguggaaggaga

SEQ ID NO: 2267925 - RNA, 19 nt, Homo sapiens
  misc_RNA (1)...(19): siRNA sense strand
gcuacaaaaugaagcaaaa

SEQ ID NO: 2267926 - RNA, 19 nt, Homo sapiens
  misc_RNA (1)...(19): siRNA sense strand
gcacagaagcuuucgguga

SEQ ID NO: 2267927 - RNA, 19 nt, Homo sapiens
  misc_RNA (1)...(19): siRNA sense strand
uagcaagacuggaaggaga

SEQ ID NO: 2267928 - RNA, 19 nt, Homo sapiens
  misc_RNA (1)...(19): siRNA sense strand
cugaaaaugguguggaaaa

SEQ ID NO: 2267929 - RNA, 19 nt, Homo sapiens
  misc_RNA (1)...(19): siRNA sense strand
cuuaagauuugguggcaau

SEQ ID NO: 2267930 - RNA, 19 nt, Homo sapiens
  misc_RNA (1)...(19): siRNA sense strand
aagcagagaaacugauuaa

SEQ ID NO: 2267931 - RNA, 19 nt, Homo sapiens
  misc_RNA (1)...(19): siRNA sense strand
gugcagaagauguuaagaa

SEQ ID NO: 2267932 - RNA, 19 nt, Homo sapiens
  misc_RNA (1)...(19): siRNA sense strand
guauauacugugaagcaaa

SEQ ID NO: 2267933 - RNA, 19 nt, Homo sapiens
  misc_RNA (1)...(19): siRNA sense strand
gaguagaagacgugaugau

SEQ ID NO: 2267934 - RNA, 19 nt, Homo sapiens
  misc_RNA (1)...(19): siRNA sense strand
caugagagacagaguagaa

SEQ ID NO: 2267935 - RNA, 19 nt, Homo sapiens
  misc_RNA (1)...(19): siRNA sense strand
aggauggaaaucagagaaa

SEQ ID NO: 2267936 - RNA, 19 nt, Homo sapiens
  misc_RNA (1)...(19): siRNA sense strand
ucagcgaguuagagaggaa

SEQ ID NO: 2267937 - RNA, 19 nt, Homo sapiens
  misc_RNA (1)...(19): siRNA sense strand
cuuagaagauaaagcucaa

SEQ ID NO: 2267938 - RNA, 19 nt, Homo sapiens
  misc_RNA (1)...(19): siRNA sense strand
acaaaugcuaccaaagaaa

SEQ ID NO: 2267939 - RNA, 19 nt, Homo sapiens
  misc_RNA (1)...(19): siRNA sense strand
cugacgaaggagagaggaa

SEQ ID NO: 2267940 - RNA, 19 nt, Homo sapiens
  misc_RNA (1)...(19): siRNA sense strand
cuuugaggaagcagagaaa

SEQ ID NO: 2267941 - RNA, 19 nt, Homo sapiens
  misc_RNA (1)...(19): siRNA sense strand
ggaagaacuuaagcggaaa

SEQ ID NO: 2267942 - RNA, 19 nt, Homo sapiens
  misc_RNA (1)...(19): siRNA sense strand
cugaaggagaggugauauu

SEQ ID NO: 2267943 - RNA, 19 nt, Homo sapiens
  misc_RNA (1)...(19): siRNA sense strand
gcuacaaagccuagaccuu

SEQ ID NO: 2267944 - RNA, 19 nt, Homo sapiens
  misc_RNA (1)...(19): siRNA sense strand
gguuguaaaucuugugcuu

SEQ ID NO: 2267945 - RNA, 19 nt, Homo sapiens
  misc_RNA (1)...(19): siRNA sense strand
ggaauguggaagaacuuaa

SEQ ID NO: 2267946 - RNA, 19 nt, Homo sapiens
  misc_RNA (1)...(19): siRNA sense strand
ggcucaaguagaagugaaa

SEQ ID NO: 2267947 - RNA, 19 nt, Homo sapiens
  misc_RNA (1)...(19): siRNA sense strand
acacagauuccuggagaaa

SEQ ID NO: 2267948 - RNA, 19 nt, Homo sapiens
  misc_RNA (1)...(19): siRNA sense strand
ggaauuugugacagcuaua

SEQ ID NO: 2267949 - RNA, 19 nt, Homo sapiens
  misc_RNA (1)...(19): siRNA sense strand
uggacucgguggagaggaa

SEQ ID NO: 2267950 - RNA, 19 nt, Homo sapiens
  misc_RNA (1)...(19): siRNA sense strand
agagaaggcaauuaaacaa

SEQ ID NO: 2267951 - RNA, 19 nt, Homo sapiens
  misc_RNA (1)...(19): siRNA sense strand
ugauuuaagcagugaagau

SEQ ID NO: 2267952 - RNA, 19 nt, Homo sapiens
  misc_RNA (1)...(19): siRNA sense strand
agaauuagcaagacuggaa

SEQ ID NO: 2267953 - RNA, 19 nt, Homo sapiens
  misc_RNA (1)...(19): siRNA sense strand
cggcaggacugucgaaagu

SEQ ID NO: 2267954 - RNA, 19 nt, Homo sapiens
  misc_RNA (1)...(19): siRNA sense strand
agauauacgugaacgaguu

SEQ ID NO: 2267955 - RNA, 19 nt, Homo sapiens
  misc_RNA (1)...(19): siRNA sense strand
cgugggagguucaggagau

SEQ ID NO: 2267956 - RNA, 19 nt, Homo sapiens
  misc_RNA (1)...(19): siRNA sense strand
acgugaugauggagcgaga

SEQ ID NO: 2267957 - RNA, 19 nt, Homo sapiens
  misc_RNA (1)...(19): siRNA sense strand
gcuugaacugccaggacua

SEQ ID NO: 2267958 - RNA, 19 nt, Homo sapiens
  misc_RNA (1)...(19): siRNA sense strand
uuacagaaaugauggcuca

SEQ ID NO: 2267959 - RNA, 19 nt, Homo sapiens
  misc_RNA (1)...(19): siRNA sense strand
cugaagacauucuguugaa

SEQ ID NO: 2267960 - RNA, 19 nt, Homo sapiens
  misc_RNA (1)...(19): siRNA sense strand
uaaaggaagcucuggaaga

SEQ ID NO: 2267961 - RNA, 19 nt, Homo sapiens
  misc_RNA (1)...(19): siRNA sense strand
gaggcagaauauauugaaa

SEQ ID NO: 2267962 - RNA, 19 nt, Homo sapiens
  misc_RNA (1)...(19): siRNA sense strand
gcagaagauguuaagaaga

SEQ ID NO: 2267963 - RNA, 19 nt, Homo sapiens
  misc_RNA (1)...(19): siRNA sense strand
aaggaaagccgaaaugcua

SEQ ID NO: 2267964 - RNA, 19 nt, Homo sapiens
  misc_RNA (1)...(19): siRNA sense strand
cgaaagugugucuguaauu

SEQ ID NO: 2267965 - RNA, 19 nt, Homo sapiens
  misc_RNA (1)...(19): siRNA sense strand
cagagaaggcaauuaaaca

SEQ ID NO: 2267966 - RNA, 19 nt, Homo sapiens
  misc_RNA (1)...(19): siRNA sense strand
ccgaaaugcuacaaaauga

SEQ ID NO: 2267967 - RNA, 19 nt, Homo sapiens
  misc_RNA (1)...(19): siRNA sense strand
auuaaauguggaaggagaa

SEQ ID NO: 2267968 - RNA, 19 nt, Homo sapiens
  misc_RNA (1)...(19): siRNA sense strand
cgacaguggacgccaguuu

SEQ ID NO: 2267969 - RNA, 19 nt, Homo sapiens
  misc_RNA (1)...(19): siRNA sense strand
caaacuacacggugagguu

SEQ ID NO: 2267970 - RNA, 19 nt, Homo sapiens
  misc_RNA (1)...(19): siRNA sense strand
aagcaacagcacagccaaa

SEQ ID NO: 2267971 - RNA, 19 nt, Homo sapiens
  misc_RNA (1)...(19): siRNA sense strand
uagacaacacugugaaaga

SEQ ID NO: 2267972 - RNA, 19 nt, Homo sapiens
  misc_RNA (1)...(19): siRNA sense strand
gggccaaacugcagaacug

SEQ ID NO: 2267973 - RNA, 19 nt, Homo sapiens
  misc_RNA (1)...(19): siRNA sense strand
ggcagaaagccauggacuu

SEQ ID NO: 2267974 - RNA, 19 nt, Homo sapiens
  misc_RNA (1)...(19): siRNA sense strand
gccacuugcaggaggacaa

SEQ ID NO: 2267975 - RNA, 19 nt, Homo sapiens
  misc_RNA (1)...(19): siRNA sense strand
gcacacaacgccuggcaga

SEQ ID NO: 2267976 - RNA, 19 nt, Homo sapiens
  misc_RNA (1)...(19): siRNA sense strand
gagaaaucuaaucaagcaa

SEQ ID NO: 2267977 - RNA, 19 nt, Homo sapiens
  misc_RNA (1)...(19): siRNA sense strand
cugcaaaguucuugggcaa

SEQ ID NO: 2267978 - RNA, 19 nt, Homo sapiens
  misc_RNA (1)...(19): siRNA sense strand
guacaaacgcuguuggcua

SEQ ID NO: 2267979 - RNA, 19 nt, Homo sapiens
  misc_RNA (1)...(19): siRNA sense strand
acauaaagauggaagcuga

SEQ ID NO: 2267980 - RNA, 19 nt, Homo sapiens
  misc_RNA (1)...(19): siRNA sense strand
guuuguaacugcagagaca

SEQ ID NO: 2267981 - RNA, 19 nt, Homo sapiens
  misc_RNA (1)...(19): siRNA sense strand
ggauaagguugcugaucau

SEQ ID NO: 2267982 - RNA, 19 nt, Homo sapiens
  misc_RNA (1)...(19): siRNA sense strand
uggauaaugaggugaacaa

SEQ ID NO: 2267983 - RNA, 19 nt, Homo sapiens
  misc_RNA (1)...(19): siRNA sense strand
auacaguggaccugaauaa

SEQ ID NO: 2267984 - RNA, 19 nt, Homo sapiens
  misc_RNA (1)...(19): siRNA sense strand
cucaagaagccgagaucaa

SEQ ID NO: 2267985 - RNA, 19 nt, Homo sapiens
  misc_RNA (1)...(19): siRNA sense strand
guaccaacugccaggauaa

SEQ ID NO: 2267986 - RNA, 19 nt, Homo sapiens
  misc_RNA (1)...(19): siRNA sense strand
gugacaaagcuguggagau

SEQ ID NO: 2267987 - RNA, 19 nt, Homo sapiens
  misc_RNA (1)...(19): siRNA sense strand
auccagagaacuugagaaa

SEQ ID NO: 2267988 - RNA, 19 nt, Homo sapiens
  misc_RNA (1)...(19): siRNA sense strand
cugaagaagcugcaaagaa

SEQ ID NO: 2267989 - RNA, 19 nt, Homo sapiens
  misc_RNA (1)...(19): siRNA sense strand
cugaauaagcuaaacgaga

SEQ ID NO: 2267990 - RNA, 19 nt, Homo sapiens
  misc_RNA (1)...(19): siRNA sense strand
cgaguggacaggcgagaua

SEQ ID NO: 2267991 - RNA, 19 nt, Homo sapiens
  misc_RNA (1)...(19): siRNA sense strand
gcaccaaggcagaagcuga

SEQ ID NO: 2267992 - RNA, 19 nt, Homo sapiens
  misc_RNA (1)...(19): siRNA sense strand
cagcgaucuugauaggaaa

SEQ ID NO: 2267993 - RNA, 19 nt, Homo sapiens
  misc_RNA (1)...(19): siRNA sense strand
uggcagaagaggcucgaaa

SEQ ID NO: 2267994 - RNA, 19 nt, Homo sapiens
  misc_RNA (1)...(19): siRNA sense strand
ugugagaggugccgagaga

SEQ ID NO: 2267995 - RNA, 19 nt, Homo sapiens
  misc_RNA (1)...(19): siRNA sense strand
ucagguuacagaagagaaa

SEQ ID NO: 2267996 - RNA, 19 nt, Homo sapiens
  misc_RNA (1)...(19): siRNA sense strand
cagccaaauuagccguuua

SEQ ID NO: 2267997 - RNA, 19 nt, Homo sapiens
  misc_RNA (1)...(19): siRNA sense strand
acaccuacuccaaggcaaa

SEQ ID NO: 2267998 - RNA, 19 nt, Homo sapiens
  misc_RNA (1)...(19): siRNA sense strand
gccuacagagagugaauaa

SEQ ID NO: 2267999 - RNA, 19 nt, Homo sapiens
  misc_RNA (1)...(19): siRNA sense strand
aguaugaacaagcgaagaa

SEQ ID NO: 2268000 - RNA, 19 nt, Homo sapiens
  misc_RNA (1)...(19): siRNA sense strand
gaguacaugaggaggccaa

SEQ ID NO: 2268001 - RNA, 19 nt, Homo sapiens
  misc_RNA (1)...(19): siRNA sense strand
gaauaagcuaaacgagauu

SEQ ID NO: 2268002 - RNA, 19 nt, Homo sapiens
  misc_RNA (1)...(19): siRNA sense strand
gaggagaucaugaaggaca

SEQ ID NO: 2268003 - RNA, 19 nt, Homo sapiens
  misc_RNA (1)...(19): siRNA sense strand
gcagcauagaugaauguaa

SEQ ID NO: 2268004 - RNA, 19 nt, Homo sapiens
  misc_RNA (1)...(19): siRNA sense strand
cugauugaccagaaauuaa

SEQ ID NO: 2268005 - RNA, 19 nt, Homo sapiens
  misc_RNA (1)...(19): siRNA sense strand
ugacauuguucgaguggca

SEQ ID NO: 2268006 - RNA, 19 nt, Homo sapiens
  misc_RNA (1)...(19): siRNA sense strand
aggcagaagcugaaagaac

SEQ ID NO: 2268007 - RNA, 19 nt, Homo sapiens
  misc_RNA (1)...(19): siRNA sense strand
aggauaagguugcugauca

SEQ ID NO: 2268008 - RNA, 19 nt, Homo sapiens
  misc_RNA (1)...(19): siRNA sense strand
ccauugaagagacuggaaa

SEQ ID NO: 2268009 - RNA, 19 nt, Homo sapiens
  misc_RNA (1)...(19): siRNA sense strand
uggcagauguaaauguaau

SEQ ID NO: 2268010 - RNA, 19 nt, Homo sapiens
  misc_RNA (1)...(19): siRNA sense strand
gcuugagggagcuggcuua

SEQ ID NO: 2268011 - RNA, 19 nt, Homo sapiens
  misc_RNA (1)...(19): siRNA sense strand
uaaaggaagcagagaggga

SEQ ID NO: 2268012 - RNA, 19 nt, Homo sapiens
  misc_RNA (1)...(19): siRNA sense strand
agagaagauaugagaggga

SEQ ID NO: 2268013 - RNA, 19 nt, Homo sapiens
  misc_RNA (1)...(19): siRNA sense strand
cagaggaggcacuaaggaa

SEQ ID NO: 2268014 - RNA, 19 nt, Homo sapiens
  misc_RNA (1)...(19): siRNA sense strand
cgaggauagacuaaaggaa

SEQ ID NO: 2268015 - RNA, 19 nt, Homo sapiens
  misc_RNA (1)...(19): siRNA sense strand
agaaugaagccaagaagca

SEQ ID NO: 2268016 - RNA, 19 nt, Homo sapiens
  misc_RNA (1)...(19): siRNA sense strand
uggagaaugaagcaaauaa

SEQ ID NO: 2268017 - RNA, 19 nt, Homo sapiens
  misc_RNA (1)...(19): siRNA sense strand
aaagauggaagcugagaau

SEQ ID NO: 2268018 - RNA, 19 nt, Homo sapiens
  misc_RNA (1)...(19): siRNA sense strand
ccuugaucgcucagggcaa

SEQ ID NO: 2268019 - RNA, 19 nt, Homo sapiens
  misc_RNA (1)...(19): siRNA sense strand
aagccaaagaugaaaugaa

SEQ ID NO: 2268020 - RNA, 19 nt, Homo sapiens
  misc_RNA (1)...(19): siRNA sense strand
ggaaguaugaacaagcgaa

SEQ ID NO: 2268021 - RNA, 19 nt, Homo sapiens
  misc_RNA (1)...(19): siRNA sense strand
ggacuauaaccgagauauc

SEQ ID NO: 2268022 - RNA, 19 nt, Homo sapiens
  misc_RNA (1)...(19): siRNA sense strand
cugcaaacccugugacugu

SEQ ID NO: 2268023 - RNA, 19 nt, Homo sapiens
  misc_RNA (1)...(19): siRNA sense strand
cagagaaggcuuuguggga

SEQ ID NO: 2268024 - RNA, 19 nt, Homo sapiens
  misc_RNA (1)...(19): siRNA sense strand
ugaugaauucagugacauu

SEQ ID NO: 2268025 - RNA, 19 nt, Homo sapiens
  misc_RNA (1)...(19): siRNA sense strand
aagcagagagggaaguuau

SEQ ID NO: 2268026 - RNA, 19 nt, Homo sapiens
  misc_RNA (1)...(19): siRNA sense strand
cccaugaggcggagaggau

SEQ ID NO: 2268027 - RNA, 19 nt, Homo sapiens
  misc_RNA (1)...(19): siRNA sense strand
ggagaaugccugaagugca

SEQ ID NO: 2268028 - RNA, 19 nt, Homo sapiens
  misc_RNA (1)...(19): siRNA sense strand
gaugauggucgcugugaau

SEQ ID NO: 2268029 - RNA, 19 nt, Homo sapiens
  misc_RNA (1)...(19): siRNA sense strand
acucugagacacuggagaa

SEQ ID NO: 2268030 - RNA, 19 nt, Homo sapiens
  misc_RNA (1)...(19): siRNA sense strand
acaacugauugaccagaaa

SEQ ID NO: 2268031 - RNA, 19 nt, Homo sapiens
  misc_RNA (1)...(19): siRNA sense strand
gagauaucgaggagaucau

SEQ ID NO: 2268032 - RNA, 19 nt, Homo sapiens
  misc_RNA (1)...(19): siRNA sense strand
agaucaagccuucgaggau

SEQ ID NO: 2268033 - RNA, 19 nt, Homo sapiens
  misc_RNA (1)...(19): siRNA sense strand
augaacaagcgaagaacau

SEQ ID NO: 2268034 - RNA, 19 nt, Homo sapiens
  misc_RNA (1)...(19): siRNA sense strand
acaccuacuccaaaggaaa

SEQ ID NO: 2268035 - RNA, 19 nt, Homo sapiens
  misc_RNA (1)...(19): siRNA sense strand
ggucuuaugcauuggaacu

SEQ ID NO: 2268036 - RNA, 19 nt, Homo sapiens
  misc_RNA (1)...(19): siRNA sense strand
ccaaaauagcagugcaguu

SEQ ID NO: 2268037 - RNA, 19 nt, Homo sapiens
  misc_RNA (1)...(19): siRNA sense strand
augcugaagauaaaggaau

SEQ ID NO: 2268038 - RNA, 19 nt, Homo sapiens
  misc_RNA (1)...(19): siRNA sense strand
cugggauguucuuguacaa

SEQ ID NO: 2268039 - RNA, 19 nt, Homo sapiens
  misc_RNA (1)...(19): siRNA sense strand
caacauuuccugaugcuga

SEQ ID NO: 2268040 - RNA, 19 nt, Homo sapiens
  misc_RNA (1)...(19): siRNA sense strand
ucagcauguauuugguuaa

SEQ ID NO: 2268041 - RNA, 19 nt, Homo sapiens
  misc_RNA (1)...(19): siRNA sense strand
agaccauggcacugugaca

SEQ ID NO: 2268042 - RNA, 19 nt, Homo sapiens
  misc_RNA (1)...(19): siRNA sense strand
acaccuacuccaaaggaaa

SEQ ID NO: 2268043 - RNA, 19 nt, Homo sapiens
  misc_RNA (1)...(19): siRNA sense strand
ggucuuaugcauuggaacu

SEQ ID NO: 2268044 - RNA, 19 nt, Homo sapiens
  misc_RNA (1)...(19): siRNA sense strand
ccaaaauagcagugcaguu

SEQ ID NO: 2268045 - RNA, 19 nt, Homo sapiens
  misc_RNA (1)...(19): siRNA sense strand
augcugaagauaaaggaau

SEQ ID NO: 2268046 - RNA, 19 nt, Homo sapiens
  misc_RNA (1)...(19): siRNA sense strand
cugggauguucuuguacaa

SEQ ID NO: 2268047 - RNA, 19 nt, Homo sapiens
  misc_RNA (1)...(19): siRNA sense strand
caacauuuccugaugcuga

SEQ ID NO: 2268048 - RNA, 19 nt, Homo sapiens
  misc_RNA (1)...(19): siRNA sense strand
ucagcauguauuugguuaa

SEQ ID NO: 2268049 - RNA, 19 nt, Homo sapiens
  misc_RNA (1)...(19): siRNA sense strand
agaccauggcacugugaca

SEQ ID NO: 2268050 - RNA, 19 nt, Homo sapiens
  misc_RNA (1)...(19): siRNA sense strand
cuuggaggacuuugagaaa

SEQ ID NO: 2268051 - RNA, 19 nt, Homo sapiens
  misc_RNA (1)...(19): siRNA sense strand
ggggcaagcacguggcaua

SEQ ID NO: 2268052 - RNA, 19 nt, Homo sapiens
  misc_RNA (1)...(19): siRNA sense strand
agaacaaccuggaagccuu

SEQ ID NO: 2268053 - RNA, 19 nt, Homo sapiens
  misc_RNA (1)...(19): siRNA sense strand
ccuuggaggacuuugagaa

SEQ ID NO: 2268054 - RNA, 19 nt, Homo sapiens
  misc_RNA (1)...(19): siRNA sense strand
cgugguaucugaaggccau

SEQ ID NO: 2268055 - RNA, 19 nt, Homo sapiens
  misc_RNA (1)...(19): siRNA sense strand
ggggcaaccuggaagccaa

SEQ ID NO: 2268056 - RNA, 19 nt, Homo sapiens
  misc_RNA (1)...(19): siRNA sense strand
caauaagaaggaagggauu

SEQ ID NO: 2268057 - RNA, 19 nt, Homo sapiens
  misc_RNA (1)...(19): siRNA sense strand
ggaccaagauggaaggauc

SEQ ID NO: 2268058 - RNA, 19 nt, Homo sapiens
  misc_RNA (1)...(19): siRNA sense strand
cuuuaaugcuguuggagau

SEQ ID NO: 2268059 - RNA, 19 nt, Homo sapiens
  misc_RNA (1)...(19): siRNA sense strand
ggaaaggaaugaagagggu

SEQ ID NO: 2268060 - RNA, 19 nt, Homo sapiens
  misc_RNA (1)...(19): siRNA sense strand
uaaacaaagcccuggaaaa

SEQ ID NO: 2268061 - RNA, 19 nt, Homo sapiens
  misc_RNA (1)...(19): siRNA sense strand
acagaaaaccugauggcua

SEQ ID NO: 2268062 - RNA, 19 nt, Homo sapiens
  misc_RNA (1)...(19): siRNA sense strand
auugagggaagcagagaaa

SEQ ID NO: 2268063 - RNA, 19 nt, Homo sapiens
  misc_RNA (1)...(19): siRNA sense strand
cuaauuaccaccuggaaaa

SEQ ID NO: 2268064 - RNA, 19 nt, Homo sapiens
  misc_RNA (1)...(19): siRNA sense strand
guugacuggaacagaguaa

SEQ ID NO: 2268065 - RNA, 19 nt, Homo sapiens
  misc_RNA (1)...(19): siRNA sense strand
uugccaagaccuuuagaaa

SEQ ID NO: 2268066 - RNA, 19 nt, Homo sapiens
  misc_RNA (1)...(19): siRNA sense strand
uggcauuguccuuuguaaa

SEQ ID NO: 2268067 - RNA, 19 nt, Homo sapiens
  misc_RNA (1)...(19): siRNA sense strand
acauuuaggaacuggauga

SEQ ID NO: 2268068 - RNA, 19 nt, Homo sapiens
  misc_RNA (1)...(19): siRNA sense strand
aguugauacugauggcaau

SEQ ID NO: 2268069 - RNA, 19 nt, Homo sapiens
  misc_RNA (1)...(19): siRNA sense strand
ucaauaagaaggaagggau

SEQ ID NO: 2268070 - RNA, 19 nt, Homo sapiens
  misc_RNA (1)...(19): siRNA sense strand
aaggaagggauuugugcaa

SEQ ID NO: 2268071 - RNA, 19 nt, Homo sapiens
  misc_RNA (1)...(19): siRNA sense strand
cgguagaauuggggaagaa

SEQ ID NO: 2268072 - RNA, 19 nt, Homo sapiens
  misc_RNA (1)...(19): siRNA sense strand
gcagcuaaugagaagguau

SEQ ID NO: 2268073 - RNA, 19 nt, Homo sapiens
  misc_RNA (1)...(19): siRNA sense strand
aauuggagcaagaguguau

SEQ ID NO: 2268074 - RNA, 19 nt, Homo sapiens
  misc_RNA (1)...(19): siRNA sense strand
uaugaagaagcuugagaau

SEQ ID NO: 2268075 - RNA, 19 nt, Homo sapiens
  misc_RNA (1)...(19): siRNA sense strand
ugaaugaugaugagaaacu

SEQ ID NO: 2268076 - RNA, 19 nt, Homo sapiens
  misc_RNA (1)...(19): siRNA sense strand
uguuaacccucgagucaau

SEQ ID NO: 2268077 - RNA, 19 nt, Homo sapiens
  misc_RNA (1)...(19): siRNA sense strand
cuggaacagaguaaacaaa

SEQ ID NO: 2268078 - RNA, 19 nt, Homo sapiens
  misc_RNA (1)...(19): siRNA sense strand
gguuggcaucgguggacaa

SEQ ID NO: 2268079 - RNA, 19 nt, Homo sapiens
  misc_RNA (1)...(19): siRNA sense strand
acugaauauccucgaagaa

SEQ ID NO: 2268080 - RNA, 19 nt, Homo sapiens
  misc_RNA (1)...(19): siRNA sense strand
gacccgaagauuaguacaa

SEQ ID NO: 2268081 - RNA, 19 nt, Homo sapiens
  misc_RNA (1)...(19): siRNA sense strand
gguauagaguacgagaaau

SEQ ID NO: 2268082 - RNA, 19 nt, Homo sapiens
  misc_RNA (1)...(19): siRNA sense strand
agaaauuggugguggccag

SEQ ID NO: 2268083 - RNA, 19 nt, Homo sapiens
  misc_RNA (1)...(19): siRNA sense strand
gaccaagauggaaggauca

SEQ ID NO: 2268084 - RNA, 19 nt, Homo sapiens
  misc_RNA (1)...(19): siRNA sense strand
ggugguggccagaagguca

SEQ ID NO: 2268085 - RNA, 19 nt, Homo sapiens
  misc_RNA (1)...(19): siRNA sense strand
auucagaggaagaaaagua

SEQ ID NO: 2268086 - RNA, 19 nt, Homo sapiens
  misc_RNA (1)...(19): siRNA sense strand
auacugauggcaauggaua

SEQ ID NO: 2268087 - RNA, 19 nt, Homo sapiens
  misc_RNA (1)...(19): siRNA sense strand
ugagagaaggugagagccu

SEQ ID NO: 2268088 - RNA, 19 nt, Homo sapiens
  misc_RNA (1)...(19): siRNA sense strand
gccuggaggauuugaugaa

SEQ ID NO: 2268089 - RNA, 19 nt, Homo sapiens
  misc_RNA (1)...(19): siRNA sense strand
gaucaguguccgaugagga

SEQ ID NO: 2268090 - RNA, 19 nt, Homo sapiens
  misc_RNA (1)...(19): siRNA sense strand
ccaaugaacccaaacacga

SEQ ID NO: 2268091 - RNA, 19 nt, Homo sapiens
  misc_RNA (1)...(19): siRNA sense strand
uccaaaaggagaugaagaa

SEQ ID NO: 2268092 - RNA, 19 nt, Homo sapiens
  misc_RNA (1)...(19): siRNA sense strand
ugucaggacugcgggagaa

SEQ ID NO: 2268093 - RNA, 19 nt, Homo sapiens
  misc_RNA (1)...(19): siRNA sense strand
gaaggugagacgagagaag

SEQ ID NO: 2268094 - RNA, 19 nt, Homo sapiens
  misc_RNA (1)...(19): siRNA sense strand
cgagagaagagcggacauu

SEQ ID NO: 2268095 - RNA, 19 nt, Homo sapiens
  misc_RNA (1)...(19): siRNA sense strand
acacaauugaugaaagaac

SEQ ID NO: 2268096 - RNA, 19 nt, Homo sapiens
  misc_RNA (1)...(19): siRNA sense strand
caguguccgaugaggaaau

SEQ ID NO: 2268097 - RNA, 19 nt, Homo sapiens
  misc_RNA (1)...(19): siRNA sense strand
aaacauugagggaagcaga

SEQ ID NO: 2268098 - RNA, 19 nt, Homo sapiens
  misc_RNA (1)...(19): siRNA sense strand
cauugaacucagcagaaau

SEQ ID NO: 2268099 - RNA, 19 nt, Homo sapiens
  misc_RNA (1)...(19): siRNA sense strand
ugcacaaaccagagaacca

SEQ ID NO: 2268100 - RNA, 19 nt, Homo sapiens
  misc_RNA (1)...(19): siRNA sense strand
ccgaugaggaaaugaugga

SEQ ID NO: 2268101 - RNA, 19 nt, Homo sapiens
  misc_RNA (1)...(19): siRNA sense strand
aaguugauacugauggcaa

SEQ ID NO: 2268102 - RNA, 19 nt, Homo sapiens
  misc_RNA (1)...(19): siRNA sense strand
cggcagaagcugaguaaau

SEQ ID NO: 2268103 - RNA, 19 nt, Homo sapiens
  misc_RNA (1)...(19): siRNA sense strand
gguuaaaggaggaauacaa

SEQ ID NO: 2268104 - RNA, 19 nt, Homo sapiens
  misc_RNA (1)...(19): siRNA sense strand
guggagagcagauggcaaa

SEQ ID NO: 2268105 - RNA, 19 nt, Homo sapiens
  misc_RNA (1)...(19): siRNA sense strand
caauauaccuugccgggaa

SEQ ID NO: 2268106 - RNA, 19 nt, Homo sapiens
  misc_RNA (1)...(19): siRNA sense strand
ggaauacacaagaggaaaa

SEQ ID NO: 2268107 - RNA, 19 nt, Homo sapiens
  misc_RNA (1)...(19): siRNA sense strand
gggaagaaacagaccucaa

SEQ ID NO: 2268108 - RNA, 19 nt, Homo sapiens
  misc_RNA (1)...(19): siRNA sense strand
cuuugaaggugaaggccua

SEQ ID NO: 2268109 - RNA, 19 nt, Homo sapiens
  misc_RNA (1)...(19): siRNA sense strand
ccagaauccagacgagaaa

SEQ ID NO: 2268110 - RNA, 19 nt, Homo sapiens
  misc_RNA (1)...(19): siRNA sense strand
agccauaaauaaagaccaa

SEQ ID NO: 2268111 - RNA, 19 nt, Homo sapiens
  misc_RNA (1)...(19): siRNA sense strand
ucacagaggcagagaagca

SEQ ID NO: 2268112 - RNA, 19 nt, Homo sapiens
  misc_RNA (1)...(19): siRNA sense strand
cagaauuuacagagaguga

SEQ ID NO: 2268113 - RNA, 19 nt, Homo sapiens
  misc_RNA (1)...(19): siRNA sense strand
cagucaagguggcgugauu

SEQ ID NO: 2268114 - RNA, 19 nt, Homo sapiens
  misc_RNA (1)...(19): siRNA sense strand
agugagaagaggaggauca

SEQ ID NO: 2268115 - RNA, 19 nt, Homo sapiens
  misc_RNA (1)...(19): siRNA sense strand
caucaaagcccaugccaga

SEQ ID NO: 2268116 - RNA, 19 nt, Homo sapiens
  misc_RNA (1)...(19): siRNA sense strand
ccuacaggcucgaugguau

SEQ ID NO: 2268117 - RNA, 19 nt, Homo sapiens
  misc_RNA (1)...(19): siRNA sense strand
cuggaauacacaagaggaa

SEQ ID NO: 2268118 - RNA, 19 nt, Homo sapiens
  misc_RNA (1)...(19): siRNA sense strand
gagcaaugugaaagacaau

SEQ ID NO: 2268119 - RNA, 19 nt, Homo sapiens
  misc_RNA (1)...(19): siRNA sense strand
ccucaaggcucaugccaga

SEQ ID NO: 2268120 - RNA, 19 nt, Homo sapiens
  misc_RNA (1)...(19): siRNA sense strand
gaggauacugauaggauau

SEQ ID NO: 2268121 - RNA, 19 nt, Homo sapiens
  misc_RNA (1)...(19): siRNA sense strand
cuaaauggcuacacgguca

SEQ ID NO: 2268122 - RNA, 19 nt, Homo sapiens
  misc_RNA (1)...(19): siRNA sense strand
gaggaagagaagagguuca

SEQ ID NO: 2268123 - RNA, 19 nt, Homo sapiens
  misc_RNA (1)...(19): siRNA sense strand
ucacaagauugcugaggau

SEQ ID NO: 2268124 - RNA, 19 nt, Homo sapiens
  misc_RNA (1)...(19): siRNA sense strand
ggacucagcauuugggaca

SEQ ID NO: 2268125 - RNA, 19 nt, Homo sapiens
  misc_RNA (1)...(19): siRNA sense strand
ccucaagacugcacggcuu

SEQ ID NO: 2268126 - RNA, 19 nt, Homo sapiens
  misc_RNA (1)...(19): siRNA sense strand
agauuuaccacgaaagcua

SEQ ID NO: 2268127 - RNA, 19 nt, Homo sapiens
  misc_RNA (1)...(19): siRNA sense strand
cgugugaagcuguggguga

SEQ ID NO: 2268128 - RNA, 19 nt, Homo sapiens
  misc_RNA (1)...(19): siRNA sense strand
ggcuaaagucguuugggaa

SEQ ID NO: 2268129 - RNA, 19 nt, Homo sapiens
  misc_RNA (1)...(19): siRNA sense strand
gcucgaugguauagaccuu

SEQ ID NO: 2268130 - RNA, 19 nt, Homo sapiens
  misc_RNA (1)...(19): siRNA sense strand
cuacaggcucgaugguaua

SEQ ID NO: 2268131 - RNA, 19 nt, Homo sapiens
  misc_RNA (1)...(19): siRNA sense strand
gcacaaaacacccaggcua

SEQ ID NO: 2268132 - RNA, 19 nt, Homo sapiens
  misc_RNA (1)...(19): siRNA sense strand
acugggagucugauagaaa

SEQ ID NO: 2268133 - RNA, 19 nt, Homo sapiens
  misc_RNA (1)...(19): siRNA sense strand
acugguuaaaggaggaaua

SEQ ID NO: 2268134 - RNA, 19 nt, Homo sapiens
  misc_RNA (1)...(19): siRNA sense strand
ucaucaaguuccaagaaaa

SEQ ID NO: 2268135 - RNA, 19 nt, Homo sapiens
  misc_RNA (1)...(19): siRNA sense strand
gaauuuacagagagugaga

SEQ ID NO: 2268136 - RNA, 19 nt, Homo sapiens
  misc_RNA (1)...(19): siRNA sense strand
gauuauuacaacaggcuga

SEQ ID NO: 2268137 - RNA, 19 nt, Homo sapiens
  misc_RNA (1)...(19): siRNA sense strand
acgaagacgaccaggagau

SEQ ID NO: 2268138 - RNA, 19 nt, Homo sapiens
  misc_RNA (1)...(19): siRNA sense strand
gguacuacacagaggucau

SEQ ID NO: 2268139 - RNA, 19 nt, Homo sapiens
  misc_RNA (1)...(19): siRNA sense strand
gguuuaaggaguaugcaga

SEQ ID NO: 2268140 - RNA, 19 nt, Homo sapiens
  misc_RNA (1)...(19): siRNA sense strand
agaaaacagugcagugcua

SEQ ID NO: 2268141 - RNA, 19 nt, Homo sapiens
  misc_RNA (1)...(19): siRNA sense strand
ccggagaaccgaagccuuu

SEQ ID NO: 2268142 - RNA, 19 nt, Homo sapiens
  misc_RNA (1)...(19): siRNA sense strand
acaacgaagccaacaggaa

SEQ ID NO: 2268143 - RNA, 19 nt, Homo sapiens
  misc_RNA (1)...(19): siRNA sense strand
aggaagacucuguggaugu

SEQ ID NO: 2268144 - RNA, 19 nt, Homo sapiens
  misc_RNA (1)...(19): siRNA sense strand
ucaaggacucccaggaaau

SEQ ID NO: 2268145 - RNA, 19 nt, Homo sapiens
  misc_RNA (1)...(19): siRNA sense strand
ucgaaagagauuuguucua

SEQ ID NO: 2268146 - RNA, 19 nt, Homo sapiens
  misc_RNA (1)...(19): siRNA sense strand
gggcuauggcuacggaaca

SEQ ID NO: 2268147 - RNA, 19 nt, Homo sapiens
  misc_RNA (1)...(19): siRNA sense strand
gagauuacaaugaggugau

SEQ ID NO: 2268148 - RNA, 19 nt, Homo sapiens
  misc_RNA (1)...(19): siRNA sense strand
gagagugagaagaggagga

SEQ ID NO: 2268149 - RNA, 19 nt, Homo sapiens
  misc_RNA (1)...(19): siRNA sense strand
gcgcucuaagcaagggaaa

SEQ ID NO: 2268150 - RNA, 19 nt, Homo sapiens
  misc_RNA (1)...(19): siRNA sense strand
ccaggaaucaagagcguca

SEQ ID NO: 2268151 - RNA, 19 nt, Homo sapiens
  misc_RNA (1)...(19): siRNA sense strand
aguuuguaucccuggaaua

SEQ ID NO: 2268152 - RNA, 19 nt, Homo sapiens
  misc_RNA (1)...(19): siRNA sense strand
cugcaagcgcucuaagcaa

SEQ ID NO: 2268153 - RNA, 19 nt, Homo sapiens
  misc_RNA (1)...(19): siRNA sense strand
cugaggaagagaagagguu

SEQ ID NO: 2268154 - RNA, 19 nt, Homo sapiens
  misc_RNA (1)...(19): siRNA sense strand
aggagauggcugaggagga

SEQ ID NO: 2268155 - RNA, 19 nt, Homo sapiens
  misc_RNA (1)...(19): siRNA sense strand
cguggagagcagauggcaa

SEQ ID NO: 2268156 - RNA, 19 nt, Homo sapiens
  misc_RNA (1)...(19): siRNA sense strand
uggcaaaggacucagcauu

SEQ ID NO: 2268157 - RNA, 19 nt, Homo sapiens
  misc_RNA (1)...(19): siRNA sense strand
ugaguaaauugcagaccau

SEQ ID NO: 2268158 - RNA, 19 nt, Homo sapiens
  misc_RNA (1)...(19): siRNA sense strand
ucacacguacgaugagaaa

SEQ ID NO: 2268159 - RNA, 19 nt, Homo sapiens
  misc_RNA (1)...(19): siRNA sense strand
aauacaggcaggagcagaa

SEQ ID NO: 2268160 - RNA, 19 nt, Homo sapiens
  misc_RNA (1)...(19): siRNA sense strand
uaauaaaggcucaugcuga

SEQ ID NO: 2268161 - RNA, 19 nt, Homo sapiens
  misc_RNA (1)...(19): siRNA sense strand
caacagaugaacagacagu

SEQ ID NO: 2268162 - RNA, 19 nt, Homo sapiens
  misc_RNA (1)...(19): siRNA sense strand
gggaaaaguucuccagcca

SEQ ID NO: 2268163 - RNA, 19 nt, Homo sapiens
  misc_RNA (1)...(19): siRNA sense strand
aacccaaguucgaaagaga

SEQ ID NO: 2268164 - RNA, 19 nt, Homo sapiens
  misc_RNA (1)...(19): siRNA sense strand
agaaauacaggcaggagca

SEQ ID NO: 2268165 - RNA, 19 nt, Homo sapiens
  misc_RNA (1)...(19): siRNA sense strand
cugccagaauuuacagaga

SEQ ID NO: 2268166 - RNA, 19 nt, Homo sapiens
  misc_RNA (1)...(19): siRNA sense strand
uggaauacacaagaggaaa

SEQ ID NO: 2268167 - RNA, 19 nt, Homo sapiens
  misc_RNA (1)...(19): siRNA sense strand
gaucaugguggauggcaga

SEQ ID NO: 2268168 - RNA, 19 nt, Homo sapiens
  misc_RNA (1)...(19): siRNA sense strand
agccgugggugaugagcua

SEQ ID NO: 2268169 - RNA, 19 nt, Homo sapiens
  misc_RNA (1)...(19): siRNA sense strand
ccugaaaggcucugcugau

SEQ ID NO: 2268170 - RNA, 19 nt, Homo sapiens
  misc_RNA (1)...(19): siRNA sense strand
cuaaagucguuugggaaaa

SEQ ID NO: 2268171 - RNA, 19 nt, Homo sapiens
  misc_RNA (1)...(19): siRNA sense strand
gggagcaaugugaaagaca

SEQ ID NO: 2268172 - RNA, 19 nt, Homo sapiens
  misc_RNA (1)...(19): siRNA sense strand
ucaaggaagaguaugguga

SEQ ID NO: 2268173 - RNA, 19 nt, Homo sapiens
  misc_RNA (1)...(19): siRNA sense strand
uauagaccuucgaggguau

SEQ ID NO: 2268174 - RNA, 19 nt, Homo sapiens
  misc_RNA (1)...(19): siRNA sense strand
uguaggaggcugggagaau

SEQ ID NO: 2268175 - RNA, 19 nt, Homo sapiens
  misc_RNA (1)...(19): siRNA sense strand
gccagaauuuacagagagu

SEQ ID NO: 2268176 - RNA, 19 nt, Homo sapiens
  misc_RNA (1)...(19): siRNA sense strand
ugucauacaaguacugcaa

SEQ ID NO: 2268177 - RNA, 19 nt, Homo sapiens
  misc_RNA (1)...(19): siRNA sense strand
ccauaaauaaagaccaagu

SEQ ID NO: 2268178 - RNA, 19 nt, Homo sapiens
  misc_RNA (1)...(19): siRNA sense strand
ggguauaccucuugggcua

SEQ ID NO: 2268179 - RNA, 19 nt, Homo sapiens
  misc_RNA (1)...(19): siRNA sense strand
uggacaaacugaagggaga

SEQ ID NO: 2268180 - RNA, 19 nt, Homo sapiens
  misc_RNA (1)...(19): siRNA sense strand
agauaaggaacacuggaaa

SEQ ID NO: 2268181 - RNA, 19 nt, Homo sapiens
  misc_RNA (1)...(19): siRNA sense strand
caaggcagcaggagggaga

SEQ ID NO: 2268182 - RNA, 19 nt, Homo sapiens
  misc_RNA (1)...(19): siRNA sense strand
augaaaacucccaguguaa

SEQ ID NO: 2268183 - RNA, 19 nt, Homo sapiens
  misc_RNA (1)...(19): siRNA sense strand
uuggauuauuggagaacau

SEQ ID NO: 2268184 - RNA, 19 nt, Homo sapiens
  misc_RNA (1)...(19): siRNA sense strand
ugguuggauuauuggagaa

SEQ ID NO: 2268185 - RNA, 19 nt, Homo sapiens
  misc_RNA (1)...(19): siRNA sense strand
uguuggaacuggugccgua

SEQ ID NO: 2268186 - RNA, 19 nt, Homo sapiens
  misc_RNA (1)...(19): siRNA sense strand
uuaucaagcugaaggggua

SEQ ID NO: 2268187 - RNA, 19 nt, Homo sapiens
  misc_RNA (1)...(19): siRNA sense strand
aauuggaagugguuguaau

SEQ ID NO: 2268188 - RNA, 19 nt, Homo sapiens
  misc_RNA (1)...(19): siRNA sense strand
cggauucagauaaggaaca

SEQ ID NO: 2268189 - RNA, 19 nt, Homo sapiens
  misc_RNA (1)...(19): siRNA sense strand
cugucaaggagcagcuaau

SEQ ID NO: 2268190 - RNA, 19 nt, Homo sapiens
  misc_RNA (1)...(19): siRNA sense strand
aggcagcaggagggagaaa

SEQ ID NO: 2268191 - RNA, 19 nt, Homo sapiens
  misc_RNA (1)...(19): siRNA sense strand
uuucaagaagagugcagaa

SEQ ID NO: 2268192 - RNA, 19 nt, Homo sapiens
  misc_RNA (1)...(19): siRNA sense strand
uguaauuggaagugguugu

SEQ ID NO: 2268193 - RNA, 19 nt, Homo sapiens
  misc_RNA (1)...(19): siRNA sense strand
gggugaauguugcuggugu

SEQ ID NO: 2268194 - RNA, 19 nt, Homo sapiens
  misc_RNA (1)...(19): siRNA sense strand
gacaaacugaagggagaaa

SEQ ID NO: 2268195 - RNA, 19 nt, Homo sapiens
  misc_RNA (1)...(19): siRNA sense strand
ggguauaccucuugggcua

SEQ ID NO: 2268196 - RNA, 19 nt, Homo sapiens
  misc_RNA (1)...(19): siRNA sense strand
uggacaaacugaagggaga

SEQ ID NO: 2268197 - RNA, 19 nt, Homo sapiens
  misc_RNA (1)...(19): siRNA sense strand
agauaaggaacacuggaaa

SEQ ID NO: 2268198 - RNA, 19 nt, Homo sapiens
  misc_RNA (1)...(19): siRNA sense strand
caaggcagcaggagggaga

SEQ ID NO: 2268199 - RNA, 19 nt, Homo sapiens
  misc_RNA (1)...(19): siRNA sense strand
augaaaacucccaguguaa

SEQ ID NO: 2268200 - RNA, 19 nt, Homo sapiens
  misc_RNA (1)...(19): siRNA sense strand
uuggauuauuggagaacau

SEQ ID NO: 2268201 - RNA, 19 nt, Homo sapiens
  misc_RNA (1)...(19): siRNA sense strand
ugguuggauuauuggagaa

SEQ ID NO: 2268202 - RNA, 19 nt, Homo sapiens
  misc_RNA (1)...(19): siRNA sense strand
uguuggaacuggugccgua

SEQ ID NO: 2268203 - RNA, 19 nt, Homo sapiens
  misc_RNA (1)...(19): siRNA sense strand
uuaucaagcugaaggggua

SEQ ID NO: 2268204 - RNA, 19 nt, Homo sapiens
  misc_RNA (1)...(19): siRNA sense strand
aauuggaagugguuguaau

SEQ ID NO: 2268205 - RNA, 19 nt, Homo sapiens
  misc_RNA (1)...(19): siRNA sense strand
cggauucagauaaggaaca

SEQ ID NO: 2268206 - RNA, 19 nt, Homo sapiens
  misc_RNA (1)...(19): siRNA sense strand
cugucaaggagcagcuaau

SEQ ID NO: 2268207 - RNA, 19 nt, Homo sapiens
  misc_RNA (1)...(19): siRNA sense strand
aggcagcaggagggagaaa

SEQ ID NO: 2268208 - RNA, 19 nt, Homo sapiens
  misc_RNA (1)...(19): siRNA sense strand
uuucaagaagagugcagaa

SEQ ID NO: 2268209 - RNA, 19 nt, Homo sapiens
  misc_RNA (1)...(19): siRNA sense strand
uguaauuggaagugguugu

SEQ ID NO: 2268210 - RNA, 19 nt, Homo sapiens
  misc_RNA (1)...(19): siRNA sense strand
gggugaauguugcuggugu

SEQ ID NO: 2268211 - RNA, 19 nt, Homo sapiens
  misc_RNA (1)...(19): siRNA sense strand
gacaaacugaagggagaaa

SEQ ID NO: 2268212 - RNA, 19 nt, Homo sapiens
  misc_RNA (1)...(19): siRNA sense strand
acggugacuucaagaucaa

SEQ ID NO: 2268213 - RNA, 19 nt, Homo sapiens
  misc_RNA (1)...(19): siRNA sense strand
gcaaguaccacgugggcca

SEQ ID NO: 2268214 - RNA, 19 nt, Homo sapiens
  misc_RNA (1)...(19): siRNA sense strand
gggaaguauaagcagauca

SEQ ID NO: 2268215 - RNA, 19 nt, Homo sapiens
  misc_RNA (1)...(19): siRNA sense strand
cgagaauggauuaaagaaa

SEQ ID NO: 2268216 - RNA, 19 nt, Homo sapiens
  misc_RNA (1)...(19): siRNA sense strand
gaacaaaccaaacgauuaa

SEQ ID NO: 2268217 - RNA, 19 nt, Homo sapiens
  misc_RNA (1)...(19): siRNA sense strand
augcagaaaucaaggauau

SEQ ID NO: 2268218 - RNA, 19 nt, Homo sapiens
  misc_RNA (1)...(19): siRNA sense strand
agaugaagcuggagggacu

SEQ ID NO: 2268219 - RNA, 19 nt, Homo sapiens
  misc_RNA (1)...(19): siRNA sense strand
agaacaaaccaaacgauua

SEQ ID NO: 2268220 - RNA, 19 nt, Homo sapiens
  misc_RNA (1)...(19): siRNA sense strand
ccugauacuuggagagagu

SEQ ID NO: 2268221 - RNA, 19 nt, Homo sapiens
  misc_RNA (1)...(19): siRNA sense strand
cagaagaagaacaagaaaa

SEQ ID NO: 2268222 - RNA, 19 nt, Homo sapiens
  misc_RNA (1)...(19): siRNA sense strand
ucaaauguuaucugggaaa

SEQ ID NO: 2268223 - RNA, 19 nt, Homo sapiens
  misc_RNA (1)...(19): siRNA sense strand
acuuguaggcucagacaua

SEQ ID NO: 2268224 - RNA, 19 nt, Homo sapiens
  misc_RNA (1)...(19): siRNA sense strand
ccagaaaacuguaaagcau

SEQ ID NO: 2268225 - RNA, 19 nt, Homo sapiens
  misc_RNA (1)...(19): siRNA sense strand
gggaaaauguugcaaucaa

SEQ ID NO: 2268226 - RNA, 19 nt, Homo sapiens
  misc_RNA (1)...(19): siRNA sense strand
aggaaaauucugugggauu

SEQ ID NO: 2268227 - RNA, 19 nt, Homo sapiens
  misc_RNA (1)...(19): siRNA sense strand
ggaaaaggagaaagagaca

SEQ ID NO: 2268228 - RNA, 19 nt, Homo sapiens
  misc_RNA (1)...(19): siRNA sense strand
uggaaguucuacaaguaaa

SEQ ID NO: 2268229 - RNA, 19 nt, Homo sapiens
  misc_RNA (1)...(19): siRNA sense strand
agacagcaacagugagauu

SEQ ID NO: 2268230 - RNA, 19 nt, Homo sapiens
  misc_RNA (1)...(19): siRNA sense strand
cauuaauucuacuguggaa

SEQ ID NO: 2268231 - RNA, 19 nt, Homo sapiens
  misc_RNA (1)...(19): siRNA sense strand
ucaucagcguaguggcuaa

SEQ ID NO: 2268232 - RNA, 19 nt, Homo sapiens
  misc_RNA (1)...(19): siRNA sense strand
cccaaauaauguugagguu

SEQ ID NO: 2268233 - RNA, 19 nt, Homo sapiens
  misc_RNA (1)...(19): siRNA sense strand
ggaagauauagcugcagaa

SEQ ID NO: 2268234 - RNA, 19 nt, Homo sapiens
  misc_RNA (1)...(19): siRNA sense strand
caugauuugaaguguguaa

SEQ ID NO: 2268235 - RNA, 19 nt, Homo sapiens
  misc_RNA (1)...(19): siRNA sense strand
aagcaaaaccagaagaaga

SEQ ID NO: 2268236 - RNA, 19 nt, Homo sapiens
  misc_RNA (1)...(19): siRNA sense strand
caguacaagagcagcggaa

SEQ ID NO: 2268237 - RNA, 19 nt, Homo sapiens
  misc_RNA (1)...(19): siRNA sense strand
cccagaagacacugagaau

SEQ ID NO: 2268238 - RNA, 19 nt, Homo sapiens
  misc_RNA (1)...(19): siRNA sense strand
ugucacaaucaaaggagua

SEQ ID NO: 2268239 - RNA, 19 nt, Homo sapiens
  misc_RNA (1)...(19): siRNA sense strand
gcuauaagccacagaugca

SEQ ID NO: 2268240 - RNA, 19 nt, Homo sapiens
  misc_RNA (1)...(19): siRNA sense strand
uccucaagauaaagugaua

SEQ ID NO: 2268241 - RNA, 19 nt, Homo sapiens
  misc_RNA (1)...(19): siRNA sense strand
agugauacuuguaggcuca

SEQ ID NO: 2268242 - RNA, 19 nt, Homo sapiens
  misc_RNA (1)...(19): siRNA sense strand
caaucaaaggaguagaaaa

SEQ ID NO: 2268243 - RNA, 19 nt, Homo sapiens
  misc_RNA (1)...(19): siRNA sense strand
cagaaaucaaggauaucaa

SEQ ID NO: 2268244 - RNA, 19 nt, Homo sapiens
  misc_RNA (1)...(19): siRNA sense strand
ccagaagaagaacaagaaa

SEQ ID NO: 2268245 - RNA, 19 nt, Homo sapiens
  misc_RNA (1)...(19): siRNA sense strand
acacaacucugaauggcaa

SEQ ID NO: 2268246 - RNA, 19 nt, Homo sapiens
  misc_RNA (1)...(19): siRNA sense strand
acaauuugcaaguguggaa

SEQ ID NO: 2268247 - RNA, 19 nt, Homo sapiens
  misc_RNA (1)...(19): siRNA sense strand
ggaaguucuacaaguaaau

SEQ ID NO: 2268248 - RNA, 19 nt, Homo sapiens
  misc_RNA (1)...(19): siRNA sense strand
acucugaauggcaaagaua

SEQ ID NO: 2268249 - RNA, 19 nt, Homo sapiens
  misc_RNA (1)...(19): siRNA sense strand
gcggaaugucacaaucaaa

SEQ ID NO: 2268250 - RNA, 19 nt, Homo sapiens
  misc_RNA (1)...(19): siRNA sense strand
guggaguucugauggaaaa

SEQ ID NO: 2268251 - RNA, 19 nt, Homo sapiens
  misc_RNA (1)...(19): siRNA sense strand
caaaauagcgaguauggaa

SEQ ID NO: 2268252 - RNA, 19 nt, Homo sapiens
  misc_RNA (1)...(19): siRNA sense strand
ggaaacgagaauggauuaa

SEQ ID NO: 2268253 - RNA, 19 nt, Homo sapiens
  misc_RNA (1)...(19): siRNA sense strand
uagauaaaacugcggguua

SEQ ID NO: 2268254 - RNA, 19 nt, Homo sapiens
  misc_RNA (1)...(19): siRNA sense strand
cagaacaaaccaaacgauu

SEQ ID NO: 2268255 - RNA, 19 nt, Homo sapiens
  misc_RNA (1)...(19): siRNA sense strand
cugggaaauuaaaguucua

SEQ ID NO: 2268256 - RNA, 19 nt, Homo sapiens
  misc_RNA (1)...(19): siRNA sense strand
guaucagccucaagcaaaa

SEQ ID NO: 2268257 - RNA, 19 nt, Homo sapiens
  misc_RNA (1)...(19): siRNA sense strand
guuacagaccucaggccaa

SEQ ID NO: 2268258 - RNA, 19 nt, Homo sapiens
  misc_RNA (1)...(19): siRNA sense strand
gcucaaauguuaucuggga

SEQ ID NO: 2268259 - RNA, 19 nt, Homo sapiens
  misc_RNA (1)...(19): siRNA sense strand
guauggaugcagaaaucaa

SEQ ID NO: 2268260 - RNA, 19 nt, Homo sapiens
  misc_RNA (1)...(19): siRNA sense strand
guacaagagcagcggaaug

SEQ ID NO: 2268261 - RNA, 19 nt, Homo sapiens
  misc_RNA (1)...(19): siRNA sense strand
cuguauggaugcagaaauc

SEQ ID NO: 2268262 - RNA, 19 nt, Homo sapiens
  misc_RNA (1)...(19): siRNA sense strand
gaugcagaaaucaaggaua

SEQ ID NO: 2268263 - RNA, 19 nt, Homo sapiens
  misc_RNA (1)...(19): siRNA sense strand
gcucuuaaaacauuggaaa

SEQ ID NO: 2268264 - RNA, 19 nt, Homo sapiens
  misc_RNA (1)...(19): siRNA sense strand
agaugaagacucuccuaaa

SEQ ID NO: 2268265 - RNA, 19 nt, Homo sapiens
  misc_RNA (1)...(19): siRNA sense strand
aguucuacguaaagagagu

SEQ ID NO: 2268266 - RNA, 19 nt, Homo sapiens
  misc_RNA (1)...(19): siRNA sense strand
ugcaaguaguggaacaaau

SEQ ID NO: 2268267 - RNA, 19 nt, Homo sapiens
  misc_RNA (1)...(19): siRNA sense strand
cagagauacgacuugauaa

SEQ ID NO: 2268268 - RNA, 19 nt, Homo sapiens
  misc_RNA (1)...(19): siRNA sense strand
cagcacugaaacuguaaua

SEQ ID NO: 2268269 - RNA, 19 nt, Homo sapiens
  misc_RNA (1)...(19): siRNA sense strand
uguuaaacuuucuuggcau

SEQ ID NO: 2268270 - RNA, 19 nt, Homo sapiens
  misc_RNA (1)...(19): siRNA sense strand
gaugaggguuuuagaauca

SEQ ID NO: 2268271 - RNA, 19 nt, Homo sapiens
  misc_RNA (1)...(19): siRNA sense strand
ucggaaacgagaauggauu

SEQ ID NO: 2268272 - RNA, 19 nt, Homo sapiens
  misc_RNA (1)...(19): siRNA sense strand
ccaucauugaggaagaaau

SEQ ID NO: 2268273 - RNA, 19 nt, Homo sapiens
  misc_RNA (1)...(19): siRNA sense strand
ccauagacagcaacaguga

SEQ ID NO: 2268274 - RNA, 19 nt, Homo sapiens
  misc_RNA (1)...(19): siRNA sense strand
ccaagaaagcagaagggaa

SEQ ID NO: 2268275 - RNA, 19 nt, Homo sapiens
  misc_RNA (1)...(19): siRNA sense strand
caagaaagcagaagggaag

SEQ ID NO: 2268276 - RNA, 19 nt, Homo sapiens
  misc_RNA (1)...(19): siRNA sense strand
cugcaaguccguugaguau

SEQ ID NO: 2268277 - RNA, 19 nt, Homo sapiens
  misc_RNA (1)...(19): siRNA sense strand
guagcagugaagagaauaa

SEQ ID NO: 2268278 - RNA, 19 nt, Homo sapiens
  misc_RNA (1)...(19): siRNA sense strand
gaguaugcaaugaagaaau

SEQ ID NO: 2268279 - RNA, 19 nt, Homo sapiens
  misc_RNA (1)...(19): siRNA sense strand
gugauaugaaagaguggua

SEQ ID NO: 2268280 - RNA, 19 nt, Homo sapiens
  misc_RNA (1)...(19): siRNA sense strand
gcauaagaauggagaccac

SEQ ID NO: 2268281 - RNA, 19 nt, Homo sapiens
  misc_RNA (1)...(19): siRNA sense strand
ugacaacaagacaggcaaa

SEQ ID NO: 2268282 - RNA, 19 nt, Homo sapiens
  misc_RNA (1)...(19): siRNA sense strand
aagauaaugagaaggaaca

SEQ ID NO: 2268283 - RNA, 19 nt, Homo sapiens
  misc_RNA (1)...(19): siRNA sense strand
agaucaaguacgauggaga

SEQ ID NO: 2268284 - RNA, 19 nt, Homo sapiens
  misc_RNA (1)...(19): siRNA sense strand
ucucagaaaugaagcgagu

SEQ ID NO: 2268285 - RNA, 19 nt, Homo sapiens
  misc_RNA (1)...(19): siRNA sense strand
uggaagauaaugagaagga

SEQ ID NO: 2268286 - RNA, 19 nt, Homo sapiens
  misc_RNA (1)...(19): siRNA sense strand
ccuucaaagccucgcgcaa

SEQ ID NO: 2268287 - RNA, 19 nt, Homo sapiens
  misc_RNA (1)...(19): siRNA sense strand
cgucccagacccaaagaaa

SEQ ID NO: 2268288 - RNA, 19 nt, Homo sapiens
  misc_RNA (1)...(19): siRNA sense strand
ccaaggaggaugagcagca

SEQ ID NO: 2268289 - RNA, 19 nt, Homo sapiens
  misc_RNA (1)...(19): siRNA sense strand
ggaaaggcucagcaggaga

SEQ ID NO: 2268290 - RNA, 19 nt, Homo sapiens
  misc_RNA (1)...(19): siRNA sense strand
acacgaagacccagaucau

SEQ ID NO: 2268291 - RNA, 19 nt, Homo sapiens
  misc_RNA (1)...(19): siRNA sense strand
ucagaaaugaagcgaguca

SEQ ID NO: 2268292 - RNA, 19 nt, Homo sapiens
  misc_RNA (1)...(19): siRNA sense strand
cugaaggaugugaagggua

SEQ ID NO: 2268293 - RNA, 19 nt, Homo sapiens
  misc_RNA (1)...(19): siRNA sense strand
gaagauaaugagaaggaac

SEQ ID NO: 2268294 - RNA, 19 nt, Homo sapiens
  misc_RNA (1)...(19): siRNA sense strand
gcugggaagagcuggaaga

SEQ ID NO: 2268295 - RNA, 19 nt, Homo sapiens
  misc_RNA (1)...(19): siRNA sense strand
agaaaugaagcgagucaca

SEQ ID NO: 2268296 - RNA, 19 nt, Homo sapiens
  misc_RNA (1)...(19): siRNA sense strand
aagcuguuguccaggcuaa

SEQ ID NO: 2268297 - RNA, 19 nt, Homo sapiens
  misc_RNA (1)...(19): siRNA sense strand
ccaacagcaaagauggcaa

SEQ ID NO: 2268298 - RNA, 19 nt, Homo sapiens
  misc_RNA (1)...(19): siRNA sense strand
ucacagagcuggaaggcug

SEQ ID NO: 2268299 - RNA, 19 nt, Homo sapiens
  misc_RNA (1)...(19): siRNA sense strand
guacauaugagccugggaa

SEQ ID NO: 2268300 - RNA, 19 nt, Homo sapiens
  misc_RNA (1)...(19): siRNA sense strand
caaguacgauggagagcga

SEQ ID NO: 2268301 - RNA, 19 nt, Homo sapiens
  misc_RNA (1)...(19): siRNA sense strand
ugggaagagcuggaagaua

SEQ ID NO: 2268302 - RNA, 19 nt, Homo sapiens
  misc_RNA (1)...(19): siRNA sense strand
ugaaggaugugaaggguac

SEQ ID NO: 2268303 - RNA, 19 nt, Homo sapiens
  misc_RNA (1)...(19): siRNA sense strand
gaagaaagcuguuguccag

SEQ ID NO: 2268304 - RNA, 19 nt, Homo sapiens
  misc_RNA (1)...(19): siRNA sense strand
gcucagcaggagaugguuu

SEQ ID NO: 2268305 - RNA, 19 nt, Homo sapiens
  misc_RNA (1)...(19): siRNA sense strand
ccugcaaguccguugagua

SEQ ID NO: 2268306 - RNA, 19 nt, Homo sapiens
  misc_RNA (1)...(19): siRNA sense strand
uugaguaugcaaugaagaa

SEQ ID NO: 2268307 - RNA, 19 nt, Homo sapiens
  misc_RNA (1)...(19): siRNA sense strand
ucggaaaggcucagcagga

SEQ ID NO: 2268308 - RNA, 19 nt, Homo sapiens
  misc_RNA (1)...(19): siRNA sense strand
acgauaagcagauugugaa

SEQ ID NO: 2268309 - RNA, 19 nt, Homo sapiens
  misc_RNA (1)...(19): siRNA sense strand
agaaaugucccaauggcau

SEQ ID NO: 2268310 - RNA, 19 nt, Homo sapiens
  misc_RNA (1)...(19): siRNA sense strand
aacuagacauggugaagau

SEQ ID NO: 2268311 - RNA, 19 nt, Homo sapiens
  misc_RNA (1)...(19): siRNA sense strand
cagugaaaguaggggagaa

SEQ ID NO: 2268312 - RNA, 19 nt, Homo sapiens
  misc_RNA (1)...(19): siRNA sense strand
aaugagaaggaacagauaa

SEQ ID NO: 2268313 - RNA, 19 nt, Homo sapiens
  misc_RNA (1)...(19): siRNA sense strand
cagguacaccaaagaagaa

SEQ ID NO: 2268314 - RNA, 19 nt, Homo sapiens
  misc_RNA (1)...(19): siRNA sense strand
gccgauaauccuagcuaca

SEQ ID NO: 2268315 - RNA, 19 nt, Homo sapiens
  misc_RNA (1)...(19): siRNA sense strand
agaagaaagcuguugucca

SEQ ID NO: 2268316 - RNA, 19 nt, Homo sapiens
  misc_RNA (1)...(19): siRNA sense strand
uggcccacuuuaaggacua

SEQ ID NO: 2268317 - RNA, 19 nt, Homo sapiens
  misc_RNA (1)...(19): siRNA sense strand
gugaagggcguaugccgaa

SEQ ID NO: 2268318 - RNA, 19 nt, Homo sapiens
  misc_RNA (1)...(19): siRNA sense strand
agucugucuucaagcaaau

SEQ ID NO: 2268319 - RNA, 19 nt, Homo sapiens
  misc_RNA (1)...(19): siRNA sense strand
ggacauugccuccaggugu

SEQ ID NO: 2268320 - RNA, 19 nt, Homo sapiens
  misc_RNA (1)...(19): siRNA sense strand
gaagaugaacucaggugca

SEQ ID NO: 2268321 - RNA, 19 nt, Homo sapiens
  misc_RNA (1)...(19): siRNA sense strand
ccaagaaagcagaagggaa

SEQ ID NO: 2268322 - RNA, 19 nt, Homo sapiens
  misc_RNA (1)...(19): siRNA sense strand
caagaaagcagaagggaag

SEQ ID NO: 2268323 - RNA, 19 nt, Homo sapiens
  misc_RNA (1)...(19): siRNA sense strand
cugcaaguccguugaguau

SEQ ID NO: 2268324 - RNA, 19 nt, Homo sapiens
  misc_RNA (1)...(19): siRNA sense strand
guagcagugaagagaauaa

SEQ ID NO: 2268325 - RNA, 19 nt, Homo sapiens
  misc_RNA (1)...(19): siRNA sense strand
gaguaugcaaugaagaaau

SEQ ID NO: 2268326 - RNA, 19 nt, Homo sapiens
  misc_RNA (1)...(19): siRNA sense strand
gugauaugaaagaguggua

SEQ ID NO: 2268327 - RNA, 19 nt, Homo sapiens
  misc_RNA (1)...(19): siRNA sense strand
gcauaagaauggagaccac

SEQ ID NO: 2268328 - RNA, 19 nt, Homo sapiens
  misc_RNA (1)...(19): siRNA sense strand
ugacaacaagacaggcaaa

SEQ ID NO: 2268329 - RNA, 19 nt, Homo sapiens
  misc_RNA (1)...(19): siRNA sense strand
aagauaaugagaaggaaca

SEQ ID NO: 2268330 - RNA, 19 nt, Homo sapiens
  misc_RNA (1)...(19): siRNA sense strand
agaucaaguacgauggaga

SEQ ID NO: 2268331 - RNA, 19 nt, Homo sapiens
  misc_RNA (1)...(19): siRNA sense strand
ucucagaaaugaagcgagu

SEQ ID NO: 2268332 - RNA, 19 nt, Homo sapiens
  misc_RNA (1)...(19): siRNA sense strand
uggaagauaaugagaagga

SEQ ID NO: 2268333 - RNA, 19 nt, Homo sapiens
  misc_RNA (1)...(19): siRNA sense strand
ccuucaaagccucgcgcaa

SEQ ID NO: 2268334 - RNA, 19 nt, Homo sapiens
  misc_RNA (1)...(19): siRNA sense strand
cgucccagacccaaagaaa

SEQ ID NO: 2268335 - RNA, 19 nt, Homo sapiens
  misc_RNA (1)...(19): siRNA sense strand
ccaaggaggaugagcagca

SEQ ID NO: 2268336 - RNA, 19 nt, Homo sapiens
  misc_RNA (1)...(19): siRNA sense strand
ggaaaggcucagcaggaga

SEQ ID NO: 2268337 - RNA, 19 nt, Homo sapiens
  misc_RNA (1)...(19): siRNA sense strand
acacgaagacccagaucau

SEQ ID NO: 2268338 - RNA, 19 nt, Homo sapiens
  misc_RNA (1)...(19): siRNA sense strand
ucagaaaugaagcgaguca

SEQ ID NO: 2268339 - RNA, 19 nt, Homo sapiens
  misc_RNA (1)...(19): siRNA sense strand
cugaaggaugugaagggua

SEQ ID NO: 2268340 - RNA, 19 nt, Homo sapiens
  misc_RNA (1)...(19): siRNA sense strand
gaagauaaugagaaggaac

SEQ ID NO: 2268341 - RNA, 19 nt, Homo sapiens
  misc_RNA (1)...(19): siRNA sense strand
gcugggaagagcuggaaga

SEQ ID NO: 2268342 - RNA, 19 nt, Homo sapiens
  misc_RNA (1)...(19): siRNA sense strand
agaaaugaagcgagucaca

SEQ ID NO: 2268343 - RNA, 19 nt, Homo sapiens
  misc_RNA (1)...(19): siRNA sense strand
aagcuguuguccaggcuaa

SEQ ID NO: 2268344 - RNA, 19 nt, Homo sapiens
  misc_RNA (1)...(19): siRNA sense strand
ccaacagcaaagauggcaa

SEQ ID NO: 2268345 - RNA, 19 nt, Homo sapiens
  misc_RNA (1)...(19): siRNA sense strand
ucacagagcuggaaggcug

SEQ ID NO: 2268346 - RNA, 19 nt, Homo sapiens
  misc_RNA (1)...(19): siRNA sense strand
guacauaugagccugggaa

SEQ ID NO: 2268347 - RNA, 19 nt, Homo sapiens
  misc_RNA (1)...(19): siRNA sense strand
caaguacgauggagagcga

SEQ ID NO: 2268348 - RNA, 19 nt, Homo sapiens
  misc_RNA (1)...(19): siRNA sense strand
ugggaagagcuggaagaua

SEQ ID NO: 2268349 - RNA, 19 nt, Homo sapiens
  misc_RNA (1)...(19): siRNA sense strand
ugaaggaugugaaggguac

SEQ ID NO: 2268350 - RNA, 19 nt, Homo sapiens
  misc_RNA (1)...(19): siRNA sense strand
gaagaaagcuguuguccag

SEQ ID NO: 2268351 - RNA, 19 nt, Homo sapiens
  misc_RNA (1)...(19): siRNA sense strand
gcucagcaggagaugguuu

SEQ ID NO: 2268352 - RNA, 19 nt, Homo sapiens
  misc_RNA (1)...(19): siRNA sense strand
ccugcaaguccguugagua

SEQ ID NO: 2268353 - RNA, 19 nt, Homo sapiens
  misc_RNA (1)...(19): siRNA sense strand
uugaguaugcaaugaagaa

SEQ ID NO: 2268354 - RNA, 19 nt, Homo sapiens
  misc_RNA (1)...(19): siRNA sense strand
ucggaaaggcucagcagga

SEQ ID NO: 2268355 - RNA, 19 nt, Homo sapiens
  misc_RNA (1)...(19): siRNA sense strand
acgauaagcagauugugaa

SEQ ID NO: 2268356 - RNA, 19 nt, Homo sapiens
  misc_RNA (1)...(19): siRNA sense strand
agaaaugucccaauggcau

SEQ ID NO: 2268357 - RNA, 19 nt, Homo sapiens
  misc_RNA (1)...(19): siRNA sense strand
aacuagacauggugaagau

SEQ ID NO: 2268358 - RNA, 19 nt, Homo sapiens
  misc_RNA (1)...(19): siRNA sense strand
cagugaaaguaggggagaa

SEQ ID NO: 2268359 - RNA, 19 nt, Homo sapiens
  misc_RNA (1)...(19): siRNA sense strand
aaugagaaggaacagauaa

SEQ ID NO: 2268360 - RNA, 19 nt, Homo sapiens
  misc_RNA (1)...(19): siRNA sense strand
cagguacaccaaagaagaa

SEQ ID NO: 2268361 - RNA, 19 nt, Homo sapiens
  misc_RNA (1)...(19): siRNA sense strand
gccgauaauccuagcuaca

SEQ ID NO: 2268362 - RNA, 19 nt, Homo sapiens
  misc_RNA (1)...(19): siRNA sense strand
agaagaaagcuguugucca

SEQ ID NO: 2268363 - RNA, 19 nt, Homo sapiens
  misc_RNA (1)...(19): siRNA sense strand
uggcccacuuuaaggacua

SEQ ID NO: 2268364 - RNA, 19 nt, Homo sapiens
  misc_RNA (1)...(19): siRNA sense strand
gugaagggcguaugccgaa

SEQ ID NO: 2268365 - RNA, 19 nt, Homo sapiens
  misc_RNA (1)...(19): siRNA sense strand
agucugucuucaagcaaau

SEQ ID NO: 2268366 - RNA, 19 nt, Homo sapiens
  misc_RNA (1)...(19): siRNA sense strand
ggacauugccuccaggugu

SEQ ID NO: 2268367 - RNA, 19 nt, Homo sapiens
  misc_RNA (1)...(19): siRNA sense strand
gaagaugaacucaggugca

SEQ ID NO: 2268368 - RNA, 19 nt, Homo sapiens
  misc_RNA (1)...(19): siRNA sense strand
aaguaaaggacgugcagaa

SEQ ID NO: 2268369 - RNA, 19 nt, Homo sapiens
  misc_RNA (1)...(19): siRNA sense strand
cuaaaagaaaguuggguaa

SEQ ID NO: 2268370 - RNA, 19 nt, Homo sapiens
  misc_RNA (1)...(19): siRNA sense strand
acaaagauggagauguaua

SEQ ID NO: 2268371 - RNA, 19 nt, Homo sapiens
  misc_RNA (1)...(19): siRNA sense strand
caugagacucugagaaaga

SEQ ID NO: 2268372 - RNA, 19 nt, Homo sapiens
  misc_RNA (1)...(19): siRNA sense strand
ugagaacaucagagugaaa

SEQ ID NO: 2268373 - RNA, 19 nt, Homo sapiens
  misc_RNA (1)...(19): siRNA sense strand
gccuauggaauuaaagaaa

SEQ ID NO: 2268374 - RNA, 19 nt, Homo sapiens
  misc_RNA (1)...(19): siRNA sense strand
gagcacauugagaaggaua

SEQ ID NO: 2268375 - RNA, 19 nt, Homo sapiens
  misc_RNA (1)...(19): siRNA sense strand
auaaaagagaagagggaau

SEQ ID NO: 2268376 - RNA, 19 nt, Homo sapiens
  misc_RNA (1)...(19): siRNA sense strand
agagaauggccuauggaau

SEQ ID NO: 2268377 - RNA, 19 nt, Homo sapiens
  misc_RNA (1)...(19): siRNA sense strand
guucagcacuugagcaaaa

SEQ ID NO: 2268378 - RNA, 19 nt, Homo sapiens
  misc_RNA (1)...(19): siRNA sense strand
aagagggaauuaugguaaa

SEQ ID NO: 2268379 - RNA, 19 nt, Homo sapiens
  misc_RNA (1)...(19): siRNA sense strand
agcuagaaagagagagaau

SEQ ID NO: 2268380 - RNA, 19 nt, Homo sapiens
  misc_RNA (1)...(19): siRNA sense strand
gaguucagcacuugagcaa

SEQ ID NO: 2268381 - RNA, 19 nt, Homo sapiens
  misc_RNA (1)...(19): siRNA sense strand
ggagaacagaauugcagaa

SEQ ID NO: 2268382 - RNA, 19 nt, Homo sapiens
  misc_RNA (1)...(19): siRNA sense strand
gugugaauuacaagaagaa

SEQ ID NO: 2268383 - RNA, 19 nt, Homo sapiens
  misc_RNA (1)...(19): siRNA sense strand
cuacauagaaaccaagcua

SEQ ID NO: 2268384 - RNA, 19 nt, Homo sapiens
  misc_RNA (1)...(19): siRNA sense strand
acauagaaaccaagcuaga

SEQ ID NO: 2268385 - RNA, 19 nt, Homo sapiens
  misc_RNA (1)...(19): siRNA sense strand
ccuaaaagaaaguugggua

SEQ ID NO: 2268386 - RNA, 19 nt, Homo sapiens
  misc_RNA (1)...(19): siRNA sense strand
cugucauuguucagauuaa

SEQ ID NO: 2268387 - RNA, 19 nt, Homo sapiens
  misc_RNA (1)...(19): siRNA sense strand
ucaauagacaagugugaau

SEQ ID NO: 2268388 - RNA, 19 nt, Homo sapiens
  misc_RNA (1)...(19): siRNA sense strand
aaguuuaaccauacagcaa

SEQ ID NO: 2268389 - RNA, 19 nt, Homo sapiens
  misc_RNA (1)...(19): siRNA sense strand
cggaugaucauaaaggauu

SEQ ID NO: 2268390 - RNA, 19 nt, Homo sapiens
  misc_RNA (1)...(19): siRNA sense strand
agaguaugucaguggacua

SEQ ID NO: 2268391 - RNA, 19 nt, Homo sapiens
  misc_RNA (1)...(19): siRNA sense strand
ccaugaaagaacuguauga

SEQ ID NO: 2268392 - RNA, 19 nt, Homo sapiens
  misc_RNA (1)...(19): siRNA sense strand
ucagcuagaaagagagaga

SEQ ID NO: 2268393 - RNA, 19 nt, Homo sapiens
  misc_RNA (1)...(19): siRNA sense strand
gcuugguguuagucagcaa

SEQ ID NO: 2268394 - RNA, 19 nt, Homo sapiens
  misc_RNA (1)...(19): siRNA sense strand
gggcaugagacucugagaa

SEQ ID NO: 2268395 - RNA, 19 nt, Homo sapiens
  misc_RNA (1)...(19): siRNA sense strand
agauaaaagagaagaggga

SEQ ID NO: 2268396 - RNA, 19 nt, Homo sapiens
  misc_RNA (1)...(19): siRNA sense strand
uugagaaggauaugaaaca

SEQ ID NO: 2268397 - RNA, 19 nt, Homo sapiens
  misc_RNA (1)...(19): siRNA sense strand
uugcagauauugagcacau

SEQ ID NO: 2268398 - RNA, 19 nt, Homo sapiens
  misc_RNA (1)...(19): siRNA sense strand
cugagaaagagguaugaga

SEQ ID NO: 2268399 - RNA, 19 nt, Homo sapiens
  misc_RNA (1)...(19): siRNA sense strand
guaacugauucaauagaca

SEQ ID NO: 2268400 - RNA, 19 nt, Homo sapiens
  misc_RNA (1)...(19): siRNA sense strand
aguaaaggacgugcagaaa

SEQ ID NO: 2268401 - RNA, 19 nt, Homo sapiens
  misc_RNA (1)...(19): siRNA sense strand
guugaagccaagauguuua

SEQ ID NO: 2268402 - RNA, 19 nt, Homo sapiens
  misc_RNA (1)...(19): siRNA sense strand
agauaagagaugacaagga

SEQ ID NO: 2268403 - RNA, 19 nt, Homo sapiens
  misc_RNA (1)...(19): siRNA sense strand
gggaauuaugguaaaacaa

SEQ ID NO: 2268404 - RNA, 19 nt, Homo sapiens
  misc_RNA (1)...(19): siRNA sense strand
uugcagaauuuggugguua

SEQ ID NO: 2268405 - RNA, 19 nt, Homo sapiens
  misc_RNA (1)...(19): siRNA sense strand
acuaauucuuccucagcua

SEQ ID NO: 2268406 - RNA, 19 nt, Homo sapiens
  misc_RNA (1)...(19): siRNA sense strand
ggauuuaaagcuugguguu

SEQ ID NO: 2268407 - RNA, 19 nt, Homo sapiens
  misc_RNA (1)...(19): siRNA sense strand
cauucaaagcagauauaca

SEQ ID NO: 2268408 - RNA, 19 nt, Homo sapiens
  misc_RNA (1)...(19): siRNA sense strand
gaaagagguaugagauucu

SEQ ID NO: 2268409 - RNA, 19 nt, Homo sapiens
  misc_RNA (1)...(19): siRNA sense strand
gaaugaaguaauugaugca

SEQ ID NO: 2268410 - RNA, 19 nt, Homo sapiens
  misc_RNA (1)...(19): siRNA sense strand
agccagaaguauacauuga

SEQ ID NO: 2268411 - RNA, 19 nt, Homo sapiens
  misc_RNA (1)...(19): siRNA sense strand
auucaauagacaaguguga

SEQ ID NO: 2268412 - RNA, 19 nt, Homo sapiens
  misc_RNA (1)...(19): siRNA sense strand
ccauacagcaaguaaacga

SEQ ID NO: 2268413 - RNA, 19 nt, Homo sapiens
  misc_RNA (1)...(19): siRNA sense strand
guaaaggacgugcagaaaa

SEQ ID NO: 2268414 - RNA, 19 nt, Homo sapiens
  misc_RNA (1)...(19): siRNA sense strand
ccccaaagaugaagaaagu

SEQ ID NO: 2268415 - RNA, 19 nt, Homo sapiens
  misc_RNA (1)...(19): siRNA sense strand
cuguguaauugcagggucu

SEQ ID NO: 2268416 - RNA, 19 nt, Homo sapiens
  misc_RNA (1)...(19): siRNA sense strand
uugcagggucugagaacau

SEQ ID NO: 2268417 - RNA, 19 nt, Homo sapiens
  misc_RNA (1)...(19): siRNA sense strand
aaagagagagaauggccua

SEQ ID NO: 2268418 - RNA, 19 nt, Homo sapiens
  misc_RNA (1)...(19): siRNA sense strand
acucguaugcuguuauuaa

SEQ ID NO: 2268419 - RNA, 19 nt, Homo sapiens
  misc_RNA (1)...(19): siRNA sense strand
uaaccauacagcaaguaaa

SEQ ID NO: 2268420 - RNA, 19 nt, Homo sapiens
  misc_RNA (1)...(19): siRNA sense strand
uguaggacucagugauauu

SEQ ID NO: 2268421 - RNA, 19 nt, Homo sapiens
  misc_RNA (1)...(19): siRNA sense strand
ggauaugaaacaucagagu

SEQ ID NO: 2268422 - RNA, 19 nt, Homo sapiens
  misc_RNA (1)...(19): siRNA sense strand
uccagguagaauagaaaua

SEQ ID NO: 2268423 - RNA, 19 nt, Homo sapiens
  misc_RNA (1)...(19): siRNA sense strand
ugaaccaacugaaggaagu

SEQ ID NO: 2268424 - RNA, 19 nt, Homo sapiens
  misc_RNA (1)...(19): siRNA sense strand
gcagaaaacacaagcucau

SEQ ID NO: 2268425 - RNA, 19 nt, Homo sapiens
  misc_RNA (1)...(19): siRNA sense strand
agaggugaagggugguuaa

SEQ ID NO: 2268426 - RNA, 19 nt, Homo sapiens
  misc_RNA (1)...(19): siRNA sense strand
uauagguggugaugaugaa

SEQ ID NO: 2268427 - RNA, 19 nt, Homo sapiens
  misc_RNA (1)...(19): siRNA sense strand
gggaagaacguaugggaga

SEQ ID NO: 2268428 - RNA, 19 nt, Homo sapiens
  misc_RNA (1)...(19): siRNA sense strand
ucaagaagccagaccgcaa

SEQ ID NO: 2268429 - RNA, 19 nt, Homo sapiens
  misc_RNA (1)...(19): siRNA sense strand
agaauguggugguggcuga

SEQ ID NO: 2268430 - RNA, 19 nt, Homo sapiens
  misc_RNA (1)...(19): siRNA sense strand
agaacguaugggagaggaa

SEQ ID NO: 2268431 - RNA, 19 nt, Homo sapiens
  misc_RNA (1)...(19): siRNA sense strand
gaggagacccagaggacgu

SEQ ID NO: 2268432 - RNA, 19 nt, Homo sapiens
  misc_RNA (1)...(19): siRNA sense strand
aggugauggugaugaagga

SEQ ID NO: 2268433 - RNA, 19 nt, Homo sapiens
  misc_RNA (1)...(19): siRNA sense strand
aggugaaggucaugcgaug

SEQ ID NO: 2268434 - RNA, 19 nt, Homo sapiens
  misc_RNA (1)...(19): siRNA sense strand
ccuacacgcugguggagca

SEQ ID NO: 2268435 - RNA, 19 nt, Homo sapiens
  misc_RNA (1)...(19): siRNA sense strand
gggaagaacguaugggaga

SEQ ID NO: 2268436 - RNA, 19 nt, Homo sapiens
  misc_RNA (1)...(19): siRNA sense strand
agaacguaugggagaggaa

SEQ ID NO: 2268437 - RNA, 19 nt, Homo sapiens
  misc_RNA (1)...(19): siRNA sense strand
ccuacacgcugguggagca

SEQ ID NO: 2268438 - RNA, 19 nt, Homo sapiens
  misc_RNA (1)...(19): siRNA sense strand
ugcugaaggcauuggacaa

SEQ ID NO: 2268439 - RNA, 19 nt, Homo sapiens
  misc_RNA (1)...(19): siRNA sense strand
gcaagaucaaggaccgcua

SEQ ID NO: 2268440 - RNA, 19 nt, Homo sapiens
  misc_RNA (1)...(19): siRNA sense strand
ggagacagugguagggaga

SEQ ID NO: 2268441 - RNA, 19 nt, Homo sapiens
  misc_RNA (1)...(19): siRNA sense strand
caacaaaaguaaugggaag

SEQ ID NO: 2268442 - RNA, 19 nt, Homo sapiens
  misc_RNA (1)...(19): siRNA sense strand
ugguaggagaaaaggguaa

SEQ ID NO: 2268443 - RNA, 19 nt, Homo sapiens
  misc_RNA (1)...(19): siRNA sense strand
gugagagaauccuggcaga

SEQ ID NO: 2268444 - RNA, 19 nt, Homo sapiens
  misc_RNA (1)...(19): siRNA sense strand
uggcuguggcagugagaga

SEQ ID NO: 2268445 - RNA, 19 nt, Homo sapiens
  misc_RNA (1)...(19): siRNA sense strand
cagaagaaagggaugacca

SEQ ID NO: 2268446 - RNA, 19 nt, Homo sapiens
  misc_RNA (1)...(19): siRNA sense strand
agaagaaagggaugaccau

SEQ ID NO: 2268447 - RNA, 19 nt, Homo sapiens
  misc_RNA (1)...(19): siRNA sense strand
ggagaaaaggguaaagagu

SEQ ID NO: 2268448 - RNA, 19 nt, Homo sapiens
  misc_RNA (1)...(19): siRNA sense strand
agacagugguagggagacu

SEQ ID NO: 2268449 - RNA, 19 nt, Homo sapiens
  misc_RNA (1)...(19): siRNA sense strand
acugguagugggagccaaa

SEQ ID NO: 2268450 - RNA, 19 nt, Homo sapiens
  misc_RNA (1)...(19): siRNA sense strand
gagccaaaggaauggagca

SEQ ID NO: 2268451 - RNA, 19 nt, Homo sapiens
  misc_RNA (1)...(19): siRNA sense strand
caacggaaguaauuggauc

SEQ ID NO: 2268452 - RNA, 19 nt, Homo sapiens
  misc_RNA (1)...(19): siRNA sense strand
acucacaucuucaacggaa

SEQ ID NO: 2268453 - RNA, 19 nt, Homo sapiens
  misc_RNA (1)...(19): siRNA sense strand
agucagaagaaagggauga

SEQ ID NO: 2268454 - RNA, 19 nt, Homo sapiens
  misc_RNA (1)...(19): siRNA sense strand
gcuguggcagugagagaau

SEQ ID NO: 2268455 - RNA, 19 nt, Homo sapiens
  misc_RNA (1)...(19): siRNA sense strand
gaauaaagcugcaggacag

SEQ ID NO: 2268456 - RNA, 19 nt, Homo sapiens
  misc_RNA (1)...(19): siRNA sense strand
agaauaaagcugcaggaca

SEQ ID NO: 2268457 - RNA, 19 nt, Homo sapiens
  misc_RNA (1)...(19): siRNA sense strand
uugaagauugugacagaaa

SEQ ID NO: 2268458 - RNA, 19 nt, Homo sapiens
  misc_RNA (1)...(19): siRNA sense strand
cugaagaggcagcuggaga

SEQ ID NO: 2268459 - RNA, 19 nt, Homo sapiens
  misc_RNA (1)...(19): siRNA sense strand
gagaggauccggauggaca

SEQ ID NO: 2268460 - RNA, 19 nt, Homo sapiens
  misc_RNA (1)...(19): siRNA sense strand
agaucaacucacaaugaaa

SEQ ID NO: 2268461 - RNA, 19 nt, Homo sapiens
  misc_RNA (1)...(19): siRNA sense strand
gaauaacagcaguagcaga

SEQ ID NO: 2268462 - RNA, 19 nt, Homo sapiens
  misc_RNA (1)...(19): siRNA sense strand
ccauacaauaacaaggaca

SEQ ID NO: 2268463 - RNA, 19 nt, Homo sapiens
  misc_RNA (1)...(19): siRNA sense strand
ggagaagaauagacgggcu

SEQ ID NO: 2268464 - RNA, 19 nt, Homo sapiens
  misc_RNA (1)...(19): siRNA sense strand
gaucuggacuggagcagca

SEQ ID NO: 2268465 - RNA, 19 nt, Homo sapiens
  misc_RNA (1)...(19): siRNA sense strand
gggagagagaagcugaaca

SEQ ID NO: 2268466 - RNA, 19 nt, Homo sapiens
  misc_RNA (1)...(19): siRNA sense strand
ucgaccagcuucagcgaga

SEQ ID NO: 2268467 - RNA, 19 nt, Homo sapiens
  misc_RNA (1)...(19): siRNA sense strand
gccuuaaaacggaggaaca

SEQ ID NO: 2268468 - RNA, 19 nt, Homo sapiens
  misc_RNA (1)...(19): siRNA sense strand
cggaggaacaaauccaaaa

SEQ ID NO: 2268469 - RNA, 19 nt, Homo sapiens
  misc_RNA (1)...(19): siRNA sense strand
augaaauggagaagaauag

SEQ ID NO: 2268470 - RNA, 19 nt, Homo sapiens
  misc_RNA (1)...(19): siRNA sense strand
cggugauuguggagaugaa

SEQ ID NO: 2268471 - RNA, 19 nt, Homo sapiens
  misc_RNA (1)...(19): siRNA sense strand
gcugcauggugccggacaa

SEQ ID NO: 2268472 - RNA, 19 nt, Homo sapiens
  misc_RNA (1)...(19): siRNA sense strand
aaguaguccacgagagcuu

SEQ ID NO: 2268473 - RNA, 19 nt, Homo sapiens
  misc_RNA (1)...(19): siRNA sense strand
ccgugucacccgaggauga

SEQ ID NO: 2268474 - RNA, 19 nt, Homo sapiens
  misc_RNA (1)...(19): siRNA sense strand
gguguguggcugagaacca

SEQ ID NO: 2268475 - RNA, 19 nt, Homo sapiens
  misc_RNA (1)...(19): siRNA sense strand
ccgagaaugccuauggcca

SEQ ID NO: 2268476 - RNA, 19 nt, Homo sapiens
  misc_RNA (1)...(19): siRNA sense strand
cggugauuguggagaugaa

SEQ ID NO: 2268477 - RNA, 19 nt, Homo sapiens
  misc_RNA (1)...(19): siRNA sense strand
gcugcauggugccggacaa

SEQ ID NO: 2268478 - RNA, 19 nt, Homo sapiens
  misc_RNA (1)...(19): siRNA sense strand
aaguaguccacgagagcuu

SEQ ID NO: 2268479 - RNA, 19 nt, Homo sapiens
  misc_RNA (1)...(19): siRNA sense strand
ccgugucacccgaggauga

SEQ ID NO: 2268480 - RNA, 19 nt, Homo sapiens
  misc_RNA (1)...(19): siRNA sense strand
gguguguggcugagaacca

SEQ ID NO: 2268481 - RNA, 19 nt, Homo sapiens
  misc_RNA (1)...(19): siRNA sense strand
ccgagaaugccuauggcca

SEQ ID NO: 2268482 - RNA, 19 nt, Homo sapiens
  misc_RNA (1)...(19): siRNA sense strand
ggacaaagucucugacgga

SEQ ID NO: 2268483 - RNA, 19 nt, Homo sapiens
  misc_RNA (1)...(19): siRNA sense strand
gugaaaauugagaguguaa

SEQ ID NO: 2268484 - RNA, 19 nt, Homo sapiens
  misc_RNA (1)...(19): siRNA sense strand
gauuaaggaucaaggcgga

SEQ ID NO: 2268485 - RNA, 19 nt, Homo sapiens
  misc_RNA (1)...(19): siRNA sense strand
guguauuuaaacaggcaaa

SEQ ID NO: 2268486 - RNA, 19 nt, Homo sapiens
  misc_RNA (1)...(19): siRNA sense strand
acaucaaauaccagccuaa

SEQ ID NO: 2268487 - RNA, 19 nt, Homo sapiens
  misc_RNA (1)...(19): siRNA sense strand
agaccuaagccaugugaca

SEQ ID NO: 2268488 - RNA, 19 nt, Homo sapiens
  misc_RNA (1)...(19): siRNA sense strand
ccaccaggucagagccaau

SEQ ID NO: 2268489 - RNA, 19 nt, Homo sapiens
  misc_RNA (1)...(19): siRNA sense strand
agaaugggaucaacggaga

SEQ ID NO: 2268490 - RNA, 19 nt, Homo sapiens
  misc_RNA (1)...(19): siRNA sense strand
aguccugaaaggugaacaa

SEQ ID NO: 2268491 - RNA, 19 nt, Homo sapiens
  misc_RNA (1)...(19): siRNA sense strand
gugugaaaauugagagugu

SEQ ID NO: 2268492 - RNA, 19 nt, Homo sapiens
  misc_RNA (1)...(19): siRNA sense strand
gagaaacagcagaggaggu

SEQ ID NO: 2268493 - RNA, 19 nt, Homo sapiens
  misc_RNA (1)...(19): siRNA sense strand
agaugaacggaaagacgaa

SEQ ID NO: 2268494 - RNA, 19 nt, Homo sapiens
  misc_RNA (1)...(19): siRNA sense strand
gaaaauagaccuaagccau

SEQ ID NO: 2268495 - RNA, 19 nt, Homo sapiens
  misc_RNA (1)...(19): siRNA sense strand
cauacagggaggaugaaga

SEQ ID NO: 2268496 - RNA, 19 nt, Homo sapiens
  misc_RNA (1)...(19): siRNA sense strand
aggagacagagaugagaau

SEQ ID NO: 2268497 - RNA, 19 nt, Homo sapiens
  misc_RNA (1)...(19): siRNA sense strand
agagcagggaagaguggua

SEQ ID NO: 2268498 - RNA, 19 nt, Homo sapiens
  misc_RNA (1)...(19): siRNA sense strand
caggagacagagaugagaa

SEQ ID NO: 2268499 - RNA, 19 nt, Homo sapiens
  misc_RNA (1)...(19): siRNA sense strand
gagcaugggucacagggca

SEQ ID NO: 2268500 - RNA, 19 nt, Homo sapiens
  misc_RNA (1)...(19): siRNA sense strand
uagcaguccugaaagguga

SEQ ID NO: 2268501 - RNA, 19 nt, Homo sapiens
  misc_RNA (1)...(19): siRNA sense strand
acaagagaaagaagcucaa

SEQ ID NO: 2268502 - RNA, 19 nt, Homo sapiens
  misc_RNA (1)...(19): siRNA sense strand
agguggcggacgugugaaa

SEQ ID NO: 2268503 - RNA, 19 nt, Homo sapiens
  misc_RNA (1)...(19): siRNA sense strand
aguugguucucuugauaau

SEQ ID NO: 2268504 - RNA, 19 nt, Homo sapiens
  misc_RNA (1)...(19): siRNA sense strand
ggacaaagucucugacgga

SEQ ID NO: 2268505 - RNA, 19 nt, Homo sapiens
  misc_RNA (1)...(19): siRNA sense strand
gugaaaauugagaguguaa

SEQ ID NO: 2268506 - RNA, 19 nt, Homo sapiens
  misc_RNA (1)...(19): siRNA sense strand
gauuaaggaucaaggcgga

SEQ ID NO: 2268507 - RNA, 19 nt, Homo sapiens
  misc_RNA (1)...(19): siRNA sense strand
guguauuuaaacaggcaaa

SEQ ID NO: 2268508 - RNA, 19 nt, Homo sapiens
  misc_RNA (1)...(19): siRNA sense strand
acaucaaauaccagccuaa

SEQ ID NO: 2268509 - RNA, 19 nt, Homo sapiens
  misc_RNA (1)...(19): siRNA sense strand
agaccuaagccaugugaca

SEQ ID NO: 2268510 - RNA, 19 nt, Homo sapiens
  misc_RNA (1)...(19): siRNA sense strand
ccaccaggucagagccaau

SEQ ID NO: 2268511 - RNA, 19 nt, Homo sapiens
  misc_RNA (1)...(19): siRNA sense strand
agaaugggaucaacggaga

SEQ ID NO: 2268512 - RNA, 19 nt, Homo sapiens
  misc_RNA (1)...(19): siRNA sense strand
aguccugaaaggugaacaa

SEQ ID NO: 2268513 - RNA, 19 nt, Homo sapiens
  misc_RNA (1)...(19): siRNA sense strand
gugugaaaauugagagugu

SEQ ID NO: 2268514 - RNA, 19 nt, Homo sapiens
  misc_RNA (1)...(19): siRNA sense strand
gagaaacagcagaggaggu

SEQ ID NO: 2268515 - RNA, 19 nt, Homo sapiens
  misc_RNA (1)...(19): siRNA sense strand
agaugaacggaaagacgaa

SEQ ID NO: 2268516 - RNA, 19 nt, Homo sapiens
  misc_RNA (1)...(19): siRNA sense strand
gaaaauagaccuaagccau

SEQ ID NO: 2268517 - RNA, 19 nt, Homo sapiens
  misc_RNA (1)...(19): siRNA sense strand
cauacagggaggaugaaga

SEQ ID NO: 2268518 - RNA, 19 nt, Homo sapiens
  misc_RNA (1)...(19): siRNA sense strand
aggagacagagaugagaau

SEQ ID NO: 2268519 - RNA, 19 nt, Homo sapiens
  misc_RNA (1)...(19): siRNA sense strand
agagcagggaagaguggua

SEQ ID NO: 2268520 - RNA, 19 nt, Homo sapiens
  misc_RNA (1)...(19): siRNA sense strand
caggagacagagaugagaa

SEQ ID NO: 2268521 - RNA, 19 nt, Homo sapiens
  misc_RNA (1)...(19): siRNA sense strand
gagcaugggucacagggca

SEQ ID NO: 2268522 - RNA, 19 nt, Homo sapiens
  misc_RNA (1)...(19): siRNA sense strand
uagcaguccugaaagguga

SEQ ID NO: 2268523 - RNA, 19 nt, Homo sapiens
  misc_RNA (1)...(19): siRNA sense strand
acaagagaaagaagcucaa

SEQ ID NO: 2268524 - RNA, 19 nt, Homo sapiens
  misc_RNA (1)...(19): siRNA sense strand
agguggcggacgugugaaa

SEQ ID NO: 2268525 - RNA, 19 nt, Homo sapiens
  misc_RNA (1)...(19): siRNA sense strand
aguugguucucuugauaau

SEQ ID NO: 2268526 - RNA, 19 nt, Homo sapiens
  misc_RNA (1)...(19): siRNA sense strand
ggacaaagucucugacgga

SEQ ID NO: 2268527 - RNA, 19 nt, Homo sapiens
  misc_RNA (1)...(19): siRNA sense strand
gugaaaauugagaguguaa

SEQ ID NO: 2268528 - RNA, 19 nt, Homo sapiens
  misc_RNA (1)...(19): siRNA sense strand
gauuaaggaucaaggcgga

SEQ ID NO: 2268529 - RNA, 19 nt, Homo sapiens
  misc_RNA (1)...(19): siRNA sense strand
guguauuuaaacaggcaaa

SEQ ID NO: 2268530 - RNA, 19 nt, Homo sapiens
  misc_RNA (1)...(19): siRNA sense strand
acaucaaauaccagccuaa

SEQ ID NO: 2268531 - RNA, 19 nt, Homo sapiens
  misc_RNA (1)...(19): siRNA sense strand
agaccuaagccaugugaca

SEQ ID NO: 2268532 - RNA, 19 nt, Homo sapiens
  misc_RNA (1)...(19): siRNA sense strand
ccaccaggucagagccaau

SEQ ID NO: 2268533 - RNA, 19 nt, Homo sapiens
  misc_RNA (1)...(19): siRNA sense strand
agaaugggaucaacggaga

SEQ ID NO: 2268534 - RNA, 19 nt, Homo sapiens
  misc_RNA (1)...(19): siRNA sense strand
aguccugaaaggugaacaa

SEQ ID NO: 2268535 - RNA, 19 nt, Homo sapiens
  misc_RNA (1)...(19): siRNA sense strand
gugugaaaauugagagugu

SEQ ID NO: 2268536 - RNA, 19 nt, Homo sapiens
  misc_RNA (1)...(19): siRNA sense strand
gagaaacagcagaggaggu

SEQ ID NO: 2268537 - RNA, 19 nt, Homo sapiens
  misc_RNA (1)...(19): siRNA sense strand
agaugaacggaaagacgaa

SEQ ID NO: 2268538 - RNA, 19 nt, Homo sapiens
  misc_RNA (1)...(19): siRNA sense strand
gaaaauagaccuaagccau

SEQ ID NO: 2268539 - RNA, 19 nt, Homo sapiens
  misc_RNA (1)...(19): siRNA sense strand
cauacagggaggaugaaga

SEQ ID NO: 2268540 - RNA, 19 nt, Homo sapiens
  misc_RNA (1)...(19): siRNA sense strand
aggagacagagaugagaau

SEQ ID NO: 2268541 - RNA, 19 nt, Homo sapiens
  misc_RNA (1)...(19): siRNA sense strand
agagcagggaagaguggua

SEQ ID NO: 2268542 - RNA, 19 nt, Homo sapiens
  misc_RNA (1)...(19): siRNA sense strand
caggagacagagaugagaa

SEQ ID NO: 2268543 - RNA, 19 nt, Homo sapiens
  misc_RNA (1)...(19): siRNA sense strand
gagcaugggucacagggca

SEQ ID NO: 2268544 - RNA, 19 nt, Homo sapiens
  misc_RNA (1)...(19): siRNA sense strand
uagcaguccugaaagguga

SEQ ID NO: 2268545 - RNA, 19 nt, Homo sapiens
  misc_RNA (1)...(19): siRNA sense strand
acaagagaaagaagcucaa

SEQ ID NO: 2268546 - RNA, 19 nt, Homo sapiens
  misc_RNA (1)...(19): siRNA sense strand
agguggcggacgugugaaa

SEQ ID NO: 2268547 - RNA, 19 nt, Homo sapiens
  misc_RNA (1)...(19): siRNA sense strand
aguugguucucuugauaau

SEQ ID NO: 2268548 - RNA, 19 nt, Homo sapiens
  misc_RNA (1)...(19): siRNA sense strand
ggacaaagucucugacgga

SEQ ID NO: 2268549 - RNA, 19 nt, Homo sapiens
  misc_RNA (1)...(19): siRNA sense strand
gugaaaauugagaguguaa

SEQ ID NO: 2268550 - RNA, 19 nt, Homo sapiens
  misc_RNA (1)...(19): siRNA sense strand
gauuaaggaucaaggcgga

SEQ ID NO: 2268551 - RNA, 19 nt, Homo sapiens
  misc_RNA (1)...(19): siRNA sense strand
guguauuuaaacaggcaaa

SEQ ID NO: 2268552 - RNA, 19 nt, Homo sapiens
  misc_RNA (1)...(19): siRNA sense strand
acaucaaauaccagccuaa

SEQ ID NO: 2268553 - RNA, 19 nt, Homo sapiens
  misc_RNA (1)...(19): siRNA sense strand
agaccuaagccaugugaca

SEQ ID NO: 2268554 - RNA, 19 nt, Homo sapiens
  misc_RNA (1)...(19): siRNA sense strand
ccaccaggucagagccaau

SEQ ID NO: 2268555 - RNA, 19 nt, Homo sapiens
  misc_RNA (1)...(19): siRNA sense strand
agaaugggaucaacggaga

SEQ ID NO: 2268556 - RNA, 19 nt, Homo sapiens
  misc_RNA (1)...(19): siRNA sense strand
aguccugaaaggugaacaa

SEQ ID NO: 2268557 - RNA, 19 nt, Homo sapiens
  misc_RNA (1)...(19): siRNA sense strand
gugugaaaauugagagugu

SEQ ID NO: 2268558 - RNA, 19 nt, Homo sapiens
  misc_RNA (1)...(19): siRNA sense strand
gagaaacagcagaggaggu

SEQ ID NO: 2268559 - RNA, 19 nt, Homo sapiens
  misc_RNA (1)...(19): siRNA sense strand
agaugaacggaaagacgaa

SEQ ID NO: 2268560 - RNA, 19 nt, Homo sapiens
  misc_RNA (1)...(19): siRNA sense strand
gaaaauagaccuaagccau

SEQ ID NO: 2268561 - RNA, 19 nt, Homo sapiens
  misc_RNA (1)...(19): siRNA sense strand
cauacagggaggaugaaga

SEQ ID NO: 2268562 - RNA, 19 nt, Homo sapiens
  misc_RNA (1)...(19): siRNA sense strand
aggagacagagaugagaau

SEQ ID NO: 2268563 - RNA, 19 nt, Homo sapiens
  misc_RNA (1)...(19): siRNA sense strand
agagcagggaagaguggua

SEQ ID NO: 2268564 - RNA, 19 nt, Homo sapiens
  misc_RNA (1)...(19): siRNA sense strand
caggagacagagaugagaa

SEQ ID NO: 2268565 - RNA, 19 nt, Homo sapiens
  misc_RNA (1)...(19): siRNA sense strand
gagcaugggucacagggca

SEQ ID NO: 2268566 - RNA, 19 nt, Homo sapiens
  misc_RNA (1)...(19): siRNA sense strand
uagcaguccugaaagguga

SEQ ID NO: 2268567 - RNA, 19 nt, Homo sapiens
  misc_RNA (1)...(19): siRNA sense strand
acaagagaaagaagcucaa

SEQ ID NO: 2268568 - RNA, 19 nt, Homo sapiens
  misc_RNA (1)...(19): siRNA sense strand
agguggcggacgugugaaa

SEQ ID NO: 2268569 - RNA, 19 nt, Homo sapiens
  misc_RNA (1)...(19): siRNA sense strand
aguugguucucuugauaau

SEQ ID NO: 2268570 - RNA, 19 nt, Homo sapiens
  misc_RNA (1)...(19): siRNA sense strand
gcacaagccugguggagga

SEQ ID NO: 2268571 - RNA, 19 nt, Homo sapiens
  misc_RNA (1)...(19): siRNA sense strand
acauugagggagagauaaa

SEQ ID NO: 2268572 - RNA, 19 nt, Homo sapiens
  misc_RNA (1)...(19): siRNA sense strand
ccuggauguugaugagaaa

SEQ ID NO: 2268573 - RNA, 19 nt, Homo sapiens
  misc_RNA (1)...(19): siRNA sense strand
cagcacaagcauuggaaau

SEQ ID NO: 2268574 - RNA, 19 nt, Homo sapiens
  misc_RNA (1)...(19): siRNA sense strand
ccaauuaaagacauggaaa

SEQ ID NO: 2268575 - RNA, 19 nt, Homo sapiens
  misc_RNA (1)...(19): siRNA sense strand
ugggagaaacuguuggaaa

SEQ ID NO: 2268576 - RNA, 19 nt, Homo sapiens
  misc_RNA (1)...(19): siRNA sense strand
cagaaauagagguggcaca

SEQ ID NO: 2268577 - RNA, 19 nt, Homo sapiens
  misc_RNA (1)...(19): siRNA sense strand
ccaaagaaaacaagaaaga

SEQ ID NO: 2268578 - RNA, 19 nt, Homo sapiens
  misc_RNA (1)...(19): siRNA sense strand
aggcuaacaucaagcacaa

SEQ ID NO: 2268579 - RNA, 19 nt, Homo sapiens
  misc_RNA (1)...(19): siRNA sense strand
aagaaguggcccugguuaa

SEQ ID NO: 2268580 - RNA, 19 nt, Homo sapiens
  misc_RNA (1)...(19): siRNA sense strand
ccagaaaccaucacaggaa

SEQ ID NO: 2268581 - RNA, 19 nt, Homo sapiens
  misc_RNA (1)...(19): siRNA sense strand
agaacaagaaaguggacau

SEQ ID NO: 2268582 - RNA, 19 nt, Homo sapiens
  misc_RNA (1)...(19): siRNA sense strand
agacauggaaauugcacaa

SEQ ID NO: 2268583 - RNA, 19 nt, Homo sapiens
  misc_RNA (1)...(19): siRNA sense strand
cggaaaacaucaagcauca

SEQ ID NO: 2268584 - RNA, 19 nt, Homo sapiens
  misc_RNA (1)...(19): siRNA sense strand
uggaaauaaugaugggacu

SEQ ID NO: 2268585 - RNA, 19 nt, Homo sapiens
  misc_RNA (1)...(19): siRNA sense strand
ccaacgugaucuugaccaa

SEQ ID NO: 2268586 - RNA, 19 nt, Homo sapiens
  misc_RNA (1)...(19): siRNA sense strand
caguaaaagaagugggcuu

SEQ ID NO: 2268587 - RNA, 19 nt, Homo sapiens
  misc_RNA (1)...(19): siRNA sense strand
ggugagugggacaggaaau

SEQ ID NO: 2268588 - RNA, 19 nt, Homo sapiens
  misc_RNA (1)...(19): siRNA sense strand
caccaagcccagagaagaa

SEQ ID NO: 2268589 - RNA, 19 nt, Homo sapiens
  misc_RNA (1)...(19): siRNA sense strand
ccgagguggcauuggcuaa

SEQ ID NO: 2268590 - RNA, 19 nt, Homo sapiens
  misc_RNA (1)...(19): siRNA sense strand
uugaugauguugugggaga

SEQ ID NO: 2268591 - RNA, 19 nt, Homo sapiens
  misc_RNA (1)...(19): siRNA sense strand
ccaaauuagaugugacacu

SEQ ID NO: 2268592 - RNA, 19 nt, Homo sapiens
  misc_RNA (1)...(19): siRNA sense strand
aaagaaacagagagggcau

SEQ ID NO: 2268593 - RNA, 19 nt, Homo sapiens
  misc_RNA (1)...(19): siRNA sense strand
aaagaaacagagagggcau

SEQ ID NO: 2268594 - RNA, 19 nt, Homo sapiens
  misc_RNA (1)...(19): siRNA sense strand
cagucaaccuucugagcuu

SEQ ID NO: 2268595 - RNA, 19 nt, Homo sapiens
  misc_RNA (1)...(19): siRNA sense strand
gagcgauacuacagggucu

SEQ ID NO: 2268596 - RNA, 19 nt, Homo sapiens
  misc_RNA (1)...(19): siRNA sense strand
cuucaauauuugcaggaca

SEQ ID NO: 2268597 - RNA, 19 nt, Homo sapiens
  misc_RNA (1)...(19): siRNA sense strand
uggcauuggcuaaagauau

SEQ ID NO: 2268598 - RNA, 19 nt, Homo sapiens
  misc_RNA (1)...(19): siRNA sense strand
ggcuaaagauauggaauca

SEQ ID NO: 2268599 - RNA, 19 nt, Homo sapiens
  misc_RNA (1)...(19): siRNA sense strand
ugguauuacucucagaaau

SEQ ID NO: 2268600 - RNA, 19 nt, Homo sapiens
  misc_RNA (1)...(19): siRNA sense strand
cuucagagaccucaggaau

SEQ ID NO: 2268601 - RNA, 19 nt, Homo sapiens
  misc_RNA (1)...(19): siRNA sense strand
cauuaagacugagggaaaa

SEQ ID NO: 2268602 - RNA, 19 nt, Homo sapiens
  misc_RNA (1)...(19): siRNA sense strand
aagugugggucuaaggcua

SEQ ID NO: 2268603 - RNA, 19 nt, Homo sapiens
  misc_RNA (1)...(19): siRNA sense strand
uucaauauuugcaggacaa

SEQ ID NO: 2268604 - RNA, 19 nt, Homo sapiens
  misc_RNA (1)...(19): siRNA sense strand
ccauugguggguugaauaa

SEQ ID NO: 2268605 - RNA, 19 nt, Homo sapiens
  misc_RNA (1)...(19): siRNA sense strand
ccacuaucagaaacagaaa

SEQ ID NO: 2268606 - RNA, 19 nt, Homo sapiens
  misc_RNA (1)...(19): siRNA sense strand
agggagagauaaagcggga

SEQ ID NO: 2268607 - RNA, 19 nt, Homo sapiens
  misc_RNA (1)...(19): siRNA sense strand
gguacugcccacagaaaca

SEQ ID NO: 2268608 - RNA, 19 nt, Homo sapiens
  misc_RNA (1)...(19): siRNA sense strand
gcccacagaaacagaggua

SEQ ID NO: 2268609 - RNA, 19 nt, Homo sapiens
  misc_RNA (1)...(19): siRNA sense strand
gggaaaggaaaccaugcaa

SEQ ID NO: 2268610 - RNA, 19 nt, Homo sapiens
  misc_RNA (1)...(19): siRNA sense strand
acucccagaaacagaaaua

SEQ ID NO: 2268611 - RNA, 19 nt, Homo sapiens
  misc_RNA (1)...(19): siRNA sense strand
agagcuagccaaggagaua

SEQ ID NO: 2268612 - RNA, 19 nt, Homo sapiens
  misc_RNA (1)...(19): siRNA sense strand
gucagauggcccacagaaa

SEQ ID NO: 2268613 - RNA, 19 nt, Homo sapiens
  misc_RNA (1)...(19): siRNA sense strand
ccaccaguuccaugaagaa

SEQ ID NO: 2268614 - RNA, 19 nt, Homo sapiens
  misc_RNA (1)...(19): siRNA sense strand
aggaauacccaaauagcca

SEQ ID NO: 2268615 - RNA, 19 nt, Homo sapiens
  misc_RNA (1)...(19): siRNA sense strand
agucaaggacauggaacua

SEQ ID NO: 2268616 - RNA, 19 nt, Homo sapiens
  misc_RNA (1)...(19): siRNA sense strand
ccacagaaacagauguauc

SEQ ID NO: 2268617 - RNA, 19 nt, Homo sapiens
  misc_RNA (1)...(19): siRNA sense strand
cugcugagaagguggcuuu

SEQ ID NO: 2268618 - RNA, 19 nt, Homo sapiens
  misc_RNA (1)...(19): siRNA sense strand
aaaacuaggggaaaggaaa

SEQ ID NO: 2268619 - RNA, 19 nt, Homo sapiens
  misc_RNA (1)...(19): siRNA sense strand
augcaaaggcuccugagaa

SEQ ID NO: 2268620 - RNA, 19 nt, Homo sapiens
  misc_RNA (1)...(19): siRNA sense strand
cucagaaacuagccagauu

SEQ ID NO: 2268621 - RNA, 19 nt, Homo sapiens
  misc_RNA (1)...(19): siRNA sense strand
agauaaagcgggacuucau

SEQ ID NO: 2268622 - RNA, 19 nt, Homo sapiens
  misc_RNA (1)...(19): siRNA sense strand
ggacauggaacuacccaca

SEQ ID NO: 2268623 - RNA, 19 nt, Homo sapiens
  misc_RNA (1)...(19): siRNA sense strand
cagccaaggaugugacacu

SEQ ID NO: 2268624 - RNA, 19 nt, Homo sapiens
  misc_RNA (1)...(19): siRNA sense strand
uagagguggcacaggcuaa

SEQ ID NO: 2268625 - RNA, 19 nt, Homo sapiens
  misc_RNA (1)...(19): siRNA sense strand
ggagagauaaagcgggacu

SEQ ID NO: 2268626 - RNA, 19 nt, Homo sapiens
  misc_RNA (1)...(19): siRNA sense strand
uagccaaggagauagaaau

SEQ ID NO: 2268627 - RNA, 19 nt, Homo sapiens
  misc_RNA (1)...(19): siRNA sense strand
cagucaaggacauggcuca

SEQ ID NO: 2268628 - RNA, 19 nt, Homo sapiens
  misc_RNA (1)...(19): siRNA sense strand
ggacauggcucaacuccca

SEQ ID NO: 2268629 - RNA, 19 nt, Homo sapiens
  misc_RNA (1)...(19): siRNA sense strand
agaaaguggacaucucuaa

SEQ ID NO: 2268630 - RNA, 19 nt, Homo sapiens
  misc_RNA (1)...(19): siRNA sense strand
agauguaccaugaugauga

SEQ ID NO: 2268631 - RNA, 19 nt, Homo sapiens
  misc_RNA (1)...(19): siRNA sense strand
ccacagaaacagagguagc

SEQ ID NO: 2268632 - RNA, 19 nt, Homo sapiens
  misc_RNA (1)...(19): siRNA sense strand
ccaaagaaaacaagauagu

SEQ ID NO: 2268633 - RNA, 19 nt, Homo sapiens
  misc_RNA (1)...(19): siRNA sense strand
gcacaagccugguggagga

SEQ ID NO: 2268634 - RNA, 19 nt, Homo sapiens
  misc_RNA (1)...(19): siRNA sense strand
acauugagggagagauaaa

SEQ ID NO: 2268635 - RNA, 19 nt, Homo sapiens
  misc_RNA (1)...(19): siRNA sense strand
ccuggauguugaugagaaa

SEQ ID NO: 2268636 - RNA, 19 nt, Homo sapiens
  misc_RNA (1)...(19): siRNA sense strand
cagcacaagcauuggaaau

SEQ ID NO: 2268637 - RNA, 19 nt, Homo sapiens
  misc_RNA (1)...(19): siRNA sense strand
ccaauuaaagacauggaaa

SEQ ID NO: 2268638 - RNA, 19 nt, Homo sapiens
  misc_RNA (1)...(19): siRNA sense strand
ugggagaaacuguuggaaa

SEQ ID NO: 2268639 - RNA, 19 nt, Homo sapiens
  misc_RNA (1)...(19): siRNA sense strand
cagaaauagagguggcaca

SEQ ID NO: 2268640 - RNA, 19 nt, Homo sapiens
  misc_RNA (1)...(19): siRNA sense strand
ccaaagaaaacaagaaaga

SEQ ID NO: 2268641 - RNA, 19 nt, Homo sapiens
  misc_RNA (1)...(19): siRNA sense strand
aggcuaacaucaagcacaa

SEQ ID NO: 2268642 - RNA, 19 nt, Homo sapiens
  misc_RNA (1)...(19): siRNA sense strand
aagaaguggcccugguuaa

SEQ ID NO: 2268643 - RNA, 19 nt, Homo sapiens
  misc_RNA (1)...(19): siRNA sense strand
ccagaaaccaucacaggaa

SEQ ID NO: 2268644 - RNA, 19 nt, Homo sapiens
  misc_RNA (1)...(19): siRNA sense strand
agaacaagaaaguggacau

SEQ ID NO: 2268645 - RNA, 19 nt, Homo sapiens
  misc_RNA (1)...(19): siRNA sense strand
agacauggaaauugcacaa

SEQ ID NO: 2268646 - RNA, 19 nt, Homo sapiens
  misc_RNA (1)...(19): siRNA sense strand
cggaaaacaucaagcauca

SEQ ID NO: 2268647 - RNA, 19 nt, Homo sapiens
  misc_RNA (1)...(19): siRNA sense strand
uggaaauaaugaugggacu

SEQ ID NO: 2268648 - RNA, 19 nt, Homo sapiens
  misc_RNA (1)...(19): siRNA sense strand
ccaacgugaucuugaccaa

SEQ ID NO: 2268649 - RNA, 19 nt, Homo sapiens
  misc_RNA (1)...(19): siRNA sense strand
caguaaaagaagugggcuu

SEQ ID NO: 2268650 - RNA, 19 nt, Homo sapiens
  misc_RNA (1)...(19): siRNA sense strand
ggugagugggacaggaaau

SEQ ID NO: 2268651 - RNA, 19 nt, Homo sapiens
  misc_RNA (1)...(19): siRNA sense strand
caccaagcccagagaagaa

SEQ ID NO: 2268652 - RNA, 19 nt, Homo sapiens
  misc_RNA (1)...(19): siRNA sense strand
ccgagguggcauuggcuaa

SEQ ID NO: 2268653 - RNA, 19 nt, Homo sapiens
  misc_RNA (1)...(19): siRNA sense strand
uugaugauguugugggaga

SEQ ID NO: 2268654 - RNA, 19 nt, Homo sapiens
  misc_RNA (1)...(19): siRNA sense strand
ccaaauuagaugugacacu

SEQ ID NO: 2268655 - RNA, 19 nt, Homo sapiens
  misc_RNA (1)...(19): siRNA sense strand
aaagaaacagagagggcau

SEQ ID NO: 2268656 - RNA, 19 nt, Homo sapiens
  misc_RNA (1)...(19): siRNA sense strand
aaagaaacagagagggcau

SEQ ID NO: 2268657 - RNA, 19 nt, Homo sapiens
  misc_RNA (1)...(19): siRNA sense strand
cagucaaccuucugagcuu

SEQ ID NO: 2268658 - RNA, 19 nt, Homo sapiens
  misc_RNA (1)...(19): siRNA sense strand
gagcgauacuacagggucu

SEQ ID NO: 2268659 - RNA, 19 nt, Homo sapiens
  misc_RNA (1)...(19): siRNA sense strand
cuucaauauuugcaggaca

SEQ ID NO: 2268660 - RNA, 19 nt, Homo sapiens
  misc_RNA (1)...(19): siRNA sense strand
uggcauuggcuaaagauau

SEQ ID NO: 2268661 - RNA, 19 nt, Homo sapiens
  misc_RNA (1)...(19): siRNA sense strand
ggcuaaagauauggaauca

SEQ ID NO: 2268662 - RNA, 19 nt, Homo sapiens
  misc_RNA (1)...(19): siRNA sense strand
ugguauuacucucagaaau

SEQ ID NO: 2268663 - RNA, 19 nt, Homo sapiens
  misc_RNA (1)...(19): siRNA sense strand
cuucagagaccucaggaau

SEQ ID NO: 2268664 - RNA, 19 nt, Homo sapiens
  misc_RNA (1)...(19): siRNA sense strand
cauuaagacugagggaaaa

SEQ ID NO: 2268665 - RNA, 19 nt, Homo sapiens
  misc_RNA (1)...(19): siRNA sense strand
aagugugggucuaaggcua

SEQ ID NO: 2268666 - RNA, 19 nt, Homo sapiens
  misc_RNA (1)...(19): siRNA sense strand
uucaauauuugcaggacaa

SEQ ID NO: 2268667 - RNA, 19 nt, Homo sapiens
  misc_RNA (1)...(19): siRNA sense strand
ccauugguggguugaauaa

SEQ ID NO: 2268668 - RNA, 19 nt, Homo sapiens
  misc_RNA (1)...(19): siRNA sense strand
ccacuaucagaaacagaaa

SEQ ID NO: 2268669 - RNA, 19 nt, Homo sapiens
  misc_RNA (1)...(19): siRNA sense strand
agggagagauaaagcggga

SEQ ID NO: 2268670 - RNA, 19 nt, Homo sapiens
  misc_RNA (1)...(19): siRNA sense strand
gguacugcccacagaaaca

SEQ ID NO: 2268671 - RNA, 19 nt, Homo sapiens
  misc_RNA (1)...(19): siRNA sense strand
gcccacagaaacagaggua

SEQ ID NO: 2268672 - RNA, 19 nt, Homo sapiens
  misc_RNA (1)...(19): siRNA sense strand
gggaaaggaaaccaugcaa

SEQ ID NO: 2268673 - RNA, 19 nt, Homo sapiens
  misc_RNA (1)...(19): siRNA sense strand
acucccagaaacagaaaua

SEQ ID NO: 2268674 - RNA, 19 nt, Homo sapiens
  misc_RNA (1)...(19): siRNA sense strand
agagcuagccaaggagaua

SEQ ID NO: 2268675 - RNA, 19 nt, Homo sapiens
  misc_RNA (1)...(19): siRNA sense strand
gucagauggcccacagaaa

SEQ ID NO: 2268676 - RNA, 19 nt, Homo sapiens
  misc_RNA (1)...(19): siRNA sense strand
ccaccaguuccaugaagaa

SEQ ID NO: 2268677 - RNA, 19 nt, Homo sapiens
  misc_RNA (1)...(19): siRNA sense strand
aggaauacccaaauagcca

SEQ ID NO: 2268678 - RNA, 19 nt, Homo sapiens
  misc_RNA (1)...(19): siRNA sense strand
agucaaggacauggaacua

SEQ ID NO: 2268679 - RNA, 19 nt, Homo sapiens
  misc_RNA (1)...(19): siRNA sense strand
ccacagaaacagauguauc

SEQ ID NO: 2268680 - RNA, 19 nt, Homo sapiens
  misc_RNA (1)...(19): siRNA sense strand
cugcugagaagguggcuuu

SEQ ID NO: 2268681 - RNA, 19 nt, Homo sapiens
  misc_RNA (1)...(19): siRNA sense strand
aaaacuaggggaaaggaaa

SEQ ID NO: 2268682 - RNA, 19 nt, Homo sapiens
  misc_RNA (1)...(19): siRNA sense strand
augcaaaggcuccugagaa

SEQ ID NO: 2268683 - RNA, 19 nt, Homo sapiens
  misc_RNA (1)...(19): siRNA sense strand
cucagaaacuagccagauu

SEQ ID NO: 2268684 - RNA, 19 nt, Homo sapiens
  misc_RNA (1)...(19): siRNA sense strand
agauaaagcgggacuucau

SEQ ID NO: 2268685 - RNA, 19 nt, Homo sapiens
  misc_RNA (1)...(19): siRNA sense strand
ggacauggaacuacccaca

SEQ ID NO: 2268686 - RNA, 19 nt, Homo sapiens
  misc_RNA (1)...(19): siRNA sense strand
cagccaaggaugugacacu

SEQ ID NO: 2268687 - RNA, 19 nt, Homo sapiens
  misc_RNA (1)...(19): siRNA sense strand
uagagguggcacaggcuaa

SEQ ID NO: 2268688 - RNA, 19 nt, Homo sapiens
  misc_RNA (1)...(19): siRNA sense strand
ggagagauaaagcgggacu

SEQ ID NO: 2268689 - RNA, 19 nt, Homo sapiens
  misc_RNA (1)...(19): siRNA sense strand
uagccaaggagauagaaau

SEQ ID NO: 2268690 - RNA, 19 nt, Homo sapiens
  misc_RNA (1)...(19): siRNA sense strand
cagucaaggacauggcuca

SEQ ID NO: 2268691 - RNA, 19 nt, Homo sapiens
  misc_RNA (1)...(19): siRNA sense strand
ggacauggcucaacuccca

SEQ ID NO: 2268692 - RNA, 19 nt, Homo sapiens
  misc_RNA (1)...(19): siRNA sense strand
agaaaguggacaucucuaa

SEQ ID NO: 2268693 - RNA, 19 nt, Homo sapiens
  misc_RNA (1)...(19): siRNA sense strand
agauguaccaugaugauga

SEQ ID NO: 2268694 - RNA, 19 nt, Homo sapiens
  misc_RNA (1)...(19): siRNA sense strand
ccacagaaacagagguagc

SEQ ID NO: 2268695 - RNA, 19 nt, Homo sapiens
  misc_RNA (1)...(19): siRNA sense strand
ccaaagaaaacaagauagu

SEQ ID NO: 2268696 - RNA, 19 nt, Homo sapiens
  misc_RNA (1)...(19): siRNA sense strand
gcacaagccugguggagga

SEQ ID NO: 2268697 - RNA, 19 nt, Homo sapiens
  misc_RNA (1)...(19): siRNA sense strand
acauugagggagagauaaa

SEQ ID NO: 2268698 - RNA, 19 nt, Homo sapiens
  misc_RNA (1)...(19): siRNA sense strand
ccuggauguugaugagaaa

SEQ ID NO: 2268699 - RNA, 19 nt, Homo sapiens
  misc_RNA (1)...(19): siRNA sense strand
cagcacaagcauuggaaau

SEQ ID NO: 2268700 - RNA, 19 nt, Homo sapiens
  misc_RNA (1)...(19): siRNA sense strand
ccaauuaaagacauggaaa

SEQ ID NO: 2268701 - RNA, 19 nt, Homo sapiens
  misc_RNA (1)...(19): siRNA sense strand
ugggagaaacuguuggaaa

SEQ ID NO: 2268702 - RNA, 19 nt, Homo sapiens
  misc_RNA (1)...(19): siRNA sense strand
cagaaauagagguggcaca

SEQ ID NO: 2268703 - RNA, 19 nt, Homo sapiens
  misc_RNA (1)...(19): siRNA sense strand
ccaaagaaaacaagaaaga

SEQ ID NO: 2268704 - RNA, 19 nt, Homo sapiens
  misc_RNA (1)...(19): siRNA sense strand
aggcuaacaucaagcacaa

SEQ ID NO: 2268705 - RNA, 19 nt, Homo sapiens
  misc_RNA (1)...(19): siRNA sense strand
aagaaguggcccugguuaa

SEQ ID NO: 2268706 - RNA, 19 nt, Homo sapiens
  misc_RNA (1)...(19): siRNA sense strand
ccagaaaccaucacaggaa

SEQ ID NO: 2268707 - RNA, 19 nt, Homo sapiens
  misc_RNA (1)...(19): siRNA sense strand
agaacaagaaaguggacau

SEQ ID NO: 2268708 - RNA, 19 nt, Homo sapiens
  misc_RNA (1)...(19): siRNA sense strand
agacauggaaauugcacaa

SEQ ID NO: 2268709 - RNA, 19 nt, Homo sapiens
  misc_RNA (1)...(19): siRNA sense strand
cggaaaacaucaagcauca

SEQ ID NO: 2268710 - RNA, 19 nt, Homo sapiens
  misc_RNA (1)...(19): siRNA sense strand
uggaaauaaugaugggacu

SEQ ID NO: 2268711 - RNA, 19 nt, Homo sapiens
  misc_RNA (1)...(19): siRNA sense strand
ccaacgugaucuugaccaa

SEQ ID NO: 2268712 - RNA, 19 nt, Homo sapiens
  misc_RNA (1)...(19): siRNA sense strand
caguaaaagaagugggcuu

SEQ ID NO: 2268713 - RNA, 19 nt, Homo sapiens
  misc_RNA (1)...(19): siRNA sense strand
ggugagugggacaggaaau

SEQ ID NO: 2268714 - RNA, 19 nt, Homo sapiens
  misc_RNA (1)...(19): siRNA sense strand
caccaagcccagagaagaa

SEQ ID NO: 2268715 - RNA, 19 nt, Homo sapiens
  misc_RNA (1)...(19): siRNA sense strand
ccgagguggcauuggcuaa

SEQ ID NO: 2268716 - RNA, 19 nt, Homo sapiens
  misc_RNA (1)...(19): siRNA sense strand
uugaugauguugugggaga

SEQ ID NO: 2268717 - RNA, 19 nt, Homo sapiens
  misc_RNA (1)...(19): siRNA sense strand
ccaaauuagaugugacacu

SEQ ID NO: 2268718 - RNA, 19 nt, Homo sapiens
  misc_RNA (1)...(19): siRNA sense strand
aaagaaacagagagggcau

SEQ ID NO: 2268719 - RNA, 19 nt, Homo sapiens
  misc_RNA (1)...(19): siRNA sense strand
aaagaaacagagagggcau

SEQ ID NO: 2268720 - RNA, 19 nt, Homo sapiens
  misc_RNA (1)...(19): siRNA sense strand
cagucaaccuucugagcuu

SEQ ID NO: 2268721 - RNA, 19 nt, Homo sapiens
  misc_RNA (1)...(19): siRNA sense strand
gagcgauacuacagggucu

SEQ ID NO: 2268722 - RNA, 19 nt, Homo sapiens
  misc_RNA (1)...(19): siRNA sense strand
cuucaauauuugcaggaca

SEQ ID NO: 2268723 - RNA, 19 nt, Homo sapiens
  misc_RNA (1)...(19): siRNA sense strand
uggcauuggcuaaagauau

SEQ ID NO: 2268724 - RNA, 19 nt, Homo sapiens
  misc_RNA (1)...(19): siRNA sense strand
ggcuaaagauauggaauca

SEQ ID NO: 2268725 - RNA, 19 nt, Homo sapiens
  misc_RNA (1)...(19): siRNA sense strand
ugguauuacucucagaaau

SEQ ID NO: 2268726 - RNA, 19 nt, Homo sapiens
  misc_RNA (1)...(19): siRNA sense strand
cuucagagaccucaggaau

SEQ ID NO: 2268727 - RNA, 19 nt, Homo sapiens
  misc_RNA (1)...(19): siRNA sense strand
cauuaagacugagggaaaa

SEQ ID NO: 2268728 - RNA, 19 nt, Homo sapiens
  misc_RNA (1)...(19): siRNA sense strand
aagugugggucuaaggcua

SEQ ID NO: 2268729 - RNA, 19 nt, Homo sapiens
  misc_RNA (1)...(19): siRNA sense strand
uucaauauuugcaggacaa

SEQ ID NO: 2268730 - RNA, 19 nt, Homo sapiens
  misc_RNA (1)...(19): siRNA sense strand
ccauugguggguugaauaa

SEQ ID NO: 2268731 - RNA, 19 nt, Homo sapiens
  misc_RNA (1)...(19): siRNA sense strand
ccacuaucagaaacagaaa

SEQ ID NO: 2268732 - RNA, 19 nt, Homo sapiens
  misc_RNA (1)...(19): siRNA sense strand
agggagagauaaagcggga

SEQ ID NO: 2268733 - RNA, 19 nt, Homo sapiens
  misc_RNA (1)...(19): siRNA sense strand
gguacugcccacagaaaca

SEQ ID NO: 2268734 - RNA, 19 nt, Homo sapiens
  misc_RNA (1)...(19): siRNA sense strand
gcccacagaaacagaggua

SEQ ID NO: 2268735 - RNA, 19 nt, Homo sapiens
  misc_RNA (1)...(19): siRNA sense strand
gggaaaggaaaccaugcaa

SEQ ID NO: 2268736 - RNA, 19 nt, Homo sapiens
  misc_RNA (1)...(19): siRNA sense strand
acucccagaaacagaaaua

SEQ ID NO: 2268737 - RNA, 19 nt, Homo sapiens
  misc_RNA (1)...(19): siRNA sense strand
agagcuagccaaggagaua

SEQ ID NO: 2268738 - RNA, 19 nt, Homo sapiens
  misc_RNA (1)...(19): siRNA sense strand
gucagauggcccacagaaa

SEQ ID NO: 2268739 - RNA, 19 nt, Homo sapiens
  misc_RNA (1)...(19): siRNA sense strand
ccaccaguuccaugaagaa

SEQ ID NO: 2268740 - RNA, 19 nt, Homo sapiens
  misc_RNA (1)...(19): siRNA sense strand
aggaauacccaaauagcca

SEQ ID NO: 2268741 - RNA, 19 nt, Homo sapiens
  misc_RNA (1)...(19): siRNA sense strand
agucaaggacauggaacua

SEQ ID NO: 2268742 - RNA, 19 nt, Homo sapiens
  misc_RNA (1)...(19): siRNA sense strand
ccacagaaacagauguauc

SEQ ID NO: 2268743 - RNA, 19 nt, Homo sapiens
  misc_RNA (1)...(19): siRNA sense strand
cugcugagaagguggcuuu

SEQ ID NO: 2268744 - RNA, 19 nt, Homo sapiens
  misc_RNA (1)...(19): siRNA sense strand
aaaacuaggggaaaggaaa

SEQ ID NO: 2268745 - RNA, 19 nt, Homo sapiens
  misc_RNA (1)...(19): siRNA sense strand
augcaaaggcuccugagaa

SEQ ID NO: 2268746 - RNA, 19 nt, Homo sapiens
  misc_RNA (1)...(19): siRNA sense strand
cucagaaacuagccagauu

SEQ ID NO: 2268747 - RNA, 19 nt, Homo sapiens
  misc_RNA (1)...(19): siRNA sense strand
agauaaagcgggacuucau

SEQ ID NO: 2268748 - RNA, 19 nt, Homo sapiens
  misc_RNA (1)...(19): siRNA sense strand
ggacauggaacuacccaca

SEQ ID NO: 2268749 - RNA, 19 nt, Homo sapiens
  misc_RNA (1)...(19): siRNA sense strand
cagccaaggaugugacacu

SEQ ID NO: 2268750 - RNA, 19 nt, Homo sapiens
  misc_RNA (1)...(19): siRNA sense strand
uagagguggcacaggcuaa

SEQ ID NO: 2268751 - RNA, 19 nt, Homo sapiens
  misc_RNA (1)...(19): siRNA sense strand
ggagagauaaagcgggacu

SEQ ID NO: 2268752 - RNA, 19 nt, Homo sapiens
  misc_RNA (1)...(19): siRNA sense strand
uagccaaggagauagaaau

SEQ ID NO: 2268753 - RNA, 19 nt, Homo sapiens
  misc_RNA (1)...(19): siRNA sense strand
cagucaaggacauggcuca

SEQ ID NO: 2268754 - RNA, 19 nt, Homo sapiens
  misc_RNA (1)...(19): siRNA sense strand
ggacauggcucaacuccca

SEQ ID NO: 2268755 - RNA, 19 nt, Homo sapiens
  misc_RNA (1)...(19): siRNA sense strand
agaaaguggacaucucuaa

SEQ ID NO: 2268756 - RNA, 19 nt, Homo sapiens
  misc_RNA (1)...(19): siRNA sense strand
agauguaccaugaugauga

SEQ ID NO: 2268757 - RNA, 19 nt, Homo sapiens
  misc_RNA (1)...(19): siRNA sense strand
ccacagaaacagagguagc

SEQ ID NO: 2268758 - RNA, 19 nt, Homo sapiens
  misc_RNA (1)...(19): siRNA sense strand
ccaaagaaaacaagauagu

SEQ ID NO: 2268759 - RNA, 19 nt, Homo sapiens
  misc_RNA (1)...(19): siRNA sense strand
gcacaagccugguggagga

SEQ ID NO: 2268760 - RNA, 19 nt, Homo sapiens
  misc_RNA (1)...(19): siRNA sense strand
acauugagggagagauaaa

SEQ ID NO: 2268761 - RNA, 19 nt, Homo sapiens
  misc_RNA (1)...(19): siRNA sense strand
ccuggauguugaugagaaa

SEQ ID NO: 2268762 - RNA, 19 nt, Homo sapiens
  misc_RNA (1)...(19): siRNA sense strand
cagcacaagcauuggaaau

SEQ ID NO: 2268763 - RNA, 19 nt, Homo sapiens
  misc_RNA (1)...(19): siRNA sense strand
ccaauuaaagacauggaaa

SEQ ID NO: 2268764 - RNA, 19 nt, Homo sapiens
  misc_RNA (1)...(19): siRNA sense strand
ugggagaaacuguuggaaa

SEQ ID NO: 2268765 - RNA, 19 nt, Homo sapiens
  misc_RNA (1)...(19): siRNA sense strand
cagaaauagagguggcaca

SEQ ID NO: 2268766 - RNA, 19 nt, Homo sapiens
  misc_RNA (1)...(19): siRNA sense strand
ccaaagaaaacaagaaaga

SEQ ID NO: 2268767 - RNA, 19 nt, Homo sapiens
  misc_RNA (1)...(19): siRNA sense strand
aggcuaacaucaagcacaa

SEQ ID NO: 2268768 - RNA, 19 nt, Homo sapiens
  misc_RNA (1)...(19): siRNA sense strand
aagaaguggcccugguuaa

SEQ ID NO: 2268769 - RNA, 19 nt, Homo sapiens
  misc_RNA (1)...(19): siRNA sense strand
ccagaaaccaucacaggaa

SEQ ID NO: 2268770 - RNA, 19 nt, Homo sapiens
  misc_RNA (1)...(19): siRNA sense strand
agaacaagaaaguggacau

SEQ ID NO: 2268771 - RNA, 19 nt, Homo sapiens
  misc_RNA (1)...(19): siRNA sense strand
agacauggaaauugcacaa

SEQ ID NO: 2268772 - RNA, 19 nt, Homo sapiens
  misc_RNA (1)...(19): siRNA sense strand
cggaaaacaucaagcauca

SEQ ID NO: 2268773 - RNA, 19 nt, Homo sapiens
  misc_RNA (1)...(19): siRNA sense strand
uggaaauaaugaugggacu

SEQ ID NO: 2268774 - RNA, 19 nt, Homo sapiens
  misc_RNA (1)...(19): siRNA sense strand
ccaacgugaucuugaccaa

SEQ ID NO: 2268775 - RNA, 19 nt, Homo sapiens
  misc_RNA (1)...(19): siRNA sense strand
caguaaaagaagugggcuu

SEQ ID NO: 2268776 - RNA, 19 nt, Homo sapiens
  misc_RNA (1)...(19): siRNA sense strand
ggugagugggacaggaaau

SEQ ID NO: 2268777 - RNA, 19 nt, Homo sapiens
  misc_RNA (1)...(19): siRNA sense strand
caccaagcccagagaagaa

SEQ ID NO: 2268778 - RNA, 19 nt, Homo sapiens
  misc_RNA (1)...(19): siRNA sense strand
ccgagguggcauuggcuaa

SEQ ID NO: 2268779 - RNA, 19 nt, Homo sapiens
  misc_RNA (1)...(19): siRNA sense strand
uugaugauguugugggaga

SEQ ID NO: 2268780 - RNA, 19 nt, Homo sapiens
  misc_RNA (1)...(19): siRNA sense strand
ccaaauuagaugugacacu

SEQ ID NO: 2268781 - RNA, 19 nt, Homo sapiens
  misc_RNA (1)...(19): siRNA sense strand
aaagaaacagagagggcau

SEQ ID NO: 2268782 - RNA, 19 nt, Homo sapiens
  misc_RNA (1)...(19): siRNA sense strand
aaagaaacagagagggcau

SEQ ID NO: 2268783 - RNA, 19 nt, Homo sapiens
  misc_RNA (1)...(19): siRNA sense strand
cagucaaccuucugagcuu

SEQ ID NO: 2268784 - RNA, 19 nt, Homo sapiens
  misc_RNA (1)...(19): siRNA sense strand
gagcgauacuacagggucu

SEQ ID NO: 2268785 - RNA, 19 nt, Homo sapiens
  misc_RNA (1)...(19): siRNA sense strand
cuucaauauuugcaggaca

SEQ ID NO: 2268786 - RNA, 19 nt, Homo sapiens
  misc_RNA (1)...(19): siRNA sense strand
uggcauuggcuaaagauau

SEQ ID NO: 2268787 - RNA, 19 nt, Homo sapiens
  misc_RNA (1)...(19): siRNA sense strand
ggcuaaagauauggaauca

SEQ ID NO: 2268788 - RNA, 19 nt, Homo sapiens
  misc_RNA (1)...(19): siRNA sense strand
ugguauuacucucagaaau

SEQ ID NO: 2268789 - RNA, 19 nt, Homo sapiens
  misc_RNA (1)...(19): siRNA sense strand
cuucagagaccucaggaau

SEQ ID NO: 2268790 - RNA, 19 nt, Homo sapiens
  misc_RNA (1)...(19): siRNA sense strand
cauuaagacugagggaaaa

SEQ ID NO: 2268791 - RNA, 19 nt, Homo sapiens
  misc_RNA (1)...(19): siRNA sense strand
aagugugggucuaaggcua

SEQ ID NO: 2268792 - RNA, 19 nt, Homo sapiens
  misc_RNA (1)...(19): siRNA sense strand
uucaauauuugcaggacaa

SEQ ID NO: 2268793 - RNA, 19 nt, Homo sapiens
  misc_RNA (1)...(19): siRNA sense strand
ccauugguggguugaauaa

SEQ ID NO: 2268794 - RNA, 19 nt, Homo sapiens
  misc_RNA (1)...(19): siRNA sense strand
ccacuaucagaaacagaaa

SEQ ID NO: 2268795 - RNA, 19 nt, Homo sapiens
  misc_RNA (1)...(19): siRNA sense strand
agggagagauaaagcggga

SEQ ID NO: 2268796 - RNA, 19 nt, Homo sapiens
  misc_RNA (1)...(19): siRNA sense strand
gguacugcccacagaaaca

SEQ ID NO: 2268797 - RNA, 19 nt, Homo sapiens
  misc_RNA (1)...(19): siRNA sense strand
gcccacagaaacagaggua

SEQ ID NO: 2268798 - RNA, 19 nt, Homo sapiens
  misc_RNA (1)...(19): siRNA sense strand
gggaaaggaaaccaugcaa

SEQ ID NO: 2268799 - RNA, 19 nt, Homo sapiens
  misc_RNA (1)...(19): siRNA sense strand
acucccagaaacagaaaua

SEQ ID NO: 2268800 - RNA, 19 nt, Homo sapiens
  misc_RNA (1)...(19): siRNA sense strand
agagcuagccaaggagaua

SEQ ID NO: 2268801 - RNA, 19 nt, Homo sapiens
  misc_RNA (1)...(19): siRNA sense strand
gucagauggcccacagaaa

SEQ ID NO: 2268802 - RNA, 19 nt, Homo sapiens
  misc_RNA (1)...(19): siRNA sense strand
ccaccaguuccaugaagaa

SEQ ID NO: 2268803 - RNA, 19 nt, Homo sapiens
  misc_RNA (1)...(19): siRNA sense strand
aggaauacccaaauagcca

SEQ ID NO: 2268804 - RNA, 19 nt, Homo sapiens
  misc_RNA (1)...(19): siRNA sense strand
agucaaggacauggaacua

SEQ ID NO: 2268805 - RNA, 19 nt, Homo sapiens
  misc_RNA (1)...(19): siRNA sense strand
ccacagaaacagauguauc

SEQ ID NO: 2268806 - RNA, 19 nt, Homo sapiens
  misc_RNA (1)...(19): siRNA sense strand
cugcugagaagguggcuuu

SEQ ID NO: 2268807 - RNA, 19 nt, Homo sapiens
  misc_RNA (1)...(19): siRNA sense strand
aaaacuaggggaaaggaaa

SEQ ID NO: 2268808 - RNA, 19 nt, Homo sapiens
  misc_RNA (1)...(19): siRNA sense strand
augcaaaggcuccugagaa

SEQ ID NO: 2268809 - RNA, 19 nt, Homo sapiens
  misc_RNA (1)...(19): siRNA sense strand
cucagaaacuagccagauu

SEQ ID NO: 2268810 - RNA, 19 nt, Homo sapiens
  misc_RNA (1)...(19): siRNA sense strand
agauaaagcgggacuucau

SEQ ID NO: 2268811 - RNA, 19 nt, Homo sapiens
  misc_RNA (1)...(19): siRNA sense strand
ggacauggaacuacccaca

SEQ ID NO: 2268812 - RNA, 19 nt, Homo sapiens
  misc_RNA (1)...(19): siRNA sense strand
cagccaaggaugugacacu

SEQ ID NO: 2268813 - RNA, 19 nt, Homo sapiens
  misc_RNA (1)...(19): siRNA sense strand
uagagguggcacaggcuaa

SEQ ID NO: 2268814 - RNA, 19 nt, Homo sapiens
  misc_RNA (1)...(19): siRNA sense strand
ggagagauaaagcgggacu

SEQ ID NO: 2268815 - RNA, 19 nt, Homo sapiens
  misc_RNA (1)...(19): siRNA sense strand
uagccaaggagauagaaau

SEQ ID NO: 2268816 - RNA, 19 nt, Homo sapiens
  misc_RNA (1)...(19): siRNA sense strand
cagucaaggacauggcuca

SEQ ID NO: 2268817 - RNA, 19 nt, Homo sapiens
  misc_RNA (1)...(19): siRNA sense strand
ggacauggcucaacuccca

SEQ ID NO: 2268818 - RNA, 19 nt, Homo sapiens
  misc_RNA (1)...(19): siRNA sense strand
agaaaguggacaucucuaa

SEQ ID NO: 2268819 - RNA, 19 nt, Homo sapiens
  misc_RNA (1)...(19): siRNA sense strand
agauguaccaugaugauga

SEQ ID NO: 2268820 - RNA, 19 nt, Homo sapiens
  misc_RNA (1)...(19): siRNA sense strand
ccacagaaacagagguagc

SEQ ID NO: 2268821 - RNA, 19 nt, Homo sapiens
  misc_RNA (1)...(19): siRNA sense strand
ccaaagaaaacaagauagu

SEQ ID NO: 2268822 - RNA, 19 nt, Homo sapiens
  misc_RNA (1)...(19): siRNA sense strand
cggaagaacacgugggcuu

SEQ ID NO: 2268823 - RNA, 19 nt, Homo sapiens
  misc_RNA (1)...(19): siRNA sense strand
aguaagaagaagagauuca

SEQ ID NO: 2268824 - RNA, 19 nt, Homo sapiens
  misc_RNA (1)...(19): siRNA sense strand
acagagaagaagagaguca

SEQ ID NO: 2268825 - RNA, 19 nt, Homo sapiens
  misc_RNA (1)...(19): siRNA sense strand
aagaagagauucaaggagu

SEQ ID NO: 2268826 - RNA, 19 nt, Homo sapiens
  misc_RNA (1)...(19): siRNA sense strand
cgggaaugcacaucggcaa

SEQ ID NO: 2268827 - RNA, 19 nt, Homo sapiens
  misc_RNA (1)...(19): siRNA sense strand
gcaucgacagagaagaaga

SEQ ID NO: 2268828 - RNA, 19 nt, Homo sapiens
  misc_RNA (1)...(19): siRNA sense strand
ugggaagcaguaagaagaa

SEQ ID NO: 2268829 - RNA, 19 nt, Homo sapiens
  misc_RNA (1)...(19): siRNA sense strand
caucauuuguuguugagga

SEQ ID NO: 2268830 - RNA, 19 nt, Homo sapiens
  misc_RNA (1)...(19): siRNA sense strand
gggaagagaaugagagccu

SEQ ID NO: 2268831 - RNA, 19 nt, Homo sapiens
  misc_RNA (1)...(19): siRNA sense strand
gaaaagaaguugaaggcca

SEQ ID NO: 2268832 - RNA, 19 nt, Homo sapiens
  misc_RNA (1)...(19): siRNA sense strand
uggccaugguggagagaca

SEQ ID NO: 2268833 - RNA, 19 nt, Homo sapiens
  misc_RNA (1)...(19): siRNA sense strand
uggcaucacuaaagggaga

SEQ ID NO: 2268834 - RNA, 19 nt, Homo sapiens
  misc_RNA (1)...(19): siRNA sense strand
agaaauuggccaaggcaca

SEQ ID NO: 2268835 - RNA, 19 nt, Homo sapiens
  misc_RNA (1)...(19): siRNA sense strand
ccggaguugccaugaaaua

SEQ ID NO: 2268836 - RNA, 19 nt, Homo sapiens
  misc_RNA (1)...(19): siRNA sense strand
aggacaacgugcagcgaga

SEQ ID NO: 2268837 - RNA, 19 nt, Homo sapiens
  misc_RNA (1)...(19): siRNA sense strand
cagcaaacagagagggaac

SEQ ID NO: 2268838 - RNA, 19 nt, Homo sapiens
  misc_RNA (1)...(19): siRNA sense strand
cuaugagaaagcaaagaaa

SEQ ID NO: 2268839 - RNA, 19 nt, Homo sapiens
  misc_RNA (1)...(19): siRNA sense strand
aguccgagguggaggagca

SEQ ID NO: 2268840 - RNA, 19 nt, Homo sapiens
  misc_RNA (1)...(19): siRNA sense strand
acucagaacugcagagggu

SEQ ID NO: 2268841 - RNA, 19 nt, Homo sapiens
  misc_RNA (1)...(19): siRNA sense strand
agacagucgaggagauuga

SEQ ID NO: 2268842 - RNA, 19 nt, Homo sapiens
  misc_RNA (1)...(19): siRNA sense strand
ccgagguggaggagcagaa

SEQ ID NO: 2268843 - RNA, 19 nt, Homo sapiens
  misc_RNA (1)...(19): siRNA sense strand
uggaaaagaaauuggccaa

SEQ ID NO: 2268844 - RNA, 19 nt, Homo sapiens
  misc_RNA (1)...(19): siRNA sense strand
cuccaauauccaagagauu

SEQ ID NO: 2268845 - RNA, 19 nt, Homo sapiens
  misc_RNA (1)...(19): siRNA sense strand
gaagagaaugagagccuga

SEQ ID NO: 2268846 - RNA, 19 nt, Homo sapiens
  misc_RNA (1)...(19): siRNA sense strand
gcaaagauaaaccuggcaa

SEQ ID NO: 2268847 - RNA, 19 nt, Homo sapiens
  misc_RNA (1)...(19): siRNA sense strand
aggagauggccgaguugaa

SEQ ID NO: 2268848 - RNA, 19 nt, Homo sapiens
  misc_RNA (1)...(19): siRNA sense strand
aguugaaggcccagcucua

SEQ ID NO: 2268849 - RNA, 19 nt, Homo sapiens
  misc_RNA (1)...(19): siRNA sense strand
gguggcugccuaugagaaa

SEQ ID NO: 2268850 - RNA, 19 nt, Homo sapiens
  misc_RNA (1)...(19): siRNA sense strand
agggagauauaguggaacu

SEQ ID NO: 2268851 - RNA, 19 nt, Homo sapiens
  misc_RNA (1)...(19): siRNA sense strand
cagcggcagcaaagauaaa

SEQ ID NO: 2268852 - RNA, 19 nt, Homo sapiens
  misc_RNA (1)...(19): siRNA sense strand
ggcugagggaagagaauga

SEQ ID NO: 2268853 - RNA, 19 nt, Homo sapiens
  misc_RNA (1)...(19): siRNA sense strand
uuagagaguuugaggugga

SEQ ID NO: 2268854 - RNA, 19 nt, Homo sapiens
  misc_RNA (1)...(19): siRNA sense strand
ugaagaaguuagagucgca

SEQ ID NO: 2268855 - RNA, 19 nt, Homo sapiens
  misc_RNA (1)...(19): siRNA sense strand
aggccuaccuggugcacau

SEQ ID NO: 2268856 - RNA, 19 nt, Homo sapiens
  misc_RNA (1)...(19): siRNA sense strand
aguuagagucgcagaugau

SEQ ID NO: 2268857 - RNA, 19 nt, Homo sapiens
  misc_RNA (1)...(19): siRNA sense strand
ccaccaucagggaggaaga

SEQ ID NO: 2268858 - RNA, 19 nt, Homo sapiens
  misc_RNA (1)...(19): siRNA sense strand
gcagcaaagaggaagaacu

SEQ ID NO: 2268859 - RNA, 19 nt, Homo sapiens
  misc_RNA (1)...(19): siRNA sense strand
gaagacgagcagaggcuga

SEQ ID NO: 2268860 - RNA, 19 nt, Homo sapiens
  misc_RNA (1)...(19): siRNA sense strand
ucacagagcuccacagcgu

SEQ ID NO: 2268861 - RNA, 19 nt, Homo sapiens
  misc_RNA (1)...(19): siRNA sense strand
cucagaaaucaguagcaua

SEQ ID NO: 2268862 - RNA, 19 nt, Homo sapiens
  misc_RNA (1)...(19): siRNA sense strand
ggccagaguucaagagcug

SEQ ID NO: 2268863 - RNA, 19 nt, Homo sapiens
  misc_RNA (1)...(19): siRNA sense strand
gcgucauugcggagcucaa

SEQ ID NO: 2268864 - RNA, 19 nt, Homo sapiens
  misc_RNA (1)...(19): siRNA sense strand
ggugaagcuaucaaagaca

SEQ ID NO: 2268865 - RNA, 19 nt, Homo sapiens
  misc_RNA (1)...(19): siRNA sense strand
aaucaguagcauaggggua

SEQ ID NO: 2268866 - RNA, 19 nt, Homo sapiens
  misc_RNA (1)...(19): siRNA sense strand
uggaaaacgcagugcuuau

SEQ ID NO: 2268867 - RNA, 19 nt, Homo sapiens
  misc_RNA (1)...(19): siRNA sense strand
cuaaagaagacgagcagag

SEQ ID NO: 2268868 - RNA, 19 nt, Homo sapiens
  misc_RNA (1)...(19): siRNA sense strand
ucuaccuacuggagaaaga

SEQ ID NO: 2268869 - RNA, 19 nt, Homo sapiens
  misc_RNA (1)...(19): siRNA sense strand
cugccuaugagaaagcaaa

SEQ ID NO: 2268870 - RNA, 19 nt, Homo sapiens
  misc_RNA (1)...(19): siRNA sense strand
aucacuaaagggagauaua

SEQ ID NO: 2268871 - RNA, 19 nt, Homo sapiens
  misc_RNA (1)...(19): siRNA sense strand
acgcagugcuuaugcagga

SEQ ID NO: 2268872 - RNA, 19 nt, Homo sapiens
  misc_RNA (1)...(19): siRNA sense strand
agucccaccucaugagaga

SEQ ID NO: 2268873 - RNA, 19 nt, Homo sapiens
  misc_RNA (1)...(19): siRNA sense strand
agagccaacacgaggucaa

SEQ ID NO: 2268874 - RNA, 19 nt, Homo sapiens
  misc_RNA (1)...(19): siRNA sense strand
aggaagaagagcagcugca

SEQ ID NO: 2268875 - RNA, 19 nt, Homo sapiens
  misc_RNA (1)...(19): siRNA sense strand
ccggaagacagcugagaac

SEQ ID NO: 2268876 - RNA, 19 nt, Homo sapiens
  misc_RNA (1)...(19): siRNA sense strand
ggugagugccuuggagaga

SEQ ID NO: 2268877 - RNA, 19 nt, Homo sapiens
  misc_RNA (1)...(19): siRNA sense strand
caugaaugccauccgggaa

SEQ ID NO: 2268878 - RNA, 19 nt, Homo sapiens
  misc_RNA (1)...(19): siRNA sense strand
gcaucgaagccuacgaacu

SEQ ID NO: 2268879 - RNA, 19 nt, Homo sapiens
  misc_RNA (1)...(19): siRNA sense strand
caccaagagcagugaaauc

SEQ ID NO: 2268880 - RNA, 19 nt, Homo sapiens
  misc_RNA (1)...(19): siRNA sense strand
ggaggaauguaaaagcaau

SEQ ID NO: 2268881 - RNA, 19 nt, Homo sapiens
  misc_RNA (1)...(19): siRNA sense strand
ucacuaaagaagacgagca

SEQ ID NO: 2268882 - RNA, 19 nt, Homo sapiens
  misc_RNA (1)...(19): siRNA sense strand
uggaggagcagaaggagca

SEQ ID NO: 2268883 - RNA, 19 nt, Homo sapiens
  misc_RNA (1)...(19): siRNA sense strand
ccaauauccaagagauuuu

SEQ ID NO: 2268884 - RNA, 19 nt, Homo sapiens
  misc_RNA (1)...(19): siRNA sense strand
cugccaucucagaaagcaa

SEQ ID NO: 2268885 - RNA, 19 nt, Homo sapiens
  misc_RNA (1)...(19): siRNA sense strand
ugaccaugcuggagcugga

SEQ ID NO: 2268886 - RNA, 19 nt, Homo sapiens
  misc_RNA (1)...(19): siRNA sense strand
agaaagagaagaaggcccu

SEQ ID NO: 2268887 - RNA, 19 nt, Homo sapiens
  misc_RNA (1)...(19): siRNA sense strand
agaagaaggcccuggagcu

SEQ ID NO: 2268888 - RNA, 19 nt, Homo sapiens
  misc_RNA (1)...(19): siRNA sense strand
ccugucuauaagagaauua

SEQ ID NO: 2268889 - RNA, 19 nt, Homo sapiens
  misc_RNA (1)...(19): siRNA sense strand
acuauauaacccuaggaau

SEQ ID NO: 2268890 - RNA, 19 nt, Homo sapiens
  misc_RNA (1)...(19): siRNA sense strand
cugaagaggugcagaaaau

SEQ ID NO: 2268891 - RNA, 19 nt, Homo sapiens
  misc_RNA (1)...(19): siRNA sense strand
gaacaaacugucugaucaa

SEQ ID NO: 2268892 - RNA, 19 nt, Homo sapiens
  misc_RNA (1)...(19): siRNA sense strand
ccuuaacacaagagaaaga

SEQ ID NO: 2268893 - RNA, 19 nt, Homo sapiens
  misc_RNA (1)...(19): siRNA sense strand
ccuagaagccauuguucaa

SEQ ID NO: 2268894 - RNA, 19 nt, Homo sapiens
  misc_RNA (1)...(19): siRNA sense strand
gcguguggauugaggcaga

SEQ ID NO: 2268895 - RNA, 19 nt, Homo sapiens
  misc_RNA (1)...(19): siRNA sense strand
ugaugauauucaaggaaca

SEQ ID NO: 2268896 - RNA, 19 nt, Homo sapiens
  misc_RNA (1)...(19): siRNA sense strand
uggaagagagacagcaauu

SEQ ID NO: 2268897 - RNA, 19 nt, Homo sapiens
  misc_RNA (1)...(19): siRNA sense strand
gaguaauccaacuagcaaa

SEQ ID NO: 2268898 - RNA, 19 nt, Homo sapiens
  misc_RNA (1)...(19): siRNA sense strand
uuccuuaacacaagagaaa

SEQ ID NO: 2268899 - RNA, 19 nt, Homo sapiens
  misc_RNA (1)...(19): siRNA sense strand
cuacggcagagaagaguaa

SEQ ID NO: 2268900 - RNA, 19 nt, Homo sapiens
  misc_RNA (1)...(19): siRNA sense strand
agguuuaccaaaagagaaa

SEQ ID NO: 2268901 - RNA, 19 nt, Homo sapiens
  misc_RNA (1)...(19): siRNA sense strand
gaacaugaagaaaugaaga

SEQ ID NO: 2268902 - RNA, 19 nt, Homo sapiens
  misc_RNA (1)...(19): siRNA sense strand
ugaagaaccuagaagccau

SEQ ID NO: 2268903 - RNA, 19 nt, Homo sapiens
  misc_RNA (1)...(19): siRNA sense strand
ucagcaagugucagauaaa

SEQ ID NO: 2268904 - RNA, 19 nt, Homo sapiens
  misc_RNA (1)...(19): siRNA sense strand
ggccugaagaggugcagaa

SEQ ID NO: 2268905 - RNA, 19 nt, Homo sapiens
  misc_RNA (1)...(19): siRNA sense strand
ccuggaagagagacagcaa

SEQ ID NO: 2268906 - RNA, 19 nt, Homo sapiens
  misc_RNA (1)...(19): siRNA sense strand
ugggcaucccuguggguaa

SEQ ID NO: 2268907 - RNA, 19 nt, Homo sapiens
  misc_RNA (1)...(19): siRNA sense strand
augaagaaaugaagaaccu

SEQ ID NO: 2268908 - RNA, 19 nt, Homo sapiens
  misc_RNA (1)...(19): siRNA sense strand
agagacagcaauugaacau

SEQ ID NO: 2268909 - RNA, 19 nt, Homo sapiens
  misc_RNA (1)...(19): siRNA sense strand
acgaauucauggaggcagu

SEQ ID NO: 2268910 - RNA, 19 nt, Homo sapiens
  misc_RNA (1)...(19): siRNA sense strand
ugacugauggagagcguau

SEQ ID NO: 2268911 - RNA, 19 nt, Homo sapiens
  misc_RNA (1)...(19): siRNA sense strand
gguucuuagaguaguaaaa

SEQ ID NO: 2268912 - RNA, 19 nt, Homo sapiens
  misc_RNA (1)...(19): siRNA sense strand
ucgaauaaccaagaacaaa

SEQ ID NO: 2268913 - RNA, 19 nt, Homo sapiens
  misc_RNA (1)...(19): siRNA sense strand
ccucauaggaguugcugca

SEQ ID NO: 2268914 - RNA, 19 nt, Homo sapiens
  misc_RNA (1)...(19): siRNA sense strand
cgaaaccaguauugcacau

SEQ ID NO: 2268915 - RNA, 19 nt, Homo sapiens
  misc_RNA (1)...(19): siRNA sense strand
aaccaagggacgugcaauu

SEQ ID NO: 2268916 - RNA, 19 nt, Homo sapiens
  misc_RNA (1)...(19): siRNA sense strand
gaaguuugcccaugaacau

SEQ ID NO: 2268917 - RNA, 19 nt, Homo sapiens
  misc_RNA (1)...(19): siRNA sense strand
uugagaaauucaugccuau

SEQ ID NO: 2268918 - RNA, 19 nt, Homo sapiens
  misc_RNA (1)...(19): siRNA sense strand
cgaauaaccaagaacaaac

SEQ ID NO: 2268919 - RNA, 19 nt, Homo sapiens
  misc_RNA (1)...(19): siRNA sense strand
uugaauaccauuagagaug

SEQ ID NO: 2268920 - RNA, 19 nt, Homo sapiens
  misc_RNA (1)...(19): siRNA sense strand
cuccaagauagaaaugaaa

SEQ ID NO: 2268921 - RNA, 19 nt, Homo sapiens
  misc_RNA (1)...(19): siRNA sense strand
gacaucugacauugagaaa

SEQ ID NO: 2268922 - RNA, 19 nt, Homo sapiens
  misc_RNA (1)...(19): siRNA sense strand
agauugugaaagaugcaua

SEQ ID NO: 2268923 - RNA, 19 nt, Homo sapiens
  misc_RNA (1)...(19): siRNA sense strand
aggccauuguggugacuga

SEQ ID NO: 2268924 - RNA, 19 nt, Homo sapiens
  misc_RNA (1)...(19): siRNA sense strand
gaggcagaucacagauaau

SEQ ID NO: 2268925 - RNA, 19 nt, Homo sapiens
  misc_RNA (1)...(19): siRNA sense strand
ggguaaauuggcucuauau

SEQ ID NO: 2268926 - RNA, 19 nt, Homo sapiens
  misc_RNA (1)...(19): siRNA sense strand
caacaauauaguuuggugu

SEQ ID NO: 2268927 - RNA, 19 nt, Homo sapiens
  misc_RNA (1)...(19): siRNA sense strand
gaaccgaaaaugaggaguu

SEQ ID NO: 2268928 - RNA, 19 nt, Homo sapiens
  misc_RNA (1)...(19): siRNA sense strand
gcagagaagaguaagaggu

SEQ ID NO: 2268929 - RNA, 19 nt, Homo sapiens
  misc_RNA (1)...(19): siRNA sense strand
uggaguugcucuugguguu

SEQ ID NO: 2268930 - RNA, 19 nt, Homo sapiens
  misc_RNA (1)...(19): siRNA sense strand
guuugaagauuuugccaau

SEQ ID NO: 2268931 - RNA, 19 nt, Homo sapiens
  misc_RNA (1)...(19): siRNA sense strand
aagccauuguucaagaaau

SEQ ID NO: 2268932 - RNA, 19 nt, Homo sapiens
  misc_RNA (1)...(19): siRNA sense strand
auugagaaauucaugccua

SEQ ID NO: 2268933 - RNA, 19 nt, Homo sapiens
  misc_RNA (1)...(19): siRNA sense strand
ggugacugauggagagcgu

SEQ ID NO: 2268934 - RNA, 19 nt, Homo sapiens
  misc_RNA (1)...(19): siRNA sense strand
uugagaaaguaccgagaaa

SEQ ID NO: 2268935 - RNA, 19 nt, Homo sapiens
  misc_RNA (1)...(19): siRNA sense strand
ugggaauacaagaaagaaa

SEQ ID NO: 2268936 - RNA, 19 nt, Homo sapiens
  misc_RNA (1)...(19): siRNA sense strand
guuaagggacggaaagcaa

SEQ ID NO: 2268937 - RNA, 19 nt, Homo sapiens
  misc_RNA (1)...(19): siRNA sense strand
ugucagaacaagaggcaca

SEQ ID NO: 2268938 - RNA, 19 nt, Homo sapiens
  misc_RNA (1)...(19): siRNA sense strand
agaacauggcggagugaau

SEQ ID NO: 2268939 - RNA, 19 nt, Homo sapiens
  misc_RNA (1)...(19): siRNA sense strand
cuacauaaugggaauacaa

SEQ ID NO: 2268940 - RNA, 19 nt, Homo sapiens
  misc_RNA (1)...(19): siRNA sense strand
uugaagaugcagugaauau

SEQ ID NO: 2268941 - RNA, 19 nt, Homo sapiens
  misc_RNA (1)...(19): siRNA sense strand
ugaugauauucaagggaca

SEQ ID NO: 2268942 - RNA, 19 nt, Homo sapiens
  misc_RNA (1)...(19): siRNA sense strand
ugacugauggagagagaau

SEQ ID NO: 2268943 - RNA, 19 nt, Homo sapiens
  misc_RNA (1)...(19): siRNA sense strand
augcugaacccaagaacaa

SEQ ID NO: 2268944 - RNA, 19 nt, Homo sapiens
  misc_RNA (1)...(19): siRNA sense strand
caagaacaaacaagggaau

SEQ ID NO: 2268945 - RNA, 19 nt, Homo sapiens
  misc_RNA (1)...(19): siRNA sense strand
augacuagcccuuuggaaa

SEQ ID NO: 2268946 - RNA, 19 nt, Homo sapiens
  misc_RNA (1)...(19): siRNA sense strand
agagcuagcccaagggaga

SEQ ID NO: 2268947 - RNA, 19 nt, Homo sapiens
  misc_RNA (1)...(19): siRNA sense strand
guguaugaauggccagaau

SEQ ID NO: 2268948 - RNA, 19 nt, Homo sapiens
  misc_RNA (1)...(19): siRNA sense strand
ccaagaacaaacaagggaa

SEQ ID NO: 2268949 - RNA, 19 nt, Homo sapiens
  misc_RNA (1)...(19): siRNA sense strand
guauacagcuugugcagga

SEQ ID NO: 2268950 - RNA, 19 nt, Homo sapiens
  misc_RNA (1)...(19): siRNA sense strand
acccagaaccugaagacaa

SEQ ID NO: 2268951 - RNA, 19 nt, Homo sapiens
  misc_RNA (1)...(19): siRNA sense strand
gcaagaugacauugagagu

SEQ ID NO: 2268952 - RNA, 19 nt, Homo sapiens
  misc_RNA (1)...(19): siRNA sense strand
auugacagaugaagagcua

SEQ ID NO: 2268953 - RNA, 19 nt, Homo sapiens
  misc_RNA (1)...(19): siRNA sense strand
aguucgaagacuuuggaaa

SEQ ID NO: 2268954 - RNA, 19 nt, Homo sapiens
  misc_RNA (1)...(19): siRNA sense strand
agugacugauggagagaga

SEQ ID NO: 2268955 - RNA, 19 nt, Homo sapiens
  misc_RNA (1)...(19): siRNA sense strand
aggaauacggccugauaga

SEQ ID NO: 2268956 - RNA, 19 nt, Homo sapiens
  misc_RNA (1)...(19): siRNA sense strand
ugacaagccaauugacaga

SEQ ID NO: 2268957 - RNA, 19 nt, Homo sapiens
  misc_RNA (1)...(19): siRNA sense strand
gagagagaauucugggucu

SEQ ID NO: 2268958 - RNA, 19 nt, Homo sapiens
  misc_RNA (1)...(19): siRNA sense strand
aagcuauuacugacagaua

SEQ ID NO: 2268959 - RNA, 19 nt, Homo sapiens
  misc_RNA (1)...(19): siRNA sense strand
agaugaagagcuagcccaa

SEQ ID NO: 2268960 - RNA, 19 nt, Homo sapiens
  misc_RNA (1)...(19): siRNA sense strand
acaagaggcacaaaagaaa

SEQ ID NO: 2268961 - RNA, 19 nt, Homo sapiens
  misc_RNA (1)...(19): siRNA sense strand
gugaauauacugaagccuu

SEQ ID NO: 2268962 - RNA, 19 nt, Homo sapiens
  misc_RNA (1)...(19): siRNA sense strand
gccaauugacagaugaaga

SEQ ID NO: 2268963 - RNA, 19 nt, Homo sapiens
  misc_RNA (1)...(19): siRNA sense strand
ugacuagcccuuuggaaaa

SEQ ID NO: 2268964 - RNA, 19 nt, Homo sapiens
  misc_RNA (1)...(19): siRNA sense strand
ccacuuaugcugaacccaa

SEQ ID NO: 2268965 - RNA, 19 nt, Homo sapiens
  misc_RNA (1)...(19): siRNA sense strand
aggccaaauauguuaaaga

SEQ ID NO: 2268966 - RNA, 19 nt, Homo sapiens
  misc_RNA (1)...(19): siRNA sense strand
cugcaaaggcccugacaag

SEQ ID NO: 2268967 - RNA, 19 nt, Homo sapiens
  misc_RNA (1)...(19): siRNA sense strand
gaugaguuuaugaaagcua

SEQ ID NO: 2268968 - RNA, 19 nt, Homo sapiens
  misc_RNA (1)...(19): siRNA sense strand
gaaacuuacagaugggcga

SEQ ID NO: 2268969 - RNA, 19 nt, Homo sapiens
  misc_RNA (1)...(19): siRNA sense strand
agucuuuacaccaggucaa

SEQ ID NO: 2268970 - RNA, 19 nt, Homo sapiens
  misc_RNA (1)...(19): siRNA sense strand
gugucuauggaaugggaau

SEQ ID NO: 2268971 - RNA, 19 nt, Homo sapiens
  misc_RNA (1)...(19): siRNA sense strand
auaaaauggcuuuccgaua

SEQ ID NO: 2268972 - RNA, 19 nt, Homo sapiens
  misc_RNA (1)...(19): siRNA sense strand
auugagaguuuaaugccaa

SEQ ID NO: 2268973 - RNA, 19 nt, Homo sapiens
  misc_RNA (1)...(19): siRNA sense strand
aggucauguuagaucaauu

SEQ ID NO: 2268974 - RNA, 19 nt, Homo sapiens
  misc_RNA (1)...(19): siRNA sense strand
auuaguuaagggacggaaa

SEQ ID NO: 2268975 - RNA, 19 nt, Homo sapiens
  misc_RNA (1)...(19): siRNA sense strand
gaucucagacagaggucau

SEQ ID NO: 2268976 - RNA, 19 nt, Homo sapiens
  misc_RNA (1)...(19): siRNA sense strand
aaaucuggauguuugacaa

SEQ ID NO: 2268977 - RNA, 19 nt, Homo sapiens
  misc_RNA (1)...(19): siRNA sense strand
gaauacugcaagaugacau

SEQ ID NO: 2268978 - RNA, 19 nt, Homo sapiens
  misc_RNA (1)...(19): siRNA sense strand
ggauaacuggccagaaaau

SEQ ID NO: 2268979 - RNA, 19 nt, Homo sapiens
  misc_RNA (1)...(19): siRNA sense strand
ccagaaacgagaucgcaca

SEQ ID NO: 2268980 - RNA, 19 nt, Homo sapiens
  misc_RNA (1)...(19): siRNA sense strand
aaugggaauacaagaaaga

SEQ ID NO: 2268981 - RNA, 19 nt, Homo sapiens
  misc_RNA (1)...(19): siRNA sense strand
caaaagaaaaucuggaugu

SEQ ID NO: 2268982 - RNA, 19 nt, Homo sapiens
  misc_RNA (1)...(19): siRNA sense strand
cugaagaagcauauacacu

SEQ ID NO: 2268983 - RNA, 19 nt, Homo sapiens
  misc_RNA (1)...(19): siRNA sense strand
aaagaaagaacauggcgga

SEQ ID NO: 2268984 - RNA, 19 nt, Homo sapiens
  misc_RNA (1)...(19): siRNA sense strand
ugaugugggaacugauaau

SEQ ID NO: 2268985 - RNA, 19 nt, Homo sapiens
  misc_RNA (1)...(19): siRNA sense strand
ggacaacagcagugagcaa

SEQ ID NO: 2268986 - RNA, 19 nt, Homo sapiens
  misc_RNA (1)...(19): siRNA sense strand
gaagaauagugcagcccau

SEQ ID NO: 2268987 - RNA, 19 nt, Homo sapiens
  misc_RNA (1)...(19): siRNA sense strand
acaaauaucaugagggcgu

SEQ ID NO: 2268988 - RNA, 19 nt, Homo sapiens
  misc_RNA (1)...(19): siRNA sense strand
uggaauuagagaagguaca

SEQ ID NO: 2268989 - RNA, 19 nt, Homo sapiens
  misc_RNA (1)...(19): siRNA sense strand
cuuauaauccugauggaca

SEQ ID NO: 2268990 - RNA, 19 nt, Homo sapiens
  misc_RNA (1)...(19): siRNA sense strand
ggucagcaacauaugggaa

SEQ ID NO: 2268991 - RNA, 19 nt, Homo sapiens
  misc_RNA (1)...(19): siRNA sense strand
agauauaacaagaucagca

SEQ ID NO: 2268992 - RNA, 19 nt, Homo sapiens
  misc_RNA (1)...(19): siRNA sense strand
uagagaaggaggaucaaaa

SEQ ID NO: 2268993 - RNA, 19 nt, Homo sapiens
  misc_RNA (1)...(19): siRNA sense strand
ccaugauagaccaguccaa

SEQ ID NO: 2268994 - RNA, 19 nt, Homo sapiens
  misc_RNA (1)...(19): siRNA sense strand
cagcaaaucuaacugacca

SEQ ID NO: 2268995 - RNA, 19 nt, Homo sapiens
  misc_RNA (1)...(19): siRNA sense strand
agacgauagagaaggagga

SEQ ID NO: 2268996 - RNA, 19 nt, Homo sapiens
  misc_RNA (1)...(19): siRNA sense strand
uggugauagacgauagaga

SEQ ID NO: 2268997 - RNA, 19 nt, Homo sapiens
  misc_RNA (1)...(19): siRNA sense strand
cgguauauuagcuguuuga

SEQ ID NO: 2268998 - RNA, 19 nt, Homo sapiens
  misc_RNA (1)...(19): siRNA sense strand
guuuauuaaugcccggaga

SEQ ID NO: 2268999 - RNA, 19 nt, Homo sapiens
  misc_RNA (1)...(19): siRNA sense strand
caggaaaugcagagcugga

SEQ ID NO: 2269000 - RNA, 19 nt, Homo sapiens
  misc_RNA (1)...(19): siRNA sense strand
caggaaaugcagagcugga

SEQ ID NO: 2269001 - RNA, 19 nt, Homo sapiens
  misc_RNA (1)...(19): siRNA sense strand
ucuagaaacacaagagcaa

SEQ ID NO: 2269002 - RNA, 19 nt, Homo sapiens
  misc_RNA (1)...(19): siRNA sense strand
ccuaaaacgaagagaauuu

SEQ ID NO: 2269003 - RNA, 19 nt, Homo sapiens
  misc_RNA (1)...(19): siRNA sense strand
gcugaaacccugaagguga

SEQ ID NO: 2269004 - RNA, 19 nt, Homo sapiens
  misc_RNA (1)...(19): siRNA sense strand
gggaauaaguacugggcug

SEQ ID NO: 2269005 - RNA, 19 nt, Homo sapiens
  misc_RNA (1)...(19): siRNA sense strand
gcggagaaauaguggccca

SEQ ID NO: 2269006 - RNA, 19 nt, Homo sapiens
  misc_RNA (1)...(19): siRNA sense strand
caacaauuucagagaguac

SEQ ID NO: 2269007 - RNA, 19 nt, Homo sapiens
  misc_RNA (1)...(19): siRNA sense strand
gaagaugaaagguggacca

SEQ ID NO: 2269008 - RNA, 19 nt, Homo sapiens
  misc_RNA (1)...(19): siRNA sense strand
acgaauuugccgacagaga

SEQ ID NO: 2269009 - RNA, 19 nt, Homo sapiens
  misc_RNA (1)...(19): siRNA sense strand
ccaaggucucugaggguca

SEQ ID NO: 2269010 - RNA, 19 nt, Homo sapiens
  misc_RNA (1)...(19): siRNA sense strand
ugaggaaaacacuggaaaa

SEQ ID NO: 2269011 - RNA, 19 nt, Homo sapiens
  misc_RNA (1)...(19): siRNA sense strand
ugguucaacugcaggaaaa

SEQ ID NO: 2269012 - RNA, 19 nt, Homo sapiens
  misc_RNA (1)...(19): siRNA sense strand
aggaugacauugauggcau

SEQ ID NO: 2269013 - RNA, 19 nt, Homo sapiens
  misc_RNA (1)...(19): siRNA sense strand
ggcugaaagugacugggaa

SEQ ID NO: 2269014 - RNA, 19 nt, Homo sapiens
  misc_RNA (1)...(19): siRNA sense strand
cuaacaaauacuggaggua

SEQ ID NO: 2269015 - RNA, 19 nt, Homo sapiens
  misc_RNA (1)...(19): siRNA sense strand
gcuaacaaauacuggaggu

SEQ ID NO: 2269016 - RNA, 19 nt, Homo sapiens
  misc_RNA (1)...(19): siRNA sense strand
ccuacuucuuuguugcuaa

SEQ ID NO: 2269017 - RNA, 19 nt, Homo sapiens
  misc_RNA (1)...(19): siRNA sense strand
acuggagguaugaugaaua

SEQ ID NO: 2269018 - RNA, 19 nt, Homo sapiens
  misc_RNA (1)...(19): siRNA sense strand
ugggaaaccagaugcugaa

SEQ ID NO: 2269019 - RNA, 19 nt, Homo sapiens
  misc_RNA (1)...(19): siRNA sense strand
uuucauggaacaagacaau

SEQ ID NO: 2269020 - RNA, 19 nt, Homo sapiens
  misc_RNA (1)...(19): siRNA sense strand
aauacuacaaccugaagaa

SEQ ID NO: 2269021 - RNA, 19 nt, Homo sapiens
  misc_RNA (1)...(19): siRNA sense strand
cccugaaggugaugaagca

SEQ ID NO: 2269022 - RNA, 19 nt, Homo sapiens
  misc_RNA (1)...(19): siRNA sense strand
uggaggaaaucuugcucau

SEQ ID NO: 2269023 - RNA, 19 nt, Homo sapiens
  misc_RNA (1)...(19): siRNA sense strand
gauccuaaaacgaagagaa

SEQ ID NO: 2269024 - RNA, 19 nt, Homo sapiens
  misc_RNA (1)...(19): siRNA sense strand
aaauaguggcccagugguu

SEQ ID NO: 2269025 - RNA, 19 nt, Homo sapiens
  misc_RNA (1)...(19): siRNA sense strand
ggaaaugaguucugggcca

SEQ ID NO: 2269026 - RNA, 19 nt, Homo sapiens
  misc_RNA (1)...(19): siRNA sense strand
augccgaaguggaggaaaa

SEQ ID NO: 2269027 - RNA, 19 nt, Homo sapiens
  misc_RNA (1)...(19): siRNA sense strand
gaaguuaacagcagggaca

SEQ ID NO: 2269028 - RNA, 19 nt, Homo sapiens
  misc_RNA (1)...(19): siRNA sense strand
ucgaaaaggaugugaaaca

SEQ ID NO: 2269029 - RNA, 19 nt, Homo sapiens
  misc_RNA (1)...(19): siRNA sense strand
gguuggaggugacagggaa

SEQ ID NO: 2269030 - RNA, 19 nt, Homo sapiens
  misc_RNA (1)...(19): siRNA sense strand
ccuccaaccauaaggaaaa

SEQ ID NO: 2269031 - RNA, 19 nt, Homo sapiens
  misc_RNA (1)...(19): siRNA sense strand
caguuaaagaacauggaga

SEQ ID NO: 2269032 - RNA, 19 nt, Homo sapiens
  misc_RNA (1)...(19): siRNA sense strand
cggacaaauacuggagauu

SEQ ID NO: 2269033 - RNA, 19 nt, Homo sapiens
  misc_RNA (1)...(19): siRNA sense strand
cugacaaggaaaagaagaa

SEQ ID NO: 2269034 - RNA, 19 nt, Homo sapiens
  misc_RNA (1)...(19): siRNA sense strand
caguuuagaagaaaggaca

SEQ ID NO: 2269035 - RNA, 19 nt, Homo sapiens
  misc_RNA (1)...(19): siRNA sense strand
ccucgaaaaggaugugaaa

SEQ ID NO: 2269036 - RNA, 19 nt, Homo sapiens
  misc_RNA (1)...(19): siRNA sense strand
uguaugaaggagaggcuga

SEQ ID NO: 2269037 - RNA, 19 nt, Homo sapiens
  misc_RNA (1)...(19): siRNA sense strand
gacaaggaaaagaagaaaa

SEQ ID NO: 2269038 - RNA, 19 nt, Homo sapiens
  misc_RNA (1)...(19): siRNA sense strand
ucagaggaaaugagguaca

SEQ ID NO: 2269039 - RNA, 19 nt, Homo sapiens
  misc_RNA (1)...(19): siRNA sense strand
gguacaagcagguuaucca

SEQ ID NO: 2269040 - RNA, 19 nt, Homo sapiens
  misc_RNA (1)...(19): siRNA sense strand
cucuggaggugaugcgcaa

SEQ ID NO: 2269041 - RNA, 19 nt, Homo sapiens
  misc_RNA (1)...(19): siRNA sense strand
gugaauuauacaccagauu

SEQ ID NO: 2269042 - RNA, 19 nt, Homo sapiens
  misc_RNA (1)...(19): siRNA sense strand
cagcaaaagaggaggacuc

SEQ ID NO: 2269043 - RNA, 19 nt, Homo sapiens
  misc_RNA (1)...(19): siRNA sense strand
gaaaugaguucugggccau

SEQ ID NO: 2269044 - RNA, 19 nt, Homo sapiens
  misc_RNA (1)...(19): siRNA sense strand
gacuaauagcugaugacuu

SEQ ID NO: 2269045 - RNA, 19 nt, Homo sapiens
  misc_RNA (1)...(19): siRNA sense strand
auuacaggcauuuggauuu

SEQ ID NO: 2269046 - RNA, 19 nt, Homo sapiens
  misc_RNA (1)...(19): siRNA sense strand
uugagaaagcucugaaagu

SEQ ID NO: 2269047 - RNA, 19 nt, Homo sapiens
  misc_RNA (1)...(19): siRNA sense strand
augccaggauggugacaca

SEQ ID NO: 2269048 - RNA, 19 nt, Homo sapiens
  misc_RNA (1)...(19): siRNA sense strand
auuuaagaccagagccaaa

SEQ ID NO: 2269049 - RNA, 19 nt, Homo sapiens
  misc_RNA (1)...(19): siRNA sense strand
caauuuaagaccagagcca

SEQ ID NO: 2269050 - RNA, 19 nt, Homo sapiens
  misc_RNA (1)...(19): siRNA sense strand
acaaacuuccagugacaaa

SEQ ID NO: 2269051 - RNA, 19 nt, Homo sapiens
  misc_RNA (1)...(19): siRNA sense strand
ugcuauuuggugagagaua

SEQ ID NO: 2269052 - RNA, 19 nt, Homo sapiens
  misc_RNA (1)...(19): siRNA sense strand
gagguaugaugaaaggaga

SEQ ID NO: 2269053 - RNA, 19 nt, Homo sapiens
  misc_RNA (1)...(19): siRNA sense strand
augaaauugaagccagaaa

SEQ ID NO: 2269054 - RNA, 19 nt, Homo sapiens
  misc_RNA (1)...(19): siRNA sense strand
ugugcuauuuggugagaga

SEQ ID NO: 2269055 - RNA, 19 nt, Homo sapiens
  misc_RNA (1)...(19): siRNA sense strand
uuaugaaauugaagccaga

SEQ ID NO: 2269056 - RNA, 19 nt, Homo sapiens
  misc_RNA (1)...(19): siRNA sense strand
ucugaaagugaccgggcaa

SEQ ID NO: 2269057 - RNA, 19 nt, Homo sapiens
  misc_RNA (1)...(19): siRNA sense strand
ccaaauuaucccaagagca

SEQ ID NO: 2269058 - RNA, 19 nt, Homo sapiens
  misc_RNA (1)...(19): siRNA sense strand
cugucacuaccgugggaaa

SEQ ID NO: 2269059 - RNA, 19 nt, Homo sapiens
  misc_RNA (1)...(19): siRNA sense strand
accaaagaccaguguuaau

SEQ ID NO: 2269060 - RNA, 19 nt, Homo sapiens
  misc_RNA (1)...(19): siRNA sense strand
auuuuauggccuugagaua

SEQ ID NO: 2269061 - RNA, 19 nt, Homo sapiens
  misc_RNA (1)...(19): siRNA sense strand
agaaccaacgcuugccaaa

SEQ ID NO: 2269062 - RNA, 19 nt, Homo sapiens
  misc_RNA (1)...(19): siRNA sense strand
gugagagauacuuagaaaa

SEQ ID NO: 2269063 - RNA, 19 nt, Homo sapiens
  misc_RNA (1)...(19): siRNA sense strand
uaugaugaaaggagacaga

SEQ ID NO: 2269064 - RNA, 19 nt, Homo sapiens
  misc_RNA (1)...(19): siRNA sense strand
gcuuagaggugacuggcaa

SEQ ID NO: 2269065 - RNA, 19 nt, Homo sapiens
  misc_RNA (1)...(19): siRNA sense strand
gugauaaaguagaugcugu

SEQ ID NO: 2269066 - RNA, 19 nt, Homo sapiens
  misc_RNA (1)...(19): siRNA sense strand
gaauuaaggagcauggcga

SEQ ID NO: 2269067 - RNA, 19 nt, Homo sapiens
  misc_RNA (1)...(19): siRNA sense strand
aaagacuauccgagacuaa

SEQ ID NO: 2269068 - RNA, 19 nt, Homo sapiens
  misc_RNA (1)...(19): siRNA sense strand
augauuugucugaggaaga

SEQ ID NO: 2269069 - RNA, 19 nt, Homo sapiens
  misc_RNA (1)...(19): siRNA sense strand
ucccagugguggugaugaa

SEQ ID NO: 2269070 - RNA, 19 nt, Homo sapiens
  misc_RNA (1)...(19): siRNA sense strand
agaugcugucuaugagaaa

SEQ ID NO: 2269071 - RNA, 19 nt, Homo sapiens
  misc_RNA (1)...(19): siRNA sense strand
acucuuaaaugguccaaaa

SEQ ID NO: 2269072 - RNA, 19 nt, Homo sapiens
  misc_RNA (1)...(19): siRNA sense strand
ccaaaagaaguuaagaaga

SEQ ID NO: 2269073 - RNA, 19 nt, Homo sapiens
  misc_RNA (1)...(19): siRNA sense strand
cagugguggugaugaagau

SEQ ID NO: 2269074 - RNA, 19 nt, Homo sapiens
  misc_RNA (1)...(19): siRNA sense strand
cuuagaggugacuggcaaa

SEQ ID NO: 2269075 - RNA, 19 nt, Homo sapiens
  misc_RNA (1)...(19): siRNA sense strand
gacuaauagaagaagacuu

SEQ ID NO: 2269076 - RNA, 19 nt, Homo sapiens
  misc_RNA (1)...(19): siRNA sense strand
ugacauucuggaagguuau

SEQ ID NO: 2269077 - RNA, 19 nt, Homo sapiens
  misc_RNA (1)...(19): siRNA sense strand
cuaugguccaggagaugaa

SEQ ID NO: 2269078 - RNA, 19 nt, Homo sapiens
  misc_RNA (1)...(19): siRNA sense strand
ggaaaucaauucugggcca

SEQ ID NO: 2269079 - RNA, 19 nt, Homo sapiens
  misc_RNA (1)...(19): siRNA sense strand
augcaaagaaagugacaca

SEQ ID NO: 2269080 - RNA, 19 nt, Homo sapiens
  misc_RNA (1)...(19): siRNA sense strand
cuuugaugaugaugaacaa

SEQ ID NO: 2269081 - RNA, 19 nt, Homo sapiens
  misc_RNA (1)...(19): siRNA sense strand
cugauaaggaaaagaacaa

SEQ ID NO: 2269082 - RNA, 19 nt, Homo sapiens
  misc_RNA (1)...(19): siRNA sense strand
ggccagggauuaauggaga

SEQ ID NO: 2269083 - RNA, 19 nt, Homo sapiens
  misc_RNA (1)...(19): siRNA sense strand
aucccgaaguggaggaaaa

SEQ ID NO: 2269084 - RNA, 19 nt, Homo sapiens
  misc_RNA (1)...(19): siRNA sense strand
gauuggaggugacggggaa

SEQ ID NO: 2269085 - RNA, 19 nt, Homo sapiens
  misc_RNA (1)...(19): siRNA sense strand
uguaugaaggagaggcuga

SEQ ID NO: 2269086 - RNA, 19 nt, Homo sapiens
  misc_RNA (1)...(19): siRNA sense strand
ggggagaaauccugaucuu

SEQ ID NO: 2269087 - RNA, 19 nt, Homo sapiens
  misc_RNA (1)...(19): siRNA sense strand
aggacaaauacuggagauu

SEQ ID NO: 2269088 - RNA, 19 nt, Homo sapiens
  misc_RNA (1)...(19): siRNA sense strand
agcaaauagcugaagacuu

SEQ ID NO: 2269089 - RNA, 19 nt, Homo sapiens
  misc_RNA (1)...(19): siRNA sense strand
cucuggaggugaugcgcaa

SEQ ID NO: 2269090 - RNA, 19 nt, Homo sapiens
  misc_RNA (1)...(19): siRNA sense strand
gugaauuauacaccagauu

SEQ ID NO: 2269091 - RNA, 19 nt, Homo sapiens
  misc_RNA (1)...(19): siRNA sense strand
acuggagauuugaugagaa

SEQ ID NO: 2269092 - RNA, 19 nt, Homo sapiens
  misc_RNA (1)...(19): siRNA sense strand
gcgcaaaucccucaggaag

SEQ ID NO: 2269093 - RNA, 19 nt, Homo sapiens
  misc_RNA (1)...(19): siRNA sense strand
uugagaaagcucugaaagu

SEQ ID NO: 2269094 - RNA, 19 nt, Homo sapiens
  misc_RNA (1)...(19): siRNA sense strand
agauuugaugagaagagaa

SEQ ID NO: 2269095 - RNA, 19 nt, Homo sapiens
  misc_RNA (1)...(19): siRNA sense strand
gcugaagacuuuccaggga

SEQ ID NO: 2269096 - RNA, 19 nt, Homo sapiens
  misc_RNA (1)...(19): siRNA sense strand
acccaaaugcaaagaaagu

SEQ ID NO: 2269097 - RNA, 19 nt, Homo sapiens
  misc_RNA (1)...(19): siRNA sense strand
ccaacaguuuagaagccaa

SEQ ID NO: 2269098 - RNA, 19 nt, Homo sapiens
  misc_RNA (1)...(19): siRNA sense strand
gcccagauguggagugcca

SEQ ID NO: 2269099 - RNA, 19 nt, Homo sapiens
  misc_RNA (1)...(19): siRNA sense strand
ucuaugacucagaaacaaa

SEQ ID NO: 2269100 - RNA, 19 nt, Homo sapiens
  misc_RNA (1)...(19): siRNA sense strand
cgauuagugucaaaggcuu

SEQ ID NO: 2269101 - RNA, 19 nt, Homo sapiens
  misc_RNA (1)...(19): siRNA sense strand
uggaaagagaaguaauuca

SEQ ID NO: 2269102 - RNA, 19 nt, Homo sapiens
  misc_RNA (1)...(19): siRNA sense strand
gggaggcaugagugagcua

SEQ ID NO: 2269103 - RNA, 19 nt, Homo sapiens
  misc_RNA (1)...(19): siRNA sense strand
gaaauaaugcagaagccca

SEQ ID NO: 2269104 - RNA, 19 nt, Homo sapiens
  misc_RNA (1)...(19): siRNA sense strand
caggaaacacgcuggcuca

SEQ ID NO: 2269105 - RNA, 19 nt, Homo sapiens
  misc_RNA (1)...(19): siRNA sense strand
aggaugauauuaaaggcau

SEQ ID NO: 2269106 - RNA, 19 nt, Homo sapiens
  misc_RNA (1)...(19): siRNA sense strand
ucucuaugacucagaaaca

SEQ ID NO: 2269107 - RNA, 19 nt, Homo sapiens
  misc_RNA (1)...(19): siRNA sense strand
uggaucgauuagugucaaa

SEQ ID NO: 2269108 - RNA, 19 nt, Homo sapiens
  misc_RNA (1)...(19): siRNA sense strand
gcuuuaaacauguggggca

SEQ ID NO: 2269109 - RNA, 19 nt, Homo sapiens
  misc_RNA (1)...(19): siRNA sense strand
auguuaaacucccgcguca

SEQ ID NO: 2269110 - RNA, 19 nt, Homo sapiens
  misc_RNA (1)...(19): siRNA sense strand
ggaccaagauauuacgcau

SEQ ID NO: 2269111 - RNA, 19 nt, Homo sapiens
  misc_RNA (1)...(19): siRNA sense strand
cuuauugcucagagaguua

SEQ ID NO: 2269112 - RNA, 19 nt, Homo sapiens
  misc_RNA (1)...(19): siRNA sense strand
caacuaugcuuucagggaa

SEQ ID NO: 2269113 - RNA, 19 nt, Homo sapiens
  misc_RNA (1)...(19): siRNA sense strand
agggagaggcagauaucaa

SEQ ID NO: 2269114 - RNA, 19 nt, Homo sapiens
  misc_RNA (1)...(19): siRNA sense strand
ccgaagaaacauggaccaa

SEQ ID NO: 2269115 - RNA, 19 nt, Homo sapiens
  misc_RNA (1)...(19): siRNA sense strand
cuaaugugaucguugaaaa

SEQ ID NO: 2269116 - RNA, 19 nt, Homo sapiens
  misc_RNA (1)...(19): siRNA sense strand
gguugaaugugacggggaa

SEQ ID NO: 2269117 - RNA, 19 nt, Homo sapiens
  misc_RNA (1)...(19): siRNA sense strand
cuucaguggaccaagauau

SEQ ID NO: 2269118 - RNA, 19 nt, Homo sapiens
  misc_RNA (1)...(19): siRNA sense strand
gcugagguagaaagagcua

SEQ ID NO: 2269119 - RNA, 19 nt, Homo sapiens
  misc_RNA (1)...(19): siRNA sense strand
ggggaagccaaaugaggaa

SEQ ID NO: 2269120 - RNA, 19 nt, Homo sapiens
  misc_RNA (1)...(19): siRNA sense strand
agaguaaaguugaugcagu

SEQ ID NO: 2269121 - RNA, 19 nt, Homo sapiens
  misc_RNA (1)...(19): siRNA sense strand
augaagauuuugacagaga

SEQ ID NO: 2269122 - RNA, 19 nt, Homo sapiens
  misc_RNA (1)...(19): siRNA sense strand
uggcuaugauauucugcaa

SEQ ID NO: 2269123 - RNA, 19 nt, Homo sapiens
  misc_RNA (1)...(19): siRNA sense strand
gaacaaugguguauggguu

SEQ ID NO: 2269124 - RNA, 19 nt, Homo sapiens
  misc_RNA (1)...(19): siRNA sense strand
gugugagaaaggagauaaa

SEQ ID NO: 2269125 - RNA, 19 nt, Homo sapiens
  misc_RNA (1)...(19): siRNA sense strand
gaaaaugggaaaagcacaa

SEQ ID NO: 2269126 - RNA, 19 nt, Homo sapiens
  misc_RNA (1)...(19): siRNA sense strand
ugaaaggauuugagcucau

SEQ ID NO: 2269127 - RNA, 19 nt, Homo sapiens
  misc_RNA (1)...(19): siRNA sense strand
agucaaaaguugcuaagaa

SEQ ID NO: 2269128 - RNA, 19 nt, Homo sapiens
  misc_RNA (1)...(19): siRNA sense strand
auguaaaggaguaauggaa

SEQ ID NO: 2269129 - RNA, 19 nt, Homo sapiens
  misc_RNA (1)...(19): siRNA sense strand
gguggaugcaagaagaaau

SEQ ID NO: 2269130 - RNA, 19 nt, Homo sapiens
  misc_RNA (1)...(19): siRNA sense strand
ugagaacaguugaccgcaa

SEQ ID NO: 2269131 - RNA, 19 nt, Homo sapiens
  misc_RNA (1)...(19): siRNA sense strand
aagaaaagacugaagccaa

SEQ ID NO: 2269132 - RNA, 19 nt, Homo sapiens
  misc_RNA (1)...(19): siRNA sense strand
ugucccaagagcagaguaa

SEQ ID NO: 2269133 - RNA, 19 nt, Homo sapiens
  misc_RNA (1)...(19): siRNA sense strand
gcugaaaggauuugagcuc

SEQ ID NO: 2269134 - RNA, 19 nt, Homo sapiens
  misc_RNA (1)...(19): siRNA sense strand
agaaaagcguacacaagaa

SEQ ID NO: 2269135 - RNA, 19 nt, Homo sapiens
  misc_RNA (1)...(19): siRNA sense strand
agagaaauuuguaaggaag

SEQ ID NO: 2269136 - RNA, 19 nt, Homo sapiens
  misc_RNA (1)...(19): siRNA sense strand
cucugaauguaaaggagua

SEQ ID NO: 2269137 - RNA, 19 nt, Homo sapiens
  misc_RNA (1)...(19): siRNA sense strand
aagcaagcaucuggaacaa

SEQ ID NO: 2269138 - RNA, 19 nt, Homo sapiens
  misc_RNA (1)...(19): siRNA sense strand
cagucaacuuuacaagcaa

SEQ ID NO: 2269139 - RNA, 19 nt, Homo sapiens
  misc_RNA (1)...(19): siRNA sense strand
aagaggaauacaacagaau

SEQ ID NO: 2269140 - RNA, 19 nt, Homo sapiens
  misc_RNA (1)...(19): siRNA sense strand
aggaaggaccaaugaaugu

SEQ ID NO: 2269141 - RNA, 19 nt, Homo sapiens
  misc_RNA (1)...(19): siRNA sense strand
agaagugggucuugcggca

SEQ ID NO: 2269142 - RNA, 19 nt, Homo sapiens
  misc_RNA (1)...(19): siRNA sense strand
acugaaagcaacagcgcca

SEQ ID NO: 2269143 - RNA, 19 nt, Homo sapiens
  misc_RNA (1)...(19): siRNA sense strand
gaguaauggaaauaaagga

SEQ ID NO: 2269144 - RNA, 19 nt, Homo sapiens
  misc_RNA (1)...(19): siRNA sense strand
caaacaaagaaaagacuga

SEQ ID NO: 2269145 - RNA, 19 nt, Homo sapiens
  misc_RNA (1)...(19): siRNA sense strand
acugaagccaaaaggaaua

SEQ ID NO: 2269146 - RNA, 19 nt, Homo sapiens
  misc_RNA (1)...(19): siRNA sense strand
gugagaaaggagauaaacu

SEQ ID NO: 2269147 - RNA, 19 nt, Homo sapiens
  misc_RNA (1)...(19): siRNA sense strand
aaacaaacugacaucggaa

SEQ ID NO: 2269148 - RNA, 19 nt, Homo sapiens
  misc_RNA (1)...(19): siRNA sense strand
gcacaauguuucaugcuac

SEQ ID NO: 2269149 - RNA, 19 nt, Homo sapiens
  misc_RNA (1)...(19): siRNA sense strand
uguaguggggaguggaaaa

SEQ ID NO: 2269150 - RNA, 19 nt, Homo sapiens
  misc_RNA (1)...(19): siRNA sense strand
ucaaggucaucaaggccaa

SEQ ID NO: 2269151 - RNA, 19 nt, Homo sapiens
  misc_RNA (1)...(19): siRNA sense strand
agacugaagccaaaaggaa

SEQ ID NO: 2269152 - RNA, 19 nt, Homo sapiens
  misc_RNA (1)...(19): siRNA sense strand
augcuacaguggccaguaa

SEQ ID NO: 2269153 - RNA, 19 nt, Homo sapiens
  misc_RNA (1)...(19): siRNA sense strand
cugaaacugguguguggaa

SEQ ID NO: 2269154 - RNA, 19 nt, Homo sapiens
  misc_RNA (1)...(19): siRNA sense strand
gcucaaaggucaaggacac

SEQ ID NO: 2269155 - RNA, 19 nt, Homo sapiens
  misc_RNA (1)...(19): siRNA sense strand
agaagaaggugguggugga

SEQ ID NO: 2269156 - RNA, 19 nt, Homo sapiens
  misc_RNA (1)...(19): siRNA sense strand
ccauguuucuggaggccaa

SEQ ID NO: 2269157 - RNA, 19 nt, Homo sapiens
  misc_RNA (1)...(19): siRNA sense strand
cuaacaaggagcuggcaga

SEQ ID NO: 2269158 - RNA, 19 nt, Homo sapiens
  misc_RNA (1)...(19): siRNA sense strand
cccagaucgcagaggacaa

SEQ ID NO: 2269159 - RNA, 19 nt, Homo sapiens
  misc_RNA (1)...(19): siRNA sense strand
ggaaacaacauggaggaca

SEQ ID NO: 2269160 - RNA, 19 nt, Homo sapiens
  misc_RNA (1)...(19): siRNA sense strand
aggacaagccuuaugcaga

SEQ ID NO: 2269161 - RNA, 19 nt, Homo sapiens
  misc_RNA (1)...(19): siRNA sense strand
ccggaaacaacauggagga

SEQ ID NO: 2269162 - RNA, 19 nt, Homo sapiens
  misc_RNA (1)...(19): siRNA sense strand
cugagaaccaggacagcuu

SEQ ID NO: 2269163 - RNA, 19 nt, Homo sapiens
  misc_RNA (1)...(19): siRNA sense strand
cagaagacccuaagccagu

SEQ ID NO: 2269164 - RNA, 19 nt, Homo sapiens
  misc_RNA (1)...(19): siRNA sense strand
gcaacacaccugaagcaga

SEQ ID NO: 2269165 - RNA, 19 nt, Homo sapiens
  misc_RNA (1)...(19): siRNA sense strand
augccuaccugaaaggaga

SEQ ID NO: 2269166 - RNA, 19 nt, Homo sapiens
  misc_RNA (1)...(19): siRNA sense strand
ggacaagccuuaugcagag

SEQ ID NO: 2269167 - RNA, 19 nt, Homo sapiens
  misc_RNA (1)...(19): siRNA sense strand
gggaagaagaagaaguaca

SEQ ID NO: 2269168 - RNA, 19 nt, Homo sapiens
  misc_RNA (1)...(19): siRNA sense strand
ccuagaaaucaauggcaca

SEQ ID NO: 2269169 - RNA, 19 nt, Homo sapiens
  misc_RNA (1)...(19): siRNA sense strand
gccaaggaagagugaggaa

SEQ ID NO: 2269170 - RNA, 19 nt, Homo sapiens
  misc_RNA (1)...(19): siRNA sense strand
cugcccaggucaagggaca

SEQ ID NO: 2269171 - RNA, 19 nt, Homo sapiens
  misc_RNA (1)...(19): siRNA sense strand
augaaagaaaccaaaggaa

SEQ ID NO: 2269172 - RNA, 19 nt, Homo sapiens
  misc_RNA (1)...(19): siRNA sense strand
acagaagagcccaugggaa

SEQ ID NO: 2269173 - RNA, 19 nt, Homo sapiens
  misc_RNA (1)...(19): siRNA sense strand
agagugaggaagaugggaa

SEQ ID NO: 2269174 - RNA, 19 nt, Homo sapiens
  misc_RNA (1)...(19): siRNA sense strand
gcagaagcguagucggcca

SEQ ID NO: 2269175 - RNA, 19 nt, Homo sapiens
  misc_RNA (1)...(19): siRNA sense strand
agacagaagcccugcagca

SEQ ID NO: 2269176 - RNA, 19 nt, Homo sapiens
  misc_RNA (1)...(19): siRNA sense strand
agggacaggaggugcggaa

SEQ ID NO: 2269177 - RNA, 19 nt, Homo sapiens
  misc_RNA (1)...(19): siRNA sense strand
uggcaugauccauagacaa

SEQ ID NO: 2269178 - RNA, 19 nt, Homo sapiens
  misc_RNA (1)...(19): siRNA sense strand
aagacaaauaucuggccaa

SEQ ID NO: 2269179 - RNA, 19 nt, Homo sapiens
  misc_RNA (1)...(19): siRNA sense strand
ccugaaaauuguucggaca

SEQ ID NO: 2269180 - RNA, 19 nt, Homo sapiens
  misc_RNA (1)...(19): siRNA sense strand
ccuuugggaagaagaagaa

SEQ ID NO: 2269181 - RNA, 19 nt, Homo sapiens
  misc_RNA (1)...(19): siRNA sense strand
augagauccuagaaaucaa

SEQ ID NO: 2269182 - RNA, 19 nt, Homo sapiens
  misc_RNA (1)...(19): siRNA sense strand
agaaggacucugaggccau

SEQ ID NO: 2269183 - RNA, 19 nt, Homo sapiens
  misc_RNA (1)...(19): siRNA sense strand
aggcgaugaaagaaaccaa

SEQ ID NO: 2269184 - RNA, 19 nt, Homo sapiens
  misc_RNA (1)...(19): siRNA sense strand
agauuaucaacaaggauga

SEQ ID NO: 2269185 - RNA, 19 nt, Homo sapiens
  misc_RNA (1)...(19): siRNA sense strand
gaggaagaugggaaggagu

SEQ ID NO: 2269186 - RNA, 19 nt, Homo sapiens
  misc_RNA (1)...(19): siRNA sense strand
ccugcauucaagaggaaga

SEQ ID NO: 2269187 - RNA, 19 nt, Homo sapiens
  misc_RNA (1)...(19): siRNA sense strand
ugaaagaucucgugggcaa

SEQ ID NO: 2269188 - RNA, 19 nt, Homo sapiens
  misc_RNA (1)...(19): siRNA sense strand
acugauaaguggaggguga

SEQ ID NO: 2269189 - RNA, 19 nt, Homo sapiens
  misc_RNA (1)...(19): siRNA sense strand
gggcaauauugaacagaau

SEQ ID NO: 2269190 - RNA, 19 nt, Homo sapiens
  misc_RNA (1)...(19): siRNA sense strand
gggacguggcuguggauaa

SEQ ID NO: 2269191 - RNA, 19 nt, Homo sapiens
  misc_RNA (1)...(19): siRNA sense strand
caucaauaacaaagaggaa

SEQ ID NO: 2269192 - RNA, 19 nt, Homo sapiens
  misc_RNA (1)...(19): siRNA sense strand
caucaaaugaagcaggaaa

SEQ ID NO: 2269193 - RNA, 19 nt, Homo sapiens
  misc_RNA (1)...(19): siRNA sense strand
ggcaugaagcggagacaua

SEQ ID NO: 2269194 - RNA, 19 nt, Homo sapiens
  misc_RNA (1)...(19): siRNA sense strand
ggaucaaaggagaagauuu

SEQ ID NO: 2269195 - RNA, 19 nt, Homo sapiens
  misc_RNA (1)...(19): siRNA sense strand
cauugaaagugcugcagaa

SEQ ID NO: 2269196 - RNA, 19 nt, Homo sapiens
  misc_RNA (1)...(19): siRNA sense strand
agaaggaaaccauggacaa

SEQ ID NO: 2269197 - RNA, 19 nt, Homo sapiens
  misc_RNA (1)...(19): siRNA sense strand
cagugaaagcuuauggaau

SEQ ID NO: 2269198 - RNA, 19 nt, Homo sapiens
  misc_RNA (1)...(19): siRNA sense strand
caacuauugaagacagaua

SEQ ID NO: 2269199 - RNA, 19 nt, Homo sapiens
  misc_RNA (1)...(19): siRNA sense strand
cagaaaugggagugcaaaa

SEQ ID NO: 2269200 - RNA, 19 nt, Homo sapiens
  misc_RNA (1)...(19): siRNA sense strand
cagaaauaguggaagucga

SEQ ID NO: 2269201 - RNA, 19 nt, Homo sapiens
  misc_RNA (1)...(19): siRNA sense strand
ggauauuguccauugaaau

SEQ ID NO: 2269202 - RNA, 19 nt, Homo sapiens
  misc_RNA (1)...(19): siRNA sense strand
acugaagauggguggguua

SEQ ID NO: 2269203 - RNA, 19 nt, Homo sapiens
  misc_RNA (1)...(19): siRNA sense strand
agacaagcuauuuggauau

SEQ ID NO: 2269204 - RNA, 19 nt, Homo sapiens
  misc_RNA (1)...(19): siRNA sense strand
aaggaaaacaugagaagaa

SEQ ID NO: 2269205 - RNA, 19 nt, Homo sapiens
  misc_RNA (1)...(19): siRNA sense strand
ggaaaacaugagaagaaaa

SEQ ID NO: 2269206 - RNA, 19 nt, Homo sapiens
  misc_RNA (1)...(19): siRNA sense strand
ucaauaacaaagaggaaca

SEQ ID NO: 2269207 - RNA, 19 nt, Homo sapiens
  misc_RNA (1)...(19): siRNA sense strand
gaugaaaucacgaagccaa

SEQ ID NO: 2269208 - RNA, 19 nt, Homo sapiens
  misc_RNA (1)...(19): siRNA sense strand
gugcaaggaagguuggaau

SEQ ID NO: 2269209 - RNA, 19 nt, Homo sapiens
  misc_RNA (1)...(19): siRNA sense strand
caguaaacgaggcuacaua

SEQ ID NO: 2269210 - RNA, 19 nt, Homo sapiens
  misc_RNA (1)...(19): siRNA sense strand
agaaauaguggaagucgaa

SEQ ID NO: 2269211 - RNA, 19 nt, Homo sapiens
  misc_RNA (1)...(19): siRNA sense strand
ugacauuaacuguggcuau

SEQ ID NO: 2269212 - RNA, 19 nt, Homo sapiens
  misc_RNA (1)...(19): siRNA sense strand
gauucacagagaugagaaa

SEQ ID NO: 2269213 - RNA, 19 nt, Homo sapiens
  misc_RNA (1)...(19): siRNA sense strand
cuugauggcuacuggaaga

SEQ ID NO: 2269214 - RNA, 19 nt, Homo sapiens
  misc_RNA (1)...(19): siRNA sense strand
ccugagcaucacagagaua

SEQ ID NO: 2269215 - RNA, 19 nt, Homo sapiens
  misc_RNA (1)...(19): siRNA sense strand
gcaauauugaacagaauga

SEQ ID NO: 2269216 - RNA, 19 nt, Homo sapiens
  misc_RNA (1)...(19): siRNA sense strand
aggaacuagugauaugaaa

SEQ ID NO: 2269217 - RNA, 19 nt, Homo sapiens
  misc_RNA (1)...(19): siRNA sense strand
gguuaugaagccauguaua

SEQ ID NO: 2269218 - RNA, 19 nt, Homo sapiens
  misc_RNA (1)...(19): siRNA sense strand
ggauggaagcaaaguggau

SEQ ID NO: 2269219 - RNA, 19 nt, Homo sapiens
  misc_RNA (1)...(19): siRNA sense strand
cuauggaaccacagacaau

SEQ ID NO: 2269220 - RNA, 19 nt, Homo sapiens
  misc_RNA (1)...(19): siRNA sense strand
aggauuguguggugaugaa

SEQ ID NO: 2269221 - RNA, 19 nt, Homo sapiens
  misc_RNA (1)...(19): siRNA sense strand
uuggauggauggaagcaaa

SEQ ID NO: 2269222 - RNA, 19 nt, Homo sapiens
  misc_RNA (1)...(19): siRNA sense strand
uggaauuucuacagcaaca

SEQ ID NO: 2269223 - RNA, 19 nt, Homo sapiens
  misc_RNA (1)...(19): siRNA sense strand
guucagaaacugggcuaua

SEQ ID NO: 2269224 - RNA, 19 nt, Homo sapiens
  misc_RNA (1)...(19): siRNA sense strand
cuguaaaagaucagaugaa

SEQ ID NO: 2269225 - RNA, 19 nt, Homo sapiens
  misc_RNA (1)...(19): siRNA sense strand
cagauaugccagggcgaaa

SEQ ID NO: 2269226 - RNA, 19 nt, Homo sapiens
  misc_RNA (1)...(19): siRNA sense strand
auggaagcaaaguggauua

SEQ ID NO: 2269227 - RNA, 19 nt, Homo sapiens
  misc_RNA (1)...(19): siRNA sense strand
gauucaaacagauggcuuu

SEQ ID NO: 2269228 - RNA, 19 nt, Homo sapiens
  misc_RNA (1)...(19): siRNA sense strand
guuggaauuucuacagcaa

SEQ ID NO: 2269229 - RNA, 19 nt, Homo sapiens
  misc_RNA (1)...(19): siRNA sense strand
uggaauguguucagaaacu

SEQ ID NO: 2269230 - RNA, 19 nt, Homo sapiens
  misc_RNA (1)...(19): siRNA sense strand
ccaucgaggaauuggacuu

SEQ ID NO: 2269231 - RNA, 19 nt, Homo sapiens
  misc_RNA (1)...(19): siRNA sense strand
cugcaggaaaggcuggaaa

SEQ ID NO: 2269232 - RNA, 19 nt, Homo sapiens
  misc_RNA (1)...(19): siRNA sense strand
uggacaggacuuucagaua

SEQ ID NO: 2269233 - RNA, 19 nt, Homo sapiens
  misc_RNA (1)...(19): siRNA sense strand
gcuguaugcaaaaggaaaa

SEQ ID NO: 2269234 - RNA, 19 nt, Homo sapiens
  misc_RNA (1)...(19): siRNA sense strand
gggcuuauggagaaccuaa

SEQ ID NO: 2269235 - RNA, 19 nt, Homo sapiens
  misc_RNA (1)...(19): siRNA sense strand
guggugagcugaaagguga

SEQ ID NO: 2269236 - RNA, 19 nt, Homo sapiens
  misc_RNA (1)...(19): siRNA sense strand
cagaaaugaugcacagucu

SEQ ID NO: 2269237 - RNA, 19 nt, Homo sapiens
  misc_RNA (1)...(19): siRNA sense strand
aaauuugagggcagugaaa

SEQ ID NO: 2269238 - RNA, 19 nt, Homo sapiens
  misc_RNA (1)...(19): siRNA sense strand
acaaagaggaacagcaaac

SEQ ID NO: 2269239 - RNA, 19 nt, Homo sapiens
  misc_RNA (1)...(19): siRNA sense strand
gagaaggaaaccauggaca

SEQ ID NO: 2269240 - RNA, 19 nt, Homo sapiens
  misc_RNA (1)...(19): siRNA sense strand
uuauggagcagguggaaga

SEQ ID NO: 2269241 - RNA, 19 nt, Homo sapiens
  misc_RNA (1)...(19): siRNA sense strand
cauugaaauuugagggcag

SEQ ID NO: 2269242 - RNA, 19 nt, Homo sapiens
  misc_RNA (1)...(19): siRNA sense strand
agcucuggguggagacuua

SEQ ID NO: 2269243 - RNA, 19 nt, Homo sapiens
  misc_RNA (1)...(19): siRNA sense strand
cuacaagggaucggguuua

SEQ ID NO: 2269244 - RNA, 19 nt, Homo sapiens
  misc_RNA (1)...(19): siRNA sense strand
gucacuaaauccuggaaaa

SEQ ID NO: 2269245 - RNA, 19 nt, Homo sapiens
  misc_RNA (1)...(19): siRNA sense strand
guguggugaugaaaggcaa

SEQ ID NO: 2269246 - RNA, 19 nt, Homo sapiens
  misc_RNA (1)...(19): siRNA sense strand
ugaagacagauaugaacaa

SEQ ID NO: 2269247 - RNA, 19 nt, Homo sapiens
  misc_RNA (1)...(19): siRNA sense strand
cagcaaacaauauggcgau

SEQ ID NO: 2269248 - RNA, 19 nt, Homo sapiens
  misc_RNA (1)...(19): siRNA sense strand
gguggaagaucuauggaac

SEQ ID NO: 2269249 - RNA, 19 nt, Homo sapiens
  misc_RNA (1)...(19): siRNA sense strand
ggauggcucuggugcggaa

SEQ ID NO: 2269250 - RNA, 19 nt, Homo sapiens
  misc_RNA (1)...(19): siRNA sense strand
gugaaauggcagagaagga

SEQ ID NO: 2269251 - RNA, 19 nt, Homo sapiens
  misc_RNA (1)...(19): siRNA sense strand
caggaugugcggaaggaaa

SEQ ID NO: 2269252 - RNA, 19 nt, Homo sapiens
  misc_RNA (1)...(19): siRNA sense strand
gggagaaggaggagcugau

SEQ ID NO: 2269253 - RNA, 19 nt, Homo sapiens
  misc_RNA (1)...(19): siRNA sense strand
agaucgaggaacagacuaa

SEQ ID NO: 2269254 - RNA, 19 nt, Homo sapiens
  misc_RNA (1)...(19): siRNA sense strand
agaaggagaaagagaagau

SEQ ID NO: 2269255 - RNA, 19 nt, Homo sapiens
  misc_RNA (1)...(19): siRNA sense strand
aggagaaagagaagauuga

SEQ ID NO: 2269256 - RNA, 19 nt, Homo sapiens
  misc_RNA (1)...(19): siRNA sense strand
aggauguguccgaggaauu

SEQ ID NO: 2269257 - RNA, 19 nt, Homo sapiens
  misc_RNA (1)...(19): siRNA sense strand
agauguauggugugaacua

SEQ ID NO: 2269258 - RNA, 19 nt, Homo sapiens
  misc_RNA (1)...(19): siRNA sense strand
uggaaaaugagaagaagaa

SEQ ID NO: 2269259 - RNA, 19 nt, Homo sapiens
  misc_RNA (1)...(19): siRNA sense strand
gggcugaugcuauggccaa

SEQ ID NO: 2269260 - RNA, 19 nt, Homo sapiens
  misc_RNA (1)...(19): siRNA sense strand
cccagaugguacaggaaga

SEQ ID NO: 2269261 - RNA, 19 nt, Homo sapiens
  misc_RNA (1)...(19): siRNA sense strand
cagagaagaaugagcgugu

SEQ ID NO: 2269262 - RNA, 19 nt, Homo sapiens
  misc_RNA (1)...(19): siRNA sense strand
gaacagacccguagggcuc

SEQ ID NO: 2269263 - RNA, 19 nt, Homo sapiens
  misc_RNA (1)...(19): siRNA sense strand
aggagaagcaccagaagca

SEQ ID NO: 2269264 - RNA, 19 nt, Homo sapiens
  misc_RNA (1)...(19): siRNA sense strand
cugagaaugagcaggauga

SEQ ID NO: 2269265 - RNA, 19 nt, Homo sapiens
  misc_RNA (1)...(19): siRNA sense strand
ggaugagcaggaugagaau

SEQ ID NO: 2269266 - RNA, 19 nt, Homo sapiens
  misc_RNA (1)...(19): siRNA sense strand
agguguggcaugaggaaca

SEQ ID NO: 2269267 - RNA, 19 nt, Homo sapiens
  misc_RNA (1)...(19): siRNA sense strand
gagaagauugaacgggaga

SEQ ID NO: 2269268 - RNA, 19 nt, Homo sapiens
  misc_RNA (1)...(19): siRNA sense strand
aggaagacuuggagaagac

SEQ ID NO: 2269269 - RNA, 19 nt, Homo sapiens
  misc_RNA (1)...(19): siRNA sense strand
cgcagagaguccuggaaca

SEQ ID NO: 2269270 - RNA, 19 nt, Homo sapiens
  misc_RNA (1)...(19): siRNA sense strand
acuucagcaucaagaacaa

SEQ ID NO: 2269271 - RNA, 19 nt, Homo sapiens
  misc_RNA (1)...(19): siRNA sense strand
acuauuggcuugagggaag

SEQ ID NO: 2269272 - RNA, 19 nt, Homo sapiens
  misc_RNA (1)...(19): siRNA sense strand
agauugaacgggagaagga

SEQ ID NO: 2269273 - RNA, 19 nt, Homo sapiens
  misc_RNA (1)...(19): siRNA sense strand
aagagaagauugaacggga

SEQ ID NO: 2269274 - RNA, 19 nt, Homo sapiens
  misc_RNA (1)...(19): siRNA sense strand
cggauuaacaagcggaucu

SEQ ID NO: 2269275 - RNA, 19 nt, Homo sapiens
  misc_RNA (1)...(19): siRNA sense strand
gagaagcaccagaagcaga

SEQ ID NO: 2269276 - RNA, 19 nt, Homo sapiens
  misc_RNA (1)...(19): siRNA sense strand
ggaagcagcuauuugacca

SEQ ID NO: 2269277 - RNA, 19 nt, Homo sapiens
  misc_RNA (1)...(19): siRNA sense strand
augagaagaagaagcguga

SEQ ID NO: 2269278 - RNA, 19 nt, Homo sapiens
  misc_RNA (1)...(19): siRNA sense strand
gagaaagagaagauugaac

SEQ ID NO: 2269279 - RNA, 19 nt, Homo sapiens
  misc_RNA (1)...(19): siRNA sense strand
ggaucuuggccuugugcau

SEQ ID NO: 2269280 - RNA, 19 nt, Homo sapiens
  misc_RNA (1)...(19): siRNA sense strand
gagcugauggagaggcuga

SEQ ID NO: 2269281 - RNA, 19 nt, Homo sapiens
  misc_RNA (1)...(19): siRNA sense strand
acaucuaugagcagaauga

SEQ ID NO: 2269282 - RNA, 19 nt, Homo sapiens
  misc_RNA (1)...(19): siRNA sense strand
ccguagggcucuggaacuu

SEQ ID NO: 2269283 - RNA, 19 nt, Homo sapiens
  misc_RNA (1)...(19): siRNA sense strand
uugacgaauuugagucuau

SEQ ID NO: 2269284 - RNA, 19 nt, Homo sapiens
  misc_RNA (1)...(19): siRNA sense strand
gcgugaaauggcagagaag

SEQ ID NO: 2269285 - RNA, 19 nt, Homo sapiens
  misc_RNA (1)...(19): siRNA sense strand
aaggaggagcugauggaga

SEQ ID NO: 2269286 - RNA, 19 nt, Homo sapiens
  misc_RNA (1)...(19): siRNA sense strand
auggagaggcugaagcaga

SEQ ID NO: 2269287 - RNA, 19 nt, Homo sapiens
  misc_RNA (1)...(19): siRNA sense strand
gcugaagcagaucgaggaa

SEQ ID NO: 2269288 - RNA, 19 nt, Homo sapiens
  misc_RNA (1)...(19): siRNA sense strand
ggaacguaccacugaggca

SEQ ID NO: 2269289 - RNA, 19 nt, Homo sapiens
  misc_RNA (1)...(19): siRNA sense strand
agaaugagcaggaugagca

SEQ ID NO: 2269290 - RNA, 19 nt, Homo sapiens
  misc_RNA (1)...(19): siRNA sense strand
cugaagacugccaugagua

SEQ ID NO: 2269291 - RNA, 19 nt, Homo sapiens
  misc_RNA (1)...(19): siRNA sense strand
ggugaaaacuauuggcuug

SEQ ID NO: 2269292 - RNA, 19 nt, Homo sapiens
  misc_RNA (1)...(19): siRNA sense strand
gugccaaguucuacccuga

SEQ ID NO: 2269293 - RNA, 19 nt, Homo sapiens
  misc_RNA (1)...(19): siRNA sense strand
ucaacaucuaugagcagaa

SEQ ID NO: 2269294 - RNA, 19 nt, Homo sapiens
  misc_RNA (1)...(19): siRNA sense strand
gagcgugcuaugcuggaaa

SEQ ID NO: 2269295 - RNA, 19 nt, Homo sapiens
  misc_RNA (1)...(19): siRNA sense strand
gaaauggcagagaaggaga

SEQ ID NO: 2269296 - RNA, 19 nt, Homo sapiens
  misc_RNA (1)...(19): siRNA sense strand
ucaacaaggaccaguggga

SEQ ID NO: 2269297 - RNA, 19 nt, Homo sapiens
  misc_RNA (1)...(19): siRNA sense strand
aagaagcugaagaggccaa

SEQ ID NO: 2269298 - RNA, 19 nt, Homo sapiens
  misc_RNA (1)...(19): siRNA sense strand
gaguacaccucauguggca

SEQ ID NO: 2269299 - RNA, 19 nt, Homo sapiens
  misc_RNA (1)...(19): siRNA sense strand
cuucaaacaacaagaggaa

SEQ ID NO: 2269300 - RNA, 19 nt, Homo sapiens
  misc_RNA (1)...(19): siRNA sense strand
uggcaaaauccaagagaau

SEQ ID NO: 2269301 - RNA, 19 nt, Homo sapiens
  misc_RNA (1)...(19): siRNA sense strand
gggacaugggaaugcaaua

SEQ ID NO: 2269302 - RNA, 19 nt, Homo sapiens
  misc_RNA (1)...(19): siRNA sense strand
acucaaagucucacgggaa

SEQ ID NO: 2269303 - RNA, 19 nt, Homo sapiens
  misc_RNA (1)...(19): siRNA sense strand
ggggaaaaggggaguggaa

SEQ ID NO: 2269304 - RNA, 19 nt, Homo sapiens
  misc_RNA (1)...(19): siRNA sense strand
cagcaugacaacugaucaa

SEQ ID NO: 2269305 - RNA, 19 nt, Homo sapiens
  misc_RNA (1)...(19): siRNA sense strand
ggcuaugaaagaagaacaa

SEQ ID NO: 2269306 - RNA, 19 nt, Homo sapiens
  misc_RNA (1)...(19): siRNA sense strand
ccucauggacacagagcau

SEQ ID NO: 2269307 - RNA, 19 nt, Homo sapiens
  misc_RNA (1)...(19): siRNA sense strand
guaaauuagaggagcgugu

SEQ ID NO: 2269308 - RNA, 19 nt, Homo sapiens
  misc_RNA (1)...(19): siRNA sense strand
aggaaauucuggaccaaaa

SEQ ID NO: 2269309 - RNA, 19 nt, Homo sapiens
  misc_RNA (1)...(19): siRNA sense strand
ugggaaugcaauagaugaa

SEQ ID NO: 2269310 - RNA, 19 nt, Homo sapiens
  misc_RNA (1)...(19): siRNA sense strand
uggaauaguggcagcucaa

SEQ ID NO: 2269311 - RNA, 19 nt, Homo sapiens
  misc_RNA (1)...(19): siRNA sense strand
uagaaaaucugaauggcaa

SEQ ID NO: 2269312 - RNA, 19 nt, Homo sapiens
  misc_RNA (1)...(19): siRNA sense strand
uuauggaacacaugagcaa

SEQ ID NO: 2269313 - RNA, 19 nt, Homo sapiens
  misc_RNA (1)...(19): siRNA sense strand
acugaaagauugggaacau

SEQ ID NO: 2269314 - RNA, 19 nt, Homo sapiens
  misc_RNA (1)...(19): siRNA sense strand
gggaaaaggggaguggaaa

SEQ ID NO: 2269315 - RNA, 19 nt, Homo sapiens
  misc_RNA (1)...(19): siRNA sense strand
ggaaaaggggaguggaaac

SEQ ID NO: 2269316 - RNA, 19 nt, Homo sapiens
  misc_RNA (1)...(19): siRNA sense strand
aaaugacagcgaagaggaa

SEQ ID NO: 2269317 - RNA, 19 nt, Homo sapiens
  misc_RNA (1)...(19): siRNA sense strand
augacagcgaagaggaaau

SEQ ID NO: 2269318 - RNA, 19 nt, Homo sapiens
  misc_RNA (1)...(19): siRNA sense strand
gcaaaauccaagagaauac

SEQ ID NO: 2269319 - RNA, 19 nt, Homo sapiens
  misc_RNA (1)...(19): siRNA sense strand
ggagaagagaauccagcau

SEQ ID NO: 2269320 - RNA, 19 nt, Homo sapiens
  misc_RNA (1)...(19): siRNA sense strand
gugcauuuggaacaggaaa

SEQ ID NO: 2269321 - RNA, 19 nt, Homo sapiens
  misc_RNA (1)...(19): siRNA sense strand
ucgaggacucccaggauau

SEQ ID NO: 2269322 - RNA, 19 nt, Homo sapiens
  misc_RNA (1)...(19): siRNA sense strand
gggaacauucucagaccuu

SEQ ID NO: 2269323 - RNA, 19 nt, Homo sapiens
  misc_RNA (1)...(19): siRNA sense strand
ucauggacacagagcauuu

SEQ ID NO: 2269324 - RNA, 19 nt, Homo sapiens
  misc_RNA (1)...(19): siRNA sense strand
agaaaaucugaauggcaaa

SEQ ID NO: 2269325 - RNA, 19 nt, Homo sapiens
  misc_RNA (1)...(19): siRNA sense strand
acaagaggaaaucaguaaa

SEQ ID NO: 2269326 - RNA, 19 nt, Homo sapiens
  misc_RNA (1)...(19): siRNA sense strand
aggauaugccggaaggcca

SEQ ID NO: 2269327 - RNA, 19 nt, Homo sapiens
  misc_RNA (1)...(19): siRNA sense strand
caacuccugaagugggaaa

SEQ ID NO: 2269328 - RNA, 19 nt, Homo sapiens
  misc_RNA (1)...(19): siRNA sense strand
cugaagugggaaacgaaga

SEQ ID NO: 2269329 - RNA, 19 nt, Homo sapiens
  misc_RNA (1)...(19): siRNA sense strand
uggcuaugaaagaagaaca

SEQ ID NO: 2269330 - RNA, 19 nt, Homo sapiens
  misc_RNA (1)...(19): siRNA sense strand
cuaugaaagaagaacaagu

SEQ ID NO: 2269331 - RNA, 19 nt, Homo sapiens
  misc_RNA (1)...(19): siRNA sense strand
ugaaagaagaacaagugca

SEQ ID NO: 2269332 - RNA, 19 nt, Homo sapiens
  misc_RNA (1)...(19): siRNA sense strand
gaacaagugcauuuggaac

SEQ ID NO: 2269333 - RNA, 19 nt, Homo sapiens
  misc_RNA (1)...(19): siRNA sense strand
cugaaagauugggaacauu

SEQ ID NO: 2269334 - RNA, 19 nt, Homo sapiens
  misc_RNA (1)...(19): siRNA sense strand
aggauuuccagguccaaua

SEQ ID NO: 2269335 - RNA, 19 nt, Homo sapiens
  misc_RNA (1)...(19): siRNA sense strand
cuucaaacaacaagaggaa

SEQ ID NO: 2269336 - RNA, 19 nt, Homo sapiens
  misc_RNA (1)...(19): siRNA sense strand
uggcaaaauccaagagaau

SEQ ID NO: 2269337 - RNA, 19 nt, Homo sapiens
  misc_RNA (1)...(19): siRNA sense strand
gggacaugggaaugcaaua

SEQ ID NO: 2269338 - RNA, 19 nt, Homo sapiens
  misc_RNA (1)...(19): siRNA sense strand
acucaaagucucacgggaa

SEQ ID NO: 2269339 - RNA, 19 nt, Homo sapiens
  misc_RNA (1)...(19): siRNA sense strand
ggggaaaaggggaguggaa

SEQ ID NO: 2269340 - RNA, 19 nt, Homo sapiens
  misc_RNA (1)...(19): siRNA sense strand
cagcaugacaacugaucaa

SEQ ID NO: 2269341 - RNA, 19 nt, Homo sapiens
  misc_RNA (1)...(19): siRNA sense strand
ggcuaugaaagaagaacaa

SEQ ID NO: 2269342 - RNA, 19 nt, Homo sapiens
  misc_RNA (1)...(19): siRNA sense strand
ccucauggacacagagcau

SEQ ID NO: 2269343 - RNA, 19 nt, Homo sapiens
  misc_RNA (1)...(19): siRNA sense strand
guaaauuagaggagcgugu

SEQ ID NO: 2269344 - RNA, 19 nt, Homo sapiens
  misc_RNA (1)...(19): siRNA sense strand
aggaaauucuggaccaaaa

SEQ ID NO: 2269345 - RNA, 19 nt, Homo sapiens
  misc_RNA (1)...(19): siRNA sense strand
ugggaaugcaauagaugaa

SEQ ID NO: 2269346 - RNA, 19 nt, Homo sapiens
  misc_RNA (1)...(19): siRNA sense strand
uggaauaguggcagcucaa

SEQ ID NO: 2269347 - RNA, 19 nt, Homo sapiens
  misc_RNA (1)...(19): siRNA sense strand
uagaaaaucugaauggcaa

SEQ ID NO: 2269348 - RNA, 19 nt, Homo sapiens
  misc_RNA (1)...(19): siRNA sense strand
uuauggaacacaugagcaa

SEQ ID NO: 2269349 - RNA, 19 nt, Homo sapiens
  misc_RNA (1)...(19): siRNA sense strand
acugaaagauugggaacau

SEQ ID NO: 2269350 - RNA, 19 nt, Homo sapiens
  misc_RNA (1)...(19): siRNA sense strand
gggaaaaggggaguggaaa

SEQ ID NO: 2269351 - RNA, 19 nt, Homo sapiens
  misc_RNA (1)...(19): siRNA sense strand
ggaaaaggggaguggaaac

SEQ ID NO: 2269352 - RNA, 19 nt, Homo sapiens
  misc_RNA (1)...(19): siRNA sense strand
aaaugacagcgaagaggaa

SEQ ID NO: 2269353 - RNA, 19 nt, Homo sapiens
  misc_RNA (1)...(19): siRNA sense strand
augacagcgaagaggaaau

SEQ ID NO: 2269354 - RNA, 19 nt, Homo sapiens
  misc_RNA (1)...(19): siRNA sense strand
gcaaaauccaagagaauac

SEQ ID NO: 2269355 - RNA, 19 nt, Homo sapiens
  misc_RNA (1)...(19): siRNA sense strand
ggagaagagaauccagcau

SEQ ID NO: 2269356 - RNA, 19 nt, Homo sapiens
  misc_RNA (1)...(19): siRNA sense strand
gugcauuuggaacaggaaa

SEQ ID NO: 2269357 - RNA, 19 nt, Homo sapiens
  misc_RNA (1)...(19): siRNA sense strand
ucgaggacucccaggauau

SEQ ID NO: 2269358 - RNA, 19 nt, Homo sapiens
  misc_RNA (1)...(19): siRNA sense strand
gggaacauucucagaccuu

SEQ ID NO: 2269359 - RNA, 19 nt, Homo sapiens
  misc_RNA (1)...(19): siRNA sense strand
ucauggacacagagcauuu

SEQ ID NO: 2269360 - RNA, 19 nt, Homo sapiens
  misc_RNA (1)...(19): siRNA sense strand
agaaaaucugaauggcaaa

SEQ ID NO: 2269361 - RNA, 19 nt, Homo sapiens
  misc_RNA (1)...(19): siRNA sense strand
acaagaggaaaucaguaaa

SEQ ID NO: 2269362 - RNA, 19 nt, Homo sapiens
  misc_RNA (1)...(19): siRNA sense strand
aggauaugccggaaggcca

SEQ ID NO: 2269363 - RNA, 19 nt, Homo sapiens
  misc_RNA (1)...(19): siRNA sense strand
caacuccugaagugggaaa

SEQ ID NO: 2269364 - RNA, 19 nt, Homo sapiens
  misc_RNA (1)...(19): siRNA sense strand
cugaagugggaaacgaaga

SEQ ID NO: 2269365 - RNA, 19 nt, Homo sapiens
  misc_RNA (1)...(19): siRNA sense strand
uggcuaugaaagaagaaca

SEQ ID NO: 2269366 - RNA, 19 nt, Homo sapiens
  misc_RNA (1)...(19): siRNA sense strand
cuaugaaagaagaacaagu

SEQ ID NO: 2269367 - RNA, 19 nt, Homo sapiens
  misc_RNA (1)...(19): siRNA sense strand
ugaaagaagaacaagugca

SEQ ID NO: 2269368 - RNA, 19 nt, Homo sapiens
  misc_RNA (1)...(19): siRNA sense strand
gaacaagugcauuuggaac

SEQ ID NO: 2269369 - RNA, 19 nt, Homo sapiens
  misc_RNA (1)...(19): siRNA sense strand
cugaaagauugggaacauu

SEQ ID NO: 2269370 - RNA, 19 nt, Homo sapiens
  misc_RNA (1)...(19): siRNA sense strand
aggauuuccagguccaaua

SEQ ID NO: 2269371 - RNA, 19 nt, Homo sapiens
  misc_RNA (1)...(19): siRNA sense strand
cuucaaacaacaagaggaa

SEQ ID NO: 2269372 - RNA, 19 nt, Homo sapiens
  misc_RNA (1)...(19): siRNA sense strand
uggcaaaauccaagagaau

SEQ ID NO: 2269373 - RNA, 19 nt, Homo sapiens
  misc_RNA (1)...(19): siRNA sense strand
gggacaugggaaugcaaua

SEQ ID NO: 2269374 - RNA, 19 nt, Homo sapiens
  misc_RNA (1)...(19): siRNA sense strand
acucaaagucucacgggaa

SEQ ID NO: 2269375 - RNA, 19 nt, Homo sapiens
  misc_RNA (1)...(19): siRNA sense strand
ggggaaaaggggaguggaa

SEQ ID NO: 2269376 - RNA, 19 nt, Homo sapiens
  misc_RNA (1)...(19): siRNA sense strand
cagcaugacaacugaucaa

SEQ ID NO: 2269377 - RNA, 19 nt, Homo sapiens
  misc_RNA (1)...(19): siRNA sense strand
ggcuaugaaagaagaacaa

SEQ ID NO: 2269378 - RNA, 19 nt, Homo sapiens
  misc_RNA (1)...(19): siRNA sense strand
ccucauggacacagagcau

SEQ ID NO: 2269379 - RNA, 19 nt, Homo sapiens
  misc_RNA (1)...(19): siRNA sense strand
guaaauuagaggagcgugu

SEQ ID NO: 2269380 - RNA, 19 nt, Homo sapiens
  misc_RNA (1)...(19): siRNA sense strand
aggaaauucuggaccaaaa

SEQ ID NO: 2269381 - RNA, 19 nt, Homo sapiens
  misc_RNA (1)...(19): siRNA sense strand
ugggaaugcaauagaugaa

SEQ ID NO: 2269382 - RNA, 19 nt, Homo sapiens
  misc_RNA (1)...(19): siRNA sense strand
uggaauaguggcagcucaa

SEQ ID NO: 2269383 - RNA, 19 nt, Homo sapiens
  misc_RNA (1)...(19): siRNA sense strand
uagaaaaucugaauggcaa

SEQ ID NO: 2269384 - RNA, 19 nt, Homo sapiens
  misc_RNA (1)...(19): siRNA sense strand
uuauggaacacaugagcaa

SEQ ID NO: 2269385 - RNA, 19 nt, Homo sapiens
  misc_RNA (1)...(19): siRNA sense strand
acugaaagauugggaacau

SEQ ID NO: 2269386 - RNA, 19 nt, Homo sapiens
  misc_RNA (1)...(19): siRNA sense strand
gggaaaaggggaguggaaa

SEQ ID NO: 2269387 - RNA, 19 nt, Homo sapiens
  misc_RNA (1)...(19): siRNA sense strand
ggaaaaggggaguggaaac

SEQ ID NO: 2269388 - RNA, 19 nt, Homo sapiens
  misc_RNA (1)...(19): siRNA sense strand
aaaugacagcgaagaggaa

SEQ ID NO: 2269389 - RNA, 19 nt, Homo sapiens
  misc_RNA (1)...(19): siRNA sense strand
augacagcgaagaggaaau

SEQ ID NO: 2269390 - RNA, 19 nt, Homo sapiens
  misc_RNA (1)...(19): siRNA sense strand
gcaaaauccaagagaauac

SEQ ID NO: 2269391 - RNA, 19 nt, Homo sapiens
  misc_RNA (1)...(19): siRNA sense strand
ggagaagagaauccagcau

SEQ ID NO: 2269392 - RNA, 19 nt, Homo sapiens
  misc_RNA (1)...(19): siRNA sense strand
gugcauuuggaacaggaaa

SEQ ID NO: 2269393 - RNA, 19 nt, Homo sapiens
  misc_RNA (1)...(19): siRNA sense strand
ucgaggacucccaggauau

SEQ ID NO: 2269394 - RNA, 19 nt, Homo sapiens
  misc_RNA (1)...(19): siRNA sense strand
gggaacauucucagaccuu

SEQ ID NO: 2269395 - RNA, 19 nt, Homo sapiens
  misc_RNA (1)...(19): siRNA sense strand
ucauggacacagagcauuu

SEQ ID NO: 2269396 - RNA, 19 nt, Homo sapiens
  misc_RNA (1)...(19): siRNA sense strand
agaaaaucugaauggcaaa

SEQ ID NO: 2269397 - RNA, 19 nt, Homo sapiens
  misc_RNA (1)...(19): siRNA sense strand
acaagaggaaaucaguaaa

SEQ ID NO: 2269398 - RNA, 19 nt, Homo sapiens
  misc_RNA (1)...(19): siRNA sense strand
aggauaugccggaaggcca

SEQ ID NO: 2269399 - RNA, 19 nt, Homo sapiens
  misc_RNA (1)...(19): siRNA sense strand
caacuccugaagugggaaa

SEQ ID NO: 2269400 - RNA, 19 nt, Homo sapiens
  misc_RNA (1)...(19): siRNA sense strand
cugaagugggaaacgaaga

SEQ ID NO: 2269401 - RNA, 19 nt, Homo sapiens
  misc_RNA (1)...(19): siRNA sense strand
uggcuaugaaagaagaaca

SEQ ID NO: 2269402 - RNA, 19 nt, Homo sapiens
  misc_RNA (1)...(19): siRNA sense strand
cuaugaaagaagaacaagu

SEQ ID NO: 2269403 - RNA, 19 nt, Homo sapiens
  misc_RNA (1)...(19): siRNA sense strand
ugaaagaagaacaagugca

SEQ ID NO: 2269404 - RNA, 19 nt, Homo sapiens
  misc_RNA (1)...(19): siRNA sense strand
gaacaagugcauuuggaac

SEQ ID NO: 2269405 - RNA, 19 nt, Homo sapiens
  misc_RNA (1)...(19): siRNA sense strand
cugaaagauugggaacauu

SEQ ID NO: 2269406 - RNA, 19 nt, Homo sapiens
  misc_RNA (1)...(19): siRNA sense strand
aggauuuccagguccaaua

SEQ ID NO: 2269407 - RNA, 19 nt, Homo sapiens
  misc_RNA (1)...(19): siRNA sense strand
gcgccaaggcaaagagacu

SEQ ID NO: 2269408 - RNA, 19 nt, Homo sapiens
  misc_RNA (1)...(19): siRNA sense strand
gugucaaaguggaggacuc

SEQ ID NO: 2269409 - RNA, 19 nt, Homo sapiens
  misc_RNA (1)...(19): siRNA sense strand
gugaagauaugguuccaga

SEQ ID NO: 2269410 - RNA, 19 nt, Homo sapiens
  misc_RNA (1)...(19): siRNA sense strand
aggcaaagagacuacaaga

SEQ ID NO: 2269411 - RNA, 19 nt, Homo sapiens
  misc_RNA (1)...(19): siRNA sense strand
ccucaagcugccagaagau

SEQ ID NO: 2269412 - RNA, 19 nt, Homo sapiens
  misc_RNA (1)...(19): siRNA sense strand
aaacacaagacgaaccgua

SEQ ID NO: 2269413 - RNA, 19 nt, Homo sapiens
  misc_RNA (1)...(19): siRNA sense strand
gcugaaaauggcugcaaaa

SEQ ID NO: 2269414 - RNA, 19 nt, Homo sapiens
  misc_RNA (1)...(19): siRNA sense strand
ccgaagggccaaggcgaaa

SEQ ID NO: 2269415 - RNA, 19 nt, Homo sapiens
  misc_RNA (1)...(19): siRNA sense strand
ccaccugcacccugaggaa

SEQ ID NO: 2269416 - RNA, 19 nt, Homo sapiens
  misc_RNA (1)...(19): siRNA sense strand
cguccaaaggcaaugacuu

SEQ ID NO: 2269417 - RNA, 19 nt, Homo sapiens
  misc_RNA (1)...(19): siRNA sense strand
ggaaggagcacgaggaagc

SEQ ID NO: 2269418 - RNA, 19 nt, Homo sapiens
  misc_RNA (1)...(19): siRNA sense strand
ccuugagggaggagauuca

SEQ ID NO: 2269419 - RNA, 19 nt, Homo sapiens
  misc_RNA (1)...(19): siRNA sense strand
gcuggaauuuguuacgcaa

SEQ ID NO: 2269420 - RNA, 19 nt, Homo sapiens
  misc_RNA (1)...(19): siRNA sense strand
cgccgugaagauuggaaua

SEQ ID NO: 2269421 - RNA, 19 nt, Homo sapiens
  misc_RNA (1)...(19): siRNA sense strand
ccccaaaacgagagagguu

SEQ ID NO: 2269422 - RNA, 19 nt, Homo sapiens
  misc_RNA (1)...(19): siRNA sense strand
ggaagucauucuugugcca

SEQ ID NO: 2269423 - RNA, 19 nt, Homo sapiens
  misc_RNA (1)...(19): siRNA sense strand
gagaagaagcugacaggca

SEQ ID NO: 2269424 - RNA, 19 nt, Homo sapiens
  misc_RNA (1)...(19): siRNA sense strand
uggugagcgcugagaagaa

SEQ ID NO: 2269425 - RNA, 19 nt, Homo sapiens
  misc_RNA (1)...(19): siRNA sense strand
cagcugaccaugaaggaca

SEQ ID NO: 2269426 - RNA, 19 nt, Homo sapiens
  misc_RNA (1)...(19): siRNA sense strand
ggacagcaucgcucggcaa

SEQ ID NO: 2269427 - RNA, 19 nt, Homo sapiens
  misc_RNA (1)...(19): siRNA sense strand
ugaccaugaaggacagcaa

SEQ ID NO: 2269428 - RNA, 19 nt, Homo sapiens
  misc_RNA (1)...(19): siRNA sense strand
cggaggaacucacgggaug

SEQ ID NO: 2269429 - RNA, 19 nt, Homo sapiens
  misc_RNA (1)...(19): siRNA sense strand
cggucaacaucgcggucau

SEQ ID NO: 2269430 - RNA, 19 nt, Homo sapiens
  misc_RNA (1)...(19): siRNA sense strand
uggaguggcagaugggaga

SEQ ID NO: 2269431 - RNA, 19 nt, Homo sapiens
  misc_RNA (1)...(19): siRNA sense strand
gaagauaaguggagaggca

SEQ ID NO: 2269432 - RNA, 19 nt, Homo sapiens
  misc_RNA (1)...(19): siRNA sense strand
agacauuagagcagaacaa

SEQ ID NO: 2269433 - RNA, 19 nt, Homo sapiens
  misc_RNA (1)...(19): siRNA sense strand
ccagaguggcugugggcaa

SEQ ID NO: 2269434 - RNA, 19 nt, Homo sapiens
  misc_RNA (1)...(19): siRNA sense strand
gcucgguggcugagaacaa

SEQ ID NO: 2269435 - RNA, 19 nt, Homo sapiens
  misc_RNA (1)...(19): siRNA sense strand
cugaaggagcggagcgaca

SEQ ID NO: 2269436 - RNA, 19 nt, Homo sapiens
  misc_RNA (1)...(19): siRNA sense strand
cggaagacgaaaaugaaaa

SEQ ID NO: 2269437 - RNA, 19 nt, Homo sapiens
  misc_RNA (1)...(19): siRNA sense strand
uggaagaagaaaagaagaa

SEQ ID NO: 2269438 - RNA, 19 nt, Homo sapiens
  misc_RNA (1)...(19): siRNA sense strand
ccgaaguggacaucgcaaa

SEQ ID NO: 2269439 - RNA, 19 nt, Homo sapiens
  misc_RNA (1)...(19): siRNA sense strand
aaaucaaggcacuggaaga

SEQ ID NO: 2269440 - RNA, 19 nt, Homo sapiens
  misc_RNA (1)...(19): siRNA sense strand
uugcagaaggucagagaga

SEQ ID NO: 2269441 - RNA, 19 nt, Homo sapiens
  misc_RNA (1)...(19): siRNA sense strand
agaaguacauccagaggca

SEQ ID NO: 2269442 - RNA, 19 nt, Homo sapiens
  misc_RNA (1)...(19): siRNA sense strand
uuacaggacauuugagaca

SEQ ID NO: 2269443 - RNA, 19 nt, Homo sapiens
  misc_RNA (1)...(19): siRNA sense strand
agccugaucugguggacaa

SEQ ID NO: 2269444 - RNA, 19 nt, Homo sapiens
  misc_RNA (1)...(19): siRNA sense strand
gcagccaguaugaggagaa

SEQ ID NO: 2269445 - RNA, 19 nt, Homo sapiens
  misc_RNA (1)...(19): siRNA sense strand
guccaaaauugaagacauu

SEQ ID NO: 2269446 - RNA, 19 nt, Homo sapiens
  misc_RNA (1)...(19): siRNA sense strand
agagagagaaggugagaag

SEQ ID NO: 2269447 - RNA, 19 nt, Homo sapiens
  misc_RNA (1)...(19): siRNA sense strand
guagagagcugccaggcuu

SEQ ID NO: 2269448 - RNA, 19 nt, Homo sapiens
  misc_RNA (1)...(19): siRNA sense strand
ggagacaggaccaucggaa

SEQ ID NO: 2269449 - RNA, 19 nt, Homo sapiens
  misc_RNA (1)...(19): siRNA sense strand
gaacgaagauaaguggaga

SEQ ID NO: 2269450 - RNA, 19 nt, Homo sapiens
  misc_RNA (1)...(19): siRNA sense strand
gagacaggaccaucggaau

SEQ ID NO: 2269451 - RNA, 19 nt, Homo sapiens
  misc_RNA (1)...(19): siRNA sense strand
cuucagagguagaaaagga

SEQ ID NO: 2269452 - RNA, 19 nt, Homo sapiens
  misc_RNA (1)...(19): siRNA sense strand
uuguggacguggugcggaa

SEQ ID NO: 2269453 - RNA, 19 nt, Homo sapiens
  misc_RNA (1)...(19): siRNA sense strand
gaagaagaaaagaagaaga

SEQ ID NO: 2269454 - RNA, 19 nt, Homo sapiens
  misc_RNA (1)...(19): siRNA sense strand
uggcauaaccagaguggcu

SEQ ID NO: 2269455 - RNA, 19 nt, Homo sapiens
  misc_RNA (1)...(19): siRNA sense strand
ggguauaagaucaagacac

SEQ ID NO: 2269456 - RNA, 19 nt, Homo sapiens
  misc_RNA (1)...(19): siRNA sense strand
ucuucaugcuccagacgua

SEQ ID NO: 2269457 - RNA, 19 nt, Homo sapiens
  misc_RNA (1)...(19): siRNA sense strand
ucgugaaacagcaaaucaa

SEQ ID NO: 2269458 - RNA, 19 nt, Homo sapiens
  misc_RNA (1)...(19): siRNA sense strand
uugagacaaucgugaaaca

SEQ ID NO: 2269459 - RNA, 19 nt, Homo sapiens
  misc_RNA (1)...(19): siRNA sense strand
acauuagagcagaacaaga

SEQ ID NO: 2269460 - RNA, 19 nt, Homo sapiens
  misc_RNA (1)...(19): siRNA sense strand
ggaaauuaauaaagcccag

SEQ ID NO: 2269461 - RNA, 19 nt, Homo sapiens
  misc_RNA (1)...(19): siRNA sense strand
agagagaaggugagaagcu

SEQ ID NO: 2269462 - RNA, 19 nt, Homo sapiens
  misc_RNA (1)...(19): siRNA sense strand
cgaaguggacaucgcaaaa

SEQ ID NO: 2269463 - RNA, 19 nt, Homo sapiens
  misc_RNA (1)...(19): siRNA sense strand
ugcugaaacugaagaaacu

SEQ ID NO: 2269464 - RNA, 19 nt, Homo sapiens
  misc_RNA (1)...(19): siRNA sense strand
agaucaagacacucaucaa

SEQ ID NO: 2269465 - RNA, 19 nt, Homo sapiens
  misc_RNA (1)...(19): siRNA sense strand
uguucuuccugauagauaa

SEQ ID NO: 2269466 - RNA, 19 nt, Homo sapiens
  misc_RNA (1)...(19): siRNA sense strand
agaacaagagagagaaggu

SEQ ID NO: 2269467 - RNA, 19 nt, Homo sapiens
  misc_RNA (1)...(19): siRNA sense strand
acauuggguauaagaucaa

SEQ ID NO: 2269468 - RNA, 19 nt, Homo sapiens
  misc_RNA (1)...(19): siRNA sense strand
cucuauuacugaauggaga

SEQ ID NO: 2269469 - RNA, 19 nt, Homo sapiens
  misc_RNA (1)...(19): siRNA sense strand
agacaaucgugaaacagca

SEQ ID NO: 2269470 - RNA, 19 nt, Homo sapiens
  misc_RNA (1)...(19): siRNA sense strand
gcagaacaagagagagaag

SEQ ID NO: 2269471 - RNA, 19 nt, Homo sapiens
  misc_RNA (1)...(19): siRNA sense strand
aggagacucaccagagaau

SEQ ID NO: 2269472 - RNA, 19 nt, Homo sapiens
  misc_RNA (1)...(19): siRNA sense strand
aguccaaaauugaagacau

SEQ ID NO: 2269473 - RNA, 19 nt, Homo sapiens
  misc_RNA (1)...(19): siRNA sense strand
gagaagaaguuguaaggga

SEQ ID NO: 2269474 - RNA, 19 nt, Homo sapiens
  misc_RNA (1)...(19): siRNA sense strand
ggacaggggcacugagaaa

SEQ ID NO: 2269475 - RNA, 19 nt, Homo sapiens
  misc_RNA (1)...(19): siRNA sense strand
caacaaaaucagagaggau

SEQ ID NO: 2269476 - RNA, 19 nt, Homo sapiens
  misc_RNA (1)...(19): siRNA sense strand
cuucaagagcagagugaga

SEQ ID NO: 2269477 - RNA, 19 nt, Homo sapiens
  misc_RNA (1)...(19): siRNA sense strand
ucaugaauguggugcggaa

SEQ ID NO: 2269478 - RNA, 19 nt, Homo sapiens
  misc_RNA (1)...(19): siRNA sense strand
gagcagagugagaccgcua

SEQ ID NO: 2269479 - RNA, 19 nt, Homo sapiens
  misc_RNA (1)...(19): siRNA sense strand
aguagaaggagaagaaguu

SEQ ID NO: 2269480 - RNA, 19 nt, Homo sapiens
  misc_RNA (1)...(19): siRNA sense strand
cagcaaaggcagaaaacau

SEQ ID NO: 2269481 - RNA, 19 nt, Homo sapiens
  misc_RNA (1)...(19): siRNA sense strand
ccaggguggcuguggacaa

SEQ ID NO: 2269482 - RNA, 19 nt, Homo sapiens
  misc_RNA (1)...(19): siRNA sense strand
agaaguacauccagaggca

SEQ ID NO: 2269483 - RNA, 19 nt, Homo sapiens
  misc_RNA (1)...(19): siRNA sense strand
gaagaaguuguaagggaga

SEQ ID NO: 2269484 - RNA, 19 nt, Homo sapiens
  misc_RNA (1)...(19): siRNA sense strand
aggcauacuugcaacuaau

SEQ ID NO: 2269485 - RNA, 19 nt, Homo sapiens
  misc_RNA (1)...(19): siRNA sense strand
agaacaaccuguacagcca

SEQ ID NO: 2269486 - RNA, 19 nt, Homo sapiens
  misc_RNA (1)...(19): siRNA sense strand
acaucggacugcagaucaa

SEQ ID NO: 2269487 - RNA, 19 nt, Homo sapiens
  misc_RNA (1)...(19): siRNA sense strand
cuggccagguggagaaaga

SEQ ID NO: 2269488 - RNA, 19 nt, Homo sapiens
  misc_RNA (1)...(19): siRNA sense strand
agguggagaaagagauaca

SEQ ID NO: 2269489 - RNA, 19 nt, Homo sapiens
  misc_RNA (1)...(19): siRNA sense strand
agaauggagcagaugguuu

SEQ ID NO: 2269490 - RNA, 19 nt, Homo sapiens
  misc_RNA (1)...(19): siRNA sense strand
cagaaagccaugaugcaga

SEQ ID NO: 2269491 - RNA, 19 nt, Homo sapiens
  misc_RNA (1)...(19): siRNA sense strand
uggagaaagagauacacaa

SEQ ID NO: 2269492 - RNA, 19 nt, Homo sapiens
  misc_RNA (1)...(19): siRNA sense strand
ugaccaaaccagaucuaau

SEQ ID NO: 2269493 - RNA, 19 nt, Homo sapiens
  misc_RNA (1)...(19): siRNA sense strand
gacaaauaagggagagcca

SEQ ID NO: 2269494 - RNA, 19 nt, Homo sapiens
  misc_RNA (1)...(19): siRNA sense strand
acaagacauuugagaucau

SEQ ID NO: 2269495 - RNA, 19 nt, Homo sapiens
  misc_RNA (1)...(19): siRNA sense strand
gggacaggaccaucgguau

SEQ ID NO: 2269496 - RNA, 19 nt, Homo sapiens
  misc_RNA (1)...(19): siRNA sense strand
cagcaggagaucacaaaca

SEQ ID NO: 2269497 - RNA, 19 nt, Homo sapiens
  misc_RNA (1)...(19): siRNA sense strand
augcagauacuacaggaaa

SEQ ID NO: 2269498 - RNA, 19 nt, Homo sapiens
  misc_RNA (1)...(19): siRNA sense strand
agaucaaggcucucaucaa

SEQ ID NO: 2269499 - RNA, 19 nt, Homo sapiens
  misc_RNA (1)...(19): siRNA sense strand
ugcagauacuacaggaaaa

SEQ ID NO: 2269500 - RNA, 19 nt, Homo sapiens
  misc_RNA (1)...(19): siRNA sense strand
ccggaggagaagucaauuu

SEQ ID NO: 2269501 - RNA, 19 nt, Homo sapiens
  misc_RNA (1)...(19): siRNA sense strand
gagagaauuuaccggcuca

SEQ ID NO: 2269502 - RNA, 19 nt, Homo sapiens
  misc_RNA (1)...(19): siRNA sense strand
ggcagaggcaaccaagaaa

SEQ ID NO: 2269503 - RNA, 19 nt, Homo sapiens
  misc_RNA (1)...(19): siRNA sense strand
aaaaguuaguagaaggaga

SEQ ID NO: 2269504 - RNA, 19 nt, Homo sapiens
  misc_RNA (1)...(19): siRNA sense strand
aguucagaauggagcagau

SEQ ID NO: 2269505 - RNA, 19 nt, Homo sapiens
  misc_RNA (1)...(19): siRNA sense strand
aggaucagcuaccggaaca

SEQ ID NO: 2269506 - RNA, 19 nt, Homo sapiens
  misc_RNA (1)...(19): siRNA sense strand
agaaaagcgucaugaaugu

SEQ ID NO: 2269507 - RNA, 19 nt, Homo sapiens
  misc_RNA (1)...(19): siRNA sense strand
gaaggacaaauaagggaga

SEQ ID NO: 2269508 - RNA, 19 nt, Homo sapiens
  misc_RNA (1)...(19): siRNA sense strand
aagugaaacacacagcaaa

SEQ ID NO: 2269509 - RNA, 19 nt, Homo sapiens
  misc_RNA (1)...(19): siRNA sense strand
cagcaaacgucucgccaac

SEQ ID NO: 2269510 - RNA, 19 nt, Homo sapiens
  misc_RNA (1)...(19): siRNA sense strand
uaguagaaggagaagaagu

SEQ ID NO: 2269511 - RNA, 19 nt, Homo sapiens
  misc_RNA (1)...(19): siRNA sense strand
guuguaagggagaaugaga

SEQ ID NO: 2269512 - RNA, 19 nt, Homo sapiens
  misc_RNA (1)...(19): siRNA sense strand
cgaaaaguuaguagaagga

SEQ ID NO: 2269513 - RNA, 19 nt, Homo sapiens
  misc_RNA (1)...(19): siRNA sense strand
agaagaaguuguaagggag

SEQ ID NO: 2269514 - RNA, 19 nt, Homo sapiens
  misc_RNA (1)...(19): siRNA sense strand
aaagugaaacacacagcaa

SEQ ID NO: 2269515 - RNA, 19 nt, Homo sapiens
  misc_RNA (1)...(19): siRNA sense strand
gaaaagaagcagaggaaau

SEQ ID NO: 2269516 - RNA, 19 nt, Homo sapiens
  misc_RNA (1)...(19): siRNA sense strand
uggaagagcuggaggacga

SEQ ID NO: 2269517 - RNA, 19 nt, Homo sapiens
  misc_RNA (1)...(19): siRNA sense strand
aggcagagaaugagcuuaa

SEQ ID NO: 2269518 - RNA, 19 nt, Homo sapiens
  misc_RNA (1)...(19): siRNA sense strand
ggacaagacccaucggcaa

SEQ ID NO: 2269519 - RNA, 19 nt, Homo sapiens
  misc_RNA (1)...(19): siRNA sense strand
ccaaggaugacgugggcaa

SEQ ID NO: 2269520 - RNA, 19 nt, Homo sapiens
  misc_RNA (1)...(19): siRNA sense strand
ugaacaaagcccuggacaa

SEQ ID NO: 2269521 - RNA, 19 nt, Homo sapiens
  misc_RNA (1)...(19): siRNA sense strand
acgaggagauggaggccaa

SEQ ID NO: 2269522 - RNA, 19 nt, Homo sapiens
  misc_RNA (1)...(19): siRNA sense strand
cggcugaggccaagaucaa

SEQ ID NO: 2269523 - RNA, 19 nt, Homo sapiens
  misc_RNA (1)...(19): siRNA sense strand
ggcuaaagaaggaagagaa

SEQ ID NO: 2269524 - RNA, 19 nt, Homo sapiens
  misc_RNA (1)...(19): siRNA sense strand
gagaauggcaagaagguca

SEQ ID NO: 2269525 - RNA, 19 nt, Homo sapiens
  misc_RNA (1)...(19): siRNA sense strand
uggcagugguggaggcuuu

SEQ ID NO: 2269526 - RNA, 19 nt, Homo sapiens
  misc_RNA (1)...(19): siRNA sense strand
agaagaagcuggaggcgca

SEQ ID NO: 2269527 - RNA, 19 nt, Homo sapiens
  misc_RNA (1)...(19): siRNA sense strand
cuguagaggcuuuggccaa

SEQ ID NO: 2269528 - RNA, 19 nt, Homo sapiens
  misc_RNA (1)...(19): siRNA sense strand
aggaggagcuggaggagga

SEQ ID NO: 2269529 - RNA, 19 nt, Homo sapiens
  misc_RNA (1)...(19): siRNA sense strand
agaaugaaguugagagcgu

SEQ ID NO: 2269530 - RNA, 19 nt, Homo sapiens
  misc_RNA (1)...(19): siRNA sense strand
gggacagagcugaggcaga

SEQ ID NO: 2269531 - RNA, 19 nt, Homo sapiens
  misc_RNA (1)...(19): siRNA sense strand
gagcaggaggccagagaga

SEQ ID NO: 2269532 - RNA, 19 nt, Homo sapiens
  misc_RNA (1)...(19): siRNA sense strand
gcgagaugugguacagaaa

SEQ ID NO: 2269533 - RNA, 19 nt, Homo sapiens
  misc_RNA (1)...(19): siRNA sense strand
acaaggagcagcugggcaa

SEQ ID NO: 2269534 - RNA, 19 nt, Homo sapiens
  misc_RNA (1)...(19): siRNA sense strand
aggaggagaugcaggccaa

SEQ ID NO: 2269535 - RNA, 19 nt, Homo sapiens
  misc_RNA (1)...(19): siRNA sense strand
augcagaggcugaggagau

SEQ ID NO: 2269536 - RNA, 19 nt, Homo sapiens
  misc_RNA (1)...(19): siRNA sense strand
aagaacagcuggaggagga

SEQ ID NO: 2269537 - RNA, 19 nt, Homo sapiens
  misc_RNA (1)...(19): siRNA sense strand
uggagaagcugaaacggaa

SEQ ID NO: 2269538 - RNA, 19 nt, Homo sapiens
  misc_RNA (1)...(19): siRNA sense strand
uggaaaagaagcagaggaa

SEQ ID NO: 2269539 - RNA, 19 nt, Homo sapiens
  misc_RNA (1)...(19): siRNA sense strand
uggaggaggagcagggcaa

SEQ ID NO: 2269540 - RNA, 19 nt, Homo sapiens
  misc_RNA (1)...(19): siRNA sense strand
agaacaaugcccugaagaa

SEQ ID NO: 2269541 - RNA, 19 nt, Homo sapiens
  misc_RNA (1)...(19): siRNA sense strand
agguggaggacgagcgcaa

SEQ ID NO: 2269542 - RNA, 19 nt, Homo sapiens
  misc_RNA (1)...(19): siRNA sense strand
uuguggagcugguggagaa

SEQ ID NO: 2269543 - RNA, 19 nt, Homo sapiens
  misc_RNA (1)...(19): siRNA sense strand
cgaaccuagacaagaauaa

SEQ ID NO: 2269544 - RNA, 19 nt, Homo sapiens
  misc_RNA (1)...(19): siRNA sense strand
agguggaacauaagaagaa

SEQ ID NO: 2269545 - RNA, 19 nt, Homo sapiens
  misc_RNA (1)...(19): siRNA sense strand
ggaaggacguggaccgcau

SEQ ID NO: 2269546 - RNA, 19 nt, Homo sapiens
  misc_RNA (1)...(19): siRNA sense strand
gagaaugagaagaaagcca

SEQ ID NO: 2269547 - RNA, 19 nt, Homo sapiens
  misc_RNA (1)...(19): siRNA sense strand
agcagaaggcagagaauga

SEQ ID NO: 2269548 - RNA, 19 nt, Homo sapiens
  misc_RNA (1)...(19): siRNA sense strand
aggccaagaucaagaaacu

SEQ ID NO: 2269549 - RNA, 19 nt, Homo sapiens
  misc_RNA (1)...(19): siRNA sense strand
augaaaucgcucagaagaa

SEQ ID NO: 2269550 - RNA, 19 nt, Homo sapiens
  misc_RNA (1)...(19): siRNA sense strand
agacggaacuggaagacga

SEQ ID NO: 2269551 - RNA, 19 nt, Homo sapiens
  misc_RNA (1)...(19): siRNA sense strand
agauggaggccaagcagaa

SEQ ID NO: 2269552 - RNA, 19 nt, Homo sapiens
  misc_RNA (1)...(19): siRNA sense strand
cagaaagacaagaagcuga

SEQ ID NO: 2269553 - RNA, 19 nt, Homo sapiens
  misc_RNA (1)...(19): siRNA sense strand
aggauagggcagagcaaaa

SEQ ID NO: 2269554 - RNA, 19 nt, Homo sapiens
  misc_RNA (1)...(19): siRNA sense strand
cugaaaagcagaagcgaga

SEQ ID NO: 2269555 - RNA, 19 nt, Homo sapiens
  misc_RNA (1)...(19): siRNA sense strand
ccaagcaggagguggaaca

SEQ ID NO: 2269556 - RNA, 19 nt, Homo sapiens
  misc_RNA (1)...(19): siRNA sense strand
aguuguuagccgaggagaa

SEQ ID NO: 2269557 - RNA, 19 nt, Homo sapiens
  misc_RNA (1)...(19): siRNA sense strand
acacaaguaucacgggaga

SEQ ID NO: 2269558 - RNA, 19 nt, Homo sapiens
  misc_RNA (1)...(19): siRNA sense strand
agacagagcuggaagacac

SEQ ID NO: 2269559 - RNA, 19 nt, Homo sapiens
  misc_RNA (1)...(19): siRNA sense strand
agaaagacaagaagcugaa

SEQ ID NO: 2269560 - RNA, 19 nt, Homo sapiens
  misc_RNA (1)...(19): siRNA sense strand
uugcagaagaggaagaaaa

SEQ ID NO: 2269561 - RNA, 19 nt, Homo sapiens
  misc_RNA (1)...(19): siRNA sense strand
ccguggaagcucuggaaga

SEQ ID NO: 2269562 - RNA, 19 nt, Homo sapiens
  misc_RNA (1)...(19): siRNA sense strand
agaaggagaucgagaaccu

SEQ ID NO: 2269563 - RNA, 19 nt, Homo sapiens
  misc_RNA (1)...(19): siRNA sense strand
ccaagaaggaggaggagcu

SEQ ID NO: 2269564 - RNA, 19 nt, Homo sapiens
  misc_RNA (1)...(19): siRNA sense strand
uggaggacguagaguuauu

SEQ ID NO: 2269565 - RNA, 19 nt, Homo sapiens
  misc_RNA (1)...(19): siRNA sense strand
uacagaaagcucagacaaa

SEQ ID NO: 2269566 - RNA, 19 nt, Homo sapiens
  misc_RNA (1)...(19): siRNA sense strand
ccaagaagcaggagcugga

SEQ ID NO: 2269567 - RNA, 19 nt, Homo sapiens
  misc_RNA (1)...(19): siRNA sense strand
cagccaaagagaaugagaa

SEQ ID NO: 2269568 - RNA, 19 nt, Homo sapiens
  misc_RNA (1)...(19): siRNA sense strand
aagaaagacacaaguauca

SEQ ID NO: 2269569 - RNA, 19 nt, Homo sapiens
  misc_RNA (1)...(19): siRNA sense strand
gaagccagggagaaggaaa

SEQ ID NO: 2269570 - RNA, 19 nt, Homo sapiens
  misc_RNA (1)...(19): siRNA sense strand
guaucaagguugggcgaga

SEQ ID NO: 2269571 - RNA, 19 nt, Homo sapiens
  misc_RNA (1)...(19): siRNA sense strand
gccuggaggaggaggaaga

SEQ ID NO: 2269572 - RNA, 19 nt, Homo sapiens
  misc_RNA (1)...(19): siRNA sense strand
ucuggaggacguagaguua

SEQ ID NO: 2269573 - RNA, 19 nt, Homo sapiens
  misc_RNA (1)...(19): siRNA sense strand
acuucgacgucacggguua

SEQ ID NO: 2269574 - RNA, 19 nt, Homo sapiens
  misc_RNA (1)...(19): siRNA sense strand
aggaaaccguggaggccau

SEQ ID NO: 2269575 - RNA, 19 nt, Homo sapiens
  misc_RNA (1)...(19): siRNA sense strand
ccguggaggccauggcaau

SEQ ID NO: 2269576 - RNA, 19 nt, Homo sapiens
  misc_RNA (1)...(19): siRNA sense strand
gaaaagaagcagaggaaau

SEQ ID NO: 2269577 - RNA, 19 nt, Homo sapiens
  misc_RNA (1)...(19): siRNA sense strand
uggaagagcuggaggacga

SEQ ID NO: 2269578 - RNA, 19 nt, Homo sapiens
  misc_RNA (1)...(19): siRNA sense strand
aggcagagaaugagcuuaa

SEQ ID NO: 2269579 - RNA, 19 nt, Homo sapiens
  misc_RNA (1)...(19): siRNA sense strand
ggacaagacccaucggcaa

SEQ ID NO: 2269580 - RNA, 19 nt, Homo sapiens
  misc_RNA (1)...(19): siRNA sense strand
ccaaggaugacgugggcaa

SEQ ID NO: 2269581 - RNA, 19 nt, Homo sapiens
  misc_RNA (1)...(19): siRNA sense strand
ugaacaaagcccuggacaa

SEQ ID NO: 2269582 - RNA, 19 nt, Homo sapiens
  misc_RNA (1)...(19): siRNA sense strand
acgaggagauggaggccaa

SEQ ID NO: 2269583 - RNA, 19 nt, Homo sapiens
  misc_RNA (1)...(19): siRNA sense strand
cggcugaggccaagaucaa

SEQ ID NO: 2269584 - RNA, 19 nt, Homo sapiens
  misc_RNA (1)...(19): siRNA sense strand
ggcuaaagaaggaagagaa

SEQ ID NO: 2269585 - RNA, 19 nt, Homo sapiens
  misc_RNA (1)...(19): siRNA sense strand
gagaauggcaagaagguca

SEQ ID NO: 2269586 - RNA, 19 nt, Homo sapiens
  misc_RNA (1)...(19): siRNA sense strand
uggcagugguggaggcuuu

SEQ ID NO: 2269587 - RNA, 19 nt, Homo sapiens
  misc_RNA (1)...(19): siRNA sense strand
agaagaagcuggaggcgca

SEQ ID NO: 2269588 - RNA, 19 nt, Homo sapiens
  misc_RNA (1)...(19): siRNA sense strand
cuguagaggcuuuggccaa

SEQ ID NO: 2269589 - RNA, 19 nt, Homo sapiens
  misc_RNA (1)...(19): siRNA sense strand
aggaggagcuggaggagga

SEQ ID NO: 2269590 - RNA, 19 nt, Homo sapiens
  misc_RNA (1)...(19): siRNA sense strand
agaaugaaguugagagcgu

SEQ ID NO: 2269591 - RNA, 19 nt, Homo sapiens
  misc_RNA (1)...(19): siRNA sense strand
gggacagagcugaggcaga

SEQ ID NO: 2269592 - RNA, 19 nt, Homo sapiens
  misc_RNA (1)...(19): siRNA sense strand
gagcaggaggccagagaga

SEQ ID NO: 2269593 - RNA, 19 nt, Homo sapiens
  misc_RNA (1)...(19): siRNA sense strand
gcgagaugugguacagaaa

SEQ ID NO: 2269594 - RNA, 19 nt, Homo sapiens
  misc_RNA (1)...(19): siRNA sense strand
acaaggagcagcugggcaa

SEQ ID NO: 2269595 - RNA, 19 nt, Homo sapiens
  misc_RNA (1)...(19): siRNA sense strand
aggaggagaugcaggccaa

SEQ ID NO: 2269596 - RNA, 19 nt, Homo sapiens
  misc_RNA (1)...(19): siRNA sense strand
augcagaggcugaggagau

SEQ ID NO: 2269597 - RNA, 19 nt, Homo sapiens
  misc_RNA (1)...(19): siRNA sense strand
aagaacagcuggaggagga

SEQ ID NO: 2269598 - RNA, 19 nt, Homo sapiens
  misc_RNA (1)...(19): siRNA sense strand
uggagaagcugaaacggaa

SEQ ID NO: 2269599 - RNA, 19 nt, Homo sapiens
  misc_RNA (1)...(19): siRNA sense strand
uggaaaagaagcagaggaa

SEQ ID NO: 2269600 - RNA, 19 nt, Homo sapiens
  misc_RNA (1)...(19): siRNA sense strand
uggaggaggagcagggcaa

SEQ ID NO: 2269601 - RNA, 19 nt, Homo sapiens
  misc_RNA (1)...(19): siRNA sense strand
agaacaaugcccugaagaa

SEQ ID NO: 2269602 - RNA, 19 nt, Homo sapiens
  misc_RNA (1)...(19): siRNA sense strand
agguggaggacgagcgcaa

SEQ ID NO: 2269603 - RNA, 19 nt, Homo sapiens
  misc_RNA (1)...(19): siRNA sense strand
uuguggagcugguggagaa

SEQ ID NO: 2269604 - RNA, 19 nt, Homo sapiens
  misc_RNA (1)...(19): siRNA sense strand
cgaaccuagacaagaauaa

SEQ ID NO: 2269605 - RNA, 19 nt, Homo sapiens
  misc_RNA (1)...(19): siRNA sense strand
agguggaacauaagaagaa

SEQ ID NO: 2269606 - RNA, 19 nt, Homo sapiens
  misc_RNA (1)...(19): siRNA sense strand
ggaaggacguggaccgcau

SEQ ID NO: 2269607 - RNA, 19 nt, Homo sapiens
  misc_RNA (1)...(19): siRNA sense strand
gagaaugagaagaaagcca

SEQ ID NO: 2269608 - RNA, 19 nt, Homo sapiens
  misc_RNA (1)...(19): siRNA sense strand
agcagaaggcagagaauga

SEQ ID NO: 2269609 - RNA, 19 nt, Homo sapiens
  misc_RNA (1)...(19): siRNA sense strand
aggccaagaucaagaaacu

SEQ ID NO: 2269610 - RNA, 19 nt, Homo sapiens
  misc_RNA (1)...(19): siRNA sense strand
augaaaucgcucagaagaa

SEQ ID NO: 2269611 - RNA, 19 nt, Homo sapiens
  misc_RNA (1)...(19): siRNA sense strand
agacggaacuggaagacga

SEQ ID NO: 2269612 - RNA, 19 nt, Homo sapiens
  misc_RNA (1)...(19): siRNA sense strand
agauggaggccaagcagaa

SEQ ID NO: 2269613 - RNA, 19 nt, Homo sapiens
  misc_RNA (1)...(19): siRNA sense strand
cagaaagacaagaagcuga

SEQ ID NO: 2269614 - RNA, 19 nt, Homo sapiens
  misc_RNA (1)...(19): siRNA sense strand
aggauagggcagagcaaaa

SEQ ID NO: 2269615 - RNA, 19 nt, Homo sapiens
  misc_RNA (1)...(19): siRNA sense strand
cugaaaagcagaagcgaga

SEQ ID NO: 2269616 - RNA, 19 nt, Homo sapiens
  misc_RNA (1)...(19): siRNA sense strand
ccaagcaggagguggaaca

SEQ ID NO: 2269617 - RNA, 19 nt, Homo sapiens
  misc_RNA (1)...(19): siRNA sense strand
aguuguuagccgaggagaa

SEQ ID NO: 2269618 - RNA, 19 nt, Homo sapiens
  misc_RNA (1)...(19): siRNA sense strand
acacaaguaucacgggaga

SEQ ID NO: 2269619 - RNA, 19 nt, Homo sapiens
  misc_RNA (1)...(19): siRNA sense strand
agacagagcuggaagacac

SEQ ID NO: 2269620 - RNA, 19 nt, Homo sapiens
  misc_RNA (1)...(19): siRNA sense strand
agaaagacaagaagcugaa

SEQ ID NO: 2269621 - RNA, 19 nt, Homo sapiens
  misc_RNA (1)...(19): siRNA sense strand
uugcagaagaggaagaaaa

SEQ ID NO: 2269622 - RNA, 19 nt, Homo sapiens
  misc_RNA (1)...(19): siRNA sense strand
ccguggaagcucuggaaga

SEQ ID NO: 2269623 - RNA, 19 nt, Homo sapiens
  misc_RNA (1)...(19): siRNA sense strand
agaaggagaucgagaaccu

SEQ ID NO: 2269624 - RNA, 19 nt, Homo sapiens
  misc_RNA (1)...(19): siRNA sense strand
ccaagaaggaggaggagcu

SEQ ID NO: 2269625 - RNA, 19 nt, Homo sapiens
  misc_RNA (1)...(19): siRNA sense strand
uacagaaagcucagacaaa

SEQ ID NO: 2269626 - RNA, 19 nt, Homo sapiens
  misc_RNA (1)...(19): siRNA sense strand
ccaagaagcaggagcugga

SEQ ID NO: 2269627 - RNA, 19 nt, Homo sapiens
  misc_RNA (1)...(19): siRNA sense strand
cagccaaagagaaugagaa

SEQ ID NO: 2269628 - RNA, 19 nt, Homo sapiens
  misc_RNA (1)...(19): siRNA sense strand
aagaaagacacaaguauca

SEQ ID NO: 2269629 - RNA, 19 nt, Homo sapiens
  misc_RNA (1)...(19): siRNA sense strand
gaagccagggagaaggaaa

SEQ ID NO: 2269630 - RNA, 19 nt, Homo sapiens
  misc_RNA (1)...(19): siRNA sense strand
guaucaagguugggcgaga

SEQ ID NO: 2269631 - RNA, 19 nt, Homo sapiens
  misc_RNA (1)...(19): siRNA sense strand
gccuggaggaggaggaaga

SEQ ID NO: 2269632 - RNA, 19 nt, Homo sapiens
  misc_RNA (1)...(19): siRNA sense strand
acuucgacgucacggguua

SEQ ID NO: 2269633 - RNA, 19 nt, Homo sapiens
  misc_RNA (1)...(19): siRNA sense strand
aggaaaccguggaggccau

SEQ ID NO: 2269634 - RNA, 19 nt, Homo sapiens
  misc_RNA (1)...(19): siRNA sense strand
ccguggaggccauggcaau

SEQ ID NO: 2269635 - RNA, 19 nt, Homo sapiens
  misc_RNA (1)...(19): siRNA sense strand
agacaaaagaacaggcuga

SEQ ID NO: 2269636 - RNA, 19 nt, Homo sapiens
  misc_RNA (1)...(19): siRNA sense strand
agcaggagcuggaggagau

SEQ ID NO: 2269637 - RNA, 19 nt, Homo sapiens
  misc_RNA (1)...(19): siRNA sense strand
gaggagaggauuagugacu

SEQ ID NO: 2269638 - RNA, 19 nt, Homo sapiens
  misc_RNA (1)...(19): siRNA sense strand
aacggaagcuggaggguga

SEQ ID NO: 2269639 - RNA, 19 nt, Homo sapiens
  misc_RNA (1)...(19): siRNA sense strand
agaagaugacugaggcuga

SEQ ID NO: 2269640 - RNA, 19 nt, Homo sapiens
  misc_RNA (1)...(19): siRNA sense strand
ucuuugacaaggagagcaa

SEQ ID NO: 2269641 - RNA, 19 nt, Homo sapiens
  misc_RNA (1)...(19): siRNA sense strand
cgaccagauugaagaguuc

SEQ ID NO: 2269642 - RNA, 19 nt, Homo sapiens
  misc_RNA (1)...(19): siRNA sense strand
cuaagaaggaggcagccaa

SEQ ID NO: 2269643 - RNA, 19 nt, Homo sapiens
  misc_RNA (1)...(19): siRNA sense strand
gcaacaaggagcagggcac

SEQ ID NO: 2269644 - RNA, 19 nt, Homo sapiens
  misc_RNA (1)...(19): siRNA sense strand
ccugaagagaugaauguca

SEQ ID NO: 2269645 - RNA, 19 nt, Homo sapiens
  misc_RNA (1)...(19): siRNA sense strand
augucaagaugcuggacuu

SEQ ID NO: 2269646 - RNA, 19 nt, Homo sapiens
  misc_RNA (1)...(19): siRNA sense strand
ccgaccagauugaagaguu

SEQ ID NO: 2269647 - RNA, 19 nt, Homo sapiens
  misc_RNA (1)...(19): siRNA sense strand
ggggagaagcugagcggua

SEQ ID NO: 2269648 - RNA, 19 nt, Homo sapiens
  misc_RNA (1)...(19): siRNA sense strand
acaagaugacggcggaaga

SEQ ID NO: 2269649 - RNA, 19 nt, Homo sapiens
  misc_RNA (1)...(19): siRNA sense strand
aaggaggaccugaaggaca

SEQ ID NO: 2269650 - RNA, 19 nt, Homo sapiens
  misc_RNA (1)...(19): siRNA sense strand
gggaaaaucaacaaggagu

SEQ ID NO: 2269651 - RNA, 19 nt, Homo sapiens
  misc_RNA (1)...(19): siRNA sense strand
acgacgagcuggacgccau

SEQ ID NO: 2269652 - RNA, 19 nt, Homo sapiens
  misc_RNA (1)...(19): siRNA sense strand
aggaguacaucaagcgucu

SEQ ID NO: 2269653 - RNA, 19 nt, Homo sapiens
  misc_RNA (1)...(19): siRNA sense strand
gcaaaguaaaugaggccuu

SEQ ID NO: 2269654 - RNA, 19 nt, Homo sapiens
  misc_RNA (1)...(19): siRNA sense strand
agguggagauccugcgcaa

SEQ ID NO: 2269655 - RNA, 19 nt, Homo sapiens
  misc_RNA (1)...(19): siRNA sense strand
ccgccugagcaaaguaaau

SEQ ID NO: 2269656 - RNA, 19 nt, Homo sapiens
  misc_RNA (1)...(19): siRNA sense strand
ccagcaucguggagcgcau

SEQ ID NO: 2269657 - RNA, 19 nt, Homo sapiens
  misc_RNA (1)...(19): siRNA sense strand
cggacgacuucuaugacga

SEQ ID NO: 2269658 - RNA, 19 nt, Homo sapiens
  misc_RNA (1)...(19): siRNA sense strand
ccugaaacccgaagagcac

SEQ ID NO: 2269659 - RNA, 19 nt, Homo sapiens
  misc_RNA (1)...(19): siRNA sense strand
gcacuggaguucagcgcca

SEQ ID NO: 2269660 - RNA, 19 nt, Homo sapiens
  misc_RNA (1)...(19): siRNA sense strand
agggagaagcgcaggcuca

SEQ ID NO: 2269661 - RNA, 19 nt, Homo sapiens
  misc_RNA (1)...(19): siRNA sense strand
cagaugaaaccaugcccaa

SEQ ID NO: 2269662 - RNA, 19 nt, Homo sapiens
  misc_RNA (1)...(19): siRNA sense strand
uguaagaggaagucggugu

SEQ ID NO: 2269663 - RNA, 19 nt, Homo sapiens
  misc_RNA (1)...(19): siRNA sense strand
uggaagaggaagaaggaga

SEQ ID NO: 2269664 - RNA, 19 nt, Homo sapiens
  misc_RNA (1)...(19): siRNA sense strand
agaggaaaccagaggaaga

SEQ ID NO: 2269665 - RNA, 19 nt, Homo sapiens
  misc_RNA (1)...(19): siRNA sense strand
aggaggaggcugagaauca

SEQ ID NO: 2269666 - RNA, 19 nt, Homo sapiens
  misc_RNA (1)...(19): siRNA sense strand
cgacaaaauugaagauguu

SEQ ID NO: 2269667 - RNA, 19 nt, Homo sapiens
  misc_RNA (1)...(19): siRNA sense strand
cggaaaacauggaggagga

SEQ ID NO: 2269668 - RNA, 19 nt, Homo sapiens
  misc_RNA (1)...(19): siRNA sense strand
agaagauagaagaugcaaa

SEQ ID NO: 2269669 - RNA, 19 nt, Homo sapiens
  misc_RNA (1)...(19): siRNA sense strand
gcaaaggagucucagcgua

SEQ ID NO: 2269670 - RNA, 19 nt, Homo sapiens
  misc_RNA (1)...(19): siRNA sense strand
gagaaugguguguugggaa

SEQ ID NO: 2269671 - RNA, 19 nt, Homo sapiens
  misc_RNA (1)...(19): siRNA sense strand
cugcugaauacaagaaaga

SEQ ID NO: 2269672 - RNA, 19 nt, Homo sapiens
  misc_RNA (1)...(19): siRNA sense strand
ccgaaauuagagagaagau

SEQ ID NO: 2269673 - RNA, 19 nt, Homo sapiens
  misc_RNA (1)...(19): siRNA sense strand
gcuaagaaacuauuggguu

SEQ ID NO: 2269674 - RNA, 19 nt, Homo sapiens
  misc_RNA (1)...(19): siRNA sense strand
gggcuuggcuuauggguac

SEQ ID NO: 2269675 - RNA, 19 nt, Homo sapiens
  misc_RNA (1)...(19): siRNA sense strand
acauggaggaggaggcuga

SEQ ID NO: 2269676 - RNA, 19 nt, Homo sapiens
  misc_RNA (1)...(19): siRNA sense strand
gcaagaaacaaaagaagca

SEQ ID NO: 2269677 - RNA, 19 nt, Homo sapiens
  misc_RNA (1)...(19): siRNA sense strand
guacuaaacgagcagguga

SEQ ID NO: 2269678 - RNA, 19 nt, Homo sapiens
  misc_RNA (1)...(19): siRNA sense strand
gaacggaggcaguggggau

SEQ ID NO: 2269679 - RNA, 19 nt, Homo sapiens
  misc_RNA (1)...(19): siRNA sense strand
aaguauggagagacagcua

SEQ ID NO: 2269680 - RNA, 19 nt, Homo sapiens
  misc_RNA (1)...(19): siRNA sense strand
ggaaggugugcauguggaa

SEQ ID NO: 2269681 - RNA, 19 nt, Homo sapiens
  misc_RNA (1)...(19): siRNA sense strand
aggaggaggagauugggaa

SEQ ID NO: 2269682 - RNA, 19 nt, Homo sapiens
  misc_RNA (1)...(19): siRNA sense strand
uugaggaacuaaaggaacu

SEQ ID NO: 2269683 - RNA, 19 nt, Homo sapiens
  misc_RNA (1)...(19): siRNA sense strand
augaugaggcaguggcaca

SEQ ID NO: 2269684 - RNA, 19 nt, Homo sapiens
  misc_RNA (1)...(19): siRNA sense strand
augcaaagaaagccaaaca

SEQ ID NO: 2269685 - RNA, 19 nt, Homo sapiens
  misc_RNA (1)...(19): siRNA sense strand
gauugggaaccuagagcuu

SEQ ID NO: 2269686 - RNA, 19 nt, Homo sapiens
  misc_RNA (1)...(19): siRNA sense strand
gucucagcguagugggaau

SEQ ID NO: 2269687 - RNA, 19 nt, Homo sapiens
  misc_RNA (1)...(19): siRNA sense strand
aagaaaaugaggaggagga

SEQ ID NO: 2269688 - RNA, 19 nt, Homo sapiens
  misc_RNA (1)...(19): siRNA sense strand
agauagaagaugcaaagga

SEQ ID NO: 2269689 - RNA, 19 nt, Homo sapiens
  misc_RNA (1)...(19): siRNA sense strand
cccggaaagaugaugcaaa

SEQ ID NO: 2269690 - RNA, 19 nt, Homo sapiens
  misc_RNA (1)...(19): siRNA sense strand
aguggaggcuggagcuaca

SEQ ID NO: 2269691 - RNA, 19 nt, Homo sapiens
  misc_RNA (1)...(19): siRNA sense strand
ugaaggaggcugaaggauc

SEQ ID NO: 2269692 - RNA, 19 nt, Homo sapiens
  misc_RNA (1)...(19): siRNA sense strand
gucagaaagaagaggaaac

SEQ ID NO: 2269693 - RNA, 19 nt, Homo sapiens
  misc_RNA (1)...(19): siRNA sense strand
gaaagaagaggaaaccaga

SEQ ID NO: 2269694 - RNA, 19 nt, Homo sapiens
  misc_RNA (1)...(19): siRNA sense strand
acccgaaauuagagagaag

SEQ ID NO: 2269695 - RNA, 19 nt, Homo sapiens
  misc_RNA (1)...(19): siRNA sense strand
gagagaagauagaagaugc

SEQ ID NO: 2269696 - RNA, 19 nt, Homo sapiens
  misc_RNA (1)...(19): siRNA sense strand
aaaaugaggaggaggagau

SEQ ID NO: 2269697 - RNA, 19 nt, Homo sapiens
  misc_RNA (1)...(19): siRNA sense strand
guauggagagacagcuaau

SEQ ID NO: 2269698 - RNA, 19 nt, Homo sapiens
  misc_RNA (1)...(19): siRNA sense strand
gaugaaucucugguagaaa

SEQ ID NO: 2269699 - RNA, 19 nt, Homo sapiens
  misc_RNA (1)...(19): siRNA sense strand
ggugaaggaggcugaagga

SEQ ID NO: 2269700 - RNA, 19 nt, Homo sapiens
  misc_RNA (1)...(19): siRNA sense strand
ugucagaaagaagaggaaa

SEQ ID NO: 2269701 - RNA, 19 nt, Homo sapiens
  misc_RNA (1)...(19): siRNA sense strand
ccgacaaaauugaagaugu

SEQ ID NO: 2269702 - RNA, 19 nt, Homo sapiens
  misc_RNA (1)...(19): siRNA sense strand
uggaagaggaagaaggaga

SEQ ID NO: 2269703 - RNA, 19 nt, Homo sapiens
  misc_RNA (1)...(19): siRNA sense strand
agaggaaaccagaggaaga

SEQ ID NO: 2269704 - RNA, 19 nt, Homo sapiens
  misc_RNA (1)...(19): siRNA sense strand
aggaggaggcugagaauca

SEQ ID NO: 2269705 - RNA, 19 nt, Homo sapiens
  misc_RNA (1)...(19): siRNA sense strand
cgacaaaauugaagauguu

SEQ ID NO: 2269706 - RNA, 19 nt, Homo sapiens
  misc_RNA (1)...(19): siRNA sense strand
cggaaaacauggaggagga

SEQ ID NO: 2269707 - RNA, 19 nt, Homo sapiens
  misc_RNA (1)...(19): siRNA sense strand
agaagauagaagaugcaaa

SEQ ID NO: 2269708 - RNA, 19 nt, Homo sapiens
  misc_RNA (1)...(19): siRNA sense strand
gcaaaggagucucagcgua

SEQ ID NO: 2269709 - RNA, 19 nt, Homo sapiens
  misc_RNA (1)...(19): siRNA sense strand
gagaaugguguguugggaa

SEQ ID NO: 2269710 - RNA, 19 nt, Homo sapiens
  misc_RNA (1)...(19): siRNA sense strand
cugcugaauacaagaaaga

SEQ ID NO: 2269711 - RNA, 19 nt, Homo sapiens
  misc_RNA (1)...(19): siRNA sense strand
ccgaaauuagagagaagau

SEQ ID NO: 2269712 - RNA, 19 nt, Homo sapiens
  misc_RNA (1)...(19): siRNA sense strand
gcuaagaaacuauuggguu

SEQ ID NO: 2269713 - RNA, 19 nt, Homo sapiens
  misc_RNA (1)...(19): siRNA sense strand
gggcuuggcuuauggguac

SEQ ID NO: 2269714 - RNA, 19 nt, Homo sapiens
  misc_RNA (1)...(19): siRNA sense strand
acauggaggaggaggcuga

SEQ ID NO: 2269715 - RNA, 19 nt, Homo sapiens
  misc_RNA (1)...(19): siRNA sense strand
gcaagaaacaaaagaagca

SEQ ID NO: 2269716 - RNA, 19 nt, Homo sapiens
  misc_RNA (1)...(19): siRNA sense strand
guacuaaacgagcagguga

SEQ ID NO: 2269717 - RNA, 19 nt, Homo sapiens
  misc_RNA (1)...(19): siRNA sense strand
gaacggaggcaguggggau

SEQ ID NO: 2269718 - RNA, 19 nt, Homo sapiens
  misc_RNA (1)...(19): siRNA sense strand
aaguauggagagacagcua

SEQ ID NO: 2269719 - RNA, 19 nt, Homo sapiens
  misc_RNA (1)...(19): siRNA sense strand
ggaaggugugcauguggaa

SEQ ID NO: 2269720 - RNA, 19 nt, Homo sapiens
  misc_RNA (1)...(19): siRNA sense strand
aggaggaggagauugggaa

SEQ ID NO: 2269721 - RNA, 19 nt, Homo sapiens
  misc_RNA (1)...(19): siRNA sense strand
uugaggaacuaaaggaacu

SEQ ID NO: 2269722 - RNA, 19 nt, Homo sapiens
  misc_RNA (1)...(19): siRNA sense strand
augaugaggcaguggcaca

SEQ ID NO: 2269723 - RNA, 19 nt, Homo sapiens
  misc_RNA (1)...(19): siRNA sense strand
augcaaagaaagccaaaca

SEQ ID NO: 2269724 - RNA, 19 nt, Homo sapiens
  misc_RNA (1)...(19): siRNA sense strand
gauugggaaccuagagcuu

SEQ ID NO: 2269725 - RNA, 19 nt, Homo sapiens
  misc_RNA (1)...(19): siRNA sense strand
gucucagcguagugggaau

SEQ ID NO: 2269726 - RNA, 19 nt, Homo sapiens
  misc_RNA (1)...(19): siRNA sense strand
aagaaaaugaggaggagga

SEQ ID NO: 2269727 - RNA, 19 nt, Homo sapiens
  misc_RNA (1)...(19): siRNA sense strand
agauagaagaugcaaagga

SEQ ID NO: 2269728 - RNA, 19 nt, Homo sapiens
  misc_RNA (1)...(19): siRNA sense strand
cccggaaagaugaugcaaa

SEQ ID NO: 2269729 - RNA, 19 nt, Homo sapiens
  misc_RNA (1)...(19): siRNA sense strand
aguggaggcuggagcuaca

SEQ ID NO: 2269730 - RNA, 19 nt, Homo sapiens
  misc_RNA (1)...(19): siRNA sense strand
ugaaggaggcugaaggauc

SEQ ID NO: 2269731 - RNA, 19 nt, Homo sapiens
  misc_RNA (1)...(19): siRNA sense strand
gucagaaagaagaggaaac

SEQ ID NO: 2269732 - RNA, 19 nt, Homo sapiens
  misc_RNA (1)...(19): siRNA sense strand
gaaagaagaggaaaccaga

SEQ ID NO: 2269733 - RNA, 19 nt, Homo sapiens
  misc_RNA (1)...(19): siRNA sense strand
acccgaaauuagagagaag

SEQ ID NO: 2269734 - RNA, 19 nt, Homo sapiens
  misc_RNA (1)...(19): siRNA sense strand
gagagaagauagaagaugc

SEQ ID NO: 2269735 - RNA, 19 nt, Homo sapiens
  misc_RNA (1)...(19): siRNA sense strand
aaaaugaggaggaggagau

SEQ ID NO: 2269736 - RNA, 19 nt, Homo sapiens
  misc_RNA (1)...(19): siRNA sense strand
guauggagagacagcuaau

SEQ ID NO: 2269737 - RNA, 19 nt, Homo sapiens
  misc_RNA (1)...(19): siRNA sense strand
gaugaaucucugguagaaa

SEQ ID NO: 2269738 - RNA, 19 nt, Homo sapiens
  misc_RNA (1)...(19): siRNA sense strand
ggugaaggaggcugaagga

SEQ ID NO: 2269739 - RNA, 19 nt, Homo sapiens
  misc_RNA (1)...(19): siRNA sense strand
ugucagaaagaagaggaaa

SEQ ID NO: 2269740 - RNA, 19 nt, Homo sapiens
  misc_RNA (1)...(19): siRNA sense strand
ccgacaaaauugaagaugu

SEQ ID NO: 2269741 - RNA, 19 nt, Homo sapiens
  misc_RNA (1)...(19): siRNA sense strand
uggaagaggaagaaggaga

SEQ ID NO: 2269742 - RNA, 19 nt, Homo sapiens
  misc_RNA (1)...(19): siRNA sense strand
agaggaaaccagaggaaga

SEQ ID NO: 2269743 - RNA, 19 nt, Homo sapiens
  misc_RNA (1)...(19): siRNA sense strand
aggaggaggcugagaauca

SEQ ID NO: 2269744 - RNA, 19 nt, Homo sapiens
  misc_RNA (1)...(19): siRNA sense strand
cggaaaacauggaggagga

SEQ ID NO: 2269745 - RNA, 19 nt, Homo sapiens
  misc_RNA (1)...(19): siRNA sense strand
agaagauagaagaugcaaa

SEQ ID NO: 2269746 - RNA, 19 nt, Homo sapiens
  misc_RNA (1)...(19): siRNA sense strand
gcaaaggagucucagcgua

SEQ ID NO: 2269747 - RNA, 19 nt, Homo sapiens
  misc_RNA (1)...(19): siRNA sense strand
gagaaugguguguugggaa

SEQ ID NO: 2269748 - RNA, 19 nt, Homo sapiens
  misc_RNA (1)...(19): siRNA sense strand
cugcugaauacaagaaaga

SEQ ID NO: 2269749 - RNA, 19 nt, Homo sapiens
  misc_RNA (1)...(19): siRNA sense strand
ccgaaauuagagagaagau

SEQ ID NO: 2269750 - RNA, 19 nt, Homo sapiens
  misc_RNA (1)...(19): siRNA sense strand
gcuaagaaacuauuggguu

SEQ ID NO: 2269751 - RNA, 19 nt, Homo sapiens
  misc_RNA (1)...(19): siRNA sense strand
gggcuuggcuuauggguac

SEQ ID NO: 2269752 - RNA, 19 nt, Homo sapiens
  misc_RNA (1)...(19): siRNA sense strand
acauggaggaggaggcuga

SEQ ID NO: 2269753 - RNA, 19 nt, Homo sapiens
  misc_RNA (1)...(19): siRNA sense strand
gcaagaaacaaaagaagca

SEQ ID NO: 2269754 - RNA, 19 nt, Homo sapiens
  misc_RNA (1)...(19): siRNA sense strand
guacuaaacgagcagguga

SEQ ID NO: 2269755 - RNA, 19 nt, Homo sapiens
  misc_RNA (1)...(19): siRNA sense strand
gaacggaggcaguggggau

SEQ ID NO: 2269756 - RNA, 19 nt, Homo sapiens
  misc_RNA (1)...(19): siRNA sense strand
aaguauggagagacagcua

SEQ ID NO: 2269757 - RNA, 19 nt, Homo sapiens
  misc_RNA (1)...(19): siRNA sense strand
ggaaggugugcauguggaa

SEQ ID NO: 2269758 - RNA, 19 nt, Homo sapiens
  misc_RNA (1)...(19): siRNA sense strand
aggaggaggagauugggaa

SEQ ID NO: 2269759 - RNA, 19 nt, Homo sapiens
  misc_RNA (1)...(19): siRNA sense strand
uugaggaacuaaaggaacu

SEQ ID NO: 2269760 - RNA, 19 nt, Homo sapiens
  misc_RNA (1)...(19): siRNA sense strand
augaugaggcaguggcaca

SEQ ID NO: 2269761 - RNA, 19 nt, Homo sapiens
  misc_RNA (1)...(19): siRNA sense strand
augcaaagaaagccaaaca

SEQ ID NO: 2269762 - RNA, 19 nt, Homo sapiens
  misc_RNA (1)...(19): siRNA sense strand
gauugggaaccuagagcuu

SEQ ID NO: 2269763 - RNA, 19 nt, Homo sapiens
  misc_RNA (1)...(19): siRNA sense strand
gucucagcguagugggaau

SEQ ID NO: 2269764 - RNA, 19 nt, Homo sapiens
  misc_RNA (1)...(19): siRNA sense strand
aagaaaaugaggaggagga

SEQ ID NO: 2269765 - RNA, 19 nt, Homo sapiens
  misc_RNA (1)...(19): siRNA sense strand
agauagaagaugcaaagga

SEQ ID NO: 2269766 - RNA, 19 nt, Homo sapiens
  misc_RNA (1)...(19): siRNA sense strand
cccggaaagaugaugcaaa

SEQ ID NO: 2269767 - RNA, 19 nt, Homo sapiens
  misc_RNA (1)...(19): siRNA sense strand
aguggaggcuggagcuaca

SEQ ID NO: 2269768 - RNA, 19 nt, Homo sapiens
  misc_RNA (1)...(19): siRNA sense strand
ugaaggaggcugaaggauc

SEQ ID NO: 2269769 - RNA, 19 nt, Homo sapiens
  misc_RNA (1)...(19): siRNA sense strand
gucagaaagaagaggaaac

SEQ ID NO: 2269770 - RNA, 19 nt, Homo sapiens
  misc_RNA (1)...(19): siRNA sense strand
gaaagaagaggaaaccaga

SEQ ID NO: 2269771 - RNA, 19 nt, Homo sapiens
  misc_RNA (1)...(19): siRNA sense strand
acccgaaauuagagagaag

SEQ ID NO: 2269772 - RNA, 19 nt, Homo sapiens
  misc_RNA (1)...(19): siRNA sense strand
gagagaagauagaagaugc

SEQ ID NO: 2269773 - RNA, 19 nt, Homo sapiens
  misc_RNA (1)...(19): siRNA sense strand
aaaaugaggaggaggagau

SEQ ID NO: 2269774 - RNA, 19 nt, Homo sapiens
  misc_RNA (1)...(19): siRNA sense strand
guauggagagacagcuaau

SEQ ID NO: 2269775 - RNA, 19 nt, Homo sapiens
  misc_RNA (1)...(19): siRNA sense strand
gaugaaucucugguagaaa

SEQ ID NO: 2269776 - RNA, 19 nt, Homo sapiens
  misc_RNA (1)...(19): siRNA sense strand
ggugaaggaggcugaagga

SEQ ID NO: 2269777 - RNA, 19 nt, Homo sapiens
  misc_RNA (1)...(19): siRNA sense strand
ugucagaaagaagaggaaa

SEQ ID NO: 2269778 - RNA, 19 nt, Homo sapiens
  misc_RNA (1)...(19): siRNA sense strand
gagcuaaacuagaggcaga

SEQ ID NO: 2269779 - RNA, 19 nt, Homo sapiens
  misc_RNA (1)...(19): siRNA sense strand
acuagaggcagaagggaaa

SEQ ID NO: 2269780 - RNA, 19 nt, Homo sapiens
  misc_RNA (1)...(19): siRNA sense strand
ggucaauucaggagggaug

SEQ ID NO: 2269781 - RNA, 19 nt, Homo sapiens
  misc_RNA (1)...(19): siRNA sense strand
augaagaagcaaugacaca

SEQ ID NO: 2269782 - RNA, 19 nt, Homo sapiens
  misc_RNA (1)...(19): siRNA sense strand
uccaaaggagagaaggaaa

SEQ ID NO: 2269783 - RNA, 19 nt, Homo sapiens
  misc_RNA (1)...(19): siRNA sense strand
aacuagaggcagaagggaa

SEQ ID NO: 2269784 - RNA, 19 nt, Homo sapiens
  misc_RNA (1)...(19): siRNA sense strand
ggaaauaccugcaugaguc

SEQ ID NO: 2269785 - RNA, 19 nt, Homo sapiens
  misc_RNA (1)...(19): siRNA sense strand
uggcaggcaauguggucaa

SEQ ID NO: 2269786 - RNA, 19 nt, Homo sapiens
  misc_RNA (1)...(19): siRNA sense strand
cagcagugggcaagggacu

SEQ ID NO: 2269787 - RNA, 19 nt, Homo sapiens
  misc_RNA (1)...(19): siRNA sense strand
gcagauugcuguccaggga

SEQ ID NO: 2269788 - RNA, 19 nt, Homo sapiens
  misc_RNA (1)...(19): siRNA sense strand
gaacacaggguuugcagca

SEQ ID NO: 2269789 - RNA, 19 nt, Homo sapiens
  misc_RNA (1)...(19): siRNA sense strand
agggacagcaaguggcaca

SEQ ID NO: 2269790 - RNA, 19 nt, Homo sapiens
  misc_RNA (1)...(19): siRNA sense strand
ggaaaaggauaguccccau

SEQ ID NO: 2269791 - RNA, 19 nt, Homo sapiens
  misc_RNA (1)...(19): siRNA sense strand
gagcuaaacuagaggcaga

SEQ ID NO: 2269792 - RNA, 19 nt, Homo sapiens
  misc_RNA (1)...(19): siRNA sense strand
acuagaggcagaagggaaa

SEQ ID NO: 2269793 - RNA, 19 nt, Homo sapiens
  misc_RNA (1)...(19): siRNA sense strand
ggucaauucaggagggaug

SEQ ID NO: 2269794 - RNA, 19 nt, Homo sapiens
  misc_RNA (1)...(19): siRNA sense strand
augaagaagcaaugacaca

SEQ ID NO: 2269795 - RNA, 19 nt, Homo sapiens
  misc_RNA (1)...(19): siRNA sense strand
uccaaaggagagaaggaaa

SEQ ID NO: 2269796 - RNA, 19 nt, Homo sapiens
  misc_RNA (1)...(19): siRNA sense strand
aacuagaggcagaagggaa

SEQ ID NO: 2269797 - RNA, 19 nt, Homo sapiens
  misc_RNA (1)...(19): siRNA sense strand
ggaaauaccugcaugaguc

SEQ ID NO: 2269798 - RNA, 19 nt, Homo sapiens
  misc_RNA (1)...(19): siRNA sense strand
uggcaggcaauguggucaa

SEQ ID NO: 2269799 - RNA, 19 nt, Homo sapiens
  misc_RNA (1)...(19): siRNA sense strand
cagcagugggcaagggacu

SEQ ID NO: 2269800 - RNA, 19 nt, Homo sapiens
  misc_RNA (1)...(19): siRNA sense strand
gcagauugcuguccaggga

SEQ ID NO: 2269801 - RNA, 19 nt, Homo sapiens
  misc_RNA (1)...(19): siRNA sense strand
gaacacaggguuugcagca

SEQ ID NO: 2269802 - RNA, 19 nt, Homo sapiens
  misc_RNA (1)...(19): siRNA sense strand
agggacagcaaguggcaca

SEQ ID NO: 2269803 - RNA, 19 nt, Homo sapiens
  misc_RNA (1)...(19): siRNA sense strand
ggaaaaggauaguccccau

SEQ ID NO: 2269804 - RNA, 19 nt, Homo sapiens
  misc_RNA (1)...(19): siRNA sense strand
ucacaauuguagagggaau

SEQ ID NO: 2269805 - RNA, 19 nt, Homo sapiens
  misc_RNA (1)...(19): siRNA sense strand
agggaaucuuagagguuaa

SEQ ID NO: 2269806 - RNA, 19 nt, Homo sapiens
  misc_RNA (1)...(19): siRNA sense strand
agaaaauaguccugggaau

SEQ ID NO: 2269807 - RNA, 19 nt, Homo sapiens
  misc_RNA (1)...(19): siRNA sense strand
caucacaauuguagaggga

SEQ ID NO: 2269808 - RNA, 19 nt, Homo sapiens
  misc_RNA (1)...(19): siRNA sense strand
ggagacaugagguggaaaa

SEQ ID NO: 2269809 - RNA, 19 nt, Homo sapiens
  misc_RNA (1)...(19): siRNA sense strand
guuuacaacuggacagcau

SEQ ID NO: 2269810 - RNA, 19 nt, Homo sapiens
  misc_RNA (1)...(19): siRNA sense strand
cagaagacauggacgggca

SEQ ID NO: 2269811 - RNA, 19 nt, Homo sapiens
  misc_RNA (1)...(19): siRNA sense strand
ugugaaagcugcagcacca

SEQ ID NO: 2269812 - RNA, 19 nt, Homo sapiens
  misc_RNA (1)...(19): siRNA sense strand
cggauggagaagauggaau

SEQ ID NO: 2269813 - RNA, 19 nt, Homo sapiens
  misc_RNA (1)...(19): siRNA sense strand
ucuacuauuuccugggauu

SEQ ID NO: 2269814 - RNA, 19 nt, Homo sapiens
  misc_RNA (1)...(19): siRNA sense strand
cgauguucagugagaguuu

SEQ ID NO: 2269815 - RNA, 19 nt, Homo sapiens
  misc_RNA (1)...(19): siRNA sense strand
ucuuagagguuaacaucau

SEQ ID NO: 2269816 - RNA, 19 nt, Homo sapiens
  misc_RNA (1)...(19): siRNA sense strand
agaucagauuccuguguuu

SEQ ID NO: 2269817 - RNA, 19 nt, Homo sapiens
  misc_RNA (1)...(19): siRNA sense strand
auauaacauuugcggugaa

SEQ ID NO: 2269818 - RNA, 19 nt, Homo sapiens
  misc_RNA (1)...(19): siRNA sense strand
gggaauguggucagaagca

SEQ ID NO: 2269819 - RNA, 19 nt, Homo sapiens
  misc_RNA (1)...(19): siRNA sense strand
ugagaagaacugcagaaau

SEQ ID NO: 2269820 - RNA, 19 nt, Homo sapiens
  misc_RNA (1)...(19): siRNA sense strand
agagggaaucuuagagguu

SEQ ID NO: 2269821 - RNA, 19 nt, Homo sapiens
  misc_RNA (1)...(19): siRNA sense strand
cgugguaacagaucagauu

SEQ ID NO: 2269822 - RNA, 19 nt, Homo sapiens
  misc_RNA (1)...(19): siRNA sense strand
uccagaagaacgaucgaaa

SEQ ID NO: 2269823 - RNA, 19 nt, Homo sapiens
  misc_RNA (1)...(19): siRNA sense strand
caccaaucauacugugaau

SEQ ID NO: 2269824 - RNA, 19 nt, Homo sapiens
  misc_RNA (1)...(19): siRNA sense strand
augaaaacugccagauuaa

SEQ ID NO: 2269825 - RNA, 19 nt, Homo sapiens
  misc_RNA (1)...(19): siRNA sense strand
cuuacaugagggagcacaa

SEQ ID NO: 2269826 - RNA, 19 nt, Homo sapiens
  misc_RNA (1)...(19): siRNA sense strand
gccaaaaggaagaugccaa

SEQ ID NO: 2269827 - RNA, 19 nt, Homo sapiens
  misc_RNA (1)...(19): siRNA sense strand
uaugagaagaacugcagaa

SEQ ID NO: 2269828 - RNA, 19 nt, Homo sapiens
  misc_RNA (1)...(19): siRNA sense strand
gugcaaaagccguguucuu

SEQ ID NO: 2269829 - RNA, 19 nt, Homo sapiens
  misc_RNA (1)...(19): siRNA sense strand
cugcugauccauauguuua

SEQ ID NO: 2269830 - RNA, 19 nt, Homo sapiens
  misc_RNA (1)...(19): siRNA sense strand
ggacagugacggggaaaau

SEQ ID NO: 2269831 - RNA, 19 nt, Homo sapiens
  misc_RNA (1)...(19): siRNA sense strand
ggucagaagcaaaggccug

SEQ ID NO: 2269832 - RNA, 19 nt, Homo sapiens
  misc_RNA (1)...(19): siRNA sense strand
accaagaauuuaaaggagu

SEQ ID NO: 2269833 - RNA, 19 nt, Homo sapiens
  misc_RNA (1)...(19): siRNA sense strand
caauuaaauggcuggucuu

SEQ ID NO: 2269834 - RNA, 19 nt, Homo sapiens
  misc_RNA (1)...(19): siRNA sense strand
ccaaaaggaagaugccaau

SEQ ID NO: 2269835 - RNA, 19 nt, Homo sapiens
  misc_RNA (1)...(19): siRNA sense strand
ccaucgcacaagugaaaga

SEQ ID NO: 2269836 - RNA, 19 nt, Homo sapiens
  misc_RNA (1)...(19): siRNA sense strand
cugcugacugugagacgaa

SEQ ID NO: 2269837 - RNA, 19 nt, Homo sapiens
  misc_RNA (1)...(19): siRNA sense strand
gugugaaggccauggguau

SEQ ID NO: 2269838 - RNA, 19 nt, Homo sapiens
  misc_RNA (1)...(19): siRNA sense strand
acagauggaaacacggaaa

SEQ ID NO: 2269839 - RNA, 19 nt, Homo sapiens
  misc_RNA (1)...(19): siRNA sense strand
acgaguggauguuuggcaa

SEQ ID NO: 2269840 - RNA, 19 nt, Homo sapiens
  misc_RNA (1)...(19): siRNA sense strand
ggaccugugugaaggccau

SEQ ID NO: 2269841 - RNA, 19 nt, Homo sapiens
  misc_RNA (1)...(19): siRNA sense strand
uggagaauacaaugaacau

SEQ ID NO: 2269842 - RNA, 19 nt, Homo sapiens
  misc_RNA (1)...(19): siRNA sense strand
cuggagaauacaaugaaca

SEQ ID NO: 2269843 - RNA, 19 nt, Homo sapiens
  misc_RNA (1)...(19): siRNA sense strand
acagcaugaagcaggaaau

SEQ ID NO: 2269844 - RNA, 19 nt, Homo sapiens
  misc_RNA (1)...(19): siRNA sense strand
uggcaaggugggcugcaaa

SEQ ID NO: 2269845 - RNA, 19 nt, Homo sapiens
  misc_RNA (1)...(19): siRNA sense strand
ggauaauagcagcuucaca

SEQ ID NO: 2269846 - RNA, 19 nt, Homo sapiens
  misc_RNA (1)...(19): siRNA sense strand
acggaaacgccuggcuaaa

SEQ ID NO: 2269847 - RNA, 19 nt, Homo sapiens
  misc_RNA (1)...(19): siRNA sense strand
gccgacagguacagagcca

SEQ ID NO: 2269848 - RNA, 19 nt, Homo sapiens
  misc_RNA (1)...(19): siRNA sense strand
agcaggugguguugggaaa

SEQ ID NO: 2269849 - RNA, 19 nt, Homo sapiens
  misc_RNA (1)...(19): siRNA sense strand
cacacugguaagagaaaua

SEQ ID NO: 2269850 - RNA, 19 nt, Homo sapiens
  misc_RNA (1)...(19): siRNA sense strand
cagcagugaugaugggacu

SEQ ID NO: 2269851 - RNA, 19 nt, Homo sapiens
  misc_RNA (1)...(19): siRNA sense strand
ggaaaagcgcacugacaau

SEQ ID NO: 2269852 - RNA, 19 nt, Homo sapiens
  misc_RNA (1)...(19): siRNA sense strand
acagaaaacaagugguuau

SEQ ID NO: 2269853 - RNA, 19 nt, Homo sapiens
  misc_RNA (1)...(19): siRNA sense strand
ucuacagggagcagauuaa

SEQ ID NO: 2269854 - RNA, 19 nt, Homo sapiens
  misc_RNA (1)...(19): siRNA sense strand
gggagcagauuaagcgagu

SEQ ID NO: 2269855 - RNA, 19 nt, Homo sapiens
  misc_RNA (1)...(19): siRNA sense strand
gagcaggugguguugggaa

SEQ ID NO: 2269856 - RNA, 19 nt, Homo sapiens
  misc_RNA (1)...(19): siRNA sense strand
auacaugaggacaggcgaa

SEQ ID NO: 2269857 - RNA, 19 nt, Homo sapiens
  misc_RNA (1)...(19): siRNA sense strand
aguacaaacuggugguggu

SEQ ID NO: 2269858 - RNA, 19 nt, Homo sapiens
  misc_RNA (1)...(19): siRNA sense strand
gugccaugagagaccaaua

SEQ ID NO: 2269859 - RNA, 19 nt, Homo sapiens
  misc_RNA (1)...(19): siRNA sense strand
acucaggguuguaugggau

SEQ ID NO: 2269860 - RNA, 19 nt, Homo sapiens
  misc_RNA (1)...(19): siRNA sense strand
aguacagugccaugagaga

SEQ ID NO: 2269861 - RNA, 19 nt, Homo sapiens
  misc_RNA (1)...(19): siRNA sense strand
acgccaguaccgaaugaaa

SEQ ID NO: 2269862 - RNA, 19 nt, Homo sapiens
  misc_RNA (1)...(19): siRNA sense strand
auauuaaccucuacaggga

SEQ ID NO: 2269863 - RNA, 19 nt, Homo sapiens
  misc_RNA (1)...(19): siRNA sense strand
acucaacagcagugaugau

SEQ ID NO: 2269864 - RNA, 19 nt, Homo sapiens
  misc_RNA (1)...(19): siRNA sense strand
agaagaugaaagugaacua

SEQ ID NO: 2269865 - RNA, 19 nt, Homo sapiens
  misc_RNA (1)...(19): siRNA sense strand
cuuuaaaacacuagccaaa

SEQ ID NO: 2269866 - RNA, 19 nt, Homo sapiens
  misc_RNA (1)...(19): siRNA sense strand
cagcaguaaggaagaggaa

SEQ ID NO: 2269867 - RNA, 19 nt, Homo sapiens
  misc_RNA (1)...(19): siRNA sense strand
gcacauuguuccagggccu

SEQ ID NO: 2269868 - RNA, 19 nt, Homo sapiens
  misc_RNA (1)...(19): siRNA sense strand
augugauguucaugguuua

SEQ ID NO: 2269869 - RNA, 19 nt, Homo sapiens
  misc_RNA (1)...(19): siRNA sense strand
ccgccgaggaugauaaaca

SEQ ID NO: 2269870 - RNA, 19 nt, Homo sapiens
  misc_RNA (1)...(19): siRNA sense strand
gauuguacguccaggccau

SEQ ID NO: 2269871 - RNA, 19 nt, Homo sapiens
  misc_RNA (1)...(19): siRNA sense strand
ccgagaagacagagcucca

SEQ ID NO: 2269872 - RNA, 19 nt, Homo sapiens
  misc_RNA (1)...(19): siRNA sense strand
aaauaggggcauugaaauu

SEQ ID NO: 2269873 - RNA, 19 nt, Homo sapiens
  misc_RNA (1)...(19): siRNA sense strand
cacaaacagcaguaaggaa

SEQ ID NO: 2269874 - RNA, 19 nt, Homo sapiens
  misc_RNA (1)...(19): siRNA sense strand
uugcugaagagaagaugaa

SEQ ID NO: 2269875 - RNA, 19 nt, Homo sapiens
  misc_RNA (1)...(19): siRNA sense strand
ccuucagcuucuugggcuu

SEQ ID NO: 2269876 - RNA, 19 nt, Homo sapiens
  misc_RNA (1)...(19): siRNA sense strand
uauucuggcauuugguuaa

SEQ ID NO: 2269877 - RNA, 19 nt, Homo sapiens
  misc_RNA (1)...(19): siRNA sense strand
caguaaggaagaggaauau

SEQ ID NO: 2269878 - RNA, 19 nt, Homo sapiens
  misc_RNA (1)...(19): siRNA sense strand
uauauaaggacgagaagcu

SEQ ID NO: 2269879 - RNA, 19 nt, Homo sapiens
  misc_RNA (1)...(19): siRNA sense strand
caggaagggccgagaagac

SEQ ID NO: 2269880 - RNA, 19 nt, Homo sapiens
  misc_RNA (1)...(19): siRNA sense strand
ggacaaauacuuuccguca

SEQ ID NO: 2269881 - RNA, 19 nt, Homo sapiens
  misc_RNA (1)...(19): siRNA sense strand
cacccgaaguagaggaaca

SEQ ID NO: 2269882 - RNA, 19 nt, Homo sapiens
  misc_RNA (1)...(19): siRNA sense strand
gaggauuaucuaugcaaau

SEQ ID NO: 2269883 - RNA, 19 nt, Homo sapiens
  misc_RNA (1)...(19): siRNA sense strand
gugaaguugaguugaugaa

SEQ ID NO: 2269884 - RNA, 19 nt, Homo sapiens
  misc_RNA (1)...(19): siRNA sense strand
acgaagaugagucgaguga

SEQ ID NO: 2269885 - RNA, 19 nt, Homo sapiens
  misc_RNA (1)...(19): siRNA sense strand
cuuugguaaugaagaguuu

SEQ ID NO: 2269886 - RNA, 19 nt, Homo sapiens
  misc_RNA (1)...(19): siRNA sense strand
ccaaggacauucuggacca

SEQ ID NO: 2269887 - RNA, 19 nt, Homo sapiens
  misc_RNA (1)...(19): siRNA sense strand
agaccuucgugcaggcaau

SEQ ID NO: 2269888 - RNA, 19 nt, Homo sapiens
  misc_RNA (1)...(19): siRNA sense strand
ugugcuagcaagacugaaa

SEQ ID NO: 2269889 - RNA, 19 nt, Homo sapiens
  misc_RNA (1)...(19): siRNA sense strand
augaagaguuugacugcca

SEQ ID NO: 2269890 - RNA, 19 nt, Homo sapiens
  misc_RNA (1)...(19): siRNA sense strand
cugaaauacaguuggugca

SEQ ID NO: 2269891 - RNA, 19 nt, Homo sapiens
  misc_RNA (1)...(19): siRNA sense strand
caguuaauaucauugccaa

SEQ ID NO: 2269892 - RNA, 19 nt, Homo sapiens
  misc_RNA (1)...(19): siRNA sense strand
gaagaugagucgagugagc

SEQ ID NO: 2269893 - RNA, 19 nt, Homo sapiens
  misc_RNA (1)...(19): siRNA sense strand
cuagcaagacugaaauaca

SEQ ID NO: 2269894 - RNA, 19 nt, Homo sapiens
  misc_RNA (1)...(19): siRNA sense strand
gaugaaaguugccagagca

SEQ ID NO: 2269895 - RNA, 19 nt, Homo sapiens
  misc_RNA (1)...(19): siRNA sense strand
gcggauugccacugaugau

SEQ ID NO: 2269896 - RNA, 19 nt, Homo sapiens
  misc_RNA (1)...(19): siRNA sense strand
gagaaguauuauucaucca

SEQ ID NO: 2269897 - RNA, 19 nt, Homo sapiens
  misc_RNA (1)...(19): siRNA sense strand
ccgaaguagaggaacagga

SEQ ID NO: 2269898 - RNA, 19 nt, Homo sapiens
  misc_RNA (1)...(19): siRNA sense strand
gggaaugacaaguggucca

SEQ ID NO: 2269899 - RNA, 19 nt, Homo sapiens
  misc_RNA (1)...(19): siRNA sense strand
cugaaaaggauuaugggaa

SEQ ID NO: 2269900 - RNA, 19 nt, Homo sapiens
  misc_RNA (1)...(19): siRNA sense strand
gggcuuuguaagugaggau

SEQ ID NO: 2269901 - RNA, 19 nt, Homo sapiens
  misc_RNA (1)...(19): siRNA sense strand
ccgaugugcggaaaguaaa

SEQ ID NO: 2269902 - RNA, 19 nt, Homo sapiens
  misc_RNA (1)...(19): siRNA sense strand
gugucuugcuauuggcaga

SEQ ID NO: 2269903 - RNA, 19 nt, Homo sapiens
  misc_RNA (1)...(19): siRNA sense strand
gcuuuguaagugaggauga

SEQ ID NO: 2269904 - RNA, 19 nt, Homo sapiens
  misc_RNA (1)...(19): siRNA sense strand
ccacgaacaagcuugggaa

SEQ ID NO: 2269905 - RNA, 19 nt, Homo sapiens
  misc_RNA (1)...(19): siRNA sense strand
gagcagucauugauggugu

SEQ ID NO: 2269906 - RNA, 19 nt, Homo sapiens
  misc_RNA (1)...(19): siRNA sense strand
gugugaucauccuggucaa

SEQ ID NO: 2269907 - RNA, 19 nt, Homo sapiens
  misc_RNA (1)...(19): siRNA sense strand
ucaaggaaggccagggcuu

SEQ ID NO: 2269908 - RNA, 19 nt, Homo sapiens
  misc_RNA (1)...(19): siRNA sense strand
gaggaugaguaccuggaga

SEQ ID NO: 2269909 - RNA, 19 nt, Homo sapiens
  misc_RNA (1)...(19): siRNA sense strand
ugaaaaggauuaugggaac

SEQ ID NO: 2269910 - RNA, 19 nt, Homo sapiens
  misc_RNA (1)...(19): siRNA sense strand
aggaugaguaccuggagau

SEQ ID NO: 2269911 - RNA, 19 nt, Homo sapiens
  misc_RNA (1)...(19): siRNA sense strand
ggaagugccucguggucgu

SEQ ID NO: 2269912 - RNA, 19 nt, Homo sapiens
  misc_RNA (1)...(19): siRNA sense strand
uggcuaaaccgcagcacca

SEQ ID NO: 2269913 - RNA, 19 nt, Homo sapiens
  misc_RNA (1)...(19): siRNA sense strand
ccaaaauguggauguguau

SEQ ID NO: 2269914 - RNA, 19 nt, Homo sapiens
  misc_RNA (1)...(19): siRNA sense strand
guucagaaguugagcggca

SEQ ID NO: 2269915 - RNA, 19 nt, Homo sapiens
  misc_RNA (1)...(19): siRNA sense strand
ccaauuauaucaaaggcua

SEQ ID NO: 2269916 - RNA, 19 nt, Homo sapiens
  misc_RNA (1)...(19): siRNA sense strand
gauuagaggagaaugggua

SEQ ID NO: 2269917 - RNA, 19 nt, Homo sapiens
  misc_RNA (1)...(19): siRNA sense strand
augaagaugaugagaauga

SEQ ID NO: 2269918 - RNA, 19 nt, Homo sapiens
  misc_RNA (1)...(19): siRNA sense strand
agaugaaucaggagaugaa

SEQ ID NO: 2269919 - RNA, 19 nt, Homo sapiens
  misc_RNA (1)...(19): siRNA sense strand
aagcaaaugcggagaagca

SEQ ID NO: 2269920 - RNA, 19 nt, Homo sapiens
  misc_RNA (1)...(19): siRNA sense strand
ggacgugggaugagaaaau

SEQ ID NO: 2269921 - RNA, 19 nt, Homo sapiens
  misc_RNA (1)...(19): siRNA sense strand
aggccaaagcugugaagau

SEQ ID NO: 2269922 - RNA, 19 nt, Homo sapiens
  misc_RNA (1)...(19): siRNA sense strand
ggaaaagagaaccagaaua

SEQ ID NO: 2269923 - RNA, 19 nt, Homo sapiens
  misc_RNA (1)...(19): siRNA sense strand
ccauacaagccaaacuaua

SEQ ID NO: 2269924 - RNA, 19 nt, Homo sapiens
  misc_RNA (1)...(19): siRNA sense strand
agagagaagcggaagcuau

SEQ ID NO: 2269925 - RNA, 19 nt, Homo sapiens
  misc_RNA (1)...(19): siRNA sense strand
aaagaagagagaagcggaa

SEQ ID NO: 2269926 - RNA, 19 nt, Homo sapiens
  misc_RNA (1)...(19): siRNA sense strand
uaugaaagccacagaggau

SEQ ID NO: 2269927 - RNA, 19 nt, Homo sapiens
  misc_RNA (1)...(19): siRNA sense strand
augaaagagaccagcguau

SEQ ID NO: 2269928 - RNA, 19 nt, Homo sapiens
  misc_RNA (1)...(19): siRNA sense strand
gcagaggaaagcaggguca

SEQ ID NO: 2269929 - RNA, 19 nt, Homo sapiens
  misc_RNA (1)...(19): siRNA sense strand
cggcaaacacuccuggcaa

SEQ ID NO: 2269930 - RNA, 19 nt, Homo sapiens
  misc_RNA (1)...(19): siRNA sense strand
cgaccugaccagagacuga

SEQ ID NO: 2269931 - RNA, 19 nt, Homo sapiens
  misc_RNA (1)...(19): siRNA sense strand
cugugaagaugcuggcaga

SEQ ID NO: 2269932 - RNA, 19 nt, Homo sapiens
  misc_RNA (1)...(19): siRNA sense strand
cauccaaugccaugaucaa

SEQ ID NO: 2269933 - RNA, 19 nt, Homo sapiens
  misc_RNA (1)...(19): siRNA sense strand
ugaagaacugcauuggaaa

SEQ ID NO: 2269934 - RNA, 19 nt, Homo sapiens
  misc_RNA (1)...(19): siRNA sense strand
aagccaaacuauagccuca

SEQ ID NO: 2269935 - RNA, 19 nt, Homo sapiens
  misc_RNA (1)...(19): siRNA sense strand
ggucaacgaacgagccaca

SEQ ID NO: 2269936 - RNA, 19 nt, Homo sapiens
  misc_RNA (1)...(19): siRNA sense strand
gcccagacccauaguaaaa

SEQ ID NO: 2269937 - RNA, 19 nt, Homo sapiens
  misc_RNA (1)...(19): siRNA sense strand
gaagaugaugagaaugaau

SEQ ID NO: 2269938 - RNA, 19 nt, Homo sapiens
  misc_RNA (1)...(19): siRNA sense strand
gaagaacugcauuggaaaa

SEQ ID NO: 2269939 - RNA, 19 nt, Homo sapiens
  misc_RNA (1)...(19): siRNA sense strand
uggaagaaaguuaccacaa

SEQ ID NO: 2269940 - RNA, 19 nt, Homo sapiens
  misc_RNA (1)...(19): siRNA sense strand
aggccaugaagcagaggaa

SEQ ID NO: 2269941 - RNA, 19 nt, Homo sapiens
  misc_RNA (1)...(19): siRNA sense strand
acucucaaugcuugggaaa

SEQ ID NO: 2269942 - RNA, 19 nt, Homo sapiens
  misc_RNA (1)...(19): siRNA sense strand
ccuauaaggcacugugguu

SEQ ID NO: 2269943 - RNA, 19 nt, Homo sapiens
  misc_RNA (1)...(19): siRNA sense strand
uggaauaccaugagcuguu

SEQ ID NO: 2269944 - RNA, 19 nt, Homo sapiens
  misc_RNA (1)...(19): siRNA sense strand
aaggcagaaaugagacaua

SEQ ID NO: 2269945 - RNA, 19 nt, Homo sapiens
  misc_RNA (1)...(19): siRNA sense strand
cagcauaaucaccuggaga

SEQ ID NO: 2269946 - RNA, 19 nt, Homo sapiens
  misc_RNA (1)...(19): siRNA sense strand
acagagaggccaugaagca

SEQ ID NO: 2269947 - RNA, 19 nt, Homo sapiens
  misc_RNA (1)...(19): siRNA sense strand
acgcugggaugaagcaaau

SEQ ID NO: 2269948 - RNA, 19 nt, Homo sapiens
  misc_RNA (1)...(19): siRNA sense strand
gggacaugagcgaugaaga

SEQ ID NO: 2269949 - RNA, 19 nt, Homo sapiens
  misc_RNA (1)...(19): siRNA sense strand
gguuugagcggaagaagga

SEQ ID NO: 2269950 - RNA, 19 nt, Homo sapiens
  misc_RNA (1)...(19): siRNA sense strand
ggaagaaacccucgagcag

SEQ ID NO: 2269951 - RNA, 19 nt, Homo sapiens
  misc_RNA (1)...(19): siRNA sense strand
gcgaaauugauauugugaa

SEQ ID NO: 2269952 - RNA, 19 nt, Homo sapiens
  misc_RNA (1)...(19): siRNA sense strand
uggaccgauuagaggagaa

SEQ ID NO: 2269953 - RNA, 19 nt, Homo sapiens
  misc_RNA (1)...(19): siRNA sense strand
aagacugagcugcagaaua

SEQ ID NO: 2269954 - RNA, 19 nt, Homo sapiens
  misc_RNA (1)...(19): siRNA sense strand
ucacaagacaggagacaag

SEQ ID NO: 2269955 - RNA, 19 nt, Homo sapiens
  misc_RNA (1)...(19): siRNA sense strand
gaagaugcuggcagaguca

SEQ ID NO: 2269956 - RNA, 19 nt, Homo sapiens
  misc_RNA (1)...(19): siRNA sense strand
guagaggacuugagcacgu

SEQ ID NO: 2269957 - RNA, 19 nt, Homo sapiens
  misc_RNA (1)...(19): siRNA sense strand
gcaaaggggacaugagcga

SEQ ID NO: 2269958 - RNA, 19 nt, Homo sapiens
  misc_RNA (1)...(19): siRNA sense strand
cgaagaaugcagaaaacau

SEQ ID NO: 2269959 - RNA, 19 nt, Homo sapiens
  misc_RNA (1)...(19): siRNA sense strand
cacugugguuugagcggaa

SEQ ID NO: 2269960 - RNA, 19 nt, Homo sapiens
  misc_RNA (1)...(19): siRNA sense strand
gaaagaagagagaagcgga

SEQ ID NO: 2269961 - RNA, 19 nt, Homo sapiens
  misc_RNA (1)...(19): siRNA sense strand
ccacaaacguacuggcagc

SEQ ID NO: 2269962 - RNA, 19 nt, Homo sapiens
  misc_RNA (1)...(19): siRNA sense strand
accagagacugauggaaaa

SEQ ID NO: 2269963 - RNA, 19 nt, Homo sapiens
  misc_RNA (1)...(19): siRNA sense strand
uacugggaguguaaagaaa

SEQ ID NO: 2269964 - RNA, 19 nt, Homo sapiens
  misc_RNA (1)...(19): siRNA sense strand
uggcgaagcagcauaauca

SEQ ID NO: 2269965 - RNA, 19 nt, Homo sapiens
  misc_RNA (1)...(19): siRNA sense strand
uggaauguuucaaaguaca

SEQ ID NO: 2269966 - RNA, 19 nt, Homo sapiens
  misc_RNA (1)...(19): siRNA sense strand
gccaugaagcagaggaaag

SEQ ID NO: 2269967 - RNA, 19 nt, Homo sapiens
  misc_RNA (1)...(19): siRNA sense strand
cugagcuacuacagaucaa

SEQ ID NO: 2269968 - RNA, 19 nt, Homo sapiens
  misc_RNA (1)...(19): siRNA sense strand
agaucaaacaggucaacga

SEQ ID NO: 2269969 - RNA, 19 nt, Homo sapiens
  misc_RNA (1)...(19): siRNA sense strand
gaauaccauacaagccaaa

SEQ ID NO: 2269970 - RNA, 19 nt, Homo sapiens
  misc_RNA (1)...(19): siRNA sense strand
ucucaaugcuugggaaagu

SEQ ID NO: 2269971 - RNA, 19 nt, Homo sapiens
  misc_RNA (1)...(19): siRNA sense strand
cggcagaagugcacggagu

SEQ ID NO: 2269972 - RNA, 19 nt, Homo sapiens
  misc_RNA (1)...(19): siRNA sense strand
gcucagggccagaaggucu

SEQ ID NO: 2269973 - RNA, 19 nt, Homo sapiens
  misc_RNA (1)...(19): siRNA sense strand
guggcaaagcgacggacua

SEQ ID NO: 2269974 - RNA, 19 nt, Homo sapiens
  misc_RNA (1)...(19): siRNA sense strand
cggaagugcaucaucgaca

SEQ ID NO: 2269975 - RNA, 19 nt, Homo sapiens
  misc_RNA (1)...(19): siRNA sense strand
cagcaguggcaaccagaau

SEQ ID NO: 2269976 - RNA, 19 nt, Homo sapiens
  misc_RNA (1)...(19): siRNA sense strand
aaugagaagcagaucguga

SEQ ID NO: 2269977 - RNA, 19 nt, Homo sapiens
  misc_RNA (1)...(19): siRNA sense strand
ccaacaguguggcacggaa

SEQ ID NO: 2269978 - RNA, 19 nt, Homo sapiens
  misc_RNA (1)...(19): siRNA sense strand
gagaagaaccacccggacu

SEQ ID NO: 2269979 - RNA, 19 nt, Homo sapiens
  misc_RNA (1)...(19): siRNA sense strand
acacgugggcugugcgcau

SEQ ID NO: 2269980 - RNA, 19 nt, Homo sapiens
  misc_RNA (1)...(19): siRNA sense strand
acgacugacuugcggcaga

SEQ ID NO: 2269981 - RNA, 19 nt, Homo sapiens
  misc_RNA (1)...(19): siRNA sense strand
gcugcaacugcgacggcua

SEQ ID NO: 2269982 - RNA, 19 nt, Homo sapiens
  misc_RNA (1)...(19): siRNA sense strand
gcaccgagcccaauggaga

SEQ ID NO: 2269983 - RNA, 19 nt, Homo sapiens
  misc_RNA (1)...(19): siRNA sense strand
gugaagaaccccagaggga

SEQ ID NO: 2269984 - RNA, 19 nt, Homo sapiens
  misc_RNA (1)...(19): siRNA sense strand
uggugaagagcauugguaa

SEQ ID NO: 2269985 - RNA, 19 nt, Homo sapiens
  misc_RNA (1)...(19): siRNA sense strand
ggugaagagcauugguaac

SEQ ID NO: 2269986 - RNA, 19 nt, Homo sapiens
  misc_RNA (1)...(19): siRNA sense strand
acuuugcaugggagagaaa

SEQ ID NO: 2269987 - RNA, 19 nt, Homo sapiens
  misc_RNA (1)...(19): siRNA sense strand
gcaccgagcccaauggaga

SEQ ID NO: 2269988 - RNA, 19 nt, Homo sapiens
  misc_RNA (1)...(19): siRNA sense strand
gugaagaaccccagaggga

SEQ ID NO: 2269989 - RNA, 19 nt, Homo sapiens
  misc_RNA (1)...(19): siRNA sense strand
uggugaagagcauugguaa

SEQ ID NO: 2269990 - RNA, 19 nt, Homo sapiens
  misc_RNA (1)...(19): siRNA sense strand
ggugaagagcauugguaac

SEQ ID NO: 2269991 - RNA, 19 nt, Homo sapiens
  misc_RNA (1)...(19): siRNA sense strand
acuuugcaugggagagaaa

SEQ ID NO: 2269992 - RNA, 19 nt, Homo sapiens
  misc_RNA (1)...(19): siRNA sense strand
gcaccgagcccaauggaga

SEQ ID NO: 2269993 - RNA, 19 nt, Homo sapiens
  misc_RNA (1)...(19): siRNA sense strand
gugaagaaccccagaggga

SEQ ID NO: 2269994 - RNA, 19 nt, Homo sapiens
  misc_RNA (1)...(19): siRNA sense strand
uggugaagagcauugguaa

SEQ ID NO: 2269995 - RNA, 19 nt, Homo sapiens
  misc_RNA (1)...(19): siRNA sense strand
ggugaagagcauugguaac

SEQ ID NO: 2269996 - RNA, 19 nt, Homo sapiens
  misc_RNA (1)...(19): siRNA sense strand
acuuugcaugggagagaaa

SEQ ID NO: 2269997 - RNA, 19 nt, Homo sapiens
  misc_RNA (1)...(19): siRNA sense strand
gaggaugggucgugggcau

SEQ ID NO: 2269998 - RNA, 19 nt, Homo sapiens
  misc_RNA (1)...(19): siRNA sense strand
cauaagaacccgacgguga

SEQ ID NO: 2269999 - RNA, 19 nt, Homo sapiens
  misc_RNA (1)...(19): siRNA sense strand
ccaaaguggaauucagcaa

SEQ ID NO: 2270000 - RNA, 19 nt, Homo sapiens
  misc_RNA (1)...(19): siRNA sense strand
guuaaugagcugaagaaca

SEQ ID NO: 2270001 - RNA, 19 nt, Homo sapiens
  misc_RNA (1)...(19): siRNA sense strand
ugaauaagaucaaugguga

SEQ ID NO: 2270002 - RNA, 19 nt, Homo sapiens
  misc_RNA (1)...(19): siRNA sense strand
ccaagaacacagccggaaa

SEQ ID NO: 2270003 - RNA, 19 nt, Homo sapiens
  misc_RNA (1)...(19): siRNA sense strand
gcgaggagguguauggcau

SEQ ID NO: 2270004 - RNA, 19 nt, Homo sapiens
  misc_RNA (1)...(19): siRNA sense strand
cugcacaauugaaaggcaa

SEQ ID NO: 2270005 - RNA, 19 nt, Homo sapiens
  misc_RNA (1)...(19): siRNA sense strand
ggucauaacuauuucagga

SEQ ID NO: 2270006 - RNA, 19 nt, Homo sapiens
  misc_RNA (1)...(19): siRNA sense strand
gcaacuuggccaugggaca

SEQ ID NO: 2270007 - RNA, 19 nt, Homo sapiens
  misc_RNA (1)...(19): siRNA sense strand
agcccaagguggugcgcua

SEQ ID NO: 2270008 - RNA, 19 nt, Homo sapiens
  misc_RNA (1)...(19): siRNA sense strand
ggaucuaaaucuuggcagu

SEQ ID NO: 2270009 - RNA, 19 nt, Homo sapiens
  misc_RNA (1)...(19): siRNA sense strand
ugucauucauugccggaaa

SEQ ID NO: 2270010 - RNA, 19 nt, Homo sapiens
  misc_RNA (1)...(19): siRNA sense strand
cuacaucucaauaggaaau

SEQ ID NO: 2270011 - RNA, 19 nt, Homo sapiens
  misc_RNA (1)...(19): siRNA sense strand
ccuucaugggagacaauua

SEQ ID NO: 2270012 - RNA, 19 nt, Homo sapiens
  misc_RNA (1)...(19): siRNA sense strand
ggguaugugaggaguuuga

SEQ ID NO: 2270013 - RNA, 19 nt, Homo sapiens
  misc_RNA (1)...(19): siRNA sense strand
ccuccacagugaagaccaa

SEQ ID NO: 2270014 - RNA, 19 nt, Homo sapiens
  misc_RNA (1)...(19): siRNA sense strand
uggucaaccucuaugaaga

SEQ ID NO: 2270015 - RNA, 19 nt, Homo sapiens
  misc_RNA (1)...(19): siRNA sense strand
gccgagagaauaagcacaa

SEQ ID NO: 2270016 - RNA, 19 nt, Homo sapiens
  misc_RNA (1)...(19): siRNA sense strand
ucgugaagaagcagcacaa

SEQ ID NO: 2270017 - RNA, 19 nt, Homo sapiens
  misc_RNA (1)...(19): siRNA sense strand
caguauugggucauaacua

SEQ ID NO: 2270018 - RNA, 19 nt, Homo sapiens
  misc_RNA (1)...(19): siRNA sense strand
ugaccuguacagagggcaa

SEQ ID NO: 2270019 - RNA, 19 nt, Homo sapiens
  misc_RNA (1)...(19): siRNA sense strand
acaucaaacuguuggcugu

SEQ ID NO: 2270020 - RNA, 19 nt, Homo sapiens
  misc_RNA (1)...(19): siRNA sense strand
aguauaaggugguccggga

SEQ ID NO: 2270021 - RNA, 19 nt, Homo sapiens
  misc_RNA (1)...(19): siRNA sense strand
caggaacugaagagaguga

SEQ ID NO: 2270022 - RNA, 19 nt, Homo sapiens
  misc_RNA (1)...(19): siRNA sense strand
acgacaugaauaagaucaa

SEQ ID NO: 2270023 - RNA, 19 nt, Homo sapiens
  misc_RNA (1)...(19): siRNA sense strand
cagagcuggcuguggagaa

SEQ ID NO: 2270024 - RNA, 19 nt, Homo sapiens
  misc_RNA (1)...(19): siRNA sense strand
gagcugaucaagagccaga

SEQ ID NO: 2270025 - RNA, 19 nt, Homo sapiens
  misc_RNA (1)...(19): siRNA sense strand
gggaacaaguggguggcau

SEQ ID NO: 2270026 - RNA, 19 nt, Homo sapiens
  misc_RNA (1)...(19): siRNA sense strand
ccuucaagcaauacaacau

SEQ ID NO: 2270027 - RNA, 19 nt, Homo sapiens
  misc_RNA (1)...(19): siRNA sense strand
auaccaaagaucagagcca

SEQ ID NO: 2270028 - RNA, 19 nt, Homo sapiens
  misc_RNA (1)...(19): siRNA sense strand
auaggaaauucguagacau

SEQ ID NO: 2270029 - RNA, 19 nt, Homo sapiens
  misc_RNA (1)...(19): siRNA sense strand
guacuguggcgauggcauu

SEQ ID NO: 2270030 - RNA, 19 nt, Homo sapiens
  misc_RNA (1)...(19): siRNA sense strand
ccucgugccuggaccacaa

SEQ ID NO: 2270031 - RNA, 19 nt, Homo sapiens
  misc_RNA (1)...(19): siRNA sense strand
cauaacuauuucaggaacu

SEQ ID NO: 2270032 - RNA, 19 nt, Homo sapiens
  misc_RNA (1)...(19): siRNA sense strand
aaugcgacgacaugaauaa

SEQ ID NO: 2270033 - RNA, 19 nt, Homo sapiens
  misc_RNA (1)...(19): siRNA sense strand
caugaagcucuaugugaau

SEQ ID NO: 2270034 - RNA, 19 nt, Homo sapiens
  misc_RNA (1)...(19): siRNA sense strand
ggucaaccucuaugaagau

SEQ ID NO: 2270035 - RNA, 19 nt, Homo sapiens
  misc_RNA (1)...(19): siRNA sense strand
auguuaaugagcugaagaa

SEQ ID NO: 2270036 - RNA, 19 nt, Homo sapiens
  misc_RNA (1)...(19): siRNA sense strand
uggaugagcaccuggagau

SEQ ID NO: 2270037 - RNA, 19 nt, Homo sapiens
  misc_RNA (1)...(19): siRNA sense strand
acaaaugcaagccuggaua

SEQ ID NO: 2270038 - RNA, 19 nt, Homo sapiens
  misc_RNA (1)...(19): siRNA sense strand
gggcucuaccaguguacua

SEQ ID NO: 2270039 - RNA, 19 nt, Homo sapiens
  misc_RNA (1)...(19): siRNA sense strand
cugaggccuucaagcaaua

SEQ ID NO: 2270040 - RNA, 19 nt, Homo sapiens
  misc_RNA (1)...(19): siRNA sense strand
ggacucagcgggagauacu

SEQ ID NO: 2270041 - RNA, 19 nt, Homo sapiens
  misc_RNA (1)...(19): siRNA sense strand
ucuuaaauuggauggauca

SEQ ID NO: 2270042 - RNA, 19 nt, Homo sapiens
  misc_RNA (1)...(19): siRNA sense strand
ucgugaagcagaaggucau

SEQ ID NO: 2270043 - RNA, 19 nt, Homo sapiens
  misc_RNA (1)...(19): siRNA sense strand
guguaccaguauuggguca

SEQ ID NO: 2270044 - RNA, 19 nt, Homo sapiens
  misc_RNA (1)...(19): siRNA sense strand
agaucucagugaaggcauu

SEQ ID NO: 2270045 - RNA, 19 nt, Homo sapiens
  misc_RNA (1)...(19): siRNA sense strand
caacuuggccaugggacaa

SEQ ID NO: 2270046 - RNA, 19 nt, Homo sapiens
  misc_RNA (1)...(19): siRNA sense strand
caacaaagacccacgcuac

SEQ ID NO: 2270047 - RNA, 19 nt, Homo sapiens
  misc_RNA (1)...(19): siRNA sense strand
aguguaggaucaaguguga

SEQ ID NO: 2270048 - RNA, 19 nt, Homo sapiens
  misc_RNA (1)...(19): siRNA sense strand
ugacccagggccaggaaau

SEQ ID NO: 2270049 - RNA, 19 nt, Homo sapiens
  misc_RNA (1)...(19): siRNA sense strand
ucacauacauccauggaag

SEQ ID NO: 2270050 - RNA, 19 nt, Homo sapiens
  misc_RNA (1)...(19): siRNA sense strand
aacagugaguguaggauca

SEQ ID NO: 2270051 - RNA, 19 nt, Homo sapiens
  misc_RNA (1)...(19): siRNA sense strand
ggaggaguuggcaggagua

SEQ ID NO: 2270052 - RNA, 19 nt, Homo sapiens
  misc_RNA (1)...(19): siRNA sense strand
ggaaaugacaccuguggcu

SEQ ID NO: 2270053 - RNA, 19 nt, Homo sapiens
  misc_RNA (1)...(19): siRNA sense strand
uugaaagagaauugggauc

SEQ ID NO: 2270054 - RNA, 19 nt, Homo sapiens
  misc_RNA (1)...(19): siRNA sense strand
ucucugaccauuuggguga

SEQ ID NO: 2270055 - RNA, 19 nt, Homo sapiens
  misc_RNA (1)...(19): siRNA sense strand
gugaacaaugcgacgacau

SEQ ID NO: 2270056 - RNA, 19 nt, Homo sapiens
  misc_RNA (1)...(19): siRNA sense strand
ggucaucaucggacagcca

SEQ ID NO: 2270057 - RNA, 19 nt, Homo sapiens
  misc_RNA (1)...(19): siRNA sense strand
ggaagaaagaggaggagga

SEQ ID NO: 2270058 - RNA, 19 nt, Homo sapiens
  misc_RNA (1)...(19): siRNA sense strand
cggacaagaaggaggacga

SEQ ID NO: 2270059 - RNA, 19 nt, Homo sapiens
  misc_RNA (1)...(19): siRNA sense strand
gcgcagaggaccaagcuga

SEQ ID NO: 2270060 - RNA, 19 nt, Homo sapiens
  misc_RNA (1)...(19): siRNA sense strand
acaugaacccggucagcaa

SEQ ID NO: 2270061 - RNA, 19 nt, Homo sapiens
  misc_RNA (1)...(19): siRNA sense strand
aaauugaaguccagccaga

SEQ ID NO: 2270062 - RNA, 19 nt, Homo sapiens
  misc_RNA (1)...(19): siRNA sense strand
aggaggaugaagcggacaa

SEQ ID NO: 2270063 - RNA, 19 nt, Homo sapiens
  misc_RNA (1)...(19): siRNA sense strand
agaaggaggacgacggcga

SEQ ID NO: 2270064 - RNA, 19 nt, Homo sapiens
  misc_RNA (1)...(19): siRNA sense strand
cggcauccugggcgacaaa

SEQ ID NO: 2270065 - RNA, 19 nt, Homo sapiens
  misc_RNA (1)...(19): siRNA sense strand
ggagaaggccuuugagagg

SEQ ID NO: 2270066 - RNA, 19 nt, Homo sapiens
  misc_RNA (1)...(19): siRNA sense strand
gcucggauguggagucgga

SEQ ID NO: 2270067 - RNA, 19 nt, Homo sapiens
  misc_RNA (1)...(19): siRNA sense strand
ggaagaaagaggaggagga

SEQ ID NO: 2270068 - RNA, 19 nt, Homo sapiens
  misc_RNA (1)...(19): siRNA sense strand
cggacaagaaggaggacga

SEQ ID NO: 2270069 - RNA, 19 nt, Homo sapiens
  misc_RNA (1)...(19): siRNA sense strand
gcgcagaggaccaagcuga

SEQ ID NO: 2270070 - RNA, 19 nt, Homo sapiens
  misc_RNA (1)...(19): siRNA sense strand
acaugaacccggucagcaa

SEQ ID NO: 2270071 - RNA, 19 nt, Homo sapiens
  misc_RNA (1)...(19): siRNA sense strand
aaauugaaguccagccaga

SEQ ID NO: 2270072 - RNA, 19 nt, Homo sapiens
  misc_RNA (1)...(19): siRNA sense strand
aggaggaugaagcggacaa

SEQ ID NO: 2270073 - RNA, 19 nt, Homo sapiens
  misc_RNA (1)...(19): siRNA sense strand
agaaggaggacgacggcga

SEQ ID NO: 2270074 - RNA, 19 nt, Homo sapiens
  misc_RNA (1)...(19): siRNA sense strand
cggcauccugggcgacaaa

SEQ ID NO: 2270075 - RNA, 19 nt, Homo sapiens
  misc_RNA (1)...(19): siRNA sense strand
ggagaaggccuuugagagg

SEQ ID NO: 2270076 - RNA, 19 nt, Homo sapiens
  misc_RNA (1)...(19): siRNA sense strand
gcucggauguggagucgga

SEQ ID NO: 2270077 - RNA, 19 nt, Homo sapiens
  misc_RNA (1)...(19): siRNA sense strand
ccaaagagauggaacgcau

SEQ ID NO: 2270078 - RNA, 19 nt, Homo sapiens
  misc_RNA (1)...(19): siRNA sense strand
ccacgggaaaugagggcaa

SEQ ID NO: 2270079 - RNA, 19 nt, Homo sapiens
  misc_RNA (1)...(19): siRNA sense strand
gaggauucgcuauaagaaa

SEQ ID NO: 2270080 - RNA, 19 nt, Homo sapiens
  misc_RNA (1)...(19): siRNA sense strand
caucgaaaguucagcgcca

SEQ ID NO: 2270081 - RNA, 19 nt, Homo sapiens
  misc_RNA (1)...(19): siRNA sense strand
gugugaaaucaaggagaaa

SEQ ID NO: 2270082 - RNA, 19 nt, Homo sapiens
  misc_RNA (1)...(19): siRNA sense strand
auguacagcccacgggaaa

SEQ ID NO: 2270083 - RNA, 19 nt, Homo sapiens
  misc_RNA (1)...(19): siRNA sense strand
aguuccaagaggaggcaaa

SEQ ID NO: 2270084 - RNA, 19 nt, Homo sapiens
  misc_RNA (1)...(19): siRNA sense strand
ggcaaauggcagcuggcaa

SEQ ID NO: 2270085 - RNA, 19 nt, Homo sapiens
  misc_RNA (1)...(19): siRNA sense strand
gugaggaggccaaggagga

SEQ ID NO: 2270086 - RNA, 19 nt, Homo sapiens
  misc_RNA (1)...(19): siRNA sense strand
gcaacaagaggauucgcua

SEQ ID NO: 2270087 - RNA, 19 nt, Homo sapiens
  misc_RNA (1)...(19): siRNA sense strand
ucaugaaccugcugaggga

SEQ ID NO: 2270088 - RNA, 19 nt, Homo sapiens
  misc_RNA (1)...(19): siRNA sense strand
caacaagaggauucgcuau

SEQ ID NO: 2270089 - RNA, 19 nt, Homo sapiens
  misc_RNA (1)...(19): siRNA sense strand
aacaagaggauucgcuaua

SEQ ID NO: 2270090 - RNA, 19 nt, Homo sapiens
  misc_RNA (1)...(19): siRNA sense strand
aggauucgcuauaagaaaa

SEQ ID NO: 2270091 - RNA, 19 nt, Homo sapiens
  misc_RNA (1)...(19): siRNA sense strand
gcaaauggcagcuggcaag

SEQ ID NO: 2270092 - RNA, 19 nt, Homo sapiens
  misc_RNA (1)...(19): siRNA sense strand
uggaacgcauggugagcau

SEQ ID NO: 2270093 - RNA, 19 nt, Homo sapiens
  misc_RNA (1)...(19): siRNA sense strand
aggcaaacaucuaugcugu

SEQ ID NO: 2270094 - RNA, 19 nt, Homo sapiens
  misc_RNA (1)...(19): siRNA sense strand
ggagauuccuauucugcuu

SEQ ID NO: 2270095 - RNA, 19 nt, Homo sapiens
  misc_RNA (1)...(19): siRNA sense strand
guaaugaguucacgaccca

SEQ ID NO: 2270096 - RNA, 19 nt, Homo sapiens
  misc_RNA (1)...(19): siRNA sense strand
ccuaauaaggagugcaucu

SEQ ID NO: 2270097 - RNA, 19 nt, Homo sapiens
  misc_RNA (1)...(19): siRNA sense strand
ggaugagggcacaggagga

SEQ ID NO: 2270098 - RNA, 19 nt, Homo sapiens
  misc_RNA (1)...(19): siRNA sense strand
uggagaaggcccagggaac

SEQ ID NO: 2270099 - RNA, 19 nt, Homo sapiens
  misc_RNA (1)...(19): siRNA sense strand
ggaaugaacuccucgucca

SEQ ID NO: 2270100 - RNA, 19 nt, Homo sapiens
  misc_RNA (1)...(19): siRNA sense strand
cggagaaaacagaggaauc

SEQ ID NO: 2270101 - RNA, 19 nt, Homo sapiens
  misc_RNA (1)...(19): siRNA sense strand
cagucuuauuggugcuuau

SEQ ID NO: 2270102 - RNA, 19 nt, Homo sapiens
  misc_RNA (1)...(19): siRNA sense strand
gggccagguagaagagaac

SEQ ID NO: 2270103 - RNA, 19 nt, Homo sapiens
  misc_RNA (1)...(19): siRNA sense strand
aggaagaagccaaaauuaa

SEQ ID NO: 2270104 - RNA, 19 nt, Homo sapiens
  misc_RNA (1)...(19): siRNA sense strand
guggaauacgucaggaaga

SEQ ID NO: 2270105 - RNA, 19 nt, Homo sapiens
  misc_RNA (1)...(19): siRNA sense strand
ccacuaagcaugugcccga

SEQ ID NO: 2270106 - RNA, 19 nt, Homo sapiens
  misc_RNA (1)...(19): siRNA sense strand
aggugagguuagaggagca

SEQ ID NO: 2270107 - RNA, 19 nt, Homo sapiens
  misc_RNA (1)...(19): siRNA sense strand
gcgaggugaucgagaggcu

SEQ ID NO: 2270108 - RNA, 19 nt, Homo sapiens
  misc_RNA (1)...(19): siRNA sense strand
agguggaauacgucaggaa

SEQ ID NO: 2270109 - RNA, 19 nt, Homo sapiens
  misc_RNA (1)...(19): siRNA sense strand
aagaaguccaggugagguu

SEQ ID NO: 2270110 - RNA, 19 nt, Homo sapiens
  misc_RNA (1)...(19): siRNA sense strand
agugaggauucuuuggaca

SEQ ID NO: 2270111 - RNA, 19 nt, Homo sapiens
  misc_RNA (1)...(19): siRNA sense strand
acgucaggaagaagccaaa

SEQ ID NO: 2270112 - RNA, 19 nt, Homo sapiens
  misc_RNA (1)...(19): siRNA sense strand
ugagguuagaggagcauuu

SEQ ID NO: 2270113 - RNA, 19 nt, Homo sapiens
  misc_RNA (1)...(19): siRNA sense strand
aggaagaagccaaaauuaa

SEQ ID NO: 2270114 - RNA, 19 nt, Homo sapiens
  misc_RNA (1)...(19): siRNA sense strand
guggaauacgucaggaaga

SEQ ID NO: 2270115 - RNA, 19 nt, Homo sapiens
  misc_RNA (1)...(19): siRNA sense strand
ccacuaagcaugugcccga

SEQ ID NO: 2270116 - RNA, 19 nt, Homo sapiens
  misc_RNA (1)...(19): siRNA sense strand
aggugagguuagaggagca

SEQ ID NO: 2270117 - RNA, 19 nt, Homo sapiens
  misc_RNA (1)...(19): siRNA sense strand
gcgaggugaucgagaggcu

SEQ ID NO: 2270118 - RNA, 19 nt, Homo sapiens
  misc_RNA (1)...(19): siRNA sense strand
agguggaauacgucaggaa

SEQ ID NO: 2270119 - RNA, 19 nt, Homo sapiens
  misc_RNA (1)...(19): siRNA sense strand
aagaaguccaggugagguu

SEQ ID NO: 2270120 - RNA, 19 nt, Homo sapiens
  misc_RNA (1)...(19): siRNA sense strand
agugaggauucuuuggaca

SEQ ID NO: 2270121 - RNA, 19 nt, Homo sapiens
  misc_RNA (1)...(19): siRNA sense strand
acgucaggaagaagccaaa

SEQ ID NO: 2270122 - RNA, 19 nt, Homo sapiens
  misc_RNA (1)...(19): siRNA sense strand
ugagguuagaggagcauuu

SEQ ID NO: 2270123 - RNA, 19 nt, Homo sapiens
  misc_RNA (1)...(19): siRNA sense strand
agaucgagauugugcggaa

SEQ ID NO: 2270124 - RNA, 19 nt, Homo sapiens
  misc_RNA (1)...(19): siRNA sense strand
ccaugaucgccgagugcaa

SEQ ID NO: 2270125 - RNA, 19 nt, Homo sapiens
  misc_RNA (1)...(19): siRNA sense strand
ggaagaaggagccuggguu

SEQ ID NO: 2270126 - RNA, 19 nt, Homo sapiens
  misc_RNA (1)...(19): siRNA sense strand
ccgaguuggaccugaacau

SEQ ID NO: 2270127 - RNA, 19 nt, Homo sapiens
  misc_RNA (1)...(19): siRNA sense strand
ccaggagcagcgagccaaa

SEQ ID NO: 2270128 - RNA, 19 nt, Homo sapiens
  misc_RNA (1)...(19): siRNA sense strand
agaucgagauugugcggaa

SEQ ID NO: 2270129 - RNA, 19 nt, Homo sapiens
  misc_RNA (1)...(19): siRNA sense strand
ccaugaucgccgagugcaa

SEQ ID NO: 2270130 - RNA, 19 nt, Homo sapiens
  misc_RNA (1)...(19): siRNA sense strand
ggaagaaggagccuggguu

SEQ ID NO: 2270131 - RNA, 19 nt, Homo sapiens
  misc_RNA (1)...(19): siRNA sense strand
ccgaguuggaccugaacau

SEQ ID NO: 2270132 - RNA, 19 nt, Homo sapiens
  misc_RNA (1)...(19): siRNA sense strand
ccaggagcagcgagccaaa

SEQ ID NO: 2270133 - RNA, 19 nt, Homo sapiens
  misc_RNA (1)...(19): siRNA sense strand
agguaguguucgaggccua

SEQ ID NO: 2270134 - RNA, 19 nt, Homo sapiens
  misc_RNA (1)...(19): siRNA sense strand
acauggaccucgugggcuu

SEQ ID NO: 2270135 - RNA, 19 nt, Homo sapiens
  misc_RNA (1)...(19): siRNA sense strand
gggcggaagcagaggauag

SEQ ID NO: 2270136 - RNA, 19 nt, Homo sapiens
  misc_RNA (1)...(19): siRNA sense strand
gggcuagacacgggagaau

SEQ ID NO: 2270137 - RNA, 19 nt, Homo sapiens
  misc_RNA (1)...(19): siRNA sense strand
gaggagagccagcuggaga

SEQ ID NO: 2270138 - RNA, 19 nt, Homo sapiens
  misc_RNA (1)...(19): siRNA sense strand
gugcauugugaucgggaau

SEQ ID NO: 2270139 - RNA, 19 nt, Homo sapiens
  misc_RNA (1)...(19): siRNA sense strand
cugacuuccucuuggauau

SEQ ID NO: 2270140 - RNA, 19 nt, Homo sapiens
  misc_RNA (1)...(19): siRNA sense strand
ccuuccagcuacagaucaa

SEQ ID NO: 2270141 - RNA, 19 nt, Homo sapiens
  misc_RNA (1)...(19): siRNA sense strand
augcagaagugcugggaag

SEQ ID NO: 2270142 - RNA, 19 nt, Homo sapiens
  misc_RNA (1)...(19): siRNA sense strand
cccuaaugaugccgaggaa

SEQ ID NO: 2270143 - RNA, 19 nt, Homo sapiens
  misc_RNA (1)...(19): siRNA sense strand
guuccgaagaggagagcca

SEQ ID NO: 2270144 - RNA, 19 nt, Homo sapiens
  misc_RNA (1)...(19): siRNA sense strand
cuaaugaugccgaggaacu

SEQ ID NO: 2270145 - RNA, 19 nt, Homo sapiens
  misc_RNA (1)...(19): siRNA sense strand
acaugaaaggagacgucaa

SEQ ID NO: 2270146 - RNA, 19 nt, Homo sapiens
  misc_RNA (1)...(19): siRNA sense strand
ucgagagacuguugggcga

SEQ ID NO: 2270147 - RNA, 19 nt, Homo sapiens
  misc_RNA (1)...(19): siRNA sense strand
cggaaauaacugagaucac

SEQ ID NO: 2270148 - RNA, 19 nt, Homo sapiens
  misc_RNA (1)...(19): siRNA sense strand
agcugaagaucaugaguca

SEQ ID NO: 2270149 - RNA, 19 nt, Homo sapiens
  misc_RNA (1)...(19): siRNA sense strand
aggacgaaccagagccaga

SEQ ID NO: 2270150 - RNA, 19 nt, Homo sapiens
  misc_RNA (1)...(19): siRNA sense strand
aggaggagcaggaguuuga

SEQ ID NO: 2270151 - RNA, 19 nt, Homo sapiens
  misc_RNA (1)...(19): siRNA sense strand
ugaaaguggccgucaagau

SEQ ID NO: 2270152 - RNA, 19 nt, Homo sapiens
  misc_RNA (1)...(19): siRNA sense strand
gggacagggagguggauuc

SEQ ID NO: 2270153 - RNA, 19 nt, Homo sapiens
  misc_RNA (1)...(19): siRNA sense strand
gugaaggcaagcuggucaa

SEQ ID NO: 2270154 - RNA, 19 nt, Homo sapiens
  misc_RNA (1)...(19): siRNA sense strand
ugguggagccggugacuga

SEQ ID NO: 2270155 - RNA, 19 nt, Homo sapiens
  misc_RNA (1)...(19): siRNA sense strand
cguacugggaggaggagca

SEQ ID NO: 2270156 - RNA, 19 nt, Homo sapiens
  misc_RNA (1)...(19): siRNA sense strand
uggacuaccugcaccgcaa

SEQ ID NO: 2270157 - RNA, 19 nt, Homo sapiens
  misc_RNA (1)...(19): siRNA sense strand
ucaaauaugcagacaucga

SEQ ID NO: 2270158 - RNA, 19 nt, Homo sapiens
  misc_RNA (1)...(19): siRNA sense strand
agaacugcguccacagaga

SEQ ID NO: 2270159 - RNA, 19 nt, Homo sapiens
  misc_RNA (1)...(19): siRNA sense strand
gugcuggagcuaagugaga

SEQ ID NO: 2270160 - RNA, 19 nt, Homo sapiens
  misc_RNA (1)...(19): siRNA sense strand
aguuugagguggugagcac

SEQ ID NO: 2270161 - RNA, 19 nt, Homo sapiens
  misc_RNA (1)...(19): siRNA sense strand
ccuuuaaaguggauggcuc

SEQ ID NO: 2270162 - RNA, 19 nt, Homo sapiens
  misc_RNA (1)...(19): siRNA sense strand
gacuguugggcgaagguua

SEQ ID NO: 2270163 - RNA, 19 nt, Homo sapiens
  misc_RNA (1)...(19): siRNA sense strand
aguaccagcagguggauga

SEQ ID NO: 2270164 - RNA, 19 nt, Homo sapiens
  misc_RNA (1)...(19): siRNA sense strand
ggacaugaaaggagacguc

SEQ ID NO: 2270165 - RNA, 19 nt, Homo sapiens
  misc_RNA (1)...(19): siRNA sense strand
ucgggaaugagguggucaa

SEQ ID NO: 2270166 - RNA, 19 nt, Homo sapiens
  misc_RNA (1)...(19): siRNA sense strand
cuggaacaguugccggauu

SEQ ID NO: 2270167 - RNA, 19 nt, Homo sapiens
  misc_RNA (1)...(19): siRNA sense strand
ugguuauagucaugggaaa

SEQ ID NO: 2270168 - RNA, 19 nt, Homo sapiens
  misc_RNA (1)...(19): siRNA sense strand
ggcagagcuacguggauaa

SEQ ID NO: 2270169 - RNA, 19 nt, Homo sapiens
  misc_RNA (1)...(19): siRNA sense strand
acacuuaacaagaaagcau

SEQ ID NO: 2270170 - RNA, 19 nt, Homo sapiens
  misc_RNA (1)...(19): siRNA sense strand
gucuauacgucgaugguga

SEQ ID NO: 2270171 - RNA, 19 nt, Homo sapiens
  misc_RNA (1)...(19): siRNA sense strand
agcauuacgccaauagaaa

SEQ ID NO: 2270172 - RNA, 19 nt, Homo sapiens
  misc_RNA (1)...(19): siRNA sense strand
caauguggcugucggcaga

SEQ ID NO: 2270173 - RNA, 19 nt, Homo sapiens
  misc_RNA (1)...(19): siRNA sense strand
acaagaaagcauaugaacu

SEQ ID NO: 2270174 - RNA, 19 nt, Homo sapiens
  misc_RNA (1)...(19): siRNA sense strand
acgccaauagaaauagaua

SEQ ID NO: 2270175 - RNA, 19 nt, Homo sapiens
  misc_RNA (1)...(19): siRNA sense strand
cgccaauagaaauagauau

SEQ ID NO: 2270176 - RNA, 19 nt, Homo sapiens
  misc_RNA (1)...(19): siRNA sense strand
uuucagagcauuacgccaa

SEQ ID NO: 2270177 - RNA, 19 nt, Homo sapiens
  misc_RNA (1)...(19): siRNA sense strand
ggcagagcuacguggauaa

SEQ ID NO: 2270178 - RNA, 19 nt, Homo sapiens
  misc_RNA (1)...(19): siRNA sense strand
gucuauacgucgaugguga

SEQ ID NO: 2270179 - RNA, 19 nt, Homo sapiens
  misc_RNA (1)...(19): siRNA sense strand
agcauuacgccaauagaaa

SEQ ID NO: 2270180 - RNA, 19 nt, Homo sapiens
  misc_RNA (1)...(19): siRNA sense strand
caauguggcugucggcaga

SEQ ID NO: 2270181 - RNA, 19 nt, Homo sapiens
  misc_RNA (1)...(19): siRNA sense strand
acgccaauagaaauagaua

SEQ ID NO: 2270182 - RNA, 19 nt, Homo sapiens
  misc_RNA (1)...(19): siRNA sense strand
cgccaauagaaauagauau

SEQ ID NO: 2270183 - RNA, 19 nt, Homo sapiens
  misc_RNA (1)...(19): siRNA sense strand
uuucagagcauuacgccaa

SEQ ID NO: 2270184 - RNA, 19 nt, Homo sapiens
  misc_RNA (1)...(19): siRNA sense strand
ccuaugaacucuuggccaa

SEQ ID NO: 2270185 - RNA, 19 nt, Homo sapiens
  misc_RNA (1)...(19): siRNA sense strand
ugaaagacgugcugggcau

SEQ ID NO: 2270186 - RNA, 19 nt, Homo sapiens
  misc_RNA (1)...(19): siRNA sense strand
ucgugaagauggugcacaa

SEQ ID NO: 2270187 - RNA, 19 nt, Homo sapiens
  misc_RNA (1)...(19): siRNA sense strand
aggcauaccaccugaugaa

SEQ ID NO: 2270188 - RNA, 19 nt, Homo sapiens
  misc_RNA (1)...(19): siRNA sense strand
cugccaaagaucagggaca

SEQ ID NO: 2270189 - RNA, 19 nt, Homo sapiens
  misc_RNA (1)...(19): siRNA sense strand
ccaaugaggcaaagggaac

SEQ ID NO: 2270190 - RNA, 19 nt, Homo sapiens
  misc_RNA (1)...(19): siRNA sense strand
gccgagaccucaaggccaa

SEQ ID NO: 2270191 - RNA, 19 nt, Homo sapiens
  misc_RNA (1)...(19): siRNA sense strand
gcagaagggcacagggaag

SEQ ID NO: 2270192 - RNA, 19 nt, Homo sapiens
  misc_RNA (1)...(19): siRNA sense strand
gcucaugccaggagggaac

SEQ ID NO: 2270193 - RNA, 19 nt, Homo sapiens
  misc_RNA (1)...(19): siRNA sense strand
ccuuugaggauuggaauaa

SEQ ID NO: 2270194 - RNA, 19 nt, Homo sapiens
  misc_RNA (1)...(19): siRNA sense strand
ccucaaggccaagggaauu

SEQ ID NO: 2270195 - RNA, 19 nt, Homo sapiens
  misc_RNA (1)...(19): siRNA sense strand
aggaugcauuugaucgaaa

SEQ ID NO: 2270196 - RNA, 19 nt, Homo sapiens
  misc_RNA (1)...(19): siRNA sense strand
accucaaggccaagggaau

SEQ ID NO: 2270197 - RNA, 19 nt, Homo sapiens
  misc_RNA (1)...(19): siRNA sense strand
gccuuugaggauuggaaua

SEQ ID NO: 2270198 - RNA, 19 nt, Homo sapiens
  misc_RNA (1)...(19): siRNA sense strand
gccaaugaggcaaagggaa

SEQ ID NO: 2270199 - RNA, 19 nt, Homo sapiens
  misc_RNA (1)...(19): siRNA sense strand
ccaucuccgcccuggaaua

SEQ ID NO: 2270200 - RNA, 19 nt, Homo sapiens
  misc_RNA (1)...(19): siRNA sense strand
gcccagucccugaaagaga

SEQ ID NO: 2270201 - RNA, 19 nt, Homo sapiens
  misc_RNA (1)...(19): siRNA sense strand
gagcggagucaguggugga

SEQ ID NO: 2270202 - RNA, 19 nt, Homo sapiens
  misc_RNA (1)...(19): siRNA sense strand
uugaugauuucuuggccaa

SEQ ID NO: 2270203 - RNA, 19 nt, Homo sapiens
  misc_RNA (1)...(19): siRNA sense strand
gcugugacugggugggaga

SEQ ID NO: 2270204 - RNA, 19 nt, Homo sapiens
  misc_RNA (1)...(19): siRNA sense strand
uuggaauaagacagagcua

SEQ ID NO: 2270205 - RNA, 19 nt, Homo sapiens
  misc_RNA (1)...(19): siRNA sense strand
aggauuggaauaagacaga

SEQ ID NO: 2270206 - RNA, 19 nt, Homo sapiens
  misc_RNA (1)...(19): siRNA sense strand
uggaaaaggcugagcaaca

SEQ ID NO: 2270207 - RNA, 19 nt, Homo sapiens
  misc_RNA (1)...(19): siRNA sense strand
ggacauugugguaggggaa

SEQ ID NO: 2270208 - RNA, 19 nt, Homo sapiens
  misc_RNA (1)...(19): siRNA sense strand
cagaagcgguggaagccaa

SEQ ID NO: 2270209 - RNA, 19 nt, Homo sapiens
  misc_RNA (1)...(19): siRNA sense strand
gggccagauuuguggugga

SEQ ID NO: 2270210 - RNA, 19 nt, Homo sapiens
  misc_RNA (1)...(19): siRNA sense strand
ggccuuagcuguugcagga

SEQ ID NO: 2270211 - RNA, 19 nt, Homo sapiens
  misc_RNA (1)...(19): siRNA sense strand
gcuggaagcugcagaggac

SEQ ID NO: 2270212 - RNA, 19 nt, Homo sapiens
  misc_RNA (1)...(19): siRNA sense strand
cugcagaggacaucgcgua

SEQ ID NO: 2270213 - RNA, 19 nt, Homo sapiens
  misc_RNA (1)...(19): siRNA sense strand
uugcaggaggcguggugaa

SEQ ID NO: 2270214 - RNA, 19 nt, Homo sapiens
  misc_RNA (1)...(19): siRNA sense strand
cgacgaccuuacagagcga

SEQ ID NO: 2270215 - RNA, 19 nt, Homo sapiens
  misc_RNA (1)...(19): siRNA sense strand
ucacagaagcgguggaagc

SEQ ID NO: 2270216 - RNA, 19 nt, Homo sapiens
  misc_RNA (1)...(19): siRNA sense strand
gguggaaaaggcugagcaa

SEQ ID NO: 2270217 - RNA, 19 nt, Homo sapiens
  misc_RNA (1)...(19): siRNA sense strand
guauaaggaagaaggccua

SEQ ID NO: 2270218 - RNA, 19 nt, Homo sapiens
  misc_RNA (1)...(19): siRNA sense strand
ccaaaauguauaaggaaga

SEQ ID NO: 2270219 - RNA, 19 nt, Homo sapiens
  misc_RNA (1)...(19): siRNA sense strand
guucaaagccagagcagcu

SEQ ID NO: 2270220 - RNA, 19 nt, Homo sapiens
  misc_RNA (1)...(19): siRNA sense strand
auuuaaagguguauggaag

SEQ ID NO: 2270221 - RNA, 19 nt, Homo sapiens
  misc_RNA (1)...(19): siRNA sense strand
aguuacacuuaaagaggau

SEQ ID NO: 2270222 - RNA, 19 nt, Homo sapiens
  misc_RNA (1)...(19): siRNA sense strand
cuguugaagcacuguacaa

SEQ ID NO: 2270223 - RNA, 19 nt, Homo sapiens
  misc_RNA (1)...(19): siRNA sense strand
caauaugcuuggagaggag

SEQ ID NO: 2270224 - RNA, 19 nt, Homo sapiens
  misc_RNA (1)...(19): siRNA sense strand
cuuugaacguacuguugaa

SEQ ID NO: 2270225 - RNA, 19 nt, Homo sapiens
  misc_RNA (1)...(19): siRNA sense strand
acuuggauuuaaaggugua

SEQ ID NO: 2270226 - RNA, 19 nt, Homo sapiens
  misc_RNA (1)...(19): siRNA sense strand
cccaaaaguacaagggcau

SEQ ID NO: 2270227 - RNA, 19 nt, Homo sapiens
  misc_RNA (1)...(19): siRNA sense strand
acuuaaagaggaugguguu

SEQ ID NO: 2270228 - RNA, 19 nt, Homo sapiens
  misc_RNA (1)...(19): siRNA sense strand
gugcugaauucuuugcuga

SEQ ID NO: 2270229 - RNA, 19 nt, Homo sapiens
  misc_RNA (1)...(19): siRNA sense strand
gccaacacuuugagggaug

SEQ ID NO: 2270230 - RNA, 19 nt, Homo sapiens
  misc_RNA (1)...(19): siRNA sense strand
guauaaggaagaaggccua

SEQ ID NO: 2270231 - RNA, 19 nt, Homo sapiens
  misc_RNA (1)...(19): siRNA sense strand
ccaaaauguauaaggaaga

SEQ ID NO: 2270232 - RNA, 19 nt, Homo sapiens
  misc_RNA (1)...(19): siRNA sense strand
guucaaagccagagcagcu

SEQ ID NO: 2270233 - RNA, 19 nt, Homo sapiens
  misc_RNA (1)...(19): siRNA sense strand
auuuaaagguguauggaag

SEQ ID NO: 2270234 - RNA, 19 nt, Homo sapiens
  misc_RNA (1)...(19): siRNA sense strand
aguuacacuuaaagaggau

SEQ ID NO: 2270235 - RNA, 19 nt, Homo sapiens
  misc_RNA (1)...(19): siRNA sense strand
cuguugaagcacuguacaa

SEQ ID NO: 2270236 - RNA, 19 nt, Homo sapiens
  misc_RNA (1)...(19): siRNA sense strand
caauaugcuuggagaggag

SEQ ID NO: 2270237 - RNA, 19 nt, Homo sapiens
  misc_RNA (1)...(19): siRNA sense strand
cuuugaacguacuguugaa

SEQ ID NO: 2270238 - RNA, 19 nt, Homo sapiens
  misc_RNA (1)...(19): siRNA sense strand
acuuggauuuaaaggugua

SEQ ID NO: 2270239 - RNA, 19 nt, Homo sapiens
  misc_RNA (1)...(19): siRNA sense strand
cccaaaaguacaagggcau

SEQ ID NO: 2270240 - RNA, 19 nt, Homo sapiens
  misc_RNA (1)...(19): siRNA sense strand
acuuaaagaggaugguguu

SEQ ID NO: 2270241 - RNA, 19 nt, Homo sapiens
  misc_RNA (1)...(19): siRNA sense strand
gugcugaauucuuugcuga

SEQ ID NO: 2270242 - RNA, 19 nt, Homo sapiens
  misc_RNA (1)...(19): siRNA sense strand
gccaacacuuugagggaug

SEQ ID NO: 2270243 - RNA, 19 nt, Homo sapiens
  misc_RNA (1)...(19): siRNA sense strand
cauaauuggaggagaggga

SEQ ID NO: 2270244 - RNA, 19 nt, Homo sapiens
  misc_RNA (1)...(19): siRNA sense strand
uagaggaggagcugggaau

SEQ ID NO: 2270245 - RNA, 19 nt, Homo sapiens
  misc_RNA (1)...(19): siRNA sense strand
cuuuagaacacaaggaugu

SEQ ID NO: 2270246 - RNA, 19 nt, Homo sapiens
  misc_RNA (1)...(19): siRNA sense strand
caguaaaaucuuuguguga

SEQ ID NO: 2270247 - RNA, 19 nt, Homo sapiens
  misc_RNA (1)...(19): siRNA sense strand
cuguguugccaauggacaa

SEQ ID NO: 2270248 - RNA, 19 nt, Homo sapiens
  misc_RNA (1)...(19): siRNA sense strand
aggagagggaccaaagaga

SEQ ID NO: 2270249 - RNA, 19 nt, Homo sapiens
  misc_RNA (1)...(19): siRNA sense strand
uuggaagaaguucgggaaa

SEQ ID NO: 2270250 - RNA, 19 nt, Homo sapiens
  misc_RNA (1)...(19): siRNA sense strand
gggaaagauaccagcugca

SEQ ID NO: 2270251 - RNA, 19 nt, Homo sapiens
  misc_RNA (1)...(19): siRNA sense strand
agagaaucauuuuggaaga

SEQ ID NO: 2270252 - RNA, 19 nt, Homo sapiens
  misc_RNA (1)...(19): siRNA sense strand
uuucauaauuggaggagag

SEQ ID NO: 2270253 - RNA, 19 nt, Homo sapiens
  misc_RNA (1)...(19): siRNA sense strand
ggguaucaguggaagcugu

SEQ ID NO: 2270254 - RNA, 19 nt, Homo sapiens
  misc_RNA (1)...(19): siRNA sense strand
ggacauugccagcuccaga

SEQ ID NO: 2270255 - RNA, 19 nt, Homo sapiens
  misc_RNA (1)...(19): siRNA sense strand
cugcauggcgaucguggaa

SEQ ID NO: 2270256 - RNA, 19 nt, Homo sapiens
  misc_RNA (1)...(19): siRNA sense strand
uagaggaggagcugggaau

SEQ ID NO: 2270257 - RNA, 19 nt, Homo sapiens
  misc_RNA (1)...(19): siRNA sense strand
uagaggaggagcugggaau

SEQ ID NO: 2270258 - RNA, 19 nt, Homo sapiens
  misc_RNA (1)...(19): siRNA sense strand
ucucaauauuggaaacaca

SEQ ID NO: 2270259 - RNA, 19 nt, Homo sapiens
  misc_RNA (1)...(19): siRNA sense strand
guucaguagaaauggaguu

SEQ ID NO: 2270260 - RNA, 19 nt, Homo sapiens
  misc_RNA (1)...(19): siRNA sense strand
ucauuaucacacaagguaa

SEQ ID NO: 2270261 - RNA, 19 nt, Homo sapiens
  misc_RNA (1)...(19): siRNA sense strand
guuacauccauaugggaga

SEQ ID NO: 2270262 - RNA, 19 nt, Homo sapiens
  misc_RNA (1)...(19): siRNA sense strand
ccauaugggagaauagucu

SEQ ID NO: 2270263 - RNA, 19 nt, Homo sapiens
  misc_RNA (1)...(19): siRNA sense strand
ucucaauauuggaaacaca

SEQ ID NO: 2270264 - RNA, 19 nt, Homo sapiens
  misc_RNA (1)...(19): siRNA sense strand
guucaguagaaauggaguu

SEQ ID NO: 2270265 - RNA, 19 nt, Homo sapiens
  misc_RNA (1)...(19): siRNA sense strand
ucauuaucacacaagguaa

SEQ ID NO: 2270266 - RNA, 19 nt, Homo sapiens
  misc_RNA (1)...(19): siRNA sense strand
guuacauccauaugggaga

SEQ ID NO: 2270267 - RNA, 19 nt, Homo sapiens
  misc_RNA (1)...(19): siRNA sense strand
ccauaugggagaauagucu

SEQ ID NO: 2270268 - RNA, 19 nt, Homo sapiens
  misc_RNA (1)...(19): siRNA sense strand
ggucaagaucagaggcauu

SEQ ID NO: 2270269 - RNA, 19 nt, Homo sapiens
  misc_RNA (1)...(19): siRNA sense strand
aggcagcaguggagagauu

SEQ ID NO: 2270270 - RNA, 19 nt, Homo sapiens
  misc_RNA (1)...(19): siRNA sense strand
ccaagauggccaagaagaa

SEQ ID NO: 2270271 - RNA, 19 nt, Homo sapiens
  misc_RNA (1)...(19): siRNA sense strand
aagaaaucucugauggaua

SEQ ID NO: 2270272 - RNA, 19 nt, Homo sapiens
  misc_RNA (1)...(19): siRNA sense strand
cgacagacacaaugacaau

SEQ ID NO: 2270273 - RNA, 19 nt, Homo sapiens
  misc_RNA (1)...(19): siRNA sense strand
agcaagaaauuguggccaa

SEQ ID NO: 2270274 - RNA, 19 nt, Homo sapiens
  misc_RNA (1)...(19): siRNA sense strand
guucugaguccaagggcaa

SEQ ID NO: 2270275 - RNA, 19 nt, Homo sapiens
  misc_RNA (1)...(19): siRNA sense strand
cugugaaauuugaaccaua

SEQ ID NO: 2270276 - RNA, 19 nt, Homo sapiens
  misc_RNA (1)...(19): siRNA sense strand
cuuuaaacauggugaugau

SEQ ID NO: 2270277 - RNA, 19 nt, Homo sapiens
  misc_RNA (1)...(19): siRNA sense strand
ucaaacaaggagagaaaca

SEQ ID NO: 2270278 - RNA, 19 nt, Homo sapiens
  misc_RNA (1)...(19): siRNA sense strand
gcauuaauaaagagagagu

SEQ ID NO: 2270279 - RNA, 19 nt, Homo sapiens
  misc_RNA (1)...(19): siRNA sense strand
ccggaguaccuguggaaga

SEQ ID NO: 2270280 - RNA, 19 nt, Homo sapiens
  misc_RNA (1)...(19): siRNA sense strand
gugaaagacgccacgacaa

SEQ ID NO: 2270281 - RNA, 19 nt, Homo sapiens
  misc_RNA (1)...(19): siRNA sense strand
cccuagacgaggugaggaa

SEQ ID NO: 2270282 - RNA, 19 nt, Homo sapiens
  misc_RNA (1)...(19): siRNA sense strand
ggauauucccgaaagccaa

SEQ ID NO: 2270283 - RNA, 19 nt, Homo sapiens
  misc_RNA (1)...(19): siRNA sense strand
cgguaaagcuccagcacug

SEQ ID NO: 2270284 - RNA, 19 nt, Homo sapiens
  misc_RNA (1)...(19): siRNA sense strand
gcaagcaauuggaggcgau

SEQ ID NO: 2270285 - RNA, 19 nt, Homo sapiens
  misc_RNA (1)...(19): siRNA sense strand
gcgccauccugcagagcuu

SEQ ID NO: 2270286 - RNA, 19 nt, Homo sapiens
  misc_RNA (1)...(19): siRNA sense strand
gggagcauuuaaagaugaa

SEQ ID NO: 2270287 - RNA, 19 nt, Homo sapiens
  misc_RNA (1)...(19): siRNA sense strand
gcaacguggagcagaugaa

SEQ ID NO: 2270288 - RNA, 19 nt, Homo sapiens
  misc_RNA (1)...(19): siRNA sense strand
gccaaagcgaacaggauuu

SEQ ID NO: 2270289 - RNA, 19 nt, Homo sapiens
  misc_RNA (1)...(19): siRNA sense strand
ugggaagggagaagaccaa

SEQ ID NO: 2270290 - RNA, 19 nt, Homo sapiens
  misc_RNA (1)...(19): siRNA sense strand
agcaaagcacagugggcaa

SEQ ID NO: 2270291 - RNA, 19 nt, Homo sapiens
  misc_RNA (1)...(19): siRNA sense strand
aaccuuuguucuuggaaua

SEQ ID NO: 2270292 - RNA, 19 nt, Homo sapiens
  misc_RNA (1)...(19): siRNA sense strand
gcgacagacacaaugacaa

SEQ ID NO: 2270293 - RNA, 19 nt, Homo sapiens
  misc_RNA (1)...(19): siRNA sense strand
uucagaaacuggagagcuu

SEQ ID NO: 2270294 - RNA, 19 nt, Homo sapiens
  misc_RNA (1)...(19): siRNA sense strand
uaauaaagagagagugcca

SEQ ID NO: 2270295 - RNA, 19 nt, Homo sapiens
  misc_RNA (1)...(19): siRNA sense strand
auaugauccuggacugaaa

SEQ ID NO: 2270296 - RNA, 19 nt, Homo sapiens
  misc_RNA (1)...(19): siRNA sense strand
aaucacuggcucaaagaaa

SEQ ID NO: 2270297 - RNA, 19 nt, Homo sapiens
  misc_RNA (1)...(19): siRNA sense strand
agccauugcaguucagaaa

SEQ ID NO: 2270298 - RNA, 19 nt, Homo sapiens
  misc_RNA (1)...(19): siRNA sense strand
auaaagagagagugccauu

SEQ ID NO: 2270299 - RNA, 19 nt, Homo sapiens
  misc_RNA (1)...(19): siRNA sense strand
augaguaccuggugggcga

SEQ ID NO: 2270300 - RNA, 19 nt, Homo sapiens
  misc_RNA (1)...(19): siRNA sense strand
cggcaaggaccacgagagu

SEQ ID NO: 2270301 - RNA, 19 nt, Homo sapiens
  misc_RNA (1)...(19): siRNA sense strand
gagagaaacauucagccua

SEQ ID NO: 2270302 - RNA, 19 nt, Homo sapiens
  misc_RNA (1)...(19): siRNA sense strand
ugcuuuggauguuggguua

SEQ ID NO: 2270303 - RNA, 19 nt, Homo sapiens
  misc_RNA (1)...(19): siRNA sense strand
aaaucaaagacuugcccaa

SEQ ID NO: 2270304 - RNA, 19 nt, Homo sapiens
  misc_RNA (1)...(19): siRNA sense strand
ggcagugguacgagaucua

SEQ ID NO: 2270305 - RNA, 19 nt, Homo sapiens
  misc_RNA (1)...(19): siRNA sense strand
cccaacaaguccaaguaau

SEQ ID NO: 2270306 - RNA, 19 nt, Homo sapiens
  misc_RNA (1)...(19): siRNA sense strand
aagcaggagcgcuggcaau

SEQ ID NO: 2270307 - RNA, 19 nt, Homo sapiens
  misc_RNA (1)...(19): siRNA sense strand
uggagagcuuggaggacga

SEQ ID NO: 2270308 - RNA, 19 nt, Homo sapiens
  misc_RNA (1)...(19): siRNA sense strand
uuucaggacaucuguguua

SEQ ID NO: 2270309 - RNA, 19 nt, Homo sapiens
  misc_RNA (1)...(19): siRNA sense strand
cgucaguucccaaguuauu

SEQ ID NO: 2270310 - RNA, 19 nt, Homo sapiens
  misc_RNA (1)...(19): siRNA sense strand
uaggaaugaucgagauugu

SEQ ID NO: 2270311 - RNA, 19 nt, Homo sapiens
  misc_RNA (1)...(19): siRNA sense strand
ggaaagaagacaagcccac

SEQ ID NO: 2270312 - RNA, 19 nt, Homo sapiens
  misc_RNA (1)...(19): siRNA sense strand
agaacggagaagagauuca

SEQ ID NO: 2270313 - RNA, 19 nt, Homo sapiens
  misc_RNA (1)...(19): siRNA sense strand
cuccagaucuacugcggua

SEQ ID NO: 2270314 - RNA, 19 nt, Homo sapiens
  misc_RNA (1)...(19): siRNA sense strand
ugguccaggcugugaaauu

SEQ ID NO: 2270315 - RNA, 19 nt, Homo sapiens
  misc_RNA (1)...(19): siRNA sense strand
ccaacaaguccaaguaauc

SEQ ID NO: 2270316 - RNA, 19 nt, Homo sapiens
  misc_RNA (1)...(19): siRNA sense strand
gcaucaaacaaggagagaa

SEQ ID NO: 2270317 - RNA, 19 nt, Homo sapiens
  misc_RNA (1)...(19): siRNA sense strand
agaagaaaucucugaugga

SEQ ID NO: 2270318 - RNA, 19 nt, Homo sapiens
  misc_RNA (1)...(19): siRNA sense strand
uccagaaauuucaggacau

SEQ ID NO: 2270319 - RNA, 19 nt, Homo sapiens
  misc_RNA (1)...(19): siRNA sense strand
caagcaaagaagacauuga

SEQ ID NO: 2270320 - RNA, 19 nt, Homo sapiens
  misc_RNA (1)...(19): siRNA sense strand
ccagaucuacugcgguaaa

SEQ ID NO: 2270321 - RNA, 19 nt, Homo sapiens
  misc_RNA (1)...(19): siRNA sense strand
gggagaagaccaaggaagc

SEQ ID NO: 2270322 - RNA, 19 nt, Homo sapiens
  misc_RNA (1)...(19): siRNA sense strand
caucaaacuacguggaaga

SEQ ID NO: 2270323 - RNA, 19 nt, Homo sapiens
  misc_RNA (1)...(19): siRNA sense strand
cugagaaauacgugaacaa

SEQ ID NO: 2270324 - RNA, 19 nt, Homo sapiens
  misc_RNA (1)...(19): siRNA sense strand
agacagaguuuguggugga

SEQ ID NO: 2270325 - RNA, 19 nt, Homo sapiens
  misc_RNA (1)...(19): siRNA sense strand
ugaacaaggccaaaggcaa

SEQ ID NO: 2270326 - RNA, 19 nt, Homo sapiens
  misc_RNA (1)...(19): siRNA sense strand
cagccaaggaccugaagaa

SEQ ID NO: 2270327 - RNA, 19 nt, Homo sapiens
  misc_RNA (1)...(19): siRNA sense strand
gggcugagggcaagaucaa

SEQ ID NO: 2270328 - RNA, 19 nt, Homo sapiens
  misc_RNA (1)...(19): siRNA sense strand
gggaagaccucacgggacu

SEQ ID NO: 2270329 - RNA, 19 nt, Homo sapiens
  misc_RNA (1)...(19): siRNA sense strand
gcaacgaggaugaggagga

SEQ ID NO: 2270330 - RNA, 19 nt, Homo sapiens
  misc_RNA (1)...(19): siRNA sense strand
ccaagaaggacucggguca

SEQ ID NO: 2270331 - RNA, 19 nt, Homo sapiens
  misc_RNA (1)...(19): siRNA sense strand
gagagaucgaggagccaua

SEQ ID NO: 2270332 - RNA, 19 nt, Homo sapiens
  misc_RNA (1)...(19): siRNA sense strand
agacagugaugcuagggaa

SEQ ID NO: 2270333 - RNA, 19 nt, Homo sapiens
  misc_RNA (1)...(19): siRNA sense strand
ggaucggaaucgugaggau

SEQ ID NO: 2270334 - RNA, 19 nt, Homo sapiens
  misc_RNA (1)...(19): siRNA sense strand
gcaagaugaagcugcgcua

SEQ ID NO: 2270335 - RNA, 19 nt, Homo sapiens
  misc_RNA (1)...(19): siRNA sense strand
ucaccaagcccguggagau

SEQ ID NO: 2270336 - RNA, 19 nt, Homo sapiens
  misc_RNA (1)...(19): siRNA sense strand
aggaugaggaggagcccaa

SEQ ID NO: 2270337 - RNA, 19 nt, Homo sapiens
  misc_RNA (1)...(19): siRNA sense strand
acgaggaggcacuggagaa

SEQ ID NO: 2270338 - RNA, 19 nt, Homo sapiens
  misc_RNA (1)...(19): siRNA sense strand
gaacaaggccaaaggcaag

SEQ ID NO: 2270339 - RNA, 19 nt, Homo sapiens
  misc_RNA (1)...(19): siRNA sense strand
gccaaggaccugaagaaca

SEQ ID NO: 2270340 - RNA, 19 nt, Homo sapiens
  misc_RNA (1)...(19): siRNA sense strand
ucacugaagggaagauaau

SEQ ID NO: 2270341 - RNA, 19 nt, Homo sapiens
  misc_RNA (1)...(19): siRNA sense strand
acauguggaucaagggcuu

SEQ ID NO: 2270342 - RNA, 19 nt, Homo sapiens
  misc_RNA (1)...(19): siRNA sense strand
acuacaaggcccagaggga

SEQ ID NO: 2270343 - RNA, 19 nt, Homo sapiens
  misc_RNA (1)...(19): siRNA sense strand
auaauggaacggaggaaga

SEQ ID NO: 2270344 - RNA, 19 nt, Homo sapiens
  misc_RNA (1)...(19): siRNA sense strand
gagaacaguguguggaacu

SEQ ID NO: 2270345 - RNA, 19 nt, Homo sapiens
  misc_RNA (1)...(19): siRNA sense strand
ccaacgcccacgagagcaa

SEQ ID NO: 2270346 - RNA, 19 nt, Homo sapiens
  misc_RNA (1)...(19): siRNA sense strand
ggacucgggucaauggaga

SEQ ID NO: 2270347 - RNA, 19 nt, Homo sapiens
  misc_RNA (1)...(19): siRNA sense strand
cgcuauaccgcaagaugaa

SEQ ID NO: 2270348 - RNA, 19 nt, Homo sapiens
  misc_RNA (1)...(19): siRNA sense strand
ccuuugaugaagagaagau

SEQ ID NO: 2270349 - RNA, 19 nt, Homo sapiens
  misc_RNA (1)...(19): siRNA sense strand
aggccaaaggcaagaaguu

SEQ ID NO: 2270350 - RNA, 19 nt, Homo sapiens
  misc_RNA (1)...(19): siRNA sense strand
agauaauggaacggaggaa

SEQ ID NO: 2270351 - RNA, 19 nt, Homo sapiens
  misc_RNA (1)...(19): siRNA sense strand
aggaggcacuggagaagau

SEQ ID NO: 2270352 - RNA, 19 nt, Homo sapiens
  misc_RNA (1)...(19): siRNA sense strand
gauacagagcagugccuuu

SEQ ID NO: 2270353 - RNA, 19 nt, Homo sapiens
  misc_RNA (1)...(19): siRNA sense strand
ugauguacucugagaacga

SEQ ID NO: 2270354 - RNA, 19 nt, Homo sapiens
  misc_RNA (1)...(19): siRNA sense strand
agaauguggagaagcaaga

SEQ ID NO: 2270355 - RNA, 19 nt, Homo sapiens
  misc_RNA (1)...(19): siRNA sense strand
acguggaagagauggucaa

SEQ ID NO: 2270356 - RNA, 19 nt, Homo sapiens
  misc_RNA (1)...(19): siRNA sense strand
guccugagggcaagaacaa

SEQ ID NO: 2270357 - RNA, 19 nt, Homo sapiens
  misc_RNA (1)...(19): siRNA sense strand
cugaggaugaagugaacau

SEQ ID NO: 2270358 - RNA, 19 nt, Homo sapiens
  misc_RNA (1)...(19): siRNA sense strand
aagagaacaguguguggaa

SEQ ID NO: 2270359 - RNA, 19 nt, Homo sapiens
  misc_RNA (1)...(19): siRNA sense strand
ccagcagugaccagggcaa

SEQ ID NO: 2270360 - RNA, 19 nt, Homo sapiens
  misc_RNA (1)...(19): siRNA sense strand
augagaaacacccgcuaua

SEQ ID NO: 2270361 - RNA, 19 nt, Homo sapiens
  misc_RNA (1)...(19): siRNA sense strand
ccaaagaauggccgaggca

SEQ ID NO: 2270362 - RNA, 19 nt, Homo sapiens
  misc_RNA (1)...(19): siRNA sense strand
ccgcuauaccgcaagauga

SEQ ID NO: 2270363 - RNA, 19 nt, Homo sapiens
  misc_RNA (1)...(19): siRNA sense strand
cugacaagccuaugcagau

SEQ ID NO: 2270364 - RNA, 19 nt, Homo sapiens
  misc_RNA (1)...(19): siRNA sense strand
gaagauuggcacagaacgu

SEQ ID NO: 2270365 - RNA, 19 nt, Homo sapiens
  misc_RNA (1)...(19): siRNA sense strand
ggaauggaauuucgccuga

SEQ ID NO: 2270366 - RNA, 19 nt, Homo sapiens
  misc_RNA (1)...(19): siRNA sense strand
ccaucaacgaggaggcacu

SEQ ID NO: 2270367 - RNA, 19 nt, Homo sapiens
  misc_RNA (1)...(19): siRNA sense strand
gggacuacggagggaagaa

SEQ ID NO: 2270368 - RNA, 19 nt, Homo sapiens
  misc_RNA (1)...(19): siRNA sense strand
gcgccaucauccagaaugu

SEQ ID NO: 2270369 - RNA, 19 nt, Homo sapiens
  misc_RNA (1)...(19): siRNA sense strand
cauacuucuuccuggauga

SEQ ID NO: 2270370 - RNA, 19 nt, Homo sapiens
  misc_RNA (1)...(19): siRNA sense strand
gcccggacaccaugaacaa

SEQ ID NO: 2270371 - RNA, 19 nt, Homo sapiens
  misc_RNA (1)...(19): siRNA sense strand
guucugaccagcagcaaga

SEQ ID NO: 2270372 - RNA, 19 nt, Homo sapiens
  misc_RNA (1)...(19): siRNA sense strand
ucagcuacuaugagaaaca

SEQ ID NO: 2270373 - RNA, 19 nt, Homo sapiens
  misc_RNA (1)...(19): siRNA sense strand
uaacuuggcugauggagga

SEQ ID NO: 2270374 - RNA, 19 nt, Homo sapiens
  misc_RNA (1)...(19): siRNA sense strand
uggaggacccugugaacca

SEQ ID NO: 2270375 - RNA, 19 nt, Homo sapiens
  misc_RNA (1)...(19): siRNA sense strand
acgagagcaaagaguggua

SEQ ID NO: 2270376 - RNA, 19 nt, Homo sapiens
  misc_RNA (1)...(19): siRNA sense strand
ccauccguccugagggcaa

SEQ ID NO: 2270377 - RNA, 19 nt, Homo sapiens
  misc_RNA (1)...(19): siRNA sense strand
caagcagaagacagaguuu

SEQ ID NO: 2270378 - RNA, 19 nt, Homo sapiens
  misc_RNA (1)...(19): siRNA sense strand
gaguuugagaugcgacuuu

SEQ ID NO: 2270379 - RNA, 19 nt, Homo sapiens
  misc_RNA (1)...(19): siRNA sense strand
gggaggacgagcugaccuu

SEQ ID NO: 2270380 - RNA, 19 nt, Homo sapiens
  misc_RNA (1)...(19): siRNA sense strand
agagggagcacuuggacga

SEQ ID NO: 2270381 - RNA, 19 nt, Homo sapiens
  misc_RNA (1)...(19): siRNA sense strand
caucaaacuacguggaaga

SEQ ID NO: 2270382 - RNA, 19 nt, Homo sapiens
  misc_RNA (1)...(19): siRNA sense strand
cugagaaauacgugaacaa

SEQ ID NO: 2270383 - RNA, 19 nt, Homo sapiens
  misc_RNA (1)...(19): siRNA sense strand
agacagaguuuguggugga

SEQ ID NO: 2270384 - RNA, 19 nt, Homo sapiens
  misc_RNA (1)...(19): siRNA sense strand
ugaacaaggccaaaggcaa

SEQ ID NO: 2270385 - RNA, 19 nt, Homo sapiens
  misc_RNA (1)...(19): siRNA sense strand
cagccaaggaccugaagaa

SEQ ID NO: 2270386 - RNA, 19 nt, Homo sapiens
  misc_RNA (1)...(19): siRNA sense strand
gggcugagggcaagaucaa

SEQ ID NO: 2270387 - RNA, 19 nt, Homo sapiens
  misc_RNA (1)...(19): siRNA sense strand
gggaagaccucacgggacu

SEQ ID NO: 2270388 - RNA, 19 nt, Homo sapiens
  misc_RNA (1)...(19): siRNA sense strand
gcaacgaggaugaggagga

SEQ ID NO: 2270389 - RNA, 19 nt, Homo sapiens
  misc_RNA (1)...(19): siRNA sense strand
ccaagaaggacucggguca

SEQ ID NO: 2270390 - RNA, 19 nt, Homo sapiens
  misc_RNA (1)...(19): siRNA sense strand
gagagaucgaggagccaua

SEQ ID NO: 2270391 - RNA, 19 nt, Homo sapiens
  misc_RNA (1)...(19): siRNA sense strand
agacagugaugcuagggaa

SEQ ID NO: 2270392 - RNA, 19 nt, Homo sapiens
  misc_RNA (1)...(19): siRNA sense strand
ggaucggaaucgugaggau

SEQ ID NO: 2270393 - RNA, 19 nt, Homo sapiens
  misc_RNA (1)...(19): siRNA sense strand
gcaagaugaagcugcgcua

SEQ ID NO: 2270394 - RNA, 19 nt, Homo sapiens
  misc_RNA (1)...(19): siRNA sense strand
ucaccaagcccguggagau

SEQ ID NO: 2270395 - RNA, 19 nt, Homo sapiens
  misc_RNA (1)...(19): siRNA sense strand
aggaugaggaggagcccaa

SEQ ID NO: 2270396 - RNA, 19 nt, Homo sapiens
  misc_RNA (1)...(19): siRNA sense strand
acgaggaggcacuggagaa

SEQ ID NO: 2270397 - RNA, 19 nt, Homo sapiens
  misc_RNA (1)...(19): siRNA sense strand
gaacaaggccaaaggcaag

SEQ ID NO: 2270398 - RNA, 19 nt, Homo sapiens
  misc_RNA (1)...(19): siRNA sense strand
gccaaggaccugaagaaca

SEQ ID NO: 2270399 - RNA, 19 nt, Homo sapiens
  misc_RNA (1)...(19): siRNA sense strand
ucacugaagggaagauaau

SEQ ID NO: 2270400 - RNA, 19 nt, Homo sapiens
  misc_RNA (1)...(19): siRNA sense strand
acauguggaucaagggcuu

SEQ ID NO: 2270401 - RNA, 19 nt, Homo sapiens
  misc_RNA (1)...(19): siRNA sense strand
acuacaaggcccagaggga

SEQ ID NO: 2270402 - RNA, 19 nt, Homo sapiens
  misc_RNA (1)...(19): siRNA sense strand
auaauggaacggaggaaga

SEQ ID NO: 2270403 - RNA, 19 nt, Homo sapiens
  misc_RNA (1)...(19): siRNA sense strand
gagaacaguguguggaacu

SEQ ID NO: 2270404 - RNA, 19 nt, Homo sapiens
  misc_RNA (1)...(19): siRNA sense strand
ccaacgcccacgagagcaa

SEQ ID NO: 2270405 - RNA, 19 nt, Homo sapiens
  misc_RNA (1)...(19): siRNA sense strand
ggacucgggucaauggaga

SEQ ID NO: 2270406 - RNA, 19 nt, Homo sapiens
  misc_RNA (1)...(19): siRNA sense strand
cgcuauaccgcaagaugaa

SEQ ID NO: 2270407 - RNA, 19 nt, Homo sapiens
  misc_RNA (1)...(19): siRNA sense strand
ccuuugaugaagagaagau

SEQ ID NO: 2270408 - RNA, 19 nt, Homo sapiens
  misc_RNA (1)...(19): siRNA sense strand
aggccaaaggcaagaaguu

SEQ ID NO: 2270409 - RNA, 19 nt, Homo sapiens
  misc_RNA (1)...(19): siRNA sense strand
agauaauggaacggaggaa

SEQ ID NO: 2270410 - RNA, 19 nt, Homo sapiens
  misc_RNA (1)...(19): siRNA sense strand
aggaggcacuggagaagau

SEQ ID NO: 2270411 - RNA, 19 nt, Homo sapiens
  misc_RNA (1)...(19): siRNA sense strand
gauacagagcagugccuuu

SEQ ID NO: 2270412 - RNA, 19 nt, Homo sapiens
  misc_RNA (1)...(19): siRNA sense strand
ugauguacucugagaacga

SEQ ID NO: 2270413 - RNA, 19 nt, Homo sapiens
  misc_RNA (1)...(19): siRNA sense strand
agaauguggagaagcaaga

SEQ ID NO: 2270414 - RNA, 19 nt, Homo sapiens
  misc_RNA (1)...(19): siRNA sense strand
acguggaagagauggucaa

SEQ ID NO: 2270415 - RNA, 19 nt, Homo sapiens
  misc_RNA (1)...(19): siRNA sense strand
guccugagggcaagaacaa

SEQ ID NO: 2270416 - RNA, 19 nt, Homo sapiens
  misc_RNA (1)...(19): siRNA sense strand
cugaggaugaagugaacau

SEQ ID NO: 2270417 - RNA, 19 nt, Homo sapiens
  misc_RNA (1)...(19): siRNA sense strand
aagagaacaguguguggaa

SEQ ID NO: 2270418 - RNA, 19 nt, Homo sapiens
  misc_RNA (1)...(19): siRNA sense strand
ccagcagugaccagggcaa

SEQ ID NO: 2270419 - RNA, 19 nt, Homo sapiens
  misc_RNA (1)...(19): siRNA sense strand
augagaaacacccgcuaua

SEQ ID NO: 2270420 - RNA, 19 nt, Homo sapiens
  misc_RNA (1)...(19): siRNA sense strand
ccaaagaauggccgaggca

SEQ ID NO: 2270421 - RNA, 19 nt, Homo sapiens
  misc_RNA (1)...(19): siRNA sense strand
ccgcuauaccgcaagauga

SEQ ID NO: 2270422 - RNA, 19 nt, Homo sapiens
  misc_RNA (1)...(19): siRNA sense strand
cugacaagccuaugcagau

SEQ ID NO: 2270423 - RNA, 19 nt, Homo sapiens
  misc_RNA (1)...(19): siRNA sense strand
gaagauuggcacagaacgu

SEQ ID NO: 2270424 - RNA, 19 nt, Homo sapiens
  misc_RNA (1)...(19): siRNA sense strand
ggaauggaauuucgccuga

SEQ ID NO: 2270425 - RNA, 19 nt, Homo sapiens
  misc_RNA (1)...(19): siRNA sense strand
ccaucaacgaggaggcacu

SEQ ID NO: 2270426 - RNA, 19 nt, Homo sapiens
  misc_RNA (1)...(19): siRNA sense strand
gggacuacggagggaagaa

SEQ ID NO: 2270427 - RNA, 19 nt, Homo sapiens
  misc_RNA (1)...(19): siRNA sense strand
gcgccaucauccagaaugu

SEQ ID NO: 2270428 - RNA, 19 nt, Homo sapiens
  misc_RNA (1)...(19): siRNA sense strand
cauacuucuuccuggauga

SEQ ID NO: 2270429 - RNA, 19 nt, Homo sapiens
  misc_RNA (1)...(19): siRNA sense strand
gcccggacaccaugaacaa

SEQ ID NO: 2270430 - RNA, 19 nt, Homo sapiens
  misc_RNA (1)...(19): siRNA sense strand
guucugaccagcagcaaga

SEQ ID NO: 2270431 - RNA, 19 nt, Homo sapiens
  misc_RNA (1)...(19): siRNA sense strand
ucagcuacuaugagaaaca

SEQ ID NO: 2270432 - RNA, 19 nt, Homo sapiens
  misc_RNA (1)...(19): siRNA sense strand
uaacuuggcugauggagga

SEQ ID NO: 2270433 - RNA, 19 nt, Homo sapiens
  misc_RNA (1)...(19): siRNA sense strand
uggaggacccugugaacca

SEQ ID NO: 2270434 - RNA, 19 nt, Homo sapiens
  misc_RNA (1)...(19): siRNA sense strand
acgagagcaaagaguggua

SEQ ID NO: 2270435 - RNA, 19 nt, Homo sapiens
  misc_RNA (1)...(19): siRNA sense strand
ccauccguccugagggcaa

SEQ ID NO: 2270436 - RNA, 19 nt, Homo sapiens
  misc_RNA (1)...(19): siRNA sense strand
caagcagaagacagaguuu

SEQ ID NO: 2270437 - RNA, 19 nt, Homo sapiens
  misc_RNA (1)...(19): siRNA sense strand
gaguuugagaugcgacuuu

SEQ ID NO: 2270438 - RNA, 19 nt, Homo sapiens
  misc_RNA (1)...(19): siRNA sense strand
gggaggacgagcugaccuu

SEQ ID NO: 2270439 - RNA, 19 nt, Homo sapiens
  misc_RNA (1)...(19): siRNA sense strand
agagggagcacuuggacga

SEQ ID NO: 2270440 - RNA, 19 nt, Homo sapiens
  misc_RNA (1)...(19): siRNA sense strand
ccucacucgcucagcuaua

SEQ ID NO: 2270441 - RNA, 19 nt, Homo sapiens
  misc_RNA (1)...(19): siRNA sense strand
agcuauaagaagagccuca

SEQ ID NO: 2270442 - RNA, 19 nt, Homo sapiens
  misc_RNA (1)...(19): siRNA sense strand
gcaaccagucggugcguga

SEQ ID NO: 2270443 - RNA, 19 nt, Homo sapiens
  misc_RNA (1)...(19): siRNA sense strand
aggaggagcuggacgccau

SEQ ID NO: 2270444 - RNA, 19 nt, Homo sapiens
  misc_RNA (1)...(19): siRNA sense strand
acagugagcucaagugcga

SEQ ID NO: 2270445 - RNA, 19 nt, Homo sapiens
  misc_RNA (1)...(19): siRNA sense strand
cagagauccagcagcgaca

SEQ ID NO: 2270446 - RNA, 19 nt, Homo sapiens
  misc_RNA (1)...(19): siRNA sense strand
gcaaccagucggugcguga

SEQ ID NO: 2270447 - RNA, 19 nt, Homo sapiens
  misc_RNA (1)...(19): siRNA sense strand
aggaggagcuggacgccau

SEQ ID NO: 2270448 - RNA, 19 nt, Homo sapiens
  misc_RNA (1)...(19): siRNA sense strand
acagugagcucaagugcga

SEQ ID NO: 2270449 - RNA, 19 nt, Homo sapiens
  misc_RNA (1)...(19): siRNA sense strand
cagagauccagcagcgaca

SEQ ID NO: 2270450 - RNA, 19 nt, Homo sapiens
  misc_RNA (1)...(19): siRNA sense strand
gcaaccagucggugcguga

SEQ ID NO: 2270451 - RNA, 19 nt, Homo sapiens
  misc_RNA (1)...(19): siRNA sense strand
aggaggagcuggacgccau

SEQ ID NO: 2270452 - RNA, 19 nt, Homo sapiens
  misc_RNA (1)...(19): siRNA sense strand
acagugagcucaagugcga

SEQ ID NO: 2270453 - RNA, 19 nt, Homo sapiens
  misc_RNA (1)...(19): siRNA sense strand
cagagauccagcagcgaca

SEQ ID NO: 2270454 - RNA, 19 nt, Homo sapiens
  misc_RNA (1)...(19): siRNA sense strand
gcaaccagucggugcguga

SEQ ID NO: 2270455 - RNA, 19 nt, Homo sapiens
  misc_RNA (1)...(19): siRNA sense strand
aggaggagcuggacgccau

SEQ ID NO: 2270456 - RNA, 19 nt, Homo sapiens
  misc_RNA (1)...(19): siRNA sense strand
acagugagcucaagugcga

SEQ ID NO: 2270457 - RNA, 19 nt, Homo sapiens
  misc_RNA (1)...(19): siRNA sense strand
cagagauccagcagcgaca

SEQ ID NO: 2270458 - RNA, 19 nt, Homo sapiens
  misc_RNA (1)...(19): siRNA sense strand
gcaaccagucggugcguga

SEQ ID NO: 2270459 - RNA, 19 nt, Homo sapiens
  misc_RNA (1)...(19): siRNA sense strand
aggaggagcuggacgccau

SEQ ID NO: 2270460 - RNA, 19 nt, Homo sapiens
  misc_RNA (1)...(19): siRNA sense strand
acagugagcucaagugcga

SEQ ID NO: 2270461 - RNA, 19 nt, Homo sapiens
  misc_RNA (1)...(19): siRNA sense strand
cagagauccagcagcgaca

SEQ ID NO: 2270462 - RNA, 19 nt, Homo sapiens
  misc_RNA (1)...(19): siRNA sense strand
gcaaccagucggugcguga

SEQ ID NO: 2270463 - RNA, 19 nt, Homo sapiens
  misc_RNA (1)...(19): siRNA sense strand
aggaggagcuggacgccau

SEQ ID NO: 2270464 - RNA, 19 nt, Homo sapiens
  misc_RNA (1)...(19): siRNA sense strand
acagugagcucaagugcga

SEQ ID NO: 2270465 - RNA, 19 nt, Homo sapiens
  misc_RNA (1)...(19): siRNA sense strand
cagagauccagcagcgaca

SEQ ID NO: 2270466 - RNA, 19 nt, Homo sapiens
  misc_RNA (1)...(19): siRNA sense strand
gcaaccagucggugcguga

SEQ ID NO: 2270467 - RNA, 19 nt, Homo sapiens
  misc_RNA (1)...(19): siRNA sense strand
aggaggagcuggacgccau

SEQ ID NO: 2270468 - RNA, 19 nt, Homo sapiens
  misc_RNA (1)...(19): siRNA sense strand
acagugagcucaagugcga

SEQ ID NO: 2270469 - RNA, 19 nt, Homo sapiens
  misc_RNA (1)...(19): siRNA sense strand
cagagauccagcagcgaca

SEQ ID NO: 2270470 - RNA, 19 nt, Homo sapiens
  misc_RNA (1)...(19): siRNA sense strand
gcaaccagucggugcguga

SEQ ID NO: 2270471 - RNA, 19 nt, Homo sapiens
  misc_RNA (1)...(19): siRNA sense strand
aggaggagcuggacgccau

SEQ ID NO: 2270472 - RNA, 19 nt, Homo sapiens
  misc_RNA (1)...(19): siRNA sense strand
acagugagcucaagugcga

SEQ ID NO: 2270473 - RNA, 19 nt, Homo sapiens
  misc_RNA (1)...(19): siRNA sense strand
cagagauccagcagcgaca

SEQ ID NO: 2270474 - RNA, 19 nt, Homo sapiens
  misc_RNA (1)...(19): siRNA sense strand
gcaaccagucggugcguga

SEQ ID NO: 2270475 - RNA, 19 nt, Homo sapiens
  misc_RNA (1)...(19): siRNA sense strand
aggaggagcuggacgccau

SEQ ID NO: 2270476 - RNA, 19 nt, Homo sapiens
  misc_RNA (1)...(19): siRNA sense strand
acagugagcucaagugcga

SEQ ID NO: 2270477 - RNA, 19 nt, Homo sapiens
  misc_RNA (1)...(19): siRNA sense strand
cagagauccagcagcgaca

SEQ ID NO: 2270478 - RNA, 19 nt, Homo sapiens
  misc_RNA (1)...(19): siRNA sense strand
gcaaccagucggugcguga

SEQ ID NO: 2270479 - RNA, 19 nt, Homo sapiens
  misc_RNA (1)...(19): siRNA sense strand
aggaggagcuggacgccau

SEQ ID NO: 2270480 - RNA, 19 nt, Homo sapiens
  misc_RNA (1)...(19): siRNA sense strand
acagugagcucaagugcga

SEQ ID NO: 2270481 - RNA, 19 nt, Homo sapiens
  misc_RNA (1)...(19): siRNA sense strand
cagagauccagcagcgaca

SEQ ID NO: 2270482 - RNA, 19 nt, Homo sapiens
  misc_RNA (1)...(19): siRNA sense strand
gcaaccagucggugcguga

SEQ ID NO: 2270483 - RNA, 19 nt, Homo sapiens
  misc_RNA (1)...(19): siRNA sense strand
aggaggagcuggacgccau

SEQ ID NO: 2270484 - RNA, 19 nt, Homo sapiens
  misc_RNA (1)...(19): siRNA sense strand
acagugagcucaagugcga

SEQ ID NO: 2270485 - RNA, 19 nt, Homo sapiens
  misc_RNA (1)...(19): siRNA sense strand
cagagauccagcagcgaca

SEQ ID NO: 2270486 - RNA, 19 nt, Homo sapiens
  misc_RNA (1)...(19): siRNA sense strand
uggacaagaaagagaagau

SEQ ID NO: 2270487 - RNA, 19 nt, Homo sapiens
  misc_RNA (1)...(19): siRNA sense strand
ccgaacuggacaagaaaga

SEQ ID NO: 2270488 - RNA, 19 nt, Homo sapiens
  misc_RNA (1)...(19): siRNA sense strand
aaagagaagauccgggaga

SEQ ID NO: 2270489 - RNA, 19 nt, Homo sapiens
  misc_RNA (1)...(19): siRNA sense strand
ggcaaagggcugagguucu

SEQ ID NO: 2270490 - RNA, 19 nt, Homo sapiens
  misc_RNA (1)...(19): siRNA sense strand
gcacccuggaggagaggau

SEQ ID NO: 2270491 - RNA, 19 nt, Homo sapiens
  misc_RNA (1)...(19): siRNA sense strand
ggaaggaguuugaggagga

SEQ ID NO: 2270492 - RNA, 19 nt, Homo sapiens
  misc_RNA (1)...(19): siRNA sense strand
acaaagagaucgugcagga

SEQ ID NO: 2270493 - RNA, 19 nt, Homo sapiens
  misc_RNA (1)...(19): siRNA sense strand
cccaguggaucgaggguga

SEQ ID NO: 2270494 - RNA, 19 nt, Homo sapiens
  misc_RNA (1)...(19): siRNA sense strand
ccaacuugcugaagccaga

SEQ ID NO: 2270495 - RNA, 19 nt, Homo sapiens
  misc_RNA (1)...(19): siRNA sense strand
ccuagagaugagaguggaa

SEQ ID NO: 2270496 - RNA, 19 nt, Homo sapiens
  misc_RNA (1)...(19): siRNA sense strand
agaugagaguggaaggugu

SEQ ID NO: 2270497 - RNA, 19 nt, Homo sapiens
  misc_RNA (1)...(19): siRNA sense strand
ucaauguggccuugcgcaa

SEQ ID NO: 2270498 - RNA, 19 nt, Homo sapiens
  misc_RNA (1)...(19): siRNA sense strand
ggaggaucugacaggcaua

SEQ ID NO: 2270499 - RNA, 19 nt, Homo sapiens
  misc_RNA (1)...(19): siRNA sense strand
ggguucagauugaugccaa

SEQ ID NO: 2270500 - RNA, 19 nt, Homo sapiens
  misc_RNA (1)...(19): siRNA sense strand
cugcaguacucucgggacu

SEQ ID NO: 2270501 - RNA, 19 nt, Homo sapiens
  misc_RNA (1)...(19): siRNA sense strand
acuucgagccuaugccaaa

SEQ ID NO: 2270502 - RNA, 19 nt, Homo sapiens
  misc_RNA (1)...(19): siRNA sense strand
cggagcuggaugaggauga

SEQ ID NO: 2270503 - RNA, 19 nt, Homo sapiens
  misc_RNA (1)...(19): siRNA sense strand
ccaaugacuacguggagca

SEQ ID NO: 2270504 - RNA, 19 nt, Homo sapiens
  misc_RNA (1)...(19): siRNA sense strand
acucggagcuggaugagga

SEQ ID NO: 2270505 - RNA, 19 nt, Homo sapiens
  misc_RNA (1)...(19): siRNA sense strand
caggauugaagaagaaacu

SEQ ID NO: 2270506 - RNA, 19 nt, Homo sapiens
  misc_RNA (1)...(19): siRNA sense strand
ggguucagauugaugccaa

SEQ ID NO: 2270507 - RNA, 19 nt, Homo sapiens
  misc_RNA (1)...(19): siRNA sense strand
cugcaguacucucgggacu

SEQ ID NO: 2270508 - RNA, 19 nt, Homo sapiens
  misc_RNA (1)...(19): siRNA sense strand
acuucgagccuaugccaaa

SEQ ID NO: 2270509 - RNA, 19 nt, Homo sapiens
  misc_RNA (1)...(19): siRNA sense strand
cggagcuggaugaggauga

SEQ ID NO: 2270510 - RNA, 19 nt, Homo sapiens
  misc_RNA (1)...(19): siRNA sense strand
ccaaugacuacguggagca

SEQ ID NO: 2270511 - RNA, 19 nt, Homo sapiens
  misc_RNA (1)...(19): siRNA sense strand
acucggagcuggaugagga

SEQ ID NO: 2270512 - RNA, 19 nt, Homo sapiens
  misc_RNA (1)...(19): siRNA sense strand
caggauugaagaagaaacu

SEQ ID NO: 2270513 - RNA, 19 nt, Homo sapiens
  misc_RNA (1)...(19): siRNA sense strand
cuaaaguggaaggaaguaa

SEQ ID NO: 2270514 - RNA, 19 nt, Homo sapiens
  misc_RNA (1)...(19): siRNA sense strand
aauuugacccggaggaaga

SEQ ID NO: 2270515 - RNA, 19 nt, Homo sapiens
  misc_RNA (1)...(19): siRNA sense strand
cacuaaaagaagagcacaa

SEQ ID NO: 2270516 - RNA, 19 nt, Homo sapiens
  misc_RNA (1)...(19): siRNA sense strand
uggaaauauugggaaguau

SEQ ID NO: 2270517 - RNA, 19 nt, Homo sapiens
  misc_RNA (1)...(19): siRNA sense strand
gaccuaaaguggaaggaag

SEQ ID NO: 2270518 - RNA, 19 nt, Homo sapiens
  misc_RNA (1)...(19): siRNA sense strand
cagcgaagauucugcccau

SEQ ID NO: 2270519 - RNA, 19 nt, Homo sapiens
  misc_RNA (1)...(19): siRNA sense strand
agugaagauccucgggaga

SEQ ID NO: 2270520 - RNA, 19 nt, Homo sapiens
  misc_RNA (1)...(19): siRNA sense strand
ggauuugccuuaccacuaa

SEQ ID NO: 2270521 - RNA, 19 nt, Homo sapiens
  misc_RNA (1)...(19): siRNA sense strand
gugacaacgcagcgaagau

SEQ ID NO: 2270522 - RNA, 19 nt, Homo sapiens
  misc_RNA (1)...(19): siRNA sense strand
gugaaaucucugagugucu

SEQ ID NO: 2270523 - RNA, 19 nt, Homo sapiens
  misc_RNA (1)...(19): siRNA sense strand
gcagcaggaugguggugga

SEQ ID NO: 2270524 - RNA, 19 nt, Homo sapiens
  misc_RNA (1)...(19): siRNA sense strand
gccuauuuacccagaagua

SEQ ID NO: 2270525 - RNA, 19 nt, Homo sapiens
  misc_RNA (1)...(19): siRNA sense strand
gaguuuaaucagugacaac

SEQ ID NO: 2270526 - RNA, 19 nt, Homo sapiens
  misc_RNA (1)...(19): siRNA sense strand
ggacagcacccucacggaa

SEQ ID NO: 2270527 - RNA, 19 nt, Homo sapiens
  misc_RNA (1)...(19): siRNA sense strand
cuuuaagugaaaugguaga

SEQ ID NO: 2270528 - RNA, 19 nt, Homo sapiens
  misc_RNA (1)...(19): siRNA sense strand
cuucucaaauacuggccaa

SEQ ID NO: 2270529 - RNA, 19 nt, Homo sapiens
  misc_RNA (1)...(19): siRNA sense strand
cuaaaguggaaggaaguaa

SEQ ID NO: 2270530 - RNA, 19 nt, Homo sapiens
  misc_RNA (1)...(19): siRNA sense strand
aauuugacccggaggaaga

SEQ ID NO: 2270531 - RNA, 19 nt, Homo sapiens
  misc_RNA (1)...(19): siRNA sense strand
cacuaaaagaagagcacaa

SEQ ID NO: 2270532 - RNA, 19 nt, Homo sapiens
  misc_RNA (1)...(19): siRNA sense strand
uggaaauauugggaaguau

SEQ ID NO: 2270533 - RNA, 19 nt, Homo sapiens
  misc_RNA (1)...(19): siRNA sense strand
gaccuaaaguggaaggaag

SEQ ID NO: 2270534 - RNA, 19 nt, Homo sapiens
  misc_RNA (1)...(19): siRNA sense strand
cagcgaagauucugcccau

SEQ ID NO: 2270535 - RNA, 19 nt, Homo sapiens
  misc_RNA (1)...(19): siRNA sense strand
agugaagauccucgggaga

SEQ ID NO: 2270536 - RNA, 19 nt, Homo sapiens
  misc_RNA (1)...(19): siRNA sense strand
ggauuugccuuaccacuaa

SEQ ID NO: 2270537 - RNA, 19 nt, Homo sapiens
  misc_RNA (1)...(19): siRNA sense strand
gugacaacgcagcgaagau

SEQ ID NO: 2270538 - RNA, 19 nt, Homo sapiens
  misc_RNA (1)...(19): siRNA sense strand
gugaaaucucugagugucu

SEQ ID NO: 2270539 - RNA, 19 nt, Homo sapiens
  misc_RNA (1)...(19): siRNA sense strand
gcagcaggaugguggugga

SEQ ID NO: 2270540 - RNA, 19 nt, Homo sapiens
  misc_RNA (1)...(19): siRNA sense strand
gccuauuuacccagaagua

SEQ ID NO: 2270541 - RNA, 19 nt, Homo sapiens
  misc_RNA (1)...(19): siRNA sense strand
gaguuuaaucagugacaac

SEQ ID NO: 2270542 - RNA, 19 nt, Homo sapiens
  misc_RNA (1)...(19): siRNA sense strand
ggacagcacccucacggaa

SEQ ID NO: 2270543 - RNA, 19 nt, Homo sapiens
  misc_RNA (1)...(19): siRNA sense strand
cuuuaagugaaaugguaga

SEQ ID NO: 2270544 - RNA, 19 nt, Homo sapiens
  misc_RNA (1)...(19): siRNA sense strand
cuucucaaauacuggccaa

SEQ ID NO: 2270545 - RNA, 19 nt, Homo sapiens
  misc_RNA (1)...(19): siRNA sense strand
cuaaaguggaaggaaguaa

SEQ ID NO: 2270546 - RNA, 19 nt, Homo sapiens
  misc_RNA (1)...(19): siRNA sense strand
aauuugacccggaggaaga

SEQ ID NO: 2270547 - RNA, 19 nt, Homo sapiens
  misc_RNA (1)...(19): siRNA sense strand
cacuaaaagaagagcacaa

SEQ ID NO: 2270548 - RNA, 19 nt, Homo sapiens
  misc_RNA (1)...(19): siRNA sense strand
uggaaauauugggaaguau

SEQ ID NO: 2270549 - RNA, 19 nt, Homo sapiens
  misc_RNA (1)...(19): siRNA sense strand
gaccuaaaguggaaggaag

SEQ ID NO: 2270550 - RNA, 19 nt, Homo sapiens
  misc_RNA (1)...(19): siRNA sense strand
cagcgaagauucugcccau

SEQ ID NO: 2270551 - RNA, 19 nt, Homo sapiens
  misc_RNA (1)...(19): siRNA sense strand
agugaagauccucgggaga

SEQ ID NO: 2270552 - RNA, 19 nt, Homo sapiens
  misc_RNA (1)...(19): siRNA sense strand
ggauuugccuuaccacuaa

SEQ ID NO: 2270553 - RNA, 19 nt, Homo sapiens
  misc_RNA (1)...(19): siRNA sense strand
gugacaacgcagcgaagau

SEQ ID NO: 2270554 - RNA, 19 nt, Homo sapiens
  misc_RNA (1)...(19): siRNA sense strand
gugaaaucucugagugucu

SEQ ID NO: 2270555 - RNA, 19 nt, Homo sapiens
  misc_RNA (1)...(19): siRNA sense strand
gcagcaggaugguggugga

SEQ ID NO: 2270556 - RNA, 19 nt, Homo sapiens
  misc_RNA (1)...(19): siRNA sense strand
gccuauuuacccagaagua

SEQ ID NO: 2270557 - RNA, 19 nt, Homo sapiens
  misc_RNA (1)...(19): siRNA sense strand
gaguuuaaucagugacaac

SEQ ID NO: 2270558 - RNA, 19 nt, Homo sapiens
  misc_RNA (1)...(19): siRNA sense strand
ggacagcacccucacggaa

SEQ ID NO: 2270559 - RNA, 19 nt, Homo sapiens
  misc_RNA (1)...(19): siRNA sense strand
cuuuaagugaaaugguaga

SEQ ID NO: 2270560 - RNA, 19 nt, Homo sapiens
  misc_RNA (1)...(19): siRNA sense strand
cuucucaaauacuggccaa

SEQ ID NO: 2270561 - RNA, 19 nt, Homo sapiens
  misc_RNA (1)...(19): siRNA sense strand
cuaaaguggaaggaaguaa

SEQ ID NO: 2270562 - RNA, 19 nt, Homo sapiens
  misc_RNA (1)...(19): siRNA sense strand
aauuugacccggaggaaga

SEQ ID NO: 2270563 - RNA, 19 nt, Homo sapiens
  misc_RNA (1)...(19): siRNA sense strand
cacuaaaagaagagcacaa

SEQ ID NO: 2270564 - RNA, 19 nt, Homo sapiens
  misc_RNA (1)...(19): siRNA sense strand
uggaaauauugggaaguau

SEQ ID NO: 2270565 - RNA, 19 nt, Homo sapiens
  misc_RNA (1)...(19): siRNA sense strand
gaccuaaaguggaaggaag

SEQ ID NO: 2270566 - RNA, 19 nt, Homo sapiens
  misc_RNA (1)...(19): siRNA sense strand
cagcgaagauucugcccau

SEQ ID NO: 2270567 - RNA, 19 nt, Homo sapiens
  misc_RNA (1)...(19): siRNA sense strand
agugaagauccucgggaga

SEQ ID NO: 2270568 - RNA, 19 nt, Homo sapiens
  misc_RNA (1)...(19): siRNA sense strand
ggauuugccuuaccacuaa

SEQ ID NO: 2270569 - RNA, 19 nt, Homo sapiens
  misc_RNA (1)...(19): siRNA sense strand
gugacaacgcagcgaagau

SEQ ID NO: 2270570 - RNA, 19 nt, Homo sapiens
  misc_RNA (1)...(19): siRNA sense strand
gugaaaucucugagugucu

SEQ ID NO: 2270571 - RNA, 19 nt, Homo sapiens
  misc_RNA (1)...(19): siRNA sense strand
gcagcaggaugguggugga

SEQ ID NO: 2270572 - RNA, 19 nt, Homo sapiens
  misc_RNA (1)...(19): siRNA sense strand
gccuauuuacccagaagua

SEQ ID NO: 2270573 - RNA, 19 nt, Homo sapiens
  misc_RNA (1)...(19): siRNA sense strand
gaguuuaaucagugacaac

SEQ ID NO: 2270574 - RNA, 19 nt, Homo sapiens
  misc_RNA (1)...(19): siRNA sense strand
ggacagcacccucacggaa

SEQ ID NO: 2270575 - RNA, 19 nt, Homo sapiens
  misc_RNA (1)...(19): siRNA sense strand
cuuuaagugaaaugguaga

SEQ ID NO: 2270576 - RNA, 19 nt, Homo sapiens
  misc_RNA (1)...(19): siRNA sense strand
cuucucaaauacuggccaa

SEQ ID NO: 2270577 - RNA, 19 nt, Homo sapiens
  misc_RNA (1)...(19): siRNA sense strand
agaagaaauucgagacgca

SEQ ID NO: 2270578 - RNA, 19 nt, Homo sapiens
  misc_RNA (1)...(19): siRNA sense strand
aaguggacauugagggcga

SEQ ID NO: 2270579 - RNA, 19 nt, Homo sapiens
  misc_RNA (1)...(19): siRNA sense strand
agaggaagcgucuggccaa

SEQ ID NO: 2270580 - RNA, 19 nt, Homo sapiens
  misc_RNA (1)...(19): siRNA sense strand
ccuuuuacaucgaggacau

SEQ ID NO: 2270581 - RNA, 19 nt, Homo sapiens
  misc_RNA (1)...(19): siRNA sense strand
ucagaaucgacgcgcuaaa

SEQ ID NO: 2270582 - RNA, 19 nt, Homo sapiens
  misc_RNA (1)...(19): siRNA sense strand
agaaauucgagacgcagaa

SEQ ID NO: 2270583 - RNA, 19 nt, Homo sapiens
  misc_RNA (1)...(19): siRNA sense strand
agaccaucgagcuggagaa

SEQ ID NO: 2270584 - RNA, 19 nt, Homo sapiens
  misc_RNA (1)...(19): siRNA sense strand
cugaucaggaaguggacau

SEQ ID NO: 2270585 - RNA, 19 nt, Homo sapiens
  misc_RNA (1)...(19): siRNA sense strand
uuucagaaucgacgcgcua

SEQ ID NO: 2270586 - RNA, 19 nt, Homo sapiens
  misc_RNA (1)...(19): siRNA sense strand
agucagaguucgaaggcuu

SEQ ID NO: 2270587 - RNA, 19 nt, Homo sapiens
  misc_RNA (1)...(19): siRNA sense strand
acaugaacacagaggacua

SEQ ID NO: 2270588 - RNA, 19 nt, Homo sapiens
  misc_RNA (1)...(19): siRNA sense strand
ccgaggagacagauggaau

SEQ ID NO: 2270589 - RNA, 19 nt, Homo sapiens
  misc_RNA (1)...(19): siRNA sense strand
ggguacagacagagaagca

SEQ ID NO: 2270590 - RNA, 19 nt, Homo sapiens
  misc_RNA (1)...(19): siRNA sense strand
caguagacgacaagaacga

SEQ ID NO: 2270591 - RNA, 19 nt, Homo sapiens
  misc_RNA (1)...(19): siRNA sense strand
aggcaaggcuacaggugca

SEQ ID NO: 2270592 - RNA, 19 nt, Homo sapiens
  misc_RNA (1)...(19): siRNA sense strand
cgaggagcucugugaggaa

SEQ ID NO: 2270593 - RNA, 19 nt, Homo sapiens
  misc_RNA (1)...(19): siRNA sense strand
cagugcagcgagaggauau

SEQ ID NO: 2270594 - RNA, 19 nt, Homo sapiens
  misc_RNA (1)...(19): siRNA sense strand
ucugugaggaagugagaga

SEQ ID NO: 2270595 - RNA, 19 nt, Homo sapiens
  misc_RNA (1)...(19): siRNA sense strand
ggacaugaacacagaggac

SEQ ID NO: 2270596 - RNA, 19 nt, Homo sapiens
  misc_RNA (1)...(19): siRNA sense strand
ugugaggaagugagagaca

SEQ ID NO: 2270597 - RNA, 19 nt, Homo sapiens
  misc_RNA (1)...(19): siRNA sense strand
ccauaaagaggaucgacca

SEQ ID NO: 2270598 - RNA, 19 nt, Homo sapiens
  misc_RNA (1)...(19): siRNA sense strand
ucaaguggguggacagcga

SEQ ID NO: 2270599 - RNA, 19 nt, Homo sapiens
  misc_RNA (1)...(19): siRNA sense strand
cagacuacggcaugugcaa

SEQ ID NO: 2270600 - RNA, 19 nt, Homo sapiens
  misc_RNA (1)...(19): siRNA sense strand
acgacuacggucuggacaa

SEQ ID NO: 2270601 - RNA, 19 nt, Homo sapiens
  misc_RNA (1)...(19): siRNA sense strand
uggacaacuuugacacaca

SEQ ID NO: 2270602 - RNA, 19 nt, Homo sapiens
  misc_RNA (1)...(19): siRNA sense strand
ggguggacagcgaagguga

SEQ ID NO: 2270603 - RNA, 19 nt, Homo sapiens
  misc_RNA (1)...(19): siRNA sense strand
guugaagaagaaugaccaa

SEQ ID NO: 2270604 - RNA, 19 nt, Homo sapiens
  misc_RNA (1)...(19): siRNA sense strand
cggaggaccuuaagccagu

SEQ ID NO: 2270605 - RNA, 19 nt, Homo sapiens
  misc_RNA (1)...(19): siRNA sense strand
gguugaagaagaaugacca

SEQ ID NO: 2270606 - RNA, 19 nt, Homo sapiens
  misc_RNA (1)...(19): siRNA sense strand
acgccaugaaaguggugaa

SEQ ID NO: 2270607 - RNA, 19 nt, Homo sapiens
  misc_RNA (1)...(19): siRNA sense strand
ugcaugaugacgaggauau

SEQ ID NO: 2270608 - RNA, 19 nt, Homo sapiens
  misc_RNA (1)...(19): siRNA sense strand
gccagaagauggaggaagc

SEQ ID NO: 2270609 - RNA, 19 nt, Homo sapiens
  misc_RNA (1)...(19): siRNA sense strand
ugaagaaagagcuggugca

SEQ ID NO: 2270610 - RNA, 19 nt, Homo sapiens
  misc_RNA (1)...(19): siRNA sense strand
acugggacuugcuggagaa

SEQ ID NO: 2270611 - RNA, 19 nt, Homo sapiens
  misc_RNA (1)...(19): siRNA sense strand
auuugaagccggagaacau

SEQ ID NO: 2270612 - RNA, 19 nt, Homo sapiens
  misc_RNA (1)...(19): siRNA sense strand
ccaagaagcugguagacag

SEQ ID NO: 2270613 - RNA, 19 nt, Homo sapiens
  misc_RNA (1)...(19): siRNA sense strand
aggagcagcacgugcacaa

SEQ ID NO: 2270614 - RNA, 19 nt, Homo sapiens
  misc_RNA (1)...(19): siRNA sense strand
gugaaggagaagacagcca

SEQ ID NO: 2270615 - RNA, 19 nt, Homo sapiens
  misc_RNA (1)...(19): siRNA sense strand
cggagaacauccugcugga

SEQ ID NO: 2270616 - RNA, 19 nt, Homo sapiens
  misc_RNA (1)...(19): siRNA sense strand
gcuacaacugugaggagaa

SEQ ID NO: 2270617 - RNA, 19 nt, Homo sapiens
  misc_RNA (1)...(19): siRNA sense strand
ucgaaguccuggaggggaa

SEQ ID NO: 2270618 - RNA, 19 nt, Homo sapiens
  misc_RNA (1)...(19): siRNA sense strand
ccuuugaugaugaugacaa

SEQ ID NO: 2270619 - RNA, 19 nt, Homo sapiens
  misc_RNA (1)...(19): siRNA sense strand
cuacaacugugaggagaau

SEQ ID NO: 2270620 - RNA, 19 nt, Homo sapiens
  misc_RNA (1)...(19): siRNA sense strand
ucgaaguccuggaggggaa

SEQ ID NO: 2270621 - RNA, 19 nt, Homo sapiens
  misc_RNA (1)...(19): siRNA sense strand
gcuacaucugugaggagaa

SEQ ID NO: 2270622 - RNA, 19 nt, Homo sapiens
  misc_RNA (1)...(19): siRNA sense strand
ccuuugaugaugaugacaa

SEQ ID NO: 2270623 - RNA, 19 nt, Homo sapiens
  misc_RNA (1)...(19): siRNA sense strand
augacauccugcugaucaa

SEQ ID NO: 2270624 - RNA, 19 nt, Homo sapiens
  misc_RNA (1)...(19): siRNA sense strand
ccuaaauacaacagggaca

SEQ ID NO: 2270625 - RNA, 19 nt, Homo sapiens
  misc_RNA (1)...(19): siRNA sense strand
ucaaaguccuggaggggaa

SEQ ID NO: 2270626 - RNA, 19 nt, Homo sapiens
  misc_RNA (1)...(19): siRNA sense strand
ccuuugacgaugaugacaa

SEQ ID NO: 2270627 - RNA, 19 nt, Homo sapiens
  misc_RNA (1)...(19): siRNA sense strand
ggaaagauuaccaacagca

SEQ ID NO: 2270628 - RNA, 19 nt, Homo sapiens
  misc_RNA (1)...(19): siRNA sense strand
gcuacaccugugaggagaa

SEQ ID NO: 2270629 - RNA, 19 nt, Homo sapiens
  misc_RNA (1)...(19): siRNA sense strand
cuaugaagaaggaggaaua

SEQ ID NO: 2270630 - RNA, 19 nt, Homo sapiens
  misc_RNA (1)...(19): siRNA sense strand
gaugauaaugaaugggaaa

SEQ ID NO: 2270631 - RNA, 19 nt, Homo sapiens
  misc_RNA (1)...(19): siRNA sense strand
aggaaauuauggagacaau

SEQ ID NO: 2270632 - RNA, 19 nt, Homo sapiens
  misc_RNA (1)...(19): siRNA sense strand
ugaaauaagagauggugaa

SEQ ID NO: 2270633 - RNA, 19 nt, Homo sapiens
  misc_RNA (1)...(19): siRNA sense strand
gggaaaggauucagggaag

SEQ ID NO: 2270634 - RNA, 19 nt, Homo sapiens
  misc_RNA (1)...(19): siRNA sense strand
gcaaauaaauccagccaac

SEQ ID NO: 2270635 - RNA, 19 nt, Homo sapiens
  misc_RNA (1)...(19): siRNA sense strand
uggaggaaguaaugccaaa

SEQ ID NO: 2270636 - RNA, 19 nt, Homo sapiens
  misc_RNA (1)...(19): siRNA sense strand
ccucauuacaauaggcgaa

SEQ ID NO: 2270637 - RNA, 19 nt, Homo sapiens
  misc_RNA (1)...(19): siRNA sense strand
ucaugaagccagagcgaca

SEQ ID NO: 2270638 - RNA, 19 nt, Homo sapiens
  misc_RNA (1)...(19): siRNA sense strand
agaggaggguuuaaagcaa

SEQ ID NO: 2270639 - RNA, 19 nt, Homo sapiens
  misc_RNA (1)...(19): siRNA sense strand
gguucagaauccagagcau

SEQ ID NO: 2270640 - RNA, 19 nt, Homo sapiens
  misc_RNA (1)...(19): siRNA sense strand
guucugacgaagacaauaa

SEQ ID NO: 2270641 - RNA, 19 nt, Homo sapiens
  misc_RNA (1)...(19): siRNA sense strand
ggagaaacuuagagccauc

SEQ ID NO: 2270642 - RNA, 19 nt, Homo sapiens
  misc_RNA (1)...(19): siRNA sense strand
ggaaacuaauccuggcaca

SEQ ID NO: 2270643 - RNA, 19 nt, Homo sapiens
  misc_RNA (1)...(19): siRNA sense strand
aaagauuguuggaggaagu

SEQ ID NO: 2270644 - RNA, 19 nt, Homo sapiens
  misc_RNA (1)...(19): siRNA sense strand
ccaugaugcaucuggaauu

SEQ ID NO: 2270645 - RNA, 19 nt, Homo sapiens
  misc_RNA (1)...(19): siRNA sense strand
aggcauaucuucuaggcau

SEQ ID NO: 2270646 - RNA, 19 nt, Homo sapiens
  misc_RNA (1)...(19): siRNA sense strand
agacaaacucucaguggau

SEQ ID NO: 2270647 - RNA, 19 nt, Homo sapiens
  misc_RNA (1)...(19): siRNA sense strand
gcaaaugauagaugagauc

SEQ ID NO: 2270648 - RNA, 19 nt, Homo sapiens
  misc_RNA (1)...(19): siRNA sense strand
cgaagaaaggacaacgaca

SEQ ID NO: 2270649 - RNA, 19 nt, Homo sapiens
  misc_RNA (1)...(19): siRNA sense strand
gcguugauauccuagacaa

SEQ ID NO: 2270650 - RNA, 19 nt, Homo sapiens
  misc_RNA (1)...(19): siRNA sense strand
uagccuaacauaugggauu

SEQ ID NO: 2270651 - RNA, 19 nt, Homo sapiens
  misc_RNA (1)...(19): siRNA sense strand
gggacuagggaguggaaac

SEQ ID NO: 2270652 - RNA, 19 nt, Homo sapiens
  misc_RNA (1)...(19): siRNA sense strand
cauuacaauaggcgaagaa

SEQ ID NO: 2270653 - RNA, 19 nt, Homo sapiens
  misc_RNA (1)...(19): siRNA sense strand
ugggaaaggauucagggaa

SEQ ID NO: 2270654 - RNA, 19 nt, Homo sapiens
  misc_RNA (1)...(19): siRNA sense strand
ggaaacucaucaaagccaa

SEQ ID NO: 2270655 - RNA, 19 nt, Homo sapiens
  misc_RNA (1)...(19): siRNA sense strand
agguacuacugcaaacaua

SEQ ID NO: 2270656 - RNA, 19 nt, Homo sapiens
  misc_RNA (1)...(19): siRNA sense strand
ugggagaaacuuagagcca

SEQ ID NO: 2270657 - RNA, 19 nt, Homo sapiens
  misc_RNA (1)...(19): siRNA sense strand
ugaugauaaugaaugggaa

SEQ ID NO: 2270658 - RNA, 19 nt, Homo sapiens
  misc_RNA (1)...(19): siRNA sense strand
ggaaggaaauuauggagac

SEQ ID NO: 2270659 - RNA, 19 nt, Homo sapiens
  misc_RNA (1)...(19): siRNA sense strand
ccaaaaggaaggaaauuau

SEQ ID NO: 2270660 - RNA, 19 nt, Homo sapiens
  misc_RNA (1)...(19): siRNA sense strand
aggaaggaaauuauggaga

SEQ ID NO: 2270661 - RNA, 19 nt, Homo sapiens
  misc_RNA (1)...(19): siRNA sense strand
aggaaguaaugccaaagaa

SEQ ID NO: 2270662 - RNA, 19 nt, Homo sapiens
  misc_RNA (1)...(19): siRNA sense strand
ggaucaagcaagauuuuaa

SEQ ID NO: 2270663 - RNA, 19 nt, Homo sapiens
  misc_RNA (1)...(19): siRNA sense strand
ggguugugggucuguauua

SEQ ID NO: 2270664 - RNA, 19 nt, Homo sapiens
  misc_RNA (1)...(19): siRNA sense strand
aguuugugauggaagauuu

SEQ ID NO: 2270665 - RNA, 19 nt, Homo sapiens
  misc_RNA (1)...(19): siRNA sense strand
gugauauugcguuggauga

SEQ ID NO: 2270666 - RNA, 19 nt, Homo sapiens
  misc_RNA (1)...(19): siRNA sense strand
ugaagaaggaggaauagau

SEQ ID NO: 2270667 - RNA, 19 nt, Homo sapiens
  misc_RNA (1)...(19): siRNA sense strand
uaucaagcaaucugaagaa

SEQ ID NO: 2270668 - RNA, 19 nt, Homo sapiens
  misc_RNA (1)...(19): siRNA sense strand
agagcuucuauuugggaaa

SEQ ID NO: 2270669 - RNA, 19 nt, Homo sapiens
  misc_RNA (1)...(19): siRNA sense strand
aagcagauugugugcguuu

SEQ ID NO: 2270670 - RNA, 19 nt, Homo sapiens
  misc_RNA (1)...(19): siRNA sense strand
aagaaaggacaacgacauu

SEQ ID NO: 2270671 - RNA, 19 nt, Homo sapiens
  misc_RNA (1)...(19): siRNA sense strand
gguuguauaucaagguacu

SEQ ID NO: 2270672 - RNA, 19 nt, Homo sapiens
  misc_RNA (1)...(19): siRNA sense strand
acguguaaaccaaggacuu

SEQ ID NO: 2270673 - RNA, 19 nt, Homo sapiens
  misc_RNA (1)...(19): siRNA sense strand
gaaacuaauccuggcacaa

SEQ ID NO: 2270674 - RNA, 19 nt, Homo sapiens
  misc_RNA (1)...(19): siRNA sense strand
uggaauuauggacaaguaa

SEQ ID NO: 2270675 - RNA, 19 nt, Homo sapiens
  misc_RNA (1)...(19): siRNA sense strand
gauuguuggaggaaguaau

SEQ ID NO: 2270676 - RNA, 19 nt, Homo sapiens
  misc_RNA (1)...(19): siRNA sense strand
cguguaugggagaaacuua

SEQ ID NO: 2270677 - RNA, 19 nt, Homo sapiens
  misc_RNA (1)...(19): siRNA sense strand
acauauugcaagaagcuga

SEQ ID NO: 2270678 - RNA, 19 nt, Homo sapiens
  misc_RNA (1)...(19): siRNA sense strand
gugaagaagcugauuccuu

SEQ ID NO: 2270679 - RNA, 19 nt, Homo sapiens
  misc_RNA (1)...(19): siRNA sense strand
cauuaaugugccaagaaaa

SEQ ID NO: 2270680 - RNA, 19 nt, Homo sapiens
  misc_RNA (1)...(19): siRNA sense strand
agcaaaugauagaugagau

SEQ ID NO: 2270681 - RNA, 19 nt, Homo sapiens
  misc_RNA (1)...(19): siRNA sense strand
cgaacuuuccaaacagcua

SEQ ID NO: 2270682 - RNA, 19 nt, Homo sapiens
  misc_RNA (1)...(19): siRNA sense strand
guuggcaagaggaggguuu

SEQ ID NO: 2270683 - RNA, 19 nt, Homo sapiens
  misc_RNA (1)...(19): siRNA sense strand
guuuagugcgguucagaau

SEQ ID NO: 2270684 - RNA, 19 nt, Homo sapiens
  misc_RNA (1)...(19): siRNA sense strand
gucucaagguuuaccgaau

SEQ ID NO: 2270685 - RNA, 19 nt, Homo sapiens
  misc_RNA (1)...(19): siRNA sense strand
aauccuaauuugcaagaca

SEQ ID NO: 2270686 - RNA, 19 nt, Homo sapiens
  misc_RNA (1)...(19): siRNA sense strand
gagcugugggagccaaaua

SEQ ID NO: 2270687 - RNA, 19 nt, Homo sapiens
  misc_RNA (1)...(19): siRNA sense strand
gcuaugaagaaggaggaau

SEQ ID NO: 2270688 - RNA, 19 nt, Homo sapiens
  misc_RNA (1)...(19): siRNA sense strand
acaaacucucaguggauuu

SEQ ID NO: 2270689 - RNA, 19 nt, Homo sapiens
  misc_RNA (1)...(19): siRNA sense strand
cagcauuauagucguauuu

SEQ ID NO: 2270690 - RNA, 19 nt, Homo sapiens
  misc_RNA (1)...(19): siRNA sense strand
agaacugauucaaggccuu

SEQ ID NO: 2270691 - RNA, 19 nt, Homo sapiens
  misc_RNA (1)...(19): siRNA sense strand
ggaaagcuuugaagggcaa

SEQ ID NO: 2270692 - RNA, 19 nt, Homo sapiens
  misc_RNA (1)...(19): siRNA sense strand
agaacuaugugaaugggaa

SEQ ID NO: 2270693 - RNA, 19 nt, Homo sapiens
  misc_RNA (1)...(19): siRNA sense strand
aagcuacagcaaugggaaa

SEQ ID NO: 2270694 - RNA, 19 nt, Homo sapiens
  misc_RNA (1)...(19): siRNA sense strand
acuuauuugugguuggaau

SEQ ID NO: 2270695 - RNA, 19 nt, Homo sapiens
  misc_RNA (1)...(19): siRNA sense strand
aggaaagcuuugaagggca

SEQ ID NO: 2270696 - RNA, 19 nt, Homo sapiens
  misc_RNA (1)...(19): siRNA sense strand
gcuggauuuaggaggcuua

SEQ ID NO: 2270697 - RNA, 19 nt, Homo sapiens
  misc_RNA (1)...(19): siRNA sense strand
aaguagaaccaauuaccaa

SEQ ID NO: 2270698 - RNA, 19 nt, Homo sapiens
  misc_RNA (1)...(19): siRNA sense strand
ggauaaagcuuuugaacua

SEQ ID NO: 2270699 - RNA, 19 nt, Homo sapiens
  misc_RNA (1)...(19): siRNA sense strand
cguuaaagaaguugcaaaa

SEQ ID NO: 2270700 - RNA, 19 nt, Homo sapiens
  misc_RNA (1)...(19): siRNA sense strand
cuaugaaggcuguggaaaa

SEQ ID NO: 2270701 - RNA, 19 nt, Homo sapiens
  misc_RNA (1)...(19): siRNA sense strand
gagaaauaugcuaaggaau

SEQ ID NO: 2270702 - RNA, 19 nt, Homo sapiens
  misc_RNA (1)...(19): siRNA sense strand
agauauaagagaagaagca

SEQ ID NO: 2270703 - RNA, 19 nt, Homo sapiens
  misc_RNA (1)...(19): siRNA sense strand
agagaaauaugcuaaggaa

SEQ ID NO: 2270704 - RNA, 19 nt, Homo sapiens
  misc_RNA (1)...(19): siRNA sense strand
agaaauaugcuaaggaauc

SEQ ID NO: 2270705 - RNA, 19 nt, Homo sapiens
  misc_RNA (1)...(19): siRNA sense strand
cggaaauagagaagcuuca

SEQ ID NO: 2270706 - RNA, 19 nt, Homo sapiens
  misc_RNA (1)...(19): siRNA sense strand
ugugaaugacggugcgcaa

SEQ ID NO: 2270707 - RNA, 19 nt, Homo sapiens
  misc_RNA (1)...(19): siRNA sense strand
ucguuaaagaaguugcaaa

SEQ ID NO: 2270708 - RNA, 19 nt, Homo sapiens
  misc_RNA (1)...(19): siRNA sense strand
auauaagagaagaagcaga

SEQ ID NO: 2270709 - RNA, 19 nt, Homo sapiens
  misc_RNA (1)...(19): siRNA sense strand
gaaguuaaggauaaagcuu

SEQ ID NO: 2270710 - RNA, 19 nt, Homo sapiens
  misc_RNA (1)...(19): siRNA sense strand
uauuggaaucagaugcaaa

SEQ ID NO: 2270711 - RNA, 19 nt, Homo sapiens
  misc_RNA (1)...(19): siRNA sense strand
ucugaaggaagaagaugaa

SEQ ID NO: 2270712 - RNA, 19 nt, Homo sapiens
  misc_RNA (1)...(19): siRNA sense strand
ccgugauaucguuaaagaa

SEQ ID NO: 2270713 - RNA, 19 nt, Homo sapiens
  misc_RNA (1)...(19): siRNA sense strand
uaguacaugacgaaguuaa

SEQ ID NO: 2270714 - RNA, 19 nt, Homo sapiens
  misc_RNA (1)...(19): siRNA sense strand
caagcugcaaagacggaaa

SEQ ID NO: 2270715 - RNA, 19 nt, Homo sapiens
  misc_RNA (1)...(19): siRNA sense strand
augaagaagguuccaacaa

SEQ ID NO: 2270716 - RNA, 19 nt, Homo sapiens
  misc_RNA (1)...(19): siRNA sense strand
cuaaggaaucucugaagga

SEQ ID NO: 2270717 - RNA, 19 nt, Homo sapiens
  misc_RNA (1)...(19): siRNA sense strand
ccaaaagauauaagagaag

SEQ ID NO: 2270718 - RNA, 19 nt, Homo sapiens
  misc_RNA (1)...(19): siRNA sense strand
uagcagguuuguuggcaga

SEQ ID NO: 2270719 - RNA, 19 nt, Homo sapiens
  misc_RNA (1)...(19): siRNA sense strand
ggauaaagcuuuugaacua

SEQ ID NO: 2270720 - RNA, 19 nt, Homo sapiens
  misc_RNA (1)...(19): siRNA sense strand
cguuaaagaaguugcaaaa

SEQ ID NO: 2270721 - RNA, 19 nt, Homo sapiens
  misc_RNA (1)...(19): siRNA sense strand
cuaugaaggcuguggaaaa

SEQ ID NO: 2270722 - RNA, 19 nt, Homo sapiens
  misc_RNA (1)...(19): siRNA sense strand
gagaaauaugcuaaggaau

SEQ ID NO: 2270723 - RNA, 19 nt, Homo sapiens
  misc_RNA (1)...(19): siRNA sense strand
agauauaagagaagaagca

SEQ ID NO: 2270724 - RNA, 19 nt, Homo sapiens
  misc_RNA (1)...(19): siRNA sense strand
agagaaauaugcuaaggaa

SEQ ID NO: 2270725 - RNA, 19 nt, Homo sapiens
  misc_RNA (1)...(19): siRNA sense strand
agaaauaugcuaaggaauc

SEQ ID NO: 2270726 - RNA, 19 nt, Homo sapiens
  misc_RNA (1)...(19): siRNA sense strand
cggaaauagagaagcuuca

SEQ ID NO: 2270727 - RNA, 19 nt, Homo sapiens
  misc_RNA (1)...(19): siRNA sense strand
ugugaaugacggugcgcaa

SEQ ID NO: 2270728 - RNA, 19 nt, Homo sapiens
  misc_RNA (1)...(19): siRNA sense strand
ucguuaaagaaguugcaaa

SEQ ID NO: 2270729 - RNA, 19 nt, Homo sapiens
  misc_RNA (1)...(19): siRNA sense strand
auauaagagaagaagcaga

SEQ ID NO: 2270730 - RNA, 19 nt, Homo sapiens
  misc_RNA (1)...(19): siRNA sense strand
gaaguuaaggauaaagcuu

SEQ ID NO: 2270731 - RNA, 19 nt, Homo sapiens
  misc_RNA (1)...(19): siRNA sense strand
uauuggaaucagaugcaaa

SEQ ID NO: 2270732 - RNA, 19 nt, Homo sapiens
  misc_RNA (1)...(19): siRNA sense strand
ucugaaggaagaagaugaa

SEQ ID NO: 2270733 - RNA, 19 nt, Homo sapiens
  misc_RNA (1)...(19): siRNA sense strand
ccgugauaucguuaaagaa

SEQ ID NO: 2270734 - RNA, 19 nt, Homo sapiens
  misc_RNA (1)...(19): siRNA sense strand
uaguacaugacgaaguuaa

SEQ ID NO: 2270735 - RNA, 19 nt, Homo sapiens
  misc_RNA (1)...(19): siRNA sense strand
caagcugcaaagacggaaa

SEQ ID NO: 2270736 - RNA, 19 nt, Homo sapiens
  misc_RNA (1)...(19): siRNA sense strand
augaagaagguuccaacaa

SEQ ID NO: 2270737 - RNA, 19 nt, Homo sapiens
  misc_RNA (1)...(19): siRNA sense strand
cuaaggaaucucugaagga

SEQ ID NO: 2270738 - RNA, 19 nt, Homo sapiens
  misc_RNA (1)...(19): siRNA sense strand
ccaaaagauauaagagaag

SEQ ID NO: 2270739 - RNA, 19 nt, Homo sapiens
  misc_RNA (1)...(19): siRNA sense strand
uagcagguuuguuggcaga

SEQ ID NO: 2270740 - RNA, 19 nt, Homo sapiens
  misc_RNA (1)...(19): siRNA sense strand
uuucaaaguccgagaguca

SEQ ID NO: 2270741 - RNA, 19 nt, Homo sapiens
  misc_RNA (1)...(19): siRNA sense strand
ccgagaaggacgaggacca

SEQ ID NO: 2270742 - RNA, 19 nt, Homo sapiens
  misc_RNA (1)...(19): siRNA sense strand
cgaaauagguacagagacg

SEQ ID NO: 2270743 - RNA, 19 nt, Homo sapiens
  misc_RNA (1)...(19): siRNA sense strand
ggaagaagcccaaaggagu

SEQ ID NO: 2270744 - RNA, 19 nt, Homo sapiens
  misc_RNA (1)...(19): siRNA sense strand
aggaagagacccaggagga

SEQ ID NO: 2270745 - RNA, 19 nt, Homo sapiens
  misc_RNA (1)...(19): siRNA sense strand
cauauuauacagugcgaca

SEQ ID NO: 2270746 - RNA, 19 nt, Homo sapiens
  misc_RNA (1)...(19): siRNA sense strand
ccuuacaacccaagaaacu

SEQ ID NO: 2270747 - RNA, 19 nt, Homo sapiens
  misc_RNA (1)...(19): siRNA sense strand
cgucacugcccgagaagga

SEQ ID NO: 2270748 - RNA, 19 nt, Homo sapiens
  misc_RNA (1)...(19): siRNA sense strand
gccucuugcugauggacaa

SEQ ID NO: 2270749 - RNA, 19 nt, Homo sapiens
  misc_RNA (1)...(19): siRNA sense strand
cguuaaaaugcgcacaaua

SEQ ID NO: 2270750 - RNA, 19 nt, Homo sapiens
  misc_RNA (1)...(19): siRNA sense strand
aggaccaugcacugaguua

SEQ ID NO: 2270751 - RNA, 19 nt, Homo sapiens
  misc_RNA (1)...(19): siRNA sense strand
cggccauuuaccaggauau

SEQ ID NO: 2270752 - RNA, 19 nt, Homo sapiens
  misc_RNA (1)...(19): siRNA sense strand
ggacaagaggaaagacccu

SEQ ID NO: 2270753 - RNA, 19 nt, Homo sapiens
  misc_RNA (1)...(19): siRNA sense strand
cgacaugaagccagugacu

SEQ ID NO: 2270754 - RNA, 19 nt, Homo sapiens
  misc_RNA (1)...(19): siRNA sense strand
ccuuaaaugccgcacccua

SEQ ID NO: 2270755 - RNA, 19 nt, Homo sapiens
  misc_RNA (1)...(19): siRNA sense strand
cuuuggagucccugaauca

SEQ ID NO: 2270756 - RNA, 19 nt, Homo sapiens
  misc_RNA (1)...(19): siRNA sense strand
cuguuagaaaugaggaagu

SEQ ID NO: 2270757 - RNA, 19 nt, Homo sapiens
  misc_RNA (1)...(19): siRNA sense strand
ugggaaagaagcagagaaa

SEQ ID NO: 2270758 - RNA, 19 nt, Homo sapiens
  misc_RNA (1)...(19): siRNA sense strand
ugacaucaucagagagaaa

SEQ ID NO: 2270759 - RNA, 19 nt, Homo sapiens
  misc_RNA (1)...(19): siRNA sense strand
ggauugaagaagagcagaa

SEQ ID NO: 2270760 - RNA, 19 nt, Homo sapiens
  misc_RNA (1)...(19): siRNA sense strand
ggacaagggaauacggaga

SEQ ID NO: 2270761 - RNA, 19 nt, Homo sapiens
  misc_RNA (1)...(19): siRNA sense strand
cgaaagaaguggagagagg

SEQ ID NO: 2270762 - RNA, 19 nt, Homo sapiens
  misc_RNA (1)...(19): siRNA sense strand
uggagagaggaaagaguaa

SEQ ID NO: 2270763 - RNA, 19 nt, Homo sapiens
  misc_RNA (1)...(19): siRNA sense strand
ucguauaaaugcugcugaa

SEQ ID NO: 2270764 - RNA, 19 nt, Homo sapiens
  misc_RNA (1)...(19): siRNA sense strand
aaagaaguggagagaggaa

SEQ ID NO: 2270765 - RNA, 19 nt, Homo sapiens
  misc_RNA (1)...(19): siRNA sense strand
cagaaaagcaagaggaaag

SEQ ID NO: 2270766 - RNA, 19 nt, Homo sapiens
  misc_RNA (1)...(19): siRNA sense strand
ggagagaacggucuggcaa

SEQ ID NO: 2270767 - RNA, 19 nt, Homo sapiens
  misc_RNA (1)...(19): siRNA sense strand
cgauauugacguucccaaa

SEQ ID NO: 2270768 - RNA, 19 nt, Homo sapiens
  misc_RNA (1)...(19): siRNA sense strand
agaggaaagggcacgaaua

SEQ ID NO: 2270769 - RNA, 19 nt, Homo sapiens
  misc_RNA (1)...(19): siRNA sense strand
gggagagcaaugacggcaa

SEQ ID NO: 2270770 - RNA, 19 nt, Homo sapiens
  misc_RNA (1)...(19): siRNA sense strand
gcaacaauucaaagcccaa

SEQ ID NO: 2270771 - RNA, 19 nt, Homo sapiens
  misc_RNA (1)...(19): siRNA sense strand
ggaugguguuccaagaaaa

SEQ ID NO: 2270772 - RNA, 19 nt, Homo sapiens
  misc_RNA (1)...(19): siRNA sense strand
ggaccagacgaguggagau

SEQ ID NO: 2270773 - RNA, 19 nt, Homo sapiens
  misc_RNA (1)...(19): siRNA sense strand
cauggaacaucacgggcaa

SEQ ID NO: 2270774 - RNA, 19 nt, Homo sapiens
  misc_RNA (1)...(19): siRNA sense strand
uggacaucucucugggaaa

SEQ ID NO: 2270775 - RNA, 19 nt, Homo sapiens
  misc_RNA (1)...(19): siRNA sense strand
gagagaacggucuggcaau

SEQ ID NO: 2270776 - RNA, 19 nt, Homo sapiens
  misc_RNA (1)...(19): siRNA sense strand
gcaaauuagcugagaccac

SEQ ID NO: 2270777 - RNA, 19 nt, Homo sapiens
  misc_RNA (1)...(19): siRNA sense strand
accauaagcaggagagcau

SEQ ID NO: 2270778 - RNA, 19 nt, Homo sapiens
  misc_RNA (1)...(19): siRNA sense strand
ggaauuggccggacaggga

SEQ ID NO: 2270779 - RNA, 19 nt, Homo sapiens
  misc_RNA (1)...(19): siRNA sense strand
aagaagagcagaaaagcaa

SEQ ID NO: 2270780 - RNA, 19 nt, Homo sapiens
  misc_RNA (1)...(19): siRNA sense strand
ggcaauuaaaagagaagaa

SEQ ID NO: 2270781 - RNA, 19 nt, Homo sapiens
  misc_RNA (1)...(19): siRNA sense strand
agaaaugagagaagacagu

SEQ ID NO: 2270782 - RNA, 19 nt, Homo sapiens
  misc_RNA (1)...(19): siRNA sense strand
guggaacauuauaagaaga

SEQ ID NO: 2270783 - RNA, 19 nt, Homo sapiens
  misc_RNA (1)...(19): siRNA sense strand
cagggaugguccagacaga

SEQ ID NO: 2270784 - RNA, 19 nt, Homo sapiens
  misc_RNA (1)...(19): siRNA sense strand
gcagaaaagcaagaggaaa

SEQ ID NO: 2270785 - RNA, 19 nt, Homo sapiens
  misc_RNA (1)...(19): siRNA sense strand
aauuugaaaccaagugcaa

SEQ ID NO: 2270786 - RNA, 19 nt, Homo sapiens
  misc_RNA (1)...(19): siRNA sense strand
caucagagagaaagguguu

SEQ ID NO: 2270787 - RNA, 19 nt, Homo sapiens
  misc_RNA (1)...(19): siRNA sense strand
augacaaaggggagagcaa

SEQ ID NO: 2270788 - RNA, 19 nt, Homo sapiens
  misc_RNA (1)...(19): siRNA sense strand
aaaagagggucaaaggcaa

SEQ ID NO: 2270789 - RNA, 19 nt, Homo sapiens
  misc_RNA (1)...(19): siRNA sense strand
aaagguuggacaagggaau

SEQ ID NO: 2270790 - RNA, 19 nt, Homo sapiens
  misc_RNA (1)...(19): siRNA sense strand
ccagcauuauauugaaaca

SEQ ID NO: 2270791 - RNA, 19 nt, Homo sapiens
  misc_RNA (1)...(19): siRNA sense strand
ucgagaacuaagcaaauua

SEQ ID NO: 2270792 - RNA, 19 nt, Homo sapiens
  misc_RNA (1)...(19): siRNA sense strand
ugacuauacgcuaagagaa

SEQ ID NO: 2270793 - RNA, 19 nt, Homo sapiens
  misc_RNA (1)...(19): siRNA sense strand
acacuuuccguuagaagaa

SEQ ID NO: 2270794 - RNA, 19 nt, Homo sapiens
  misc_RNA (1)...(19): siRNA sense strand
gguuugauucuuugacaga

SEQ ID NO: 2270795 - RNA, 19 nt, Homo sapiens
  misc_RNA (1)...(19): siRNA sense strand
cgucaugcguguuaggaac

SEQ ID NO: 2270796 - RNA, 19 nt, Homo sapiens
  misc_RNA (1)...(19): siRNA sense strand
agcugagaccacagauaaa

SEQ ID NO: 2270797 - RNA, 19 nt, Homo sapiens
  misc_RNA (1)...(19): siRNA sense strand
gauugaagaagagcagaaa

SEQ ID NO: 2270798 - RNA, 19 nt, Homo sapiens
  misc_RNA (1)...(19): siRNA sense strand
aaacaaggcuuuugggaag

SEQ ID NO: 2270799 - RNA, 19 nt, Homo sapiens
  misc_RNA (1)...(19): siRNA sense strand
gcgucaugcguguuaggaa

SEQ ID NO: 2270800 - RNA, 19 nt, Homo sapiens
  misc_RNA (1)...(19): siRNA sense strand
gacuauacgcuaagagaac

SEQ ID NO: 2270801 - RNA, 19 nt, Homo sapiens
  misc_RNA (1)...(19): siRNA sense strand
ucacugguguggaggcaga

SEQ ID NO: 2270802 - RNA, 19 nt, Homo sapiens
  misc_RNA (1)...(19): siRNA sense strand
aauagaaagcagaguucga

SEQ ID NO: 2270803 - RNA, 19 nt, Homo sapiens
  misc_RNA (1)...(19): siRNA sense strand
agaaagcagaguucgagaa

SEQ ID NO: 2270804 - RNA, 19 nt, Homo sapiens
  misc_RNA (1)...(19): siRNA sense strand
aggaaagggcacgaauaua

SEQ ID NO: 2270805 - RNA, 19 nt, Homo sapiens
  misc_RNA (1)...(19): siRNA sense strand
cguuagaagaaauggagcu

SEQ ID NO: 2270806 - RNA, 19 nt, Homo sapiens
  misc_RNA (1)...(19): siRNA sense strand
uggagaugucauugagcuu

SEQ ID NO: 2270807 - RNA, 19 nt, Homo sapiens
  misc_RNA (1)...(19): siRNA sense strand
cuaaagugacccauguuau

SEQ ID NO: 2270808 - RNA, 19 nt, Homo sapiens
  misc_RNA (1)...(19): siRNA sense strand
uacaacaacaggagugcaa

SEQ ID NO: 2270809 - RNA, 19 nt, Homo sapiens
  misc_RNA (1)...(19): siRNA sense strand
agaaagguguugacugcga

SEQ ID NO: 2270810 - RNA, 19 nt, Homo sapiens
  misc_RNA (1)...(19): siRNA sense strand
uuugaaaccaagugcaaca

SEQ ID NO: 2270811 - RNA, 19 nt, Homo sapiens
  misc_RNA (1)...(19): siRNA sense strand
caacgaaagaaguggagag

SEQ ID NO: 2270812 - RNA, 19 nt, Homo sapiens
  misc_RNA (1)...(19): siRNA sense strand
uggagaaagaaucgguuaa

SEQ ID NO: 2270813 - RNA, 19 nt, Homo sapiens
  misc_RNA (1)...(19): siRNA sense strand
guuuaaagugagagaaucu

SEQ ID NO: 2270814 - RNA, 19 nt, Homo sapiens
  misc_RNA (1)...(19): siRNA sense strand
caaaauguauaaagggaga

SEQ ID NO: 2270815 - RNA, 19 nt, Homo sapiens
  misc_RNA (1)...(19): siRNA sense strand
uauacagaaacgauggaaa

SEQ ID NO: 2270816 - RNA, 19 nt, Homo sapiens
  misc_RNA (1)...(19): siRNA sense strand
cagaaaacagaaaucgaaa

SEQ ID NO: 2270817 - RNA, 19 nt, Homo sapiens
  misc_RNA (1)...(19): siRNA sense strand
agaaaucgaaacagauaca

SEQ ID NO: 2270818 - RNA, 19 nt, Homo sapiens
  misc_RNA (1)...(19): siRNA sense strand
ugggaacagaauaggucua

SEQ ID NO: 2270819 - RNA, 19 nt, Homo sapiens
  misc_RNA (1)...(19): siRNA sense strand
ugcaaaaugcugagaauga

SEQ ID NO: 2270820 - RNA, 19 nt, Homo sapiens
  misc_RNA (1)...(19): siRNA sense strand
agaccaaagcaguugucau

SEQ ID NO: 2270821 - RNA, 19 nt, Homo sapiens
  misc_RNA (1)...(19): siRNA sense strand
acugcaaaaugcugagaau

SEQ ID NO: 2270822 - RNA, 19 nt, Homo sapiens
  misc_RNA (1)...(19): siRNA sense strand
uggagaaagaaucgguuaa

SEQ ID NO: 2270823 - RNA, 19 nt, Homo sapiens
  misc_RNA (1)...(19): siRNA sense strand
guuuaaagugagagaaucu

SEQ ID NO: 2270824 - RNA, 19 nt, Homo sapiens
  misc_RNA (1)...(19): siRNA sense strand
caaaauguauaaagggaga

SEQ ID NO: 2270825 - RNA, 19 nt, Homo sapiens
  misc_RNA (1)...(19): siRNA sense strand
uauacagaaacgauggaaa

SEQ ID NO: 2270826 - RNA, 19 nt, Homo sapiens
  misc_RNA (1)...(19): siRNA sense strand
cagaaaacagaaaucgaaa

SEQ ID NO: 2270827 - RNA, 19 nt, Homo sapiens
  misc_RNA (1)...(19): siRNA sense strand
agaaaucgaaacagauaca

SEQ ID NO: 2270828 - RNA, 19 nt, Homo sapiens
  misc_RNA (1)...(19): siRNA sense strand
ugggaacagaauaggucua

SEQ ID NO: 2270829 - RNA, 19 nt, Homo sapiens
  misc_RNA (1)...(19): siRNA sense strand
ugcaaaaugcugagaauga

SEQ ID NO: 2270830 - RNA, 19 nt, Homo sapiens
  misc_RNA (1)...(19): siRNA sense strand
agaccaaagcaguugucau

SEQ ID NO: 2270831 - RNA, 19 nt, Homo sapiens
  misc_RNA (1)...(19): siRNA sense strand
acugcaaaaugcugagaau

SEQ ID NO: 2270832 - RNA, 19 nt, Homo sapiens
  misc_RNA (1)...(19): siRNA sense strand
uggagaaagaaucgguuaa

SEQ ID NO: 2270833 - RNA, 19 nt, Homo sapiens
  misc_RNA (1)...(19): siRNA sense strand
guuuaaagugagagaaucu

SEQ ID NO: 2270834 - RNA, 19 nt, Homo sapiens
  misc_RNA (1)...(19): siRNA sense strand
caaaauguauaaagggaga

SEQ ID NO: 2270835 - RNA, 19 nt, Homo sapiens
  misc_RNA (1)...(19): siRNA sense strand
uauacagaaacgauggaaa

SEQ ID NO: 2270836 - RNA, 19 nt, Homo sapiens
  misc_RNA (1)...(19): siRNA sense strand
cagaaaacagaaaucgaaa

SEQ ID NO: 2270837 - RNA, 19 nt, Homo sapiens
  misc_RNA (1)...(19): siRNA sense strand
agaaaucgaaacagauaca

SEQ ID NO: 2270838 - RNA, 19 nt, Homo sapiens
  misc_RNA (1)...(19): siRNA sense strand
ugggaacagaauaggucua

SEQ ID NO: 2270839 - RNA, 19 nt, Homo sapiens
  misc_RNA (1)...(19): siRNA sense strand
ugcaaaaugcugagaauga

SEQ ID NO: 2270840 - RNA, 19 nt, Homo sapiens
  misc_RNA (1)...(19): siRNA sense strand
agaccaaagcaguugucau

SEQ ID NO: 2270841 - RNA, 19 nt, Homo sapiens
  misc_RNA (1)...(19): siRNA sense strand
acugcaaaaugcugagaau

SEQ ID NO: 2270842 - RNA, 19 nt, Homo sapiens
  misc_RNA (1)...(19): siRNA sense strand
ggguauuauugcagggaaa

SEQ ID NO: 2270843 - RNA, 19 nt, Homo sapiens
  misc_RNA (1)...(19): siRNA sense strand
gcacgaaauccgaaagcca

SEQ ID NO: 2270844 - RNA, 19 nt, Homo sapiens
  misc_RNA (1)...(19): siRNA sense strand
caccagaugaagauggaaa

SEQ ID NO: 2270845 - RNA, 19 nt, Homo sapiens
  misc_RNA (1)...(19): siRNA sense strand
gauccauggcacagcuaaa

SEQ ID NO: 2270846 - RNA, 19 nt, Homo sapiens
  misc_RNA (1)...(19): siRNA sense strand
aaggauaaacccagaguca

SEQ ID NO: 2270847 - RNA, 19 nt, Homo sapiens
  misc_RNA (1)...(19): siRNA sense strand
gggaacauauuguggccuu

SEQ ID NO: 2270848 - RNA, 19 nt, Homo sapiens
  misc_RNA (1)...(19): siRNA sense strand
agaguuuauccgagaacaa

SEQ ID NO: 2270849 - RNA, 19 nt, Homo sapiens
  misc_RNA (1)...(19): siRNA sense strand
agaccuaaugauuggaauu

SEQ ID NO: 2270850 - RNA, 19 nt, Homo sapiens
  misc_RNA (1)...(19): siRNA sense strand
cggaaacggaagauguauu

SEQ ID NO: 2270851 - RNA, 19 nt, Homo sapiens
  misc_RNA (1)...(19): siRNA sense strand
caagagaguuuauccgaga

SEQ ID NO: 2270852 - RNA, 19 nt, Homo sapiens
  misc_RNA (1)...(19): siRNA sense strand
cggaguuacccaaagagaa

SEQ ID NO: 2270853 - RNA, 19 nt, Homo sapiens
  misc_RNA (1)...(19): siRNA sense strand
gaagauggauauuugcgaa

SEQ ID NO: 2270854 - RNA, 19 nt, Homo sapiens
  misc_RNA (1)...(19): siRNA sense strand
ccaucaggaagcaguuaaa

SEQ ID NO: 2270855 - RNA, 19 nt, Homo sapiens
  misc_RNA (1)...(19): siRNA sense strand
cauacaucagcgacagaaa

SEQ ID NO: 2270856 - RNA, 19 nt, Homo sapiens
  misc_RNA (1)...(19): siRNA sense strand
auacguucuuucaggcaaa

SEQ ID NO: 2270857 - RNA, 19 nt, Homo sapiens
  misc_RNA (1)...(19): siRNA sense strand
uugcaaaugaaaugaccua

SEQ ID NO: 2270858 - RNA, 19 nt, Homo sapiens
  misc_RNA (1)...(19): siRNA sense strand
caaagaagcuacuaccuca

SEQ ID NO: 2270859 - RNA, 19 nt, Homo sapiens
  misc_RNA (1)...(19): siRNA sense strand
acuuagaaaccaagagucu

SEQ ID NO: 2270860 - RNA, 19 nt, Homo sapiens
  misc_RNA (1)...(19): siRNA sense strand
ccguaucacaccagaugaa

SEQ ID NO: 2270861 - RNA, 19 nt, Homo sapiens
  misc_RNA (1)...(19): siRNA sense strand
uuacaacugaagauggaua

SEQ ID NO: 2270862 - RNA, 19 nt, Homo sapiens
  misc_RNA (1)...(19): siRNA sense strand
gcacagugggcuaaaacaa

SEQ ID NO: 2270863 - RNA, 19 nt, Homo sapiens
  misc_RNA (1)...(19): siRNA sense strand
guguguaugaagaagguuu

SEQ ID NO: 2270864 - RNA, 19 nt, Homo sapiens
  misc_RNA (1)...(19): siRNA sense strand
ucuuaagggaggaguggau

SEQ ID NO: 2270865 - RNA, 19 nt, Homo sapiens
  misc_RNA (1)...(19): siRNA sense strand
agggaggaguggaucaaaa

SEQ ID NO: 2270866 - RNA, 19 nt, Homo sapiens
  misc_RNA (1)...(19): siRNA sense strand
guuugugugugaagcgauu

SEQ ID NO: 2270867 - RNA, 19 nt, Homo sapiens
  misc_RNA (1)...(19): siRNA sense strand
gggugugacugaaaaggaa

SEQ ID NO: 2270868 - RNA, 19 nt, Homo sapiens
  misc_RNA (1)...(19): siRNA sense strand
cauacaucauccaggcuau

SEQ ID NO: 2270869 - RNA, 19 nt, Homo sapiens
  misc_RNA (1)...(19): siRNA sense strand
cgacagaaacaggcugaau

SEQ ID NO: 2270870 - RNA, 19 nt, Homo sapiens
  misc_RNA (1)...(19): siRNA sense strand
cugaagaugaacugaacca

SEQ ID NO: 2270871 - RNA, 19 nt, Homo sapiens
  misc_RNA (1)...(19): siRNA sense strand
gugcagacaucaagccagu

SEQ ID NO: 2270872 - RNA, 19 nt, Homo sapiens
  misc_RNA (1)...(19): siRNA sense strand
acuaugggcucucggaaca

SEQ ID NO: 2270873 - RNA, 19 nt, Homo sapiens
  misc_RNA (1)...(19): siRNA sense strand
acaagaaugauaaugguga

SEQ ID NO: 2270874 - RNA, 19 nt, Homo sapiens
  misc_RNA (1)...(19): siRNA sense strand
augauaauggugacagcua

SEQ ID NO: 2270875 - RNA, 19 nt, Homo sapiens
  misc_RNA (1)...(19): siRNA sense strand
gcucauuugcugacuucaa

SEQ ID NO: 2270876 - RNA, 19 nt, Homo sapiens
  misc_RNA (1)...(19): siRNA sense strand
gcuaaaacaaucagaagca

SEQ ID NO: 2270877 - RNA, 19 nt, Homo sapiens
  misc_RNA (1)...(19): siRNA sense strand
guguuggucacuauggaaa

SEQ ID NO: 2270878 - RNA, 19 nt, Homo sapiens
  misc_RNA (1)...(19): siRNA sense strand
guuacgugaacauggaaau

SEQ ID NO: 2270879 - RNA, 19 nt, Homo sapiens
  misc_RNA (1)...(19): siRNA sense strand
gagaacaauccggcacaaa

SEQ ID NO: 2270880 - RNA, 19 nt, Homo sapiens
  misc_RNA (1)...(19): siRNA sense strand
agacaucaagccaguacaa

SEQ ID NO: 2270881 - RNA, 19 nt, Homo sapiens
  misc_RNA (1)...(19): siRNA sense strand
uguguaugaagaagguuua

SEQ ID NO: 2270882 - RNA, 19 nt, Homo sapiens
  misc_RNA (1)...(19): siRNA sense strand
gggugaacauucucaaaau

SEQ ID NO: 2270883 - RNA, 19 nt, Homo sapiens
  misc_RNA (1)...(19): siRNA sense strand
agauaaccuugcaaaugaa

SEQ ID NO: 2270884 - RNA, 19 nt, Homo sapiens
  misc_RNA (1)...(19): siRNA sense strand
aagaagguuuaguccaaau

SEQ ID NO: 2270885 - RNA, 19 nt, Homo sapiens
  misc_RNA (1)...(19): siRNA sense strand
agucugaagaugaacugaa

SEQ ID NO: 2270886 - RNA, 19 nt, Homo sapiens
  misc_RNA (1)...(19): siRNA sense strand
augcaaguuacgugaacau

SEQ ID NO: 2270887 - RNA, 19 nt, Homo sapiens
  misc_RNA (1)...(19): siRNA sense strand
gggacacuuuggagggauc

SEQ ID NO: 2270888 - RNA, 19 nt, Homo sapiens
  misc_RNA (1)...(19): siRNA sense strand
aagaacacacagugacaca

SEQ ID NO: 2270889 - RNA, 19 nt, Homo sapiens
  misc_RNA (1)...(19): siRNA sense strand
uugcaugaaucuagagaaa

SEQ ID NO: 2270890 - RNA, 19 nt, Homo sapiens
  misc_RNA (1)...(19): siRNA sense strand
ccaguauauuccugagaaa

SEQ ID NO: 2270891 - RNA, 19 nt, Homo sapiens
  misc_RNA (1)...(19): siRNA sense strand
augcaagggaucagaguaa

SEQ ID NO: 2270892 - RNA, 19 nt, Homo sapiens
  misc_RNA (1)...(19): siRNA sense strand
ccuauuuaaccaagagaaa

SEQ ID NO: 2270893 - RNA, 19 nt, Homo sapiens
  misc_RNA (1)...(19): siRNA sense strand
caauaaggaagcagcuaaa

SEQ ID NO: 2270894 - RNA, 19 nt, Homo sapiens
  misc_RNA (1)...(19): siRNA sense strand
ggaagaaaagcuagaaaau

SEQ ID NO: 2270895 - RNA, 19 nt, Homo sapiens
  misc_RNA (1)...(19): siRNA sense strand
caauguaaagggaggauau

SEQ ID NO: 2270896 - RNA, 19 nt, Homo sapiens
  misc_RNA (1)...(19): siRNA sense strand
gggaaguaguaagcagaaa

SEQ ID NO: 2270897 - RNA, 19 nt, Homo sapiens
  misc_RNA (1)...(19): siRNA sense strand
ggaaguaguaagcagaaau

SEQ ID NO: 2270898 - RNA, 19 nt, Homo sapiens
  misc_RNA (1)...(19): siRNA sense strand
ggaaauuaauggauuggga

SEQ ID NO: 2270899 - RNA, 19 nt, Homo sapiens
  misc_RNA (1)...(19): siRNA sense strand
uguauaugauguaguggaa

SEQ ID NO: 2270900 - RNA, 19 nt, Homo sapiens
  misc_RNA (1)...(19): siRNA sense strand
guucaguauggcaaagaaa

SEQ ID NO: 2270901 - RNA, 19 nt, Homo sapiens
  misc_RNA (1)...(19): siRNA sense strand
cagaaugaaaccugaugaa

SEQ ID NO: 2270902 - RNA, 19 nt, Homo sapiens
  misc_RNA (1)...(19): siRNA sense strand
gguuuggauucaauguaaa

SEQ ID NO: 2270903 - RNA, 19 nt, Homo sapiens
  misc_RNA (1)...(19): siRNA sense strand
uguccuaaucagaaugaaa

SEQ ID NO: 2270904 - RNA, 19 nt, Homo sapiens
  misc_RNA (1)...(19): siRNA sense strand
ugaacguggcagaguuaaa

SEQ ID NO: 2270905 - RNA, 19 nt, Homo sapiens
  misc_RNA (1)...(19): siRNA sense strand
gaggauaugaucagaagau

SEQ ID NO: 2270906 - RNA, 19 nt, Homo sapiens
  misc_RNA (1)...(19): siRNA sense strand
cagagaacuugucaggcua

SEQ ID NO: 2270907 - RNA, 19 nt, Homo sapiens
  misc_RNA (1)...(19): siRNA sense strand
ucugaugacagguuagaaa

SEQ ID NO: 2270908 - RNA, 19 nt, Homo sapiens
  misc_RNA (1)...(19): siRNA sense strand
ucgaguagcaccaggaaca

SEQ ID NO: 2270909 - RNA, 19 nt, Homo sapiens
  misc_RNA (1)...(19): siRNA sense strand
gaguuaaaugucaccaaua

SEQ ID NO: 2270910 - RNA, 19 nt, Homo sapiens
  misc_RNA (1)...(19): siRNA sense strand
guaagaacaaugagagauc

SEQ ID NO: 2270911 - RNA, 19 nt, Homo sapiens
  misc_RNA (1)...(19): siRNA sense strand
gcaagggaucagaguaaca

SEQ ID NO: 2270912 - RNA, 19 nt, Homo sapiens
  misc_RNA (1)...(19): siRNA sense strand
caucagaguuggcccgaga

SEQ ID NO: 2270913 - RNA, 19 nt, Homo sapiens
  misc_RNA (1)...(19): siRNA sense strand
agugaugucaggaggaauu

SEQ ID NO: 2270914 - RNA, 19 nt, Homo sapiens
  misc_RNA (1)...(19): siRNA sense strand
gaaauuaauggauugggaa

SEQ ID NO: 2270915 - RNA, 19 nt, Homo sapiens
  misc_RNA (1)...(19): siRNA sense strand
gaucaacuguaucggaaaa

SEQ ID NO: 2270916 - RNA, 19 nt, Homo sapiens
  misc_RNA (1)...(19): siRNA sense strand
gaaacaagagggcuggcaa

SEQ ID NO: 2270917 - RNA, 19 nt, Homo sapiens
  misc_RNA (1)...(19): siRNA sense strand
gcuucuaguucgaccuaau

SEQ ID NO: 2270918 - RNA, 19 nt, Homo sapiens
  misc_RNA (1)...(19): siRNA sense strand
augaagaaggcuuuguuaa

SEQ ID NO: 2270919 - RNA, 19 nt, Homo sapiens
  misc_RNA (1)...(19): siRNA sense strand
guugaacguggcagaguua

SEQ ID NO: 2270920 - RNA, 19 nt, Homo sapiens
  misc_RNA (1)...(19): siRNA sense strand
agacaggguauuugcaaga

SEQ ID NO: 2270921 - RNA, 19 nt, Homo sapiens
  misc_RNA (1)...(19): siRNA sense strand
auacugaagugguuugcaa

SEQ ID NO: 2270922 - RNA, 19 nt, Homo sapiens
  misc_RNA (1)...(19): siRNA sense strand
uggaagaaaagcuagaaaa

SEQ ID NO: 2270923 - RNA, 19 nt, Homo sapiens
  misc_RNA (1)...(19): siRNA sense strand
gguuagaaacacaaagucu

SEQ ID NO: 2270924 - RNA, 19 nt, Homo sapiens
  misc_RNA (1)...(19): siRNA sense strand
acccaaacagucaaagaaa

SEQ ID NO: 2270925 - RNA, 19 nt, Homo sapiens
  misc_RNA (1)...(19): siRNA sense strand
gcuaguugugagagacauu

SEQ ID NO: 2270926 - RNA, 19 nt, Homo sapiens
  misc_RNA (1)...(19): siRNA sense strand
gauccaaacaccuagucaa

SEQ ID NO: 2270927 - RNA, 19 nt, Homo sapiens
  misc_RNA (1)...(19): siRNA sense strand
agguuuggauucaauguaa

SEQ ID NO: 2270928 - RNA, 19 nt, Homo sapiens
  misc_RNA (1)...(19): siRNA sense strand
uaaagcuaguugugagaga

SEQ ID NO: 2270929 - RNA, 19 nt, Homo sapiens
  misc_RNA (1)...(19): siRNA sense strand
ccugaugauucgagugacu

SEQ ID NO: 2270930 - RNA, 19 nt, Homo sapiens
  misc_RNA (1)...(19): siRNA sense strand
agagaaacauuauugggau

SEQ ID NO: 2270931 - RNA, 19 nt, Homo sapiens
  misc_RNA (1)...(19): siRNA sense strand
aguaguaagcagaaauuca

SEQ ID NO: 2270932 - RNA, 19 nt, Homo sapiens
  misc_RNA (1)...(19): siRNA sense strand
ucagcaacacauaggcuua

SEQ ID NO: 2270933 - RNA, 19 nt, Homo sapiens
  misc_RNA (1)...(19): siRNA sense strand
ggaaagcauguguagaaca

SEQ ID NO: 2270934 - RNA, 19 nt, Homo sapiens
  misc_RNA (1)...(19): siRNA sense strand
auuaauggauugggaagua

SEQ ID NO: 2270935 - RNA, 19 nt, Homo sapiens
  misc_RNA (1)...(19): siRNA sense strand
cgucaucaacacaagcuaa

SEQ ID NO: 2270936 - RNA, 19 nt, Homo sapiens
  misc_RNA (1)...(19): siRNA sense strand
agguugugcuguuuauuaa

SEQ ID NO: 2270937 - RNA, 19 nt, Homo sapiens
  misc_RNA (1)...(19): siRNA sense strand
ggaucagaguaacaaugaa

SEQ ID NO: 2270938 - RNA, 19 nt, Homo sapiens
  misc_RNA (1)...(19): siRNA sense strand
cccaaacagucaaagaaaa

SEQ ID NO: 2270939 - RNA, 19 nt, Homo sapiens
  misc_RNA (1)...(19): siRNA sense strand
ccucagaauauuuccaaaa

SEQ ID NO: 2270940 - RNA, 19 nt, Homo sapiens
  misc_RNA (1)...(19): siRNA sense strand
guacgaaacaagagggcug

SEQ ID NO: 2270941 - RNA, 19 nt, Homo sapiens
  misc_RNA (1)...(19): siRNA sense strand
ggauccaaacaaaccaaua

SEQ ID NO: 2270942 - RNA, 19 nt, Homo sapiens
  misc_RNA (1)...(19): siRNA sense strand
aaacaaaccaauaaggaag

SEQ ID NO: 2270943 - RNA, 19 nt, Homo sapiens
  misc_RNA (1)...(19): siRNA sense strand
aagcgaaguguuuguaaau

SEQ ID NO: 2270944 - RNA, 19 nt, Homo sapiens
  misc_RNA (1)...(19): siRNA sense strand
augauguaguggaagaaaa

SEQ ID NO: 2270945 - RNA, 19 nt, Homo sapiens
  misc_RNA (1)...(19): siRNA sense strand
caaaauuacaucagcaaca

SEQ ID NO: 2270946 - RNA, 19 nt, Homo sapiens
  misc_RNA (1)...(19): siRNA sense strand
agaguuggcccgagacaga

SEQ ID NO: 2270947 - RNA, 19 nt, Homo sapiens
  misc_RNA (1)...(19): siRNA sense strand
gggauuuaauauggugaau

SEQ ID NO: 2270948 - RNA, 19 nt, Homo sapiens
  misc_RNA (1)...(19): siRNA sense strand
ggccagagaacaagggcaa

SEQ ID NO: 2270949 - RNA, 19 nt, Homo sapiens
  misc_RNA (1)...(19): siRNA sense strand
ggacguuucuugugcguga

SEQ ID NO: 2270950 - RNA, 19 nt, Homo sapiens
  misc_RNA (1)...(19): siRNA sense strand
agaagaagcuggagguccu

SEQ ID NO: 2270951 - RNA, 19 nt, Homo sapiens
  misc_RNA (1)...(19): siRNA sense strand
acacuaagaacaagaggga

SEQ ID NO: 2270952 - RNA, 19 nt, Homo sapiens
  misc_RNA (1)...(19): siRNA sense strand
ugcagaagcaggaggugaa

SEQ ID NO: 2270953 - RNA, 19 nt, Homo sapiens
  misc_RNA (1)...(19): siRNA sense strand
gcuaagaccuacaucgcca

SEQ ID NO: 2270954 - RNA, 19 nt, Homo sapiens
  misc_RNA (1)...(19): siRNA sense strand
augagaacgcuaagaccua

SEQ ID NO: 2270955 - RNA, 19 nt, Homo sapiens
  misc_RNA (1)...(19): siRNA sense strand
ccgacuacaucaaugccaa

SEQ ID NO: 2270956 - RNA, 19 nt, Homo sapiens
  misc_RNA (1)...(19): siRNA sense strand
acaagaagcaggaguccga

SEQ ID NO: 2270957 - RNA, 19 nt, Homo sapiens
  misc_RNA (1)...(19): siRNA sense strand
auugaaaccacuaagaaga

SEQ ID NO: 2270958 - RNA, 19 nt, Homo sapiens
  misc_RNA (1)...(19): siRNA sense strand
ggcagcggccagagaacaa

SEQ ID NO: 2270959 - RNA, 19 nt, Homo sapiens
  misc_RNA (1)...(19): siRNA sense strand
ccacuaagaagaagcugga

SEQ ID NO: 2270960 - RNA, 19 nt, Homo sapiens
  misc_RNA (1)...(19): siRNA sense strand
ugaagaaugcccaugccaa

SEQ ID NO: 2270961 - RNA, 19 nt, Homo sapiens
  misc_RNA (1)...(19): siRNA sense strand
acuaagaacaagagggagg

SEQ ID NO: 2270962 - RNA, 19 nt, Homo sapiens
  misc_RNA (1)...(19): siRNA sense strand
ggcccuacucugugaccaa

SEQ ID NO: 2270963 - RNA, 19 nt, Homo sapiens
  misc_RNA (1)...(19): siRNA sense strand
aguuugagaguuugcagaa

SEQ ID NO: 2270964 - RNA, 19 nt, Homo sapiens
  misc_RNA (1)...(19): siRNA sense strand
ggccagagaacaagggcaa

SEQ ID NO: 2270965 - RNA, 19 nt, Homo sapiens
  misc_RNA (1)...(19): siRNA sense strand
ggacguuucuugugcguga

SEQ ID NO: 2270966 - RNA, 19 nt, Homo sapiens
  misc_RNA (1)...(19): siRNA sense strand
agaagaagcuggagguccu

SEQ ID NO: 2270967 - RNA, 19 nt, Homo sapiens
  misc_RNA (1)...(19): siRNA sense strand
acacuaagaacaagaggga

SEQ ID NO: 2270968 - RNA, 19 nt, Homo sapiens
  misc_RNA (1)...(19): siRNA sense strand
ugcagaagcaggaggugaa

SEQ ID NO: 2270969 - RNA, 19 nt, Homo sapiens
  misc_RNA (1)...(19): siRNA sense strand
gcuaagaccuacaucgcca

SEQ ID NO: 2270970 - RNA, 19 nt, Homo sapiens
  misc_RNA (1)...(19): siRNA sense strand
augagaacgcuaagaccua

SEQ ID NO: 2270971 - RNA, 19 nt, Homo sapiens
  misc_RNA (1)...(19): siRNA sense strand
ccgacuacaucaaugccaa

SEQ ID NO: 2270972 - RNA, 19 nt, Homo sapiens
  misc_RNA (1)...(19): siRNA sense strand
acaagaagcaggaguccga

SEQ ID NO: 2270973 - RNA, 19 nt, Homo sapiens
  misc_RNA (1)...(19): siRNA sense strand
auugaaaccacuaagaaga

SEQ ID NO: 2270974 - RNA, 19 nt, Homo sapiens
  misc_RNA (1)...(19): siRNA sense strand
ggcagcggccagagaacaa

SEQ ID NO: 2270975 - RNA, 19 nt, Homo sapiens
  misc_RNA (1)...(19): siRNA sense strand
ccacuaagaagaagcugga

SEQ ID NO: 2270976 - RNA, 19 nt, Homo sapiens
  misc_RNA (1)...(19): siRNA sense strand
ugaagaaugcccaugccaa

SEQ ID NO: 2270977 - RNA, 19 nt, Homo sapiens
  misc_RNA (1)...(19): siRNA sense strand
acuaagaacaagagggagg

SEQ ID NO: 2270978 - RNA, 19 nt, Homo sapiens
  misc_RNA (1)...(19): siRNA sense strand
ggcccuacucugugaccaa

SEQ ID NO: 2270979 - RNA, 19 nt, Homo sapiens
  misc_RNA (1)...(19): siRNA sense strand
aguuugagaguuugcagaa

SEQ ID NO: 2270980 - RNA, 19 nt, Homo sapiens
  misc_RNA (1)...(19): siRNA sense strand
ggccagagaacaagggcaa

SEQ ID NO: 2270981 - RNA, 19 nt, Homo sapiens
  misc_RNA (1)...(19): siRNA sense strand
ggacguuucuugugcguga

SEQ ID NO: 2270982 - RNA, 19 nt, Homo sapiens
  misc_RNA (1)...(19): siRNA sense strand
agaagaagcuggagguccu

SEQ ID NO: 2270983 - RNA, 19 nt, Homo sapiens
  misc_RNA (1)...(19): siRNA sense strand
acacuaagaacaagaggga

SEQ ID NO: 2270984 - RNA, 19 nt, Homo sapiens
  misc_RNA (1)...(19): siRNA sense strand
ugcagaagcaggaggugaa

SEQ ID NO: 2270985 - RNA, 19 nt, Homo sapiens
  misc_RNA (1)...(19): siRNA sense strand
gcuaagaccuacaucgcca

SEQ ID NO: 2270986 - RNA, 19 nt, Homo sapiens
  misc_RNA (1)...(19): siRNA sense strand
augagaacgcuaagaccua

SEQ ID NO: 2270987 - RNA, 19 nt, Homo sapiens
  misc_RNA (1)...(19): siRNA sense strand
ccgacuacaucaaugccaa

SEQ ID NO: 2270988 - RNA, 19 nt, Homo sapiens
  misc_RNA (1)...(19): siRNA sense strand
acaagaagcaggaguccga

SEQ ID NO: 2270989 - RNA, 19 nt, Homo sapiens
  misc_RNA (1)...(19): siRNA sense strand
auugaaaccacuaagaaga

SEQ ID NO: 2270990 - RNA, 19 nt, Homo sapiens
  misc_RNA (1)...(19): siRNA sense strand
ggcagcggccagagaacaa

SEQ ID NO: 2270991 - RNA, 19 nt, Homo sapiens
  misc_RNA (1)...(19): siRNA sense strand
ccacuaagaagaagcugga

SEQ ID NO: 2270992 - RNA, 19 nt, Homo sapiens
  misc_RNA (1)...(19): siRNA sense strand
ugaagaaugcccaugccaa

SEQ ID NO: 2270993 - RNA, 19 nt, Homo sapiens
  misc_RNA (1)...(19): siRNA sense strand
acuaagaacaagagggagg

SEQ ID NO: 2270994 - RNA, 19 nt, Homo sapiens
  misc_RNA (1)...(19): siRNA sense strand
ggcccuacucugugaccaa

SEQ ID NO: 2270995 - RNA, 19 nt, Homo sapiens
  misc_RNA (1)...(19): siRNA sense strand
aguuugagaguuugcagaa

SEQ ID NO: 2270996 - RNA, 19 nt, Homo sapiens
  misc_RNA (1)...(19): siRNA sense strand
aaggaaucuaugaggaaua

SEQ ID NO: 2270997 - RNA, 19 nt, Homo sapiens
  misc_RNA (1)...(19): siRNA sense strand
ucgcagagaaggagggcau

SEQ ID NO: 2270998 - RNA, 19 nt, Homo sapiens
  misc_RNA (1)...(19): siRNA sense strand
ucuugagaguggucagaaa

SEQ ID NO: 2270999 - RNA, 19 nt, Homo sapiens
  misc_RNA (1)...(19): siRNA sense strand
cagagaaacucgaaggaag

SEQ ID NO: 2271000 - RNA, 19 nt, Homo sapiens
  misc_RNA (1)...(19): siRNA sense strand
agacauucgucgugagaac

SEQ ID NO: 2271001 - RNA, 19 nt, Homo sapiens
  misc_RNA (1)...(19): siRNA sense strand
uccaggaaaccuagagaaa

SEQ ID NO: 2271002 - RNA, 19 nt, Homo sapiens
  misc_RNA (1)...(19): siRNA sense strand
caguacuggccuuuagaaa

SEQ ID NO: 2271003 - RNA, 19 nt, Homo sapiens
  misc_RNA (1)...(19): siRNA sense strand
acaaaguccgggagaggau

SEQ ID NO: 2271004 - RNA, 19 nt, Homo sapiens
  misc_RNA (1)...(19): siRNA sense strand
cggcagaaacgccagguga

SEQ ID NO: 2271005 - RNA, 19 nt, Homo sapiens
  misc_RNA (1)...(19): siRNA sense strand
aagaaaacaacgcuagaaa

SEQ ID NO: 2271006 - RNA, 19 nt, Homo sapiens
  misc_RNA (1)...(19): siRNA sense strand
ccaguuucauggauggcua

SEQ ID NO: 2271007 - RNA, 19 nt, Homo sapiens
  misc_RNA (1)...(19): siRNA sense strand
ccaaucuaggcguggagaa

SEQ ID NO: 2271008 - RNA, 19 nt, Homo sapiens
  misc_RNA (1)...(19): siRNA sense strand
uuguaaagcugaaaccuca

SEQ ID NO: 2271009 - RNA, 19 nt, Homo sapiens
  misc_RNA (1)...(19): siRNA sense strand
aggaaggaaggcauuguaa

SEQ ID NO: 2271010 - RNA, 19 nt, Homo sapiens
  misc_RNA (1)...(19): siRNA sense strand
ccgggagaggauucaaaua

SEQ ID NO: 2271011 - RNA, 19 nt, Homo sapiens
  misc_RNA (1)...(19): siRNA sense strand
gagauuaacaaguggacag

SEQ ID NO: 2271012 - RNA, 19 nt, Homo sapiens
  misc_RNA (1)...(19): siRNA sense strand
agggagugucuuccagaaa

SEQ ID NO: 2271013 - RNA, 19 nt, Homo sapiens
  misc_RNA (1)...(19): siRNA sense strand
ucauugacuucuugagagu

SEQ ID NO: 2271014 - RNA, 19 nt, Homo sapiens
  misc_RNA (1)...(19): siRNA sense strand
ucuaugaggaauaugaaga

SEQ ID NO: 2271015 - RNA, 19 nt, Homo sapiens
  misc_RNA (1)...(19): siRNA sense strand
ugaggaaggcggcaggaga

SEQ ID NO: 2271016 - RNA, 19 nt, Homo sapiens
  misc_RNA (1)...(19): siRNA sense strand
aggaaggcggcaggagaaa

SEQ ID NO: 2271017 - RNA, 19 nt, Homo sapiens
  misc_RNA (1)...(19): siRNA sense strand
cuagagugaagcuaacaaa

SEQ ID NO: 2271018 - RNA, 19 nt, Homo sapiens
  misc_RNA (1)...(19): siRNA sense strand
ucgaaggaaggaaggcauu

SEQ ID NO: 2271019 - RNA, 19 nt, Homo sapiens
  misc_RNA (1)...(19): siRNA sense strand
cuuugaaacucagaggaau

SEQ ID NO: 2271020 - RNA, 19 nt, Homo sapiens
  misc_RNA (1)...(19): siRNA sense strand
cagaaaaccugggugggua

SEQ ID NO: 2271021 - RNA, 19 nt, Homo sapiens
  misc_RNA (1)...(19): siRNA sense strand
acacagaggaacggcagaa

SEQ ID NO: 2271022 - RNA, 19 nt, Homo sapiens
  misc_RNA (1)...(19): siRNA sense strand
agagucuggcugugagcaa

SEQ ID NO: 2271023 - RNA, 19 nt, Homo sapiens
  misc_RNA (1)...(19): siRNA sense strand
ggagaauggcagacgacaa

SEQ ID NO: 2271024 - RNA, 19 nt, Homo sapiens
  misc_RNA (1)...(19): siRNA sense strand
caguuaaagaagaggccaa

SEQ ID NO: 2271025 - RNA, 19 nt, Homo sapiens
  misc_RNA (1)...(19): siRNA sense strand
gcgacaugaccaacagaaa

SEQ ID NO: 2271026 - RNA, 19 nt, Homo sapiens
  misc_RNA (1)...(19): siRNA sense strand
aggaggaaugugagagcua

SEQ ID NO: 2271027 - RNA, 19 nt, Homo sapiens
  misc_RNA (1)...(19): siRNA sense strand
gcuacaagguggugcagga

SEQ ID NO: 2271028 - RNA, 19 nt, Homo sapiens
  misc_RNA (1)...(19): siRNA sense strand
ccaaccugaaggagagaaa

SEQ ID NO: 2271029 - RNA, 19 nt, Homo sapiens
  misc_RNA (1)...(19): siRNA sense strand
gcaccaacauucagcccaa

SEQ ID NO: 2271030 - RNA, 19 nt, Homo sapiens
  misc_RNA (1)...(19): siRNA sense strand
gagaauaagagccggcaga

SEQ ID NO: 2271031 - RNA, 19 nt, Homo sapiens
  misc_RNA (1)...(19): siRNA sense strand
aggaggaaaacaaggaaaa

SEQ ID NO: 2271032 - RNA, 19 nt, Homo sapiens
  misc_RNA (1)...(19): siRNA sense strand
acaauaagcucuucaggga

SEQ ID NO: 2271033 - RNA, 19 nt, Homo sapiens
  misc_RNA (1)...(19): siRNA sense strand
aggagagaaaggagugcaa

SEQ ID NO: 2271034 - RNA, 19 nt, Homo sapiens
  misc_RNA (1)...(19): siRNA sense strand
uggacaagcuggaagagga

SEQ ID NO: 2271035 - RNA, 19 nt, Homo sapiens
  misc_RNA (1)...(19): siRNA sense strand
uaacagaacuggaggagag

SEQ ID NO: 2271036 - RNA, 19 nt, Homo sapiens
  misc_RNA (1)...(19): siRNA sense strand
cguccuggagcgugugaaa

SEQ ID NO: 2271037 - RNA, 19 nt, Homo sapiens
  misc_RNA (1)...(19): siRNA sense strand
caguaugaguucugcuaca

SEQ ID NO: 2271038 - RNA, 19 nt, Homo sapiens
  misc_RNA (1)...(19): siRNA sense strand
uggagauauuacaguggaa

SEQ ID NO: 2271039 - RNA, 19 nt, Homo sapiens
  misc_RNA (1)...(19): siRNA sense strand
gaggaaauuaaccggagaa

SEQ ID NO: 2271040 - RNA, 19 nt, Homo sapiens
  misc_RNA (1)...(19): siRNA sense strand
gagagaaaggagugcaagu

SEQ ID NO: 2271041 - RNA, 19 nt, Homo sapiens
  misc_RNA (1)...(19): siRNA sense strand
aggagagaggccaggagaa

SEQ ID NO: 2271042 - RNA, 19 nt, Homo sapiens
  misc_RNA (1)...(19): siRNA sense strand
ccaagcaccaacaggaaau

SEQ ID NO: 2271043 - RNA, 19 nt, Homo sapiens
  misc_RNA (1)...(19): siRNA sense strand
acaauggauuagaggagga

SEQ ID NO: 2271044 - RNA, 19 nt, Homo sapiens
  misc_RNA (1)...(19): siRNA sense strand
gaacaaauucauugcugca

SEQ ID NO: 2271045 - RNA, 19 nt, Homo sapiens
  misc_RNA (1)...(19): siRNA sense strand
cugcuggaccuaugggaau

SEQ ID NO: 2271046 - RNA, 19 nt, Homo sapiens
  misc_RNA (1)...(19): siRNA sense strand
caacaauggauuagaggag

SEQ ID NO: 2271047 - RNA, 19 nt, Homo sapiens
  misc_RNA (1)...(19): siRNA sense strand
acaagcuggaagaggaaau

SEQ ID NO: 2271048 - RNA, 19 nt, Homo sapiens
  misc_RNA (1)...(19): siRNA sense strand
caaaagaagaaacggugaa

SEQ ID NO: 2271049 - RNA, 19 nt, Homo sapiens
  misc_RNA (1)...(19): siRNA sense strand
gcggaugaucugggaacaa

SEQ ID NO: 2271050 - RNA, 19 nt, Homo sapiens
  misc_RNA (1)...(19): siRNA sense strand
ggaaagggcaugaucagca

SEQ ID NO: 2271051 - RNA, 19 nt, Homo sapiens
  misc_RNA (1)...(19): siRNA sense strand
gugaaugauuucuggcgga

SEQ ID NO: 2271052 - RNA, 19 nt, Homo sapiens
  misc_RNA (1)...(19): siRNA sense strand
gugugaaagcagaggggau

SEQ ID NO: 2271053 - RNA, 19 nt, Homo sapiens
  misc_RNA (1)...(19): siRNA sense strand
aguuaaagaagaggccaaa

SEQ ID NO: 2271054 - RNA, 19 nt, Homo sapiens
  misc_RNA (1)...(19): siRNA sense strand
gaaugaucugggaguggaa

SEQ ID NO: 2271055 - RNA, 19 nt, Homo sapiens
  misc_RNA (1)...(19): siRNA sense strand
gaggaaugugagagcuaca

SEQ ID NO: 2271056 - RNA, 19 nt, Homo sapiens
  misc_RNA (1)...(19): siRNA sense strand
cuauuuaaccacugucaau

SEQ ID NO: 2271057 - RNA, 19 nt, Homo sapiens
  misc_RNA (1)...(19): siRNA sense strand
guuaccaaccugaaggaga

SEQ ID NO: 2271058 - RNA, 19 nt, Homo sapiens
  misc_RNA (1)...(19): siRNA sense strand
ggaccagcaacaauggauu

SEQ ID NO: 2271059 - RNA, 19 nt, Homo sapiens
  misc_RNA (1)...(19): siRNA sense strand
ccaaauggaacguggcuuc

SEQ ID NO: 2271060 - RNA, 19 nt, Homo sapiens
  misc_RNA (1)...(19): siRNA sense strand
gguuuaagaaauacaagca

SEQ ID NO: 2271061 - RNA, 19 nt, Homo sapiens
  misc_RNA (1)...(19): siRNA sense strand
augaagaagaaccguguuu

SEQ ID NO: 2271062 - RNA, 19 nt, Homo sapiens
  misc_RNA (1)...(19): siRNA sense strand
cugaagaaggaggaggaau

SEQ ID NO: 2271063 - RNA, 19 nt, Homo sapiens
  misc_RNA (1)...(19): siRNA sense strand
gcaccaauucuauaggcau

SEQ ID NO: 2271064 - RNA, 19 nt, Homo sapiens
  misc_RNA (1)...(19): siRNA sense strand
agcuggaagaggaaauuaa

SEQ ID NO: 2271065 - RNA, 19 nt, Homo sapiens
  misc_RNA (1)...(19): siRNA sense strand
acaagaugcggacuggaaa

SEQ ID NO: 2271066 - RNA, 19 nt, Homo sapiens
  misc_RNA (1)...(19): siRNA sense strand
agaggaaauuaaccggaga

SEQ ID NO: 2271067 - RNA, 19 nt, Homo sapiens
  misc_RNA (1)...(19): siRNA sense strand
agguggugcaggaguauau

SEQ ID NO: 2271068 - RNA, 19 nt, Homo sapiens
  misc_RNA (1)...(19): siRNA sense strand
ccguggacaagcuggaaga

SEQ ID NO: 2271069 - RNA, 19 nt, Homo sapiens
  misc_RNA (1)...(19): siRNA sense strand
auacagaacggaaggugga

SEQ ID NO: 2271070 - RNA, 19 nt, Homo sapiens
  misc_RNA (1)...(19): siRNA sense strand
auggauuagaggaggaguu

SEQ ID NO: 2271071 - RNA, 19 nt, Homo sapiens
  misc_RNA (1)...(19): siRNA sense strand
gagauauuacaguggaacu

SEQ ID NO: 2271072 - RNA, 19 nt, Homo sapiens
  misc_RNA (1)...(19): siRNA sense strand
auugaggacuucuggcgaa

SEQ ID NO: 2271073 - RNA, 19 nt, Homo sapiens
  misc_RNA (1)...(19): siRNA sense strand
ggagaauggcagacgacaa

SEQ ID NO: 2271074 - RNA, 19 nt, Homo sapiens
  misc_RNA (1)...(19): siRNA sense strand
caguuaaagaagaggccaa

SEQ ID NO: 2271075 - RNA, 19 nt, Homo sapiens
  misc_RNA (1)...(19): siRNA sense strand
gcgacaugaccaacagaaa

SEQ ID NO: 2271076 - RNA, 19 nt, Homo sapiens
  misc_RNA (1)...(19): siRNA sense strand
aggaggaaugugagagcua

SEQ ID NO: 2271077 - RNA, 19 nt, Homo sapiens
  misc_RNA (1)...(19): siRNA sense strand
gcuacaagguggugcagga

SEQ ID NO: 2271078 - RNA, 19 nt, Homo sapiens
  misc_RNA (1)...(19): siRNA sense strand
ccaaccugaaggagagaaa

SEQ ID NO: 2271079 - RNA, 19 nt, Homo sapiens
  misc_RNA (1)...(19): siRNA sense strand
gcaccaacauucagcccaa

SEQ ID NO: 2271080 - RNA, 19 nt, Homo sapiens
  misc_RNA (1)...(19): siRNA sense strand
gagaauaagagccggcaga

SEQ ID NO: 2271081 - RNA, 19 nt, Homo sapiens
  misc_RNA (1)...(19): siRNA sense strand
aggaggaaaacaaggaaaa

SEQ ID NO: 2271082 - RNA, 19 nt, Homo sapiens
  misc_RNA (1)...(19): siRNA sense strand
acaauaagcucuucaggga

SEQ ID NO: 2271083 - RNA, 19 nt, Homo sapiens
  misc_RNA (1)...(19): siRNA sense strand
aggagagaaaggagugcaa

SEQ ID NO: 2271084 - RNA, 19 nt, Homo sapiens
  misc_RNA (1)...(19): siRNA sense strand
uggacaagcuggaagagga

SEQ ID NO: 2271085 - RNA, 19 nt, Homo sapiens
  misc_RNA (1)...(19): siRNA sense strand
uaacagaacuggaggagag

SEQ ID NO: 2271086 - RNA, 19 nt, Homo sapiens
  misc_RNA (1)...(19): siRNA sense strand
cguccuggagcgugugaaa

SEQ ID NO: 2271087 - RNA, 19 nt, Homo sapiens
  misc_RNA (1)...(19): siRNA sense strand
caguaugaguucugcuaca

SEQ ID NO: 2271088 - RNA, 19 nt, Homo sapiens
  misc_RNA (1)...(19): siRNA sense strand
uggagauauuacaguggaa

SEQ ID NO: 2271089 - RNA, 19 nt, Homo sapiens
  misc_RNA (1)...(19): siRNA sense strand
gaggaaauuaaccggagaa

SEQ ID NO: 2271090 - RNA, 19 nt, Homo sapiens
  misc_RNA (1)...(19): siRNA sense strand
gagagaaaggagugcaagu

SEQ ID NO: 2271091 - RNA, 19 nt, Homo sapiens
  misc_RNA (1)...(19): siRNA sense strand
aggagagaggccaggagaa

SEQ ID NO: 2271092 - RNA, 19 nt, Homo sapiens
  misc_RNA (1)...(19): siRNA sense strand
ccaagcaccaacaggaaau

SEQ ID NO: 2271093 - RNA, 19 nt, Homo sapiens
  misc_RNA (1)...(19): siRNA sense strand
acaauggauuagaggagga

SEQ ID NO: 2271094 - RNA, 19 nt, Homo sapiens
  misc_RNA (1)...(19): siRNA sense strand
gaacaaauucauugcugca

SEQ ID NO: 2271095 - RNA, 19 nt, Homo sapiens
  misc_RNA (1)...(19): siRNA sense strand
cugcuggaccuaugggaau

SEQ ID NO: 2271096 - RNA, 19 nt, Homo sapiens
  misc_RNA (1)...(19): siRNA sense strand
caacaauggauuagaggag

SEQ ID NO: 2271097 - RNA, 19 nt, Homo sapiens
  misc_RNA (1)...(19): siRNA sense strand
acaagcuggaagaggaaau

SEQ ID NO: 2271098 - RNA, 19 nt, Homo sapiens
  misc_RNA (1)...(19): siRNA sense strand
caaaagaagaaacggugaa

SEQ ID NO: 2271099 - RNA, 19 nt, Homo sapiens
  misc_RNA (1)...(19): siRNA sense strand
gcggaugaucugggaacaa

SEQ ID NO: 2271100 - RNA, 19 nt, Homo sapiens
  misc_RNA (1)...(19): siRNA sense strand
ggaaagggcaugaucagca

SEQ ID NO: 2271101 - RNA, 19 nt, Homo sapiens
  misc_RNA (1)...(19): siRNA sense strand
gugaaugauuucuggcgga

SEQ ID NO: 2271102 - RNA, 19 nt, Homo sapiens
  misc_RNA (1)...(19): siRNA sense strand
gugugaaagcagaggggau

SEQ ID NO: 2271103 - RNA, 19 nt, Homo sapiens
  misc_RNA (1)...(19): siRNA sense strand
aguuaaagaagaggccaaa

SEQ ID NO: 2271104 - RNA, 19 nt, Homo sapiens
  misc_RNA (1)...(19): siRNA sense strand
gaaugaucugggaguggaa

SEQ ID NO: 2271105 - RNA, 19 nt, Homo sapiens
  misc_RNA (1)...(19): siRNA sense strand
gaggaaugugagagcuaca

SEQ ID NO: 2271106 - RNA, 19 nt, Homo sapiens
  misc_RNA (1)...(19): siRNA sense strand
cuauuuaaccacugucaau

SEQ ID NO: 2271107 - RNA, 19 nt, Homo sapiens
  misc_RNA (1)...(19): siRNA sense strand
guuaccaaccugaaggaga

SEQ ID NO: 2271108 - RNA, 19 nt, Homo sapiens
  misc_RNA (1)...(19): siRNA sense strand
ggaccagcaacaauggauu

SEQ ID NO: 2271109 - RNA, 19 nt, Homo sapiens
  misc_RNA (1)...(19): siRNA sense strand
ccaaauggaacguggcuuc

SEQ ID NO: 2271110 - RNA, 19 nt, Homo sapiens
  misc_RNA (1)...(19): siRNA sense strand
gguuuaagaaauacaagca

SEQ ID NO: 2271111 - RNA, 19 nt, Homo sapiens
  misc_RNA (1)...(19): siRNA sense strand
augaagaagaaccguguuu

SEQ ID NO: 2271112 - RNA, 19 nt, Homo sapiens
  misc_RNA (1)...(19): siRNA sense strand
cugaagaaggaggaggaau

SEQ ID NO: 2271113 - RNA, 19 nt, Homo sapiens
  misc_RNA (1)...(19): siRNA sense strand
gcaccaauucuauaggcau

SEQ ID NO: 2271114 - RNA, 19 nt, Homo sapiens
  misc_RNA (1)...(19): siRNA sense strand
agcuggaagaggaaauuaa

SEQ ID NO: 2271115 - RNA, 19 nt, Homo sapiens
  misc_RNA (1)...(19): siRNA sense strand
acaagaugcggacuggaaa

SEQ ID NO: 2271116 - RNA, 19 nt, Homo sapiens
  misc_RNA (1)...(19): siRNA sense strand
agaggaaauuaaccggaga

SEQ ID NO: 2271117 - RNA, 19 nt, Homo sapiens
  misc_RNA (1)...(19): siRNA sense strand
agguggugcaggaguauau

SEQ ID NO: 2271118 - RNA, 19 nt, Homo sapiens
  misc_RNA (1)...(19): siRNA sense strand
ccguggacaagcuggaaga

SEQ ID NO: 2271119 - RNA, 19 nt, Homo sapiens
  misc_RNA (1)...(19): siRNA sense strand
auacagaacggaaggugga

SEQ ID NO: 2271120 - RNA, 19 nt, Homo sapiens
  misc_RNA (1)...(19): siRNA sense strand
auggauuagaggaggaguu

SEQ ID NO: 2271121 - RNA, 19 nt, Homo sapiens
  misc_RNA (1)...(19): siRNA sense strand
gagauauuacaguggaacu

SEQ ID NO: 2271122 - RNA, 19 nt, Homo sapiens
  misc_RNA (1)...(19): siRNA sense strand
auugaggacuucuggcgaa

SEQ ID NO: 2271123 - RNA, 19 nt, Homo sapiens
  misc_RNA (1)...(19): siRNA sense strand
ggagaauggcagacgacaa

SEQ ID NO: 2271124 - RNA, 19 nt, Homo sapiens
  misc_RNA (1)...(19): siRNA sense strand
caguuaaagaagaggccaa

SEQ ID NO: 2271125 - RNA, 19 nt, Homo sapiens
  misc_RNA (1)...(19): siRNA sense strand
gcgacaugaccaacagaaa

SEQ ID NO: 2271126 - RNA, 19 nt, Homo sapiens
  misc_RNA (1)...(19): siRNA sense strand
aggaggaaugugagagcua

SEQ ID NO: 2271127 - RNA, 19 nt, Homo sapiens
  misc_RNA (1)...(19): siRNA sense strand
gcuacaagguggugcagga

SEQ ID NO: 2271128 - RNA, 19 nt, Homo sapiens
  misc_RNA (1)...(19): siRNA sense strand
ccaaccugaaggagagaaa

SEQ ID NO: 2271129 - RNA, 19 nt, Homo sapiens
  misc_RNA (1)...(19): siRNA sense strand
gcaccaacauucagcccaa

SEQ ID NO: 2271130 - RNA, 19 nt, Homo sapiens
  misc_RNA (1)...(19): siRNA sense strand
gagaauaagagccggcaga

SEQ ID NO: 2271131 - RNA, 19 nt, Homo sapiens
  misc_RNA (1)...(19): siRNA sense strand
aggaggaaaacaaggaaaa

SEQ ID NO: 2271132 - RNA, 19 nt, Homo sapiens
  misc_RNA (1)...(19): siRNA sense strand
acaauaagcucuucaggga

SEQ ID NO: 2271133 - RNA, 19 nt, Homo sapiens
  misc_RNA (1)...(19): siRNA sense strand
aggagagaaaggagugcaa

SEQ ID NO: 2271134 - RNA, 19 nt, Homo sapiens
  misc_RNA (1)...(19): siRNA sense strand
uggacaagcuggaagagga

SEQ ID NO: 2271135 - RNA, 19 nt, Homo sapiens
  misc_RNA (1)...(19): siRNA sense strand
uaacagaacuggaggagag

SEQ ID NO: 2271136 - RNA, 19 nt, Homo sapiens
  misc_RNA (1)...(19): siRNA sense strand
cguccuggagcgugugaaa

SEQ ID NO: 2271137 - RNA, 19 nt, Homo sapiens
  misc_RNA (1)...(19): siRNA sense strand
caguaugaguucugcuaca

SEQ ID NO: 2271138 - RNA, 19 nt, Homo sapiens
  misc_RNA (1)...(19): siRNA sense strand
uggagauauuacaguggaa

SEQ ID NO: 2271139 - RNA, 19 nt, Homo sapiens
  misc_RNA (1)...(19): siRNA sense strand
gaggaaauuaaccggagaa

SEQ ID NO: 2271140 - RNA, 19 nt, Homo sapiens
  misc_RNA (1)...(19): siRNA sense strand
gagagaaaggagugcaagu

SEQ ID NO: 2271141 - RNA, 19 nt, Homo sapiens
  misc_RNA (1)...(19): siRNA sense strand
aggagagaggccaggagaa

SEQ ID NO: 2271142 - RNA, 19 nt, Homo sapiens
  misc_RNA (1)...(19): siRNA sense strand
ccaagcaccaacaggaaau

SEQ ID NO: 2271143 - RNA, 19 nt, Homo sapiens
  misc_RNA (1)...(19): siRNA sense strand
acaauggauuagaggagga

SEQ ID NO: 2271144 - RNA, 19 nt, Homo sapiens
  misc_RNA (1)...(19): siRNA sense strand
gaacaaauucauugcugca

SEQ ID NO: 2271145 - RNA, 19 nt, Homo sapiens
  misc_RNA (1)...(19): siRNA sense strand
cugcuggaccuaugggaau

SEQ ID NO: 2271146 - RNA, 19 nt, Homo sapiens
  misc_RNA (1)...(19): siRNA sense strand
caacaauggauuagaggag

SEQ ID NO: 2271147 - RNA, 19 nt, Homo sapiens
  misc_RNA (1)...(19): siRNA sense strand
acaagcuggaagaggaaau

SEQ ID NO: 2271148 - RNA, 19 nt, Homo sapiens
  misc_RNA (1)...(19): siRNA sense strand
caaaagaagaaacggugaa

SEQ ID NO: 2271149 - RNA, 19 nt, Homo sapiens
  misc_RNA (1)...(19): siRNA sense strand
gcggaugaucugggaacaa

SEQ ID NO: 2271150 - RNA, 19 nt, Homo sapiens
  misc_RNA (1)...(19): siRNA sense strand
ggaaagggcaugaucagca

SEQ ID NO: 2271151 - RNA, 19 nt, Homo sapiens
  misc_RNA (1)...(19): siRNA sense strand
gugaaugauuucuggcgga

SEQ ID NO: 2271152 - RNA, 19 nt, Homo sapiens
  misc_RNA (1)...(19): siRNA sense strand
gugugaaagcagaggggau

SEQ ID NO: 2271153 - RNA, 19 nt, Homo sapiens
  misc_RNA (1)...(19): siRNA sense strand
aguuaaagaagaggccaaa

SEQ ID NO: 2271154 - RNA, 19 nt, Homo sapiens
  misc_RNA (1)...(19): siRNA sense strand
gaaugaucugggaguggaa

SEQ ID NO: 2271155 - RNA, 19 nt, Homo sapiens
  misc_RNA (1)...(19): siRNA sense strand
gaggaaugugagagcuaca

SEQ ID NO: 2271156 - RNA, 19 nt, Homo sapiens
  misc_RNA (1)...(19): siRNA sense strand
cuauuuaaccacugucaau

SEQ ID NO: 2271157 - RNA, 19 nt, Homo sapiens
  misc_RNA (1)...(19): siRNA sense strand
guuaccaaccugaaggaga

SEQ ID NO: 2271158 - RNA, 19 nt, Homo sapiens
  misc_RNA (1)...(19): siRNA sense strand
ggaccagcaacaauggauu

SEQ ID NO: 2271159 - RNA, 19 nt, Homo sapiens
  misc_RNA (1)...(19): siRNA sense strand
ccaaauggaacguggcuuc

SEQ ID NO: 2271160 - RNA, 19 nt, Homo sapiens
  misc_RNA (1)...(19): siRNA sense strand
gguuuaagaaauacaagca

SEQ ID NO: 2271161 - RNA, 19 nt, Homo sapiens
  misc_RNA (1)...(19): siRNA sense strand
augaagaagaaccguguuu

SEQ ID NO: 2271162 - RNA, 19 nt, Homo sapiens
  misc_RNA (1)...(19): siRNA sense strand
cugaagaaggaggaggaau

SEQ ID NO: 2271163 - RNA, 19 nt, Homo sapiens
  misc_RNA (1)...(19): siRNA sense strand
gcaccaauucuauaggcau

SEQ ID NO: 2271164 - RNA, 19 nt, Homo sapiens
  misc_RNA (1)...(19): siRNA sense strand
agcuggaagaggaaauuaa

SEQ ID NO: 2271165 - RNA, 19 nt, Homo sapiens
  misc_RNA (1)...(19): siRNA sense strand
acaagaugcggacuggaaa

SEQ ID NO: 2271166 - RNA, 19 nt, Homo sapiens
  misc_RNA (1)...(19): siRNA sense strand
agaggaaauuaaccggaga

SEQ ID NO: 2271167 - RNA, 19 nt, Homo sapiens
  misc_RNA (1)...(19): siRNA sense strand
agguggugcaggaguauau

SEQ ID NO: 2271168 - RNA, 19 nt, Homo sapiens
  misc_RNA (1)...(19): siRNA sense strand
ccguggacaagcuggaaga

SEQ ID NO: 2271169 - RNA, 19 nt, Homo sapiens
  misc_RNA (1)...(19): siRNA sense strand
auacagaacggaaggugga

SEQ ID NO: 2271170 - RNA, 19 nt, Homo sapiens
  misc_RNA (1)...(19): siRNA sense strand
auggauuagaggaggaguu

SEQ ID NO: 2271171 - RNA, 19 nt, Homo sapiens
  misc_RNA (1)...(19): siRNA sense strand
gagauauuacaguggaacu

SEQ ID NO: 2271172 - RNA, 19 nt, Homo sapiens
  misc_RNA (1)...(19): siRNA sense strand
auugaggacuucuggcgaa

SEQ ID NO: 2271173 - RNA, 19 nt, Homo sapiens
  misc_RNA (1)...(19): siRNA sense strand
uagcagaaugggagaaaua

SEQ ID NO: 2271174 - RNA, 19 nt, Homo sapiens
  misc_RNA (1)...(19): siRNA sense strand
aggaauacgaggaguuaaa

SEQ ID NO: 2271175 - RNA, 19 nt, Homo sapiens
  misc_RNA (1)...(19): siRNA sense strand
ccucagagcaagaaagcua

SEQ ID NO: 2271176 - RNA, 19 nt, Homo sapiens
  misc_RNA (1)...(19): siRNA sense strand
agaaaguacuucauggaau

SEQ ID NO: 2271177 - RNA, 19 nt, Homo sapiens
  misc_RNA (1)...(19): siRNA sense strand
gcaagaaauacaagauaca

SEQ ID NO: 2271178 - RNA, 19 nt, Homo sapiens
  misc_RNA (1)...(19): siRNA sense strand
ccaaagacucuguggacau

SEQ ID NO: 2271179 - RNA, 19 nt, Homo sapiens
  misc_RNA (1)...(19): siRNA sense strand
gccggagaauagagggaaa

SEQ ID NO: 2271180 - RNA, 19 nt, Homo sapiens
  misc_RNA (1)...(19): siRNA sense strand
gguucaaauucaagaaagu

SEQ ID NO: 2271181 - RNA, 19 nt, Homo sapiens
  misc_RNA (1)...(19): siRNA sense strand
ggcugaugcuaauggauaa

SEQ ID NO: 2271182 - RNA, 19 nt, Homo sapiens
  misc_RNA (1)...(19): siRNA sense strand
gcuaauggauaaagggauc

SEQ ID NO: 2271183 - RNA, 19 nt, Homo sapiens
  misc_RNA (1)...(19): siRNA sense strand
ucaacaucacugugggaaa

SEQ ID NO: 2271184 - RNA, 19 nt, Homo sapiens
  misc_RNA (1)...(19): siRNA sense strand
cugacaaaguccagggagu

SEQ ID NO: 2271185 - RNA, 19 nt, Homo sapiens
  misc_RNA (1)...(19): siRNA sense strand
auaugaagccaaugaacaa

SEQ ID NO: 2271186 - RNA, 19 nt, Homo sapiens
  misc_RNA (1)...(19): siRNA sense strand
cugggaauguggaacgaua

SEQ ID NO: 2271187 - RNA, 19 nt, Homo sapiens
  misc_RNA (1)...(19): siRNA sense strand
cggcugaugcuaauggaua

SEQ ID NO: 2271188 - RNA, 19 nt, Homo sapiens
  misc_RNA (1)...(19): siRNA sense strand
acagauagccugacgguga

SEQ ID NO: 2271189 - RNA, 19 nt, Homo sapiens
  misc_RNA (1)...(19): siRNA sense strand
gaugaggaccugaaggaau

SEQ ID NO: 2271190 - RNA, 19 nt, Homo sapiens
  misc_RNA (1)...(19): siRNA sense strand
ccaaggaauacgaggaguu

SEQ ID NO: 2271191 - RNA, 19 nt, Homo sapiens
  misc_RNA (1)...(19): siRNA sense strand
ggacgaaaauacauggcua

SEQ ID NO: 2271192 - RNA, 19 nt, Homo sapiens
  misc_RNA (1)...(19): siRNA sense strand
guggaguaacggugaacaa

SEQ ID NO: 2271193 - RNA, 19 nt, Homo sapiens
  misc_RNA (1)...(19): siRNA sense strand
caagggaaugggagaacaa

SEQ ID NO: 2271194 - RNA, 19 nt, Homo sapiens
  misc_RNA (1)...(19): siRNA sense strand
guugagaagggccgaguaa

SEQ ID NO: 2271195 - RNA, 19 nt, Homo sapiens
  misc_RNA (1)...(19): siRNA sense strand
gaacaagggaaugggagaa

SEQ ID NO: 2271196 - RNA, 19 nt, Homo sapiens
  misc_RNA (1)...(19): siRNA sense strand
ccucagaacuccacggcca

SEQ ID NO: 2271197 - RNA, 19 nt, Homo sapiens
  misc_RNA (1)...(19): siRNA sense strand
ucaugaagcuacaggcuga

SEQ ID NO: 2271198 - RNA, 19 nt, Homo sapiens
  misc_RNA (1)...(19): siRNA sense strand
ugaacaagggaaugggaga

SEQ ID NO: 2271199 - RNA, 19 nt, Homo sapiens
  misc_RNA (1)...(19): siRNA sense strand
aggcaagaaauacaagaua

SEQ ID NO: 2271200 - RNA, 19 nt, Homo sapiens
  misc_RNA (1)...(19): siRNA sense strand
gugaugagcugaagccaga

SEQ ID NO: 2271201 - RNA, 19 nt, Homo sapiens
  misc_RNA (1)...(19): siRNA sense strand
cagcaaaugugccgaaaau

SEQ ID NO: 2271202 - RNA, 19 nt, Homo sapiens
  misc_RNA (1)...(19): siRNA sense strand
augaggaccugaaggaauu

SEQ ID NO: 2271203 - RNA, 19 nt, Homo sapiens
  misc_RNA (1)...(19): siRNA sense strand
aaaugugaauccagaguau

SEQ ID NO: 2271204 - RNA, 19 nt, Homo sapiens
  misc_RNA (1)...(19): siRNA sense strand
aaggaaaacuggaaagaca

SEQ ID NO: 2271205 - RNA, 19 nt, Homo sapiens
  misc_RNA (1)...(19): siRNA sense strand
caccaauggagcugugaaa

SEQ ID NO: 2271206 - RNA, 19 nt, Homo sapiens
  misc_RNA (1)...(19): siRNA sense strand
cggaaaacuucuuguccaa

SEQ ID NO: 2271207 - RNA, 19 nt, Homo sapiens
  misc_RNA (1)...(19): siRNA sense strand
agagauguccucagagcaa

SEQ ID NO: 2271208 - RNA, 19 nt, Homo sapiens
  misc_RNA (1)...(19): siRNA sense strand
gcaccuuggauuacugaaa

SEQ ID NO: 2271209 - RNA, 19 nt, Homo sapiens
  misc_RNA (1)...(19): siRNA sense strand
agaaagcuggagaaagaaa

SEQ ID NO: 2271210 - RNA, 19 nt, Homo sapiens
  misc_RNA (1)...(19): siRNA sense strand
ggguuggccuuguggauca

SEQ ID NO: 2271211 - RNA, 19 nt, Homo sapiens
  misc_RNA (1)...(19): siRNA sense strand
aaggaugacuucuggaaaa

SEQ ID NO: 2271212 - RNA, 19 nt, Homo sapiens
  misc_RNA (1)...(19): siRNA sense strand
ggaccauccgggaguuuaa

SEQ ID NO: 2271213 - RNA, 19 nt, Homo sapiens
  misc_RNA (1)...(19): siRNA sense strand
ggcaaagaccuccuggaaa

SEQ ID NO: 2271214 - RNA, 19 nt, Homo sapiens
  misc_RNA (1)...(19): siRNA sense strand
ccgaaaauccuaacagcaa

SEQ ID NO: 2271215 - RNA, 19 nt, Homo sapiens
  misc_RNA (1)...(19): siRNA sense strand
ggaaaauggugugggaaca

SEQ ID NO: 2271216 - RNA, 19 nt, Homo sapiens
  misc_RNA (1)...(19): siRNA sense strand
aggaacagcuugaugcaca

SEQ ID NO: 2271217 - RNA, 19 nt, Homo sapiens
  misc_RNA (1)...(19): siRNA sense strand
gaccauaacuacaaggagu

SEQ ID NO: 2271218 - RNA, 19 nt, Homo sapiens
  misc_RNA (1)...(19): siRNA sense strand
gcauucaggcacagucaaa

SEQ ID NO: 2271219 - RNA, 19 nt, Homo sapiens
  misc_RNA (1)...(19): siRNA sense strand
auucugacuuugaugguua

SEQ ID NO: 2271220 - RNA, 19 nt, Homo sapiens
  misc_RNA (1)...(19): siRNA sense strand
gcagaaugggagaaauaca

SEQ ID NO: 2271221 - RNA, 19 nt, Homo sapiens
  misc_RNA (1)...(19): siRNA sense strand
ugggaaaggaagaaacaca

SEQ ID NO: 2271222 - RNA, 19 nt, Homo sapiens
  misc_RNA (1)...(19): siRNA sense strand
ccuccagcuucgugucaaa

SEQ ID NO: 2271223 - RNA, 19 nt, Homo sapiens
  misc_RNA (1)...(19): siRNA sense strand
agccaaugaacaagggaau

SEQ ID NO: 2271224 - RNA, 19 nt, Homo sapiens
  misc_RNA (1)...(19): siRNA sense strand
ggacagacuacaacgacuu

SEQ ID NO: 2271225 - RNA, 19 nt, Homo sapiens
  misc_RNA (1)...(19): siRNA sense strand
cagaaagguaaccggaaaa

SEQ ID NO: 2271226 - RNA, 19 nt, Homo sapiens
  misc_RNA (1)...(19): siRNA sense strand
gcuacggagugaacaagaa

SEQ ID NO: 2271227 - RNA, 19 nt, Homo sapiens
  misc_RNA (1)...(19): siRNA sense strand
aguaaagagaagacgacuu

SEQ ID NO: 2271228 - RNA, 19 nt, Homo sapiens
  misc_RNA (1)...(19): siRNA sense strand
ucucacugcugguaguaaa

SEQ ID NO: 2271229 - RNA, 19 nt, Homo sapiens
  misc_RNA (1)...(19): siRNA sense strand
aggaguggcaaguaugaaa

SEQ ID NO: 2271230 - RNA, 19 nt, Homo sapiens
  misc_RNA (1)...(19): siRNA sense strand
gcggacagugccugacaaa

SEQ ID NO: 2271231 - RNA, 19 nt, Homo sapiens
  misc_RNA (1)...(19): siRNA sense strand
gagaacaauuccagagccu

SEQ ID NO: 2271232 - RNA, 19 nt, Homo sapiens
  misc_RNA (1)...(19): siRNA sense strand
caaaucugaaggugacaaa

SEQ ID NO: 2271233 - RNA, 19 nt, Homo sapiens
  misc_RNA (1)...(19): siRNA sense strand
gcgcaacacaucagagcca

SEQ ID NO: 2271234 - RNA, 19 nt, Homo sapiens
  misc_RNA (1)...(19): siRNA sense strand
cagugaaagauauugguau

SEQ ID NO: 2271235 - RNA, 19 nt, Homo sapiens
  misc_RNA (1)...(19): siRNA sense strand
aguauuugugacagggcaa

SEQ ID NO: 2271236 - RNA, 19 nt, Homo sapiens
  misc_RNA (1)...(19): siRNA sense strand
aguauuugugacagggcaa

SEQ ID NO: 2271237 - RNA, 19 nt, Homo sapiens
  misc_RNA (1)...(19): siRNA sense strand
aguauuugugacagggcaa

SEQ ID NO: 2271238 - RNA, 19 nt, Homo sapiens
  misc_RNA (1)...(19): siRNA sense strand
aguauuugugacagggcaa

SEQ ID NO: 2271239 - RNA, 19 nt, Homo sapiens
  misc_RNA (1)...(19): siRNA sense strand
aggaagaaugagagggaca

SEQ ID NO: 2271240 - RNA, 19 nt, Homo sapiens
  misc_RNA (1)...(19): siRNA sense strand
cuguguggguggagaaaga

SEQ ID NO: 2271241 - RNA, 19 nt, Homo sapiens
  misc_RNA (1)...(19): siRNA sense strand
cuguguggguggagaaaga

SEQ ID NO: 2271242 - RNA, 19 nt, Homo sapiens
  misc_RNA (1)...(19): siRNA sense strand
ccgugugggcagagaggaa

SEQ ID NO: 2271243 - RNA, 19 nt, Homo sapiens
  misc_RNA (1)...(19): siRNA sense strand
cucccaacccagugagaaa

SEQ ID NO: 2271244 - RNA, 19 nt, Homo sapiens
  misc_RNA (1)...(19): siRNA sense strand
gaaugaggucagaggcuau

SEQ ID NO: 2271245 - RNA, 19 nt, Homo sapiens
  misc_RNA (1)...(19): siRNA sense strand
ggaaugaggucagaggcua

SEQ ID NO: 2271246 - RNA, 19 nt, Homo sapiens
  misc_RNA (1)...(19): siRNA sense strand
ggaauaagaagaagcagca

SEQ ID NO: 2271247 - RNA, 19 nt, Homo sapiens
  misc_RNA (1)...(19): siRNA sense strand
agaaugagagggacagcaa

SEQ ID NO: 2271248 - RNA, 19 nt, Homo sapiens
  misc_RNA (1)...(19): siRNA sense strand
guaaauagcuccucgugga

SEQ ID NO: 2271249 - RNA, 19 nt, Homo sapiens
  misc_RNA (1)...(19): siRNA sense strand
caguggaggcucagaccaa

SEQ ID NO: 2271250 - RNA, 19 nt, Homo sapiens
  misc_RNA (1)...(19): siRNA sense strand
acagaaaugugcugcccua

SEQ ID NO: 2271251 - RNA, 19 nt, Homo sapiens
  misc_RNA (1)...(19): siRNA sense strand
cguaugaggaugucgaaaa

SEQ ID NO: 2271252 - RNA, 19 nt, Homo sapiens
  misc_RNA (1)...(19): siRNA sense strand
cguugauggugcagacuga

SEQ ID NO: 2271253 - RNA, 19 nt, Homo sapiens
  misc_RNA (1)...(19): siRNA sense strand
gggaagaauggaaucaaca

SEQ ID NO: 2271254 - RNA, 19 nt, Homo sapiens
  misc_RNA (1)...(19): siRNA sense strand
acaacagacaccagaguca

SEQ ID NO: 2271255 - RNA, 19 nt, Homo sapiens
  misc_RNA (1)...(19): siRNA sense strand
acaacaaauaccaguguga

SEQ ID NO: 2271256 - RNA, 19 nt, Homo sapiens
  misc_RNA (1)...(19): siRNA sense strand
agaggaggaauaagaagaa

SEQ ID NO: 2271257 - RNA, 19 nt, Homo sapiens
  misc_RNA (1)...(19): siRNA sense strand
aagaggaggaauaagaaga

SEQ ID NO: 2271258 - RNA, 19 nt, Homo sapiens
  misc_RNA (1)...(19): siRNA sense strand
acucgaaacacaacagaca

SEQ ID NO: 2271259 - RNA, 19 nt, Homo sapiens
  misc_RNA (1)...(19): siRNA sense strand
cuucagagaacaacgccaa

SEQ ID NO: 2271260 - RNA, 19 nt, Homo sapiens
  misc_RNA (1)...(19): siRNA sense strand
uuguaaggaagaugagaga

SEQ ID NO: 2271261 - RNA, 19 nt, Homo sapiens
  misc_RNA (1)...(19): siRNA sense strand
agaacagagacucgaaaca

SEQ ID NO: 2271262 - RNA, 19 nt, Homo sapiens
  misc_RNA (1)...(19): siRNA sense strand
ucaggaagaaugagaggga

SEQ ID NO: 2271263 - RNA, 19 nt, Homo sapiens
  misc_RNA (1)...(19): siRNA sense strand
aggaagugauggagaacug

SEQ ID NO: 2271264 - RNA, 19 nt, Homo sapiens
  misc_RNA (1)...(19): siRNA sense strand
cagugugacagcugagaga

SEQ ID NO: 2271265 - RNA, 19 nt, Homo sapiens
  misc_RNA (1)...(19): siRNA sense strand
ggugaggaagugauggaga

SEQ ID NO: 2271266 - RNA, 19 nt, Homo sapiens
  misc_RNA (1)...(19): siRNA sense strand
guggagaaagacggaguaa

SEQ ID NO: 2271267 - RNA, 19 nt, Homo sapiens
  misc_RNA (1)...(19): siRNA sense strand
uggagaaagacggaguaaa

SEQ ID NO: 2271268 - RNA, 19 nt, Homo sapiens
  misc_RNA (1)...(19): siRNA sense strand
guggagaaagacggaguaa

SEQ ID NO: 2271269 - RNA, 19 nt, Homo sapiens
  misc_RNA (1)...(19): siRNA sense strand
uggagaaagacggaguaaa

SEQ ID NO: 2271270 - RNA, 19 nt, Homo sapiens
  misc_RNA (1)...(19): siRNA sense strand
cucccaacccagugaggaa

SEQ ID NO: 2271271 - RNA, 19 nt, Homo sapiens
  misc_RNA (1)...(19): siRNA sense strand
uggagaugguggcagaaca

SEQ ID NO: 2271272 - RNA, 19 nt, Homo sapiens
  misc_RNA (1)...(19): siRNA sense strand
auauggagacucagaccaa

SEQ ID NO: 2271273 - RNA, 19 nt, Homo sapiens
  misc_RNA (1)...(19): siRNA sense strand
aacaaauaccagugugaca

SEQ ID NO: 2271274 - RNA, 19 nt, Homo sapiens
  misc_RNA (1)...(19): siRNA sense strand
ccgagaaggaagucccgua

SEQ ID NO: 2271275 - RNA, 19 nt, Homo sapiens
  misc_RNA (1)...(19): siRNA sense strand
uggagacggugguggcaca

SEQ ID NO: 2271276 - RNA, 19 nt, Homo sapiens
  misc_RNA (1)...(19): siRNA sense strand
ggguggagaaagacggagu

SEQ ID NO: 2271277 - RNA, 19 nt, Homo sapiens
  misc_RNA (1)...(19): siRNA sense strand
ggguggagaaagacggagu

SEQ ID NO: 2271278 - RNA, 19 nt, Homo sapiens
  misc_RNA (1)...(19): siRNA sense strand
acaacagagacucgaaaca

SEQ ID NO: 2271279 - RNA, 19 nt, Homo sapiens
  misc_RNA (1)...(19): siRNA sense strand
cacuggagaugguggcaga

SEQ ID NO: 2271280 - RNA, 19 nt, Homo sapiens
  misc_RNA (1)...(19): siRNA sense strand
cacuggagaugguggcaga

SEQ ID NO: 2271281 - RNA, 19 nt, Homo sapiens
  misc_RNA (1)...(19): siRNA sense strand
cacuggagaugguggcaga

SEQ ID NO: 2271282 - RNA, 19 nt, Homo sapiens
  misc_RNA (1)...(19): siRNA sense strand
gcaagauccccaagcgaau

SEQ ID NO: 2271283 - RNA, 19 nt, Homo sapiens
  misc_RNA (1)...(19): siRNA sense strand
aauaagaagaagcagcaga

SEQ ID NO: 2271284 - RNA, 19 nt, Homo sapiens
  misc_RNA (1)...(19): siRNA sense strand
gggugggaaagaauggaau

SEQ ID NO: 2271285 - RNA, 19 nt, Homo sapiens
  misc_RNA (1)...(19): siRNA sense strand
cgaccaucugggacggaau

SEQ ID NO: 2271286 - RNA, 19 nt, Homo sapiens
  misc_RNA (1)...(19): siRNA sense strand
aaggaagaugagagagagu

SEQ ID NO: 2271287 - RNA, 19 nt, Homo sapiens
  misc_RNA (1)...(19): siRNA sense strand
acagagacucgaaacacaa

SEQ ID NO: 2271288 - RNA, 19 nt, Homo sapiens
  misc_RNA (1)...(19): siRNA sense strand
gcucagaccaccagcucca

SEQ ID NO: 2271289 - RNA, 19 nt, Homo sapiens
  misc_RNA (1)...(19): siRNA sense strand
acagagacucgaaacacaa

SEQ ID NO: 2271290 - RNA, 19 nt, Homo sapiens
  misc_RNA (1)...(19): siRNA sense strand
gcucagaccaacagcucca

SEQ ID NO: 2271291 - RNA, 19 nt, Homo sapiens
  misc_RNA (1)...(19): siRNA sense strand
gcucagaccaacagcucca

SEQ ID NO: 2271292 - RNA, 19 nt, Homo sapiens
  misc_RNA (1)...(19): siRNA sense strand
augugaugguggacagcaa

SEQ ID NO: 2271293 - RNA, 19 nt, Homo sapiens
  misc_RNA (1)...(19): siRNA sense strand
ugaaauaccuggagugcuc

SEQ ID NO: 2271294 - RNA, 19 nt, Homo sapiens
  misc_RNA (1)...(19): siRNA sense strand
agugugugguggugggaga

SEQ ID NO: 2271295 - RNA, 19 nt, Homo sapiens
  misc_RNA (1)...(19): siRNA sense strand
cagccaaugugauggugga

SEQ ID NO: 2271296 - RNA, 19 nt, Homo sapiens
  misc_RNA (1)...(19): siRNA sense strand
gggcuaugaacgagagcaa

SEQ ID NO: 2271297 - RNA, 19 nt, Homo sapiens
  misc_RNA (1)...(19): siRNA sense strand
cggugaaagcacugaaaga

SEQ ID NO: 2271298 - RNA, 19 nt, Homo sapiens
  misc_RNA (1)...(19): siRNA sense strand
auagaaagguuaaaggcau

SEQ ID NO: 2271299 - RNA, 19 nt, Homo sapiens
  misc_RNA (1)...(19): siRNA sense strand
uuucaacagaugagacaaa

SEQ ID NO: 2271300 - RNA, 19 nt, Homo sapiens
  misc_RNA (1)...(19): siRNA sense strand
cugaaagagaagauugaau

SEQ ID NO: 2271301 - RNA, 19 nt, Homo sapiens
  misc_RNA (1)...(19): siRNA sense strand
cugacagagcaguggagua

SEQ ID NO: 2271302 - RNA, 19 nt, Homo sapiens
  misc_RNA (1)...(19): siRNA sense strand
gcagcaacuacgacagcaa

SEQ ID NO: 2271303 - RNA, 19 nt, Homo sapiens
  misc_RNA (1)...(19): siRNA sense strand
agguggcaguggaggaauu

SEQ ID NO: 2271304 - RNA, 19 nt, Homo sapiens
  misc_RNA (1)...(19): siRNA sense strand
caguggaggaauugcagaa

SEQ ID NO: 2271305 - RNA, 19 nt, Homo sapiens
  misc_RNA (1)...(19): siRNA sense strand
ggugauucuucucggucaa

SEQ ID NO: 2271306 - RNA, 19 nt, Homo sapiens
  misc_RNA (1)...(19): siRNA sense strand
agaucaugucaaugggcua

SEQ ID NO: 2271307 - RNA, 19 nt, Homo sapiens
  misc_RNA (1)...(19): siRNA sense strand
aaguaacaccucaggaaaa

SEQ ID NO: 2271308 - RNA, 19 nt, Homo sapiens
  misc_RNA (1)...(19): siRNA sense strand
aagagaagccugcagaaaa

SEQ ID NO: 2271309 - RNA, 19 nt, Homo sapiens
  misc_RNA (1)...(19): siRNA sense strand
agaaaagccagcagagaca

SEQ ID NO: 2271310 - RNA, 19 nt, Homo sapiens
  misc_RNA (1)...(19): siRNA sense strand
cccuggagauagagaaagu

SEQ ID NO: 2271311 - RNA, 19 nt, Homo sapiens
  misc_RNA (1)...(19): siRNA sense strand
ccucaauuacuucagcaaa

SEQ ID NO: 2271312 - RNA, 19 nt, Homo sapiens
  misc_RNA (1)...(19): siRNA sense strand
ucaaggaggaggaggugga

SEQ ID NO: 2271313 - RNA, 19 nt, Homo sapiens
  misc_RNA (1)...(19): siRNA sense strand
agcagaacuuugaugaaga

SEQ ID NO: 2271314 - RNA, 19 nt, Homo sapiens
  misc_RNA (1)...(19): siRNA sense strand
gcuugugagaagaaugaga

SEQ ID NO: 2271315 - RNA, 19 nt, Homo sapiens
  misc_RNA (1)...(19): siRNA sense strand
cacugaaagagaagauuga

SEQ ID NO: 2271316 - RNA, 19 nt, Homo sapiens
  misc_RNA (1)...(19): siRNA sense strand
gggugauucuucucgguca

SEQ ID NO: 2271317 - RNA, 19 nt, Homo sapiens
  misc_RNA (1)...(19): siRNA sense strand
agacaaauuauucagcaga

SEQ ID NO: 2271318 - RNA, 19 nt, Homo sapiens
  misc_RNA (1)...(19): siRNA sense strand
cgaacauggcccugggaca

SEQ ID NO: 2271319 - RNA, 19 nt, Homo sapiens
  misc_RNA (1)...(19): siRNA sense strand
ggacaugaagaaaaggaaa

SEQ ID NO: 2271320 - RNA, 19 nt, Homo sapiens
  misc_RNA (1)...(19): siRNA sense strand
cagaaggcccugaggcaga

SEQ ID NO: 2271321 - RNA, 19 nt, Homo sapiens
  misc_RNA (1)...(19): siRNA sense strand
cagaagaguaccaggccau

SEQ ID NO: 2271322 - RNA, 19 nt, Homo sapiens
  misc_RNA (1)...(19): siRNA sense strand
ggaagcaauucuuggagga

SEQ ID NO: 2271323 - RNA, 19 nt, Homo sapiens
  misc_RNA (1)...(19): siRNA sense strand
ggguaauuaaucuggccaa

SEQ ID NO: 2271324 - RNA, 19 nt, Homo sapiens
  misc_RNA (1)...(19): siRNA sense strand
cuguggaggaggcaagaua

SEQ ID NO: 2271325 - RNA, 19 nt, Homo sapiens
  misc_RNA (1)...(19): siRNA sense strand
acaacaggaaacugggaau

SEQ ID NO: 2271326 - RNA, 19 nt, Homo sapiens
  misc_RNA (1)...(19): siRNA sense strand
cauugagggucaucgggua

SEQ ID NO: 2271327 - RNA, 19 nt, Homo sapiens
  misc_RNA (1)...(19): siRNA sense strand
aggcuuuaucuuuggagaa

SEQ ID NO: 2271328 - RNA, 19 nt, Homo sapiens
  misc_RNA (1)...(19): siRNA sense strand
ugugcuacauugaggguca

SEQ ID NO: 2271329 - RNA, 19 nt, Homo sapiens
  misc_RNA (1)...(19): siRNA sense strand
ggccagaaggugugcuaca

SEQ ID NO: 2271330 - RNA, 19 nt, Homo sapiens
  misc_RNA (1)...(19): siRNA sense strand
ugggaaucucauaggaaga

SEQ ID NO: 2271331 - RNA, 19 nt, Homo sapiens
  misc_RNA (1)...(19): siRNA sense strand
accagaaaccacaagcaaa

SEQ ID NO: 2271332 - RNA, 19 nt, Homo sapiens
  misc_RNA (1)...(19): siRNA sense strand
gcagaagaguaccaggcca

SEQ ID NO: 2271333 - RNA, 19 nt, Homo sapiens
  misc_RNA (1)...(19): siRNA sense strand
cuugaagacaacucugaaa

SEQ ID NO: 2271334 - RNA, 19 nt, Homo sapiens
  misc_RNA (1)...(19): siRNA sense strand
gcaaguucuacgugggagu

SEQ ID NO: 2271335 - RNA, 19 nt, Homo sapiens
  misc_RNA (1)...(19): siRNA sense strand
auugagggucaucggguaa

SEQ ID NO: 2271336 - RNA, 19 nt, Homo sapiens
  misc_RNA (1)...(19): siRNA sense strand
guggaggaggcaagauaca

SEQ ID NO: 2271337 - RNA, 19 nt, Homo sapiens
  misc_RNA (1)...(19): siRNA sense strand
cagaaggcccugaggcaga

SEQ ID NO: 2271338 - RNA, 19 nt, Homo sapiens
  misc_RNA (1)...(19): siRNA sense strand
cagaagaguaccaggccau

SEQ ID NO: 2271339 - RNA, 19 nt, Homo sapiens
  misc_RNA (1)...(19): siRNA sense strand
ggaagcaauucuuggagga

SEQ ID NO: 2271340 - RNA, 19 nt, Homo sapiens
  misc_RNA (1)...(19): siRNA sense strand
ggguaauuaaucuggccaa

SEQ ID NO: 2271341 - RNA, 19 nt, Homo sapiens
  misc_RNA (1)...(19): siRNA sense strand
ugugcuacauugaggguca

SEQ ID NO: 2271342 - RNA, 19 nt, Homo sapiens
  misc_RNA (1)...(19): siRNA sense strand
ggccagaaggugugcuaca

SEQ ID NO: 2271343 - RNA, 19 nt, Homo sapiens
  misc_RNA (1)...(19): siRNA sense strand
gcagaagaguaccaggcca

SEQ ID NO: 2271344 - RNA, 19 nt, Homo sapiens
  misc_RNA (1)...(19): siRNA sense strand
cagaaggcccugaggcaga

SEQ ID NO: 2271345 - RNA, 19 nt, Homo sapiens
  misc_RNA (1)...(19): siRNA sense strand
cagaagaguaccaggccau

SEQ ID NO: 2271346 - RNA, 19 nt, Homo sapiens
  misc_RNA (1)...(19): siRNA sense strand
ggaagcaauucuuggagga

SEQ ID NO: 2271347 - RNA, 19 nt, Homo sapiens
  misc_RNA (1)...(19): siRNA sense strand
ggguaauuaaucuggccaa

SEQ ID NO: 2271348 - RNA, 19 nt, Homo sapiens
  misc_RNA (1)...(19): siRNA sense strand
ugugcuacauugaggguca

SEQ ID NO: 2271349 - RNA, 19 nt, Homo sapiens
  misc_RNA (1)...(19): siRNA sense strand
ggccagaaggugugcuaca

SEQ ID NO: 2271350 - RNA, 19 nt, Homo sapiens
  misc_RNA (1)...(19): siRNA sense strand
gcagaagaguaccaggcca

SEQ ID NO: 2271351 - RNA, 19 nt, Homo sapiens
  misc_RNA (1)...(19): siRNA sense strand
gcaaguucuacgugggagu

SEQ ID NO: 2271352 - RNA, 19 nt, Homo sapiens
  misc_RNA (1)...(19): siRNA sense strand
cagaaggcccugaggcaga

SEQ ID NO: 2271353 - RNA, 19 nt, Homo sapiens
  misc_RNA (1)...(19): siRNA sense strand
cagaagaguaccaggccau

SEQ ID NO: 2271354 - RNA, 19 nt, Homo sapiens
  misc_RNA (1)...(19): siRNA sense strand
ggaagcaauucuuggagga

SEQ ID NO: 2271355 - RNA, 19 nt, Homo sapiens
  misc_RNA (1)...(19): siRNA sense strand
ggguaauuaaucuggccaa

SEQ ID NO: 2271356 - RNA, 19 nt, Homo sapiens
  misc_RNA (1)...(19): siRNA sense strand
aggcuuuaucuuuggagaa

SEQ ID NO: 2271357 - RNA, 19 nt, Homo sapiens
  misc_RNA (1)...(19): siRNA sense strand
ugugcuacauugaggguca

SEQ ID NO: 2271358 - RNA, 19 nt, Homo sapiens
  misc_RNA (1)...(19): siRNA sense strand
ggccagaaggugugcuaca

SEQ ID NO: 2271359 - RNA, 19 nt, Homo sapiens
  misc_RNA (1)...(19): siRNA sense strand
gcagaagaguaccaggcca

SEQ ID NO: 2271360 - RNA, 19 nt, Homo sapiens
  misc_RNA (1)...(19): siRNA sense strand
gcaaguucuacgugggagu

SEQ ID NO: 2271361 - RNA, 19 nt, Homo sapiens
  misc_RNA (1)...(19): siRNA sense strand
gguacaugacaaaggacaa

SEQ ID NO: 2271362 - RNA, 19 nt, Homo sapiens
  misc_RNA (1)...(19): siRNA sense strand
ccucguggacagagagauu

SEQ ID NO: 2271363 - RNA, 19 nt, Homo sapiens
  misc_RNA (1)...(19): siRNA sense strand
gggaaauagaagccaguga

SEQ ID NO: 2271364 - RNA, 19 nt, Homo sapiens
  misc_RNA (1)...(19): siRNA sense strand
ucaagcuauuauugggaaa

SEQ ID NO: 2271365 - RNA, 19 nt, Homo sapiens
  misc_RNA (1)...(19): siRNA sense strand
ggaacuguuuauaagggua

SEQ ID NO: 2271366 - RNA, 19 nt, Homo sapiens
  misc_RNA (1)...(19): siRNA sense strand
aaguagauuuccuggauca

SEQ ID NO: 2271367 - RNA, 19 nt, Homo sapiens
  misc_RNA (1)...(19): siRNA sense strand
agcaaagaacaguggucaa

SEQ ID NO: 2271368 - RNA, 19 nt, Homo sapiens
  misc_RNA (1)...(19): siRNA sense strand
cauggugggccgaggauau

SEQ ID NO: 2271369 - RNA, 19 nt, Homo sapiens
  misc_RNA (1)...(19): siRNA sense strand
cuacaaauuucaugagcac

SEQ ID NO: 2271370 - RNA, 19 nt, Homo sapiens
  misc_RNA (1)...(19): siRNA sense strand
ggguaaauggcacggagau

SEQ ID NO: 2271371 - RNA, 19 nt, Homo sapiens
  misc_RNA (1)...(19): siRNA sense strand
aguaaagauccuaaagguu

SEQ ID NO: 2271372 - RNA, 19 nt, Homo sapiens
  misc_RNA (1)...(19): siRNA sense strand
ccuucuaagacaagcaaca

SEQ ID NO: 2271373 - RNA, 19 nt, Homo sapiens
  misc_RNA (1)...(19): siRNA sense strand
gcacaaagagagcgggcac

SEQ ID NO: 2271374 - RNA, 19 nt, Homo sapiens
  misc_RNA (1)...(19): siRNA sense strand
gcuacaaauuucaugagca

SEQ ID NO: 2271375 - RNA, 19 nt, Homo sapiens
  misc_RNA (1)...(19): siRNA sense strand
ccuaaagguugucgaccca

SEQ ID NO: 2271376 - RNA, 19 nt, Homo sapiens
  misc_RNA (1)...(19): siRNA sense strand
ugugaagaaaguaaaggaa

SEQ ID NO: 2271377 - RNA, 19 nt, Homo sapiens
  misc_RNA (1)...(19): siRNA sense strand
caguggucaaugugcgaaa

SEQ ID NO: 2271378 - RNA, 19 nt, Homo sapiens
  misc_RNA (1)...(19): siRNA sense strand
ggguacaugacaaaggaca

SEQ ID NO: 2271379 - RNA, 19 nt, Homo sapiens
  misc_RNA (1)...(19): siRNA sense strand
cggcucagggaauggacua

SEQ ID NO: 2271380 - RNA, 19 nt, Homo sapiens
  misc_RNA (1)...(19): siRNA sense strand
gucagaaauuccugcucaa

SEQ ID NO: 2271381 - RNA, 19 nt, Homo sapiens
  misc_RNA (1)...(19): siRNA sense strand
auacagggagcuuggaaga

SEQ ID NO: 2271382 - RNA, 19 nt, Homo sapiens
  misc_RNA (1)...(19): siRNA sense strand
cagcaggaugauugaggau

SEQ ID NO: 2271383 - RNA, 19 nt, Homo sapiens
  misc_RNA (1)...(19): siRNA sense strand
ggcagacggcucagggaau

SEQ ID NO: 2271384 - RNA, 19 nt, Homo sapiens
  misc_RNA (1)...(19): siRNA sense strand
ggucaaugugcgaaaugga

SEQ ID NO: 2271385 - RNA, 19 nt, Homo sapiens
  misc_RNA (1)...(19): siRNA sense strand
gcucaauggauuucgaugu

SEQ ID NO: 2271386 - RNA, 19 nt, Homo sapiens
  misc_RNA (1)...(19): siRNA sense strand
agaacaucauccauagaga

SEQ ID NO: 2271387 - RNA, 19 nt, Homo sapiens
  misc_RNA (1)...(19): siRNA sense strand
cagcaaugguuuuggauuc

SEQ ID NO: 2271388 - RNA, 19 nt, Homo sapiens
  misc_RNA (1)...(19): siRNA sense strand
cgacccaaccccagagcaa

SEQ ID NO: 2271389 - RNA, 19 nt, Homo sapiens
  misc_RNA (1)...(19): siRNA sense strand
cagcccacacugaggauau

SEQ ID NO: 2271390 - RNA, 19 nt, Homo sapiens
  misc_RNA (1)...(19): siRNA sense strand
cccaacaaucugagcccaa

SEQ ID NO: 2271391 - RNA, 19 nt, Homo sapiens
  misc_RNA (1)...(19): siRNA sense strand
guaaagauccuaaagguug

SEQ ID NO: 2271392 - RNA, 19 nt, Homo sapiens
  misc_RNA (1)...(19): siRNA sense strand
ccaaagcaaugaagaggcu

SEQ ID NO: 2271393 - RNA, 19 nt, Homo sapiens
  misc_RNA (1)...(19): siRNA sense strand
gcacgcuuagauuggaaua

SEQ ID NO: 2271394 - RNA, 19 nt, Homo sapiens
  misc_RNA (1)...(19): siRNA sense strand
acaaaggacaaccuggcaa

SEQ ID NO: 2271395 - RNA, 19 nt, Homo sapiens
  misc_RNA (1)...(19): siRNA sense strand
cuuggaagacgaucagcaa

SEQ ID NO: 2271396 - RNA, 19 nt, Homo sapiens
  misc_RNA (1)...(19): siRNA sense strand
cggagauguugcaguaaag

SEQ ID NO: 2271397 - RNA, 19 nt, Homo sapiens
  misc_RNA (1)...(19): siRNA sense strand
gugaagaaaguaaaggaag

SEQ ID NO: 2271398 - RNA, 19 nt, Homo sapiens
  misc_RNA (1)...(19): siRNA sense strand
ccgcugggcaagaggacua

SEQ ID NO: 2271399 - RNA, 19 nt, Homo sapiens
  misc_RNA (1)...(19): siRNA sense strand
acaaagacaagaauggcaa

SEQ ID NO: 2271400 - RNA, 19 nt, Homo sapiens
  misc_RNA (1)...(19): siRNA sense strand
ccaacaagaguaagggcca

SEQ ID NO: 2271401 - RNA, 19 nt, Homo sapiens
  misc_RNA (1)...(19): siRNA sense strand
cagaaaacaaagacaagaa

SEQ ID NO: 2271402 - RNA, 19 nt, Homo sapiens
  misc_RNA (1)...(19): siRNA sense strand
ggccaggaguaaagccgaa

SEQ ID NO: 2271403 - RNA, 19 nt, Homo sapiens
  misc_RNA (1)...(19): siRNA sense strand
acgaguuuguagaagacua

SEQ ID NO: 2271404 - RNA, 19 nt, Homo sapiens
  misc_RNA (1)...(19): siRNA sense strand
gaguaaagccgaagagugg

SEQ ID NO: 2271405 - RNA, 19 nt, Homo sapiens
  misc_RNA (1)...(19): siRNA sense strand
guggaggaggccaggagua

SEQ ID NO: 2271406 - RNA, 19 nt, Homo sapiens
  misc_RNA (1)...(19): siRNA sense strand
augagagaaaucagaacaa

SEQ ID NO: 2271407 - RNA, 19 nt, Homo sapiens
  misc_RNA (1)...(19): siRNA sense strand
aagaaaagcagcaagaaca

SEQ ID NO: 2271408 - RNA, 19 nt, Homo sapiens
  misc_RNA (1)...(19): siRNA sense strand
agaaaagcagcaagaacaa

SEQ ID NO: 2271409 - RNA, 19 nt, Homo sapiens
  misc_RNA (1)...(19): siRNA sense strand
gacaagaauggcaagaaaa

SEQ ID NO: 2271410 - RNA, 19 nt, Homo sapiens
  misc_RNA (1)...(19): siRNA sense strand
agaagaugucagaaaacaa

SEQ ID NO: 2271411 - RNA, 19 nt, Homo sapiens
  misc_RNA (1)...(19): siRNA sense strand
cgaguuuguagaagacuau

SEQ ID NO: 2271412 - RNA, 19 nt, Homo sapiens
  misc_RNA (1)...(19): siRNA sense strand
cacugcucgucgugggaaa

SEQ ID NO: 2271413 - RNA, 19 nt, Homo sapiens
  misc_RNA (1)...(19): siRNA sense strand
cggugaaggaggagaccaa

SEQ ID NO: 2271414 - RNA, 19 nt, Homo sapiens
  misc_RNA (1)...(19): siRNA sense strand
ggaaagagaucgaagagag

SEQ ID NO: 2271415 - RNA, 19 nt, Homo sapiens
  misc_RNA (1)...(19): siRNA sense strand
aggaggaugcugaggagaa

SEQ ID NO: 2271416 - RNA, 19 nt, Homo sapiens
  misc_RNA (1)...(19): siRNA sense strand
gggacaagacccugaagau

SEQ ID NO: 2271417 - RNA, 19 nt, Homo sapiens
  misc_RNA (1)...(19): siRNA sense strand
cgaagagagagaaaagaaa

SEQ ID NO: 2271418 - RNA, 19 nt, Homo sapiens
  misc_RNA (1)...(19): siRNA sense strand
ugauggagcugaagcccaa

SEQ ID NO: 2271419 - RNA, 19 nt, Homo sapiens
  misc_RNA (1)...(19): siRNA sense strand
uggaagaagaugaagagga

SEQ ID NO: 2271420 - RNA, 19 nt, Homo sapiens
  misc_RNA (1)...(19): siRNA sense strand
aagaagaugaagaggaacu

SEQ ID NO: 2271421 - RNA, 19 nt, Homo sapiens
  misc_RNA (1)...(19): siRNA sense strand
aagagaucgaagagagaga

SEQ ID NO: 2271422 - RNA, 19 nt, Homo sapiens
  misc_RNA (1)...(19): siRNA sense strand
acgucaagcuccugaagca

SEQ ID NO: 2271423 - RNA, 19 nt, Homo sapiens
  misc_RNA (1)...(19): siRNA sense strand
agaaaagaaagcaggauca

SEQ ID NO: 2271424 - RNA, 19 nt, Homo sapiens
  misc_RNA (1)...(19): siRNA sense strand
agaccaaggaggaugcuga

SEQ ID NO: 2271425 - RNA, 19 nt, Homo sapiens
  misc_RNA (1)...(19): siRNA sense strand
cgccgaugauggagcugaa

SEQ ID NO: 2271426 - RNA, 19 nt, Homo sapiens
  misc_RNA (1)...(19): siRNA sense strand
ccugaagcacaaggagaaa

SEQ ID NO: 2271427 - RNA, 19 nt, Homo sapiens
  misc_RNA (1)...(19): siRNA sense strand
aggaggagaccaaggagga

SEQ ID NO: 2271428 - RNA, 19 nt, Homo sapiens
  misc_RNA (1)...(19): siRNA sense strand
agaauacagacgaguccaa

SEQ ID NO: 2271429 - RNA, 19 nt, Homo sapiens
  misc_RNA (1)...(19): siRNA sense strand
ucgaagagagagaaaagaa

SEQ ID NO: 2271430 - RNA, 19 nt, Homo sapiens
  misc_RNA (1)...(19): siRNA sense strand
gaauggaaggagcgaggca

SEQ ID NO: 2271431 - RNA, 19 nt, Homo sapiens
  misc_RNA (1)...(19): siRNA sense strand
cugcaaagucaaagaucaa

SEQ ID NO: 2271432 - RNA, 19 nt, Homo sapiens
  misc_RNA (1)...(19): siRNA sense strand
cggccaagguuuugcacua

SEQ ID NO: 2271433 - RNA, 19 nt, Homo sapiens
  misc_RNA (1)...(19): siRNA sense strand
cugcagggacagagcaauu

SEQ ID NO: 2271434 - RNA, 19 nt, Homo sapiens
  misc_RNA (1)...(19): siRNA sense strand
cagacagauaaauaggaaa

SEQ ID NO: 2271435 - RNA, 19 nt, Homo sapiens
  misc_RNA (1)...(19): siRNA sense strand
uggaaaagaagaagccuaa

SEQ ID NO: 2271436 - RNA, 19 nt, Homo sapiens
  misc_RNA (1)...(19): siRNA sense strand
ugagcgaguaguuggcaaa

SEQ ID NO: 2271437 - RNA, 19 nt, Homo sapiens
  misc_RNA (1)...(19): siRNA sense strand
gaaagcaaguugaagucga

SEQ ID NO: 2271438 - RNA, 19 nt, Homo sapiens
  misc_RNA (1)...(19): siRNA sense strand
guucaggaggcguugggaa

SEQ ID NO: 2271439 - RNA, 19 nt, Homo sapiens
  misc_RNA (1)...(19): siRNA sense strand
auaaaugugaccuggaaga

SEQ ID NO: 2271440 - RNA, 19 nt, Homo sapiens
  misc_RNA (1)...(19): siRNA sense strand
guggaaaagaagaagccua

SEQ ID NO: 2271441 - RNA, 19 nt, Homo sapiens
  misc_RNA (1)...(19): siRNA sense strand
agggauuuguauaugaaga

SEQ ID NO: 2271442 - RNA, 19 nt, Homo sapiens
  misc_RNA (1)...(19): siRNA sense strand
aguacaagcuagugguccu

SEQ ID NO: 2271443 - RNA, 19 nt, Homo sapiens
  misc_RNA (1)...(19): siRNA sense strand
guauaugaagaacggccaa

SEQ ID NO: 2271444 - RNA, 19 nt, Homo sapiens
  misc_RNA (1)...(19): siRNA sense strand
uuagcaagacaguggugua

SEQ ID NO: 2271445 - RNA, 19 nt, Homo sapiens
  misc_RNA (1)...(19): siRNA sense strand
uaggaaaacaccaguggaa

SEQ ID NO: 2271446 - RNA, 19 nt, Homo sapiens
  misc_RNA (1)...(19): siRNA sense strand
gcuagaugacagaggaaau

SEQ ID NO: 2271447 - RNA, 19 nt, Homo sapiens
  misc_RNA (1)...(19): siRNA sense strand
gguuaaaucauguaggaga

SEQ ID NO: 2271448 - RNA, 19 nt, Homo sapiens
  misc_RNA (1)...(19): siRNA sense strand
ggaugauggcagaaagauu

SEQ ID NO: 2271449 - RNA, 19 nt, Homo sapiens
  misc_RNA (1)...(19): siRNA sense strand
ugguaugacccuaaaguaa

SEQ ID NO: 2271450 - RNA, 19 nt, Homo sapiens
  misc_RNA (1)...(19): siRNA sense strand
uggacaaguugaaggaaaa

SEQ ID NO: 2271451 - RNA, 19 nt, Homo sapiens
  misc_RNA (1)...(19): siRNA sense strand
auggacaaguugaaggaaa

SEQ ID NO: 2271452 - RNA, 19 nt, Homo sapiens
  misc_RNA (1)...(19): siRNA sense strand
ccgccaagaguuaaauaaa

SEQ ID NO: 2271453 - RNA, 19 nt, Homo sapiens
  misc_RNA (1)...(19): siRNA sense strand
gaauuuaagaagcgagcau

SEQ ID NO: 2271454 - RNA, 19 nt, Homo sapiens
  misc_RNA (1)...(19): siRNA sense strand
cuuugaauuugcaggguau

SEQ ID NO: 2271455 - RNA, 19 nt, Homo sapiens
  misc_RNA (1)...(19): siRNA sense strand
agcaggaagaagagauuaa

SEQ ID NO: 2271456 - RNA, 19 nt, Homo sapiens
  misc_RNA (1)...(19): siRNA sense strand
accaaggaacagaaaguua

SEQ ID NO: 2271457 - RNA, 19 nt, Homo sapiens
  misc_RNA (1)...(19): siRNA sense strand
ucauggaucuucugggaga

SEQ ID NO: 2271458 - RNA, 19 nt, Homo sapiens
  misc_RNA (1)...(19): siRNA sense strand
guggagaaagauagacaga

SEQ ID NO: 2271459 - RNA, 19 nt, Homo sapiens
  misc_RNA (1)...(19): siRNA sense strand
agauagacagacuggaaaa

SEQ ID NO: 2271460 - RNA, 19 nt, Homo sapiens
  misc_RNA (1)...(19): siRNA sense strand
aaaccaaggaacagaaagu

SEQ ID NO: 2271461 - RNA, 19 nt, Homo sapiens
  misc_RNA (1)...(19): siRNA sense strand
uaguucugcuccaggguaa

SEQ ID NO: 2271462 - RNA, 19 nt, Homo sapiens
  misc_RNA (1)...(19): siRNA sense strand
cgccaagaguuaaauaaaa

SEQ ID NO: 2271463 - RNA, 19 nt, Homo sapiens
  misc_RNA (1)...(19): siRNA sense strand
gggaauaaaaccuguccaa

SEQ ID NO: 2271464 - RNA, 19 nt, Homo sapiens
  misc_RNA (1)...(19): siRNA sense strand
uuuaauagagagaggggaa

SEQ ID NO: 2271465 - RNA, 19 nt, Homo sapiens
  misc_RNA (1)...(19): siRNA sense strand
gauuugugcagguggauga

SEQ ID NO: 2271466 - RNA, 19 nt, Homo sapiens
  misc_RNA (1)...(19): siRNA sense strand
ucuuaacugcagaggaauu

SEQ ID NO: 2271467 - RNA, 19 nt, Homo sapiens
  misc_RNA (1)...(19): siRNA sense strand
ggagcaguuacaagaagaa

SEQ ID NO: 2271468 - RNA, 19 nt, Homo sapiens
  misc_RNA (1)...(19): siRNA sense strand
gguuugauacugaggagga

SEQ ID NO: 2271469 - RNA, 19 nt, Homo sapiens
  misc_RNA (1)...(19): siRNA sense strand
cugaggaggaauuuaagaa

SEQ ID NO: 2271470 - RNA, 19 nt, Homo sapiens
  misc_RNA (1)...(19): siRNA sense strand
auuuaagaagcgagcauau

SEQ ID NO: 2271471 - RNA, 19 nt, Homo sapiens
  misc_RNA (1)...(19): siRNA sense strand
gcagguggaugauggcaga

SEQ ID NO: 2271472 - RNA, 19 nt, Homo sapiens
  misc_RNA (1)...(19): siRNA sense strand
gaauuugaagauagaggau

SEQ ID NO: 2271473 - RNA, 19 nt, Homo sapiens
  misc_RNA (1)...(19): siRNA sense strand
guggaugauggcagaaaga

SEQ ID NO: 2271474 - RNA, 19 nt, Homo sapiens
  misc_RNA (1)...(19): siRNA sense strand
guguggagaaagauagaca

SEQ ID NO: 2271475 - RNA, 19 nt, Homo sapiens
  misc_RNA (1)...(19): siRNA sense strand
augaagaaaugcuccaaaa

SEQ ID NO: 2271476 - RNA, 19 nt, Homo sapiens
  misc_RNA (1)...(19): siRNA sense strand
gaaucuaagaagagguuug

SEQ ID NO: 2271477 - RNA, 19 nt, Homo sapiens
  misc_RNA (1)...(19): siRNA sense strand
aauauuugcugcugcucaa

SEQ ID NO: 2271478 - RNA, 19 nt, Homo sapiens
  misc_RNA (1)...(19): siRNA sense strand
ucaugagaaggaauggaaa

SEQ ID NO: 2271479 - RNA, 19 nt, Homo sapiens
  misc_RNA (1)...(19): siRNA sense strand
gcugcuacuguguggagaa

SEQ ID NO: 2271480 - RNA, 19 nt, Homo sapiens
  misc_RNA (1)...(19): siRNA sense strand
guuaaaucauguaggagac

SEQ ID NO: 2271481 - RNA, 19 nt, Homo sapiens
  misc_RNA (1)...(19): siRNA sense strand
gggagaaggacuaaaacga

SEQ ID NO: 2271482 - RNA, 19 nt, Homo sapiens
  misc_RNA (1)...(19): siRNA sense strand
gauccauggacaaguugaa

SEQ ID NO: 2271483 - RNA, 19 nt, Homo sapiens
  misc_RNA (1)...(19): siRNA sense strand
aagauagacagacuggaaa

SEQ ID NO: 2271484 - RNA, 19 nt, Homo sapiens
  misc_RNA (1)...(19): siRNA sense strand
gagaaauugcugaaaacau

SEQ ID NO: 2271485 - RNA, 19 nt, Homo sapiens
  misc_RNA (1)...(19): siRNA sense strand
uaacauuauuagccgccua

SEQ ID NO: 2271486 - RNA, 19 nt, Homo sapiens
  misc_RNA (1)...(19): siRNA sense strand
ugaaauugaccgguugaaa

SEQ ID NO: 2271487 - RNA, 19 nt, Homo sapiens
  misc_RNA (1)...(19): siRNA sense strand
ucuuugaauuugcagggua

SEQ ID NO: 2271488 - RNA, 19 nt, Homo sapiens
  misc_RNA (1)...(19): siRNA sense strand
guuugauacugaggaggaa

SEQ ID NO: 2271489 - RNA, 19 nt, Homo sapiens
  misc_RNA (1)...(19): siRNA sense strand
gcaguuacaagaagaaaau

SEQ ID NO: 2271490 - RNA, 19 nt, Homo sapiens
  misc_RNA (1)...(19): siRNA sense strand
guuugauauccugggaaua

SEQ ID NO: 2271491 - RNA, 19 nt, Homo sapiens
  misc_RNA (1)...(19): siRNA sense strand
caaauuuggagcaguuaca

SEQ ID NO: 2271492 - RNA, 19 nt, Homo sapiens
  misc_RNA (1)...(19): siRNA sense strand
gaggauuugugcaggugga

SEQ ID NO: 2271493 - RNA, 19 nt, Homo sapiens
  misc_RNA (1)...(19): siRNA sense strand
caggaagaagagauuaaau

SEQ ID NO: 2271494 - RNA, 19 nt, Homo sapiens
  misc_RNA (1)...(19): siRNA sense strand
aaaaucagauggagguuau

SEQ ID NO: 2271495 - RNA, 19 nt, Homo sapiens
  misc_RNA (1)...(19): siRNA sense strand
aaggugaacauguggcgua

SEQ ID NO: 2271496 - RNA, 19 nt, Homo sapiens
  misc_RNA (1)...(19): siRNA sense strand
cugcugaaauugaccgguu

SEQ ID NO: 2271497 - RNA, 19 nt, Homo sapiens
  misc_RNA (1)...(19): siRNA sense strand
auugaaugcugcucagaca

SEQ ID NO: 2271498 - RNA, 19 nt, Homo sapiens
  misc_RNA (1)...(19): siRNA sense strand
acacuaaaugacagagaaa

SEQ ID NO: 2271499 - RNA, 19 nt, Homo sapiens
  misc_RNA (1)...(19): siRNA sense strand
gauggauggauguggguua

SEQ ID NO: 2271500 - RNA, 19 nt, Homo sapiens
  misc_RNA (1)...(19): siRNA sense strand
ccuuauuguugaagaccua

SEQ ID NO: 2271501 - RNA, 19 nt, Homo sapiens
  misc_RNA (1)...(19): siRNA sense strand
acagauuguugaaggauau

SEQ ID NO: 2271502 - RNA, 19 nt, Homo sapiens
  misc_RNA (1)...(19): siRNA sense strand
gagaaauaagcauggaaga

SEQ ID NO: 2271503 - RNA, 19 nt, Homo sapiens
  misc_RNA (1)...(19): siRNA sense strand
ccauaaacucccaguaaaa

SEQ ID NO: 2271504 - RNA, 19 nt, Homo sapiens
  misc_RNA (1)...(19): siRNA sense strand
agaaauacuuccaccgaca

SEQ ID NO: 2271505 - RNA, 19 nt, Homo sapiens
  misc_RNA (1)...(19): siRNA sense strand
cagugaauuuaaagagcuu

SEQ ID NO: 2271506 - RNA, 19 nt, Homo sapiens
  misc_RNA (1)...(19): siRNA sense strand
agauaauacuccuggcgau

SEQ ID NO: 2271507 - RNA, 19 nt, Homo sapiens
  misc_RNA (1)...(19): siRNA sense strand
agauaguaguucagcacuu

SEQ ID NO: 2271508 - RNA, 19 nt, Homo sapiens
  misc_RNA (1)...(19): siRNA sense strand
cugcaagaacacugauauu

SEQ ID NO: 2271509 - RNA, 19 nt, Homo sapiens
  misc_RNA (1)...(19): siRNA sense strand
uguugaagaccuaguagaa

SEQ ID NO: 2271510 - RNA, 19 nt, Homo sapiens
  misc_RNA (1)...(19): siRNA sense strand
caaaggaaaacguuggaaa

SEQ ID NO: 2271511 - RNA, 19 nt, Homo sapiens
  misc_RNA (1)...(19): siRNA sense strand
gagauauauuuaugggugu

SEQ ID NO: 2271512 - RNA, 19 nt, Homo sapiens
  misc_RNA (1)...(19): siRNA sense strand
aaaggaaaacguuggaaaa

SEQ ID NO: 2271513 - RNA, 19 nt, Homo sapiens
  misc_RNA (1)...(19): siRNA sense strand
agaaauaagcauggaagau

SEQ ID NO: 2271514 - RNA, 19 nt, Homo sapiens
  misc_RNA (1)...(19): siRNA sense strand
agaagaguacagugaauuu

SEQ ID NO: 2271515 - RNA, 19 nt, Homo sapiens
  misc_RNA (1)...(19): siRNA sense strand
uggacaagaccgaacacua

SEQ ID NO: 2271516 - RNA, 19 nt, Homo sapiens
  misc_RNA (1)...(19): siRNA sense strand
caccagagccaguagaaga

SEQ ID NO: 2271517 - RNA, 19 nt, Homo sapiens
  misc_RNA (1)...(19): siRNA sense strand
gggacaucauagaucacua

SEQ ID NO: 2271518 - RNA, 19 nt, Homo sapiens
  misc_RNA (1)...(19): siRNA sense strand
cagaacgauagcagaagaa

SEQ ID NO: 2271519 - RNA, 19 nt, Homo sapiens
  misc_RNA (1)...(19): siRNA sense strand
agauagaaggcguguacga

SEQ ID NO: 2271520 - RNA, 19 nt, Homo sapiens
  misc_RNA (1)...(19): siRNA sense strand
aaugcaggaucaagaacaa

SEQ ID NO: 2271521 - RNA, 19 nt, Homo sapiens
  misc_RNA (1)...(19): siRNA sense strand
gcacacuaaaugacagaga

SEQ ID NO: 2271522 - RNA, 19 nt, Homo sapiens
  misc_RNA (1)...(19): siRNA sense strand
cuacauggaaggugucaau

SEQ ID NO: 2271523 - RNA, 19 nt, Homo sapiens
  misc_RNA (1)...(19): siRNA sense strand
cagaacaagcagaggauug

SEQ ID NO: 2271524 - RNA, 19 nt, Homo sapiens
  misc_RNA (1)...(19): siRNA sense strand
cuacauugguggaagacgu

SEQ ID NO: 2271525 - RNA, 19 nt, Homo sapiens
  misc_RNA (1)...(19): siRNA sense strand
gauaauacuccuggcgauu

SEQ ID NO: 2271526 - RNA, 19 nt, Homo sapiens
  misc_RNA (1)...(19): siRNA sense strand
caguggauggcaaggaaau

SEQ ID NO: 2271527 - RNA, 19 nt, Homo sapiens
  misc_RNA (1)...(19): siRNA sense strand
gagaaaauauucauggcuu

SEQ ID NO: 2271528 - RNA, 19 nt, Homo sapiens
  misc_RNA (1)...(19): siRNA sense strand
gagcaguauaugaaagcca

SEQ ID NO: 2271529 - RNA, 19 nt, Homo sapiens
  misc_RNA (1)...(19): siRNA sense strand
aguagaagauagaaggcgu

SEQ ID NO: 2271530 - RNA, 19 nt, Homo sapiens
  misc_RNA (1)...(19): siRNA sense strand
caguauggucagaagaguu

SEQ ID NO: 2271531 - RNA, 19 nt, Homo sapiens
  misc_RNA (1)...(19): siRNA sense strand
cuuagcaaaucuuguggaa

SEQ ID NO: 2271532 - RNA, 19 nt, Homo sapiens
  misc_RNA (1)...(19): siRNA sense strand
uuauggguguuuacagaaa

SEQ ID NO: 2271533 - RNA, 19 nt, Homo sapiens
  misc_RNA (1)...(19): siRNA sense strand
aaaccaaugaugucaggua

SEQ ID NO: 2271534 - RNA, 19 nt, Homo sapiens
  misc_RNA (1)...(19): siRNA sense strand
cuaccugaauaguguccaa

SEQ ID NO: 2271535 - RNA, 19 nt, Homo sapiens
  misc_RNA (1)...(19): siRNA sense strand
ccgauuacagaaagggcau

SEQ ID NO: 2271536 - RNA, 19 nt, Homo sapiens
  misc_RNA (1)...(19): siRNA sense strand
aaaucaugccagaagaaga

SEQ ID NO: 2271537 - RNA, 19 nt, Homo sapiens
  misc_RNA (1)...(19): siRNA sense strand
uuacuacauugguggaaga

SEQ ID NO: 2271538 - RNA, 19 nt, Homo sapiens
  misc_RNA (1)...(19): siRNA sense strand
acagaaagggcaugccaca

SEQ ID NO: 2271539 - RNA, 19 nt, Homo sapiens
  misc_RNA (1)...(19): siRNA sense strand
cagagaaauaagcauggaa

SEQ ID NO: 2271540 - RNA, 19 nt, Homo sapiens
  misc_RNA (1)...(19): siRNA sense strand
aauaccaccaugagaacaa

SEQ ID NO: 2271541 - RNA, 19 nt, Homo sapiens
  misc_RNA (1)...(19): siRNA sense strand
cagaacugcuucaacaaaa

SEQ ID NO: 2271542 - RNA, 19 nt, Homo sapiens
  misc_RNA (1)...(19): siRNA sense strand
ccuugauggagcaguauau

SEQ ID NO: 2271543 - RNA, 19 nt, Homo sapiens
  misc_RNA (1)...(19): siRNA sense strand
aguccaucaaaguuagaaa

SEQ ID NO: 2271544 - RNA, 19 nt, Homo sapiens
  misc_RNA (1)...(19): siRNA sense strand
gcauaaguggccuacaaau

SEQ ID NO: 2271545 - RNA, 19 nt, Homo sapiens
  misc_RNA (1)...(19): siRNA sense strand
uuuagaugaacuugggaau

SEQ ID NO: 2271546 - RNA, 19 nt, Homo sapiens
  misc_RNA (1)...(19): siRNA sense strand
uaccaaaccaaaaggauua

SEQ ID NO: 2271547 - RNA, 19 nt, Homo sapiens
  misc_RNA (1)...(19): siRNA sense strand
agauccacaugaaggaaaa

SEQ ID NO: 2271548 - RNA, 19 nt, Homo sapiens
  misc_RNA (1)...(19): siRNA sense strand
augacacaguggauggcaa

SEQ ID NO: 2271549 - RNA, 19 nt, Homo sapiens
  misc_RNA (1)...(19): siRNA sense strand
cuaccaaaccaaaaggauu

SEQ ID NO: 2271550 - RNA, 19 nt, Homo sapiens
  misc_RNA (1)...(19): siRNA sense strand
aagcagaggauuggaugaa

SEQ ID NO: 2271551 - RNA, 19 nt, Homo sapiens
  misc_RNA (1)...(19): siRNA sense strand
gaauaguguccaaguagca

SEQ ID NO: 2271552 - RNA, 19 nt, Homo sapiens
  misc_RNA (1)...(19): siRNA sense strand
acacuaaaugacagagaaa

SEQ ID NO: 2271553 - RNA, 19 nt, Homo sapiens
  misc_RNA (1)...(19): siRNA sense strand
gauggauggauguggguua

SEQ ID NO: 2271554 - RNA, 19 nt, Homo sapiens
  misc_RNA (1)...(19): siRNA sense strand
ccuuauuguugaagaccua

SEQ ID NO: 2271555 - RNA, 19 nt, Homo sapiens
  misc_RNA (1)...(19): siRNA sense strand
acagauuguugaaggauau

SEQ ID NO: 2271556 - RNA, 19 nt, Homo sapiens
  misc_RNA (1)...(19): siRNA sense strand
gagaaauaagcauggaaga

SEQ ID NO: 2271557 - RNA, 19 nt, Homo sapiens
  misc_RNA (1)...(19): siRNA sense strand
ccauaaacucccaguaaaa

SEQ ID NO: 2271558 - RNA, 19 nt, Homo sapiens
  misc_RNA (1)...(19): siRNA sense strand
agaaauacuuccaccgaca

SEQ ID NO: 2271559 - RNA, 19 nt, Homo sapiens
  misc_RNA (1)...(19): siRNA sense strand
cagugaauuuaaagagcuu

SEQ ID NO: 2271560 - RNA, 19 nt, Homo sapiens
  misc_RNA (1)...(19): siRNA sense strand
agauaauacuccuggcgau

SEQ ID NO: 2271561 - RNA, 19 nt, Homo sapiens
  misc_RNA (1)...(19): siRNA sense strand
agauaguaguucagcacuu

SEQ ID NO: 2271562 - RNA, 19 nt, Homo sapiens
  misc_RNA (1)...(19): siRNA sense strand
cugcaagaacacugauauu

SEQ ID NO: 2271563 - RNA, 19 nt, Homo sapiens
  misc_RNA (1)...(19): siRNA sense strand
uguugaagaccuaguagaa

SEQ ID NO: 2271564 - RNA, 19 nt, Homo sapiens
  misc_RNA (1)...(19): siRNA sense strand
caaaggaaaacguuggaaa

SEQ ID NO: 2271565 - RNA, 19 nt, Homo sapiens
  misc_RNA (1)...(19): siRNA sense strand
gagauauauuuaugggugu

SEQ ID NO: 2271566 - RNA, 19 nt, Homo sapiens
  misc_RNA (1)...(19): siRNA sense strand
aaaggaaaacguuggaaaa

SEQ ID NO: 2271567 - RNA, 19 nt, Homo sapiens
  misc_RNA (1)...(19): siRNA sense strand
agaaauaagcauggaagau

SEQ ID NO: 2271568 - RNA, 19 nt, Homo sapiens
  misc_RNA (1)...(19): siRNA sense strand
agaagaguacagugaauuu

SEQ ID NO: 2271569 - RNA, 19 nt, Homo sapiens
  misc_RNA (1)...(19): siRNA sense strand
uggacaagaccgaacacua

SEQ ID NO: 2271570 - RNA, 19 nt, Homo sapiens
  misc_RNA (1)...(19): siRNA sense strand
caccagagccaguagaaga

SEQ ID NO: 2271571 - RNA, 19 nt, Homo sapiens
  misc_RNA (1)...(19): siRNA sense strand
gggacaucauagaucacua

SEQ ID NO: 2271572 - RNA, 19 nt, Homo sapiens
  misc_RNA (1)...(19): siRNA sense strand
agauagaaggcguguacga

SEQ ID NO: 2271573 - RNA, 19 nt, Homo sapiens
  misc_RNA (1)...(19): siRNA sense strand
aaugcaggaucaagaacaa

SEQ ID NO: 2271574 - RNA, 19 nt, Homo sapiens
  misc_RNA (1)...(19): siRNA sense strand
gcacacuaaaugacagaga

SEQ ID NO: 2271575 - RNA, 19 nt, Homo sapiens
  misc_RNA (1)...(19): siRNA sense strand
cagaacgauagcagaagaa

SEQ ID NO: 2271576 - RNA, 19 nt, Homo sapiens
  misc_RNA (1)...(19): siRNA sense strand
cuacauggaaggugucaau

SEQ ID NO: 2271577 - RNA, 19 nt, Homo sapiens
  misc_RNA (1)...(19): siRNA sense strand
cagaacaagcagaggauug

SEQ ID NO: 2271578 - RNA, 19 nt, Homo sapiens
  misc_RNA (1)...(19): siRNA sense strand
cuacauugguggaagacgu

SEQ ID NO: 2271579 - RNA, 19 nt, Homo sapiens
  misc_RNA (1)...(19): siRNA sense strand
gauaauacuccuggcgauu

SEQ ID NO: 2271580 - RNA, 19 nt, Homo sapiens
  misc_RNA (1)...(19): siRNA sense strand
caguggauggcaaggaaau

SEQ ID NO: 2271581 - RNA, 19 nt, Homo sapiens
  misc_RNA (1)...(19): siRNA sense strand
gagaaaauauucauggcuu

SEQ ID NO: 2271582 - RNA, 19 nt, Homo sapiens
  misc_RNA (1)...(19): siRNA sense strand
gagcaguauaugaaagcca

SEQ ID NO: 2271583 - RNA, 19 nt, Homo sapiens
  misc_RNA (1)...(19): siRNA sense strand
aguagaagauagaaggcgu

SEQ ID NO: 2271584 - RNA, 19 nt, Homo sapiens
  misc_RNA (1)...(19): siRNA sense strand
caguauggucagaagaguu

SEQ ID NO: 2271585 - RNA, 19 nt, Homo sapiens
  misc_RNA (1)...(19): siRNA sense strand
cuuagcaaaucuuguggaa

SEQ ID NO: 2271586 - RNA, 19 nt, Homo sapiens
  misc_RNA (1)...(19): siRNA sense strand
uuauggguguuuacagaaa

SEQ ID NO: 2271587 - RNA, 19 nt, Homo sapiens
  misc_RNA (1)...(19): siRNA sense strand
aaaccaaugaugucaggua

SEQ ID NO: 2271588 - RNA, 19 nt, Homo sapiens
  misc_RNA (1)...(19): siRNA sense strand
cuaccugaauaguguccaa

SEQ ID NO: 2271589 - RNA, 19 nt, Homo sapiens
  misc_RNA (1)...(19): siRNA sense strand
ccgauuacagaaagggcau

SEQ ID NO: 2271590 - RNA, 19 nt, Homo sapiens
  misc_RNA (1)...(19): siRNA sense strand
aaaucaugccagaagaaga

SEQ ID NO: 2271591 - RNA, 19 nt, Homo sapiens
  misc_RNA (1)...(19): siRNA sense strand
uuacuacauugguggaaga

SEQ ID NO: 2271592 - RNA, 19 nt, Homo sapiens
  misc_RNA (1)...(19): siRNA sense strand
acagaaagggcaugccaca

SEQ ID NO: 2271593 - RNA, 19 nt, Homo sapiens
  misc_RNA (1)...(19): siRNA sense strand
cagagaaauaagcauggaa

SEQ ID NO: 2271594 - RNA, 19 nt, Homo sapiens
  misc_RNA (1)...(19): siRNA sense strand
aauaccaccaugagaacaa

SEQ ID NO: 2271595 - RNA, 19 nt, Homo sapiens
  misc_RNA (1)...(19): siRNA sense strand
cagaacugcuucaacaaaa

SEQ ID NO: 2271596 - RNA, 19 nt, Homo sapiens
  misc_RNA (1)...(19): siRNA sense strand
ccuugauggagcaguauau

SEQ ID NO: 2271597 - RNA, 19 nt, Homo sapiens
  misc_RNA (1)...(19): siRNA sense strand
aguccaucaaaguuagaaa

SEQ ID NO: 2271598 - RNA, 19 nt, Homo sapiens
  misc_RNA (1)...(19): siRNA sense strand
gcauaaguggccuacaaau

SEQ ID NO: 2271599 - RNA, 19 nt, Homo sapiens
  misc_RNA (1)...(19): siRNA sense strand
uuuagaugaacuugggaau

SEQ ID NO: 2271600 - RNA, 19 nt, Homo sapiens
  misc_RNA (1)...(19): siRNA sense strand
uaccaaaccaaaaggauua

SEQ ID NO: 2271601 - RNA, 19 nt, Homo sapiens
  misc_RNA (1)...(19): siRNA sense strand
agauccacaugaaggaaaa

SEQ ID NO: 2271602 - RNA, 19 nt, Homo sapiens
  misc_RNA (1)...(19): siRNA sense strand
augacacaguggauggcaa

SEQ ID NO: 2271603 - RNA, 19 nt, Homo sapiens
  misc_RNA (1)...(19): siRNA sense strand
cuaccaaaccaaaaggauu

SEQ ID NO: 2271604 - RNA, 19 nt, Homo sapiens
  misc_RNA (1)...(19): siRNA sense strand
aagcagaggauuggaugaa

SEQ ID NO: 2271605 - RNA, 19 nt, Homo sapiens
  misc_RNA (1)...(19): siRNA sense strand
gaauaguguccaaguagca

SEQ ID NO: 2271606 - RNA, 19 nt, Homo sapiens
  misc_RNA (1)...(19): siRNA sense strand
aggaaaugcuuauggacaa

SEQ ID NO: 2271607 - RNA, 19 nt, Homo sapiens
  misc_RNA (1)...(19): siRNA sense strand
gaggaaaugugcagggaca

SEQ ID NO: 2271608 - RNA, 19 nt, Homo sapiens
  misc_RNA (1)...(19): siRNA sense strand
cggagauauuuacgagaaa

SEQ ID NO: 2271609 - RNA, 19 nt, Homo sapiens
  misc_RNA (1)...(19): siRNA sense strand
cguagaagcaaaaggaaua

SEQ ID NO: 2271610 - RNA, 19 nt, Homo sapiens
  misc_RNA (1)...(19): siRNA sense strand
auagcaaagcagugaauaa

SEQ ID NO: 2271611 - RNA, 19 nt, Homo sapiens
  misc_RNA (1)...(19): siRNA sense strand
ccuaaacagcauugaagaa

SEQ ID NO: 2271612 - RNA, 19 nt, Homo sapiens
  misc_RNA (1)...(19): siRNA sense strand
augaagaaauggauggaca

SEQ ID NO: 2271613 - RNA, 19 nt, Homo sapiens
  misc_RNA (1)...(19): siRNA sense strand
aggaacaacaggacauaaa

SEQ ID NO: 2271614 - RNA, 19 nt, Homo sapiens
  misc_RNA (1)...(19): siRNA sense strand
ugaaauacgacuuggcgaa

SEQ ID NO: 2271615 - RNA, 19 nt, Homo sapiens
  misc_RNA (1)...(19): siRNA sense strand
ccacgaagccggaagcaga

SEQ ID NO: 2271616 - RNA, 19 nt, Homo sapiens
  misc_RNA (1)...(19): siRNA sense strand
aauacuacguucagcuaaa

SEQ ID NO: 2271617 - RNA, 19 nt, Homo sapiens
  misc_RNA (1)...(19): siRNA sense strand
uauagaaaggcuagagaga

SEQ ID NO: 2271618 - RNA, 19 nt, Homo sapiens
  misc_RNA (1)...(19): siRNA sense strand
caaucugacuaaagcacaa

SEQ ID NO: 2271619 - RNA, 19 nt, Homo sapiens
  misc_RNA (1)...(19): siRNA sense strand
acauagacuuugcuguaaa

SEQ ID NO: 2271620 - RNA, 19 nt, Homo sapiens
  misc_RNA (1)...(19): siRNA sense strand
acuacagccuagagggaga

SEQ ID NO: 2271621 - RNA, 19 nt, Homo sapiens
  misc_RNA (1)...(19): siRNA sense strand
aacaggaaauggaggaaau

SEQ ID NO: 2271622 - RNA, 19 nt, Homo sapiens
  misc_RNA (1)...(19): siRNA sense strand
auacaaaucaggaguccaa

SEQ ID NO: 2271623 - RNA, 19 nt, Homo sapiens
  misc_RNA (1)...(19): siRNA sense strand
agacuaaagcuggcagaaa

SEQ ID NO: 2271624 - RNA, 19 nt, Homo sapiens
  misc_RNA (1)...(19): siRNA sense strand
agucaagaguccuguauca

SEQ ID NO: 2271625 - RNA, 19 nt, Homo sapiens
  misc_RNA (1)...(19): siRNA sense strand
cuguaaugguucaggaaac

SEQ ID NO: 2271626 - RNA, 19 nt, Homo sapiens
  misc_RNA (1)...(19): siRNA sense strand
aagcagugaauaaggagua

SEQ ID NO: 2271627 - RNA, 19 nt, Homo sapiens
  misc_RNA (1)...(19): siRNA sense strand
gagcagacgcagaagagga

SEQ ID NO: 2271628 - RNA, 19 nt, Homo sapiens
  misc_RNA (1)...(19): siRNA sense strand
ccaaagugugagccgguua

SEQ ID NO: 2271629 - RNA, 19 nt, Homo sapiens
  misc_RNA (1)...(19): siRNA sense strand
cagcauugaagaacagauu

SEQ ID NO: 2271630 - RNA, 19 nt, Homo sapiens
  misc_RNA (1)...(19): siRNA sense strand
aaggaauaaaggagcacua

SEQ ID NO: 2271631 - RNA, 19 nt, Homo sapiens
  misc_RNA (1)...(19): siRNA sense strand
aaaugaugcuggagagauc

SEQ ID NO: 2271632 - RNA, 19 nt, Homo sapiens
  misc_RNA (1)...(19): siRNA sense strand
gaaagaggaaagaggugau

SEQ ID NO: 2271633 - RNA, 19 nt, Homo sapiens
  misc_RNA (1)...(19): siRNA sense strand
agaagaggaaauuggaaca

SEQ ID NO: 2271634 - RNA, 19 nt, Homo sapiens
  misc_RNA (1)...(19): siRNA sense strand
acuuagaagaugcuacaaa

SEQ ID NO: 2271635 - RNA, 19 nt, Homo sapiens
  misc_RNA (1)...(19): siRNA sense strand
uggaaaggguaucauggaa

SEQ ID NO: 2271636 - RNA, 19 nt, Homo sapiens
  misc_RNA (1)...(19): siRNA sense strand
ucucaagggacauggugaa

SEQ ID NO: 2271637 - RNA, 19 nt, Homo sapiens
  misc_RNA (1)...(19): siRNA sense strand
aaucaggaguccaaaguca

SEQ ID NO: 2271638 - RNA, 19 nt, Homo sapiens
  misc_RNA (1)...(19): siRNA sense strand
auaaacaggccaaagagaa

SEQ ID NO: 2271639 - RNA, 19 nt, Homo sapiens
  misc_RNA (1)...(19): siRNA sense strand
ggaagauauuaaaaggaga

SEQ ID NO: 2271640 - RNA, 19 nt, Homo sapiens
  misc_RNA (1)...(19): siRNA sense strand
cuaaagcacaagagguaca

SEQ ID NO: 2271641 - RNA, 19 nt, Homo sapiens
  misc_RNA (1)...(19): siRNA sense strand
gguaacaaaagaagaaaga

SEQ ID NO: 2271642 - RNA, 19 nt, Homo sapiens
  misc_RNA (1)...(19): siRNA sense strand
acggagauauuuacgagaa

SEQ ID NO: 2271643 - RNA, 19 nt, Homo sapiens
  misc_RNA (1)...(19): siRNA sense strand
acuaaagcuggcagaaauu

SEQ ID NO: 2271644 - RNA, 19 nt, Homo sapiens
  misc_RNA (1)...(19): siRNA sense strand
ccaguggaccagugaaaga

SEQ ID NO: 2271645 - RNA, 19 nt, Homo sapiens
  misc_RNA (1)...(19): siRNA sense strand
auaaggaguaugaagagua

SEQ ID NO: 2271646 - RNA, 19 nt, Homo sapiens
  misc_RNA (1)...(19): siRNA sense strand
gcaaaugaugcuggagaga

SEQ ID NO: 2271647 - RNA, 19 nt, Homo sapiens
  misc_RNA (1)...(19): siRNA sense strand
cagccuagagggagaaguu

SEQ ID NO: 2271648 - RNA, 19 nt, Homo sapiens
  misc_RNA (1)...(19): siRNA sense strand
ugaagaaauggauggacau

SEQ ID NO: 2271649 - RNA, 19 nt, Homo sapiens
  misc_RNA (1)...(19): siRNA sense strand
gcugaaaaguauuccaaga

SEQ ID NO: 2271650 - RNA, 19 nt, Homo sapiens
  misc_RNA (1)...(19): siRNA sense strand
cagacgcagaagaggaaau

SEQ ID NO: 2271651 - RNA, 19 nt, Homo sapiens
  misc_RNA (1)...(19): siRNA sense strand
aaggaauaggagagacuuu

SEQ ID NO: 2271652 - RNA, 19 nt, Homo sapiens
  misc_RNA (1)...(19): siRNA sense strand
aaggaaaugcuuauggaca

SEQ ID NO: 2271653 - RNA, 19 nt, Homo sapiens
  misc_RNA (1)...(19): siRNA sense strand
cauaacagaaggaacaaaa

SEQ ID NO: 2271654 - RNA, 19 nt, Homo sapiens
  misc_RNA (1)...(19): siRNA sense strand
aggaagauauggacguguu

SEQ ID NO: 2271655 - RNA, 19 nt, Homo sapiens
  misc_RNA (1)...(19): siRNA sense strand
cuuagaagaugcuacaaaa

SEQ ID NO: 2271656 - RNA, 19 nt, Homo sapiens
  misc_RNA (1)...(19): siRNA sense strand
acaagaauuucgugaacgu

SEQ ID NO: 2271657 - RNA, 19 nt, Homo sapiens
  misc_RNA (1)...(19): siRNA sense strand
cagugaauaaggaguauga

SEQ ID NO: 2271658 - RNA, 19 nt, Homo sapiens
  misc_RNA (1)...(19): siRNA sense strand
acccaagagucaaggaagu

SEQ ID NO: 2271659 - RNA, 19 nt, Homo sapiens
  misc_RNA (1)...(19): siRNA sense strand
gcagggagugcuaagagaa

SEQ ID NO: 2271660 - RNA, 19 nt, Homo sapiens
  misc_RNA (1)...(19): siRNA sense strand
ccuuuuauaucauggcaaa

SEQ ID NO: 2271661 - RNA, 19 nt, Homo sapiens
  misc_RNA (1)...(19): siRNA sense strand
uggcaaagguaacaaaaga

SEQ ID NO: 2271662 - RNA, 19 nt, Homo sapiens
  misc_RNA (1)...(19): siRNA sense strand
aggguaucauggaaggcaa

SEQ ID NO: 2271663 - RNA, 19 nt, Homo sapiens
  misc_RNA (1)...(19): siRNA sense strand
gcagaagaggaaauuggaa

SEQ ID NO: 2271664 - RNA, 19 nt, Homo sapiens
  misc_RNA (1)...(19): siRNA sense strand
gggucaggccuuacaccaa

SEQ ID NO: 2271665 - RNA, 19 nt, Homo sapiens
  misc_RNA (1)...(19): siRNA sense strand
gagaaugccuccuggaccu

SEQ ID NO: 2271666 - RNA, 19 nt, Homo sapiens
  misc_RNA (1)...(19): siRNA sense strand
aaacaggaaauggaggaaa

SEQ ID NO: 2271667 - RNA, 19 nt, Homo sapiens
  misc_RNA (1)...(19): siRNA sense strand
aaguauuccaagagaaguu

SEQ ID NO: 2271668 - RNA, 19 nt, Homo sapiens
  misc_RNA (1)...(19): siRNA sense strand
caaaaggaauaaaggagca

SEQ ID NO: 2271669 - RNA, 19 nt, Homo sapiens
  misc_RNA (1)...(19): siRNA sense strand
uguucuaacuguuggugau

SEQ ID NO: 2271670 - RNA, 19 nt, Homo sapiens
  misc_RNA (1)...(19): siRNA sense strand
aggaaaugcuuauggacaa

SEQ ID NO: 2271671 - RNA, 19 nt, Homo sapiens
  misc_RNA (1)...(19): siRNA sense strand
gaggaaaugugcagggaca

SEQ ID NO: 2271672 - RNA, 19 nt, Homo sapiens
  misc_RNA (1)...(19): siRNA sense strand
cggagauauuuacgagaaa

SEQ ID NO: 2271673 - RNA, 19 nt, Homo sapiens
  misc_RNA (1)...(19): siRNA sense strand
cguagaagcaaaaggaaua

SEQ ID NO: 2271674 - RNA, 19 nt, Homo sapiens
  misc_RNA (1)...(19): siRNA sense strand
auagcaaagcagugaauaa

SEQ ID NO: 2271675 - RNA, 19 nt, Homo sapiens
  misc_RNA (1)...(19): siRNA sense strand
ccuaaacagcauugaagaa

SEQ ID NO: 2271676 - RNA, 19 nt, Homo sapiens
  misc_RNA (1)...(19): siRNA sense strand
augaagaaauggauggaca

SEQ ID NO: 2271677 - RNA, 19 nt, Homo sapiens
  misc_RNA (1)...(19): siRNA sense strand
aggaacaacaggacauaaa

SEQ ID NO: 2271678 - RNA, 19 nt, Homo sapiens
  misc_RNA (1)...(19): siRNA sense strand
ugaaauacgacuuggcgaa

SEQ ID NO: 2271679 - RNA, 19 nt, Homo sapiens
  misc_RNA (1)...(19): siRNA sense strand
ccacgaagccggaagcaga

SEQ ID NO: 2271680 - RNA, 19 nt, Homo sapiens
  misc_RNA (1)...(19): siRNA sense strand
aauacuacguucagcuaaa

SEQ ID NO: 2271681 - RNA, 19 nt, Homo sapiens
  misc_RNA (1)...(19): siRNA sense strand
uauagaaaggcuagagaga

SEQ ID NO: 2271682 - RNA, 19 nt, Homo sapiens
  misc_RNA (1)...(19): siRNA sense strand
caaucugacuaaagcacaa

SEQ ID NO: 2271683 - RNA, 19 nt, Homo sapiens
  misc_RNA (1)...(19): siRNA sense strand
acauagacuuugcuguaaa

SEQ ID NO: 2271684 - RNA, 19 nt, Homo sapiens
  misc_RNA (1)...(19): siRNA sense strand
acuacagccuagagggaga

SEQ ID NO: 2271685 - RNA, 19 nt, Homo sapiens
  misc_RNA (1)...(19): siRNA sense strand
aacaggaaauggaggaaau

SEQ ID NO: 2271686 - RNA, 19 nt, Homo sapiens
  misc_RNA (1)...(19): siRNA sense strand
auacaaaucaggaguccaa

SEQ ID NO: 2271687 - RNA, 19 nt, Homo sapiens
  misc_RNA (1)...(19): siRNA sense strand
agacuaaagcuggcagaaa

SEQ ID NO: 2271688 - RNA, 19 nt, Homo sapiens
  misc_RNA (1)...(19): siRNA sense strand
agucaagaguccuguauca

SEQ ID NO: 2271689 - RNA, 19 nt, Homo sapiens
  misc_RNA (1)...(19): siRNA sense strand
cuguaaugguucaggaaac

SEQ ID NO: 2271690 - RNA, 19 nt, Homo sapiens
  misc_RNA (1)...(19): siRNA sense strand
aagcagugaauaaggagua

SEQ ID NO: 2271691 - RNA, 19 nt, Homo sapiens
  misc_RNA (1)...(19): siRNA sense strand
gagcagacgcagaagagga

SEQ ID NO: 2271692 - RNA, 19 nt, Homo sapiens
  misc_RNA (1)...(19): siRNA sense strand
ccaaagugugagccgguua

SEQ ID NO: 2271693 - RNA, 19 nt, Homo sapiens
  misc_RNA (1)...(19): siRNA sense strand
cagcauugaagaacagauu

SEQ ID NO: 2271694 - RNA, 19 nt, Homo sapiens
  misc_RNA (1)...(19): siRNA sense strand
aaggaauaaaggagcacua

SEQ ID NO: 2271695 - RNA, 19 nt, Homo sapiens
  misc_RNA (1)...(19): siRNA sense strand
aaaugaugcuggagagauc

SEQ ID NO: 2271696 - RNA, 19 nt, Homo sapiens
  misc_RNA (1)...(19): siRNA sense strand
gaaagaggaaagaggugau

SEQ ID NO: 2271697 - RNA, 19 nt, Homo sapiens
  misc_RNA (1)...(19): siRNA sense strand
agaagaggaaauuggaaca

SEQ ID NO: 2271698 - RNA, 19 nt, Homo sapiens
  misc_RNA (1)...(19): siRNA sense strand
acuuagaagaugcuacaaa

SEQ ID NO: 2271699 - RNA, 19 nt, Homo sapiens
  misc_RNA (1)...(19): siRNA sense strand
uggaaaggguaucauggaa

SEQ ID NO: 2271700 - RNA, 19 nt, Homo sapiens
  misc_RNA (1)...(19): siRNA sense strand
ucucaagggacauggugaa

SEQ ID NO: 2271701 - RNA, 19 nt, Homo sapiens
  misc_RNA (1)...(19): siRNA sense strand
aaucaggaguccaaaguca

SEQ ID NO: 2271702 - RNA, 19 nt, Homo sapiens
  misc_RNA (1)...(19): siRNA sense strand
auaaacaggccaaagagaa

SEQ ID NO: 2271703 - RNA, 19 nt, Homo sapiens
  misc_RNA (1)...(19): siRNA sense strand
ggaagauauuaaaaggaga

SEQ ID NO: 2271704 - RNA, 19 nt, Homo sapiens
  misc_RNA (1)...(19): siRNA sense strand
cuaaagcacaagagguaca

SEQ ID NO: 2271705 - RNA, 19 nt, Homo sapiens
  misc_RNA (1)...(19): siRNA sense strand
gguaacaaaagaagaaaga

SEQ ID NO: 2271706 - RNA, 19 nt, Homo sapiens
  misc_RNA (1)...(19): siRNA sense strand
acggagauauuuacgagaa

SEQ ID NO: 2271707 - RNA, 19 nt, Homo sapiens
  misc_RNA (1)...(19): siRNA sense strand
acuaaagcuggcagaaauu

SEQ ID NO: 2271708 - RNA, 19 nt, Homo sapiens
  misc_RNA (1)...(19): siRNA sense strand
ccaguggaccagugaaaga

SEQ ID NO: 2271709 - RNA, 19 nt, Homo sapiens
  misc_RNA (1)...(19): siRNA sense strand
auaaggaguaugaagagua

SEQ ID NO: 2271710 - RNA, 19 nt, Homo sapiens
  misc_RNA (1)...(19): siRNA sense strand
gcaaaugaugcuggagaga

SEQ ID NO: 2271711 - RNA, 19 nt, Homo sapiens
  misc_RNA (1)...(19): siRNA sense strand
cagccuagagggagaaguu

SEQ ID NO: 2271712 - RNA, 19 nt, Homo sapiens
  misc_RNA (1)...(19): siRNA sense strand
ugaagaaauggauggacau

SEQ ID NO: 2271713 - RNA, 19 nt, Homo sapiens
  misc_RNA (1)...(19): siRNA sense strand
gcugaaaaguauuccaaga

SEQ ID NO: 2271714 - RNA, 19 nt, Homo sapiens
  misc_RNA (1)...(19): siRNA sense strand
cagacgcagaagaggaaau

SEQ ID NO: 2271715 - RNA, 19 nt, Homo sapiens
  misc_RNA (1)...(19): siRNA sense strand
aaggaauaggagagacuuu

SEQ ID NO: 2271716 - RNA, 19 nt, Homo sapiens
  misc_RNA (1)...(19): siRNA sense strand
aaggaaaugcuuauggaca

SEQ ID NO: 2271717 - RNA, 19 nt, Homo sapiens
  misc_RNA (1)...(19): siRNA sense strand
cauaacagaaggaacaaaa

SEQ ID NO: 2271718 - RNA, 19 nt, Homo sapiens
  misc_RNA (1)...(19): siRNA sense strand
aggaagauauggacguguu

SEQ ID NO: 2271719 - RNA, 19 nt, Homo sapiens
  misc_RNA (1)...(19): siRNA sense strand
cuuagaagaugcuacaaaa

SEQ ID NO: 2271720 - RNA, 19 nt, Homo sapiens
  misc_RNA (1)...(19): siRNA sense strand
acaagaauuucgugaacgu

SEQ ID NO: 2271721 - RNA, 19 nt, Homo sapiens
  misc_RNA (1)...(19): siRNA sense strand
cagugaauaaggaguauga

SEQ ID NO: 2271722 - RNA, 19 nt, Homo sapiens
  misc_RNA (1)...(19): siRNA sense strand
acccaagagucaaggaagu

SEQ ID NO: 2271723 - RNA, 19 nt, Homo sapiens
  misc_RNA (1)...(19): siRNA sense strand
gcagggagugcuaagagaa

SEQ ID NO: 2271724 - RNA, 19 nt, Homo sapiens
  misc_RNA (1)...(19): siRNA sense strand
ccuuuuauaucauggcaaa

SEQ ID NO: 2271725 - RNA, 19 nt, Homo sapiens
  misc_RNA (1)...(19): siRNA sense strand
uggcaaagguaacaaaaga

SEQ ID NO: 2271726 - RNA, 19 nt, Homo sapiens
  misc_RNA (1)...(19): siRNA sense strand
aggguaucauggaaggcaa

SEQ ID NO: 2271727 - RNA, 19 nt, Homo sapiens
  misc_RNA (1)...(19): siRNA sense strand
gcagaagaggaaauuggaa

SEQ ID NO: 2271728 - RNA, 19 nt, Homo sapiens
  misc_RNA (1)...(19): siRNA sense strand
gggucaggccuuacaccaa

SEQ ID NO: 2271729 - RNA, 19 nt, Homo sapiens
  misc_RNA (1)...(19): siRNA sense strand
gagaaugccuccuggaccu

SEQ ID NO: 2271730 - RNA, 19 nt, Homo sapiens
  misc_RNA (1)...(19): siRNA sense strand
aaacaggaaauggaggaaa

SEQ ID NO: 2271731 - RNA, 19 nt, Homo sapiens
  misc_RNA (1)...(19): siRNA sense strand
aaguauuccaagagaaguu

SEQ ID NO: 2271732 - RNA, 19 nt, Homo sapiens
  misc_RNA (1)...(19): siRNA sense strand
caaaaggaauaaaggagca

SEQ ID NO: 2271733 - RNA, 19 nt, Homo sapiens
  misc_RNA (1)...(19): siRNA sense strand
uguucuaacuguuggugau

SEQ ID NO: 2271734 - RNA, 19 nt, Homo sapiens
  misc_RNA (1)...(19): siRNA sense strand
cggagaaccugcugggcau

SEQ ID NO: 2271735 - RNA, 19 nt, Homo sapiens
  misc_RNA (1)...(19): siRNA sense strand
augagguucuggaggguaa

SEQ ID NO: 2271736 - RNA, 19 nt, Homo sapiens
  misc_RNA (1)...(19): siRNA sense strand
ggacgaggcuauccggcaa

SEQ ID NO: 2271737 - RNA, 19 nt, Homo sapiens
  misc_RNA (1)...(19): siRNA sense strand
ggaagaagaucaugcacac

SEQ ID NO: 2271738 - RNA, 19 nt, Homo sapiens
  misc_RNA (1)...(19): siRNA sense strand
cagaguugccugaggacga

SEQ ID NO: 2271739 - RNA, 19 nt, Homo sapiens
  misc_RNA (1)...(19): siRNA sense strand
gggccacacugguagguga

SEQ ID NO: 2271740 - RNA, 19 nt, Homo sapiens
  misc_RNA (1)...(19): siRNA sense strand
uggacaaagcccaggaagu

SEQ ID NO: 2271741 - RNA, 19 nt, Homo sapiens
  misc_RNA (1)...(19): siRNA sense strand
ccuacuucuuugaggcaga

SEQ ID NO: 2271742 - RNA, 19 nt, Homo sapiens
  misc_RNA (1)...(19): siRNA sense strand
cgagcuggugguagaggaa

SEQ ID NO: 2271743 - RNA, 19 nt, Homo sapiens
  misc_RNA (1)...(19): siRNA sense strand
aagcagaugcgcagggcca

SEQ ID NO: 2271744 - RNA, 19 nt, Homo sapiens
  misc_RNA (1)...(19): siRNA sense strand
cgcccagguuguaggugaa

SEQ ID NO: 2271745 - RNA, 19 nt, Homo sapiens
  misc_RNA (1)...(19): siRNA sense strand
cgguggucuccgaggaaga

SEQ ID NO: 2271746 - RNA, 19 nt, Homo sapiens
  misc_RNA (1)...(19): siRNA sense strand
uggaagaagaucaugcaca

SEQ ID NO: 2271747 - RNA, 19 nt, Homo sapiens
  misc_RNA (1)...(19): siRNA sense strand
uggagaaagcccuggccau

SEQ ID NO: 2271748 - RNA, 19 nt, Homo sapiens
  misc_RNA (1)...(19): siRNA sense strand
ccgaggacaucgcgcacau

SEQ ID NO: 2271749 - RNA, 19 nt, Homo sapiens
  misc_RNA (1)...(19): siRNA sense strand
gcgcacauccuuaagcaga

SEQ ID NO: 2271750 - RNA, 19 nt, Homo sapiens
  misc_RNA (1)...(19): siRNA sense strand
ggcaacagcugguggacac

SEQ ID NO: 2271751 - RNA, 19 nt, Homo sapiens
  misc_RNA (1)...(19): siRNA sense strand
gcgcacucucugugggcau

SEQ ID NO: 2271752 - RNA, 19 nt, Homo sapiens
  misc_RNA (1)...(19): siRNA sense strand
acgcccagguuguagguga

SEQ ID NO: 2271753 - RNA, 19 nt, Homo sapiens
  misc_RNA (1)...(19): siRNA sense strand
ccaucaaggcugagaccaa

SEQ ID NO: 2271754 - RNA, 19 nt, Homo sapiens
  misc_RNA (1)...(19): siRNA sense strand
ggaucgagaccgagaccga

SEQ ID NO: 2271755 - RNA, 19 nt, Homo sapiens
  misc_RNA (1)...(19): siRNA sense strand
agaaauucaacaagcucaa

SEQ ID NO: 2271756 - RNA, 19 nt, Homo sapiens
  misc_RNA (1)...(19): siRNA sense strand
cugaagaagcaaaguagca

SEQ ID NO: 2271757 - RNA, 19 nt, Homo sapiens
  misc_RNA (1)...(19): siRNA sense strand
cagauggagaagaggcaga

SEQ ID NO: 2271758 - RNA, 19 nt, Homo sapiens
  misc_RNA (1)...(19): siRNA sense strand
caugagaggaaccgggaca

SEQ ID NO: 2271759 - RNA, 19 nt, Homo sapiens
  misc_RNA (1)...(19): siRNA sense strand
gcaaaguagcagcagcaca

SEQ ID NO: 2271760 - RNA, 19 nt, Homo sapiens
  misc_RNA (1)...(19): siRNA sense strand
aagcaaaguagcagcagca

SEQ ID NO: 2271761 - RNA, 19 nt, Homo sapiens
  misc_RNA (1)...(19): siRNA sense strand
acuaggaccagauggagaa

SEQ ID NO: 2271762 - RNA, 19 nt, Homo sapiens
  misc_RNA (1)...(19): siRNA sense strand
aagucaacauagcccgaaa

SEQ ID NO: 2271763 - RNA, 19 nt, Homo sapiens
  misc_RNA (1)...(19): siRNA sense strand
agaacuaggaccagaugga

SEQ ID NO: 2271764 - RNA, 19 nt, Homo sapiens
  misc_RNA (1)...(19): siRNA sense strand
cugcagaagaaauucaaca

SEQ ID NO: 2271765 - RNA, 19 nt, Homo sapiens
  misc_RNA (1)...(19): siRNA sense strand
agaccaaagaagaguuaaa

SEQ ID NO: 2271766 - RNA, 19 nt, Homo sapiens
  misc_RNA (1)...(19): siRNA sense strand
caguucaaguuuagagcua

SEQ ID NO: 2271767 - RNA, 19 nt, Homo sapiens
  misc_RNA (1)...(19): siRNA sense strand
gcagaaaaggaaaaggaaa

SEQ ID NO: 2271768 - RNA, 19 nt, Homo sapiens
  misc_RNA (1)...(19): siRNA sense strand
caugaagaacauagaggaa

SEQ ID NO: 2271769 - RNA, 19 nt, Homo sapiens
  misc_RNA (1)...(19): siRNA sense strand
augaacacgaugagaauaa

SEQ ID NO: 2271770 - RNA, 19 nt, Homo sapiens
  misc_RNA (1)...(19): siRNA sense strand
ggaagaacguguaaccgaa

SEQ ID NO: 2271771 - RNA, 19 nt, Homo sapiens
  misc_RNA (1)...(19): siRNA sense strand
aggaaagaauagaacguga

SEQ ID NO: 2271772 - RNA, 19 nt, Homo sapiens
  misc_RNA (1)...(19): siRNA sense strand
gugaaaaggaagagcuaau

SEQ ID NO: 2271773 - RNA, 19 nt, Homo sapiens
  misc_RNA (1)...(19): siRNA sense strand
gcccaauacaacuggcaaa

SEQ ID NO: 2271774 - RNA, 19 nt, Homo sapiens
  misc_RNA (1)...(19): siRNA sense strand
uggagugaaaucagaaaua

SEQ ID NO: 2271775 - RNA, 19 nt, Homo sapiens
  misc_RNA (1)...(19): siRNA sense strand
agaaauagcagaaaaggaa

SEQ ID NO: 2271776 - RNA, 19 nt, Homo sapiens
  misc_RNA (1)...(19): siRNA sense strand
gaaccauagaagcgaggaa

SEQ ID NO: 2271777 - RNA, 19 nt, Homo sapiens
  misc_RNA (1)...(19): siRNA sense strand
aggcuagggaggagaaaca

SEQ ID NO: 2271778 - RNA, 19 nt, Homo sapiens
  misc_RNA (1)...(19): siRNA sense strand
uuauaaagccaaucgacaa

SEQ ID NO: 2271779 - RNA, 19 nt, Homo sapiens
  misc_RNA (1)...(19): siRNA sense strand
gguuauucuacauggcuua

SEQ ID NO: 2271780 - RNA, 19 nt, Homo sapiens
  misc_RNA (1)...(19): siRNA sense strand
ggaagaaagaauacagaac

SEQ ID NO: 2271781 - RNA, 19 nt, Homo sapiens
  misc_RNA (1)...(19): siRNA sense strand
ccauagaagcgaggaagaa

SEQ ID NO: 2271782 - RNA, 19 nt, Homo sapiens
  misc_RNA (1)...(19): siRNA sense strand
agaacgaaaacgagcaaaa

SEQ ID NO: 2271783 - RNA, 19 nt, Homo sapiens
  misc_RNA (1)...(19): siRNA sense strand
ugaugaacacgaugagaau

SEQ ID NO: 2271784 - RNA, 19 nt, Homo sapiens
  misc_RNA (1)...(19): siRNA sense strand
gauugcacuucuagaggaa

SEQ ID NO: 2271785 - RNA, 19 nt, Homo sapiens
  misc_RNA (1)...(19): siRNA sense strand
gagcaaaagaagaagcaga

SEQ ID NO: 2271786 - RNA, 19 nt, Homo sapiens
  misc_RNA (1)...(19): siRNA sense strand
ggaaaaggaaagaauagaa

SEQ ID NO: 2271787 - RNA, 19 nt, Homo sapiens
  misc_RNA (1)...(19): siRNA sense strand
agaauuagcccaagccaga

SEQ ID NO: 2271788 - RNA, 19 nt, Homo sapiens
  misc_RNA (1)...(19): siRNA sense strand
ucgaugaguuugaagcaau

SEQ ID NO: 2271789 - RNA, 19 nt, Homo sapiens
  misc_RNA (1)...(19): siRNA sense strand
cgaugagaauaaugcugaa

SEQ ID NO: 2271790 - RNA, 19 nt, Homo sapiens
  misc_RNA (1)...(19): siRNA sense strand
gacaauuaaagcucagaaa

SEQ ID NO: 2271791 - RNA, 19 nt, Homo sapiens
  misc_RNA (1)...(19): siRNA sense strand
gaggaagccaagaagaaaa

SEQ ID NO: 2271792 - RNA, 19 nt, Homo sapiens
  misc_RNA (1)...(19): siRNA sense strand
uauaaagccaaucgacaaa

SEQ ID NO: 2271793 - RNA, 19 nt, Homo sapiens
  misc_RNA (1)...(19): siRNA sense strand
aagaaauaacccagagacu

SEQ ID NO: 2271794 - RNA, 19 nt, Homo sapiens
  misc_RNA (1)...(19): siRNA sense strand
cgacaaguuaacaccuaaa

SEQ ID NO: 2271795 - RNA, 19 nt, Homo sapiens
  misc_RNA (1)...(19): siRNA sense strand
aggagaaacaucagaagca

SEQ ID NO: 2271796 - RNA, 19 nt, Homo sapiens
  misc_RNA (1)...(19): siRNA sense strand
cuagaaauguauggaguca

SEQ ID NO: 2271797 - RNA, 19 nt, Homo sapiens
  misc_RNA (1)...(19): siRNA sense strand
agcccaagccagagaugaa

SEQ ID NO: 2271798 - RNA, 19 nt, Homo sapiens
  misc_RNA (1)...(19): siRNA sense strand
guuauaaagccaaucgaca

SEQ ID NO: 2271799 - RNA, 19 nt, Homo sapiens
  misc_RNA (1)...(19): siRNA sense strand
gcaaagucugccauagcaa

SEQ ID NO: 2271800 - RNA, 19 nt, Homo sapiens
  misc_RNA (1)...(19): siRNA sense strand
uggaaaagaccaaagaaga

SEQ ID NO: 2271801 - RNA, 19 nt, Homo sapiens
  misc_RNA (1)...(19): siRNA sense strand
cagaaaaggaaaaggaaag

SEQ ID NO: 2271802 - RNA, 19 nt, Homo sapiens
  misc_RNA (1)...(19): siRNA sense strand
gcuaauggaacgucuaaaa

SEQ ID NO: 2271803 - RNA, 19 nt, Homo sapiens
  misc_RNA (1)...(19): siRNA sense strand
agucauuccuccaacagaa

SEQ ID NO: 2271804 - RNA, 19 nt, Homo sapiens
  misc_RNA (1)...(19): siRNA sense strand
cagagaugaaaccaagaaa

SEQ ID NO: 2271805 - RNA, 19 nt, Homo sapiens
  misc_RNA (1)...(19): siRNA sense strand
aagaagaagcagaacgacu

SEQ ID NO: 2271806 - RNA, 19 nt, Homo sapiens
  misc_RNA (1)...(19): siRNA sense strand
augaugaacacgaugagaa

SEQ ID NO: 2271807 - RNA, 19 nt, Homo sapiens
  misc_RNA (1)...(19): siRNA sense strand
aguacaagacucugcgaca

SEQ ID NO: 2271808 - RNA, 19 nt, Homo sapiens
  misc_RNA (1)...(19): siRNA sense strand
auguagacagcaaagguua

SEQ ID NO: 2271809 - RNA, 19 nt, Homo sapiens
  misc_RNA (1)...(19): siRNA sense strand
agaacuggcaugaagaaca

SEQ ID NO: 2271810 - RNA, 19 nt, Homo sapiens
  misc_RNA (1)...(19): siRNA sense strand
uggccuuauguaugggaaa

SEQ ID NO: 2271811 - RNA, 19 nt, Homo sapiens
  misc_RNA (1)...(19): siRNA sense strand
cucuagaacuggaucaaga

SEQ ID NO: 2271812 - RNA, 19 nt, Homo sapiens
  misc_RNA (1)...(19): siRNA sense strand
gggaggagaaacaucagaa

SEQ ID NO: 2271813 - RNA, 19 nt, Homo sapiens
  misc_RNA (1)...(19): siRNA sense strand
gagcugcugaagaggcaaa

SEQ ID NO: 2271814 - RNA, 19 nt, Homo sapiens
  misc_RNA (1)...(19): siRNA sense strand
ccgaaaccaaucaacguaa

SEQ ID NO: 2271815 - RNA, 19 nt, Homo sapiens
  misc_RNA (1)...(19): siRNA sense strand
gagcuaaauucuuuccuga

SEQ ID NO: 2271816 - RNA, 19 nt, Homo sapiens
  misc_RNA (1)...(19): siRNA sense strand
ccaaguauggagauuacaa

SEQ ID NO: 2271817 - RNA, 19 nt, Homo sapiens
  misc_RNA (1)...(19): siRNA sense strand
uuuaugagcaugacgacaa

SEQ ID NO: 2271818 - RNA, 19 nt, Homo sapiens
  misc_RNA (1)...(19): siRNA sense strand
ugcaguauguagacagcaa

SEQ ID NO: 2271819 - RNA, 19 nt, Homo sapiens
  misc_RNA (1)...(19): siRNA sense strand
agaugaagaaucaggagca

SEQ ID NO: 2271820 - RNA, 19 nt, Homo sapiens
  misc_RNA (1)...(19): siRNA sense strand
cccaggaagacuuggaaaa

SEQ ID NO: 2271821 - RNA, 19 nt, Homo sapiens
  misc_RNA (1)...(19): siRNA sense strand
ucuacauggcuuaaacuaa

SEQ ID NO: 2271822 - RNA, 19 nt, Homo sapiens
  misc_RNA (1)...(19): siRNA sense strand
gcgucaucauugugggcaa

SEQ ID NO: 2271823 - RNA, 19 nt, Homo sapiens
  misc_RNA (1)...(19): siRNA sense strand
cugcaacggacguggaaau

SEQ ID NO: 2271824 - RNA, 19 nt, Homo sapiens
  misc_RNA (1)...(19): siRNA sense strand
ggcuaaaggucgugcgccu

SEQ ID NO: 2271825 - RNA, 19 nt, Homo sapiens
  misc_RNA (1)...(19): siRNA sense strand
uggucaagcuggaggccga

SEQ ID NO: 2271826 - RNA, 19 nt, Homo sapiens
  misc_RNA (1)...(19): siRNA sense strand
gacaagaagcugaaggagu

SEQ ID NO: 2271827 - RNA, 19 nt, Homo sapiens
  misc_RNA (1)...(19): siRNA sense strand
ucgaggaagaugaagaaga

SEQ ID NO: 2271828 - RNA, 19 nt, Homo sapiens
  misc_RNA (1)...(19): siRNA sense strand
gccuuaacaagaagagaau

SEQ ID NO: 2271829 - RNA, 19 nt, Homo sapiens
  misc_RNA (1)...(19): siRNA sense strand
acaagaagcugaaggaguc

SEQ ID NO: 2271830 - RNA, 19 nt, Homo sapiens
  misc_RNA (1)...(19): siRNA sense strand
gcaacaucgccguggacca

SEQ ID NO: 2271831 - RNA, 19 nt, Homo sapiens
  misc_RNA (1)...(19): siRNA sense strand
ccaacgagcaccaaggcau

SEQ ID NO: 2271832 - RNA, 19 nt, Homo sapiens
  misc_RNA (1)...(19): siRNA sense strand
gcauguacuuccagaccca

SEQ ID NO: 2271833 - RNA, 19 nt, Homo sapiens
  misc_RNA (1)...(19): siRNA sense strand
aagaugaagaagacaccua

SEQ ID NO: 2271834 - RNA, 19 nt, Homo sapiens
  misc_RNA (1)...(19): siRNA sense strand
gaagaaccgcuuugggcuu

SEQ ID NO: 2271835 - RNA, 19 nt, Homo sapiens
  misc_RNA (1)...(19): siRNA sense strand
accacaagcuguugggcca

SEQ ID NO: 2271836 - RNA, 19 nt, Homo sapiens
  misc_RNA (1)...(19): siRNA sense strand
cgcuggaggaccuggagaa

SEQ ID NO: 2271837 - RNA, 19 nt, Homo sapiens
  misc_RNA (1)...(19): siRNA sense strand
acaccaagcucuaccagga

SEQ ID NO: 2271838 - RNA, 19 nt, Homo sapiens
  misc_RNA (1)...(19): siRNA sense strand
agagcagccucaaggacau

SEQ ID NO: 2271839 - RNA, 19 nt, Homo sapiens
  misc_RNA (1)...(19): siRNA sense strand
gcaaagaggugacccugca

SEQ ID NO: 2271840 - RNA, 19 nt, Homo sapiens
  misc_RNA (1)...(19): siRNA sense strand
acguaaucaucaagugcca

SEQ ID NO: 2271841 - RNA, 19 nt, Homo sapiens
  misc_RNA (1)...(19): siRNA sense strand
ccaagagccgugaggccau

SEQ ID NO: 2271842 - RNA, 19 nt, Homo sapiens
  misc_RNA (1)...(19): siRNA sense strand
aguuguuggcugaguugaa

SEQ ID NO: 2271843 - RNA, 19 nt, Homo sapiens
  misc_RNA (1)...(19): siRNA sense strand
aggaagaagaggaggagga

SEQ ID NO: 2271844 - RNA, 19 nt, Homo sapiens
  misc_RNA (1)...(19): siRNA sense strand
gagcaggacuucaagguga

SEQ ID NO: 2271845 - RNA, 19 nt, Homo sapiens
  misc_RNA (1)...(19): siRNA sense strand
ccgacaaagacgaggagga

SEQ ID NO: 2271846 - RNA, 19 nt, Homo sapiens
  misc_RNA (1)...(19): siRNA sense strand
ucgcagaagcagaggcuca

SEQ ID NO: 2271847 - RNA, 19 nt, Homo sapiens
  misc_RNA (1)...(19): siRNA sense strand
agacgagcgugcaggccaa

SEQ ID NO: 2271848 - RNA, 19 nt, Homo sapiens
  misc_RNA (1)...(19): siRNA sense strand
gaggagaugcugcggguga

SEQ ID NO: 2271849 - RNA, 19 nt, Homo sapiens
  misc_RNA (1)...(19): siRNA sense strand
aagaggaggaggagagcga

SEQ ID NO: 2271850 - RNA, 19 nt, Homo sapiens
  misc_RNA (1)...(19): siRNA sense strand
aggaggaagaagaggagga

SEQ ID NO: 2271851 - RNA, 19 nt, Homo sapiens
  misc_RNA (1)...(19): siRNA sense strand
ggccagaagcaguacguga

SEQ ID NO: 2271852 - RNA, 19 nt, Homo sapiens
  misc_RNA (1)...(19): siRNA sense strand
aagacgaggaggaagaaga

SEQ ID NO: 2271853 - RNA, 19 nt, Homo sapiens
  misc_RNA (1)...(19): siRNA sense strand
ccgagaagcgacugcccaa

SEQ ID NO: 2271854 - RNA, 19 nt, Homo sapiens
  misc_RNA (1)...(19): siRNA sense strand
agauggaaggcaugaccaa

SEQ ID NO: 2271855 - RNA, 19 nt, Homo sapiens
  misc_RNA (1)...(19): siRNA sense strand
cuguacacgcagacggcaa

SEQ ID NO: 2271856 - RNA, 19 nt, Homo sapiens
  misc_RNA (1)...(19): siRNA sense strand
ucacagagcucgaccucca

SEQ ID NO: 2271857 - RNA, 19 nt, Homo sapiens
  misc_RNA (1)...(19): siRNA sense strand
aggaggagagcgaggacga

SEQ ID NO: 2271858 - RNA, 19 nt, Homo sapiens
  misc_RNA (1)...(19): siRNA sense strand
gggaacacugugaggccau

SEQ ID NO: 2271859 - RNA, 19 nt, Homo sapiens
  misc_RNA (1)...(19): siRNA sense strand
ccaagagccuggagagcug

SEQ ID NO: 2271860 - RNA, 19 nt, Homo sapiens
  misc_RNA (1)...(19): siRNA sense strand
aagaagaggaggaggagag

SEQ ID NO: 2271861 - RNA, 19 nt, Homo sapiens
  misc_RNA (1)...(19): siRNA sense strand
cagcaaagguggccagguc

SEQ ID NO: 2271862 - RNA, 19 nt, Homo sapiens
  misc_RNA (1)...(19): siRNA sense strand
agcucgaccuccagggcaa

SEQ ID NO: 2271863 - RNA, 19 nt, Homo sapiens
  misc_RNA (1)...(19): siRNA sense strand
ucgccaacgugcaggagca

SEQ ID NO: 2271864 - RNA, 19 nt, Homo sapiens
  misc_RNA (1)...(19): siRNA sense strand
ccaaaauacuggagggaau

SEQ ID NO: 2271865 - RNA, 19 nt, Homo sapiens
  misc_RNA (1)...(19): siRNA sense strand
aaacaaagguacaagccua

SEQ ID NO: 2271866 - RNA, 19 nt, Homo sapiens
  misc_RNA (1)...(19): siRNA sense strand
aggaaguggucaacagaca

SEQ ID NO: 2271867 - RNA, 19 nt, Homo sapiens
  misc_RNA (1)...(19): siRNA sense strand
gaaccuaucugaucggcaa

SEQ ID NO: 2271868 - RNA, 19 nt, Homo sapiens
  misc_RNA (1)...(19): siRNA sense strand
gggcgucacaggaggacaa

SEQ ID NO: 2271869 - RNA, 19 nt, Homo sapiens
  misc_RNA (1)...(19): siRNA sense strand
gguucagagacuagaaaca

SEQ ID NO: 2271870 - RNA, 19 nt, Homo sapiens
  misc_RNA (1)...(19): siRNA sense strand
agauugggcacuagaggaa

SEQ ID NO: 2271871 - RNA, 19 nt, Homo sapiens
  misc_RNA (1)...(19): siRNA sense strand
agagaaugauacaaaccaa

SEQ ID NO: 2271872 - RNA, 19 nt, Homo sapiens
  misc_RNA (1)...(19): siRNA sense strand
ucgagcaaucugagugaaa

SEQ ID NO: 2271873 - RNA, 19 nt, Homo sapiens
  misc_RNA (1)...(19): siRNA sense strand
ccgaaagcaaagcugauaa

SEQ ID NO: 2271874 - RNA, 19 nt, Homo sapiens
  misc_RNA (1)...(19): siRNA sense strand
aguauauggcuaugagaca

SEQ ID NO: 2271875 - RNA, 19 nt, Homo sapiens
  misc_RNA (1)...(19): siRNA sense strand
cuucagaacacuucccaaa

SEQ ID NO: 2271876 - RNA, 19 nt, Homo sapiens
  misc_RNA (1)...(19): siRNA sense strand
acaacaugguucagagacu

SEQ ID NO: 2271877 - RNA, 19 nt, Homo sapiens
  misc_RNA (1)...(19): siRNA sense strand
cgauugagacgcugcaaaa

SEQ ID NO: 2271878 - RNA, 19 nt, Homo sapiens
  misc_RNA (1)...(19): siRNA sense strand
agacacagauguacagcca

SEQ ID NO: 2271879 - RNA, 19 nt, Homo sapiens
  misc_RNA (1)...(19): siRNA sense strand
uguaauugcccaaagccaa

SEQ ID NO: 2271880 - RNA, 19 nt, Homo sapiens
  misc_RNA (1)...(19): siRNA sense strand
cagcagaaggagugagccu

SEQ ID NO: 2271881 - RNA, 19 nt, Homo sapiens
  misc_RNA (1)...(19): siRNA sense strand
cugaaauggauguguaacu

SEQ ID NO: 2271882 - RNA, 19 nt, Homo sapiens
  misc_RNA (1)...(19): siRNA sense strand
gcgauugagacgcugcaaa

SEQ ID NO: 2271883 - RNA, 19 nt, Homo sapiens
  misc_RNA (1)...(19): siRNA sense strand
gcucaaugguuauucggga

SEQ ID NO: 2271884 - RNA, 19 nt, Homo sapiens
  misc_RNA (1)...(19): siRNA sense strand
ggacuuaaccuuacgcagu

SEQ ID NO: 2271885 - RNA, 19 nt, Homo sapiens
  misc_RNA (1)...(19): siRNA sense strand
cgacaauugaaauggcgau

SEQ ID NO: 2271886 - RNA, 19 nt, Homo sapiens
  misc_RNA (1)...(19): siRNA sense strand
uuucacaggaaguggucaa

SEQ ID NO: 2271887 - RNA, 19 nt, Homo sapiens
  misc_RNA (1)...(19): siRNA sense strand
cuauagcagucaugggcga

SEQ ID NO: 2271888 - RNA, 19 nt, Homo sapiens
  misc_RNA (1)...(19): siRNA sense strand
aaacaugagucuauccuga

SEQ ID NO: 2271889 - RNA, 19 nt, Homo sapiens
  misc_RNA (1)...(19): siRNA sense strand
gugcagugcuucagaacac

SEQ ID NO: 2271890 - RNA, 19 nt, Homo sapiens
  misc_RNA (1)...(19): siRNA sense strand
aggcaauauuggacguugu

SEQ ID NO: 2271891 - RNA, 19 nt, Homo sapiens
  misc_RNA (1)...(19): siRNA sense strand
aggcuuugguggagauucu

SEQ ID NO: 2271892 - RNA, 19 nt, Homo sapiens
  misc_RNA (1)...(19): siRNA sense strand
caauuaugagacagcagaa

SEQ ID NO: 2271893 - RNA, 19 nt, Homo sapiens
  misc_RNA (1)...(19): siRNA sense strand
uuuccaaugccaugaacaa

SEQ ID NO: 2271894 - RNA, 19 nt, Homo sapiens
  misc_RNA (1)...(19): siRNA sense strand
acugaaacccuaugaagga

SEQ ID NO: 2271895 - RNA, 19 nt, Homo sapiens
  misc_RNA (1)...(19): siRNA sense strand
gcagaaaguggaugggguu

SEQ ID NO: 2271896 - RNA, 19 nt, Homo sapiens
  misc_RNA (1)...(19): siRNA sense strand
ucgagcacuuccagaguuu

SEQ ID NO: 2271897 - RNA, 19 nt, Homo sapiens
  misc_RNA (1)...(19): siRNA sense strand
uuacaaacaucuguggcua

SEQ ID NO: 2271898 - RNA, 19 nt, Homo sapiens
  misc_RNA (1)...(19): siRNA sense strand
gacuagaaacagacuucaa

SEQ ID NO: 2271899 - RNA, 19 nt, Homo sapiens
  misc_RNA (1)...(19): siRNA sense strand
ccaaaauacuggagggaau

SEQ ID NO: 2271900 - RNA, 19 nt, Homo sapiens
  misc_RNA (1)...(19): siRNA sense strand
aaacaaagguacaagccua

SEQ ID NO: 2271901 - RNA, 19 nt, Homo sapiens
  misc_RNA (1)...(19): siRNA sense strand
aggaaguggucaacagaca

SEQ ID NO: 2271902 - RNA, 19 nt, Homo sapiens
  misc_RNA (1)...(19): siRNA sense strand
gaaccuaucugaucggcaa

SEQ ID NO: 2271903 - RNA, 19 nt, Homo sapiens
  misc_RNA (1)...(19): siRNA sense strand
gggcgucacaggaggacaa

SEQ ID NO: 2271904 - RNA, 19 nt, Homo sapiens
  misc_RNA (1)...(19): siRNA sense strand
gguucagagacuagaaaca

SEQ ID NO: 2271905 - RNA, 19 nt, Homo sapiens
  misc_RNA (1)...(19): siRNA sense strand
agauugggcacuagaggaa

SEQ ID NO: 2271906 - RNA, 19 nt, Homo sapiens
  misc_RNA (1)...(19): siRNA sense strand
agagaaugauacaaaccaa

SEQ ID NO: 2271907 - RNA, 19 nt, Homo sapiens
  misc_RNA (1)...(19): siRNA sense strand
ucgagcaaucugagugaaa

SEQ ID NO: 2271908 - RNA, 19 nt, Homo sapiens
  misc_RNA (1)...(19): siRNA sense strand
ccgaaagcaaagcugauaa

SEQ ID NO: 2271909 - RNA, 19 nt, Homo sapiens
  misc_RNA (1)...(19): siRNA sense strand
aguauauggcuaugagaca

SEQ ID NO: 2271910 - RNA, 19 nt, Homo sapiens
  misc_RNA (1)...(19): siRNA sense strand
cuucagaacacuucccaaa

SEQ ID NO: 2271911 - RNA, 19 nt, Homo sapiens
  misc_RNA (1)...(19): siRNA sense strand
acaacaugguucagagacu

SEQ ID NO: 2271912 - RNA, 19 nt, Homo sapiens
  misc_RNA (1)...(19): siRNA sense strand
cgauugagacgcugcaaaa

SEQ ID NO: 2271913 - RNA, 19 nt, Homo sapiens
  misc_RNA (1)...(19): siRNA sense strand
agacacagauguacagcca

SEQ ID NO: 2271914 - RNA, 19 nt, Homo sapiens
  misc_RNA (1)...(19): siRNA sense strand
uguaauugcccaaagccaa

SEQ ID NO: 2271915 - RNA, 19 nt, Homo sapiens
  misc_RNA (1)...(19): siRNA sense strand
cagcagaaggagugagccu

SEQ ID NO: 2271916 - RNA, 19 nt, Homo sapiens
  misc_RNA (1)...(19): siRNA sense strand
cugaaauggauguguaacu

SEQ ID NO: 2271917 - RNA, 19 nt, Homo sapiens
  misc_RNA (1)...(19): siRNA sense strand
gcgauugagacgcugcaaa

SEQ ID NO: 2271918 - RNA, 19 nt, Homo sapiens
  misc_RNA (1)...(19): siRNA sense strand
gcucaaugguuauucggga

SEQ ID NO: 2271919 - RNA, 19 nt, Homo sapiens
  misc_RNA (1)...(19): siRNA sense strand
ggacuuaaccuuacgcagu

SEQ ID NO: 2271920 - RNA, 19 nt, Homo sapiens
  misc_RNA (1)...(19): siRNA sense strand
cgacaauugaaauggcgau

SEQ ID NO: 2271921 - RNA, 19 nt, Homo sapiens
  misc_RNA (1)...(19): siRNA sense strand
uuucacaggaaguggucaa

SEQ ID NO: 2271922 - RNA, 19 nt, Homo sapiens
  misc_RNA (1)...(19): siRNA sense strand
cuauagcagucaugggcga

SEQ ID NO: 2271923 - RNA, 19 nt, Homo sapiens
  misc_RNA (1)...(19): siRNA sense strand
aaacaugagucuauccuga

SEQ ID NO: 2271924 - RNA, 19 nt, Homo sapiens
  misc_RNA (1)...(19): siRNA sense strand
gugcagugcuucagaacac

SEQ ID NO: 2271925 - RNA, 19 nt, Homo sapiens
  misc_RNA (1)...(19): siRNA sense strand
aggcaauauuggacguugu

SEQ ID NO: 2271926 - RNA, 19 nt, Homo sapiens
  misc_RNA (1)...(19): siRNA sense strand
aggcuuugguggagauucu

SEQ ID NO: 2271927 - RNA, 19 nt, Homo sapiens
  misc_RNA (1)...(19): siRNA sense strand
caauuaugagacagcagaa

SEQ ID NO: 2271928 - RNA, 19 nt, Homo sapiens
  misc_RNA (1)...(19): siRNA sense strand
uuuccaaugccaugaacaa

SEQ ID NO: 2271929 - RNA, 19 nt, Homo sapiens
  misc_RNA (1)...(19): siRNA sense strand
acugaaacccuaugaagga

SEQ ID NO: 2271930 - RNA, 19 nt, Homo sapiens
  misc_RNA (1)...(19): siRNA sense strand
gcagaaaguggaugggguu

SEQ ID NO: 2271931 - RNA, 19 nt, Homo sapiens
  misc_RNA (1)...(19): siRNA sense strand
ucgagcacuuccagaguuu

SEQ ID NO: 2271932 - RNA, 19 nt, Homo sapiens
  misc_RNA (1)...(19): siRNA sense strand
uuacaaacaucuguggcua

SEQ ID NO: 2271933 - RNA, 19 nt, Homo sapiens
  misc_RNA (1)...(19): siRNA sense strand
gacuagaaacagacuucaa

SEQ ID NO: 2271934 - RNA, 19 nt, Homo sapiens
  misc_RNA (1)...(19): siRNA sense strand
ccaucaagaccgagugcuu

SEQ ID NO: 2271935 - RNA, 19 nt, Homo sapiens
  misc_RNA (1)...(19): siRNA sense strand
gggagaaggggauggagaa

SEQ ID NO: 2271936 - RNA, 19 nt, Homo sapiens
  misc_RNA (1)...(19): siRNA sense strand
ugugaagacaacugggaau

SEQ ID NO: 2271937 - RNA, 19 nt, Homo sapiens
  misc_RNA (1)...(19): siRNA sense strand
cggaggaccugaugggugu

SEQ ID NO: 2271938 - RNA, 19 nt, Homo sapiens
  misc_RNA (1)...(19): siRNA sense strand
gggaggaauacgaggccca

SEQ ID NO: 2271939 - RNA, 19 nt, Homo sapiens
  misc_RNA (1)...(19): siRNA sense strand
cugaagaauacgaugacca

SEQ ID NO: 2271940 - RNA, 19 nt, Homo sapiens
  misc_RNA (1)...(19): siRNA sense strand
ggagaauacugccagacga

SEQ ID NO: 2271941 - RNA, 19 nt, Homo sapiens
  misc_RNA (1)...(19): siRNA sense strand
ggggagcaguguagggaca

SEQ ID NO: 2271942 - RNA, 19 nt, Homo sapiens
  misc_RNA (1)...(19): siRNA sense strand
cugcauugucacagcccua

SEQ ID NO: 2271943 - RNA, 19 nt, Homo sapiens
  misc_RNA (1)...(19): siRNA sense strand
cagcaggcauugagcucca

SEQ ID NO: 2271944 - RNA, 19 nt, Homo sapiens
  misc_RNA (1)...(19): siRNA sense strand
guggagaaauugagcucgu

SEQ ID NO: 2271945 - RNA, 19 nt, Homo sapiens
  misc_RNA (1)...(19): siRNA sense strand
agaaggggauggagaagau

SEQ ID NO: 2271946 - RNA, 19 nt, Homo sapiens
  misc_RNA (1)...(19): siRNA sense strand
gugaaaagcaguacaccau

SEQ ID NO: 2271947 - RNA, 19 nt, Homo sapiens
  misc_RNA (1)...(19): siRNA sense strand
gaacaaaagaagaguggaa

SEQ ID NO: 2271948 - RNA, 19 nt, Homo sapiens
  misc_RNA (1)...(19): siRNA sense strand
acgaaauguugaagaucuu

SEQ ID NO: 2271949 - RNA, 19 nt, Homo sapiens
  misc_RNA (1)...(19): siRNA sense strand
gaaacaaagacacaggcaa

SEQ ID NO: 2271950 - RNA, 19 nt, Homo sapiens
  misc_RNA (1)...(19): siRNA sense strand
uaguguaagagaaggcaua

SEQ ID NO: 2271951 - RNA, 19 nt, Homo sapiens
  misc_RNA (1)...(19): siRNA sense strand
guuauaagccacagaaaau

SEQ ID NO: 2271952 - RNA, 19 nt, Homo sapiens
  misc_RNA (1)...(19): siRNA sense strand
cagcaaaugaagaagaagu

SEQ ID NO: 2271953 - RNA, 19 nt, Homo sapiens
  misc_RNA (1)...(19): siRNA sense strand
caggaaaacaaaagccaaa

SEQ ID NO: 2271954 - RNA, 19 nt, Homo sapiens
  misc_RNA (1)...(19): siRNA sense strand
cuaagaacacaguugcaaa

SEQ ID NO: 2271955 - RNA, 19 nt, Homo sapiens
  misc_RNA (1)...(19): siRNA sense strand
cuguaguucgaaugggaaa

SEQ ID NO: 2271956 - RNA, 19 nt, Homo sapiens
  misc_RNA (1)...(19): siRNA sense strand
gagcaaaauagcauggauu

SEQ ID NO: 2271957 - RNA, 19 nt, Homo sapiens
  misc_RNA (1)...(19): siRNA sense strand
auauuuggauucugagcaa

SEQ ID NO: 2271958 - RNA, 19 nt, Homo sapiens
  misc_RNA (1)...(19): siRNA sense strand
guuucauacuccaugcaaa

SEQ ID NO: 2271959 - RNA, 19 nt, Homo sapiens
  misc_RNA (1)...(19): siRNA sense strand
caaccaugacaaauguaaa

SEQ ID NO: 2271960 - RNA, 19 nt, Homo sapiens
  misc_RNA (1)...(19): siRNA sense strand
caggugaaguuuugggauu

SEQ ID NO: 2271961 - RNA, 19 nt, Homo sapiens
  misc_RNA (1)...(19): siRNA sense strand
ccuucaaacuucacagguu

SEQ ID NO: 2271962 - RNA, 19 nt, Homo sapiens
  misc_RNA (1)...(19): siRNA sense strand
acagaaaauuagucccaaa

SEQ ID NO: 2271963 - RNA, 19 nt, Homo sapiens
  misc_RNA (1)...(19): siRNA sense strand
gauucuagaagaugaccua

SEQ ID NO: 2271964 - RNA, 19 nt, Homo sapiens
  misc_RNA (1)...(19): siRNA sense strand
caguuauaagccacagaaa

SEQ ID NO: 2271965 - RNA, 19 nt, Homo sapiens
  misc_RNA (1)...(19): siRNA sense strand
aguuauaagccacagaaaa

SEQ ID NO: 2271966 - RNA, 19 nt, Homo sapiens
  misc_RNA (1)...(19): siRNA sense strand
gagcaaagacugauggcag

SEQ ID NO: 2271967 - RNA, 19 nt, Homo sapiens
  misc_RNA (1)...(19): siRNA sense strand
ccaaacaacuauaggccac

SEQ ID NO: 2271968 - RNA, 19 nt, Homo sapiens
  misc_RNA (1)...(19): siRNA sense strand
ccuaaaagccaucaucaaa

SEQ ID NO: 2271969 - RNA, 19 nt, Homo sapiens
  misc_RNA (1)...(19): siRNA sense strand
cucaauauguagccagauu

SEQ ID NO: 2271970 - RNA, 19 nt, Homo sapiens
  misc_RNA (1)...(19): siRNA sense strand
aagaugaaacaaagacaca

SEQ ID NO: 2271971 - RNA, 19 nt, Homo sapiens
  misc_RNA (1)...(19): siRNA sense strand
auaucauugugguggaaca

SEQ ID NO: 2271972 - RNA, 19 nt, Homo sapiens
  misc_RNA (1)...(19): siRNA sense strand
agacagcaaaugaagaaga

SEQ ID NO: 2271973 - RNA, 19 nt, Homo sapiens
  misc_RNA (1)...(19): siRNA sense strand
aaugggagaauuugagcua

SEQ ID NO: 2271974 - RNA, 19 nt, Homo sapiens
  misc_RNA (1)...(19): siRNA sense strand
aagaaaugucgacaggaau

SEQ ID NO: 2271975 - RNA, 19 nt, Homo sapiens
  misc_RNA (1)...(19): siRNA sense strand
auuaucugguggugaacua

SEQ ID NO: 2271976 - RNA, 19 nt, Homo sapiens
  misc_RNA (1)...(19): siRNA sense strand
ugucguuugcauacagaaa

SEQ ID NO: 2271977 - RNA, 19 nt, Homo sapiens
  misc_RNA (1)...(19): siRNA sense strand
gauauaucauuguggugga

SEQ ID NO: 2271978 - RNA, 19 nt, Homo sapiens
  misc_RNA (1)...(19): siRNA sense strand
guguaagagaaggcauaaa

SEQ ID NO: 2271979 - RNA, 19 nt, Homo sapiens
  misc_RNA (1)...(19): siRNA sense strand
ggaccgaaaagaugaaaca

SEQ ID NO: 2271980 - RNA, 19 nt, Homo sapiens
  misc_RNA (1)...(19): siRNA sense strand
ccuaaaagaacgaaauguu

SEQ ID NO: 2271981 - RNA, 19 nt, Homo sapiens
  misc_RNA (1)...(19): siRNA sense strand
gaucaagaggugcagacau

SEQ ID NO: 2271982 - RNA, 19 nt, Homo sapiens
  misc_RNA (1)...(19): siRNA sense strand
gaucuauuuuggaccgaaa

SEQ ID NO: 2271983 - RNA, 19 nt, Homo sapiens
  misc_RNA (1)...(19): siRNA sense strand
aggugaaguuuugggauua

SEQ ID NO: 2271984 - RNA, 19 nt, Homo sapiens
  misc_RNA (1)...(19): siRNA sense strand
cauacagaaagcugauauu

SEQ ID NO: 2271985 - RNA, 19 nt, Homo sapiens
  misc_RNA (1)...(19): siRNA sense strand
gagaauuugagcuagcaau

SEQ ID NO: 2271986 - RNA, 19 nt, Homo sapiens
  misc_RNA (1)...(19): siRNA sense strand
uagcaauuguagcuggaga

SEQ ID NO: 2271987 - RNA, 19 nt, Homo sapiens
  misc_RNA (1)...(19): siRNA sense strand
cgagaauugcuauugucaa

SEQ ID NO: 2271988 - RNA, 19 nt, Homo sapiens
  misc_RNA (1)...(19): siRNA sense strand
uaaugguauuggaaaguca

SEQ ID NO: 2271989 - RNA, 19 nt, Homo sapiens
  misc_RNA (1)...(19): siRNA sense strand
cgaaaagaugaaacaaaga

SEQ ID NO: 2271990 - RNA, 19 nt, Homo sapiens
  misc_RNA (1)...(19): siRNA sense strand
gcguuuaaaggcugcuauu

SEQ ID NO: 2271991 - RNA, 19 nt, Homo sapiens
  misc_RNA (1)...(19): siRNA sense strand
ggagaauuugagcuagcaa

SEQ ID NO: 2271992 - RNA, 19 nt, Homo sapiens
  misc_RNA (1)...(19): siRNA sense strand
agcaaaugaagaagaaguu

SEQ ID NO: 2271993 - RNA, 19 nt, Homo sapiens
  misc_RNA (1)...(19): siRNA sense strand
augcagaaguacagaaaca

SEQ ID NO: 2271994 - RNA, 19 nt, Homo sapiens
  misc_RNA (1)...(19): siRNA sense strand
ccguguacuuugaugggaa

SEQ ID NO: 2271995 - RNA, 19 nt, Homo sapiens
  misc_RNA (1)...(19): siRNA sense strand
cagcagauaacguggcaga

SEQ ID NO: 2271996 - RNA, 19 nt, Homo sapiens
  misc_RNA (1)...(19): siRNA sense strand
gagacaaaucaucaggaau

SEQ ID NO: 2271997 - RNA, 19 nt, Homo sapiens
  misc_RNA (1)...(19): siRNA sense strand
ccuacaacaucucggccaa

SEQ ID NO: 2271998 - RNA, 19 nt, Homo sapiens
  misc_RNA (1)...(19): siRNA sense strand
ccuuugacucucagaacaa

SEQ ID NO: 2271999 - RNA, 19 nt, Homo sapiens
  misc_RNA (1)...(19): siRNA sense strand
ucuaaaucgcaucuggaaa

SEQ ID NO: 2272000 - RNA, 19 nt, Homo sapiens
  misc_RNA (1)...(19): siRNA sense strand
ugccaauacuugagagaag

SEQ ID NO: 2272001 - RNA, 19 nt, Homo sapiens
  misc_RNA (1)...(19): siRNA sense strand
acagaaaugccuugccgua

SEQ ID NO: 2272002 - RNA, 19 nt, Homo sapiens
  misc_RNA (1)...(19): siRNA sense strand
guuugaauuuggaaagagu

SEQ ID NO: 2272003 - RNA, 19 nt, Homo sapiens
  misc_RNA (1)...(19): siRNA sense strand
caguagaaaccgcugccaa

SEQ ID NO: 2272004 - RNA, 19 nt, Homo sapiens
  misc_RNA (1)...(19): siRNA sense strand
cgggaggugauguggcaau

SEQ ID NO: 2272005 - RNA, 19 nt, Homo sapiens
  misc_RNA (1)...(19): siRNA sense strand
cgacauacagaaaagcuaa

SEQ ID NO: 2272006 - RNA, 19 nt, Homo sapiens
  misc_RNA (1)...(19): siRNA sense strand
guaacuacauugacgggca

SEQ ID NO: 2272007 - RNA, 19 nt, Homo sapiens
  misc_RNA (1)...(19): siRNA sense strand
agcaauauacccagacauu

SEQ ID NO: 2272008 - RNA, 19 nt, Homo sapiens
  misc_RNA (1)...(19): siRNA sense strand
cagaagaaucaccgagaag

SEQ ID NO: 2272009 - RNA, 19 nt, Homo sapiens
  misc_RNA (1)...(19): siRNA sense strand
ugacggaacuucacgacga

SEQ ID NO: 2272010 - RNA, 19 nt, Homo sapiens
  misc_RNA (1)...(19): siRNA sense strand
caucaaaauuacagaagcu

SEQ ID NO: 2272011 - RNA, 19 nt, Homo sapiens
  misc_RNA (1)...(19): siRNA sense strand
uuucaggagaagucagcaa

SEQ ID NO: 2272012 - RNA, 19 nt, Homo sapiens
  misc_RNA (1)...(19): siRNA sense strand
caauggaaucaaaccagaa

SEQ ID NO: 2272013 - RNA, 19 nt, Homo sapiens
  misc_RNA (1)...(19): siRNA sense strand
cgcucauggcugcaagaaa

SEQ ID NO: 2272014 - RNA, 19 nt, Homo sapiens
  misc_RNA (1)...(19): siRNA sense strand
gugaaggcugcaagggcuu

SEQ ID NO: 2272015 - RNA, 19 nt, Homo sapiens
  misc_RNA (1)...(19): siRNA sense strand
augcagaaguacagaaaca

SEQ ID NO: 2272016 - RNA, 19 nt, Homo sapiens
  misc_RNA (1)...(19): siRNA sense strand
ccguguacuuugaugggaa

SEQ ID NO: 2272017 - RNA, 19 nt, Homo sapiens
  misc_RNA (1)...(19): siRNA sense strand
cagcagauaacguggcaga

SEQ ID NO: 2272018 - RNA, 19 nt, Homo sapiens
  misc_RNA (1)...(19): siRNA sense strand
gagacaaaucaucaggaau

SEQ ID NO: 2272019 - RNA, 19 nt, Homo sapiens
  misc_RNA (1)...(19): siRNA sense strand
ccuacaacaucucggccaa

SEQ ID NO: 2272020 - RNA, 19 nt, Homo sapiens
  misc_RNA (1)...(19): siRNA sense strand
ccuuugacucucagaacaa

SEQ ID NO: 2272021 - RNA, 19 nt, Homo sapiens
  misc_RNA (1)...(19): siRNA sense strand
ucuaaaucgcaucuggaaa

SEQ ID NO: 2272022 - RNA, 19 nt, Homo sapiens
  misc_RNA (1)...(19): siRNA sense strand
ugccaauacuugagagaag

SEQ ID NO: 2272023 - RNA, 19 nt, Homo sapiens
  misc_RNA (1)...(19): siRNA sense strand
acagaaaugccuugccgua

SEQ ID NO: 2272024 - RNA, 19 nt, Homo sapiens
  misc_RNA (1)...(19): siRNA sense strand
guuugaauuuggaaagagu

SEQ ID NO: 2272025 - RNA, 19 nt, Homo sapiens
  misc_RNA (1)...(19): siRNA sense strand
caguagaaaccgcugccaa

SEQ ID NO: 2272026 - RNA, 19 nt, Homo sapiens
  misc_RNA (1)...(19): siRNA sense strand
cgggaggugauguggcaau

SEQ ID NO: 2272027 - RNA, 19 nt, Homo sapiens
  misc_RNA (1)...(19): siRNA sense strand
cgacauacagaaaagcuaa

SEQ ID NO: 2272028 - RNA, 19 nt, Homo sapiens
  misc_RNA (1)...(19): siRNA sense strand
guaacuacauugacgggca

SEQ ID NO: 2272029 - RNA, 19 nt, Homo sapiens
  misc_RNA (1)...(19): siRNA sense strand
agcaauauacccagacauu

SEQ ID NO: 2272030 - RNA, 19 nt, Homo sapiens
  misc_RNA (1)...(19): siRNA sense strand
cagaagaaucaccgagaag

SEQ ID NO: 2272031 - RNA, 19 nt, Homo sapiens
  misc_RNA (1)...(19): siRNA sense strand
ugacggaacuucacgacga

SEQ ID NO: 2272032 - RNA, 19 nt, Homo sapiens
  misc_RNA (1)...(19): siRNA sense strand
caucaaaauuacagaagcu

SEQ ID NO: 2272033 - RNA, 19 nt, Homo sapiens
  misc_RNA (1)...(19): siRNA sense strand
uuucaggagaagucagcaa

SEQ ID NO: 2272034 - RNA, 19 nt, Homo sapiens
  misc_RNA (1)...(19): siRNA sense strand
caauggaaucaaaccagaa

SEQ ID NO: 2272035 - RNA, 19 nt, Homo sapiens
  misc_RNA (1)...(19): siRNA sense strand
cgcucauggcugcaagaaa

SEQ ID NO: 2272036 - RNA, 19 nt, Homo sapiens
  misc_RNA (1)...(19): siRNA sense strand
gugaaggcugcaagggcuu

SEQ ID NO: 2272037 - RNA, 19 nt, Homo sapiens
  misc_RNA (1)...(19): siRNA sense strand
augcagaaguacagaaaca

SEQ ID NO: 2272038 - RNA, 19 nt, Homo sapiens
  misc_RNA (1)...(19): siRNA sense strand
ccguguacuuugaugggaa

SEQ ID NO: 2272039 - RNA, 19 nt, Homo sapiens
  misc_RNA (1)...(19): siRNA sense strand
cagcagauaacguggcaga

SEQ ID NO: 2272040 - RNA, 19 nt, Homo sapiens
  misc_RNA (1)...(19): siRNA sense strand
gagacaaaucaucaggaau

SEQ ID NO: 2272041 - RNA, 19 nt, Homo sapiens
  misc_RNA (1)...(19): siRNA sense strand
ccuacaacaucucggccaa

SEQ ID NO: 2272042 - RNA, 19 nt, Homo sapiens
  misc_RNA (1)...(19): siRNA sense strand
ccuuugacucucagaacaa

SEQ ID NO: 2272043 - RNA, 19 nt, Homo sapiens
  misc_RNA (1)...(19): siRNA sense strand
ucuaaaucgcaucuggaaa

SEQ ID NO: 2272044 - RNA, 19 nt, Homo sapiens
  misc_RNA (1)...(19): siRNA sense strand
ugccaauacuugagagaag

SEQ ID NO: 2272045 - RNA, 19 nt, Homo sapiens
  misc_RNA (1)...(19): siRNA sense strand
acagaaaugccuugccgua

SEQ ID NO: 2272046 - RNA, 19 nt, Homo sapiens
  misc_RNA (1)...(19): siRNA sense strand
guuugaauuuggaaagagu

SEQ ID NO: 2272047 - RNA, 19 nt, Homo sapiens
  misc_RNA (1)...(19): siRNA sense strand
caguagaaaccgcugccaa

SEQ ID NO: 2272048 - RNA, 19 nt, Homo sapiens
  misc_RNA (1)...(19): siRNA sense strand
cgggaggugauguggcaau

SEQ ID NO: 2272049 - RNA, 19 nt, Homo sapiens
  misc_RNA (1)...(19): siRNA sense strand
cgacauacagaaaagcuaa

SEQ ID NO: 2272050 - RNA, 19 nt, Homo sapiens
  misc_RNA (1)...(19): siRNA sense strand
guaacuacauugacgggca

SEQ ID NO: 2272051 - RNA, 19 nt, Homo sapiens
  misc_RNA (1)...(19): siRNA sense strand
agcaauauacccagacauu

SEQ ID NO: 2272052 - RNA, 19 nt, Homo sapiens
  misc_RNA (1)...(19): siRNA sense strand
cagaagaaucaccgagaag

SEQ ID NO: 2272053 - RNA, 19 nt, Homo sapiens
  misc_RNA (1)...(19): siRNA sense strand
ugacggaacuucacgacga

SEQ ID NO: 2272054 - RNA, 19 nt, Homo sapiens
  misc_RNA (1)...(19): siRNA sense strand
caucaaaauuacagaagcu

SEQ ID NO: 2272055 - RNA, 19 nt, Homo sapiens
  misc_RNA (1)...(19): siRNA sense strand
uuucaggagaagucagcaa

SEQ ID NO: 2272056 - RNA, 19 nt, Homo sapiens
  misc_RNA (1)...(19): siRNA sense strand
caauggaaucaaaccagaa

SEQ ID NO: 2272057 - RNA, 19 nt, Homo sapiens
  misc_RNA (1)...(19): siRNA sense strand
cgcucauggcugcaagaaa

SEQ ID NO: 2272058 - RNA, 19 nt, Homo sapiens
  misc_RNA (1)...(19): siRNA sense strand
gugaaggcugcaagggcuu

SEQ ID NO: 2272059 - RNA, 19 nt, Homo sapiens
  misc_RNA (1)...(19): siRNA sense strand
augcagaaguacagaaaca

SEQ ID NO: 2272060 - RNA, 19 nt, Homo sapiens
  misc_RNA (1)...(19): siRNA sense strand
ccguguacuuugaugggaa

SEQ ID NO: 2272061 - RNA, 19 nt, Homo sapiens
  misc_RNA (1)...(19): siRNA sense strand
cagcagauaacguggcaga

SEQ ID NO: 2272062 - RNA, 19 nt, Homo sapiens
  misc_RNA (1)...(19): siRNA sense strand
gagacaaaucaucaggaau

SEQ ID NO: 2272063 - RNA, 19 nt, Homo sapiens
  misc_RNA (1)...(19): siRNA sense strand
ccuacaacaucucggccaa

SEQ ID NO: 2272064 - RNA, 19 nt, Homo sapiens
  misc_RNA (1)...(19): siRNA sense strand
ccuuugacucucagaacaa

SEQ ID NO: 2272065 - RNA, 19 nt, Homo sapiens
  misc_RNA (1)...(19): siRNA sense strand
ucuaaaucgcaucuggaaa

SEQ ID NO: 2272066 - RNA, 19 nt, Homo sapiens
  misc_RNA (1)...(19): siRNA sense strand
ugccaauacuugagagaag

SEQ ID NO: 2272067 - RNA, 19 nt, Homo sapiens
  misc_RNA (1)...(19): siRNA sense strand
acagaaaugccuugccgua

SEQ ID NO: 2272068 - RNA, 19 nt, Homo sapiens
  misc_RNA (1)...(19): siRNA sense strand
guuugaauuuggaaagagu

SEQ ID NO: 2272069 - RNA, 19 nt, Homo sapiens
  misc_RNA (1)...(19): siRNA sense strand
caguagaaaccgcugccaa

SEQ ID NO: 2272070 - RNA, 19 nt, Homo sapiens
  misc_RNA (1)...(19): siRNA sense strand
cgggaggugauguggcaau

SEQ ID NO: 2272071 - RNA, 19 nt, Homo sapiens
  misc_RNA (1)...(19): siRNA sense strand
cgacauacagaaaagcuaa

SEQ ID NO: 2272072 - RNA, 19 nt, Homo sapiens
  misc_RNA (1)...(19): siRNA sense strand
guaacuacauugacgggca

SEQ ID NO: 2272073 - RNA, 19 nt, Homo sapiens
  misc_RNA (1)...(19): siRNA sense strand
agcaauauacccagacauu

SEQ ID NO: 2272074 - RNA, 19 nt, Homo sapiens
  misc_RNA (1)...(19): siRNA sense strand
cagaagaaucaccgagaag

SEQ ID NO: 2272075 - RNA, 19 nt, Homo sapiens
  misc_RNA (1)...(19): siRNA sense strand
ugacggaacuucacgacga

SEQ ID NO: 2272076 - RNA, 19 nt, Homo sapiens
  misc_RNA (1)...(19): siRNA sense strand
caucaaaauuacagaagcu

SEQ ID NO: 2272077 - RNA, 19 nt, Homo sapiens
  misc_RNA (1)...(19): siRNA sense strand
uuucaggagaagucagcaa

SEQ ID NO: 2272078 - RNA, 19 nt, Homo sapiens
  misc_RNA (1)...(19): siRNA sense strand
caauggaaucaaaccagaa

SEQ ID NO: 2272079 - RNA, 19 nt, Homo sapiens
  misc_RNA (1)...(19): siRNA sense strand
cgcucauggcugcaagaaa

SEQ ID NO: 2272080 - RNA, 19 nt, Homo sapiens
  misc_RNA (1)...(19): siRNA sense strand
gugaaggcugcaagggcuu

SEQ ID NO: 2272081 - RNA, 19 nt, Homo sapiens
  misc_RNA (1)...(19): siRNA sense strand
gcuuauaaacgaagacaaa

SEQ ID NO: 2272082 - RNA, 19 nt, Homo sapiens
  misc_RNA (1)...(19): siRNA sense strand
ugucaguguuggagaguua

SEQ ID NO: 2272083 - RNA, 19 nt, Homo sapiens
  misc_RNA (1)...(19): siRNA sense strand
gguuauaacuuaaggcuga

SEQ ID NO: 2272084 - RNA, 19 nt, Homo sapiens
  misc_RNA (1)...(19): siRNA sense strand
gcacaagagaucugggcaa

SEQ ID NO: 2272085 - RNA, 19 nt, Homo sapiens
  misc_RNA (1)...(19): siRNA sense strand
guggaaagcaccagacuaa

SEQ ID NO: 2272086 - RNA, 19 nt, Homo sapiens
  misc_RNA (1)...(19): siRNA sense strand
cauuuaggauugaaggaaa

SEQ ID NO: 2272087 - RNA, 19 nt, Homo sapiens
  misc_RNA (1)...(19): siRNA sense strand
guuuauaagacgggagaaa

SEQ ID NO: 2272088 - RNA, 19 nt, Homo sapiens
  misc_RNA (1)...(19): siRNA sense strand
gugcagaagcugugcguau

SEQ ID NO: 2272089 - RNA, 19 nt, Homo sapiens
  misc_RNA (1)...(19): siRNA sense strand
ccaaauggaccuaaagaau

SEQ ID NO: 2272090 - RNA, 19 nt, Homo sapiens
  misc_RNA (1)...(19): siRNA sense strand
guuuaacacaccagagaaa

SEQ ID NO: 2272091 - RNA, 19 nt, Homo sapiens
  misc_RNA (1)...(19): siRNA sense strand
uggaaagacauaugugaua

SEQ ID NO: 2272092 - RNA, 19 nt, Homo sapiens
  misc_RNA (1)...(19): siRNA sense strand
ggaaaagagauuuggggaa

SEQ ID NO: 2272093 - RNA, 19 nt, Homo sapiens
  misc_RNA (1)...(19): siRNA sense strand
ggauucaguugguggauau

SEQ ID NO: 2272094 - RNA, 19 nt, Homo sapiens
  misc_RNA (1)...(19): siRNA sense strand
cugauaaugagaugggaua

SEQ ID NO: 2272095 - RNA, 19 nt, Homo sapiens
  misc_RNA (1)...(19): siRNA sense strand
ccacagaccaggagaagau

SEQ ID NO: 2272096 - RNA, 19 nt, Homo sapiens
  misc_RNA (1)...(19): siRNA sense strand
ucaagaaauaggucagaaa

SEQ ID NO: 2272097 - RNA, 19 nt, Homo sapiens
  misc_RNA (1)...(19): siRNA sense strand
cuaaagaaucaguccguua

SEQ ID NO: 2272098 - RNA, 19 nt, Homo sapiens
  misc_RNA (1)...(19): siRNA sense strand
ucagaguaguggugguuua

SEQ ID NO: 2272099 - RNA, 19 nt, Homo sapiens
  misc_RNA (1)...(19): siRNA sense strand
gaucaauggcuuuaggauu

SEQ ID NO: 2272100 - RNA, 19 nt, Homo sapiens
  misc_RNA (1)...(19): siRNA sense strand
gcaccuuugauuaggaaua

SEQ ID NO: 2272101 - RNA, 19 nt, Homo sapiens
  misc_RNA (1)...(19): siRNA sense strand
ugccuaaagucguguguaa

SEQ ID NO: 2272102 - RNA, 19 nt, Homo sapiens
  misc_RNA (1)...(19): siRNA sense strand
cauagaagaauuuggguuu

SEQ ID NO: 2272103 - RNA, 19 nt, Homo sapiens
  misc_RNA (1)...(19): siRNA sense strand
cagugaagacuuugaagaa

SEQ ID NO: 2272104 - RNA, 19 nt, Homo sapiens
  misc_RNA (1)...(19): siRNA sense strand
gguaugugucugugauuua

SEQ ID NO: 2272105 - RNA, 19 nt, Homo sapiens
  misc_RNA (1)...(19): siRNA sense strand
acgugaagcuauuggugaa

SEQ ID NO: 2272106 - RNA, 19 nt, Homo sapiens
  misc_RNA (1)...(19): siRNA sense strand
ccacauaaucugagugaac

SEQ ID NO: 2272107 - RNA, 19 nt, Homo sapiens
  misc_RNA (1)...(19): siRNA sense strand
ggacagagcacuggggaua

SEQ ID NO: 2272108 - RNA, 19 nt, Homo sapiens
  misc_RNA (1)...(19): siRNA sense strand
gaguaguagcugcaaauaa

SEQ ID NO: 2272109 - RNA, 19 nt, Homo sapiens
  misc_RNA (1)...(19): siRNA sense strand
guggagaguugcacguuaa

SEQ ID NO: 2272110 - RNA, 19 nt, Homo sapiens
  misc_RNA (1)...(19): siRNA sense strand
ccucuaagacaaagugaau

SEQ ID NO: 2272111 - RNA, 19 nt, Homo sapiens
  misc_RNA (1)...(19): siRNA sense strand
ugcaaauaaucuaggguuu

SEQ ID NO: 2272112 - RNA, 19 nt, Homo sapiens
  misc_RNA (1)...(19): siRNA sense strand
agacaaagauuucugccaa

SEQ ID NO: 2272113 - RNA, 19 nt, Homo sapiens
  misc_RNA (1)...(19): siRNA sense strand
gagauaagaaagagcacuu

SEQ ID NO: 2272114 - RNA, 19 nt, Homo sapiens
  misc_RNA (1)...(19): siRNA sense strand
aauuuaagguggaagauga

SEQ ID NO: 2272115 - RNA, 19 nt, Homo sapiens
  misc_RNA (1)...(19): siRNA sense strand
agugaagauuggagacuuu

SEQ ID NO: 2272116 - RNA, 19 nt, Homo sapiens
  misc_RNA (1)...(19): siRNA sense strand
gugcauaugaagaggaagu

SEQ ID NO: 2272117 - RNA, 19 nt, Homo sapiens
  misc_RNA (1)...(19): siRNA sense strand
aagaggaaguacuggaaaa

SEQ ID NO: 2272118 - RNA, 19 nt, Homo sapiens
  misc_RNA (1)...(19): siRNA sense strand
augaaguugugguggaauu

SEQ ID NO: 2272119 - RNA, 19 nt, Homo sapiens
  misc_RNA (1)...(19): siRNA sense strand
ccagaaaguuugauggaug

SEQ ID NO: 2272120 - RNA, 19 nt, Homo sapiens
  misc_RNA (1)...(19): siRNA sense strand
ccugaugaucuguggaauu

SEQ ID NO: 2272121 - RNA, 19 nt, Homo sapiens
  misc_RNA (1)...(19): siRNA sense strand
gcuuuaaagugucgggagu

SEQ ID NO: 2272122 - RNA, 19 nt, Homo sapiens
  misc_RNA (1)...(19): siRNA sense strand
guaucugaccugagaauuu

SEQ ID NO: 2272123 - RNA, 19 nt, Homo sapiens
  misc_RNA (1)...(19): siRNA sense strand
gugaaggcccuaaggagua

SEQ ID NO: 2272124 - RNA, 19 nt, Homo sapiens
  misc_RNA (1)...(19): siRNA sense strand
guggaaauacaaugaguuu

SEQ ID NO: 2272125 - RNA, 19 nt, Homo sapiens
  misc_RNA (1)...(19): siRNA sense strand
cuggaguacuucugaaauu

SEQ ID NO: 2272126 - RNA, 19 nt, Homo sapiens
  misc_RNA (1)...(19): siRNA sense strand
ccuuauaccuacuggggaa

SEQ ID NO: 2272127 - RNA, 19 nt, Homo sapiens
  misc_RNA (1)...(19): siRNA sense strand
agaaugaaguuguggugga

SEQ ID NO: 2272128 - RNA, 19 nt, Homo sapiens
  misc_RNA (1)...(19): siRNA sense strand
cagccaagguccugcuuau

SEQ ID NO: 2272129 - RNA, 19 nt, Homo sapiens
  misc_RNA (1)...(19): siRNA sense strand
cagaauuuaagguggaaga

SEQ ID NO: 2272130 - RNA, 19 nt, Homo sapiens
  misc_RNA (1)...(19): siRNA sense strand
gaacauaaguggaaccaug

SEQ ID NO: 2272131 - RNA, 19 nt, Homo sapiens
  misc_RNA (1)...(19): siRNA sense strand
ugauauaggaaauguguca

SEQ ID NO: 2272132 - RNA, 19 nt, Homo sapiens
  misc_RNA (1)...(19): siRNA sense strand
agaaguuaaugacaggaaa

SEQ ID NO: 2272133 - RNA, 19 nt, Homo sapiens
  misc_RNA (1)...(19): siRNA sense strand
caguaaaugaaguugguga

SEQ ID NO: 2272134 - RNA, 19 nt, Homo sapiens
  misc_RNA (1)...(19): siRNA sense strand
auacaagguuucugugaga

SEQ ID NO: 2272135 - RNA, 19 nt, Homo sapiens
  misc_RNA (1)...(19): siRNA sense strand
ccagagaaccccagaauau

SEQ ID NO: 2272136 - RNA, 19 nt, Homo sapiens
  misc_RNA (1)...(19): siRNA sense strand
uugaacacaaggugaaaua

SEQ ID NO: 2272137 - RNA, 19 nt, Homo sapiens
  misc_RNA (1)...(19): siRNA sense strand
ccacaagccaagcgaauca

SEQ ID NO: 2272138 - RNA, 19 nt, Homo sapiens
  misc_RNA (1)...(19): siRNA sense strand
cuacugggcuggaaagaca

SEQ ID NO: 2272139 - RNA, 19 nt, Homo sapiens
  misc_RNA (1)...(19): siRNA sense strand
acacagauuuaucaggcaa

SEQ ID NO: 2272140 - RNA, 19 nt, Homo sapiens
  misc_RNA (1)...(19): siRNA sense strand
gagcuacagaaguggaaau

SEQ ID NO: 2272141 - RNA, 19 nt, Homo sapiens
  misc_RNA (1)...(19): siRNA sense strand
gcugggaaguggagccuuu

SEQ ID NO: 2272142 - RNA, 19 nt, Homo sapiens
  misc_RNA (1)...(19): siRNA sense strand
ggguuaaacuauaugguac

SEQ ID NO: 2272143 - RNA, 19 nt, Homo sapiens
  misc_RNA (1)...(19): siRNA sense strand
cugcugaaugggacggaua

SEQ ID NO: 2272144 - RNA, 19 nt, Homo sapiens
  misc_RNA (1)...(19): siRNA sense strand
cacaauaggaauucaacaa

SEQ ID NO: 2272145 - RNA, 19 nt, Homo sapiens
  misc_RNA (1)...(19): siRNA sense strand
gcuuaacuguggauggaga

SEQ ID NO: 2272146 - RNA, 19 nt, Homo sapiens
  misc_RNA (1)...(19): siRNA sense strand
aggaguuggaaguggagaa

SEQ ID NO: 2272147 - RNA, 19 nt, Homo sapiens
  misc_RNA (1)...(19): siRNA sense strand
cuauagaaagagaggggaa

SEQ ID NO: 2272148 - RNA, 19 nt, Homo sapiens
  misc_RNA (1)...(19): siRNA sense strand
ugugcaaacaggagggaga

SEQ ID NO: 2272149 - RNA, 19 nt, Homo sapiens
  misc_RNA (1)...(19): siRNA sense strand
uggauaaggaucagagcau

SEQ ID NO: 2272150 - RNA, 19 nt, Homo sapiens
  misc_RNA (1)...(19): siRNA sense strand
ggagcaucguggaggagau

SEQ ID NO: 2272151 - RNA, 19 nt, Homo sapiens
  misc_RNA (1)...(19): siRNA sense strand
acuggaaacaacagcguua

SEQ ID NO: 2272152 - RNA, 19 nt, Homo sapiens
  misc_RNA (1)...(19): siRNA sense strand
cuacuuaaucauuggagau

SEQ ID NO: 2272153 - RNA, 19 nt, Homo sapiens
  misc_RNA (1)...(19): siRNA sense strand
gcaucguggaggagauuga

SEQ ID NO: 2272154 - RNA, 19 nt, Homo sapiens
  misc_RNA (1)...(19): siRNA sense strand
agucaagagaacagcacau

SEQ ID NO: 2272155 - RNA, 19 nt, Homo sapiens
  misc_RNA (1)...(19): siRNA sense strand
guuugaagaaggacuggaa

SEQ ID NO: 2272156 - RNA, 19 nt, Homo sapiens
  misc_RNA (1)...(19): siRNA sense strand
uggauaccucugaaagaaa

SEQ ID NO: 2272157 - RNA, 19 nt, Homo sapiens
  misc_RNA (1)...(19): siRNA sense strand
uggaggagauugaggaccu

SEQ ID NO: 2272158 - RNA, 19 nt, Homo sapiens
  misc_RNA (1)...(19): siRNA sense strand
ugaagaaggacuggaaaca

SEQ ID NO: 2272159 - RNA, 19 nt, Homo sapiens
  misc_RNA (1)...(19): siRNA sense strand
ggaagaagcucccucgacu

SEQ ID NO: 2272160 - RNA, 19 nt, Homo sapiens
  misc_RNA (1)...(19): siRNA sense strand
cuaaauuucaugaacguca

SEQ ID NO: 2272161 - RNA, 19 nt, Homo sapiens
  misc_RNA (1)...(19): siRNA sense strand
ccucugaaagaaagauuga

SEQ ID NO: 2272162 - RNA, 19 nt, Homo sapiens
  misc_RNA (1)...(19): siRNA sense strand
agcaugacguggagagacu

SEQ ID NO: 2272163 - RNA, 19 nt, Homo sapiens
  misc_RNA (1)...(19): siRNA sense strand
uugccgagccagacaacaa

SEQ ID NO: 2272164 - RNA, 19 nt, Homo sapiens
  misc_RNA (1)...(19): siRNA sense strand
caguugugguugugccuga

SEQ ID NO: 2272165 - RNA, 19 nt, Homo sapiens
  misc_RNA (1)...(19): siRNA sense strand
ucaacauguuccagaccuu

SEQ ID NO: 2272166 - RNA, 19 nt, Homo sapiens
  misc_RNA (1)...(19): siRNA sense strand
cagccaaagccaagggcac

SEQ ID NO: 2272167 - RNA, 19 nt, Homo sapiens
  misc_RNA (1)...(19): siRNA sense strand
gggacaugcagauggacaa

SEQ ID NO: 2272168 - RNA, 19 nt, Homo sapiens
  misc_RNA (1)...(19): siRNA sense strand
ggaacgagaaugaggugga

SEQ ID NO: 2272169 - RNA, 19 nt, Homo sapiens
  misc_RNA (1)...(19): siRNA sense strand
ggcaaggaccggaacgaga

SEQ ID NO: 2272170 - RNA, 19 nt, Homo sapiens
  misc_RNA (1)...(19): siRNA sense strand
agcccaagaccgagaccua

SEQ ID NO: 2272171 - RNA, 19 nt, Homo sapiens
  misc_RNA (1)...(19): siRNA sense strand
ccuuggaggccuacugcaa

SEQ ID NO: 2272172 - RNA, 19 nt, Homo sapiens
  misc_RNA (1)...(19): siRNA sense strand
agaggauccuggaggcuga

SEQ ID NO: 2272173 - RNA, 19 nt, Homo sapiens
  misc_RNA (1)...(19): siRNA sense strand
uugccaagcagccgacaaa

SEQ ID NO: 2272174 - RNA, 19 nt, Homo sapiens
  misc_RNA (1)...(19): siRNA sense strand
uugacaagcggcagcggaa

SEQ ID NO: 2272175 - RNA, 19 nt, Homo sapiens
  misc_RNA (1)...(19): siRNA sense strand
cgggacaugcagauggaca

SEQ ID NO: 2272176 - RNA, 19 nt, Homo sapiens
  misc_RNA (1)...(19): siRNA sense strand
gcgcugagggagaaggucu

SEQ ID NO: 2272177 - RNA, 19 nt, Homo sapiens
  misc_RNA (1)...(19): siRNA sense strand
gcaaguuaguagaggccaa

SEQ ID NO: 2272178 - RNA, 19 nt, Homo sapiens
  misc_RNA (1)...(19): siRNA sense strand
guguauagaagaaggagaa

SEQ ID NO: 2272179 - RNA, 19 nt, Homo sapiens
  misc_RNA (1)...(19): siRNA sense strand
guuaguacccagugagaca

SEQ ID NO: 2272180 - RNA, 19 nt, Homo sapiens
  misc_RNA (1)...(19): siRNA sense strand
aggaaaaugugcuacaaaa

SEQ ID NO: 2272181 - RNA, 19 nt, Homo sapiens
  misc_RNA (1)...(19): siRNA sense strand
aguuaagaucacagacaau

SEQ ID NO: 2272182 - RNA, 19 nt, Homo sapiens
  misc_RNA (1)...(19): siRNA sense strand
ggagaaaagcccaugguga

SEQ ID NO: 2272183 - RNA, 19 nt, Homo sapiens
  misc_RNA (1)...(19): siRNA sense strand
aggccaaaggcaaggugaa

SEQ ID NO: 2272184 - RNA, 19 nt, Homo sapiens
  misc_RNA (1)...(19): siRNA sense strand
aguuaaagaucaagcuucu

SEQ ID NO: 2272185 - RNA, 19 nt, Homo sapiens
  misc_RNA (1)...(19): siRNA sense strand
uugaauauaagcugggauu

SEQ ID NO: 2272186 - RNA, 19 nt, Homo sapiens
  misc_RNA (1)...(19): siRNA sense strand
ccuugcggauagagaagaa

SEQ ID NO: 2272187 - RNA, 19 nt, Homo sapiens
  misc_RNA (1)...(19): siRNA sense strand
gccaauaauccacaggcaa

SEQ ID NO: 2272188 - RNA, 19 nt, Homo sapiens
  misc_RNA (1)...(19): siRNA sense strand
aguuaguagaggccaauaa

SEQ ID NO: 2272189 - RNA, 19 nt, Homo sapiens
  misc_RNA (1)...(19): siRNA sense strand
cuaccuggccagaagggaa

SEQ ID NO: 2272190 - RNA, 19 nt, Homo sapiens
  misc_RNA (1)...(19): siRNA sense strand
ccugaaagaugguuaccga

SEQ ID NO: 2272191 - RNA, 19 nt, Homo sapiens
  misc_RNA (1)...(19): siRNA sense strand
cggucuugaugcagaacuu

SEQ ID NO: 2272192 - RNA, 19 nt, Homo sapiens
  misc_RNA (1)...(19): siRNA sense strand
auagcaauauccagagaga

SEQ ID NO: 2272193 - RNA, 19 nt, Homo sapiens
  misc_RNA (1)...(19): siRNA sense strand
agaagaacgacuugagaag

SEQ ID NO: 2272194 - RNA, 19 nt, Homo sapiens
  misc_RNA (1)...(19): siRNA sense strand
ggaaugagcuaccuggcca

SEQ ID NO: 2272195 - RNA, 19 nt, Homo sapiens
  misc_RNA (1)...(19): siRNA sense strand
aggcaauuucucagcaaga

SEQ ID NO: 2272196 - RNA, 19 nt, Homo sapiens
  misc_RNA (1)...(19): siRNA sense strand
ggagugacgcugugggaac

SEQ ID NO: 2272197 - RNA, 19 nt, Homo sapiens
  misc_RNA (1)...(19): siRNA sense strand
aaacuucagccuuggacaa

SEQ ID NO: 2272198 - RNA, 19 nt, Homo sapiens
  misc_RNA (1)...(19): siRNA sense strand
guauagaagaaggagaaaa

SEQ ID NO: 2272199 - RNA, 19 nt, Homo sapiens
  misc_RNA (1)...(19): siRNA sense strand
ggauugaacuggaugacag

SEQ ID NO: 2272200 - RNA, 19 nt, Homo sapiens
  misc_RNA (1)...(19): siRNA sense strand
aaaggcaaggugaaggaua

SEQ ID NO: 2272201 - RNA, 19 nt, Homo sapiens
  misc_RNA (1)...(19): siRNA sense strand
augcgaaguccaagguuga

SEQ ID NO: 2272202 - RNA, 19 nt, Homo sapiens
  misc_RNA (1)...(19): siRNA sense strand
aggugaaggauauagcaau

SEQ ID NO: 2272203 - RNA, 19 nt, Homo sapiens
  misc_RNA (1)...(19): siRNA sense strand
ugauacuaaugcagcucaa

SEQ ID NO: 2272204 - RNA, 19 nt, Homo sapiens
  misc_RNA (1)...(19): siRNA sense strand
uggcaaaguagauucugaa

SEQ ID NO: 2272205 - RNA, 19 nt, Homo sapiens
  misc_RNA (1)...(19): siRNA sense strand
aggcaaggugaaggauaua

SEQ ID NO: 2272206 - RNA, 19 nt, Homo sapiens
  misc_RNA (1)...(19): siRNA sense strand
ucuaaaagauguacuccaa

SEQ ID NO: 2272207 - RNA, 19 nt, Homo sapiens
  misc_RNA (1)...(19): siRNA sense strand
uggacaauguuuuggcaau

SEQ ID NO: 2272208 - RNA, 19 nt, Homo sapiens
  misc_RNA (1)...(19): siRNA sense strand
uuauauuaguguagggguu

SEQ ID NO: 2272209 - RNA, 19 nt, Homo sapiens
  misc_RNA (1)...(19): siRNA sense strand
ggccaauaauccacaggca

SEQ ID NO: 2272210 - RNA, 19 nt, Homo sapiens
  misc_RNA (1)...(19): siRNA sense strand
gcguauuuuccaugggauu

SEQ ID NO: 2272211 - RNA, 19 nt, Homo sapiens
  misc_RNA (1)...(19): siRNA sense strand
cacaugaagcagaagggaa

SEQ ID NO: 2272212 - RNA, 19 nt, Homo sapiens
  misc_RNA (1)...(19): siRNA sense strand
ccaguguagagauggcaaa

SEQ ID NO: 2272213 - RNA, 19 nt, Homo sapiens
  misc_RNA (1)...(19): siRNA sense strand
uaaugaaggaccuggacca

SEQ ID NO: 2272214 - RNA, 19 nt, Homo sapiens
  misc_RNA (1)...(19): siRNA sense strand
agguggacuuuguggagua

SEQ ID NO: 2272215 - RNA, 19 nt, Homo sapiens
  misc_RNA (1)...(19): siRNA sense strand
ggaaggaacucaaggagcu

SEQ ID NO: 2272216 - RNA, 19 nt, Homo sapiens
  misc_RNA (1)...(19): siRNA sense strand
ugaugaagagccuggacaa

SEQ ID NO: 2272217 - RNA, 19 nt, Homo sapiens
  misc_RNA (1)...(19): siRNA sense strand
acuucuuucuagaggacaa

SEQ ID NO: 2272218 - RNA, 19 nt, Homo sapiens
  misc_RNA (1)...(19): siRNA sense strand
ugaccacguuucacaaaua

SEQ ID NO: 2272219 - RNA, 19 nt, Homo sapiens
  misc_RNA (1)...(19): siRNA sense strand
ggggagagaggguagcaaa

SEQ ID NO: 2272220 - RNA, 19 nt, Homo sapiens
  misc_RNA (1)...(19): siRNA sense strand
gagaugaaggagagcagca

SEQ ID NO: 2272221 - RNA, 19 nt, Homo sapiens
  misc_RNA (1)...(19): siRNA sense strand
gggagaugaaggagagcag

SEQ ID NO: 2272222 - RNA, 19 nt, Homo sapiens
  misc_RNA (1)...(19): siRNA sense strand
cgaugaugaaggagaacuu

SEQ ID NO: 2272223 - RNA, 19 nt, Homo sapiens
  misc_RNA (1)...(19): siRNA sense strand
aagaaugaggauaagaaga

SEQ ID NO: 2272224 - RNA, 19 nt, Homo sapiens
  misc_RNA (1)...(19): siRNA sense strand
cgccgacgucuuugagaaa

SEQ ID NO: 2272225 - RNA, 19 nt, Homo sapiens
  misc_RNA (1)...(19): siRNA sense strand
ccauaauaggcaugaucga

SEQ ID NO: 2272226 - RNA, 19 nt, Homo sapiens
  misc_RNA (1)...(19): siRNA sense strand
acaccagacgugaugacaa

SEQ ID NO: 2272227 - RNA, 19 nt, Homo sapiens
  misc_RNA (1)...(19): siRNA sense strand
cugacgaugaugaaggaga

SEQ ID NO: 2272228 - RNA, 19 nt, Homo sapiens
  misc_RNA (1)...(19): siRNA sense strand
cgugaugacaagauugaca

SEQ ID NO: 2272229 - RNA, 19 nt, Homo sapiens
  misc_RNA (1)...(19): siRNA sense strand
ugacaagauugacaagcca

SEQ ID NO: 2272230 - RNA, 19 nt, Homo sapiens
  misc_RNA (1)...(19): siRNA sense strand
gguucaaagaguuggauau

SEQ ID NO: 2272231 - RNA, 19 nt, Homo sapiens
  misc_RNA (1)...(19): siRNA sense strand
agaaauugcuagagaccga

SEQ ID NO: 2272232 - RNA, 19 nt, Homo sapiens
  misc_RNA (1)...(19): siRNA sense strand
agggaugaccugaagaaau

SEQ ID NO: 2272233 - RNA, 19 nt, Homo sapiens
  misc_RNA (1)...(19): siRNA sense strand
ccucaguauaucaggaaaa

SEQ ID NO: 2272234 - RNA, 19 nt, Homo sapiens
  misc_RNA (1)...(19): siRNA sense strand
augaagaaagccacaaaga

SEQ ID NO: 2272235 - RNA, 19 nt, Homo sapiens
  misc_RNA (1)...(19): siRNA sense strand
gcaguuaacuuccaggagu

SEQ ID NO: 2272236 - RNA, 19 nt, Homo sapiens
  misc_RNA (1)...(19): siRNA sense strand
uccucauucuggugauaaa

SEQ ID NO: 2272237 - RNA, 19 nt, Homo sapiens
  misc_RNA (1)...(19): siRNA sense strand
aauuugugcuggugagaaa

SEQ ID NO: 2272238 - RNA, 19 nt, Homo sapiens
  misc_RNA (1)...(19): siRNA sense strand
acggcaaacugaaggacaa

SEQ ID NO: 2272239 - RNA, 19 nt, Homo sapiens
  misc_RNA (1)...(19): siRNA sense strand
caguggaagccuugggaau

SEQ ID NO: 2272240 - RNA, 19 nt, Homo sapiens
  misc_RNA (1)...(19): siRNA sense strand
agagaguguccaagauaaa

SEQ ID NO: 2272241 - RNA, 19 nt, Homo sapiens
  misc_RNA (1)...(19): siRNA sense strand
uuuaugaacaggagagcaa

SEQ ID NO: 2272242 - RNA, 19 nt, Homo sapiens
  misc_RNA (1)...(19): siRNA sense strand
augggaaaccagagaacaa

SEQ ID NO: 2272243 - RNA, 19 nt, Homo sapiens
  misc_RNA (1)...(19): siRNA sense strand
cacugaaaggaaugggaaa

SEQ ID NO: 2272244 - RNA, 19 nt, Homo sapiens
  misc_RNA (1)...(19): siRNA sense strand
gcuaggaagaggaaggcuu

SEQ ID NO: 2272245 - RNA, 19 nt, Homo sapiens
  misc_RNA (1)...(19): siRNA sense strand
ugaauaagccuuuggagca

SEQ ID NO: 2272246 - RNA, 19 nt, Homo sapiens
  misc_RNA (1)...(19): siRNA sense strand
ccauuuaugaugagauuca

SEQ ID NO: 2272247 - RNA, 19 nt, Homo sapiens
  misc_RNA (1)...(19): siRNA sense strand
uggcagaauauaaagaaga

SEQ ID NO: 2272248 - RNA, 19 nt, Homo sapiens
  misc_RNA (1)...(19): siRNA sense strand
caggaaaugaagcgugcua

SEQ ID NO: 2272249 - RNA, 19 nt, Homo sapiens
  misc_RNA (1)...(19): siRNA sense strand
ggucgauguggcagaauau

SEQ ID NO: 2272250 - RNA, 19 nt, Homo sapiens
  misc_RNA (1)...(19): siRNA sense strand
aagaagaggagcugcugaa

SEQ ID NO: 2272251 - RNA, 19 nt, Homo sapiens
  misc_RNA (1)...(19): siRNA sense strand
ugucuaacaaugugaguga

SEQ ID NO: 2272252 - RNA, 19 nt, Homo sapiens
  misc_RNA (1)...(19): siRNA sense strand
cugguaaaccuucgggcua

SEQ ID NO: 2272253 - RNA, 19 nt, Homo sapiens
  misc_RNA (1)...(19): siRNA sense strand
gguacuaucucaagcacca

SEQ ID NO: 2272254 - RNA, 19 nt, Homo sapiens
  misc_RNA (1)...(19): siRNA sense strand
aggucgauguggcagaaua

SEQ ID NO: 2272255 - RNA, 19 nt, Homo sapiens
  misc_RNA (1)...(19): siRNA sense strand
ccauugaauaugauugcaa

SEQ ID NO: 2272256 - RNA, 19 nt, Homo sapiens
  misc_RNA (1)...(19): siRNA sense strand
aggacuuacugaaagauau

SEQ ID NO: 2272257 - RNA, 19 nt, Homo sapiens
  misc_RNA (1)...(19): siRNA sense strand
cagcagagucagaugagga

SEQ ID NO: 2272258 - RNA, 19 nt, Homo sapiens
  misc_RNA (1)...(19): siRNA sense strand
cgaauauaccaggacgaaa

SEQ ID NO: 2272259 - RNA, 19 nt, Homo sapiens
  misc_RNA (1)...(19): siRNA sense strand
cagaauauaaagaagagga

SEQ ID NO: 2272260 - RNA, 19 nt, Homo sapiens
  misc_RNA (1)...(19): siRNA sense strand
cagagucagaugaggaaaa

SEQ ID NO: 2272261 - RNA, 19 nt, Homo sapiens
  misc_RNA (1)...(19): siRNA sense strand
gaauuuggaaggugguaca

SEQ ID NO: 2272262 - RNA, 19 nt, Homo sapiens
  misc_RNA (1)...(19): siRNA sense strand
uaccaggacgaaagggaaa

SEQ ID NO: 2272263 - RNA, 19 nt, Homo sapiens
  misc_RNA (1)...(19): siRNA sense strand
agaacaauaccaugaacau

SEQ ID NO: 2272264 - RNA, 19 nt, Homo sapiens
  misc_RNA (1)...(19): siRNA sense strand
ucugaaggacuuacugaaa

SEQ ID NO: 2272265 - RNA, 19 nt, Homo sapiens
  misc_RNA (1)...(19): siRNA sense strand
ccacugaaaggaaugggaa

SEQ ID NO: 2272266 - RNA, 19 nt, Homo sapiens
  misc_RNA (1)...(19): siRNA sense strand
gagaacaauaccaugaaca

SEQ ID NO: 2272267 - RNA, 19 nt, Homo sapiens
  misc_RNA (1)...(19): siRNA sense strand
augaaaacgccauugaaua

SEQ ID NO: 2272268 - RNA, 19 nt, Homo sapiens
  misc_RNA (1)...(19): siRNA sense strand
gcaaggaggagcaugcaga

SEQ ID NO: 2272269 - RNA, 19 nt, Homo sapiens
  misc_RNA (1)...(19): siRNA sense strand
cagcaaaaugucaagaauu

SEQ ID NO: 2272270 - RNA, 19 nt, Homo sapiens
  misc_RNA (1)...(19): siRNA sense strand
aggaggagcaugcagaauu

SEQ ID NO: 2272271 - RNA, 19 nt, Homo sapiens
  misc_RNA (1)...(19): siRNA sense strand
ucgauguggcagaauauaa

SEQ ID NO: 2272272 - RNA, 19 nt, Homo sapiens
  misc_RNA (1)...(19): siRNA sense strand
aggauuuggaagagagugu

SEQ ID NO: 2272273 - RNA, 19 nt, Homo sapiens
  misc_RNA (1)...(19): siRNA sense strand
gugcuggugagaaaggaua

SEQ ID NO: 2272274 - RNA, 19 nt, Homo sapiens
  misc_RNA (1)...(19): siRNA sense strand
aaucagaguucauuggcca

SEQ ID NO: 2272275 - RNA, 19 nt, Homo sapiens
  misc_RNA (1)...(19): siRNA sense strand
ucucaagcaccacggcaaa

SEQ ID NO: 2272276 - RNA, 19 nt, Homo sapiens
  misc_RNA (1)...(19): siRNA sense strand
agcaacagguuucgaccaa

SEQ ID NO: 2272277 - RNA, 19 nt, Homo sapiens
  misc_RNA (1)...(19): siRNA sense strand
agcugucaguggaaggaaa

SEQ ID NO: 2272278 - RNA, 19 nt, Homo sapiens
  misc_RNA (1)...(19): siRNA sense strand
ccagcaguaugcagugaau

SEQ ID NO: 2272279 - RNA, 19 nt, Homo sapiens
  misc_RNA (1)...(19): siRNA sense strand
cagaaaugucuaacaaugu

SEQ ID NO: 2272280 - RNA, 19 nt, Homo sapiens
  misc_RNA (1)...(19): siRNA sense strand
ugguaaaccuucgggcuau

SEQ ID NO: 2272281 - RNA, 19 nt, Homo sapiens
  misc_RNA (1)...(19): siRNA sense strand
gcuacuauugccacugaaa

SEQ ID NO: 2272282 - RNA, 19 nt, Homo sapiens
  misc_RNA (1)...(19): siRNA sense strand
gcagcaaaaugucaagaau

SEQ ID NO: 2272283 - RNA, 19 nt, Homo sapiens
  misc_RNA (1)...(19): siRNA sense strand
ccuuaaaccaacaauacuu

SEQ ID NO: 2272284 - RNA, 19 nt, Homo sapiens
  misc_RNA (1)...(19): siRNA sense strand
aauauaaagaagaggagcu

SEQ ID NO: 2272285 - RNA, 19 nt, Homo sapiens
  misc_RNA (1)...(19): siRNA sense strand
ugcugaaggauuuggaaga

SEQ ID NO: 2272286 - RNA, 19 nt, Homo sapiens
  misc_RNA (1)...(19): siRNA sense strand
ugggaguacaggugcaaaa

SEQ ID NO: 2272287 - RNA, 19 nt, Homo sapiens
  misc_RNA (1)...(19): siRNA sense strand
acgauaaggaagagaagaa

SEQ ID NO: 2272288 - RNA, 19 nt, Homo sapiens
  misc_RNA (1)...(19): siRNA sense strand
agcauaaacacuagggaaa

SEQ ID NO: 2272289 - RNA, 19 nt, Homo sapiens
  misc_RNA (1)...(19): siRNA sense strand
gggaagugggagacagaau

SEQ ID NO: 2272290 - RNA, 19 nt, Homo sapiens
  misc_RNA (1)...(19): siRNA sense strand
cauguaaacaagagaaaga

SEQ ID NO: 2272291 - RNA, 19 nt, Homo sapiens
  misc_RNA (1)...(19): siRNA sense strand
ccucgaaaucacagaguuu

SEQ ID NO: 2272292 - RNA, 19 nt, Homo sapiens
  misc_RNA (1)...(19): siRNA sense strand
cagcauaaacacuagggaa

SEQ ID NO: 2272293 - RNA, 19 nt, Homo sapiens
  misc_RNA (1)...(19): siRNA sense strand
ggaucaacuacuaaacaaa

SEQ ID NO: 2272294 - RNA, 19 nt, Homo sapiens
  misc_RNA (1)...(19): siRNA sense strand
ccuccuggacaaagaaaua

SEQ ID NO: 2272295 - RNA, 19 nt, Homo sapiens
  misc_RNA (1)...(19): siRNA sense strand
agguauauaugaaggaguu

SEQ ID NO: 2272296 - RNA, 19 nt, Homo sapiens
  misc_RNA (1)...(19): siRNA sense strand
gggcaaaccaguuagcaga

SEQ ID NO: 2272297 - RNA, 19 nt, Homo sapiens
  misc_RNA (1)...(19): siRNA sense strand
auauauuccuccuggacaa

SEQ ID NO: 2272298 - RNA, 19 nt, Homo sapiens
  misc_RNA (1)...(19): siRNA sense strand
aaacaaagguauaucacca

SEQ ID NO: 2272299 - RNA, 19 nt, Homo sapiens
  misc_RNA (1)...(19): siRNA sense strand
augugaaguacaagugaaa

SEQ ID NO: 2272300 - RNA, 19 nt, Homo sapiens
  misc_RNA (1)...(19): siRNA sense strand
ucucaaaagcugaaaacaa

SEQ ID NO: 2272301 - RNA, 19 nt, Homo sapiens
  misc_RNA (1)...(19): siRNA sense strand
cuucaagaucagaggcaga

SEQ ID NO: 2272302 - RNA, 19 nt, Homo sapiens
  misc_RNA (1)...(19): siRNA sense strand
agaccaaagaguaguuaau

SEQ ID NO: 2272303 - RNA, 19 nt, Homo sapiens
  misc_RNA (1)...(19): siRNA sense strand
ccgaauagccccagcauuu

SEQ ID NO: 2272304 - RNA, 19 nt, Homo sapiens
  misc_RNA (1)...(19): siRNA sense strand
aacaagagaaagacgauaa

SEQ ID NO: 2272305 - RNA, 19 nt, Homo sapiens
  misc_RNA (1)...(19): siRNA sense strand
auaaggaagagaagaaaga

SEQ ID NO: 2272306 - RNA, 19 nt, Homo sapiens
  misc_RNA (1)...(19): siRNA sense strand
gagcaaguuaggaaaucaa

SEQ ID NO: 2272307 - RNA, 19 nt, Homo sapiens
  misc_RNA (1)...(19): siRNA sense strand
cgauaaggaagagaagaaa

SEQ ID NO: 2272308 - RNA, 19 nt, Homo sapiens
  misc_RNA (1)...(19): siRNA sense strand
ggccgaaacgugaagaaau

SEQ ID NO: 2272309 - RNA, 19 nt, Homo sapiens
  misc_RNA (1)...(19): siRNA sense strand
gugcuaaagugaauggcga

SEQ ID NO: 2272310 - RNA, 19 nt, Homo sapiens
  misc_RNA (1)...(19): siRNA sense strand
ccugcagggaauaaagaaa

SEQ ID NO: 2272311 - RNA, 19 nt, Homo sapiens
  misc_RNA (1)...(19): siRNA sense strand
gcaaauaugaggaugguuc

SEQ ID NO: 2272312 - RNA, 19 nt, Homo sapiens
  misc_RNA (1)...(19): siRNA sense strand
ccaacaugguggaagucau

SEQ ID NO: 2272313 - RNA, 19 nt, Homo sapiens
  misc_RNA (1)...(19): siRNA sense strand
ugaugauaggagugaggaa

SEQ ID NO: 2272314 - RNA, 19 nt, Homo sapiens
  misc_RNA (1)...(19): siRNA sense strand
gcauaaacacuagggaaaa

SEQ ID NO: 2272315 - RNA, 19 nt, Homo sapiens
  misc_RNA (1)...(19): siRNA sense strand
agugaauggcgaacacaaa

SEQ ID NO: 2272316 - RNA, 19 nt, Homo sapiens
  misc_RNA (1)...(19): siRNA sense strand
agucaagugcccaguacaa

SEQ ID NO: 2272317 - RNA, 19 nt, Homo sapiens
  misc_RNA (1)...(19): siRNA sense strand
cagagaaauuccagugaac

SEQ ID NO: 2272318 - RNA, 19 nt, Homo sapiens
  misc_RNA (1)...(19): siRNA sense strand
gcuaaagauuccaggcuuc

SEQ ID NO: 2272319 - RNA, 19 nt, Homo sapiens
  misc_RNA (1)...(19): siRNA sense strand
aagagauaacucagaagaa

SEQ ID NO: 2272320 - RNA, 19 nt, Homo sapiens
  misc_RNA (1)...(19): siRNA sense strand
cauauagagcaguaccaaa

SEQ ID NO: 2272321 - RNA, 19 nt, Homo sapiens
  misc_RNA (1)...(19): siRNA sense strand
gcucauguacagucaggaa

SEQ ID NO: 2272322 - RNA, 19 nt, Homo sapiens
  misc_RNA (1)...(19): siRNA sense strand
gcgaacacaaagagaagga

SEQ ID NO: 2272323 - RNA, 19 nt, Homo sapiens
  misc_RNA (1)...(19): siRNA sense strand
auauagagcaguaccaaau

SEQ ID NO: 2272324 - RNA, 19 nt, Homo sapiens
  misc_RNA (1)...(19): siRNA sense strand
aggucgaaacaguaacaaa

SEQ ID NO: 2272325 - RNA, 19 nt, Homo sapiens
  misc_RNA (1)...(19): siRNA sense strand
ggaaaaugaugauaggagu

SEQ ID NO: 2272326 - RNA, 19 nt, Homo sapiens
  misc_RNA (1)...(19): siRNA sense strand
uggacaaagaaauagagaa

SEQ ID NO: 2272327 - RNA, 19 nt, Homo sapiens
  misc_RNA (1)...(19): siRNA sense strand
gggccgaaacgugaagaaa

SEQ ID NO: 2272328 - RNA, 19 nt, Homo sapiens
  misc_RNA (1)...(19): siRNA sense strand
gagaaauuccagugaacgu

SEQ ID NO: 2272329 - RNA, 19 nt, Homo sapiens
  misc_RNA (1)...(19): siRNA sense strand
agacagaauucaccgcgua

SEQ ID NO: 2272330 - RNA, 19 nt, Homo sapiens
  misc_RNA (1)...(19): siRNA sense strand
ugauaggagugaggaagaa

SEQ ID NO: 2272331 - RNA, 19 nt, Homo sapiens
  misc_RNA (1)...(19): siRNA sense strand
agcauguaaacaagagaaa

SEQ ID NO: 2272332 - RNA, 19 nt, Homo sapiens
  misc_RNA (1)...(19): siRNA sense strand
cgugaagaaauaauggaga

SEQ ID NO: 2272333 - RNA, 19 nt, Homo sapiens
  misc_RNA (1)...(19): siRNA sense strand
gugaagaaauaauggagag

SEQ ID NO: 2272334 - RNA, 19 nt, Homo sapiens
  misc_RNA (1)...(19): siRNA sense strand
cagacuuuguugugguaca

SEQ ID NO: 2272335 - RNA, 19 nt, Homo sapiens
  misc_RNA (1)...(19): siRNA sense strand
guacaaagcucgaguggcc

SEQ ID NO: 2272336 - RNA, 19 nt, Homo sapiens
  misc_RNA (1)...(19): siRNA sense strand
aagccaacaugguggaagu

SEQ ID NO: 2272337 - RNA, 19 nt, Homo sapiens
  misc_RNA (1)...(19): siRNA sense strand
ugauggaaucuaugcaaau

SEQ ID NO: 2272338 - RNA, 19 nt, Homo sapiens
  misc_RNA (1)...(19): siRNA sense strand
ggcuaaagauuccaggcuu

SEQ ID NO: 2272339 - RNA, 19 nt, Homo sapiens
  misc_RNA (1)...(19): siRNA sense strand
cagccaaagccuucuacua

SEQ ID NO: 2272340 - RNA, 19 nt, Homo sapiens
  misc_RNA (1)...(19): siRNA sense strand
caggguaaugcuagaauga

SEQ ID NO: 2272341 - RNA, 19 nt, Homo sapiens
  misc_RNA (1)...(19): siRNA sense strand
gcuccaaaugugaaguaca

SEQ ID NO: 2272342 - RNA, 19 nt, Homo sapiens
  misc_RNA (1)...(19): siRNA sense strand
aguaguuaauggagguguu

SEQ ID NO: 2272343 - RNA, 19 nt, Homo sapiens
  misc_RNA (1)...(19): siRNA sense strand
gagaaagacgauaaggaag

SEQ ID NO: 2272344 - RNA, 19 nt, Homo sapiens
  misc_RNA (1)...(19): siRNA sense strand
cgaaacgugaagaaauaau

SEQ ID NO: 2272345 - RNA, 19 nt, Homo sapiens
  misc_RNA (1)...(19): siRNA sense strand
gauaggagugaggaagaaa

SEQ ID NO: 2272346 - RNA, 19 nt, Homo sapiens
  misc_RNA (1)...(19): siRNA sense strand
guaaacaagagaaagacga

SEQ ID NO: 2272347 - RNA, 19 nt, Homo sapiens
  misc_RNA (1)...(19): siRNA sense strand
augauaggagugaggaaga

SEQ ID NO: 2272348 - RNA, 19 nt, Homo sapiens
  misc_RNA (1)...(19): siRNA sense strand
gcugagcaaguuaggaaau

SEQ ID NO: 2272349 - RNA, 19 nt, Homo sapiens
  misc_RNA (1)...(19): siRNA sense strand
gagaaaacuuagaacccaa

SEQ ID NO: 2272350 - RNA, 19 nt, Homo sapiens
  misc_RNA (1)...(19): siRNA sense strand
ucauguacaccgugggcua

SEQ ID NO: 2272351 - RNA, 19 nt, Homo sapiens
  misc_RNA (1)...(19): siRNA sense strand
cugcugaagcugaaaguca

SEQ ID NO: 2272352 - RNA, 19 nt, Homo sapiens
  misc_RNA (1)...(19): siRNA sense strand
gauguugggugcugggaca

SEQ ID NO: 2272353 - RNA, 19 nt, Homo sapiens
  misc_RNA (1)...(19): siRNA sense strand
acccaagaaacaagaggaa

SEQ ID NO: 2272354 - RNA, 19 nt, Homo sapiens
  misc_RNA (1)...(19): siRNA sense strand
ccagagagcagacaggaga

SEQ ID NO: 2272355 - RNA, 19 nt, Homo sapiens
  misc_RNA (1)...(19): siRNA sense strand
aggugcagcuggagguuca

SEQ ID NO: 2272356 - RNA, 19 nt, Homo sapiens
  misc_RNA (1)...(19): siRNA sense strand
cuacaagugcugugggaag

SEQ ID NO: 2272357 - RNA, 19 nt, Homo sapiens
  misc_RNA (1)...(19): siRNA sense strand
gaggaaaugaagucagcca

SEQ ID NO: 2272358 - RNA, 19 nt, Homo sapiens
  misc_RNA (1)...(19): siRNA sense strand
ccagaggacgcuauggaga

SEQ ID NO: 2272359 - RNA, 19 nt, Homo sapiens
  misc_RNA (1)...(19): siRNA sense strand
cccaagaaacaagaggaaa

SEQ ID NO: 2272360 - RNA, 19 nt, Homo sapiens
  misc_RNA (1)...(19): siRNA sense strand
ggaugguggagguggaaug

SEQ ID NO: 2272361 - RNA, 19 nt, Homo sapiens
  misc_RNA (1)...(19): siRNA sense strand
ccaugaaguaucuggacca

SEQ ID NO: 2272362 - RNA, 19 nt, Homo sapiens
  misc_RNA (1)...(19): siRNA sense strand
cccagaaagcugugaucuu

SEQ ID NO: 2272363 - RNA, 19 nt, Homo sapiens
  misc_RNA (1)...(19): siRNA sense strand
agaagaagugggugcagga

SEQ ID NO: 2272364 - RNA, 19 nt, Homo sapiens
  misc_RNA (1)...(19): siRNA sense strand
aagaagugggugcaggauu

SEQ ID NO: 2272365 - RNA, 19 nt, Homo sapiens
  misc_RNA (1)...(19): siRNA sense strand
ccauggaccaccuggacaa

SEQ ID NO: 2272366 - RNA, 19 nt, Homo sapiens
  misc_RNA (1)...(19): siRNA sense strand
ccauuguggccaaggagau

SEQ ID NO: 2272367 - RNA, 19 nt, Homo sapiens
  misc_RNA (1)...(19): siRNA sense strand
ucaagaccauuguggccaa

SEQ ID NO: 2272368 - RNA, 19 nt, Homo sapiens
  misc_RNA (1)...(19): siRNA sense strand
guacaaauccauugagccu

SEQ ID NO: 2272369 - RNA, 19 nt, Homo sapiens
  misc_RNA (1)...(19): siRNA sense strand
gaacaucaauggaggcaac

SEQ ID NO: 2272370 - RNA, 19 nt, Homo sapiens
  misc_RNA (1)...(19): siRNA sense strand
ccagacagcugcagccaca

SEQ ID NO: 2272371 - RNA, 19 nt, Homo sapiens
  misc_RNA (1)...(19): siRNA sense strand
cugguggaacggagacaaa

SEQ ID NO: 2272372 - RNA, 19 nt, Homo sapiens
  misc_RNA (1)...(19): siRNA sense strand
aagcuauugcagagaucaa

SEQ ID NO: 2272373 - RNA, 19 nt, Homo sapiens
  misc_RNA (1)...(19): siRNA sense strand
gugagaaacuggacgggcu

SEQ ID NO: 2272374 - RNA, 19 nt, Homo sapiens
  misc_RNA (1)...(19): siRNA sense strand
cagacaaggcuggagacaa

SEQ ID NO: 2272375 - RNA, 19 nt, Homo sapiens
  misc_RNA (1)...(19): siRNA sense strand
auuugaagaagaaggauga

SEQ ID NO: 2272376 - RNA, 19 nt, Homo sapiens
  misc_RNA (1)...(19): siRNA sense strand
aguccauagaagagcguga

SEQ ID NO: 2272377 - RNA, 19 nt, Homo sapiens
  misc_RNA (1)...(19): siRNA sense strand
uauaaggagaagaaagcuu

SEQ ID NO: 2272378 - RNA, 19 nt, Homo sapiens
  misc_RNA (1)...(19): siRNA sense strand
uggcaaccuauaaggagaa

SEQ ID NO: 2272379 - RNA, 19 nt, Homo sapiens
  misc_RNA (1)...(19): siRNA sense strand
aggaaggcaagcagcagua

SEQ ID NO: 2272380 - RNA, 19 nt, Homo sapiens
  misc_RNA (1)...(19): siRNA sense strand
auggcaaccuauaaggaga

SEQ ID NO: 2272381 - RNA, 19 nt, Homo sapiens
  misc_RNA (1)...(19): siRNA sense strand
agggaaagcuauugcagag

SEQ ID NO: 2272382 - RNA, 19 nt, Homo sapiens
  misc_RNA (1)...(19): siRNA sense strand
aggacugcguggagauaua

SEQ ID NO: 2272383 - RNA, 19 nt, Homo sapiens
  misc_RNA (1)...(19): siRNA sense strand
cgugagagaguguggagaa

SEQ ID NO: 2272384 - RNA, 19 nt, Homo sapiens
  misc_RNA (1)...(19): siRNA sense strand
acacagacuuaguggccau

SEQ ID NO: 2272385 - RNA, 19 nt, Homo sapiens
  misc_RNA (1)...(19): siRNA sense strand
agagaguggucuuuggaau

SEQ ID NO: 2272386 - RNA, 19 nt, Homo sapiens
  misc_RNA (1)...(19): siRNA sense strand
ccgaaagaacaauaagaca

SEQ ID NO: 2272387 - RNA, 19 nt, Homo sapiens
  misc_RNA (1)...(19): siRNA sense strand
guuaauaagccaauagcga

SEQ ID NO: 2272388 - RNA, 19 nt, Homo sapiens
  misc_RNA (1)...(19): siRNA sense strand
ccguaaauacugccagaau

SEQ ID NO: 2272389 - RNA, 19 nt, Homo sapiens
  misc_RNA (1)...(19): siRNA sense strand
acuuaauggcucugcacaa

SEQ ID NO: 2272390 - RNA, 19 nt, Homo sapiens
  misc_RNA (1)...(19): siRNA sense strand
gaacaauaagacauggaca

SEQ ID NO: 2272391 - RNA, 19 nt, Homo sapiens
  misc_RNA (1)...(19): siRNA sense strand
gcugcaaauuugagugcca

SEQ ID NO: 2272392 - RNA, 19 nt, Homo sapiens
  misc_RNA (1)...(19): siRNA sense strand
ccugaagauuccugaacga

SEQ ID NO: 2272393 - RNA, 19 nt, Homo sapiens
  misc_RNA (1)...(19): siRNA sense strand
ucaauaagguccuacccua

SEQ ID NO: 2272394 - RNA, 19 nt, Homo sapiens
  misc_RNA (1)...(19): siRNA sense strand
gugaagagggauuugcauu

SEQ ID NO: 2272395 - RNA, 19 nt, Homo sapiens
  misc_RNA (1)...(19): siRNA sense strand
gcuccaaccucuggggaaa

SEQ ID NO: 2272396 - RNA, 19 nt, Homo sapiens
  misc_RNA (1)...(19): siRNA sense strand
gcuacuggaaacuggaauu

SEQ ID NO: 2272397 - RNA, 19 nt, Homo sapiens
  misc_RNA (1)...(19): siRNA sense strand
cuaacaaaccagaaagaag

SEQ ID NO: 2272398 - RNA, 19 nt, Homo sapiens
  misc_RNA (1)...(19): siRNA sense strand
acuuaucauuacagcacaa

SEQ ID NO: 2272399 - RNA, 19 nt, Homo sapiens
  misc_RNA (1)...(19): siRNA sense strand
ccuaggaacauauggaguu

SEQ ID NO: 2272400 - RNA, 19 nt, Homo sapiens
  misc_RNA (1)...(19): siRNA sense strand
aacaauaagacauggacau

SEQ ID NO: 2272401 - RNA, 19 nt, Homo sapiens
  misc_RNA (1)...(19): siRNA sense strand
gcuucuggaaucuggacaa

SEQ ID NO: 2272402 - RNA, 19 nt, Homo sapiens
  misc_RNA (1)...(19): siRNA sense strand
aaugugaauacgugagaga

SEQ ID NO: 2272403 - RNA, 19 nt, Homo sapiens
  misc_RNA (1)...(19): siRNA sense strand
ugugaauacgugagagagu

SEQ ID NO: 2272404 - RNA, 19 nt, Homo sapiens
  misc_RNA (1)...(19): siRNA sense strand
uguucaaccucuuggaagu

SEQ ID NO: 2272405 - RNA, 19 nt, Homo sapiens
  misc_RNA (1)...(19): siRNA sense strand
ccuaacaacaaaaggaaca

SEQ ID NO: 2272406 - RNA, 19 nt, Homo sapiens
  misc_RNA (1)...(19): siRNA sense strand
ggugugauaacuugggaca

SEQ ID NO: 2272407 - RNA, 19 nt, Homo sapiens
  misc_RNA (1)...(19): siRNA sense strand
agaaagaaguggcagcaug

SEQ ID NO: 2272408 - RNA, 19 nt, Homo sapiens
  misc_RNA (1)...(19): siRNA sense strand
ccaacgaggcugagaacug

SEQ ID NO: 2272409 - RNA, 19 nt, Homo sapiens
  misc_RNA (1)...(19): siRNA sense strand
cagcaaacaaggagagugc

SEQ ID NO: 2272410 - RNA, 19 nt, Homo sapiens
  misc_RNA (1)...(19): siRNA sense strand
ggauuguacucgaucggga

SEQ ID NO: 2272411 - RNA, 19 nt, Homo sapiens
  misc_RNA (1)...(19): siRNA sense strand
cgauauaguucggugugau

SEQ ID NO: 2272412 - RNA, 19 nt, Homo sapiens
  misc_RNA (1)...(19): siRNA sense strand
agauauacaucaagagucc

SEQ ID NO: 2272413 - RNA, 19 nt, Homo sapiens
  misc_RNA (1)...(19): siRNA sense strand
gcaaacaaggagagugccu

SEQ ID NO: 2272414 - RNA, 19 nt, Homo sapiens
  misc_RNA (1)...(19): siRNA sense strand
aggacaauggacagcagua

SEQ ID NO: 2272415 - RNA, 19 nt, Homo sapiens
  misc_RNA (1)...(19): siRNA sense strand
gcauuugacccgaguccuu

SEQ ID NO: 2272416 - RNA, 19 nt, Homo sapiens
  misc_RNA (1)...(19): siRNA sense strand
gugcuacagugcuuggcua

SEQ ID NO: 2272417 - RNA, 19 nt, Homo sapiens
  misc_RNA (1)...(19): siRNA sense strand
aagcauacucauggaauau

SEQ ID NO: 2272418 - RNA, 19 nt, Homo sapiens
  misc_RNA (1)...(19): siRNA sense strand
cugagaacugggcugauaa

SEQ ID NO: 2272419 - RNA, 19 nt, Homo sapiens
  misc_RNA (1)...(19): siRNA sense strand
ucaguugugaagagggauu

SEQ ID NO: 2272420 - RNA, 19 nt, Homo sapiens
  misc_RNA (1)...(19): siRNA sense strand
gugcuuggcuacuggaaac

SEQ ID NO: 2272421 - RNA, 19 nt, Homo sapiens
  misc_RNA (1)...(19): siRNA sense strand
gauucacacucauaggaga

SEQ ID NO: 2272422 - RNA, 19 nt, Homo sapiens
  misc_RNA (1)...(19): siRNA sense strand
cuacauguuaauaagccaa

SEQ ID NO: 2272423 - RNA, 19 nt, Homo sapiens
  misc_RNA (1)...(19): siRNA sense strand
ccacagccauggaggcaca

SEQ ID NO: 2272424 - RNA, 19 nt, Homo sapiens
  misc_RNA (1)...(19): siRNA sense strand
ggcagaugaagccgagaaa

SEQ ID NO: 2272425 - RNA, 19 nt, Homo sapiens
  misc_RNA (1)...(19): siRNA sense strand
cagcagccauggaggcaca

SEQ ID NO: 2272426 - RNA, 19 nt, Homo sapiens
  misc_RNA (1)...(19): siRNA sense strand
cagcagccauggaggcaca

SEQ ID NO: 2272427 - RNA, 19 nt, Homo sapiens
  misc_RNA (1)...(19): siRNA sense strand
acauguaccccgugcguaa

SEQ ID NO: 2272428 - RNA, 19 nt, Homo sapiens
  misc_RNA (1)...(19): siRNA sense strand
ccacagaggcacagaccac

SEQ ID NO: 2272429 - RNA, 19 nt, Homo sapiens
  misc_RNA (1)...(19): siRNA sense strand
cagaugaagccgagaaagc

SEQ ID NO: 2272430 - RNA, 19 nt, Homo sapiens
  misc_RNA (1)...(19): siRNA sense strand
gucaaauagaugaagcaaa

SEQ ID NO: 2272431 - RNA, 19 nt, Homo sapiens
  misc_RNA (1)...(19): siRNA sense strand
augccaugcccgaggaauu

SEQ ID NO: 2272432 - RNA, 19 nt, Homo sapiens
  misc_RNA (1)...(19): siRNA sense strand
auuggaaaguucuggaaaa

SEQ ID NO: 2272433 - RNA, 19 nt, Homo sapiens
  misc_RNA (1)...(19): siRNA sense strand
cuggaaaaguagaggaauc

SEQ ID NO: 2272434 - RNA, 19 nt, Homo sapiens
  misc_RNA (1)...(19): siRNA sense strand
ggaaacaaauggaagacug

SEQ ID NO: 2272435 - RNA, 19 nt, Homo sapiens
  misc_RNA (1)...(19): siRNA sense strand
aaugcgcgguggugggaaa

SEQ ID NO: 2272436 - RNA, 19 nt, Homo sapiens
  misc_RNA (1)...(19): siRNA sense strand
gaagacaggaacagagcca

SEQ ID NO: 2272437 - RNA, 19 nt, Homo sapiens
  misc_RNA (1)...(19): siRNA sense strand
cggccagagcguucaggaa

SEQ ID NO: 2272438 - RNA, 19 nt, Homo sapiens
  misc_RNA (1)...(19): siRNA sense strand
ccuccuuugucaagugaau

SEQ ID NO: 2272439 - RNA, 19 nt, Homo sapiens
  misc_RNA (1)...(19): siRNA sense strand
guagaggaauccaugccaa

SEQ ID NO: 2272440 - RNA, 19 nt, Homo sapiens
  misc_RNA (1)...(19): siRNA sense strand
agaaagacauuuguggaca

SEQ ID NO: 2272441 - RNA, 19 nt, Homo sapiens
  misc_RNA (1)...(19): siRNA sense strand
cauuggaaaguucuggaaa

SEQ ID NO: 2272442 - RNA, 19 nt, Homo sapiens
  misc_RNA (1)...(19): siRNA sense strand
gcguggaggaggaaccaga

SEQ ID NO: 2272443 - RNA, 19 nt, Homo sapiens
  misc_RNA (1)...(19): siRNA sense strand
cgucaaauagaugaagcaa

SEQ ID NO: 2272444 - RNA, 19 nt, Homo sapiens
  misc_RNA (1)...(19): siRNA sense strand
ccagaaagacauuugugga

SEQ ID NO: 2272445 - RNA, 19 nt, Homo sapiens
  misc_RNA (1)...(19): siRNA sense strand
ccgucaaauagaugaagca

SEQ ID NO: 2272446 - RNA, 19 nt, Homo sapiens
  misc_RNA (1)...(19): siRNA sense strand
gguaaugacuccacaggga

SEQ ID NO: 2272447 - RNA, 19 nt, Homo sapiens
  misc_RNA (1)...(19): siRNA sense strand
cgaagcaaccagagcguga

SEQ ID NO: 2272448 - RNA, 19 nt, Homo sapiens
  misc_RNA (1)...(19): siRNA sense strand
ccccaaagauacuggcauu

SEQ ID NO: 2272449 - RNA, 19 nt, Homo sapiens
  misc_RNA (1)...(19): siRNA sense strand
ccaaagaaugcgaagcaac

SEQ ID NO: 2272450 - RNA, 19 nt, Homo sapiens
  misc_RNA (1)...(19): siRNA sense strand
aaccagagcgugaagaaaa

SEQ ID NO: 2272451 - RNA, 19 nt, Homo sapiens
  misc_RNA (1)...(19): siRNA sense strand
ugguagggcagcugguaga

SEQ ID NO: 2272452 - RNA, 19 nt, Homo sapiens
  misc_RNA (1)...(19): siRNA sense strand
gguaaugacuccacaggga

SEQ ID NO: 2272453 - RNA, 19 nt, Homo sapiens
  misc_RNA (1)...(19): siRNA sense strand
cgaagcaaccagagcguga

SEQ ID NO: 2272454 - RNA, 19 nt, Homo sapiens
  misc_RNA (1)...(19): siRNA sense strand
ccccaaagauacuggcauu

SEQ ID NO: 2272455 - RNA, 19 nt, Homo sapiens
  misc_RNA (1)...(19): siRNA sense strand
ccaaagaaugcgaagcaac

SEQ ID NO: 2272456 - RNA, 19 nt, Homo sapiens
  misc_RNA (1)...(19): siRNA sense strand
aaccagagcgugaagaaaa

SEQ ID NO: 2272457 - RNA, 19 nt, Homo sapiens
  misc_RNA (1)...(19): siRNA sense strand
ugguagggcagcugguaga

SEQ ID NO: 2272458 - RNA, 19 nt, Homo sapiens
  misc_RNA (1)...(19): siRNA sense strand
gguaaugacuccacaggga

SEQ ID NO: 2272459 - RNA, 19 nt, Homo sapiens
  misc_RNA (1)...(19): siRNA sense strand
cgaagcaaccagagcguga

SEQ ID NO: 2272460 - RNA, 19 nt, Homo sapiens
  misc_RNA (1)...(19): siRNA sense strand
ccccaaagauacuggcauu

SEQ ID NO: 2272461 - RNA, 19 nt, Homo sapiens
  misc_RNA (1)...(19): siRNA sense strand
ccaaagaaugcgaagcaac

SEQ ID NO: 2272462 - RNA, 19 nt, Homo sapiens
  misc_RNA (1)...(19): siRNA sense strand
aaccagagcgugaagaaaa

SEQ ID NO: 2272463 - RNA, 19 nt, Homo sapiens
  misc_RNA (1)...(19): siRNA sense strand
ugguagggcagcugguaga

SEQ ID NO: 2272464 - RNA, 19 nt, Homo sapiens
  misc_RNA (1)...(19): siRNA sense strand
gguaaugacuccacaggga

SEQ ID NO: 2272465 - RNA, 19 nt, Homo sapiens
  misc_RNA (1)...(19): siRNA sense strand
cgaagcaaccagagcguga

SEQ ID NO: 2272466 - RNA, 19 nt, Homo sapiens
  misc_RNA (1)...(19): siRNA sense strand
ccccaaagauacuggcauu

SEQ ID NO: 2272467 - RNA, 19 nt, Homo sapiens
  misc_RNA (1)...(19): siRNA sense strand
ccaaagaaugcgaagcaac

SEQ ID NO: 2272468 - RNA, 19 nt, Homo sapiens
  misc_RNA (1)...(19): siRNA sense strand
aaccagagcgugaagaaaa

SEQ ID NO: 2272469 - RNA, 19 nt, Homo sapiens
  misc_RNA (1)...(19): siRNA sense strand
ugguagggcagcugguaga

SEQ ID NO: 2272470 - RNA, 19 nt, Homo sapiens
  misc_RNA (1)...(19): siRNA sense strand
gguaaugacuccacaggga

SEQ ID NO: 2272471 - RNA, 19 nt, Homo sapiens
  misc_RNA (1)...(19): siRNA sense strand
cgaagcaaccagagcguga

SEQ ID NO: 2272472 - RNA, 19 nt, Homo sapiens
  misc_RNA (1)...(19): siRNA sense strand
ccccaaagauacuggcauu

SEQ ID NO: 2272473 - RNA, 19 nt, Homo sapiens
  misc_RNA (1)...(19): siRNA sense strand
ccaaagaaugcgaagcaac

SEQ ID NO: 2272474 - RNA, 19 nt, Homo sapiens
  misc_RNA (1)...(19): siRNA sense strand
aaccagagcgugaagaaaa

SEQ ID NO: 2272475 - RNA, 19 nt, Homo sapiens
  misc_RNA (1)...(19): siRNA sense strand
ugguagggcagcugguaga

SEQ ID NO: 2272476 - RNA, 19 nt, Homo sapiens
  misc_RNA (1)...(19): siRNA sense strand
agguggugcuggaggucaa

SEQ ID NO: 2272477 - RNA, 19 nt, Homo sapiens
  misc_RNA (1)...(19): siRNA sense strand
gcaaggagguggugcugga

SEQ ID NO: 2272478 - RNA, 19 nt, Homo sapiens
  misc_RNA (1)...(19): siRNA sense strand
cgggagaacaagaugccua

SEQ ID NO: 2272479 - RNA, 19 nt, Homo sapiens
  misc_RNA (1)...(19): siRNA sense strand
ggaacuucagcgaggccaa

SEQ ID NO: 2272480 - RNA, 19 nt, Homo sapiens
  misc_RNA (1)...(19): siRNA sense strand
gggccaaggaugaggcuag

SEQ ID NO: 2272481 - RNA, 19 nt, Homo sapiens
  misc_RNA (1)...(19): siRNA sense strand
aggaugagcugcaggcacu

SEQ ID NO: 2272482 - RNA, 19 nt, Homo sapiens
  misc_RNA (1)...(19): siRNA sense strand
gggucaaggaugagcugca

SEQ ID NO: 2272483 - RNA, 19 nt, Homo sapiens
  misc_RNA (1)...(19): siRNA sense strand
ccauccaagcccaggucaa

SEQ ID NO: 2272484 - RNA, 19 nt, Homo sapiens
  misc_RNA (1)...(19): siRNA sense strand
gcauaugucucgaagaggu

SEQ ID NO: 2272485 - RNA, 19 nt, Homo sapiens
  misc_RNA (1)...(19): siRNA sense strand
gugcugaaggcgagaucca

SEQ ID NO: 2272486 - RNA, 19 nt, Homo sapiens
  misc_RNA (1)...(19): siRNA sense strand
ccguauuucaagaacucua

SEQ ID NO: 2272487 - RNA, 19 nt, Homo sapiens
  misc_RNA (1)...(19): siRNA sense strand
caagcagauuggcuggcua

SEQ ID NO: 2272488 - RNA, 19 nt, Homo sapiens
  misc_RNA (1)...(19): siRNA sense strand
ccugcuaacugaaaaggaa

SEQ ID NO: 2272489 - RNA, 19 nt, Homo sapiens
  misc_RNA (1)...(19): siRNA sense strand
cguucaucgacgaggcuaa

SEQ ID NO: 2272490 - RNA, 19 nt, Homo sapiens
  misc_RNA (1)...(19): siRNA sense strand
cgcucaugaagaaggauaa

SEQ ID NO: 2272491 - RNA, 19 nt, Homo sapiens
  misc_RNA (1)...(19): siRNA sense strand
acaacaugauggagacgga

SEQ ID NO: 2272492 - RNA, 19 nt, Homo sapiens
  misc_RNA (1)...(19): siRNA sense strand
acgcucaugaagaaggaua

SEQ ID NO: 2272493 - RNA, 19 nt, Homo sapiens
  misc_RNA (1)...(19): siRNA sense strand
augaagaaggauaaguaca

SEQ ID NO: 2272494 - RNA, 19 nt, Homo sapiens
  misc_RNA (1)...(19): siRNA sense strand
gcucuuggcuccauggguu

SEQ ID NO: 2272495 - RNA, 19 nt, Homo sapiens
  misc_RNA (1)...(19): siRNA sense strand
caguacaacuccaugacca

SEQ ID NO: 2272496 - RNA, 19 nt, Homo sapiens
  misc_RNA (1)...(19): siRNA sense strand
cggaaaaccaagacgcuca

SEQ ID NO: 2272497 - RNA, 19 nt, Homo sapiens
  misc_RNA (1)...(19): siRNA sense strand
agaagaaggugaagcgcgu

SEQ ID NO: 2272498 - RNA, 19 nt, Homo sapiens
  misc_RNA (1)...(19): siRNA sense strand
ucuccaagcggcugggcaa

SEQ ID NO: 2272499 - RNA, 19 nt, Homo sapiens
  misc_RNA (1)...(19): siRNA sense strand
agacaaggucgguggcagu

SEQ ID NO: 2272500 - RNA, 19 nt, Homo sapiens
  misc_RNA (1)...(19): siRNA sense strand
uggcggagaagaaggugaa

SEQ ID NO: 2272501 - RNA, 19 nt, Homo sapiens
  misc_RNA (1)...(19): siRNA sense strand
acgacgaguucgaagacga

SEQ ID NO: 2272502 - RNA, 19 nt, Homo sapiens
  misc_RNA (1)...(19): siRNA sense strand
ccaacaaugccgagaacac

SEQ ID NO: 2272503 - RNA, 19 nt, Homo sapiens
  misc_RNA (1)...(19): siRNA sense strand
acuucgaguucccggacua

SEQ ID NO: 2272504 - RNA, 19 nt, Homo sapiens
  misc_RNA (1)...(19): siRNA sense strand
cggcccaggaagaagguga

SEQ ID NO: 2272505 - RNA, 19 nt, Homo sapiens
  misc_RNA (1)...(19): siRNA sense strand
gggagaagggagacaaggu

SEQ ID NO: 2272506 - RNA, 19 nt, Homo sapiens
  misc_RNA (1)...(19): siRNA sense strand
uuucaaacuugguggcgaa

SEQ ID NO: 2272507 - RNA, 19 nt, Homo sapiens
  misc_RNA (1)...(19): siRNA sense strand
gugcagaguggaagagcuu

SEQ ID NO: 2272508 - RNA, 19 nt, Homo sapiens
  misc_RNA (1)...(19): siRNA sense strand
cuuagaagccacugacaau

SEQ ID NO: 2272509 - RNA, 19 nt, Homo sapiens
  misc_RNA (1)...(19): siRNA sense strand
aaucaagugcagaguggaa

SEQ ID NO: 2272510 - RNA, 19 nt, Homo sapiens
  misc_RNA (1)...(19): siRNA sense strand
ggaaagcagcuauggcaga

SEQ ID NO: 2272511 - RNA, 19 nt, Homo sapiens
  misc_RNA (1)...(19): siRNA sense strand
gaaaugaaguauaugguuc

SEQ ID NO: 2272512 - RNA, 19 nt, Homo sapiens
  misc_RNA (1)...(19): siRNA sense strand
aagucagaaccuuggauua

SEQ ID NO: 2272513 - RNA, 19 nt, Homo sapiens
  misc_RNA (1)...(19): siRNA sense strand
cagcuauggcagagcccaa

SEQ ID NO: 2272514 - RNA, 19 nt, Homo sapiens
  misc_RNA (1)...(19): siRNA sense strand
ucucaguaguagugcugua

SEQ ID NO: 2272515 - RNA, 19 nt, Homo sapiens
  misc_RNA (1)...(19): siRNA sense strand
aguuauuagaggaagauga

SEQ ID NO: 2272516 - RNA, 19 nt, Homo sapiens
  misc_RNA (1)...(19): siRNA sense strand
aggagaaaugccaaggaau

SEQ ID NO: 2272517 - RNA, 19 nt, Homo sapiens
  misc_RNA (1)...(19): siRNA sense strand
uguugacauuagaggagaa

SEQ ID NO: 2272518 - RNA, 19 nt, Homo sapiens
  misc_RNA (1)...(19): siRNA sense strand
ucuuggagauacaguggaa

SEQ ID NO: 2272519 - RNA, 19 nt, Homo sapiens
  misc_RNA (1)...(19): siRNA sense strand
caguacaaggauaaagaga

SEQ ID NO: 2272520 - RNA, 19 nt, Homo sapiens
  misc_RNA (1)...(19): siRNA sense strand
guuacaguuauuagaggaa

SEQ ID NO: 2272521 - RNA, 19 nt, Homo sapiens
  misc_RNA (1)...(19): siRNA sense strand
cugacagaauaguuggaga

SEQ ID NO: 2272522 - RNA, 19 nt, Homo sapiens
  misc_RNA (1)...(19): siRNA sense strand
aaagcaaaucagagguuca

SEQ ID NO: 2272523 - RNA, 19 nt, Homo sapiens
  misc_RNA (1)...(19): siRNA sense strand
cuggagauaucaaggaacu

SEQ ID NO: 2272524 - RNA, 19 nt, Homo sapiens
  misc_RNA (1)...(19): siRNA sense strand
gagauacaguggaaggucu

SEQ ID NO: 2272525 - RNA, 19 nt, Homo sapiens
  misc_RNA (1)...(19): siRNA sense strand
aggaaugacuguugcuuuu

SEQ ID NO: 2272526 - RNA, 19 nt, Homo sapiens
  misc_RNA (1)...(19): siRNA sense strand
ccuuggucuuggagauaca

SEQ ID NO: 2272527 - RNA, 19 nt, Homo sapiens
  misc_RNA (1)...(19): siRNA sense strand
agagauggaagaaagguga

SEQ ID NO: 2272528 - RNA, 19 nt, Homo sapiens
  misc_RNA (1)...(19): siRNA sense strand
agugaagaaacgagguguu

SEQ ID NO: 2272529 - RNA, 19 nt, Homo sapiens
  misc_RNA (1)...(19): siRNA sense strand
gcgcagaaaaggaaccaau

SEQ ID NO: 2272530 - RNA, 19 nt, Homo sapiens
  misc_RNA (1)...(19): siRNA sense strand
uacaguuauuagaggaaga

SEQ ID NO: 2272531 - RNA, 19 nt, Homo sapiens
  misc_RNA (1)...(19): siRNA sense strand
aggauaaagagacuggaga

SEQ ID NO: 2272532 - RNA, 19 nt, Homo sapiens
  misc_RNA (1)...(19): siRNA sense strand
ucuuagaagccacugacaa

SEQ ID NO: 2272533 - RNA, 19 nt, Homo sapiens
  misc_RNA (1)...(19): siRNA sense strand
agguguuguguuacaguua

SEQ ID NO: 2272534 - RNA, 19 nt, Homo sapiens
  misc_RNA (1)...(19): siRNA sense strand
caaaguuuauugaaggugu

SEQ ID NO: 2272535 - RNA, 19 nt, Homo sapiens
  misc_RNA (1)...(19): siRNA sense strand
cagcuauuuucgaggccaa

SEQ ID NO: 2272536 - RNA, 19 nt, Homo sapiens
  misc_RNA (1)...(19): siRNA sense strand
ucuaaguaucagugugaaa

SEQ ID NO: 2272537 - RNA, 19 nt, Homo sapiens
  misc_RNA (1)...(19): siRNA sense strand
gcacagaaauuacaggcca

SEQ ID NO: 2272538 - RNA, 19 nt, Homo sapiens
  misc_RNA (1)...(19): siRNA sense strand
acucaagaauggagcacca

SEQ ID NO: 2272539 - RNA, 19 nt, Homo sapiens
  misc_RNA (1)...(19): siRNA sense strand
aggcgaagaugcugccgaa

SEQ ID NO: 2272540 - RNA, 19 nt, Homo sapiens
  misc_RNA (1)...(19): siRNA sense strand
gagaaaacaguaaaggcaa

SEQ ID NO: 2272541 - RNA, 19 nt, Homo sapiens
  misc_RNA (1)...(19): siRNA sense strand
cagggaugacuguacgaaa

SEQ ID NO: 2272542 - RNA, 19 nt, Homo sapiens
  misc_RNA (1)...(19): siRNA sense strand
cgcuacagccacuggacaa

SEQ ID NO: 2272543 - RNA, 19 nt, Homo sapiens
  misc_RNA (1)...(19): siRNA sense strand
ggagaaaacaguaaaggca

SEQ ID NO: 2272544 - RNA, 19 nt, Homo sapiens
  misc_RNA (1)...(19): siRNA sense strand
cagugugaaacgggagaaa

SEQ ID NO: 2272545 - RNA, 19 nt, Homo sapiens
  misc_RNA (1)...(19): siRNA sense strand
cacagaaauuacaggccau

SEQ ID NO: 2272546 - RNA, 19 nt, Homo sapiens
  misc_RNA (1)...(19): siRNA sense strand
cguccaggauagagugaag

SEQ ID NO: 2272547 - RNA, 19 nt, Homo sapiens
  misc_RNA (1)...(19): siRNA sense strand
cuuccaggaggcacagaaa

SEQ ID NO: 2272548 - RNA, 19 nt, Homo sapiens
  misc_RNA (1)...(19): siRNA sense strand
cuggaaaugaagagagauu

SEQ ID NO: 2272549 - RNA, 19 nt, Homo sapiens
  misc_RNA (1)...(19): siRNA sense strand
aagaagaugcugaggacau

SEQ ID NO: 2272550 - RNA, 19 nt, Homo sapiens
  misc_RNA (1)...(19): siRNA sense strand
agaaguuggaaguggaaau

SEQ ID NO: 2272551 - RNA, 19 nt, Homo sapiens
  misc_RNA (1)...(19): siRNA sense strand
uggagaaggaugagaggga

SEQ ID NO: 2272552 - RNA, 19 nt, Homo sapiens
  misc_RNA (1)...(19): siRNA sense strand
gcacaggaguaccaggaga

SEQ ID NO: 2272553 - RNA, 19 nt, Homo sapiens
  misc_RNA (1)...(19): siRNA sense strand
acgcagaguuugugcagca

SEQ ID NO: 2272554 - RNA, 19 nt, Homo sapiens
  misc_RNA (1)...(19): siRNA sense strand
agagcagacuggaagaaaa

SEQ ID NO: 2272555 - RNA, 19 nt, Homo sapiens
  misc_RNA (1)...(19): siRNA sense strand
acugaauauuggaucacaa

SEQ ID NO: 2272556 - RNA, 19 nt, Homo sapiens
  misc_RNA (1)...(19): siRNA sense strand
aggaguuggcugagaaguu

SEQ ID NO: 2272557 - RNA, 19 nt, Homo sapiens
  misc_RNA (1)...(19): siRNA sense strand
ggaagaaaacaguggaaac

SEQ ID NO: 2272558 - RNA, 19 nt, Homo sapiens
  misc_RNA (1)...(19): siRNA sense strand
gugccagggcugaagaaga

SEQ ID NO: 2272559 - RNA, 19 nt, Homo sapiens
  misc_RNA (1)...(19): siRNA sense strand
gggcugaagaagaugcuga

SEQ ID NO: 2272560 - RNA, 19 nt, Homo sapiens
  misc_RNA (1)...(19): siRNA sense strand
ucguggagccugugagcau

SEQ ID NO: 2272561 - RNA, 19 nt, Homo sapiens
  misc_RNA (1)...(19): siRNA sense strand
cugagaaguuggaagugga

SEQ ID NO: 2272562 - RNA, 19 nt, Homo sapiens
  misc_RNA (1)...(19): siRNA sense strand
uugaagaagaacagaggca

SEQ ID NO: 2272563 - RNA, 19 nt, Homo sapiens
  misc_RNA (1)...(19): siRNA sense strand
gaaagcaggaguuggcuga

SEQ ID NO: 2272564 - RNA, 19 nt, Homo sapiens
  misc_RNA (1)...(19): siRNA sense strand
accuggaaaugaagagaga

SEQ ID NO: 2272565 - RNA, 19 nt, Homo sapiens
  misc_RNA (1)...(19): siRNA sense strand
cacaggaguaccaggagaa

SEQ ID NO: 2272566 - RNA, 19 nt, Homo sapiens
  misc_RNA (1)...(19): siRNA sense strand
agaaaacaguggaaacaca

SEQ ID NO: 2272567 - RNA, 19 nt, Homo sapiens
  misc_RNA (1)...(19): siRNA sense strand
ucucagagcuagaucgaag

SEQ ID NO: 2272568 - RNA, 19 nt, Homo sapiens
  misc_RNA (1)...(19): siRNA sense strand
ugaagaagaugcugaggac

SEQ ID NO: 2272569 - RNA, 19 nt, Homo sapiens
  misc_RNA (1)...(19): siRNA sense strand
gagguagaugugacaggaa

SEQ ID NO: 2272570 - RNA, 19 nt, Homo sapiens
  misc_RNA (1)...(19): siRNA sense strand
gguuagauggagaaacaau

SEQ ID NO: 2272571 - RNA, 19 nt, Homo sapiens
  misc_RNA (1)...(19): siRNA sense strand
ccauaauugaggaugaaga

SEQ ID NO: 2272572 - RNA, 19 nt, Homo sapiens
  misc_RNA (1)...(19): siRNA sense strand
augaagaaacaguagaaga

SEQ ID NO: 2272573 - RNA, 19 nt, Homo sapiens
  misc_RNA (1)...(19): siRNA sense strand
aguuauugaaagagaggau

SEQ ID NO: 2272574 - RNA, 19 nt, Homo sapiens
  misc_RNA (1)...(19): siRNA sense strand
ggguacaucaagucagaau

SEQ ID NO: 2272575 - RNA, 19 nt, Homo sapiens
  misc_RNA (1)...(19): siRNA sense strand
auuccauaauugaggauga

SEQ ID NO: 2272576 - RNA, 19 nt, Homo sapiens
  misc_RNA (1)...(19): siRNA sense strand
aggauggguuagauggaga

SEQ ID NO: 2272577 - RNA, 19 nt, Homo sapiens
  misc_RNA (1)...(19): siRNA sense strand
gcucguuagcaguggcaca

SEQ ID NO: 2272578 - RNA, 19 nt, Homo sapiens
  misc_RNA (1)...(19): siRNA sense strand
acaagaucuuacagaggau

SEQ ID NO: 2272579 - RNA, 19 nt, Homo sapiens
  misc_RNA (1)...(19): siRNA sense strand
agaagaagaugaacccaca

SEQ ID NO: 2272580 - RNA, 19 nt, Homo sapiens
  misc_RNA (1)...(19): siRNA sense strand
aagaagaugugucugguga

SEQ ID NO: 2272581 - RNA, 19 nt, Homo sapiens
  misc_RNA (1)...(19): siRNA sense strand
ccaagaagguugcccagga

SEQ ID NO: 2272582 - RNA, 19 nt, Homo sapiens
  misc_RNA (1)...(19): siRNA sense strand
ccgagguagaagaagauga

SEQ ID NO: 2272583 - RNA, 19 nt, Homo sapiens
  misc_RNA (1)...(19): siRNA sense strand
agaaaguagaaauggguac

SEQ ID NO: 2272584 - RNA, 19 nt, Homo sapiens
  misc_RNA (1)...(19): siRNA sense strand
cagaaaguagaaaugggua

SEQ ID NO: 2272585 - RNA, 19 nt, Homo sapiens
  misc_RNA (1)...(19): siRNA sense strand
ggauggguuagauggagaa

SEQ ID NO: 2272586 - RNA, 19 nt, Homo sapiens
  misc_RNA (1)...(19): siRNA sense strand
ugguagaagauaaagagga

SEQ ID NO: 2272587 - RNA, 19 nt, Homo sapiens
  misc_RNA (1)...(19): siRNA sense strand
agaagaugugucuggugaa

SEQ ID NO: 2272588 - RNA, 19 nt, Homo sapiens
  misc_RNA (1)...(19): siRNA sense strand
ugaaguuccugguaggcuu

SEQ ID NO: 2272589 - RNA, 19 nt, Homo sapiens
  misc_RNA (1)...(19): siRNA sense strand
uugaaagagaggauggguu

SEQ ID NO: 2272590 - RNA, 19 nt, Homo sapiens
  misc_RNA (1)...(19): siRNA sense strand
cugcauuagacguggaacu

SEQ ID NO: 2272591 - RNA, 19 nt, Homo sapiens
  misc_RNA (1)...(19): siRNA sense strand
uggaaugcucaaugucaaa

SEQ ID NO: 2272592 - RNA, 19 nt, Homo sapiens
  misc_RNA (1)...(19): siRNA sense strand
ggaaauaugacacucccaa

SEQ ID NO: 2272593 - RNA, 19 nt, Homo sapiens
  misc_RNA (1)...(19): siRNA sense strand
cgggagagaacaagagcaa

SEQ ID NO: 2272594 - RNA, 19 nt, Homo sapiens
  misc_RNA (1)...(19): siRNA sense strand
cuucaagagcaaagaguuu

SEQ ID NO: 2272595 - RNA, 19 nt, Homo sapiens
  misc_RNA (1)...(19): siRNA sense strand
agguaaagauggaaaagaa

SEQ ID NO: 2272596 - RNA, 19 nt, Homo sapiens
  misc_RNA (1)...(19): siRNA sense strand
ugucaaaggcggauguaau

SEQ ID NO: 2272597 - RNA, 19 nt, Homo sapiens
  misc_RNA (1)...(19): siRNA sense strand
ucaugaaagcacugguaaa

SEQ ID NO: 2272598 - RNA, 19 nt, Homo sapiens
  misc_RNA (1)...(19): siRNA sense strand
gggaugagaagaagcggaa

SEQ ID NO: 2272599 - RNA, 19 nt, Homo sapiens
  misc_RNA (1)...(19): siRNA sense strand
acuuugaaauugagaccaa

SEQ ID NO: 2272600 - RNA, 19 nt, Homo sapiens
  misc_RNA (1)...(19): siRNA sense strand
acgaggaagaaguggagaa

SEQ ID NO: 2272601 - RNA, 19 nt, Homo sapiens
  misc_RNA (1)...(19): siRNA sense strand
gguaaagauggaaaagaaa

SEQ ID NO: 2272602 - RNA, 19 nt, Homo sapiens
  misc_RNA (1)...(19): siRNA sense strand
agacaggcaaaguggacaa

SEQ ID NO: 2272603 - RNA, 19 nt, Homo sapiens
  misc_RNA (1)...(19): siRNA sense strand
ggcgagaucuggaagggaa

SEQ ID NO: 2272604 - RNA, 19 nt, Homo sapiens
  misc_RNA (1)...(19): siRNA sense strand
gggaguuaacagaagguau

SEQ ID NO: 2272605 - RNA, 19 nt, Homo sapiens
  misc_RNA (1)...(19): siRNA sense strand
caggugaagaggaggaaga

SEQ ID NO: 2272606 - RNA, 19 nt, Homo sapiens
  misc_RNA (1)...(19): siRNA sense strand
gaggauugaaagagggcau

SEQ ID NO: 2272607 - RNA, 19 nt, Homo sapiens
  misc_RNA (1)...(19): siRNA sense strand
gcaagaagccuguggaggu

SEQ ID NO: 2272608 - RNA, 19 nt, Homo sapiens
  misc_RNA (1)...(19): siRNA sense strand
uguccaaagagaagaaaga

SEQ ID NO: 2272609 - RNA, 19 nt, Homo sapiens
  misc_RNA (1)...(19): siRNA sense strand
ugaacaugaacgaggaaga

SEQ ID NO: 2272610 - RNA, 19 nt, Homo sapiens
  misc_RNA (1)...(19): siRNA sense strand
cgucaggauccgaugagua

SEQ ID NO: 2272611 - RNA, 19 nt, Homo sapiens
  misc_RNA (1)...(19): siRNA sense strand
agaagaaagaggaguggga

SEQ ID NO: 2272612 - RNA, 19 nt, Homo sapiens
  misc_RNA (1)...(19): siRNA sense strand
cagcgaugacucaggagaa

SEQ ID NO: 2272613 - RNA, 19 nt, Homo sapiens
  misc_RNA (1)...(19): siRNA sense strand
cuucaagaauagcaagaca

SEQ ID NO: 2272614 - RNA, 19 nt, Homo sapiens
  misc_RNA (1)...(19): siRNA sense strand
caguauaccuucagcagca

SEQ ID NO: 2272615 - RNA, 19 nt, Homo sapiens
  misc_RNA (1)...(19): siRNA sense strand
ccaaagagaagaaagagga

SEQ ID NO: 2272616 - RNA, 19 nt, Homo sapiens
  misc_RNA (1)...(19): siRNA sense strand
caggcaaaguggacaacau

SEQ ID NO: 2272617 - RNA, 19 nt, Homo sapiens
  misc_RNA (1)...(19): siRNA sense strand
ucuccaaggacgaggacau

SEQ ID NO: 2272618 - RNA, 19 nt, Homo sapiens
  misc_RNA (1)...(19): siRNA sense strand
aagaauagcaagacaggca

SEQ ID NO: 2272619 - RNA, 19 nt, Homo sapiens
  misc_RNA (1)...(19): siRNA sense strand
aggaggaagauguggcaga

SEQ ID NO: 2272620 - RNA, 19 nt, Homo sapiens
  misc_RNA (1)...(19): siRNA sense strand
ucacuaucgccuugagcua

SEQ ID NO: 2272621 - RNA, 19 nt, Homo sapiens
  misc_RNA (1)...(19): siRNA sense strand
cgaugacucaggagaagaa

SEQ ID NO: 2272622 - RNA, 19 nt, Homo sapiens
  misc_RNA (1)...(19): siRNA sense strand
gcgagaucuggaagggaau

SEQ ID NO: 2272623 - RNA, 19 nt, Homo sapiens
  misc_RNA (1)...(19): siRNA sense strand
agggacaagucaaagaaga

SEQ ID NO: 2272624 - RNA, 19 nt, Homo sapiens
  misc_RNA (1)...(19): siRNA sense strand
aagucaaagaagaagaaga

SEQ ID NO: 2272625 - RNA, 19 nt, Homo sapiens
  misc_RNA (1)...(19): siRNA sense strand
agaaucggaguuugagaaa

SEQ ID NO: 2272626 - RNA, 19 nt, Homo sapiens
  misc_RNA (1)...(19): siRNA sense strand
ucaaagaagaagaagaaag

SEQ ID NO: 2272627 - RNA, 19 nt, Homo sapiens
  misc_RNA (1)...(19): siRNA sense strand
agggaauguccaaagagaa

SEQ ID NO: 2272628 - RNA, 19 nt, Homo sapiens
  misc_RNA (1)...(19): siRNA sense strand
ucuaagagggacaagucaa

SEQ ID NO: 2272629 - RNA, 19 nt, Homo sapiens
  misc_RNA (1)...(19): siRNA sense strand
ggucaugaaagcacuggua

SEQ ID NO: 2272630 - RNA, 19 nt, Homo sapiens
  misc_RNA (1)...(19): siRNA sense strand
gagggaggaguacgggaaa

SEQ ID NO: 2272631 - RNA, 19 nt, Homo sapiens
  misc_RNA (1)...(19): siRNA sense strand
cugaugaggaccagcauga

SEQ ID NO: 2272632 - RNA, 19 nt, Homo sapiens
  misc_RNA (1)...(19): siRNA sense strand
augccuacuuggagaggau

SEQ ID NO: 2272633 - RNA, 19 nt, Homo sapiens
  misc_RNA (1)...(19): siRNA sense strand
uggaggugaagaagggcaa

SEQ ID NO: 2272634 - RNA, 19 nt, Homo sapiens
  misc_RNA (1)...(19): siRNA sense strand
aagaaagaggagugggauc

SEQ ID NO: 2272635 - RNA, 19 nt, Homo sapiens
  misc_RNA (1)...(19): siRNA sense strand
gaggaugccaggagggacu

SEQ ID NO: 2272636 - RNA, 19 nt, Homo sapiens
  misc_RNA (1)...(19): siRNA sense strand
ccgcaagaucacagugcca

SEQ ID NO: 2272637 - RNA, 19 nt, Homo sapiens
  misc_RNA (1)...(19): siRNA sense strand
agagggaggaguacgggaa

SEQ ID NO: 2272638 - RNA, 19 nt, Homo sapiens
  misc_RNA (1)...(19): siRNA sense strand
gaugagaagaagcggaaac

SEQ ID NO: 2272639 - RNA, 19 nt, Homo sapiens
  misc_RNA (1)...(19): siRNA sense strand
cucugaagaagaagaacua

SEQ ID NO: 2272640 - RNA, 19 nt, Homo sapiens
  misc_RNA (1)...(19): siRNA sense strand
aggaagauguggcagagga

SEQ ID NO: 2272641 - RNA, 19 nt, Homo sapiens
  misc_RNA (1)...(19): siRNA sense strand
gugaccgggaugagaagaa

SEQ ID NO: 2272642 - RNA, 19 nt, Homo sapiens
  misc_RNA (1)...(19): siRNA sense strand
acgucuaucaggaggugaa

SEQ ID NO: 2272643 - RNA, 19 nt, Homo sapiens
  misc_RNA (1)...(19): siRNA sense strand
aagaaguggagaagcgcuu

SEQ ID NO: 2272644 - RNA, 19 nt, Homo sapiens
  misc_RNA (1)...(19): siRNA sense strand
acccaagcuacgaugaaua

SEQ ID NO: 2272645 - RNA, 19 nt, Homo sapiens
  misc_RNA (1)...(19): siRNA sense strand
ccucaaggcagcuaagcga

SEQ ID NO: 2272646 - RNA, 19 nt, Homo sapiens
  misc_RNA (1)...(19): siRNA sense strand
agacaauggaucagaguga

SEQ ID NO: 2272647 - RNA, 19 nt, Homo sapiens
  misc_RNA (1)...(19): siRNA sense strand
uggagaaacuagaggagca

SEQ ID NO: 2272648 - RNA, 19 nt, Homo sapiens
  misc_RNA (1)...(19): siRNA sense strand
ggcuguugcuaaaggauaa

SEQ ID NO: 2272649 - RNA, 19 nt, Homo sapiens
  misc_RNA (1)...(19): siRNA sense strand
aagacaaagccuucgguaa

SEQ ID NO: 2272650 - RNA, 19 nt, Homo sapiens
  misc_RNA (1)...(19): siRNA sense strand
ugacagaacaagauaccaa

SEQ ID NO: 2272651 - RNA, 19 nt, Homo sapiens
  misc_RNA (1)...(19): siRNA sense strand
acuaucagguaaagguuaa

SEQ ID NO: 2272652 - RNA, 19 nt, Homo sapiens
  misc_RNA (1)...(19): siRNA sense strand
agguaaagguuaaggcauc

SEQ ID NO: 2272653 - RNA, 19 nt, Homo sapiens
  misc_RNA (1)...(19): siRNA sense strand
ugagaaggcaauuggagaa

SEQ ID NO: 2272654 - RNA, 19 nt, Homo sapiens
  misc_RNA (1)...(19): siRNA sense strand
gcucauugccuguggugau

SEQ ID NO: 2272655 - RNA, 19 nt, Homo sapiens
  misc_RNA (1)...(19): siRNA sense strand
aagccaucucggaggaaua

SEQ ID NO: 2272656 - RNA, 19 nt, Homo sapiens
  misc_RNA (1)...(19): siRNA sense strand
cauuugugguugagcgaca

SEQ ID NO: 2272657 - RNA, 19 nt, Homo sapiens
  misc_RNA (1)...(19): siRNA sense strand
ggagaaacuagaggagcaa

SEQ ID NO: 2272658 - RNA, 19 nt, Homo sapiens
  misc_RNA (1)...(19): siRNA sense strand
gagaaggcaauuggagaaa

SEQ ID NO: 2272659 - RNA, 19 nt, Homo sapiens
  misc_RNA (1)...(19): siRNA sense strand
ucauagaagagcugcaaga

SEQ ID NO: 2272660 - RNA, 19 nt, Homo sapiens
  misc_RNA (1)...(19): siRNA sense strand
guacguuggucguggucuu

SEQ ID NO: 2272661 - RNA, 19 nt, Homo sapiens
  misc_RNA (1)...(19): siRNA sense strand
gaacuaaugucaaagccau

SEQ ID NO: 2272662 - RNA, 19 nt, Homo sapiens
  misc_RNA (1)...(19): siRNA sense strand
cugaaaacccucugaagua

SEQ ID NO: 2272663 - RNA, 19 nt, Homo sapiens
  misc_RNA (1)...(19): siRNA sense strand
uaugcgguguugagagaaa

SEQ ID NO: 2272664 - RNA, 19 nt, Homo sapiens
  misc_RNA (1)...(19): siRNA sense strand
ccaggggccucuagagaaa

SEQ ID NO: 2272665 - RNA, 19 nt, Homo sapiens
  misc_RNA (1)...(19): siRNA sense strand
ccuuuggauugauggguau

SEQ ID NO: 2272666 - RNA, 19 nt, Homo sapiens
  misc_RNA (1)...(19): siRNA sense strand
acuuagaagaucugcaaga

SEQ ID NO: 2272667 - RNA, 19 nt, Homo sapiens
  misc_RNA (1)...(19): siRNA sense strand
uguuaauacaacuggauga

SEQ ID NO: 2272668 - RNA, 19 nt, Homo sapiens
  misc_RNA (1)...(19): siRNA sense strand
agccaugucuauugaagaa

SEQ ID NO: 2272669 - RNA, 19 nt, Homo sapiens
  misc_RNA (1)...(19): siRNA sense strand
ugcuggagguaaaggaaau

SEQ ID NO: 2272670 - RNA, 19 nt, Homo sapiens
  misc_RNA (1)...(19): siRNA sense strand
gugcuggagguaaaggaaa

SEQ ID NO: 2272671 - RNA, 19 nt, Homo sapiens
  misc_RNA (1)...(19): siRNA sense strand
cugaaaacauuccugaaaa

SEQ ID NO: 2272672 - RNA, 19 nt, Homo sapiens
  misc_RNA (1)...(19): siRNA sense strand
cugagaaggcaauuggaga

SEQ ID NO: 2272673 - RNA, 19 nt, Homo sapiens
  misc_RNA (1)...(19): siRNA sense strand
gguaaagguuaaggcauca

SEQ ID NO: 2272674 - RNA, 19 nt, Homo sapiens
  misc_RNA (1)...(19): siRNA sense strand
uuguggaacuaaugucaaa

SEQ ID NO: 2272675 - RNA, 19 nt, Homo sapiens
  misc_RNA (1)...(19): siRNA sense strand
aagaauagugccaugguga

SEQ ID NO: 2272676 - RNA, 19 nt, Homo sapiens
  misc_RNA (1)...(19): siRNA sense strand
gcuuuacacuauuggcaga

SEQ ID NO: 2272677 - RNA, 19 nt, Homo sapiens
  misc_RNA (1)...(19): siRNA sense strand
agagaagcuuacaguccaa

SEQ ID NO: 2272678 - RNA, 19 nt, Homo sapiens
  misc_RNA (1)...(19): siRNA sense strand
acgaauuugacuacaggua

SEQ ID NO: 2272679 - RNA, 19 nt, Homo sapiens
  misc_RNA (1)...(19): siRNA sense strand
acaaaguuauuauggcuga

SEQ ID NO: 2272680 - RNA, 19 nt, Homo sapiens
  misc_RNA (1)...(19): siRNA sense strand
uagaagaucugcaagacga

SEQ ID NO: 2272681 - RNA, 19 nt, Homo sapiens
  misc_RNA (1)...(19): siRNA sense strand
caucaauugacaagaaugu

SEQ ID NO: 2272682 - RNA, 19 nt, Homo sapiens
  misc_RNA (1)...(19): siRNA sense strand
agaauagugccauggugaa

SEQ ID NO: 2272683 - RNA, 19 nt, Homo sapiens
  misc_RNA (1)...(19): siRNA sense strand
ccaacgauucccagaacuu

SEQ ID NO: 2272684 - RNA, 19 nt, Homo sapiens
  misc_RNA (1)...(19): siRNA sense strand
acaauggaucagagugaca

SEQ ID NO: 2272685 - RNA, 19 nt, Homo sapiens
  misc_RNA (1)...(19): siRNA sense strand
gaauagugccauggugaau

SEQ ID NO: 2272686 - RNA, 19 nt, Homo sapiens
  misc_RNA (1)...(19): siRNA sense strand
gcugaaaacauuccugaaa

SEQ ID NO: 2272687 - RNA, 19 nt, Homo sapiens
  misc_RNA (1)...(19): siRNA sense strand
aggaaaugcuuaacagccu

SEQ ID NO: 2272688 - RNA, 19 nt, Homo sapiens
  misc_RNA (1)...(19): siRNA sense strand
cgacagccauguaugccaa

SEQ ID NO: 2272689 - RNA, 19 nt, Homo sapiens
  misc_RNA (1)...(19): siRNA sense strand
gaaaugaaguccagugcug

SEQ ID NO: 2272690 - RNA, 19 nt, Homo sapiens
  misc_RNA (1)...(19): siRNA sense strand
ggaacuaaugucaaagcca

SEQ ID NO: 2272691 - RNA, 19 nt, Homo sapiens
  misc_RNA (1)...(19): siRNA sense strand
ccauagauuuggagaccag

SEQ ID NO: 2272692 - RNA, 19 nt, Homo sapiens
  misc_RNA (1)...(19): siRNA sense strand
gaacaagauaccaaauacu

SEQ ID NO: 2272693 - RNA, 19 nt, Homo sapiens
  misc_RNA (1)...(19): siRNA sense strand
ccaaaggaaaugaagucca

SEQ ID NO: 2272694 - RNA, 19 nt, Homo sapiens
  misc_RNA (1)...(19): siRNA sense strand
guuaauacaacuggaugaa

SEQ ID NO: 2272695 - RNA, 19 nt, Homo sapiens
  misc_RNA (1)...(19): siRNA sense strand
uccaacaguuagaaaucaa

SEQ ID NO: 2272696 - RNA, 19 nt, Homo sapiens
  misc_RNA (1)...(19): siRNA sense strand
ugacaagaauagugccaug

SEQ ID NO: 2272697 - RNA, 19 nt, Homo sapiens
  misc_RNA (1)...(19): siRNA sense strand
agaacucauuugugguuga

SEQ ID NO: 2272698 - RNA, 19 nt, Homo sapiens
  misc_RNA (1)...(19): siRNA sense strand
cagguaaagguuaaggcau

SEQ ID NO: 2272699 - RNA, 19 nt, Homo sapiens
  misc_RNA (1)...(19): siRNA sense strand
guaaaggaaaugagggcug

SEQ ID NO: 2272700 - RNA, 19 nt, Homo sapiens
  misc_RNA (1)...(19): siRNA sense strand
cuacaaaguuauuauggcu

SEQ ID NO: 2272701 - RNA, 19 nt, Homo sapiens
  misc_RNA (1)...(19): siRNA sense strand
guuuaagggaagagaggag

SEQ ID NO: 2272702 - RNA, 19 nt, Homo sapiens
  misc_RNA (1)...(19): siRNA sense strand
cgaauuugacuacagguau

SEQ ID NO: 2272703 - RNA, 19 nt, Homo sapiens
  misc_RNA (1)...(19): siRNA sense strand
gacuacagguauaaaacaa

SEQ ID NO: 2272704 - RNA, 19 nt, Homo sapiens
  misc_RNA (1)...(19): siRNA sense strand
caauucagacaauggauca

SEQ ID NO: 2272705 - RNA, 19 nt, Homo sapiens
  misc_RNA (1)...(19): siRNA sense strand
gcaagaaggcuguggcuga

SEQ ID NO: 2272706 - RNA, 19 nt, Homo sapiens
  misc_RNA (1)...(19): siRNA sense strand
gcuucgaggcaguccguaa

SEQ ID NO: 2272707 - RNA, 19 nt, Homo sapiens
  misc_RNA (1)...(19): siRNA sense strand
aggcauuacuggcgcugaa

SEQ ID NO: 2272708 - RNA, 19 nt, Homo sapiens
  misc_RNA (1)...(19): siRNA sense strand
agugagaaggcgacaggaa

SEQ ID NO: 2272709 - RNA, 19 nt, Homo sapiens
  misc_RNA (1)...(19): siRNA sense strand
gugauguggauguggaaga

SEQ ID NO: 2272710 - RNA, 19 nt, Homo sapiens
  misc_RNA (1)...(19): siRNA sense strand
gugaugaguuccugaggga

SEQ ID NO: 2272711 - RNA, 19 nt, Homo sapiens
  misc_RNA (1)...(19): siRNA sense strand
gcguggaggaccuguggaa

SEQ ID NO: 2272712 - RNA, 19 nt, Homo sapiens
  misc_RNA (1)...(19): siRNA sense strand
ugaggaaagcagagaagga

SEQ ID NO: 2272713 - RNA, 19 nt, Homo sapiens
  misc_RNA (1)...(19): siRNA sense strand
augagguggaggugcaaua

SEQ ID NO: 2272714 - RNA, 19 nt, Homo sapiens
  misc_RNA (1)...(19): siRNA sense strand
ccuuccauggugaggauaa

SEQ ID NO: 2272715 - RNA, 19 nt, Homo sapiens
  misc_RNA (1)...(19): siRNA sense strand
ccaugacccaacagugaaa

SEQ ID NO: 2272716 - RNA, 19 nt, Homo sapiens
  misc_RNA (1)...(19): siRNA sense strand
acagugaggaugagaaacu

SEQ ID NO: 2272717 - RNA, 19 nt, Homo sapiens
  misc_RNA (1)...(19): siRNA sense strand
aagaagaugaugaaggacu

SEQ ID NO: 2272718 - RNA, 19 nt, Homo sapiens
  misc_RNA (1)...(19): siRNA sense strand
cugacgacguggaugacau

SEQ ID NO: 2272719 - RNA, 19 nt, Homo sapiens
  misc_RNA (1)...(19): siRNA sense strand
cacaugagguggaggugca

SEQ ID NO: 2272720 - RNA, 19 nt, Homo sapiens
  misc_RNA (1)...(19): siRNA sense strand
cgaugaugccaauggugau

SEQ ID NO: 2272721 - RNA, 19 nt, Homo sapiens
  misc_RNA (1)...(19): siRNA sense strand
ccguggaugaggugguaca

SEQ ID NO: 2272722 - RNA, 19 nt, Homo sapiens
  misc_RNA (1)...(19): siRNA sense strand
cugggaucucagagggauu

SEQ ID NO: 2272723 - RNA, 19 nt, Homo sapiens
  misc_RNA (1)...(19): siRNA sense strand
auggaagucaucagaagua

SEQ ID NO: 2272724 - RNA, 19 nt, Homo sapiens
  misc_RNA (1)...(19): siRNA sense strand
agagaaggagcuagaaucu

SEQ ID NO: 2272725 - RNA, 19 nt, Homo sapiens
  misc_RNA (1)...(19): siRNA sense strand
aauucuaacagcuaagcaa

SEQ ID NO: 2272726 - RNA, 19 nt, Homo sapiens
  misc_RNA (1)...(19): siRNA sense strand
uggauguggaagaaaguga

SEQ ID NO: 2272727 - RNA, 19 nt, Homo sapiens
  misc_RNA (1)...(19): siRNA sense strand
aggauaagcucaucagcgu

SEQ ID NO: 2272728 - RNA, 19 nt, Homo sapiens
  misc_RNA (1)...(19): siRNA sense strand
uggaaggcauggaagucau

SEQ ID NO: 2272729 - RNA, 19 nt, Homo sapiens
  misc_RNA (1)...(19): siRNA sense strand
cugaggaggaguuggagca

SEQ ID NO: 2272730 - RNA, 19 nt, Homo sapiens
  misc_RNA (1)...(19): siRNA sense strand
augacauggaugaggagau

SEQ ID NO: 2272731 - RNA, 19 nt, Homo sapiens
  misc_RNA (1)...(19): siRNA sense strand
cugcaagccagccgaaaca

SEQ ID NO: 2272732 - RNA, 19 nt, Homo sapiens
  misc_RNA (1)...(19): siRNA sense strand
ugaaggacuuggagggguu

SEQ ID NO: 2272733 - RNA, 19 nt, Homo sapiens
  misc_RNA (1)...(19): siRNA sense strand
auuacaacaucaagaagca

SEQ ID NO: 2272734 - RNA, 19 nt, Homo sapiens
  misc_RNA (1)...(19): siRNA sense strand
aggcuguggcugaggagga

SEQ ID NO: 2272735 - RNA, 19 nt, Homo sapiens
  misc_RNA (1)...(19): siRNA sense strand
cuguggcugaggaggauaa

SEQ ID NO: 2272736 - RNA, 19 nt, Homo sapiens
  misc_RNA (1)...(19): siRNA sense strand
ggaagaaagugaauccuga

SEQ ID NO: 2272737 - RNA, 19 nt, Homo sapiens
  misc_RNA (1)...(19): siRNA sense strand
cgucggaaguggaagcuga

SEQ ID NO: 2272738 - RNA, 19 nt, Homo sapiens
  misc_RNA (1)...(19): siRNA sense strand
auggugaggcugacagaaa

SEQ ID NO: 2272739 - RNA, 19 nt, Homo sapiens
  misc_RNA (1)...(19): siRNA sense strand
ccugguaaauagaggguuc

SEQ ID NO: 2272740 - RNA, 19 nt, Homo sapiens
  misc_RNA (1)...(19): siRNA sense strand
aaggccagauugagggaga

SEQ ID NO: 2272741 - RNA, 19 nt, Homo sapiens
  misc_RNA (1)...(19): siRNA sense strand
agggagaaguggaccucau

SEQ ID NO: 2272742 - RNA, 19 nt, Homo sapiens
  misc_RNA (1)...(19): siRNA sense strand
gaacaauccagaaaggaac

SEQ ID NO: 2272743 - RNA, 19 nt, Homo sapiens
  misc_RNA (1)...(19): siRNA sense strand
gagcacagucccuggagga

SEQ ID NO: 2272744 - RNA, 19 nt, Homo sapiens
  misc_RNA (1)...(19): siRNA sense strand
gaaauuccuacgugggaca

SEQ ID NO: 2272745 - RNA, 19 nt, Homo sapiens
  misc_RNA (1)...(19): siRNA sense strand
aagaaagugaauccugaaa

SEQ ID NO: 2272746 - RNA, 19 nt, Homo sapiens
  misc_RNA (1)...(19): siRNA sense strand
aggacccauuggagggcaa

SEQ ID NO: 2272747 - RNA, 19 nt, Homo sapiens
  misc_RNA (1)...(19): siRNA sense strand
ggacaucgaucucagggaa

SEQ ID NO: 2272748 - RNA, 19 nt, Homo sapiens
  misc_RNA (1)...(19): siRNA sense strand
ccgaacuagucaucagcaa

SEQ ID NO: 2272749 - RNA, 19 nt, Homo sapiens
  misc_RNA (1)...(19): siRNA sense strand
gggaacaucagguggagga

SEQ ID NO: 2272750 - RNA, 19 nt, Homo sapiens
  misc_RNA (1)...(19): siRNA sense strand
gggaacuggaagacgaaca

SEQ ID NO: 2272751 - RNA, 19 nt, Homo sapiens
  misc_RNA (1)...(19): siRNA sense strand
gcaaggucaaaguggaaaa

SEQ ID NO: 2272752 - RNA, 19 nt, Homo sapiens
  misc_RNA (1)...(19): siRNA sense strand
uggcggagaaugaggacuu

SEQ ID NO: 2272753 - RNA, 19 nt, Homo sapiens
  misc_RNA (1)...(19): siRNA sense strand
ggcaacaacuacaaggcuu

SEQ ID NO: 2272754 - RNA, 19 nt, Homo sapiens
  misc_RNA (1)...(19): siRNA sense strand
cagcagccacagagcggaa

SEQ ID NO: 2272755 - RNA, 19 nt, Homo sapiens
  misc_RNA (1)...(19): siRNA sense strand
acuacgacuuccaggacau

SEQ ID NO: 2272756 - RNA, 19 nt, Homo sapiens
  misc_RNA (1)...(19): siRNA sense strand
ccggaauggcacaaagguu

SEQ ID NO: 2272757 - RNA, 19 nt, Homo sapiens
  misc_RNA (1)...(19): siRNA sense strand
acauggcaaagaugggaaa

SEQ ID NO: 2272758 - RNA, 19 nt, Homo sapiens
  misc_RNA (1)...(19): siRNA sense strand
ucagggaacuggaagacga

SEQ ID NO: 2272759 - RNA, 19 nt, Homo sapiens
  misc_RNA (1)...(19): siRNA sense strand
ucaaagcuguacauggcaa

SEQ ID NO: 2272760 - RNA, 19 nt, Homo sapiens
  misc_RNA (1)...(19): siRNA sense strand
caaagcuguacauggcaaa

SEQ ID NO: 2272761 - RNA, 19 nt, Homo sapiens
  misc_RNA (1)...(19): siRNA sense strand
gguacaaacugugggugga

SEQ ID NO: 2272762 - RNA, 19 nt, Homo sapiens
  misc_RNA (1)...(19): siRNA sense strand
cggaauggcacaaagguug

SEQ ID NO: 2272763 - RNA, 19 nt, Homo sapiens
  misc_RNA (1)...(19): siRNA sense strand
agguggaacaggcagaauu

SEQ ID NO: 2272764 - RNA, 19 nt, Homo sapiens
  misc_RNA (1)...(19): siRNA sense strand
ggacaucgaucucagggaa

SEQ ID NO: 2272765 - RNA, 19 nt, Homo sapiens
  misc_RNA (1)...(19): siRNA sense strand
ccgaacuagucaucagcaa

SEQ ID NO: 2272766 - RNA, 19 nt, Homo sapiens
  misc_RNA (1)...(19): siRNA sense strand
gggaacaucagguggagga

SEQ ID NO: 2272767 - RNA, 19 nt, Homo sapiens
  misc_RNA (1)...(19): siRNA sense strand
gggaacuggaagacgaaca

SEQ ID NO: 2272768 - RNA, 19 nt, Homo sapiens
  misc_RNA (1)...(19): siRNA sense strand
gcaaggucaaaguggaaaa

SEQ ID NO: 2272769 - RNA, 19 nt, Homo sapiens
  misc_RNA (1)...(19): siRNA sense strand
uggcggagaaugaggacuu

SEQ ID NO: 2272770 - RNA, 19 nt, Homo sapiens
  misc_RNA (1)...(19): siRNA sense strand
ggcaacaacuacaaggcuu

SEQ ID NO: 2272771 - RNA, 19 nt, Homo sapiens
  misc_RNA (1)...(19): siRNA sense strand
cagcagccacagagcggaa

SEQ ID NO: 2272772 - RNA, 19 nt, Homo sapiens
  misc_RNA (1)...(19): siRNA sense strand
acuacgacuuccaggacau

SEQ ID NO: 2272773 - RNA, 19 nt, Homo sapiens
  misc_RNA (1)...(19): siRNA sense strand
ccggaauggcacaaagguu

SEQ ID NO: 2272774 - RNA, 19 nt, Homo sapiens
  misc_RNA (1)...(19): siRNA sense strand
acauggcaaagaugggaaa

SEQ ID NO: 2272775 - RNA, 19 nt, Homo sapiens
  misc_RNA (1)...(19): siRNA sense strand
ucagggaacuggaagacga

SEQ ID NO: 2272776 - RNA, 19 nt, Homo sapiens
  misc_RNA (1)...(19): siRNA sense strand
ucaaagcuguacauggcaa

SEQ ID NO: 2272777 - RNA, 19 nt, Homo sapiens
  misc_RNA (1)...(19): siRNA sense strand
caaagcuguacauggcaaa

SEQ ID NO: 2272778 - RNA, 19 nt, Homo sapiens
  misc_RNA (1)...(19): siRNA sense strand
gguacaaacugugggugga

SEQ ID NO: 2272779 - RNA, 19 nt, Homo sapiens
  misc_RNA (1)...(19): siRNA sense strand
cggaauggcacaaagguug

SEQ ID NO: 2272780 - RNA, 19 nt, Homo sapiens
  misc_RNA (1)...(19): siRNA sense strand
agguggaacaggcagaauu

SEQ ID NO: 2272781 - RNA, 19 nt, Homo sapiens
  misc_RNA (1)...(19): siRNA sense strand
gcuuaugaaaggagugcaa

SEQ ID NO: 2272782 - RNA, 19 nt, Homo sapiens
  misc_RNA (1)...(19): siRNA sense strand
agaagaaauaggagccaau

SEQ ID NO: 2272783 - RNA, 19 nt, Homo sapiens
  misc_RNA (1)...(19): siRNA sense strand
cagaagaaauaggagccaa

SEQ ID NO: 2272784 - RNA, 19 nt, Homo sapiens
  misc_RNA (1)...(19): siRNA sense strand
gcgaccagaucaaggagga

SEQ ID NO: 2272785 - RNA, 19 nt, Homo sapiens
  misc_RNA (1)...(19): siRNA sense strand
ucuuuggauuaaugggcaa

SEQ ID NO: 2272786 - RNA, 19 nt, Homo sapiens
  misc_RNA (1)...(19): siRNA sense strand
cugaauuacugguccgacu

SEQ ID NO: 2272787 - RNA, 19 nt, Homo sapiens
  misc_RNA (1)...(19): siRNA sense strand
ccacucagcuguuugcaga

SEQ ID NO: 2272788 - RNA, 19 nt, Homo sapiens
  misc_RNA (1)...(19): siRNA sense strand
gcuuaugaaaggagugcaa

SEQ ID NO: 2272789 - RNA, 19 nt, Homo sapiens
  misc_RNA (1)...(19): siRNA sense strand
agaagaaauaggagccaau

SEQ ID NO: 2272790 - RNA, 19 nt, Homo sapiens
  misc_RNA (1)...(19): siRNA sense strand
cagaagaaauaggagccaa

SEQ ID NO: 2272791 - RNA, 19 nt, Homo sapiens
  misc_RNA (1)...(19): siRNA sense strand
gcgaccagaucaaggagga

SEQ ID NO: 2272792 - RNA, 19 nt, Homo sapiens
  misc_RNA (1)...(19): siRNA sense strand
ucuuuggauuaaugggcaa

SEQ ID NO: 2272793 - RNA, 19 nt, Homo sapiens
  misc_RNA (1)...(19): siRNA sense strand
cugaauuacugguccgacu

SEQ ID NO: 2272794 - RNA, 19 nt, Homo sapiens
  misc_RNA (1)...(19): siRNA sense strand
ccacucagcuguuugcaga

SEQ ID NO: 2272795 - RNA, 19 nt, Homo sapiens
  misc_RNA (1)...(19): siRNA sense strand
gcuuaugaaaggagugcaa

SEQ ID NO: 2272796 - RNA, 19 nt, Homo sapiens
  misc_RNA (1)...(19): siRNA sense strand
agaagaaauaggagccaau

SEQ ID NO: 2272797 - RNA, 19 nt, Homo sapiens
  misc_RNA (1)...(19): siRNA sense strand
cagaagaaauaggagccaa

SEQ ID NO: 2272798 - RNA, 19 nt, Homo sapiens
  misc_RNA (1)...(19): siRNA sense strand
gcgaccagaucaaggagga

SEQ ID NO: 2272799 - RNA, 19 nt, Homo sapiens
  misc_RNA (1)...(19): siRNA sense strand
ucuuuggauuaaugggcaa

SEQ ID NO: 2272800 - RNA, 19 nt, Homo sapiens
  misc_RNA (1)...(19): siRNA sense strand
cugaauuacugguccgacu

SEQ ID NO: 2272801 - RNA, 19 nt, Homo sapiens
  misc_RNA (1)...(19): siRNA sense strand
ccacucagcuguuugcaga

SEQ ID NO: 2272802 - RNA, 19 nt, Homo sapiens
  misc_RNA (1)...(19): siRNA sense strand
gcuuaugaaaggagugcaa

SEQ ID NO: 2272803 - RNA, 19 nt, Homo sapiens
  misc_RNA (1)...(19): siRNA sense strand
agaagaaauaggagccaau

SEQ ID NO: 2272804 - RNA, 19 nt, Homo sapiens
  misc_RNA (1)...(19): siRNA sense strand
cagaagaaauaggagccaa

SEQ ID NO: 2272805 - RNA, 19 nt, Homo sapiens
  misc_RNA (1)...(19): siRNA sense strand
gcgaccagaucaaggagga

SEQ ID NO: 2272806 - RNA, 19 nt, Homo sapiens
  misc_RNA (1)...(19): siRNA sense strand
ucuuuggauuaaugggcaa

SEQ ID NO: 2272807 - RNA, 19 nt, Homo sapiens
  misc_RNA (1)...(19): siRNA sense strand
cugaauuacugguccgacu

SEQ ID NO: 2272808 - RNA, 19 nt, Homo sapiens
  misc_RNA (1)...(19): siRNA sense strand
ccacucagcuguuugcaga

SEQ ID NO: 2272809 - RNA, 19 nt, Homo sapiens
  misc_RNA (1)...(19): siRNA sense strand
agugaaucuugguuguaaa

SEQ ID NO: 2272810 - RNA, 19 nt, Homo sapiens
  misc_RNA (1)...(19): siRNA sense strand
aagucagagcagaaauuua

SEQ ID NO: 2272811 - RNA, 19 nt, Homo sapiens
  misc_RNA (1)...(19): siRNA sense strand
cuauaagguuagaaggccu

SEQ ID NO: 2272812 - RNA, 19 nt, Homo sapiens
  misc_RNA (1)...(19): siRNA sense strand
uggaagagcaacaaaggca

SEQ ID NO: 2272813 - RNA, 19 nt, Homo sapiens
  misc_RNA (1)...(19): siRNA sense strand
caugaggauaagagagcca

SEQ ID NO: 2272814 - RNA, 19 nt, Homo sapiens
  misc_RNA (1)...(19): siRNA sense strand
auuuaguaguuaugagcca

SEQ ID NO: 2272815 - RNA, 19 nt, Homo sapiens
  misc_RNA (1)...(19): siRNA sense strand
cugguuuaaucuacagaau

SEQ ID NO: 2272816 - RNA, 19 nt, Homo sapiens
  misc_RNA (1)...(19): siRNA sense strand
gagcagaaauuuaugaagc

SEQ ID NO: 2272817 - RNA, 19 nt, Homo sapiens
  misc_RNA (1)...(19): siRNA sense strand
gcaaaauauuguauccaca

SEQ ID NO: 2272818 - RNA, 19 nt, Homo sapiens
  misc_RNA (1)...(19): siRNA sense strand
uuguacagaaguuggguuu

SEQ ID NO: 2272819 - RNA, 19 nt, Homo sapiens
  misc_RNA (1)...(19): siRNA sense strand
cugcgguaaucaugaggau

SEQ ID NO: 2272820 - RNA, 19 nt, Homo sapiens
  misc_RNA (1)...(19): siRNA sense strand
agcagaaauuuaugaagca

SEQ ID NO: 2272821 - RNA, 19 nt, Homo sapiens
  misc_RNA (1)...(19): siRNA sense strand
agaggagagaugagagaaa

SEQ ID NO: 2272822 - RNA, 19 nt, Homo sapiens
  misc_RNA (1)...(19): siRNA sense strand
caguaaauagcuugcgaaa

SEQ ID NO: 2272823 - RNA, 19 nt, Homo sapiens
  misc_RNA (1)...(19): siRNA sense strand
agaaauuacccaaggugaa

SEQ ID NO: 2272824 - RNA, 19 nt, Homo sapiens
  misc_RNA (1)...(19): siRNA sense strand
caagaaaccuggaaagcca

SEQ ID NO: 2272825 - RNA, 19 nt, Homo sapiens
  misc_RNA (1)...(19): siRNA sense strand
cagaagaaacauaggaaac

SEQ ID NO: 2272826 - RNA, 19 nt, Homo sapiens
  misc_RNA (1)...(19): siRNA sense strand
uguggugagcagagagaaa

SEQ ID NO: 2272827 - RNA, 19 nt, Homo sapiens
  misc_RNA (1)...(19): siRNA sense strand
ggucaugagaggagagaug

SEQ ID NO: 2272828 - RNA, 19 nt, Homo sapiens
  misc_RNA (1)...(19): siRNA sense strand
caaugauggccaagacaau

SEQ ID NO: 2272829 - RNA, 19 nt, Homo sapiens
  misc_RNA (1)...(19): siRNA sense strand
cugagaaaaucaagaucaa

SEQ ID NO: 2272830 - RNA, 19 nt, Homo sapiens
  misc_RNA (1)...(19): siRNA sense strand
cagauauggaggaugaauu

SEQ ID NO: 2272831 - RNA, 19 nt, Homo sapiens
  misc_RNA (1)...(19): siRNA sense strand
aagaagaagaagcuggauu

SEQ ID NO: 2272832 - RNA, 19 nt, Homo sapiens
  misc_RNA (1)...(19): siRNA sense strand
cuaaaguugaggagacaga

SEQ ID NO: 2272833 - RNA, 19 nt, Homo sapiens
  misc_RNA (1)...(19): siRNA sense strand
ccuuccagccaaagcgaaa

SEQ ID NO: 2272834 - RNA, 19 nt, Homo sapiens
  misc_RNA (1)...(19): siRNA sense strand
aggagagaugagagaaaga

SEQ ID NO: 2272835 - RNA, 19 nt, Homo sapiens
  misc_RNA (1)...(19): siRNA sense strand
gcuguaucgcauagaggaa

SEQ ID NO: 2272836 - RNA, 19 nt, Homo sapiens
  misc_RNA (1)...(19): siRNA sense strand
gagaagagcaauucccgaa

SEQ ID NO: 2272837 - RNA, 19 nt, Homo sapiens
  misc_RNA (1)...(19): siRNA sense strand
auuccaagaugcaggugua

SEQ ID NO: 2272838 - RNA, 19 nt, Homo sapiens
  misc_RNA (1)...(19): siRNA sense strand
ggaacgaaaugcugagccu

SEQ ID NO: 2272839 - RNA, 19 nt, Homo sapiens
  misc_RNA (1)...(19): siRNA sense strand
agaaggaggaggagaugga

SEQ ID NO: 2272840 - RNA, 19 nt, Homo sapiens
  misc_RNA (1)...(19): siRNA sense strand
ccguggaugccaagaguga

SEQ ID NO: 2272841 - RNA, 19 nt, Homo sapiens
  misc_RNA (1)...(19): siRNA sense strand
ggaagaagaagaagcugga

SEQ ID NO: 2272842 - RNA, 19 nt, Homo sapiens
  misc_RNA (1)...(19): siRNA sense strand
gccuauuacaguagacauu

SEQ ID NO: 2272843 - RNA, 19 nt, Homo sapiens
  misc_RNA (1)...(19): siRNA sense strand
ugagaggagagaugagaga

SEQ ID NO: 2272844 - RNA, 19 nt, Homo sapiens
  misc_RNA (1)...(19): siRNA sense strand
acuuggagauaaaggacuu

SEQ ID NO: 2272845 - RNA, 19 nt, Homo sapiens
  misc_RNA (1)...(19): siRNA sense strand
cuaccaagaaaccuggaaa

SEQ ID NO: 2272846 - RNA, 19 nt, Homo sapiens
  misc_RNA (1)...(19): siRNA sense strand
gcucgagagaccucacaaa

SEQ ID NO: 2272847 - RNA, 19 nt, Homo sapiens
  misc_RNA (1)...(19): siRNA sense strand
cagcuuugacacaggaaaa

SEQ ID NO: 2272848 - RNA, 19 nt, Homo sapiens
  misc_RNA (1)...(19): siRNA sense strand
aaagacuccagaagggaaa

SEQ ID NO: 2272849 - RNA, 19 nt, Homo sapiens
  misc_RNA (1)...(19): siRNA sense strand
cagaaauuacccaagguga

SEQ ID NO: 2272850 - RNA, 19 nt, Homo sapiens
  misc_RNA (1)...(19): siRNA sense strand
ggcagaagaaacauaggaa

SEQ ID NO: 2272851 - RNA, 19 nt, Homo sapiens
  misc_RNA (1)...(19): siRNA sense strand
ggagacugggguugggaaa

SEQ ID NO: 2272852 - RNA, 19 nt, Homo sapiens
  misc_RNA (1)...(19): siRNA sense strand
cccuaaaguugaggagaca

SEQ ID NO: 2272853 - RNA, 19 nt, Homo sapiens
  misc_RNA (1)...(19): siRNA sense strand
aaaguugaggagacagaua

SEQ ID NO: 2272854 - RNA, 19 nt, Homo sapiens
  misc_RNA (1)...(19): siRNA sense strand
cucuaaaagcacugguaaa

SEQ ID NO: 2272855 - RNA, 19 nt, Homo sapiens
  misc_RNA (1)...(19): siRNA sense strand
aggacuuugagaagagcaa

SEQ ID NO: 2272856 - RNA, 19 nt, Homo sapiens
  misc_RNA (1)...(19): siRNA sense strand
ggauuuacugggcgcagaa

SEQ ID NO: 2272857 - RNA, 19 nt, Homo sapiens
  misc_RNA (1)...(19): siRNA sense strand
ugcagaaggaggaggagau

SEQ ID NO: 2272858 - RNA, 19 nt, Homo sapiens
  misc_RNA (1)...(19): siRNA sense strand
gggacaaugcaagggagaa

SEQ ID NO: 2272859 - RNA, 19 nt, Homo sapiens
  misc_RNA (1)...(19): siRNA sense strand
caauaagcccaaaggccga

SEQ ID NO: 2272860 - RNA, 19 nt, Homo sapiens
  misc_RNA (1)...(19): siRNA sense strand
ccaaagaggagaaccgaag

SEQ ID NO: 2272861 - RNA, 19 nt, Homo sapiens
  misc_RNA (1)...(19): siRNA sense strand
agucguggcgagagaugua

SEQ ID NO: 2272862 - RNA, 19 nt, Homo sapiens
  misc_RNA (1)...(19): siRNA sense strand
gccugaagaagaaguguuu

SEQ ID NO: 2272863 - RNA, 19 nt, Homo sapiens
  misc_RNA (1)...(19): siRNA sense strand
ucuaaaagcacugguaaaa

SEQ ID NO: 2272864 - RNA, 19 nt, Homo sapiens
  misc_RNA (1)...(19): siRNA sense strand
accgagacuuuaaggaaga

SEQ ID NO: 2272865 - RNA, 19 nt, Homo sapiens
  misc_RNA (1)...(19): siRNA sense strand
guccggaggaggcaggaaa

SEQ ID NO: 2272866 - RNA, 19 nt, Homo sapiens
  misc_RNA (1)...(19): siRNA sense strand
acaaagugucucacgguca

SEQ ID NO: 2272867 - RNA, 19 nt, Homo sapiens
  misc_RNA (1)...(19): siRNA sense strand
gucaaaacaaggagcacaa

SEQ ID NO: 2272868 - RNA, 19 nt, Homo sapiens
  misc_RNA (1)...(19): siRNA sense strand
ggcuacgaguacuaacaaa

SEQ ID NO: 2272869 - RNA, 19 nt, Homo sapiens
  misc_RNA (1)...(19): siRNA sense strand
acgaguacuaacaaagaau

SEQ ID NO: 2272870 - RNA, 19 nt, Homo sapiens
  misc_RNA (1)...(19): siRNA sense strand
cccaaaggccgacaagcaa

SEQ ID NO: 2272871 - RNA, 19 nt, Homo sapiens
  misc_RNA (1)...(19): siRNA sense strand
augcugagccugaugaaca

SEQ ID NO: 2272872 - RNA, 19 nt, Homo sapiens
  misc_RNA (1)...(19): siRNA sense strand
aagggaaagucaaaacuaa

SEQ ID NO: 2272873 - RNA, 19 nt, Homo sapiens
  misc_RNA (1)...(19): siRNA sense strand
uggagauaaaggacuuaaa

SEQ ID NO: 2272874 - RNA, 19 nt, Homo sapiens
  misc_RNA (1)...(19): siRNA sense strand
cccuaagaagcuauugaaa

SEQ ID NO: 2272875 - RNA, 19 nt, Homo sapiens
  misc_RNA (1)...(19): siRNA sense strand
uaugagucguggcgagaga

SEQ ID NO: 2272876 - RNA, 19 nt, Homo sapiens
  misc_RNA (1)...(19): siRNA sense strand
ggaaaaguuuggaacggga

SEQ ID NO: 2272877 - RNA, 19 nt, Homo sapiens
  misc_RNA (1)...(19): siRNA sense strand
gccaagacaauuaaagcuu

SEQ ID NO: 2272878 - RNA, 19 nt, Homo sapiens
  misc_RNA (1)...(19): siRNA sense strand
augaacaggacuuugagaa

SEQ ID NO: 2272879 - RNA, 19 nt, Homo sapiens
  misc_RNA (1)...(19): siRNA sense strand
cugggaaaggccacagcaa

SEQ ID NO: 2272880 - RNA, 19 nt, Homo sapiens
  misc_RNA (1)...(19): siRNA sense strand
ugggaaaggccacagcaau

SEQ ID NO: 2272881 - RNA, 19 nt, Homo sapiens
  misc_RNA (1)...(19): siRNA sense strand
gagcacaaaucuucccaca

SEQ ID NO: 2272882 - RNA, 19 nt, Homo sapiens
  misc_RNA (1)...(19): siRNA sense strand
gccaagaccuggagggcaa

SEQ ID NO: 2272883 - RNA, 19 nt, Homo sapiens
  misc_RNA (1)...(19): siRNA sense strand
ucuaggaaccagagggaau

SEQ ID NO: 2272884 - RNA, 19 nt, Homo sapiens
  misc_RNA (1)...(19): siRNA sense strand
gcuacaaguuccaggagga

SEQ ID NO: 2272885 - RNA, 19 nt, Homo sapiens
  misc_RNA (1)...(19): siRNA sense strand
gguuggaacucaucgggaa

SEQ ID NO: 2272886 - RNA, 19 nt, Homo sapiens
  misc_RNA (1)...(19): siRNA sense strand
ugaugaaagaggagguaca

SEQ ID NO: 2272887 - RNA, 19 nt, Homo sapiens
  misc_RNA (1)...(19): siRNA sense strand
ccugaacagaagauagaaa

SEQ ID NO: 2272888 - RNA, 19 nt, Homo sapiens
  misc_RNA (1)...(19): siRNA sense strand
cagaagauagaaagggaga

SEQ ID NO: 2272889 - RNA, 19 nt, Homo sapiens
  misc_RNA (1)...(19): siRNA sense strand
gguacaacaucuuggggaa

SEQ ID NO: 2272890 - RNA, 19 nt, Homo sapiens
  misc_RNA (1)...(19): siRNA sense strand
agauagaaagggagaagga

SEQ ID NO: 2272891 - RNA, 19 nt, Homo sapiens
  misc_RNA (1)...(19): siRNA sense strand
aaggagaggcggauggcua

SEQ ID NO: 2272892 - RNA, 19 nt, Homo sapiens
  misc_RNA (1)...(19): siRNA sense strand
auagaaagggagaaggaga

SEQ ID NO: 2272893 - RNA, 19 nt, Homo sapiens
  misc_RNA (1)...(19): siRNA sense strand
agagaagggaagaagaaaa

SEQ ID NO: 2272894 - RNA, 19 nt, Homo sapiens
  misc_RNA (1)...(19): siRNA sense strand
accuguuaauagugggaaa

SEQ ID NO: 2272895 - RNA, 19 nt, Homo sapiens
  misc_RNA (1)...(19): siRNA sense strand
cuugaaugacagucgauua

SEQ ID NO: 2272896 - RNA, 19 nt, Homo sapiens
  misc_RNA (1)...(19): siRNA sense strand
ccgacaaggagcugagcga

SEQ ID NO: 2272897 - RNA, 19 nt, Homo sapiens
  misc_RNA (1)...(19): siRNA sense strand
gguuucaucuagaggcaga

SEQ ID NO: 2272898 - RNA, 19 nt, Homo sapiens
  misc_RNA (1)...(19): siRNA sense strand
acaugaagucagaugauga

SEQ ID NO: 2272899 - RNA, 19 nt, Homo sapiens
  misc_RNA (1)...(19): siRNA sense strand
aggagaggcggauggcuaa

SEQ ID NO: 2272900 - RNA, 19 nt, Homo sapiens
  misc_RNA (1)...(19): siRNA sense strand
gguaccagucaguggccaa

SEQ ID NO: 2272901 - RNA, 19 nt, Homo sapiens
  misc_RNA (1)...(19): siRNA sense strand
ucaucuagaggcagaacaa

SEQ ID NO: 2272902 - RNA, 19 nt, Homo sapiens
  misc_RNA (1)...(19): siRNA sense strand
cagucaauucaguggauca

SEQ ID NO: 2272903 - RNA, 19 nt, Homo sapiens
  misc_RNA (1)...(19): siRNA sense strand
uugcaaagucagucuggaa

SEQ ID NO: 2272904 - RNA, 19 nt, Homo sapiens
  misc_RNA (1)...(19): siRNA sense strand
cagaacaagcaguacuaau

SEQ ID NO: 2272905 - RNA, 19 nt, Homo sapiens
  misc_RNA (1)...(19): siRNA sense strand
cagcuaucuucuucaggaa

SEQ ID NO: 2272906 - RNA, 19 nt, Homo sapiens
  misc_RNA (1)...(19): siRNA sense strand
auucaguggaucagguauu

SEQ ID NO: 2272907 - RNA, 19 nt, Homo sapiens
  misc_RNA (1)...(19): siRNA sense strand
guuuagacagacuggauga

SEQ ID NO: 2272908 - RNA, 19 nt, Homo sapiens
  misc_RNA (1)...(19): siRNA sense strand
agguauugaugaaagagga

SEQ ID NO: 2272909 - RNA, 19 nt, Homo sapiens
  misc_RNA (1)...(19): siRNA sense strand
gcuaacaaugccagagaac

SEQ ID NO: 2272910 - RNA, 19 nt, Homo sapiens
  misc_RNA (1)...(19): siRNA sense strand
gcuaucuucuucaggaaaa

SEQ ID NO: 2272911 - RNA, 19 nt, Homo sapiens
  misc_RNA (1)...(19): siRNA sense strand
caggugaugcacuuggaaa

SEQ ID NO: 2272912 - RNA, 19 nt, Homo sapiens
  misc_RNA (1)...(19): siRNA sense strand
guacuaaugaagaugagga

SEQ ID NO: 2272913 - RNA, 19 nt, Homo sapiens
  misc_RNA (1)...(19): siRNA sense strand
aagagaagggaagaagaaa

SEQ ID NO: 2272914 - RNA, 19 nt, Homo sapiens
  misc_RNA (1)...(19): siRNA sense strand
gggaaaacuagaccaacua

SEQ ID NO: 2272915 - RNA, 19 nt, Homo sapiens
  misc_RNA (1)...(19): siRNA sense strand
ccuuagucuagaacagcaa

SEQ ID NO: 2272916 - RNA, 19 nt, Homo sapiens
  misc_RNA (1)...(19): siRNA sense strand
cugucagucucaauggcaa

SEQ ID NO: 2272917 - RNA, 19 nt, Homo sapiens
  misc_RNA (1)...(19): siRNA sense strand
agggagaaggagaggcgga

SEQ ID NO: 2272918 - RNA, 19 nt, Homo sapiens
  misc_RNA (1)...(19): siRNA sense strand
gcgggauauuaaugaagca

SEQ ID NO: 2272919 - RNA, 19 nt, Homo sapiens
  misc_RNA (1)...(19): siRNA sense strand
agcaagucagagagaggaa

SEQ ID NO: 2272920 - RNA, 19 nt, Homo sapiens
  misc_RNA (1)...(19): siRNA sense strand
gaagauucaaagaaggaaa

SEQ ID NO: 2272921 - RNA, 19 nt, Homo sapiens
  misc_RNA (1)...(19): siRNA sense strand
cauagaggaaagagacaua

SEQ ID NO: 2272922 - RNA, 19 nt, Homo sapiens
  misc_RNA (1)...(19): siRNA sense strand
gugaagaaagucaggaaga

SEQ ID NO: 2272923 - RNA, 19 nt, Homo sapiens
  misc_RNA (1)...(19): siRNA sense strand
gccuaaagcucuuccgcaa

SEQ ID NO: 2272924 - RNA, 19 nt, Homo sapiens
  misc_RNA (1)...(19): siRNA sense strand
cauccaagaaauagaauca

SEQ ID NO: 2272925 - RNA, 19 nt, Homo sapiens
  misc_RNA (1)...(19): siRNA sense strand
gguucaaaucuguagaaga

SEQ ID NO: 2272926 - RNA, 19 nt, Homo sapiens
  misc_RNA (1)...(19): siRNA sense strand
guaugaagagagagagcga

SEQ ID NO: 2272927 - RNA, 19 nt, Homo sapiens
  misc_RNA (1)...(19): siRNA sense strand
acgcaggcaagaugaauua

SEQ ID NO: 2272928 - RNA, 19 nt, Homo sapiens
  misc_RNA (1)...(19): siRNA sense strand
acaaaggauggcugaggaa

SEQ ID NO: 2272929 - RNA, 19 nt, Homo sapiens
  misc_RNA (1)...(19): siRNA sense strand
cuugcaagaacuaggacua

SEQ ID NO: 2272930 - RNA, 19 nt, Homo sapiens
  misc_RNA (1)...(19): siRNA sense strand
aaacaagugaagaaaguca

SEQ ID NO: 2272931 - RNA, 19 nt, Homo sapiens
  misc_RNA (1)...(19): siRNA sense strand
aagaagugcaagaugauuu

SEQ ID NO: 2272932 - RNA, 19 nt, Homo sapiens
  misc_RNA (1)...(19): siRNA sense strand
cgaagaugacccugagagu

SEQ ID NO: 2272933 - RNA, 19 nt, Homo sapiens
  misc_RNA (1)...(19): siRNA sense strand
gaggaaucaauaagcagaa

SEQ ID NO: 2272934 - RNA, 19 nt, Homo sapiens
  misc_RNA (1)...(19): siRNA sense strand
aagaaagucaggaagauga

SEQ ID NO: 2272935 - RNA, 19 nt, Homo sapiens
  misc_RNA (1)...(19): siRNA sense strand
aagugaagaaagucaggaa

SEQ ID NO: 2272936 - RNA, 19 nt, Homo sapiens
  misc_RNA (1)...(19): siRNA sense strand
cagaaaguaaggaugauca

SEQ ID NO: 2272937 - RNA, 19 nt, Homo sapiens
  misc_RNA (1)...(19): siRNA sense strand
uccaaagagugcuguagaa

SEQ ID NO: 2272938 - RNA, 19 nt, Homo sapiens
  misc_RNA (1)...(19): siRNA sense strand
caaagagugcuguagaaaa

SEQ ID NO: 2272939 - RNA, 19 nt, Homo sapiens
  misc_RNA (1)...(19): siRNA sense strand
caaaguuccaagaaagaca

SEQ ID NO: 2272940 - RNA, 19 nt, Homo sapiens
  misc_RNA (1)...(19): siRNA sense strand
ggaaucaauaagcagaaau

SEQ ID NO: 2272941 - RNA, 19 nt, Homo sapiens
  misc_RNA (1)...(19): siRNA sense strand
agaaagucaggaagaugaa

SEQ ID NO: 2272942 - RNA, 19 nt, Homo sapiens
  misc_RNA (1)...(19): siRNA sense strand
uggaagauucaaagaagga

SEQ ID NO: 2272943 - RNA, 19 nt, Homo sapiens
  misc_RNA (1)...(19): siRNA sense strand
aaaucauagaggaaagaga

SEQ ID NO: 2272944 - RNA, 19 nt, Homo sapiens
  misc_RNA (1)...(19): siRNA sense strand
auucaaaguuccaagaaag

SEQ ID NO: 2272945 - RNA, 19 nt, Homo sapiens
  misc_RNA (1)...(19): siRNA sense strand
cagaugacaccuugcaaga

SEQ ID NO: 2272946 - RNA, 19 nt, Homo sapiens
  misc_RNA (1)...(19): siRNA sense strand
gaagaugaaaagcaagaua

SEQ ID NO: 2272947 - RNA, 19 nt, Homo sapiens
  misc_RNA (1)...(19): siRNA sense strand
guccacagaugaagaggau

SEQ ID NO: 2272948 - RNA, 19 nt, Homo sapiens
  misc_RNA (1)...(19): siRNA sense strand
cugcuaaaucguuaccuua

SEQ ID NO: 2272949 - RNA, 19 nt, Homo sapiens
  misc_RNA (1)...(19): siRNA sense strand
ugaagaagugcaagaugau

SEQ ID NO: 2272950 - RNA, 19 nt, Homo sapiens
  misc_RNA (1)...(19): siRNA sense strand
aggaaaguaguucagauaa

SEQ ID NO: 2272951 - RNA, 19 nt, Homo sapiens
  misc_RNA (1)...(19): siRNA sense strand
cagaugaagaggauaaaau

SEQ ID NO: 2272952 - RNA, 19 nt, Homo sapiens
  misc_RNA (1)...(19): siRNA sense strand
ccgccaguaaauuuagaaa

SEQ ID NO: 2272953 - RNA, 19 nt, Homo sapiens
  misc_RNA (1)...(19): siRNA sense strand
ucugguaugaagagagaga

SEQ ID NO: 2272954 - RNA, 19 nt, Homo sapiens
  misc_RNA (1)...(19): siRNA sense strand
agcuaugaccuuuaugaaa

SEQ ID NO: 2272955 - RNA, 19 nt, Homo sapiens
  misc_RNA (1)...(19): siRNA sense strand
aguaaaagcagacaggauu

SEQ ID NO: 2272956 - RNA, 19 nt, Homo sapiens
  misc_RNA (1)...(19): siRNA sense strand
agaagugaauucagggaug

SEQ ID NO: 2272957 - RNA, 19 nt, Homo sapiens
  misc_RNA (1)...(19): siRNA sense strand
cauccagaaccuagagagu

SEQ ID NO: 2272958 - RNA, 19 nt, Homo sapiens
  misc_RNA (1)...(19): siRNA sense strand
cuuuaugaaacgcaggcaa

SEQ ID NO: 2272959 - RNA, 19 nt, Homo sapiens
  misc_RNA (1)...(19): siRNA sense strand
gcagcaugucuaccagaaa

SEQ ID NO: 2272960 - RNA, 19 nt, Homo sapiens
  misc_RNA (1)...(19): siRNA sense strand
gcagaaaugaagaaacaag

SEQ ID NO: 2272961 - RNA, 19 nt, Homo sapiens
  misc_RNA (1)...(19): siRNA sense strand
aacaacagcaaaugaggaa

SEQ ID NO: 2272962 - RNA, 19 nt, Homo sapiens
  misc_RNA (1)...(19): siRNA sense strand
ggauuuuagaagagauuga

SEQ ID NO: 2272963 - RNA, 19 nt, Homo sapiens
  misc_RNA (1)...(19): siRNA sense strand
auugaaucucgaaggacaa

SEQ ID NO: 2272964 - RNA, 19 nt, Homo sapiens
  misc_RNA (1)...(19): siRNA sense strand
aggaaucaauaagcagaaa

SEQ ID NO: 2272965 - RNA, 19 nt, Homo sapiens
  misc_RNA (1)...(19): siRNA sense strand
ucaggaagaugaaaagcaa

SEQ ID NO: 2272966 - RNA, 19 nt, Homo sapiens
  misc_RNA (1)...(19): siRNA sense strand
ggauagcaguguggaagau

SEQ ID NO: 2272967 - RNA, 19 nt, Homo sapiens
  misc_RNA (1)...(19): siRNA sense strand
auucaaagaaggaaaguag

SEQ ID NO: 2272968 - RNA, 19 nt, Homo sapiens
  misc_RNA (1)...(19): siRNA sense strand
auaacacauugcagaguga

SEQ ID NO: 2272969 - RNA, 19 nt, Homo sapiens
  misc_RNA (1)...(19): siRNA sense strand
cagcaugucuaccagaaaa

SEQ ID NO: 2272970 - RNA, 19 nt, Homo sapiens
  misc_RNA (1)...(19): siRNA sense strand
gagugagccugaugaccau

SEQ ID NO: 2272971 - RNA, 19 nt, Homo sapiens
  misc_RNA (1)...(19): siRNA sense strand
gugcauugguggagagcaa

SEQ ID NO: 2272972 - RNA, 19 nt, Homo sapiens
  misc_RNA (1)...(19): siRNA sense strand
aaucaaagcuauucgggaa

SEQ ID NO: 2272973 - RNA, 19 nt, Homo sapiens
  misc_RNA (1)...(19): siRNA sense strand
guguggaaauagugaagaa

SEQ ID NO: 2272974 - RNA, 19 nt, Homo sapiens
  misc_RNA (1)...(19): siRNA sense strand
cacuagaagaagaagauaa

SEQ ID NO: 2272975 - RNA, 19 nt, Homo sapiens
  misc_RNA (1)...(19): siRNA sense strand
augagaaaugggagauuaa

SEQ ID NO: 2272976 - RNA, 19 nt, Homo sapiens
  misc_RNA (1)...(19): siRNA sense strand
guuacugaguucauggaaa

SEQ ID NO: 2272977 - RNA, 19 nt, Homo sapiens
  misc_RNA (1)...(19): siRNA sense strand
gcgcacaauagaugaacua

SEQ ID NO: 2272978 - RNA, 19 nt, Homo sapiens
  misc_RNA (1)...(19): siRNA sense strand
cagauuagagagaggccaa

SEQ ID NO: 2272979 - RNA, 19 nt, Homo sapiens
  misc_RNA (1)...(19): siRNA sense strand
ugguggagagcaagagaua

SEQ ID NO: 2272980 - RNA, 19 nt, Homo sapiens
  misc_RNA (1)...(19): siRNA sense strand
cgggaaagaaaucaaacaa

SEQ ID NO: 2272981 - RNA, 19 nt, Homo sapiens
  misc_RNA (1)...(19): siRNA sense strand
aaaucaaguguguggaaau

SEQ ID NO: 2272982 - RNA, 19 nt, Homo sapiens
  misc_RNA (1)...(19): siRNA sense strand
aggauucagcuaugagaaa

SEQ ID NO: 2272983 - RNA, 19 nt, Homo sapiens
  misc_RNA (1)...(19): siRNA sense strand
aggagaaaccagagggaag

SEQ ID NO: 2272984 - RNA, 19 nt, Homo sapiens
  misc_RNA (1)...(19): siRNA sense strand
aguacaaagucgcaaucaa

SEQ ID NO: 2272985 - RNA, 19 nt, Homo sapiens
  misc_RNA (1)...(19): siRNA sense strand
ccagaaacaaagaagcgaa

SEQ ID NO: 2272986 - RNA, 19 nt, Homo sapiens
  misc_RNA (1)...(19): siRNA sense strand
uaugaaugguauugcagaa

SEQ ID NO: 2272987 - RNA, 19 nt, Homo sapiens
  misc_RNA (1)...(19): siRNA sense strand
ccuccgcagugaagauaaa

SEQ ID NO: 2272988 - RNA, 19 nt, Homo sapiens
  misc_RNA (1)...(19): siRNA sense strand
agauaaagaaggugguuuu

SEQ ID NO: 2272989 - RNA, 19 nt, Homo sapiens
  misc_RNA (1)...(19): siRNA sense strand
ggagaagguucaucggguu

SEQ ID NO: 2272990 - RNA, 19 nt, Homo sapiens
  misc_RNA (1)...(19): siRNA sense strand
aauaugggaaugaaggaua

SEQ ID NO: 2272991 - RNA, 19 nt, Homo sapiens
  misc_RNA (1)...(19): siRNA sense strand
ggaaguuaucaguguugua

SEQ ID NO: 2272992 - RNA, 19 nt, Homo sapiens
  misc_RNA (1)...(19): siRNA sense strand
cccuuaaacuacaaagaga

SEQ ID NO: 2272993 - RNA, 19 nt, Homo sapiens
  misc_RNA (1)...(19): siRNA sense strand
gugcaaugugcgaggagga

SEQ ID NO: 2272994 - RNA, 19 nt, Homo sapiens
  misc_RNA (1)...(19): siRNA sense strand
gaagcaaggcagagcaacu

SEQ ID NO: 2272995 - RNA, 19 nt, Homo sapiens
  misc_RNA (1)...(19): siRNA sense strand
gcuccauuccugagauuau

SEQ ID NO: 2272996 - RNA, 19 nt, Homo sapiens
  misc_RNA (1)...(19): siRNA sense strand
caagagauaaauaugggaa

SEQ ID NO: 2272997 - RNA, 19 nt, Homo sapiens
  misc_RNA (1)...(19): siRNA sense strand
caguuagugugaaagggaa

SEQ ID NO: 2272998 - RNA, 19 nt, Homo sapiens
  misc_RNA (1)...(19): siRNA sense strand
acuaguugaaugugaagaa

SEQ ID NO: 2272999 - RNA, 19 nt, Homo sapiens
  misc_RNA (1)...(19): siRNA sense strand
aguaauuacguaacgggaa

SEQ ID NO: 2273000 - RNA, 19 nt, Homo sapiens
  misc_RNA (1)...(19): siRNA sense strand
ccgcagugaagauaaagaa

SEQ ID NO: 2273001 - RNA, 19 nt, Homo sapiens
  misc_RNA (1)...(19): siRNA sense strand
gagaagguucaucggguuu

SEQ ID NO: 2273002 - RNA, 19 nt, Homo sapiens
  misc_RNA (1)...(19): siRNA sense strand
gcacaauagaugaacuagu

SEQ ID NO: 2273003 - RNA, 19 nt, Homo sapiens
  misc_RNA (1)...(19): siRNA sense strand
ccaagcagcagaaggacau

SEQ ID NO: 2273004 - RNA, 19 nt, Homo sapiens
  misc_RNA (1)...(19): siRNA sense strand
cagugaagauaaagaaggu

SEQ ID NO: 2273005 - RNA, 19 nt, Homo sapiens
  misc_RNA (1)...(19): siRNA sense strand
agacaaggucauuucagua

SEQ ID NO: 2273006 - RNA, 19 nt, Homo sapiens
  misc_RNA (1)...(19): siRNA sense strand
gggauggaguaucuggaga

SEQ ID NO: 2273007 - RNA, 19 nt, Homo sapiens
  misc_RNA (1)...(19): siRNA sense strand
gaguaucuggagagaaaca

SEQ ID NO: 2273008 - RNA, 19 nt, Homo sapiens
  misc_RNA (1)...(19): siRNA sense strand
cuggacagauggaaguuau

SEQ ID NO: 2273009 - RNA, 19 nt, Homo sapiens
  misc_RNA (1)...(19): siRNA sense strand
cuuaaacuacaaagagaga

SEQ ID NO: 2273010 - RNA, 19 nt, Homo sapiens
  misc_RNA (1)...(19): siRNA sense strand
agaaaagaaugaugugcau

SEQ ID NO: 2273011 - RNA, 19 nt, Homo sapiens
  misc_RNA (1)...(19): siRNA sense strand
ucauuucaguagagacgua

SEQ ID NO: 2273012 - RNA, 19 nt, Homo sapiens
  misc_RNA (1)...(19): siRNA sense strand
cguccaacuauguguauga

SEQ ID NO: 2273013 - RNA, 19 nt, Homo sapiens
  misc_RNA (1)...(19): siRNA sense strand
accaauuccacuagaagaa

SEQ ID NO: 2273014 - RNA, 19 nt, Homo sapiens
  misc_RNA (1)...(19): siRNA sense strand
aagaaaucguuguagccau

SEQ ID NO: 2273015 - RNA, 19 nt, Homo sapiens
  misc_RNA (1)...(19): siRNA sense strand
gggucgagcagagaagaaa

SEQ ID NO: 2273016 - RNA, 19 nt, Homo sapiens
  misc_RNA (1)...(19): siRNA sense strand
ggucgagcagagaagaaau

SEQ ID NO: 2273017 - RNA, 19 nt, Homo sapiens
  misc_RNA (1)...(19): siRNA sense strand
aguauuaccuagcugaaaa

SEQ ID NO: 2273018 - RNA, 19 nt, Homo sapiens
  misc_RNA (1)...(19): siRNA sense strand
aggaggacuuuauagaaga

SEQ ID NO: 2273019 - RNA, 19 nt, Homo sapiens
  misc_RNA (1)...(19): siRNA sense strand
ggaugugugugaagggaug

SEQ ID NO: 2273020 - RNA, 19 nt, Homo sapiens
  misc_RNA (1)...(19): siRNA sense strand
gugaagaaguuaaaagaag

SEQ ID NO: 2273021 - RNA, 19 nt, Homo sapiens
  misc_RNA (1)...(19): siRNA sense strand
ccaaagaaguauuaccuag

SEQ ID NO: 2273022 - RNA, 19 nt, Homo sapiens
  misc_RNA (1)...(19): siRNA sense strand
cugagauguuggcaggaga

SEQ ID NO: 2273023 - RNA, 19 nt, Homo sapiens
  misc_RNA (1)...(19): siRNA sense strand
guuuggaggagaagguuca

SEQ ID NO: 2273024 - RNA, 19 nt, Homo sapiens
  misc_RNA (1)...(19): siRNA sense strand
caaugugcgaggaggacuu

SEQ ID NO: 2273025 - RNA, 19 nt, Homo sapiens
  misc_RNA (1)...(19): siRNA sense strand
agaaacagcuucauccaca

SEQ ID NO: 2273026 - RNA, 19 nt, Homo sapiens
  misc_RNA (1)...(19): siRNA sense strand
guaacgggaaagaaaucaa

SEQ ID NO: 2273027 - RNA, 19 nt, Homo sapiens
  misc_RNA (1)...(19): siRNA sense strand
auuaagaggucacagcaga

SEQ ID NO: 2273028 - RNA, 19 nt, Homo sapiens
  misc_RNA (1)...(19): siRNA sense strand
aggaaaaggggaaggaaaa

SEQ ID NO: 2273029 - RNA, 19 nt, Homo sapiens
  misc_RNA (1)...(19): siRNA sense strand
cugaagaagcugauggaga

SEQ ID NO: 2273030 - RNA, 19 nt, Homo sapiens
  misc_RNA (1)...(19): siRNA sense strand
aggaaaagcuggaggagga

SEQ ID NO: 2273031 - RNA, 19 nt, Homo sapiens
  misc_RNA (1)...(19): siRNA sense strand
cuggagaaggagagggaga

SEQ ID NO: 2273032 - RNA, 19 nt, Homo sapiens
  misc_RNA (1)...(19): siRNA sense strand
aaggaaaaggggaaggaaa

SEQ ID NO: 2273033 - RNA, 19 nt, Homo sapiens
  misc_RNA (1)...(19): siRNA sense strand
uguccaaguaugagaccaa

SEQ ID NO: 2273034 - RNA, 19 nt, Homo sapiens
  misc_RNA (1)...(19): siRNA sense strand
ucgauaaggaaaaggggaa

SEQ ID NO: 2273035 - RNA, 19 nt, Homo sapiens
  misc_RNA (1)...(19): siRNA sense strand
gcuaaacggucacgggaug

SEQ ID NO: 2273036 - RNA, 19 nt, Homo sapiens
  misc_RNA (1)...(19): siRNA sense strand
aguacauggaccuggauga

SEQ ID NO: 2273037 - RNA, 19 nt, Homo sapiens
  misc_RNA (1)...(19): siRNA sense strand
augaguuccugcuggagaa

SEQ ID NO: 2273038 - RNA, 19 nt, Homo sapiens
  misc_RNA (1)...(19): siRNA sense strand
gcacaaguuugcugaggag

SEQ ID NO: 2273039 - RNA, 19 nt, Homo sapiens
  misc_RNA (1)...(19): siRNA sense strand
aggaggugggcaagugcaa

SEQ ID NO: 2273040 - RNA, 19 nt, Homo sapiens
  misc_RNA (1)...(19): siRNA sense strand
ccaccuuauaccagcguua

SEQ ID NO: 2273041 - RNA, 19 nt, Homo sapiens
  misc_RNA (1)...(19): siRNA sense strand
cguuaugagaucaagauga

SEQ ID NO: 2273042 - RNA, 19 nt, Homo sapiens
  misc_RNA (1)...(19): siRNA sense strand
aggauggacucuugcacau

SEQ ID NO: 2273043 - RNA, 19 nt, Homo sapiens
  misc_RNA (1)...(19): siRNA sense strand
cacuguuggcugugaggaa

SEQ ID NO: 2273044 - RNA, 19 nt, Homo sapiens
  misc_RNA (1)...(19): siRNA sense strand
guuccaagccuuaggggau

SEQ ID NO: 2273045 - RNA, 19 nt, Homo sapiens
  misc_RNA (1)...(19): siRNA sense strand
caagauguauaaaggguuc

SEQ ID NO: 2273046 - RNA, 19 nt, Homo sapiens
  misc_RNA (1)...(19): siRNA sense strand
ccaagauguauaaaggguu

SEQ ID NO: 2273047 - RNA, 19 nt, Homo sapiens
  misc_RNA (1)...(19): siRNA sense strand
gaaacgacauuuauggcaa

SEQ ID NO: 2273048 - RNA, 19 nt, Homo sapiens
  misc_RNA (1)...(19): siRNA sense strand
aggaaguggacucuggaaa

SEQ ID NO: 2273049 - RNA, 19 nt, Homo sapiens
  misc_RNA (1)...(19): siRNA sense strand
uuggaggaaagaaggaaua

SEQ ID NO: 2273050 - RNA, 19 nt, Homo sapiens
  misc_RNA (1)...(19): siRNA sense strand
aagaagagccugaaccaca

SEQ ID NO: 2273051 - RNA, 19 nt, Homo sapiens
  misc_RNA (1)...(19): siRNA sense strand
augagaucaagcagauaaa

SEQ ID NO: 2273052 - RNA, 19 nt, Homo sapiens
  misc_RNA (1)...(19): siRNA sense strand
agaagaacaucaacgggca

SEQ ID NO: 2273053 - RNA, 19 nt, Homo sapiens
  misc_RNA (1)...(19): siRNA sense strand
gugagaaggaaguggacuc

SEQ ID NO: 2273054 - RNA, 19 nt, Homo sapiens
  misc_RNA (1)...(19): siRNA sense strand
caguaugagaucaagcaga

SEQ ID NO: 2273055 - RNA, 19 nt, Homo sapiens
  misc_RNA (1)...(19): siRNA sense strand
guuggaggaaagaaggaau

SEQ ID NO: 2273056 - RNA, 19 nt, Homo sapiens
  misc_RNA (1)...(19): siRNA sense strand
gggucacagagaagaacau

SEQ ID NO: 2273057 - RNA, 19 nt, Homo sapiens
  misc_RNA (1)...(19): siRNA sense strand
cugaagaagaugaagaaua

SEQ ID NO: 2273058 - RNA, 19 nt, Homo sapiens
  misc_RNA (1)...(19): siRNA sense strand
ggaaacagcuauaugggaa

SEQ ID NO: 2273059 - RNA, 19 nt, Homo sapiens
  misc_RNA (1)...(19): siRNA sense strand
ccgaagaaguuuugagaau

SEQ ID NO: 2273060 - RNA, 19 nt, Homo sapiens
  misc_RNA (1)...(19): siRNA sense strand
aagauuuggccgagggaua

SEQ ID NO: 2273061 - RNA, 19 nt, Homo sapiens
  misc_RNA (1)...(19): siRNA sense strand
guagagaugaagagagaau

SEQ ID NO: 2273062 - RNA, 19 nt, Homo sapiens
  misc_RNA (1)...(19): siRNA sense strand
ccauauuggcucagaagaa

SEQ ID NO: 2273063 - RNA, 19 nt, Homo sapiens
  misc_RNA (1)...(19): siRNA sense strand
gaaagaagcaauucaacaa

SEQ ID NO: 2273064 - RNA, 19 nt, Homo sapiens
  misc_RNA (1)...(19): siRNA sense strand
ggguaaacaacguagauuu

SEQ ID NO: 2273065 - RNA, 19 nt, Homo sapiens
  misc_RNA (1)...(19): siRNA sense strand
agauaaagagaaaggugaa

SEQ ID NO: 2273066 - RNA, 19 nt, Homo sapiens
  misc_RNA (1)...(19): siRNA sense strand
gaggaaaugaugaggcaga

SEQ ID NO: 2273067 - RNA, 19 nt, Homo sapiens
  misc_RNA (1)...(19): siRNA sense strand
aagugaaacugcacauaaa

SEQ ID NO: 2273068 - RNA, 19 nt, Homo sapiens
  misc_RNA (1)...(19): siRNA sense strand
agaccaagaaggauguaaa

SEQ ID NO: 2273069 - RNA, 19 nt, Homo sapiens
  misc_RNA (1)...(19): siRNA sense strand
uggaagaggaugaagauga

SEQ ID NO: 2273070 - RNA, 19 nt, Homo sapiens
  misc_RNA (1)...(19): siRNA sense strand
gcggcuggcugguggaaau

SEQ ID NO: 2273071 - RNA, 19 nt, Homo sapiens
  misc_RNA (1)...(19): siRNA sense strand
gagcacauggugaagguaa

SEQ ID NO: 2273072 - RNA, 19 nt, Homo sapiens
  misc_RNA (1)...(19): siRNA sense strand
ccgaaggaguugagcagga

SEQ ID NO: 2273073 - RNA, 19 nt, Homo sapiens
  misc_RNA (1)...(19): siRNA sense strand
ucccauacguagagaaaca

SEQ ID NO: 2273074 - RNA, 19 nt, Homo sapiens
  misc_RNA (1)...(19): siRNA sense strand
agauaguuaugaugaggaa

SEQ ID NO: 2273075 - RNA, 19 nt, Homo sapiens
  misc_RNA (1)...(19): siRNA sense strand
augcaaagacauugauaga

SEQ ID NO: 2273076 - RNA, 19 nt, Homo sapiens
  misc_RNA (1)...(19): siRNA sense strand
ggucuaaaggcaaauuaaa

SEQ ID NO: 2273077 - RNA, 19 nt, Homo sapiens
  misc_RNA (1)...(19): siRNA sense strand
aaaccgaagaagaggaaga

SEQ ID NO: 2273078 - RNA, 19 nt, Homo sapiens
  misc_RNA (1)...(19): siRNA sense strand
ugacagaugcaaagacauu

SEQ ID NO: 2273079 - RNA, 19 nt, Homo sapiens
  misc_RNA (1)...(19): siRNA sense strand
acaaugagaaugagguuau

SEQ ID NO: 2273080 - RNA, 19 nt, Homo sapiens
  misc_RNA (1)...(19): siRNA sense strand
gcugauguugccagagaaa

SEQ ID NO: 2273081 - RNA, 19 nt, Homo sapiens
  misc_RNA (1)...(19): siRNA sense strand
gaacaggcaccuagagcau

SEQ ID NO: 2273082 - RNA, 19 nt, Homo sapiens
  misc_RNA (1)...(19): siRNA sense strand
gauaaagagaaaggugaaa

SEQ ID NO: 2273083 - RNA, 19 nt, Homo sapiens
  misc_RNA (1)...(19): siRNA sense strand
cugcauacaauaaagcaaa

SEQ ID NO: 2273084 - RNA, 19 nt, Homo sapiens
  misc_RNA (1)...(19): siRNA sense strand
acaauuagaaggaagaaga

SEQ ID NO: 2273085 - RNA, 19 nt, Homo sapiens
  misc_RNA (1)...(19): siRNA sense strand
guuaacagaaggagugaga

SEQ ID NO: 2273086 - RNA, 19 nt, Homo sapiens
  misc_RNA (1)...(19): siRNA sense strand
agagaugaagagagaauuu

SEQ ID NO: 2273087 - RNA, 19 nt, Homo sapiens
  misc_RNA (1)...(19): siRNA sense strand
guggaaaugauguuggaau

SEQ ID NO: 2273088 - RNA, 19 nt, Homo sapiens
  misc_RNA (1)...(19): siRNA sense strand
ugaucaagaacuagaugaa

SEQ ID NO: 2273089 - RNA, 19 nt, Homo sapiens
  misc_RNA (1)...(19): siRNA sense strand
ggccagacaaagagccuaa

SEQ ID NO: 2273090 - RNA, 19 nt, Homo sapiens
  misc_RNA (1)...(19): siRNA sense strand
acuaaggaaaagugggaaa

SEQ ID NO: 2273091 - RNA, 19 nt, Homo sapiens
  misc_RNA (1)...(19): siRNA sense strand
aagagaagaaccagauauu

SEQ ID NO: 2273092 - RNA, 19 nt, Homo sapiens
  misc_RNA (1)...(19): siRNA sense strand
uggauuuggaauugcaaua

SEQ ID NO: 2273093 - RNA, 19 nt, Homo sapiens
  misc_RNA (1)...(19): siRNA sense strand
ccacauacauucuaaggga

SEQ ID NO: 2273094 - RNA, 19 nt, Homo sapiens
  misc_RNA (1)...(19): siRNA sense strand
aaggacagcuacaggaaaa

SEQ ID NO: 2273095 - RNA, 19 nt, Homo sapiens
  misc_RNA (1)...(19): siRNA sense strand
agaaguuacaguugaaaga

SEQ ID NO: 2273096 - RNA, 19 nt, Homo sapiens
  misc_RNA (1)...(19): siRNA sense strand
gcucagaagaagaaggaug

SEQ ID NO: 2273097 - RNA, 19 nt, Homo sapiens
  misc_RNA (1)...(19): siRNA sense strand
caauuagaaggaagaagaa

SEQ ID NO: 2273098 - RNA, 19 nt, Homo sapiens
  misc_RNA (1)...(19): siRNA sense strand
ggaaauuucacaagauagu

SEQ ID NO: 2273099 - RNA, 19 nt, Homo sapiens
  misc_RNA (1)...(19): siRNA sense strand
ccagcaugaaauugguaaa

SEQ ID NO: 2273100 - RNA, 19 nt, Homo sapiens
  misc_RNA (1)...(19): siRNA sense strand
agaaucagauguaggagau

SEQ ID NO: 2273101 - RNA, 19 nt, Homo sapiens
  misc_RNA (1)...(19): siRNA sense strand
ccgaggaaaugaugaggca

SEQ ID NO: 2273102 - RNA, 19 nt, Homo sapiens
  misc_RNA (1)...(19): siRNA sense strand
gcaauauucaagaagguga

SEQ ID NO: 2273103 - RNA, 19 nt, Homo sapiens
  misc_RNA (1)...(19): siRNA sense strand
gauucuaagcaaggaguaa

SEQ ID NO: 2273104 - RNA, 19 nt, Homo sapiens
  misc_RNA (1)...(19): siRNA sense strand
auccauaucccgaggaaau

SEQ ID NO: 2273105 - RNA, 19 nt, Homo sapiens
  misc_RNA (1)...(19): siRNA sense strand
ggauuuaccucuagagcag

SEQ ID NO: 2273106 - RNA, 19 nt, Homo sapiens
  misc_RNA (1)...(19): siRNA sense strand
ccaccaaaccgagaagaua

SEQ ID NO: 2273107 - RNA, 19 nt, Homo sapiens
  misc_RNA (1)...(19): siRNA sense strand
ggggaaacgucaauaguga

SEQ ID NO: 2273108 - RNA, 19 nt, Homo sapiens
  misc_RNA (1)...(19): siRNA sense strand
agauaaagccccaguuaau

SEQ ID NO: 2273109 - RNA, 19 nt, Homo sapiens
  misc_RNA (1)...(19): siRNA sense strand
ggaaaugauguuggaauau

SEQ ID NO: 2273110 - RNA, 19 nt, Homo sapiens
  misc_RNA (1)...(19): siRNA sense strand
aaugaaugaugguugguau

SEQ ID NO: 2273111 - RNA, 19 nt, Homo sapiens
  misc_RNA (1)...(19): siRNA sense strand
cugcauccuuagagaccaa

SEQ ID NO: 2273112 - RNA, 19 nt, Homo sapiens
  misc_RNA (1)...(19): siRNA sense strand
aguuauucuucaaagggaa

SEQ ID NO: 2273113 - RNA, 19 nt, Homo sapiens
  misc_RNA (1)...(19): siRNA sense strand
cagcuguggaagaggauga

SEQ ID NO: 2273114 - RNA, 19 nt, Homo sapiens
  misc_RNA (1)...(19): siRNA sense strand
ccuaaaaccuggcaaaaca

SEQ ID NO: 2273115 - RNA, 19 nt, Homo sapiens
  misc_RNA (1)...(19): siRNA sense strand
uggauuuggauuuggaauu

SEQ ID NO: 2273116 - RNA, 19 nt, Homo sapiens
  misc_RNA (1)...(19): siRNA sense strand
ggagaagaagugaccauau

SEQ ID NO: 2273117 - RNA, 19 nt, Homo sapiens
  misc_RNA (1)...(19): siRNA sense strand
cgaagaaguuuugagaaua

SEQ ID NO: 2273118 - RNA, 19 nt, Homo sapiens
  misc_RNA (1)...(19): siRNA sense strand
gggaaagccuccugaagcu

SEQ ID NO: 2273119 - RNA, 19 nt, Homo sapiens
  misc_RNA (1)...(19): siRNA sense strand
uagaucauuuggcgagaaa

SEQ ID NO: 2273120 - RNA, 19 nt, Homo sapiens
  misc_RNA (1)...(19): siRNA sense strand
agaaggagugagaagauuu

SEQ ID NO: 2273121 - RNA, 19 nt, Homo sapiens
  misc_RNA (1)...(19): siRNA sense strand
cuguaaagcaugcugauga

SEQ ID NO: 2273122 - RNA, 19 nt, Homo sapiens
  misc_RNA (1)...(19): siRNA sense strand
cauuguagaaucagaugua

SEQ ID NO: 2273123 - RNA, 19 nt, Homo sapiens
  misc_RNA (1)...(19): siRNA sense strand
cuaugaagacacagacaca

SEQ ID NO: 2273124 - RNA, 19 nt, Homo sapiens
  misc_RNA (1)...(19): siRNA sense strand
cugaagaagaugaagaaua

SEQ ID NO: 2273125 - RNA, 19 nt, Homo sapiens
  misc_RNA (1)...(19): siRNA sense strand
ggaaacagcuauaugggaa

SEQ ID NO: 2273126 - RNA, 19 nt, Homo sapiens
  misc_RNA (1)...(19): siRNA sense strand
ccgaagaaguuuugagaau

SEQ ID NO: 2273127 - RNA, 19 nt, Homo sapiens
  misc_RNA (1)...(19): siRNA sense strand
aagauuuggccgagggaua

SEQ ID NO: 2273128 - RNA, 19 nt, Homo sapiens
  misc_RNA (1)...(19): siRNA sense strand
guagagaugaagagagaau

SEQ ID NO: 2273129 - RNA, 19 nt, Homo sapiens
  misc_RNA (1)...(19): siRNA sense strand
ccauauuggcucagaagaa

SEQ ID NO: 2273130 - RNA, 19 nt, Homo sapiens
  misc_RNA (1)...(19): siRNA sense strand
gaaagaagcaauucaacaa

SEQ ID NO: 2273131 - RNA, 19 nt, Homo sapiens
  misc_RNA (1)...(19): siRNA sense strand
ggguaaacaacguagauuu

SEQ ID NO: 2273132 - RNA, 19 nt, Homo sapiens
  misc_RNA (1)...(19): siRNA sense strand
agauaaagagaaaggugaa

SEQ ID NO: 2273133 - RNA, 19 nt, Homo sapiens
  misc_RNA (1)...(19): siRNA sense strand
gaggaaaugaugaggcaga

SEQ ID NO: 2273134 - RNA, 19 nt, Homo sapiens
  misc_RNA (1)...(19): siRNA sense strand
aagugaaacugcacauaaa

SEQ ID NO: 2273135 - RNA, 19 nt, Homo sapiens
  misc_RNA (1)...(19): siRNA sense strand
agaccaagaaggauguaaa

SEQ ID NO: 2273136 - RNA, 19 nt, Homo sapiens
  misc_RNA (1)...(19): siRNA sense strand
uggaagaggaugaagauga

SEQ ID NO: 2273137 - RNA, 19 nt, Homo sapiens
  misc_RNA (1)...(19): siRNA sense strand
gcggcuggcugguggaaau

SEQ ID NO: 2273138 - RNA, 19 nt, Homo sapiens
  misc_RNA (1)...(19): siRNA sense strand
gagcacauggugaagguaa

SEQ ID NO: 2273139 - RNA, 19 nt, Homo sapiens
  misc_RNA (1)...(19): siRNA sense strand
ccgaaggaguugagcagga

SEQ ID NO: 2273140 - RNA, 19 nt, Homo sapiens
  misc_RNA (1)...(19): siRNA sense strand
ucccauacguagagaaaca

SEQ ID NO: 2273141 - RNA, 19 nt, Homo sapiens
  misc_RNA (1)...(19): siRNA sense strand
agauaguuaugaugaggaa

SEQ ID NO: 2273142 - RNA, 19 nt, Homo sapiens
  misc_RNA (1)...(19): siRNA sense strand
augcaaagacauugauaga

SEQ ID NO: 2273143 - RNA, 19 nt, Homo sapiens
  misc_RNA (1)...(19): siRNA sense strand
ggucuaaaggcaaauuaaa

SEQ ID NO: 2273144 - RNA, 19 nt, Homo sapiens
  misc_RNA (1)...(19): siRNA sense strand
aaaccgaagaagaggaaga

SEQ ID NO: 2273145 - RNA, 19 nt, Homo sapiens
  misc_RNA (1)...(19): siRNA sense strand
ugacagaugcaaagacauu

SEQ ID NO: 2273146 - RNA, 19 nt, Homo sapiens
  misc_RNA (1)...(19): siRNA sense strand
acaaugagaaugagguuau

SEQ ID NO: 2273147 - RNA, 19 nt, Homo sapiens
  misc_RNA (1)...(19): siRNA sense strand
gcugauguugccagagaaa

SEQ ID NO: 2273148 - RNA, 19 nt, Homo sapiens
  misc_RNA (1)...(19): siRNA sense strand
gaacaggcaccuagagcau

SEQ ID NO: 2273149 - RNA, 19 nt, Homo sapiens
  misc_RNA (1)...(19): siRNA sense strand
gauaaagagaaaggugaaa

SEQ ID NO: 2273150 - RNA, 19 nt, Homo sapiens
  misc_RNA (1)...(19): siRNA sense strand
cugcauacaauaaagcaaa

SEQ ID NO: 2273151 - RNA, 19 nt, Homo sapiens
  misc_RNA (1)...(19): siRNA sense strand
acaauuagaaggaagaaga

SEQ ID NO: 2273152 - RNA, 19 nt, Homo sapiens
  misc_RNA (1)...(19): siRNA sense strand
guuaacagaaggagugaga

SEQ ID NO: 2273153 - RNA, 19 nt, Homo sapiens
  misc_RNA (1)...(19): siRNA sense strand
agagaugaagagagaauuu

SEQ ID NO: 2273154 - RNA, 19 nt, Homo sapiens
  misc_RNA (1)...(19): siRNA sense strand
guggaaaugauguuggaau

SEQ ID NO: 2273155 - RNA, 19 nt, Homo sapiens
  misc_RNA (1)...(19): siRNA sense strand
ugaucaagaacuagaugaa

SEQ ID NO: 2273156 - RNA, 19 nt, Homo sapiens
  misc_RNA (1)...(19): siRNA sense strand
ggccagacaaagagccuaa

SEQ ID NO: 2273157 - RNA, 19 nt, Homo sapiens
  misc_RNA (1)...(19): siRNA sense strand
acuaaggaaaagugggaaa

SEQ ID NO: 2273158 - RNA, 19 nt, Homo sapiens
  misc_RNA (1)...(19): siRNA sense strand
aagagaagaaccagauauu

SEQ ID NO: 2273159 - RNA, 19 nt, Homo sapiens
  misc_RNA (1)...(19): siRNA sense strand
uggauuuggaauugcaaua

SEQ ID NO: 2273160 - RNA, 19 nt, Homo sapiens
  misc_RNA (1)...(19): siRNA sense strand
ccacauacauucuaaggga

SEQ ID NO: 2273161 - RNA, 19 nt, Homo sapiens
  misc_RNA (1)...(19): siRNA sense strand
aaggacagcuacaggaaaa

SEQ ID NO: 2273162 - RNA, 19 nt, Homo sapiens
  misc_RNA (1)...(19): siRNA sense strand
agaaguuacaguugaaaga

SEQ ID NO: 2273163 - RNA, 19 nt, Homo sapiens
  misc_RNA (1)...(19): siRNA sense strand
gcucagaagaagaaggaug

SEQ ID NO: 2273164 - RNA, 19 nt, Homo sapiens
  misc_RNA (1)...(19): siRNA sense strand
caauuagaaggaagaagaa

SEQ ID NO: 2273165 - RNA, 19 nt, Homo sapiens
  misc_RNA (1)...(19): siRNA sense strand
ggaaauuucacaagauagu

SEQ ID NO: 2273166 - RNA, 19 nt, Homo sapiens
  misc_RNA (1)...(19): siRNA sense strand
ccagcaugaaauugguaaa

SEQ ID NO: 2273167 - RNA, 19 nt, Homo sapiens
  misc_RNA (1)...(19): siRNA sense strand
agaaucagauguaggagau

SEQ ID NO: 2273168 - RNA, 19 nt, Homo sapiens
  misc_RNA (1)...(19): siRNA sense strand
ccgaggaaaugaugaggca

SEQ ID NO: 2273169 - RNA, 19 nt, Homo sapiens
  misc_RNA (1)...(19): siRNA sense strand
gcaauauucaagaagguga

SEQ ID NO: 2273170 - RNA, 19 nt, Homo sapiens
  misc_RNA (1)...(19): siRNA sense strand
gauucuaagcaaggaguaa

SEQ ID NO: 2273171 - RNA, 19 nt, Homo sapiens
  misc_RNA (1)...(19): siRNA sense strand
auccauaucccgaggaaau

SEQ ID NO: 2273172 - RNA, 19 nt, Homo sapiens
  misc_RNA (1)...(19): siRNA sense strand
ggauuuaccucuagagcag

SEQ ID NO: 2273173 - RNA, 19 nt, Homo sapiens
  misc_RNA (1)...(19): siRNA sense strand
ccaccaaaccgagaagaua

SEQ ID NO: 2273174 - RNA, 19 nt, Homo sapiens
  misc_RNA (1)...(19): siRNA sense strand
ggggaaacgucaauaguga

SEQ ID NO: 2273175 - RNA, 19 nt, Homo sapiens
  misc_RNA (1)...(19): siRNA sense strand
agauaaagccccaguuaau

SEQ ID NO: 2273176 - RNA, 19 nt, Homo sapiens
  misc_RNA (1)...(19): siRNA sense strand
ggaaaugauguuggaauau

SEQ ID NO: 2273177 - RNA, 19 nt, Homo sapiens
  misc_RNA (1)...(19): siRNA sense strand
aaugaaugaugguugguau

SEQ ID NO: 2273178 - RNA, 19 nt, Homo sapiens
  misc_RNA (1)...(19): siRNA sense strand
cugcauccuuagagaccaa

SEQ ID NO: 2273179 - RNA, 19 nt, Homo sapiens
  misc_RNA (1)...(19): siRNA sense strand
aguuauucuucaaagggaa

SEQ ID NO: 2273180 - RNA, 19 nt, Homo sapiens
  misc_RNA (1)...(19): siRNA sense strand
cagcuguggaagaggauga

SEQ ID NO: 2273181 - RNA, 19 nt, Homo sapiens
  misc_RNA (1)...(19): siRNA sense strand
ccuaaaaccuggcaaaaca

SEQ ID NO: 2273182 - RNA, 19 nt, Homo sapiens
  misc_RNA (1)...(19): siRNA sense strand
uggauuuggauuuggaauu

SEQ ID NO: 2273183 - RNA, 19 nt, Homo sapiens
  misc_RNA (1)...(19): siRNA sense strand
ggagaagaagugaccauau

SEQ ID NO: 2273184 - RNA, 19 nt, Homo sapiens
  misc_RNA (1)...(19): siRNA sense strand
cgaagaaguuuugagaaua

SEQ ID NO: 2273185 - RNA, 19 nt, Homo sapiens
  misc_RNA (1)...(19): siRNA sense strand
gggaaagccuccugaagcu

SEQ ID NO: 2273186 - RNA, 19 nt, Homo sapiens
  misc_RNA (1)...(19): siRNA sense strand
uagaucauuuggcgagaaa

SEQ ID NO: 2273187 - RNA, 19 nt, Homo sapiens
  misc_RNA (1)...(19): siRNA sense strand
agaaggagugagaagauuu

SEQ ID NO: 2273188 - RNA, 19 nt, Homo sapiens
  misc_RNA (1)...(19): siRNA sense strand
cuguaaagcaugcugauga

SEQ ID NO: 2273189 - RNA, 19 nt, Homo sapiens
  misc_RNA (1)...(19): siRNA sense strand
cauuguagaaucagaugua

SEQ ID NO: 2273190 - RNA, 19 nt, Homo sapiens
  misc_RNA (1)...(19): siRNA sense strand
cuaugaagacacagacaca

SEQ ID NO: 2273191 - RNA, 19 nt, Homo sapiens
  misc_RNA (1)...(19): siRNA sense strand
cgaagaaagaagaggaaca

SEQ ID NO: 2273192 - RNA, 19 nt, Homo sapiens
  misc_RNA (1)...(19): siRNA sense strand
auaaagaaggagaaggaaa

SEQ ID NO: 2273193 - RNA, 19 nt, Homo sapiens
  misc_RNA (1)...(19): siRNA sense strand
aagaagaagaggaugguaa

SEQ ID NO: 2273194 - RNA, 19 nt, Homo sapiens
  misc_RNA (1)...(19): siRNA sense strand
ccacagaccgagaggaaaa

SEQ ID NO: 2273195 - RNA, 19 nt, Homo sapiens
  misc_RNA (1)...(19): siRNA sense strand
acacaaagauggaagcuca

SEQ ID NO: 2273196 - RNA, 19 nt, Homo sapiens
  misc_RNA (1)...(19): siRNA sense strand
agaaagaagaggaacagaa

SEQ ID NO: 2273197 - RNA, 19 nt, Homo sapiens
  misc_RNA (1)...(19): siRNA sense strand
gaaucaugcccgaggauau

SEQ ID NO: 2273198 - RNA, 19 nt, Homo sapiens
  misc_RNA (1)...(19): siRNA sense strand
agaagaagaggaugguaaa

SEQ ID NO: 2273199 - RNA, 19 nt, Homo sapiens
  misc_RNA (1)...(19): siRNA sense strand
agaagguaguagagucaaa

SEQ ID NO: 2273200 - RNA, 19 nt, Homo sapiens
  misc_RNA (1)...(19): siRNA sense strand
ugacuaaugaagagaagaa

SEQ ID NO: 2273201 - RNA, 19 nt, Homo sapiens
  misc_RNA (1)...(19): siRNA sense strand
aaauaaagaaggagaagga

SEQ ID NO: 2273202 - RNA, 19 nt, Homo sapiens
  misc_RNA (1)...(19): siRNA sense strand
gaagauaccaagaaggaga

SEQ ID NO: 2273203 - RNA, 19 nt, Homo sapiens
  misc_RNA (1)...(19): siRNA sense strand
cgggaaaaguccaagcaua

SEQ ID NO: 2273204 - RNA, 19 nt, Homo sapiens
  misc_RNA (1)...(19): siRNA sense strand
aaacauaaagacagagaca

SEQ ID NO: 2273205 - RNA, 19 nt, Homo sapiens
  misc_RNA (1)...(19): siRNA sense strand
uaaagaaggagaaggaaaa

SEQ ID NO: 2273206 - RNA, 19 nt, Homo sapiens
  misc_RNA (1)...(19): siRNA sense strand
aaaucaaagaggagaauga

SEQ ID NO: 2273207 - RNA, 19 nt, Homo sapiens
  misc_RNA (1)...(19): siRNA sense strand
auaccaagaaggagaagaa

SEQ ID NO: 2273208 - RNA, 19 nt, Homo sapiens
  misc_RNA (1)...(19): siRNA sense strand
uaguagagucaaagaagaa

SEQ ID NO: 2273209 - RNA, 19 nt, Homo sapiens
  misc_RNA (1)...(19): siRNA sense strand
aaacuaagauugaugccaa

SEQ ID NO: 2273210 - RNA, 19 nt, Homo sapiens
  misc_RNA (1)...(19): siRNA sense strand
cagaaaagcauaaagacaa

SEQ ID NO: 2273211 - RNA, 19 nt, Homo sapiens
  misc_RNA (1)...(19): siRNA sense strand
ggugggaagaagagcgcua

SEQ ID NO: 2273212 - RNA, 19 nt, Homo sapiens
  misc_RNA (1)...(19): siRNA sense strand
agaaggacuggcagaaaua

SEQ ID NO: 2273213 - RNA, 19 nt, Homo sapiens
  misc_RNA (1)...(19): siRNA sense strand
gaggaacagaaguggaaau

SEQ ID NO: 2273214 - RNA, 19 nt, Homo sapiens
  misc_RNA (1)...(19): siRNA sense strand
aagagaaggagaagaccaa

SEQ ID NO: 2273215 - RNA, 19 nt, Homo sapiens
  misc_RNA (1)...(19): siRNA sense strand
ucaaagaggagaaugaaaa

SEQ ID NO: 2273216 - RNA, 19 nt, Homo sapiens
  misc_RNA (1)...(19): siRNA sense strand
gugcuaaggcugaugccaa

SEQ ID NO: 2273217 - RNA, 19 nt, Homo sapiens
  misc_RNA (1)...(19): siRNA sense strand
aaggagaaggaccgggaaa

SEQ ID NO: 2273218 - RNA, 19 nt, Homo sapiens
  misc_RNA (1)...(19): siRNA sense strand
acauaaagacagagacaag

SEQ ID NO: 2273219 - RNA, 19 nt, Homo sapiens
  misc_RNA (1)...(19): siRNA sense strand
agaugaaccugaagaugau

SEQ ID NO: 2273220 - RNA, 19 nt, Homo sapiens
  misc_RNA (1)...(19): siRNA sense strand
agaggaugguaaauugaaa

SEQ ID NO: 2273221 - RNA, 19 nt, Homo sapiens
  misc_RNA (1)...(19): siRNA sense strand
gguaaagucaugaagcuga

SEQ ID NO: 2273222 - RNA, 19 nt, Homo sapiens
  misc_RNA (1)...(19): siRNA sense strand
aggaaaugacuaaugaaga

SEQ ID NO: 2273223 - RNA, 19 nt, Homo sapiens
  misc_RNA (1)...(19): siRNA sense strand
gcaaagacgaagaagguag

SEQ ID NO: 2273224 - RNA, 19 nt, Homo sapiens
  misc_RNA (1)...(19): siRNA sense strand
ggagaagaaaagaaaacua

SEQ ID NO: 2273225 - RNA, 19 nt, Homo sapiens
  misc_RNA (1)...(19): siRNA sense strand
agauaaacacaaagaucga

SEQ ID NO: 2273226 - RNA, 19 nt, Homo sapiens
  misc_RNA (1)...(19): siRNA sense strand
gcauagcaacagugaacau

SEQ ID NO: 2273227 - RNA, 19 nt, Homo sapiens
  misc_RNA (1)...(19): siRNA sense strand
aggagaagaccaaacacaa

SEQ ID NO: 2273228 - RNA, 19 nt, Homo sapiens
  misc_RNA (1)...(19): siRNA sense strand
aggaagagaaacugaaaau

SEQ ID NO: 2273229 - RNA, 19 nt, Homo sapiens
  misc_RNA (1)...(19): siRNA sense strand
aguuggauggucaggaaua

SEQ ID NO: 2273230 - RNA, 19 nt, Homo sapiens
  misc_RNA (1)...(19): siRNA sense strand
acuagaagaagaagaggau

SEQ ID NO: 2273231 - RNA, 19 nt, Homo sapiens
  misc_RNA (1)...(19): siRNA sense strand
augaaaaggaggaaggaga

SEQ ID NO: 2273232 - RNA, 19 nt, Homo sapiens
  misc_RNA (1)...(19): siRNA sense strand
uggaggaacaguugaugaa

SEQ ID NO: 2273233 - RNA, 19 nt, Homo sapiens
  misc_RNA (1)...(19): siRNA sense strand
agccacagaccgagaggaa

SEQ ID NO: 2273234 - RNA, 19 nt, Homo sapiens
  misc_RNA (1)...(19): siRNA sense strand
agaaggagaagaaaagaaa

SEQ ID NO: 2273235 - RNA, 19 nt, Homo sapiens
  misc_RNA (1)...(19): siRNA sense strand
ggugagaaggacuggcaga

SEQ ID NO: 2273236 - RNA, 19 nt, Homo sapiens
  misc_RNA (1)...(19): siRNA sense strand
gcuggaaguucaagccaca

SEQ ID NO: 2273237 - RNA, 19 nt, Homo sapiens
  misc_RNA (1)...(19): siRNA sense strand
gccgaagaaagaagaggaa

SEQ ID NO: 2273238 - RNA, 19 nt, Homo sapiens
  misc_RNA (1)...(19): siRNA sense strand
aagaggaacagaaguggaa

SEQ ID NO: 2273239 - RNA, 19 nt, Homo sapiens
  misc_RNA (1)...(19): siRNA sense strand
ugaaaaucaaagaggagaa

SEQ ID NO: 2273240 - RNA, 19 nt, Homo sapiens
  misc_RNA (1)...(19): siRNA sense strand
cgaagaagguaguagaguc

SEQ ID NO: 2273241 - RNA, 19 nt, Homo sapiens
  misc_RNA (1)...(19): siRNA sense strand
agacgaagaagguaguaga

SEQ ID NO: 2273242 - RNA, 19 nt, Homo sapiens
  misc_RNA (1)...(19): siRNA sense strand
acaaagagaaggagaagac

SEQ ID NO: 2273243 - RNA, 19 nt, Homo sapiens
  misc_RNA (1)...(19): siRNA sense strand
ccuagaacauaaaggucca

SEQ ID NO: 2273244 - RNA, 19 nt, Homo sapiens
  misc_RNA (1)...(19): siRNA sense strand
gcgauguggacaaugauga

SEQ ID NO: 2273245 - RNA, 19 nt, Homo sapiens
  misc_RNA (1)...(19): siRNA sense strand
aggagaaagcuguggagaa

SEQ ID NO: 2273246 - RNA, 19 nt, Homo sapiens
  misc_RNA (1)...(19): siRNA sense strand
ugagaaugcuuaugggcaa

SEQ ID NO: 2273247 - RNA, 19 nt, Homo sapiens
  misc_RNA (1)...(19): siRNA sense strand
aggaaaucauugaaggaga

SEQ ID NO: 2273248 - RNA, 19 nt, Homo sapiens
  misc_RNA (1)...(19): siRNA sense strand
ccguaggggugaagauaaa

SEQ ID NO: 2273249 - RNA, 19 nt, Homo sapiens
  misc_RNA (1)...(19): siRNA sense strand
cgucaagagauaacaacaa

SEQ ID NO: 2273250 - RNA, 19 nt, Homo sapiens
  misc_RNA (1)...(19): siRNA sense strand
caauauggcaagaagguga

SEQ ID NO: 2273251 - RNA, 19 nt, Homo sapiens
  misc_RNA (1)...(19): siRNA sense strand
acaaauugaagcagggaca

SEQ ID NO: 2273252 - RNA, 19 nt, Homo sapiens
  misc_RNA (1)...(19): siRNA sense strand
ccucacaggauuaaggcaa

SEQ ID NO: 2273253 - RNA, 19 nt, Homo sapiens
  misc_RNA (1)...(19): siRNA sense strand
cagaugaagaacagaccaa

SEQ ID NO: 2273254 - RNA, 19 nt, Homo sapiens
  misc_RNA (1)...(19): siRNA sense strand
ggagaauauaauacgguga

SEQ ID NO: 2273255 - RNA, 19 nt, Homo sapiens
  misc_RNA (1)...(19): siRNA sense strand
ggaaagucgaggagacagu

SEQ ID NO: 2273256 - RNA, 19 nt, Homo sapiens
  misc_RNA (1)...(19): siRNA sense strand
gcaagaaggugaugguccu

SEQ ID NO: 2273257 - RNA, 19 nt, Homo sapiens
  misc_RNA (1)...(19): siRNA sense strand
caucauuggagguggcuca

SEQ ID NO: 2273258 - RNA, 19 nt, Homo sapiens
  misc_RNA (1)...(19): siRNA sense strand
caacaaaauuggugaacac

SEQ ID NO: 2273259 - RNA, 19 nt, Homo sapiens
  misc_RNA (1)...(19): siRNA sense strand
gcaacaaauaauaaaggca

SEQ ID NO: 2273260 - RNA, 19 nt, Homo sapiens
  misc_RNA (1)...(19): siRNA sense strand
cauucuucuuagaggauuu

SEQ ID NO: 2273261 - RNA, 19 nt, Homo sapiens
  misc_RNA (1)...(19): siRNA sense strand
aggaagagaugcuugcaca

SEQ ID NO: 2273262 - RNA, 19 nt, Homo sapiens
  misc_RNA (1)...(19): siRNA sense strand
gauggaaagucgaggagac

SEQ ID NO: 2273263 - RNA, 19 nt, Homo sapiens
  misc_RNA (1)...(19): siRNA sense strand
caggaagauugcuggcuca

SEQ ID NO: 2273264 - RNA, 19 nt, Homo sapiens
  misc_RNA (1)...(19): siRNA sense strand
caugauugggacagaauga

SEQ ID NO: 2273265 - RNA, 19 nt, Homo sapiens
  misc_RNA (1)...(19): siRNA sense strand
ucucauugccacuggugaa

SEQ ID NO: 2273266 - RNA, 19 nt, Homo sapiens
  misc_RNA (1)...(19): siRNA sense strand
guauuuacuccuuuggaau

SEQ ID NO: 2273267 - RNA, 19 nt, Homo sapiens
  misc_RNA (1)...(19): siRNA sense strand
cgaaauuauggauggaaag

SEQ ID NO: 2273268 - RNA, 19 nt, Homo sapiens
  misc_RNA (1)...(19): siRNA sense strand
ggcaauaggaagagaugcu

SEQ ID NO: 2273269 - RNA, 19 nt, Homo sapiens
  misc_RNA (1)...(19): siRNA sense strand
cguaccaauuaaaguugaa

SEQ ID NO: 2273270 - RNA, 19 nt, Homo sapiens
  misc_RNA (1)...(19): siRNA sense strand
gaggauuugaccaggacau

SEQ ID NO: 2273271 - RNA, 19 nt, Homo sapiens
  misc_RNA (1)...(19): siRNA sense strand
aggauaagguggagcucac

SEQ ID NO: 2273272 - RNA, 19 nt, Homo sapiens
  misc_RNA (1)...(19): siRNA sense strand
ggggugaagauaaaugaaa

SEQ ID NO: 2273273 - RNA, 19 nt, Homo sapiens
  misc_RNA (1)...(19): siRNA sense strand
guuaagcaugauugggaca

SEQ ID NO: 2273274 - RNA, 19 nt, Homo sapiens
  misc_RNA (1)...(19): siRNA sense strand
gugacaaagaauacugcau

SEQ ID NO: 2273275 - RNA, 19 nt, Homo sapiens
  misc_RNA (1)...(19): siRNA sense strand
ugaggaaaucauugaagga

SEQ ID NO: 2273276 - RNA, 19 nt, Homo sapiens
  misc_RNA (1)...(19): siRNA sense strand
ucaaauguggacugaccaa

SEQ ID NO: 2273277 - RNA, 19 nt, Homo sapiens
  misc_RNA (1)...(19): siRNA sense strand
cgaguagcucugcgggaga

SEQ ID NO: 2273278 - RNA, 19 nt, Homo sapiens
  misc_RNA (1)...(19): siRNA sense strand
agaacauggcaucaaguuu

SEQ ID NO: 2273279 - RNA, 19 nt, Homo sapiens
  misc_RNA (1)...(19): siRNA sense strand
cuaaagacaaugaacgugu

SEQ ID NO: 2273280 - RNA, 19 nt, Homo sapiens
  misc_RNA (1)...(19): siRNA sense strand
aggagaaagcuguggagaa

SEQ ID NO: 2273281 - RNA, 19 nt, Homo sapiens
  misc_RNA (1)...(19): siRNA sense strand
ugagaaugcuuaugggcaa

SEQ ID NO: 2273282 - RNA, 19 nt, Homo sapiens
  misc_RNA (1)...(19): siRNA sense strand
aggaaaucauugaaggaga

SEQ ID NO: 2273283 - RNA, 19 nt, Homo sapiens
  misc_RNA (1)...(19): siRNA sense strand
ccguaggggugaagauaaa

SEQ ID NO: 2273284 - RNA, 19 nt, Homo sapiens
  misc_RNA (1)...(19): siRNA sense strand
cgucaagagauaacaacaa

SEQ ID NO: 2273285 - RNA, 19 nt, Homo sapiens
  misc_RNA (1)...(19): siRNA sense strand
caauauggcaagaagguga

SEQ ID NO: 2273286 - RNA, 19 nt, Homo sapiens
  misc_RNA (1)...(19): siRNA sense strand
acaaauugaagcagggaca

SEQ ID NO: 2273287 - RNA, 19 nt, Homo sapiens
  misc_RNA (1)...(19): siRNA sense strand
ccucacaggauuaaggcaa

SEQ ID NO: 2273288 - RNA, 19 nt, Homo sapiens
  misc_RNA (1)...(19): siRNA sense strand
cagaugaagaacagaccaa

SEQ ID NO: 2273289 - RNA, 19 nt, Homo sapiens
  misc_RNA (1)...(19): siRNA sense strand
ggagaauauaauacgguga

SEQ ID NO: 2273290 - RNA, 19 nt, Homo sapiens
  misc_RNA (1)...(19): siRNA sense strand
ggaaagucgaggagacagu

SEQ ID NO: 2273291 - RNA, 19 nt, Homo sapiens
  misc_RNA (1)...(19): siRNA sense strand
gcaagaaggugaugguccu

SEQ ID NO: 2273292 - RNA, 19 nt, Homo sapiens
  misc_RNA (1)...(19): siRNA sense strand
caucauuggagguggcuca

SEQ ID NO: 2273293 - RNA, 19 nt, Homo sapiens
  misc_RNA (1)...(19): siRNA sense strand
caacaaaauuggugaacac

SEQ ID NO: 2273294 - RNA, 19 nt, Homo sapiens
  misc_RNA (1)...(19): siRNA sense strand
gcaacaaauaauaaaggca

SEQ ID NO: 2273295 - RNA, 19 nt, Homo sapiens
  misc_RNA (1)...(19): siRNA sense strand
cauucuucuuagaggauuu

SEQ ID NO: 2273296 - RNA, 19 nt, Homo sapiens
  misc_RNA (1)...(19): siRNA sense strand
aggaagagaugcuugcaca

SEQ ID NO: 2273297 - RNA, 19 nt, Homo sapiens
  misc_RNA (1)...(19): siRNA sense strand
gauggaaagucgaggagac

SEQ ID NO: 2273298 - RNA, 19 nt, Homo sapiens
  misc_RNA (1)...(19): siRNA sense strand
caggaagauugcuggcuca

SEQ ID NO: 2273299 - RNA, 19 nt, Homo sapiens
  misc_RNA (1)...(19): siRNA sense strand
caugauugggacagaauga

SEQ ID NO: 2273300 - RNA, 19 nt, Homo sapiens
  misc_RNA (1)...(19): siRNA sense strand
ucucauugccacuggugaa

SEQ ID NO: 2273301 - RNA, 19 nt, Homo sapiens
  misc_RNA (1)...(19): siRNA sense strand
guauuuacuccuuuggaau

SEQ ID NO: 2273302 - RNA, 19 nt, Homo sapiens
  misc_RNA (1)...(19): siRNA sense strand
cgaaauuauggauggaaag

SEQ ID NO: 2273303 - RNA, 19 nt, Homo sapiens
  misc_RNA (1)...(19): siRNA sense strand
ggcaauaggaagagaugcu

SEQ ID NO: 2273304 - RNA, 19 nt, Homo sapiens
  misc_RNA (1)...(19): siRNA sense strand
cguaccaauuaaaguugaa

SEQ ID NO: 2273305 - RNA, 19 nt, Homo sapiens
  misc_RNA (1)...(19): siRNA sense strand
gaggauuugaccaggacau

SEQ ID NO: 2273306 - RNA, 19 nt, Homo sapiens
  misc_RNA (1)...(19): siRNA sense strand
aggauaagguggagcucac

SEQ ID NO: 2273307 - RNA, 19 nt, Homo sapiens
  misc_RNA (1)...(19): siRNA sense strand
ggggugaagauaaaugaaa

SEQ ID NO: 2273308 - RNA, 19 nt, Homo sapiens
  misc_RNA (1)...(19): siRNA sense strand
guuaagcaugauugggaca

SEQ ID NO: 2273309 - RNA, 19 nt, Homo sapiens
  misc_RNA (1)...(19): siRNA sense strand
gugacaaagaauacugcau

SEQ ID NO: 2273310 - RNA, 19 nt, Homo sapiens
  misc_RNA (1)...(19): siRNA sense strand
ugaggaaaucauugaagga

SEQ ID NO: 2273311 - RNA, 19 nt, Homo sapiens
  misc_RNA (1)...(19): siRNA sense strand
ucaaauguggacugaccaa

SEQ ID NO: 2273312 - RNA, 19 nt, Homo sapiens
  misc_RNA (1)...(19): siRNA sense strand
cgaguagcucugcgggaga

SEQ ID NO: 2273313 - RNA, 19 nt, Homo sapiens
  misc_RNA (1)...(19): siRNA sense strand
agaacauggcaucaaguuu

SEQ ID NO: 2273314 - RNA, 19 nt, Homo sapiens
  misc_RNA (1)...(19): siRNA sense strand
cuaaagacaaugaacgugu

SEQ ID NO: 2273315 - RNA, 19 nt, Homo sapiens
  misc_RNA (1)...(19): siRNA sense strand
aggagaaagcuguggagaa

SEQ ID NO: 2273316 - RNA, 19 nt, Homo sapiens
  misc_RNA (1)...(19): siRNA sense strand
ugagaaugcuuaugggcaa

SEQ ID NO: 2273317 - RNA, 19 nt, Homo sapiens
  misc_RNA (1)...(19): siRNA sense strand
aggaaaucauugaaggaga

SEQ ID NO: 2273318 - RNA, 19 nt, Homo sapiens
  misc_RNA (1)...(19): siRNA sense strand
ccguaggggugaagauaaa

SEQ ID NO: 2273319 - RNA, 19 nt, Homo sapiens
  misc_RNA (1)...(19): siRNA sense strand
cgucaagagauaacaacaa

SEQ ID NO: 2273320 - RNA, 19 nt, Homo sapiens
  misc_RNA (1)...(19): siRNA sense strand
caauauggcaagaagguga

SEQ ID NO: 2273321 - RNA, 19 nt, Homo sapiens
  misc_RNA (1)...(19): siRNA sense strand
acaaauugaagcagggaca

SEQ ID NO: 2273322 - RNA, 19 nt, Homo sapiens
  misc_RNA (1)...(19): siRNA sense strand
ccucacaggauuaaggcaa

SEQ ID NO: 2273323 - RNA, 19 nt, Homo sapiens
  misc_RNA (1)...(19): siRNA sense strand
cagaugaagaacagaccaa

SEQ ID NO: 2273324 - RNA, 19 nt, Homo sapiens
  misc_RNA (1)...(19): siRNA sense strand
ggagaauauaauacgguga

SEQ ID NO: 2273325 - RNA, 19 nt, Homo sapiens
  misc_RNA (1)...(19): siRNA sense strand
ggaaagucgaggagacagu

SEQ ID NO: 2273326 - RNA, 19 nt, Homo sapiens
  misc_RNA (1)...(19): siRNA sense strand
gcaagaaggugaugguccu

SEQ ID NO: 2273327 - RNA, 19 nt, Homo sapiens
  misc_RNA (1)...(19): siRNA sense strand
caucauuggagguggcuca

SEQ ID NO: 2273328 - RNA, 19 nt, Homo sapiens
  misc_RNA (1)...(19): siRNA sense strand
caacaaaauuggugaacac

SEQ ID NO: 2273329 - RNA, 19 nt, Homo sapiens
  misc_RNA (1)...(19): siRNA sense strand
gcaacaaauaauaaaggca

SEQ ID NO: 2273330 - RNA, 19 nt, Homo sapiens
  misc_RNA (1)...(19): siRNA sense strand
cauucuucuuagaggauuu

SEQ ID NO: 2273331 - RNA, 19 nt, Homo sapiens
  misc_RNA (1)...(19): siRNA sense strand
aggaagagaugcuugcaca

SEQ ID NO: 2273332 - RNA, 19 nt, Homo sapiens
  misc_RNA (1)...(19): siRNA sense strand
gauggaaagucgaggagac

SEQ ID NO: 2273333 - RNA, 19 nt, Homo sapiens
  misc_RNA (1)...(19): siRNA sense strand
caggaagauugcuggcuca

SEQ ID NO: 2273334 - RNA, 19 nt, Homo sapiens
  misc_RNA (1)...(19): siRNA sense strand
caugauugggacagaauga

SEQ ID NO: 2273335 - RNA, 19 nt, Homo sapiens
  misc_RNA (1)...(19): siRNA sense strand
ucucauugccacuggugaa

SEQ ID NO: 2273336 - RNA, 19 nt, Homo sapiens
  misc_RNA (1)...(19): siRNA sense strand
guauuuacuccuuuggaau

SEQ ID NO: 2273337 - RNA, 19 nt, Homo sapiens
  misc_RNA (1)...(19): siRNA sense strand
cgaaauuauggauggaaag

SEQ ID NO: 2273338 - RNA, 19 nt, Homo sapiens
  misc_RNA (1)...(19): siRNA sense strand
ggcaauaggaagagaugcu

SEQ ID NO: 2273339 - RNA, 19 nt, Homo sapiens
  misc_RNA (1)...(19): siRNA sense strand
cguaccaauuaaaguugaa

SEQ ID NO: 2273340 - RNA, 19 nt, Homo sapiens
  misc_RNA (1)...(19): siRNA sense strand
gaggauuugaccaggacau

SEQ ID NO: 2273341 - RNA, 19 nt, Homo sapiens
  misc_RNA (1)...(19): siRNA sense strand
aggauaagguggagcucac

SEQ ID NO: 2273342 - RNA, 19 nt, Homo sapiens
  misc_RNA (1)...(19): siRNA sense strand
ggggugaagauaaaugaaa

SEQ ID NO: 2273343 - RNA, 19 nt, Homo sapiens
  misc_RNA (1)...(19): siRNA sense strand
guuaagcaugauugggaca

SEQ ID NO: 2273344 - RNA, 19 nt, Homo sapiens
  misc_RNA (1)...(19): siRNA sense strand
gugacaaagaauacugcau

SEQ ID NO: 2273345 - RNA, 19 nt, Homo sapiens
  misc_RNA (1)...(19): siRNA sense strand
ugaggaaaucauugaagga

SEQ ID NO: 2273346 - RNA, 19 nt, Homo sapiens
  misc_RNA (1)...(19): siRNA sense strand
ucaaauguggacugaccaa

SEQ ID NO: 2273347 - RNA, 19 nt, Homo sapiens
  misc_RNA (1)...(19): siRNA sense strand
cgaguagcucugcgggaga

SEQ ID NO: 2273348 - RNA, 19 nt, Homo sapiens
  misc_RNA (1)...(19): siRNA sense strand
agaacauggcaucaaguuu

SEQ ID NO: 2273349 - RNA, 19 nt, Homo sapiens
  misc_RNA (1)...(19): siRNA sense strand
cuaaagacaaugaacgugu

SEQ ID NO: 2273350 - RNA, 19 nt, Homo sapiens
  misc_RNA (1)...(19): siRNA sense strand
aggagaaagcuguggagaa

SEQ ID NO: 2273351 - RNA, 19 nt, Homo sapiens
  misc_RNA (1)...(19): siRNA sense strand
ugagaaugcuuaugggcaa

SEQ ID NO: 2273352 - RNA, 19 nt, Homo sapiens
  misc_RNA (1)...(19): siRNA sense strand
aggaaaucauugaaggaga

SEQ ID NO: 2273353 - RNA, 19 nt, Homo sapiens
  misc_RNA (1)...(19): siRNA sense strand
ccguaggggugaagauaaa

SEQ ID NO: 2273354 - RNA, 19 nt, Homo sapiens
  misc_RNA (1)...(19): siRNA sense strand
cgucaagagauaacaacaa

SEQ ID NO: 2273355 - RNA, 19 nt, Homo sapiens
  misc_RNA (1)...(19): siRNA sense strand
caauauggcaagaagguga

SEQ ID NO: 2273356 - RNA, 19 nt, Homo sapiens
  misc_RNA (1)...(19): siRNA sense strand
acaaauugaagcagggaca

SEQ ID NO: 2273357 - RNA, 19 nt, Homo sapiens
  misc_RNA (1)...(19): siRNA sense strand
ccucacaggauuaaggcaa

SEQ ID NO: 2273358 - RNA, 19 nt, Homo sapiens
  misc_RNA (1)...(19): siRNA sense strand
cagaugaagaacagaccaa

SEQ ID NO: 2273359 - RNA, 19 nt, Homo sapiens
  misc_RNA (1)...(19): siRNA sense strand
ggagaauauaauacgguga

SEQ ID NO: 2273360 - RNA, 19 nt, Homo sapiens
  misc_RNA (1)...(19): siRNA sense strand
ggaaagucgaggagacagu

SEQ ID NO: 2273361 - RNA, 19 nt, Homo sapiens
  misc_RNA (1)...(19): siRNA sense strand
gcaagaaggugaugguccu

SEQ ID NO: 2273362 - RNA, 19 nt, Homo sapiens
  misc_RNA (1)...(19): siRNA sense strand
caucauuggagguggcuca

SEQ ID NO: 2273363 - RNA, 19 nt, Homo sapiens
  misc_RNA (1)...(19): siRNA sense strand
caacaaaauuggugaacac

SEQ ID NO: 2273364 - RNA, 19 nt, Homo sapiens
  misc_RNA (1)...(19): siRNA sense strand
gcaacaaauaauaaaggca

SEQ ID NO: 2273365 - RNA, 19 nt, Homo sapiens
  misc_RNA (1)...(19): siRNA sense strand
cauucuucuuagaggauuu

SEQ ID NO: 2273366 - RNA, 19 nt, Homo sapiens
  misc_RNA (1)...(19): siRNA sense strand
aggaagagaugcuugcaca

SEQ ID NO: 2273367 - RNA, 19 nt, Homo sapiens
  misc_RNA (1)...(19): siRNA sense strand
gauggaaagucgaggagac

SEQ ID NO: 2273368 - RNA, 19 nt, Homo sapiens
  misc_RNA (1)...(19): siRNA sense strand
caggaagauugcuggcuca

SEQ ID NO: 2273369 - RNA, 19 nt, Homo sapiens
  misc_RNA (1)...(19): siRNA sense strand
caugauugggacagaauga

SEQ ID NO: 2273370 - RNA, 19 nt, Homo sapiens
  misc_RNA (1)...(19): siRNA sense strand
ucucauugccacuggugaa

SEQ ID NO: 2273371 - RNA, 19 nt, Homo sapiens
  misc_RNA (1)...(19): siRNA sense strand
guauuuacuccuuuggaau

SEQ ID NO: 2273372 - RNA, 19 nt, Homo sapiens
  misc_RNA (1)...(19): siRNA sense strand
cgaaauuauggauggaaag

SEQ ID NO: 2273373 - RNA, 19 nt, Homo sapiens
  misc_RNA (1)...(19): siRNA sense strand
ggcaauaggaagagaugcu

SEQ ID NO: 2273374 - RNA, 19 nt, Homo sapiens
  misc_RNA (1)...(19): siRNA sense strand
cguaccaauuaaaguugaa

SEQ ID NO: 2273375 - RNA, 19 nt, Homo sapiens
  misc_RNA (1)...(19): siRNA sense strand
gaggauuugaccaggacau

SEQ ID NO: 2273376 - RNA, 19 nt, Homo sapiens
  misc_RNA (1)...(19): siRNA sense strand
aggauaagguggagcucac

SEQ ID NO: 2273377 - RNA, 19 nt, Homo sapiens
  misc_RNA (1)...(19): siRNA sense strand
ggggugaagauaaaugaaa

SEQ ID NO: 2273378 - RNA, 19 nt, Homo sapiens
  misc_RNA (1)...(19): siRNA sense strand
guuaagcaugauugggaca

SEQ ID NO: 2273379 - RNA, 19 nt, Homo sapiens
  misc_RNA (1)...(19): siRNA sense strand
gugacaaagaauacugcau

SEQ ID NO: 2273380 - RNA, 19 nt, Homo sapiens
  misc_RNA (1)...(19): siRNA sense strand
ugaggaaaucauugaagga

SEQ ID NO: 2273381 - RNA, 19 nt, Homo sapiens
  misc_RNA (1)...(19): siRNA sense strand
ucaaauguggacugaccaa

SEQ ID NO: 2273382 - RNA, 19 nt, Homo sapiens
  misc_RNA (1)...(19): siRNA sense strand
cgaguagcucugcgggaga

SEQ ID NO: 2273383 - RNA, 19 nt, Homo sapiens
  misc_RNA (1)...(19): siRNA sense strand
agaacauggcaucaaguuu

SEQ ID NO: 2273384 - RNA, 19 nt, Homo sapiens
  misc_RNA (1)...(19): siRNA sense strand
cuaaagacaaugaacgugu

SEQ ID NO: 2273385 - RNA, 19 nt, Homo sapiens
  misc_RNA (1)...(19): siRNA sense strand
cagaaauacaacugcgaca

SEQ ID NO: 2273386 - RNA, 19 nt, Homo sapiens
  misc_RNA (1)...(19): siRNA sense strand
ugagaaugucaaagccaaa

SEQ ID NO: 2273387 - RNA, 19 nt, Homo sapiens
  misc_RNA (1)...(19): siRNA sense strand
gcaaacagcuggaggaugg

SEQ ID NO: 2273388 - RNA, 19 nt, Homo sapiens
  misc_RNA (1)...(19): siRNA sense strand
cagugacaccauugagaau

SEQ ID NO: 2273389 - RNA, 19 nt, Homo sapiens
  misc_RNA (1)...(19): siRNA sense strand
uucaagacaaggaggguau

SEQ ID NO: 2273390 - RNA, 19 nt, Homo sapiens
  misc_RNA (1)...(19): siRNA sense strand
ccgccagcuugcccagaaa

SEQ ID NO: 2273391 - RNA, 19 nt, Homo sapiens
  misc_RNA (1)...(19): siRNA sense strand
aagccaaaauucaagacaa

SEQ ID NO: 2273392 - RNA, 19 nt, Homo sapiens
  misc_RNA (1)...(19): siRNA sense strand
gucccaagaagaaggucaa

SEQ ID NO: 2273393 - RNA, 19 nt, Homo sapiens
  misc_RNA (1)...(19): siRNA sense strand
caggagaacaaacgggaau

SEQ ID NO: 2273394 - RNA, 19 nt, Homo sapiens
  misc_RNA (1)...(19): siRNA sense strand
agcuguaccaggagaacaa

SEQ ID NO: 2273395 - RNA, 19 nt, Homo sapiens
  misc_RNA (1)...(19): siRNA sense strand
aggagaacaaacgggaaua

SEQ ID NO: 2273396 - RNA, 19 nt, Homo sapiens
  misc_RNA (1)...(19): siRNA sense strand
ccaggagaacaaacgggaa

SEQ ID NO: 2273397 - RNA, 19 nt, Homo sapiens
  misc_RNA (1)...(19): siRNA sense strand
gggaauaugaaaagcgugu

SEQ ID NO: 2273398 - RNA, 19 nt, Homo sapiens
  misc_RNA (1)...(19): siRNA sense strand
caggagaacaaacgggaau

SEQ ID NO: 2273399 - RNA, 19 nt, Homo sapiens
  misc_RNA (1)...(19): siRNA sense strand
agcuguaccaggagaacaa

SEQ ID NO: 2273400 - RNA, 19 nt, Homo sapiens
  misc_RNA (1)...(19): siRNA sense strand
aggagaacaaacgggaaua

SEQ ID NO: 2273401 - RNA, 19 nt, Homo sapiens
  misc_RNA (1)...(19): siRNA sense strand
ccaggagaacaaacgggaa

SEQ ID NO: 2273402 - RNA, 19 nt, Homo sapiens
  misc_RNA (1)...(19): siRNA sense strand
gggaauaugaaaagcgugu

SEQ ID NO: 2273403 - RNA, 19 nt, Homo sapiens
  misc_RNA (1)...(19): siRNA sense strand
caggagaacaaacgggaau

SEQ ID NO: 2273404 - RNA, 19 nt, Homo sapiens
  misc_RNA (1)...(19): siRNA sense strand
agcuguaccaggagaacaa

SEQ ID NO: 2273405 - RNA, 19 nt, Homo sapiens
  misc_RNA (1)...(19): siRNA sense strand
aggagaacaaacgggaaua

SEQ ID NO: 2273406 - RNA, 19 nt, Homo sapiens
  misc_RNA (1)...(19): siRNA sense strand
ccaggagaacaaacgggaa

SEQ ID NO: 2273407 - RNA, 19 nt, Homo sapiens
  misc_RNA (1)...(19): siRNA sense strand
gggaauaugaaaagcgugu

SEQ ID NO: 2273408 - RNA, 19 nt, Homo sapiens
  misc_RNA (1)...(19): siRNA sense strand
caggaaaacaaacgagaau

SEQ ID NO: 2273409 - RNA, 19 nt, Homo sapiens
  misc_RNA (1)...(19): siRNA sense strand
acaaacgagaauaugagaa

SEQ ID NO: 2273410 - RNA, 19 nt, Homo sapiens
  misc_RNA (1)...(19): siRNA sense strand
cagcacagcuuuaucagga

SEQ ID NO: 2273411 - RNA, 19 nt, Homo sapiens
  misc_RNA (1)...(19): siRNA sense strand
ugaugguagcauauguuua

SEQ ID NO: 2273412 - RNA, 19 nt, Homo sapiens
  misc_RNA (1)...(19): siRNA sense strand
aggaaaggcuucugaucua

SEQ ID NO: 2273413 - RNA, 19 nt, Homo sapiens
  misc_RNA (1)...(19): siRNA sense strand
cugaagaugacaagaggaa

SEQ ID NO: 2273414 - RNA, 19 nt, Homo sapiens
  misc_RNA (1)...(19): siRNA sense strand
acguagaagaggagggcau

SEQ ID NO: 2273415 - RNA, 19 nt, Homo sapiens
  misc_RNA (1)...(19): siRNA sense strand
gguggaagggcgagaccaa

SEQ ID NO: 2273416 - RNA, 19 nt, Homo sapiens
  misc_RNA (1)...(19): siRNA sense strand
gcaccuucuaccagggaua

SEQ ID NO: 2273417 - RNA, 19 nt, Homo sapiens
  misc_RNA (1)...(19): siRNA sense strand
cgggaggacuucaggcaga

SEQ ID NO: 2273418 - RNA, 19 nt, Homo sapiens
  misc_RNA (1)...(19): siRNA sense strand
ugucaaacaucaagccaga

SEQ ID NO: 2273419 - RNA, 19 nt, Homo sapiens
  misc_RNA (1)...(19): siRNA sense strand
ccaucgaccucaaggacau

SEQ ID NO: 2273420 - RNA, 19 nt, Homo sapiens
  misc_RNA (1)...(19): siRNA sense strand
agaggagaccacagagaau

SEQ ID NO: 2273421 - RNA, 19 nt, Homo sapiens
  misc_RNA (1)...(19): siRNA sense strand
caacguacguagaagagga

SEQ ID NO: 2273422 - RNA, 19 nt, Homo sapiens
  misc_RNA (1)...(19): siRNA sense strand
ucaucaagguggaggugca

SEQ ID NO: 2273423 - RNA, 19 nt, Homo sapiens
  misc_RNA (1)...(19): siRNA sense strand
cagguaacauggagaggca

SEQ ID NO: 2273424 - RNA, 19 nt, Homo sapiens
  misc_RNA (1)...(19): siRNA sense strand
ccaagaaauucgacagccu

SEQ ID NO: 2273425 - RNA, 19 nt, Homo sapiens
  misc_RNA (1)...(19): siRNA sense strand
ggaggaauuuggaagacca

SEQ ID NO: 2273426 - RNA, 19 nt, Homo sapiens
  misc_RNA (1)...(19): siRNA sense strand
cagacaaagccaaugccaa

SEQ ID NO: 2273427 - RNA, 19 nt, Homo sapiens
  misc_RNA (1)...(19): siRNA sense strand
gcgcagaacaaagggauca

SEQ ID NO: 2273428 - RNA, 19 nt, Homo sapiens
  misc_RNA (1)...(19): siRNA sense strand
augaugaggugaagcacau

SEQ ID NO: 2273429 - RNA, 19 nt, Homo sapiens
  misc_RNA (1)...(19): siRNA sense strand
aggacauugagaagaacua

SEQ ID NO: 2273430 - RNA, 19 nt, Homo sapiens
  misc_RNA (1)...(19): siRNA sense strand
agacaaagccaaugccaac

SEQ ID NO: 2273431 - RNA, 19 nt, Homo sapiens
  misc_RNA (1)...(19): siRNA sense strand
agggugacguggugaggau

SEQ ID NO: 2273432 - RNA, 19 nt, Homo sapiens
  misc_RNA (1)...(19): siRNA sense strand
aggugguggagaaggacaa

SEQ ID NO: 2273433 - RNA, 19 nt, Homo sapiens
  misc_RNA (1)...(19): siRNA sense strand
ggcagaaagucgaggagug

SEQ ID NO: 2273434 - RNA, 19 nt, Homo sapiens
  misc_RNA (1)...(19): siRNA sense strand
ucauuaaccuggaggaccu

SEQ ID NO: 2273435 - RNA, 19 nt, Homo sapiens
  misc_RNA (1)...(19): siRNA sense strand
ucugcaagcggaagggcua

SEQ ID NO: 2273436 - RNA, 19 nt, Homo sapiens
  misc_RNA (1)...(19): siRNA sense strand
ggcugagcgcuuugcaaua

SEQ ID NO: 2273437 - RNA, 19 nt, Homo sapiens
  misc_RNA (1)...(19): siRNA sense strand
ugaaagucugccacgauaa

SEQ ID NO: 2273438 - RNA, 19 nt, Homo sapiens
  misc_RNA (1)...(19): siRNA sense strand
ugaacaacaaggacgucaa

SEQ ID NO: 2273439 - RNA, 19 nt, Homo sapiens
  misc_RNA (1)...(19): siRNA sense strand
gguacaaaccaggaaguca

SEQ ID NO: 2273440 - RNA, 19 nt, Homo sapiens
  misc_RNA (1)...(19): siRNA sense strand
uccuggaguugguggagua

SEQ ID NO: 2273441 - RNA, 19 nt, Homo sapiens
  misc_RNA (1)...(19): siRNA sense strand
gggacgacaucuacgagga

SEQ ID NO: 2273442 - RNA, 19 nt, Homo sapiens
  misc_RNA (1)...(19): siRNA sense strand
guuaaacgggacaaggaga

SEQ ID NO: 2273443 - RNA, 19 nt, Homo sapiens
  misc_RNA (1)...(19): siRNA sense strand
gcaaaacagaagauaugaa

SEQ ID NO: 2273444 - RNA, 19 nt, Homo sapiens
  misc_RNA (1)...(19): siRNA sense strand
agauguacacguuugacaa

SEQ ID NO: 2273445 - RNA, 19 nt, Homo sapiens
  misc_RNA (1)...(19): siRNA sense strand
gauaugaagaggaagugga

SEQ ID NO: 2273446 - RNA, 19 nt, Homo sapiens
  misc_RNA (1)...(19): siRNA sense strand
ucaaugaaguuaaacggga

SEQ ID NO: 2273447 - RNA, 19 nt, Homo sapiens
  misc_RNA (1)...(19): siRNA sense strand
gaccaaagauugacgggga

SEQ ID NO: 2273448 - RNA, 19 nt, Homo sapiens
  misc_RNA (1)...(19): siRNA sense strand
acagcaucgcgcagaacaa

SEQ ID NO: 2273449 - RNA, 19 nt, Homo sapiens
  misc_RNA (1)...(19): siRNA sense strand
gaacaaagggaucaggccu

SEQ ID NO: 2273450 - RNA, 19 nt, Homo sapiens
  misc_RNA (1)...(19): siRNA sense strand
ugguggccaugcagaauua

SEQ ID NO: 2273451 - RNA, 19 nt, Homo sapiens
  misc_RNA (1)...(19): siRNA sense strand
gcacagcgguggauugaua

SEQ ID NO: 2273452 - RNA, 19 nt, Homo sapiens
  misc_RNA (1)...(19): siRNA sense strand
aaaccaaggcauagaggaa

SEQ ID NO: 2273453 - RNA, 19 nt, Homo sapiens
  misc_RNA (1)...(19): siRNA sense strand
cuguacaccuugagggcaa

SEQ ID NO: 2273454 - RNA, 19 nt, Homo sapiens
  misc_RNA (1)...(19): siRNA sense strand
cgaugaacaccgugaaaga

SEQ ID NO: 2273455 - RNA, 19 nt, Homo sapiens
  misc_RNA (1)...(19): siRNA sense strand
ugacagggcugguggacga

SEQ ID NO: 2273456 - RNA, 19 nt, Homo sapiens
  misc_RNA (1)...(19): siRNA sense strand
cuaagagggagguggagaa

SEQ ID NO: 2273457 - RNA, 19 nt, Homo sapiens
  misc_RNA (1)...(19): siRNA sense strand
ggcaaagaacgcagggaga

SEQ ID NO: 2273458 - RNA, 19 nt, Homo sapiens
  misc_RNA (1)...(19): siRNA sense strand
ugugaugauccuaaagaaa

SEQ ID NO: 2273459 - RNA, 19 nt, Homo sapiens
  misc_RNA (1)...(19): siRNA sense strand
cggaaggagaagagcagau

SEQ ID NO: 2273460 - RNA, 19 nt, Homo sapiens
  misc_RNA (1)...(19): siRNA sense strand
cuaacagggaagagguauu

SEQ ID NO: 2273461 - RNA, 19 nt, Homo sapiens
  misc_RNA (1)...(19): siRNA sense strand
ccucugaugaauugagcaa

SEQ ID NO: 2273462 - RNA, 19 nt, Homo sapiens
  misc_RNA (1)...(19): siRNA sense strand
ccaucaagcuguuggcagu

SEQ ID NO: 2273463 - RNA, 19 nt, Homo sapiens
  misc_RNA (1)...(19): siRNA sense strand
ugaugauccuaaagaaaga

SEQ ID NO: 2273464 - RNA, 19 nt, Homo sapiens
  misc_RNA (1)...(19): siRNA sense strand
caaagaacgcagggagauu

SEQ ID NO: 2273465 - RNA, 19 nt, Homo sapiens
  misc_RNA (1)...(19): siRNA sense strand
ucggaaaauagcagaauua

SEQ ID NO: 2273466 - RNA, 19 nt, Homo sapiens
  misc_RNA (1)...(19): siRNA sense strand
gcaagguagcuauggccaa

SEQ ID NO: 2273467 - RNA, 19 nt, Homo sapiens
  misc_RNA (1)...(19): siRNA sense strand
ccgacuaacagaugagcuu

SEQ ID NO: 2273468 - RNA, 19 nt, Homo sapiens
  misc_RNA (1)...(19): siRNA sense strand
cuaaagaaagagaugacau

SEQ ID NO: 2273469 - RNA, 19 nt, Homo sapiens
  misc_RNA (1)...(19): siRNA sense strand
ucugaugaauugagcaaaa

SEQ ID NO: 2273470 - RNA, 19 nt, Homo sapiens
  misc_RNA (1)...(19): siRNA sense strand
cagauuuugaagagagaua

SEQ ID NO: 2273471 - RNA, 19 nt, Homo sapiens
  misc_RNA (1)...(19): siRNA sense strand
agaugauugacgagagaca

SEQ ID NO: 2273472 - RNA, 19 nt, Homo sapiens
  misc_RNA (1)...(19): siRNA sense strand
aaucaacaguggaaggcau

SEQ ID NO: 2273473 - RNA, 19 nt, Homo sapiens
  misc_RNA (1)...(19): siRNA sense strand
ccauaagcacccagcucaa

SEQ ID NO: 2273474 - RNA, 19 nt, Homo sapiens
  misc_RNA (1)...(19): siRNA sense strand
uggcagaggugguggagac

SEQ ID NO: 2273475 - RNA, 19 nt, Homo sapiens
  misc_RNA (1)...(19): siRNA sense strand
acuuaggaacccuggaaau

SEQ ID NO: 2273476 - RNA, 19 nt, Homo sapiens
  misc_RNA (1)...(19): siRNA sense strand
aggaaaaggaugaagaguu

SEQ ID NO: 2273477 - RNA, 19 nt, Homo sapiens
  misc_RNA (1)...(19): siRNA sense strand
caagcagugcacagauaaa

SEQ ID NO: 2273478 - RNA, 19 nt, Homo sapiens
  misc_RNA (1)...(19): siRNA sense strand
ucuuagaugaagcuggaaa

SEQ ID NO: 2273479 - RNA, 19 nt, Homo sapiens
  misc_RNA (1)...(19): siRNA sense strand
ccaaacugaaccaggccaa

SEQ ID NO: 2273480 - RNA, 19 nt, Homo sapiens
  misc_RNA (1)...(19): siRNA sense strand
ccaugaagaaccaguggau

SEQ ID NO: 2273481 - RNA, 19 nt, Homo sapiens
  misc_RNA (1)...(19): siRNA sense strand
ugaaagaguugcugccagu

SEQ ID NO: 2273482 - RNA, 19 nt, Homo sapiens
  misc_RNA (1)...(19): siRNA sense strand
gcagggagauucugggaac

SEQ ID NO: 2273483 - RNA, 19 nt, Homo sapiens
  misc_RNA (1)...(19): siRNA sense strand
gcuuguggccgaagggcau

SEQ ID NO: 2273484 - RNA, 19 nt, Homo sapiens
  misc_RNA (1)...(19): siRNA sense strand
uuaucuaauugauggguca

SEQ ID NO: 2273485 - RNA, 19 nt, Homo sapiens
  misc_RNA (1)...(19): siRNA sense strand
cagaaagcucagcagguau

SEQ ID NO: 2273486 - RNA, 19 nt, Homo sapiens
  misc_RNA (1)...(19): siRNA sense strand
ggcaagaucuucucgccaa

SEQ ID NO: 2273487 - RNA, 19 nt, Homo sapiens
  misc_RNA (1)...(19): siRNA sense strand
agaugaagcuggaaaaguu

SEQ ID NO: 2273488 - RNA, 19 nt, Homo sapiens
  misc_RNA (1)...(19): siRNA sense strand
ggaauaucuuacaguggca

SEQ ID NO: 2273489 - RNA, 19 nt, Homo sapiens
  misc_RNA (1)...(19): siRNA sense strand
ugguggagacuauggaaga

SEQ ID NO: 2273490 - RNA, 19 nt, Homo sapiens
  misc_RNA (1)...(19): siRNA sense strand
ccauagacuccaaacugaa

SEQ ID NO: 2273491 - RNA, 19 nt, Homo sapiens
  misc_RNA (1)...(19): siRNA sense strand
gcgcuggguuagaaagacu

SEQ ID NO: 2273492 - RNA, 19 nt, Homo sapiens
  misc_RNA (1)...(19): siRNA sense strand
gggcauccucucuggaaca

SEQ ID NO: 2273493 - RNA, 19 nt, Homo sapiens
  misc_RNA (1)...(19): siRNA sense strand
cuaagauggccaagaugau

SEQ ID NO: 2273494 - RNA, 19 nt, Homo sapiens
  misc_RNA (1)...(19): siRNA sense strand
ucacagcaaaaguggaaaa

SEQ ID NO: 2273495 - RNA, 19 nt, Homo sapiens
  misc_RNA (1)...(19): siRNA sense strand
ggaaugacuaagauggcca

SEQ ID NO: 2273496 - RNA, 19 nt, Homo sapiens
  misc_RNA (1)...(19): siRNA sense strand
uguucaaaccacugaggau

SEQ ID NO: 2273497 - RNA, 19 nt, Homo sapiens
  misc_RNA (1)...(19): siRNA sense strand
gccuaacagggaagaggua

SEQ ID NO: 2273498 - RNA, 19 nt, Homo sapiens
  misc_RNA (1)...(19): siRNA sense strand
gcuaagagggagguggaga

SEQ ID NO: 2273499 - RNA, 19 nt, Homo sapiens
  misc_RNA (1)...(19): siRNA sense strand
gcucacagcaaaaguggaa

SEQ ID NO: 2273500 - RNA, 19 nt, Homo sapiens
  misc_RNA (1)...(19): siRNA sense strand
gcuaauaaaucaacagugg

SEQ ID NO: 2273501 - RNA, 19 nt, Homo sapiens
  misc_RNA (1)...(19): siRNA sense strand
aagaguucccugagcagaa

SEQ ID NO: 2273502 - RNA, 19 nt, Homo sapiens
  misc_RNA (1)...(19): siRNA sense strand
gcaaggacacugaagccau

SEQ ID NO: 2273503 - RNA, 19 nt, Homo sapiens
  misc_RNA (1)...(19): siRNA sense strand
ggaucgauaauguugaaaa

SEQ ID NO: 2273504 - RNA, 19 nt, Homo sapiens
  misc_RNA (1)...(19): siRNA sense strand
ccaugaugaagcucgcaaa

SEQ ID NO: 2273505 - RNA, 19 nt, Homo sapiens
  misc_RNA (1)...(19): siRNA sense strand
cuuagaugaagcuggaaaa

SEQ ID NO: 2273506 - RNA, 19 nt, Homo sapiens
  misc_RNA (1)...(19): siRNA sense strand
gugccaaggacaucgccaa

SEQ ID NO: 2273507 - RNA, 19 nt, Homo sapiens
  misc_RNA (1)...(19): siRNA sense strand
ugaaggagacugugcggga

SEQ ID NO: 2273508 - RNA, 19 nt, Homo sapiens
  misc_RNA (1)...(19): siRNA sense strand
ucagauguuuucagcgaua

SEQ ID NO: 2273509 - RNA, 19 nt, Homo sapiens
  misc_RNA (1)...(19): siRNA sense strand
gggccaggaaugacuaaga

SEQ ID NO: 2273510 - RNA, 19 nt, Homo sapiens
  misc_RNA (1)...(19): siRNA sense strand
acuaagauggccaagauga

SEQ ID NO: 2273511 - RNA, 19 nt, Homo sapiens
  misc_RNA (1)...(19): siRNA sense strand
ugguggaccggaaggagaa

SEQ ID NO: 2273512 - RNA, 19 nt, Homo sapiens
  misc_RNA (1)...(19): siRNA sense strand
uagaguuugcaaaggaauu

SEQ ID NO: 2273513 - RNA, 19 nt, Homo sapiens
  misc_RNA (1)...(19): siRNA sense strand
uuggugaacucgaugaaca

SEQ ID NO: 2273514 - RNA, 19 nt, Homo sapiens
  misc_RNA (1)...(19): siRNA sense strand
gcaaaaugcuagggcagau

SEQ ID NO: 2273515 - RNA, 19 nt, Homo sapiens
  misc_RNA (1)...(19): siRNA sense strand
ugacugaucaaguggcuga

SEQ ID NO: 2273516 - RNA, 19 nt, Homo sapiens
  misc_RNA (1)...(19): siRNA sense strand
cggccaaagcagcuguaca

SEQ ID NO: 2273517 - RNA, 19 nt, Homo sapiens
  misc_RNA (1)...(19): siRNA sense strand
gcacagcgguggauugaua

SEQ ID NO: 2273518 - RNA, 19 nt, Homo sapiens
  misc_RNA (1)...(19): siRNA sense strand
aaaccaaggcauagaggaa

SEQ ID NO: 2273519 - RNA, 19 nt, Homo sapiens
  misc_RNA (1)...(19): siRNA sense strand
cuguacaccuugagggcaa

SEQ ID NO: 2273520 - RNA, 19 nt, Homo sapiens
  misc_RNA (1)...(19): siRNA sense strand
cgaugaacaccgugaaaga

SEQ ID NO: 2273521 - RNA, 19 nt, Homo sapiens
  misc_RNA (1)...(19): siRNA sense strand
ugacagggcugguggacga

SEQ ID NO: 2273522 - RNA, 19 nt, Homo sapiens
  misc_RNA (1)...(19): siRNA sense strand
cuaagagggagguggagaa

SEQ ID NO: 2273523 - RNA, 19 nt, Homo sapiens
  misc_RNA (1)...(19): siRNA sense strand
ggcaaagaacgcagggaga

SEQ ID NO: 2273524 - RNA, 19 nt, Homo sapiens
  misc_RNA (1)...(19): siRNA sense strand
ugugaugauccuaaagaaa

SEQ ID NO: 2273525 - RNA, 19 nt, Homo sapiens
  misc_RNA (1)...(19): siRNA sense strand
cggaaggagaagagcagau

SEQ ID NO: 2273526 - RNA, 19 nt, Homo sapiens
  misc_RNA (1)...(19): siRNA sense strand
cuaacagggaagagguauu

SEQ ID NO: 2273527 - RNA, 19 nt, Homo sapiens
  misc_RNA (1)...(19): siRNA sense strand
ccucugaugaauugagcaa

SEQ ID NO: 2273528 - RNA, 19 nt, Homo sapiens
  misc_RNA (1)...(19): siRNA sense strand
ccaucaagcuguuggcagu

SEQ ID NO: 2273529 - RNA, 19 nt, Homo sapiens
  misc_RNA (1)...(19): siRNA sense strand
ugaugauccuaaagaaaga

SEQ ID NO: 2273530 - RNA, 19 nt, Homo sapiens
  misc_RNA (1)...(19): siRNA sense strand
caaagaacgcagggagauu

SEQ ID NO: 2273531 - RNA, 19 nt, Homo sapiens
  misc_RNA (1)...(19): siRNA sense strand
ucggaaaauagcagaauua

SEQ ID NO: 2273532 - RNA, 19 nt, Homo sapiens
  misc_RNA (1)...(19): siRNA sense strand
gcaagguagcuauggccaa

SEQ ID NO: 2273533 - RNA, 19 nt, Homo sapiens
  misc_RNA (1)...(19): siRNA sense strand
ccgacuaacagaugagcuu

SEQ ID NO: 2273534 - RNA, 19 nt, Homo sapiens
  misc_RNA (1)...(19): siRNA sense strand
cuaaagaaagagaugacau

SEQ ID NO: 2273535 - RNA, 19 nt, Homo sapiens
  misc_RNA (1)...(19): siRNA sense strand
ucugaugaauugagcaaaa

SEQ ID NO: 2273536 - RNA, 19 nt, Homo sapiens
  misc_RNA (1)...(19): siRNA sense strand
cagauuuugaagagagaua

SEQ ID NO: 2273537 - RNA, 19 nt, Homo sapiens
  misc_RNA (1)...(19): siRNA sense strand
agaugauugacgagagaca

SEQ ID NO: 2273538 - RNA, 19 nt, Homo sapiens
  misc_RNA (1)...(19): siRNA sense strand
aaucaacaguggaaggcau

SEQ ID NO: 2273539 - RNA, 19 nt, Homo sapiens
  misc_RNA (1)...(19): siRNA sense strand
ccauaagcacccagcucaa

SEQ ID NO: 2273540 - RNA, 19 nt, Homo sapiens
  misc_RNA (1)...(19): siRNA sense strand
uggcagaggugguggagac

SEQ ID NO: 2273541 - RNA, 19 nt, Homo sapiens
  misc_RNA (1)...(19): siRNA sense strand
acuuaggaacccuggaaau

SEQ ID NO: 2273542 - RNA, 19 nt, Homo sapiens
  misc_RNA (1)...(19): siRNA sense strand
aggaaaaggaugaagaguu

SEQ ID NO: 2273543 - RNA, 19 nt, Homo sapiens
  misc_RNA (1)...(19): siRNA sense strand
caagcagugcacagauaaa

SEQ ID NO: 2273544 - RNA, 19 nt, Homo sapiens
  misc_RNA (1)...(19): siRNA sense strand
ucuuagaugaagcuggaaa

SEQ ID NO: 2273545 - RNA, 19 nt, Homo sapiens
  misc_RNA (1)...(19): siRNA sense strand
ccaaacugaaccaggccaa

SEQ ID NO: 2273546 - RNA, 19 nt, Homo sapiens
  misc_RNA (1)...(19): siRNA sense strand
ccaugaagaaccaguggau

SEQ ID NO: 2273547 - RNA, 19 nt, Homo sapiens
  misc_RNA (1)...(19): siRNA sense strand
ugaaagaguugcugccagu

SEQ ID NO: 2273548 - RNA, 19 nt, Homo sapiens
  misc_RNA (1)...(19): siRNA sense strand
gcagggagauucugggaac

SEQ ID NO: 2273549 - RNA, 19 nt, Homo sapiens
  misc_RNA (1)...(19): siRNA sense strand
gcuuguggccgaagggcau

SEQ ID NO: 2273550 - RNA, 19 nt, Homo sapiens
  misc_RNA (1)...(19): siRNA sense strand
uuaucuaauugauggguca

SEQ ID NO: 2273551 - RNA, 19 nt, Homo sapiens
  misc_RNA (1)...(19): siRNA sense strand
cagaaagcucagcagguau

SEQ ID NO: 2273552 - RNA, 19 nt, Homo sapiens
  misc_RNA (1)...(19): siRNA sense strand
ggcaagaucuucucgccaa

SEQ ID NO: 2273553 - RNA, 19 nt, Homo sapiens
  misc_RNA (1)...(19): siRNA sense strand
agaugaagcuggaaaaguu

SEQ ID NO: 2273554 - RNA, 19 nt, Homo sapiens
  misc_RNA (1)...(19): siRNA sense strand
ggaauaucuuacaguggca

SEQ ID NO: 2273555 - RNA, 19 nt, Homo sapiens
  misc_RNA (1)...(19): siRNA sense strand
ugguggagacuauggaaga

SEQ ID NO: 2273556 - RNA, 19 nt, Homo sapiens
  misc_RNA (1)...(19): siRNA sense strand
ccauagacuccaaacugaa

SEQ ID NO: 2273557 - RNA, 19 nt, Homo sapiens
  misc_RNA (1)...(19): siRNA sense strand
gcgcuggguuagaaagacu

SEQ ID NO: 2273558 - RNA, 19 nt, Homo sapiens
  misc_RNA (1)...(19): siRNA sense strand
gggcauccucucuggaaca

SEQ ID NO: 2273559 - RNA, 19 nt, Homo sapiens
  misc_RNA (1)...(19): siRNA sense strand
cuaagauggccaagaugau

SEQ ID NO: 2273560 - RNA, 19 nt, Homo sapiens
  misc_RNA (1)...(19): siRNA sense strand
ucacagcaaaaguggaaaa

SEQ ID NO: 2273561 - RNA, 19 nt, Homo sapiens
  misc_RNA (1)...(19): siRNA sense strand
ggaaugacuaagauggcca

SEQ ID NO: 2273562 - RNA, 19 nt, Homo sapiens
  misc_RNA (1)...(19): siRNA sense strand
uguucaaaccacugaggau

SEQ ID NO: 2273563 - RNA, 19 nt, Homo sapiens
  misc_RNA (1)...(19): siRNA sense strand
gccuaacagggaagaggua

SEQ ID NO: 2273564 - RNA, 19 nt, Homo sapiens
  misc_RNA (1)...(19): siRNA sense strand
gcuaagagggagguggaga

SEQ ID NO: 2273565 - RNA, 19 nt, Homo sapiens
  misc_RNA (1)...(19): siRNA sense strand
gcucacagcaaaaguggaa

SEQ ID NO: 2273566 - RNA, 19 nt, Homo sapiens
  misc_RNA (1)...(19): siRNA sense strand
gcuaauaaaucaacagugg

SEQ ID NO: 2273567 - RNA, 19 nt, Homo sapiens
  misc_RNA (1)...(19): siRNA sense strand
aagaguucccugagcagaa

SEQ ID NO: 2273568 - RNA, 19 nt, Homo sapiens
  misc_RNA (1)...(19): siRNA sense strand
gcaaggacacugaagccau

SEQ ID NO: 2273569 - RNA, 19 nt, Homo sapiens
  misc_RNA (1)...(19): siRNA sense strand
ggaucgauaauguugaaaa

SEQ ID NO: 2273570 - RNA, 19 nt, Homo sapiens
  misc_RNA (1)...(19): siRNA sense strand
ccaugaugaagcucgcaaa

SEQ ID NO: 2273571 - RNA, 19 nt, Homo sapiens
  misc_RNA (1)...(19): siRNA sense strand
cuuagaugaagcuggaaaa

SEQ ID NO: 2273572 - RNA, 19 nt, Homo sapiens
  misc_RNA (1)...(19): siRNA sense strand
gugccaaggacaucgccaa

SEQ ID NO: 2273573 - RNA, 19 nt, Homo sapiens
  misc_RNA (1)...(19): siRNA sense strand
ugaaggagacugugcggga

SEQ ID NO: 2273574 - RNA, 19 nt, Homo sapiens
  misc_RNA (1)...(19): siRNA sense strand
ucagauguuuucagcgaua

SEQ ID NO: 2273575 - RNA, 19 nt, Homo sapiens
  misc_RNA (1)...(19): siRNA sense strand
gggccaggaaugacuaaga

SEQ ID NO: 2273576 - RNA, 19 nt, Homo sapiens
  misc_RNA (1)...(19): siRNA sense strand
acuaagauggccaagauga

SEQ ID NO: 2273577 - RNA, 19 nt, Homo sapiens
  misc_RNA (1)...(19): siRNA sense strand
ugguggaccggaaggagaa

SEQ ID NO: 2273578 - RNA, 19 nt, Homo sapiens
  misc_RNA (1)...(19): siRNA sense strand
uagaguuugcaaaggaauu

SEQ ID NO: 2273579 - RNA, 19 nt, Homo sapiens
  misc_RNA (1)...(19): siRNA sense strand
uuggugaacucgaugaaca

SEQ ID NO: 2273580 - RNA, 19 nt, Homo sapiens
  misc_RNA (1)...(19): siRNA sense strand
gcaaaaugcuagggcagau

SEQ ID NO: 2273581 - RNA, 19 nt, Homo sapiens
  misc_RNA (1)...(19): siRNA sense strand
ugacugaucaaguggcuga

SEQ ID NO: 2273582 - RNA, 19 nt, Homo sapiens
  misc_RNA (1)...(19): siRNA sense strand
cggccaaagcagcuguaca

SEQ ID NO: 2273583 - RNA, 19 nt, Homo sapiens
  misc_RNA (1)...(19): siRNA sense strand
cagcaauggcacugguaaa

SEQ ID NO: 2273584 - RNA, 19 nt, Homo sapiens
  misc_RNA (1)...(19): siRNA sense strand
aggaagaagaggaggagga

SEQ ID NO: 2273585 - RNA, 19 nt, Homo sapiens
  misc_RNA (1)...(19): siRNA sense strand
ucgacuuauuggaaagaaa

SEQ ID NO: 2273586 - RNA, 19 nt, Homo sapiens
  misc_RNA (1)...(19): siRNA sense strand
aagaagaggaggaggagga

SEQ ID NO: 2273587 - RNA, 19 nt, Homo sapiens
  misc_RNA (1)...(19): siRNA sense strand
gggaauuugaugugcgaca

SEQ ID NO: 2273588 - RNA, 19 nt, Homo sapiens
  misc_RNA (1)...(19): siRNA sense strand
gugcagaacaauuacgaau

SEQ ID NO: 2273589 - RNA, 19 nt, Homo sapiens
  misc_RNA (1)...(19): siRNA sense strand
cugaagaaggagacgaaga

SEQ ID NO: 2273590 - RNA, 19 nt, Homo sapiens
  misc_RNA (1)...(19): siRNA sense strand
gcugaugcuauaagugaaa

SEQ ID NO: 2273591 - RNA, 19 nt, Homo sapiens
  misc_RNA (1)...(19): siRNA sense strand
gugaggaggaggaagaaga

SEQ ID NO: 2273592 - RNA, 19 nt, Homo sapiens
  misc_RNA (1)...(19): siRNA sense strand
agaccugcuaagagaauua

SEQ ID NO: 2273593 - RNA, 19 nt, Homo sapiens
  misc_RNA (1)...(19): siRNA sense strand
agugaaaacuacagaauca

SEQ ID NO: 2273594 - RNA, 19 nt, Homo sapiens
  misc_RNA (1)...(19): siRNA sense strand
cguagaaagagaacguauu

SEQ ID NO: 2273595 - RNA, 19 nt, Homo sapiens
  misc_RNA (1)...(19): siRNA sense strand
aagaaagcacagauggcaa

SEQ ID NO: 2273596 - RNA, 19 nt, Homo sapiens
  misc_RNA (1)...(19): siRNA sense strand
uccgagaaauggagaucaa

SEQ ID NO: 2273597 - RNA, 19 nt, Homo sapiens
  misc_RNA (1)...(19): siRNA sense strand
gaauagaauugaaugccga

SEQ ID NO: 2273598 - RNA, 19 nt, Homo sapiens
  misc_RNA (1)...(19): siRNA sense strand
aggaggaagaagaggagga

SEQ ID NO: 2273599 - RNA, 19 nt, Homo sapiens
  misc_RNA (1)...(19): siRNA sense strand
cagaauuucaugagcuaga

SEQ ID NO: 2273600 - RNA, 19 nt, Homo sapiens
  misc_RNA (1)...(19): siRNA sense strand
aagaaggagacgaagauga

SEQ ID NO: 2273601 - RNA, 19 nt, Homo sapiens
  misc_RNA (1)...(19): siRNA sense strand
acugugaggaggaggaaga

SEQ ID NO: 2273602 - RNA, 19 nt, Homo sapiens
  misc_RNA (1)...(19): siRNA sense strand
ugguaaagcauucaguauu

SEQ ID NO: 2273603 - RNA, 19 nt, Homo sapiens
  misc_RNA (1)...(19): siRNA sense strand
agaacguauuggaaugauu

SEQ ID NO: 2273604 - RNA, 19 nt, Homo sapiens
  misc_RNA (1)...(19): siRNA sense strand
ccgguauacaacagaauuu

SEQ ID NO: 2273605 - RNA, 19 nt, Homo sapiens
  misc_RNA (1)...(19): siRNA sense strand
cuuuaaagaagcagaguug

SEQ ID NO: 2273606 - RNA, 19 nt, Homo sapiens
  misc_RNA (1)...(19): siRNA sense strand
ucauccagauccagagaga

SEQ ID NO: 2273607 - RNA, 19 nt, Homo sapiens
  misc_RNA (1)...(19): siRNA sense strand
cgucguagaaagagaacgu

SEQ ID NO: 2273608 - RNA, 19 nt, Homo sapiens
  misc_RNA (1)...(19): siRNA sense strand
agcagaacgcuuugagaga

SEQ ID NO: 2273609 - RNA, 19 nt, Homo sapiens
  misc_RNA (1)...(19): siRNA sense strand
ucguagaaagagaacguau

SEQ ID NO: 2273610 - RNA, 19 nt, Homo sapiens
  misc_RNA (1)...(19): siRNA sense strand
gagagaaguauaugcucau

SEQ ID NO: 2273611 - RNA, 19 nt, Homo sapiens
  misc_RNA (1)...(19): siRNA sense strand
cugguaaagcauucaguau

SEQ ID NO: 2273612 - RNA, 19 nt, Homo sapiens
  misc_RNA (1)...(19): siRNA sense strand
acccagaguaauagaacau

SEQ ID NO: 2273613 - RNA, 19 nt, Homo sapiens
  misc_RNA (1)...(19): siRNA sense strand
gaagcagaguugaaggauc

SEQ ID NO: 2273614 - RNA, 19 nt, Homo sapiens
  misc_RNA (1)...(19): siRNA sense strand
agacgaagaugauugggca

SEQ ID NO: 2273615 - RNA, 19 nt, Homo sapiens
  misc_RNA (1)...(19): siRNA sense strand
aauaggugaucuugggcau

SEQ ID NO: 2273616 - RNA, 19 nt, Homo sapiens
  misc_RNA (1)...(19): siRNA sense strand
gggcauguaacaaggaucu

SEQ ID NO: 2273617 - RNA, 19 nt, Homo sapiens
  misc_RNA (1)...(19): siRNA sense strand
aaauggagaucaauggcau

SEQ ID NO: 2273618 - RNA, 19 nt, Homo sapiens
  misc_RNA (1)...(19): siRNA sense strand
caacagaauuucaugagcu

SEQ ID NO: 2273619 - RNA, 19 nt, Homo sapiens
  misc_RNA (1)...(19): siRNA sense strand
gugucgucguagaaagaga

SEQ ID NO: 2273620 - RNA, 19 nt, Homo sapiens
  misc_RNA (1)...(19): siRNA sense strand
ugguucacauggauauaaa

SEQ ID NO: 2273621 - RNA, 19 nt, Homo sapiens
  misc_RNA (1)...(19): siRNA sense strand
cgacuuauuggaaagaaaa

SEQ ID NO: 2273622 - RNA, 19 nt, Homo sapiens
  misc_RNA (1)...(19): siRNA sense strand
acugaaagcaauaugaagu

SEQ ID NO: 2273623 - RNA, 19 nt, Homo sapiens
  misc_RNA (1)...(19): siRNA sense strand
cagaacgcuuugagagaag

SEQ ID NO: 2273624 - RNA, 19 nt, Homo sapiens
  misc_RNA (1)...(19): siRNA sense strand
ugguggaaguuuagcugau

SEQ ID NO: 2273625 - RNA, 19 nt, Homo sapiens
  misc_RNA (1)...(19): siRNA sense strand
ugaagaggcuggauggaug

SEQ ID NO: 2273626 - RNA, 19 nt, Homo sapiens
  misc_RNA (1)...(19): siRNA sense strand
acgcuuugagagaaguaua

SEQ ID NO: 2273627 - RNA, 19 nt, Homo sapiens
  misc_RNA (1)...(19): siRNA sense strand
auucaaugucuuugguuca

SEQ ID NO: 2273628 - RNA, 19 nt, Homo sapiens
  misc_RNA (1)...(19): siRNA sense strand
caugaaaucagacagggua

SEQ ID NO: 2273629 - RNA, 19 nt, Homo sapiens
  misc_RNA (1)...(19): siRNA sense strand
aggaggaggaagaagagga

SEQ ID NO: 2273630 - RNA, 19 nt, Homo sapiens
  misc_RNA (1)...(19): siRNA sense strand
agccagugauuaugagcuu

SEQ ID NO: 2273631 - RNA, 19 nt, Homo sapiens
  misc_RNA (1)...(19): siRNA sense strand
cucugaagaaggagacgaa

SEQ ID NO: 2273632 - RNA, 19 nt, Homo sapiens
  misc_RNA (1)...(19): siRNA sense strand
ugcagaacaauuacgaaua

SEQ ID NO: 2273633 - RNA, 19 nt, Homo sapiens
  misc_RNA (1)...(19): siRNA sense strand
gaauauuguaaugguggaa

SEQ ID NO: 2273634 - RNA, 19 nt, Homo sapiens
  misc_RNA (1)...(19): siRNA sense strand
gcaugaaaucagacagggu

SEQ ID NO: 2273635 - RNA, 19 nt, Homo sapiens
  misc_RNA (1)...(19): siRNA sense strand
acagacuccucaagugaau

SEQ ID NO: 2273636 - RNA, 19 nt, Homo sapiens
  misc_RNA (1)...(19): siRNA sense strand
gauccaaagaagaugggaa

SEQ ID NO: 2273637 - RNA, 19 nt, Homo sapiens
  misc_RNA (1)...(19): siRNA sense strand
agucaugugcugugggaga

SEQ ID NO: 2273638 - RNA, 19 nt, Homo sapiens
  misc_RNA (1)...(19): siRNA sense strand
caacagagcuggcaggaag

SEQ ID NO: 2273639 - RNA, 19 nt, Homo sapiens
  misc_RNA (1)...(19): siRNA sense strand
guuuaagaagccaacgaaa

SEQ ID NO: 2273640 - RNA, 19 nt, Homo sapiens
  misc_RNA (1)...(19): siRNA sense strand
uggugguacaugagagcua

SEQ ID NO: 2273641 - RNA, 19 nt, Homo sapiens
  misc_RNA (1)...(19): siRNA sense strand
uuuaagaagccaacgaaaa

SEQ ID NO: 2273642 - RNA, 19 nt, Homo sapiens
  misc_RNA (1)...(19): siRNA sense strand
ggccuguagccaaggagaa

SEQ ID NO: 2273643 - RNA, 19 nt, Homo sapiens
  misc_RNA (1)...(19): siRNA sense strand
uagccaaggagaaguaaaa

SEQ ID NO: 2273644 - RNA, 19 nt, Homo sapiens
  misc_RNA (1)...(19): siRNA sense strand
cagugauaacauugacuau

SEQ ID NO: 2273645 - RNA, 19 nt, Homo sapiens
  misc_RNA (1)...(19): siRNA sense strand
cagcagaaugccagcacca

SEQ ID NO: 2273646 - RNA, 19 nt, Homo sapiens
  misc_RNA (1)...(19): siRNA sense strand
uaucagggaccgagaggca

SEQ ID NO: 2273647 - RNA, 19 nt, Homo sapiens
  misc_RNA (1)...(19): siRNA sense strand
ggacagggaucacagccuu

SEQ ID NO: 2273648 - RNA, 19 nt, Homo sapiens
  misc_RNA (1)...(19): siRNA sense strand
gaaaggaaaggaugccaga

SEQ ID NO: 2273649 - RNA, 19 nt, Homo sapiens
  misc_RNA (1)...(19): siRNA sense strand
cuguagccaaggagaagua

SEQ ID NO: 2273650 - RNA, 19 nt, Homo sapiens
  misc_RNA (1)...(19): siRNA sense strand
cagguuucacuguggcuaa

SEQ ID NO: 2273651 - RNA, 19 nt, Homo sapiens
  misc_RNA (1)...(19): siRNA sense strand
ccuccagggugaugugcga

SEQ ID NO: 2273652 - RNA, 19 nt, Homo sapiens
  misc_RNA (1)...(19): siRNA sense strand
gggccauccagguggucau

SEQ ID NO: 2273653 - RNA, 19 nt, Homo sapiens
  misc_RNA (1)...(19): siRNA sense strand
ggugaugcccugaaggaga

SEQ ID NO: 2273654 - RNA, 19 nt, Homo sapiens
  misc_RNA (1)...(19): siRNA sense strand
aauauuaagcccaggaguu

SEQ ID NO: 2273655 - RNA, 19 nt, Homo sapiens
  misc_RNA (1)...(19): siRNA sense strand
uggaccaguuugugugcaa

SEQ ID NO: 2273656 - RNA, 19 nt, Homo sapiens
  misc_RNA (1)...(19): siRNA sense strand
cagaagaaacugugccacu

SEQ ID NO: 2273657 - RNA, 19 nt, Homo sapiens
  misc_RNA (1)...(19): siRNA sense strand
cgacaucgaagguggaacu

SEQ ID NO: 2273658 - RNA, 19 nt, Homo sapiens
  misc_RNA (1)...(19): siRNA sense strand
agguuguaauugaagccaa

SEQ ID NO: 2273659 - RNA, 19 nt, Homo sapiens
  misc_RNA (1)...(19): siRNA sense strand
aagacaggcaucaaagaau

SEQ ID NO: 2273660 - RNA, 19 nt, Homo sapiens
  misc_RNA (1)...(19): siRNA sense strand
caucgaagguggaacugca

SEQ ID NO: 2273661 - RNA, 19 nt, Homo sapiens
  misc_RNA (1)...(19): siRNA sense strand
cugaaggagaaguacgaca

SEQ ID NO: 2273662 - RNA, 19 nt, Homo sapiens
  misc_RNA (1)...(19): siRNA sense strand
acaagacgucggagggcau

SEQ ID NO: 2273663 - RNA, 19 nt, Homo sapiens
  misc_RNA (1)...(19): siRNA sense strand
acugcagcacuguggauaa

SEQ ID NO: 2273664 - RNA, 19 nt, Homo sapiens
  misc_RNA (1)...(19): siRNA sense strand
gccaagggcuccuacgaga

SEQ ID NO: 2273665 - RNA, 19 nt, Homo sapiens
  misc_RNA (1)...(19): siRNA sense strand
acaacaucgacuauggcua

SEQ ID NO: 2273666 - RNA, 19 nt, Homo sapiens
  misc_RNA (1)...(19): siRNA sense strand
ccuucaaccuagagaaagu

SEQ ID NO: 2273667 - RNA, 19 nt, Homo sapiens
  misc_RNA (1)...(19): siRNA sense strand
gaaugauguucaaggacga

SEQ ID NO: 2273668 - RNA, 19 nt, Homo sapiens
  misc_RNA (1)...(19): siRNA sense strand
caucaaacaagaaggggaa

SEQ ID NO: 2273669 - RNA, 19 nt, Homo sapiens
  misc_RNA (1)...(19): siRNA sense strand
acugaugaggaaagugaaa

SEQ ID NO: 2273670 - RNA, 19 nt, Homo sapiens
  misc_RNA (1)...(19): siRNA sense strand
ugaaaugacugcugaccga

SEQ ID NO: 2273671 - RNA, 19 nt, Homo sapiens
  misc_RNA (1)...(19): siRNA sense strand
gaaagaaaaugaaaggcuu

SEQ ID NO: 2273672 - RNA, 19 nt, Homo sapiens
  misc_RNA (1)...(19): siRNA sense strand
ugguguugaaugagaagaa

SEQ ID NO: 2273673 - RNA, 19 nt, Homo sapiens
  misc_RNA (1)...(19): siRNA sense strand
cccaagaagcugaugacau

SEQ ID NO: 2273674 - RNA, 19 nt, Homo sapiens
  misc_RNA (1)...(19): siRNA sense strand
gcuaaggaagcuuuggaga

SEQ ID NO: 2273675 - RNA, 19 nt, Homo sapiens
  misc_RNA (1)...(19): siRNA sense strand
guuucugaacccaguauaa

SEQ ID NO: 2273676 - RNA, 19 nt, Homo sapiens
  misc_RNA (1)...(19): siRNA sense strand
gcugaagucauuagagaac

SEQ ID NO: 2273677 - RNA, 19 nt, Homo sapiens
  misc_RNA (1)...(19): siRNA sense strand
guguugaaugagaagaaaa

SEQ ID NO: 2273678 - RNA, 19 nt, Homo sapiens
  misc_RNA (1)...(19): siRNA sense strand
auuaaaugcagcucaagaa

SEQ ID NO: 2273679 - RNA, 19 nt, Homo sapiens
  misc_RNA (1)...(19): siRNA sense strand
ugauauugcaccaaguaga

SEQ ID NO: 2273680 - RNA, 19 nt, Homo sapiens
  misc_RNA (1)...(19): siRNA sense strand
cugcagaaagaaaaugaaa

SEQ ID NO: 2273681 - RNA, 19 nt, Homo sapiens
  misc_RNA (1)...(19): siRNA sense strand
augacauggcaauggaaaa

SEQ ID NO: 2273682 - RNA, 19 nt, Homo sapiens
  misc_RNA (1)...(19): siRNA sense strand
agaaaaggacaucaaacaa

SEQ ID NO: 2273683 - RNA, 19 nt, Homo sapiens
  misc_RNA (1)...(19): siRNA sense strand
gaggaaagugaaaaccaaa

SEQ ID NO: 2273684 - RNA, 19 nt, Homo sapiens
  misc_RNA (1)...(19): siRNA sense strand
ccuucaaccuagagaaagu

SEQ ID NO: 2273685 - RNA, 19 nt, Homo sapiens
  misc_RNA (1)...(19): siRNA sense strand
gaaugauguucaaggacga

SEQ ID NO: 2273686 - RNA, 19 nt, Homo sapiens
  misc_RNA (1)...(19): siRNA sense strand
caucaaacaagaaggggaa

SEQ ID NO: 2273687 - RNA, 19 nt, Homo sapiens
  misc_RNA (1)...(19): siRNA sense strand
acugaugaggaaagugaaa

SEQ ID NO: 2273688 - RNA, 19 nt, Homo sapiens
  misc_RNA (1)...(19): siRNA sense strand
ugaaaugacugcugaccga

SEQ ID NO: 2273689 - RNA, 19 nt, Homo sapiens
  misc_RNA (1)...(19): siRNA sense strand
gaaagaaaaugaaaggcuu

SEQ ID NO: 2273690 - RNA, 19 nt, Homo sapiens
  misc_RNA (1)...(19): siRNA sense strand
ugguguugaaugagaagaa

SEQ ID NO: 2273691 - RNA, 19 nt, Homo sapiens
  misc_RNA (1)...(19): siRNA sense strand
cccaagaagcugaugacau

SEQ ID NO: 2273692 - RNA, 19 nt, Homo sapiens
  misc_RNA (1)...(19): siRNA sense strand
gcuaaggaagcuuuggaga

SEQ ID NO: 2273693 - RNA, 19 nt, Homo sapiens
  misc_RNA (1)...(19): siRNA sense strand
guuucugaacccaguauaa

SEQ ID NO: 2273694 - RNA, 19 nt, Homo sapiens
  misc_RNA (1)...(19): siRNA sense strand
gcugaagucauuagagaac

SEQ ID NO: 2273695 - RNA, 19 nt, Homo sapiens
  misc_RNA (1)...(19): siRNA sense strand
guguugaaugagaagaaaa

SEQ ID NO: 2273696 - RNA, 19 nt, Homo sapiens
  misc_RNA (1)...(19): siRNA sense strand
auuaaaugcagcucaagaa

SEQ ID NO: 2273697 - RNA, 19 nt, Homo sapiens
  misc_RNA (1)...(19): siRNA sense strand
ugauauugcaccaaguaga

SEQ ID NO: 2273698 - RNA, 19 nt, Homo sapiens
  misc_RNA (1)...(19): siRNA sense strand
cugcagaaagaaaaugaaa

SEQ ID NO: 2273699 - RNA, 19 nt, Homo sapiens
  misc_RNA (1)...(19): siRNA sense strand
augacauggcaauggaaaa

SEQ ID NO: 2273700 - RNA, 19 nt, Homo sapiens
  misc_RNA (1)...(19): siRNA sense strand
agaaaaggacaucaaacaa

SEQ ID NO: 2273701 - RNA, 19 nt, Homo sapiens
  misc_RNA (1)...(19): siRNA sense strand
gaggaaagugaaaaccaaa

SEQ ID NO: 2273702 - RNA, 19 nt, Homo sapiens
  misc_RNA (1)...(19): siRNA sense strand
ccuucaaccuagagaaagu

SEQ ID NO: 2273703 - RNA, 19 nt, Homo sapiens
  misc_RNA (1)...(19): siRNA sense strand
gaaugauguucaaggacga

SEQ ID NO: 2273704 - RNA, 19 nt, Homo sapiens
  misc_RNA (1)...(19): siRNA sense strand
caucaaacaagaaggggaa

SEQ ID NO: 2273705 - RNA, 19 nt, Homo sapiens
  misc_RNA (1)...(19): siRNA sense strand
acugaugaggaaagugaaa

SEQ ID NO: 2273706 - RNA, 19 nt, Homo sapiens
  misc_RNA (1)...(19): siRNA sense strand
ugaaaugacugcugaccga

SEQ ID NO: 2273707 - RNA, 19 nt, Homo sapiens
  misc_RNA (1)...(19): siRNA sense strand
gaaagaaaaugaaaggcuu

SEQ ID NO: 2273708 - RNA, 19 nt, Homo sapiens
  misc_RNA (1)...(19): siRNA sense strand
ugguguugaaugagaagaa

SEQ ID NO: 2273709 - RNA, 19 nt, Homo sapiens
  misc_RNA (1)...(19): siRNA sense strand
cccaagaagcugaugacau

SEQ ID NO: 2273710 - RNA, 19 nt, Homo sapiens
  misc_RNA (1)...(19): siRNA sense strand
gcuaaggaagcuuuggaga

SEQ ID NO: 2273711 - RNA, 19 nt, Homo sapiens
  misc_RNA (1)...(19): siRNA sense strand
guuucugaacccaguauaa

SEQ ID NO: 2273712 - RNA, 19 nt, Homo sapiens
  misc_RNA (1)...(19): siRNA sense strand
gcugaagucauuagagaac

SEQ ID NO: 2273713 - RNA, 19 nt, Homo sapiens
  misc_RNA (1)...(19): siRNA sense strand
guguugaaugagaagaaaa

SEQ ID NO: 2273714 - RNA, 19 nt, Homo sapiens
  misc_RNA (1)...(19): siRNA sense strand
auuaaaugcagcucaagaa

SEQ ID NO: 2273715 - RNA, 19 nt, Homo sapiens
  misc_RNA (1)...(19): siRNA sense strand
ugauauugcaccaaguaga

SEQ ID NO: 2273716 - RNA, 19 nt, Homo sapiens
  misc_RNA (1)...(19): siRNA sense strand
cugcagaaagaaaaugaaa

SEQ ID NO: 2273717 - RNA, 19 nt, Homo sapiens
  misc_RNA (1)...(19): siRNA sense strand
augacauggcaauggaaaa

SEQ ID NO: 2273718 - RNA, 19 nt, Homo sapiens
  misc_RNA (1)...(19): siRNA sense strand
agaaaaggacaucaaacaa

SEQ ID NO: 2273719 - RNA, 19 nt, Homo sapiens
  misc_RNA (1)...(19): siRNA sense strand
gaggaaagugaaaaccaaa

SEQ ID NO: 2273720 - RNA, 19 nt, Homo sapiens
  misc_RNA (1)...(19): siRNA sense strand
gugagaagauagaggcaga

SEQ ID NO: 2273721 - RNA, 19 nt, Homo sapiens
  misc_RNA (1)...(19): siRNA sense strand
agaagcagcagaugggcaa

SEQ ID NO: 2273722 - RNA, 19 nt, Homo sapiens
  misc_RNA (1)...(19): siRNA sense strand
cggcauuugaugaagcaau

SEQ ID NO: 2273723 - RNA, 19 nt, Homo sapiens
  misc_RNA (1)...(19): siRNA sense strand
ggaaugagaagaagcagca

SEQ ID NO: 2273724 - RNA, 19 nt, Homo sapiens
  misc_RNA (1)...(19): siRNA sense strand
agaaagaaaugcagccuac

SEQ ID NO: 2273725 - RNA, 19 nt, Homo sapiens
  misc_RNA (1)...(19): siRNA sense strand
agcagaaaacagagaggaa

SEQ ID NO: 2273726 - RNA, 19 nt, Homo sapiens
  misc_RNA (1)...(19): siRNA sense strand
gcaaugauguucuggagcu

SEQ ID NO: 2273727 - RNA, 19 nt, Homo sapiens
  misc_RNA (1)...(19): siRNA sense strand
uucuggagcuguuggacaa

SEQ ID NO: 2273728 - RNA, 19 nt, Homo sapiens
  misc_RNA (1)...(19): siRNA sense strand
augcaguuacuuagggaca

SEQ ID NO: 2273729 - RNA, 19 nt, Homo sapiens
  misc_RNA (1)...(19): siRNA sense strand
acucuguggacaucggaaa

SEQ ID NO: 2273730 - RNA, 19 nt, Homo sapiens
  misc_RNA (1)...(19): siRNA sense strand
aagaaagaaaugcagccua

SEQ ID NO: 2273731 - RNA, 19 nt, Homo sapiens
  misc_RNA (1)...(19): siRNA sense strand
gugagaagauagaggcaga

SEQ ID NO: 2273732 - RNA, 19 nt, Homo sapiens
  misc_RNA (1)...(19): siRNA sense strand
agaagcagcagaugggcaa

SEQ ID NO: 2273733 - RNA, 19 nt, Homo sapiens
  misc_RNA (1)...(19): siRNA sense strand
cggcauuugaugaagcaau

SEQ ID NO: 2273734 - RNA, 19 nt, Homo sapiens
  misc_RNA (1)...(19): siRNA sense strand
ggaaugagaagaagcagca

SEQ ID NO: 2273735 - RNA, 19 nt, Homo sapiens
  misc_RNA (1)...(19): siRNA sense strand
agaaagaaaugcagccuac

SEQ ID NO: 2273736 - RNA, 19 nt, Homo sapiens
  misc_RNA (1)...(19): siRNA sense strand
agcagaaaacagagaggaa

SEQ ID NO: 2273737 - RNA, 19 nt, Homo sapiens
  misc_RNA (1)...(19): siRNA sense strand
gcaaugauguucuggagcu

SEQ ID NO: 2273738 - RNA, 19 nt, Homo sapiens
  misc_RNA (1)...(19): siRNA sense strand
uucuggagcuguuggacaa

SEQ ID NO: 2273739 - RNA, 19 nt, Homo sapiens
  misc_RNA (1)...(19): siRNA sense strand
augcaguuacuuagggaca

SEQ ID NO: 2273740 - RNA, 19 nt, Homo sapiens
  misc_RNA (1)...(19): siRNA sense strand
acucuguggacaucggaaa

SEQ ID NO: 2273741 - RNA, 19 nt, Homo sapiens
  misc_RNA (1)...(19): siRNA sense strand
aagaaagaaaugcagccua

SEQ ID NO: 2273742 - RNA, 19 nt, Homo sapiens
  misc_RNA (1)...(19): siRNA sense strand
cuucacaagcagagagcaa

SEQ ID NO: 2273743 - RNA, 19 nt, Homo sapiens
  misc_RNA (1)...(19): siRNA sense strand
agacgaagcugaagcagga

SEQ ID NO: 2273744 - RNA, 19 nt, Homo sapiens
  misc_RNA (1)...(19): siRNA sense strand
uauccaaugaggagaggaa

SEQ ID NO: 2273745 - RNA, 19 nt, Homo sapiens
  misc_RNA (1)...(19): siRNA sense strand
augcaauuacugagagaca

SEQ ID NO: 2273746 - RNA, 19 nt, Homo sapiens
  misc_RNA (1)...(19): siRNA sense strand
auacaaagacagcacgcua

SEQ ID NO: 2273747 - RNA, 19 nt, Homo sapiens
  misc_RNA (1)...(19): siRNA sense strand
gagagaaaauugagacgga

SEQ ID NO: 2273748 - RNA, 19 nt, Homo sapiens
  misc_RNA (1)...(19): siRNA sense strand
ggugaugacaagaaaggga

SEQ ID NO: 2273749 - RNA, 19 nt, Homo sapiens
  misc_RNA (1)...(19): siRNA sense strand
uguaggagcccguagguca

SEQ ID NO: 2273750 - RNA, 19 nt, Homo sapiens
  misc_RNA (1)...(19): siRNA sense strand
acauuguggacaucggaua

SEQ ID NO: 2273751 - RNA, 19 nt, Homo sapiens
  misc_RNA (1)...(19): siRNA sense strand
cgaagcugaagcaggagaa

SEQ ID NO: 2273752 - RNA, 19 nt, Homo sapiens
  misc_RNA (1)...(19): siRNA sense strand
gcaauuacugagagacaac

SEQ ID NO: 2273753 - RNA, 19 nt, Homo sapiens
  misc_RNA (1)...(19): siRNA sense strand
caggagaaggaggggaaaa

SEQ ID NO: 2273754 - RNA, 19 nt, Homo sapiens
  misc_RNA (1)...(19): siRNA sense strand
cuucacaagcagagagcaa

SEQ ID NO: 2273755 - RNA, 19 nt, Homo sapiens
  misc_RNA (1)...(19): siRNA sense strand
agacgaagcugaagcagga

SEQ ID NO: 2273756 - RNA, 19 nt, Homo sapiens
  misc_RNA (1)...(19): siRNA sense strand
uauccaaugaggagaggaa

SEQ ID NO: 2273757 - RNA, 19 nt, Homo sapiens
  misc_RNA (1)...(19): siRNA sense strand
augcaauuacugagagaca

SEQ ID NO: 2273758 - RNA, 19 nt, Homo sapiens
  misc_RNA (1)...(19): siRNA sense strand
auacaaagacagcacgcua

SEQ ID NO: 2273759 - RNA, 19 nt, Homo sapiens
  misc_RNA (1)...(19): siRNA sense strand
gagagaaaauugagacgga

SEQ ID NO: 2273760 - RNA, 19 nt, Homo sapiens
  misc_RNA (1)...(19): siRNA sense strand
ggugaugacaagaaaggga

SEQ ID NO: 2273761 - RNA, 19 nt, Homo sapiens
  misc_RNA (1)...(19): siRNA sense strand
uguaggagcccguagguca

SEQ ID NO: 2273762 - RNA, 19 nt, Homo sapiens
  misc_RNA (1)...(19): siRNA sense strand
acauuguggacaucggaua

SEQ ID NO: 2273763 - RNA, 19 nt, Homo sapiens
  misc_RNA (1)...(19): siRNA sense strand
cgaagcugaagcaggagaa

SEQ ID NO: 2273764 - RNA, 19 nt, Homo sapiens
  misc_RNA (1)...(19): siRNA sense strand
gcaauuacugagagacaac

SEQ ID NO: 2273765 - RNA, 19 nt, Homo sapiens
  misc_RNA (1)...(19): siRNA sense strand
caggagaaggaggggaaaa

SEQ ID NO: 2273766 - RNA, 19 nt, Homo sapiens
  misc_RNA (1)...(19): siRNA sense strand
gcacaaagauguucaggga

SEQ ID NO: 2273767 - RNA, 19 nt, Homo sapiens
  misc_RNA (1)...(19): siRNA sense strand
agaucgagguggagaccau

SEQ ID NO: 2273768 - RNA, 19 nt, Homo sapiens
  misc_RNA (1)...(19): siRNA sense strand
gguucauacuggagagaag

SEQ ID NO: 2273769 - RNA, 19 nt, Homo sapiens
  misc_RNA (1)...(19): siRNA sense strand
guucaaaacuaaaacgaca

SEQ ID NO: 2273770 - RNA, 19 nt, Homo sapiens
  misc_RNA (1)...(19): siRNA sense strand
aggaggaggaggaggacga

SEQ ID NO: 2273771 - RNA, 19 nt, Homo sapiens
  misc_RNA (1)...(19): siRNA sense strand
ucagaauauaugacaggaa

SEQ ID NO: 2273772 - RNA, 19 nt, Homo sapiens
  misc_RNA (1)...(19): siRNA sense strand
aagaacagaucauuggaga

SEQ ID NO: 2273773 - RNA, 19 nt, Homo sapiens
  misc_RNA (1)...(19): siRNA sense strand
cugugcagaauguggcaaa

SEQ ID NO: 2273774 - RNA, 19 nt, Homo sapiens
  misc_RNA (1)...(19): siRNA sense strand
aggacggcuucgaggauca

SEQ ID NO: 2273775 - RNA, 19 nt, Homo sapiens
  misc_RNA (1)...(19): siRNA sense strand
uaacacaugcuaaggccaa

SEQ ID NO: 2273776 - RNA, 19 nt, Homo sapiens
  misc_RNA (1)...(19): siRNA sense strand
guaauaagaaguuugcuca

SEQ ID NO: 2273777 - RNA, 19 nt, Homo sapiens
  misc_RNA (1)...(19): siRNA sense strand
uggaggaauaccuggcauu

SEQ ID NO: 2273778 - RNA, 19 nt, Homo sapiens
  misc_RNA (1)...(19): siRNA sense strand
uaaagaagaugaugcucca

SEQ ID NO: 2273779 - RNA, 19 nt, Homo sapiens
  misc_RNA (1)...(19): siRNA sense strand
aggaggaggacgacgacga

SEQ ID NO: 2273780 - RNA, 19 nt, Homo sapiens
  misc_RNA (1)...(19): siRNA sense strand
cugaaaucucacaucuuaa

SEQ ID NO: 2273781 - RNA, 19 nt, Homo sapiens
  misc_RNA (1)...(19): siRNA sense strand
aggaggaggaggacgacga

SEQ ID NO: 2273782 - RNA, 19 nt, Homo sapiens
  misc_RNA (1)...(19): siRNA sense strand
gaggaggaagagagagaaa

SEQ ID NO: 2273783 - RNA, 19 nt, Homo sapiens
  misc_RNA (1)...(19): siRNA sense strand
acgaggaggaagagagaga

SEQ ID NO: 2273784 - RNA, 19 nt, Homo sapiens
  misc_RNA (1)...(19): siRNA sense strand
agaaugaggagcagggaca

SEQ ID NO: 2273785 - RNA, 19 nt, Homo sapiens
  misc_RNA (1)...(19): siRNA sense strand
gcggaaacuacgacaagaa

SEQ ID NO: 2273786 - RNA, 19 nt, Homo sapiens
  misc_RNA (1)...(19): siRNA sense strand
agaaagggucaucaggaaa

SEQ ID NO: 2273787 - RNA, 19 nt, Homo sapiens
  misc_RNA (1)...(19): siRNA sense strand
cagcggaacagcaggagaa

SEQ ID NO: 2273788 - RNA, 19 nt, Homo sapiens
  misc_RNA (1)...(19): siRNA sense strand
aggaagaggacgaacuaau

SEQ ID NO: 2273789 - RNA, 19 nt, Homo sapiens
  misc_RNA (1)...(19): siRNA sense strand
guucgcagcucuagggaca

SEQ ID NO: 2273790 - RNA, 19 nt, Homo sapiens
  misc_RNA (1)...(19): siRNA sense strand
ccacaaccuacuauggaaa

SEQ ID NO: 2273791 - RNA, 19 nt, Homo sapiens
  misc_RNA (1)...(19): siRNA sense strand
gagcugugaaugucagaaa

SEQ ID NO: 2273792 - RNA, 19 nt, Homo sapiens
  misc_RNA (1)...(19): siRNA sense strand
gugccaagcaugagaagga

SEQ ID NO: 2273793 - RNA, 19 nt, Homo sapiens
  misc_RNA (1)...(19): siRNA sense strand
gcuauaaagugcagcucca

SEQ ID NO: 2273794 - RNA, 19 nt, Homo sapiens
  misc_RNA (1)...(19): siRNA sense strand
acagaaagcuugcaggcga

SEQ ID NO: 2273795 - RNA, 19 nt, Homo sapiens
  misc_RNA (1)...(19): siRNA sense strand
gaacaagaacugugcgauc

SEQ ID NO: 2273796 - RNA, 19 nt, Homo sapiens
  misc_RNA (1)...(19): siRNA sense strand
gugaguggccugugcggaa

SEQ ID NO: 2273797 - RNA, 19 nt, Homo sapiens
  misc_RNA (1)...(19): siRNA sense strand
gugaaagcaacaacagaau

SEQ ID NO: 2273798 - RNA, 19 nt, Homo sapiens
  misc_RNA (1)...(19): siRNA sense strand
cagcacauacucuggcaaa

SEQ ID NO: 2273799 - RNA, 19 nt, Homo sapiens
  misc_RNA (1)...(19): siRNA sense strand
auaaacaacccgagggacu

SEQ ID NO: 2273800 - RNA, 19 nt, Homo sapiens
  misc_RNA (1)...(19): siRNA sense strand
gucuggagcuuguggucaa

SEQ ID NO: 2273801 - RNA, 19 nt, Homo sapiens
  misc_RNA (1)...(19): siRNA sense strand
agaaaacgcaggagggaga

SEQ ID NO: 2273802 - RNA, 19 nt, Homo sapiens
  misc_RNA (1)...(19): siRNA sense strand
cagccaagaaugaggagca

SEQ ID NO: 2273803 - RNA, 19 nt, Homo sapiens
  misc_RNA (1)...(19): siRNA sense strand
cagaaagcuugcaggcgau

SEQ ID NO: 2273804 - RNA, 19 nt, Homo sapiens
  misc_RNA (1)...(19): siRNA sense strand
cagcgaugaaguagcaaau

SEQ ID NO: 2273805 - RNA, 19 nt, Homo sapiens
  misc_RNA (1)...(19): siRNA sense strand
gcgagugugaaguugguua

SEQ ID NO: 2273806 - RNA, 19 nt, Homo sapiens
  misc_RNA (1)...(19): siRNA sense strand
gcauaaacaacccgaggga

SEQ ID NO: 2273807 - RNA, 19 nt, Homo sapiens
  misc_RNA (1)...(19): siRNA sense strand
ccacaguccccaaagaaaa

SEQ ID NO: 2273808 - RNA, 19 nt, Homo sapiens
  misc_RNA (1)...(19): siRNA sense strand
acuaccaucucuacagaaa

SEQ ID NO: 2273809 - RNA, 19 nt, Homo sapiens
  misc_RNA (1)...(19): siRNA sense strand
gcacuuacaucuuggccca

SEQ ID NO: 2273810 - RNA, 19 nt, Homo sapiens
  misc_RNA (1)...(19): siRNA sense strand
acaacagcuuggaugacaa

SEQ ID NO: 2273811 - RNA, 19 nt, Homo sapiens
  misc_RNA (1)...(19): siRNA sense strand
gcuccaucccucugggcaa

SEQ ID NO: 2273812 - RNA, 19 nt, Homo sapiens
  misc_RNA (1)...(19): siRNA sense strand
gggugacagccaagaauga

SEQ ID NO: 2273813 - RNA, 19 nt, Homo sapiens
  misc_RNA (1)...(19): siRNA sense strand
guuggaaagauaaggacau

SEQ ID NO: 2273814 - RNA, 19 nt, Homo sapiens
  misc_RNA (1)...(19): siRNA sense strand
gaguugugcgucugugaaa

SEQ ID NO: 2273815 - RNA, 19 nt, Homo sapiens
  misc_RNA (1)...(19): siRNA sense strand
gcaacagcugggaggugaa

SEQ ID NO: 2273816 - RNA, 19 nt, Homo sapiens
  misc_RNA (1)...(19): siRNA sense strand
ccaaaugaccucugugacu

SEQ ID NO: 2273817 - RNA, 19 nt, Homo sapiens
  misc_RNA (1)...(19): siRNA sense strand
agugugacuuugaagacaa

SEQ ID NO: 2273818 - RNA, 19 nt, Homo sapiens
  misc_RNA (1)...(19): siRNA sense strand
auaucuaccuugaggcuga

SEQ ID NO: 2273819 - RNA, 19 nt, Homo sapiens
  misc_RNA (1)...(19): siRNA sense strand
cagcaggagacaaggagga

SEQ ID NO: 2273820 - RNA, 19 nt, Homo sapiens
  misc_RNA (1)...(19): siRNA sense strand
ugugaaagcaacaacagaa

SEQ ID NO: 2273821 - RNA, 19 nt, Homo sapiens
  misc_RNA (1)...(19): siRNA sense strand
caagagagcaagaggagcu

SEQ ID NO: 2273822 - RNA, 19 nt, Homo sapiens
  misc_RNA (1)...(19): siRNA sense strand
ccggcuaugugcugaguga

SEQ ID NO: 2273823 - RNA, 19 nt, Homo sapiens
  misc_RNA (1)...(19): siRNA sense strand
cccuaugaccagugugauu

SEQ ID NO: 2273824 - RNA, 19 nt, Homo sapiens
  misc_RNA (1)...(19): siRNA sense strand
gcauagaccucacgcccuu

SEQ ID NO: 2273825 - RNA, 19 nt, Homo sapiens
  misc_RNA (1)...(19): siRNA sense strand
augaugaggaagaggacga

SEQ ID NO: 2273826 - RNA, 19 nt, Homo sapiens
  misc_RNA (1)...(19): siRNA sense strand
gcugggaggugaagaccga

SEQ ID NO: 2273827 - RNA, 19 nt, Homo sapiens
  misc_RNA (1)...(19): siRNA sense strand
acuaccaucuccacagaaa

SEQ ID NO: 2273828 - RNA, 19 nt, Homo sapiens
  misc_RNA (1)...(19): siRNA sense strand
acuaccaucuccacagaaa

SEQ ID NO: 2273829 - RNA, 19 nt, Homo sapiens
  misc_RNA (1)...(19): siRNA sense strand
uggcagacgccuggaacaa

SEQ ID NO: 2273830 - RNA, 19 nt, Homo sapiens
  misc_RNA (1)...(19): siRNA sense strand
aggucuacauugacaucua

SEQ ID NO: 2273831 - RNA, 19 nt, Homo sapiens
  misc_RNA (1)...(19): siRNA sense strand
acaacaacagcuuggauga

SEQ ID NO: 2273832 - RNA, 19 nt, Homo sapiens
  misc_RNA (1)...(19): siRNA sense strand
ccgacaacagcaacagcaa

SEQ ID NO: 2273833 - RNA, 19 nt, Homo sapiens
  misc_RNA (1)...(19): siRNA sense strand
gugggaacuaugacggcaa

SEQ ID NO: 2273834 - RNA, 19 nt, Homo sapiens
  misc_RNA (1)...(19): siRNA sense strand
gggcuauaccagcggagga

SEQ ID NO: 2273835 - RNA, 19 nt, Homo sapiens
  misc_RNA (1)...(19): siRNA sense strand
ugcaagaccugggcagaaa

SEQ ID NO: 2273836 - RNA, 19 nt, Homo sapiens
  misc_RNA (1)...(19): siRNA sense strand
gguguagggcccaggaguu

SEQ ID NO: 2273837 - RNA, 19 nt, Homo sapiens
  misc_RNA (1)...(19): siRNA sense strand
agauaaggacauugaccca

SEQ ID NO: 2273838 - RNA, 19 nt, Homo sapiens
  misc_RNA (1)...(19): siRNA sense strand
ggcugauguuugagggaac

SEQ ID NO: 2273839 - RNA, 19 nt, Homo sapiens
  misc_RNA (1)...(19): siRNA sense strand
ccagcgaugaaguagcaaa

SEQ ID NO: 2273840 - RNA, 19 nt, Homo sapiens
  misc_RNA (1)...(19): siRNA sense strand
ccuguagggugcuggcaga

SEQ ID NO: 2273841 - RNA, 19 nt, Homo sapiens
  misc_RNA (1)...(19): siRNA sense strand
gcucagaggcuguaagguc

SEQ ID NO: 2273842 - RNA, 19 nt, Homo sapiens
  misc_RNA (1)...(19): siRNA sense strand
gugcauggucaguguggga

SEQ ID NO: 2273843 - RNA, 19 nt, Homo sapiens
  misc_RNA (1)...(19): siRNA sense strand
acgaggaccaggaguguca

SEQ ID NO: 2273844 - RNA, 19 nt, Homo sapiens
  misc_RNA (1)...(19): siRNA sense strand
uacagaacgaggaggaaga

SEQ ID NO: 2273845 - RNA, 19 nt, Homo sapiens
  misc_RNA (1)...(19): siRNA sense strand
gcuuaagggcagacgcacu

SEQ ID NO: 2273846 - RNA, 19 nt, Homo sapiens
  misc_RNA (1)...(19): siRNA sense strand
gggugagaugggaugguga

SEQ ID NO: 2273847 - RNA, 19 nt, Homo sapiens
  misc_RNA (1)...(19): siRNA sense strand
acaaggaggagcuggggaa

SEQ ID NO: 2273848 - RNA, 19 nt, Homo sapiens
  misc_RNA (1)...(19): siRNA sense strand
ccgaugugcucuggaaaca

SEQ ID NO: 2273849 - RNA, 19 nt, Homo sapiens
  misc_RNA (1)...(19): siRNA sense strand
cccaacaugcccucagaaa

SEQ ID NO: 2273850 - RNA, 19 nt, Homo sapiens
  misc_RNA (1)...(19): siRNA sense strand
agaaugaggagcagggaca

SEQ ID NO: 2273851 - RNA, 19 nt, Homo sapiens
  misc_RNA (1)...(19): siRNA sense strand
gcggaaacuacgacaagaa

SEQ ID NO: 2273852 - RNA, 19 nt, Homo sapiens
  misc_RNA (1)...(19): siRNA sense strand
agaaagggucaucaggaaa

SEQ ID NO: 2273853 - RNA, 19 nt, Homo sapiens
  misc_RNA (1)...(19): siRNA sense strand
cagcggaacagcaggagaa

SEQ ID NO: 2273854 - RNA, 19 nt, Homo sapiens
  misc_RNA (1)...(19): siRNA sense strand
aggaagaggacgaacuaau

SEQ ID NO: 2273855 - RNA, 19 nt, Homo sapiens
  misc_RNA (1)...(19): siRNA sense strand
guucgcagcucuagggaca

SEQ ID NO: 2273856 - RNA, 19 nt, Homo sapiens
  misc_RNA (1)...(19): siRNA sense strand
ccacaaccuacuauggaaa

SEQ ID NO: 2273857 - RNA, 19 nt, Homo sapiens
  misc_RNA (1)...(19): siRNA sense strand
gagcugugaaugucagaaa

SEQ ID NO: 2273858 - RNA, 19 nt, Homo sapiens
  misc_RNA (1)...(19): siRNA sense strand
gugccaagcaugagaagga

SEQ ID NO: 2273859 - RNA, 19 nt, Homo sapiens
  misc_RNA (1)...(19): siRNA sense strand
gcuauaaagugcagcucca

SEQ ID NO: 2273860 - RNA, 19 nt, Homo sapiens
  misc_RNA (1)...(19): siRNA sense strand
acagaaagcuugcaggcga

SEQ ID NO: 2273861 - RNA, 19 nt, Homo sapiens
  misc_RNA (1)...(19): siRNA sense strand
gaacaagaacugugcgauc

SEQ ID NO: 2273862 - RNA, 19 nt, Homo sapiens
  misc_RNA (1)...(19): siRNA sense strand
gugaguggccugugcggaa

SEQ ID NO: 2273863 - RNA, 19 nt, Homo sapiens
  misc_RNA (1)...(19): siRNA sense strand
gugaaagcaacaacagaau

SEQ ID NO: 2273864 - RNA, 19 nt, Homo sapiens
  misc_RNA (1)...(19): siRNA sense strand
cagcacauacucuggcaaa

SEQ ID NO: 2273865 - RNA, 19 nt, Homo sapiens
  misc_RNA (1)...(19): siRNA sense strand
auaaacaacccgagggacu

SEQ ID NO: 2273866 - RNA, 19 nt, Homo sapiens
  misc_RNA (1)...(19): siRNA sense strand
gucuggagcuuguggucaa

SEQ ID NO: 2273867 - RNA, 19 nt, Homo sapiens
  misc_RNA (1)...(19): siRNA sense strand
cagccaagaaugaggagca

SEQ ID NO: 2273868 - RNA, 19 nt, Homo sapiens
  misc_RNA (1)...(19): siRNA sense strand
cagaaagcuugcaggcgau

SEQ ID NO: 2273869 - RNA, 19 nt, Homo sapiens
  misc_RNA (1)...(19): siRNA sense strand
cagcgaugaaguagcaaau

SEQ ID NO: 2273870 - RNA, 19 nt, Homo sapiens
  misc_RNA (1)...(19): siRNA sense strand
gcauaaacaacccgaggga

SEQ ID NO: 2273871 - RNA, 19 nt, Homo sapiens
  misc_RNA (1)...(19): siRNA sense strand
ccacaguccccaaagaaaa

SEQ ID NO: 2273872 - RNA, 19 nt, Homo sapiens
  misc_RNA (1)...(19): siRNA sense strand
acuaccaucucuacagaaa

SEQ ID NO: 2273873 - RNA, 19 nt, Homo sapiens
  misc_RNA (1)...(19): siRNA sense strand
gcacuuacaucuuggccca

SEQ ID NO: 2273874 - RNA, 19 nt, Homo sapiens
  misc_RNA (1)...(19): siRNA sense strand
acaacagcuuggaugacaa

SEQ ID NO: 2273875 - RNA, 19 nt, Homo sapiens
  misc_RNA (1)...(19): siRNA sense strand
gcuccaucccucugggcaa

SEQ ID NO: 2273876 - RNA, 19 nt, Homo sapiens
  misc_RNA (1)...(19): siRNA sense strand
gggugacagccaagaauga

SEQ ID NO: 2273877 - RNA, 19 nt, Homo sapiens
  misc_RNA (1)...(19): siRNA sense strand
guuggaaagauaaggacau

SEQ ID NO: 2273878 - RNA, 19 nt, Homo sapiens
  misc_RNA (1)...(19): siRNA sense strand
gaguugugcgucugugaaa

SEQ ID NO: 2273879 - RNA, 19 nt, Homo sapiens
  misc_RNA (1)...(19): siRNA sense strand
gcaacagcugggaggugaa

SEQ ID NO: 2273880 - RNA, 19 nt, Homo sapiens
  misc_RNA (1)...(19): siRNA sense strand
ccaaaugaccucugugacu

SEQ ID NO: 2273881 - RNA, 19 nt, Homo sapiens
  misc_RNA (1)...(19): siRNA sense strand
agugugacuuugaagacaa

SEQ ID NO: 2273882 - RNA, 19 nt, Homo sapiens
  misc_RNA (1)...(19): siRNA sense strand
auaucuaccuugaggcuga

SEQ ID NO: 2273883 - RNA, 19 nt, Homo sapiens
  misc_RNA (1)...(19): siRNA sense strand
cagcaggagacaaggagga

SEQ ID NO: 2273884 - RNA, 19 nt, Homo sapiens
  misc_RNA (1)...(19): siRNA sense strand
ugugaaagcaacaacagaa

SEQ ID NO: 2273885 - RNA, 19 nt, Homo sapiens
  misc_RNA (1)...(19): siRNA sense strand
caagagagcaagaggagcu

SEQ ID NO: 2273886 - RNA, 19 nt, Homo sapiens
  misc_RNA (1)...(19): siRNA sense strand
ccggcuaugugcugaguga

SEQ ID NO: 2273887 - RNA, 19 nt, Homo sapiens
  misc_RNA (1)...(19): siRNA sense strand
cccuaugaccagugugauu

SEQ ID NO: 2273888 - RNA, 19 nt, Homo sapiens
  misc_RNA (1)...(19): siRNA sense strand
gcauagaccucacgcccuu

SEQ ID NO: 2273889 - RNA, 19 nt, Homo sapiens
  misc_RNA (1)...(19): siRNA sense strand
augaugaggaagaggacga

SEQ ID NO: 2273890 - RNA, 19 nt, Homo sapiens
  misc_RNA (1)...(19): siRNA sense strand
gcugggaggugaagaccga

SEQ ID NO: 2273891 - RNA, 19 nt, Homo sapiens
  misc_RNA (1)...(19): siRNA sense strand
acuaccaucuccacagaaa

SEQ ID NO: 2273892 - RNA, 19 nt, Homo sapiens
  misc_RNA (1)...(19): siRNA sense strand
acuaccaucuccacagaaa

SEQ ID NO: 2273893 - RNA, 19 nt, Homo sapiens
  misc_RNA (1)...(19): siRNA sense strand
uggcagacgccuggaacaa

SEQ ID NO: 2273894 - RNA, 19 nt, Homo sapiens
  misc_RNA (1)...(19): siRNA sense strand
aggucuacauugacaucua

SEQ ID NO: 2273895 - RNA, 19 nt, Homo sapiens
  misc_RNA (1)...(19): siRNA sense strand
acaacaacagcuuggauga

SEQ ID NO: 2273896 - RNA, 19 nt, Homo sapiens
  misc_RNA (1)...(19): siRNA sense strand
ccgacaacagcaacagcaa

SEQ ID NO: 2273897 - RNA, 19 nt, Homo sapiens
  misc_RNA (1)...(19): siRNA sense strand
gugggaacuaugacggcaa

SEQ ID NO: 2273898 - RNA, 19 nt, Homo sapiens
  misc_RNA (1)...(19): siRNA sense strand
gggcuauaccagcggagga

SEQ ID NO: 2273899 - RNA, 19 nt, Homo sapiens
  misc_RNA (1)...(19): siRNA sense strand
ugcaagaccugggcagaaa

SEQ ID NO: 2273900 - RNA, 19 nt, Homo sapiens
  misc_RNA (1)...(19): siRNA sense strand
gguguagggcccaggaguu

SEQ ID NO: 2273901 - RNA, 19 nt, Homo sapiens
  misc_RNA (1)...(19): siRNA sense strand
agauaaggacauugaccca

SEQ ID NO: 2273902 - RNA, 19 nt, Homo sapiens
  misc_RNA (1)...(19): siRNA sense strand
ggcugauguuugagggaac

SEQ ID NO: 2273903 - RNA, 19 nt, Homo sapiens
  misc_RNA (1)...(19): siRNA sense strand
ccagcgaugaaguagcaaa

SEQ ID NO: 2273904 - RNA, 19 nt, Homo sapiens
  misc_RNA (1)...(19): siRNA sense strand
ccuguagggugcuggcaga

SEQ ID NO: 2273905 - RNA, 19 nt, Homo sapiens
  misc_RNA (1)...(19): siRNA sense strand
gcucagaggcuguaagguc

SEQ ID NO: 2273906 - RNA, 19 nt, Homo sapiens
  misc_RNA (1)...(19): siRNA sense strand
gugcauggucaguguggga

SEQ ID NO: 2273907 - RNA, 19 nt, Homo sapiens
  misc_RNA (1)...(19): siRNA sense strand
acgaggaccaggaguguca

SEQ ID NO: 2273908 - RNA, 19 nt, Homo sapiens
  misc_RNA (1)...(19): siRNA sense strand
gcuuaagggcagacgcacu

SEQ ID NO: 2273909 - RNA, 19 nt, Homo sapiens
  misc_RNA (1)...(19): siRNA sense strand
gggugagaugggaugguga

SEQ ID NO: 2273910 - RNA, 19 nt, Homo sapiens
  misc_RNA (1)...(19): siRNA sense strand
acaaggaggagcuggggaa

SEQ ID NO: 2273911 - RNA, 19 nt, Homo sapiens
  misc_RNA (1)...(19): siRNA sense strand
ccgaugugcucuggaaaca

SEQ ID NO: 2273912 - RNA, 19 nt, Homo sapiens
  misc_RNA (1)...(19): siRNA sense strand
cccaacaugcccucagaaa

SEQ ID NO: 2273913 - RNA, 19 nt, Homo sapiens
  misc_RNA (1)...(19): siRNA sense strand
ccaacaugcccucagaaaa

SEQ ID NO: 2273914 - RNA, 19 nt, Homo sapiens
  misc_RNA (1)...(19): siRNA sense strand
ccugcuuggucuacggaga

SEQ ID NO: 2273915 - RNA, 19 nt, Homo sapiens
  misc_RNA (1)...(19): siRNA sense strand
acuuuggcuucaugggcaa

SEQ ID NO: 2273916 - RNA, 19 nt, Homo sapiens
  misc_RNA (1)...(19): siRNA sense strand
ugcaaagaguugugcgucu

SEQ ID NO: 2273917 - RNA, 19 nt, Homo sapiens
  misc_RNA (1)...(19): siRNA sense strand
caguaaaagugcuaccaga

SEQ ID NO: 2273918 - RNA, 19 nt, Homo sapiens
  misc_RNA (1)...(19): siRNA sense strand
agaaugaggagcagggaca

SEQ ID NO: 2273919 - RNA, 19 nt, Homo sapiens
  misc_RNA (1)...(19): siRNA sense strand
gcggaaacuacgacaagaa

SEQ ID NO: 2273920 - RNA, 19 nt, Homo sapiens
  misc_RNA (1)...(19): siRNA sense strand
agaaagggucaucaggaaa

SEQ ID NO: 2273921 - RNA, 19 nt, Homo sapiens
  misc_RNA (1)...(19): siRNA sense strand
cagcggaacagcaggagaa

SEQ ID NO: 2273922 - RNA, 19 nt, Homo sapiens
  misc_RNA (1)...(19): siRNA sense strand
aggaagaggacgaacuaau

SEQ ID NO: 2273923 - RNA, 19 nt, Homo sapiens
  misc_RNA (1)...(19): siRNA sense strand
guucgcagcucuagggaca

SEQ ID NO: 2273924 - RNA, 19 nt, Homo sapiens
  misc_RNA (1)...(19): siRNA sense strand
ccacaaccuacuauggaaa

SEQ ID NO: 2273925 - RNA, 19 nt, Homo sapiens
  misc_RNA (1)...(19): siRNA sense strand
gagcugugaaugucagaaa

SEQ ID NO: 2273926 - RNA, 19 nt, Homo sapiens
  misc_RNA (1)...(19): siRNA sense strand
gugccaagcaugagaagga

SEQ ID NO: 2273927 - RNA, 19 nt, Homo sapiens
  misc_RNA (1)...(19): siRNA sense strand
gcuauaaagugcagcucca

SEQ ID NO: 2273928 - RNA, 19 nt, Homo sapiens
  misc_RNA (1)...(19): siRNA sense strand
acagaaagcuugcaggcga

SEQ ID NO: 2273929 - RNA, 19 nt, Homo sapiens
  misc_RNA (1)...(19): siRNA sense strand
gaacaagaacugugcgauc

SEQ ID NO: 2273930 - RNA, 19 nt, Homo sapiens
  misc_RNA (1)...(19): siRNA sense strand
gugaguggccugugcggaa

SEQ ID NO: 2273931 - RNA, 19 nt, Homo sapiens
  misc_RNA (1)...(19): siRNA sense strand
gugaaagcaacaacagaau

SEQ ID NO: 2273932 - RNA, 19 nt, Homo sapiens
  misc_RNA (1)...(19): siRNA sense strand
cagcacauacucuggcaaa

SEQ ID NO: 2273933 - RNA, 19 nt, Homo sapiens
  misc_RNA (1)...(19): siRNA sense strand
auaaacaacccgagggacu

SEQ ID NO: 2273934 - RNA, 19 nt, Homo sapiens
  misc_RNA (1)...(19): siRNA sense strand
gucuggagcuuguggucaa

SEQ ID NO: 2273935 - RNA, 19 nt, Homo sapiens
  misc_RNA (1)...(19): siRNA sense strand
cagccaagaaugaggagca

SEQ ID NO: 2273936 - RNA, 19 nt, Homo sapiens
  misc_RNA (1)...(19): siRNA sense strand
cagaaagcuugcaggcgau

SEQ ID NO: 2273937 - RNA, 19 nt, Homo sapiens
  misc_RNA (1)...(19): siRNA sense strand
cagcgaugaaguagcaaau

SEQ ID NO: 2273938 - RNA, 19 nt, Homo sapiens
  misc_RNA (1)...(19): siRNA sense strand
gcauaaacaacccgaggga

SEQ ID NO: 2273939 - RNA, 19 nt, Homo sapiens
  misc_RNA (1)...(19): siRNA sense strand
ccacaguccccaaagaaaa

SEQ ID NO: 2273940 - RNA, 19 nt, Homo sapiens
  misc_RNA (1)...(19): siRNA sense strand
acuaccaucucuacagaaa

SEQ ID NO: 2273941 - RNA, 19 nt, Homo sapiens
  misc_RNA (1)...(19): siRNA sense strand
gcacuuacaucuuggccca

SEQ ID NO: 2273942 - RNA, 19 nt, Homo sapiens
  misc_RNA (1)...(19): siRNA sense strand
acaacagcuuggaugacaa

SEQ ID NO: 2273943 - RNA, 19 nt, Homo sapiens
  misc_RNA (1)...(19): siRNA sense strand
gcuccaucccucugggcaa

SEQ ID NO: 2273944 - RNA, 19 nt, Homo sapiens
  misc_RNA (1)...(19): siRNA sense strand
gggugacagccaagaauga

SEQ ID NO: 2273945 - RNA, 19 nt, Homo sapiens
  misc_RNA (1)...(19): siRNA sense strand
guuggaaagauaaggacau

SEQ ID NO: 2273946 - RNA, 19 nt, Homo sapiens
  misc_RNA (1)...(19): siRNA sense strand
gaguugugcgucugugaaa

SEQ ID NO: 2273947 - RNA, 19 nt, Homo sapiens
  misc_RNA (1)...(19): siRNA sense strand
gcaacagcugggaggugaa

SEQ ID NO: 2273948 - RNA, 19 nt, Homo sapiens
  misc_RNA (1)...(19): siRNA sense strand
ccaaaugaccucugugacu

SEQ ID NO: 2273949 - RNA, 19 nt, Homo sapiens
  misc_RNA (1)...(19): siRNA sense strand
agugugacuuugaagacaa

SEQ ID NO: 2273950 - RNA, 19 nt, Homo sapiens
  misc_RNA (1)...(19): siRNA sense strand
auaucuaccuugaggcuga

SEQ ID NO: 2273951 - RNA, 19 nt, Homo sapiens
  misc_RNA (1)...(19): siRNA sense strand
cagcaggagacaaggagga

SEQ ID NO: 2273952 - RNA, 19 nt, Homo sapiens
  misc_RNA (1)...(19): siRNA sense strand
ugugaaagcaacaacagaa

SEQ ID NO: 2273953 - RNA, 19 nt, Homo sapiens
  misc_RNA (1)...(19): siRNA sense strand
caagagagcaagaggagcu

SEQ ID NO: 2273954 - RNA, 19 nt, Homo sapiens
  misc_RNA (1)...(19): siRNA sense strand
ccggcuaugugcugaguga

SEQ ID NO: 2273955 - RNA, 19 nt, Homo sapiens
  misc_RNA (1)...(19): siRNA sense strand
cccuaugaccagugugauu

SEQ ID NO: 2273956 - RNA, 19 nt, Homo sapiens
  misc_RNA (1)...(19): siRNA sense strand
gcauagaccucacgcccuu

SEQ ID NO: 2273957 - RNA, 19 nt, Homo sapiens
  misc_RNA (1)...(19): siRNA sense strand
augaugaggaagaggacga

SEQ ID NO: 2273958 - RNA, 19 nt, Homo sapiens
  misc_RNA (1)...(19): siRNA sense strand
gcugggaggugaagaccga

SEQ ID NO: 2273959 - RNA, 19 nt, Homo sapiens
  misc_RNA (1)...(19): siRNA sense strand
acuaccaucuccacagaaa

SEQ ID NO: 2273960 - RNA, 19 nt, Homo sapiens
  misc_RNA (1)...(19): siRNA sense strand
acuaccaucuccacagaaa

SEQ ID NO: 2273961 - RNA, 19 nt, Homo sapiens
  misc_RNA (1)...(19): siRNA sense strand
uggcagacgccuggaacaa

SEQ ID NO: 2273962 - RNA, 19 nt, Homo sapiens
  misc_RNA (1)...(19): siRNA sense strand
aggucuacauugacaucua

SEQ ID NO: 2273963 - RNA, 19 nt, Homo sapiens
  misc_RNA (1)...(19): siRNA sense strand
acaacaacagcuuggauga

SEQ ID NO: 2273964 - RNA, 19 nt, Homo sapiens
  misc_RNA (1)...(19): siRNA sense strand
ccgacaacagcaacagcaa

SEQ ID NO: 2273965 - RNA, 19 nt, Homo sapiens
  misc_RNA (1)...(19): siRNA sense strand
gugggaacuaugacggcaa

SEQ ID NO: 2273966 - RNA, 19 nt, Homo sapiens
  misc_RNA (1)...(19): siRNA sense strand
gggcuauaccagcggagga

SEQ ID NO: 2273967 - RNA, 19 nt, Homo sapiens
  misc_RNA (1)...(19): siRNA sense strand
ugcaagaccugggcagaaa

SEQ ID NO: 2273968 - RNA, 19 nt, Homo sapiens
  misc_RNA (1)...(19): siRNA sense strand
gguguagggcccaggaguu

SEQ ID NO: 2273969 - RNA, 19 nt, Homo sapiens
  misc_RNA (1)...(19): siRNA sense strand
agauaaggacauugaccca

SEQ ID NO: 2273970 - RNA, 19 nt, Homo sapiens
  misc_RNA (1)...(19): siRNA sense strand
ggcugauguuugagggaac

SEQ ID NO: 2273971 - RNA, 19 nt, Homo sapiens
  misc_RNA (1)...(19): siRNA sense strand
ccagcgaugaaguagcaaa

SEQ ID NO: 2273972 - RNA, 19 nt, Homo sapiens
  misc_RNA (1)...(19): siRNA sense strand
ccuguagggugcuggcaga

SEQ ID NO: 2273973 - RNA, 19 nt, Homo sapiens
  misc_RNA (1)...(19): siRNA sense strand
gcucagaggcuguaagguc

SEQ ID NO: 2273974 - RNA, 19 nt, Homo sapiens
  misc_RNA (1)...(19): siRNA sense strand
gugcauggucaguguggga

SEQ ID NO: 2273975 - RNA, 19 nt, Homo sapiens
  misc_RNA (1)...(19): siRNA sense strand
acgaggaccaggaguguca

SEQ ID NO: 2273976 - RNA, 19 nt, Homo sapiens
  misc_RNA (1)...(19): siRNA sense strand
gcuuaagggcagacgcacu

SEQ ID NO: 2273977 - RNA, 19 nt, Homo sapiens
  misc_RNA (1)...(19): siRNA sense strand
gggugagaugggaugguga

SEQ ID NO: 2273978 - RNA, 19 nt, Homo sapiens
  misc_RNA (1)...(19): siRNA sense strand
acaaggaggagcuggggaa

SEQ ID NO: 2273979 - RNA, 19 nt, Homo sapiens
  misc_RNA (1)...(19): siRNA sense strand
ccgaugugcucuggaaaca

SEQ ID NO: 2273980 - RNA, 19 nt, Homo sapiens
  misc_RNA (1)...(19): siRNA sense strand
cccaacaugcccucagaaa

SEQ ID NO: 2273981 - RNA, 19 nt, Homo sapiens
  misc_RNA (1)...(19): siRNA sense strand
ccaacaugcccucagaaaa

SEQ ID NO: 2273982 - RNA, 19 nt, Homo sapiens
  misc_RNA (1)...(19): siRNA sense strand
ccugcuuggucuacggaga

SEQ ID NO: 2273983 - RNA, 19 nt, Homo sapiens
  misc_RNA (1)...(19): siRNA sense strand
acuuuggcuucaugggcaa

SEQ ID NO: 2273984 - RNA, 19 nt, Homo sapiens
  misc_RNA (1)...(19): siRNA sense strand
ugcaaagaguugugcgucu

SEQ ID NO: 2273985 - RNA, 19 nt, Homo sapiens
  misc_RNA (1)...(19): siRNA sense strand
caguaaaagugcuaccaga

SEQ ID NO: 2273986 - RNA, 19 nt, Homo sapiens
  misc_RNA (1)...(19): siRNA sense strand
agaaugaggagcagggaca

SEQ ID NO: 2273987 - RNA, 19 nt, Homo sapiens
  misc_RNA (1)...(19): siRNA sense strand
gcggaaacuacgacaagaa

SEQ ID NO: 2273988 - RNA, 19 nt, Homo sapiens
  misc_RNA (1)...(19): siRNA sense strand
agaaagggucaucaggaaa

SEQ ID NO: 2273989 - RNA, 19 nt, Homo sapiens
  misc_RNA (1)...(19): siRNA sense strand
cagcggaacagcaggagaa

SEQ ID NO: 2273990 - RNA, 19 nt, Homo sapiens
  misc_RNA (1)...(19): siRNA sense strand
aggaagaggacgaacuaau

SEQ ID NO: 2273991 - RNA, 19 nt, Homo sapiens
  misc_RNA (1)...(19): siRNA sense strand
guucgcagcucuagggaca

SEQ ID NO: 2273992 - RNA, 19 nt, Homo sapiens
  misc_RNA (1)...(19): siRNA sense strand
ccacaaccuacuauggaaa

SEQ ID NO: 2273993 - RNA, 19 nt, Homo sapiens
  misc_RNA (1)...(19): siRNA sense strand
gagcugugaaugucagaaa

SEQ ID NO: 2273994 - RNA, 19 nt, Homo sapiens
  misc_RNA (1)...(19): siRNA sense strand
gugccaagcaugagaagga

SEQ ID NO: 2273995 - RNA, 19 nt, Homo sapiens
  misc_RNA (1)...(19): siRNA sense strand
gcuauaaagugcagcucca

SEQ ID NO: 2273996 - RNA, 19 nt, Homo sapiens
  misc_RNA (1)...(19): siRNA sense strand
acagaaagcuugcaggcga

SEQ ID NO: 2273997 - RNA, 19 nt, Homo sapiens
  misc_RNA (1)...(19): siRNA sense strand
gaacaagaacugugcgauc

SEQ ID NO: 2273998 - RNA, 19 nt, Homo sapiens
  misc_RNA (1)...(19): siRNA sense strand
gugaguggccugugcggaa

SEQ ID NO: 2273999 - RNA, 19 nt, Homo sapiens
  misc_RNA (1)...(19): siRNA sense strand
gugaaagcaacaacagaau

SEQ ID NO: 2274000 - RNA, 19 nt, Homo sapiens
  misc_RNA (1)...(19): siRNA sense strand
cagcacauacucuggcaaa

SEQ ID NO: 2274001 - RNA, 19 nt, Homo sapiens
  misc_RNA (1)...(19): siRNA sense strand
auaaacaacccgagggacu

SEQ ID NO: 2274002 - RNA, 19 nt, Homo sapiens
  misc_RNA (1)...(19): siRNA sense strand
gucuggagcuuguggucaa

SEQ ID NO: 2274003 - RNA, 19 nt, Homo sapiens
  misc_RNA (1)...(19): siRNA sense strand
cagccaagaaugaggagca

SEQ ID NO: 2274004 - RNA, 19 nt, Homo sapiens
  misc_RNA (1)...(19): siRNA sense strand
cagaaagcuugcaggcgau

SEQ ID NO: 2274005 - RNA, 19 nt, Homo sapiens
  misc_RNA (1)...(19): siRNA sense strand
cagcgaugaaguagcaaau

SEQ ID NO: 2274006 - RNA, 19 nt, Homo sapiens
  misc_RNA (1)...(19): siRNA sense strand
gcauaaacaacccgaggga

SEQ ID NO: 2274007 - RNA, 19 nt, Homo sapiens
  misc_RNA (1)...(19): siRNA sense strand
ccacaguccccaaagaaaa

SEQ ID NO: 2274008 - RNA, 19 nt, Homo sapiens
  misc_RNA (1)...(19): siRNA sense strand
acuaccaucucuacagaaa

SEQ ID NO: 2274009 - RNA, 19 nt, Homo sapiens
  misc_RNA (1)...(19): siRNA sense strand
gcacuuacaucuuggccca

SEQ ID NO: 2274010 - RNA, 19 nt, Homo sapiens
  misc_RNA (1)...(19): siRNA sense strand
acaacagcuuggaugacaa

SEQ ID NO: 2274011 - RNA, 19 nt, Homo sapiens
  misc_RNA (1)...(19): siRNA sense strand
gcuccaucccucugggcaa

SEQ ID NO: 2274012 - RNA, 19 nt, Homo sapiens
  misc_RNA (1)...(19): siRNA sense strand
gggugacagccaagaauga

SEQ ID NO: 2274013 - RNA, 19 nt, Homo sapiens
  misc_RNA (1)...(19): siRNA sense strand
guuggaaagauaaggacau

SEQ ID NO: 2274014 - RNA, 19 nt, Homo sapiens
  misc_RNA (1)...(19): siRNA sense strand
gaguugugcgucugugaaa

SEQ ID NO: 2274015 - RNA, 19 nt, Homo sapiens
  misc_RNA (1)...(19): siRNA sense strand
gcaacagcugggaggugaa

SEQ ID NO: 2274016 - RNA, 19 nt, Homo sapiens
  misc_RNA (1)...(19): siRNA sense strand
ccaaaugaccucugugacu

SEQ ID NO: 2274017 - RNA, 19 nt, Homo sapiens
  misc_RNA (1)...(19): siRNA sense strand
agugugacuuugaagacaa

SEQ ID NO: 2274018 - RNA, 19 nt, Homo sapiens
  misc_RNA (1)...(19): siRNA sense strand
auaucuaccuugaggcuga

SEQ ID NO: 2274019 - RNA, 19 nt, Homo sapiens
  misc_RNA (1)...(19): siRNA sense strand
cagcaggagacaaggagga

SEQ ID NO: 2274020 - RNA, 19 nt, Homo sapiens
  misc_RNA (1)...(19): siRNA sense strand
ugugaaagcaacaacagaa

SEQ ID NO: 2274021 - RNA, 19 nt, Homo sapiens
  misc_RNA (1)...(19): siRNA sense strand
caagagagcaagaggagcu

SEQ ID NO: 2274022 - RNA, 19 nt, Homo sapiens
  misc_RNA (1)...(19): siRNA sense strand
ccggcuaugugcugaguga

SEQ ID NO: 2274023 - RNA, 19 nt, Homo sapiens
  misc_RNA (1)...(19): siRNA sense strand
cccuaugaccagugugauu

SEQ ID NO: 2274024 - RNA, 19 nt, Homo sapiens
  misc_RNA (1)...(19): siRNA sense strand
gcauagaccucacgcccuu

SEQ ID NO: 2274025 - RNA, 19 nt, Homo sapiens
  misc_RNA (1)...(19): siRNA sense strand
augaugaggaagaggacga

SEQ ID NO: 2274026 - RNA, 19 nt, Homo sapiens
  misc_RNA (1)...(19): siRNA sense strand
gcugggaggugaagaccga

SEQ ID NO: 2274027 - RNA, 19 nt, Homo sapiens
  misc_RNA (1)...(19): siRNA sense strand
acuaccaucuccacagaaa

SEQ ID NO: 2274028 - RNA, 19 nt, Homo sapiens
  misc_RNA (1)...(19): siRNA sense strand
acuaccaucuccacagaaa

SEQ ID NO: 2274029 - RNA, 19 nt, Homo sapiens
  misc_RNA (1)...(19): siRNA sense strand
uggcagacgccuggaacaa

SEQ ID NO: 2274030 - RNA, 19 nt, Homo sapiens
  misc_RNA (1)...(19): siRNA sense strand
aggucuacauugacaucua

SEQ ID NO: 2274031 - RNA, 19 nt, Homo sapiens
  misc_RNA (1)...(19): siRNA sense strand
acaacaacagcuuggauga

SEQ ID NO: 2274032 - RNA, 19 nt, Homo sapiens
  misc_RNA (1)...(19): siRNA sense strand
ccgacaacagcaacagcaa

SEQ ID NO: 2274033 - RNA, 19 nt, Homo sapiens
  misc_RNA (1)...(19): siRNA sense strand
gugggaacuaugacggcaa

SEQ ID NO: 2274034 - RNA, 19 nt, Homo sapiens
  misc_RNA (1)...(19): siRNA sense strand
gggcuauaccagcggagga

SEQ ID NO: 2274035 - RNA, 19 nt, Homo sapiens
  misc_RNA (1)...(19): siRNA sense strand
ugcaagaccugggcagaaa

SEQ ID NO: 2274036 - RNA, 19 nt, Homo sapiens
  misc_RNA (1)...(19): siRNA sense strand
gguguagggcccaggaguu

SEQ ID NO: 2274037 - RNA, 19 nt, Homo sapiens
  misc_RNA (1)...(19): siRNA sense strand
agauaaggacauugaccca

SEQ ID NO: 2274038 - RNA, 19 nt, Homo sapiens
  misc_RNA (1)...(19): siRNA sense strand
ggcugauguuugagggaac

SEQ ID NO: 2274039 - RNA, 19 nt, Homo sapiens
  misc_RNA (1)...(19): siRNA sense strand
ccagcgaugaaguagcaaa

SEQ ID NO: 2274040 - RNA, 19 nt, Homo sapiens
  misc_RNA (1)...(19): siRNA sense strand
ccuguagggugcuggcaga

SEQ ID NO: 2274041 - RNA, 19 nt, Homo sapiens
  misc_RNA (1)...(19): siRNA sense strand
gcucagaggcuguaagguc

SEQ ID NO: 2274042 - RNA, 19 nt, Homo sapiens
  misc_RNA (1)...(19): siRNA sense strand
gugcauggucaguguggga

SEQ ID NO: 2274043 - RNA, 19 nt, Homo sapiens
  misc_RNA (1)...(19): siRNA sense strand
acgaggaccaggaguguca

SEQ ID NO: 2274044 - RNA, 19 nt, Homo sapiens
  misc_RNA (1)...(19): siRNA sense strand
gcuuaagggcagacgcacu

SEQ ID NO: 2274045 - RNA, 19 nt, Homo sapiens
  misc_RNA (1)...(19): siRNA sense strand
gggugagaugggaugguga

SEQ ID NO: 2274046 - RNA, 19 nt, Homo sapiens
  misc_RNA (1)...(19): siRNA sense strand
acaaggaggagcuggggaa

SEQ ID NO: 2274047 - RNA, 19 nt, Homo sapiens
  misc_RNA (1)...(19): siRNA sense strand
ccgaugugcucuggaaaca

SEQ ID NO: 2274048 - RNA, 19 nt, Homo sapiens
  misc_RNA (1)...(19): siRNA sense strand
cccaacaugcccucagaaa

SEQ ID NO: 2274049 - RNA, 19 nt, Homo sapiens
  misc_RNA (1)...(19): siRNA sense strand
ccaacaugcccucagaaaa

SEQ ID NO: 2274050 - RNA, 19 nt, Homo sapiens
  misc_RNA (1)...(19): siRNA sense strand
ccugcuuggucuacggaga

SEQ ID NO: 2274051 - RNA, 19 nt, Homo sapiens
  misc_RNA (1)...(19): siRNA sense strand
acuuuggcuucaugggcaa

SEQ ID NO: 2274052 - RNA, 19 nt, Homo sapiens
  misc_RNA (1)...(19): siRNA sense strand
ugcaaagaguugugcgucu

SEQ ID NO: 2274053 - RNA, 19 nt, Homo sapiens
  misc_RNA (1)...(19): siRNA sense strand
caguaaaagugcuaccaga

SEQ ID NO: 2274054 - RNA, 19 nt, Homo sapiens
  misc_RNA (1)...(19): siRNA sense strand
agaaugaggagcagggaca

SEQ ID NO: 2274055 - RNA, 19 nt, Homo sapiens
  misc_RNA (1)...(19): siRNA sense strand
gcggaaacuacgacaagaa

SEQ ID NO: 2274056 - RNA, 19 nt, Homo sapiens
  misc_RNA (1)...(19): siRNA sense strand
agaaagggucaucaggaaa

SEQ ID NO: 2274057 - RNA, 19 nt, Homo sapiens
  misc_RNA (1)...(19): siRNA sense strand
cagcggaacagcaggagaa

SEQ ID NO: 2274058 - RNA, 19 nt, Homo sapiens
  misc_RNA (1)...(19): siRNA sense strand
aggaagaggacgaacuaau

SEQ ID NO: 2274059 - RNA, 19 nt, Homo sapiens
  misc_RNA (1)...(19): siRNA sense strand
guucgcagcucuagggaca

SEQ ID NO: 2274060 - RNA, 19 nt, Homo sapiens
  misc_RNA (1)...(19): siRNA sense strand
ccacaaccuacuauggaaa

SEQ ID NO: 2274061 - RNA, 19 nt, Homo sapiens
  misc_RNA (1)...(19): siRNA sense strand
gagcugugaaugucagaaa

SEQ ID NO: 2274062 - RNA, 19 nt, Homo sapiens
  misc_RNA (1)...(19): siRNA sense strand
gugccaagcaugagaagga

SEQ ID NO: 2274063 - RNA, 19 nt, Homo sapiens
  misc_RNA (1)...(19): siRNA sense strand
gcuauaaagugcagcucca

SEQ ID NO: 2274064 - RNA, 19 nt, Homo sapiens
  misc_RNA (1)...(19): siRNA sense strand
acagaaagcuugcaggcga

SEQ ID NO: 2274065 - RNA, 19 nt, Homo sapiens
  misc_RNA (1)...(19): siRNA sense strand
gaacaagaacugugcgauc

SEQ ID NO: 2274066 - RNA, 19 nt, Homo sapiens
  misc_RNA (1)...(19): siRNA sense strand
gugaguggccugugcggaa

SEQ ID NO: 2274067 - RNA, 19 nt, Homo sapiens
  misc_RNA (1)...(19): siRNA sense strand
gugaaagcaacaacagaau

SEQ ID NO: 2274068 - RNA, 19 nt, Homo sapiens
  misc_RNA (1)...(19): siRNA sense strand
cagcacauacucuggcaaa

SEQ ID NO: 2274069 - RNA, 19 nt, Homo sapiens
  misc_RNA (1)...(19): siRNA sense strand
auaaacaacccgagggacu

SEQ ID NO: 2274070 - RNA, 19 nt, Homo sapiens
  misc_RNA (1)...(19): siRNA sense strand
gucuggagcuuguggucaa

SEQ ID NO: 2274071 - RNA, 19 nt, Homo sapiens
  misc_RNA (1)...(19): siRNA sense strand
cagccaagaaugaggagca

SEQ ID NO: 2274072 - RNA, 19 nt, Homo sapiens
  misc_RNA (1)...(19): siRNA sense strand
cagaaagcuugcaggcgau

SEQ ID NO: 2274073 - RNA, 19 nt, Homo sapiens
  misc_RNA (1)...(19): siRNA sense strand
cagcgaugaaguagcaaau

SEQ ID NO: 2274074 - RNA, 19 nt, Homo sapiens
  misc_RNA (1)...(19): siRNA sense strand
gcauaaacaacccgaggga

SEQ ID NO: 2274075 - RNA, 19 nt, Homo sapiens
  misc_RNA (1)...(19): siRNA sense strand
ccacaguccccaaagaaaa

SEQ ID NO: 2274076 - RNA, 19 nt, Homo sapiens
  misc_RNA (1)...(19): siRNA sense strand
acuaccaucucuacagaaa

SEQ ID NO: 2274077 - RNA, 19 nt, Homo sapiens
  misc_RNA (1)...(19): siRNA sense strand
gcacuuacaucuuggccca

SEQ ID NO: 2274078 - RNA, 19 nt, Homo sapiens
  misc_RNA (1)...(19): siRNA sense strand
acaacagcuuggaugacaa

SEQ ID NO: 2274079 - RNA, 19 nt, Homo sapiens
  misc_RNA (1)...(19): siRNA sense strand
gcuccaucccucugggcaa

SEQ ID NO: 2274080 - RNA, 19 nt, Homo sapiens
  misc_RNA (1)...(19): siRNA sense strand
gggugacagccaagaauga

SEQ ID NO: 2274081 - RNA, 19 nt, Homo sapiens
  misc_RNA (1)...(19): siRNA sense strand
guuggaaagauaaggacau

SEQ ID NO: 2274082 - RNA, 19 nt, Homo sapiens
  misc_RNA (1)...(19): siRNA sense strand
gaguugugcgucugugaaa

SEQ ID NO: 2274083 - RNA, 19 nt, Homo sapiens
  misc_RNA (1)...(19): siRNA sense strand
gcaacagcugggaggugaa

SEQ ID NO: 2274084 - RNA, 19 nt, Homo sapiens
  misc_RNA (1)...(19): siRNA sense strand
ccaaaugaccucugugacu

SEQ ID NO: 2274085 - RNA, 19 nt, Homo sapiens
  misc_RNA (1)...(19): siRNA sense strand
agugugacuuugaagacaa

SEQ ID NO: 2274086 - RNA, 19 nt, Homo sapiens
  misc_RNA (1)...(19): siRNA sense strand
auaucuaccuugaggcuga

SEQ ID NO: 2274087 - RNA, 19 nt, Homo sapiens
  misc_RNA (1)...(19): siRNA sense strand
cagcaggagacaaggagga

SEQ ID NO: 2274088 - RNA, 19 nt, Homo sapiens
  misc_RNA (1)...(19): siRNA sense strand
ugugaaagcaacaacagaa

SEQ ID NO: 2274089 - RNA, 19 nt, Homo sapiens
  misc_RNA (1)...(19): siRNA sense strand
caagagagcaagaggagcu

SEQ ID NO: 2274090 - RNA, 19 nt, Homo sapiens
  misc_RNA (1)...(19): siRNA sense strand
ccggcuaugugcugaguga

SEQ ID NO: 2274091 - RNA, 19 nt, Homo sapiens
  misc_RNA (1)...(19): siRNA sense strand
cccuaugaccagugugauu

SEQ ID NO: 2274092 - RNA, 19 nt, Homo sapiens
  misc_RNA (1)...(19): siRNA sense strand
gcauagaccucacgcccuu

SEQ ID NO: 2274093 - RNA, 19 nt, Homo sapiens
  misc_RNA (1)...(19): siRNA sense strand
augaugaggaagaggacga

SEQ ID NO: 2274094 - RNA, 19 nt, Homo sapiens
  misc_RNA (1)...(19): siRNA sense strand
gcugggaggugaagaccga

SEQ ID NO: 2274095 - RNA, 19 nt, Homo sapiens
  misc_RNA (1)...(19): siRNA sense strand
acuaccaucuccacagaaa

SEQ ID NO: 2274096 - RNA, 19 nt, Homo sapiens
  misc_RNA (1)...(19): siRNA sense strand
acuaccaucuccacagaaa

SEQ ID NO: 2274097 - RNA, 19 nt, Homo sapiens
  misc_RNA (1)...(19): siRNA sense strand
uggcagacgccuggaacaa

SEQ ID NO: 2274098 - RNA, 19 nt, Homo sapiens
  misc_RNA (1)...(19): siRNA sense strand
aggucuacauugacaucua

SEQ ID NO: 2274099 - RNA, 19 nt, Homo sapiens
  misc_RNA (1)...(19): siRNA sense strand
acaacaacagcuuggauga

SEQ ID NO: 2274100 - RNA, 19 nt, Homo sapiens
  misc_RNA (1)...(19): siRNA sense strand
ccgacaacagcaacagcaa

SEQ ID NO: 2274101 - RNA, 19 nt, Homo sapiens
  misc_RNA (1)...(19): siRNA sense strand
gugggaacuaugacggcaa

SEQ ID NO: 2274102 - RNA, 19 nt, Homo sapiens
  misc_RNA (1)...(19): siRNA sense strand
gggcuauaccagcggagga

SEQ ID NO: 2274103 - RNA, 19 nt, Homo sapiens
  misc_RNA (1)...(19): siRNA sense strand
ugcaagaccugggcagaaa

SEQ ID NO: 2274104 - RNA, 19 nt, Homo sapiens
  misc_RNA (1)...(19): siRNA sense strand
gguguagggcccaggaguu

SEQ ID NO: 2274105 - RNA, 19 nt, Homo sapiens
  misc_RNA (1)...(19): siRNA sense strand
agauaaggacauugaccca

SEQ ID NO: 2274106 - RNA, 19 nt, Homo sapiens
  misc_RNA (1)...(19): siRNA sense strand
ggcugauguuugagggaac

SEQ ID NO: 2274107 - RNA, 19 nt, Homo sapiens
  misc_RNA (1)...(19): siRNA sense strand
ccagcgaugaaguagcaaa

SEQ ID NO: 2274108 - RNA, 19 nt, Homo sapiens
  misc_RNA (1)...(19): siRNA sense strand
ccuguagggugcuggcaga

SEQ ID NO: 2274109 - RNA, 19 nt, Homo sapiens
  misc_RNA (1)...(19): siRNA sense strand
gcucagaggcuguaagguc

SEQ ID NO: 2274110 - RNA, 19 nt, Homo sapiens
  misc_RNA (1)...(19): siRNA sense strand
gugcauggucaguguggga

SEQ ID NO: 2274111 - RNA, 19 nt, Homo sapiens
  misc_RNA (1)...(19): siRNA sense strand
acgaggaccaggaguguca

SEQ ID NO: 2274112 - RNA, 19 nt, Homo sapiens
  misc_RNA (1)...(19): siRNA sense strand
gcuuaagggcagacgcacu

SEQ ID NO: 2274113 - RNA, 19 nt, Homo sapiens
  misc_RNA (1)...(19): siRNA sense strand
gggugagaugggaugguga

SEQ ID NO: 2274114 - RNA, 19 nt, Homo sapiens
  misc_RNA (1)...(19): siRNA sense strand
acaaggaggagcuggggaa

SEQ ID NO: 2274115 - RNA, 19 nt, Homo sapiens
  misc_RNA (1)...(19): siRNA sense strand
ccgaugugcucuggaaaca

SEQ ID NO: 2274116 - RNA, 19 nt, Homo sapiens
  misc_RNA (1)...(19): siRNA sense strand
cccaacaugcccucagaaa

SEQ ID NO: 2274117 - RNA, 19 nt, Homo sapiens
  misc_RNA (1)...(19): siRNA sense strand
ccaacaugcccucagaaaa

SEQ ID NO: 2274118 - RNA, 19 nt, Homo sapiens
  misc_RNA (1)...(19): siRNA sense strand
ccugcuuggucuacggaga

SEQ ID NO: 2274119 - RNA, 19 nt, Homo sapiens
  misc_RNA (1)...(19): siRNA sense strand
acuuuggcuucaugggcaa

SEQ ID NO: 2274120 - RNA, 19 nt, Homo sapiens
  misc_RNA (1)...(19): siRNA sense strand
ugcaaagaguugugcgucu

SEQ ID NO: 2274121 - RNA, 19 nt, Homo sapiens
  misc_RNA (1)...(19): siRNA sense strand
caguaaaagugcuaccaga

SEQ ID NO: 2274122 - RNA, 19 nt, Homo sapiens
  misc_RNA (1)...(19): siRNA sense strand
gaggaggaagagagagaaa

SEQ ID NO: 2274123 - RNA, 19 nt, Homo sapiens
  misc_RNA (1)...(19): siRNA sense strand
acgaggaggaagagagaga

SEQ ID NO: 2274124 - RNA, 19 nt, Homo sapiens
  misc_RNA (1)...(19): siRNA sense strand
agaaugaggagcagggaca

SEQ ID NO: 2274125 - RNA, 19 nt, Homo sapiens
  misc_RNA (1)...(19): siRNA sense strand
gcggaaacuacgacaagaa

SEQ ID NO: 2274126 - RNA, 19 nt, Homo sapiens
  misc_RNA (1)...(19): siRNA sense strand
agaaagggucaucaggaaa

SEQ ID NO: 2274127 - RNA, 19 nt, Homo sapiens
  misc_RNA (1)...(19): siRNA sense strand
cagcggaacagcaggagaa

SEQ ID NO: 2274128 - RNA, 19 nt, Homo sapiens
  misc_RNA (1)...(19): siRNA sense strand
aggaagaggacgaacuaau

SEQ ID NO: 2274129 - RNA, 19 nt, Homo sapiens
  misc_RNA (1)...(19): siRNA sense strand
guucgcagcucuagggaca

SEQ ID NO: 2274130 - RNA, 19 nt, Homo sapiens
  misc_RNA (1)...(19): siRNA sense strand
ccacaaccuacuauggaaa

SEQ ID NO: 2274131 - RNA, 19 nt, Homo sapiens
  misc_RNA (1)...(19): siRNA sense strand
gagcugugaaugucagaaa

SEQ ID NO: 2274132 - RNA, 19 nt, Homo sapiens
  misc_RNA (1)...(19): siRNA sense strand
gugccaagcaugagaagga

SEQ ID NO: 2274133 - RNA, 19 nt, Homo sapiens
  misc_RNA (1)...(19): siRNA sense strand
gcuauaaagugcagcucca

SEQ ID NO: 2274134 - RNA, 19 nt, Homo sapiens
  misc_RNA (1)...(19): siRNA sense strand
acagaaagcuugcaggcga

SEQ ID NO: 2274135 - RNA, 19 nt, Homo sapiens
  misc_RNA (1)...(19): siRNA sense strand
gaacaagaacugugcgauc

SEQ ID NO: 2274136 - RNA, 19 nt, Homo sapiens
  misc_RNA (1)...(19): siRNA sense strand
gugaguggccugugcggaa

SEQ ID NO: 2274137 - RNA, 19 nt, Homo sapiens
  misc_RNA (1)...(19): siRNA sense strand
gugaaagcaacaacagaau

SEQ ID NO: 2274138 - RNA, 19 nt, Homo sapiens
  misc_RNA (1)...(19): siRNA sense strand
cagcacauacucuggcaaa

SEQ ID NO: 2274139 - RNA, 19 nt, Homo sapiens
  misc_RNA (1)...(19): siRNA sense strand
auaaacaacccgagggacu

SEQ ID NO: 2274140 - RNA, 19 nt, Homo sapiens
  misc_RNA (1)...(19): siRNA sense strand
gucuggagcuuguggucaa

SEQ ID NO: 2274141 - RNA, 19 nt, Homo sapiens
  misc_RNA (1)...(19): siRNA sense strand
agaaaacgcaggagggaga

SEQ ID NO: 2274142 - RNA, 19 nt, Homo sapiens
  misc_RNA (1)...(19): siRNA sense strand
cagccaagaaugaggagca

SEQ ID NO: 2274143 - RNA, 19 nt, Homo sapiens
  misc_RNA (1)...(19): siRNA sense strand
cagaaagcuugcaggcgau

SEQ ID NO: 2274144 - RNA, 19 nt, Homo sapiens
  misc_RNA (1)...(19): siRNA sense strand
cagcgaugaaguagcaaau

SEQ ID NO: 2274145 - RNA, 19 nt, Homo sapiens
  misc_RNA (1)...(19): siRNA sense strand
gcgagugugaaguugguua

SEQ ID NO: 2274146 - RNA, 19 nt, Homo sapiens
  misc_RNA (1)...(19): siRNA sense strand
gcauaaacaacccgaggga

SEQ ID NO: 2274147 - RNA, 19 nt, Homo sapiens
  misc_RNA (1)...(19): siRNA sense strand
ccacaguccccaaagaaaa

SEQ ID NO: 2274148 - RNA, 19 nt, Homo sapiens
  misc_RNA (1)...(19): siRNA sense strand
acuaccaucucuacagaaa

SEQ ID NO: 2274149 - RNA, 19 nt, Homo sapiens
  misc_RNA (1)...(19): siRNA sense strand
gcacuuacaucuuggccca

SEQ ID NO: 2274150 - RNA, 19 nt, Homo sapiens
  misc_RNA (1)...(19): siRNA sense strand
acaacagcuuggaugacaa

SEQ ID NO: 2274151 - RNA, 19 nt, Homo sapiens
  misc_RNA (1)...(19): siRNA sense strand
gcuccaucccucugggcaa

SEQ ID NO: 2274152 - RNA, 19 nt, Homo sapiens
  misc_RNA (1)...(19): siRNA sense strand
gggugacagccaagaauga

SEQ ID NO: 2274153 - RNA, 19 nt, Homo sapiens
  misc_RNA (1)...(19): siRNA sense strand
guuggaaagauaaggacau

SEQ ID NO: 2274154 - RNA, 19 nt, Homo sapiens
  misc_RNA (1)...(19): siRNA sense strand
gaguugugcgucugugaaa

SEQ ID NO: 2274155 - RNA, 19 nt, Homo sapiens
  misc_RNA (1)...(19): siRNA sense strand
gcaacagcugggaggugaa

SEQ ID NO: 2274156 - RNA, 19 nt, Homo sapiens
  misc_RNA (1)...(19): siRNA sense strand
ccaaaugaccucugugacu

SEQ ID NO: 2274157 - RNA, 19 nt, Homo sapiens
  misc_RNA (1)...(19): siRNA sense strand
agugugacuuugaagacaa

SEQ ID NO: 2274158 - RNA, 19 nt, Homo sapiens
  misc_RNA (1)...(19): siRNA sense strand
auaucuaccuugaggcuga

SEQ ID NO: 2274159 - RNA, 19 nt, Homo sapiens
  misc_RNA (1)...(19): siRNA sense strand
cagcaggagacaaggagga

SEQ ID NO: 2274160 - RNA, 19 nt, Homo sapiens
  misc_RNA (1)...(19): siRNA sense strand
ugugaaagcaacaacagaa

SEQ ID NO: 2274161 - RNA, 19 nt, Homo sapiens
  misc_RNA (1)...(19): siRNA sense strand
caagagagcaagaggagcu

SEQ ID NO: 2274162 - RNA, 19 nt, Homo sapiens
  misc_RNA (1)...(19): siRNA sense strand
ccggcuaugugcugaguga

SEQ ID NO: 2274163 - RNA, 19 nt, Homo sapiens
  misc_RNA (1)...(19): siRNA sense strand
cccuaugaccagugugauu

SEQ ID NO: 2274164 - RNA, 19 nt, Homo sapiens
  misc_RNA (1)...(19): siRNA sense strand
gcauagaccucacgcccuu

SEQ ID NO: 2274165 - RNA, 19 nt, Homo sapiens
  misc_RNA (1)...(19): siRNA sense strand
augaugaggaagaggacga

SEQ ID NO: 2274166 - RNA, 19 nt, Homo sapiens
  misc_RNA (1)...(19): siRNA sense strand
gcugggaggugaagaccga

SEQ ID NO: 2274167 - RNA, 19 nt, Homo sapiens
  misc_RNA (1)...(19): siRNA sense strand
acuaccaucuccacagaaa

SEQ ID NO: 2274168 - RNA, 19 nt, Homo sapiens
  misc_RNA (1)...(19): siRNA sense strand
acuaccaucuccacagaaa

SEQ ID NO: 2274169 - RNA, 19 nt, Homo sapiens
  misc_RNA (1)...(19): siRNA sense strand
uggcagacgccuggaacaa

SEQ ID NO: 2274170 - RNA, 19 nt, Homo sapiens
  misc_RNA (1)...(19): siRNA sense strand
aggucuacauugacaucua

SEQ ID NO: 2274171 - RNA, 19 nt, Homo sapiens
  misc_RNA (1)...(19): siRNA sense strand
acaacaacagcuuggauga

SEQ ID NO: 2274172 - RNA, 19 nt, Homo sapiens
  misc_RNA (1)...(19): siRNA sense strand
ccgacaacagcaacagcaa

SEQ ID NO: 2274173 - RNA, 19 nt, Homo sapiens
  misc_RNA (1)...(19): siRNA sense strand
gugggaacuaugacggcaa

SEQ ID NO: 2274174 - RNA, 19 nt, Homo sapiens
  misc_RNA (1)...(19): siRNA sense strand
gggcuauaccagcggagga

SEQ ID NO: 2274175 - RNA, 19 nt, Homo sapiens
  misc_RNA (1)...(19): siRNA sense strand
ugcaagaccugggcagaaa

SEQ ID NO: 2274176 - RNA, 19 nt, Homo sapiens
  misc_RNA (1)...(19): siRNA sense strand
gguguagggcccaggaguu

SEQ ID NO: 2274177 - RNA, 19 nt, Homo sapiens
  misc_RNA (1)...(19): siRNA sense strand
agauaaggacauugaccca

SEQ ID NO: 2274178 - RNA, 19 nt, Homo sapiens
  misc_RNA (1)...(19): siRNA sense strand
ggcugauguuugagggaac

SEQ ID NO: 2274179 - RNA, 19 nt, Homo sapiens
  misc_RNA (1)...(19): siRNA sense strand
ccagcgaugaaguagcaaa

SEQ ID NO: 2274180 - RNA, 19 nt, Homo sapiens
  misc_RNA (1)...(19): siRNA sense strand
ccuguagggugcuggcaga

SEQ ID NO: 2274181 - RNA, 19 nt, Homo sapiens
  misc_RNA (1)...(19): siRNA sense strand
gcucagaggcuguaagguc

SEQ ID NO: 2274182 - RNA, 19 nt, Homo sapiens
  misc_RNA (1)...(19): siRNA sense strand
gugcauggucaguguggga

SEQ ID NO: 2274183 - RNA, 19 nt, Homo sapiens
  misc_RNA (1)...(19): siRNA sense strand
acgaggaccaggaguguca

SEQ ID NO: 2274184 - RNA, 19 nt, Homo sapiens
  misc_RNA (1)...(19): siRNA sense strand
uacagaacgaggaggaaga

SEQ ID NO: 2274185 - RNA, 19 nt, Homo sapiens
  misc_RNA (1)...(19): siRNA sense strand
gcuuaagggcagacgcacu

SEQ ID NO: 2274186 - RNA, 19 nt, Homo sapiens
  misc_RNA (1)...(19): siRNA sense strand
gggugagaugggaugguga

SEQ ID NO: 2274187 - RNA, 19 nt, Homo sapiens
  misc_RNA (1)...(19): siRNA sense strand
acaaggaggagcuggggaa

SEQ ID NO: 2274188 - RNA, 19 nt, Homo sapiens
  misc_RNA (1)...(19): siRNA sense strand
ccgaugugcucuggaaaca

SEQ ID NO: 2274189 - RNA, 19 nt, Homo sapiens
  misc_RNA (1)...(19): siRNA sense strand
cccaacaugcccucagaaa

SEQ ID NO: 2274190 - RNA, 19 nt, Homo sapiens
  misc_RNA (1)...(19): siRNA sense strand
gggaagaaguuuaagucga

SEQ ID NO: 2274191 - RNA, 19 nt, Homo sapiens
  misc_RNA (1)...(19): siRNA sense strand
agguggaacuguagacauu

SEQ ID NO: 2274192 - RNA, 19 nt, Homo sapiens
  misc_RNA (1)...(19): siRNA sense strand
uggaagugaucguaggaga

SEQ ID NO: 2274193 - RNA, 19 nt, Homo sapiens
  misc_RNA (1)...(19): siRNA sense strand
acaaaaugcacaaguguaa

SEQ ID NO: 2274194 - RNA, 19 nt, Homo sapiens
  misc_RNA (1)...(19): siRNA sense strand
uagaaagggauuuaggcaa

SEQ ID NO: 2274195 - RNA, 19 nt, Homo sapiens
  misc_RNA (1)...(19): siRNA sense strand
cugacauaacugugcauaa

SEQ ID NO: 2274196 - RNA, 19 nt, Homo sapiens
  misc_RNA (1)...(19): siRNA sense strand
ugucaucauuccugagcaa

SEQ ID NO: 2274197 - RNA, 19 nt, Homo sapiens
  misc_RNA (1)...(19): siRNA sense strand
cugaagucaucaaggugua

SEQ ID NO: 2274198 - RNA, 19 nt, Homo sapiens
  misc_RNA (1)...(19): siRNA sense strand
gugugagaugugcgagaaa

SEQ ID NO: 2274199 - RNA, 19 nt, Homo sapiens
  misc_RNA (1)...(19): siRNA sense strand
gcacauaaugagacaccau

SEQ ID NO: 2274200 - RNA, 19 nt, Homo sapiens
  misc_RNA (1)...(19): siRNA sense strand
guuggaugaugcuggcaaa

SEQ ID NO: 2274201 - RNA, 19 nt, Homo sapiens
  misc_RNA (1)...(19): siRNA sense strand
aggcaguaccaaacagcaa

SEQ ID NO: 2274202 - RNA, 19 nt, Homo sapiens
  misc_RNA (1)...(19): siRNA sense strand
uagacauuguggagaguga

SEQ ID NO: 2274203 - RNA, 19 nt, Homo sapiens
  misc_RNA (1)...(19): siRNA sense strand
agaaagggauuuaggcaac

SEQ ID NO: 2274204 - RNA, 19 nt, Homo sapiens
  misc_RNA (1)...(19): siRNA sense strand
uggcuaaacagaaaccaaa

SEQ ID NO: 2274205 - RNA, 19 nt, Homo sapiens
  misc_RNA (1)...(19): siRNA sense strand
cuacacacauggaugguga

SEQ ID NO: 2274206 - RNA, 19 nt, Homo sapiens
  misc_RNA (1)...(19): siRNA sense strand
cauaaugagacaccauaaa

SEQ ID NO: 2274207 - RNA, 19 nt, Homo sapiens
  misc_RNA (1)...(19): siRNA sense strand
caguggaccagcaagauaa

SEQ ID NO: 2274208 - RNA, 19 nt, Homo sapiens
  misc_RNA (1)...(19): siRNA sense strand
cggugugaguacugcaaga

SEQ ID NO: 2274209 - RNA, 19 nt, Homo sapiens
  misc_RNA (1)...(19): siRNA sense strand
ugaucagauuguuguggaa

SEQ ID NO: 2274210 - RNA, 19 nt, Homo sapiens
  misc_RNA (1)...(19): siRNA sense strand
cuuagaagaggcagaugua

SEQ ID NO: 2274211 - RNA, 19 nt, Homo sapiens
  misc_RNA (1)...(19): siRNA sense strand
ucauagaggaggauguuca

SEQ ID NO: 2274212 - RNA, 19 nt, Homo sapiens
  misc_RNA (1)...(19): siRNA sense strand
aagaaguauugguagcaga

SEQ ID NO: 2274213 - RNA, 19 nt, Homo sapiens
  misc_RNA (1)...(19): siRNA sense strand
cagaaaagaaccagcacau

SEQ ID NO: 2274214 - RNA, 19 nt, Homo sapiens
  misc_RNA (1)...(19): siRNA sense strand
cagaagaaguauugguagc

SEQ ID NO: 2274215 - RNA, 19 nt, Homo sapiens
  misc_RNA (1)...(19): siRNA sense strand
ugaaaaugaucauggaguu

SEQ ID NO: 2274216 - RNA, 19 nt, Homo sapiens
  misc_RNA (1)...(19): siRNA sense strand
agcaaauugaugaggauga

SEQ ID NO: 2274217 - RNA, 19 nt, Homo sapiens
  misc_RNA (1)...(19): siRNA sense strand
agguguaagagauguagaa

SEQ ID NO: 2274218 - RNA, 19 nt, Homo sapiens
  misc_RNA (1)...(19): siRNA sense strand
acauaaugagacaccauaa

SEQ ID NO: 2274219 - RNA, 19 nt, Homo sapiens
  misc_RNA (1)...(19): siRNA sense strand
ucaacaagaagaugaagau

SEQ ID NO: 2274220 - RNA, 19 nt, Homo sapiens
  misc_RNA (1)...(19): siRNA sense strand
aaguuuaagucgagggguu

SEQ ID NO: 2274221 - RNA, 19 nt, Homo sapiens
  misc_RNA (1)...(19): siRNA sense strand
ugugauuacacuaccaaua

SEQ ID NO: 2274222 - RNA, 19 nt, Homo sapiens
  misc_RNA (1)...(19): siRNA sense strand
uaagagauguagaaaggga

SEQ ID NO: 2274223 - RNA, 19 nt, Homo sapiens
  misc_RNA (1)...(19): siRNA sense strand
ccucaaugucuaugccaga

SEQ ID NO: 2274224 - RNA, 19 nt, Homo sapiens
  misc_RNA (1)...(19): siRNA sense strand
agauguagaaagggauuua

SEQ ID NO: 2274225 - RNA, 19 nt, Homo sapiens
  misc_RNA (1)...(19): siRNA sense strand
guguaguggaagcagaaau

SEQ ID NO: 2274226 - RNA, 19 nt, Homo sapiens
  misc_RNA (1)...(19): siRNA sense strand
ccacaagagccaaacucau

SEQ ID NO: 2274227 - RNA, 19 nt, Homo sapiens
  misc_RNA (1)...(19): siRNA sense strand
gugacauaguuucagaaga

SEQ ID NO: 2274228 - RNA, 19 nt, Homo sapiens
  misc_RNA (1)...(19): siRNA sense strand
ggagagugaaccugaaaau

SEQ ID NO: 2274229 - RNA, 19 nt, Homo sapiens
  misc_RNA (1)...(19): siRNA sense strand
cucacaaaauggugcauaa

SEQ ID NO: 2274230 - RNA, 19 nt, Homo sapiens
  misc_RNA (1)...(19): siRNA sense strand
cuuuaagauugcagaccca

SEQ ID NO: 2274231 - RNA, 19 nt, Homo sapiens
  misc_RNA (1)...(19): siRNA sense strand
cugagaaagcacaugcgaa

SEQ ID NO: 2274232 - RNA, 19 nt, Homo sapiens
  misc_RNA (1)...(19): siRNA sense strand
agagauguagaaagggauu

SEQ ID NO: 2274233 - RNA, 19 nt, Homo sapiens
  misc_RNA (1)...(19): siRNA sense strand
aaaugaucauggaguugaa

SEQ ID NO: 2274234 - RNA, 19 nt, Homo sapiens
  misc_RNA (1)...(19): siRNA sense strand
ugguaauaauucugaugga

SEQ ID NO: 2274235 - RNA, 19 nt, Homo sapiens
  misc_RNA (1)...(19): siRNA sense strand
aagcauaugaagacacaca

SEQ ID NO: 2274236 - RNA, 19 nt, Homo sapiens
  misc_RNA (1)...(19): siRNA sense strand
gacacacaguggcaggaaa

SEQ ID NO: 2274237 - RNA, 19 nt, Homo sapiens
  misc_RNA (1)...(19): siRNA sense strand
uugcaugauuugugggaag

SEQ ID NO: 2274238 - RNA, 19 nt, Homo sapiens
  misc_RNA (1)...(19): siRNA sense strand
gcaaacacaugaaggucca

SEQ ID NO: 2274239 - RNA, 19 nt, Homo sapiens
  misc_RNA (1)...(19): siRNA sense strand
ccaucaagcaagagcucau

SEQ ID NO: 2274240 - RNA, 19 nt, Homo sapiens
  misc_RNA (1)...(19): siRNA sense strand
gcaaguggaucgagcccga

SEQ ID NO: 2274241 - RNA, 19 nt, Homo sapiens
  misc_RNA (1)...(19): siRNA sense strand
ccuucaaagccaaauacaa

SEQ ID NO: 2274242 - RNA, 19 nt, Homo sapiens
  misc_RNA (1)...(19): siRNA sense strand
ccgagaauuuaaagaucca

SEQ ID NO: 2274243 - RNA, 19 nt, Homo sapiens
  misc_RNA (1)...(19): siRNA sense strand
gggacuuucuguuccgcaa

SEQ ID NO: 2274244 - RNA, 19 nt, Homo sapiens
  misc_RNA (1)...(19): siRNA sense strand
gcaagaagcacaugcacgu

SEQ ID NO: 2274245 - RNA, 19 nt, Homo sapiens
  misc_RNA (1)...(19): siRNA sense strand
gcaccaugcacgagcuagu

SEQ ID NO: 2274246 - RNA, 19 nt, Homo sapiens
  misc_RNA (1)...(19): siRNA sense strand
ucaugaaucucaaggguca

SEQ ID NO: 2274247 - RNA, 19 nt, Homo sapiens
  misc_RNA (1)...(19): siRNA sense strand
cgaaguacaaacuggucaa

SEQ ID NO: 2274248 - RNA, 19 nt, Homo sapiens
  misc_RNA (1)...(19): siRNA sense strand
cuuucaaggcgaaguacaa

SEQ ID NO: 2274249 - RNA, 19 nt, Homo sapiens
  misc_RNA (1)...(19): siRNA sense strand
caaacuagcaccagccaca

SEQ ID NO: 2274250 - RNA, 19 nt, Homo sapiens
  misc_RNA (1)...(19): siRNA sense strand
cguuauaugcggcagccua

SEQ ID NO: 2274251 - RNA, 19 nt, Homo sapiens
  misc_RNA (1)...(19): siRNA sense strand
gcaagucuuucaaggcgaa

SEQ ID NO: 2274252 - RNA, 19 nt, Homo sapiens
  misc_RNA (1)...(19): siRNA sense strand
ccgcuauagcuucugcaaa

SEQ ID NO: 2274253 - RNA, 19 nt, Homo sapiens
  misc_RNA (1)...(19): siRNA sense strand
ccuccuaauuuuaacgaau

SEQ ID NO: 2274254 - RNA, 19 nt, Homo sapiens
  misc_RNA (1)...(19): siRNA sense strand
guguaaugaaugugggaaa

SEQ ID NO: 2274255 - RNA, 19 nt, Homo sapiens
  misc_RNA (1)...(19): siRNA sense strand
gugucaagaaugugggaaa

SEQ ID NO: 2274256 - RNA, 19 nt, Homo sapiens
  misc_RNA (1)...(19): siRNA sense strand
auguaaugaaugugggaaa

SEQ ID NO: 2274257 - RNA, 19 nt, Homo sapiens
  misc_RNA (1)...(19): siRNA sense strand
auguaaugaaugugggaaa

SEQ ID NO: 2274258 - RNA, 19 nt, Homo sapiens
  misc_RNA (1)...(19): siRNA sense strand
ccuuaugaauguagugaau

SEQ ID NO: 2274259 - RNA, 19 nt, Homo sapiens
  misc_RNA (1)...(19): siRNA sense strand
auguagugaaugugggaaa

SEQ ID NO: 2274260 - RNA, 19 nt, Homo sapiens
  misc_RNA (1)...(19): siRNA sense strand
auguagugaaugugggaaa

SEQ ID NO: 2274261 - RNA, 19 nt, Homo sapiens
  misc_RNA (1)...(19): siRNA sense strand
ggauauuagaggaggaauc

SEQ ID NO: 2274262 - RNA, 19 nt, Homo sapiens
  misc_RNA (1)...(19): siRNA sense strand
gaugcauucaggagagaaa

SEQ ID NO: 2274263 - RNA, 19 nt, Homo sapiens
  misc_RNA (1)...(19): siRNA sense strand
guguggugaaugugggaaa

SEQ ID NO: 2274264 - RNA, 19 nt, Homo sapiens
  misc_RNA (1)...(19): siRNA sense strand
auauaauggaugcaggaaa

SEQ ID NO: 2274265 - RNA, 19 nt, Homo sapiens
  misc_RNA (1)...(19): siRNA sense strand
aggcuuuguuagacguaaa

SEQ ID NO: 2274266 - RNA, 19 nt, Homo sapiens
  misc_RNA (1)...(19): siRNA sense strand
aauucacacaggagagaaa

SEQ ID NO: 2274267 - RNA, 19 nt, Homo sapiens
  misc_RNA (1)...(19): siRNA sense strand
cccuaugaauguagugaau

SEQ ID NO: 2274268 - RNA, 19 nt, Homo sapiens
  misc_RNA (1)...(19): siRNA sense strand
gugcaaagaaaucccuaaa

SEQ ID NO: 2274269 - RNA, 19 nt, Homo sapiens
  misc_RNA (1)...(19): siRNA sense strand
augugaugcuggagaccua

SEQ ID NO: 2274270 - RNA, 19 nt, Homo sapiens
  misc_RNA (1)...(19): siRNA sense strand
ucacagaacaucagagaac

SEQ ID NO: 2274271 - RNA, 19 nt, Homo sapiens
  misc_RNA (1)...(19): siRNA sense strand
aggauguggcuguggauuu

SEQ ID NO: 2274272 - RNA, 19 nt, Homo sapiens
  misc_RNA (1)...(19): siRNA sense strand
gaucauaccucauugcuca

SEQ ID NO: 2274273 - RNA, 19 nt, Homo sapiens
  misc_RNA (1)...(19): siRNA sense strand
auguacugaaugugggaaa

SEQ ID NO: 2274274 - RNA, 19 nt, Homo sapiens
  misc_RNA (1)...(19): siRNA sense strand
gcucagaggaccaugcaca

SEQ ID NO: 2274275 - RNA, 19 nt, Homo sapiens
  misc_RNA (1)...(19): siRNA sense strand
auguagugaauguggaaau

SEQ ID NO: 2274276 - RNA, 19 nt, Homo sapiens
  misc_RNA (1)...(19): siRNA sense strand
uggccaaaccagagaugau

SEQ ID NO: 2274277 - RNA, 19 nt, Homo sapiens
  misc_RNA (1)...(19): siRNA sense strand
ucauugaacaucagcgaau

SEQ ID NO: 2274278 - RNA, 19 nt, Homo sapiens
  misc_RNA (1)...(19): siRNA sense strand
ggaccaugcacaaggaugu

SEQ ID NO: 2274279 - RNA, 19 nt, Homo sapiens
  misc_RNA (1)...(19): siRNA sense strand
caaguuggagcgaggagaa

SEQ ID NO: 2274280 - RNA, 19 nt, Homo sapiens
  misc_RNA (1)...(19): siRNA sense strand
gaauauaauggaugcagga

SEQ ID NO: 2274281 - RNA, 19 nt, Homo sapiens
  misc_RNA (1)...(19): siRNA sense strand
aagaacacccagaggagau

SEQ ID NO: 2274282 - RNA, 19 nt, Homo sapiens
  misc_RNA (1)...(19): siRNA sense strand
gaggagaagagcuguggau

SEQ ID NO: 2274283 - RNA, 19 nt, Homo sapiens
  misc_RNA (1)...(19): siRNA sense strand
caucagaagauucaaacau

SEQ ID NO: 2274284 - RNA, 19 nt, Homo sapiens
  misc_RNA (1)...(19): siRNA sense strand
auguaaugagugugguaau

SEQ ID NO: 2274285 - RNA, 19 nt, Homo sapiens
  misc_RNA (1)...(19): siRNA sense strand
gcaucaaagaauucacaca

SEQ ID NO: 2274286 - RNA, 19 nt, Homo sapiens
  misc_RNA (1)...(19): siRNA sense strand
caagaaugugggaaagcuu

SEQ ID NO: 2274287 - RNA, 19 nt, Homo sapiens
  misc_RNA (1)...(19): siRNA sense strand
cuaugaaugcggugaaugu

SEQ ID NO: 2274288 - RNA, 19 nt, Homo sapiens
  misc_RNA (1)...(19): siRNA sense strand
cauccuacauacaagaaca

SEQ ID NO: 2274289 - RNA, 19 nt, Homo sapiens
  misc_RNA (1)...(19): siRNA sense strand
uaauugaacaucagaggau

SEQ ID NO: 2274290 - RNA, 19 nt, Homo sapiens
  misc_RNA (1)...(19): siRNA sense strand
aauacacacaggagagaga

SEQ ID NO: 2274291 - RNA, 19 nt, Homo sapiens
  misc_RNA (1)...(19): siRNA sense strand
cuaugaguguggugaaugu

SEQ ID NO: 2274292 - RNA, 19 nt, Homo sapiens
  misc_RNA (1)...(19): siRNA sense strand
gcacucaucucuugggauc

SEQ ID NO: 2274293 - RNA, 19 nt, Homo sapiens
  misc_RNA (1)...(19): siRNA sense strand
gauucaaacauuggaucaa

SEQ ID NO: 2274294 - RNA, 19 nt, Homo sapiens
  misc_RNA (1)...(19): siRNA sense strand
ccucacagaacaucagaga

SEQ ID NO: 2274295 - RNA, 19 nt, Homo sapiens
  misc_RNA (1)...(19): siRNA sense strand
cuacauacaagaacacaca

SEQ ID NO: 2274296 - RNA, 19 nt, Homo sapiens
  misc_RNA (1)...(19): siRNA sense strand
cccuaugaauguacugaau

SEQ ID NO: 2274297 - RNA, 19 nt, Homo sapiens
  misc_RNA (1)...(19): siRNA sense strand
aacacacacuggagagaga

SEQ ID NO: 2274298 - RNA, 19 nt, Homo sapiens
  misc_RNA (1)...(19): siRNA sense strand
ccucacgauucaucagaga

SEQ ID NO: 2274299 - RNA, 19 nt, Homo sapiens
  misc_RNA (1)...(19): siRNA sense strand
aacucacacaggagagaaa

SEQ ID NO: 2274300 - RNA, 19 nt, Homo sapiens
  misc_RNA (1)...(19): siRNA sense strand
gcuuacuguaggaagucaa

SEQ ID NO: 2274301 - RNA, 19 nt, Homo sapiens
  misc_RNA (1)...(19): siRNA sense strand
gagaauacacacaggagag

SEQ ID NO: 2274302 - RNA, 19 nt, Homo sapiens
  misc_RNA (1)...(19): siRNA sense strand
cguguaaagauaucccuua

SEQ ID NO: 2274303 - RNA, 19 nt, Homo sapiens
  misc_RNA (1)...(19): siRNA sense strand
ggggagaaaccuuaugaau

SEQ ID NO: 2274304 - RNA, 19 nt, Homo sapiens
  misc_RNA (1)...(19): siRNA sense strand
augaagaugacucucaaua

SEQ ID NO: 2274305 - RNA, 19 nt, Homo sapiens
  misc_RNA (1)...(19): siRNA sense strand
guguaaugaaugugggaaa

SEQ ID NO: 2274306 - RNA, 19 nt, Homo sapiens
  misc_RNA (1)...(19): siRNA sense strand
guguagugaaugugggaaa

SEQ ID NO: 2274307 - RNA, 19 nt, Homo sapiens
  misc_RNA (1)...(19): siRNA sense strand
auguaaugaaugugggaaa

SEQ ID NO: 2274308 - RNA, 19 nt, Homo sapiens
  misc_RNA (1)...(19): siRNA sense strand
gguaaagagacaaugggaa

SEQ ID NO: 2274309 - RNA, 19 nt, Homo sapiens
  misc_RNA (1)...(19): siRNA sense strand
ugugauaaugagagugaaa

SEQ ID NO: 2274310 - RNA, 19 nt, Homo sapiens
  misc_RNA (1)...(19): siRNA sense strand
uugcaaagaaugugggaga

SEQ ID NO: 2274311 - RNA, 19 nt, Homo sapiens
  misc_RNA (1)...(19): siRNA sense strand
ugaagauagaagaggaaga

SEQ ID NO: 2274312 - RNA, 19 nt, Homo sapiens
  misc_RNA (1)...(19): siRNA sense strand
aauucacaccagagagaaa

SEQ ID NO: 2274313 - RNA, 19 nt, Homo sapiens
  misc_RNA (1)...(19): siRNA sense strand
agugaagauagaagaggaa

SEQ ID NO: 2274314 - RNA, 19 nt, Homo sapiens
  misc_RNA (1)...(19): siRNA sense strand
aaauacagucagaggugaa

SEQ ID NO: 2274315 - RNA, 19 nt, Homo sapiens
  misc_RNA (1)...(19): siRNA sense strand
caggcaggguaaagagaca

SEQ ID NO: 2274316 - RNA, 19 nt, Homo sapiens
  misc_RNA (1)...(19): siRNA sense strand
ggcuacagaaccaaagaaa

SEQ ID NO: 2274317 - RNA, 19 nt, Homo sapiens
  misc_RNA (1)...(19): siRNA sense strand
aaagaaugugggagagcau

SEQ ID NO: 2274318 - RNA, 19 nt, Homo sapiens
  misc_RNA (1)...(19): siRNA sense strand
uggaagaaucucaggauac

SEQ ID NO: 2274319 - RNA, 19 nt, Homo sapiens
  misc_RNA (1)...(19): siRNA sense strand
uugcuaggcaucagagaau

SEQ ID NO: 2274320 - RNA, 19 nt, Homo sapiens
  misc_RNA (1)...(19): siRNA sense strand
cuaugaaugcagugagugu

SEQ ID NO: 2274321 - RNA, 19 nt, Homo sapiens
  misc_RNA (1)...(19): siRNA sense strand
aguuuucaguggagauaaa

SEQ ID NO: 2274322 - RNA, 19 nt, Homo sapiens
  misc_RNA (1)...(19): siRNA sense strand
gcucaaaacuugcuaggca

SEQ ID NO: 2274323 - RNA, 19 nt, Homo sapiens
  misc_RNA (1)...(19): siRNA sense strand
uguaaugaaugugggaaaa

SEQ ID NO: 2274324 - RNA, 19 nt, Homo sapiens
  misc_RNA (1)...(19): siRNA sense strand
uagaauucacacuggagaa

SEQ ID NO: 2274325 - RNA, 19 nt, Homo sapiens
  misc_RNA (1)...(19): siRNA sense strand
uagugaagauagaagagga

SEQ ID NO: 2274326 - RNA, 19 nt, Homo sapiens
  misc_RNA (1)...(19): siRNA sense strand
uuaucaggcaucagagaau

SEQ ID NO: 2274327 - RNA, 19 nt, Homo sapiens
  misc_RNA (1)...(19): siRNA sense strand
ggguaaagagacaauggga

SEQ ID NO: 2274328 - RNA, 19 nt, Homo sapiens
  misc_RNA (1)...(19): siRNA sense strand
gaagauuuggagagaggca

SEQ ID NO: 2274329 - RNA, 19 nt, Homo sapiens
  misc_RNA (1)...(19): siRNA sense strand
ggacaagaaauauuccaga

SEQ ID NO: 2274330 - RNA, 19 nt, Homo sapiens
  misc_RNA (1)...(19): siRNA sense strand
augcagugaguguggaaga

SEQ ID NO: 2274331 - RNA, 19 nt, Homo sapiens
  misc_RNA (1)...(19): siRNA sense strand
agucaacaccagagaauuc

SEQ ID NO: 2274332 - RNA, 19 nt, Homo sapiens
  misc_RNA (1)...(19): siRNA sense strand
gcucacaucuuauucgaca

SEQ ID NO: 2274333 - RNA, 19 nt, Homo sapiens
  misc_RNA (1)...(19): siRNA sense strand
gaaugcagugaguguggaa

SEQ ID NO: 2274334 - RNA, 19 nt, Homo sapiens
  misc_RNA (1)...(19): siRNA sense strand
acaguagauccaugccaaa

SEQ ID NO: 2274335 - RNA, 19 nt, Homo sapiens
  misc_RNA (1)...(19): siRNA sense strand
cagucagaggugaaauaau

SEQ ID NO: 2274336 - RNA, 19 nt, Homo sapiens
  misc_RNA (1)...(19): siRNA sense strand
acucaaaugaauucacaca

SEQ ID NO: 2274337 - RNA, 19 nt, Homo sapiens
  misc_RNA (1)...(19): siRNA sense strand
gcuuucaggcacagcucaa

SEQ ID NO: 2274338 - RNA, 19 nt, Homo sapiens
  misc_RNA (1)...(19): siRNA sense strand
ugauagugaagauagaaga

SEQ ID NO: 2274339 - RNA, 19 nt, Homo sapiens
  misc_RNA (1)...(19): siRNA sense strand
ugcaauaauucaagaccaa

SEQ ID NO: 2274340 - RNA, 19 nt, Homo sapiens
  misc_RNA (1)...(19): siRNA sense strand
cuguauugaaagaugguua

SEQ ID NO: 2274341 - RNA, 19 nt, Homo sapiens
  misc_RNA (1)...(19): siRNA sense strand
ccagaaguucagugagaca

SEQ ID NO: 2274342 - RNA, 19 nt, Homo sapiens
  misc_RNA (1)...(19): siRNA sense strand
agguugugaugaagaggaa

SEQ ID NO: 2274343 - RNA, 19 nt, Homo sapiens
  misc_RNA (1)...(19): siRNA sense strand
auuuagagauccuggacau

SEQ ID NO: 2274344 - RNA, 19 nt, Homo sapiens
  misc_RNA (1)...(19): siRNA sense strand
agacuuugucccaggagaa

SEQ ID NO: 2274345 - RNA, 19 nt, Homo sapiens
  misc_RNA (1)...(19): siRNA sense strand
cagaaaacaggcuagaaaa

SEQ ID NO: 2274346 - RNA, 19 nt, Homo sapiens
  misc_RNA (1)...(19): siRNA sense strand
ucagaaaacaggcuagaaa

SEQ ID NO: 2274347 - RNA, 19 nt, Homo sapiens
  misc_RNA (1)...(19): siRNA sense strand
agaaaacaggcuagaaaau

SEQ ID NO: 2274348 - RNA, 19 nt, Homo sapiens
  misc_RNA (1)...(19): siRNA sense strand
guuugaacuuagacuguau

SEQ ID NO: 2274349 - RNA, 19 nt, Homo sapiens
  misc_RNA (1)...(19): siRNA sense strand
ggaaauggcuggacagugg

SEQ ID NO: 2274350 - RNA, 19 nt, Homo sapiens
  misc_RNA (1)...(19): siRNA sense strand
uagcaaugccaucagcaaa

SEQ ID NO: 2274351 - RNA, 19 nt, Homo sapiens
  misc_RNA (1)...(19): siRNA sense strand
ugggaaguaguaagauaua

SEQ ID NO: 2274352 - RNA, 19 nt, Homo sapiens
  misc_RNA (1)...(19): siRNA sense strand
ucacaggaaacuuuagcaa

SEQ ID NO: 2274353 - RNA, 19 nt, Homo sapiens
  misc_RNA (1)...(19): siRNA sense strand
ggaucuuucacauggguuu

SEQ ID NO: 2274354 - RNA, 19 nt, Homo sapiens
  misc_RNA (1)...(19): siRNA sense strand
caucaaagauccugaccag

SEQ ID NO: 2274355 - RNA, 19 nt, Homo sapiens
  misc_RNA (1)...(19): siRNA sense strand
uugccuacaacaagauaaa

SEQ ID NO: 2274356 - RNA, 19 nt, Homo sapiens
  misc_RNA (1)...(19): siRNA sense strand
aguaccaguugaugaaaca

SEQ ID NO: 2274357 - RNA, 19 nt, Homo sapiens
  misc_RNA (1)...(19): siRNA sense strand
caaaagaaucacauugcaa

SEQ ID NO: 2274358 - RNA, 19 nt, Homo sapiens
  misc_RNA (1)...(19): siRNA sense strand
cugggaaguaguaagauau

SEQ ID NO: 2274359 - RNA, 19 nt, Homo sapiens
  misc_RNA (1)...(19): siRNA sense strand
gaggcuuuguacagaaaca

SEQ ID NO: 2274360 - RNA, 19 nt, Homo sapiens
  misc_RNA (1)...(19): siRNA sense strand
uccuuaaaguccauagauu

SEQ ID NO: 2274361 - RNA, 19 nt, Homo sapiens
  misc_RNA (1)...(19): siRNA sense strand
ggacuaagccucaacucca

SEQ ID NO: 2274362 - RNA, 19 nt, Homo sapiens
  misc_RNA (1)...(19): siRNA sense strand
cggaagguugugaugaaga

SEQ ID NO: 2274363 - RNA, 19 nt, Homo sapiens
  misc_RNA (1)...(19): siRNA sense strand
ucagaaacauggugcugga

SEQ ID NO: 2274364 - RNA, 19 nt, Homo sapiens
  misc_RNA (1)...(19): siRNA sense strand
acauggugcuggagauacu

SEQ ID NO: 2274365 - RNA, 19 nt, Homo sapiens
  misc_RNA (1)...(19): siRNA sense strand
uggcaauaaacuagugacu

SEQ ID NO: 2274366 - RNA, 19 nt, Homo sapiens
  misc_RNA (1)...(19): siRNA sense strand
ucuuaaagucccuaaaguu

SEQ ID NO: 2274367 - RNA, 19 nt, Homo sapiens
  misc_RNA (1)...(19): siRNA sense strand
cucugaugcuguauugaaa

SEQ ID NO: 2274368 - RNA, 19 nt, Homo sapiens
  misc_RNA (1)...(19): siRNA sense strand
aauaacauuccguugcaaa

SEQ ID NO: 2274369 - RNA, 19 nt, Homo sapiens
  misc_RNA (1)...(19): siRNA sense strand
guucgaauuucuauggacu

SEQ ID NO: 2274370 - RNA, 19 nt, Homo sapiens
  misc_RNA (1)...(19): siRNA sense strand
uagcaauguuacagugaaa

SEQ ID NO: 2274371 - RNA, 19 nt, Homo sapiens
  misc_RNA (1)...(19): siRNA sense strand
cagagaaagcgauggcaua

SEQ ID NO: 2274372 - RNA, 19 nt, Homo sapiens
  misc_RNA (1)...(19): siRNA sense strand
aaguagaguuugauggaau

SEQ ID NO: 2274373 - RNA, 19 nt, Homo sapiens
  misc_RNA (1)...(19): siRNA sense strand
cugaauguccagugguaaa

SEQ ID NO: 2274374 - RNA, 19 nt, Homo sapiens
  misc_RNA (1)...(19): siRNA sense strand
cauugauaccuaugggaaa

SEQ ID NO: 2274375 - RNA, 19 nt, Homo sapiens
  misc_RNA (1)...(19): siRNA sense strand
ucuauguguucuugggaaa

SEQ ID NO: 2274376 - RNA, 19 nt, Homo sapiens
  misc_RNA (1)...(19): siRNA sense strand
cgacacagguauuaagcau

SEQ ID NO: 2274377 - RNA, 19 nt, Homo sapiens
  misc_RNA (1)...(19): siRNA sense strand
agauaagggaugaagaaaa

SEQ ID NO: 2274378 - RNA, 19 nt, Homo sapiens
  misc_RNA (1)...(19): siRNA sense strand
gagggaaauagaagaacua

SEQ ID NO: 2274379 - RNA, 19 nt, Homo sapiens
  misc_RNA (1)...(19): siRNA sense strand
gcuugaaguuugauggcau

SEQ ID NO: 2274380 - RNA, 19 nt, Homo sapiens
  misc_RNA (1)...(19): siRNA sense strand
aagugguggaagagggaaa

SEQ ID NO: 2274381 - RNA, 19 nt, Homo sapiens
  misc_RNA (1)...(19): siRNA sense strand
ggacauuggcugggagaca

SEQ ID NO: 2274382 - RNA, 19 nt, Homo sapiens
  misc_RNA (1)...(19): siRNA sense strand
aagaauaucuagagcucau

SEQ ID NO: 2274383 - RNA, 19 nt, Homo sapiens
  misc_RNA (1)...(19): siRNA sense strand
ccuaauaagagaagcuuca

SEQ ID NO: 2274384 - RNA, 19 nt, Homo sapiens
  misc_RNA (1)...(19): siRNA sense strand
gcaugaaggcugaugggau

SEQ ID NO: 2274385 - RNA, 19 nt, Homo sapiens
  misc_RNA (1)...(19): siRNA sense strand
gcaagaggagaguggaaga

SEQ ID NO: 2274386 - RNA, 19 nt, Homo sapiens
  misc_RNA (1)...(19): siRNA sense strand
gugagauggaggaagcaaa

SEQ ID NO: 2274387 - RNA, 19 nt, Homo sapiens
  misc_RNA (1)...(19): siRNA sense strand
caaagaagcaaaaggagaa

SEQ ID NO: 2274388 - RNA, 19 nt, Homo sapiens
  misc_RNA (1)...(19): siRNA sense strand
ggagagacuuggaguggca

SEQ ID NO: 2274389 - RNA, 19 nt, Homo sapiens
  misc_RNA (1)...(19): siRNA sense strand
ucacaaucaaguagaguuu

SEQ ID NO: 2274390 - RNA, 19 nt, Homo sapiens
  misc_RNA (1)...(19): siRNA sense strand
gcagaauaucagacaucua

SEQ ID NO: 2274391 - RNA, 19 nt, Homo sapiens
  misc_RNA (1)...(19): siRNA sense strand
gugcaguccuucaguggaa

SEQ ID NO: 2274392 - RNA, 19 nt, Homo sapiens
  misc_RNA (1)...(19): siRNA sense strand
cgaaggauacuguggccaa

SEQ ID NO: 2274393 - RNA, 19 nt, Homo sapiens
  misc_RNA (1)...(19): siRNA sense strand
cagaaaugucacugcauau

SEQ ID NO: 2274394 - RNA, 19 nt, Homo sapiens
  misc_RNA (1)...(19): siRNA sense strand
ccaaagagucacugaaauc

SEQ ID NO: 2274395 - RNA, 19 nt, Homo sapiens
  misc_RNA (1)...(19): siRNA sense strand
gcaagaaagaagcugaaaa

SEQ ID NO: 2274396 - RNA, 19 nt, Homo sapiens
  misc_RNA (1)...(19): siRNA sense strand
caugauaugaauuggaaga

SEQ ID NO: 2274397 - RNA, 19 nt, Homo sapiens
  misc_RNA (1)...(19): siRNA sense strand
gagcauaaagauaagggau

SEQ ID NO: 2274398 - RNA, 19 nt, Homo sapiens
  misc_RNA (1)...(19): siRNA sense strand
ccaaguaccucuauggcuu

SEQ ID NO: 2274399 - RNA, 19 nt, Homo sapiens
  misc_RNA (1)...(19): siRNA sense strand
ggauauuaaugcaagagga

SEQ ID NO: 2274400 - RNA, 19 nt, Homo sapiens
  misc_RNA (1)...(19): siRNA sense strand
ggagagaaaucgcgcagca

SEQ ID NO: 2274401 - RNA, 19 nt, Homo sapiens
  misc_RNA (1)...(19): siRNA sense strand
ggaagagggaaauagaaga

SEQ ID NO: 2274402 - RNA, 19 nt, Homo sapiens
  misc_RNA (1)...(19): siRNA sense strand
gccagaaauucaugggcuu

SEQ ID NO: 2274403 - RNA, 19 nt, Homo sapiens
  misc_RNA (1)...(19): siRNA sense strand
acacaacucccaauggaaa

SEQ ID NO: 2274404 - RNA, 19 nt, Homo sapiens
  misc_RNA (1)...(19): siRNA sense strand
augcaagaggagaguggaa

SEQ ID NO: 2274405 - RNA, 19 nt, Homo sapiens
  misc_RNA (1)...(19): siRNA sense strand
agagcaaguuguucaagaa

SEQ ID NO: 2274406 - RNA, 19 nt, Homo sapiens
  misc_RNA (1)...(19): siRNA sense strand
gcagagaaagcgauggcau

SEQ ID NO: 2274407 - RNA, 19 nt, Homo sapiens
  misc_RNA (1)...(19): siRNA sense strand
ccgcaugggaucagcugaa

SEQ ID NO: 2274408 - RNA, 19 nt, Homo sapiens
  misc_RNA (1)...(19): siRNA sense strand
ugaauuugucaacgaguua

SEQ ID NO: 2274409 - RNA, 19 nt, Homo sapiens
  misc_RNA (1)...(19): siRNA sense strand
ccggaagaguauaggcacu

SEQ ID NO: 2274410 - RNA, 19 nt, Homo sapiens
  misc_RNA (1)...(19): siRNA sense strand
acagccaaguggagcuaua

SEQ ID NO: 2274411 - RNA, 19 nt, Homo sapiens
  misc_RNA (1)...(19): siRNA sense strand
cuucugggaugaugggcaa

SEQ ID NO: 2274412 - RNA, 19 nt, Homo sapiens
  misc_RNA (1)...(19): siRNA sense strand
ucgaugugacugacagaaa

SEQ ID NO: 2274413 - RNA, 19 nt, Homo sapiens
  misc_RNA (1)...(19): siRNA sense strand
acacaauaauggacagaag

SEQ ID NO: 2274414 - RNA, 19 nt, Homo sapiens
  misc_RNA (1)...(19): siRNA sense strand
gggcaagcaguaugacauu

SEQ ID NO: 2274415 - RNA, 19 nt, Homo sapiens
  misc_RNA (1)...(19): siRNA sense strand
agcaaguuguucaagaaua

SEQ ID NO: 2274416 - RNA, 19 nt, Homo sapiens
  misc_RNA (1)...(19): siRNA sense strand
ugucagugauguucaguau

SEQ ID NO: 2274417 - RNA, 19 nt, Homo sapiens
  misc_RNA (1)...(19): siRNA sense strand
ggauguugcuuuugugaau

SEQ ID NO: 2274418 - RNA, 19 nt, Homo sapiens
  misc_RNA (1)...(19): siRNA sense strand
auacaacaauccacagaau

SEQ ID NO: 2274419 - RNA, 19 nt, Homo sapiens
  misc_RNA (1)...(19): siRNA sense strand
agccagaauacgaugcaaa

SEQ ID NO: 2274420 - RNA, 19 nt, Homo sapiens
  misc_RNA (1)...(19): siRNA sense strand
acaaagaagcaaaaggaga

SEQ ID NO: 2274421 - RNA, 19 nt, Homo sapiens
  misc_RNA (1)...(19): siRNA sense strand
ggacggaggaaccuagcaa

SEQ ID NO: 2274422 - RNA, 19 nt, Homo sapiens
  misc_RNA (1)...(19): siRNA sense strand
gcugaugggaugcggguca

SEQ ID NO: 2274423 - RNA, 19 nt, Homo sapiens
  misc_RNA (1)...(19): siRNA sense strand
gcauugauaccuaugggaa

SEQ ID NO: 2274424 - RNA, 19 nt, Homo sapiens
  misc_RNA (1)...(19): siRNA sense strand
gaauauggaaccuuagaca

SEQ ID NO: 2274425 - RNA, 19 nt, Homo sapiens
  misc_RNA (1)...(19): siRNA sense strand
augagaacaaagaagcaaa

SEQ ID NO: 2274426 - RNA, 19 nt, Homo sapiens
  misc_RNA (1)...(19): siRNA sense strand
acuuaagccgccagaaauu

SEQ ID NO: 2274427 - RNA, 19 nt, Homo sapiens
  misc_RNA (1)...(19): siRNA sense strand
acuucauugacguggauaa

SEQ ID NO: 2274428 - RNA, 19 nt, Homo sapiens
  misc_RNA (1)...(19): siRNA sense strand
cauauuuaacagagacaca

SEQ ID NO: 2274429 - RNA, 19 nt, Homo sapiens
  misc_RNA (1)...(19): siRNA sense strand
cuuaugauucaguggauuu

SEQ ID NO: 2274430 - RNA, 19 nt, Homo sapiens
  misc_RNA (1)...(19): siRNA sense strand
caugaaggcugaugggaug

SEQ ID NO: 2274431 - RNA, 19 nt, Homo sapiens
  misc_RNA (1)...(19): siRNA sense strand
cggaagaguauaggcacua

SEQ ID NO: 2274432 - RNA, 19 nt, Homo sapiens
  misc_RNA (1)...(19): siRNA sense strand
agccaaagagucacugaaa

SEQ ID NO: 2274433 - RNA, 19 nt, Homo sapiens
  misc_RNA (1)...(19): siRNA sense strand
augaagauaugggugaaua

SEQ ID NO: 2274434 - RNA, 19 nt, Homo sapiens
  misc_RNA (1)...(19): siRNA sense strand
augcaaaugaagacaguaa

SEQ ID NO: 2274435 - RNA, 19 nt, Homo sapiens
  misc_RNA (1)...(19): siRNA sense strand
caggaaaacaacagaagaa

SEQ ID NO: 2274436 - RNA, 19 nt, Homo sapiens
  misc_RNA (1)...(19): siRNA sense strand
ggagaugcgacgaggacga

SEQ ID NO: 2274437 - RNA, 19 nt, Homo sapiens
  misc_RNA (1)...(19): siRNA sense strand
gcgacauugaugagugcaa

SEQ ID NO: 2274438 - RNA, 19 nt, Homo sapiens
  misc_RNA (1)...(19): siRNA sense strand
gugucaauuacaagggcua

SEQ ID NO: 2274439 - RNA, 19 nt, Homo sapiens
  misc_RNA (1)...(19): siRNA sense strand
cguaagaucuauagcgccu

SEQ ID NO: 2274440 - RNA, 19 nt, Homo sapiens
  misc_RNA (1)...(19): siRNA sense strand
ccacugacuuccugagcca

SEQ ID NO: 2274441 - RNA, 19 nt, Homo sapiens
  misc_RNA (1)...(19): siRNA sense strand
ggacaagguguucuggaca

SEQ ID NO: 2274442 - RNA, 19 nt, Homo sapiens
  misc_RNA (1)...(19): siRNA sense strand
uugaauggcccaacggaau

SEQ ID NO: 2274443 - RNA, 19 nt, Homo sapiens
  misc_RNA (1)...(19): siRNA sense strand
ccagaugccugcagccaga

SEQ ID NO: 2274444 - RNA, 19 nt, Homo sapiens
  misc_RNA (1)...(19): siRNA sense strand
ccucagaucuccagccacu

SEQ ID NO: 2274445 - RNA, 19 nt, Homo sapiens
  misc_RNA (1)...(19): siRNA sense strand
ggagaaggacugcgagggu

SEQ ID NO: 2274446 - RNA, 19 nt, Homo sapiens
  misc_RNA (1)...(19): siRNA sense strand
ugaacgagugucugcacaa

SEQ ID NO: 2274447 - RNA, 19 nt, Homo sapiens
  misc_RNA (1)...(19): siRNA sense strand
caacaauggcggcugcuca

SEQ ID NO: 2274448 - RNA, 19 nt, Homo sapiens
  misc_RNA (1)...(19): siRNA sense strand
ggaggaucgaccuggugaa

SEQ ID NO: 2274449 - RNA, 19 nt, Homo sapiens
  misc_RNA (1)...(19): siRNA sense strand
aguggaggcaacagaaaga

SEQ ID NO: 2274450 - RNA, 19 nt, Homo sapiens
  misc_RNA (1)...(19): siRNA sense strand
ggaagaacaccaaaagcau

SEQ ID NO: 2274451 - RNA, 19 nt, Homo sapiens
  misc_RNA (1)...(19): siRNA sense strand
augcaaaugaagacaguaa

SEQ ID NO: 2274452 - RNA, 19 nt, Homo sapiens
  misc_RNA (1)...(19): siRNA sense strand
caggaaaacaacagaagaa

SEQ ID NO: 2274453 - RNA, 19 nt, Homo sapiens
  misc_RNA (1)...(19): siRNA sense strand
ggagaugcgacgaggacga

SEQ ID NO: 2274454 - RNA, 19 nt, Homo sapiens
  misc_RNA (1)...(19): siRNA sense strand
gcgacauugaugagugcaa

SEQ ID NO: 2274455 - RNA, 19 nt, Homo sapiens
  misc_RNA (1)...(19): siRNA sense strand
gugucaauuacaagggcua

SEQ ID NO: 2274456 - RNA, 19 nt, Homo sapiens
  misc_RNA (1)...(19): siRNA sense strand
cguaagaucuauagcgccu

SEQ ID NO: 2274457 - RNA, 19 nt, Homo sapiens
  misc_RNA (1)...(19): siRNA sense strand
ccacugacuuccugagcca

SEQ ID NO: 2274458 - RNA, 19 nt, Homo sapiens
  misc_RNA (1)...(19): siRNA sense strand
ggacaagguguucuggaca

SEQ ID NO: 2274459 - RNA, 19 nt, Homo sapiens
  misc_RNA (1)...(19): siRNA sense strand
uugaauggcccaacggaau

SEQ ID NO: 2274460 - RNA, 19 nt, Homo sapiens
  misc_RNA (1)...(19): siRNA sense strand
ccagaugccugcagccaga

SEQ ID NO: 2274461 - RNA, 19 nt, Homo sapiens
  misc_RNA (1)...(19): siRNA sense strand
ccucagaucuccagccacu

SEQ ID NO: 2274462 - RNA, 19 nt, Homo sapiens
  misc_RNA (1)...(19): siRNA sense strand
ggagaaggacugcgagggu

SEQ ID NO: 2274463 - RNA, 19 nt, Homo sapiens
  misc_RNA (1)...(19): siRNA sense strand
ugaacgagugucugcacaa

SEQ ID NO: 2274464 - RNA, 19 nt, Homo sapiens
  misc_RNA (1)...(19): siRNA sense strand
caacaauggcggcugcuca

SEQ ID NO: 2274465 - RNA, 19 nt, Homo sapiens
  misc_RNA (1)...(19): siRNA sense strand
ggaggaucgaccuggugaa

SEQ ID NO: 2274466 - RNA, 19 nt, Homo sapiens
  misc_RNA (1)...(19): siRNA sense strand
aguggaggcaacagaaaga

SEQ ID NO: 2274467 - RNA, 19 nt, Homo sapiens
  misc_RNA (1)...(19): siRNA sense strand
ggaagaacaccaaaagcau

SEQ ID NO: 2274468 - RNA, 19 nt, Homo sapiens
  misc_RNA (1)...(19): siRNA sense strand
augcaaaugaagacaguaa

SEQ ID NO: 2274469 - RNA, 19 nt, Homo sapiens
  misc_RNA (1)...(19): siRNA sense strand
caggaaaacaacagaagaa

SEQ ID NO: 2274470 - RNA, 19 nt, Homo sapiens
  misc_RNA (1)...(19): siRNA sense strand
ggagaugcgacgaggacga

SEQ ID NO: 2274471 - RNA, 19 nt, Homo sapiens
  misc_RNA (1)...(19): siRNA sense strand
gcgacauugaugagugcaa

SEQ ID NO: 2274472 - RNA, 19 nt, Homo sapiens
  misc_RNA (1)...(19): siRNA sense strand
gugucaauuacaagggcua

SEQ ID NO: 2274473 - RNA, 19 nt, Homo sapiens
  misc_RNA (1)...(19): siRNA sense strand
cguaagaucuauagcgccu

SEQ ID NO: 2274474 - RNA, 19 nt, Homo sapiens
  misc_RNA (1)...(19): siRNA sense strand
ccacugacuuccugagcca

SEQ ID NO: 2274475 - RNA, 19 nt, Homo sapiens
  misc_RNA (1)...(19): siRNA sense strand
ggacaagguguucuggaca

SEQ ID NO: 2274476 - RNA, 19 nt, Homo sapiens
  misc_RNA (1)...(19): siRNA sense strand
uugaauggcccaacggaau

SEQ ID NO: 2274477 - RNA, 19 nt, Homo sapiens
  misc_RNA (1)...(19): siRNA sense strand
ccagaugccugcagccaga

SEQ ID NO: 2274478 - RNA, 19 nt, Homo sapiens
  misc_RNA (1)...(19): siRNA sense strand
ccucagaucuccagccacu

SEQ ID NO: 2274479 - RNA, 19 nt, Homo sapiens
  misc_RNA (1)...(19): siRNA sense strand
ggagaaggacugcgagggu

SEQ ID NO: 2274480 - RNA, 19 nt, Homo sapiens
  misc_RNA (1)...(19): siRNA sense strand
ugaacgagugucugcacaa

SEQ ID NO: 2274481 - RNA, 19 nt, Homo sapiens
  misc_RNA (1)...(19): siRNA sense strand
caacaauggcggcugcuca

SEQ ID NO: 2274482 - RNA, 19 nt, Homo sapiens
  misc_RNA (1)...(19): siRNA sense strand
ggaggaucgaccuggugaa

SEQ ID NO: 2274483 - RNA, 19 nt, Homo sapiens
  misc_RNA (1)...(19): siRNA sense strand
aguggaggcaacagaaaga

SEQ ID NO: 2274484 - RNA, 19 nt, Homo sapiens
  misc_RNA (1)...(19): siRNA sense strand
ggaagaacaccaaaagcau

SEQ ID NO: 2274485 - RNA, 19 nt, Homo sapiens
  misc_RNA (1)...(19): siRNA sense strand
aggagaagauggaggcuga

SEQ ID NO: 2274486 - RNA, 19 nt, Homo sapiens
  misc_RNA (1)...(19): siRNA sense strand
ugacaaauuuaguggccau

SEQ ID NO: 2274487 - RNA, 19 nt, Homo sapiens
  misc_RNA (1)...(19): siRNA sense strand
agguagagaagcagaugaa

SEQ ID NO: 2274488 - RNA, 19 nt, Homo sapiens
  misc_RNA (1)...(19): siRNA sense strand
gccaagaggaggaggagga

SEQ ID NO: 2274489 - RNA, 19 nt, Homo sapiens
  misc_RNA (1)...(19): siRNA sense strand
ccuauuuagaggaaggcaa

SEQ ID NO: 2274490 - RNA, 19 nt, Homo sapiens
  misc_RNA (1)...(19): siRNA sense strand
cugaggaacuggagccuga

SEQ ID NO: 2274491 - RNA, 19 nt, Homo sapiens
  misc_RNA (1)...(19): siRNA sense strand
agaccaggcaucagcacaa

SEQ ID NO: 2274492 - RNA, 19 nt, Homo sapiens
  misc_RNA (1)...(19): siRNA sense strand
acaaagagucagugaggac

SEQ ID NO: 2274493 - RNA, 19 nt, Homo sapiens
  misc_RNA (1)...(19): siRNA sense strand
ggacuauggugcaacagca

SEQ ID NO: 2274494 - RNA, 19 nt, Homo sapiens
  misc_RNA (1)...(19): siRNA sense strand
cggccuggagucugaggaa

SEQ ID NO: 2274495 - RNA, 19 nt, Homo sapiens
  misc_RNA (1)...(19): siRNA sense strand
agauggaggaagaagcuga

SEQ ID NO: 2274496 - RNA, 19 nt, Homo sapiens
  misc_RNA (1)...(19): siRNA sense strand
uggccaucccaaaggguuu

SEQ ID NO: 2274497 - RNA, 19 nt, Homo sapiens
  misc_RNA (1)...(19): siRNA sense strand
gaauaugaguccaccucca

SEQ ID NO: 2274498 - RNA, 19 nt, Homo sapiens
  misc_RNA (1)...(19): siRNA sense strand
ccauacugugugacaaauu

SEQ ID NO: 2274499 - RNA, 19 nt, Homo sapiens
  misc_RNA (1)...(19): siRNA sense strand
ggguuugcguauauagagu

SEQ ID NO: 2274500 - RNA, 19 nt, Homo sapiens
  misc_RNA (1)...(19): siRNA sense strand
aggaagaugcccaggauau

SEQ ID NO: 2274501 - RNA, 19 nt, Homo sapiens
  misc_RNA (1)...(19): siRNA sense strand
gagcuuacgccgugggaga

SEQ ID NO: 2274502 - RNA, 19 nt, Homo sapiens
  misc_RNA (1)...(19): siRNA sense strand
augaguacauggagaugaa

SEQ ID NO: 2274503 - RNA, 19 nt, Homo sapiens
  misc_RNA (1)...(19): siRNA sense strand
aggccuacuuugacguuaa

SEQ ID NO: 2274504 - RNA, 19 nt, Homo sapiens
  misc_RNA (1)...(19): siRNA sense strand
ugggagauguggagaaaau

SEQ ID NO: 2274505 - RNA, 19 nt, Homo sapiens
  misc_RNA (1)...(19): siRNA sense strand
gagaauguuacgagaaacu

SEQ ID NO: 2274506 - RNA, 19 nt, Homo sapiens
  misc_RNA (1)...(19): siRNA sense strand
agauaucugucuggagaaa

SEQ ID NO: 2274507 - RNA, 19 nt, Homo sapiens
  misc_RNA (1)...(19): siRNA sense strand
cagacaaagagaugcugaa

SEQ ID NO: 2274508 - RNA, 19 nt, Homo sapiens
  misc_RNA (1)...(19): siRNA sense strand
ccgugggagauguggagaa

SEQ ID NO: 2274509 - RNA, 19 nt, Homo sapiens
  misc_RNA (1)...(19): siRNA sense strand
aguacauggagaugaagaa

SEQ ID NO: 2274510 - RNA, 19 nt, Homo sapiens
  misc_RNA (1)...(19): siRNA sense strand
gaaaacuggacuugguuaa

SEQ ID NO: 2274511 - RNA, 19 nt, Homo sapiens
  misc_RNA (1)...(19): siRNA sense strand
ucauaaccucugugagauu

SEQ ID NO: 2274512 - RNA, 19 nt, Homo sapiens
  misc_RNA (1)...(19): siRNA sense strand
aaguguuauuggagagcuu

SEQ ID NO: 2274513 - RNA, 19 nt, Homo sapiens
  misc_RNA (1)...(19): siRNA sense strand
aaugaggcgcuuagagaau

SEQ ID NO: 2274514 - RNA, 19 nt, Homo sapiens
  misc_RNA (1)...(19): siRNA sense strand
ccucugugagauugauaaa

SEQ ID NO: 2274515 - RNA, 19 nt, Homo sapiens
  misc_RNA (1)...(19): siRNA sense strand
acucaaucaacuaguggaa

SEQ ID NO: 2274516 - RNA, 19 nt, Homo sapiens
  misc_RNA (1)...(19): siRNA sense strand
ucaacuaguggaagccaaa

SEQ ID NO: 2274517 - RNA, 19 nt, Homo sapiens
  misc_RNA (1)...(19): siRNA sense strand
agaaaauggcucuggugaa

SEQ ID NO: 2274518 - RNA, 19 nt, Homo sapiens
  misc_RNA (1)...(19): siRNA sense strand
augaaacaguugauagcuu

SEQ ID NO: 2274519 - RNA, 19 nt, Homo sapiens
  misc_RNA (1)...(19): siRNA sense strand
gaggaagaugcccaggaua

SEQ ID NO: 2274520 - RNA, 19 nt, Homo sapiens
  misc_RNA (1)...(19): siRNA sense strand
uaaccugaucacagacaaa

SEQ ID NO: 2274521 - RNA, 19 nt, Homo sapiens
  misc_RNA (1)...(19): siRNA sense strand
uaguagaacacuuggagga

SEQ ID NO: 2274522 - RNA, 19 nt, Homo sapiens
  misc_RNA (1)...(19): siRNA sense strand
cagaguugcaguugauaga

SEQ ID NO: 2274523 - RNA, 19 nt, Homo sapiens
  misc_RNA (1)...(19): siRNA sense strand
ggugaaacuggcaaagcuu

SEQ ID NO: 2274524 - RNA, 19 nt, Homo sapiens
  misc_RNA (1)...(19): siRNA sense strand
cuuuaugucaggagcauga

SEQ ID NO: 2274525 - RNA, 19 nt, Homo sapiens
  misc_RNA (1)...(19): siRNA sense strand
caguuuacguucucagcau

SEQ ID NO: 2274526 - RNA, 19 nt, Homo sapiens
  misc_RNA (1)...(19): siRNA sense strand
ccuggacacuaaugggaca

SEQ ID NO: 2274527 - RNA, 19 nt, Homo sapiens
  misc_RNA (1)...(19): siRNA sense strand
uagaacacuuggaggaaag

SEQ ID NO: 2274528 - RNA, 19 nt, Homo sapiens
  misc_RNA (1)...(19): siRNA sense strand
gugcaaacugugggaugaa

SEQ ID NO: 2274529 - RNA, 19 nt, Homo sapiens
  misc_RNA (1)...(19): siRNA sense strand
uggcugcaauagcaagaaa

SEQ ID NO: 2274530 - RNA, 19 nt, Homo sapiens
  misc_RNA (1)...(19): siRNA sense strand
gcaauagcaagaaagccua

SEQ ID NO: 2274531 - RNA, 19 nt, Homo sapiens
  misc_RNA (1)...(19): siRNA sense strand
uagaggaggcccugcaaaa

SEQ ID NO: 2274532 - RNA, 19 nt, Homo sapiens
  misc_RNA (1)...(19): siRNA sense strand
ccuuauauuuccagagagc

SEQ ID NO: 2274533 - RNA, 19 nt, Homo sapiens
  misc_RNA (1)...(19): siRNA sense strand
gaguacauggagaugaaga

SEQ ID NO: 2274534 - RNA, 19 nt, Homo sapiens
  misc_RNA (1)...(19): siRNA sense strand
cuguauauguauuccagau

SEQ ID NO: 2274535 - RNA, 19 nt, Homo sapiens
  misc_RNA (1)...(19): siRNA sense strand
acuaaugggacaugaguac

SEQ ID NO: 2274536 - RNA, 19 nt, Homo sapiens
  misc_RNA (1)...(19): siRNA sense strand
guuaauugugugaggaaca

SEQ ID NO: 2274537 - RNA, 19 nt, Homo sapiens
  misc_RNA (1)...(19): siRNA sense strand
gguuggacaccgaggaaca

SEQ ID NO: 2274538 - RNA, 19 nt, Homo sapiens
  misc_RNA (1)...(19): siRNA sense strand
aggaacaguaagagauuau

SEQ ID NO: 2274539 - RNA, 19 nt, Homo sapiens
  misc_RNA (1)...(19): siRNA sense strand
gaacaaacgaagaugccuu

SEQ ID NO: 2274540 - RNA, 19 nt, Homo sapiens
  misc_RNA (1)...(19): siRNA sense strand
ggucaaaugcacagcggca

SEQ ID NO: 2274541 - RNA, 19 nt, Homo sapiens
  misc_RNA (1)...(19): siRNA sense strand
auggaaaggagcugaaaga

SEQ ID NO: 2274542 - RNA, 19 nt, Homo sapiens
  misc_RNA (1)...(19): siRNA sense strand
aagaugacuugaaggguga

SEQ ID NO: 2274543 - RNA, 19 nt, Homo sapiens
  misc_RNA (1)...(19): siRNA sense strand
uggcagaagagaugaaagu

SEQ ID NO: 2274544 - RNA, 19 nt, Homo sapiens
  misc_RNA (1)...(19): siRNA sense strand
agcugauuguuaaggaaua

SEQ ID NO: 2274545 - RNA, 19 nt, Homo sapiens
  misc_RNA (1)...(19): siRNA sense strand
aaucagaggaauuggaacu

SEQ ID NO: 2274546 - RNA, 19 nt, Homo sapiens
  misc_RNA (1)...(19): siRNA sense strand
cuugaaggguauuggaacu

SEQ ID NO: 2274547 - RNA, 19 nt, Homo sapiens
  misc_RNA (1)...(19): siRNA sense strand
agacaaauucacugagauc

SEQ ID NO: 2274548 - RNA, 19 nt, Homo sapiens
  misc_RNA (1)...(19): siRNA sense strand
caguauacaagaagagucu

SEQ ID NO: 2274549 - RNA, 19 nt, Homo sapiens
  misc_RNA (1)...(19): siRNA sense strand
cggaaagcucuguugacuu

SEQ ID NO: 2274550 - RNA, 19 nt, Homo sapiens
  misc_RNA (1)...(19): siRNA sense strand
ccgaggaacaguaagagau

SEQ ID NO: 2274551 - RNA, 19 nt, Homo sapiens
  misc_RNA (1)...(19): siRNA sense strand
uaguuaauugugugaggaa

SEQ ID NO: 2274552 - RNA, 19 nt, Homo sapiens
  misc_RNA (1)...(19): siRNA sense strand
ugcaaagcagcuaaagaaa

SEQ ID NO: 2274553 - RNA, 19 nt, Homo sapiens
  misc_RNA (1)...(19): siRNA sense strand
aagagaugaaagucugaaa

SEQ ID NO: 2274554 - RNA, 19 nt, Homo sapiens
  misc_RNA (1)...(19): siRNA sense strand
acaccgaggaacaguaaga

SEQ ID NO: 2274555 - RNA, 19 nt, Homo sapiens
  misc_RNA (1)...(19): siRNA sense strand
ucugaaaguggaugagcau

SEQ ID NO: 2274556 - RNA, 19 nt, Homo sapiens
  misc_RNA (1)...(19): siRNA sense strand
ggacagcauaaaaggagaa

SEQ ID NO: 2274557 - RNA, 19 nt, Homo sapiens
  misc_RNA (1)...(19): siRNA sense strand
aggagaauuaucugggcau

SEQ ID NO: 2274558 - RNA, 19 nt, Homo sapiens
  misc_RNA (1)...(19): siRNA sense strand
cauauggaaaggagcugaa

SEQ ID NO: 2274559 - RNA, 19 nt, Homo sapiens
  misc_RNA (1)...(19): siRNA sense strand
aaucuuaacuaccaggaca

SEQ ID NO: 2274560 - RNA, 19 nt, Homo sapiens
  misc_RNA (1)...(19): siRNA sense strand
aggacauuguggacagcau

SEQ ID NO: 2274561 - RNA, 19 nt, Homo sapiens
  misc_RNA (1)...(19): siRNA sense strand
cagcugauuguuaaggaau

SEQ ID NO: 2274562 - RNA, 19 nt, Homo sapiens
  misc_RNA (1)...(19): siRNA sense strand
gagucuuggagaugacauu

SEQ ID NO: 2274563 - RNA, 19 nt, Homo sapiens
  misc_RNA (1)...(19): siRNA sense strand
caguaagagauuauccaga

SEQ ID NO: 2274564 - RNA, 19 nt, Homo sapiens
  misc_RNA (1)...(19): siRNA sense strand
ggaaagauguggugugcga

SEQ ID NO: 2274565 - RNA, 19 nt, Homo sapiens
  misc_RNA (1)...(19): siRNA sense strand
ggaaaagauugaugcggua

SEQ ID NO: 2274566 - RNA, 19 nt, Homo sapiens
  misc_RNA (1)...(19): siRNA sense strand
aagaguuggcagugcaaua

SEQ ID NO: 2274567 - RNA, 19 nt, Homo sapiens
  misc_RNA (1)...(19): siRNA sense strand
ccaucgagaccaugcggaa

SEQ ID NO: 2274568 - RNA, 19 nt, Homo sapiens
  misc_RNA (1)...(19): siRNA sense strand
caucaaauccgacuggcua

SEQ ID NO: 2274569 - RNA, 19 nt, Homo sapiens
  misc_RNA (1)...(19): siRNA sense strand
gcgacaagaaguauggcuu

SEQ ID NO: 2274570 - RNA, 19 nt, Homo sapiens
  misc_RNA (1)...(19): siRNA sense strand
gcaacaaauaugagagcug

SEQ ID NO: 2274571 - RNA, 19 nt, Homo sapiens
  misc_RNA (1)...(19): siRNA sense strand
acacuaaagaagaugcaga

SEQ ID NO: 2274572 - RNA, 19 nt, Homo sapiens
  misc_RNA (1)...(19): siRNA sense strand
cauacaggaucauuggcua

SEQ ID NO: 2274573 - RNA, 19 nt, Homo sapiens
  misc_RNA (1)...(19): siRNA sense strand
gcggcaacgcugaaggaca

SEQ ID NO: 2274574 - RNA, 19 nt, Homo sapiens
  misc_RNA (1)...(19): siRNA sense strand
acccagagacaguggauga

SEQ ID NO: 2274575 - RNA, 19 nt, Homo sapiens
  misc_RNA (1)...(19): siRNA sense strand
cggacaaagaguuggcagu

SEQ ID NO: 2274576 - RNA, 19 nt, Homo sapiens
  misc_RNA (1)...(19): siRNA sense strand
accugaagcuggagaacca

SEQ ID NO: 2274577 - RNA, 19 nt, Homo sapiens
  misc_RNA (1)...(19): siRNA sense strand
ccaagugggacaagaacca

SEQ ID NO: 2274578 - RNA, 19 nt, Homo sapiens
  misc_RNA (1)...(19): siRNA sense strand
acuuugagaaggauggcaa

SEQ ID NO: 2274579 - RNA, 19 nt, Homo sapiens
  misc_RNA (1)...(19): siRNA sense strand
gcagaugccuggaaugcca

SEQ ID NO: 2274580 - RNA, 19 nt, Homo sapiens
  misc_RNA (1)...(19): siRNA sense strand
aggacacacuaaagaagau

SEQ ID NO: 2274581 - RNA, 19 nt, Homo sapiens
  misc_RNA (1)...(19): siRNA sense strand
cggcaacgcugaaggacag

SEQ ID NO: 2274582 - RNA, 19 nt, Homo sapiens
  misc_RNA (1)...(19): siRNA sense strand
gcgugaaguuuggaagcau

SEQ ID NO: 2274583 - RNA, 19 nt, Homo sapiens
  misc_RNA (1)...(19): siRNA sense strand
acaaagaguuggcagugca

SEQ ID NO: 2274584 - RNA, 19 nt, Homo sapiens
  misc_RNA (1)...(19): siRNA sense strand
agcuauggaccuugggaga

SEQ ID NO: 2274585 - RNA, 19 nt, Homo sapiens
  misc_RNA (1)...(19): siRNA sense strand
ccuauuaccugaagcugga

SEQ ID NO: 2274586 - RNA, 19 nt, Homo sapiens
  misc_RNA (1)...(19): siRNA sense strand
gggagaaggccaagugguc

SEQ ID NO: 2274587 - RNA, 19 nt, Homo sapiens
  misc_RNA (1)...(19): siRNA sense strand
caaagaguuggcagugcaa

SEQ ID NO: 2274588 - RNA, 19 nt, Homo sapiens
  misc_RNA (1)...(19): siRNA sense strand
gugaagaagaugagggagu

SEQ ID NO: 2274589 - RNA, 19 nt, Homo sapiens
  misc_RNA (1)...(19): siRNA sense strand
acgugaaaccgcugaguaa

SEQ ID NO: 2274590 - RNA, 19 nt, Homo sapiens
  misc_RNA (1)...(19): siRNA sense strand
gguccuuccuugugggaga

SEQ ID NO: 2274591 - RNA, 19 nt, Homo sapiens
  misc_RNA (1)...(19): siRNA sense strand
cagccagauuaguagaaau

SEQ ID NO: 2274592 - RNA, 19 nt, Homo sapiens
  misc_RNA (1)...(19): siRNA sense strand
ggugaagccugauggcaca

SEQ ID NO: 2274593 - RNA, 19 nt, Homo sapiens
  misc_RNA (1)...(19): siRNA sense strand
gguuaugaugagauagaca

SEQ ID NO: 2274594 - RNA, 19 nt, Homo sapiens
  misc_RNA (1)...(19): siRNA sense strand
ugaacaaagcagaggucca

SEQ ID NO: 2274595 - RNA, 19 nt, Homo sapiens
  misc_RNA (1)...(19): siRNA sense strand
cauacaugaaggagaccua

SEQ ID NO: 2274596 - RNA, 19 nt, Homo sapiens
  misc_RNA (1)...(19): siRNA sense strand
gcgcauacaugaaggagac

SEQ ID NO: 2274597 - RNA, 19 nt, Homo sapiens
  misc_RNA (1)...(19): siRNA sense strand
gugaaaccgcugaguaaca

SEQ ID NO: 2274598 - RNA, 19 nt, Homo sapiens
  misc_RNA (1)...(19): siRNA sense strand
ccggauuaacgaaggcauu

SEQ ID NO: 2274599 - RNA, 19 nt, Homo sapiens
  misc_RNA (1)...(19): siRNA sense strand
agaacaugauccugaacga

SEQ ID NO: 2274600 - RNA, 19 nt, Homo sapiens
  misc_RNA (1)...(19): siRNA sense strand
agccagauuaguagaaauu

SEQ ID NO: 2274601 - RNA, 19 nt, Homo sapiens
  misc_RNA (1)...(19): siRNA sense strand
gcuguaccuuugagggaga

SEQ ID NO: 2274602 - RNA, 19 nt, Homo sapiens
  misc_RNA (1)...(19): siRNA sense strand
gcucaucacuaaggggaaa

SEQ ID NO: 2274603 - RNA, 19 nt, Homo sapiens
  misc_RNA (1)...(19): siRNA sense strand
ucgcugacccugaugaaau

SEQ ID NO: 2274604 - RNA, 19 nt, Homo sapiens
  misc_RNA (1)...(19): siRNA sense strand
guuaugaugagauagacaa

SEQ ID NO: 2274605 - RNA, 19 nt, Homo sapiens
  misc_RNA (1)...(19): siRNA sense strand
ggaaaguugguguguggca

SEQ ID NO: 2274606 - RNA, 19 nt, Homo sapiens
  misc_RNA (1)...(19): siRNA sense strand
gcaucaugacagagccuca

SEQ ID NO: 2274607 - RNA, 19 nt, Homo sapiens
  misc_RNA (1)...(19): siRNA sense strand
uugcaguggucuuccaaau

SEQ ID NO: 2274608 - RNA, 19 nt, Homo sapiens
  misc_RNA (1)...(19): siRNA sense strand
gagugaacugccugagcuu

SEQ ID NO: 2274609 - RNA, 19 nt, Homo sapiens
  misc_RNA (1)...(19): siRNA sense strand
agauaaagccauucaagcu

SEQ ID NO: 2274610 - RNA, 19 nt, Homo sapiens
  misc_RNA (1)...(19): siRNA sense strand
gugaagaagaugagggagu

SEQ ID NO: 2274611 - RNA, 19 nt, Homo sapiens
  misc_RNA (1)...(19): siRNA sense strand
acgugaaaccgcugaguaa

SEQ ID NO: 2274612 - RNA, 19 nt, Homo sapiens
  misc_RNA (1)...(19): siRNA sense strand
gguccuuccuugugggaga

SEQ ID NO: 2274613 - RNA, 19 nt, Homo sapiens
  misc_RNA (1)...(19): siRNA sense strand
cagccagauuaguagaaau

SEQ ID NO: 2274614 - RNA, 19 nt, Homo sapiens
  misc_RNA (1)...(19): siRNA sense strand
ggugaagccugauggcaca

SEQ ID NO: 2274615 - RNA, 19 nt, Homo sapiens
  misc_RNA (1)...(19): siRNA sense strand
gguuaugaugagauagaca

SEQ ID NO: 2274616 - RNA, 19 nt, Homo sapiens
  misc_RNA (1)...(19): siRNA sense strand
ugaacaaagcagaggucca

SEQ ID NO: 2274617 - RNA, 19 nt, Homo sapiens
  misc_RNA (1)...(19): siRNA sense strand
cauacaugaaggagaccua

SEQ ID NO: 2274618 - RNA, 19 nt, Homo sapiens
  misc_RNA (1)...(19): siRNA sense strand
gcgcauacaugaaggagac

SEQ ID NO: 2274619 - RNA, 19 nt, Homo sapiens
  misc_RNA (1)...(19): siRNA sense strand
gugaaaccgcugaguaaca

SEQ ID NO: 2274620 - RNA, 19 nt, Homo sapiens
  misc_RNA (1)...(19): siRNA sense strand
ccggauuaacgaaggcauu

SEQ ID NO: 2274621 - RNA, 19 nt, Homo sapiens
  misc_RNA (1)...(19): siRNA sense strand
agaacaugauccugaacga

SEQ ID NO: 2274622 - RNA, 19 nt, Homo sapiens
  misc_RNA (1)...(19): siRNA sense strand
agccagauuaguagaaauu

SEQ ID NO: 2274623 - RNA, 19 nt, Homo sapiens
  misc_RNA (1)...(19): siRNA sense strand
gcuguaccuuugagggaga

SEQ ID NO: 2274624 - RNA, 19 nt, Homo sapiens
  misc_RNA (1)...(19): siRNA sense strand
gcucaucacuaaggggaaa

SEQ ID NO: 2274625 - RNA, 19 nt, Homo sapiens
  misc_RNA (1)...(19): siRNA sense strand
ucgcugacccugaugaaau

SEQ ID NO: 2274626 - RNA, 19 nt, Homo sapiens
  misc_RNA (1)...(19): siRNA sense strand
guuaugaugagauagacaa

SEQ ID NO: 2274627 - RNA, 19 nt, Homo sapiens
  misc_RNA (1)...(19): siRNA sense strand
ggaaaguugguguguggca

SEQ ID NO: 2274628 - RNA, 19 nt, Homo sapiens
  misc_RNA (1)...(19): siRNA sense strand
gcaucaugacagagccuca

SEQ ID NO: 2274629 - RNA, 19 nt, Homo sapiens
  misc_RNA (1)...(19): siRNA sense strand
uugcaguggucuuccaaau

SEQ ID NO: 2274630 - RNA, 19 nt, Homo sapiens
  misc_RNA (1)...(19): siRNA sense strand
gagugaacugccugagcuu

SEQ ID NO: 2274631 - RNA, 19 nt, Homo sapiens
  misc_RNA (1)...(19): siRNA sense strand
agauaaagccauucaagcu

SEQ ID NO: 2274632 - RNA, 19 nt, Homo sapiens
  misc_RNA (1)...(19): siRNA sense strand
gcaggaagcuagaggcaca

SEQ ID NO: 2274633 - RNA, 19 nt, Homo sapiens
  misc_RNA (1)...(19): siRNA sense strand
gggcaaugaacgagcaaca

SEQ ID NO: 2274634 - RNA, 19 nt, Homo sapiens
  misc_RNA (1)...(19): siRNA sense strand
cagauauggaggaggaaga

SEQ ID NO: 2274635 - RNA, 19 nt, Homo sapiens
  misc_RNA (1)...(19): siRNA sense strand
guggagacgcugagcaaga

SEQ ID NO: 2274636 - RNA, 19 nt, Homo sapiens
  misc_RNA (1)...(19): siRNA sense strand
gcaaaggagaucagggaug

SEQ ID NO: 2274637 - RNA, 19 nt, Homo sapiens
  misc_RNA (1)...(19): siRNA sense strand
ucaagaagcauaagcccaa

SEQ ID NO: 2274638 - RNA, 19 nt, Homo sapiens
  misc_RNA (1)...(19): siRNA sense strand
cuggaaaucaucaguggaa

SEQ ID NO: 2274639 - RNA, 19 nt, Homo sapiens
  misc_RNA (1)...(19): siRNA sense strand
cagcaaaggagaucaggga

SEQ ID NO: 2274640 - RNA, 19 nt, Homo sapiens
  misc_RNA (1)...(19): siRNA sense strand
ccaugcaauugcugggaca

SEQ ID NO: 2274641 - RNA, 19 nt, Homo sapiens
  misc_RNA (1)...(19): siRNA sense strand
agucaggagccaugaacau

SEQ ID NO: 2274642 - RNA, 19 nt, Homo sapiens
  misc_RNA (1)...(19): siRNA sense strand
ggaugaguuaguaaaggaa

SEQ ID NO: 2274643 - RNA, 19 nt, Homo sapiens
  misc_RNA (1)...(19): siRNA sense strand
uaguaaaggaagcucuuaa

SEQ ID NO: 2274644 - RNA, 19 nt, Homo sapiens
  misc_RNA (1)...(19): siRNA sense strand
gagcaggaagcuagaggca

SEQ ID NO: 2274645 - RNA, 19 nt, Homo sapiens
  misc_RNA (1)...(19): siRNA sense strand
caguggaaucucugaguca

SEQ ID NO: 2274646 - RNA, 19 nt, Homo sapiens
  misc_RNA (1)...(19): siRNA sense strand
gggaacaggugcuugccuu

SEQ ID NO: 2274647 - RNA, 19 nt, Homo sapiens
  misc_RNA (1)...(19): siRNA sense strand
aggagaucagggaugaaua

SEQ ID NO: 2274648 - RNA, 19 nt, Homo sapiens
  misc_RNA (1)...(19): siRNA sense strand
uggaggaugaguuaguaaa

SEQ ID NO: 2274649 - RNA, 19 nt, Homo sapiens
  misc_RNA (1)...(19): siRNA sense strand
cgaagauccgagaguuuau

SEQ ID NO: 2274650 - RNA, 19 nt, Homo sapiens
  misc_RNA (1)...(19): siRNA sense strand
auguggagacgcugagcaa

SEQ ID NO: 2274651 - RNA, 19 nt, Homo sapiens
  misc_RNA (1)...(19): siRNA sense strand
caaagcaaguugagcugga

SEQ ID NO: 2274652 - RNA, 19 nt, Homo sapiens
  misc_RNA (1)...(19): siRNA sense strand
augcuguccuggagcgaau

SEQ ID NO: 2274653 - RNA, 19 nt, Homo sapiens
  misc_RNA (1)...(19): siRNA sense strand
cuggaggaugaguuaguaa

SEQ ID NO: 2274654 - RNA, 19 nt, Homo sapiens
  misc_RNA (1)...(19): siRNA sense strand
gagugagaauauagcaucu

SEQ ID NO: 2274655 - RNA, 19 nt, Homo sapiens
  misc_RNA (1)...(19): siRNA sense strand
aguuuauccuccagaagau

SEQ ID NO: 2274656 - RNA, 19 nt, Homo sapiens
  misc_RNA (1)...(19): siRNA sense strand
gagagugagaauauagcau

SEQ ID NO: 2274657 - RNA, 19 nt, Homo sapiens
  misc_RNA (1)...(19): siRNA sense strand
cugcugaaguacagguucu

SEQ ID NO: 2274658 - RNA, 19 nt, Homo sapiens
  misc_RNA (1)...(19): siRNA sense strand
cgggcugggaccucagaua

SEQ ID NO: 2274659 - RNA, 19 nt, Homo sapiens
  misc_RNA (1)...(19): siRNA sense strand
augaauauguggagacgcu

SEQ ID NO: 2274660 - RNA, 19 nt, Homo sapiens
  misc_RNA (1)...(19): siRNA sense strand
cagcaaagagguugagagc

SEQ ID NO: 2274661 - RNA, 19 nt, Homo sapiens
  misc_RNA (1)...(19): siRNA sense strand
gggaugaauauguggagac

SEQ ID NO: 2274662 - RNA, 19 nt, Homo sapiens
  misc_RNA (1)...(19): siRNA sense strand
guuuaguggcauuugugaa

SEQ ID NO: 2274663 - RNA, 19 nt, Homo sapiens
  misc_RNA (1)...(19): siRNA sense strand
guggacaggcugagcgacu

SEQ ID NO: 2274664 - RNA, 19 nt, Homo sapiens
  misc_RNA (1)...(19): siRNA sense strand
accuuaugguggagcucaa

SEQ ID NO: 2274665 - RNA, 19 nt, Homo sapiens
  misc_RNA (1)...(19): siRNA sense strand
gcaggaagcuagaggcaca

SEQ ID NO: 2274666 - RNA, 19 nt, Homo sapiens
  misc_RNA (1)...(19): siRNA sense strand
gggcaaugaacgagcaaca

SEQ ID NO: 2274667 - RNA, 19 nt, Homo sapiens
  misc_RNA (1)...(19): siRNA sense strand
cagauauggaggaggaaga

SEQ ID NO: 2274668 - RNA, 19 nt, Homo sapiens
  misc_RNA (1)...(19): siRNA sense strand
guggagacgcugagcaaga

SEQ ID NO: 2274669 - RNA, 19 nt, Homo sapiens
  misc_RNA (1)...(19): siRNA sense strand
gcaaaggagaucagggaug

SEQ ID NO: 2274670 - RNA, 19 nt, Homo sapiens
  misc_RNA (1)...(19): siRNA sense strand
ucaagaagcauaagcccaa

SEQ ID NO: 2274671 - RNA, 19 nt, Homo sapiens
  misc_RNA (1)...(19): siRNA sense strand
cuggaaaucaucaguggaa

SEQ ID NO: 2274672 - RNA, 19 nt, Homo sapiens
  misc_RNA (1)...(19): siRNA sense strand
cagcaaaggagaucaggga

SEQ ID NO: 2274673 - RNA, 19 nt, Homo sapiens
  misc_RNA (1)...(19): siRNA sense strand
ccaugcaauugcugggaca

SEQ ID NO: 2274674 - RNA, 19 nt, Homo sapiens
  misc_RNA (1)...(19): siRNA sense strand
agucaggagccaugaacau

SEQ ID NO: 2274675 - RNA, 19 nt, Homo sapiens
  misc_RNA (1)...(19): siRNA sense strand
ggaugaguuaguaaaggaa

SEQ ID NO: 2274676 - RNA, 19 nt, Homo sapiens
  misc_RNA (1)...(19): siRNA sense strand
uaguaaaggaagcucuuaa

SEQ ID NO: 2274677 - RNA, 19 nt, Homo sapiens
  misc_RNA (1)...(19): siRNA sense strand
gagcaggaagcuagaggca

SEQ ID NO: 2274678 - RNA, 19 nt, Homo sapiens
  misc_RNA (1)...(19): siRNA sense strand
caguggaaucucugaguca

SEQ ID NO: 2274679 - RNA, 19 nt, Homo sapiens
  misc_RNA (1)...(19): siRNA sense strand
gggaacaggugcuugccuu

SEQ ID NO: 2274680 - RNA, 19 nt, Homo sapiens
  misc_RNA (1)...(19): siRNA sense strand
aggagaucagggaugaaua

SEQ ID NO: 2274681 - RNA, 19 nt, Homo sapiens
  misc_RNA (1)...(19): siRNA sense strand
uggaggaugaguuaguaaa

SEQ ID NO: 2274682 - RNA, 19 nt, Homo sapiens
  misc_RNA (1)...(19): siRNA sense strand
cgaagauccgagaguuuau

SEQ ID NO: 2274683 - RNA, 19 nt, Homo sapiens
  misc_RNA (1)...(19): siRNA sense strand
auguggagacgcugagcaa

SEQ ID NO: 2274684 - RNA, 19 nt, Homo sapiens
  misc_RNA (1)...(19): siRNA sense strand
caaagcaaguugagcugga

SEQ ID NO: 2274685 - RNA, 19 nt, Homo sapiens
  misc_RNA (1)...(19): siRNA sense strand
augcuguccuggagcgaau

SEQ ID NO: 2274686 - RNA, 19 nt, Homo sapiens
  misc_RNA (1)...(19): siRNA sense strand
cuggaggaugaguuaguaa

SEQ ID NO: 2274687 - RNA, 19 nt, Homo sapiens
  misc_RNA (1)...(19): siRNA sense strand
gagugagaauauagcaucu

SEQ ID NO: 2274688 - RNA, 19 nt, Homo sapiens
  misc_RNA (1)...(19): siRNA sense strand
aguuuauccuccagaagau

SEQ ID NO: 2274689 - RNA, 19 nt, Homo sapiens
  misc_RNA (1)...(19): siRNA sense strand
gagagugagaauauagcau

SEQ ID NO: 2274690 - RNA, 19 nt, Homo sapiens
  misc_RNA (1)...(19): siRNA sense strand
cugcugaaguacagguucu

SEQ ID NO: 2274691 - RNA, 19 nt, Homo sapiens
  misc_RNA (1)...(19): siRNA sense strand
cgggcugggaccucagaua

SEQ ID NO: 2274692 - RNA, 19 nt, Homo sapiens
  misc_RNA (1)...(19): siRNA sense strand
augaauauguggagacgcu

SEQ ID NO: 2274693 - RNA, 19 nt, Homo sapiens
  misc_RNA (1)...(19): siRNA sense strand
cagcaaagagguugagagc

SEQ ID NO: 2274694 - RNA, 19 nt, Homo sapiens
  misc_RNA (1)...(19): siRNA sense strand
gggaugaauauguggagac

SEQ ID NO: 2274695 - RNA, 19 nt, Homo sapiens
  misc_RNA (1)...(19): siRNA sense strand
guuuaguggcauuugugaa

SEQ ID NO: 2274696 - RNA, 19 nt, Homo sapiens
  misc_RNA (1)...(19): siRNA sense strand
guggacaggcugagcgacu

SEQ ID NO: 2274697 - RNA, 19 nt, Homo sapiens
  misc_RNA (1)...(19): siRNA sense strand
accuuaugguggagcucaa

SEQ ID NO: 2274698 - RNA, 19 nt, Homo sapiens
  misc_RNA (1)...(19): siRNA sense strand
augaagacccggaggagga

SEQ ID NO: 2274699 - RNA, 19 nt, Homo sapiens
  misc_RNA (1)...(19): siRNA sense strand
cggaugaagggcaaagaca

SEQ ID NO: 2274700 - RNA, 19 nt, Homo sapiens
  misc_RNA (1)...(19): siRNA sense strand
ccucaaaggcgaagugcag

SEQ ID NO: 2274701 - RNA, 19 nt, Homo sapiens
  misc_RNA (1)...(19): siRNA sense strand
ccaugaaggccaacaccau

SEQ ID NO: 2274702 - RNA, 19 nt, Homo sapiens
  misc_RNA (1)...(19): siRNA sense strand
gggaugaagacccggagga

SEQ ID NO: 2274703 - RNA, 19 nt, Homo sapiens
  misc_RNA (1)...(19): siRNA sense strand
ccagaaguugccaggugaa

SEQ ID NO: 2274704 - RNA, 19 nt, Homo sapiens
  misc_RNA (1)...(19): siRNA sense strand
gggacuuccucaaaggcga

SEQ ID NO: 2274705 - RNA, 19 nt, Homo sapiens
  misc_RNA (1)...(19): siRNA sense strand
augaagacccggaggagga

SEQ ID NO: 2274706 - RNA, 19 nt, Homo sapiens
  misc_RNA (1)...(19): siRNA sense strand
cggaugaagggcaaagaca

SEQ ID NO: 2274707 - RNA, 19 nt, Homo sapiens
  misc_RNA (1)...(19): siRNA sense strand
ccucaaaggcgaagugcag

SEQ ID NO: 2274708 - RNA, 19 nt, Homo sapiens
  misc_RNA (1)...(19): siRNA sense strand
ccaugaaggccaacaccau

SEQ ID NO: 2274709 - RNA, 19 nt, Homo sapiens
  misc_RNA (1)...(19): siRNA sense strand
gggaugaagacccggagga

SEQ ID NO: 2274710 - RNA, 19 nt, Homo sapiens
  misc_RNA (1)...(19): siRNA sense strand
ccagaaguugccaggugaa

SEQ ID NO: 2274711 - RNA, 19 nt, Homo sapiens
  misc_RNA (1)...(19): siRNA sense strand
gggacuuccucaaaggcga

SEQ ID NO: 2274712 - RNA, 19 nt, Homo sapiens
  misc_RNA (1)...(19): siRNA sense strand
ccaacaacuuacagggaga

SEQ ID NO: 2274713 - RNA, 19 nt, Homo sapiens
  misc_RNA (1)...(19): siRNA sense strand
gggcugaacuggaagcuga

SEQ ID NO: 2274714 - RNA, 19 nt, Homo sapiens
  misc_RNA (1)...(19): siRNA sense strand
ucauugaagcgguggcuaa

SEQ ID NO: 2274715 - RNA, 19 nt, Homo sapiens
  misc_RNA (1)...(19): siRNA sense strand
agaaauuggacgaggccuu

SEQ ID NO: 2274716 - RNA, 19 nt, Homo sapiens
  misc_RNA (1)...(19): siRNA sense strand
aagcaaagaaauuggacga

SEQ ID NO: 2274717 - RNA, 19 nt, Homo sapiens
  misc_RNA (1)...(19): siRNA sense strand
uggcagugguaguggcaca

SEQ ID NO: 2274718 - RNA, 19 nt, Homo sapiens
  misc_RNA (1)...(19): siRNA sense strand
cagaaauacaagcagguuu

SEQ ID NO: 2274719 - RNA, 19 nt, Homo sapiens
  misc_RNA (1)...(19): siRNA sense strand
agauuauccacguguguaa

SEQ ID NO: 2274720 - RNA, 19 nt, Homo sapiens
  misc_RNA (1)...(19): siRNA sense strand
ccucaaaggcucuggccca

SEQ ID NO: 2274721 - RNA, 19 nt, Homo sapiens
  misc_RNA (1)...(19): siRNA sense strand
gagccugaucagaggguga

SEQ ID NO: 2274722 - RNA, 19 nt, Homo sapiens
  misc_RNA (1)...(19): siRNA sense strand
ccacagugcaacaaggaca

SEQ ID NO: 2274723 - RNA, 19 nt, Homo sapiens
  misc_RNA (1)...(19): siRNA sense strand
gaucagagggugagcgaug

SEQ ID NO: 2274724 - RNA, 19 nt, Homo sapiens
  misc_RNA (1)...(19): siRNA sense strand
ucguagaauucaacuggaa

SEQ ID NO: 2274725 - RNA, 19 nt, Homo sapiens
  misc_RNA (1)...(19): siRNA sense strand
cguagaauucaacuggaaa

SEQ ID NO: 2274726 - RNA, 19 nt, Homo sapiens
  misc_RNA (1)...(19): siRNA sense strand
guuaugauuccaugggcua

SEQ ID NO: 2274727 - RNA, 19 nt, Homo sapiens
  misc_RNA (1)...(19): siRNA sense strand
ccucuuugaagcagaaauu

SEQ ID NO: 2274728 - RNA, 19 nt, Homo sapiens
  misc_RNA (1)...(19): siRNA sense strand
acaucggguuugagauuau

SEQ ID NO: 2274729 - RNA, 19 nt, Homo sapiens
  misc_RNA (1)...(19): siRNA sense strand
gcuuugugguggagcgguu

SEQ ID NO: 2274730 - RNA, 19 nt, Homo sapiens
  misc_RNA (1)...(19): siRNA sense strand
cagcaagugcagaaauaca

SEQ ID NO: 2274731 - RNA, 19 nt, Homo sapiens
  misc_RNA (1)...(19): siRNA sense strand
ggacagaguuggcccagca

SEQ ID NO: 2274732 - RNA, 19 nt, Homo sapiens
  misc_RNA (1)...(19): siRNA sense strand
guagaauucaacuggaaaa

SEQ ID NO: 2274733 - RNA, 19 nt, Homo sapiens
  misc_RNA (1)...(19): siRNA sense strand
aguacugcccagagaauuu

SEQ ID NO: 2274734 - RNA, 19 nt, Homo sapiens
  misc_RNA (1)...(19): siRNA sense strand
caagaagaauggcggguuc

SEQ ID NO: 2274735 - RNA, 19 nt, Homo sapiens
  misc_RNA (1)...(19): siRNA sense strand
cagaguuggcccagcaaga

SEQ ID NO: 2274736 - RNA, 19 nt, Homo sapiens
  misc_RNA (1)...(19): siRNA sense strand
ugggacuuguggaagguua

SEQ ID NO: 2274737 - RNA, 19 nt, Homo sapiens
  misc_RNA (1)...(19): siRNA sense strand
cgaccaugccucuggaguu

SEQ ID NO: 2274738 - RNA, 19 nt, Homo sapiens
  misc_RNA (1)...(19): siRNA sense strand
gucggaagccagaagcaaa

SEQ ID NO: 2274739 - RNA, 19 nt, Homo sapiens
  misc_RNA (1)...(19): siRNA sense strand
guacuuugggaaugggaca

SEQ ID NO: 2274740 - RNA, 19 nt, Homo sapiens
  misc_RNA (1)...(19): siRNA sense strand
ccaccaaauacaccaacaa

SEQ ID NO: 2274741 - RNA, 19 nt, Homo sapiens
  misc_RNA (1)...(19): siRNA sense strand
cggagcacaucgagaccau

SEQ ID NO: 2274742 - RNA, 19 nt, Homo sapiens
  misc_RNA (1)...(19): siRNA sense strand
ccgaacagaaacaaacauu

SEQ ID NO: 2274743 - RNA, 19 nt, Homo sapiens
  misc_RNA (1)...(19): siRNA sense strand
acuuaaaccugacgguguu

SEQ ID NO: 2274744 - RNA, 19 nt, Homo sapiens
  misc_RNA (1)...(19): siRNA sense strand
agaaauacaagcagguuuu

SEQ ID NO: 2274745 - RNA, 19 nt, Homo sapiens
  misc_RNA (1)...(19): siRNA sense strand
gaacaccgcuccagggacu

SEQ ID NO: 2274746 - RNA, 19 nt, Homo sapiens
  misc_RNA (1)...(19): siRNA sense strand
gggacuuguggaagguuau

SEQ ID NO: 2274747 - RNA, 19 nt, Homo sapiens
  misc_RNA (1)...(19): siRNA sense strand
gcuaaagaaaccaugagga

SEQ ID NO: 2274748 - RNA, 19 nt, Homo sapiens
  misc_RNA (1)...(19): siRNA sense strand
uccuuaagaccaagaagaa

SEQ ID NO: 2274749 - RNA, 19 nt, Homo sapiens
  misc_RNA (1)...(19): siRNA sense strand
uggacaggagacagaggaa

SEQ ID NO: 2274750 - RNA, 19 nt, Homo sapiens
  misc_RNA (1)...(19): siRNA sense strand
cgcaugaggcggagagaag

SEQ ID NO: 2274751 - RNA, 19 nt, Homo sapiens
  misc_RNA (1)...(19): siRNA sense strand
gcucuacacucaaggguac

SEQ ID NO: 2274752 - RNA, 19 nt, Homo sapiens
  misc_RNA (1)...(19): siRNA sense strand
ggcaguucuuuaagugcaa

SEQ ID NO: 2274753 - RNA, 19 nt, Homo sapiens
  misc_RNA (1)...(19): siRNA sense strand
gcaagaagauaucuaccca

SEQ ID NO: 2274754 - RNA, 19 nt, Homo sapiens
  misc_RNA (1)...(19): siRNA sense strand
cugugauagagaaggcgaa

SEQ ID NO: 2274755 - RNA, 19 nt, Homo sapiens
  misc_RNA (1)...(19): siRNA sense strand
guggaggaucccauggcaa

SEQ ID NO: 2274756 - RNA, 19 nt, Homo sapiens
  misc_RNA (1)...(19): siRNA sense strand
cgucaggacagcuugugaa

SEQ ID NO: 2274757 - RNA, 19 nt, Homo sapiens
  misc_RNA (1)...(19): siRNA sense strand
ucaugauucuggcccgaaa

SEQ ID NO: 2274758 - RNA, 19 nt, Homo sapiens
  misc_RNA (1)...(19): siRNA sense strand
aagcgguggcuaaagcaaa

SEQ ID NO: 2274759 - RNA, 19 nt, Homo sapiens
  misc_RNA (1)...(19): siRNA sense strand
gaagauaucuacccagcca

SEQ ID NO: 2274760 - RNA, 19 nt, Homo sapiens
  misc_RNA (1)...(19): siRNA sense strand
ccuccacaagaaagggaaa

SEQ ID NO: 2274761 - RNA, 19 nt, Homo sapiens
  misc_RNA (1)...(19): siRNA sense strand
aagaaaggcguguggcuca

SEQ ID NO: 2274762 - RNA, 19 nt, Homo sapiens
  misc_RNA (1)...(19): siRNA sense strand
ggaagaaaggcguguggcu

SEQ ID NO: 2274763 - RNA, 19 nt, Homo sapiens
  misc_RNA (1)...(19): siRNA sense strand
cuagagaagaggaaggaaa

SEQ ID NO: 2274764 - RNA, 19 nt, Homo sapiens
  misc_RNA (1)...(19): siRNA sense strand
cgugaaugaauuugggaaa

SEQ ID NO: 2274765 - RNA, 19 nt, Homo sapiens
  misc_RNA (1)...(19): siRNA sense strand
augaaauacaggagggauu

SEQ ID NO: 2274766 - RNA, 19 nt, Homo sapiens
  misc_RNA (1)...(19): siRNA sense strand
ucucauucuuggagugaaa

SEQ ID NO: 2274767 - RNA, 19 nt, Homo sapiens
  misc_RNA (1)...(19): siRNA sense strand
gaaggguaacugugggaaa

SEQ ID NO: 2274768 - RNA, 19 nt, Homo sapiens
  misc_RNA (1)...(19): siRNA sense strand
ccucauugauggagcuaga

SEQ ID NO: 2274769 - RNA, 19 nt, Homo sapiens
  misc_RNA (1)...(19): siRNA sense strand
aaagaaaaucagaggcaaa

SEQ ID NO: 2274770 - RNA, 19 nt, Homo sapiens
  misc_RNA (1)...(19): siRNA sense strand
ugguauuaucucagacaaa

SEQ ID NO: 2274771 - RNA, 19 nt, Homo sapiens
  misc_RNA (1)...(19): siRNA sense strand
auguuaagcuugaagaaga

SEQ ID NO: 2274772 - RNA, 19 nt, Homo sapiens
  misc_RNA (1)...(19): siRNA sense strand
agagauagacaaugcaaau

SEQ ID NO: 2274773 - RNA, 19 nt, Homo sapiens
  misc_RNA (1)...(19): siRNA sense strand
cuuaagaccaggauaguau

SEQ ID NO: 2274774 - RNA, 19 nt, Homo sapiens
  misc_RNA (1)...(19): siRNA sense strand
ucguaauguagaagaagaa

SEQ ID NO: 2274775 - RNA, 19 nt, Homo sapiens
  misc_RNA (1)...(19): siRNA sense strand
gugaugguguucagggaau

SEQ ID NO: 2274776 - RNA, 19 nt, Homo sapiens
  misc_RNA (1)...(19): siRNA sense strand
aguuaaaggaggagagcac

SEQ ID NO: 2274777 - RNA, 19 nt, Homo sapiens
  misc_RNA (1)...(19): siRNA sense strand
gggcaaaaggugacagcau

SEQ ID NO: 2274778 - RNA, 19 nt, Homo sapiens
  misc_RNA (1)...(19): siRNA sense strand
ugggaaagacaaagacaca

SEQ ID NO: 2274779 - RNA, 19 nt, Homo sapiens
  misc_RNA (1)...(19): siRNA sense strand
augcaaaaccagagauaga

SEQ ID NO: 2274780 - RNA, 19 nt, Homo sapiens
  misc_RNA (1)...(19): siRNA sense strand
gggaauuugcuuuggagga

SEQ ID NO: 2274781 - RNA, 19 nt, Homo sapiens
  misc_RNA (1)...(19): siRNA sense strand
uuggagaacucgaugguga

SEQ ID NO: 2274782 - RNA, 19 nt, Homo sapiens
  misc_RNA (1)...(19): siRNA sense strand
ugacacuacucaagaggau

SEQ ID NO: 2274783 - RNA, 19 nt, Homo sapiens
  misc_RNA (1)...(19): siRNA sense strand
auguagaagaagaaaccaa

SEQ ID NO: 2274784 - RNA, 19 nt, Homo sapiens
  misc_RNA (1)...(19): siRNA sense strand
gugaaugaauuugggaaaa

SEQ ID NO: 2274785 - RNA, 19 nt, Homo sapiens
  misc_RNA (1)...(19): siRNA sense strand
agcaaguggugaauguaaa

SEQ ID NO: 2274786 - RNA, 19 nt, Homo sapiens
  misc_RNA (1)...(19): siRNA sense strand
gcauguuaagcuugaagaa

SEQ ID NO: 2274787 - RNA, 19 nt, Homo sapiens
  misc_RNA (1)...(19): siRNA sense strand
uaccaauaccuaugcgaaa

SEQ ID NO: 2274788 - RNA, 19 nt, Homo sapiens
  misc_RNA (1)...(19): siRNA sense strand
agcagaguguuguaagaaa

SEQ ID NO: 2274789 - RNA, 19 nt, Homo sapiens
  misc_RNA (1)...(19): siRNA sense strand
cagagauagacaaugcaaa

SEQ ID NO: 2274790 - RNA, 19 nt, Homo sapiens
  misc_RNA (1)...(19): siRNA sense strand
augcgaaaucuguggugaa

SEQ ID NO: 2274791 - RNA, 19 nt, Homo sapiens
  misc_RNA (1)...(19): siRNA sense strand
aaaguuagcaaguggugaa

SEQ ID NO: 2274792 - RNA, 19 nt, Homo sapiens
  misc_RNA (1)...(19): siRNA sense strand
gugcauaaugggagacacu

SEQ ID NO: 2274793 - RNA, 19 nt, Homo sapiens
  misc_RNA (1)...(19): siRNA sense strand
cauugaaacuggagaggag

SEQ ID NO: 2274794 - RNA, 19 nt, Homo sapiens
  misc_RNA (1)...(19): siRNA sense strand
ucauugagccagaagaaaa

SEQ ID NO: 2274795 - RNA, 19 nt, Homo sapiens
  misc_RNA (1)...(19): siRNA sense strand
uagagaagaggaaggaaaa

SEQ ID NO: 2274796 - RNA, 19 nt, Homo sapiens
  misc_RNA (1)...(19): siRNA sense strand
gggauuugcucguugcuga

SEQ ID NO: 2274797 - RNA, 19 nt, Homo sapiens
  misc_RNA (1)...(19): siRNA sense strand
uguuaagcuugaagaagau

SEQ ID NO: 2274798 - RNA, 19 nt, Homo sapiens
  misc_RNA (1)...(19): siRNA sense strand
ggauagguucugauugcaa

SEQ ID NO: 2274799 - RNA, 19 nt, Homo sapiens
  misc_RNA (1)...(19): siRNA sense strand
gcgugaaugaauuugggaa

SEQ ID NO: 2274800 - RNA, 19 nt, Homo sapiens
  misc_RNA (1)...(19): siRNA sense strand
gaggcaagacuguggaagu

SEQ ID NO: 2274801 - RNA, 19 nt, Homo sapiens
  misc_RNA (1)...(19): siRNA sense strand
uguagaagaagaaaccaaa

SEQ ID NO: 2274802 - RNA, 19 nt, Homo sapiens
  misc_RNA (1)...(19): siRNA sense strand
agcuuauauuggugggauu

SEQ ID NO: 2274803 - RNA, 19 nt, Homo sapiens
  misc_RNA (1)...(19): siRNA sense strand
gugaaacgugcucaggaaa

SEQ ID NO: 2274804 - RNA, 19 nt, Homo sapiens
  misc_RNA (1)...(19): siRNA sense strand
gggccauauccgaggaaac

SEQ ID NO: 2274805 - RNA, 19 nt, Homo sapiens
  misc_RNA (1)...(19): siRNA sense strand
uagcaaguggugaauguaa

SEQ ID NO: 2274806 - RNA, 19 nt, Homo sapiens
  misc_RNA (1)...(19): siRNA sense strand
ccgagaagcaguaaaugau

SEQ ID NO: 2274807 - RNA, 19 nt, Homo sapiens
  misc_RNA (1)...(19): siRNA sense strand
gacaaaagaaaguuagcaa

SEQ ID NO: 2274808 - RNA, 19 nt, Homo sapiens
  misc_RNA (1)...(19): siRNA sense strand
caguaaagaaggcacuauu

SEQ ID NO: 2274809 - RNA, 19 nt, Homo sapiens
  misc_RNA (1)...(19): siRNA sense strand
gauugugauauucgugaaa

SEQ ID NO: 2274810 - RNA, 19 nt, Homo sapiens
  misc_RNA (1)...(19): siRNA sense strand
caucagacaaauauugcua

SEQ ID NO: 2274811 - RNA, 19 nt, Homo sapiens
  misc_RNA (1)...(19): siRNA sense strand
uaacugugggaaagacaaa

SEQ ID NO: 2274812 - RNA, 19 nt, Homo sapiens
  misc_RNA (1)...(19): siRNA sense strand
agagaaaagugaugcaguu

SEQ ID NO: 2274813 - RNA, 19 nt, Homo sapiens
  misc_RNA (1)...(19): siRNA sense strand
agaaaugcaccuugacuca

SEQ ID NO: 2274814 - RNA, 19 nt, Homo sapiens
  misc_RNA (1)...(19): siRNA sense strand
gugccgagaagcaguaaau

SEQ ID NO: 2274815 - RNA, 19 nt, Homo sapiens
  misc_RNA (1)...(19): siRNA sense strand
ugaaacgugcucaggaaau

SEQ ID NO: 2274816 - RNA, 19 nt, Homo sapiens
  misc_RNA (1)...(19): siRNA sense strand
aggcaagacuguggaaguu

SEQ ID NO: 2274817 - RNA, 19 nt, Homo sapiens
  misc_RNA (1)...(19): siRNA sense strand
ggauguucuaugacgggaa

SEQ ID NO: 2274818 - RNA, 19 nt, Homo sapiens
  misc_RNA (1)...(19): siRNA sense strand
gccgagaagcaguaaauga

SEQ ID NO: 2274819 - RNA, 19 nt, Homo sapiens
  misc_RNA (1)...(19): siRNA sense strand
gguaacugugggaaagaca

SEQ ID NO: 2274820 - RNA, 19 nt, Homo sapiens
  misc_RNA (1)...(19): siRNA sense strand
ccugaauaguggagguggu

SEQ ID NO: 2274821 - RNA, 19 nt, Homo sapiens
  misc_RNA (1)...(19): siRNA sense strand
gaagggacggagaagggua

SEQ ID NO: 2274822 - RNA, 19 nt, Homo sapiens
  misc_RNA (1)...(19): siRNA sense strand
uggagaacucgauggugaa

SEQ ID NO: 2274823 - RNA, 19 nt, Homo sapiens
  misc_RNA (1)...(19): siRNA sense strand
agcugaaguguguguguaa

SEQ ID NO: 2274824 - RNA, 19 nt, Homo sapiens
  misc_RNA (1)...(19): siRNA sense strand
agugaaaggauuccagaca

SEQ ID NO: 2274825 - RNA, 19 nt, Homo sapiens
  misc_RNA (1)...(19): siRNA sense strand
cuagagaagaggaaggaaa

SEQ ID NO: 2274826 - RNA, 19 nt, Homo sapiens
  misc_RNA (1)...(19): siRNA sense strand
cgugaaugaauuugggaaa

SEQ ID NO: 2274827 - RNA, 19 nt, Homo sapiens
  misc_RNA (1)...(19): siRNA sense strand
augaaauacaggagggauu

SEQ ID NO: 2274828 - RNA, 19 nt, Homo sapiens
  misc_RNA (1)...(19): siRNA sense strand
ucucauucuuggagugaaa

SEQ ID NO: 2274829 - RNA, 19 nt, Homo sapiens
  misc_RNA (1)...(19): siRNA sense strand
gaaggguaacugugggaaa

SEQ ID NO: 2274830 - RNA, 19 nt, Homo sapiens
  misc_RNA (1)...(19): siRNA sense strand
ccucauugauggagcuaga

SEQ ID NO: 2274831 - RNA, 19 nt, Homo sapiens
  misc_RNA (1)...(19): siRNA sense strand
aaagaaaaucagaggcaaa

SEQ ID NO: 2274832 - RNA, 19 nt, Homo sapiens
  misc_RNA (1)...(19): siRNA sense strand
ugguauuaucucagacaaa

SEQ ID NO: 2274833 - RNA, 19 nt, Homo sapiens
  misc_RNA (1)...(19): siRNA sense strand
auguuaagcuugaagaaga

SEQ ID NO: 2274834 - RNA, 19 nt, Homo sapiens
  misc_RNA (1)...(19): siRNA sense strand
agagauagacaaugcaaau

SEQ ID NO: 2274835 - RNA, 19 nt, Homo sapiens
  misc_RNA (1)...(19): siRNA sense strand
cuuaagaccaggauaguau

SEQ ID NO: 2274836 - RNA, 19 nt, Homo sapiens
  misc_RNA (1)...(19): siRNA sense strand
ucguaauguagaagaagaa

SEQ ID NO: 2274837 - RNA, 19 nt, Homo sapiens
  misc_RNA (1)...(19): siRNA sense strand
gugaugguguucagggaau

SEQ ID NO: 2274838 - RNA, 19 nt, Homo sapiens
  misc_RNA (1)...(19): siRNA sense strand
aguuaaaggaggagagcac

SEQ ID NO: 2274839 - RNA, 19 nt, Homo sapiens
  misc_RNA (1)...(19): siRNA sense strand
gggcaaaaggugacagcau

SEQ ID NO: 2274840 - RNA, 19 nt, Homo sapiens
  misc_RNA (1)...(19): siRNA sense strand
ugggaaagacaaagacaca

SEQ ID NO: 2274841 - RNA, 19 nt, Homo sapiens
  misc_RNA (1)...(19): siRNA sense strand
augcaaaaccagagauaga

SEQ ID NO: 2274842 - RNA, 19 nt, Homo sapiens
  misc_RNA (1)...(19): siRNA sense strand
gggaauuugcuuuggagga

SEQ ID NO: 2274843 - RNA, 19 nt, Homo sapiens
  misc_RNA (1)...(19): siRNA sense strand
uuggagaacucgaugguga

SEQ ID NO: 2274844 - RNA, 19 nt, Homo sapiens
  misc_RNA (1)...(19): siRNA sense strand
ugacacuacucaagaggau

SEQ ID NO: 2274845 - RNA, 19 nt, Homo sapiens
  misc_RNA (1)...(19): siRNA sense strand
auguagaagaagaaaccaa

SEQ ID NO: 2274846 - RNA, 19 nt, Homo sapiens
  misc_RNA (1)...(19): siRNA sense strand
gugaaugaauuugggaaaa

SEQ ID NO: 2274847 - RNA, 19 nt, Homo sapiens
  misc_RNA (1)...(19): siRNA sense strand
agcaaguggugaauguaaa

SEQ ID NO: 2274848 - RNA, 19 nt, Homo sapiens
  misc_RNA (1)...(19): siRNA sense strand
gcauguuaagcuugaagaa

SEQ ID NO: 2274849 - RNA, 19 nt, Homo sapiens
  misc_RNA (1)...(19): siRNA sense strand
uaccaauaccuaugcgaaa

SEQ ID NO: 2274850 - RNA, 19 nt, Homo sapiens
  misc_RNA (1)...(19): siRNA sense strand
agcagaguguuguaagaaa

SEQ ID NO: 2274851 - RNA, 19 nt, Homo sapiens
  misc_RNA (1)...(19): siRNA sense strand
cagagauagacaaugcaaa

SEQ ID NO: 2274852 - RNA, 19 nt, Homo sapiens
  misc_RNA (1)...(19): siRNA sense strand
augcgaaaucuguggugaa

SEQ ID NO: 2274853 - RNA, 19 nt, Homo sapiens
  misc_RNA (1)...(19): siRNA sense strand
aaaguuagcaaguggugaa

SEQ ID NO: 2274854 - RNA, 19 nt, Homo sapiens
  misc_RNA (1)...(19): siRNA sense strand
gugcauaaugggagacacu

SEQ ID NO: 2274855 - RNA, 19 nt, Homo sapiens
  misc_RNA (1)...(19): siRNA sense strand
cauugaaacuggagaggag

SEQ ID NO: 2274856 - RNA, 19 nt, Homo sapiens
  misc_RNA (1)...(19): siRNA sense strand
ucauugagccagaagaaaa

SEQ ID NO: 2274857 - RNA, 19 nt, Homo sapiens
  misc_RNA (1)...(19): siRNA sense strand
uagagaagaggaaggaaaa

SEQ ID NO: 2274858 - RNA, 19 nt, Homo sapiens
  misc_RNA (1)...(19): siRNA sense strand
gggauuugcucguugcuga

SEQ ID NO: 2274859 - RNA, 19 nt, Homo sapiens
  misc_RNA (1)...(19): siRNA sense strand
uguuaagcuugaagaagau

SEQ ID NO: 2274860 - RNA, 19 nt, Homo sapiens
  misc_RNA (1)...(19): siRNA sense strand
ggauagguucugauugcaa

SEQ ID NO: 2274861 - RNA, 19 nt, Homo sapiens
  misc_RNA (1)...(19): siRNA sense strand
gcgugaaugaauuugggaa

SEQ ID NO: 2274862 - RNA, 19 nt, Homo sapiens
  misc_RNA (1)...(19): siRNA sense strand
gaggcaagacuguggaagu

SEQ ID NO: 2274863 - RNA, 19 nt, Homo sapiens
  misc_RNA (1)...(19): siRNA sense strand
uguagaagaagaaaccaaa

SEQ ID NO: 2274864 - RNA, 19 nt, Homo sapiens
  misc_RNA (1)...(19): siRNA sense strand
agcuuauauuggugggauu

SEQ ID NO: 2274865 - RNA, 19 nt, Homo sapiens
  misc_RNA (1)...(19): siRNA sense strand
gugaaacgugcucaggaaa

SEQ ID NO: 2274866 - RNA, 19 nt, Homo sapiens
  misc_RNA (1)...(19): siRNA sense strand
gggccauauccgaggaaac

SEQ ID NO: 2274867 - RNA, 19 nt, Homo sapiens
  misc_RNA (1)...(19): siRNA sense strand
uagcaaguggugaauguaa

SEQ ID NO: 2274868 - RNA, 19 nt, Homo sapiens
  misc_RNA (1)...(19): siRNA sense strand
ccgagaagcaguaaaugau

SEQ ID NO: 2274869 - RNA, 19 nt, Homo sapiens
  misc_RNA (1)...(19): siRNA sense strand
gacaaaagaaaguuagcaa

SEQ ID NO: 2274870 - RNA, 19 nt, Homo sapiens
  misc_RNA (1)...(19): siRNA sense strand
caguaaagaaggcacuauu

SEQ ID NO: 2274871 - RNA, 19 nt, Homo sapiens
  misc_RNA (1)...(19): siRNA sense strand
gauugugauauucgugaaa

SEQ ID NO: 2274872 - RNA, 19 nt, Homo sapiens
  misc_RNA (1)...(19): siRNA sense strand
caucagacaaauauugcua

SEQ ID NO: 2274873 - RNA, 19 nt, Homo sapiens
  misc_RNA (1)...(19): siRNA sense strand
uaacugugggaaagacaaa

SEQ ID NO: 2274874 - RNA, 19 nt, Homo sapiens
  misc_RNA (1)...(19): siRNA sense strand
agagaaaagugaugcaguu

SEQ ID NO: 2274875 - RNA, 19 nt, Homo sapiens
  misc_RNA (1)...(19): siRNA sense strand
agaaaugcaccuugacuca

SEQ ID NO: 2274876 - RNA, 19 nt, Homo sapiens
  misc_RNA (1)...(19): siRNA sense strand
gugccgagaagcaguaaau

SEQ ID NO: 2274877 - RNA, 19 nt, Homo sapiens
  misc_RNA (1)...(19): siRNA sense strand
ugaaacgugcucaggaaau

SEQ ID NO: 2274878 - RNA, 19 nt, Homo sapiens
  misc_RNA (1)...(19): siRNA sense strand
aggcaagacuguggaaguu

SEQ ID NO: 2274879 - RNA, 19 nt, Homo sapiens
  misc_RNA (1)...(19): siRNA sense strand
ggauguucuaugacgggaa

SEQ ID NO: 2274880 - RNA, 19 nt, Homo sapiens
  misc_RNA (1)...(19): siRNA sense strand
gccgagaagcaguaaauga

SEQ ID NO: 2274881 - RNA, 19 nt, Homo sapiens
  misc_RNA (1)...(19): siRNA sense strand
gguaacugugggaaagaca

SEQ ID NO: 2274882 - RNA, 19 nt, Homo sapiens
  misc_RNA (1)...(19): siRNA sense strand
ccugaauaguggagguggu

SEQ ID NO: 2274883 - RNA, 19 nt, Homo sapiens
  misc_RNA (1)...(19): siRNA sense strand
gaagggacggagaagggua

SEQ ID NO: 2274884 - RNA, 19 nt, Homo sapiens
  misc_RNA (1)...(19): siRNA sense strand
uggagaacucgauggugaa

SEQ ID NO: 2274885 - RNA, 19 nt, Homo sapiens
  misc_RNA (1)...(19): siRNA sense strand
agcugaaguguguguguaa

SEQ ID NO: 2274886 - RNA, 19 nt, Homo sapiens
  misc_RNA (1)...(19): siRNA sense strand
agugaaaggauuccagaca

SEQ ID NO: 2274887 - RNA, 19 nt, Homo sapiens
  misc_RNA (1)...(19): siRNA sense strand
cuagagaagaggaaggaaa

SEQ ID NO: 2274888 - RNA, 19 nt, Homo sapiens
  misc_RNA (1)...(19): siRNA sense strand
cgugaaugaauuugggaaa

SEQ ID NO: 2274889 - RNA, 19 nt, Homo sapiens
  misc_RNA (1)...(19): siRNA sense strand
augaaauacaggagggauu

SEQ ID NO: 2274890 - RNA, 19 nt, Homo sapiens
  misc_RNA (1)...(19): siRNA sense strand
ucucauucuuggagugaaa

SEQ ID NO: 2274891 - RNA, 19 nt, Homo sapiens
  misc_RNA (1)...(19): siRNA sense strand
gaaggguaacugugggaaa

SEQ ID NO: 2274892 - RNA, 19 nt, Homo sapiens
  misc_RNA (1)...(19): siRNA sense strand
ccucauugauggagcuaga

SEQ ID NO: 2274893 - RNA, 19 nt, Homo sapiens
  misc_RNA (1)...(19): siRNA sense strand
aaagaaaaucagaggcaaa

SEQ ID NO: 2274894 - RNA, 19 nt, Homo sapiens
  misc_RNA (1)...(19): siRNA sense strand
ugguauuaucucagacaaa

SEQ ID NO: 2274895 - RNA, 19 nt, Homo sapiens
  misc_RNA (1)...(19): siRNA sense strand
auguuaagcuugaagaaga

SEQ ID NO: 2274896 - RNA, 19 nt, Homo sapiens
  misc_RNA (1)...(19): siRNA sense strand
agagauagacaaugcaaau

SEQ ID NO: 2274897 - RNA, 19 nt, Homo sapiens
  misc_RNA (1)...(19): siRNA sense strand
cuuaagaccaggauaguau

SEQ ID NO: 2274898 - RNA, 19 nt, Homo sapiens
  misc_RNA (1)...(19): siRNA sense strand
ucguaauguagaagaagaa

SEQ ID NO: 2274899 - RNA, 19 nt, Homo sapiens
  misc_RNA (1)...(19): siRNA sense strand
gugaugguguucagggaau

SEQ ID NO: 2274900 - RNA, 19 nt, Homo sapiens
  misc_RNA (1)...(19): siRNA sense strand
aguuaaaggaggagagcac

SEQ ID NO: 2274901 - RNA, 19 nt, Homo sapiens
  misc_RNA (1)...(19): siRNA sense strand
gggcaaaaggugacagcau

SEQ ID NO: 2274902 - RNA, 19 nt, Homo sapiens
  misc_RNA (1)...(19): siRNA sense strand
ugggaaagacaaagacaca

SEQ ID NO: 2274903 - RNA, 19 nt, Homo sapiens
  misc_RNA (1)...(19): siRNA sense strand
augcaaaaccagagauaga

SEQ ID NO: 2274904 - RNA, 19 nt, Homo sapiens
  misc_RNA (1)...(19): siRNA sense strand
gggaauuugcuuuggagga

SEQ ID NO: 2274905 - RNA, 19 nt, Homo sapiens
  misc_RNA (1)...(19): siRNA sense strand
uuggagaacucgaugguga

SEQ ID NO: 2274906 - RNA, 19 nt, Homo sapiens
  misc_RNA (1)...(19): siRNA sense strand
ugacacuacucaagaggau

SEQ ID NO: 2274907 - RNA, 19 nt, Homo sapiens
  misc_RNA (1)...(19): siRNA sense strand
auguagaagaagaaaccaa

SEQ ID NO: 2274908 - RNA, 19 nt, Homo sapiens
  misc_RNA (1)...(19): siRNA sense strand
gugaaugaauuugggaaaa

SEQ ID NO: 2274909 - RNA, 19 nt, Homo sapiens
  misc_RNA (1)...(19): siRNA sense strand
agcaaguggugaauguaaa

SEQ ID NO: 2274910 - RNA, 19 nt, Homo sapiens
  misc_RNA (1)...(19): siRNA sense strand
gcauguuaagcuugaagaa

SEQ ID NO: 2274911 - RNA, 19 nt, Homo sapiens
  misc_RNA (1)...(19): siRNA sense strand
uaccaauaccuaugcgaaa

SEQ ID NO: 2274912 - RNA, 19 nt, Homo sapiens
  misc_RNA (1)...(19): siRNA sense strand
agcagaguguuguaagaaa

SEQ ID NO: 2274913 - RNA, 19 nt, Homo sapiens
  misc_RNA (1)...(19): siRNA sense strand
cagagauagacaaugcaaa

SEQ ID NO: 2274914 - RNA, 19 nt, Homo sapiens
  misc_RNA (1)...(19): siRNA sense strand
augcgaaaucuguggugaa

SEQ ID NO: 2274915 - RNA, 19 nt, Homo sapiens
  misc_RNA (1)...(19): siRNA sense strand
aaaguuagcaaguggugaa

SEQ ID NO: 2274916 - RNA, 19 nt, Homo sapiens
  misc_RNA (1)...(19): siRNA sense strand
gugcauaaugggagacacu

SEQ ID NO: 2274917 - RNA, 19 nt, Homo sapiens
  misc_RNA (1)...(19): siRNA sense strand
cauugaaacuggagaggag

SEQ ID NO: 2274918 - RNA, 19 nt, Homo sapiens
  misc_RNA (1)...(19): siRNA sense strand
ucauugagccagaagaaaa

SEQ ID NO: 2274919 - RNA, 19 nt, Homo sapiens
  misc_RNA (1)...(19): siRNA sense strand
uagagaagaggaaggaaaa

SEQ ID NO: 2274920 - RNA, 19 nt, Homo sapiens
  misc_RNA (1)...(19): siRNA sense strand
gggauuugcucguugcuga

SEQ ID NO: 2274921 - RNA, 19 nt, Homo sapiens
  misc_RNA (1)...(19): siRNA sense strand
uguuaagcuugaagaagau

SEQ ID NO: 2274922 - RNA, 19 nt, Homo sapiens
  misc_RNA (1)...(19): siRNA sense strand
ggauagguucugauugcaa

SEQ ID NO: 2274923 - RNA, 19 nt, Homo sapiens
  misc_RNA (1)...(19): siRNA sense strand
gcgugaaugaauuugggaa

SEQ ID NO: 2274924 - RNA, 19 nt, Homo sapiens
  misc_RNA (1)...(19): siRNA sense strand
gaggcaagacuguggaagu

SEQ ID NO: 2274925 - RNA, 19 nt, Homo sapiens
  misc_RNA (1)...(19): siRNA sense strand
uguagaagaagaaaccaaa

SEQ ID NO: 2274926 - RNA, 19 nt, Homo sapiens
  misc_RNA (1)...(19): siRNA sense strand
agcuuauauuggugggauu

SEQ ID NO: 2274927 - RNA, 19 nt, Homo sapiens
  misc_RNA (1)...(19): siRNA sense strand
gugaaacgugcucaggaaa

SEQ ID NO: 2274928 - RNA, 19 nt, Homo sapiens
  misc_RNA (1)...(19): siRNA sense strand
gggccauauccgaggaaac

SEQ ID NO: 2274929 - RNA, 19 nt, Homo sapiens
  misc_RNA (1)...(19): siRNA sense strand
uagcaaguggugaauguaa

SEQ ID NO: 2274930 - RNA, 19 nt, Homo sapiens
  misc_RNA (1)...(19): siRNA sense strand
ccgagaagcaguaaaugau

SEQ ID NO: 2274931 - RNA, 19 nt, Homo sapiens
  misc_RNA (1)...(19): siRNA sense strand
gacaaaagaaaguuagcaa

SEQ ID NO: 2274932 - RNA, 19 nt, Homo sapiens
  misc_RNA (1)...(19): siRNA sense strand
caguaaagaaggcacuauu

SEQ ID NO: 2274933 - RNA, 19 nt, Homo sapiens
  misc_RNA (1)...(19): siRNA sense strand
gauugugauauucgugaaa

SEQ ID NO: 2274934 - RNA, 19 nt, Homo sapiens
  misc_RNA (1)...(19): siRNA sense strand
caucagacaaauauugcua

SEQ ID NO: 2274935 - RNA, 19 nt, Homo sapiens
  misc_RNA (1)...(19): siRNA sense strand
uaacugugggaaagacaaa

SEQ ID NO: 2274936 - RNA, 19 nt, Homo sapiens
  misc_RNA (1)...(19): siRNA sense strand
agagaaaagugaugcaguu

SEQ ID NO: 2274937 - RNA, 19 nt, Homo sapiens
  misc_RNA (1)...(19): siRNA sense strand
agaaaugcaccuugacuca

SEQ ID NO: 2274938 - RNA, 19 nt, Homo sapiens
  misc_RNA (1)...(19): siRNA sense strand
gugccgagaagcaguaaau

SEQ ID NO: 2274939 - RNA, 19 nt, Homo sapiens
  misc_RNA (1)...(19): siRNA sense strand
ugaaacgugcucaggaaau

SEQ ID NO: 2274940 - RNA, 19 nt, Homo sapiens
  misc_RNA (1)...(19): siRNA sense strand
aggcaagacuguggaaguu

SEQ ID NO: 2274941 - RNA, 19 nt, Homo sapiens
  misc_RNA (1)...(19): siRNA sense strand
ggauguucuaugacgggaa

SEQ ID NO: 2274942 - RNA, 19 nt, Homo sapiens
  misc_RNA (1)...(19): siRNA sense strand
gccgagaagcaguaaauga

SEQ ID NO: 2274943 - RNA, 19 nt, Homo sapiens
  misc_RNA (1)...(19): siRNA sense strand
gguaacugugggaaagaca

SEQ ID NO: 2274944 - RNA, 19 nt, Homo sapiens
  misc_RNA (1)...(19): siRNA sense strand
ccugaauaguggagguggu

SEQ ID NO: 2274945 - RNA, 19 nt, Homo sapiens
  misc_RNA (1)...(19): siRNA sense strand
gaagggacggagaagggua

SEQ ID NO: 2274946 - RNA, 19 nt, Homo sapiens
  misc_RNA (1)...(19): siRNA sense strand
uggagaacucgauggugaa

SEQ ID NO: 2274947 - RNA, 19 nt, Homo sapiens
  misc_RNA (1)...(19): siRNA sense strand
agcugaaguguguguguaa

SEQ ID NO: 2274948 - RNA, 19 nt, Homo sapiens
  misc_RNA (1)...(19): siRNA sense strand
agugaaaggauuccagaca

SEQ ID NO: 2274949 - RNA, 19 nt, Homo sapiens
  misc_RNA (1)...(19): siRNA sense strand
cuagagaagaggaaggaaa

SEQ ID NO: 2274950 - RNA, 19 nt, Homo sapiens
  misc_RNA (1)...(19): siRNA sense strand
cgugaaugaauuugggaaa

SEQ ID NO: 2274951 - RNA, 19 nt, Homo sapiens
  misc_RNA (1)...(19): siRNA sense strand
augaaauacaggagggauu

SEQ ID NO: 2274952 - RNA, 19 nt, Homo sapiens
  misc_RNA (1)...(19): siRNA sense strand
ucucauucuuggagugaaa

SEQ ID NO: 2274953 - RNA, 19 nt, Homo sapiens
  misc_RNA (1)...(19): siRNA sense strand
gaaggguaacugugggaaa

SEQ ID NO: 2274954 - RNA, 19 nt, Homo sapiens
  misc_RNA (1)...(19): siRNA sense strand
ccucauugauggagcuaga

SEQ ID NO: 2274955 - RNA, 19 nt, Homo sapiens
  misc_RNA (1)...(19): siRNA sense strand
aaagaaaaucagaggcaaa

SEQ ID NO: 2274956 - RNA, 19 nt, Homo sapiens
  misc_RNA (1)...(19): siRNA sense strand
ugguauuaucucagacaaa

SEQ ID NO: 2274957 - RNA, 19 nt, Homo sapiens
  misc_RNA (1)...(19): siRNA sense strand
auguuaagcuugaagaaga

SEQ ID NO: 2274958 - RNA, 19 nt, Homo sapiens
  misc_RNA (1)...(19): siRNA sense strand
agagauagacaaugcaaau

SEQ ID NO: 2274959 - RNA, 19 nt, Homo sapiens
  misc_RNA (1)...(19): siRNA sense strand
cuuaagaccaggauaguau

SEQ ID NO: 2274960 - RNA, 19 nt, Homo sapiens
  misc_RNA (1)...(19): siRNA sense strand
ucguaauguagaagaagaa

SEQ ID NO: 2274961 - RNA, 19 nt, Homo sapiens
  misc_RNA (1)...(19): siRNA sense strand
gugaugguguucagggaau

SEQ ID NO: 2274962 - RNA, 19 nt, Homo sapiens
  misc_RNA (1)...(19): siRNA sense strand
aguuaaaggaggagagcac

SEQ ID NO: 2274963 - RNA, 19 nt, Homo sapiens
  misc_RNA (1)...(19): siRNA sense strand
gggcaaaaggugacagcau

SEQ ID NO: 2274964 - RNA, 19 nt, Homo sapiens
  misc_RNA (1)...(19): siRNA sense strand
ugggaaagacaaagacaca

SEQ ID NO: 2274965 - RNA, 19 nt, Homo sapiens
  misc_RNA (1)...(19): siRNA sense strand
augcaaaaccagagauaga

SEQ ID NO: 2274966 - RNA, 19 nt, Homo sapiens
  misc_RNA (1)...(19): siRNA sense strand
gggaauuugcuuuggagga

SEQ ID NO: 2274967 - RNA, 19 nt, Homo sapiens
  misc_RNA (1)...(19): siRNA sense strand
uuggagaacucgaugguga

SEQ ID NO: 2274968 - RNA, 19 nt, Homo sapiens
  misc_RNA (1)...(19): siRNA sense strand
ugacacuacucaagaggau

SEQ ID NO: 2274969 - RNA, 19 nt, Homo sapiens
  misc_RNA (1)...(19): siRNA sense strand
auguagaagaagaaaccaa

SEQ ID NO: 2274970 - RNA, 19 nt, Homo sapiens
  misc_RNA (1)...(19): siRNA sense strand
gugaaugaauuugggaaaa

SEQ ID NO: 2274971 - RNA, 19 nt, Homo sapiens
  misc_RNA (1)...(19): siRNA sense strand
agcaaguggugaauguaaa

SEQ ID NO: 2274972 - RNA, 19 nt, Homo sapiens
  misc_RNA (1)...(19): siRNA sense strand
gcauguuaagcuugaagaa

SEQ ID NO: 2274973 - RNA, 19 nt, Homo sapiens
  misc_RNA (1)...(19): siRNA sense strand
uaccaauaccuaugcgaaa

SEQ ID NO: 2274974 - RNA, 19 nt, Homo sapiens
  misc_RNA (1)...(19): siRNA sense strand
agcagaguguuguaagaaa

SEQ ID NO: 2274975 - RNA, 19 nt, Homo sapiens
  misc_RNA (1)...(19): siRNA sense strand
cagagauagacaaugcaaa

SEQ ID NO: 2274976 - RNA, 19 nt, Homo sapiens
  misc_RNA (1)...(19): siRNA sense strand
augcgaaaucuguggugaa

SEQ ID NO: 2274977 - RNA, 19 nt, Homo sapiens
  misc_RNA (1)...(19): siRNA sense strand
aaaguuagcaaguggugaa

SEQ ID NO: 2274978 - RNA, 19 nt, Homo sapiens
  misc_RNA (1)...(19): siRNA sense strand
gugcauaaugggagacacu

SEQ ID NO: 2274979 - RNA, 19 nt, Homo sapiens
  misc_RNA (1)...(19): siRNA sense strand
cauugaaacuggagaggag

SEQ ID NO: 2274980 - RNA, 19 nt, Homo sapiens
  misc_RNA (1)...(19): siRNA sense strand
ucauugagccagaagaaaa

SEQ ID NO: 2274981 - RNA, 19 nt, Homo sapiens
  misc_RNA (1)...(19): siRNA sense strand
uagagaagaggaaggaaaa

SEQ ID NO: 2274982 - RNA, 19 nt, Homo sapiens
  misc_RNA (1)...(19): siRNA sense strand
gggauuugcucguugcuga

SEQ ID NO: 2274983 - RNA, 19 nt, Homo sapiens
  misc_RNA (1)...(19): siRNA sense strand
uguuaagcuugaagaagau

SEQ ID NO: 2274984 - RNA, 19 nt, Homo sapiens
  misc_RNA (1)...(19): siRNA sense strand
ggauagguucugauugcaa

SEQ ID NO: 2274985 - RNA, 19 nt, Homo sapiens
  misc_RNA (1)...(19): siRNA sense strand
gcgugaaugaauuugggaa

SEQ ID NO: 2274986 - RNA, 19 nt, Homo sapiens
  misc_RNA (1)...(19): siRNA sense strand
gaggcaagacuguggaagu

SEQ ID NO: 2274987 - RNA, 19 nt, Homo sapiens
  misc_RNA (1)...(19): siRNA sense strand
uguagaagaagaaaccaaa

SEQ ID NO: 2274988 - RNA, 19 nt, Homo sapiens
  misc_RNA (1)...(19): siRNA sense strand
agcuuauauuggugggauu

SEQ ID NO: 2274989 - RNA, 19 nt, Homo sapiens
  misc_RNA (1)...(19): siRNA sense strand
gugaaacgugcucaggaaa

SEQ ID NO: 2274990 - RNA, 19 nt, Homo sapiens
  misc_RNA (1)...(19): siRNA sense strand
gggccauauccgaggaaac

SEQ ID NO: 2274991 - RNA, 19 nt, Homo sapiens
  misc_RNA (1)...(19): siRNA sense strand
uagcaaguggugaauguaa

SEQ ID NO: 2274992 - RNA, 19 nt, Homo sapiens
  misc_RNA (1)...(19): siRNA sense strand
ccgagaagcaguaaaugau

SEQ ID NO: 2274993 - RNA, 19 nt, Homo sapiens
  misc_RNA (1)...(19): siRNA sense strand
gacaaaagaaaguuagcaa

SEQ ID NO: 2274994 - RNA, 19 nt, Homo sapiens
  misc_RNA (1)...(19): siRNA sense strand
caguaaagaaggcacuauu

SEQ ID NO: 2274995 - RNA, 19 nt, Homo sapiens
  misc_RNA (1)...(19): siRNA sense strand
gauugugauauucgugaaa

SEQ ID NO: 2274996 - RNA, 19 nt, Homo sapiens
  misc_RNA (1)...(19): siRNA sense strand
caucagacaaauauugcua

SEQ ID NO: 2274997 - RNA, 19 nt, Homo sapiens
  misc_RNA (1)...(19): siRNA sense strand
uaacugugggaaagacaaa

SEQ ID NO: 2274998 - RNA, 19 nt, Homo sapiens
  misc_RNA (1)...(19): siRNA sense strand
agagaaaagugaugcaguu

SEQ ID NO: 2274999 - RNA, 19 nt, Homo sapiens
  misc_RNA (1)...(19): siRNA sense strand
agaaaugcaccuugacuca

SEQ ID NO: 2275000 - RNA, 19 nt, Homo sapiens
  misc_RNA (1)...(19): siRNA sense strand
gugccgagaagcaguaaau

SEQ ID NO: 2275001 - RNA, 19 nt, Homo sapiens
  misc_RNA (1)...(19): siRNA sense strand
ugaaacgugcucaggaaau

SEQ ID NO: 2275002 - RNA, 19 nt, Homo sapiens
  misc_RNA (1)...(19): siRNA sense strand
aggcaagacuguggaaguu

SEQ ID NO: 2275003 - RNA, 19 nt, Homo sapiens
  misc_RNA (1)...(19): siRNA sense strand
ggauguucuaugacgggaa

SEQ ID NO: 2275004 - RNA, 19 nt, Homo sapiens
  misc_RNA (1)...(19): siRNA sense strand
gccgagaagcaguaaauga

SEQ ID NO: 2275005 - RNA, 19 nt, Homo sapiens
  misc_RNA (1)...(19): siRNA sense strand
gguaacugugggaaagaca

SEQ ID NO: 2275006 - RNA, 19 nt, Homo sapiens
  misc_RNA (1)...(19): siRNA sense strand
ccugaauaguggagguggu

SEQ ID NO: 2275007 - RNA, 19 nt, Homo sapiens
  misc_RNA (1)...(19): siRNA sense strand
gaagggacggagaagggua

SEQ ID NO: 2275008 - RNA, 19 nt, Homo sapiens
  misc_RNA (1)...(19): siRNA sense strand
uggagaacucgauggugaa

SEQ ID NO: 2275009 - RNA, 19 nt, Homo sapiens
  misc_RNA (1)...(19): siRNA sense strand
agcugaaguguguguguaa

SEQ ID NO: 2275010 - RNA, 19 nt, Homo sapiens
  misc_RNA (1)...(19): siRNA sense strand
agugaaaggauuccagaca

SEQ ID NO: 2275011 - RNA, 19 nt, Homo sapiens
  misc_RNA (1)...(19): siRNA sense strand
cuagagaagaggaaggaaa

SEQ ID NO: 2275012 - RNA, 19 nt, Homo sapiens
  misc_RNA (1)...(19): siRNA sense strand
cgugaaugaauuugggaaa

SEQ ID NO: 2275013 - RNA, 19 nt, Homo sapiens
  misc_RNA (1)...(19): siRNA sense strand
augaaauacaggagggauu

SEQ ID NO: 2275014 - RNA, 19 nt, Homo sapiens
  misc_RNA (1)...(19): siRNA sense strand
ucucauucuuggagugaaa

SEQ ID NO: 2275015 - RNA, 19 nt, Homo sapiens
  misc_RNA (1)...(19): siRNA sense strand
gaaggguaacugugggaaa

SEQ ID NO: 2275016 - RNA, 19 nt, Homo sapiens
  misc_RNA (1)...(19): siRNA sense strand
ccucauugauggagcuaga

SEQ ID NO: 2275017 - RNA, 19 nt, Homo sapiens
  misc_RNA (1)...(19): siRNA sense strand
aaagaaaaucagaggcaaa

SEQ ID NO: 2275018 - RNA, 19 nt, Homo sapiens
  misc_RNA (1)...(19): siRNA sense strand
ugguauuaucucagacaaa

SEQ ID NO: 2275019 - RNA, 19 nt, Homo sapiens
  misc_RNA (1)...(19): siRNA sense strand
auguuaagcuugaagaaga

SEQ ID NO: 2275020 - RNA, 19 nt, Homo sapiens
  misc_RNA (1)...(19): siRNA sense strand
agagauagacaaugcaaau

SEQ ID NO: 2275021 - RNA, 19 nt, Homo sapiens
  misc_RNA (1)...(19): siRNA sense strand
cuuaagaccaggauaguau

SEQ ID NO: 2275022 - RNA, 19 nt, Homo sapiens
  misc_RNA (1)...(19): siRNA sense strand
ucguaauguagaagaagaa

SEQ ID NO: 2275023 - RNA, 19 nt, Homo sapiens
  misc_RNA (1)...(19): siRNA sense strand
gugaugguguucagggaau

SEQ ID NO: 2275024 - RNA, 19 nt, Homo sapiens
  misc_RNA (1)...(19): siRNA sense strand
aguuaaaggaggagagcac

SEQ ID NO: 2275025 - RNA, 19 nt, Homo sapiens
  misc_RNA (1)...(19): siRNA sense strand
gggcaaaaggugacagcau

SEQ ID NO: 2275026 - RNA, 19 nt, Homo sapiens
  misc_RNA (1)...(19): siRNA sense strand
ugggaaagacaaagacaca

SEQ ID NO: 2275027 - RNA, 19 nt, Homo sapiens
  misc_RNA (1)...(19): siRNA sense strand
augcaaaaccagagauaga

SEQ ID NO: 2275028 - RNA, 19 nt, Homo sapiens
  misc_RNA (1)...(19): siRNA sense strand
gggaauuugcuuuggagga

SEQ ID NO: 2275029 - RNA, 19 nt, Homo sapiens
  misc_RNA (1)...(19): siRNA sense strand
uuggagaacucgaugguga

SEQ ID NO: 2275030 - RNA, 19 nt, Homo sapiens
  misc_RNA (1)...(19): siRNA sense strand
ugacacuacucaagaggau

SEQ ID NO: 2275031 - RNA, 19 nt, Homo sapiens
  misc_RNA (1)...(19): siRNA sense strand
auguagaagaagaaaccaa

SEQ ID NO: 2275032 - RNA, 19 nt, Homo sapiens
  misc_RNA (1)...(19): siRNA sense strand
gugaaugaauuugggaaaa

SEQ ID NO: 2275033 - RNA, 19 nt, Homo sapiens
  misc_RNA (1)...(19): siRNA sense strand
agcaaguggugaauguaaa

SEQ ID NO: 2275034 - RNA, 19 nt, Homo sapiens
  misc_RNA (1)...(19): siRNA sense strand
gcauguuaagcuugaagaa

SEQ ID NO: 2275035 - RNA, 19 nt, Homo sapiens
  misc_RNA (1)...(19): siRNA sense strand
uaccaauaccuaugcgaaa

SEQ ID NO: 2275036 - RNA, 19 nt, Homo sapiens
  misc_RNA (1)...(19): siRNA sense strand
agcagaguguuguaagaaa

SEQ ID NO: 2275037 - RNA, 19 nt, Homo sapiens
  misc_RNA (1)...(19): siRNA sense strand
cagagauagacaaugcaaa

SEQ ID NO: 2275038 - RNA, 19 nt, Homo sapiens
  misc_RNA (1)...(19): siRNA sense strand
augcgaaaucuguggugaa

SEQ ID NO: 2275039 - RNA, 19 nt, Homo sapiens
  misc_RNA (1)...(19): siRNA sense strand
aaaguuagcaaguggugaa

SEQ ID NO: 2275040 - RNA, 19 nt, Homo sapiens
  misc_RNA (1)...(19): siRNA sense strand
gugcauaaugggagacacu

SEQ ID NO: 2275041 - RNA, 19 nt, Homo sapiens
  misc_RNA (1)...(19): siRNA sense strand
cauugaaacuggagaggag

SEQ ID NO: 2275042 - RNA, 19 nt, Homo sapiens
  misc_RNA (1)...(19): siRNA sense strand
ucauugagccagaagaaaa

SEQ ID NO: 2275043 - RNA, 19 nt, Homo sapiens
  misc_RNA (1)...(19): siRNA sense strand
uagagaagaggaaggaaaa

SEQ ID NO: 2275044 - RNA, 19 nt, Homo sapiens
  misc_RNA (1)...(19): siRNA sense strand
gggauuugcucguugcuga

SEQ ID NO: 2275045 - RNA, 19 nt, Homo sapiens
  misc_RNA (1)...(19): siRNA sense strand
uguuaagcuugaagaagau

SEQ ID NO: 2275046 - RNA, 19 nt, Homo sapiens
  misc_RNA (1)...(19): siRNA sense strand
ggauagguucugauugcaa

SEQ ID NO: 2275047 - RNA, 19 nt, Homo sapiens
  misc_RNA (1)...(19): siRNA sense strand
gcgugaaugaauuugggaa

SEQ ID NO: 2275048 - RNA, 19 nt, Homo sapiens
  misc_RNA (1)...(19): siRNA sense strand
gaggcaagacuguggaagu

SEQ ID NO: 2275049 - RNA, 19 nt, Homo sapiens
  misc_RNA (1)...(19): siRNA sense strand
uguagaagaagaaaccaaa

SEQ ID NO: 2275050 - RNA, 19 nt, Homo sapiens
  misc_RNA (1)...(19): siRNA sense strand
agcuuauauuggugggauu

SEQ ID NO: 2275051 - RNA, 19 nt, Homo sapiens
  misc_RNA (1)...(19): siRNA sense strand
gugaaacgugcucaggaaa

SEQ ID NO: 2275052 - RNA, 19 nt, Homo sapiens
  misc_RNA (1)...(19): siRNA sense strand
gggccauauccgaggaaac

SEQ ID NO: 2275053 - RNA, 19 nt, Homo sapiens
  misc_RNA (1)...(19): siRNA sense strand
uagcaaguggugaauguaa

SEQ ID NO: 2275054 - RNA, 19 nt, Homo sapiens
  misc_RNA (1)...(19): siRNA sense strand
ccgagaagcaguaaaugau

SEQ ID NO: 2275055 - RNA, 19 nt, Homo sapiens
  misc_RNA (1)...(19): siRNA sense strand
gacaaaagaaaguuagcaa

SEQ ID NO: 2275056 - RNA, 19 nt, Homo sapiens
  misc_RNA (1)...(19): siRNA sense strand
caguaaagaaggcacuauu

SEQ ID NO: 2275057 - RNA, 19 nt, Homo sapiens
  misc_RNA (1)...(19): siRNA sense strand
gauugugauauucgugaaa

SEQ ID NO: 2275058 - RNA, 19 nt, Homo sapiens
  misc_RNA (1)...(19): siRNA sense strand
caucagacaaauauugcua

SEQ ID NO: 2275059 - RNA, 19 nt, Homo sapiens
  misc_RNA (1)...(19): siRNA sense strand
uaacugugggaaagacaaa

SEQ ID NO: 2275060 - RNA, 19 nt, Homo sapiens
  misc_RNA (1)...(19): siRNA sense strand
agagaaaagugaugcaguu

SEQ ID NO: 2275061 - RNA, 19 nt, Homo sapiens
  misc_RNA (1)...(19): siRNA sense strand
agaaaugcaccuugacuca

SEQ ID NO: 2275062 - RNA, 19 nt, Homo sapiens
  misc_RNA (1)...(19): siRNA sense strand
gugccgagaagcaguaaau

SEQ ID NO: 2275063 - RNA, 19 nt, Homo sapiens
  misc_RNA (1)...(19): siRNA sense strand
ugaaacgugcucaggaaau

SEQ ID NO: 2275064 - RNA, 19 nt, Homo sapiens
  misc_RNA (1)...(19): siRNA sense strand
aggcaagacuguggaaguu

SEQ ID NO: 2275065 - RNA, 19 nt, Homo sapiens
  misc_RNA (1)...(19): siRNA sense strand
ggauguucuaugacgggaa

SEQ ID NO: 2275066 - RNA, 19 nt, Homo sapiens
  misc_RNA (1)...(19): siRNA sense strand
gccgagaagcaguaaauga

SEQ ID NO: 2275067 - RNA, 19 nt, Homo sapiens
  misc_RNA (1)...(19): siRNA sense strand
gguaacugugggaaagaca

SEQ ID NO: 2275068 - RNA, 19 nt, Homo sapiens
  misc_RNA (1)...(19): siRNA sense strand
ccugaauaguggagguggu

SEQ ID NO: 2275069 - RNA, 19 nt, Homo sapiens
  misc_RNA (1)...(19): siRNA sense strand
gaagggacggagaagggua

SEQ ID NO: 2275070 - RNA, 19 nt, Homo sapiens
  misc_RNA (1)...(19): siRNA sense strand
uggagaacucgauggugaa

SEQ ID NO: 2275071 - RNA, 19 nt, Homo sapiens
  misc_RNA (1)...(19): siRNA sense strand
agcugaaguguguguguaa

SEQ ID NO: 2275072 - RNA, 19 nt, Homo sapiens
  misc_RNA (1)...(19): siRNA sense strand
agugaaaggauuccagaca

SEQ ID NO: 2275073 - RNA, 19 nt, Homo sapiens
  misc_RNA (1)...(19): siRNA sense strand
cgggauaugagcuggaaga

SEQ ID NO: 2275074 - RNA, 19 nt, Homo sapiens
  misc_RNA (1)...(19): siRNA sense strand
augcaaucauucagcgaca

SEQ ID NO: 2275075 - RNA, 19 nt, Homo sapiens
  misc_RNA (1)...(19): siRNA sense strand
acugaggacuacaggacca

SEQ ID NO: 2275076 - RNA, 19 nt, Homo sapiens
  misc_RNA (1)...(19): siRNA sense strand
cuuggaugcccauggaauu

SEQ ID NO: 2275077 - RNA, 19 nt, Homo sapiens
  misc_RNA (1)...(19): siRNA sense strand
cgggauaugagcuggaaga

SEQ ID NO: 2275078 - RNA, 19 nt, Homo sapiens
  misc_RNA (1)...(19): siRNA sense strand
augcaaucauucagcgaca

SEQ ID NO: 2275079 - RNA, 19 nt, Homo sapiens
  misc_RNA (1)...(19): siRNA sense strand
acugaggacuacaggacca

SEQ ID NO: 2275080 - RNA, 19 nt, Homo sapiens
  misc_RNA (1)...(19): siRNA sense strand
cuuggaugcccauggaauu

SEQ ID NO: 2275081 - RNA, 19 nt, Homo sapiens
  misc_RNA (1)...(19): siRNA sense strand
cagcuaaugaagaaggaau

SEQ ID NO: 2275082 - RNA, 19 nt, Homo sapiens
  misc_RNA (1)...(19): siRNA sense strand
ggguuuggcaggagcggaa

SEQ ID NO: 2275083 - RNA, 19 nt, Homo sapiens
  misc_RNA (1)...(19): siRNA sense strand
cggaccaaguuaagcggaa

SEQ ID NO: 2275084 - RNA, 19 nt, Homo sapiens
  misc_RNA (1)...(19): siRNA sense strand
gggcauagacugugagguc

SEQ ID NO: 2275085 - RNA, 19 nt, Homo sapiens
  misc_RNA (1)...(19): siRNA sense strand
ugggaagauccgagaccaa

SEQ ID NO: 2275086 - RNA, 19 nt, Homo sapiens
  misc_RNA (1)...(19): siRNA sense strand
gggugaacuuggugaccga

SEQ ID NO: 2275087 - RNA, 19 nt, Homo sapiens
  misc_RNA (1)...(19): siRNA sense strand
ccugaagaaggcugagauu

SEQ ID NO: 2275088 - RNA, 19 nt, Homo sapiens
  misc_RNA (1)...(19): siRNA sense strand
cggaggaauguuuggccua

SEQ ID NO: 2275089 - RNA, 19 nt, Homo sapiens
  misc_RNA (1)...(19): siRNA sense strand
agcuaaugaagaaggaauu

SEQ ID NO: 2275090 - RNA, 19 nt, Homo sapiens
  misc_RNA (1)...(19): siRNA sense strand
ugaaggaguaugagccaga

SEQ ID NO: 2275091 - RNA, 19 nt, Homo sapiens
  misc_RNA (1)...(19): siRNA sense strand
cugagauggugcuggcuga

SEQ ID NO: 2275092 - RNA, 19 nt, Homo sapiens
  misc_RNA (1)...(19): siRNA sense strand
aggaaggugaagagaccau

SEQ ID NO: 2275093 - RNA, 19 nt, Homo sapiens
  misc_RNA (1)...(19): siRNA sense strand
acacccacuuugagggcau

SEQ ID NO: 2275094 - RNA, 19 nt, Homo sapiens
  misc_RNA (1)...(19): siRNA sense strand
ggaucaaggcucgggacau

SEQ ID NO: 2275095 - RNA, 19 nt, Homo sapiens
  misc_RNA (1)...(19): siRNA sense strand
agaacgaggagguggccga

SEQ ID NO: 2275096 - RNA, 19 nt, Homo sapiens
  misc_RNA (1)...(19): siRNA sense strand
gugcaaaggaucaaggcuc

SEQ ID NO: 2275097 - RNA, 19 nt, Homo sapiens
  misc_RNA (1)...(19): siRNA sense strand
agucauugggcucgacgaa

SEQ ID NO: 2275098 - RNA, 19 nt, Homo sapiens
  misc_RNA (1)...(19): siRNA sense strand
ccccgaagcgagaggaaau

SEQ ID NO: 2275099 - RNA, 19 nt, Homo sapiens
  misc_RNA (1)...(19): siRNA sense strand
cagcuaaugaagaaggaau

SEQ ID NO: 2275100 - RNA, 19 nt, Homo sapiens
  misc_RNA (1)...(19): siRNA sense strand
ggguuuggcaggagcggaa

SEQ ID NO: 2275101 - RNA, 19 nt, Homo sapiens
  misc_RNA (1)...(19): siRNA sense strand
cggaccaaguuaagcggaa

SEQ ID NO: 2275102 - RNA, 19 nt, Homo sapiens
  misc_RNA (1)...(19): siRNA sense strand
gggcauagacugugagguc

SEQ ID NO: 2275103 - RNA, 19 nt, Homo sapiens
  misc_RNA (1)...(19): siRNA sense strand
ugggaagauccgagaccaa

SEQ ID NO: 2275104 - RNA, 19 nt, Homo sapiens
  misc_RNA (1)...(19): siRNA sense strand
gggugaacuuggugaccga

SEQ ID NO: 2275105 - RNA, 19 nt, Homo sapiens
  misc_RNA (1)...(19): siRNA sense strand
ccugaagaaggcugagauu

SEQ ID NO: 2275106 - RNA, 19 nt, Homo sapiens
  misc_RNA (1)...(19): siRNA sense strand
cggaggaauguuuggccua

SEQ ID NO: 2275107 - RNA, 19 nt, Homo sapiens
  misc_RNA (1)...(19): siRNA sense strand
agcuaaugaagaaggaauu

SEQ ID NO: 2275108 - RNA, 19 nt, Homo sapiens
  misc_RNA (1)...(19): siRNA sense strand
ugaaggaguaugagccaga

SEQ ID NO: 2275109 - RNA, 19 nt, Homo sapiens
  misc_RNA (1)...(19): siRNA sense strand
cugagauggugcuggcuga

SEQ ID NO: 2275110 - RNA, 19 nt, Homo sapiens
  misc_RNA (1)...(19): siRNA sense strand
ccagaagaugaaagaagga

SEQ ID NO: 2275111 - RNA, 19 nt, Homo sapiens
  misc_RNA (1)...(19): siRNA sense strand
aggaaggugaagagaccau

SEQ ID NO: 2275112 - RNA, 19 nt, Homo sapiens
  misc_RNA (1)...(19): siRNA sense strand
acacccacuuugagggcau

SEQ ID NO: 2275113 - RNA, 19 nt, Homo sapiens
  misc_RNA (1)...(19): siRNA sense strand
ggaucaaggcucgggacau

SEQ ID NO: 2275114 - RNA, 19 nt, Homo sapiens
  misc_RNA (1)...(19): siRNA sense strand
agaacgaggagguggccga

SEQ ID NO: 2275115 - RNA, 19 nt, Homo sapiens
  misc_RNA (1)...(19): siRNA sense strand
gugcaaaggaucaaggcuc

SEQ ID NO: 2275116 - RNA, 19 nt, Homo sapiens
  misc_RNA (1)...(19): siRNA sense strand
agucauugggcucgacgaa

SEQ ID NO: 2275117 - RNA, 19 nt, Homo sapiens
  misc_RNA (1)...(19): siRNA sense strand
ccccgaagcgagaggaaau

SEQ ID NO: 2275118 - RNA, 19 nt, Homo sapiens
  misc_RNA (1)...(19): siRNA sense strand
agaaagaagacaaggaaaa

SEQ ID NO: 2275119 - RNA, 19 nt, Homo sapiens
  misc_RNA (1)...(19): siRNA sense strand
aggaagaggagaagccaaa

SEQ ID NO: 2275120 - RNA, 19 nt, Homo sapiens
  misc_RNA (1)...(19): siRNA sense strand
aggaggaggaagaggagaa

SEQ ID NO: 2275121 - RNA, 19 nt, Homo sapiens
  misc_RNA (1)...(19): siRNA sense strand
ggcuaaaggaagagauuga

SEQ ID NO: 2275122 - RNA, 19 nt, Homo sapiens
  misc_RNA (1)...(19): siRNA sense strand
aggaggaagccgaucgaaa

SEQ ID NO: 2275123 - RNA, 19 nt, Homo sapiens
  misc_RNA (1)...(19): siRNA sense strand
aagaaagauacgagauaga

SEQ ID NO: 2275124 - RNA, 19 nt, Homo sapiens
  misc_RNA (1)...(19): siRNA sense strand
aagaaagaagacaaggaaa

SEQ ID NO: 2275125 - RNA, 19 nt, Homo sapiens
  misc_RNA (1)...(19): siRNA sense strand
ccgaccagguggaggugaa

SEQ ID NO: 2275126 - RNA, 19 nt, Homo sapiens
  misc_RNA (1)...(19): siRNA sense strand
agugaaagucgccaagaaa

SEQ ID NO: 2275127 - RNA, 19 nt, Homo sapiens
  misc_RNA (1)...(19): siRNA sense strand
gaggaagagcagaggagga

SEQ ID NO: 2275128 - RNA, 19 nt, Homo sapiens
  misc_RNA (1)...(19): siRNA sense strand
gcgagggagcauuggagaa

SEQ ID NO: 2275129 - RNA, 19 nt, Homo sapiens
  misc_RNA (1)...(19): siRNA sense strand
gagcaguauaccagugcaa

SEQ ID NO: 2275130 - RNA, 19 nt, Homo sapiens
  misc_RNA (1)...(19): siRNA sense strand
aagaaugauuggagggaug

SEQ ID NO: 2275131 - RNA, 19 nt, Homo sapiens
  misc_RNA (1)...(19): siRNA sense strand
ggaagagauugaaaggcga

SEQ ID NO: 2275132 - RNA, 19 nt, Homo sapiens
  misc_RNA (1)...(19): siRNA sense strand
ugaaaggcgaagagcagaa

SEQ ID NO: 2275133 - RNA, 19 nt, Homo sapiens
  misc_RNA (1)...(19): siRNA sense strand
gcaaaaugacacagcagaa

SEQ ID NO: 2275134 - RNA, 19 nt, Homo sapiens
  misc_RNA (1)...(19): siRNA sense strand
aggaaaaggaggaggagga

SEQ ID NO: 2275135 - RNA, 19 nt, Homo sapiens
  misc_RNA (1)...(19): siRNA sense strand
guuaagagcuucauggauc

SEQ ID NO: 2275136 - RNA, 19 nt, Homo sapiens
  misc_RNA (1)...(19): siRNA sense strand
cuuuggagcuggaggaacu

SEQ ID NO: 2275137 - RNA, 19 nt, Homo sapiens
  misc_RNA (1)...(19): siRNA sense strand
gcaaaaggcuggaggagcu

SEQ ID NO: 2275138 - RNA, 19 nt, Homo sapiens
  misc_RNA (1)...(19): siRNA sense strand
ccgcaucaaugaauggcua

SEQ ID NO: 2275139 - RNA, 19 nt, Homo sapiens
  misc_RNA (1)...(19): siRNA sense strand
aggaagagcagaggaggaa

SEQ ID NO: 2275140 - RNA, 19 nt, Homo sapiens
  misc_RNA (1)...(19): siRNA sense strand
cugaagaaaacaagaaaga

SEQ ID NO: 2275141 - RNA, 19 nt, Homo sapiens
  misc_RNA (1)...(19): siRNA sense strand
ggagggaugcugaagaaaa

SEQ ID NO: 2275142 - RNA, 19 nt, Homo sapiens
  misc_RNA (1)...(19): siRNA sense strand
gaggaagaggagaagccaa

SEQ ID NO: 2275143 - RNA, 19 nt, Homo sapiens
  misc_RNA (1)...(19): siRNA sense strand
cuugagaccaggagacgua

SEQ ID NO: 2275144 - RNA, 19 nt, Homo sapiens
  misc_RNA (1)...(19): siRNA sense strand
cugagaaacgccagaagau

SEQ ID NO: 2275145 - RNA, 19 nt, Homo sapiens
  misc_RNA (1)...(19): siRNA sense strand
aaaaggaggaggaggaaga

SEQ ID NO: 2275146 - RNA, 19 nt, Homo sapiens
  misc_RNA (1)...(19): siRNA sense strand
gaagagauugaaaggcgaa

SEQ ID NO: 2275147 - RNA, 19 nt, Homo sapiens
  misc_RNA (1)...(19): siRNA sense strand
caagaguaugugggagaaa

SEQ ID NO: 2275148 - RNA, 19 nt, Homo sapiens
  misc_RNA (1)...(19): siRNA sense strand
aucaagaguaugugggaga

SEQ ID NO: 2275149 - RNA, 19 nt, Homo sapiens
  misc_RNA (1)...(19): siRNA sense strand
cuaccgagaaggaagaaaa

SEQ ID NO: 2275150 - RNA, 19 nt, Homo sapiens
  misc_RNA (1)...(19): siRNA sense strand
acaagaaagaagacaagga

SEQ ID NO: 2275151 - RNA, 19 nt, Homo sapiens
  misc_RNA (1)...(19): siRNA sense strand
ccagaagaugccagaagau

SEQ ID NO: 2275152 - RNA, 19 nt, Homo sapiens
  misc_RNA (1)...(19): siRNA sense strand
cuaaaaccccagauggaaa

SEQ ID NO: 2275153 - RNA, 19 nt, Homo sapiens
  misc_RNA (1)...(19): siRNA sense strand
aguccuaccagaagaauga

SEQ ID NO: 2275154 - RNA, 19 nt, Homo sapiens
  misc_RNA (1)...(19): siRNA sense strand
ucucaagauagaagagcga

SEQ ID NO: 2275155 - RNA, 19 nt, Homo sapiens
  misc_RNA (1)...(19): siRNA sense strand
guaugugggagaaagggaa

SEQ ID NO: 2275156 - RNA, 19 nt, Homo sapiens
  misc_RNA (1)...(19): siRNA sense strand
agggauuuacagaaguuaa

SEQ ID NO: 2275157 - RNA, 19 nt, Homo sapiens
  misc_RNA (1)...(19): siRNA sense strand
aaaagcaaucuguggauaa

SEQ ID NO: 2275158 - RNA, 19 nt, Homo sapiens
  misc_RNA (1)...(19): siRNA sense strand
gaagaaaacaagaaagaag

SEQ ID NO: 2275159 - RNA, 19 nt, Homo sapiens
  misc_RNA (1)...(19): siRNA sense strand
aacccaaagaagaaguuaa

SEQ ID NO: 2275160 - RNA, 19 nt, Homo sapiens
  misc_RNA (1)...(19): siRNA sense strand
ggaggaagcaggaggaagc

SEQ ID NO: 2275161 - RNA, 19 nt, Homo sapiens
  misc_RNA (1)...(19): siRNA sense strand
agagcuucauggaucgaaa

SEQ ID NO: 2275162 - RNA, 19 nt, Homo sapiens
  misc_RNA (1)...(19): siRNA sense strand
gauugaaaggcgaagagca

SEQ ID NO: 2275163 - RNA, 19 nt, Homo sapiens
  misc_RNA (1)...(19): siRNA sense strand
ucaccaaguccuaccagaa

SEQ ID NO: 2275164 - RNA, 19 nt, Homo sapiens
  misc_RNA (1)...(19): siRNA sense strand
uuacagaaguuaagucgca

SEQ ID NO: 2275165 - RNA, 19 nt, Homo sapiens
  misc_RNA (1)...(19): siRNA sense strand
gagaggaggaagagaagag

SEQ ID NO: 2275166 - RNA, 19 nt, Homo sapiens
  misc_RNA (1)...(19): siRNA sense strand
cugcugaagguguacgcaa

SEQ ID NO: 2275167 - RNA, 19 nt, Homo sapiens
  misc_RNA (1)...(19): siRNA sense strand
agaaagaagacaaggaaaa

SEQ ID NO: 2275168 - RNA, 19 nt, Homo sapiens
  misc_RNA (1)...(19): siRNA sense strand
aggaagaggagaagccaaa

SEQ ID NO: 2275169 - RNA, 19 nt, Homo sapiens
  misc_RNA (1)...(19): siRNA sense strand
aggaggaggaagaggagaa

SEQ ID NO: 2275170 - RNA, 19 nt, Homo sapiens
  misc_RNA (1)...(19): siRNA sense strand
ggcuaaaggaagagauuga

SEQ ID NO: 2275171 - RNA, 19 nt, Homo sapiens
  misc_RNA (1)...(19): siRNA sense strand
aggaggaagccgaucgaaa

SEQ ID NO: 2275172 - RNA, 19 nt, Homo sapiens
  misc_RNA (1)...(19): siRNA sense strand
aagaaagauacgagauaga

SEQ ID NO: 2275173 - RNA, 19 nt, Homo sapiens
  misc_RNA (1)...(19): siRNA sense strand
aagaaagaagacaaggaaa

SEQ ID NO: 2275174 - RNA, 19 nt, Homo sapiens
  misc_RNA (1)...(19): siRNA sense strand
ccgaccagguggaggugaa

SEQ ID NO: 2275175 - RNA, 19 nt, Homo sapiens
  misc_RNA (1)...(19): siRNA sense strand
agugaaagucgccaagaaa

SEQ ID NO: 2275176 - RNA, 19 nt, Homo sapiens
  misc_RNA (1)...(19): siRNA sense strand
gaggaagagcagaggagga

SEQ ID NO: 2275177 - RNA, 19 nt, Homo sapiens
  misc_RNA (1)...(19): siRNA sense strand
gcgagggagcauuggagaa

SEQ ID NO: 2275178 - RNA, 19 nt, Homo sapiens
  misc_RNA (1)...(19): siRNA sense strand
gagcaguauaccagugcaa

SEQ ID NO: 2275179 - RNA, 19 nt, Homo sapiens
  misc_RNA (1)...(19): siRNA sense strand
aagaaugauuggagggaug

SEQ ID NO: 2275180 - RNA, 19 nt, Homo sapiens
  misc_RNA (1)...(19): siRNA sense strand
ggaagagauugaaaggcga

SEQ ID NO: 2275181 - RNA, 19 nt, Homo sapiens
  misc_RNA (1)...(19): siRNA sense strand
ugaaaggcgaagagcagaa

SEQ ID NO: 2275182 - RNA, 19 nt, Homo sapiens
  misc_RNA (1)...(19): siRNA sense strand
gcaaaaugacacagcagaa

SEQ ID NO: 2275183 - RNA, 19 nt, Homo sapiens
  misc_RNA (1)...(19): siRNA sense strand
aggaaaaggaggaggagga

SEQ ID NO: 2275184 - RNA, 19 nt, Homo sapiens
  misc_RNA (1)...(19): siRNA sense strand
guuaagagcuucauggauc

SEQ ID NO: 2275185 - RNA, 19 nt, Homo sapiens
  misc_RNA (1)...(19): siRNA sense strand
cuuuggagcuggaggaacu

SEQ ID NO: 2275186 - RNA, 19 nt, Homo sapiens
  misc_RNA (1)...(19): siRNA sense strand
gcaaaaggcuggaggagcu

SEQ ID NO: 2275187 - RNA, 19 nt, Homo sapiens
  misc_RNA (1)...(19): siRNA sense strand
ccgcaucaaugaauggcua

SEQ ID NO: 2275188 - RNA, 19 nt, Homo sapiens
  misc_RNA (1)...(19): siRNA sense strand
aggaagagcagaggaggaa

SEQ ID NO: 2275189 - RNA, 19 nt, Homo sapiens
  misc_RNA (1)...(19): siRNA sense strand
cugaagaaaacaagaaaga

SEQ ID NO: 2275190 - RNA, 19 nt, Homo sapiens
  misc_RNA (1)...(19): siRNA sense strand
ggagggaugcugaagaaaa

SEQ ID NO: 2275191 - RNA, 19 nt, Homo sapiens
  misc_RNA (1)...(19): siRNA sense strand
gaggaagaggagaagccaa

SEQ ID NO: 2275192 - RNA, 19 nt, Homo sapiens
  misc_RNA (1)...(19): siRNA sense strand
cuugagaccaggagacgua

SEQ ID NO: 2275193 - RNA, 19 nt, Homo sapiens
  misc_RNA (1)...(19): siRNA sense strand
cugagaaacgccagaagau

SEQ ID NO: 2275194 - RNA, 19 nt, Homo sapiens
  misc_RNA (1)...(19): siRNA sense strand
aaaaggaggaggaggaaga

SEQ ID NO: 2275195 - RNA, 19 nt, Homo sapiens
  misc_RNA (1)...(19): siRNA sense strand
gaagagauugaaaggcgaa

SEQ ID NO: 2275196 - RNA, 19 nt, Homo sapiens
  misc_RNA (1)...(19): siRNA sense strand
caagaguaugugggagaaa

SEQ ID NO: 2275197 - RNA, 19 nt, Homo sapiens
  misc_RNA (1)...(19): siRNA sense strand
aucaagaguaugugggaga

SEQ ID NO: 2275198 - RNA, 19 nt, Homo sapiens
  misc_RNA (1)...(19): siRNA sense strand
cuaccgagaaggaagaaaa

SEQ ID NO: 2275199 - RNA, 19 nt, Homo sapiens
  misc_RNA (1)...(19): siRNA sense strand
acaagaaagaagacaagga

SEQ ID NO: 2275200 - RNA, 19 nt, Homo sapiens
  misc_RNA (1)...(19): siRNA sense strand
ccagaagaugccagaagau

SEQ ID NO: 2275201 - RNA, 19 nt, Homo sapiens
  misc_RNA (1)...(19): siRNA sense strand
cuaaaaccccagauggaaa

SEQ ID NO: 2275202 - RNA, 19 nt, Homo sapiens
  misc_RNA (1)...(19): siRNA sense strand
aguccuaccagaagaauga

SEQ ID NO: 2275203 - RNA, 19 nt, Homo sapiens
  misc_RNA (1)...(19): siRNA sense strand
ucucaagauagaagagcga

SEQ ID NO: 2275204 - RNA, 19 nt, Homo sapiens
  misc_RNA (1)...(19): siRNA sense strand
guaugugggagaaagggaa

SEQ ID NO: 2275205 - RNA, 19 nt, Homo sapiens
  misc_RNA (1)...(19): siRNA sense strand
agggauuuacagaaguuaa

SEQ ID NO: 2275206 - RNA, 19 nt, Homo sapiens
  misc_RNA (1)...(19): siRNA sense strand
aaaagcaaucuguggauaa

SEQ ID NO: 2275207 - RNA, 19 nt, Homo sapiens
  misc_RNA (1)...(19): siRNA sense strand
gaagaaaacaagaaagaag

SEQ ID NO: 2275208 - RNA, 19 nt, Homo sapiens
  misc_RNA (1)...(19): siRNA sense strand
aacccaaagaagaaguuaa

SEQ ID NO: 2275209 - RNA, 19 nt, Homo sapiens
  misc_RNA (1)...(19): siRNA sense strand
ggaggaagcaggaggaagc

SEQ ID NO: 2275210 - RNA, 19 nt, Homo sapiens
  misc_RNA (1)...(19): siRNA sense strand
agagcuucauggaucgaaa

SEQ ID NO: 2275211 - RNA, 19 nt, Homo sapiens
  misc_RNA (1)...(19): siRNA sense strand
gauugaaaggcgaagagca

SEQ ID NO: 2275212 - RNA, 19 nt, Homo sapiens
  misc_RNA (1)...(19): siRNA sense strand
ucaccaaguccuaccagaa

SEQ ID NO: 2275213 - RNA, 19 nt, Homo sapiens
  misc_RNA (1)...(19): siRNA sense strand
uuacagaaguuaagucgca

SEQ ID NO: 2275214 - RNA, 19 nt, Homo sapiens
  misc_RNA (1)...(19): siRNA sense strand
gagaggaggaagagaagag

SEQ ID NO: 2275215 - RNA, 19 nt, Homo sapiens
  misc_RNA (1)...(19): siRNA sense strand
cugcugaagguguacgcaa

SEQ ID NO: 2275216 - RNA, 19 nt, Homo sapiens
  misc_RNA (1)...(19): siRNA sense strand
agaaagaagacaaggaaaa

SEQ ID NO: 2275217 - RNA, 19 nt, Homo sapiens
  misc_RNA (1)...(19): siRNA sense strand
aggaagaggagaagccaaa

SEQ ID NO: 2275218 - RNA, 19 nt, Homo sapiens
  misc_RNA (1)...(19): siRNA sense strand
aggaggaggaagaggagaa

SEQ ID NO: 2275219 - RNA, 19 nt, Homo sapiens
  misc_RNA (1)...(19): siRNA sense strand
ggcuaaaggaagagauuga

SEQ ID NO: 2275220 - RNA, 19 nt, Homo sapiens
  misc_RNA (1)...(19): siRNA sense strand
aggaggaagccgaucgaaa

SEQ ID NO: 2275221 - RNA, 19 nt, Homo sapiens
  misc_RNA (1)...(19): siRNA sense strand
aagaaagauacgagauaga

SEQ ID NO: 2275222 - RNA, 19 nt, Homo sapiens
  misc_RNA (1)...(19): siRNA sense strand
aagaaagaagacaaggaaa

SEQ ID NO: 2275223 - RNA, 19 nt, Homo sapiens
  misc_RNA (1)...(19): siRNA sense strand
ccgaccagguggaggugaa

SEQ ID NO: 2275224 - RNA, 19 nt, Homo sapiens
  misc_RNA (1)...(19): siRNA sense strand
agugaaagucgccaagaaa

SEQ ID NO: 2275225 - RNA, 19 nt, Homo sapiens
  misc_RNA (1)...(19): siRNA sense strand
gaggaagagcagaggagga

SEQ ID NO: 2275226 - RNA, 19 nt, Homo sapiens
  misc_RNA (1)...(19): siRNA sense strand
gcgagggagcauuggagaa

SEQ ID NO: 2275227 - RNA, 19 nt, Homo sapiens
  misc_RNA (1)...(19): siRNA sense strand
gagcaguauaccagugcaa

SEQ ID NO: 2275228 - RNA, 19 nt, Homo sapiens
  misc_RNA (1)...(19): siRNA sense strand
aagaaugauuggagggaug

SEQ ID NO: 2275229 - RNA, 19 nt, Homo sapiens
  misc_RNA (1)...(19): siRNA sense strand
ggaagagauugaaaggcga

SEQ ID NO: 2275230 - RNA, 19 nt, Homo sapiens
  misc_RNA (1)...(19): siRNA sense strand
ugaaaggcgaagagcagaa

SEQ ID NO: 2275231 - RNA, 19 nt, Homo sapiens
  misc_RNA (1)...(19): siRNA sense strand
gcaaaaugacacagcagaa

SEQ ID NO: 2275232 - RNA, 19 nt, Homo sapiens
  misc_RNA (1)...(19): siRNA sense strand
aggaaaaggaggaggagga

SEQ ID NO: 2275233 - RNA, 19 nt, Homo sapiens
  misc_RNA (1)...(19): siRNA sense strand
guuaagagcuucauggauc

SEQ ID NO: 2275234 - RNA, 19 nt, Homo sapiens
  misc_RNA (1)...(19): siRNA sense strand
cuuuggagcuggaggaacu

SEQ ID NO: 2275235 - RNA, 19 nt, Homo sapiens
  misc_RNA (1)...(19): siRNA sense strand
gcaaaaggcuggaggagcu

SEQ ID NO: 2275236 - RNA, 19 nt, Homo sapiens
  misc_RNA (1)...(19): siRNA sense strand
ccgcaucaaugaauggcua

SEQ ID NO: 2275237 - RNA, 19 nt, Homo sapiens
  misc_RNA (1)...(19): siRNA sense strand
aggaagagcagaggaggaa

SEQ ID NO: 2275238 - RNA, 19 nt, Homo sapiens
  misc_RNA (1)...(19): siRNA sense strand
cugaagaaaacaagaaaga

SEQ ID NO: 2275239 - RNA, 19 nt, Homo sapiens
  misc_RNA (1)...(19): siRNA sense strand
ggagggaugcugaagaaaa

SEQ ID NO: 2275240 - RNA, 19 nt, Homo sapiens
  misc_RNA (1)...(19): siRNA sense strand
gaggaagaggagaagccaa

SEQ ID NO: 2275241 - RNA, 19 nt, Homo sapiens
  misc_RNA (1)...(19): siRNA sense strand
cuugagaccaggagacgua

SEQ ID NO: 2275242 - RNA, 19 nt, Homo sapiens
  misc_RNA (1)...(19): siRNA sense strand
cugagaaacgccagaagau

SEQ ID NO: 2275243 - RNA, 19 nt, Homo sapiens
  misc_RNA (1)...(19): siRNA sense strand
aaaaggaggaggaggaaga

SEQ ID NO: 2275244 - RNA, 19 nt, Homo sapiens
  misc_RNA (1)...(19): siRNA sense strand
gaagagauugaaaggcgaa

SEQ ID NO: 2275245 - RNA, 19 nt, Homo sapiens
  misc_RNA (1)...(19): siRNA sense strand
caagaguaugugggagaaa

SEQ ID NO: 2275246 - RNA, 19 nt, Homo sapiens
  misc_RNA (1)...(19): siRNA sense strand
aucaagaguaugugggaga

SEQ ID NO: 2275247 - RNA, 19 nt, Homo sapiens
  misc_RNA (1)...(19): siRNA sense strand
cuaccgagaaggaagaaaa

SEQ ID NO: 2275248 - RNA, 19 nt, Homo sapiens
  misc_RNA (1)...(19): siRNA sense strand
acaagaaagaagacaagga

SEQ ID NO: 2275249 - RNA, 19 nt, Homo sapiens
  misc_RNA (1)...(19): siRNA sense strand
ccagaagaugccagaagau

SEQ ID NO: 2275250 - RNA, 19 nt, Homo sapiens
  misc_RNA (1)...(19): siRNA sense strand
cuaaaaccccagauggaaa

SEQ ID NO: 2275251 - RNA, 19 nt, Homo sapiens
  misc_RNA (1)...(19): siRNA sense strand
aguccuaccagaagaauga

SEQ ID NO: 2275252 - RNA, 19 nt, Homo sapiens
  misc_RNA (1)...(19): siRNA sense strand
ucucaagauagaagagcga

SEQ ID NO: 2275253 - RNA, 19 nt, Homo sapiens
  misc_RNA (1)...(19): siRNA sense strand
guaugugggagaaagggaa

SEQ ID NO: 2275254 - RNA, 19 nt, Homo sapiens
  misc_RNA (1)...(19): siRNA sense strand
agggauuuacagaaguuaa

SEQ ID NO: 2275255 - RNA, 19 nt, Homo sapiens
  misc_RNA (1)...(19): siRNA sense strand
aaaagcaaucuguggauaa

SEQ ID NO: 2275256 - RNA, 19 nt, Homo sapiens
  misc_RNA (1)...(19): siRNA sense strand
gaagaaaacaagaaagaag

SEQ ID NO: 2275257 - RNA, 19 nt, Homo sapiens
  misc_RNA (1)...(19): siRNA sense strand
aacccaaagaagaaguuaa

SEQ ID NO: 2275258 - RNA, 19 nt, Homo sapiens
  misc_RNA (1)...(19): siRNA sense strand
ggaggaagcaggaggaagc

SEQ ID NO: 2275259 - RNA, 19 nt, Homo sapiens
  misc_RNA (1)...(19): siRNA sense strand
agagcuucauggaucgaaa

SEQ ID NO: 2275260 - RNA, 19 nt, Homo sapiens
  misc_RNA (1)...(19): siRNA sense strand
gauugaaaggcgaagagca

SEQ ID NO: 2275261 - RNA, 19 nt, Homo sapiens
  misc_RNA (1)...(19): siRNA sense strand
ucaccaaguccuaccagaa

SEQ ID NO: 2275262 - RNA, 19 nt, Homo sapiens
  misc_RNA (1)...(19): siRNA sense strand
uuacagaaguuaagucgca

SEQ ID NO: 2275263 - RNA, 19 nt, Homo sapiens
  misc_RNA (1)...(19): siRNA sense strand
gagaggaggaagagaagag

SEQ ID NO: 2275264 - RNA, 19 nt, Homo sapiens
  misc_RNA (1)...(19): siRNA sense strand
cugcugaagguguacgcaa

SEQ ID NO: 2275265 - RNA, 19 nt, Homo sapiens
  misc_RNA (1)...(19): siRNA sense strand
agaaagaagacaaggaaaa

SEQ ID NO: 2275266 - RNA, 19 nt, Homo sapiens
  misc_RNA (1)...(19): siRNA sense strand
aggaagaggagaagccaaa

SEQ ID NO: 2275267 - RNA, 19 nt, Homo sapiens
  misc_RNA (1)...(19): siRNA sense strand
aggaggaggaagaggagaa

SEQ ID NO: 2275268 - RNA, 19 nt, Homo sapiens
  misc_RNA (1)...(19): siRNA sense strand
ggcuaaaggaagagauuga

SEQ ID NO: 2275269 - RNA, 19 nt, Homo sapiens
  misc_RNA (1)...(19): siRNA sense strand
aggaggaagccgaucgaaa

SEQ ID NO: 2275270 - RNA, 19 nt, Homo sapiens
  misc_RNA (1)...(19): siRNA sense strand
aagaaagauacgagauaga

SEQ ID NO: 2275271 - RNA, 19 nt, Homo sapiens
  misc_RNA (1)...(19): siRNA sense strand
aagaaagaagacaaggaaa

SEQ ID NO: 2275272 - RNA, 19 nt, Homo sapiens
  misc_RNA (1)...(19): siRNA sense strand
ccgaccagguggaggugaa

SEQ ID NO: 2275273 - RNA, 19 nt, Homo sapiens
  misc_RNA (1)...(19): siRNA sense strand
agugaaagucgccaagaaa

SEQ ID NO: 2275274 - RNA, 19 nt, Homo sapiens
  misc_RNA (1)...(19): siRNA sense strand
gaggaagagcagaggagga

SEQ ID NO: 2275275 - RNA, 19 nt, Homo sapiens
  misc_RNA (1)...(19): siRNA sense strand
gcgagggagcauuggagaa

SEQ ID NO: 2275276 - RNA, 19 nt, Homo sapiens
  misc_RNA (1)...(19): siRNA sense strand
gagcaguauaccagugcaa

SEQ ID NO: 2275277 - RNA, 19 nt, Homo sapiens
  misc_RNA (1)...(19): siRNA sense strand
aagaaugauuggagggaug

SEQ ID NO: 2275278 - RNA, 19 nt, Homo sapiens
  misc_RNA (1)...(19): siRNA sense strand
ggaagagauugaaaggcga

SEQ ID NO: 2275279 - RNA, 19 nt, Homo sapiens
  misc_RNA (1)...(19): siRNA sense strand
ugaaaggcgaagagcagaa

SEQ ID NO: 2275280 - RNA, 19 nt, Homo sapiens
  misc_RNA (1)...(19): siRNA sense strand
gcaaaaugacacagcagaa

SEQ ID NO: 2275281 - RNA, 19 nt, Homo sapiens
  misc_RNA (1)...(19): siRNA sense strand
aggaaaaggaggaggagga

SEQ ID NO: 2275282 - RNA, 19 nt, Homo sapiens
  misc_RNA (1)...(19): siRNA sense strand
guuaagagcuucauggauc

SEQ ID NO: 2275283 - RNA, 19 nt, Homo sapiens
  misc_RNA (1)...(19): siRNA sense strand
cuuuggagcuggaggaacu

SEQ ID NO: 2275284 - RNA, 19 nt, Homo sapiens
  misc_RNA (1)...(19): siRNA sense strand
gcaaaaggcuggaggagcu

SEQ ID NO: 2275285 - RNA, 19 nt, Homo sapiens
  misc_RNA (1)...(19): siRNA sense strand
ccgcaucaaugaauggcua

SEQ ID NO: 2275286 - RNA, 19 nt, Homo sapiens
  misc_RNA (1)...(19): siRNA sense strand
aggaagagcagaggaggaa

SEQ ID NO: 2275287 - RNA, 19 nt, Homo sapiens
  misc_RNA (1)...(19): siRNA sense strand
cugaagaaaacaagaaaga

SEQ ID NO: 2275288 - RNA, 19 nt, Homo sapiens
  misc_RNA (1)...(19): siRNA sense strand
ggagggaugcugaagaaaa

SEQ ID NO: 2275289 - RNA, 19 nt, Homo sapiens
  misc_RNA (1)...(19): siRNA sense strand
gaggaagaggagaagccaa

SEQ ID NO: 2275290 - RNA, 19 nt, Homo sapiens
  misc_RNA (1)...(19): siRNA sense strand
cuugagaccaggagacgua

SEQ ID NO: 2275291 - RNA, 19 nt, Homo sapiens
  misc_RNA (1)...(19): siRNA sense strand
cugagaaacgccagaagau

SEQ ID NO: 2275292 - RNA, 19 nt, Homo sapiens
  misc_RNA (1)...(19): siRNA sense strand
aaaaggaggaggaggaaga

SEQ ID NO: 2275293 - RNA, 19 nt, Homo sapiens
  misc_RNA (1)...(19): siRNA sense strand
gaagagauugaaaggcgaa

SEQ ID NO: 2275294 - RNA, 19 nt, Homo sapiens
  misc_RNA (1)...(19): siRNA sense strand
caagaguaugugggagaaa

SEQ ID NO: 2275295 - RNA, 19 nt, Homo sapiens
  misc_RNA (1)...(19): siRNA sense strand
aucaagaguaugugggaga

SEQ ID NO: 2275296 - RNA, 19 nt, Homo sapiens
  misc_RNA (1)...(19): siRNA sense strand
cuaccgagaaggaagaaaa

SEQ ID NO: 2275297 - RNA, 19 nt, Homo sapiens
  misc_RNA (1)...(19): siRNA sense strand
acaagaaagaagacaagga

SEQ ID NO: 2275298 - RNA, 19 nt, Homo sapiens
  misc_RNA (1)...(19): siRNA sense strand
ccagaagaugccagaagau

SEQ ID NO: 2275299 - RNA, 19 nt, Homo sapiens
  misc_RNA (1)...(19): siRNA sense strand
cuaaaaccccagauggaaa

SEQ ID NO: 2275300 - RNA, 19 nt, Homo sapiens
  misc_RNA (1)...(19): siRNA sense strand
aguccuaccagaagaauga

SEQ ID NO: 2275301 - RNA, 19 nt, Homo sapiens
  misc_RNA (1)...(19): siRNA sense strand
ucucaagauagaagagcga

SEQ ID NO: 2275302 - RNA, 19 nt, Homo sapiens
  misc_RNA (1)...(19): siRNA sense strand
guaugugggagaaagggaa

SEQ ID NO: 2275303 - RNA, 19 nt, Homo sapiens
  misc_RNA (1)...(19): siRNA sense strand
agggauuuacagaaguuaa

SEQ ID NO: 2275304 - RNA, 19 nt, Homo sapiens
  misc_RNA (1)...(19): siRNA sense strand
aaaagcaaucuguggauaa

SEQ ID NO: 2275305 - RNA, 19 nt, Homo sapiens
  misc_RNA (1)...(19): siRNA sense strand
gaagaaaacaagaaagaag

SEQ ID NO: 2275306 - RNA, 19 nt, Homo sapiens
  misc_RNA (1)...(19): siRNA sense strand
aacccaaagaagaaguuaa

SEQ ID NO: 2275307 - RNA, 19 nt, Homo sapiens
  misc_RNA (1)...(19): siRNA sense strand
ggaggaagcaggaggaagc

SEQ ID NO: 2275308 - RNA, 19 nt, Homo sapiens
  misc_RNA (1)...(19): siRNA sense strand
agagcuucauggaucgaaa

SEQ ID NO: 2275309 - RNA, 19 nt, Homo sapiens
  misc_RNA (1)...(19): siRNA sense strand
gauugaaaggcgaagagca

SEQ ID NO: 2275310 - RNA, 19 nt, Homo sapiens
  misc_RNA (1)...(19): siRNA sense strand
ucaccaaguccuaccagaa

SEQ ID NO: 2275311 - RNA, 19 nt, Homo sapiens
  misc_RNA (1)...(19): siRNA sense strand
uuacagaaguuaagucgca

SEQ ID NO: 2275312 - RNA, 19 nt, Homo sapiens
  misc_RNA (1)...(19): siRNA sense strand
gagaggaggaagagaagag

SEQ ID NO: 2275313 - RNA, 19 nt, Homo sapiens
  misc_RNA (1)...(19): siRNA sense strand
cugcugaagguguacgcaa

SEQ ID NO: 2275314 - RNA, 19 nt, Homo sapiens
  misc_RNA (1)...(19): siRNA sense strand
agaaagaagacaaggaaaa

SEQ ID NO: 2275315 - RNA, 19 nt, Homo sapiens
  misc_RNA (1)...(19): siRNA sense strand
aggaagaggagaagccaaa

SEQ ID NO: 2275316 - RNA, 19 nt, Homo sapiens
  misc_RNA (1)...(19): siRNA sense strand
aggaggaggaagaggagaa

SEQ ID NO: 2275317 - RNA, 19 nt, Homo sapiens
  misc_RNA (1)...(19): siRNA sense strand
ggcuaaaggaagagauuga

SEQ ID NO: 2275318 - RNA, 19 nt, Homo sapiens
  misc_RNA (1)...(19): siRNA sense strand
aggaggaagccgaucgaaa

SEQ ID NO: 2275319 - RNA, 19 nt, Homo sapiens
  misc_RNA (1)...(19): siRNA sense strand
aagaaagauacgagauaga

SEQ ID NO: 2275320 - RNA, 19 nt, Homo sapiens
  misc_RNA (1)...(19): siRNA sense strand
aagaaagaagacaaggaaa

SEQ ID NO: 2275321 - RNA, 19 nt, Homo sapiens
  misc_RNA (1)...(19): siRNA sense strand
ccgaccagguggaggugaa

SEQ ID NO: 2275322 - RNA, 19 nt, Homo sapiens
  misc_RNA (1)...(19): siRNA sense strand
agugaaagucgccaagaaa

SEQ ID NO: 2275323 - RNA, 19 nt, Homo sapiens
  misc_RNA (1)...(19): siRNA sense strand
gaggaagagcagaggagga

SEQ ID NO: 2275324 - RNA, 19 nt, Homo sapiens
  misc_RNA (1)...(19): siRNA sense strand
gcgagggagcauuggagaa

SEQ ID NO: 2275325 - RNA, 19 nt, Homo sapiens
  misc_RNA (1)...(19): siRNA sense strand
gagcaguauaccagugcaa

SEQ ID NO: 2275326 - RNA, 19 nt, Homo sapiens
  misc_RNA (1)...(19): siRNA sense strand
aagaaugauuggagggaug

SEQ ID NO: 2275327 - RNA, 19 nt, Homo sapiens
  misc_RNA (1)...(19): siRNA sense strand
ggaagagauugaaaggcga

SEQ ID NO: 2275328 - RNA, 19 nt, Homo sapiens
  misc_RNA (1)...(19): siRNA sense strand
ugaaaggcgaagagcagaa

SEQ ID NO: 2275329 - RNA, 19 nt, Homo sapiens
  misc_RNA (1)...(19): siRNA sense strand
gcaaaaugacacagcagaa

SEQ ID NO: 2275330 - RNA, 19 nt, Homo sapiens
  misc_RNA (1)...(19): siRNA sense strand
aggaaaaggaggaggagga

SEQ ID NO: 2275331 - RNA, 19 nt, Homo sapiens
  misc_RNA (1)...(19): siRNA sense strand
guuaagagcuucauggauc

SEQ ID NO: 2275332 - RNA, 19 nt, Homo sapiens
  misc_RNA (1)...(19): siRNA sense strand
cuuuggagcuggaggaacu

SEQ ID NO: 2275333 - RNA, 19 nt, Homo sapiens
  misc_RNA (1)...(19): siRNA sense strand
gcaaaaggcuggaggagcu

SEQ ID NO: 2275334 - RNA, 19 nt, Homo sapiens
  misc_RNA (1)...(19): siRNA sense strand
ccgcaucaaugaauggcua

SEQ ID NO: 2275335 - RNA, 19 nt, Homo sapiens
  misc_RNA (1)...(19): siRNA sense strand
aggaagagcagaggaggaa

SEQ ID NO: 2275336 - RNA, 19 nt, Homo sapiens
  misc_RNA (1)...(19): siRNA sense strand
cugaagaaaacaagaaaga

SEQ ID NO: 2275337 - RNA, 19 nt, Homo sapiens
  misc_RNA (1)...(19): siRNA sense strand
ggagggaugcugaagaaaa

SEQ ID NO: 2275338 - RNA, 19 nt, Homo sapiens
  misc_RNA (1)...(19): siRNA sense strand
gaggaagaggagaagccaa

SEQ ID NO: 2275339 - RNA, 19 nt, Homo sapiens
  misc_RNA (1)...(19): siRNA sense strand
cuugagaccaggagacgua

SEQ ID NO: 2275340 - RNA, 19 nt, Homo sapiens
  misc_RNA (1)...(19): siRNA sense strand
cugagaaacgccagaagau

SEQ ID NO: 2275341 - RNA, 19 nt, Homo sapiens
  misc_RNA (1)...(19): siRNA sense strand
aaaaggaggaggaggaaga

SEQ ID NO: 2275342 - RNA, 19 nt, Homo sapiens
  misc_RNA (1)...(19): siRNA sense strand
gaagagauugaaaggcgaa

SEQ ID NO: 2275343 - RNA, 19 nt, Homo sapiens
  misc_RNA (1)...(19): siRNA sense strand
caagaguaugugggagaaa

SEQ ID NO: 2275344 - RNA, 19 nt, Homo sapiens
  misc_RNA (1)...(19): siRNA sense strand
aucaagaguaugugggaga

SEQ ID NO: 2275345 - RNA, 19 nt, Homo sapiens
  misc_RNA (1)...(19): siRNA sense strand
cuaccgagaaggaagaaaa

SEQ ID NO: 2275346 - RNA, 19 nt, Homo sapiens
  misc_RNA (1)...(19): siRNA sense strand
acaagaaagaagacaagga

SEQ ID NO: 2275347 - RNA, 19 nt, Homo sapiens
  misc_RNA (1)...(19): siRNA sense strand
ccagaagaugccagaagau

SEQ ID NO: 2275348 - RNA, 19 nt, Homo sapiens
  misc_RNA (1)...(19): siRNA sense strand
cuaaaaccccagauggaaa

SEQ ID NO: 2275349 - RNA, 19 nt, Homo sapiens
  misc_RNA (1)...(19): siRNA sense strand
aguccuaccagaagaauga

SEQ ID NO: 2275350 - RNA, 19 nt, Homo sapiens
  misc_RNA (1)...(19): siRNA sense strand
ucucaagauagaagagcga

SEQ ID NO: 2275351 - RNA, 19 nt, Homo sapiens
  misc_RNA (1)...(19): siRNA sense strand
guaugugggagaaagggaa

SEQ ID NO: 2275352 - RNA, 19 nt, Homo sapiens
  misc_RNA (1)...(19): siRNA sense strand
agggauuuacagaaguuaa

SEQ ID NO: 2275353 - RNA, 19 nt, Homo sapiens
  misc_RNA (1)...(19): siRNA sense strand
aaaagcaaucuguggauaa

SEQ ID NO: 2275354 - RNA, 19 nt, Homo sapiens
  misc_RNA (1)...(19): siRNA sense strand
gaagaaaacaagaaagaag

SEQ ID NO: 2275355 - RNA, 19 nt, Homo sapiens
  misc_RNA (1)...(19): siRNA sense strand
aacccaaagaagaaguuaa

SEQ ID NO: 2275356 - RNA, 19 nt, Homo sapiens
  misc_RNA (1)...(19): siRNA sense strand
ggaggaagcaggaggaagc

SEQ ID NO: 2275357 - RNA, 19 nt, Homo sapiens
  misc_RNA (1)...(19): siRNA sense strand
agagcuucauggaucgaaa

SEQ ID NO: 2275358 - RNA, 19 nt, Homo sapiens
  misc_RNA (1)...(19): siRNA sense strand
gauugaaaggcgaagagca

SEQ ID NO: 2275359 - RNA, 19 nt, Homo sapiens
  misc_RNA (1)...(19): siRNA sense strand
ucaccaaguccuaccagaa

SEQ ID NO: 2275360 - RNA, 19 nt, Homo sapiens
  misc_RNA (1)...(19): siRNA sense strand
uuacagaaguuaagucgca

SEQ ID NO: 2275361 - RNA, 19 nt, Homo sapiens
  misc_RNA (1)...(19): siRNA sense strand
gagaggaggaagagaagag

SEQ ID NO: 2275362 - RNA, 19 nt, Homo sapiens
  misc_RNA (1)...(19): siRNA sense strand
cugcugaagguguacgcaa

SEQ ID NO: 2275363 - RNA, 19 nt, Homo sapiens
  misc_RNA (1)...(19): siRNA sense strand
gggagaagcuggaugccga

SEQ ID NO: 2275364 - RNA, 19 nt, Homo sapiens
  misc_RNA (1)...(19): siRNA sense strand
ucacuagacuggagggugu

SEQ ID NO: 2275365 - RNA, 19 nt, Homo sapiens
  misc_RNA (1)...(19): siRNA sense strand
gggagaagcugguggaucc

SEQ ID NO: 2275366 - RNA, 19 nt, Homo sapiens
  misc_RNA (1)...(19): siRNA sense strand
aggugaagaaugucaucaa

SEQ ID NO: 2275367 - RNA, 19 nt, Homo sapiens
  misc_RNA (1)...(19): siRNA sense strand
aggacaagaucaaggaggu

SEQ ID NO: 2275368 - RNA, 19 nt, Homo sapiens
  misc_RNA (1)...(19): siRNA sense strand
cggcccaacaccugcuaaa

SEQ ID NO: 2275369 - RNA, 19 nt, Homo sapiens
  misc_RNA (1)...(19): siRNA sense strand
auuaaggagcuucgggaga

SEQ ID NO: 2275370 - RNA, 19 nt, Homo sapiens
  misc_RNA (1)...(19): siRNA sense strand
acguggacaucuacgagaa

SEQ ID NO: 2275371 - RNA, 19 nt, Homo sapiens
  misc_RNA (1)...(19): siRNA sense strand
ggugaagagaggaccuaca

SEQ ID NO: 2275372 - RNA, 19 nt, Homo sapiens
  misc_RNA (1)...(19): siRNA sense strand
uggacaucuacgagaaaca

SEQ ID NO: 2275373 - RNA, 19 nt, Homo sapiens
  misc_RNA (1)...(19): siRNA sense strand
cguggacaucuacgagaaa

SEQ ID NO: 2275374 - RNA, 19 nt, Homo sapiens
  misc_RNA (1)...(19): siRNA sense strand
ucuugggucuccaggacaa

SEQ ID NO: 2275375 - RNA, 19 nt, Homo sapiens
  misc_RNA (1)...(19): siRNA sense strand
gggagaagcuggaugccga

SEQ ID NO: 2275376 - RNA, 19 nt, Homo sapiens
  misc_RNA (1)...(19): siRNA sense strand
ucacuagacuggagggugu

SEQ ID NO: 2275377 - RNA, 19 nt, Homo sapiens
  misc_RNA (1)...(19): siRNA sense strand
gggagaagcugguggaucc

SEQ ID NO: 2275378 - RNA, 19 nt, Homo sapiens
  misc_RNA (1)...(19): siRNA sense strand
aggugaagaaugucaucaa

SEQ ID NO: 2275379 - RNA, 19 nt, Homo sapiens
  misc_RNA (1)...(19): siRNA sense strand
aggacaagaucaaggaggu

SEQ ID NO: 2275380 - RNA, 19 nt, Homo sapiens
  misc_RNA (1)...(19): siRNA sense strand
cggcccaacaccugcuaaa

SEQ ID NO: 2275381 - RNA, 19 nt, Homo sapiens
  misc_RNA (1)...(19): siRNA sense strand
auuaaggagcuucgggaga

SEQ ID NO: 2275382 - RNA, 19 nt, Homo sapiens
  misc_RNA (1)...(19): siRNA sense strand
acguggacaucuacgagaa

SEQ ID NO: 2275383 - RNA, 19 nt, Homo sapiens
  misc_RNA (1)...(19): siRNA sense strand
ggugaagagaggaccuaca

SEQ ID NO: 2275384 - RNA, 19 nt, Homo sapiens
  misc_RNA (1)...(19): siRNA sense strand
uggacaucuacgagaaaca

SEQ ID NO: 2275385 - RNA, 19 nt, Homo sapiens
  misc_RNA (1)...(19): siRNA sense strand
cguggacaucuacgagaaa

SEQ ID NO: 2275386 - RNA, 19 nt, Homo sapiens
  misc_RNA (1)...(19): siRNA sense strand
ucuugggucuccaggacaa

SEQ ID NO: 2275387 - RNA, 19 nt, Homo sapiens
  misc_RNA (1)...(19): siRNA sense strand
gggacaagauccaggugca

SEQ ID NO: 2275388 - RNA, 19 nt, Homo sapiens
  misc_RNA (1)...(19): siRNA sense strand
ggggagacggagagauaua

SEQ ID NO: 2275389 - RNA, 19 nt, Homo sapiens
  misc_RNA (1)...(19): siRNA sense strand
cgcaauacguggagcgcca

SEQ ID NO: 2275390 - RNA, 19 nt, Homo sapiens
  misc_RNA (1)...(19): siRNA sense strand
ccuacagugcacagugaaa

SEQ ID NO: 2275391 - RNA, 19 nt, Homo sapiens
  misc_RNA (1)...(19): siRNA sense strand
ccuucuaccaccagggcaa

SEQ ID NO: 2275392 - RNA, 19 nt, Homo sapiens
  misc_RNA (1)...(19): siRNA sense strand
gugugaacgaguacggcaa

SEQ ID NO: 2275393 - RNA, 19 nt, Homo sapiens
  misc_RNA (1)...(19): siRNA sense strand
uugccaaguccguggugaa

SEQ ID NO: 2275394 - RNA, 19 nt, Homo sapiens
  misc_RNA (1)...(19): siRNA sense strand
gggcaugauguggaacaaa

SEQ ID NO: 2275395 - RNA, 19 nt, Homo sapiens
  misc_RNA (1)...(19): siRNA sense strand
uggagcuaauugugaucaa

SEQ ID NO: 2275396 - RNA, 19 nt, Homo sapiens
  misc_RNA (1)...(19): siRNA sense strand
acgagaagcugaaugugga

SEQ ID NO: 2275397 - RNA, 19 nt, Homo sapiens
  misc_RNA (1)...(19): siRNA sense strand
gggucuucucugaugggaa

SEQ ID NO: 2275398 - RNA, 19 nt, Homo sapiens
  misc_RNA (1)...(19): siRNA sense strand
gggacaagauccaggugca

SEQ ID NO: 2275399 - RNA, 19 nt, Homo sapiens
  misc_RNA (1)...(19): siRNA sense strand
cgcaauacguggagcgcca

SEQ ID NO: 2275400 - RNA, 19 nt, Homo sapiens
  misc_RNA (1)...(19): siRNA sense strand
ccuacagugcacagugaaa

SEQ ID NO: 2275401 - RNA, 19 nt, Homo sapiens
  misc_RNA (1)...(19): siRNA sense strand
gugugaacgaguacggcaa

SEQ ID NO: 2275402 - RNA, 19 nt, Homo sapiens
  misc_RNA (1)...(19): siRNA sense strand
gcagcaucgacgaguacaa

SEQ ID NO: 2275403 - RNA, 19 nt, Homo sapiens
  misc_RNA (1)...(19): siRNA sense strand
uugccaaguccguggugaa

SEQ ID NO: 2275404 - RNA, 19 nt, Homo sapiens
  misc_RNA (1)...(19): siRNA sense strand
gggcaugauguggaacaaa

SEQ ID NO: 2275405 - RNA, 19 nt, Homo sapiens
  misc_RNA (1)...(19): siRNA sense strand
uggagcuaauugugaucaa

SEQ ID NO: 2275406 - RNA, 19 nt, Homo sapiens
  misc_RNA (1)...(19): siRNA sense strand
acgagaagcugaaugugga

SEQ ID NO: 2275407 - RNA, 19 nt, Homo sapiens
  misc_RNA (1)...(19): siRNA sense strand
gggucuucucugaugggaa

SEQ ID NO: 2275408 - RNA, 19 nt, Homo sapiens
  misc_RNA (1)...(19): siRNA sense strand
cccuaaugaugaugggaaa

SEQ ID NO: 2275409 - RNA, 19 nt, Homo sapiens
  misc_RNA (1)...(19): siRNA sense strand
caagagaacccuaaggaga

SEQ ID NO: 2275410 - RNA, 19 nt, Homo sapiens
  misc_RNA (1)...(19): siRNA sense strand
aaguaaacguucagcucua

SEQ ID NO: 2275411 - RNA, 19 nt, Homo sapiens
  misc_RNA (1)...(19): siRNA sense strand
gaacagugcaaaagcgaaa

SEQ ID NO: 2275412 - RNA, 19 nt, Homo sapiens
  misc_RNA (1)...(19): siRNA sense strand
guggauauuuacagugcaa

SEQ ID NO: 2275413 - RNA, 19 nt, Homo sapiens
  misc_RNA (1)...(19): siRNA sense strand
ggagcaggcuugaugguga

SEQ ID NO: 2275414 - RNA, 19 nt, Homo sapiens
  misc_RNA (1)...(19): siRNA sense strand
ugugauaccuguuuggcaa

SEQ ID NO: 2275415 - RNA, 19 nt, Homo sapiens
  misc_RNA (1)...(19): siRNA sense strand
gcugaacaacaguaugaaa

SEQ ID NO: 2275416 - RNA, 19 nt, Homo sapiens
  misc_RNA (1)...(19): siRNA sense strand
gcaaaagcgaaaaggcaau

SEQ ID NO: 2275417 - RNA, 19 nt, Homo sapiens
  misc_RNA (1)...(19): siRNA sense strand
ugauaugggcugaacaaca

SEQ ID NO: 2275418 - RNA, 19 nt, Homo sapiens
  misc_RNA (1)...(19): siRNA sense strand
cacaaugacugcacggaga

SEQ ID NO: 2275419 - RNA, 19 nt, Homo sapiens
  misc_RNA (1)...(19): siRNA sense strand
uguacaauuugaagcaaca

SEQ ID NO: 2275420 - RNA, 19 nt, Homo sapiens
  misc_RNA (1)...(19): siRNA sense strand
ucuaagggacucagcacua

SEQ ID NO: 2275421 - RNA, 19 nt, Homo sapiens
  misc_RNA (1)...(19): siRNA sense strand
cgccaaagcaaucaccaaa

SEQ ID NO: 2275422 - RNA, 19 nt, Homo sapiens
  misc_RNA (1)...(19): siRNA sense strand
ugugauaugggcugaacaa

SEQ ID NO: 2275423 - RNA, 19 nt, Homo sapiens
  misc_RNA (1)...(19): siRNA sense strand
cugaacaacaguaugaaaa

SEQ ID NO: 2275424 - RNA, 19 nt, Homo sapiens
  misc_RNA (1)...(19): siRNA sense strand
gcuuaaagacucugaagac

SEQ ID NO: 2275425 - RNA, 19 nt, Homo sapiens
  misc_RNA (1)...(19): siRNA sense strand
cgaaaaggcaauuugucaa

SEQ ID NO: 2275426 - RNA, 19 nt, Homo sapiens
  misc_RNA (1)...(19): siRNA sense strand
uugcaagauaccaggauga

SEQ ID NO: 2275427 - RNA, 19 nt, Homo sapiens
  misc_RNA (1)...(19): siRNA sense strand
ucgucugggcuucgggaaa

SEQ ID NO: 2275428 - RNA, 19 nt, Homo sapiens
  misc_RNA (1)...(19): siRNA sense strand
ugaaagagaacgggauaca

SEQ ID NO: 2275429 - RNA, 19 nt, Homo sapiens
  misc_RNA (1)...(19): siRNA sense strand
ccuauagguacuuggacuu

SEQ ID NO: 2275430 - RNA, 19 nt, Homo sapiens
  misc_RNA (1)...(19): siRNA sense strand
gguacuuggacuuugagaa

SEQ ID NO: 2275431 - RNA, 19 nt, Homo sapiens
  misc_RNA (1)...(19): siRNA sense strand
ccgccaaagcaaucaccaa

SEQ ID NO: 2275432 - RNA, 19 nt, Homo sapiens
  misc_RNA (1)...(19): siRNA sense strand
cuuaaagacucugaagaca

SEQ ID NO: 2275433 - RNA, 19 nt, Homo sapiens
  misc_RNA (1)...(19): siRNA sense strand
ggguuggaguugcauacaa

SEQ ID NO: 2275434 - RNA, 19 nt, Homo sapiens
  misc_RNA (1)...(19): siRNA sense strand
cugagaagaaagagugugu

SEQ ID NO: 2275435 - RNA, 19 nt, Homo sapiens
  misc_RNA (1)...(19): siRNA sense strand
ucuacgaagcccuggaaaa

SEQ ID NO: 2275436 - RNA, 19 nt, Homo sapiens
  misc_RNA (1)...(19): siRNA sense strand
gcccuaaugaugaugggaa

SEQ ID NO: 2275437 - RNA, 19 nt, Homo sapiens
  misc_RNA (1)...(19): siRNA sense strand
cuucucagccagagcauau

SEQ ID NO: 2275438 - RNA, 19 nt, Homo sapiens
  misc_RNA (1)...(19): siRNA sense strand
gcgaaaaggcaauuuguca

SEQ ID NO: 2275439 - RNA, 19 nt, Homo sapiens
  misc_RNA (1)...(19): siRNA sense strand
acacggacauuuaugccaa

SEQ ID NO: 2275440 - RNA, 19 nt, Homo sapiens
  misc_RNA (1)...(19): siRNA sense strand
gcauguacaauuugaagca

SEQ ID NO: 2275441 - RNA, 19 nt, Homo sapiens
  misc_RNA (1)...(19): siRNA sense strand
gaguggaaucacacggaca

SEQ ID NO: 2275442 - RNA, 19 nt, Homo sapiens
  misc_RNA (1)...(19): siRNA sense strand
cagcagugccucccagcaa

SEQ ID NO: 2275443 - RNA, 19 nt, Homo sapiens
  misc_RNA (1)...(19): siRNA sense strand
aguaugacccgcuggccaa

SEQ ID NO: 2275444 - RNA, 19 nt, Homo sapiens
  misc_RNA (1)...(19): siRNA sense strand
ccguacuggaugaugguuu

SEQ ID NO: 2275445 - RNA, 19 nt, Homo sapiens
  misc_RNA (1)...(19): siRNA sense strand
caacuaugauccagaggcu

SEQ ID NO: 2275446 - RNA, 19 nt, Homo sapiens
  misc_RNA (1)...(19): siRNA sense strand
gugaauagucgauuuggau

SEQ ID NO: 2275447 - RNA, 19 nt, Homo sapiens
  misc_RNA (1)...(19): siRNA sense strand
ugucuggaccucugaguau

SEQ ID NO: 2275448 - RNA, 19 nt, Homo sapiens
  misc_RNA (1)...(19): siRNA sense strand
augaaugggcagcggagau

SEQ ID NO: 2275449 - RNA, 19 nt, Homo sapiens
  misc_RNA (1)...(19): siRNA sense strand
acagaagagggguggagaa

SEQ ID NO: 2275450 - RNA, 19 nt, Homo sapiens
  misc_RNA (1)...(19): siRNA sense strand
ugauaaugaccaugaucca

SEQ ID NO: 2275451 - RNA, 19 nt, Homo sapiens
  misc_RNA (1)...(19): siRNA sense strand
gugcaaaagcgaaaaggca

SEQ ID NO: 2275452 - RNA, 19 nt, Homo sapiens
  misc_RNA (1)...(19): siRNA sense strand
gguuuggaguggaaucaca

SEQ ID NO: 2275453 - RNA, 19 nt, Homo sapiens
  misc_RNA (1)...(19): siRNA sense strand
cccagaaggcuuuugaaua

SEQ ID NO: 2275454 - RNA, 19 nt, Homo sapiens
  misc_RNA (1)...(19): siRNA sense strand
gggcaguaacauugagcca

SEQ ID NO: 2275455 - RNA, 19 nt, Homo sapiens
  misc_RNA (1)...(19): siRNA sense strand
ccaaaaugacagagcucua

SEQ ID NO: 2275456 - RNA, 19 nt, Homo sapiens
  misc_RNA (1)...(19): siRNA sense strand
cugccaagcaucaggccaa

SEQ ID NO: 2275457 - RNA, 19 nt, Homo sapiens
  misc_RNA (1)...(19): siRNA sense strand
gccuggagcaagagcacaa

SEQ ID NO: 2275458 - RNA, 19 nt, Homo sapiens
  misc_RNA (1)...(19): siRNA sense strand
aauuaugacaucugccaaa

SEQ ID NO: 2275459 - RNA, 19 nt, Homo sapiens
  misc_RNA (1)...(19): siRNA sense strand
caggagaagauguucgaga

SEQ ID NO: 2275460 - RNA, 19 nt, Homo sapiens
  misc_RNA (1)...(19): siRNA sense strand
gagcacaacaauuugguca

SEQ ID NO: 2275461 - RNA, 19 nt, Homo sapiens
  misc_RNA (1)...(19): siRNA sense strand
guacaggagucuaaagcac

SEQ ID NO: 2275462 - RNA, 19 nt, Homo sapiens
  misc_RNA (1)...(19): siRNA sense strand
agcacaaccucaagcaaaa

SEQ ID NO: 2275463 - RNA, 19 nt, Homo sapiens
  misc_RNA (1)...(19): siRNA sense strand
cuuuagcugaccugaauaa

SEQ ID NO: 2275464 - RNA, 19 nt, Homo sapiens
  misc_RNA (1)...(19): siRNA sense strand
ggagaagauguucgagacu

SEQ ID NO: 2275465 - RNA, 19 nt, Homo sapiens
  misc_RNA (1)...(19): siRNA sense strand
gcaguaacauugagccaag

SEQ ID NO: 2275466 - RNA, 19 nt, Homo sapiens
  misc_RNA (1)...(19): siRNA sense strand
gggcaguaacauugagcca

SEQ ID NO: 2275467 - RNA, 19 nt, Homo sapiens
  misc_RNA (1)...(19): siRNA sense strand
ccaaaaugacagagcucua

SEQ ID NO: 2275468 - RNA, 19 nt, Homo sapiens
  misc_RNA (1)...(19): siRNA sense strand
cugccaagcaucaggccaa

SEQ ID NO: 2275469 - RNA, 19 nt, Homo sapiens
  misc_RNA (1)...(19): siRNA sense strand
gccuggagcaagagcacaa

SEQ ID NO: 2275470 - RNA, 19 nt, Homo sapiens
  misc_RNA (1)...(19): siRNA sense strand
aauuaugacaucugccaaa

SEQ ID NO: 2275471 - RNA, 19 nt, Homo sapiens
  misc_RNA (1)...(19): siRNA sense strand
caggagaagauguucgaga

SEQ ID NO: 2275472 - RNA, 19 nt, Homo sapiens
  misc_RNA (1)...(19): siRNA sense strand
gagcacaacaauuugguca

SEQ ID NO: 2275473 - RNA, 19 nt, Homo sapiens
  misc_RNA (1)...(19): siRNA sense strand
guacaggagucuaaagcac

SEQ ID NO: 2275474 - RNA, 19 nt, Homo sapiens
  misc_RNA (1)...(19): siRNA sense strand
agcacaaccucaagcaaaa

SEQ ID NO: 2275475 - RNA, 19 nt, Homo sapiens
  misc_RNA (1)...(19): siRNA sense strand
cuuuagcugaccugaauaa

SEQ ID NO: 2275476 - RNA, 19 nt, Homo sapiens
  misc_RNA (1)...(19): siRNA sense strand
ggagaagauguucgagacu

SEQ ID NO: 2275477 - RNA, 19 nt, Homo sapiens
  misc_RNA (1)...(19): siRNA sense strand
gcaguaacauugagccaag

SEQ ID NO: 2275478 - RNA, 19 nt, Homo sapiens
  misc_RNA (1)...(19): siRNA sense strand
gggcaguaacauugagcca

SEQ ID NO: 2275479 - RNA, 19 nt, Homo sapiens
  misc_RNA (1)...(19): siRNA sense strand
ccaaaaugacagagcucua

SEQ ID NO: 2275480 - RNA, 19 nt, Homo sapiens
  misc_RNA (1)...(19): siRNA sense strand
cugccaagcaucaggccaa

SEQ ID NO: 2275481 - RNA, 19 nt, Homo sapiens
  misc_RNA (1)...(19): siRNA sense strand
gccuggagcaagagcacaa

SEQ ID NO: 2275482 - RNA, 19 nt, Homo sapiens
  misc_RNA (1)...(19): siRNA sense strand
aauuaugacaucugccaaa

SEQ ID NO: 2275483 - RNA, 19 nt, Homo sapiens
  misc_RNA (1)...(19): siRNA sense strand
caggagaagauguucgaga

SEQ ID NO: 2275484 - RNA, 19 nt, Homo sapiens
  misc_RNA (1)...(19): siRNA sense strand
gagcacaacaauuugguca

SEQ ID NO: 2275485 - RNA, 19 nt, Homo sapiens
  misc_RNA (1)...(19): siRNA sense strand
guacaggagucuaaagcac

SEQ ID NO: 2275486 - RNA, 19 nt, Homo sapiens
  misc_RNA (1)...(19): siRNA sense strand
agcacaaccucaagcaaaa

SEQ ID NO: 2275487 - RNA, 19 nt, Homo sapiens
  misc_RNA (1)...(19): siRNA sense strand
cuuuagcugaccugaauaa

SEQ ID NO: 2275488 - RNA, 19 nt, Homo sapiens
  misc_RNA (1)...(19): siRNA sense strand
ggagaagauguucgagacu

SEQ ID NO: 2275489 - RNA, 19 nt, Homo sapiens
  misc_RNA (1)...(19): siRNA sense strand
gcaguaacauugagccaag

SEQ ID NO: 2275490 - RNA, 19 nt, Homo sapiens
  misc_RNA (1)...(19): siRNA sense strand
gggcaguaacauugagcca

SEQ ID NO: 2275491 - RNA, 19 nt, Homo sapiens
  misc_RNA (1)...(19): siRNA sense strand
ccaaaaugacagagcucua

SEQ ID NO: 2275492 - RNA, 19 nt, Homo sapiens
  misc_RNA (1)...(19): siRNA sense strand
cugccaagcaucaggccaa

SEQ ID NO: 2275493 - RNA, 19 nt, Homo sapiens
  misc_RNA (1)...(19): siRNA sense strand
gccuggagcaagagcacaa

SEQ ID NO: 2275494 - RNA, 19 nt, Homo sapiens
  misc_RNA (1)...(19): siRNA sense strand
aauuaugacaucugccaaa

SEQ ID NO: 2275495 - RNA, 19 nt, Homo sapiens
  misc_RNA (1)...(19): siRNA sense strand
caggagaagauguucgaga

SEQ ID NO: 2275496 - RNA, 19 nt, Homo sapiens
  misc_RNA (1)...(19): siRNA sense strand
gagcacaacaauuugguca

SEQ ID NO: 2275497 - RNA, 19 nt, Homo sapiens
  misc_RNA (1)...(19): siRNA sense strand
guacaggagucuaaagcac

SEQ ID NO: 2275498 - RNA, 19 nt, Homo sapiens
  misc_RNA (1)...(19): siRNA sense strand
agcacaaccucaagcaaaa

SEQ ID NO: 2275499 - RNA, 19 nt, Homo sapiens
  misc_RNA (1)...(19): siRNA sense strand
cuuuagcugaccugaauaa

SEQ ID NO: 2275500 - RNA, 19 nt, Homo sapiens
  misc_RNA (1)...(19): siRNA sense strand
ggagaagauguucgagacu

SEQ ID NO: 2275501 - RNA, 19 nt, Homo sapiens
  misc_RNA (1)...(19): siRNA sense strand
gcaguaacauugagccaag

SEQ ID NO: 2275502 - RNA, 19 nt, Homo sapiens
  misc_RNA (1)...(19): siRNA sense strand
gggcaguaacauugagcca

SEQ ID NO: 2275503 - RNA, 19 nt, Homo sapiens
  misc_RNA (1)...(19): siRNA sense strand
ccaaaaugacagagcucua

SEQ ID NO: 2275504 - RNA, 19 nt, Homo sapiens
  misc_RNA (1)...(19): siRNA sense strand
cugccaagcaucaggccaa

SEQ ID NO: 2275505 - RNA, 19 nt, Homo sapiens
  misc_RNA (1)...(19): siRNA sense strand
gccuggagcaagagcacaa

SEQ ID NO: 2275506 - RNA, 19 nt, Homo sapiens
  misc_RNA (1)...(19): siRNA sense strand
aauuaugacaucugccaaa

SEQ ID NO: 2275507 - RNA, 19 nt, Homo sapiens
  misc_RNA (1)...(19): siRNA sense strand
caggagaagauguucgaga

SEQ ID NO: 2275508 - RNA, 19 nt, Homo sapiens
  misc_RNA (1)...(19): siRNA sense strand
gagcacaacaauuugguca

SEQ ID NO: 2275509 - RNA, 19 nt, Homo sapiens
  misc_RNA (1)...(19): siRNA sense strand
guacaggagucuaaagcac

SEQ ID NO: 2275510 - RNA, 19 nt, Homo sapiens
  misc_RNA (1)...(19): siRNA sense strand
agcacaaccucaagcaaaa

SEQ ID NO: 2275511 - RNA, 19 nt, Homo sapiens
  misc_RNA (1)...(19): siRNA sense strand
cuuuagcugaccugaauaa

SEQ ID NO: 2275512 - RNA, 19 nt, Homo sapiens
  misc_RNA (1)...(19): siRNA sense strand
ggagaagauguucgagacu

SEQ ID NO: 2275513 - RNA, 19 nt, Homo sapiens
  misc_RNA (1)...(19): siRNA sense strand
gcaguaacauugagccaag

SEQ ID NO: 2275514 - RNA, 19 nt, Homo sapiens
  misc_RNA (1)...(19): siRNA sense strand
gggcaguaacauugagcca

SEQ ID NO: 2275515 - RNA, 19 nt, Homo sapiens
  misc_RNA (1)...(19): siRNA sense strand
ccaaaaugacagagcucua

SEQ ID NO: 2275516 - RNA, 19 nt, Homo sapiens
  misc_RNA (1)...(19): siRNA sense strand
cugccaagcaucaggccaa

SEQ ID NO: 2275517 - RNA, 19 nt, Homo sapiens
  misc_RNA (1)...(19): siRNA sense strand
gccuggagcaagagcacaa

SEQ ID NO: 2275518 - RNA, 19 nt, Homo sapiens
  misc_RNA (1)...(19): siRNA sense strand
aauuaugacaucugccaaa

SEQ ID NO: 2275519 - RNA, 19 nt, Homo sapiens
  misc_RNA (1)...(19): siRNA sense strand
caggagaagauguucgaga

SEQ ID NO: 2275520 - RNA, 19 nt, Homo sapiens
  misc_RNA (1)...(19): siRNA sense strand
gagcacaacaauuugguca

SEQ ID NO: 2275521 - RNA, 19 nt, Homo sapiens
  misc_RNA (1)...(19): siRNA sense strand
guacaggagucuaaagcac

SEQ ID NO: 2275522 - RNA, 19 nt, Homo sapiens
  misc_RNA (1)...(19): siRNA sense strand
agcacaaccucaagcaaaa

SEQ ID NO: 2275523 - RNA, 19 nt, Homo sapiens
  misc_RNA (1)...(19): siRNA sense strand
cuuuagcugaccugaauaa

SEQ ID NO: 2275524 - RNA, 19 nt, Homo sapiens
  misc_RNA (1)...(19): siRNA sense strand
ggagaagauguucgagacu

SEQ ID NO: 2275525 - RNA, 19 nt, Homo sapiens
  misc_RNA (1)...(19): siRNA sense strand
gcaguaacauugagccaag

SEQ ID NO: 2275526 - RNA, 19 nt, Homo sapiens
  misc_RNA (1)...(19): siRNA sense strand
gggcaguaacauugagcca

SEQ ID NO: 2275527 - RNA, 19 nt, Homo sapiens
  misc_RNA (1)...(19): siRNA sense strand
ccaaaaugacagagcucua

SEQ ID NO: 2275528 - RNA, 19 nt, Homo sapiens
  misc_RNA (1)...(19): siRNA sense strand
cugccaagcaucaggccaa

SEQ ID NO: 2275529 - RNA, 19 nt, Homo sapiens
  misc_RNA (1)...(19): siRNA sense strand
gccuggagcaagagcacaa

SEQ ID NO: 2275530 - RNA, 19 nt, Homo sapiens
  misc_RNA (1)...(19): siRNA sense strand
aauuaugacaucugccaaa

SEQ ID NO: 2275531 - RNA, 19 nt, Homo sapiens
  misc_RNA (1)...(19): siRNA sense strand
caggagaagauguucgaga

SEQ ID NO: 2275532 - RNA, 19 nt, Homo sapiens
  misc_RNA (1)...(19): siRNA sense strand
gagcacaacaauuugguca

SEQ ID NO: 2275533 - RNA, 19 nt, Homo sapiens
  misc_RNA (1)...(19): siRNA sense strand
guacaggagucuaaagcac

SEQ ID NO: 2275534 - RNA, 19 nt, Homo sapiens
  misc_RNA (1)...(19): siRNA sense strand
agcacaaccucaagcaaaa

SEQ ID NO: 2275535 - RNA, 19 nt, Homo sapiens
  misc_RNA (1)...(19): siRNA sense strand
cuuuagcugaccugaauaa

SEQ ID NO: 2275536 - RNA, 19 nt, Homo sapiens
  misc_RNA (1)...(19): siRNA sense strand
ggagaagauguucgagacu

SEQ ID NO: 2275537 - RNA, 19 nt, Homo sapiens
  misc_RNA (1)...(19): siRNA sense strand
gcaguaacauugagccaag

SEQ ID NO: 2275538 - RNA, 19 nt, Homo sapiens
  misc_RNA (1)...(19): siRNA sense strand
gggcaguaacauugagcca

SEQ ID NO: 2275539 - RNA, 19 nt, Homo sapiens
  misc_RNA (1)...(19): siRNA sense strand
ccaaaaugacagagcucua

SEQ ID NO: 2275540 - RNA, 19 nt, Homo sapiens
  misc_RNA (1)...(19): siRNA sense strand
cugccaagcaucaggccaa

SEQ ID NO: 2275541 - RNA, 19 nt, Homo sapiens
  misc_RNA (1)...(19): siRNA sense strand
gccuggagcaagagcacaa

SEQ ID NO: 2275542 - RNA, 19 nt, Homo sapiens
  misc_RNA (1)...(19): siRNA sense strand
aauuaugacaucugccaaa

SEQ ID NO: 2275543 - RNA, 19 nt, Homo sapiens
  misc_RNA (1)...(19): siRNA sense strand
caggagaagauguucgaga

SEQ ID NO: 2275544 - RNA, 19 nt, Homo sapiens
  misc_RNA (1)...(19): siRNA sense strand
gagcacaacaauuugguca

SEQ ID NO: 2275545 - RNA, 19 nt, Homo sapiens
  misc_RNA (1)...(19): siRNA sense strand
guacaggagucuaaagcac

SEQ ID NO: 2275546 - RNA, 19 nt, Homo sapiens
  misc_RNA (1)...(19): siRNA sense strand
agcacaaccucaagcaaaa

SEQ ID NO: 2275547 - RNA, 19 nt, Homo sapiens
  misc_RNA (1)...(19): siRNA sense strand
cuuuagcugaccugaauaa

SEQ ID NO: 2275548 - RNA, 19 nt, Homo sapiens
  misc_RNA (1)...(19): siRNA sense strand
ggagaagauguucgagacu

SEQ ID NO: 2275549 - RNA, 19 nt, Homo sapiens
  misc_RNA (1)...(19): siRNA sense strand
gcaguaacauugagccaag

SEQ ID NO: 2275550 - RNA, 19 nt, Homo sapiens
  misc_RNA (1)...(19): siRNA sense strand
gggcaguaacauugagcca

SEQ ID NO: 2275551 - RNA, 19 nt, Homo sapiens
  misc_RNA (1)...(19): siRNA sense strand
ccaaaaugacagagcucua

SEQ ID NO: 2275552 - RNA, 19 nt, Homo sapiens
  misc_RNA (1)...(19): siRNA sense strand
cugccaagcaucaggccaa

SEQ ID NO: 2275553 - RNA, 19 nt, Homo sapiens
  misc_RNA (1)...(19): siRNA sense strand
gccuggagcaagagcacaa

SEQ ID NO: 2275554 - RNA, 19 nt, Homo sapiens
  misc_RNA (1)...(19): siRNA sense strand
aauuaugacaucugccaaa

SEQ ID NO: 2275555 - RNA, 19 nt, Homo sapiens
  misc_RNA (1)...(19): siRNA sense strand
caggagaagauguucgaga

SEQ ID NO: 2275556 - RNA, 19 nt, Homo sapiens
  misc_RNA (1)...(19): siRNA sense strand
gagcacaacaauuugguca

SEQ ID NO: 2275557 - RNA, 19 nt, Homo sapiens
  misc_RNA (1)...(19): siRNA sense strand
guacaggagucuaaagcac

SEQ ID NO: 2275558 - RNA, 19 nt, Homo sapiens
  misc_RNA (1)...(19): siRNA sense strand
agcacaaccucaagcaaaa

SEQ ID NO: 2275559 - RNA, 19 nt, Homo sapiens
  misc_RNA (1)...(19): siRNA sense strand
cuuuagcugaccugaauaa

SEQ ID NO: 2275560 - RNA, 19 nt, Homo sapiens
  misc_RNA (1)...(19): siRNA sense strand
ggagaagauguucgagacu

SEQ ID NO: 2275561 - RNA, 19 nt, Homo sapiens
  misc_RNA (1)...(19): siRNA sense strand
gcaguaacauugagccaag

SEQ ID NO: 2275562 - RNA, 19 nt, Homo sapiens
  misc_RNA (1)...(19): siRNA sense strand
gggcaguaacauugagcca

SEQ ID NO: 2275563 - RNA, 19 nt, Homo sapiens
  misc_RNA (1)...(19): siRNA sense strand
ccaaaaugacagagcucua

SEQ ID NO: 2275564 - RNA, 19 nt, Homo sapiens
  misc_RNA (1)...(19): siRNA sense strand
cugccaagcaucaggccaa

SEQ ID NO: 2275565 - RNA, 19 nt, Homo sapiens
  misc_RNA (1)...(19): siRNA sense strand
gccuggagcaagagcacaa

SEQ ID NO: 2275566 - RNA, 19 nt, Homo sapiens
  misc_RNA (1)...(19): siRNA sense strand
aauuaugacaucugccaaa

SEQ ID NO: 2275567 - RNA, 19 nt, Homo sapiens
  misc_RNA (1)...(19): siRNA sense strand
caggagaagauguucgaga

SEQ ID NO: 2275568 - RNA, 19 nt, Homo sapiens
  misc_RNA (1)...(19): siRNA sense strand
gagcacaacaauuugguca

SEQ ID NO: 2275569 - RNA, 19 nt, Homo sapiens
  misc_RNA (1)...(19): siRNA sense strand
guacaggagucuaaagcac

SEQ ID NO: 2275570 - RNA, 19 nt, Homo sapiens
  misc_RNA (1)...(19): siRNA sense strand
agcacaaccucaagcaaaa

SEQ ID NO: 2275571 - RNA, 19 nt, Homo sapiens
  misc_RNA (1)...(19): siRNA sense strand
cuuuagcugaccugaauaa

SEQ ID NO: 2275572 - RNA, 19 nt, Homo sapiens
  misc_RNA (1)...(19): siRNA sense strand
ggagaagauguucgagacu

SEQ ID NO: 2275573 - RNA, 19 nt, Homo sapiens
  misc_RNA (1)...(19): siRNA sense strand
gcaguaacauugagccaag

SEQ ID NO: 2275574 - RNA, 19 nt, Homo sapiens
  misc_RNA (1)...(19): siRNA sense strand
gggcaguaacauugagcca

SEQ ID NO: 2275575 - RNA, 19 nt, Homo sapiens
  misc_RNA (1)...(19): siRNA sense strand
ccaaaaugacagagcucua

SEQ ID NO: 2275576 - RNA, 19 nt, Homo sapiens
  misc_RNA (1)...(19): siRNA sense strand
cugccaagcaucaggccaa

SEQ ID NO: 2275577 - RNA, 19 nt, Homo sapiens
  misc_RNA (1)...(19): siRNA sense strand
gccuggagcaagagcacaa

SEQ ID NO: 2275578 - RNA, 19 nt, Homo sapiens
  misc_RNA (1)...(19): siRNA sense strand
aauuaugacaucugccaaa

SEQ ID NO: 2275579 - RNA, 19 nt, Homo sapiens
  misc_RNA (1)...(19): siRNA sense strand
caggagaagauguucgaga

SEQ ID NO: 2275580 - RNA, 19 nt, Homo sapiens
  misc_RNA (1)...(19): siRNA sense strand
gagcacaacaauuugguca

SEQ ID NO: 2275581 - RNA, 19 nt, Homo sapiens
  misc_RNA (1)...(19): siRNA sense strand
guacaggagucuaaagcac

SEQ ID NO: 2275582 - RNA, 19 nt, Homo sapiens
  misc_RNA (1)...(19): siRNA sense strand
agcacaaccucaagcaaaa

SEQ ID NO: 2275583 - RNA, 19 nt, Homo sapiens
  misc_RNA (1)...(19): siRNA sense strand
cuuuagcugaccugaauaa

SEQ ID NO: 2275584 - RNA, 19 nt, Homo sapiens
  misc_RNA (1)...(19): siRNA sense strand
ggagaagauguucgagacu

SEQ ID NO: 2275585 - RNA, 19 nt, Homo sapiens
  misc_RNA (1)...(19): siRNA sense strand
gcaguaacauugagccaag

SEQ ID NO: 2275586 - RNA, 19 nt, Homo sapiens
  misc_RNA (1)...(19): siRNA sense strand
gggcaguaacauugagcca

SEQ ID NO: 2275587 - RNA, 19 nt, Homo sapiens
  misc_RNA (1)...(19): siRNA sense strand
ccaaaaugacagagcucua

SEQ ID NO: 2275588 - RNA, 19 nt, Homo sapiens
  misc_RNA (1)...(19): siRNA sense strand
cugccaagcaucaggccaa

SEQ ID NO: 2275589 - RNA, 19 nt, Homo sapiens
  misc_RNA (1)...(19): siRNA sense strand
gccuggagcaagagcacaa

SEQ ID NO: 2275590 - RNA, 19 nt, Homo sapiens
  misc_RNA (1)...(19): siRNA sense strand
aauuaugacaucugccaaa

SEQ ID NO: 2275591 - RNA, 19 nt, Homo sapiens
  misc_RNA (1)...(19): siRNA sense strand
caggagaagauguucgaga

SEQ ID NO: 2275592 - RNA, 19 nt, Homo sapiens
  misc_RNA (1)...(19): siRNA sense strand
gagcacaacaauuugguca

SEQ ID NO: 2275593 - RNA, 19 nt, Homo sapiens
  misc_RNA (1)...(19): siRNA sense strand
guacaggagucuaaagcac

SEQ ID NO: 2275594 - RNA, 19 nt, Homo sapiens
  misc_RNA (1)...(19): siRNA sense strand
agcacaaccucaagcaaaa

SEQ ID NO: 2275595 - RNA, 19 nt, Homo sapiens
  misc_RNA (1)...(19): siRNA sense strand
cuuuagcugaccugaauaa

SEQ ID NO: 2275596 - RNA, 19 nt, Homo sapiens
  misc_RNA (1)...(19): siRNA sense strand
ggagaagauguucgagacu

SEQ ID NO: 2275597 - RNA, 19 nt, Homo sapiens
  misc_RNA (1)...(19): siRNA sense strand
gcaguaacauugagccaag

SEQ ID NO: 2275598 - RNA, 19 nt, Homo sapiens
  misc_RNA (1)...(19): siRNA sense strand
gggcaguaacauugagcca

SEQ ID NO: 2275599 - RNA, 19 nt, Homo sapiens
  misc_RNA (1)...(19): siRNA sense strand
ccaaaaugacagagcucua

SEQ ID NO: 2275600 - RNA, 19 nt, Homo sapiens
  misc_RNA (1)...(19): siRNA sense strand
cugccaagcaucaggccaa

SEQ ID NO: 2275601 - RNA, 19 nt, Homo sapiens
  misc_RNA (1)...(19): siRNA sense strand
gccuggagcaagagcacaa

SEQ ID NO: 2275602 - RNA, 19 nt, Homo sapiens
  misc_RNA (1)...(19): siRNA sense strand
aauuaugacaucugccaaa

SEQ ID NO: 2275603 - RNA, 19 nt, Homo sapiens
  misc_RNA (1)...(19): siRNA sense strand
caggagaagauguucgaga

SEQ ID NO: 2275604 - RNA, 19 nt, Homo sapiens
  misc_RNA (1)...(19): siRNA sense strand
gagcacaacaauuugguca

SEQ ID NO: 2275605 - RNA, 19 nt, Homo sapiens
  misc_RNA (1)...(19): siRNA sense strand
guacaggagucuaaagcac

SEQ ID NO: 2275606 - RNA, 19 nt, Homo sapiens
  misc_RNA (1)...(19): siRNA sense strand
agcacaaccucaagcaaaa

SEQ ID NO: 2275607 - RNA, 19 nt, Homo sapiens
  misc_RNA (1)...(19): siRNA sense strand
cuuuagcugaccugaauaa

SEQ ID NO: 2275608 - RNA, 19 nt, Homo sapiens
  misc_RNA (1)...(19): siRNA sense strand
ggagaagauguucgagacu

SEQ ID NO: 2275609 - RNA, 19 nt, Homo sapiens
  misc_RNA (1)...(19): siRNA sense strand
gcaguaacauugagccaag

SEQ ID NO: 2275610 - RNA, 19 nt, Homo sapiens
  misc_RNA (1)...(19): siRNA sense strand
gggcaguaacauugagcca

SEQ ID NO: 2275611 - RNA, 19 nt, Homo sapiens
  misc_RNA (1)...(19): siRNA sense strand
ccaaaaugacagagcucua

SEQ ID NO: 2275612 - RNA, 19 nt, Homo sapiens
  misc_RNA (1)...(19): siRNA sense strand
cugccaagcaucaggccaa

SEQ ID NO: 2275613 - RNA, 19 nt, Homo sapiens
  misc_RNA (1)...(19): siRNA sense strand
gccuggagcaagagcacaa

SEQ ID NO: 2275614 - RNA, 19 nt, Homo sapiens
  misc_RNA (1)...(19): siRNA sense strand
aauuaugacaucugccaaa

SEQ ID NO: 2275615 - RNA, 19 nt, Homo sapiens
  misc_RNA (1)...(19): siRNA sense strand
caggagaagauguucgaga

SEQ ID NO: 2275616 - RNA, 19 nt, Homo sapiens
  misc_RNA (1)...(19): siRNA sense strand
gagcacaacaauuugguca

SEQ ID NO: 2275617 - RNA, 19 nt, Homo sapiens
  misc_RNA (1)...(19): siRNA sense strand
guacaggagucuaaagcac

SEQ ID NO: 2275618 - RNA, 19 nt, Homo sapiens
  misc_RNA (1)...(19): siRNA sense strand
agcacaaccucaagcaaaa

SEQ ID NO: 2275619 - RNA, 19 nt, Homo sapiens
  misc_RNA (1)...(19): siRNA sense strand
cuuuagcugaccugaauaa

SEQ ID NO: 2275620 - RNA, 19 nt, Homo sapiens
  misc_RNA (1)...(19): siRNA sense strand
ggagaagauguucgagacu

SEQ ID NO: 2275621 - RNA, 19 nt, Homo sapiens
  misc_RNA (1)...(19): siRNA sense strand
gcaguaacauugagccaag

SEQ ID NO: 2275622 - RNA, 19 nt, Homo sapiens
  misc_RNA (1)...(19): siRNA sense strand
gggcaguaacauugagcca

SEQ ID NO: 2275623 - RNA, 19 nt, Homo sapiens
  misc_RNA (1)...(19): siRNA sense strand
ccaaaaugacagagcucua

SEQ ID NO: 2275624 - RNA, 19 nt, Homo sapiens
  misc_RNA (1)...(19): siRNA sense strand
cugccaagcaucaggccaa

SEQ ID NO: 2275625 - RNA, 19 nt, Homo sapiens
  misc_RNA (1)...(19): siRNA sense strand
gccuggagcaagagcacaa

SEQ ID NO: 2275626 - RNA, 19 nt, Homo sapiens
  misc_RNA (1)...(19): siRNA sense strand
aauuaugacaucugccaaa

SEQ ID NO: 2275627 - RNA, 19 nt, Homo sapiens
  misc_RNA (1)...(19): siRNA sense strand
caggagaagauguucgaga

SEQ ID NO: 2275628 - RNA, 19 nt, Homo sapiens
  misc_RNA (1)...(19): siRNA sense strand
gagcacaacaauuugguca

SEQ ID NO: 2275629 - RNA, 19 nt, Homo sapiens
  misc_RNA (1)...(19): siRNA sense strand
guacaggagucuaaagcac

SEQ ID NO: 2275630 - RNA, 19 nt, Homo sapiens
  misc_RNA (1)...(19): siRNA sense strand
agcacaaccucaagcaaaa

SEQ ID NO: 2275631 - RNA, 19 nt, Homo sapiens
  misc_RNA (1)...(19): siRNA sense strand
cuuuagcugaccugaauaa

SEQ ID NO: 2275632 - RNA, 19 nt, Homo sapiens
  misc_RNA (1)...(19): siRNA sense strand
ggagaagauguucgagacu

SEQ ID NO: 2275633 - RNA, 19 nt, Homo sapiens
  misc_RNA (1)...(19): siRNA sense strand
gcaguaacauugagccaag

SEQ ID NO: 2275634 - RNA, 19 nt, Homo sapiens
  misc_RNA (1)...(19): siRNA sense strand
gggcaguaacauugagcca

SEQ ID NO: 2275635 - RNA, 19 nt, Homo sapiens
  misc_RNA (1)...(19): siRNA sense strand
ccaaaaugacagagcucua

SEQ ID NO: 2275636 - RNA, 19 nt, Homo sapiens
  misc_RNA (1)...(19): siRNA sense strand
cugccaagcaucaggccaa

SEQ ID NO: 2275637 - RNA, 19 nt, Homo sapiens
  misc_RNA (1)...(19): siRNA sense strand
gccuggagcaagagcacaa

SEQ ID NO: 2275638 - RNA, 19 nt, Homo sapiens
  misc_RNA (1)...(19): siRNA sense strand
aauuaugacaucugccaaa

SEQ ID NO: 2275639 - RNA, 19 nt, Homo sapiens
  misc_RNA (1)...(19): siRNA sense strand
caggagaagauguucgaga

SEQ ID NO: 2275640 - RNA, 19 nt, Homo sapiens
  misc_RNA (1)...(19): siRNA sense strand
gagcacaacaauuugguca

SEQ ID NO: 2275641 - RNA, 19 nt, Homo sapiens
  misc_RNA (1)...(19): siRNA sense strand
guacaggagucuaaagcac

SEQ ID NO: 2275642 - RNA, 19 nt, Homo sapiens
  misc_RNA (1)...(19): siRNA sense strand
agcacaaccucaagcaaaa

SEQ ID NO: 2275643 - RNA, 19 nt, Homo sapiens
  misc_RNA (1)...(19): siRNA sense strand
cuuuagcugaccugaauaa

SEQ ID NO: 2275644 - RNA, 19 nt, Homo sapiens
  misc_RNA (1)...(19): siRNA sense strand
ggagaagauguucgagacu

SEQ ID NO: 2275645 - RNA, 19 nt, Homo sapiens
  misc_RNA (1)...(19): siRNA sense strand
gcaguaacauugagccaag

SEQ ID NO: 2275646 - RNA, 19 nt, Homo sapiens
  misc_RNA (1)...(19): siRNA sense strand
gggcaguaacauugagcca

SEQ ID NO: 2275647 - RNA, 19 nt, Homo sapiens
  misc_RNA (1)...(19): siRNA sense strand
ccaaaaugacagagcucua

SEQ ID NO: 2275648 - RNA, 19 nt, Homo sapiens
  misc_RNA (1)...(19): siRNA sense strand
cugccaagcaucaggccaa

SEQ ID NO: 2275649 - RNA, 19 nt, Homo sapiens
  misc_RNA (1)...(19): siRNA sense strand
gccuggagcaagagcacaa

SEQ ID NO: 2275650 - RNA, 19 nt, Homo sapiens
  misc_RNA (1)...(19): siRNA sense strand
aauuaugacaucugccaaa

SEQ ID NO: 2275651 - RNA, 19 nt, Homo sapiens
  misc_RNA (1)...(19): siRNA sense strand
caggagaagauguucgaga

SEQ ID NO: 2275652 - RNA, 19 nt, Homo sapiens
  misc_RNA (1)...(19): siRNA sense strand
gagcacaacaauuugguca

SEQ ID NO: 2275653 - RNA, 19 nt, Homo sapiens
  misc_RNA (1)...(19): siRNA sense strand
guacaggagucuaaagcac

SEQ ID NO: 2275654 - RNA, 19 nt, Homo sapiens
  misc_RNA (1)...(19): siRNA sense strand
agcacaaccucaagcaaaa

SEQ ID NO: 2275655 - RNA, 19 nt, Homo sapiens
  misc_RNA (1)...(19): siRNA sense strand
cuuuagcugaccugaauaa

SEQ ID NO: 2275656 - RNA, 19 nt, Homo sapiens
  misc_RNA (1)...(19): siRNA sense strand
ggagaagauguucgagacu

SEQ ID NO: 2275657 - RNA, 19 nt, Homo sapiens
  misc_RNA (1)...(19): siRNA sense strand
gcaguaacauugagccaag

SEQ ID NO: 2275658 - RNA, 19 nt, Homo sapiens
  misc_RNA (1)...(19): siRNA sense strand
gggcaguaacauugagcca

SEQ ID NO: 2275659 - RNA, 19 nt, Homo sapiens
  misc_RNA (1)...(19): siRNA sense strand
ccaaaaugacagagcucua

SEQ ID NO: 2275660 - RNA, 19 nt, Homo sapiens
  misc_RNA (1)...(19): siRNA sense strand
cugccaagcaucaggccaa

SEQ ID NO: 2275661 - RNA, 19 nt, Homo sapiens
  misc_RNA (1)...(19): siRNA sense strand
gccuggagcaagagcacaa

SEQ ID NO: 2275662 - RNA, 19 nt, Homo sapiens
  misc_RNA (1)...(19): siRNA sense strand
aauuaugacaucugccaaa

SEQ ID NO: 2275663 - RNA, 19 nt, Homo sapiens
  misc_RNA (1)...(19): siRNA sense strand
caggagaagauguucgaga

SEQ ID NO: 2275664 - RNA, 19 nt, Homo sapiens
  misc_RNA (1)...(19): siRNA sense strand
gagcacaacaauuugguca

SEQ ID NO: 2275665 - RNA, 19 nt, Homo sapiens
  misc_RNA (1)...(19): siRNA sense strand
guacaggagucuaaagcac

SEQ ID NO: 2275666 - RNA, 19 nt, Homo sapiens
  misc_RNA (1)...(19): siRNA sense strand
agcacaaccucaagcaaaa

SEQ ID NO: 2275667 - RNA, 19 nt, Homo sapiens
  misc_RNA (1)...(19): siRNA sense strand
cuuuagcugaccugaauaa

SEQ ID NO: 2275668 - RNA, 19 nt, Homo sapiens
  misc_RNA (1)...(19): siRNA sense strand
ggagaagauguucgagacu

SEQ ID NO: 2275669 - RNA, 19 nt, Homo sapiens
  misc_RNA (1)...(19): siRNA sense strand
gcaguaacauugagccaag

SEQ ID NO: 2275670 - RNA, 19 nt, Homo sapiens
  misc_RNA (1)...(19): siRNA sense strand
aggcaggagcaaagagcaa

SEQ ID NO: 2275671 - RNA, 19 nt, Homo sapiens
  misc_RNA (1)...(19): siRNA sense strand
acauugaguuugagagcau

SEQ ID NO: 2275672 - RNA, 19 nt, Homo sapiens
  misc_RNA (1)...(19): siRNA sense strand
augcaaucacuguggaaua

SEQ ID NO: 2275673 - RNA, 19 nt, Homo sapiens
  misc_RNA (1)...(19): siRNA sense strand
auuugaagaaccagagaaa

SEQ ID NO: 2275674 - RNA, 19 nt, Homo sapiens
  misc_RNA (1)...(19): siRNA sense strand
cuguagagggugagcgaga

SEQ ID NO: 2275675 - RNA, 19 nt, Homo sapiens
  misc_RNA (1)...(19): siRNA sense strand
aggaauacaagaagagcuu

SEQ ID NO: 2275676 - RNA, 19 nt, Homo sapiens
  misc_RNA (1)...(19): siRNA sense strand
ucacagaaguucacgcuga

SEQ ID NO: 2275677 - RNA, 19 nt, Homo sapiens
  misc_RNA (1)...(19): siRNA sense strand
ccaucggcuuggagcgcua

SEQ ID NO: 2275678 - RNA, 19 nt, Homo sapiens
  misc_RNA (1)...(19): siRNA sense strand
ccaagaacaaaguggccau

SEQ ID NO: 2275679 - RNA, 19 nt, Homo sapiens
  misc_RNA (1)...(19): siRNA sense strand
ccgaggaggacuuggagga

SEQ ID NO: 2275680 - RNA, 19 nt, Homo sapiens
  misc_RNA (1)...(19): siRNA sense strand
aggagaacucagugggcga

SEQ ID NO: 2275681 - RNA, 19 nt, Homo sapiens
  misc_RNA (1)...(19): siRNA sense strand
gguugaagccagagggagc

SEQ ID NO: 2275682 - RNA, 19 nt, Homo sapiens
  misc_RNA (1)...(19): siRNA sense strand
gggaagucacagaaguuca

SEQ ID NO: 2275683 - RNA, 19 nt, Homo sapiens
  misc_RNA (1)...(19): siRNA sense strand
guguuguguuugagaagga

SEQ ID NO: 2275684 - RNA, 19 nt, Homo sapiens
  misc_RNA (1)...(19): siRNA sense strand
ggacauuugagguuggagu

SEQ ID NO: 2275685 - RNA, 19 nt, Homo sapiens
  misc_RNA (1)...(19): siRNA sense strand
aggaagaccuggcagagga

SEQ ID NO: 2275686 - RNA, 19 nt, Homo sapiens
  misc_RNA (1)...(19): siRNA sense strand
ggaaaugagaagacggcuc

SEQ ID NO: 2275687 - RNA, 19 nt, Homo sapiens
  misc_RNA (1)...(19): siRNA sense strand
ucgaguaccugcaggacca

SEQ ID NO: 2275688 - RNA, 19 nt, Homo sapiens
  misc_RNA (1)...(19): siRNA sense strand
ggaugaggcaggagcaaag

SEQ ID NO: 2275689 - RNA, 19 nt, Homo sapiens
  misc_RNA (1)...(19): siRNA sense strand
uggucaagccagagcacga

SEQ ID NO: 2275690 - RNA, 19 nt, Homo sapiens
  misc_RNA (1)...(19): siRNA sense strand
gagaagacggcucggagga

SEQ ID NO: 2275691 - RNA, 19 nt, Homo sapiens
  misc_RNA (1)...(19): siRNA sense strand
ggaaagaguuugagccccu

SEQ ID NO: 2275692 - RNA, 19 nt, Homo sapiens
  misc_RNA (1)...(19): siRNA sense strand
cuggaggaauacaagaaga

SEQ ID NO: 2275693 - RNA, 19 nt, Homo sapiens
  misc_RNA (1)...(19): siRNA sense strand
gaccggauucuguggaaau

SEQ ID NO: 2275694 - RNA, 19 nt, Homo sapiens
  misc_RNA (1)...(19): siRNA sense strand
cgggagaagcacaaggucu

SEQ ID NO: 2275695 - RNA, 19 nt, Homo sapiens
  misc_RNA (1)...(19): siRNA sense strand
caucgaagggucuggggaa

SEQ ID NO: 2275696 - RNA, 19 nt, Homo sapiens
  misc_RNA (1)...(19): siRNA sense strand
ugaggagucuggaggcaca

SEQ ID NO: 2275697 - RNA, 19 nt, Homo sapiens
  misc_RNA (1)...(19): siRNA sense strand
uguuugagaaggagaagga

SEQ ID NO: 2275698 - RNA, 19 nt, Homo sapiens
  misc_RNA (1)...(19): siRNA sense strand
cuacaggacaugagcucca

SEQ ID NO: 2275699 - RNA, 19 nt, Homo sapiens
  misc_RNA (1)...(19): siRNA sense strand
ggaauaucaagguggcagu

SEQ ID NO: 2275700 - RNA, 19 nt, Homo sapiens
  misc_RNA (1)...(19): siRNA sense strand
gauucagugaggaggagau

SEQ ID NO: 2275701 - RNA, 19 nt, Homo sapiens
  misc_RNA (1)...(19): siRNA sense strand
uguccaagguguuugacca

SEQ ID NO: 2275702 - RNA, 19 nt, Homo sapiens
  misc_RNA (1)...(19): siRNA sense strand
aggaugaggcaggagcaaa

SEQ ID NO: 2275703 - RNA, 19 nt, Homo sapiens
  misc_RNA (1)...(19): siRNA sense strand
gggcaguggagaagggcaa

SEQ ID NO: 2275704 - RNA, 19 nt, Homo sapiens
  misc_RNA (1)...(19): siRNA sense strand
gcgaggaguuggaggagga

SEQ ID NO: 2275705 - RNA, 19 nt, Homo sapiens
  misc_RNA (1)...(19): siRNA sense strand
aggaagaggaggaggagga

SEQ ID NO: 2275706 - RNA, 19 nt, Homo sapiens
  misc_RNA (1)...(19): siRNA sense strand
cggaaaagaccaaagacaa

SEQ ID NO: 2275707 - RNA, 19 nt, Homo sapiens
  misc_RNA (1)...(19): siRNA sense strand
ccaagaagcccaaggagga

SEQ ID NO: 2275708 - RNA, 19 nt, Homo sapiens
  misc_RNA (1)...(19): siRNA sense strand
aagaaaggcaagaaagaca

SEQ ID NO: 2275709 - RNA, 19 nt, Homo sapiens
  misc_RNA (1)...(19): siRNA sense strand
agaccaaagacaaagggaa

SEQ ID NO: 2275710 - RNA, 19 nt, Homo sapiens
  misc_RNA (1)...(19): siRNA sense strand
acaagugggcaguggagaa

SEQ ID NO: 2275711 - RNA, 19 nt, Homo sapiens
  misc_RNA (1)...(19): siRNA sense strand
aagagaaggaggagcugaa

SEQ ID NO: 2275712 - RNA, 19 nt, Homo sapiens
  misc_RNA (1)...(19): siRNA sense strand
gcacuuacagccugggcaa

SEQ ID NO: 2275713 - RNA, 19 nt, Homo sapiens
  misc_RNA (1)...(19): siRNA sense strand
agaucgagagggaggacua

SEQ ID NO: 2275714 - RNA, 19 nt, Homo sapiens
  misc_RNA (1)...(19): siRNA sense strand
ggagcugaggagaggaaau

SEQ ID NO: 2275715 - RNA, 19 nt, Homo sapiens
  misc_RNA (1)...(19): siRNA sense strand
gggaggacuaugaggacuu

SEQ ID NO: 2275716 - RNA, 19 nt, Homo sapiens
  misc_RNA (1)...(19): siRNA sense strand
gaggaggaguggacgccua

SEQ ID NO: 2275717 - RNA, 19 nt, Homo sapiens
  misc_RNA (1)...(19): siRNA sense strand
acaaagggaagaaaggcaa

SEQ ID NO: 2275718 - RNA, 19 nt, Homo sapiens
  misc_RNA (1)...(19): siRNA sense strand
agggaagaaaggcaagaaa

SEQ ID NO: 2275719 - RNA, 19 nt, Homo sapiens
  misc_RNA (1)...(19): siRNA sense strand
ccaagaaggggaaggagaa

SEQ ID NO: 2275720 - RNA, 19 nt, Homo sapiens
  misc_RNA (1)...(19): siRNA sense strand
guggacaccaggaggacua

SEQ ID NO: 2275721 - RNA, 19 nt, Homo sapiens
  misc_RNA (1)...(19): siRNA sense strand
ccaacggcuaugaggaaau

SEQ ID NO: 2275722 - RNA, 19 nt, Homo sapiens
  misc_RNA (1)...(19): siRNA sense strand
cagaagugccuccggaaaa

SEQ ID NO: 2275723 - RNA, 19 nt, Homo sapiens
  misc_RNA (1)...(19): siRNA sense strand
uugccuggauggagaagaa

SEQ ID NO: 2275724 - RNA, 19 nt, Homo sapiens
  misc_RNA (1)...(19): siRNA sense strand
gaccaaagacaaagggaag

SEQ ID NO: 2275725 - RNA, 19 nt, Homo sapiens
  misc_RNA (1)...(19): siRNA sense strand
cugacuauggugaugguua

SEQ ID NO: 2275726 - RNA, 19 nt, Homo sapiens
  misc_RNA (1)...(19): siRNA sense strand
agaaaggcaagaaagacaa

SEQ ID NO: 2275727 - RNA, 19 nt, Homo sapiens
  misc_RNA (1)...(19): siRNA sense strand
cggacgaagagaaggagga

SEQ ID NO: 2275728 - RNA, 19 nt, Homo sapiens
  misc_RNA (1)...(19): siRNA sense strand
cccgaaagggcgaggaguu

SEQ ID NO: 2275729 - RNA, 19 nt, Homo sapiens
  misc_RNA (1)...(19): siRNA sense strand
aacccgaguuugaggaaga

SEQ ID NO: 2275730 - RNA, 19 nt, Homo sapiens
  misc_RNA (1)...(19): siRNA sense strand
cagcaaugacagccagaca

SEQ ID NO: 2275731 - RNA, 19 nt, Homo sapiens
  misc_RNA (1)...(19): siRNA sense strand
gcuacaaggacaugcgcca

SEQ ID NO: 2275732 - RNA, 19 nt, Homo sapiens
  misc_RNA (1)...(19): siRNA sense strand
accaagaagcccaaagaga

SEQ ID NO: 2275733 - RNA, 19 nt, Homo sapiens
  misc_RNA (1)...(19): siRNA sense strand
agaccuacacagugaacuu

SEQ ID NO: 2275734 - RNA, 19 nt, Homo sapiens
  misc_RNA (1)...(19): siRNA sense strand
agacggacgaagagaagga

SEQ ID NO: 2275735 - RNA, 19 nt, Homo sapiens
  misc_RNA (1)...(19): siRNA sense strand
aguuugaggaagaggagga

SEQ ID NO: 2275736 - RNA, 19 nt, Homo sapiens
  misc_RNA (1)...(19): siRNA sense strand
accaagaagcccaaggaga

SEQ ID NO: 2275737 - RNA, 19 nt, Homo sapiens
  misc_RNA (1)...(19): siRNA sense strand
acgaagagaaggaggagcu

SEQ ID NO: 2275738 - RNA, 19 nt, Homo sapiens
  misc_RNA (1)...(19): siRNA sense strand
uggagaagggcaaggacca

SEQ ID NO: 2275739 - RNA, 19 nt, Homo sapiens
  misc_RNA (1)...(19): siRNA sense strand
gaguggacgccuacggaga

SEQ ID NO: 2275740 - RNA, 19 nt, Homo sapiens
  misc_RNA (1)...(19): siRNA sense strand
ccggaaaagaccaaagaca

SEQ ID NO: 2275741 - RNA, 19 nt, Homo sapiens
  misc_RNA (1)...(19): siRNA sense strand
caccacagcuacaaggaca

SEQ ID NO: 2275742 - RNA, 19 nt, Homo sapiens
  misc_RNA (1)...(19): siRNA sense strand
gguggugauuacuggcgaa

SEQ ID NO: 2275743 - RNA, 19 nt, Homo sapiens
  misc_RNA (1)...(19): siRNA sense strand
agguggagcccgaguuuga

SEQ ID NO: 2275744 - RNA, 19 nt, Homo sapiens
  misc_RNA (1)...(19): siRNA sense strand
acuacgaugacauggacua

SEQ ID NO: 2275745 - RNA, 19 nt, Homo sapiens
  misc_RNA (1)...(19): siRNA sense strand
gcugccaagcccaggacua

SEQ ID NO: 2275746 - RNA, 19 nt, Homo sapiens
  misc_RNA (1)...(19): siRNA sense strand
gacaaagggaagaaaggca

SEQ ID NO: 2275747 - RNA, 19 nt, Homo sapiens
  misc_RNA (1)...(19): siRNA sense strand
cugcugggauccauggcaa

SEQ ID NO: 2275748 - RNA, 19 nt, Homo sapiens
  misc_RNA (1)...(19): siRNA sense strand
ggaggaggagaccgagcaa

SEQ ID NO: 2275749 - RNA, 19 nt, Homo sapiens
  misc_RNA (1)...(19): siRNA sense strand
ccaaagagaagccacccaa

SEQ ID NO: 2275750 - RNA, 19 nt, Homo sapiens
  misc_RNA (1)...(19): siRNA sense strand
ugacagaguuugggaccga

SEQ ID NO: 2275751 - RNA, 19 nt, Homo sapiens
  misc_RNA (1)...(19): siRNA sense strand
augaggacuuugaguacau

SEQ ID NO: 2275752 - RNA, 19 nt, Homo sapiens
  misc_RNA (1)...(19): siRNA sense strand
ugauguacaccaacggcua

SEQ ID NO: 2275753 - RNA, 19 nt, Homo sapiens
  misc_RNA (1)...(19): siRNA sense strand
cggagaaagucaagugucc

SEQ ID NO: 2275754 - RNA, 19 nt, Homo sapiens
  misc_RNA (1)...(19): siRNA sense strand
cacugaacccugauggcua

SEQ ID NO: 2275755 - RNA, 19 nt, Homo sapiens
  misc_RNA (1)...(19): siRNA sense strand
uugaggaagaggaggagga

SEQ ID NO: 2275756 - RNA, 19 nt, Homo sapiens
  misc_RNA (1)...(19): siRNA sense strand
cggaauacccugaggaaca

SEQ ID NO: 2275757 - RNA, 19 nt, Homo sapiens
  misc_RNA (1)...(19): siRNA sense strand
gagcauuaucagagggauu

SEQ ID NO: 2275758 - RNA, 19 nt, Homo sapiens
  misc_RNA (1)...(19): siRNA sense strand
gcaaagugcucuuaggaga

SEQ ID NO: 2275759 - RNA, 19 nt, Homo sapiens
  misc_RNA (1)...(19): siRNA sense strand
agaacacagugaagggaaa

SEQ ID NO: 2275760 - RNA, 19 nt, Homo sapiens
  misc_RNA (1)...(19): siRNA sense strand
ggaaaaguuuggaggguuu

SEQ ID NO: 2275761 - RNA, 19 nt, Homo sapiens
  misc_RNA (1)...(19): siRNA sense strand
ggacaguacuucaacgcua

SEQ ID NO: 2275762 - RNA, 19 nt, Homo sapiens
  misc_RNA (1)...(19): siRNA sense strand
acacagaauccuaaguaua

SEQ ID NO: 2275763 - RNA, 19 nt, Homo sapiens
  misc_RNA (1)...(19): siRNA sense strand
aggaaugggacgaggaaga

SEQ ID NO: 2275764 - RNA, 19 nt, Homo sapiens
  misc_RNA (1)...(19): siRNA sense strand
cuucagaacagcacggaaa

SEQ ID NO: 2275765 - RNA, 19 nt, Homo sapiens
  misc_RNA (1)...(19): siRNA sense strand
agagaaggacauugugaaa

SEQ ID NO: 2275766 - RNA, 19 nt, Homo sapiens
  misc_RNA (1)...(19): siRNA sense strand
ucagaugagucuaggaaga

SEQ ID NO: 2275767 - RNA, 19 nt, Homo sapiens
  misc_RNA (1)...(19): siRNA sense strand
agaaagaccgugugaauca

SEQ ID NO: 2275768 - RNA, 19 nt, Homo sapiens
  misc_RNA (1)...(19): siRNA sense strand
gaggauaucuugagccaca

SEQ ID NO: 2275769 - RNA, 19 nt, Homo sapiens
  misc_RNA (1)...(19): siRNA sense strand
aaauaaagcugaugcagga

SEQ ID NO: 2275770 - RNA, 19 nt, Homo sapiens
  misc_RNA (1)...(19): siRNA sense strand
aggaggaaguagauccaaa

SEQ ID NO: 2275771 - RNA, 19 nt, Homo sapiens
  misc_RNA (1)...(19): siRNA sense strand
ccucagaaaugcaggccuu

SEQ ID NO: 2275772 - RNA, 19 nt, Homo sapiens
  misc_RNA (1)...(19): siRNA sense strand
cagugaagggaaacaaaua

SEQ ID NO: 2275773 - RNA, 19 nt, Homo sapiens
  misc_RNA (1)...(19): siRNA sense strand
gcgaggaggaggaggaagu

SEQ ID NO: 2275774 - RNA, 19 nt, Homo sapiens
  misc_RNA (1)...(19): siRNA sense strand
agaaugaagacaaguggaa

SEQ ID NO: 2275775 - RNA, 19 nt, Homo sapiens
  misc_RNA (1)...(19): siRNA sense strand
gagcaagagauucaagcaa

SEQ ID NO: 2275776 - RNA, 19 nt, Homo sapiens
  misc_RNA (1)...(19): siRNA sense strand
ugaacaaagucaucggaga

SEQ ID NO: 2275777 - RNA, 19 nt, Homo sapiens
  misc_RNA (1)...(19): siRNA sense strand
cuacccaguugaagacaaa

SEQ ID NO: 2275778 - RNA, 19 nt, Homo sapiens
  misc_RNA (1)...(19): siRNA sense strand
gggacgaggaagaggagga

SEQ ID NO: 2275779 - RNA, 19 nt, Homo sapiens
  misc_RNA (1)...(19): siRNA sense strand
acaaggagaaugaagacaa

SEQ ID NO: 2275780 - RNA, 19 nt, Homo sapiens
  misc_RNA (1)...(19): siRNA sense strand
gugaagggaaacaaauaaa

SEQ ID NO: 2275781 - RNA, 19 nt, Homo sapiens
  misc_RNA (1)...(19): siRNA sense strand
guacacaggaaaggagaaa

SEQ ID NO: 2275782 - RNA, 19 nt, Homo sapiens
  misc_RNA (1)...(19): siRNA sense strand
ccauuugcuuggagaugaa

SEQ ID NO: 2275783 - RNA, 19 nt, Homo sapiens
  misc_RNA (1)...(19): siRNA sense strand
ggaacuaggcacacugcua

SEQ ID NO: 2275784 - RNA, 19 nt, Homo sapiens
  misc_RNA (1)...(19): siRNA sense strand
cugagaaagagaaggacau

SEQ ID NO: 2275785 - RNA, 19 nt, Homo sapiens
  misc_RNA (1)...(19): siRNA sense strand
gugaaaacauaguggcaca

SEQ ID NO: 2275786 - RNA, 19 nt, Homo sapiens
  misc_RNA (1)...(19): siRNA sense strand
ggaaagaaauggaagucuc

SEQ ID NO: 2275787 - RNA, 19 nt, Homo sapiens
  misc_RNA (1)...(19): siRNA sense strand
aagaagaagccuuggagga

SEQ ID NO: 2275788 - RNA, 19 nt, Homo sapiens
  misc_RNA (1)...(19): siRNA sense strand
cagcagcuacagugaguua

SEQ ID NO: 2275789 - RNA, 19 nt, Homo sapiens
  misc_RNA (1)...(19): siRNA sense strand
gguuucaaagagagagaau

SEQ ID NO: 2275790 - RNA, 19 nt, Homo sapiens
  misc_RNA (1)...(19): siRNA sense strand
gagucuaggaagagcugua

SEQ ID NO: 2275791 - RNA, 19 nt, Homo sapiens
  misc_RNA (1)...(19): siRNA sense strand
gaucauuggaauuccuaaa

SEQ ID NO: 2275792 - RNA, 19 nt, Homo sapiens
  misc_RNA (1)...(19): siRNA sense strand
caauagagaaauaguacga

SEQ ID NO: 2275793 - RNA, 19 nt, Homo sapiens
  misc_RNA (1)...(19): siRNA sense strand
gugagaugguggcagaaau

SEQ ID NO: 2275794 - RNA, 19 nt, Homo sapiens
  misc_RNA (1)...(19): siRNA sense strand
cagaaaugguggagucucu

SEQ ID NO: 2275795 - RNA, 19 nt, Homo sapiens
  misc_RNA (1)...(19): siRNA sense strand
gaaaagagcuugaaaccca

SEQ ID NO: 2275796 - RNA, 19 nt, Homo sapiens
  misc_RNA (1)...(19): siRNA sense strand
caaagugcucuuaggagaa

SEQ ID NO: 2275797 - RNA, 19 nt, Homo sapiens
  misc_RNA (1)...(19): siRNA sense strand
gugcugacucugaggaaca

SEQ ID NO: 2275798 - RNA, 19 nt, Homo sapiens
  misc_RNA (1)...(19): siRNA sense strand
cagagaggacccagaucaa

SEQ ID NO: 2275799 - RNA, 19 nt, Homo sapiens
  misc_RNA (1)...(19): siRNA sense strand
caaagucaucggagaguuu

SEQ ID NO: 2275800 - RNA, 19 nt, Homo sapiens
  misc_RNA (1)...(19): siRNA sense strand
ggaacauggugcaggcgga

SEQ ID NO: 2275801 - RNA, 19 nt, Homo sapiens
  misc_RNA (1)...(19): siRNA sense strand
gggcagaagugcagcagac

SEQ ID NO: 2275802 - RNA, 19 nt, Homo sapiens
  misc_RNA (1)...(19): siRNA sense strand
ugaggaagccacagguauu

SEQ ID NO: 2275803 - RNA, 19 nt, Homo sapiens
  misc_RNA (1)...(19): siRNA sense strand
cugcuuuagucgagaacca

SEQ ID NO: 2275804 - RNA, 19 nt, Homo sapiens
  misc_RNA (1)...(19): siRNA sense strand
acgagaagcugcugcuaca

SEQ ID NO: 2275805 - RNA, 19 nt, Homo sapiens
  misc_RNA (1)...(19): siRNA sense strand
agauagaggaggagcucga

SEQ ID NO: 2275806 - RNA, 19 nt, Homo sapiens
  misc_RNA (1)...(19): siRNA sense strand
cgaaauguccacaagguca

SEQ ID NO: 2275807 - RNA, 19 nt, Homo sapiens
  misc_RNA (1)...(19): siRNA sense strand
ggcaaaagcagaaaacuua

SEQ ID NO: 2275808 - RNA, 19 nt, Homo sapiens
  misc_RNA (1)...(19): siRNA sense strand
cagcagugccacaaggaga

SEQ ID NO: 2275809 - RNA, 19 nt, Homo sapiens
  misc_RNA (1)...(19): siRNA sense strand
agccuagggaugagugaaa

SEQ ID NO: 2275810 - RNA, 19 nt, Homo sapiens
  misc_RNA (1)...(19): siRNA sense strand
ccugugagaugguggcaga

SEQ ID NO: 2275811 - RNA, 19 nt, Homo sapiens
  misc_RNA (1)...(19): siRNA sense strand
aagcaagagacccgaagaa

SEQ ID NO: 2275812 - RNA, 19 nt, Homo sapiens
  misc_RNA (1)...(19): siRNA sense strand
cggaaucuuucuucagcaa

SEQ ID NO: 2275813 - RNA, 19 nt, Homo sapiens
  misc_RNA (1)...(19): siRNA sense strand
ccucugaagaagaagccaa

SEQ ID NO: 2275814 - RNA, 19 nt, Homo sapiens
  misc_RNA (1)...(19): siRNA sense strand
aggcggagcaggagaacga

SEQ ID NO: 2275815 - RNA, 19 nt, Homo sapiens
  misc_RNA (1)...(19): siRNA sense strand
ugucaauguuacugagacu

SEQ ID NO: 2275816 - RNA, 19 nt, Homo sapiens
  misc_RNA (1)...(19): siRNA sense strand
augcagaaucgcuggucaa

SEQ ID NO: 2275817 - RNA, 19 nt, Homo sapiens
  misc_RNA (1)...(19): siRNA sense strand
acacaggaaaggagaaagu

SEQ ID NO: 2275818 - RNA, 19 nt, Homo sapiens
  misc_RNA (1)...(19): siRNA sense strand
aggcaaaagcagaaaacuu

SEQ ID NO: 2275819 - RNA, 19 nt, Homo sapiens
  misc_RNA (1)...(19): siRNA sense strand
aggaauaccuucagagcag

SEQ ID NO: 2275820 - RNA, 19 nt, Homo sapiens
  misc_RNA (1)...(19): siRNA sense strand
ccugagaaagagaaggaca

SEQ ID NO: 2275821 - RNA, 19 nt, Homo sapiens
  misc_RNA (1)...(19): siRNA sense strand
ugcagaagguggugggaca

SEQ ID NO: 2275822 - RNA, 19 nt, Homo sapiens
  misc_RNA (1)...(19): siRNA sense strand
cggaccagacugaggcaga

SEQ ID NO: 2275823 - RNA, 19 nt, Homo sapiens
  misc_RNA (1)...(19): siRNA sense strand
cuggauagcagcagccuca

SEQ ID NO: 2275824 - RNA, 19 nt, Homo sapiens
  misc_RNA (1)...(19): siRNA sense strand
ugcagaagguggugggaca

SEQ ID NO: 2275825 - RNA, 19 nt, Homo sapiens
  misc_RNA (1)...(19): siRNA sense strand
cggaccagacugaggcaga

SEQ ID NO: 2275826 - RNA, 19 nt, Homo sapiens
  misc_RNA (1)...(19): siRNA sense strand
cuggauagcagcagccuca

SEQ ID NO: 2275827 - RNA, 19 nt, Homo sapiens
  misc_RNA (1)...(19): siRNA sense strand
cggaccagacugaggcaga

SEQ ID NO: 2275828 - RNA, 19 nt, Homo sapiens
  misc_RNA (1)...(19): siRNA sense strand
ugcagaagguggugggaca

SEQ ID NO: 2275829 - RNA, 19 nt, Homo sapiens
  misc_RNA (1)...(19): siRNA sense strand
cggaccagacugaggcaga

SEQ ID NO: 2275830 - RNA, 19 nt, Homo sapiens
  misc_RNA (1)...(19): siRNA sense strand
cuggauagcagcagccuca

SEQ ID NO: 2275831 - RNA, 19 nt, Homo sapiens
  misc_RNA (1)...(19): siRNA sense strand
ccaaagaggaggaaagaaa

SEQ ID NO: 2275832 - RNA, 19 nt, Homo sapiens
  misc_RNA (1)...(19): siRNA sense strand
agauaaugaugcagguaau

SEQ ID NO: 2275833 - RNA, 19 nt, Homo sapiens
  misc_RNA (1)...(19): siRNA sense strand
ccaugaaggauguggucaa

SEQ ID NO: 2275834 - RNA, 19 nt, Homo sapiens
  misc_RNA (1)...(19): siRNA sense strand
cgguggagaacuagauuua

SEQ ID NO: 2275835 - RNA, 19 nt, Homo sapiens
  misc_RNA (1)...(19): siRNA sense strand
agguagugggucagggaaa

SEQ ID NO: 2275836 - RNA, 19 nt, Homo sapiens
  misc_RNA (1)...(19): siRNA sense strand
uguaggagguaguggguca

SEQ ID NO: 2275837 - RNA, 19 nt, Homo sapiens
  misc_RNA (1)...(19): siRNA sense strand
cacccaaauuaaagacaaa

SEQ ID NO: 2275838 - RNA, 19 nt, Homo sapiens
  misc_RNA (1)...(19): siRNA sense strand
gaacaaagcagauaaugau

SEQ ID NO: 2275839 - RNA, 19 nt, Homo sapiens
  misc_RNA (1)...(19): siRNA sense strand
uugaauacauugagggcca

SEQ ID NO: 2275840 - RNA, 19 nt, Homo sapiens
  misc_RNA (1)...(19): siRNA sense strand
cggaaaaucauaaaagcaa

SEQ ID NO: 2275841 - RNA, 19 nt, Homo sapiens
  misc_RNA (1)...(19): siRNA sense strand
acagagauaugauggauuu

SEQ ID NO: 2275842 - RNA, 19 nt, Homo sapiens
  misc_RNA (1)...(19): siRNA sense strand
agaggaggaaagaaagaaa

SEQ ID NO: 2275843 - RNA, 19 nt, Homo sapiens
  misc_RNA (1)...(19): siRNA sense strand
ccuuacuguuggagaucua

SEQ ID NO: 2275844 - RNA, 19 nt, Homo sapiens
  misc_RNA (1)...(19): siRNA sense strand
ugaacaaagcagauaauga

SEQ ID NO: 2275845 - RNA, 19 nt, Homo sapiens
  misc_RNA (1)...(19): siRNA sense strand
ugggaagcaaagaaagaaa

SEQ ID NO: 2275846 - RNA, 19 nt, Homo sapiens
  misc_RNA (1)...(19): siRNA sense strand
ggugcaaaggccaugaaua

SEQ ID NO: 2275847 - RNA, 19 nt, Homo sapiens
  misc_RNA (1)...(19): siRNA sense strand
ggcuauugacagaggaaca

SEQ ID NO: 2275848 - RNA, 19 nt, Homo sapiens
  misc_RNA (1)...(19): siRNA sense strand
agauguugauacucggaaa

SEQ ID NO: 2275849 - RNA, 19 nt, Homo sapiens
  misc_RNA (1)...(19): siRNA sense strand
aaguguaugcaguggcaaa

SEQ ID NO: 2275850 - RNA, 19 nt, Homo sapiens
  misc_RNA (1)...(19): siRNA sense strand
caggaaagaaaguggccau

SEQ ID NO: 2275851 - RNA, 19 nt, Homo sapiens
  misc_RNA (1)...(19): siRNA sense strand
agguagacacccaaauuaa

SEQ ID NO: 2275852 - RNA, 19 nt, Homo sapiens
  misc_RNA (1)...(19): siRNA sense strand
cagacagacgggagcuuua

SEQ ID NO: 2275853 - RNA, 19 nt, Homo sapiens
  misc_RNA (1)...(19): siRNA sense strand
ccucaaaaggguagcauuu

SEQ ID NO: 2275854 - RNA, 19 nt, Homo sapiens
  misc_RNA (1)...(19): siRNA sense strand
ugugaaaggcuguggaaac

SEQ ID NO: 2275855 - RNA, 19 nt, Homo sapiens
  misc_RNA (1)...(19): siRNA sense strand
ccagcagauuccagaguca

SEQ ID NO: 2275856 - RNA, 19 nt, Homo sapiens
  misc_RNA (1)...(19): siRNA sense strand
aaagcaaagaguagcaauu

SEQ ID NO: 2275857 - RNA, 19 nt, Homo sapiens
  misc_RNA (1)...(19): siRNA sense strand
cagcaguucugauuggcua

SEQ ID NO: 2275858 - RNA, 19 nt, Homo sapiens
  misc_RNA (1)...(19): siRNA sense strand
aauccgaagaauagccaaa

SEQ ID NO: 2275859 - RNA, 19 nt, Homo sapiens
  misc_RNA (1)...(19): siRNA sense strand
agaaaugaacaaagcagau

SEQ ID NO: 2275860 - RNA, 19 nt, Homo sapiens
  misc_RNA (1)...(19): siRNA sense strand
gaaaugaacaaagcagaua

SEQ ID NO: 2275861 - RNA, 19 nt, Homo sapiens
  misc_RNA (1)...(19): siRNA sense strand
ggagaaaagcaaagaguag

SEQ ID NO: 2275862 - RNA, 19 nt, Homo sapiens
  misc_RNA (1)...(19): siRNA sense strand
aagaguagcaauugcaaga

SEQ ID NO: 2275863 - RNA, 19 nt, Homo sapiens
  misc_RNA (1)...(19): siRNA sense strand
agguauggccacugauaga

SEQ ID NO: 2275864 - RNA, 19 nt, Homo sapiens
  misc_RNA (1)...(19): siRNA sense strand
gucacacgguggagaacua

SEQ ID NO: 2275865 - RNA, 19 nt, Homo sapiens
  misc_RNA (1)...(19): siRNA sense strand
gcauuuaucuugcugguca

SEQ ID NO: 2275866 - RNA, 19 nt, Homo sapiens
  misc_RNA (1)...(19): siRNA sense strand
ucgaaugccacauggauau

SEQ ID NO: 2275867 - RNA, 19 nt, Homo sapiens
  misc_RNA (1)...(19): siRNA sense strand
ggagcuuuaucuaaggcua

SEQ ID NO: 2275868 - RNA, 19 nt, Homo sapiens
  misc_RNA (1)...(19): siRNA sense strand
ccuuggaacacuugguaca

SEQ ID NO: 2275869 - RNA, 19 nt, Homo sapiens
  misc_RNA (1)...(19): siRNA sense strand
auacauugagggccagaaa

SEQ ID NO: 2275870 - RNA, 19 nt, Homo sapiens
  misc_RNA (1)...(19): siRNA sense strand
gagcuuuaucuaaggcuau

SEQ ID NO: 2275871 - RNA, 19 nt, Homo sapiens
  misc_RNA (1)...(19): siRNA sense strand
gggaagcaaagaaagaaaa

SEQ ID NO: 2275872 - RNA, 19 nt, Homo sapiens
  misc_RNA (1)...(19): siRNA sense strand
aaagaggaggaaagaaaga

SEQ ID NO: 2275873 - RNA, 19 nt, Homo sapiens
  misc_RNA (1)...(19): siRNA sense strand
cgggaaacaugcugaaccu

SEQ ID NO: 2275874 - RNA, 19 nt, Homo sapiens
  misc_RNA (1)...(19): siRNA sense strand
cagaauucaauccgaagaa

SEQ ID NO: 2275875 - RNA, 19 nt, Homo sapiens
  misc_RNA (1)...(19): siRNA sense strand
gagaucuaguaauggugaa

SEQ ID NO: 2275876 - RNA, 19 nt, Homo sapiens
  misc_RNA (1)...(19): siRNA sense strand
gguagugggucagggaaaa

SEQ ID NO: 2275877 - RNA, 19 nt, Homo sapiens
  misc_RNA (1)...(19): siRNA sense strand
acucaagcuuucaggagga

SEQ ID NO: 2275878 - RNA, 19 nt, Homo sapiens
  misc_RNA (1)...(19): siRNA sense strand
ggaaacaugcugaaccuga

SEQ ID NO: 2275879 - RNA, 19 nt, Homo sapiens
  misc_RNA (1)...(19): siRNA sense strand
acacccaaauuaaagacaa

SEQ ID NO: 2275880 - RNA, 19 nt, Homo sapiens
  misc_RNA (1)...(19): siRNA sense strand
aaugggaagcaaagaaaga

SEQ ID NO: 2275881 - RNA, 19 nt, Homo sapiens
  misc_RNA (1)...(19): siRNA sense strand
cauggcagagauugggaaa

SEQ ID NO: 2275882 - RNA, 19 nt, Homo sapiens
  misc_RNA (1)...(19): siRNA sense strand
cuaccguggccuuugauaa

SEQ ID NO: 2275883 - RNA, 19 nt, Homo sapiens
  misc_RNA (1)...(19): siRNA sense strand
auauagagagacuagacaa

SEQ ID NO: 2275884 - RNA, 19 nt, Homo sapiens
  misc_RNA (1)...(19): siRNA sense strand
uugaagucccugcaggaaa

SEQ ID NO: 2275885 - RNA, 19 nt, Homo sapiens
  misc_RNA (1)...(19): siRNA sense strand
cauuuaucuugcuggucaa

SEQ ID NO: 2275886 - RNA, 19 nt, Homo sapiens
  misc_RNA (1)...(19): siRNA sense strand
aaaucauugucuuggauca

SEQ ID NO: 2275887 - RNA, 19 nt, Homo sapiens
  misc_RNA (1)...(19): siRNA sense strand
uugucuuggaucaggguaa

SEQ ID NO: 2275888 - RNA, 19 nt, Homo sapiens
  misc_RNA (1)...(19): siRNA sense strand
uauucagaaauguggcaua

SEQ ID NO: 2275889 - RNA, 19 nt, Homo sapiens
  misc_RNA (1)...(19): siRNA sense strand
ccagaaaguccuuagugga

SEQ ID NO: 2275890 - RNA, 19 nt, Homo sapiens
  misc_RNA (1)...(19): siRNA sense strand
caagcuuucaggaggagaa

SEQ ID NO: 2275891 - RNA, 19 nt, Homo sapiens
  misc_RNA (1)...(19): siRNA sense strand
gaaccugagugaugcacca

SEQ ID NO: 2275892 - RNA, 19 nt, Homo sapiens
  misc_RNA (1)...(19): siRNA sense strand
cuauagacucacugcugaa

SEQ ID NO: 2275893 - RNA, 19 nt, Homo sapiens
  misc_RNA (1)...(19): siRNA sense strand
uggcuaugguguaucaaga

SEQ ID NO: 2275894 - RNA, 19 nt, Homo sapiens
  misc_RNA (1)...(19): siRNA sense strand
gcccagaauucaauccgaa

SEQ ID NO: 2275895 - RNA, 19 nt, Homo sapiens
  misc_RNA (1)...(19): siRNA sense strand
gaauagaaaugaacaaagc

SEQ ID NO: 2275896 - RNA, 19 nt, Homo sapiens
  misc_RNA (1)...(19): siRNA sense strand
ccugagugaugcaccaaau

SEQ ID NO: 2275897 - RNA, 19 nt, Homo sapiens
  misc_RNA (1)...(19): siRNA sense strand
uaguaauggugaauggacu

SEQ ID NO: 2275898 - RNA, 19 nt, Homo sapiens
  misc_RNA (1)...(19): siRNA sense strand
agucccugcaggaaagaaa

SEQ ID NO: 2275899 - RNA, 19 nt, Homo sapiens
  misc_RNA (1)...(19): siRNA sense strand
augaaagauaugaagcaca

SEQ ID NO: 2275900 - RNA, 19 nt, Homo sapiens
  misc_RNA (1)...(19): siRNA sense strand
ccguggaauacuagagcaa

SEQ ID NO: 2275901 - RNA, 19 nt, Homo sapiens
  misc_RNA (1)...(19): siRNA sense strand
ggaaaagaaaagagaaguu

SEQ ID NO: 2275902 - RNA, 19 nt, Homo sapiens
  misc_RNA (1)...(19): siRNA sense strand
guuacgaggucuuggcaca

SEQ ID NO: 2275903 - RNA, 19 nt, Homo sapiens
  misc_RNA (1)...(19): siRNA sense strand
uagagcaaagagagagaaa

SEQ ID NO: 2275904 - RNA, 19 nt, Homo sapiens
  misc_RNA (1)...(19): siRNA sense strand
cagcaaacuggaaaagaaa

SEQ ID NO: 2275905 - RNA, 19 nt, Homo sapiens
  misc_RNA (1)...(19): siRNA sense strand
auacuagagcaaagagaga

SEQ ID NO: 2275906 - RNA, 19 nt, Homo sapiens
  misc_RNA (1)...(19): siRNA sense strand
ugguauggugguagaaaga

SEQ ID NO: 2275907 - RNA, 19 nt, Homo sapiens
  misc_RNA (1)...(19): siRNA sense strand
guggaauacuagagcaaag

SEQ ID NO: 2275908 - RNA, 19 nt, Homo sapiens
  misc_RNA (1)...(19): siRNA sense strand
agcaguguguagaaagaaa

SEQ ID NO: 2275909 - RNA, 19 nt, Homo sapiens
  misc_RNA (1)...(19): siRNA sense strand
gguagaaagagaugacgga

SEQ ID NO: 2275910 - RNA, 19 nt, Homo sapiens
  misc_RNA (1)...(19): siRNA sense strand
cuacaaaaugcaugucaaa

SEQ ID NO: 2275911 - RNA, 19 nt, Homo sapiens
  misc_RNA (1)...(19): siRNA sense strand
aguguugggaugugugaua

SEQ ID NO: 2275912 - RNA, 19 nt, Homo sapiens
  misc_RNA (1)...(19): siRNA sense strand
ugucagaggcaccguggaa

SEQ ID NO: 2275913 - RNA, 19 nt, Homo sapiens
  misc_RNA (1)...(19): siRNA sense strand
uguaauaguggcaggagga

SEQ ID NO: 2275914 - RNA, 19 nt, Homo sapiens
  misc_RNA (1)...(19): siRNA sense strand
uggaaauagauggcgauaa

SEQ ID NO: 2275915 - RNA, 19 nt, Homo sapiens
  misc_RNA (1)...(19): siRNA sense strand
acuagagcaaagagagaga

SEQ ID NO: 2275916 - RNA, 19 nt, Homo sapiens
  misc_RNA (1)...(19): siRNA sense strand
gggaugugugauauugaua

SEQ ID NO: 2275917 - RNA, 19 nt, Homo sapiens
  misc_RNA (1)...(19): siRNA sense strand
gaauacuagagcaaagaga

SEQ ID NO: 2275918 - RNA, 19 nt, Homo sapiens
  misc_RNA (1)...(19): siRNA sense strand
caaaagaagcuguucguga

SEQ ID NO: 2275919 - RNA, 19 nt, Homo sapiens
  misc_RNA (1)...(19): siRNA sense strand
cugacagguugaauagaga

SEQ ID NO: 2275920 - RNA, 19 nt, Homo sapiens
  misc_RNA (1)...(19): siRNA sense strand
uuucaacagauguggauuu

SEQ ID NO: 2275921 - RNA, 19 nt, Homo sapiens
  misc_RNA (1)...(19): siRNA sense strand
uaauaguggcaggaggaaa

SEQ ID NO: 2275922 - RNA, 19 nt, Homo sapiens
  misc_RNA (1)...(19): siRNA sense strand
gugaaggaucuccagcaaa

SEQ ID NO: 2275923 - RNA, 19 nt, Homo sapiens
  misc_RNA (1)...(19): siRNA sense strand
ccaagcaagaauaugaaga

SEQ ID NO: 2275924 - RNA, 19 nt, Homo sapiens
  misc_RNA (1)...(19): siRNA sense strand
ccuccaaguaugcgguuga

SEQ ID NO: 2275925 - RNA, 19 nt, Homo sapiens
  misc_RNA (1)...(19): siRNA sense strand
auaugaagaaggagggaag

SEQ ID NO: 2275926 - RNA, 19 nt, Homo sapiens
  misc_RNA (1)...(19): siRNA sense strand
uaauggaaauagauggcga

SEQ ID NO: 2275927 - RNA, 19 nt, Homo sapiens
  misc_RNA (1)...(19): siRNA sense strand
gaaaagagaaguugccuca

SEQ ID NO: 2275928 - RNA, 19 nt, Homo sapiens
  misc_RNA (1)...(19): siRNA sense strand
cccucuugcuggagacuuu

SEQ ID NO: 2275929 - RNA, 19 nt, Homo sapiens
  misc_RNA (1)...(19): siRNA sense strand
cuauugguauggugguaga

SEQ ID NO: 2275930 - RNA, 19 nt, Homo sapiens
  misc_RNA (1)...(19): siRNA sense strand
agaaagagaugacggaagc

SEQ ID NO: 2275931 - RNA, 19 nt, Homo sapiens
  misc_RNA (1)...(19): siRNA sense strand
uugaagacugggauaguuu

SEQ ID NO: 2275932 - RNA, 19 nt, Homo sapiens
  misc_RNA (1)...(19): siRNA sense strand
ccuacaaaaugcaugucaa

SEQ ID NO: 2275933 - RNA, 19 nt, Homo sapiens
  misc_RNA (1)...(19): siRNA sense strand
ccguggaauacuagagcaa

SEQ ID NO: 2275934 - RNA, 19 nt, Homo sapiens
  misc_RNA (1)...(19): siRNA sense strand
ggaaaagaaaagagaaguu

SEQ ID NO: 2275935 - RNA, 19 nt, Homo sapiens
  misc_RNA (1)...(19): siRNA sense strand
guuacgaggucuuggcaca

SEQ ID NO: 2275936 - RNA, 19 nt, Homo sapiens
  misc_RNA (1)...(19): siRNA sense strand
uagagcaaagagagagaaa

SEQ ID NO: 2275937 - RNA, 19 nt, Homo sapiens
  misc_RNA (1)...(19): siRNA sense strand
cagcaaacuggaaaagaaa

SEQ ID NO: 2275938 - RNA, 19 nt, Homo sapiens
  misc_RNA (1)...(19): siRNA sense strand
auacuagagcaaagagaga

SEQ ID NO: 2275939 - RNA, 19 nt, Homo sapiens
  misc_RNA (1)...(19): siRNA sense strand
guggaauacuagagcaaag

SEQ ID NO: 2275940 - RNA, 19 nt, Homo sapiens
  misc_RNA (1)...(19): siRNA sense strand
agcaguguguagaaagaaa

SEQ ID NO: 2275941 - RNA, 19 nt, Homo sapiens
  misc_RNA (1)...(19): siRNA sense strand
gguagaaagagaugacgga

SEQ ID NO: 2275942 - RNA, 19 nt, Homo sapiens
  misc_RNA (1)...(19): siRNA sense strand
cuacaaaaugcaugucaaa

SEQ ID NO: 2275943 - RNA, 19 nt, Homo sapiens
  misc_RNA (1)...(19): siRNA sense strand
aguguugggaugugugaua

SEQ ID NO: 2275944 - RNA, 19 nt, Homo sapiens
  misc_RNA (1)...(19): siRNA sense strand
ugucagaggcaccguggaa

SEQ ID NO: 2275945 - RNA, 19 nt, Homo sapiens
  misc_RNA (1)...(19): siRNA sense strand
uguaauaguggcaggagga

SEQ ID NO: 2275946 - RNA, 19 nt, Homo sapiens
  misc_RNA (1)...(19): siRNA sense strand
uggaaauagauggcgauaa

SEQ ID NO: 2275947 - RNA, 19 nt, Homo sapiens
  misc_RNA (1)...(19): siRNA sense strand
acuagagcaaagagagaga

SEQ ID NO: 2275948 - RNA, 19 nt, Homo sapiens
  misc_RNA (1)...(19): siRNA sense strand
gggaugugugauauugaua

SEQ ID NO: 2275949 - RNA, 19 nt, Homo sapiens
  misc_RNA (1)...(19): siRNA sense strand
gaauacuagagcaaagaga

SEQ ID NO: 2275950 - RNA, 19 nt, Homo sapiens
  misc_RNA (1)...(19): siRNA sense strand
caaaagaagcuguucguga

SEQ ID NO: 2275951 - RNA, 19 nt, Homo sapiens
  misc_RNA (1)...(19): siRNA sense strand
cugacagguugaauagaga

SEQ ID NO: 2275952 - RNA, 19 nt, Homo sapiens
  misc_RNA (1)...(19): siRNA sense strand
uuucaacagauguggauuu

SEQ ID NO: 2275953 - RNA, 19 nt, Homo sapiens
  misc_RNA (1)...(19): siRNA sense strand
uaauaguggcaggaggaaa

SEQ ID NO: 2275954 - RNA, 19 nt, Homo sapiens
  misc_RNA (1)...(19): siRNA sense strand
gugaaggaucuccagcaaa

SEQ ID NO: 2275955 - RNA, 19 nt, Homo sapiens
  misc_RNA (1)...(19): siRNA sense strand
ccaagcaagaauaugaaga

SEQ ID NO: 2275956 - RNA, 19 nt, Homo sapiens
  misc_RNA (1)...(19): siRNA sense strand
ccuccaaguaugcgguuga

SEQ ID NO: 2275957 - RNA, 19 nt, Homo sapiens
  misc_RNA (1)...(19): siRNA sense strand
auaugaagaaggagggaag

SEQ ID NO: 2275958 - RNA, 19 nt, Homo sapiens
  misc_RNA (1)...(19): siRNA sense strand
gaaaagagaaguugccuca

SEQ ID NO: 2275959 - RNA, 19 nt, Homo sapiens
  misc_RNA (1)...(19): siRNA sense strand
uaauggaaauagauggcga

SEQ ID NO: 2275960 - RNA, 19 nt, Homo sapiens
  misc_RNA (1)...(19): siRNA sense strand
cccucuugcuggagacuuu

SEQ ID NO: 2275961 - RNA, 19 nt, Homo sapiens
  misc_RNA (1)...(19): siRNA sense strand
uugaagacugggauaguuu

SEQ ID NO: 2275962 - RNA, 19 nt, Homo sapiens
  misc_RNA (1)...(19): siRNA sense strand
ccuacaaaaugcaugucaa

SEQ ID NO: 2275963 - RNA, 19 nt, Homo sapiens
  misc_RNA (1)...(19): siRNA sense strand
agaaagagaugacggaagc

SEQ ID NO: 2275964 - RNA, 19 nt, Homo sapiens
  misc_RNA (1)...(19): siRNA sense strand
ccguggaauacuagagcaa

SEQ ID NO: 2275965 - RNA, 19 nt, Homo sapiens
  misc_RNA (1)...(19): siRNA sense strand
ggaaaagaaaagagaaguu

SEQ ID NO: 2275966 - RNA, 19 nt, Homo sapiens
  misc_RNA (1)...(19): siRNA sense strand
guuacgaggucuuggcaca

SEQ ID NO: 2275967 - RNA, 19 nt, Homo sapiens
  misc_RNA (1)...(19): siRNA sense strand
uagagcaaagagagagaaa

SEQ ID NO: 2275968 - RNA, 19 nt, Homo sapiens
  misc_RNA (1)...(19): siRNA sense strand
cagcaaacuggaaaagaaa

SEQ ID NO: 2275969 - RNA, 19 nt, Homo sapiens
  misc_RNA (1)...(19): siRNA sense strand
auacuagagcaaagagaga

SEQ ID NO: 2275970 - RNA, 19 nt, Homo sapiens
  misc_RNA (1)...(19): siRNA sense strand
guggaauacuagagcaaag

SEQ ID NO: 2275971 - RNA, 19 nt, Homo sapiens
  misc_RNA (1)...(19): siRNA sense strand
agcaguguguagaaagaaa

SEQ ID NO: 2275972 - RNA, 19 nt, Homo sapiens
  misc_RNA (1)...(19): siRNA sense strand
gguagaaagagaugacgga

SEQ ID NO: 2275973 - RNA, 19 nt, Homo sapiens
  misc_RNA (1)...(19): siRNA sense strand
cuacaaaaugcaugucaaa

SEQ ID NO: 2275974 - RNA, 19 nt, Homo sapiens
  misc_RNA (1)...(19): siRNA sense strand
aguguugggaugugugaua

SEQ ID NO: 2275975 - RNA, 19 nt, Homo sapiens
  misc_RNA (1)...(19): siRNA sense strand
ugucagaggcaccguggaa

SEQ ID NO: 2275976 - RNA, 19 nt, Homo sapiens
  misc_RNA (1)...(19): siRNA sense strand
uguaauaguggcaggagga

SEQ ID NO: 2275977 - RNA, 19 nt, Homo sapiens
  misc_RNA (1)...(19): siRNA sense strand
uggaaauagauggcgauaa

SEQ ID NO: 2275978 - RNA, 19 nt, Homo sapiens
  misc_RNA (1)...(19): siRNA sense strand
acuagagcaaagagagaga

SEQ ID NO: 2275979 - RNA, 19 nt, Homo sapiens
  misc_RNA (1)...(19): siRNA sense strand
gggaugugugauauugaua

SEQ ID NO: 2275980 - RNA, 19 nt, Homo sapiens
  misc_RNA (1)...(19): siRNA sense strand
gaauacuagagcaaagaga

SEQ ID NO: 2275981 - RNA, 19 nt, Homo sapiens
  misc_RNA (1)...(19): siRNA sense strand
caaaagaagcuguucguga

SEQ ID NO: 2275982 - RNA, 19 nt, Homo sapiens
  misc_RNA (1)...(19): siRNA sense strand
cugacagguugaauagaga

SEQ ID NO: 2275983 - RNA, 19 nt, Homo sapiens
  misc_RNA (1)...(19): siRNA sense strand
uuucaacagauguggauuu

SEQ ID NO: 2275984 - RNA, 19 nt, Homo sapiens
  misc_RNA (1)...(19): siRNA sense strand
uaauaguggcaggaggaaa

SEQ ID NO: 2275985 - RNA, 19 nt, Homo sapiens
  misc_RNA (1)...(19): siRNA sense strand
gugaaggaucuccagcaaa

SEQ ID NO: 2275986 - RNA, 19 nt, Homo sapiens
  misc_RNA (1)...(19): siRNA sense strand
ccaagcaagaauaugaaga

SEQ ID NO: 2275987 - RNA, 19 nt, Homo sapiens
  misc_RNA (1)...(19): siRNA sense strand
ccuccaaguaugcgguuga

SEQ ID NO: 2275988 - RNA, 19 nt, Homo sapiens
  misc_RNA (1)...(19): siRNA sense strand
auaugaagaaggagggaag

SEQ ID NO: 2275989 - RNA, 19 nt, Homo sapiens
  misc_RNA (1)...(19): siRNA sense strand
gaaaagagaaguugccuca

SEQ ID NO: 2275990 - RNA, 19 nt, Homo sapiens
  misc_RNA (1)...(19): siRNA sense strand
uaauggaaauagauggcga

SEQ ID NO: 2275991 - RNA, 19 nt, Homo sapiens
  misc_RNA (1)...(19): siRNA sense strand
cccucuugcuggagacuuu

SEQ ID NO: 2275992 - RNA, 19 nt, Homo sapiens
  misc_RNA (1)...(19): siRNA sense strand
uugaagacugggauaguuu

SEQ ID NO: 2275993 - RNA, 19 nt, Homo sapiens
  misc_RNA (1)...(19): siRNA sense strand
ccuacaaaaugcaugucaa

SEQ ID NO: 2275994 - RNA, 19 nt, Homo sapiens
  misc_RNA (1)...(19): siRNA sense strand
agaaagagaugacggaagc

SEQ ID NO: 2275995 - RNA, 19 nt, Homo sapiens
  misc_RNA (1)...(19): siRNA sense strand
cgguggagcugguaggcau

SEQ ID NO: 2275996 - RNA, 19 nt, Homo sapiens
  misc_RNA (1)...(19): siRNA sense strand
gggcuuguauauugggaga

SEQ ID NO: 2275997 - RNA, 19 nt, Homo sapiens
  misc_RNA (1)...(19): siRNA sense strand
gagauauaccagacgguca

SEQ ID NO: 2275998 - RNA, 19 nt, Homo sapiens
  misc_RNA (1)...(19): siRNA sense strand
uacaagagauuauuggcaa

SEQ ID NO: 2275999 - RNA, 19 nt, Homo sapiens
  misc_RNA (1)...(19): siRNA sense strand
caauaaagauaauggcacc

SEQ ID NO: 2276000 - RNA, 19 nt, Homo sapiens
  misc_RNA (1)...(19): siRNA sense strand
gugauguggcugugaaaau

SEQ ID NO: 2276001 - RNA, 19 nt, Homo sapiens
  misc_RNA (1)...(19): siRNA sense strand
cggucuugguucagggaag

SEQ ID NO: 2276002 - RNA, 19 nt, Homo sapiens
  misc_RNA (1)...(19): siRNA sense strand
cccugaaguacuugaugaa

SEQ ID NO: 2276003 - RNA, 19 nt, Homo sapiens
  misc_RNA (1)...(19): siRNA sense strand
agauauaccagacggucau

SEQ ID NO: 2276004 - RNA, 19 nt, Homo sapiens
  misc_RNA (1)...(19): siRNA sense strand
ggagauugcucgaagaugc

SEQ ID NO: 2276005 - RNA, 19 nt, Homo sapiens
  misc_RNA (1)...(19): siRNA sense strand
uggugauguggcugugaaa

SEQ ID NO: 2276006 - RNA, 19 nt, Homo sapiens
  misc_RNA (1)...(19): siRNA sense strand
agauaauggcaccuggaca

SEQ ID NO: 2276007 - RNA, 19 nt, Homo sapiens
  misc_RNA (1)...(19): siRNA sense strand
acauggagaucgugggcac

SEQ ID NO: 2276008 - RNA, 19 nt, Homo sapiens
  misc_RNA (1)...(19): siRNA sense strand
cgguggagcugguaggcau

SEQ ID NO: 2276009 - RNA, 19 nt, Homo sapiens
  misc_RNA (1)...(19): siRNA sense strand
gggcuuguauauugggaga

SEQ ID NO: 2276010 - RNA, 19 nt, Homo sapiens
  misc_RNA (1)...(19): siRNA sense strand
gagauauaccagacgguca

SEQ ID NO: 2276011 - RNA, 19 nt, Homo sapiens
  misc_RNA (1)...(19): siRNA sense strand
uacaagagauuauuggcaa

SEQ ID NO: 2276012 - RNA, 19 nt, Homo sapiens
  misc_RNA (1)...(19): siRNA sense strand
caauaaagauaauggcacc

SEQ ID NO: 2276013 - RNA, 19 nt, Homo sapiens
  misc_RNA (1)...(19): siRNA sense strand
gugauguggcugugaaaau

SEQ ID NO: 2276014 - RNA, 19 nt, Homo sapiens
  misc_RNA (1)...(19): siRNA sense strand
cggucuugguucagggaag

SEQ ID NO: 2276015 - RNA, 19 nt, Homo sapiens
  misc_RNA (1)...(19): siRNA sense strand
cccugaaguacuugaugaa

SEQ ID NO: 2276016 - RNA, 19 nt, Homo sapiens
  misc_RNA (1)...(19): siRNA sense strand
agauauaccagacggucau

SEQ ID NO: 2276017 - RNA, 19 nt, Homo sapiens
  misc_RNA (1)...(19): siRNA sense strand
ggagauugcucgaagaugc

SEQ ID NO: 2276018 - RNA, 19 nt, Homo sapiens
  misc_RNA (1)...(19): siRNA sense strand
uggugauguggcugugaaa

SEQ ID NO: 2276019 - RNA, 19 nt, Homo sapiens
  misc_RNA (1)...(19): siRNA sense strand
agauaauggcaccuggaca

SEQ ID NO: 2276020 - RNA, 19 nt, Homo sapiens
  misc_RNA (1)...(19): siRNA sense strand
acauggagaucgugggcac

SEQ ID NO: 2276021 - RNA, 19 nt, Homo sapiens
  misc_RNA (1)...(19): siRNA sense strand
cgguggagcugguaggcau

SEQ ID NO: 2276022 - RNA, 19 nt, Homo sapiens
  misc_RNA (1)...(19): siRNA sense strand
gggcuuguauauugggaga

SEQ ID NO: 2276023 - RNA, 19 nt, Homo sapiens
  misc_RNA (1)...(19): siRNA sense strand
gagauauaccagacgguca

SEQ ID NO: 2276024 - RNA, 19 nt, Homo sapiens
  misc_RNA (1)...(19): siRNA sense strand
uacaagagauuauuggcaa

SEQ ID NO: 2276025 - RNA, 19 nt, Homo sapiens
  misc_RNA (1)...(19): siRNA sense strand
caauaaagauaauggcacc

SEQ ID NO: 2276026 - RNA, 19 nt, Homo sapiens
  misc_RNA (1)...(19): siRNA sense strand
gugauguggcugugaaaau

SEQ ID NO: 2276027 - RNA, 19 nt, Homo sapiens
  misc_RNA (1)...(19): siRNA sense strand
cggucuugguucagggaag

SEQ ID NO: 2276028 - RNA, 19 nt, Homo sapiens
  misc_RNA (1)...(19): siRNA sense strand
cccugaaguacuugaugaa

SEQ ID NO: 2276029 - RNA, 19 nt, Homo sapiens
  misc_RNA (1)...(19): siRNA sense strand
agauauaccagacggucau

SEQ ID NO: 2276030 - RNA, 19 nt, Homo sapiens
  misc_RNA (1)...(19): siRNA sense strand
ggagauugcucgaagaugc

SEQ ID NO: 2276031 - RNA, 19 nt, Homo sapiens
  misc_RNA (1)...(19): siRNA sense strand
uggugauguggcugugaaa

SEQ ID NO: 2276032 - RNA, 19 nt, Homo sapiens
  misc_RNA (1)...(19): siRNA sense strand
agauaauggcaccuggaca

SEQ ID NO: 2276033 - RNA, 19 nt, Homo sapiens
  misc_RNA (1)...(19): siRNA sense strand
acauggagaucgugggcac

SEQ ID NO: 2276034 - RNA, 19 nt, Homo sapiens
  misc_RNA (1)...(19): siRNA sense strand
guaguaaagaagagaaaca

SEQ ID NO: 2276035 - RNA, 19 nt, Homo sapiens
  misc_RNA (1)...(19): siRNA sense strand
aagacaaguccgagagaga

SEQ ID NO: 2276036 - RNA, 19 nt, Homo sapiens
  misc_RNA (1)...(19): siRNA sense strand
cuaagaagcuuguggccuu

SEQ ID NO: 2276037 - RNA, 19 nt, Homo sapiens
  misc_RNA (1)...(19): siRNA sense strand
ugaagaaagacgagagcca

SEQ ID NO: 2276038 - RNA, 19 nt, Homo sapiens
  misc_RNA (1)...(19): siRNA sense strand
gcuccaacaaggaagacaa

SEQ ID NO: 2276039 - RNA, 19 nt, Homo sapiens
  misc_RNA (1)...(19): siRNA sense strand
ugacaaacuaugugaccuu

SEQ ID NO: 2276040 - RNA, 19 nt, Homo sapiens
  misc_RNA (1)...(19): siRNA sense strand
cgcuggaggugaagaugaa

SEQ ID NO: 2276041 - RNA, 19 nt, Homo sapiens
  misc_RNA (1)...(19): siRNA sense strand
accuagaagagaaggguau

SEQ ID NO: 2276042 - RNA, 19 nt, Homo sapiens
  misc_RNA (1)...(19): siRNA sense strand
ccgcccaaguaguaaagaa

SEQ ID NO: 2276043 - RNA, 19 nt, Homo sapiens
  misc_RNA (1)...(19): siRNA sense strand
agagagaugaggagcugua

SEQ ID NO: 2276044 - RNA, 19 nt, Homo sapiens
  misc_RNA (1)...(19): siRNA sense strand
gcaacauucaggugguaga

SEQ ID NO: 2276045 - RNA, 19 nt, Homo sapiens
  misc_RNA (1)...(19): siRNA sense strand
agaugaaccuggaagagca

SEQ ID NO: 2276046 - RNA, 19 nt, Homo sapiens
  misc_RNA (1)...(19): siRNA sense strand
aagaaagacgagagccaga

SEQ ID NO: 2276047 - RNA, 19 nt, Homo sapiens
  misc_RNA (1)...(19): siRNA sense strand
cgguggagaaggagaagca

SEQ ID NO: 2276048 - RNA, 19 nt, Homo sapiens
  misc_RNA (1)...(19): siRNA sense strand
ccucugaagaugagcacga

SEQ ID NO: 2276049 - RNA, 19 nt, Homo sapiens
  misc_RNA (1)...(19): siRNA sense strand
ugaagaugaaccuggaaga

SEQ ID NO: 2276050 - RNA, 19 nt, Homo sapiens
  misc_RNA (1)...(19): siRNA sense strand
cauucaggugguagaagaa

SEQ ID NO: 2276051 - RNA, 19 nt, Homo sapiens
  misc_RNA (1)...(19): siRNA sense strand
aggaggagcucaaggggau

SEQ ID NO: 2276052 - RNA, 19 nt, Homo sapiens
  misc_RNA (1)...(19): siRNA sense strand
acgagaugcugaaagacau

SEQ ID NO: 2276053 - RNA, 19 nt, Homo sapiens
  misc_RNA (1)...(19): siRNA sense strand
guggagaaggagaagcaga

SEQ ID NO: 2276054 - RNA, 19 nt, Homo sapiens
  misc_RNA (1)...(19): siRNA sense strand
cugaaagacaugaagaaag

SEQ ID NO: 2276055 - RNA, 19 nt, Homo sapiens
  misc_RNA (1)...(19): siRNA sense strand
ccaagaagagagaugagga

SEQ ID NO: 2276056 - RNA, 19 nt, Homo sapiens
  misc_RNA (1)...(19): siRNA sense strand
ugcugaaagacaugaagaa

SEQ ID NO: 2276057 - RNA, 19 nt, Homo sapiens
  misc_RNA (1)...(19): siRNA sense strand
acucgguggagaaggagaa

SEQ ID NO: 2276058 - RNA, 19 nt, Homo sapiens
  misc_RNA (1)...(19): siRNA sense strand
acuacauggcugaccgcaa

SEQ ID NO: 2276059 - RNA, 19 nt, Homo sapiens
  misc_RNA (1)...(19): siRNA sense strand
gguggaugccucugaagau

SEQ ID NO: 2276060 - RNA, 19 nt, Homo sapiens
  misc_RNA (1)...(19): siRNA sense strand
aggcccugcuugagcgaga

SEQ ID NO: 2276061 - RNA, 19 nt, Homo sapiens
  misc_RNA (1)...(19): siRNA sense strand
agagaugaggagcuguaua

SEQ ID NO: 2276062 - RNA, 19 nt, Homo sapiens
  misc_RNA (1)...(19): siRNA sense strand
augaggagcuguauagcca

SEQ ID NO: 2276063 - RNA, 19 nt, Homo sapiens
  misc_RNA (1)...(19): siRNA sense strand
ugucaacaccaauggcuuu

SEQ ID NO: 2276064 - RNA, 19 nt, Homo sapiens
  misc_RNA (1)...(19): siRNA sense strand
uagaagaaacccaagucau

SEQ ID NO: 2276065 - RNA, 19 nt, Homo sapiens
  misc_RNA (1)...(19): siRNA sense strand
ccaucuuugugaaggggaa

SEQ ID NO: 2276066 - RNA, 19 nt, Homo sapiens
  misc_RNA (1)...(19): siRNA sense strand
ggacaaggauccagagcca

SEQ ID NO: 2276067 - RNA, 19 nt, Homo sapiens
  misc_RNA (1)...(19): siRNA sense strand
ggacagugcuccagggaag

SEQ ID NO: 2276068 - RNA, 19 nt, Homo sapiens
  misc_RNA (1)...(19): siRNA sense strand
uggaggaggcggaggauau

SEQ ID NO: 2276069 - RNA, 19 nt, Homo sapiens
  misc_RNA (1)...(19): siRNA sense strand
uggaagaggaagagaaagu

SEQ ID NO: 2276070 - RNA, 19 nt, Homo sapiens
  misc_RNA (1)...(19): siRNA sense strand
ggaagugggcagagaggga

SEQ ID NO: 2276071 - RNA, 19 nt, Homo sapiens
  misc_RNA (1)...(19): siRNA sense strand
ccuuggugcuaguggagaa

SEQ ID NO: 2276072 - RNA, 19 nt, Homo sapiens
  misc_RNA (1)...(19): siRNA sense strand
uguggaagaggaagagaaa

SEQ ID NO: 2276073 - RNA, 19 nt, Homo sapiens
  misc_RNA (1)...(19): siRNA sense strand
gggcgagcuacuauagaaa

SEQ ID NO: 2276074 - RNA, 19 nt, Homo sapiens
  misc_RNA (1)...(19): siRNA sense strand
ccugaaagccacaagguca

SEQ ID NO: 2276075 - RNA, 19 nt, Homo sapiens
  misc_RNA (1)...(19): siRNA sense strand
agggagaagaugagagcca

SEQ ID NO: 2276076 - RNA, 19 nt, Homo sapiens
  misc_RNA (1)...(19): siRNA sense strand
gagaauaacuccucgguuc

SEQ ID NO: 2276077 - RNA, 19 nt, Homo sapiens
  misc_RNA (1)...(19): siRNA sense strand
ggacauugccuguggcugu

SEQ ID NO: 2276078 - RNA, 19 nt, Homo sapiens
  misc_RNA (1)...(19): siRNA sense strand
ccauuagcggagaggacaa

SEQ ID NO: 2276079 - RNA, 19 nt, Homo sapiens
  misc_RNA (1)...(19): siRNA sense strand
uagcaaagaaggagccaca

SEQ ID NO: 2276080 - RNA, 19 nt, Homo sapiens
  misc_RNA (1)...(19): siRNA sense strand
gccugaugcccgagaagaa

SEQ ID NO: 2276081 - RNA, 19 nt, Homo sapiens
  misc_RNA (1)...(19): siRNA sense strand
uggagagaacaaugugaua

SEQ ID NO: 2276082 - RNA, 19 nt, Homo sapiens
  misc_RNA (1)...(19): siRNA sense strand
gcagagcguucuaaggaga

SEQ ID NO: 2276083 - RNA, 19 nt, Homo sapiens
  misc_RNA (1)...(19): siRNA sense strand
ggagaagaugagagccaga

SEQ ID NO: 2276084 - RNA, 19 nt, Homo sapiens
  misc_RNA (1)...(19): siRNA sense strand
caaugugauagaagaagaa

SEQ ID NO: 2276085 - RNA, 19 nt, Homo sapiens
  misc_RNA (1)...(19): siRNA sense strand
gucaguauuuggaggaaaa

SEQ ID NO: 2276086 - RNA, 19 nt, Homo sapiens
  misc_RNA (1)...(19): siRNA sense strand
ccuacguauuuaagaugaa

SEQ ID NO: 2276087 - RNA, 19 nt, Homo sapiens
  misc_RNA (1)...(19): siRNA sense strand
gcgaagggcgacugaggau

SEQ ID NO: 2276088 - RNA, 19 nt, Homo sapiens
  misc_RNA (1)...(19): siRNA sense strand
cugaguacaagcugagcaa

SEQ ID NO: 2276089 - RNA, 19 nt, Homo sapiens
  misc_RNA (1)...(19): siRNA sense strand
ugucaguauuuggaggaaa

SEQ ID NO: 2276090 - RNA, 19 nt, Homo sapiens
  misc_RNA (1)...(19): siRNA sense strand
cgagacaucuacagggcga

SEQ ID NO: 2276091 - RNA, 19 nt, Homo sapiens
  misc_RNA (1)...(19): siRNA sense strand
agaagaaggcgucggaagu

SEQ ID NO: 2276092 - RNA, 19 nt, Homo sapiens
  misc_RNA (1)...(19): siRNA sense strand
uggugcuaguggagaacaa

SEQ ID NO: 2276093 - RNA, 19 nt, Homo sapiens
  misc_RNA (1)...(19): siRNA sense strand
gagcaaggcaggauggucu

SEQ ID NO: 2276094 - RNA, 19 nt, Homo sapiens
  misc_RNA (1)...(19): siRNA sense strand
ggacaagauccugcagaau

SEQ ID NO: 2276095 - RNA, 19 nt, Homo sapiens
  misc_RNA (1)...(19): siRNA sense strand
gagacauugcugccagaaa

SEQ ID NO: 2276096 - RNA, 19 nt, Homo sapiens
  misc_RNA (1)...(19): siRNA sense strand
cgaggauaccauucugaaa

SEQ ID NO: 2276097 - RNA, 19 nt, Homo sapiens
  misc_RNA (1)...(19): siRNA sense strand
ccuacagcaucucgggcua

SEQ ID NO: 2276098 - RNA, 19 nt, Homo sapiens
  misc_RNA (1)...(19): siRNA sense strand
agaagaaauccgugugaac

SEQ ID NO: 2276099 - RNA, 19 nt, Homo sapiens
  misc_RNA (1)...(19): siRNA sense strand
aggcaaaacgggaggagga

SEQ ID NO: 2276100 - RNA, 19 nt, Homo sapiens
  misc_RNA (1)...(19): siRNA sense strand
gagaagaaggcgucggaag

SEQ ID NO: 2276101 - RNA, 19 nt, Homo sapiens
  misc_RNA (1)...(19): siRNA sense strand
ccaucagccuggacugcua

SEQ ID NO: 2276102 - RNA, 19 nt, Homo sapiens
  misc_RNA (1)...(19): siRNA sense strand
ugguggagguggcuggaau

SEQ ID NO: 2276103 - RNA, 19 nt, Homo sapiens
  misc_RNA (1)...(19): siRNA sense strand
ggaaugucaauuacggcua

SEQ ID NO: 2276104 - RNA, 19 nt, Homo sapiens
  misc_RNA (1)...(19): siRNA sense strand
cugaaagccacaaggucau

SEQ ID NO: 2276105 - RNA, 19 nt, Homo sapiens
  misc_RNA (1)...(19): siRNA sense strand
acaacgaggcugcaagaga

SEQ ID NO: 2276106 - RNA, 19 nt, Homo sapiens
  misc_RNA (1)...(19): siRNA sense strand
agggaagcaugguuggaca

SEQ ID NO: 2276107 - RNA, 19 nt, Homo sapiens
  misc_RNA (1)...(19): siRNA sense strand
gaggauauauaggcggcaa

SEQ ID NO: 2276108 - RNA, 19 nt, Homo sapiens
  misc_RNA (1)...(19): siRNA sense strand
gagccagaugugccggaaa

SEQ ID NO: 2276109 - RNA, 19 nt, Homo sapiens
  misc_RNA (1)...(19): siRNA sense strand
gcuacagugaccagugcua

SEQ ID NO: 2276110 - RNA, 19 nt, Homo sapiens
  misc_RNA (1)...(19): siRNA sense strand
cguggagucuugaggggaa

SEQ ID NO: 2276111 - RNA, 19 nt, Homo sapiens
  misc_RNA (1)...(19): siRNA sense strand
cuauagaaagggaggcugu

SEQ ID NO: 2276112 - RNA, 19 nt, Homo sapiens
  misc_RNA (1)...(19): siRNA sense strand
gggccaagacagacacguu

SEQ ID NO: 2276113 - RNA, 19 nt, Homo sapiens
  misc_RNA (1)...(19): siRNA sense strand
cagcaaaagcaaccaggaa

SEQ ID NO: 2276114 - RNA, 19 nt, Homo sapiens
  misc_RNA (1)...(19): siRNA sense strand
gcgggaaaggcgggaagaa

SEQ ID NO: 2276115 - RNA, 19 nt, Homo sapiens
  misc_RNA (1)...(19): siRNA sense strand
guauuuaagaugaaggaug

SEQ ID NO: 2276116 - RNA, 19 nt, Homo sapiens
  misc_RNA (1)...(19): siRNA sense strand
cgucggaagugggcagaga

SEQ ID NO: 2276117 - RNA, 19 nt, Homo sapiens
  misc_RNA (1)...(19): siRNA sense strand
ccaucaugaccgacuacaa

SEQ ID NO: 2276118 - RNA, 19 nt, Homo sapiens
  misc_RNA (1)...(19): siRNA sense strand
gcucugaacaggacgaacu

SEQ ID NO: 2276119 - RNA, 19 nt, Homo sapiens
  misc_RNA (1)...(19): siRNA sense strand
cuccugguuuacagagaaa

SEQ ID NO: 2276120 - RNA, 19 nt, Homo sapiens
  misc_RNA (1)...(19): siRNA sense strand
ggauaaugaaagacuccuu

SEQ ID NO: 2276121 - RNA, 19 nt, Homo sapiens
  misc_RNA (1)...(19): siRNA sense strand
ucugaaagugcuacaguga

SEQ ID NO: 2276122 - RNA, 19 nt, Homo sapiens
  misc_RNA (1)...(19): siRNA sense strand
acccaaacaaggagcugaa

SEQ ID NO: 2276123 - RNA, 19 nt, Homo sapiens
  misc_RNA (1)...(19): siRNA sense strand
gaaaauucaccaagacaga

SEQ ID NO: 2276124 - RNA, 19 nt, Homo sapiens
  misc_RNA (1)...(19): siRNA sense strand
ugugauagaagaagaaauc

SEQ ID NO: 2276125 - RNA, 19 nt, Homo sapiens
  misc_RNA (1)...(19): siRNA sense strand
uggaagaguggccaagauu

SEQ ID NO: 2276126 - RNA, 19 nt, Homo sapiens
  misc_RNA (1)...(19): siRNA sense strand
gcuaccagcaacagggcuu

SEQ ID NO: 2276127 - RNA, 19 nt, Homo sapiens
  misc_RNA (1)...(19): siRNA sense strand
gcaucuucaaccuggagaa

SEQ ID NO: 2276128 - RNA, 19 nt, Homo sapiens
  misc_RNA (1)...(19): siRNA sense strand
uuguggaagaggaagagaa

SEQ ID NO: 2276129 - RNA, 19 nt, Homo sapiens
  misc_RNA (1)...(19): siRNA sense strand
uaacguugcaacugggaga

SEQ ID NO: 2276130 - RNA, 19 nt, Homo sapiens
  misc_RNA (1)...(19): siRNA sense strand
acaagaucgcagagaacaa

SEQ ID NO: 2276131 - RNA, 19 nt, Homo sapiens
  misc_RNA (1)...(19): siRNA sense strand
ccggcagggaugaggcaaa

SEQ ID NO: 2276132 - RNA, 19 nt, Homo sapiens
  misc_RNA (1)...(19): siRNA sense strand
aaacaagaucgcagagaac

SEQ ID NO: 2276133 - RNA, 19 nt, Homo sapiens
  misc_RNA (1)...(19): siRNA sense strand
gagucaaccacgagccaga

SEQ ID NO: 2276134 - RNA, 19 nt, Homo sapiens
  misc_RNA (1)...(19): siRNA sense strand
guuucauguucaagguaca

SEQ ID NO: 2276135 - RNA, 19 nt, Homo sapiens
  misc_RNA (1)...(19): siRNA sense strand
uccacaaggagaugagcaa

SEQ ID NO: 2276136 - RNA, 19 nt, Homo sapiens
  misc_RNA (1)...(19): siRNA sense strand
aagcaacacgggagcaaca

SEQ ID NO: 2276137 - RNA, 19 nt, Homo sapiens
  misc_RNA (1)...(19): siRNA sense strand
aaaagaaggaugaagccaa

SEQ ID NO: 2276138 - RNA, 19 nt, Homo sapiens
  misc_RNA (1)...(19): siRNA sense strand
ccgaggaggagcucaucaa

SEQ ID NO: 2276139 - RNA, 19 nt, Homo sapiens
  misc_RNA (1)...(19): siRNA sense strand
ccgucaaagccaugcacga

SEQ ID NO: 2276140 - RNA, 19 nt, Homo sapiens
  misc_RNA (1)...(19): siRNA sense strand
uguucaagguacaggccca

SEQ ID NO: 2276141 - RNA, 19 nt, Homo sapiens
  misc_RNA (1)...(19): siRNA sense strand
agaagcaacacgggagcaa

SEQ ID NO: 2276142 - RNA, 19 nt, Homo sapiens
  misc_RNA (1)...(19): siRNA sense strand
gugauguggugcuggugau

SEQ ID NO: 2276143 - RNA, 19 nt, Homo sapiens
  misc_RNA (1)...(19): siRNA sense strand
acaagaucgcagagaacaa

SEQ ID NO: 2276144 - RNA, 19 nt, Homo sapiens
  misc_RNA (1)...(19): siRNA sense strand
ccggcagggaugaggcaaa

SEQ ID NO: 2276145 - RNA, 19 nt, Homo sapiens
  misc_RNA (1)...(19): siRNA sense strand
aaacaagaucgcagagaac

SEQ ID NO: 2276146 - RNA, 19 nt, Homo sapiens
  misc_RNA (1)...(19): siRNA sense strand
gagucaaccacgagccaga

SEQ ID NO: 2276147 - RNA, 19 nt, Homo sapiens
  misc_RNA (1)...(19): siRNA sense strand
guuucauguucaagguaca

SEQ ID NO: 2276148 - RNA, 19 nt, Homo sapiens
  misc_RNA (1)...(19): siRNA sense strand
uccacaaggagaugagcaa

SEQ ID NO: 2276149 - RNA, 19 nt, Homo sapiens
  misc_RNA (1)...(19): siRNA sense strand
aagcaacacgggagcaaca

SEQ ID NO: 2276150 - RNA, 19 nt, Homo sapiens
  misc_RNA (1)...(19): siRNA sense strand
aaaagaaggaugaagccaa

SEQ ID NO: 2276151 - RNA, 19 nt, Homo sapiens
  misc_RNA (1)...(19): siRNA sense strand
ccgaggaggagcucaucaa

SEQ ID NO: 2276152 - RNA, 19 nt, Homo sapiens
  misc_RNA (1)...(19): siRNA sense strand
ccgucaaagccaugcacga

SEQ ID NO: 2276153 - RNA, 19 nt, Homo sapiens
  misc_RNA (1)...(19): siRNA sense strand
uguucaagguacaggccca

SEQ ID NO: 2276154 - RNA, 19 nt, Homo sapiens
  misc_RNA (1)...(19): siRNA sense strand
agaagcaacacgggagcaa

SEQ ID NO: 2276155 - RNA, 19 nt, Homo sapiens
  misc_RNA (1)...(19): siRNA sense strand
gugauguggugcuggugau

SEQ ID NO: 2276156 - RNA, 19 nt, Homo sapiens
  misc_RNA (1)...(19): siRNA sense strand
acaagaucgcagagaacaa

SEQ ID NO: 2276157 - RNA, 19 nt, Homo sapiens
  misc_RNA (1)...(19): siRNA sense strand
ccggcagggaugaggcaaa

SEQ ID NO: 2276158 - RNA, 19 nt, Homo sapiens
  misc_RNA (1)...(19): siRNA sense strand
aaacaagaucgcagagaac

SEQ ID NO: 2276159 - RNA, 19 nt, Homo sapiens
  misc_RNA (1)...(19): siRNA sense strand
gagucaaccacgagccaga

SEQ ID NO: 2276160 - RNA, 19 nt, Homo sapiens
  misc_RNA (1)...(19): siRNA sense strand
guuucauguucaagguaca

SEQ ID NO: 2276161 - RNA, 19 nt, Homo sapiens
  misc_RNA (1)...(19): siRNA sense strand
uccacaaggagaugagcaa

SEQ ID NO: 2276162 - RNA, 19 nt, Homo sapiens
  misc_RNA (1)...(19): siRNA sense strand
aagcaacacgggagcaaca

SEQ ID NO: 2276163 - RNA, 19 nt, Homo sapiens
  misc_RNA (1)...(19): siRNA sense strand
aaaagaaggaugaagccaa

SEQ ID NO: 2276164 - RNA, 19 nt, Homo sapiens
  misc_RNA (1)...(19): siRNA sense strand
ccgaggaggagcucaucaa

SEQ ID NO: 2276165 - RNA, 19 nt, Homo sapiens
  misc_RNA (1)...(19): siRNA sense strand
ccgucaaagccaugcacga

SEQ ID NO: 2276166 - RNA, 19 nt, Homo sapiens
  misc_RNA (1)...(19): siRNA sense strand
uguucaagguacaggccca

SEQ ID NO: 2276167 - RNA, 19 nt, Homo sapiens
  misc_RNA (1)...(19): siRNA sense strand
agaagcaacacgggagcaa

SEQ ID NO: 2276168 - RNA, 19 nt, Homo sapiens
  misc_RNA (1)...(19): siRNA sense strand
gugauguggugcuggugau

SEQ ID NO: 2276169 - RNA, 19 nt, Homo sapiens
  misc_RNA (1)...(19): siRNA sense strand
acaagaucgcagagaacaa

SEQ ID NO: 2276170 - RNA, 19 nt, Homo sapiens
  misc_RNA (1)...(19): siRNA sense strand
ccggcagggaugaggcaaa

SEQ ID NO: 2276171 - RNA, 19 nt, Homo sapiens
  misc_RNA (1)...(19): siRNA sense strand
aaacaagaucgcagagaac

SEQ ID NO: 2276172 - RNA, 19 nt, Homo sapiens
  misc_RNA (1)...(19): siRNA sense strand
gagucaaccacgagccaga

SEQ ID NO: 2276173 - RNA, 19 nt, Homo sapiens
  misc_RNA (1)...(19): siRNA sense strand
guuucauguucaagguaca

SEQ ID NO: 2276174 - RNA, 19 nt, Homo sapiens
  misc_RNA (1)...(19): siRNA sense strand
uccacaaggagaugagcaa

SEQ ID NO: 2276175 - RNA, 19 nt, Homo sapiens
  misc_RNA (1)...(19): siRNA sense strand
aagcaacacgggagcaaca

SEQ ID NO: 2276176 - RNA, 19 nt, Homo sapiens
  misc_RNA (1)...(19): siRNA sense strand
aaaagaaggaugaagccaa

SEQ ID NO: 2276177 - RNA, 19 nt, Homo sapiens
  misc_RNA (1)...(19): siRNA sense strand
ccgaggaggagcucaucaa

SEQ ID NO: 2276178 - RNA, 19 nt, Homo sapiens
  misc_RNA (1)...(19): siRNA sense strand
ccgucaaagccaugcacga

SEQ ID NO: 2276179 - RNA, 19 nt, Homo sapiens
  misc_RNA (1)...(19): siRNA sense strand
uguucaagguacaggccca

SEQ ID NO: 2276180 - RNA, 19 nt, Homo sapiens
  misc_RNA (1)...(19): siRNA sense strand
agaagcaacacgggagcaa

SEQ ID NO: 2276181 - RNA, 19 nt, Homo sapiens
  misc_RNA (1)...(19): siRNA sense strand
gugauguggugcuggugau

SEQ ID NO: 2276182 - RNA, 19 nt, Homo sapiens
  misc_RNA (1)...(19): siRNA sense strand
acaagaucgcagagaacaa

SEQ ID NO: 2276183 - RNA, 19 nt, Homo sapiens
  misc_RNA (1)...(19): siRNA sense strand
ccggcagggaugaggcaaa

SEQ ID NO: 2276184 - RNA, 19 nt, Homo sapiens
  misc_RNA (1)...(19): siRNA sense strand
aaacaagaucgcagagaac

SEQ ID NO: 2276185 - RNA, 19 nt, Homo sapiens
  misc_RNA (1)...(19): siRNA sense strand
gagucaaccacgagccaga

SEQ ID NO: 2276186 - RNA, 19 nt, Homo sapiens
  misc_RNA (1)...(19): siRNA sense strand
guuucauguucaagguaca

SEQ ID NO: 2276187 - RNA, 19 nt, Homo sapiens
  misc_RNA (1)...(19): siRNA sense strand
uccacaaggagaugagcaa

SEQ ID NO: 2276188 - RNA, 19 nt, Homo sapiens
  misc_RNA (1)...(19): siRNA sense strand
aagcaacacgggagcaaca

SEQ ID NO: 2276189 - RNA, 19 nt, Homo sapiens
  misc_RNA (1)...(19): siRNA sense strand
aaaagaaggaugaagccaa

SEQ ID NO: 2276190 - RNA, 19 nt, Homo sapiens
  misc_RNA (1)...(19): siRNA sense strand
ccgaggaggagcucaucaa

SEQ ID NO: 2276191 - RNA, 19 nt, Homo sapiens
  misc_RNA (1)...(19): siRNA sense strand
ccgucaaagccaugcacga

SEQ ID NO: 2276192 - RNA, 19 nt, Homo sapiens
  misc_RNA (1)...(19): siRNA sense strand
uguucaagguacaggccca

SEQ ID NO: 2276193 - RNA, 19 nt, Homo sapiens
  misc_RNA (1)...(19): siRNA sense strand
agaagcaacacgggagcaa

SEQ ID NO: 2276194 - RNA, 19 nt, Homo sapiens
  misc_RNA (1)...(19): siRNA sense strand
gugauguggugcuggugau

SEQ ID NO: 2276195 - RNA, 19 nt, Homo sapiens
  misc_RNA (1)...(19): siRNA sense strand
acaagaucgcagagaacaa

SEQ ID NO: 2276196 - RNA, 19 nt, Homo sapiens
  misc_RNA (1)...(19): siRNA sense strand
ccggcagggaugaggcaaa

SEQ ID NO: 2276197 - RNA, 19 nt, Homo sapiens
  misc_RNA (1)...(19): siRNA sense strand
aaacaagaucgcagagaac

SEQ ID NO: 2276198 - RNA, 19 nt, Homo sapiens
  misc_RNA (1)...(19): siRNA sense strand
gagucaaccacgagccaga

SEQ ID NO: 2276199 - RNA, 19 nt, Homo sapiens
  misc_RNA (1)...(19): siRNA sense strand
guuucauguucaagguaca

SEQ ID NO: 2276200 - RNA, 19 nt, Homo sapiens
  misc_RNA (1)...(19): siRNA sense strand
uccacaaggagaugagcaa

SEQ ID NO: 2276201 - RNA, 19 nt, Homo sapiens
  misc_RNA (1)...(19): siRNA sense strand
aagcaacacgggagcaaca

SEQ ID NO: 2276202 - RNA, 19 nt, Homo sapiens
  misc_RNA (1)...(19): siRNA sense strand
aaaagaaggaugaagccaa

SEQ ID NO: 2276203 - RNA, 19 nt, Homo sapiens
  misc_RNA (1)...(19): siRNA sense strand
ccgaggaggagcucaucaa

SEQ ID NO: 2276204 - RNA, 19 nt, Homo sapiens
  misc_RNA (1)...(19): siRNA sense strand
ccgucaaagccaugcacga

SEQ ID NO: 2276205 - RNA, 19 nt, Homo sapiens
  misc_RNA (1)...(19): siRNA sense strand
uguucaagguacaggccca

SEQ ID NO: 2276206 - RNA, 19 nt, Homo sapiens
  misc_RNA (1)...(19): siRNA sense strand
agaagcaacacgggagcaa

SEQ ID NO: 2276207 - RNA, 19 nt, Homo sapiens
  misc_RNA (1)...(19): siRNA sense strand
gugauguggugcuggugau

SEQ ID NO: 2276208 - RNA, 19 nt, Homo sapiens
  misc_RNA (1)...(19): siRNA sense strand
acaagaucgcagagaacaa

SEQ ID NO: 2276209 - RNA, 19 nt, Homo sapiens
  misc_RNA (1)...(19): siRNA sense strand
ccggcagggaugaggcaaa

SEQ ID NO: 2276210 - RNA, 19 nt, Homo sapiens
  misc_RNA (1)...(19): siRNA sense strand
aaacaagaucgcagagaac

SEQ ID NO: 2276211 - RNA, 19 nt, Homo sapiens
  misc_RNA (1)...(19): siRNA sense strand
gagucaaccacgagccaga

SEQ ID NO: 2276212 - RNA, 19 nt, Homo sapiens
  misc_RNA (1)...(19): siRNA sense strand
guuucauguucaagguaca

SEQ ID NO: 2276213 - RNA, 19 nt, Homo sapiens
  misc_RNA (1)...(19): siRNA sense strand
uccacaaggagaugagcaa

SEQ ID NO: 2276214 - RNA, 19 nt, Homo sapiens
  misc_RNA (1)...(19): siRNA sense strand
aagcaacacgggagcaaca

SEQ ID NO: 2276215 - RNA, 19 nt, Homo sapiens
  misc_RNA (1)...(19): siRNA sense strand
aaaagaaggaugaagccaa

SEQ ID NO: 2276216 - RNA, 19 nt, Homo sapiens
  misc_RNA (1)...(19): siRNA sense strand
ccgaggaggagcucaucaa

SEQ ID NO: 2276217 - RNA, 19 nt, Homo sapiens
  misc_RNA (1)...(19): siRNA sense strand
ccgucaaagccaugcacga

SEQ ID NO: 2276218 - RNA, 19 nt, Homo sapiens
  misc_RNA (1)...(19): siRNA sense strand
uguucaagguacaggccca

SEQ ID NO: 2276219 - RNA, 19 nt, Homo sapiens
  misc_RNA (1)...(19): siRNA sense strand
agaagcaacacgggagcaa

SEQ ID NO: 2276220 - RNA, 19 nt, Homo sapiens
  misc_RNA (1)...(19): siRNA sense strand
gugauguggugcuggugau

SEQ ID NO: 2276221 - RNA, 19 nt, Homo sapiens
  misc_RNA (1)...(19): siRNA sense strand
acaagaucgcagagaacaa

SEQ ID NO: 2276222 - RNA, 19 nt, Homo sapiens
  misc_RNA (1)...(19): siRNA sense strand
ccggcagggaugaggcaaa

SEQ ID NO: 2276223 - RNA, 19 nt, Homo sapiens
  misc_RNA (1)...(19): siRNA sense strand
aaacaagaucgcagagaac

SEQ ID NO: 2276224 - RNA, 19 nt, Homo sapiens
  misc_RNA (1)...(19): siRNA sense strand
gagucaaccacgagccaga

SEQ ID NO: 2276225 - RNA, 19 nt, Homo sapiens
  misc_RNA (1)...(19): siRNA sense strand
guuucauguucaagguaca

SEQ ID NO: 2276226 - RNA, 19 nt, Homo sapiens
  misc_RNA (1)...(19): siRNA sense strand
uccacaaggagaugagcaa

SEQ ID NO: 2276227 - RNA, 19 nt, Homo sapiens
  misc_RNA (1)...(19): siRNA sense strand
aagcaacacgggagcaaca

SEQ ID NO: 2276228 - RNA, 19 nt, Homo sapiens
  misc_RNA (1)...(19): siRNA sense strand
aaaagaaggaugaagccaa

SEQ ID NO: 2276229 - RNA, 19 nt, Homo sapiens
  misc_RNA (1)...(19): siRNA sense strand
ccgaggaggagcucaucaa

SEQ ID NO: 2276230 - RNA, 19 nt, Homo sapiens
  misc_RNA (1)...(19): siRNA sense strand
ccgucaaagccaugcacga

SEQ ID NO: 2276231 - RNA, 19 nt, Homo sapiens
  misc_RNA (1)...(19): siRNA sense strand
uguucaagguacaggccca

SEQ ID NO: 2276232 - RNA, 19 nt, Homo sapiens
  misc_RNA (1)...(19): siRNA sense strand
agaagcaacacgggagcaa

SEQ ID NO: 2276233 - RNA, 19 nt, Homo sapiens
  misc_RNA (1)...(19): siRNA sense strand
gugauguggugcuggugau

SEQ ID NO: 2276234 - RNA, 19 nt, Homo sapiens
  misc_RNA (1)...(19): siRNA sense strand
acaagaucgcagagaacaa

SEQ ID NO: 2276235 - RNA, 19 nt, Homo sapiens
  misc_RNA (1)...(19): siRNA sense strand
ccggcagggaugaggcaaa

SEQ ID NO: 2276236 - RNA, 19 nt, Homo sapiens
  misc_RNA (1)...(19): siRNA sense strand
aaacaagaucgcagagaac

SEQ ID NO: 2276237 - RNA, 19 nt, Homo sapiens
  misc_RNA (1)...(19): siRNA sense strand
gagucaaccacgagccaga

SEQ ID NO: 2276238 - RNA, 19 nt, Homo sapiens
  misc_RNA (1)...(19): siRNA sense strand
guuucauguucaagguaca

SEQ ID NO: 2276239 - RNA, 19 nt, Homo sapiens
  misc_RNA (1)...(19): siRNA sense strand
uccacaaggagaugagcaa

SEQ ID NO: 2276240 - RNA, 19 nt, Homo sapiens
  misc_RNA (1)...(19): siRNA sense strand
aagcaacacgggagcaaca

SEQ ID NO: 2276241 - RNA, 19 nt, Homo sapiens
  misc_RNA (1)...(19): siRNA sense strand
aaaagaaggaugaagccaa

SEQ ID NO: 2276242 - RNA, 19 nt, Homo sapiens
  misc_RNA (1)...(19): siRNA sense strand
ccgaggaggagcucaucaa

SEQ ID NO: 2276243 - RNA, 19 nt, Homo sapiens
  misc_RNA (1)...(19): siRNA sense strand
ccgucaaagccaugcacga

SEQ ID NO: 2276244 - RNA, 19 nt, Homo sapiens
  misc_RNA (1)...(19): siRNA sense strand
uguucaagguacaggccca

SEQ ID NO: 2276245 - RNA, 19 nt, Homo sapiens
  misc_RNA (1)...(19): siRNA sense strand
agaagcaacacgggagcaa

SEQ ID NO: 2276246 - RNA, 19 nt, Homo sapiens
  misc_RNA (1)...(19): siRNA sense strand
gugauguggugcuggugau

SEQ ID NO: 2276247 - RNA, 19 nt, Homo sapiens
  misc_RNA (1)...(19): siRNA sense strand
acaagaucgcagagaacaa

SEQ ID NO: 2276248 - RNA, 19 nt, Homo sapiens
  misc_RNA (1)...(19): siRNA sense strand
ccggcagggaugaggcaaa

SEQ ID NO: 2276249 - RNA, 19 nt, Homo sapiens
  misc_RNA (1)...(19): siRNA sense strand
aaacaagaucgcagagaac

SEQ ID NO: 2276250 - RNA, 19 nt, Homo sapiens
  misc_RNA (1)...(19): siRNA sense strand
gagucaaccacgagccaga

SEQ ID NO: 2276251 - RNA, 19 nt, Homo sapiens
  misc_RNA (1)...(19): siRNA sense strand
guuucauguucaagguaca

SEQ ID NO: 2276252 - RNA, 19 nt, Homo sapiens
  misc_RNA (1)...(19): siRNA sense strand
uccacaaggagaugagcaa

SEQ ID NO: 2276253 - RNA, 19 nt, Homo sapiens
  misc_RNA (1)...(19): siRNA sense strand
aagcaacacgggagcaaca

SEQ ID NO: 2276254 - RNA, 19 nt, Homo sapiens
  misc_RNA (1)...(19): siRNA sense strand
aaaagaaggaugaagccaa

SEQ ID NO: 2276255 - RNA, 19 nt, Homo sapiens
  misc_RNA (1)...(19): siRNA sense strand
ccgaggaggagcucaucaa

SEQ ID NO: 2276256 - RNA, 19 nt, Homo sapiens
  misc_RNA (1)...(19): siRNA sense strand
ccgucaaagccaugcacga

SEQ ID NO: 2276257 - RNA, 19 nt, Homo sapiens
  misc_RNA (1)...(19): siRNA sense strand
uguucaagguacaggccca

SEQ ID NO: 2276258 - RNA, 19 nt, Homo sapiens
  misc_RNA (1)...(19): siRNA sense strand
agaagcaacacgggagcaa

SEQ ID NO: 2276259 - RNA, 19 nt, Homo sapiens
  misc_RNA (1)...(19): siRNA sense strand
gugauguggugcuggugau

SEQ ID NO: 2276260 - RNA, 19 nt, Homo sapiens
  misc_RNA (1)...(19): siRNA sense strand
ggacaaagaucuagcuggu

SEQ ID NO: 2276261 - RNA, 19 nt, Homo sapiens
  misc_RNA (1)...(19): siRNA sense strand
aagcaaaaguacaaggcaa

SEQ ID NO: 2276262 - RNA, 19 nt, Homo sapiens
  misc_RNA (1)...(19): siRNA sense strand
ucaaugaaguccuggccaa

SEQ ID NO: 2276263 - RNA, 19 nt, Homo sapiens
  misc_RNA (1)...(19): siRNA sense strand
ucaaauucucauuggcaaa

SEQ ID NO: 2276264 - RNA, 19 nt, Homo sapiens
  misc_RNA (1)...(19): siRNA sense strand
acgaggaccaauaaggaaa

SEQ ID NO: 2276265 - RNA, 19 nt, Homo sapiens
  misc_RNA (1)...(19): siRNA sense strand
aaggagaugacguggacaa

SEQ ID NO: 2276266 - RNA, 19 nt, Homo sapiens
  misc_RNA (1)...(19): siRNA sense strand
aaucagaugucaaagguga

SEQ ID NO: 2276267 - RNA, 19 nt, Homo sapiens
  misc_RNA (1)...(19): siRNA sense strand
acaaagaucuagcugguca

SEQ ID NO: 2276268 - RNA, 19 nt, Homo sapiens
  misc_RNA (1)...(19): siRNA sense strand
aagagugagcugaguggaa

SEQ ID NO: 2276269 - RNA, 19 nt, Homo sapiens
  misc_RNA (1)...(19): siRNA sense strand
gcgacuugcagaaggccua

SEQ ID NO: 2276270 - RNA, 19 nt, Homo sapiens
  misc_RNA (1)...(19): siRNA sense strand
gcaaagacauagaagaagc

SEQ ID NO: 2276271 - RNA, 19 nt, Homo sapiens
  misc_RNA (1)...(19): siRNA sense strand
cggcagcugcagaaggcua

SEQ ID NO: 2276272 - RNA, 19 nt, Homo sapiens
  misc_RNA (1)...(19): siRNA sense strand
aggcaacaaaucaagcaaa

SEQ ID NO: 2276273 - RNA, 19 nt, Homo sapiens
  misc_RNA (1)...(19): siRNA sense strand
cggcaaggagcuggaggaa

SEQ ID NO: 2276274 - RNA, 19 nt, Homo sapiens
  misc_RNA (1)...(19): siRNA sense strand
caucaggcgacuugcagaa

SEQ ID NO: 2276275 - RNA, 19 nt, Homo sapiens
  misc_RNA (1)...(19): siRNA sense strand
ggaucaaagcaaaguucca

SEQ ID NO: 2276276 - RNA, 19 nt, Homo sapiens
  misc_RNA (1)...(19): siRNA sense strand
agccauugaagaagaaaca

SEQ ID NO: 2276277 - RNA, 19 nt, Homo sapiens
  misc_RNA (1)...(19): siRNA sense strand
acauagaagaagccauuga

SEQ ID NO: 2276278 - RNA, 19 nt, Homo sapiens
  misc_RNA (1)...(19): siRNA sense strand
aggaagagaaugugaagcu

SEQ ID NO: 2276279 - RNA, 19 nt, Homo sapiens
  misc_RNA (1)...(19): siRNA sense strand
cagcauugguggugggugc

SEQ ID NO: 2276280 - RNA, 19 nt, Homo sapiens
  misc_RNA (1)...(19): siRNA sense strand
cgacagaaggagcuggugu

SEQ ID NO: 2276281 - RNA, 19 nt, Homo sapiens
  misc_RNA (1)...(19): siRNA sense strand
uggauaugaucaauggcuu

SEQ ID NO: 2276282 - RNA, 19 nt, Homo sapiens
  misc_RNA (1)...(19): siRNA sense strand
ggugaaauuaggagcaacu

SEQ ID NO: 2276283 - RNA, 19 nt, Homo sapiens
  misc_RNA (1)...(19): siRNA sense strand
cgaaacagaaggaggcucu

SEQ ID NO: 2276284 - RNA, 19 nt, Homo sapiens
  misc_RNA (1)...(19): siRNA sense strand
cagacugaccagcgggaga

SEQ ID NO: 2276285 - RNA, 19 nt, Homo sapiens
  misc_RNA (1)...(19): siRNA sense strand
uccugaacuugaagaacaa

SEQ ID NO: 2276286 - RNA, 19 nt, Homo sapiens
  misc_RNA (1)...(19): siRNA sense strand
ccauggaagggaagaaacu

SEQ ID NO: 2276287 - RNA, 19 nt, Homo sapiens
  misc_RNA (1)...(19): siRNA sense strand
agaccuucccggaggccua

SEQ ID NO: 2276288 - RNA, 19 nt, Homo sapiens
  misc_RNA (1)...(19): siRNA sense strand
acguggugcugaugugcua

SEQ ID NO: 2276289 - RNA, 19 nt, Homo sapiens
  misc_RNA (1)...(19): siRNA sense strand
ggccaggagacgaaacaga

SEQ ID NO: 2276290 - RNA, 19 nt, Homo sapiens
  misc_RNA (1)...(19): siRNA sense strand
cagaccaggaggugagaau

SEQ ID NO: 2276291 - RNA, 19 nt, Homo sapiens
  misc_RNA (1)...(19): siRNA sense strand
gggucaggaacuagcggaa

SEQ ID NO: 2276292 - RNA, 19 nt, Homo sapiens
  misc_RNA (1)...(19): siRNA sense strand
ucgacagugcagacagaaa

SEQ ID NO: 2276293 - RNA, 19 nt, Homo sapiens
  misc_RNA (1)...(19): siRNA sense strand
ggacauugguggacagagg

SEQ ID NO: 2276294 - RNA, 19 nt, Homo sapiens
  misc_RNA (1)...(19): siRNA sense strand
augucaaugcaaagaagaa

SEQ ID NO: 2276295 - RNA, 19 nt, Homo sapiens
  misc_RNA (1)...(19): siRNA sense strand
gaauacuucuccugggcuu

SEQ ID NO: 2276296 - RNA, 19 nt, Homo sapiens
  misc_RNA (1)...(19): siRNA sense strand
guguacaaucacaagguuu

SEQ ID NO: 2276297 - RNA, 19 nt, Homo sapiens
  misc_RNA (1)...(19): siRNA sense strand
aaacugaauguaugggaca

SEQ ID NO: 2276298 - RNA, 19 nt, Homo sapiens
  misc_RNA (1)...(19): siRNA sense strand
ugucaaugcaaagaagaaa

SEQ ID NO: 2276299 - RNA, 19 nt, Homo sapiens
  misc_RNA (1)...(19): siRNA sense strand
gauuugaagagacggguca

SEQ ID NO: 2276300 - RNA, 19 nt, Homo sapiens
  misc_RNA (1)...(19): siRNA sense strand
cugaaauugcagaaggacu

SEQ ID NO: 2276301 - RNA, 19 nt, Homo sapiens
  misc_RNA (1)...(19): siRNA sense strand
gcaugaacugggucugcaa

SEQ ID NO: 2276302 - RNA, 19 nt, Homo sapiens
  misc_RNA (1)...(19): siRNA sense strand
ggauaaugcuggcaagacc

SEQ ID NO: 2276303 - RNA, 19 nt, Homo sapiens
  misc_RNA (1)...(19): siRNA sense strand
gucaaugcaaagaagaaau

SEQ ID NO: 2276304 - RNA, 19 nt, Homo sapiens
  misc_RNA (1)...(19): siRNA sense strand
aggaaaggccugcggcgua

SEQ ID NO: 2276305 - RNA, 19 nt, Homo sapiens
  misc_RNA (1)...(19): siRNA sense strand
ucguagaucaccuggacaa

SEQ ID NO: 2276306 - RNA, 19 nt, Homo sapiens
  misc_RNA (1)...(19): siRNA sense strand
uucaagaagucgagcccua

SEQ ID NO: 2276307 - RNA, 19 nt, Homo sapiens
  misc_RNA (1)...(19): siRNA sense strand
acauuguguuugaggacuu

SEQ ID NO: 2276308 - RNA, 19 nt, Homo sapiens
  misc_RNA (1)...(19): siRNA sense strand
agaugaugacauuguguuu

SEQ ID NO: 2276309 - RNA, 19 nt, Homo sapiens
  misc_RNA (1)...(19): siRNA sense strand
agaaaagccacaaaaggaa

SEQ ID NO: 2276310 - RNA, 19 nt, Homo sapiens
  misc_RNA (1)...(19): siRNA sense strand
aggaccggcugcugaggaa

SEQ ID NO: 2276311 - RNA, 19 nt, Homo sapiens
  misc_RNA (1)...(19): siRNA sense strand
ucaccguguacuugggcaa

SEQ ID NO: 2276312 - RNA, 19 nt, Homo sapiens
  misc_RNA (1)...(19): siRNA sense strand
gggucaaggugaagcuggu

SEQ ID NO: 2276313 - RNA, 19 nt, Homo sapiens
  misc_RNA (1)...(19): siRNA sense strand
aggaaaggccugcggcgua

SEQ ID NO: 2276314 - RNA, 19 nt, Homo sapiens
  misc_RNA (1)...(19): siRNA sense strand
ucguagaucaccuggacaa

SEQ ID NO: 2276315 - RNA, 19 nt, Homo sapiens
  misc_RNA (1)...(19): siRNA sense strand
uucaagaagucgagcccua

SEQ ID NO: 2276316 - RNA, 19 nt, Homo sapiens
  misc_RNA (1)...(19): siRNA sense strand
acauuguguuugaggacuu

SEQ ID NO: 2276317 - RNA, 19 nt, Homo sapiens
  misc_RNA (1)...(19): siRNA sense strand
agaugaugacauuguguuu

SEQ ID NO: 2276318 - RNA, 19 nt, Homo sapiens
  misc_RNA (1)...(19): siRNA sense strand
agaaaagccacaaaaggaa

SEQ ID NO: 2276319 - RNA, 19 nt, Homo sapiens
  misc_RNA (1)...(19): siRNA sense strand
aggaccggcugcugaggaa

SEQ ID NO: 2276320 - RNA, 19 nt, Homo sapiens
  misc_RNA (1)...(19): siRNA sense strand
ucaccguguacuugggcaa

SEQ ID NO: 2276321 - RNA, 19 nt, Homo sapiens
  misc_RNA (1)...(19): siRNA sense strand
gggucaaggugaagcuggu

SEQ ID NO: 2276322 - RNA, 19 nt, Homo sapiens
  misc_RNA (1)...(19): siRNA sense strand
gugacaaggaagaggaagu

SEQ ID NO: 2276323 - RNA, 19 nt, Homo sapiens
  misc_RNA (1)...(19): siRNA sense strand
gcaaauggcaccaaggcuu

SEQ ID NO: 2276324 - RNA, 19 nt, Homo sapiens
  misc_RNA (1)...(19): siRNA sense strand
cugaaggaacaccaggaaa

SEQ ID NO: 2276325 - RNA, 19 nt, Homo sapiens
  misc_RNA (1)...(19): siRNA sense strand
ugguggauggaauggaaua

SEQ ID NO: 2276326 - RNA, 19 nt, Homo sapiens
  misc_RNA (1)...(19): siRNA sense strand
ccaucgugccugugaccua

SEQ ID NO: 2276327 - RNA, 19 nt, Homo sapiens
  misc_RNA (1)...(19): siRNA sense strand
gguccuaacgagaagagau

SEQ ID NO: 2276328 - RNA, 19 nt, Homo sapiens
  misc_RNA (1)...(19): siRNA sense strand
ggaagcuaggcgagggcau

SEQ ID NO: 2276329 - RNA, 19 nt, Homo sapiens
  misc_RNA (1)...(19): siRNA sense strand
cuaaagaagcaaggauaca

SEQ ID NO: 2276330 - RNA, 19 nt, Homo sapiens
  misc_RNA (1)...(19): siRNA sense strand
aauuagccuuugagaguca

SEQ ID NO: 2276331 - RNA, 19 nt, Homo sapiens
  misc_RNA (1)...(19): siRNA sense strand
gcacggggcuuauaggcaa

SEQ ID NO: 2276332 - RNA, 19 nt, Homo sapiens
  misc_RNA (1)...(19): siRNA sense strand
uggaauauacaaaggugga

SEQ ID NO: 2276333 - RNA, 19 nt, Homo sapiens
  misc_RNA (1)...(19): siRNA sense strand
gugcaugacgacaagccua

SEQ ID NO: 2276334 - RNA, 19 nt, Homo sapiens
  misc_RNA (1)...(19): siRNA sense strand
ugguugaugaccuggguau

SEQ ID NO: 2276335 - RNA, 19 nt, Homo sapiens
  misc_RNA (1)...(19): siRNA sense strand
gcuuauaggcaaauggcac

SEQ ID NO: 2276336 - RNA, 19 nt, Homo sapiens
  misc_RNA (1)...(19): siRNA sense strand
acacggaguuccaggccaa

SEQ ID NO: 2276337 - RNA, 19 nt, Homo sapiens
  misc_RNA (1)...(19): siRNA sense strand
ccaaccagguguaugcaga

SEQ ID NO: 2276338 - RNA, 19 nt, Homo sapiens
  misc_RNA (1)...(19): siRNA sense strand
agaccuuccaagugaucaa

SEQ ID NO: 2276339 - RNA, 19 nt, Homo sapiens
  misc_RNA (1)...(19): siRNA sense strand
uggccagaguggagucuca

SEQ ID NO: 2276340 - RNA, 19 nt, Homo sapiens
  misc_RNA (1)...(19): siRNA sense strand
ccuacaacugcgaguacau

SEQ ID NO: 2276341 - RNA, 19 nt, Homo sapiens
  misc_RNA (1)...(19): siRNA sense strand
gcaccaaugcuaaagguua

SEQ ID NO: 2276342 - RNA, 19 nt, Homo sapiens
  misc_RNA (1)...(19): siRNA sense strand
caauaguagcagaagacaa

SEQ ID NO: 2276343 - RNA, 19 nt, Homo sapiens
  misc_RNA (1)...(19): siRNA sense strand
caccaaugcuaaagguuau

SEQ ID NO: 2276344 - RNA, 19 nt, Homo sapiens
  misc_RNA (1)...(19): siRNA sense strand
gaagaggaaaugaagggua

SEQ ID NO: 2276345 - RNA, 19 nt, Homo sapiens
  misc_RNA (1)...(19): siRNA sense strand
aaauuaugaccguuggaaa

SEQ ID NO: 2276346 - RNA, 19 nt, Homo sapiens
  misc_RNA (1)...(19): siRNA sense strand
ugacaaggcaccaaugcua

SEQ ID NO: 2276347 - RNA, 19 nt, Homo sapiens
  misc_RNA (1)...(19): siRNA sense strand
ggaaaauagcacaaguuau

SEQ ID NO: 2276348 - RNA, 19 nt, Homo sapiens
  misc_RNA (1)...(19): siRNA sense strand
guagaugguaugugguaca

SEQ ID NO: 2276349 - RNA, 19 nt, Homo sapiens
  misc_RNA (1)...(19): siRNA sense strand
acagaggacugcagaaaau

SEQ ID NO: 2276350 - RNA, 19 nt, Homo sapiens
  misc_RNA (1)...(19): siRNA sense strand
augaauugaugcuugacaa

SEQ ID NO: 2276351 - RNA, 19 nt, Homo sapiens
  misc_RNA (1)...(19): siRNA sense strand
agauguuaccaaaggucaa

SEQ ID NO: 2276352 - RNA, 19 nt, Homo sapiens
  misc_RNA (1)...(19): siRNA sense strand
acacgagacagaaaggaau

SEQ ID NO: 2276353 - RNA, 19 nt, Homo sapiens
  misc_RNA (1)...(19): siRNA sense strand
ugugauuacacgagacaga

SEQ ID NO: 2276354 - RNA, 19 nt, Homo sapiens
  misc_RNA (1)...(19): siRNA sense strand
ccgcaccagccaagagaau

SEQ ID NO: 2276355 - RNA, 19 nt, Homo sapiens
  misc_RNA (1)...(19): siRNA sense strand
aauaaugauaccuggguca

SEQ ID NO: 2276356 - RNA, 19 nt, Homo sapiens
  misc_RNA (1)...(19): siRNA sense strand
cuucaagcuuugcuggcua

SEQ ID NO: 2276357 - RNA, 19 nt, Homo sapiens
  misc_RNA (1)...(19): siRNA sense strand
ugauuacacgagacagaaa

SEQ ID NO: 2276358 - RNA, 19 nt, Homo sapiens
  misc_RNA (1)...(19): siRNA sense strand
ucaucuaauacaugggaga

SEQ ID NO: 2276359 - RNA, 19 nt, Homo sapiens
  misc_RNA (1)...(19): siRNA sense strand
ggaccaacguacagaggug

SEQ ID NO: 2276360 - RNA, 19 nt, Homo sapiens
  misc_RNA (1)...(19): siRNA sense strand
auuuauugaccaagaccaa

SEQ ID NO: 2276361 - RNA, 19 nt, Homo sapiens
  misc_RNA (1)...(19): siRNA sense strand
uggggaagguugugugauu

SEQ ID NO: 2276362 - RNA, 19 nt, Homo sapiens
  misc_RNA (1)...(19): siRNA sense strand
gauaaauacauucgugcca

SEQ ID NO: 2276363 - RNA, 19 nt, Homo sapiens
  misc_RNA (1)...(19): siRNA sense strand
guuaugaagaagccaagaa

SEQ ID NO: 2276364 - RNA, 19 nt, Homo sapiens
  misc_RNA (1)...(19): siRNA sense strand
cuaauacaugggagaaaca

SEQ ID NO: 2276365 - RNA, 19 nt, Homo sapiens
  misc_RNA (1)...(19): siRNA sense strand
caaguuaugaagaagccaa

SEQ ID NO: 2276366 - RNA, 19 nt, Homo sapiens
  misc_RNA (1)...(19): siRNA sense strand
gccaagaauuuauugacca

SEQ ID NO: 2276367 - RNA, 19 nt, Homo sapiens
  misc_RNA (1)...(19): siRNA sense strand
gaaacuuaccugcgggacu

SEQ ID NO: 2276368 - RNA, 19 nt, Homo sapiens
  misc_RNA (1)...(19): siRNA sense strand
gggucauaacugagcaacu

SEQ ID NO: 2276369 - RNA, 19 nt, Homo sapiens
  misc_RNA (1)...(19): siRNA sense strand
augcuaaagguuauaguga

SEQ ID NO: 2276370 - RNA, 19 nt, Homo sapiens
  misc_RNA (1)...(19): siRNA sense strand
accaaaggucaauucgaaa

SEQ ID NO: 2276371 - RNA, 19 nt, Homo sapiens
  misc_RNA (1)...(19): siRNA sense strand
gcaccaaugcuaaagguua

SEQ ID NO: 2276372 - RNA, 19 nt, Homo sapiens
  misc_RNA (1)...(19): siRNA sense strand
caauaguagcagaagacaa

SEQ ID NO: 2276373 - RNA, 19 nt, Homo sapiens
  misc_RNA (1)...(19): siRNA sense strand
caccaaugcuaaagguuau

SEQ ID NO: 2276374 - RNA, 19 nt, Homo sapiens
  misc_RNA (1)...(19): siRNA sense strand
gaagaggaaaugaagggua

SEQ ID NO: 2276375 - RNA, 19 nt, Homo sapiens
  misc_RNA (1)...(19): siRNA sense strand
aaauuaugaccguuggaaa

SEQ ID NO: 2276376 - RNA, 19 nt, Homo sapiens
  misc_RNA (1)...(19): siRNA sense strand
ugacaaggcaccaaugcua

SEQ ID NO: 2276377 - RNA, 19 nt, Homo sapiens
  misc_RNA (1)...(19): siRNA sense strand
ggaaaauagcacaaguuau

SEQ ID NO: 2276378 - RNA, 19 nt, Homo sapiens
  misc_RNA (1)...(19): siRNA sense strand
guagaugguaugugguaca

SEQ ID NO: 2276379 - RNA, 19 nt, Homo sapiens
  misc_RNA (1)...(19): siRNA sense strand
acagaggacugcagaaaau

SEQ ID NO: 2276380 - RNA, 19 nt, Homo sapiens
  misc_RNA (1)...(19): siRNA sense strand
augaauugaugcuugacaa

SEQ ID NO: 2276381 - RNA, 19 nt, Homo sapiens
  misc_RNA (1)...(19): siRNA sense strand
agauguuaccaaaggucaa

SEQ ID NO: 2276382 - RNA, 19 nt, Homo sapiens
  misc_RNA (1)...(19): siRNA sense strand
acacgagacagaaaggaau

SEQ ID NO: 2276383 - RNA, 19 nt, Homo sapiens
  misc_RNA (1)...(19): siRNA sense strand
ugugauuacacgagacaga

SEQ ID NO: 2276384 - RNA, 19 nt, Homo sapiens
  misc_RNA (1)...(19): siRNA sense strand
ccgcaccagccaagagaau

SEQ ID NO: 2276385 - RNA, 19 nt, Homo sapiens
  misc_RNA (1)...(19): siRNA sense strand
aauaaugauaccuggguca

SEQ ID NO: 2276386 - RNA, 19 nt, Homo sapiens
  misc_RNA (1)...(19): siRNA sense strand
cuucaagcuuugcuggcua

SEQ ID NO: 2276387 - RNA, 19 nt, Homo sapiens
  misc_RNA (1)...(19): siRNA sense strand
ugauuacacgagacagaaa

SEQ ID NO: 2276388 - RNA, 19 nt, Homo sapiens
  misc_RNA (1)...(19): siRNA sense strand
ucaucuaauacaugggaga

SEQ ID NO: 2276389 - RNA, 19 nt, Homo sapiens
  misc_RNA (1)...(19): siRNA sense strand
ggaccaacguacagaggug

SEQ ID NO: 2276390 - RNA, 19 nt, Homo sapiens
  misc_RNA (1)...(19): siRNA sense strand
auuuauugaccaagaccaa

SEQ ID NO: 2276391 - RNA, 19 nt, Homo sapiens
  misc_RNA (1)...(19): siRNA sense strand
uggggaagguugugugauu

SEQ ID NO: 2276392 - RNA, 19 nt, Homo sapiens
  misc_RNA (1)...(19): siRNA sense strand
gauaaauacauucgugcca

SEQ ID NO: 2276393 - RNA, 19 nt, Homo sapiens
  misc_RNA (1)...(19): siRNA sense strand
guuaugaagaagccaagaa

SEQ ID NO: 2276394 - RNA, 19 nt, Homo sapiens
  misc_RNA (1)...(19): siRNA sense strand
cuaauacaugggagaaaca

SEQ ID NO: 2276395 - RNA, 19 nt, Homo sapiens
  misc_RNA (1)...(19): siRNA sense strand
caaguuaugaagaagccaa

SEQ ID NO: 2276396 - RNA, 19 nt, Homo sapiens
  misc_RNA (1)...(19): siRNA sense strand
gccaagaauuuauugacca

SEQ ID NO: 2276397 - RNA, 19 nt, Homo sapiens
  misc_RNA (1)...(19): siRNA sense strand
gaaacuuaccugcgggacu

SEQ ID NO: 2276398 - RNA, 19 nt, Homo sapiens
  misc_RNA (1)...(19): siRNA sense strand
gggucauaacugagcaacu

SEQ ID NO: 2276399 - RNA, 19 nt, Homo sapiens
  misc_RNA (1)...(19): siRNA sense strand
augcuaaagguuauaguga

SEQ ID NO: 2276400 - RNA, 19 nt, Homo sapiens
  misc_RNA (1)...(19): siRNA sense strand
accaaaggucaauucgaaa

SEQ ID NO: 2276401 - RNA, 19 nt, Homo sapiens
  misc_RNA (1)...(19): siRNA sense strand
ccaagcaagucaagcgaca

SEQ ID NO: 2276402 - RNA, 19 nt, Homo sapiens
  misc_RNA (1)...(19): siRNA sense strand
agacaaagcauggaggaca

SEQ ID NO: 2276403 - RNA, 19 nt, Homo sapiens
  misc_RNA (1)...(19): siRNA sense strand
guuugaucuuguugacuau

SEQ ID NO: 2276404 - RNA, 19 nt, Homo sapiens
  misc_RNA (1)...(19): siRNA sense strand
agacaaagcauggaggaca

SEQ ID NO: 2276405 - RNA, 19 nt, Homo sapiens
  misc_RNA (1)...(19): siRNA sense strand
guuugaucuuguugacuau

SEQ ID NO: 2276406 - RNA, 19 nt, Homo sapiens
  misc_RNA (1)...(19): siRNA sense strand
agacaaagcauggaggaca

SEQ ID NO: 2276407 - RNA, 19 nt, Homo sapiens
  misc_RNA (1)...(19): siRNA sense strand
guuugaucuuguugacuau

SEQ ID NO: 2276408 - RNA, 19 nt, Homo sapiens
  misc_RNA (1)...(19): siRNA sense strand
agacaaagcauggaggaca

SEQ ID NO: 2276409 - RNA, 19 nt, Homo sapiens
  misc_RNA (1)...(19): siRNA sense strand
guuugaucuuguugacuau

SEQ ID NO: 2276410 - RNA, 19 nt, Homo sapiens
  misc_RNA (1)...(19): siRNA sense strand
agacaaagcauggaggaca

SEQ ID NO: 2276411 - RNA, 19 nt, Homo sapiens
  misc_RNA (1)...(19): siRNA sense strand
guuugaucuuguugacuau

SEQ ID NO: 2276412 - RNA, 19 nt, Homo sapiens
  misc_RNA (1)...(19): siRNA sense strand
auugaaagacugaaggaaa

SEQ ID NO: 2276413 - RNA, 19 nt, Homo sapiens
  misc_RNA (1)...(19): siRNA sense strand
ccuagacagcucugagaaa

SEQ ID NO: 2276414 - RNA, 19 nt, Homo sapiens
  misc_RNA (1)...(19): siRNA sense strand
gcuuauaucgagauggaga

SEQ ID NO: 2276415 - RNA, 19 nt, Homo sapiens
  misc_RNA (1)...(19): siRNA sense strand
ucugugagcuggaggccaa

SEQ ID NO: 2276416 - RNA, 19 nt, Homo sapiens
  misc_RNA (1)...(19): siRNA sense strand
ggacagaagccauccggau

SEQ ID NO: 2276417 - RNA, 19 nt, Homo sapiens
  misc_RNA (1)...(19): siRNA sense strand
acaccuacgucaauggcaa

SEQ ID NO: 2276418 - RNA, 19 nt, Homo sapiens
  misc_RNA (1)...(19): siRNA sense strand
acggagaaggugagcaaaa

SEQ ID NO: 2276419 - RNA, 19 nt, Homo sapiens
  misc_RNA (1)...(19): siRNA sense strand
uugaaagacugaaggaaac

SEQ ID NO: 2276420 - RNA, 19 nt, Homo sapiens
  misc_RNA (1)...(19): siRNA sense strand
cagagaagaucauagcuga

SEQ ID NO: 2276421 - RNA, 19 nt, Homo sapiens
  misc_RNA (1)...(19): siRNA sense strand
ucgcaguggaggugaccaa

SEQ ID NO: 2276422 - RNA, 19 nt, Homo sapiens
  misc_RNA (1)...(19): siRNA sense strand
ggcuggacuaugagagcaa

SEQ ID NO: 2276423 - RNA, 19 nt, Homo sapiens
  misc_RNA (1)...(19): siRNA sense strand
ggaucaacgacacgaccaa

SEQ ID NO: 2276424 - RNA, 19 nt, Homo sapiens
  misc_RNA (1)...(19): siRNA sense strand
ugaacgaggaggaggagga

SEQ ID NO: 2276425 - RNA, 19 nt, Homo sapiens
  misc_RNA (1)...(19): siRNA sense strand
acaugaagcaggagaugga

SEQ ID NO: 2276426 - RNA, 19 nt, Homo sapiens
  misc_RNA (1)...(19): siRNA sense strand
gccaugacgcagagaccaa

SEQ ID NO: 2276427 - RNA, 19 nt, Homo sapiens
  misc_RNA (1)...(19): siRNA sense strand
agggcgaggugaagggcuu

SEQ ID NO: 2276428 - RNA, 19 nt, Homo sapiens
  misc_RNA (1)...(19): siRNA sense strand
agaaggaccagcagggcau

SEQ ID NO: 2276429 - RNA, 19 nt, Homo sapiens
  misc_RNA (1)...(19): siRNA sense strand
gggcaacagagacagacaa

SEQ ID NO: 2276430 - RNA, 19 nt, Homo sapiens
  misc_RNA (1)...(19): siRNA sense strand
gggacaucggcgaggagau

SEQ ID NO: 2276431 - RNA, 19 nt, Homo sapiens
  misc_RNA (1)...(19): siRNA sense strand
ccucauggacucagggaac

SEQ ID NO: 2276432 - RNA, 19 nt, Homo sapiens
  misc_RNA (1)...(19): siRNA sense strand
gcuggaaggaagugcgcga

SEQ ID NO: 2276433 - RNA, 19 nt, Homo sapiens
  misc_RNA (1)...(19): siRNA sense strand
gcaagcaggagaaggacca

SEQ ID NO: 2276434 - RNA, 19 nt, Homo sapiens
  misc_RNA (1)...(19): siRNA sense strand
gguaacucaaggacagcua

SEQ ID NO: 2276435 - RNA, 19 nt, Homo sapiens
  misc_RNA (1)...(19): siRNA sense strand
aggugaacgaggaggagga

SEQ ID NO: 2276436 - RNA, 19 nt, Homo sapiens
  misc_RNA (1)...(19): siRNA sense strand
agacugaaggaaacagaga

SEQ ID NO: 2276437 - RNA, 19 nt, Homo sapiens
  misc_RNA (1)...(19): siRNA sense strand
aggaaacagagaagaucau

SEQ ID NO: 2276438 - RNA, 19 nt, Homo sapiens
  misc_RNA (1)...(19): siRNA sense strand
ggguaagagccauguguuc

SEQ ID NO: 2276439 - RNA, 19 nt, Homo sapiens
  misc_RNA (1)...(19): siRNA sense strand
ccaauaucaccacggagaa

SEQ ID NO: 2276440 - RNA, 19 nt, Homo sapiens
  misc_RNA (1)...(19): siRNA sense strand
gucaauggcaagaaaguca

SEQ ID NO: 2276441 - RNA, 19 nt, Homo sapiens
  misc_RNA (1)...(19): siRNA sense strand
guggagaagacuaggcacu

SEQ ID NO: 2276442 - RNA, 19 nt, Homo sapiens
  misc_RNA (1)...(19): siRNA sense strand
agcaugccuuugagggaua

SEQ ID NO: 2276443 - RNA, 19 nt, Homo sapiens
  misc_RNA (1)...(19): siRNA sense strand
gugaggaccagcaggcuau

SEQ ID NO: 2276444 - RNA, 19 nt, Homo sapiens
  misc_RNA (1)...(19): siRNA sense strand
cggaggugaacgaggagga

SEQ ID NO: 2276445 - RNA, 19 nt, Homo sapiens
  misc_RNA (1)...(19): siRNA sense strand
cuuauaucgagauggagaa

SEQ ID NO: 2276446 - RNA, 19 nt, Homo sapiens
  misc_RNA (1)...(19): siRNA sense strand
ugggcaagcaggagaagga

SEQ ID NO: 2276447 - RNA, 19 nt, Homo sapiens
  misc_RNA (1)...(19): siRNA sense strand
gcagcaugccuuugaggga

SEQ ID NO: 2276448 - RNA, 19 nt, Homo sapiens
  misc_RNA (1)...(19): siRNA sense strand
agggauacaacgugugcau

SEQ ID NO: 2276449 - RNA, 19 nt, Homo sapiens
  misc_RNA (1)...(19): siRNA sense strand
gcaucgacaugaagcagga

SEQ ID NO: 2276450 - RNA, 19 nt, Homo sapiens
  misc_RNA (1)...(19): siRNA sense strand
cagccgaugaagucaacaa

SEQ ID NO: 2276451 - RNA, 19 nt, Homo sapiens
  misc_RNA (1)...(19): siRNA sense strand
aagcagguguaccgggaca

SEQ ID NO: 2276452 - RNA, 19 nt, Homo sapiens
  misc_RNA (1)...(19): siRNA sense strand
ccaaacagcccaaggagac

SEQ ID NO: 2276453 - RNA, 19 nt, Homo sapiens
  misc_RNA (1)...(19): siRNA sense strand
agacagauuucauuccgua

SEQ ID NO: 2276454 - RNA, 19 nt, Homo sapiens
  misc_RNA (1)...(19): siRNA sense strand
gggcgguaacucaaggaca

SEQ ID NO: 2276455 - RNA, 19 nt, Homo sapiens
  misc_RNA (1)...(19): siRNA sense strand
acaacaagcugauccgcga

SEQ ID NO: 2276456 - RNA, 19 nt, Homo sapiens
  misc_RNA (1)...(19): siRNA sense strand
gaggucagcuacauggaga

SEQ ID NO: 2276457 - RNA, 19 nt, Homo sapiens
  misc_RNA (1)...(19): siRNA sense strand
aaggaaacagagaagauca

SEQ ID NO: 2276458 - RNA, 19 nt, Homo sapiens
  misc_RNA (1)...(19): siRNA sense strand
ccuuugaugaccagcauuu

SEQ ID NO: 2276459 - RNA, 19 nt, Homo sapiens
  misc_RNA (1)...(19): siRNA sense strand
gggucaugccacuguccaa

SEQ ID NO: 2276460 - RNA, 19 nt, Homo sapiens
  misc_RNA (1)...(19): siRNA sense strand
cggugacacuacugcauga

SEQ ID NO: 2276461 - RNA, 19 nt, Homo sapiens
  misc_RNA (1)...(19): siRNA sense strand
gcugcaaugcugucaucaa

SEQ ID NO: 2276462 - RNA, 19 nt, Homo sapiens
  misc_RNA (1)...(19): siRNA sense strand
ccuucguguaccugagcaa

SEQ ID NO: 2276463 - RNA, 19 nt, Homo sapiens
  misc_RNA (1)...(19): siRNA sense strand
ccgaaacacuccagagacc

SEQ ID NO: 2276464 - RNA, 19 nt, Homo sapiens
  misc_RNA (1)...(19): siRNA sense strand
ggaaaaucucugaaggaaa

SEQ ID NO: 2276465 - RNA, 19 nt, Homo sapiens
  misc_RNA (1)...(19): siRNA sense strand
aguugaaacauuuggagaa

SEQ ID NO: 2276466 - RNA, 19 nt, Homo sapiens
  misc_RNA (1)...(19): siRNA sense strand
cugcaaacuugauaggaga

SEQ ID NO: 2276467 - RNA, 19 nt, Homo sapiens
  misc_RNA (1)...(19): siRNA sense strand
acacaguggagcagaacau

SEQ ID NO: 2276468 - RNA, 19 nt, Homo sapiens
  misc_RNA (1)...(19): siRNA sense strand
agcuggaagaguugaauaa

SEQ ID NO: 2276469 - RNA, 19 nt, Homo sapiens
  misc_RNA (1)...(19): siRNA sense strand
gggucauguuaauugggaa

SEQ ID NO: 2276470 - RNA, 19 nt, Homo sapiens
  misc_RNA (1)...(19): siRNA sense strand
caagaugguugccggguca

SEQ ID NO: 2276471 - RNA, 19 nt, Homo sapiens
  misc_RNA (1)...(19): siRNA sense strand
ucucugaaggaaauggaaa

SEQ ID NO: 2276472 - RNA, 19 nt, Homo sapiens
  misc_RNA (1)...(19): siRNA sense strand
uuaugaagaucuuggagga

SEQ ID NO: 2276473 - RNA, 19 nt, Homo sapiens
  misc_RNA (1)...(19): siRNA sense strand
agaacaguccacaggaaga

SEQ ID NO: 2276474 - RNA, 19 nt, Homo sapiens
  misc_RNA (1)...(19): siRNA sense strand
ccgcggaugaagaagaaaa

SEQ ID NO: 2276475 - RNA, 19 nt, Homo sapiens
  misc_RNA (1)...(19): siRNA sense strand
caguagauugaaaaggaaa

SEQ ID NO: 2276476 - RNA, 19 nt, Homo sapiens
  misc_RNA (1)...(19): siRNA sense strand
cagugaaccaguuguccaa

SEQ ID NO: 2276477 - RNA, 19 nt, Homo sapiens
  misc_RNA (1)...(19): siRNA sense strand
aggaguugacccugaguga

SEQ ID NO: 2276478 - RNA, 19 nt, Homo sapiens
  misc_RNA (1)...(19): siRNA sense strand
ccaaggauuugcaagcuga

SEQ ID NO: 2276479 - RNA, 19 nt, Homo sapiens
  misc_RNA (1)...(19): siRNA sense strand
guccacaggaagagguuga

SEQ ID NO: 2276480 - RNA, 19 nt, Homo sapiens
  misc_RNA (1)...(19): siRNA sense strand
gaauaaagagcuuacugga

SEQ ID NO: 2276481 - RNA, 19 nt, Homo sapiens
  misc_RNA (1)...(19): siRNA sense strand
guggauaccuauaaggaga

SEQ ID NO: 2276482 - RNA, 19 nt, Homo sapiens
  misc_RNA (1)...(19): siRNA sense strand
ggaucagguccaagcaaaa

SEQ ID NO: 2276483 - RNA, 19 nt, Homo sapiens
  misc_RNA (1)...(19): siRNA sense strand
aaugaauaacacaggagaa

SEQ ID NO: 2276484 - RNA, 19 nt, Homo sapiens
  misc_RNA (1)...(19): siRNA sense strand
aggagaauggauaaggcaa

SEQ ID NO: 2276485 - RNA, 19 nt, Homo sapiens
  misc_RNA (1)...(19): siRNA sense strand
aggaaagaucugugaaaug

SEQ ID NO: 2276486 - RNA, 19 nt, Homo sapiens
  misc_RNA (1)...(19): siRNA sense strand
augaauaacacaggagaau

SEQ ID NO: 2276487 - RNA, 19 nt, Homo sapiens
  misc_RNA (1)...(19): siRNA sense strand
gaaacuucuacgacagcaa

SEQ ID NO: 2276488 - RNA, 19 nt, Homo sapiens
  misc_RNA (1)...(19): siRNA sense strand
uggaaaaggaguuugaaga

SEQ ID NO: 2276489 - RNA, 19 nt, Homo sapiens
  misc_RNA (1)...(19): siRNA sense strand
ccuaaaucuggcuggauga

SEQ ID NO: 2276490 - RNA, 19 nt, Homo sapiens
  misc_RNA (1)...(19): siRNA sense strand
gcagugcguccuacagaua

SEQ ID NO: 2276491 - RNA, 19 nt, Homo sapiens
  misc_RNA (1)...(19): siRNA sense strand
cagacugugaauuuggaua

SEQ ID NO: 2276492 - RNA, 19 nt, Homo sapiens
  misc_RNA (1)...(19): siRNA sense strand
caaaacggaggcugggaaa

SEQ ID NO: 2276493 - RNA, 19 nt, Homo sapiens
  misc_RNA (1)...(19): siRNA sense strand
cguccagagugcuacaaaa

SEQ ID NO: 2276494 - RNA, 19 nt, Homo sapiens
  misc_RNA (1)...(19): siRNA sense strand
gguuauaagcugaggcaga

SEQ ID NO: 2276495 - RNA, 19 nt, Homo sapiens
  misc_RNA (1)...(19): siRNA sense strand
aggaguggaugguggccua

SEQ ID NO: 2276496 - RNA, 19 nt, Homo sapiens
  misc_RNA (1)...(19): siRNA sense strand
agcugaggcagaaggguua

SEQ ID NO: 2276497 - RNA, 19 nt, Homo sapiens
  misc_RNA (1)...(19): siRNA sense strand
aagcugaggcagaaggguu

SEQ ID NO: 2276498 - RNA, 19 nt, Homo sapiens
  misc_RNA (1)...(19): siRNA sense strand
agucaaagcaggaggugau

SEQ ID NO: 2276499 - RNA, 19 nt, Homo sapiens
  misc_RNA (1)...(19): siRNA sense strand
gggaaaagggagcgaagua

SEQ ID NO: 2276500 - RNA, 19 nt, Homo sapiens
  misc_RNA (1)...(19): siRNA sense strand
ccacauggagccugggaau

SEQ ID NO: 2276501 - RNA, 19 nt, Homo sapiens
  misc_RNA (1)...(19): siRNA sense strand
ggaugaagggagaugucaa

SEQ ID NO: 2276502 - RNA, 19 nt, Homo sapiens
  misc_RNA (1)...(19): siRNA sense strand
ggccagaugaugugccaaa

SEQ ID NO: 2276503 - RNA, 19 nt, Homo sapiens
  misc_RNA (1)...(19): siRNA sense strand
cguuauaccaugaugcuau

SEQ ID NO: 2276504 - RNA, 19 nt, Homo sapiens
  misc_RNA (1)...(19): siRNA sense strand
acauaaagucccaggauuc

SEQ ID NO: 2276505 - RNA, 19 nt, Homo sapiens
  misc_RNA (1)...(19): siRNA sense strand
acaacaagacagagagaag

SEQ ID NO: 2276506 - RNA, 19 nt, Homo sapiens
  misc_RNA (1)...(19): siRNA sense strand
gagagaaucccgauggcuu

SEQ ID NO: 2276507 - RNA, 19 nt, Homo sapiens
  misc_RNA (1)...(19): siRNA sense strand
ccucaaggacauagagaug

SEQ ID NO: 2276508 - RNA, 19 nt, Homo sapiens
  misc_RNA (1)...(19): siRNA sense strand
ccggaauaccugaguuuga

SEQ ID NO: 2276509 - RNA, 19 nt, Homo sapiens
  misc_RNA (1)...(19): siRNA sense strand
ucagagagauccugggacu

SEQ ID NO: 2276510 - RNA, 19 nt, Homo sapiens
  misc_RNA (1)...(19): siRNA sense strand
gagcagauagcguggcuga

SEQ ID NO: 2276511 - RNA, 19 nt, Homo sapiens
  misc_RNA (1)...(19): siRNA sense strand
gaaagaauucacaggagca

SEQ ID NO: 2276512 - RNA, 19 nt, Homo sapiens
  misc_RNA (1)...(19): siRNA sense strand
agaauucacaggagcacaa

SEQ ID NO: 2276513 - RNA, 19 nt, Homo sapiens
  misc_RNA (1)...(19): siRNA sense strand
augaauaauaugccaggaa

SEQ ID NO: 2276514 - RNA, 19 nt, Homo sapiens
  misc_RNA (1)...(19): siRNA sense strand
ucuaacaacaagacagaga

SEQ ID NO: 2276515 - RNA, 19 nt, Homo sapiens
  misc_RNA (1)...(19): siRNA sense strand
cagagaaacagcugggucu

SEQ ID NO: 2276516 - RNA, 19 nt, Homo sapiens
  misc_RNA (1)...(19): siRNA sense strand
cuagugggaugaagggaga

SEQ ID NO: 2276517 - RNA, 19 nt, Homo sapiens
  misc_RNA (1)...(19): siRNA sense strand
acgaugacucugacauuaa

SEQ ID NO: 2276518 - RNA, 19 nt, Homo sapiens
  misc_RNA (1)...(19): siRNA sense strand
cggccaaccaggaccagaa

SEQ ID NO: 2276519 - RNA, 19 nt, Homo sapiens
  misc_RNA (1)...(19): siRNA sense strand
gaagagaagaggaggaagc

SEQ ID NO: 2276520 - RNA, 19 nt, Homo sapiens
  misc_RNA (1)...(19): siRNA sense strand
gggcaugauuccuggcaag

SEQ ID NO: 2276521 - RNA, 19 nt, Homo sapiens
  misc_RNA (1)...(19): siRNA sense strand
ggccaauaaagcugcagaa

SEQ ID NO: 2276522 - RNA, 19 nt, Homo sapiens
  misc_RNA (1)...(19): siRNA sense strand
ggcccagcauggagaugaa

SEQ ID NO: 2276523 - RNA, 19 nt, Homo sapiens
  misc_RNA (1)...(19): siRNA sense strand
agaugauaccucagaagau

SEQ ID NO: 2276524 - RNA, 19 nt, Homo sapiens
  misc_RNA (1)...(19): siRNA sense strand
gaagaauggggcuggaaau

SEQ ID NO: 2276525 - RNA, 19 nt, Homo sapiens
  misc_RNA (1)...(19): siRNA sense strand
cagccaaagugguguacgu

SEQ ID NO: 2276526 - RNA, 19 nt, Homo sapiens
  misc_RNA (1)...(19): siRNA sense strand
gaauaauaugccaggaaug

SEQ ID NO: 2276527 - RNA, 19 nt, Homo sapiens
  misc_RNA (1)...(19): siRNA sense strand
uaacaacaagacagagaga

SEQ ID NO: 2276528 - RNA, 19 nt, Homo sapiens
  misc_RNA (1)...(19): siRNA sense strand
ucagagauauccagcgcau

SEQ ID NO: 2276529 - RNA, 19 nt, Homo sapiens
  misc_RNA (1)...(19): siRNA sense strand
ugauaaacucugaaaugga

SEQ ID NO: 2276530 - RNA, 19 nt, Homo sapiens
  misc_RNA (1)...(19): siRNA sense strand
gcucagaagacuccagcca

SEQ ID NO: 2276531 - RNA, 19 nt, Homo sapiens
  misc_RNA (1)...(19): siRNA sense strand
caggaaacacacagaguag

SEQ ID NO: 2276532 - RNA, 19 nt, Homo sapiens
  misc_RNA (1)...(19): siRNA sense strand
uaugaagagaagaggagga

SEQ ID NO: 2276533 - RNA, 19 nt, Homo sapiens
  misc_RNA (1)...(19): siRNA sense strand
gcagcagaauccuggggua

SEQ ID NO: 2276534 - RNA, 19 nt, Homo sapiens
  misc_RNA (1)...(19): siRNA sense strand
augaagagaagaggaggaa

SEQ ID NO: 2276535 - RNA, 19 nt, Homo sapiens
  misc_RNA (1)...(19): siRNA sense strand
gauuugcaggcaugauaaa

SEQ ID NO: 2276536 - RNA, 19 nt, Homo sapiens
  misc_RNA (1)...(19): siRNA sense strand
gauccaacucucagaugau

SEQ ID NO: 2276537 - RNA, 19 nt, Homo sapiens
  misc_RNA (1)...(19): siRNA sense strand
ccuacaagcagguggcaga

SEQ ID NO: 2276538 - RNA, 19 nt, Homo sapiens
  misc_RNA (1)...(19): siRNA sense strand
ugccugaggucgugcgcaa

SEQ ID NO: 2276539 - RNA, 19 nt, Homo sapiens
  misc_RNA (1)...(19): siRNA sense strand
aggacuacggcaagaagua

SEQ ID NO: 2276540 - RNA, 19 nt, Homo sapiens
  misc_RNA (1)...(19): siRNA sense strand
ccaagaagaugugggagga

SEQ ID NO: 2276541 - RNA, 19 nt, Homo sapiens
  misc_RNA (1)...(19): siRNA sense strand
gaugaaggacaaaggccau

SEQ ID NO: 2276542 - RNA, 19 nt, Homo sapiens
  misc_RNA (1)...(19): siRNA sense strand
ugaugaaggacaaaggcca

SEQ ID NO: 2276543 - RNA, 19 nt, Homo sapiens
  misc_RNA (1)...(19): siRNA sense strand
cagccuaaacagugaccga

SEQ ID NO: 2276544 - RNA, 19 nt, Homo sapiens
  misc_RNA (1)...(19): siRNA sense strand
gccuaaacagugaccgauu

SEQ ID NO: 2276545 - RNA, 19 nt, Homo sapiens
  misc_RNA (1)...(19): siRNA sense strand
ccuacaagcagguggcaga

SEQ ID NO: 2276546 - RNA, 19 nt, Homo sapiens
  misc_RNA (1)...(19): siRNA sense strand
ugccugaggucgugcgcaa

SEQ ID NO: 2276547 - RNA, 19 nt, Homo sapiens
  misc_RNA (1)...(19): siRNA sense strand
aggacuacggcaagaagua

SEQ ID NO: 2276548 - RNA, 19 nt, Homo sapiens
  misc_RNA (1)...(19): siRNA sense strand
ccaagaagaugugggagga

SEQ ID NO: 2276549 - RNA, 19 nt, Homo sapiens
  misc_RNA (1)...(19): siRNA sense strand
gaugaaggacaaaggccau

SEQ ID NO: 2276550 - RNA, 19 nt, Homo sapiens
  misc_RNA (1)...(19): siRNA sense strand
ugaugaaggacaaaggcca

SEQ ID NO: 2276551 - RNA, 19 nt, Homo sapiens
  misc_RNA (1)...(19): siRNA sense strand
cagccuaaacagugaccga

SEQ ID NO: 2276552 - RNA, 19 nt, Homo sapiens
  misc_RNA (1)...(19): siRNA sense strand
gccuaaacagugaccgauu

SEQ ID NO: 2276553 - RNA, 19 nt, Homo sapiens
  misc_RNA (1)...(19): siRNA sense strand
ccuacaagcagguggcaga

SEQ ID NO: 2276554 - RNA, 19 nt, Homo sapiens
  misc_RNA (1)...(19): siRNA sense strand
ugccugaggucgugcgcaa

SEQ ID NO: 2276555 - RNA, 19 nt, Homo sapiens
  misc_RNA (1)...(19): siRNA sense strand
aggacuacggcaagaagua

SEQ ID NO: 2276556 - RNA, 19 nt, Homo sapiens
  misc_RNA (1)...(19): siRNA sense strand
ccaagaagaugugggagga

SEQ ID NO: 2276557 - RNA, 19 nt, Homo sapiens
  misc_RNA (1)...(19): siRNA sense strand
gaugaaggacaaaggccau

SEQ ID NO: 2276558 - RNA, 19 nt, Homo sapiens
  misc_RNA (1)...(19): siRNA sense strand
ugaugaaggacaaaggcca

SEQ ID NO: 2276559 - RNA, 19 nt, Homo sapiens
  misc_RNA (1)...(19): siRNA sense strand
cagccuaaacagugaccga

SEQ ID NO: 2276560 - RNA, 19 nt, Homo sapiens
  misc_RNA (1)...(19): siRNA sense strand
gccuaaacagugaccgauu

SEQ ID NO: 2276561 - RNA, 19 nt, Homo sapiens
  misc_RNA (1)...(19): siRNA sense strand
gggcaaauggcguggcgaa

SEQ ID NO: 2276562 - RNA, 19 nt, Homo sapiens
  misc_RNA (1)...(19): siRNA sense strand
augcauaacuaauggacau

SEQ ID NO: 2276563 - RNA, 19 nt, Homo sapiens
  misc_RNA (1)...(19): siRNA sense strand
gagaaguauggaugggcaa

SEQ ID NO: 2276564 - RNA, 19 nt, Homo sapiens
  misc_RNA (1)...(19): siRNA sense strand
aagaagaugaccagggaga

SEQ ID NO: 2276565 - RNA, 19 nt, Homo sapiens
  misc_RNA (1)...(19): siRNA sense strand
gugucuaaucgguggaaca

SEQ ID NO: 2276566 - RNA, 19 nt, Homo sapiens
  misc_RNA (1)...(19): siRNA sense strand
gcaaguugguaaaggccga

SEQ ID NO: 2276567 - RNA, 19 nt, Homo sapiens
  misc_RNA (1)...(19): siRNA sense strand
ggcaaauggcguggcgaaa

SEQ ID NO: 2276568 - RNA, 19 nt, Homo sapiens
  misc_RNA (1)...(19): siRNA sense strand
cgaagauaugcgugagguu

SEQ ID NO: 2276569 - RNA, 19 nt, Homo sapiens
  misc_RNA (1)...(19): siRNA sense strand
ggccuaaucauuugggaga

SEQ ID NO: 2276570 - RNA, 19 nt, Homo sapiens
  misc_RNA (1)...(19): siRNA sense strand
ggagaaguauggaugggca

SEQ ID NO: 2276571 - RNA, 19 nt, Homo sapiens
  misc_RNA (1)...(19): siRNA sense strand
cggcagacauuaaagguac

SEQ ID NO: 2276572 - RNA, 19 nt, Homo sapiens
  misc_RNA (1)...(19): siRNA sense strand
guuaaauucaacagugaca

SEQ ID NO: 2276573 - RNA, 19 nt, Homo sapiens
  misc_RNA (1)...(19): siRNA sense strand
gugauuuggaacaggauga

SEQ ID NO: 2276574 - RNA, 19 nt, Homo sapiens
  misc_RNA (1)...(19): siRNA sense strand
acaacaugguaccgaguga

SEQ ID NO: 2276575 - RNA, 19 nt, Homo sapiens
  misc_RNA (1)...(19): siRNA sense strand
uggaacaggaugaagcauu

SEQ ID NO: 2276576 - RNA, 19 nt, Homo sapiens
  misc_RNA (1)...(19): siRNA sense strand
gguccggcaaguugguaaa

SEQ ID NO: 2276577 - RNA, 19 nt, Homo sapiens
  misc_RNA (1)...(19): siRNA sense strand
ugguaaaggccgauaugga

SEQ ID NO: 2276578 - RNA, 19 nt, Homo sapiens
  misc_RNA (1)...(19): siRNA sense strand
aucgagaccuaaagagcaa

SEQ ID NO: 2276579 - RNA, 19 nt, Homo sapiens
  misc_RNA (1)...(19): siRNA sense strand
cacauuagcuucagggugu

SEQ ID NO: 2276580 - RNA, 19 nt, Homo sapiens
  misc_RNA (1)...(19): siRNA sense strand
acaccagagcccugcuuaa

SEQ ID NO: 2276581 - RNA, 19 nt, Homo sapiens
  misc_RNA (1)...(19): siRNA sense strand
ccaccugcacacagaaauu

SEQ ID NO: 2276582 - RNA, 19 nt, Homo sapiens
  misc_RNA (1)...(19): siRNA sense strand
uggacgaaagccugaacaa

SEQ ID NO: 2276583 - RNA, 19 nt, Homo sapiens
  misc_RNA (1)...(19): siRNA sense strand
guaaaggccgauauggaga

SEQ ID NO: 2276584 - RNA, 19 nt, Homo sapiens
  misc_RNA (1)...(19): siRNA sense strand
gcggcagacauuaaaggua

SEQ ID NO: 2276585 - RNA, 19 nt, Homo sapiens
  misc_RNA (1)...(19): siRNA sense strand
agaaaauggaguaaccuua

SEQ ID NO: 2276586 - RNA, 19 nt, Homo sapiens
  misc_RNA (1)...(19): siRNA sense strand
guaugaaauaugaaggauc

SEQ ID NO: 2276587 - RNA, 19 nt, Homo sapiens
  misc_RNA (1)...(19): siRNA sense strand
aaucagacuccgaccagaa

SEQ ID NO: 2276588 - RNA, 19 nt, Homo sapiens
  misc_RNA (1)...(19): siRNA sense strand
uggaguaaccuuagcacca

SEQ ID NO: 2276589 - RNA, 19 nt, Homo sapiens
  misc_RNA (1)...(19): siRNA sense strand
cauuauugcaagagcaucu

SEQ ID NO: 2276590 - RNA, 19 nt, Homo sapiens
  misc_RNA (1)...(19): siRNA sense strand
acacaaaugaaguugaugu

SEQ ID NO: 2276591 - RNA, 19 nt, Homo sapiens
  misc_RNA (1)...(19): siRNA sense strand
cauuaaagguacagguucc

SEQ ID NO: 2276592 - RNA, 19 nt, Homo sapiens
  misc_RNA (1)...(19): siRNA sense strand
acacagaaauuuauggcac

SEQ ID NO: 2276593 - RNA, 19 nt, Homo sapiens
  misc_RNA (1)...(19): siRNA sense strand
caagaugguugaaucccaa

SEQ ID NO: 2276594 - RNA, 19 nt, Homo sapiens
  misc_RNA (1)...(19): siRNA sense strand
aaacauuauugcaagagca

SEQ ID NO: 2276595 - RNA, 19 nt, Homo sapiens
  misc_RNA (1)...(19): siRNA sense strand
cagcauugagaauuaagaa

SEQ ID NO: 2276596 - RNA, 19 nt, Homo sapiens
  misc_RNA (1)...(19): siRNA sense strand
guguaugaaauaugaagga

SEQ ID NO: 2276597 - RNA, 19 nt, Homo sapiens
  misc_RNA (1)...(19): siRNA sense strand
ccgcaauugcucaucgaga

SEQ ID NO: 2276598 - RNA, 19 nt, Homo sapiens
  misc_RNA (1)...(19): siRNA sense strand
acaucauggcugacaucua

SEQ ID NO: 2276599 - RNA, 19 nt, Homo sapiens
  misc_RNA (1)...(19): siRNA sense strand
agaagaagaugaccaggga

SEQ ID NO: 2276600 - RNA, 19 nt, Homo sapiens
  misc_RNA (1)...(19): siRNA sense strand
ccaagaugguugaauccca

SEQ ID NO: 2276601 - RNA, 19 nt, Homo sapiens
  misc_RNA (1)...(19): siRNA sense strand
cagauuauugggagccuau

SEQ ID NO: 2276602 - RNA, 19 nt, Homo sapiens
  misc_RNA (1)...(19): siRNA sense strand
aggaaauguuaucagcaaa

SEQ ID NO: 2276603 - RNA, 19 nt, Homo sapiens
  misc_RNA (1)...(19): siRNA sense strand
acuuaaagaagaauggcaa

SEQ ID NO: 2276604 - RNA, 19 nt, Homo sapiens
  misc_RNA (1)...(19): siRNA sense strand
guaaugaguuugaguggga

SEQ ID NO: 2276605 - RNA, 19 nt, Homo sapiens
  misc_RNA (1)...(19): siRNA sense strand
acacagcagcagaggaaaa

SEQ ID NO: 2276606 - RNA, 19 nt, Homo sapiens
  misc_RNA (1)...(19): siRNA sense strand
guuuaauuuggcagaacua

SEQ ID NO: 2276607 - RNA, 19 nt, Homo sapiens
  misc_RNA (1)...(19): siRNA sense strand
gaacaggaccacaggguug

SEQ ID NO: 2276608 - RNA, 19 nt, Homo sapiens
  misc_RNA (1)...(19): siRNA sense strand
cuguauugucagaugauuu

SEQ ID NO: 2276609 - RNA, 19 nt, Homo sapiens
  misc_RNA (1)...(19): siRNA sense strand
cuuagauggcuuagacaca

SEQ ID NO: 2276610 - RNA, 19 nt, Homo sapiens
  misc_RNA (1)...(19): siRNA sense strand
cugggauggcucaggaaau

SEQ ID NO: 2276611 - RNA, 19 nt, Homo sapiens
  misc_RNA (1)...(19): siRNA sense strand
agauugacuuagauggcuu

SEQ ID NO: 2276612 - RNA, 19 nt, Homo sapiens
  misc_RNA (1)...(19): siRNA sense strand
aguaauuaggaaaggcuca

SEQ ID NO: 2276613 - RNA, 19 nt, Homo sapiens
  misc_RNA (1)...(19): siRNA sense strand
ggauuggagaacaggacca

SEQ ID NO: 2276614 - RNA, 19 nt, Homo sapiens
  misc_RNA (1)...(19): siRNA sense strand
agcucgaaauucagccaaa

SEQ ID NO: 2276615 - RNA, 19 nt, Homo sapiens
  misc_RNA (1)...(19): siRNA sense strand
ccauggaauacguuggcau

SEQ ID NO: 2276616 - RNA, 19 nt, Homo sapiens
  misc_RNA (1)...(19): siRNA sense strand
uauagauaccugauggaca

SEQ ID NO: 2276617 - RNA, 19 nt, Homo sapiens
  misc_RNA (1)...(19): siRNA sense strand
cagcaaauugauagaaggu

SEQ ID NO: 2276618 - RNA, 19 nt, Homo sapiens
  misc_RNA (1)...(19): siRNA sense strand
ggcagaacuagcagaacuu

SEQ ID NO: 2276619 - RNA, 19 nt, Homo sapiens
  misc_RNA (1)...(19): siRNA sense strand
ugauaauggcaaugggaaa

SEQ ID NO: 2276620 - RNA, 19 nt, Homo sapiens
  misc_RNA (1)...(19): siRNA sense strand
ucuuuaagcaugaggaaaa

SEQ ID NO: 2276621 - RNA, 19 nt, Homo sapiens
  misc_RNA (1)...(19): siRNA sense strand
cagaguaguuccagaggca

SEQ ID NO: 2276622 - RNA, 19 nt, Homo sapiens
  misc_RNA (1)...(19): siRNA sense strand
aagaaguuguagaaggaga

SEQ ID NO: 2276623 - RNA, 19 nt, Homo sapiens
  misc_RNA (1)...(19): siRNA sense strand
acaacaacugcgaggaaaa

SEQ ID NO: 2276624 - RNA, 19 nt, Homo sapiens
  misc_RNA (1)...(19): siRNA sense strand
aagucgaggcuuugaagaa

SEQ ID NO: 2276625 - RNA, 19 nt, Homo sapiens
  misc_RNA (1)...(19): siRNA sense strand
caucuauauuggaaagcga

SEQ ID NO: 2276626 - RNA, 19 nt, Homo sapiens
  misc_RNA (1)...(19): siRNA sense strand
uuguagaaggagagaagga

SEQ ID NO: 2276627 - RNA, 19 nt, Homo sapiens
  misc_RNA (1)...(19): siRNA sense strand
agucagaagaagaaguugu

SEQ ID NO: 2276628 - RNA, 19 nt, Homo sapiens
  misc_RNA (1)...(19): siRNA sense strand
aguuguagaaggagagaag

SEQ ID NO: 2276629 - RNA, 19 nt, Homo sapiens
  misc_RNA (1)...(19): siRNA sense strand
uagaaggagagaaggaagu

SEQ ID NO: 2276630 - RNA, 19 nt, Homo sapiens
  misc_RNA (1)...(19): siRNA sense strand
ucauguuugauguggaaau

SEQ ID NO: 2276631 - RNA, 19 nt, Homo sapiens
  misc_RNA (1)...(19): siRNA sense strand
gaguaguuccagaggcagu

SEQ ID NO: 2276632 - RNA, 19 nt, Homo sapiens
  misc_RNA (1)...(19): siRNA sense strand
aagaagaugggcagaucau

SEQ ID NO: 2276633 - RNA, 19 nt, Homo sapiens
  misc_RNA (1)...(19): siRNA sense strand
gaggaaaaguggagccaug

SEQ ID NO: 2276634 - RNA, 19 nt, Homo sapiens
  misc_RNA (1)...(19): siRNA sense strand
ucucggaccaggagggcua

SEQ ID NO: 2276635 - RNA, 19 nt, Homo sapiens
  misc_RNA (1)...(19): siRNA sense strand
acagaaaggcagugggcac

SEQ ID NO: 2276636 - RNA, 19 nt, Homo sapiens
  misc_RNA (1)...(19): siRNA sense strand
ucagcagccucaaggguga

SEQ ID NO: 2276637 - RNA, 19 nt, Homo sapiens
  misc_RNA (1)...(19): siRNA sense strand
gaaaagaggcugaaggaca

SEQ ID NO: 2276638 - RNA, 19 nt, Homo sapiens
  misc_RNA (1)...(19): siRNA sense strand
uuaaaguggcgcuggacaa

SEQ ID NO: 2276639 - RNA, 19 nt, Homo sapiens
  misc_RNA (1)...(19): siRNA sense strand
acaucagaagacugugaaa

SEQ ID NO: 2276640 - RNA, 19 nt, Homo sapiens
  misc_RNA (1)...(19): siRNA sense strand
ccuuuaaaguggcgcugga

SEQ ID NO: 2276641 - RNA, 19 nt, Homo sapiens
  misc_RNA (1)...(19): siRNA sense strand
uggaggagcuugagggaga

SEQ ID NO: 2276642 - RNA, 19 nt, Homo sapiens
  misc_RNA (1)...(19): siRNA sense strand
cugcagagguggagcgacu

SEQ ID NO: 2276643 - RNA, 19 nt, Homo sapiens
  misc_RNA (1)...(19): siRNA sense strand
cagagaaggcccaaggaca

SEQ ID NO: 2276644 - RNA, 19 nt, Homo sapiens
  misc_RNA (1)...(19): siRNA sense strand
ggcccaaggacaaaagaaa

SEQ ID NO: 2276645 - RNA, 19 nt, Homo sapiens
  misc_RNA (1)...(19): siRNA sense strand
ccaucaaggccaacagcga

SEQ ID NO: 2276646 - RNA, 19 nt, Homo sapiens
  misc_RNA (1)...(19): siRNA sense strand
ggagcgacugagaagagaa

SEQ ID NO: 2276647 - RNA, 19 nt, Homo sapiens
  misc_RNA (1)...(19): siRNA sense strand
ccauggaagacggggauaa

SEQ ID NO: 2276648 - RNA, 19 nt, Homo sapiens
  misc_RNA (1)...(19): siRNA sense strand
aaaagaaaguggaggagcu

SEQ ID NO: 2276649 - RNA, 19 nt, Homo sapiens
  misc_RNA (1)...(19): siRNA sense strand
ggauaggaauucuggugcu

SEQ ID NO: 2276650 - RNA, 19 nt, Homo sapiens
  misc_RNA (1)...(19): siRNA sense strand
gacaaaagaaaguggagga

SEQ ID NO: 2276651 - RNA, 19 nt, Homo sapiens
  misc_RNA (1)...(19): siRNA sense strand
ugucagaggugucgggcuu

SEQ ID NO: 2276652 - RNA, 19 nt, Homo sapiens
  misc_RNA (1)...(19): siRNA sense strand
ugacuuugguccagcgcua

SEQ ID NO: 2276653 - RNA, 19 nt, Homo sapiens
  misc_RNA (1)...(19): siRNA sense strand
gagcaaauccucuacguca

SEQ ID NO: 2276654 - RNA, 19 nt, Homo sapiens
  misc_RNA (1)...(19): siRNA sense strand
cugacaucaucauggagaa

SEQ ID NO: 2276655 - RNA, 19 nt, Homo sapiens
  misc_RNA (1)...(19): siRNA sense strand
gagccugguucaaagggau

SEQ ID NO: 2276656 - RNA, 19 nt, Homo sapiens
  misc_RNA (1)...(19): siRNA sense strand
auggagaagcugacugaga

SEQ ID NO: 2276657 - RNA, 19 nt, Homo sapiens
  misc_RNA (1)...(19): siRNA sense strand
ggaauuggccguugggcuu

SEQ ID NO: 2276658 - RNA, 19 nt, Homo sapiens
  misc_RNA (1)...(19): siRNA sense strand
cggacaggagugaggagaa

SEQ ID NO: 2276659 - RNA, 19 nt, Homo sapiens
  misc_RNA (1)...(19): siRNA sense strand
aggagaaggccaugcguga

SEQ ID NO: 2276660 - RNA, 19 nt, Homo sapiens
  misc_RNA (1)...(19): siRNA sense strand
ggagugaggagaaggccau

SEQ ID NO: 2276661 - RNA, 19 nt, Homo sapiens
  misc_RNA (1)...(19): siRNA sense strand
agagcagagaugaagacaa

SEQ ID NO: 2276662 - RNA, 19 nt, Homo sapiens
  misc_RNA (1)...(19): siRNA sense strand
ucucagaacacaaacaaaa

SEQ ID NO: 2276663 - RNA, 19 nt, Homo sapiens
  misc_RNA (1)...(19): siRNA sense strand
uggccuguuuaaagaagaa

SEQ ID NO: 2276664 - RNA, 19 nt, Homo sapiens
  misc_RNA (1)...(19): siRNA sense strand
ccguaugcuagauuugaaa

SEQ ID NO: 2276665 - RNA, 19 nt, Homo sapiens
  misc_RNA (1)...(19): siRNA sense strand
gggugaacuuugaggcgcu

SEQ ID NO: 2276666 - RNA, 19 nt, Homo sapiens
  misc_RNA (1)...(19): siRNA sense strand
gcggauacggcaggaggaa

SEQ ID NO: 2276667 - RNA, 19 nt, Homo sapiens
  misc_RNA (1)...(19): siRNA sense strand
aggaagaggaugaggagga

SEQ ID NO: 2276668 - RNA, 19 nt, Homo sapiens
  misc_RNA (1)...(19): siRNA sense strand
aggaagaagaggagggugu

SEQ ID NO: 2276669 - RNA, 19 nt, Homo sapiens
  misc_RNA (1)...(19): siRNA sense strand
gggcagaacuuguggaagg

SEQ ID NO: 2276670 - RNA, 19 nt, Homo sapiens
  misc_RNA (1)...(19): siRNA sense strand
aggaugaggaggaagaaga

SEQ ID NO: 2276671 - RNA, 19 nt, Homo sapiens
  misc_RNA (1)...(19): siRNA sense strand
gaaaggaacauguuggcuu

SEQ ID NO: 2276672 - RNA, 19 nt, Homo sapiens
  misc_RNA (1)...(19): siRNA sense strand
aagaggaugaggaggaaga

SEQ ID NO: 2276673 - RNA, 19 nt, Homo sapiens
  misc_RNA (1)...(19): siRNA sense strand
agguuauccugaagucaaa

SEQ ID NO: 2276674 - RNA, 19 nt, Homo sapiens
  misc_RNA (1)...(19): siRNA sense strand
gguucugagcacacgguua

SEQ ID NO: 2276675 - RNA, 19 nt, Homo sapiens
  misc_RNA (1)...(19): siRNA sense strand
agucauuagagcugcauuu

SEQ ID NO: 2276676 - RNA, 19 nt, Homo sapiens
  misc_RNA (1)...(19): siRNA sense strand
ccuggauauuauuccgaua

SEQ ID NO: 2276677 - RNA, 19 nt, Homo sapiens
  misc_RNA (1)...(19): siRNA sense strand
agcuacagauagaagaauu

SEQ ID NO: 2276678 - RNA, 19 nt, Homo sapiens
  misc_RNA (1)...(19): siRNA sense strand
gaagaauuucgaaggcuga

SEQ ID NO: 2276679 - RNA, 19 nt, Homo sapiens
  misc_RNA (1)...(19): siRNA sense strand
acucaagagaggcuaggua

SEQ ID NO: 2276680 - RNA, 19 nt, Homo sapiens
  misc_RNA (1)...(19): siRNA sense strand
ggagacaacuuucggccca

SEQ ID NO: 2276681 - RNA, 19 nt, Homo sapiens
  misc_RNA (1)...(19): siRNA sense strand
agaaggaagaggaugagga

SEQ ID NO: 2276682 - RNA, 19 nt, Homo sapiens
  misc_RNA (1)...(19): siRNA sense strand
gugaugggauuuugggaga

SEQ ID NO: 2276683 - RNA, 19 nt, Homo sapiens
  misc_RNA (1)...(19): siRNA sense strand
cgaggaagguguugagugg

SEQ ID NO: 2276684 - RNA, 19 nt, Homo sapiens
  misc_RNA (1)...(19): siRNA sense strand
uugaugaggcuguggggaa

SEQ ID NO: 2276685 - RNA, 19 nt, Homo sapiens
  misc_RNA (1)...(19): siRNA sense strand
aguacgagguggugagaga

SEQ ID NO: 2276686 - RNA, 19 nt, Homo sapiens
  misc_RNA (1)...(19): siRNA sense strand
aggaggaauucgagagcau

SEQ ID NO: 2276687 - RNA, 19 nt, Homo sapiens
  misc_RNA (1)...(19): siRNA sense strand
cauuaagacuccacgggua

SEQ ID NO: 2276688 - RNA, 19 nt, Homo sapiens
  misc_RNA (1)...(19): siRNA sense strand
cugaagggauggaaggaga

SEQ ID NO: 2276689 - RNA, 19 nt, Homo sapiens
  misc_RNA (1)...(19): siRNA sense strand
ggacuuugcuucaggcaca

SEQ ID NO: 2276690 - RNA, 19 nt, Homo sapiens
  misc_RNA (1)...(19): siRNA sense strand
gaacuauaacccagagaca

SEQ ID NO: 2276691 - RNA, 19 nt, Homo sapiens
  misc_RNA (1)...(19): siRNA sense strand
gccaagugcuaguagacaa

SEQ ID NO: 2276692 - RNA, 19 nt, Homo sapiens
  misc_RNA (1)...(19): siRNA sense strand
caguaaggccacagguuau

SEQ ID NO: 2276693 - RNA, 19 nt, Homo sapiens
  misc_RNA (1)...(19): siRNA sense strand
aggcauaccucaaggccau

SEQ ID NO: 2276694 - RNA, 19 nt, Homo sapiens
  misc_RNA (1)...(19): siRNA sense strand
cugaggagccaaaggagaa

SEQ ID NO: 2276695 - RNA, 19 nt, Homo sapiens
  misc_RNA (1)...(19): siRNA sense strand
gggaagaaguggaaccugu

SEQ ID NO: 2276696 - RNA, 19 nt, Homo sapiens
  misc_RNA (1)...(19): siRNA sense strand
aauuaaagcugcaaaggca

SEQ ID NO: 2276697 - RNA, 19 nt, Homo sapiens
  misc_RNA (1)...(19): siRNA sense strand
guggaagcccugugggaga

SEQ ID NO: 2276698 - RNA, 19 nt, Homo sapiens
  misc_RNA (1)...(19): siRNA sense strand
caugaagagcguuggugaa

SEQ ID NO: 2276699 - RNA, 19 nt, Homo sapiens
  misc_RNA (1)...(19): siRNA sense strand
gggcagaaagugaagggca

SEQ ID NO: 2276700 - RNA, 19 nt, Homo sapiens
  misc_RNA (1)...(19): siRNA sense strand
gagccagagcugaugggaa

SEQ ID NO: 2276701 - RNA, 19 nt, Homo sapiens
  misc_RNA (1)...(19): siRNA sense strand
ggaagguagccgagccaga

SEQ ID NO: 2276702 - RNA, 19 nt, Homo sapiens
  misc_RNA (1)...(19): siRNA sense strand
ccaagaaguugcgggaaca

SEQ ID NO: 2276703 - RNA, 19 nt, Homo sapiens
  misc_RNA (1)...(19): siRNA sense strand
ugagagacgccuauggcaa

SEQ ID NO: 2276704 - RNA, 19 nt, Homo sapiens
  misc_RNA (1)...(19): siRNA sense strand
gcacauaugucacguggca

SEQ ID NO: 2276705 - RNA, 19 nt, Homo sapiens
  misc_RNA (1)...(19): siRNA sense strand
guaugauggugcagaagga

SEQ ID NO: 2276706 - RNA, 19 nt, Homo sapiens
  misc_RNA (1)...(19): siRNA sense strand
gccaagaguaugagggucu

SEQ ID NO: 2276707 - RNA, 19 nt, Homo sapiens
  misc_RNA (1)...(19): siRNA sense strand
ccuacaaggcacagaucuu

SEQ ID NO: 2276708 - RNA, 19 nt, Homo sapiens
  misc_RNA (1)...(19): siRNA sense strand
gcaugaagagcguugguga

SEQ ID NO: 2276709 - RNA, 19 nt, Homo sapiens
  misc_RNA (1)...(19): siRNA sense strand
agguggaucuggagcauga

SEQ ID NO: 2276710 - RNA, 19 nt, Homo sapiens
  misc_RNA (1)...(19): siRNA sense strand
gggccaagacuuacaagau

SEQ ID NO: 2276711 - RNA, 19 nt, Homo sapiens
  misc_RNA (1)...(19): siRNA sense strand
uguguaacauggagaacuu

SEQ ID NO: 2276712 - RNA, 19 nt, Homo sapiens
  misc_RNA (1)...(19): siRNA sense strand
gcacaaagauugggagcug

SEQ ID NO: 2276713 - RNA, 19 nt, Homo sapiens
  misc_RNA (1)...(19): siRNA sense strand
gugaaaccagucagcgaua

SEQ ID NO: 2276714 - RNA, 19 nt, Homo sapiens
  misc_RNA (1)...(19): siRNA sense strand
agaagaugguggugaugca

SEQ ID NO: 2276715 - RNA, 19 nt, Homo sapiens
  misc_RNA (1)...(19): siRNA sense strand
gaucuguccagcagugaaa

SEQ ID NO: 2276716 - RNA, 19 nt, Homo sapiens
  misc_RNA (1)...(19): siRNA sense strand
gggcauugggcguucauuu

SEQ ID NO: 2276717 - RNA, 19 nt, Homo sapiens
  misc_RNA (1)...(19): siRNA sense strand
ccaacagauaagcggauuu

SEQ ID NO: 2276718 - RNA, 19 nt, Homo sapiens
  misc_RNA (1)...(19): siRNA sense strand
cgccagaccugcugcaaca

SEQ ID NO: 2276719 - RNA, 19 nt, Homo sapiens
  misc_RNA (1)...(19): siRNA sense strand
guucuggagucgugggagu

SEQ ID NO: 2276720 - RNA, 19 nt, Homo sapiens
  misc_RNA (1)...(19): siRNA sense strand
gcugaggagccaaaggaga

SEQ ID NO: 2276721 - RNA, 19 nt, Homo sapiens
  misc_RNA (1)...(19): siRNA sense strand
cagcaaauucucuugaaca

SEQ ID NO: 2276722 - RNA, 19 nt, Homo sapiens
  misc_RNA (1)...(19): siRNA sense strand
gcucaggaacucugugaca

SEQ ID NO: 2276723 - RNA, 19 nt, Homo sapiens
  misc_RNA (1)...(19): siRNA sense strand
ggcagagaucggagagcau

SEQ ID NO: 2276724 - RNA, 19 nt, Homo sapiens
  misc_RNA (1)...(19): siRNA sense strand
auggagaccuggagcgcuu

SEQ ID NO: 2276725 - RNA, 19 nt, Homo sapiens
  misc_RNA (1)...(19): siRNA sense strand
cagcagugaaacagauuga

SEQ ID NO: 2276726 - RNA, 19 nt, Homo sapiens
  misc_RNA (1)...(19): siRNA sense strand
aguucauccaggaggcuaa

SEQ ID NO: 2276727 - RNA, 19 nt, Homo sapiens
  misc_RNA (1)...(19): siRNA sense strand
acaagauaucacugccaaa

SEQ ID NO: 2276728 - RNA, 19 nt, Homo sapiens
  misc_RNA (1)...(19): siRNA sense strand
ggcugaagcuuuaccucaa

SEQ ID NO: 2276729 - RNA, 19 nt, Homo sapiens
  misc_RNA (1)...(19): siRNA sense strand
agggauggaaggagauuga

SEQ ID NO: 2276730 - RNA, 19 nt, Homo sapiens
  misc_RNA (1)...(19): siRNA sense strand
gguuugaauccucgggcau

SEQ ID NO: 2276731 - RNA, 19 nt, Homo sapiens
  misc_RNA (1)...(19): siRNA sense strand
agccagagcugaugggaac

SEQ ID NO: 2276732 - RNA, 19 nt, Homo sapiens
  misc_RNA (1)...(19): siRNA sense strand
agauaagcguggaagugga

SEQ ID NO: 2276733 - RNA, 19 nt, Homo sapiens
  misc_RNA (1)...(19): siRNA sense strand
ggcagaaagugaagggcac

SEQ ID NO: 2276734 - RNA, 19 nt, Homo sapiens
  misc_RNA (1)...(19): siRNA sense strand
acuagacagccaagaguau

SEQ ID NO: 2276735 - RNA, 19 nt, Homo sapiens
  misc_RNA (1)...(19): siRNA sense strand
cagugaaaccagucagcga

SEQ ID NO: 2276736 - RNA, 19 nt, Homo sapiens
  misc_RNA (1)...(19): siRNA sense strand
ccaaggaugaccagcugaa

SEQ ID NO: 2276737 - RNA, 19 nt, Homo sapiens
  misc_RNA (1)...(19): siRNA sense strand
cccaaaagcuugugcgacu

SEQ ID NO: 2276738 - RNA, 19 nt, Homo sapiens
  misc_RNA (1)...(19): siRNA sense strand
cugcuaugaauguggccua

SEQ ID NO: 2276739 - RNA, 19 nt, Homo sapiens
  misc_RNA (1)...(19): siRNA sense strand
gcacggacgcacaguacau

SEQ ID NO: 2276740 - RNA, 19 nt, Homo sapiens
  misc_RNA (1)...(19): siRNA sense strand
accaagaaguugcgggaac

SEQ ID NO: 2276741 - RNA, 19 nt, Homo sapiens
  misc_RNA (1)...(19): siRNA sense strand
ugguguuggguguggaaau

SEQ ID NO: 2276742 - RNA, 19 nt, Homo sapiens
  misc_RNA (1)...(19): siRNA sense strand
cuuugaaggugcauguuga

SEQ ID NO: 2276743 - RNA, 19 nt, Homo sapiens
  misc_RNA (1)...(19): siRNA sense strand
aggaaaacauccagacguu

SEQ ID NO: 2276744 - RNA, 19 nt, Homo sapiens
  misc_RNA (1)...(19): siRNA sense strand
ccuugaacccugagucuga

SEQ ID NO: 2276745 - RNA, 19 nt, Homo sapiens
  misc_RNA (1)...(19): siRNA sense strand
caacgagauaagcguggaa

SEQ ID NO: 2276746 - RNA, 19 nt, Homo sapiens
  misc_RNA (1)...(19): siRNA sense strand
auuaagacuccacggguau

SEQ ID NO: 2276747 - RNA, 19 nt, Homo sapiens
  misc_RNA (1)...(19): siRNA sense strand
cguauuggcucuagcguug

SEQ ID NO: 2276748 - RNA, 19 nt, Homo sapiens
  misc_RNA (1)...(19): siRNA sense strand
acuauaacccagagacagu

SEQ ID NO: 2276749 - RNA, 19 nt, Homo sapiens
  misc_RNA (1)...(19): siRNA sense strand
ccaaaacccuggagcggau

SEQ ID NO: 2276750 - RNA, 19 nt, Homo sapiens
  misc_RNA (1)...(19): siRNA sense strand
gcuaaugacugguucugga

SEQ ID NO: 2276751 - RNA, 19 nt, Homo sapiens
  misc_RNA (1)...(19): siRNA sense strand
caagaugagauaugggaac

SEQ ID NO: 2276752 - RNA, 19 nt, Homo sapiens
  misc_RNA (1)...(19): siRNA sense strand
gcgagucagcacaaagauu

SEQ ID NO: 2276753 - RNA, 19 nt, Homo sapiens
  misc_RNA (1)...(19): siRNA sense strand
guucauuugaggaggccuu

SEQ ID NO: 2276754 - RNA, 19 nt, Homo sapiens
  misc_RNA (1)...(19): siRNA sense strand
ccaaagaaggugauccaga

SEQ ID NO: 2276755 - RNA, 19 nt, Homo sapiens
  misc_RNA (1)...(19): siRNA sense strand
acaagaauggagauggaga

SEQ ID NO: 2276756 - RNA, 19 nt, Homo sapiens
  misc_RNA (1)...(19): siRNA sense strand
agccaaagaaggugaucca

SEQ ID NO: 2276757 - RNA, 19 nt, Homo sapiens
  misc_RNA (1)...(19): siRNA sense strand
aggaggaggcagaggacaa

SEQ ID NO: 2276758 - RNA, 19 nt, Homo sapiens
  misc_RNA (1)...(19): siRNA sense strand
cggugaaacaugagcagaa

SEQ ID NO: 2276759 - RNA, 19 nt, Homo sapiens
  misc_RNA (1)...(19): siRNA sense strand
aggaagaugaggaggaaga

SEQ ID NO: 2276760 - RNA, 19 nt, Homo sapiens
  misc_RNA (1)...(19): siRNA sense strand
aggacaaagaugaggauga

SEQ ID NO: 2276761 - RNA, 19 nt, Homo sapiens
  misc_RNA (1)...(19): siRNA sense strand
augaagagauggacggaga

SEQ ID NO: 2276762 - RNA, 19 nt, Homo sapiens
  misc_RNA (1)...(19): siRNA sense strand
ggcuuaaggaggaggaaga

SEQ ID NO: 2276763 - RNA, 19 nt, Homo sapiens
  misc_RNA (1)...(19): siRNA sense strand
aggaggaugaugaggacaa

SEQ ID NO: 2276764 - RNA, 19 nt, Homo sapiens
  misc_RNA (1)...(19): siRNA sense strand
aggaggaugaggaggacaa

SEQ ID NO: 2276765 - RNA, 19 nt, Homo sapiens
  misc_RNA (1)...(19): siRNA sense strand
agacagacaugcacggaga

SEQ ID NO: 2276766 - RNA, 19 nt, Homo sapiens
  misc_RNA (1)...(19): siRNA sense strand
aggaggaggaagaagacaa

SEQ ID NO: 2276767 - RNA, 19 nt, Homo sapiens
  misc_RNA (1)...(19): siRNA sense strand
aguacaagggugaguggaa

SEQ ID NO: 2276768 - RNA, 19 nt, Homo sapiens
  misc_RNA (1)...(19): siRNA sense strand
gagaaacaaaugaaggaca

SEQ ID NO: 2276769 - RNA, 19 nt, Homo sapiens
  misc_RNA (1)...(19): siRNA sense strand
aggcagaggacaaggagga

SEQ ID NO: 2276770 - RNA, 19 nt, Homo sapiens
  misc_RNA (1)...(19): siRNA sense strand
aggacaaggaggaagauga

SEQ ID NO: 2276771 - RNA, 19 nt, Homo sapiens
  misc_RNA (1)...(19): siRNA sense strand
aggaggaagaagacaagaa

SEQ ID NO: 2276772 - RNA, 19 nt, Homo sapiens
  misc_RNA (1)...(19): siRNA sense strand
aggccaaggacgagcugua

SEQ ID NO: 2276773 - RNA, 19 nt, Homo sapiens
  misc_RNA (1)...(19): siRNA sense strand
acaaacaggacgaggagca

SEQ ID NO: 2276774 - RNA, 19 nt, Homo sapiens
  misc_RNA (1)...(19): siRNA sense strand
aggaggacaaggaggaaga

SEQ ID NO: 2276775 - RNA, 19 nt, Homo sapiens
  misc_RNA (1)...(19): siRNA sense strand
aggacaaggaggaugauga

SEQ ID NO: 2276776 - RNA, 19 nt, Homo sapiens
  misc_RNA (1)...(19): siRNA sense strand
aagaggaggaggaggcaga

SEQ ID NO: 2276777 - RNA, 19 nt, Homo sapiens
  misc_RNA (1)...(19): siRNA sense strand
aggaggaagaugaggagga

SEQ ID NO: 2276778 - RNA, 19 nt, Homo sapiens
  misc_RNA (1)...(19): siRNA sense strand
ccggcaaguucuacgguga

SEQ ID NO: 2276779 - RNA, 19 nt, Homo sapiens
  misc_RNA (1)...(19): siRNA sense strand
ccacagacuccaagccuga

SEQ ID NO: 2276780 - RNA, 19 nt, Homo sapiens
  misc_RNA (1)...(19): siRNA sense strand
aagaugaggaugaggagga

SEQ ID NO: 2276781 - RNA, 19 nt, Homo sapiens
  misc_RNA (1)...(19): siRNA sense strand
cuaagaagcccgaggacug

SEQ ID NO: 2276782 - RNA, 19 nt, Homo sapiens
  misc_RNA (1)...(19): siRNA sense strand
aagaagacaagaaacgcaa

SEQ ID NO: 2276783 - RNA, 19 nt, Homo sapiens
  misc_RNA (1)...(19): siRNA sense strand
ucuucaacuacaagggcaa

SEQ ID NO: 2276784 - RNA, 19 nt, Homo sapiens
  misc_RNA (1)...(19): siRNA sense strand
ccaagaagauaaaggaucc

SEQ ID NO: 2276785 - RNA, 19 nt, Homo sapiens
  misc_RNA (1)...(19): siRNA sense strand
acgcugaggaguuuggcaa

SEQ ID NO: 2276786 - RNA, 19 nt, Homo sapiens
  misc_RNA (1)...(19): siRNA sense strand
gcaaagaggaggaggaggc

SEQ ID NO: 2276787 - RNA, 19 nt, Homo sapiens
  misc_RNA (1)...(19): siRNA sense strand
acggugacgaggagaaaga

SEQ ID NO: 2276788 - RNA, 19 nt, Homo sapiens
  misc_RNA (1)...(19): siRNA sense strand
aggaugaugaggacaaaga

SEQ ID NO: 2276789 - RNA, 19 nt, Homo sapiens
  misc_RNA (1)...(19): siRNA sense strand
acaaagaugaggaugagga

SEQ ID NO: 2276790 - RNA, 19 nt, Homo sapiens
  misc_RNA (1)...(19): siRNA sense strand
augaggaugaggaggauga

SEQ ID NO: 2276791 - RNA, 19 nt, Homo sapiens
  misc_RNA (1)...(19): siRNA sense strand
augaggaggaugaggagga

SEQ ID NO: 2276792 - RNA, 19 nt, Homo sapiens
  misc_RNA (1)...(19): siRNA sense strand
ccgucuacuucaaggagca

SEQ ID NO: 2276793 - RNA, 19 nt, Homo sapiens
  misc_RNA (1)...(19): siRNA sense strand
aggacaaacaggacgagga

SEQ ID NO: 2276794 - RNA, 19 nt, Homo sapiens
  misc_RNA (1)...(19): siRNA sense strand
ccuaauaguuuggaccaga

SEQ ID NO: 2276795 - RNA, 19 nt, Homo sapiens
  misc_RNA (1)...(19): siRNA sense strand
gaagaagacaagaaacgca

SEQ ID NO: 2276796 - RNA, 19 nt, Homo sapiens
  misc_RNA (1)...(19): siRNA sense strand
acggagacucagaauacaa

SEQ ID NO: 2276797 - RNA, 19 nt, Homo sapiens
  misc_RNA (1)...(19): siRNA sense strand
caagaaacgcaaagaggag

SEQ ID NO: 2276798 - RNA, 19 nt, Homo sapiens
  misc_RNA (1)...(19): siRNA sense strand
ucgacaacccagauuacaa

SEQ ID NO: 2276799 - RNA, 19 nt, Homo sapiens
  misc_RNA (1)...(19): siRNA sense strand
gcuuaaggaggaggaagaa

SEQ ID NO: 2276800 - RNA, 19 nt, Homo sapiens
  misc_RNA (1)...(19): siRNA sense strand
acaaggaggaugaugagga

SEQ ID NO: 2276801 - RNA, 19 nt, Homo sapiens
  misc_RNA (1)...(19): siRNA sense strand
aggaugaggaggacaagga

SEQ ID NO: 2276802 - RNA, 19 nt, Homo sapiens
  misc_RNA (1)...(19): siRNA sense strand
agaaaaugucugagaaaga

SEQ ID NO: 2276803 - RNA, 19 nt, Homo sapiens
  misc_RNA (1)...(19): siRNA sense strand
uggagaggucagugagcaa

SEQ ID NO: 2276804 - RNA, 19 nt, Homo sapiens
  misc_RNA (1)...(19): siRNA sense strand
gcaucaaguucucagcgaa

SEQ ID NO: 2276805 - RNA, 19 nt, Homo sapiens
  misc_RNA (1)...(19): siRNA sense strand
ccaacuuuaagaaggcaaa

SEQ ID NO: 2276806 - RNA, 19 nt, Homo sapiens
  misc_RNA (1)...(19): siRNA sense strand
acccaagaaagaagaaauu

SEQ ID NO: 2276807 - RNA, 19 nt, Homo sapiens
  misc_RNA (1)...(19): siRNA sense strand
agcaagaguuccugcgcau

SEQ ID NO: 2276808 - RNA, 19 nt, Homo sapiens
  misc_RNA (1)...(19): siRNA sense strand
uaaggaagggacaggaaaa

SEQ ID NO: 2276809 - RNA, 19 nt, Homo sapiens
  misc_RNA (1)...(19): siRNA sense strand
auaaggaagggacaggaaa

SEQ ID NO: 2276810 - RNA, 19 nt, Homo sapiens
  misc_RNA (1)...(19): siRNA sense strand
agauggagauggagagguc

SEQ ID NO: 2276811 - RNA, 19 nt, Homo sapiens
  misc_RNA (1)...(19): siRNA sense strand
gcaggaagugggaccgcaa

SEQ ID NO: 2276812 - RNA, 19 nt, Homo sapiens
  misc_RNA (1)...(19): siRNA sense strand
augaggaguucguggccau

SEQ ID NO: 2276813 - RNA, 19 nt, Homo sapiens
  misc_RNA (1)...(19): siRNA sense strand
aggucacacuggcggaauu

SEQ ID NO: 2276814 - RNA, 19 nt, Homo sapiens
  misc_RNA (1)...(19): siRNA sense strand
gcaggaagugggaccgcaa

SEQ ID NO: 2276815 - RNA, 19 nt, Homo sapiens
  misc_RNA (1)...(19): siRNA sense strand
augaggaguucguggccau

SEQ ID NO: 2276816 - RNA, 19 nt, Homo sapiens
  misc_RNA (1)...(19): siRNA sense strand
aggucacacuggcggaauu

SEQ ID NO: 2276817 - RNA, 19 nt, Homo sapiens
  misc_RNA (1)...(19): siRNA sense strand
gaucauacauggaagcgaa

SEQ ID NO: 2276818 - RNA, 19 nt, Homo sapiens
  misc_RNA (1)...(19): siRNA sense strand
gguuauuauucuuggcgaa

SEQ ID NO: 2276819 - RNA, 19 nt, Homo sapiens
  misc_RNA (1)...(19): siRNA sense strand
cuggaauaucccuggacaa

SEQ ID NO: 2276820 - RNA, 19 nt, Homo sapiens
  misc_RNA (1)...(19): siRNA sense strand
acgugaagaaauuguggaa

SEQ ID NO: 2276821 - RNA, 19 nt, Homo sapiens
  misc_RNA (1)...(19): siRNA sense strand
ccgaaagguggcaacagaa

SEQ ID NO: 2276822 - RNA, 19 nt, Homo sapiens
  misc_RNA (1)...(19): siRNA sense strand
aaagaagaucacagcaaaa

SEQ ID NO: 2276823 - RNA, 19 nt, Homo sapiens
  misc_RNA (1)...(19): siRNA sense strand
aaucaauggacucuggaau

SEQ ID NO: 2276824 - RNA, 19 nt, Homo sapiens
  misc_RNA (1)...(19): siRNA sense strand
cauacauggaagcgaauca

SEQ ID NO: 2276825 - RNA, 19 nt, Homo sapiens
  misc_RNA (1)...(19): siRNA sense strand
gcuucugagccauggugaa

SEQ ID NO: 2276826 - RNA, 19 nt, Homo sapiens
  misc_RNA (1)...(19): siRNA sense strand
uggcgaaauucaaaggaug

SEQ ID NO: 2276827 - RNA, 19 nt, Homo sapiens
  misc_RNA (1)...(19): siRNA sense strand
gaucauacauggaagcgaa

SEQ ID NO: 2276828 - RNA, 19 nt, Homo sapiens
  misc_RNA (1)...(19): siRNA sense strand
gguuauuauucuuggcgaa

SEQ ID NO: 2276829 - RNA, 19 nt, Homo sapiens
  misc_RNA (1)...(19): siRNA sense strand
cuggaauaucccuggacaa

SEQ ID NO: 2276830 - RNA, 19 nt, Homo sapiens
  misc_RNA (1)...(19): siRNA sense strand
acgugaagaaauuguggaa

SEQ ID NO: 2276831 - RNA, 19 nt, Homo sapiens
  misc_RNA (1)...(19): siRNA sense strand
ccgaaagguggcaacagaa

SEQ ID NO: 2276832 - RNA, 19 nt, Homo sapiens
  misc_RNA (1)...(19): siRNA sense strand
aaagaagaucacagcaaaa

SEQ ID NO: 2276833 - RNA, 19 nt, Homo sapiens
  misc_RNA (1)...(19): siRNA sense strand
aaucaauggacucuggaau

SEQ ID NO: 2276834 - RNA, 19 nt, Homo sapiens
  misc_RNA (1)...(19): siRNA sense strand
cauacauggaagcgaauca

SEQ ID NO: 2276835 - RNA, 19 nt, Homo sapiens
  misc_RNA (1)...(19): siRNA sense strand
gcuucugagccauggugaa

SEQ ID NO: 2276836 - RNA, 19 nt, Homo sapiens
  misc_RNA (1)...(19): siRNA sense strand
uggcgaaauucaaaggaug

SEQ ID NO: 2276837 - RNA, 19 nt, Homo sapiens
  misc_RNA (1)...(19): siRNA sense strand
cauugaaggaagaggaaaa

SEQ ID NO: 2276838 - RNA, 19 nt, Homo sapiens
  misc_RNA (1)...(19): siRNA sense strand
ggacaaacaucuauccaga

SEQ ID NO: 2276839 - RNA, 19 nt, Homo sapiens
  misc_RNA (1)...(19): siRNA sense strand
cugagaaccuggaggcaga

SEQ ID NO: 2276840 - RNA, 19 nt, Homo sapiens
  misc_RNA (1)...(19): siRNA sense strand
ugguagacucuuugcgaaa

SEQ ID NO: 2276841 - RNA, 19 nt, Homo sapiens
  misc_RNA (1)...(19): siRNA sense strand
gaaagaaucgcguggcuca

SEQ ID NO: 2276842 - RNA, 19 nt, Homo sapiens
  misc_RNA (1)...(19): siRNA sense strand
cugccagaccagagcacaa

SEQ ID NO: 2276843 - RNA, 19 nt, Homo sapiens
  misc_RNA (1)...(19): siRNA sense strand
aggacaaacccaaggucau

SEQ ID NO: 2276844 - RNA, 19 nt, Homo sapiens
  misc_RNA (1)...(19): siRNA sense strand
agaacaacguggcuggaca

SEQ ID NO: 2276845 - RNA, 19 nt, Homo sapiens
  misc_RNA (1)...(19): siRNA sense strand
accacaugcuaaagaacaa

SEQ ID NO: 2276846 - RNA, 19 nt, Homo sapiens
  misc_RNA (1)...(19): siRNA sense strand
caaaagucgaccaguguaa

SEQ ID NO: 2276847 - RNA, 19 nt, Homo sapiens
  misc_RNA (1)...(19): siRNA sense strand
acaguuaagauguuggaau

SEQ ID NO: 2276848 - RNA, 19 nt, Homo sapiens
  misc_RNA (1)...(19): siRNA sense strand
uguuggaauaccugggcaa

SEQ ID NO: 2276849 - RNA, 19 nt, Homo sapiens
  misc_RNA (1)...(19): siRNA sense strand
auggcauccuagagggaau

SEQ ID NO: 2276850 - RNA, 19 nt, Homo sapiens
  misc_RNA (1)...(19): siRNA sense strand
gccucagucuaaaggacaa

SEQ ID NO: 2276851 - RNA, 19 nt, Homo sapiens
  misc_RNA (1)...(19): siRNA sense strand
uugaaguuccacaggcuaa

SEQ ID NO: 2276852 - RNA, 19 nt, Homo sapiens
  misc_RNA (1)...(19): siRNA sense strand
ugaaggaagaggaaaagaa

SEQ ID NO: 2276853 - RNA, 19 nt, Homo sapiens
  misc_RNA (1)...(19): siRNA sense strand
ugacauugaaggaagagga

SEQ ID NO: 2276854 - RNA, 19 nt, Homo sapiens
  misc_RNA (1)...(19): siRNA sense strand
cuagagggaaucugcggaa

SEQ ID NO: 2276855 - RNA, 19 nt, Homo sapiens
  misc_RNA (1)...(19): siRNA sense strand
gucuaaaggacaaacccaa

SEQ ID NO: 2276856 - RNA, 19 nt, Homo sapiens
  misc_RNA (1)...(19): siRNA sense strand
cggaagguacagaaaucau

SEQ ID NO: 2276857 - RNA, 19 nt, Homo sapiens
  misc_RNA (1)...(19): siRNA sense strand
gaaaagaaucucacagcca

SEQ ID NO: 2276858 - RNA, 19 nt, Homo sapiens
  misc_RNA (1)...(19): siRNA sense strand
agacuaacagacagagaau

SEQ ID NO: 2276859 - RNA, 19 nt, Homo sapiens
  misc_RNA (1)...(19): siRNA sense strand
ugucugaggcggagcggaa

SEQ ID NO: 2276860 - RNA, 19 nt, Homo sapiens
  misc_RNA (1)...(19): siRNA sense strand
caggaggauucaagcgaga

SEQ ID NO: 2276861 - RNA, 19 nt, Homo sapiens
  misc_RNA (1)...(19): siRNA sense strand
ucaaugaggugaagcgcca

SEQ ID NO: 2276862 - RNA, 19 nt, Homo sapiens
  misc_RNA (1)...(19): siRNA sense strand
acaaagacugggagaagca

SEQ ID NO: 2276863 - RNA, 19 nt, Homo sapiens
  misc_RNA (1)...(19): siRNA sense strand
agaaaauggcuuugacaga

SEQ ID NO: 2276864 - RNA, 19 nt, Homo sapiens
  misc_RNA (1)...(19): siRNA sense strand
acucagaacauccaagcaa

SEQ ID NO: 2276865 - RNA, 19 nt, Homo sapiens
  misc_RNA (1)...(19): siRNA sense strand
gauacgugccagaggagau

SEQ ID NO: 2276866 - RNA, 19 nt, Homo sapiens
  misc_RNA (1)...(19): siRNA sense strand
cagcacaaagacugggaga

SEQ ID NO: 2276867 - RNA, 19 nt, Homo sapiens
  misc_RNA (1)...(19): siRNA sense strand
cuggaauuguggccguaaa

SEQ ID NO: 2276868 - RNA, 19 nt, Homo sapiens
  misc_RNA (1)...(19): siRNA sense strand
ggaagaaagcugaggaggc

SEQ ID NO: 2276869 - RNA, 19 nt, Homo sapiens
  misc_RNA (1)...(19): siRNA sense strand
gaaaacgggaagaggcgaa

SEQ ID NO: 2276870 - RNA, 19 nt, Homo sapiens
  misc_RNA (1)...(19): siRNA sense strand
ccguaaagcgagugaaacc

SEQ ID NO: 2276871 - RNA, 19 nt, Homo sapiens
  misc_RNA (1)...(19): siRNA sense strand
cagacagaaccaaagaaaa

SEQ ID NO: 2276872 - RNA, 19 nt, Homo sapiens
  misc_RNA (1)...(19): siRNA sense strand
acagugacgccgaggacuu

SEQ ID NO: 2276873 - RNA, 19 nt, Homo sapiens
  misc_RNA (1)...(19): siRNA sense strand
ucaagaagcagaccgggaa

SEQ ID NO: 2276874 - RNA, 19 nt, Homo sapiens
  misc_RNA (1)...(19): siRNA sense strand
cauccaagcaagcgaccau

SEQ ID NO: 2276875 - RNA, 19 nt, Homo sapiens
  misc_RNA (1)...(19): siRNA sense strand
cugcaguggcuguaacaca

SEQ ID NO: 2276876 - RNA, 19 nt, Homo sapiens
  misc_RNA (1)...(19): siRNA sense strand
agggacagaaacagaccua

SEQ ID NO: 2276877 - RNA, 19 nt, Homo sapiens
  misc_RNA (1)...(19): siRNA sense strand
agacuaacagacagagaau

SEQ ID NO: 2276878 - RNA, 19 nt, Homo sapiens
  misc_RNA (1)...(19): siRNA sense strand
ugucugaggcggagcggaa

SEQ ID NO: 2276879 - RNA, 19 nt, Homo sapiens
  misc_RNA (1)...(19): siRNA sense strand
caggaggauucaagcgaga

SEQ ID NO: 2276880 - RNA, 19 nt, Homo sapiens
  misc_RNA (1)...(19): siRNA sense strand
ucaaugaggugaagcgcca

SEQ ID NO: 2276881 - RNA, 19 nt, Homo sapiens
  misc_RNA (1)...(19): siRNA sense strand
acaaagacugggagaagca

SEQ ID NO: 2276882 - RNA, 19 nt, Homo sapiens
  misc_RNA (1)...(19): siRNA sense strand
agaaaauggcuuugacaga

SEQ ID NO: 2276883 - RNA, 19 nt, Homo sapiens
  misc_RNA (1)...(19): siRNA sense strand
acucagaacauccaagcaa

SEQ ID NO: 2276884 - RNA, 19 nt, Homo sapiens
  misc_RNA (1)...(19): siRNA sense strand
gauacgugccagaggagau

SEQ ID NO: 2276885 - RNA, 19 nt, Homo sapiens
  misc_RNA (1)...(19): siRNA sense strand
cagcacaaagacugggaga

SEQ ID NO: 2276886 - RNA, 19 nt, Homo sapiens
  misc_RNA (1)...(19): siRNA sense strand
cuggaauuguggccguaaa

SEQ ID NO: 2276887 - RNA, 19 nt, Homo sapiens
  misc_RNA (1)...(19): siRNA sense strand
ggaagaaagcugaggaggc

SEQ ID NO: 2276888 - RNA, 19 nt, Homo sapiens
  misc_RNA (1)...(19): siRNA sense strand
gaaaacgggaagaggcgaa

SEQ ID NO: 2276889 - RNA, 19 nt, Homo sapiens
  misc_RNA (1)...(19): siRNA sense strand
ccguaaagcgagugaaacc

SEQ ID NO: 2276890 - RNA, 19 nt, Homo sapiens
  misc_RNA (1)...(19): siRNA sense strand
cagacagaaccaaagaaaa

SEQ ID NO: 2276891 - RNA, 19 nt, Homo sapiens
  misc_RNA (1)...(19): siRNA sense strand
acagugacgccgaggacuu

SEQ ID NO: 2276892 - RNA, 19 nt, Homo sapiens
  misc_RNA (1)...(19): siRNA sense strand
ucaagaagcagaccgggaa

SEQ ID NO: 2276893 - RNA, 19 nt, Homo sapiens
  misc_RNA (1)...(19): siRNA sense strand
cauccaagcaagcgaccau

SEQ ID NO: 2276894 - RNA, 19 nt, Homo sapiens
  misc_RNA (1)...(19): siRNA sense strand
cugcaguggcuguaacaca

SEQ ID NO: 2276895 - RNA, 19 nt, Homo sapiens
  misc_RNA (1)...(19): siRNA sense strand
agggacagaaacagaccua

SEQ ID NO: 2276896 - RNA, 19 nt, Homo sapiens
  misc_RNA (1)...(19): siRNA sense strand
agacuaacagacagagaau

SEQ ID NO: 2276897 - RNA, 19 nt, Homo sapiens
  misc_RNA (1)...(19): siRNA sense strand
ugucugaggcggagcggaa

SEQ ID NO: 2276898 - RNA, 19 nt, Homo sapiens
  misc_RNA (1)...(19): siRNA sense strand
caggaggauucaagcgaga

SEQ ID NO: 2276899 - RNA, 19 nt, Homo sapiens
  misc_RNA (1)...(19): siRNA sense strand
ucaaugaggugaagcgcca

SEQ ID NO: 2276900 - RNA, 19 nt, Homo sapiens
  misc_RNA (1)...(19): siRNA sense strand
acaaagacugggagaagca

SEQ ID NO: 2276901 - RNA, 19 nt, Homo sapiens
  misc_RNA (1)...(19): siRNA sense strand
agaaaauggcuuugacaga

SEQ ID NO: 2276902 - RNA, 19 nt, Homo sapiens
  misc_RNA (1)...(19): siRNA sense strand
acucagaacauccaagcaa

SEQ ID NO: 2276903 - RNA, 19 nt, Homo sapiens
  misc_RNA (1)...(19): siRNA sense strand
gauacgugccagaggagau

SEQ ID NO: 2276904 - RNA, 19 nt, Homo sapiens
  misc_RNA (1)...(19): siRNA sense strand
cagcacaaagacugggaga

SEQ ID NO: 2276905 - RNA, 19 nt, Homo sapiens
  misc_RNA (1)...(19): siRNA sense strand
cuggaauuguggccguaaa

SEQ ID NO: 2276906 - RNA, 19 nt, Homo sapiens
  misc_RNA (1)...(19): siRNA sense strand
ggaagaaagcugaggaggc

SEQ ID NO: 2276907 - RNA, 19 nt, Homo sapiens
  misc_RNA (1)...(19): siRNA sense strand
gaaaacgggaagaggcgaa

SEQ ID NO: 2276908 - RNA, 19 nt, Homo sapiens
  misc_RNA (1)...(19): siRNA sense strand
ccguaaagcgagugaaacc

SEQ ID NO: 2276909 - RNA, 19 nt, Homo sapiens
  misc_RNA (1)...(19): siRNA sense strand
cagacagaaccaaagaaaa

SEQ ID NO: 2276910 - RNA, 19 nt, Homo sapiens
  misc_RNA (1)...(19): siRNA sense strand
acagugacgccgaggacuu

SEQ ID NO: 2276911 - RNA, 19 nt, Homo sapiens
  misc_RNA (1)...(19): siRNA sense strand
ucaagaagcagaccgggaa

SEQ ID NO: 2276912 - RNA, 19 nt, Homo sapiens
  misc_RNA (1)...(19): siRNA sense strand
cauccaagcaagcgaccau

SEQ ID NO: 2276913 - RNA, 19 nt, Homo sapiens
  misc_RNA (1)...(19): siRNA sense strand
cugcaguggcuguaacaca

SEQ ID NO: 2276914 - RNA, 19 nt, Homo sapiens
  misc_RNA (1)...(19): siRNA sense strand
agggacagaaacagaccua

SEQ ID NO: 2276915 - RNA, 19 nt, Homo sapiens
  misc_RNA (1)...(19): siRNA sense strand
agacuaacagacagagaau

SEQ ID NO: 2276916 - RNA, 19 nt, Homo sapiens
  misc_RNA (1)...(19): siRNA sense strand
ugucugaggcggagcggaa

SEQ ID NO: 2276917 - RNA, 19 nt, Homo sapiens
  misc_RNA (1)...(19): siRNA sense strand
caggaggauucaagcgaga

SEQ ID NO: 2276918 - RNA, 19 nt, Homo sapiens
  misc_RNA (1)...(19): siRNA sense strand
ucaaugaggugaagcgcca

SEQ ID NO: 2276919 - RNA, 19 nt, Homo sapiens
  misc_RNA (1)...(19): siRNA sense strand
acaaagacugggagaagca

SEQ ID NO: 2276920 - RNA, 19 nt, Homo sapiens
  misc_RNA (1)...(19): siRNA sense strand
agaaaauggcuuugacaga

SEQ ID NO: 2276921 - RNA, 19 nt, Homo sapiens
  misc_RNA (1)...(19): siRNA sense strand
acucagaacauccaagcaa

SEQ ID NO: 2276922 - RNA, 19 nt, Homo sapiens
  misc_RNA (1)...(19): siRNA sense strand
gauacgugccagaggagau

SEQ ID NO: 2276923 - RNA, 19 nt, Homo sapiens
  misc_RNA (1)...(19): siRNA sense strand
cagcacaaagacugggaga

SEQ ID NO: 2276924 - RNA, 19 nt, Homo sapiens
  misc_RNA (1)...(19): siRNA sense strand
cuggaauuguggccguaaa

SEQ ID NO: 2276925 - RNA, 19 nt, Homo sapiens
  misc_RNA (1)...(19): siRNA sense strand
ggaagaaagcugaggaggc

SEQ ID NO: 2276926 - RNA, 19 nt, Homo sapiens
  misc_RNA (1)...(19): siRNA sense strand
gaaaacgggaagaggcgaa

SEQ ID NO: 2276927 - RNA, 19 nt, Homo sapiens
  misc_RNA (1)...(19): siRNA sense strand
ccguaaagcgagugaaacc

SEQ ID NO: 2276928 - RNA, 19 nt, Homo sapiens
  misc_RNA (1)...(19): siRNA sense strand
cagacagaaccaaagaaaa

SEQ ID NO: 2276929 - RNA, 19 nt, Homo sapiens
  misc_RNA (1)...(19): siRNA sense strand
acagugacgccgaggacuu

SEQ ID NO: 2276930 - RNA, 19 nt, Homo sapiens
  misc_RNA (1)...(19): siRNA sense strand
ucaagaagcagaccgggaa

SEQ ID NO: 2276931 - RNA, 19 nt, Homo sapiens
  misc_RNA (1)...(19): siRNA sense strand
cauccaagcaagcgaccau

SEQ ID NO: 2276932 - RNA, 19 nt, Homo sapiens
  misc_RNA (1)...(19): siRNA sense strand
cugcaguggcuguaacaca

SEQ ID NO: 2276933 - RNA, 19 nt, Homo sapiens
  misc_RNA (1)...(19): siRNA sense strand
agggacagaaacagaccua

SEQ ID NO: 2276934 - RNA, 19 nt, Homo sapiens
  misc_RNA (1)...(19): siRNA sense strand
ccaucgugcuggagggcaa

SEQ ID NO: 2276935 - RNA, 19 nt, Homo sapiens
  misc_RNA (1)...(19): siRNA sense strand
gagcauaccucaagcugga

SEQ ID NO: 2276936 - RNA, 19 nt, Homo sapiens
  misc_RNA (1)...(19): siRNA sense strand
agacaaaccauacagguga

SEQ ID NO: 2276937 - RNA, 19 nt, Homo sapiens
  misc_RNA (1)...(19): siRNA sense strand
agaaugagacggagcccau

SEQ ID NO: 2276938 - RNA, 19 nt, Homo sapiens
  misc_RNA (1)...(19): siRNA sense strand
uuaacuuccacgugguaaa

SEQ ID NO: 2276939 - RNA, 19 nt, Homo sapiens
  misc_RNA (1)...(19): siRNA sense strand
ggagaaaggcgaccgagca

SEQ ID NO: 2276940 - RNA, 19 nt, Homo sapiens
  misc_RNA (1)...(19): siRNA sense strand
cuaaacggguggccgguga

SEQ ID NO: 2276941 - RNA, 19 nt, Homo sapiens
  misc_RNA (1)...(19): siRNA sense strand
acgaaggagacgaggucau

SEQ ID NO: 2276942 - RNA, 19 nt, Homo sapiens
  misc_RNA (1)...(19): siRNA sense strand
gcacaucagcauugucuca

SEQ ID NO: 2276943 - RNA, 19 nt, Homo sapiens
  misc_RNA (1)...(19): siRNA sense strand
ugacgaagauccuggcaag

SEQ ID NO: 2276944 - RNA, 19 nt, Homo sapiens
  misc_RNA (1)...(19): siRNA sense strand
ccacuugaaaggagaaaua

SEQ ID NO: 2276945 - RNA, 19 nt, Homo sapiens
  misc_RNA (1)...(19): siRNA sense strand
aaaugaagguacagcccaa

SEQ ID NO: 2276946 - RNA, 19 nt, Homo sapiens
  misc_RNA (1)...(19): siRNA sense strand
cauuagagauccaagcaca

SEQ ID NO: 2276947 - RNA, 19 nt, Homo sapiens
  misc_RNA (1)...(19): siRNA sense strand
ccucagaaugacugcaaga

SEQ ID NO: 2276948 - RNA, 19 nt, Homo sapiens
  misc_RNA (1)...(19): siRNA sense strand
gcaacugacuugauccgaa

SEQ ID NO: 2276949 - RNA, 19 nt, Homo sapiens
  misc_RNA (1)...(19): siRNA sense strand
aaucaauagaagaggaaag

SEQ ID NO: 2276950 - RNA, 19 nt, Homo sapiens
  misc_RNA (1)...(19): siRNA sense strand
aauagaagaggaaaggaau

SEQ ID NO: 2276951 - RNA, 19 nt, Homo sapiens
  misc_RNA (1)...(19): siRNA sense strand
gagucuagaugucagccaa

SEQ ID NO: 2276952 - RNA, 19 nt, Homo sapiens
  misc_RNA (1)...(19): siRNA sense strand
uagaguuaacagaaggaau

SEQ ID NO: 2276953 - RNA, 19 nt, Homo sapiens
  misc_RNA (1)...(19): siRNA sense strand
cuucagaaacauuccaaga

SEQ ID NO: 2276954 - RNA, 19 nt, Homo sapiens
  misc_RNA (1)...(19): siRNA sense strand
uggcuuugacacagagaca

SEQ ID NO: 2276955 - RNA, 19 nt, Homo sapiens
  misc_RNA (1)...(19): siRNA sense strand
ugucuaaaaugaagguaca

SEQ ID NO: 2276956 - RNA, 19 nt, Homo sapiens
  misc_RNA (1)...(19): siRNA sense strand
ugaaaggagaaauagcauu

SEQ ID NO: 2276957 - RNA, 19 nt, Homo sapiens
  misc_RNA (1)...(19): siRNA sense strand
cugcaagacuaagggacuu

SEQ ID NO: 2276958 - RNA, 19 nt, Homo sapiens
  misc_RNA (1)...(19): siRNA sense strand
guucuuuggcuuugacaca

SEQ ID NO: 2276959 - RNA, 19 nt, Homo sapiens
  misc_RNA (1)...(19): siRNA sense strand
gacuugaugagaauggaaa

SEQ ID NO: 2276960 - RNA, 19 nt, Homo sapiens
  misc_RNA (1)...(19): siRNA sense strand
agucuagaugucagccaaa

SEQ ID NO: 2276961 - RNA, 19 nt, Homo sapiens
  misc_RNA (1)...(19): siRNA sense strand
ccacuugaaaggagaaaua

SEQ ID NO: 2276962 - RNA, 19 nt, Homo sapiens
  misc_RNA (1)...(19): siRNA sense strand
aaaugaagguacagcccaa

SEQ ID NO: 2276963 - RNA, 19 nt, Homo sapiens
  misc_RNA (1)...(19): siRNA sense strand
cauuagagauccaagcaca

SEQ ID NO: 2276964 - RNA, 19 nt, Homo sapiens
  misc_RNA (1)...(19): siRNA sense strand
ccucagaaugacugcaaga

SEQ ID NO: 2276965 - RNA, 19 nt, Homo sapiens
  misc_RNA (1)...(19): siRNA sense strand
gcaacugacuugauccgaa

SEQ ID NO: 2276966 - RNA, 19 nt, Homo sapiens
  misc_RNA (1)...(19): siRNA sense strand
aaucaauagaagaggaaag

SEQ ID NO: 2276967 - RNA, 19 nt, Homo sapiens
  misc_RNA (1)...(19): siRNA sense strand
aauagaagaggaaaggaau

SEQ ID NO: 2276968 - RNA, 19 nt, Homo sapiens
  misc_RNA (1)...(19): siRNA sense strand
gagucuagaugucagccaa

SEQ ID NO: 2276969 - RNA, 19 nt, Homo sapiens
  misc_RNA (1)...(19): siRNA sense strand
uagaguuaacagaaggaau

SEQ ID NO: 2276970 - RNA, 19 nt, Homo sapiens
  misc_RNA (1)...(19): siRNA sense strand
cuucagaaacauuccaaga

SEQ ID NO: 2276971 - RNA, 19 nt, Homo sapiens
  misc_RNA (1)...(19): siRNA sense strand
uggcuuugacacagagaca

SEQ ID NO: 2276972 - RNA, 19 nt, Homo sapiens
  misc_RNA (1)...(19): siRNA sense strand
ugucuaaaaugaagguaca

SEQ ID NO: 2276973 - RNA, 19 nt, Homo sapiens
  misc_RNA (1)...(19): siRNA sense strand
ugaaaggagaaauagcauu

SEQ ID NO: 2276974 - RNA, 19 nt, Homo sapiens
  misc_RNA (1)...(19): siRNA sense strand
cugcaagacuaagggacuu

SEQ ID NO: 2276975 - RNA, 19 nt, Homo sapiens
  misc_RNA (1)...(19): siRNA sense strand
guucuuuggcuuugacaca

SEQ ID NO: 2276976 - RNA, 19 nt, Homo sapiens
  misc_RNA (1)...(19): siRNA sense strand
gacuugaugagaauggaaa

SEQ ID NO: 2276977 - RNA, 19 nt, Homo sapiens
  misc_RNA (1)...(19): siRNA sense strand
agucuagaugucagccaaa

SEQ ID NO: 2276978 - RNA, 19 nt, Homo sapiens
  misc_RNA (1)...(19): siRNA sense strand
ggaaagaaauacugagccu

SEQ ID NO: 2276979 - RNA, 19 nt, Homo sapiens
  misc_RNA (1)...(19): siRNA sense strand
acauaaaacggauggaaaa

SEQ ID NO: 2276980 - RNA, 19 nt, Homo sapiens
  misc_RNA (1)...(19): siRNA sense strand
cggauuagucaguguaaau

SEQ ID NO: 2276981 - RNA, 19 nt, Homo sapiens
  misc_RNA (1)...(19): siRNA sense strand
cuguugaauuacuggaaau

SEQ ID NO: 2276982 - RNA, 19 nt, Homo sapiens
  misc_RNA (1)...(19): siRNA sense strand
aauacugagccuugauaaa

SEQ ID NO: 2276983 - RNA, 19 nt, Homo sapiens
  misc_RNA (1)...(19): siRNA sense strand
acuucagaaaggaaagaaa

SEQ ID NO: 2276984 - RNA, 19 nt, Homo sapiens
  misc_RNA (1)...(19): siRNA sense strand
cuucagaaaggaaagaaau

SEQ ID NO: 2276985 - RNA, 19 nt, Homo sapiens
  misc_RNA (1)...(19): siRNA sense strand
aguugaagauuuaaggagu

SEQ ID NO: 2276986 - RNA, 19 nt, Homo sapiens
  misc_RNA (1)...(19): siRNA sense strand
gacauaaaacggauggaaa

SEQ ID NO: 2276987 - RNA, 19 nt, Homo sapiens
  misc_RNA (1)...(19): siRNA sense strand
uugauaaacuagaagcuca

SEQ ID NO: 2276988 - RNA, 19 nt, Homo sapiens
  misc_RNA (1)...(19): siRNA sense strand
cuucaaaguggcacaaaca

SEQ ID NO: 2276989 - RNA, 19 nt, Homo sapiens
  misc_RNA (1)...(19): siRNA sense strand
ugcuagaauaguugaagaa

SEQ ID NO: 2276990 - RNA, 19 nt, Homo sapiens
  misc_RNA (1)...(19): siRNA sense strand
aggauugagaaaugccaaa

SEQ ID NO: 2276991 - RNA, 19 nt, Homo sapiens
  misc_RNA (1)...(19): siRNA sense strand
cugcuagaauaguugaaga

SEQ ID NO: 2276992 - RNA, 19 nt, Homo sapiens
  misc_RNA (1)...(19): siRNA sense strand
agauaugaguuguggagag

SEQ ID NO: 2276993 - RNA, 19 nt, Homo sapiens
  misc_RNA (1)...(19): siRNA sense strand
cagaaaggaaagaaauacu

SEQ ID NO: 2276994 - RNA, 19 nt, Homo sapiens
  misc_RNA (1)...(19): siRNA sense strand
gauuaaugacacugaguuc

SEQ ID NO: 2276995 - RNA, 19 nt, Homo sapiens
  misc_RNA (1)...(19): siRNA sense strand
guguaaauguacugcuucu

SEQ ID NO: 2276996 - RNA, 19 nt, Homo sapiens
  misc_RNA (1)...(19): siRNA sense strand
gauuuaaggaguuuagcca

SEQ ID NO: 2276997 - RNA, 19 nt, Homo sapiens
  misc_RNA (1)...(19): siRNA sense strand
ucauacuucagaaaggaaa

SEQ ID NO: 2276998 - RNA, 19 nt, Homo sapiens
  misc_RNA (1)...(19): siRNA sense strand
ccggauuagucaguguaaa

SEQ ID NO: 2276999 - RNA, 19 nt, Homo sapiens
  misc_RNA (1)...(19): siRNA sense strand
aaggagaaccugaaggaca

SEQ ID NO: 2277000 - RNA, 19 nt, Homo sapiens
  misc_RNA (1)...(19): siRNA sense strand
gugaguucaacgagaagaa

SEQ ID NO: 2277001 - RNA, 19 nt, Homo sapiens
  misc_RNA (1)...(19): siRNA sense strand
acaccaugaccaagcgcua

SEQ ID NO: 2277002 - RNA, 19 nt, Homo sapiens
  misc_RNA (1)...(19): siRNA sense strand
gcaagacggugguggcucu

SEQ ID NO: 2277003 - RNA, 19 nt, Homo sapiens
  misc_RNA (1)...(19): siRNA sense strand
cugucauggcagugggcau

SEQ ID NO: 2277004 - RNA, 19 nt, Homo sapiens
  misc_RNA (1)...(19): siRNA sense strand
aggagaaccugaaggacac

SEQ ID NO: 2277005 - RNA, 19 nt, Homo sapiens
  misc_RNA (1)...(19): siRNA sense strand
aaggagaaccugaaggaca

SEQ ID NO: 2277006 - RNA, 19 nt, Homo sapiens
  misc_RNA (1)...(19): siRNA sense strand
gugaguucaacgagaagaa

SEQ ID NO: 2277007 - RNA, 19 nt, Homo sapiens
  misc_RNA (1)...(19): siRNA sense strand
acaccaugaccaagcgcua

SEQ ID NO: 2277008 - RNA, 19 nt, Homo sapiens
  misc_RNA (1)...(19): siRNA sense strand
gcaagacggugguggcucu

SEQ ID NO: 2277009 - RNA, 19 nt, Homo sapiens
  misc_RNA (1)...(19): siRNA sense strand
cugucauggcagugggcau

SEQ ID NO: 2277010 - RNA, 19 nt, Homo sapiens
  misc_RNA (1)...(19): siRNA sense strand
aggagaaccugaaggacac

SEQ ID NO: 2277011 - RNA, 19 nt, Homo sapiens
  misc_RNA (1)...(19): siRNA sense strand
uggaaaaggaagaggaaaa

SEQ ID NO: 2277012 - RNA, 19 nt, Homo sapiens
  misc_RNA (1)...(19): siRNA sense strand
ggaagauggaaguggagga

SEQ ID NO: 2277013 - RNA, 19 nt, Homo sapiens
  misc_RNA (1)...(19): siRNA sense strand
uggacauccuagagaguga

SEQ ID NO: 2277014 - RNA, 19 nt, Homo sapiens
  misc_RNA (1)...(19): siRNA sense strand
cugaggaagaugauggauu

SEQ ID NO: 2277015 - RNA, 19 nt, Homo sapiens
  misc_RNA (1)...(19): siRNA sense strand
ccaugaaccacgaggccuu

SEQ ID NO: 2277016 - RNA, 19 nt, Homo sapiens
  misc_RNA (1)...(19): siRNA sense strand
ggagauuacucuaaggccu

SEQ ID NO: 2277017 - RNA, 19 nt, Homo sapiens
  misc_RNA (1)...(19): siRNA sense strand
agauggaaguggaggagcu

SEQ ID NO: 2277018 - RNA, 19 nt, Homo sapiens
  misc_RNA (1)...(19): siRNA sense strand
acaucaagacugcggugaa

SEQ ID NO: 2277019 - RNA, 19 nt, Homo sapiens
  misc_RNA (1)...(19): siRNA sense strand
gcucaaaaucacuguguca

SEQ ID NO: 2277020 - RNA, 19 nt, Homo sapiens
  misc_RNA (1)...(19): siRNA sense strand
gagauuacucuaaggccuu

SEQ ID NO: 2277021 - RNA, 19 nt, Homo sapiens
  misc_RNA (1)...(19): siRNA sense strand
cuaaagaccuuccgccuca

SEQ ID NO: 2277022 - RNA, 19 nt, Homo sapiens
  misc_RNA (1)...(19): siRNA sense strand
augauggauuuguggacau

SEQ ID NO: 2277023 - RNA, 19 nt, Homo sapiens
  misc_RNA (1)...(19): siRNA sense strand
gagagugacuuaaaggaug

SEQ ID NO: 2277024 - RNA, 19 nt, Homo sapiens
  misc_RNA (1)...(19): siRNA sense strand
uggaaaaggaagaggaaaa

SEQ ID NO: 2277025 - RNA, 19 nt, Homo sapiens
  misc_RNA (1)...(19): siRNA sense strand
ggaagauggaaguggagga

SEQ ID NO: 2277026 - RNA, 19 nt, Homo sapiens
  misc_RNA (1)...(19): siRNA sense strand
uggacauccuagagaguga

SEQ ID NO: 2277027 - RNA, 19 nt, Homo sapiens
  misc_RNA (1)...(19): siRNA sense strand
cugaggaagaugauggauu

SEQ ID NO: 2277028 - RNA, 19 nt, Homo sapiens
  misc_RNA (1)...(19): siRNA sense strand
ccaugaaccacgaggccuu

SEQ ID NO: 2277029 - RNA, 19 nt, Homo sapiens
  misc_RNA (1)...(19): siRNA sense strand
ggagauuacucuaaggccu

SEQ ID NO: 2277030 - RNA, 19 nt, Homo sapiens
  misc_RNA (1)...(19): siRNA sense strand
agauggaaguggaggagcu

SEQ ID NO: 2277031 - RNA, 19 nt, Homo sapiens
  misc_RNA (1)...(19): siRNA sense strand
acaucaagacugcggugaa

SEQ ID NO: 2277032 - RNA, 19 nt, Homo sapiens
  misc_RNA (1)...(19): siRNA sense strand
gcucaaaaucacuguguca

SEQ ID NO: 2277033 - RNA, 19 nt, Homo sapiens
  misc_RNA (1)...(19): siRNA sense strand
gagauuacucuaaggccuu

SEQ ID NO: 2277034 - RNA, 19 nt, Homo sapiens
  misc_RNA (1)...(19): siRNA sense strand
cuaaagaccuuccgccuca

SEQ ID NO: 2277035 - RNA, 19 nt, Homo sapiens
  misc_RNA (1)...(19): siRNA sense strand
augauggauuuguggacau

SEQ ID NO: 2277036 - RNA, 19 nt, Homo sapiens
  misc_RNA (1)...(19): siRNA sense strand
gagagugacuuaaaggaug

SEQ ID NO: 2277037 - RNA, 19 nt, Homo sapiens
  misc_RNA (1)...(19): siRNA sense strand
uggaaaaggaagaggaaaa

SEQ ID NO: 2277038 - RNA, 19 nt, Homo sapiens
  misc_RNA (1)...(19): siRNA sense strand
ggaagauggaaguggagga

SEQ ID NO: 2277039 - RNA, 19 nt, Homo sapiens
  misc_RNA (1)...(19): siRNA sense strand
uggacauccuagagaguga

SEQ ID NO: 2277040 - RNA, 19 nt, Homo sapiens
  misc_RNA (1)...(19): siRNA sense strand
cugaggaagaugauggauu

SEQ ID NO: 2277041 - RNA, 19 nt, Homo sapiens
  misc_RNA (1)...(19): siRNA sense strand
ccaugaaccacgaggccuu

SEQ ID NO: 2277042 - RNA, 19 nt, Homo sapiens
  misc_RNA (1)...(19): siRNA sense strand
ggagauuacucuaaggccu

SEQ ID NO: 2277043 - RNA, 19 nt, Homo sapiens
  misc_RNA (1)...(19): siRNA sense strand
agauggaaguggaggagcu

SEQ ID NO: 2277044 - RNA, 19 nt, Homo sapiens
  misc_RNA (1)...(19): siRNA sense strand
acaucaagacugcggugaa

SEQ ID NO: 2277045 - RNA, 19 nt, Homo sapiens
  misc_RNA (1)...(19): siRNA sense strand
gcucaaaaucacuguguca

SEQ ID NO: 2277046 - RNA, 19 nt, Homo sapiens
  misc_RNA (1)...(19): siRNA sense strand
gagauuacucuaaggccuu

SEQ ID NO: 2277047 - RNA, 19 nt, Homo sapiens
  misc_RNA (1)...(19): siRNA sense strand
cuaaagaccuuccgccuca

SEQ ID NO: 2277048 - RNA, 19 nt, Homo sapiens
  misc_RNA (1)...(19): siRNA sense strand
augauggauuuguggacau

SEQ ID NO: 2277049 - RNA, 19 nt, Homo sapiens
  misc_RNA (1)...(19): siRNA sense strand
gagagugacuuaaaggaug

SEQ ID NO: 2277050 - RNA, 19 nt, Homo sapiens
  misc_RNA (1)...(19): siRNA sense strand
uggaaaaggaagaggaaaa

SEQ ID NO: 2277051 - RNA, 19 nt, Homo sapiens
  misc_RNA (1)...(19): siRNA sense strand
ggaagauggaaguggagga

SEQ ID NO: 2277052 - RNA, 19 nt, Homo sapiens
  misc_RNA (1)...(19): siRNA sense strand
uggacauccuagagaguga

SEQ ID NO: 2277053 - RNA, 19 nt, Homo sapiens
  misc_RNA (1)...(19): siRNA sense strand
cugaggaagaugauggauu

SEQ ID NO: 2277054 - RNA, 19 nt, Homo sapiens
  misc_RNA (1)...(19): siRNA sense strand
ccaugaaccacgaggccuu

SEQ ID NO: 2277055 - RNA, 19 nt, Homo sapiens
  misc_RNA (1)...(19): siRNA sense strand
ggagauuacucuaaggccu

SEQ ID NO: 2277056 - RNA, 19 nt, Homo sapiens
  misc_RNA (1)...(19): siRNA sense strand
agauggaaguggaggagcu

SEQ ID NO: 2277057 - RNA, 19 nt, Homo sapiens
  misc_RNA (1)...(19): siRNA sense strand
acaucaagacugcggugaa

SEQ ID NO: 2277058 - RNA, 19 nt, Homo sapiens
  misc_RNA (1)...(19): siRNA sense strand
gcucaaaaucacuguguca

SEQ ID NO: 2277059 - RNA, 19 nt, Homo sapiens
  misc_RNA (1)...(19): siRNA sense strand
gagauuacucuaaggccuu

SEQ ID NO: 2277060 - RNA, 19 nt, Homo sapiens
  misc_RNA (1)...(19): siRNA sense strand
cuaaagaccuuccgccuca

SEQ ID NO: 2277061 - RNA, 19 nt, Homo sapiens
  misc_RNA (1)...(19): siRNA sense strand
augauggauuuguggacau

SEQ ID NO: 2277062 - RNA, 19 nt, Homo sapiens
  misc_RNA (1)...(19): siRNA sense strand
gagagugacuuaaaggaug

SEQ ID NO: 2277063 - RNA, 19 nt, Homo sapiens
  misc_RNA (1)...(19): siRNA sense strand
ggaaagagagcaaggggaa

SEQ ID NO: 2277064 - RNA, 19 nt, Homo sapiens
  misc_RNA (1)...(19): siRNA sense strand
acacagacaucauccggaa

SEQ ID NO: 2277065 - RNA, 19 nt, Homo sapiens
  misc_RNA (1)...(19): siRNA sense strand
gcgugacacugguggacga

SEQ ID NO: 2277066 - RNA, 19 nt, Homo sapiens
  misc_RNA (1)...(19): siRNA sense strand
acgcagaacgucaggacca

SEQ ID NO: 2277067 - RNA, 19 nt, Homo sapiens
  misc_RNA (1)...(19): siRNA sense strand
aguacugcgugaagaccaa

SEQ ID NO: 2277068 - RNA, 19 nt, Homo sapiens
  misc_RNA (1)...(19): siRNA sense strand
gggaguacacagacaucau

SEQ ID NO: 2277069 - RNA, 19 nt, Homo sapiens
  misc_RNA (1)...(19): siRNA sense strand
cagacaaagaccaggacua

SEQ ID NO: 2277070 - RNA, 19 nt, Homo sapiens
  misc_RNA (1)...(19): siRNA sense strand
gcuuugacgccgagagcua

SEQ ID NO: 2277071 - RNA, 19 nt, Homo sapiens
  misc_RNA (1)...(19): siRNA sense strand
ggguuaagcacaacagcaa

SEQ ID NO: 2277072 - RNA, 19 nt, Homo sapiens
  misc_RNA (1)...(19): siRNA sense strand
acaaagacaaagaaggcaa

SEQ ID NO: 2277073 - RNA, 19 nt, Homo sapiens
  misc_RNA (1)...(19): siRNA sense strand
ccucagagucagacaaaga

SEQ ID NO: 2277074 - RNA, 19 nt, Homo sapiens
  misc_RNA (1)...(19): siRNA sense strand
ggaggagagcgguggucaa

SEQ ID NO: 2277075 - RNA, 19 nt, Homo sapiens
  misc_RNA (1)...(19): siRNA sense strand
ucagaagacagaagagaga

SEQ ID NO: 2277076 - RNA, 19 nt, Homo sapiens
  misc_RNA (1)...(19): siRNA sense strand
cgggaaugcaguugaggau

SEQ ID NO: 2277077 - RNA, 19 nt, Homo sapiens
  misc_RNA (1)...(19): siRNA sense strand
cguccugggcagagugaau

SEQ ID NO: 2277078 - RNA, 19 nt, Homo sapiens
  misc_RNA (1)...(19): siRNA sense strand
aucucaagcucauggauaa

SEQ ID NO: 2277079 - RNA, 19 nt, Homo sapiens
  misc_RNA (1)...(19): siRNA sense strand
cguaaucaccacacugaaa

SEQ ID NO: 2277080 - RNA, 19 nt, Homo sapiens
  misc_RNA (1)...(19): siRNA sense strand
uaucggauuuggagagaca

SEQ ID NO: 2277081 - RNA, 19 nt, Homo sapiens
  misc_RNA (1)...(19): siRNA sense strand
ccuuagaggugggugacua

SEQ ID NO: 2277082 - RNA, 19 nt, Homo sapiens
  misc_RNA (1)...(19): siRNA sense strand
ggugagggguuaagcacaa

SEQ ID NO: 2277083 - RNA, 19 nt, Homo sapiens
  misc_RNA (1)...(19): siRNA sense strand
gugaagaacagcacguaca

SEQ ID NO: 2277084 - RNA, 19 nt, Homo sapiens
  misc_RNA (1)...(19): siRNA sense strand
ugucgaagcaggauugcaa

SEQ ID NO: 2277085 - RNA, 19 nt, Homo sapiens
  misc_RNA (1)...(19): siRNA sense strand
cugccaaucccgaugaaau

SEQ ID NO: 2277086 - RNA, 19 nt, Homo sapiens
  misc_RNA (1)...(19): siRNA sense strand
agaucaaauccaacaaaga

SEQ ID NO: 2277087 - RNA, 19 nt, Homo sapiens
  misc_RNA (1)...(19): siRNA sense strand
ccgaucagaaugacaacaa

SEQ ID NO: 2277088 - RNA, 19 nt, Homo sapiens
  misc_RNA (1)...(19): siRNA sense strand
uggugugauuacagucaaa

SEQ ID NO: 2277089 - RNA, 19 nt, Homo sapiens
  misc_RNA (1)...(19): siRNA sense strand
acaaagaaggcaagguuuu

SEQ ID NO: 2277090 - RNA, 19 nt, Homo sapiens
  misc_RNA (1)...(19): siRNA sense strand
gggacuccaccuacagaaa

SEQ ID NO: 2277091 - RNA, 19 nt, Homo sapiens
  misc_RNA (1)...(19): siRNA sense strand
cagacacauuuauggaaca

SEQ ID NO: 2277092 - RNA, 19 nt, Homo sapiens
  misc_RNA (1)...(19): siRNA sense strand
gaggaugacacccgggaca

SEQ ID NO: 2277093 - RNA, 19 nt, Homo sapiens
  misc_RNA (1)...(19): siRNA sense strand
uggaugugcuggaugugaa

SEQ ID NO: 2277094 - RNA, 19 nt, Homo sapiens
  misc_RNA (1)...(19): siRNA sense strand
ggcuggaccgagagaguuu

SEQ ID NO: 2277095 - RNA, 19 nt, Homo sapiens
  misc_RNA (1)...(19): siRNA sense strand
cguauacccuggugguuca

SEQ ID NO: 2277096 - RNA, 19 nt, Homo sapiens
  misc_RNA (1)...(19): siRNA sense strand
gaauaaagaccaagugacc

SEQ ID NO: 2277097 - RNA, 19 nt, Homo sapiens
  misc_RNA (1)...(19): siRNA sense strand
aggccaagcagcaguacau

SEQ ID NO: 2277098 - RNA, 19 nt, Homo sapiens
  misc_RNA (1)...(19): siRNA sense strand
cugaaaagagaguggaagu

SEQ ID NO: 2277099 - RNA, 19 nt, Homo sapiens
  misc_RNA (1)...(19): siRNA sense strand
aaucucaagcucauggaua

SEQ ID NO: 2277100 - RNA, 19 nt, Homo sapiens
  misc_RNA (1)...(19): siRNA sense strand
agaagacagaagagagacu

SEQ ID NO: 2277101 - RNA, 19 nt, Homo sapiens
  misc_RNA (1)...(19): siRNA sense strand
ugaugaagaaggaggcgga

SEQ ID NO: 2277102 - RNA, 19 nt, Homo sapiens
  misc_RNA (1)...(19): siRNA sense strand
uggccaaggagcugacaca

SEQ ID NO: 2277103 - RNA, 19 nt, Homo sapiens
  misc_RNA (1)...(19): siRNA sense strand
ugaaagugacugaugcuga

SEQ ID NO: 2277104 - RNA, 19 nt, Homo sapiens
  misc_RNA (1)...(19): siRNA sense strand
uggccuuagagguggguga

SEQ ID NO: 2277105 - RNA, 19 nt, Homo sapiens
  misc_RNA (1)...(19): siRNA sense strand
agagaaacaggauggcuga

SEQ ID NO: 2277106 - RNA, 19 nt, Homo sapiens
  misc_RNA (1)...(19): siRNA sense strand
acaggauggcugaagguga

SEQ ID NO: 2277107 - RNA, 19 nt, Homo sapiens
  misc_RNA (1)...(19): siRNA sense strand
acaccauauugaaugauga

SEQ ID NO: 2277108 - RNA, 19 nt, Homo sapiens
  misc_RNA (1)...(19): siRNA sense strand
acuauauucuucugugaga

SEQ ID NO: 2277109 - RNA, 19 nt, Homo sapiens
  misc_RNA (1)...(19): siRNA sense strand
aaaucaaucucaagcucau

SEQ ID NO: 2277110 - RNA, 19 nt, Homo sapiens
  misc_RNA (1)...(19): siRNA sense strand
aggaauucuugcuuugcua

SEQ ID NO: 2277111 - RNA, 19 nt, Homo sapiens
  misc_RNA (1)...(19): siRNA sense strand
gcggagaagaggaccagga

SEQ ID NO: 2277112 - RNA, 19 nt, Homo sapiens
  misc_RNA (1)...(19): siRNA sense strand
ugccaaucccgaugaaauu

SEQ ID NO: 2277113 - RNA, 19 nt, Homo sapiens
  misc_RNA (1)...(19): siRNA sense strand
ccucagaagacagaagaga

SEQ ID NO: 2277114 - RNA, 19 nt, Homo sapiens
  misc_RNA (1)...(19): siRNA sense strand
cagccaagauccugagcuc

SEQ ID NO: 2277115 - RNA, 19 nt, Homo sapiens
  misc_RNA (1)...(19): siRNA sense strand
guuaagcacaacagcaaca

SEQ ID NO: 2277116 - RNA, 19 nt, Homo sapiens
  misc_RNA (1)...(19): siRNA sense strand
cagugaacaacgauggcau

SEQ ID NO: 2277117 - RNA, 19 nt, Homo sapiens
  misc_RNA (1)...(19): siRNA sense strand
agaaggaggcggagaagag

SEQ ID NO: 2277118 - RNA, 19 nt, Homo sapiens
  misc_RNA (1)...(19): siRNA sense strand
auccaaagccucaggucau

SEQ ID NO: 2277119 - RNA, 19 nt, Homo sapiens
  misc_RNA (1)...(19): siRNA sense strand
agggaauuuauuugggaaa

SEQ ID NO: 2277120 - RNA, 19 nt, Homo sapiens
  misc_RNA (1)...(19): siRNA sense strand
ucaaguaggaagaggcuau

SEQ ID NO: 2277121 - RNA, 19 nt, Homo sapiens
  misc_RNA (1)...(19): siRNA sense strand
ggauaugguuggucaaaau

SEQ ID NO: 2277122 - RNA, 19 nt, Homo sapiens
  misc_RNA (1)...(19): siRNA sense strand
augcugaaauggaguacaa

SEQ ID NO: 2277123 - RNA, 19 nt, Homo sapiens
  misc_RNA (1)...(19): siRNA sense strand
ccaagagacuggaucguga

SEQ ID NO: 2277124 - RNA, 19 nt, Homo sapiens
  misc_RNA (1)...(19): siRNA sense strand
cacuaugagaagacggaaa

SEQ ID NO: 2277125 - RNA, 19 nt, Homo sapiens
  misc_RNA (1)...(19): siRNA sense strand
aaaucagugcuguggauaa

SEQ ID NO: 2277126 - RNA, 19 nt, Homo sapiens
  misc_RNA (1)...(19): siRNA sense strand
cugaauuugccauggacua

SEQ ID NO: 2277127 - RNA, 19 nt, Homo sapiens
  misc_RNA (1)...(19): siRNA sense strand
aggcuaaagaccaguauuu

SEQ ID NO: 2277128 - RNA, 19 nt, Homo sapiens
  misc_RNA (1)...(19): siRNA sense strand
acgacaacugugaagauaa

SEQ ID NO: 2277129 - RNA, 19 nt, Homo sapiens
  misc_RNA (1)...(19): siRNA sense strand
aaacauggauagagaggcu

SEQ ID NO: 2277130 - RNA, 19 nt, Homo sapiens
  misc_RNA (1)...(19): siRNA sense strand
cagagaaaauauugugaga

SEQ ID NO: 2277131 - RNA, 19 nt, Homo sapiens
  misc_RNA (1)...(19): siRNA sense strand
agauaauuguggaagaugu

SEQ ID NO: 2277132 - RNA, 19 nt, Homo sapiens
  misc_RNA (1)...(19): siRNA sense strand
agucggaguuugucaucaa

SEQ ID NO: 2277133 - RNA, 19 nt, Homo sapiens
  misc_RNA (1)...(19): siRNA sense strand
caaaggauaugguugguca

SEQ ID NO: 2277134 - RNA, 19 nt, Homo sapiens
  misc_RNA (1)...(19): siRNA sense strand
acggauagaagcugcaaau

SEQ ID NO: 2277135 - RNA, 19 nt, Homo sapiens
  misc_RNA (1)...(19): siRNA sense strand
cucucaagguccagaucaa

SEQ ID NO: 2277136 - RNA, 19 nt, Homo sapiens
  misc_RNA (1)...(19): siRNA sense strand
aagaaagagacaucagaga

SEQ ID NO: 2277137 - RNA, 19 nt, Homo sapiens
  misc_RNA (1)...(19): siRNA sense strand
ccucaguuguggccagaau

SEQ ID NO: 2277138 - RNA, 19 nt, Homo sapiens
  misc_RNA (1)...(19): siRNA sense strand
acauggauagagaggcuaa

SEQ ID NO: 2277139 - RNA, 19 nt, Homo sapiens
  misc_RNA (1)...(19): siRNA sense strand
ugacauuauugguguugau

SEQ ID NO: 2277140 - RNA, 19 nt, Homo sapiens
  misc_RNA (1)...(19): siRNA sense strand
cugaaauggaguacaagau

SEQ ID NO: 2277141 - RNA, 19 nt, Homo sapiens
  misc_RNA (1)...(19): siRNA sense strand
aagaaacccaggaaggaau

SEQ ID NO: 2277142 - RNA, 19 nt, Homo sapiens
  misc_RNA (1)...(19): siRNA sense strand
gcugaaauggaguacaaga

SEQ ID NO: 2277143 - RNA, 19 nt, Homo sapiens
  misc_RNA (1)...(19): siRNA sense strand
ugauguugauaaaggagau

SEQ ID NO: 2277144 - RNA, 19 nt, Homo sapiens
  misc_RNA (1)...(19): siRNA sense strand
gaugagaacacuggggaua

SEQ ID NO: 2277145 - RNA, 19 nt, Homo sapiens
  misc_RNA (1)...(19): siRNA sense strand
ggucuacaguauucugcaa

SEQ ID NO: 2277146 - RNA, 19 nt, Homo sapiens
  misc_RNA (1)...(19): siRNA sense strand
acuucucaguggagccaaa

SEQ ID NO: 2277147 - RNA, 19 nt, Homo sapiens
  misc_RNA (1)...(19): siRNA sense strand
auacagaaggagcuggauu

SEQ ID NO: 2277148 - RNA, 19 nt, Homo sapiens
  misc_RNA (1)...(19): siRNA sense strand
ggauaggcucaccaacaaa

SEQ ID NO: 2277149 - RNA, 19 nt, Homo sapiens
  misc_RNA (1)...(19): siRNA sense strand
gaucgagagacaaaugcua

SEQ ID NO: 2277150 - RNA, 19 nt, Homo sapiens
  misc_RNA (1)...(19): siRNA sense strand
gagaaacggcuuccggaga

SEQ ID NO: 2277151 - RNA, 19 nt, Homo sapiens
  misc_RNA (1)...(19): siRNA sense strand
caauacugaccaggagaaa

SEQ ID NO: 2277152 - RNA, 19 nt, Homo sapiens
  misc_RNA (1)...(19): siRNA sense strand
gguccagaucaaagcccua

SEQ ID NO: 2277153 - RNA, 19 nt, Homo sapiens
  misc_RNA (1)...(19): siRNA sense strand
ugugaagauaauuguggaa

SEQ ID NO: 2277154 - RNA, 19 nt, Homo sapiens
  misc_RNA (1)...(19): siRNA sense strand
auauaacgucccagaguca

SEQ ID NO: 2277155 - RNA, 19 nt, Homo sapiens
  misc_RNA (1)...(19): siRNA sense strand
aguuguggccagaauuaaa

SEQ ID NO: 2277156 - RNA, 19 nt, Homo sapiens
  misc_RNA (1)...(19): siRNA sense strand
ugacgaagaaagagacauc

SEQ ID NO: 2277157 - RNA, 19 nt, Homo sapiens
  misc_RNA (1)...(19): siRNA sense strand
aaugucaucuuuagggaau

SEQ ID NO: 2277158 - RNA, 19 nt, Homo sapiens
  misc_RNA (1)...(19): siRNA sense strand
uauuggagcuaaugcugaa

SEQ ID NO: 2277159 - RNA, 19 nt, Homo sapiens
  misc_RNA (1)...(19): siRNA sense strand
caguuuuacuucagcuuaa

SEQ ID NO: 2277160 - RNA, 19 nt, Homo sapiens
  misc_RNA (1)...(19): siRNA sense strand
aggaacaaucaguuuacua

SEQ ID NO: 2277161 - RNA, 19 nt, Homo sapiens
  misc_RNA (1)...(19): siRNA sense strand
ccucuauguaggaaagcuu

SEQ ID NO: 2277162 - RNA, 19 nt, Homo sapiens
  misc_RNA (1)...(19): siRNA sense strand
cuggauaggcucaccaaca

SEQ ID NO: 2277163 - RNA, 19 nt, Homo sapiens
  misc_RNA (1)...(19): siRNA sense strand
gagccaaagacaggaguca

SEQ ID NO: 2277164 - RNA, 19 nt, Homo sapiens
  misc_RNA (1)...(19): siRNA sense strand
cauuauugguguugauccu

SEQ ID NO: 2277165 - RNA, 19 nt, Homo sapiens
  misc_RNA (1)...(19): siRNA sense strand
gaaagauaacaaagacaac

SEQ ID NO: 2277166 - RNA, 19 nt, Homo sapiens
  misc_RNA (1)...(19): siRNA sense strand
uuuaaaagcaucccagaua

SEQ ID NO: 2277167 - RNA, 19 nt, Homo sapiens
  misc_RNA (1)...(19): siRNA sense strand
aaagaaacccaggaaggaa

SEQ ID NO: 2277168 - RNA, 19 nt, Homo sapiens
  misc_RNA (1)...(19): siRNA sense strand
gagccagaauccaucucaa

SEQ ID NO: 2277169 - RNA, 19 nt, Homo sapiens
  misc_RNA (1)...(19): siRNA sense strand
acaacggaugcaacaaaua

SEQ ID NO: 2277170 - RNA, 19 nt, Homo sapiens
  misc_RNA (1)...(19): siRNA sense strand
uuaaacgacucgcggacau

SEQ ID NO: 2277171 - RNA, 19 nt, Homo sapiens
  misc_RNA (1)...(19): siRNA sense strand
agggaauuuauuugggaaa

SEQ ID NO: 2277172 - RNA, 19 nt, Homo sapiens
  misc_RNA (1)...(19): siRNA sense strand
ucaaguaggaagaggcuau

SEQ ID NO: 2277173 - RNA, 19 nt, Homo sapiens
  misc_RNA (1)...(19): siRNA sense strand
ggauaugguuggucaaaau

SEQ ID NO: 2277174 - RNA, 19 nt, Homo sapiens
  misc_RNA (1)...(19): siRNA sense strand
augcugaaauggaguacaa

SEQ ID NO: 2277175 - RNA, 19 nt, Homo sapiens
  misc_RNA (1)...(19): siRNA sense strand
ccaagagacuggaucguga

SEQ ID NO: 2277176 - RNA, 19 nt, Homo sapiens
  misc_RNA (1)...(19): siRNA sense strand
cacuaugagaagacggaaa

SEQ ID NO: 2277177 - RNA, 19 nt, Homo sapiens
  misc_RNA (1)...(19): siRNA sense strand
aaaucagugcuguggauaa

SEQ ID NO: 2277178 - RNA, 19 nt, Homo sapiens
  misc_RNA (1)...(19): siRNA sense strand
cugaauuugccauggacua

SEQ ID NO: 2277179 - RNA, 19 nt, Homo sapiens
  misc_RNA (1)...(19): siRNA sense strand
aggcuaaagaccaguauuu

SEQ ID NO: 2277180 - RNA, 19 nt, Homo sapiens
  misc_RNA (1)...(19): siRNA sense strand
acgacaacugugaagauaa

SEQ ID NO: 2277181 - RNA, 19 nt, Homo sapiens
  misc_RNA (1)...(19): siRNA sense strand
aaacauggauagagaggcu

SEQ ID NO: 2277182 - RNA, 19 nt, Homo sapiens
  misc_RNA (1)...(19): siRNA sense strand
cagagaaaauauugugaga

SEQ ID NO: 2277183 - RNA, 19 nt, Homo sapiens
  misc_RNA (1)...(19): siRNA sense strand
agauaauuguggaagaugu

SEQ ID NO: 2277184 - RNA, 19 nt, Homo sapiens
  misc_RNA (1)...(19): siRNA sense strand
agucggaguuugucaucaa

SEQ ID NO: 2277185 - RNA, 19 nt, Homo sapiens
  misc_RNA (1)...(19): siRNA sense strand
caaaggauaugguugguca

SEQ ID NO: 2277186 - RNA, 19 nt, Homo sapiens
  misc_RNA (1)...(19): siRNA sense strand
acggauagaagcugcaaau

SEQ ID NO: 2277187 - RNA, 19 nt, Homo sapiens
  misc_RNA (1)...(19): siRNA sense strand
cucucaagguccagaucaa

SEQ ID NO: 2277188 - RNA, 19 nt, Homo sapiens
  misc_RNA (1)...(19): siRNA sense strand
aagaaagagacaucagaga

SEQ ID NO: 2277189 - RNA, 19 nt, Homo sapiens
  misc_RNA (1)...(19): siRNA sense strand
ccucaguuguggccagaau

SEQ ID NO: 2277190 - RNA, 19 nt, Homo sapiens
  misc_RNA (1)...(19): siRNA sense strand
acauggauagagaggcuaa

SEQ ID NO: 2277191 - RNA, 19 nt, Homo sapiens
  misc_RNA (1)...(19): siRNA sense strand
ugacauuauugguguugau

SEQ ID NO: 2277192 - RNA, 19 nt, Homo sapiens
  misc_RNA (1)...(19): siRNA sense strand
cugaaauggaguacaagau

SEQ ID NO: 2277193 - RNA, 19 nt, Homo sapiens
  misc_RNA (1)...(19): siRNA sense strand
aagaaacccaggaaggaau

SEQ ID NO: 2277194 - RNA, 19 nt, Homo sapiens
  misc_RNA (1)...(19): siRNA sense strand
gcugaaauggaguacaaga

SEQ ID NO: 2277195 - RNA, 19 nt, Homo sapiens
  misc_RNA (1)...(19): siRNA sense strand
ugauguugauaaaggagau

SEQ ID NO: 2277196 - RNA, 19 nt, Homo sapiens
  misc_RNA (1)...(19): siRNA sense strand
gaugagaacacuggggaua

SEQ ID NO: 2277197 - RNA, 19 nt, Homo sapiens
  misc_RNA (1)...(19): siRNA sense strand
ggucuacaguauucugcaa

SEQ ID NO: 2277198 - RNA, 19 nt, Homo sapiens
  misc_RNA (1)...(19): siRNA sense strand
acuucucaguggagccaaa

SEQ ID NO: 2277199 - RNA, 19 nt, Homo sapiens
  misc_RNA (1)...(19): siRNA sense strand
auacagaaggagcuggauu

SEQ ID NO: 2277200 - RNA, 19 nt, Homo sapiens
  misc_RNA (1)...(19): siRNA sense strand
ggauaggcucaccaacaaa

SEQ ID NO: 2277201 - RNA, 19 nt, Homo sapiens
  misc_RNA (1)...(19): siRNA sense strand
gaucgagagacaaaugcua

SEQ ID NO: 2277202 - RNA, 19 nt, Homo sapiens
  misc_RNA (1)...(19): siRNA sense strand
gagaaacggcuuccggaga

SEQ ID NO: 2277203 - RNA, 19 nt, Homo sapiens
  misc_RNA (1)...(19): siRNA sense strand
caauacugaccaggagaaa

SEQ ID NO: 2277204 - RNA, 19 nt, Homo sapiens
  misc_RNA (1)...(19): siRNA sense strand
gguccagaucaaagcccua

SEQ ID NO: 2277205 - RNA, 19 nt, Homo sapiens
  misc_RNA (1)...(19): siRNA sense strand
ugugaagauaauuguggaa

SEQ ID NO: 2277206 - RNA, 19 nt, Homo sapiens
  misc_RNA (1)...(19): siRNA sense strand
auauaacgucccagaguca

SEQ ID NO: 2277207 - RNA, 19 nt, Homo sapiens
  misc_RNA (1)...(19): siRNA sense strand
aguuguggccagaauuaaa

SEQ ID NO: 2277208 - RNA, 19 nt, Homo sapiens
  misc_RNA (1)...(19): siRNA sense strand
ugacgaagaaagagacauc

SEQ ID NO: 2277209 - RNA, 19 nt, Homo sapiens
  misc_RNA (1)...(19): siRNA sense strand
aaugucaucuuuagggaau

SEQ ID NO: 2277210 - RNA, 19 nt, Homo sapiens
  misc_RNA (1)...(19): siRNA sense strand
uauuggagcuaaugcugaa

SEQ ID NO: 2277211 - RNA, 19 nt, Homo sapiens
  misc_RNA (1)...(19): siRNA sense strand
caguuuuacuucagcuuaa

SEQ ID NO: 2277212 - RNA, 19 nt, Homo sapiens
  misc_RNA (1)...(19): siRNA sense strand
aggaacaaucaguuuacua

SEQ ID NO: 2277213 - RNA, 19 nt, Homo sapiens
  misc_RNA (1)...(19): siRNA sense strand
ccucuauguaggaaagcuu

SEQ ID NO: 2277214 - RNA, 19 nt, Homo sapiens
  misc_RNA (1)...(19): siRNA sense strand
cuggauaggcucaccaaca

SEQ ID NO: 2277215 - RNA, 19 nt, Homo sapiens
  misc_RNA (1)...(19): siRNA sense strand
gagccaaagacaggaguca

SEQ ID NO: 2277216 - RNA, 19 nt, Homo sapiens
  misc_RNA (1)...(19): siRNA sense strand
cauuauugguguugauccu

SEQ ID NO: 2277217 - RNA, 19 nt, Homo sapiens
  misc_RNA (1)...(19): siRNA sense strand
gaaagauaacaaagacaac

SEQ ID NO: 2277218 - RNA, 19 nt, Homo sapiens
  misc_RNA (1)...(19): siRNA sense strand
uuuaaaagcaucccagaua

SEQ ID NO: 2277219 - RNA, 19 nt, Homo sapiens
  misc_RNA (1)...(19): siRNA sense strand
aaagaaacccaggaaggaa

SEQ ID NO: 2277220 - RNA, 19 nt, Homo sapiens
  misc_RNA (1)...(19): siRNA sense strand
gagccagaauccaucucaa

SEQ ID NO: 2277221 - RNA, 19 nt, Homo sapiens
  misc_RNA (1)...(19): siRNA sense strand
acaacggaugcaacaaaua

SEQ ID NO: 2277222 - RNA, 19 nt, Homo sapiens
  misc_RNA (1)...(19): siRNA sense strand
uuaaacgacucgcggacau

SEQ ID NO: 2277223 - RNA, 19 nt, Homo sapiens
  misc_RNA (1)...(19): siRNA sense strand
ccuagauagagaagagaaa

SEQ ID NO: 2277224 - RNA, 19 nt, Homo sapiens
  misc_RNA (1)...(19): siRNA sense strand
cagagaagucaaagaacaa

SEQ ID NO: 2277225 - RNA, 19 nt, Homo sapiens
  misc_RNA (1)...(19): siRNA sense strand
gcuuuaaagucuuggcaga

SEQ ID NO: 2277226 - RNA, 19 nt, Homo sapiens
  misc_RNA (1)...(19): siRNA sense strand
gggagagggcacugugaaa

SEQ ID NO: 2277227 - RNA, 19 nt, Homo sapiens
  misc_RNA (1)...(19): siRNA sense strand
aggacagcuuggaggauua

SEQ ID NO: 2277228 - RNA, 19 nt, Homo sapiens
  misc_RNA (1)...(19): siRNA sense strand
gccacagagccaagagaaa

SEQ ID NO: 2277229 - RNA, 19 nt, Homo sapiens
  misc_RNA (1)...(19): siRNA sense strand
caauauuguuccaggagau

SEQ ID NO: 2277230 - RNA, 19 nt, Homo sapiens
  misc_RNA (1)...(19): siRNA sense strand
augaauuacuagacagaga

SEQ ID NO: 2277231 - RNA, 19 nt, Homo sapiens
  misc_RNA (1)...(19): siRNA sense strand
ggauaugggaggacagcuu

SEQ ID NO: 2277232 - RNA, 19 nt, Homo sapiens
  misc_RNA (1)...(19): siRNA sense strand
ucuccauaauugcgaguaa

SEQ ID NO: 2277233 - RNA, 19 nt, Homo sapiens
  misc_RNA (1)...(19): siRNA sense strand
uguuauacucuuagccaua

SEQ ID NO: 2277234 - RNA, 19 nt, Homo sapiens
  misc_RNA (1)...(19): siRNA sense strand
cauauguacuccaggucaa

SEQ ID NO: 2277235 - RNA, 19 nt, Homo sapiens
  misc_RNA (1)...(19): siRNA sense strand
gugcaggauauuaaugaua

SEQ ID NO: 2277236 - RNA, 19 nt, Homo sapiens
  misc_RNA (1)...(19): siRNA sense strand
gagacagccgugugugaaa

SEQ ID NO: 2277237 - RNA, 19 nt, Homo sapiens
  misc_RNA (1)...(19): siRNA sense strand
aaagaagacaucagagaca

SEQ ID NO: 2277238 - RNA, 19 nt, Homo sapiens
  misc_RNA (1)...(19): siRNA sense strand
uguuaaacguggcugggua

SEQ ID NO: 2277239 - RNA, 19 nt, Homo sapiens
  misc_RNA (1)...(19): siRNA sense strand
aauaaggagccuagauaga

SEQ ID NO: 2277240 - RNA, 19 nt, Homo sapiens
  misc_RNA (1)...(19): siRNA sense strand
gaacaaaauucgcagggau

SEQ ID NO: 2277241 - RNA, 19 nt, Homo sapiens
  misc_RNA (1)...(19): siRNA sense strand
ggucaaggccacagaugca

SEQ ID NO: 2277242 - RNA, 19 nt, Homo sapiens
  misc_RNA (1)...(19): siRNA sense strand
cuugaaaguuccugagucu

SEQ ID NO: 2277243 - RNA, 19 nt, Homo sapiens
  misc_RNA (1)...(19): siRNA sense strand
uggacaaaaugcagaaauu

SEQ ID NO: 2277244 - RNA, 19 nt, Homo sapiens
  misc_RNA (1)...(19): siRNA sense strand
uuggcgaagaagagaguua

SEQ ID NO: 2277245 - RNA, 19 nt, Homo sapiens
  misc_RNA (1)...(19): siRNA sense strand
ccgacuuagacaagggaga

SEQ ID NO: 2277246 - RNA, 19 nt, Homo sapiens
  misc_RNA (1)...(19): siRNA sense strand
aucaaaggcuacaggaaaa

SEQ ID NO: 2277247 - RNA, 19 nt, Homo sapiens
  misc_RNA (1)...(19): siRNA sense strand
aggaagauacccaggcuuu

SEQ ID NO: 2277248 - RNA, 19 nt, Homo sapiens
  misc_RNA (1)...(19): siRNA sense strand
ccacagaagccgaccagga

SEQ ID NO: 2277249 - RNA, 19 nt, Homo sapiens
  misc_RNA (1)...(19): siRNA sense strand
aggauuagccggaacaaca

SEQ ID NO: 2277250 - RNA, 19 nt, Homo sapiens
  misc_RNA (1)...(19): siRNA sense strand
cuguuuaccucgucagaga

SEQ ID NO: 2277251 - RNA, 19 nt, Homo sapiens
  misc_RNA (1)...(19): siRNA sense strand
aagaauaagagcuguggau

SEQ ID NO: 2277252 - RNA, 19 nt, Homo sapiens
  misc_RNA (1)...(19): siRNA sense strand
aggacagauaauucagaua

SEQ ID NO: 2277253 - RNA, 19 nt, Homo sapiens
  misc_RNA (1)...(19): siRNA sense strand
ugguucagcuauuggaaga

SEQ ID NO: 2277254 - RNA, 19 nt, Homo sapiens
  misc_RNA (1)...(19): siRNA sense strand
cagauaauucagauaguca

SEQ ID NO: 2277255 - RNA, 19 nt, Homo sapiens
  misc_RNA (1)...(19): siRNA sense strand
ggcgaagaagagaguuaua

SEQ ID NO: 2277256 - RNA, 19 nt, Homo sapiens
  misc_RNA (1)...(19): siRNA sense strand
uugaaacaaagaaggcaua

SEQ ID NO: 2277257 - RNA, 19 nt, Homo sapiens
  misc_RNA (1)...(19): siRNA sense strand
ugccaagccaggacagaua

SEQ ID NO: 2277258 - RNA, 19 nt, Homo sapiens
  misc_RNA (1)...(19): siRNA sense strand
aagugauugaggagaacaa

SEQ ID NO: 2277259 - RNA, 19 nt, Homo sapiens
  misc_RNA (1)...(19): siRNA sense strand
gggauugaaacccgaagaa

SEQ ID NO: 2277260 - RNA, 19 nt, Homo sapiens
  misc_RNA (1)...(19): siRNA sense strand
cagaagccgaccaggacua

SEQ ID NO: 2277261 - RNA, 19 nt, Homo sapiens
  misc_RNA (1)...(19): siRNA sense strand
ugauaaugagccaaaguuu

SEQ ID NO: 2277262 - RNA, 19 nt, Homo sapiens
  misc_RNA (1)...(19): siRNA sense strand
ucauagauuggaagaguga

SEQ ID NO: 2277263 - RNA, 19 nt, Homo sapiens
  misc_RNA (1)...(19): siRNA sense strand
agucagugcugcagaccga

SEQ ID NO: 2277264 - RNA, 19 nt, Homo sapiens
  misc_RNA (1)...(19): siRNA sense strand
aacaaaauucgcagggaua

SEQ ID NO: 2277265 - RNA, 19 nt, Homo sapiens
  misc_RNA (1)...(19): siRNA sense strand
guuaaacguggcuggguau

SEQ ID NO: 2277266 - RNA, 19 nt, Homo sapiens
  misc_RNA (1)...(19): siRNA sense strand
ccagagucguuuacagcau

SEQ ID NO: 2277267 - RNA, 19 nt, Homo sapiens
  misc_RNA (1)...(19): siRNA sense strand
cccuauugguucagcuauu

SEQ ID NO: 2277268 - RNA, 19 nt, Homo sapiens
  misc_RNA (1)...(19): siRNA sense strand
cuuguaauguggaagcaau

SEQ ID NO: 2277269 - RNA, 19 nt, Homo sapiens
  misc_RNA (1)...(19): siRNA sense strand
ucaucaaaggcuacaggaa

SEQ ID NO: 2277270 - RNA, 19 nt, Homo sapiens
  misc_RNA (1)...(19): siRNA sense strand
agccucaguaugugggaaa

SEQ ID NO: 2277271 - RNA, 19 nt, Homo sapiens
  misc_RNA (1)...(19): siRNA sense strand
cagcauucuucagggacaa

SEQ ID NO: 2277272 - RNA, 19 nt, Homo sapiens
  misc_RNA (1)...(19): siRNA sense strand
ggauuagccggaacaacaa

SEQ ID NO: 2277273 - RNA, 19 nt, Homo sapiens
  misc_RNA (1)...(19): siRNA sense strand
gguacuucauagauuggaa

SEQ ID NO: 2277274 - RNA, 19 nt, Homo sapiens
  misc_RNA (1)...(19): siRNA sense strand
ccacagagccaagagaaaa

SEQ ID NO: 2277275 - RNA, 19 nt, Homo sapiens
  misc_RNA (1)...(19): siRNA sense strand
gugcucaggcuguggacau

SEQ ID NO: 2277276 - RNA, 19 nt, Homo sapiens
  misc_RNA (1)...(19): siRNA sense strand
uuucauucaucaaaggcua

SEQ ID NO: 2277277 - RNA, 19 nt, Homo sapiens
  misc_RNA (1)...(19): siRNA sense strand
caucaaagugcaggauauu

SEQ ID NO: 2277278 - RNA, 19 nt, Homo sapiens
  misc_RNA (1)...(19): siRNA sense strand
cacaagagggagucaucaa

SEQ ID NO: 2277279 - RNA, 19 nt, Homo sapiens
  misc_RNA (1)...(19): siRNA sense strand
agaaauggauacagccgca

SEQ ID NO: 2277280 - RNA, 19 nt, Homo sapiens
  misc_RNA (1)...(19): siRNA sense strand
gaauaagagcuguggaucc

SEQ ID NO: 2277281 - RNA, 19 nt, Homo sapiens
  misc_RNA (1)...(19): siRNA sense strand
ucacagaugaggauacaca

SEQ ID NO: 2277282 - RNA, 19 nt, Homo sapiens
  misc_RNA (1)...(19): siRNA sense strand
acagcauucuucagggaca

SEQ ID NO: 2277283 - RNA, 19 nt, Homo sapiens
  misc_RNA (1)...(19): siRNA sense strand
aagugaaugcagagggaaa

SEQ ID NO: 2277284 - RNA, 19 nt, Homo sapiens
  misc_RNA (1)...(19): siRNA sense strand
acgugaaggaugagaauga

SEQ ID NO: 2277285 - RNA, 19 nt, Homo sapiens
  misc_RNA (1)...(19): siRNA sense strand
ugguacaggucaaggacau

SEQ ID NO: 2277286 - RNA, 19 nt, Homo sapiens
  misc_RNA (1)...(19): siRNA sense strand
aguuggaccaggagagcua

SEQ ID NO: 2277287 - RNA, 19 nt, Homo sapiens
  misc_RNA (1)...(19): siRNA sense strand
aggucaaggacauggguga

SEQ ID NO: 2277288 - RNA, 19 nt, Homo sapiens
  misc_RNA (1)...(19): siRNA sense strand
ccacgaagcugucggcagu

SEQ ID NO: 2277289 - RNA, 19 nt, Homo sapiens
  misc_RNA (1)...(19): siRNA sense strand
uggugauggaugagaauga

SEQ ID NO: 2277290 - RNA, 19 nt, Homo sapiens
  misc_RNA (1)...(19): siRNA sense strand
gagccgagacugagcgcuu

SEQ ID NO: 2277291 - RNA, 19 nt, Homo sapiens
  misc_RNA (1)...(19): siRNA sense strand
aggcagaguaccagcuaca

SEQ ID NO: 2277292 - RNA, 19 nt, Homo sapiens
  misc_RNA (1)...(19): siRNA sense strand
gaccauggcuugaucguga

SEQ ID NO: 2277293 - RNA, 19 nt, Homo sapiens
  misc_RNA (1)...(19): siRNA sense strand
ugaagugaaugcagaggga

SEQ ID NO: 2277294 - RNA, 19 nt, Homo sapiens
  misc_RNA (1)...(19): siRNA sense strand
ccuuugaagugaaugcaga

SEQ ID NO: 2277295 - RNA, 19 nt, Homo sapiens
  misc_RNA (1)...(19): siRNA sense strand
gugcuaguggagagaguga

SEQ ID NO: 2277296 - RNA, 19 nt, Homo sapiens
  misc_RNA (1)...(19): siRNA sense strand
uggagaugcaggauggaca

SEQ ID NO: 2277297 - RNA, 19 nt, Homo sapiens
  misc_RNA (1)...(19): siRNA sense strand
acuaucaccuggagagcca

SEQ ID NO: 2277298 - RNA, 19 nt, Homo sapiens
  misc_RNA (1)...(19): siRNA sense strand
gggagacacagaagggacu

SEQ ID NO: 2277299 - RNA, 19 nt, Homo sapiens
  misc_RNA (1)...(19): siRNA sense strand
cagaaaacuaugguggaaa

SEQ ID NO: 2277300 - RNA, 19 nt, Homo sapiens
  misc_RNA (1)...(19): siRNA sense strand
ggaccaugucaaggaagaa

SEQ ID NO: 2277301 - RNA, 19 nt, Homo sapiens
  misc_RNA (1)...(19): siRNA sense strand
agaaugaacgacuggguaa

SEQ ID NO: 2277302 - RNA, 19 nt, Homo sapiens
  misc_RNA (1)...(19): siRNA sense strand
aggauaaaggcaaagauaa

SEQ ID NO: 2277303 - RNA, 19 nt, Homo sapiens
  misc_RNA (1)...(19): siRNA sense strand
ggccaagaaccgagucaaa

SEQ ID NO: 2277304 - RNA, 19 nt, Homo sapiens
  misc_RNA (1)...(19): siRNA sense strand
ggauguagcuauaggcacu

SEQ ID NO: 2277305 - RNA, 19 nt, Homo sapiens
  misc_RNA (1)...(19): siRNA sense strand
uaucauagugacagagaau

SEQ ID NO: 2277306 - RNA, 19 nt, Homo sapiens
  misc_RNA (1)...(19): siRNA sense strand
ucauagugacagagaauau

SEQ ID NO: 2277307 - RNA, 19 nt, Homo sapiens
  misc_RNA (1)...(19): siRNA sense strand
cuguggagaugguggaaaa

SEQ ID NO: 2277308 - RNA, 19 nt, Homo sapiens
  misc_RNA (1)...(19): siRNA sense strand
ucauaaagggagacaguga

SEQ ID NO: 2277309 - RNA, 19 nt, Homo sapiens
  misc_RNA (1)...(19): siRNA sense strand
uaaagaaggauaaaggcaa

SEQ ID NO: 2277310 - RNA, 19 nt, Homo sapiens
  misc_RNA (1)...(19): siRNA sense strand
acacguauuccaagcgaaa

SEQ ID NO: 2277311 - RNA, 19 nt, Homo sapiens
  misc_RNA (1)...(19): siRNA sense strand
gagaagaaaaggaugcaua

SEQ ID NO: 2277312 - RNA, 19 nt, Homo sapiens
  misc_RNA (1)...(19): siRNA sense strand
ugauagaacgggagggacu

SEQ ID NO: 2277313 - RNA, 19 nt, Homo sapiens
  misc_RNA (1)...(19): siRNA sense strand
gcuggaaauucauguaaaa

SEQ ID NO: 2277314 - RNA, 19 nt, Homo sapiens
  misc_RNA (1)...(19): siRNA sense strand
gaaugaucccggugcacaa

SEQ ID NO: 2277315 - RNA, 19 nt, Homo sapiens
  misc_RNA (1)...(19): siRNA sense strand
ccgcauaaagaaggauaaa

SEQ ID NO: 2277316 - RNA, 19 nt, Homo sapiens
  misc_RNA (1)...(19): siRNA sense strand
cuacaggauuguggagcaa

SEQ ID NO: 2277317 - RNA, 19 nt, Homo sapiens
  misc_RNA (1)...(19): siRNA sense strand
gagaauauuuggaaagcac

SEQ ID NO: 2277318 - RNA, 19 nt, Homo sapiens
  misc_RNA (1)...(19): siRNA sense strand
gcaaaggaugaguacggaa

SEQ ID NO: 2277319 - RNA, 19 nt, Homo sapiens
  misc_RNA (1)...(19): siRNA sense strand
caauugaccaggaaggaga

SEQ ID NO: 2277320 - RNA, 19 nt, Homo sapiens
  misc_RNA (1)...(19): siRNA sense strand
ugaccaggaaggagauauu

SEQ ID NO: 2277321 - RNA, 19 nt, Homo sapiens
  misc_RNA (1)...(19): siRNA sense strand
gcccuuggaccgagaagaa

SEQ ID NO: 2277322 - RNA, 19 nt, Homo sapiens
  misc_RNA (1)...(19): siRNA sense strand
cgaaagucagugaggaugu

SEQ ID NO: 2277323 - RNA, 19 nt, Homo sapiens
  misc_RNA (1)...(19): siRNA sense strand
cgcuggaaauucauguaaa

SEQ ID NO: 2277324 - RNA, 19 nt, Homo sapiens
  misc_RNA (1)...(19): siRNA sense strand
cagagaagccggaagucca

SEQ ID NO: 2277325 - RNA, 19 nt, Homo sapiens
  misc_RNA (1)...(19): siRNA sense strand
uggauaucauagugacaga

SEQ ID NO: 2277326 - RNA, 19 nt, Homo sapiens
  misc_RNA (1)...(19): siRNA sense strand
gagaaugaacgacugggua

SEQ ID NO: 2277327 - RNA, 19 nt, Homo sapiens
  misc_RNA (1)...(19): siRNA sense strand
agcgaaagucagugaggau

SEQ ID NO: 2277328 - RNA, 19 nt, Homo sapiens
  misc_RNA (1)...(19): siRNA sense strand
cggaaguccauaucgggua

SEQ ID NO: 2277329 - RNA, 19 nt, Homo sapiens
  misc_RNA (1)...(19): siRNA sense strand
ccauuuacugggaguucua

SEQ ID NO: 2277330 - RNA, 19 nt, Homo sapiens
  misc_RNA (1)...(19): siRNA sense strand
gaauuauaguggagggucc

SEQ ID NO: 2277331 - RNA, 19 nt, Homo sapiens
  misc_RNA (1)...(19): siRNA sense strand
gugaaggacaucaacgaca

SEQ ID NO: 2277332 - RNA, 19 nt, Homo sapiens
  misc_RNA (1)...(19): siRNA sense strand
uaucauaaagggagacagu

SEQ ID NO: 2277333 - RNA, 19 nt, Homo sapiens
  misc_RNA (1)...(19): siRNA sense strand
agacacaagagguuggcuu

SEQ ID NO: 2277334 - RNA, 19 nt, Homo sapiens
  misc_RNA (1)...(19): siRNA sense strand
ccucagugcaccuggaagu

SEQ ID NO: 2277335 - RNA, 19 nt, Homo sapiens
  misc_RNA (1)...(19): siRNA sense strand
caccaaaaccuguggagau

SEQ ID NO: 2277336 - RNA, 19 nt, Homo sapiens
  misc_RNA (1)...(19): siRNA sense strand
ccuucuggugauugguaua

SEQ ID NO: 2277337 - RNA, 19 nt, Homo sapiens
  misc_RNA (1)...(19): siRNA sense strand
auaaagaaggauaaaggca

SEQ ID NO: 2277338 - RNA, 19 nt, Homo sapiens
  misc_RNA (1)...(19): siRNA sense strand
cccugaaacccaugacauu

SEQ ID NO: 2277339 - RNA, 19 nt, Homo sapiens
  misc_RNA (1)...(19): siRNA sense strand
ccuuaguugacaaagagaa

SEQ ID NO: 2277340 - RNA, 19 nt, Homo sapiens
  misc_RNA (1)...(19): siRNA sense strand
acuacaggauuguggagca

SEQ ID NO: 2277341 - RNA, 19 nt, Homo sapiens
  misc_RNA (1)...(19): siRNA sense strand
aguacaacuuaacgauaga

SEQ ID NO: 2277342 - RNA, 19 nt, Homo sapiens
  misc_RNA (1)...(19): siRNA sense strand
gugagaauuccuucaguga

SEQ ID NO: 2277343 - RNA, 19 nt, Homo sapiens
  misc_RNA (1)...(19): siRNA sense strand
ggacagggaaacaagaucu

SEQ ID NO: 2277344 - RNA, 19 nt, Homo sapiens
  misc_RNA (1)...(19): siRNA sense strand
agucaaaguacgaaggcuc

SEQ ID NO: 2277345 - RNA, 19 nt, Homo sapiens
  misc_RNA (1)...(19): siRNA sense strand
auugaauccugcuaagaau

SEQ ID NO: 2277346 - RNA, 19 nt, Homo sapiens
  misc_RNA (1)...(19): siRNA sense strand
cggcaguggaagcuuacaa

SEQ ID NO: 2277347 - RNA, 19 nt, Homo sapiens
  misc_RNA (1)...(19): siRNA sense strand
acagagaauauuuggaaag

SEQ ID NO: 2277348 - RNA, 19 nt, Homo sapiens
  misc_RNA (1)...(19): siRNA sense strand
auuccuuaguugacaaaga

SEQ ID NO: 2277349 - RNA, 19 nt, Homo sapiens
  misc_RNA (1)...(19): siRNA sense strand
acaaagauuucaagacccu

SEQ ID NO: 2277350 - RNA, 19 nt, Homo sapiens
  misc_RNA (1)...(19): siRNA sense strand
ccaaggauccagaaggucu

SEQ ID NO: 2277351 - RNA, 19 nt, Homo sapiens
  misc_RNA (1)...(19): siRNA sense strand
uuauggaugugaaugacaa

SEQ ID NO: 2277352 - RNA, 19 nt, Homo sapiens
  misc_RNA (1)...(19): siRNA sense strand
ugacaacccucccaggcua

SEQ ID NO: 2277353 - RNA, 19 nt, Homo sapiens
  misc_RNA (1)...(19): siRNA sense strand
gagauauuuacgugacuca

SEQ ID NO: 2277354 - RNA, 19 nt, Homo sapiens
  misc_RNA (1)...(19): siRNA sense strand
ggccaagaggggaaguuua

SEQ ID NO: 2277355 - RNA, 19 nt, Homo sapiens
  misc_RNA (1)...(19): siRNA sense strand
acacaagagguuggcuuaa

SEQ ID NO: 2277356 - RNA, 19 nt, Homo sapiens
  misc_RNA (1)...(19): siRNA sense strand
cggaagacuuugaagaaaa

SEQ ID NO: 2277357 - RNA, 19 nt, Homo sapiens
  misc_RNA (1)...(19): siRNA sense strand
cgauaaagucaguacgcaa

SEQ ID NO: 2277358 - RNA, 19 nt, Homo sapiens
  misc_RNA (1)...(19): siRNA sense strand
gggaaauugaagaguugaa

SEQ ID NO: 2277359 - RNA, 19 nt, Homo sapiens
  misc_RNA (1)...(19): siRNA sense strand
agaagaaaaggaagagaaa

SEQ ID NO: 2277360 - RNA, 19 nt, Homo sapiens
  misc_RNA (1)...(19): siRNA sense strand
cgaagagaaacaugccaaa

SEQ ID NO: 2277361 - RNA, 19 nt, Homo sapiens
  misc_RNA (1)...(19): siRNA sense strand
aaagugaaccugaggaaaa

SEQ ID NO: 2277362 - RNA, 19 nt, Homo sapiens
  misc_RNA (1)...(19): siRNA sense strand
ugaaaucauagaagggcaa

SEQ ID NO: 2277363 - RNA, 19 nt, Homo sapiens
  misc_RNA (1)...(19): siRNA sense strand
gcaaaagaagaguacgaaa

SEQ ID NO: 2277364 - RNA, 19 nt, Homo sapiens
  misc_RNA (1)...(19): siRNA sense strand
aagcaaagaaagaugacau

SEQ ID NO: 2277365 - RNA, 19 nt, Homo sapiens
  misc_RNA (1)...(19): siRNA sense strand
ugaagaucccaaugauaaa

SEQ ID NO: 2277366 - RNA, 19 nt, Homo sapiens
  misc_RNA (1)...(19): siRNA sense strand
aaggaguacuagagcaaga

SEQ ID NO: 2277367 - RNA, 19 nt, Homo sapiens
  misc_RNA (1)...(19): siRNA sense strand
gccaagaaaaguaaagaaa

SEQ ID NO: 2277368 - RNA, 19 nt, Homo sapiens
  misc_RNA (1)...(19): siRNA sense strand
augacauggaugaggaaau

SEQ ID NO: 2277369 - RNA, 19 nt, Homo sapiens
  misc_RNA (1)...(19): siRNA sense strand
aguacuagagcaagaagaa

SEQ ID NO: 2277370 - RNA, 19 nt, Homo sapiens
  misc_RNA (1)...(19): siRNA sense strand
cggaaaaggaaguagcaga

SEQ ID NO: 2277371 - RNA, 19 nt, Homo sapiens
  misc_RNA (1)...(19): siRNA sense strand
gaaugggaugaaagagcaa

SEQ ID NO: 2277372 - RNA, 19 nt, Homo sapiens
  misc_RNA (1)...(19): siRNA sense strand
cgauggaagaugggaaauu

SEQ ID NO: 2277373 - RNA, 19 nt, Homo sapiens
  misc_RNA (1)...(19): siRNA sense strand
aggaaaagagugaagaaga

SEQ ID NO: 2277374 - RNA, 19 nt, Homo sapiens
  misc_RNA (1)...(19): siRNA sense strand
acauuaaacuccuagcaga

SEQ ID NO: 2277375 - RNA, 19 nt, Homo sapiens
  misc_RNA (1)...(19): siRNA sense strand
agaaagcagcccuggaaaa

SEQ ID NO: 2277376 - RNA, 19 nt, Homo sapiens
  misc_RNA (1)...(19): siRNA sense strand
aggagugccaauagcauua

SEQ ID NO: 2277377 - RNA, 19 nt, Homo sapiens
  misc_RNA (1)...(19): siRNA sense strand
ggaaaaggaaguagcagau

SEQ ID NO: 2277378 - RNA, 19 nt, Homo sapiens
  misc_RNA (1)...(19): siRNA sense strand
aaaaggaguacuagagcaa

SEQ ID NO: 2277379 - RNA, 19 nt, Homo sapiens
  misc_RNA (1)...(19): siRNA sense strand
ucauagaagggcaagaaga

SEQ ID NO: 2277380 - RNA, 19 nt, Homo sapiens
  misc_RNA (1)...(19): siRNA sense strand
cugauaaacccuugauagu

SEQ ID NO: 2277381 - RNA, 19 nt, Homo sapiens
  misc_RNA (1)...(19): siRNA sense strand
ccaaagaaauugaagaucc

SEQ ID NO: 2277382 - RNA, 19 nt, Homo sapiens
  misc_RNA (1)...(19): siRNA sense strand
accucaaccuauaggagaa

SEQ ID NO: 2277383 - RNA, 19 nt, Homo sapiens
  misc_RNA (1)...(19): siRNA sense strand
augaagacacggauggaga

SEQ ID NO: 2277384 - RNA, 19 nt, Homo sapiens
  misc_RNA (1)...(19): siRNA sense strand
aagaagaaaaggaagagaa

SEQ ID NO: 2277385 - RNA, 19 nt, Homo sapiens
  misc_RNA (1)...(19): siRNA sense strand
caauggaccuggaagagga

SEQ ID NO: 2277386 - RNA, 19 nt, Homo sapiens
  misc_RNA (1)...(19): siRNA sense strand
cuccagauguagaccuuaa

SEQ ID NO: 2277387 - RNA, 19 nt, Homo sapiens
  misc_RNA (1)...(19): siRNA sense strand
aauccuaacuaucagggaa

SEQ ID NO: 2277388 - RNA, 19 nt, Homo sapiens
  misc_RNA (1)...(19): siRNA sense strand
ugaacuuuccucagagauu

SEQ ID NO: 2277389 - RNA, 19 nt, Homo sapiens
  misc_RNA (1)...(19): siRNA sense strand
agacggaagacuuugaaga

SEQ ID NO: 2277390 - RNA, 19 nt, Homo sapiens
  misc_RNA (1)...(19): siRNA sense strand
ggaaugggaugaaagagca

SEQ ID NO: 2277391 - RNA, 19 nt, Homo sapiens
  misc_RNA (1)...(19): siRNA sense strand
agaugaaagaagcagauga

SEQ ID NO: 2277392 - RNA, 19 nt, Homo sapiens
  misc_RNA (1)...(19): siRNA sense strand
gaugauuugauucuggaaa

SEQ ID NO: 2277393 - RNA, 19 nt, Homo sapiens
  misc_RNA (1)...(19): siRNA sense strand
agacauaaacaucccaaaa

SEQ ID NO: 2277394 - RNA, 19 nt, Homo sapiens
  misc_RNA (1)...(19): siRNA sense strand
ucgaagagaaacaugccaa

SEQ ID NO: 2277395 - RNA, 19 nt, Homo sapiens
  misc_RNA (1)...(19): siRNA sense strand
ccaugauagauaacccaaa

SEQ ID NO: 2277396 - RNA, 19 nt, Homo sapiens
  misc_RNA (1)...(19): siRNA sense strand
guacuagagcaagaagaaa

SEQ ID NO: 2277397 - RNA, 19 nt, Homo sapiens
  misc_RNA (1)...(19): siRNA sense strand
auacgauggaagaugggaa

SEQ ID NO: 2277398 - RNA, 19 nt, Homo sapiens
  misc_RNA (1)...(19): siRNA sense strand
gaaagaagcagaugagagc

SEQ ID NO: 2277399 - RNA, 19 nt, Homo sapiens
  misc_RNA (1)...(19): siRNA sense strand
acgcaaaagaagaguacga

SEQ ID NO: 2277400 - RNA, 19 nt, Homo sapiens
  misc_RNA (1)...(19): siRNA sense strand
ucccaaagaaauugaagau

SEQ ID NO: 2277401 - RNA, 19 nt, Homo sapiens
  misc_RNA (1)...(19): siRNA sense strand
guugauuuaucuugugaca

SEQ ID NO: 2277402 - RNA, 19 nt, Homo sapiens
  misc_RNA (1)...(19): siRNA sense strand
acaaacaaaaggaguacua

SEQ ID NO: 2277403 - RNA, 19 nt, Homo sapiens
  misc_RNA (1)...(19): siRNA sense strand
aagggcaagaagaaaguaa

SEQ ID NO: 2277404 - RNA, 19 nt, Homo sapiens
  misc_RNA (1)...(19): siRNA sense strand
gcagaugagagcacaggau

SEQ ID NO: 2277405 - RNA, 19 nt, Homo sapiens
  misc_RNA (1)...(19): siRNA sense strand
ugaaagugaaccugcccaa

SEQ ID NO: 2277406 - RNA, 19 nt, Homo sapiens
  misc_RNA (1)...(19): siRNA sense strand
uauguuuggaccagauaaa

SEQ ID NO: 2277407 - RNA, 19 nt, Homo sapiens
  misc_RNA (1)...(19): siRNA sense strand
gcuugaugaugaaccaaaa

SEQ ID NO: 2277408 - RNA, 19 nt, Homo sapiens
  misc_RNA (1)...(19): siRNA sense strand
cccaaaauacaaaggagua

SEQ ID NO: 2277409 - RNA, 19 nt, Homo sapiens
  misc_RNA (1)...(19): siRNA sense strand
cgacgaagcugaucgggau

SEQ ID NO: 2277410 - RNA, 19 nt, Homo sapiens
  misc_RNA (1)...(19): siRNA sense strand
gcgaagugaacgaggagga

SEQ ID NO: 2277411 - RNA, 19 nt, Homo sapiens
  misc_RNA (1)...(19): siRNA sense strand
aagaaauccugaaggccuu

SEQ ID NO: 2277412 - RNA, 19 nt, Homo sapiens
  misc_RNA (1)...(19): siRNA sense strand
agaagauguccgagaagga

SEQ ID NO: 2277413 - RNA, 19 nt, Homo sapiens
  misc_RNA (1)...(19): siRNA sense strand
acgcagaagauguccgaga

SEQ ID NO: 2277414 - RNA, 19 nt, Homo sapiens
  misc_RNA (1)...(19): siRNA sense strand
gaagcaagaaguucgggaa

SEQ ID NO: 2277415 - RNA, 19 nt, Homo sapiens
  misc_RNA (1)...(19): siRNA sense strand
aaggaagagaugaagaaaa

SEQ ID NO: 2277416 - RNA, 19 nt, Homo sapiens
  misc_RNA (1)...(19): siRNA sense strand
augaagaagaccagccuuu

SEQ ID NO: 2277417 - RNA, 19 nt, Homo sapiens
  misc_RNA (1)...(19): siRNA sense strand
ccaugagagcgcugggcuu

SEQ ID NO: 2277418 - RNA, 19 nt, Homo sapiens
  misc_RNA (1)...(19): siRNA sense strand
gaagaaauccugaaggccu

SEQ ID NO: 2277419 - RNA, 19 nt, Homo sapiens
  misc_RNA (1)...(19): siRNA sense strand
aagugaacgaggaggaguu

SEQ ID NO: 2277420 - RNA, 19 nt, Homo sapiens
  misc_RNA (1)...(19): siRNA sense strand
aggaaggaagagaugaaga

SEQ ID NO: 2277421 - RNA, 19 nt, Homo sapiens
  misc_RNA (1)...(19): siRNA sense strand
ccaccggccaaaagagaaa

SEQ ID NO: 2277422 - RNA, 19 nt, Homo sapiens
  misc_RNA (1)...(19): siRNA sense strand
gaugaggagcugcaggaga

SEQ ID NO: 2277423 - RNA, 19 nt, Homo sapiens
  misc_RNA (1)...(19): siRNA sense strand
ccgugaugacgcagaagau

SEQ ID NO: 2277424 - RNA, 19 nt, Homo sapiens
  misc_RNA (1)...(19): siRNA sense strand
cggaugaggagcugcagga

SEQ ID NO: 2277425 - RNA, 19 nt, Homo sapiens
  misc_RNA (1)...(19): siRNA sense strand
gacaaaacaaagaggaaaa

SEQ ID NO: 2277426 - RNA, 19 nt, Homo sapiens
  misc_RNA (1)...(19): siRNA sense strand
cagacaaagaugaagcaau

SEQ ID NO: 2277427 - RNA, 19 nt, Homo sapiens
  misc_RNA (1)...(19): siRNA sense strand
acaaagauggugauggaga

SEQ ID NO: 2277428 - RNA, 19 nt, Homo sapiens
  misc_RNA (1)...(19): siRNA sense strand
guaaaauaagcuugaggaa

SEQ ID NO: 2277429 - RNA, 19 nt, Homo sapiens
  misc_RNA (1)...(19): siRNA sense strand
gaagaaauacucaaggcau

SEQ ID NO: 2277430 - RNA, 19 nt, Homo sapiens
  misc_RNA (1)...(19): siRNA sense strand
cgacguguugcuagagaau

SEQ ID NO: 2277431 - RNA, 19 nt, Homo sapiens
  misc_RNA (1)...(19): siRNA sense strand
augaauuaaagguggcaau

SEQ ID NO: 2277432 - RNA, 19 nt, Homo sapiens
  misc_RNA (1)...(19): siRNA sense strand
agaaauaaaccaagaggag

SEQ ID NO: 2277433 - RNA, 19 nt, Homo sapiens
  misc_RNA (1)...(19): siRNA sense strand
aggaacagaaacaagaaau

SEQ ID NO: 2277434 - RNA, 19 nt, Homo sapiens
  misc_RNA (1)...(19): siRNA sense strand
gaagagaacugucugagga

SEQ ID NO: 2277435 - RNA, 19 nt, Homo sapiens
  misc_RNA (1)...(19): siRNA sense strand
gagaaauaaaccaagagga

SEQ ID NO: 2277436 - RNA, 19 nt, Homo sapiens
  misc_RNA (1)...(19): siRNA sense strand
uggacaaaacaaagaggaa

SEQ ID NO: 2277437 - RNA, 19 nt, Homo sapiens
  misc_RNA (1)...(19): siRNA sense strand
acagagaagccacagggaa

SEQ ID NO: 2277438 - RNA, 19 nt, Homo sapiens
  misc_RNA (1)...(19): siRNA sense strand
aagagaacugucugaggaa

SEQ ID NO: 2277439 - RNA, 19 nt, Homo sapiens
  misc_RNA (1)...(19): siRNA sense strand
acuggauauuggaaagaga

SEQ ID NO: 2277440 - RNA, 19 nt, Homo sapiens
  misc_RNA (1)...(19): siRNA sense strand
ggugaaaacaugagugaug

SEQ ID NO: 2277441 - RNA, 19 nt, Homo sapiens
  misc_RNA (1)...(19): siRNA sense strand
aaagauggugauggagaaa

SEQ ID NO: 2277442 - RNA, 19 nt, Homo sapiens
  misc_RNA (1)...(19): siRNA sense strand
ugauggagaaauaaaccaa

SEQ ID NO: 2277443 - RNA, 19 nt, Homo sapiens
  misc_RNA (1)...(19): siRNA sense strand
gagaauugggugaaaacau

SEQ ID NO: 2277444 - RNA, 19 nt, Homo sapiens
  misc_RNA (1)...(19): siRNA sense strand
gaugagaaacagaagcuga

SEQ ID NO: 2277445 - RNA, 19 nt, Homo sapiens
  misc_RNA (1)...(19): siRNA sense strand
uugaugaugaugagaaaca

SEQ ID NO: 2277446 - RNA, 19 nt, Homo sapiens
  misc_RNA (1)...(19): siRNA sense strand
aguuugaugaugaugagaa

SEQ ID NO: 2277447 - RNA, 19 nt, Homo sapiens
  misc_RNA (1)...(19): siRNA sense strand
ucaacuucuacaagguuua

SEQ ID NO: 2277448 - RNA, 19 nt, Homo sapiens
  misc_RNA (1)...(19): siRNA sense strand
gaugagaaacagaagcuga

SEQ ID NO: 2277449 - RNA, 19 nt, Homo sapiens
  misc_RNA (1)...(19): siRNA sense strand
uugaugaugaugagaaaca

SEQ ID NO: 2277450 - RNA, 19 nt, Homo sapiens
  misc_RNA (1)...(19): siRNA sense strand
aguuugaugaugaugagaa

SEQ ID NO: 2277451 - RNA, 19 nt, Homo sapiens
  misc_RNA (1)...(19): siRNA sense strand
ucaacuucuacaagguuua

SEQ ID NO: 2277452 - RNA, 19 nt, Homo sapiens
  misc_RNA (1)...(19): siRNA sense strand
gagcagaggaagaagacca

SEQ ID NO: 2277453 - RNA, 19 nt, Homo sapiens
  misc_RNA (1)...(19): siRNA sense strand
uggagauggauuugaagaa

SEQ ID NO: 2277454 - RNA, 19 nt, Homo sapiens
  misc_RNA (1)...(19): siRNA sense strand
agauugagcugcaccgaga

SEQ ID NO: 2277455 - RNA, 19 nt, Homo sapiens
  misc_RNA (1)...(19): siRNA sense strand
ccucaugaaggguggagau

SEQ ID NO: 2277456 - RNA, 19 nt, Homo sapiens
  misc_RNA (1)...(19): siRNA sense strand
ccgaaaucguagugcuugu

SEQ ID NO: 2277457 - RNA, 19 nt, Homo sapiens
  misc_RNA (1)...(19): siRNA sense strand
gggaccucaaguugggaaa

SEQ ID NO: 2277458 - RNA, 19 nt, Homo sapiens
  misc_RNA (1)...(19): siRNA sense strand
gcccaguguggaagaggua

SEQ ID NO: 2277459 - RNA, 19 nt, Homo sapiens
  misc_RNA (1)...(19): siRNA sense strand
gagaaauuguauagccuuc

SEQ ID NO: 2277460 - RNA, 19 nt, Homo sapiens
  misc_RNA (1)...(19): siRNA sense strand
ccaguguggaagagguaga

SEQ ID NO: 2277461 - RNA, 19 nt, Homo sapiens
  misc_RNA (1)...(19): siRNA sense strand
uaaaugagauugagcugca

SEQ ID NO: 2277462 - RNA, 19 nt, Homo sapiens
  misc_RNA (1)...(19): siRNA sense strand
cuuugugcucugagaaauu

SEQ ID NO: 2277463 - RNA, 19 nt, Homo sapiens
  misc_RNA (1)...(19): siRNA sense strand
gcgcacauccguuggccau

SEQ ID NO: 2277464 - RNA, 19 nt, Homo sapiens
  misc_RNA (1)...(19): siRNA sense strand
cccuuugugcucugagaaa

SEQ ID NO: 2277465 - RNA, 19 nt, Homo sapiens
  misc_RNA (1)...(19): siRNA sense strand
gcccgaaaucguagugcuu

SEQ ID NO: 2277466 - RNA, 19 nt, Homo sapiens
  misc_RNA (1)...(19): siRNA sense strand
gggcgaaguaggagaaauu

SEQ ID NO: 2277467 - RNA, 19 nt, Homo sapiens
  misc_RNA (1)...(19): siRNA sense strand
uggugaagauggagacaaa

SEQ ID NO: 2277468 - RNA, 19 nt, Homo sapiens
  misc_RNA (1)...(19): siRNA sense strand
gaggaaagucgguggaaga

SEQ ID NO: 2277469 - RNA, 19 nt, Homo sapiens
  misc_RNA (1)...(19): siRNA sense strand
cugaagagaagcagcauaa

SEQ ID NO: 2277470 - RNA, 19 nt, Homo sapiens
  misc_RNA (1)...(19): siRNA sense strand
aggagaagcugguggacuu

SEQ ID NO: 2277471 - RNA, 19 nt, Homo sapiens
  misc_RNA (1)...(19): siRNA sense strand
ugaaggacgcagaggcaaa

SEQ ID NO: 2277472 - RNA, 19 nt, Homo sapiens
  misc_RNA (1)...(19): siRNA sense strand
ccaaagcaucaaagauaaa

SEQ ID NO: 2277473 - RNA, 19 nt, Homo sapiens
  misc_RNA (1)...(19): siRNA sense strand
cauuuaagcgugugaggaa

SEQ ID NO: 2277474 - RNA, 19 nt, Homo sapiens
  misc_RNA (1)...(19): siRNA sense strand
ucuucaaauuaguggacaa

SEQ ID NO: 2277475 - RNA, 19 nt, Homo sapiens
  misc_RNA (1)...(19): siRNA sense strand
ggucuugaguauugugaau

SEQ ID NO: 2277476 - RNA, 19 nt, Homo sapiens
  misc_RNA (1)...(19): siRNA sense strand
aggaggagcuggugaagau

SEQ ID NO: 2277477 - RNA, 19 nt, Homo sapiens
  misc_RNA (1)...(19): siRNA sense strand
gugaagagaaugaagauca

SEQ ID NO: 2277478 - RNA, 19 nt, Homo sapiens
  misc_RNA (1)...(19): siRNA sense strand
gcaaguaaccugaagcaga

SEQ ID NO: 2277479 - RNA, 19 nt, Homo sapiens
  misc_RNA (1)...(19): siRNA sense strand
uugaugagcaccagaguaa

SEQ ID NO: 2277480 - RNA, 19 nt, Homo sapiens
  misc_RNA (1)...(19): siRNA sense strand
caaauuuggaucacagaaa

SEQ ID NO: 2277481 - RNA, 19 nt, Homo sapiens
  misc_RNA (1)...(19): siRNA sense strand
ccaacauagaagaaagaau

SEQ ID NO: 2277482 - RNA, 19 nt, Homo sapiens
  misc_RNA (1)...(19): siRNA sense strand
uggaagaaggggugauaaa

SEQ ID NO: 2277483 - RNA, 19 nt, Homo sapiens
  misc_RNA (1)...(19): siRNA sense strand
gcuguuggagugaggaaua

SEQ ID NO: 2277484 - RNA, 19 nt, Homo sapiens
  misc_RNA (1)...(19): siRNA sense strand
gcaaggaugaagugcagaa

SEQ ID NO: 2277485 - RNA, 19 nt, Homo sapiens
  misc_RNA (1)...(19): siRNA sense strand
auccaaagcaucaaagaua

SEQ ID NO: 2277486 - RNA, 19 nt, Homo sapiens
  misc_RNA (1)...(19): siRNA sense strand
agucaacaagagagacaua

SEQ ID NO: 2277487 - RNA, 19 nt, Homo sapiens
  misc_RNA (1)...(19): siRNA sense strand
ggaguuugggcgaggguuu

SEQ ID NO: 2277488 - RNA, 19 nt, Homo sapiens
  misc_RNA (1)...(19): siRNA sense strand
acucggaggagguuggaaa

SEQ ID NO: 2277489 - RNA, 19 nt, Homo sapiens
  misc_RNA (1)...(19): siRNA sense strand
aggagagaaaggagaaaga

SEQ ID NO: 2277490 - RNA, 19 nt, Homo sapiens
  misc_RNA (1)...(19): siRNA sense strand
ugaauacaccauagagaau

SEQ ID NO: 2277491 - RNA, 19 nt, Homo sapiens
  misc_RNA (1)...(19): siRNA sense strand
gcacagaaccauuggcucu

SEQ ID NO: 2277492 - RNA, 19 nt, Homo sapiens
  misc_RNA (1)...(19): siRNA sense strand
cagccaaucuugugggcca

SEQ ID NO: 2277493 - RNA, 19 nt, Homo sapiens
  misc_RNA (1)...(19): siRNA sense strand
ggacaagacagccaggaga

SEQ ID NO: 2277494 - RNA, 19 nt, Homo sapiens
  misc_RNA (1)...(19): siRNA sense strand
aggccaaaugcaagggcua

SEQ ID NO: 2277495 - RNA, 19 nt, Homo sapiens
  misc_RNA (1)...(19): siRNA sense strand
cgaaggaacuugcagggau

SEQ ID NO: 2277496 - RNA, 19 nt, Homo sapiens
  misc_RNA (1)...(19): siRNA sense strand
aggagaaagaggagauguu

SEQ ID NO: 2277497 - RNA, 19 nt, Homo sapiens
  misc_RNA (1)...(19): siRNA sense strand
ugaacaucaaggagguaua

SEQ ID NO: 2277498 - RNA, 19 nt, Homo sapiens
  misc_RNA (1)...(19): siRNA sense strand
gcaucgggccaaaggguau

SEQ ID NO: 2277499 - RNA, 19 nt, Homo sapiens
  misc_RNA (1)...(19): siRNA sense strand
ugggaagaaugguggcuuu

SEQ ID NO: 2277500 - RNA, 19 nt, Homo sapiens
  misc_RNA (1)...(19): siRNA sense strand
ucagagaggcugugcucaa

SEQ ID NO: 2277501 - RNA, 19 nt, Homo sapiens
  misc_RNA (1)...(19): siRNA sense strand
aggcugagcuggaagagau

SEQ ID NO: 2277502 - RNA, 19 nt, Homo sapiens
  misc_RNA (1)...(19): siRNA sense strand
cuggaaagucugacgauga

SEQ ID NO: 2277503 - RNA, 19 nt, Homo sapiens
  misc_RNA (1)...(19): siRNA sense strand
aguccagguguuugagaua

SEQ ID NO: 2277504 - RNA, 19 nt, Homo sapiens
  misc_RNA (1)...(19): siRNA sense strand
cgguggagcucaagcaguu

SEQ ID NO: 2277505 - RNA, 19 nt, Homo sapiens
  misc_RNA (1)...(19): siRNA sense strand
ccaucaacaaaguggucua

SEQ ID NO: 2277506 - RNA, 19 nt, Homo sapiens
  misc_RNA (1)...(19): siRNA sense strand
gaagucaacaagagagaca

SEQ ID NO: 2277507 - RNA, 19 nt, Homo sapiens
  misc_RNA (1)...(19): siRNA sense strand
gaggaggcccagagaguca

SEQ ID NO: 2277508 - RNA, 19 nt, Homo sapiens
  misc_RNA (1)...(19): siRNA sense strand
ccgaauaacguuacuucaa

SEQ ID NO: 2277509 - RNA, 19 nt, Homo sapiens
  misc_RNA (1)...(19): siRNA sense strand
guauggagguuguggugga

SEQ ID NO: 2277510 - RNA, 19 nt, Homo sapiens
  misc_RNA (1)...(19): siRNA sense strand
ugguaagucccuagaugaa

SEQ ID NO: 2277511 - RNA, 19 nt, Homo sapiens
  misc_RNA (1)...(19): siRNA sense strand
gaauauguguucucgguga

SEQ ID NO: 2277512 - RNA, 19 nt, Homo sapiens
  misc_RNA (1)...(19): siRNA sense strand
uggaggaccuggagaaacu

SEQ ID NO: 2277513 - RNA, 19 nt, Homo sapiens
  misc_RNA (1)...(19): siRNA sense strand
uggagaaacugggaagaau

SEQ ID NO: 2277514 - RNA, 19 nt, Homo sapiens
  misc_RNA (1)...(19): siRNA sense strand
caacaggacccaaaggcau

SEQ ID NO: 2277515 - RNA, 19 nt, Homo sapiens
  misc_RNA (1)...(19): siRNA sense strand
ccuuugacuuugacgagua

SEQ ID NO: 2277516 - RNA, 19 nt, Homo sapiens
  misc_RNA (1)...(19): siRNA sense strand
cggagcagcuugacaacau

SEQ ID NO: 2277517 - RNA, 19 nt, Homo sapiens
  misc_RNA (1)...(19): siRNA sense strand
gcccaggagcugaagagaa

SEQ ID NO: 2277518 - RNA, 19 nt, Homo sapiens
  misc_RNA (1)...(19): siRNA sense strand
uggacuaugcacagaggua

SEQ ID NO: 2277519 - RNA, 19 nt, Homo sapiens
  misc_RNA (1)...(19): siRNA sense strand
gugaaaaggacgugguguu

SEQ ID NO: 2277520 - RNA, 19 nt, Homo sapiens
  misc_RNA (1)...(19): siRNA sense strand
gcgagaguucagagagcuu

SEQ ID NO: 2277521 - RNA, 19 nt, Homo sapiens
  misc_RNA (1)...(19): siRNA sense strand
ggguauuccuggagaagac

SEQ ID NO: 2277522 - RNA, 19 nt, Homo sapiens
  misc_RNA (1)...(19): siRNA sense strand
gagucauccugcaggccaa

SEQ ID NO: 2277523 - RNA, 19 nt, Homo sapiens
  misc_RNA (1)...(19): siRNA sense strand
ccucagagcagauccagaa

SEQ ID NO: 2277524 - RNA, 19 nt, Homo sapiens
  misc_RNA (1)...(19): siRNA sense strand
cugaaauaguggacacagu

SEQ ID NO: 2277525 - RNA, 19 nt, Homo sapiens
  misc_RNA (1)...(19): siRNA sense strand
gcgaugaugucaaggugga

SEQ ID NO: 2277526 - RNA, 19 nt, Homo sapiens
  misc_RNA (1)...(19): siRNA sense strand
gaguacguguccaggaaca

SEQ ID NO: 2277527 - RNA, 19 nt, Homo sapiens
  misc_RNA (1)...(19): siRNA sense strand
uggaacaacaggacccaaa

SEQ ID NO: 2277528 - RNA, 19 nt, Homo sapiens
  misc_RNA (1)...(19): siRNA sense strand
ugacacaguugcagggaac

SEQ ID NO: 2277529 - RNA, 19 nt, Homo sapiens
  misc_RNA (1)...(19): siRNA sense strand
aagcagaaccucacgguca

SEQ ID NO: 2277530 - RNA, 19 nt, Homo sapiens
  misc_RNA (1)...(19): siRNA sense strand
gggcgaaguaggagaaauu

SEQ ID NO: 2277531 - RNA, 19 nt, Homo sapiens
  misc_RNA (1)...(19): siRNA sense strand
uggugaagauggagacaaa

SEQ ID NO: 2277532 - RNA, 19 nt, Homo sapiens
  misc_RNA (1)...(19): siRNA sense strand
gaggaaagucgguggaaga

SEQ ID NO: 2277533 - RNA, 19 nt, Homo sapiens
  misc_RNA (1)...(19): siRNA sense strand
cugaagagaagcagcauaa

SEQ ID NO: 2277534 - RNA, 19 nt, Homo sapiens
  misc_RNA (1)...(19): siRNA sense strand
aggagaagcugguggacuu

SEQ ID NO: 2277535 - RNA, 19 nt, Homo sapiens
  misc_RNA (1)...(19): siRNA sense strand
ugaaggacgcagaggcaaa

SEQ ID NO: 2277536 - RNA, 19 nt, Homo sapiens
  misc_RNA (1)...(19): siRNA sense strand
ccaaagcaucaaagauaaa

SEQ ID NO: 2277537 - RNA, 19 nt, Homo sapiens
  misc_RNA (1)...(19): siRNA sense strand
cauuuaagcgugugaggaa

SEQ ID NO: 2277538 - RNA, 19 nt, Homo sapiens
  misc_RNA (1)...(19): siRNA sense strand
ucuucaaauuaguggacaa

SEQ ID NO: 2277539 - RNA, 19 nt, Homo sapiens
  misc_RNA (1)...(19): siRNA sense strand
ggucuugaguauugugaau

SEQ ID NO: 2277540 - RNA, 19 nt, Homo sapiens
  misc_RNA (1)...(19): siRNA sense strand
aggaggagcuggugaagau

SEQ ID NO: 2277541 - RNA, 19 nt, Homo sapiens
  misc_RNA (1)...(19): siRNA sense strand
gugaagagaaugaagauca

SEQ ID NO: 2277542 - RNA, 19 nt, Homo sapiens
  misc_RNA (1)...(19): siRNA sense strand
gcaaguaaccugaagcaga

SEQ ID NO: 2277543 - RNA, 19 nt, Homo sapiens
  misc_RNA (1)...(19): siRNA sense strand
uugaugagcaccagaguaa

SEQ ID NO: 2277544 - RNA, 19 nt, Homo sapiens
  misc_RNA (1)...(19): siRNA sense strand
caaauuuggaucacagaaa

SEQ ID NO: 2277545 - RNA, 19 nt, Homo sapiens
  misc_RNA (1)...(19): siRNA sense strand
ccaacauagaagaaagaau

SEQ ID NO: 2277546 - RNA, 19 nt, Homo sapiens
  misc_RNA (1)...(19): siRNA sense strand
uggaagaaggggugauaaa

SEQ ID NO: 2277547 - RNA, 19 nt, Homo sapiens
  misc_RNA (1)...(19): siRNA sense strand
gcuguuggagugaggaaua

SEQ ID NO: 2277548 - RNA, 19 nt, Homo sapiens
  misc_RNA (1)...(19): siRNA sense strand
gcaaggaugaagugcagaa

SEQ ID NO: 2277549 - RNA, 19 nt, Homo sapiens
  misc_RNA (1)...(19): siRNA sense strand
auccaaagcaucaaagaua

SEQ ID NO: 2277550 - RNA, 19 nt, Homo sapiens
  misc_RNA (1)...(19): siRNA sense strand
agucaacaagagagacaua

SEQ ID NO: 2277551 - RNA, 19 nt, Homo sapiens
  misc_RNA (1)...(19): siRNA sense strand
ggaguuugggcgaggguuu

SEQ ID NO: 2277552 - RNA, 19 nt, Homo sapiens
  misc_RNA (1)...(19): siRNA sense strand
acucggaggagguuggaaa

SEQ ID NO: 2277553 - RNA, 19 nt, Homo sapiens
  misc_RNA (1)...(19): siRNA sense strand
aggagagaaaggagaaaga

SEQ ID NO: 2277554 - RNA, 19 nt, Homo sapiens
  misc_RNA (1)...(19): siRNA sense strand
ugaauacaccauagagaau

SEQ ID NO: 2277555 - RNA, 19 nt, Homo sapiens
  misc_RNA (1)...(19): siRNA sense strand
gcacagaaccauuggcucu

SEQ ID NO: 2277556 - RNA, 19 nt, Homo sapiens
  misc_RNA (1)...(19): siRNA sense strand
cagccaaucuugugggcca

SEQ ID NO: 2277557 - RNA, 19 nt, Homo sapiens
  misc_RNA (1)...(19): siRNA sense strand
ggacaagacagccaggaga

SEQ ID NO: 2277558 - RNA, 19 nt, Homo sapiens
  misc_RNA (1)...(19): siRNA sense strand
aggccaaaugcaagggcua

SEQ ID NO: 2277559 - RNA, 19 nt, Homo sapiens
  misc_RNA (1)...(19): siRNA sense strand
cgaaggaacuugcagggau

SEQ ID NO: 2277560 - RNA, 19 nt, Homo sapiens
  misc_RNA (1)...(19): siRNA sense strand
aggagaaagaggagauguu

SEQ ID NO: 2277561 - RNA, 19 nt, Homo sapiens
  misc_RNA (1)...(19): siRNA sense strand
ugaacaucaaggagguaua

SEQ ID NO: 2277562 - RNA, 19 nt, Homo sapiens
  misc_RNA (1)...(19): siRNA sense strand
gcaucgggccaaaggguau

SEQ ID NO: 2277563 - RNA, 19 nt, Homo sapiens
  misc_RNA (1)...(19): siRNA sense strand
ugggaagaaugguggcuuu

SEQ ID NO: 2277564 - RNA, 19 nt, Homo sapiens
  misc_RNA (1)...(19): siRNA sense strand
ucagagaggcugugcucaa

SEQ ID NO: 2277565 - RNA, 19 nt, Homo sapiens
  misc_RNA (1)...(19): siRNA sense strand
aggcugagcuggaagagau

SEQ ID NO: 2277566 - RNA, 19 nt, Homo sapiens
  misc_RNA (1)...(19): siRNA sense strand
cuggaaagucugacgauga

SEQ ID NO: 2277567 - RNA, 19 nt, Homo sapiens
  misc_RNA (1)...(19): siRNA sense strand
aguccagguguuugagaua

SEQ ID NO: 2277568 - RNA, 19 nt, Homo sapiens
  misc_RNA (1)...(19): siRNA sense strand
cgguggagcucaagcaguu

SEQ ID NO: 2277569 - RNA, 19 nt, Homo sapiens
  misc_RNA (1)...(19): siRNA sense strand
ccaucaacaaaguggucua

SEQ ID NO: 2277570 - RNA, 19 nt, Homo sapiens
  misc_RNA (1)...(19): siRNA sense strand
gaagucaacaagagagaca

SEQ ID NO: 2277571 - RNA, 19 nt, Homo sapiens
  misc_RNA (1)...(19): siRNA sense strand
gaggaggcccagagaguca

SEQ ID NO: 2277572 - RNA, 19 nt, Homo sapiens
  misc_RNA (1)...(19): siRNA sense strand
ccgaauaacguuacuucaa

SEQ ID NO: 2277573 - RNA, 19 nt, Homo sapiens
  misc_RNA (1)...(19): siRNA sense strand
guauggagguuguggugga

SEQ ID NO: 2277574 - RNA, 19 nt, Homo sapiens
  misc_RNA (1)...(19): siRNA sense strand
ugguaagucccuagaugaa

SEQ ID NO: 2277575 - RNA, 19 nt, Homo sapiens
  misc_RNA (1)...(19): siRNA sense strand
gaauauguguucucgguga

SEQ ID NO: 2277576 - RNA, 19 nt, Homo sapiens
  misc_RNA (1)...(19): siRNA sense strand
uggaggaccuggagaaacu

SEQ ID NO: 2277577 - RNA, 19 nt, Homo sapiens
  misc_RNA (1)...(19): siRNA sense strand
uggagaaacugggaagaau

SEQ ID NO: 2277578 - RNA, 19 nt, Homo sapiens
  misc_RNA (1)...(19): siRNA sense strand
caacaggacccaaaggcau

SEQ ID NO: 2277579 - RNA, 19 nt, Homo sapiens
  misc_RNA (1)...(19): siRNA sense strand
ccuuugacuuugacgagua

SEQ ID NO: 2277580 - RNA, 19 nt, Homo sapiens
  misc_RNA (1)...(19): siRNA sense strand
cggagcagcuugacaacau

SEQ ID NO: 2277581 - RNA, 19 nt, Homo sapiens
  misc_RNA (1)...(19): siRNA sense strand
gcccaggagcugaagagaa

SEQ ID NO: 2277582 - RNA, 19 nt, Homo sapiens
  misc_RNA (1)...(19): siRNA sense strand
uggacuaugcacagaggua

SEQ ID NO: 2277583 - RNA, 19 nt, Homo sapiens
  misc_RNA (1)...(19): siRNA sense strand
gugaaaaggacgugguguu

SEQ ID NO: 2277584 - RNA, 19 nt, Homo sapiens
  misc_RNA (1)...(19): siRNA sense strand
gcgagaguucagagagcuu

SEQ ID NO: 2277585 - RNA, 19 nt, Homo sapiens
  misc_RNA (1)...(19): siRNA sense strand
ggguauuccuggagaagac

SEQ ID NO: 2277586 - RNA, 19 nt, Homo sapiens
  misc_RNA (1)...(19): siRNA sense strand
gagucauccugcaggccaa

SEQ ID NO: 2277587 - RNA, 19 nt, Homo sapiens
  misc_RNA (1)...(19): siRNA sense strand
ccucagagcagauccagaa

SEQ ID NO: 2277588 - RNA, 19 nt, Homo sapiens
  misc_RNA (1)...(19): siRNA sense strand
cugaaauaguggacacagu

SEQ ID NO: 2277589 - RNA, 19 nt, Homo sapiens
  misc_RNA (1)...(19): siRNA sense strand
gcgaugaugucaaggugga

SEQ ID NO: 2277590 - RNA, 19 nt, Homo sapiens
  misc_RNA (1)...(19): siRNA sense strand
gaguacguguccaggaaca

SEQ ID NO: 2277591 - RNA, 19 nt, Homo sapiens
  misc_RNA (1)...(19): siRNA sense strand
uggaacaacaggacccaaa

SEQ ID NO: 2277592 - RNA, 19 nt, Homo sapiens
  misc_RNA (1)...(19): siRNA sense strand
ugacacaguugcagggaac

SEQ ID NO: 2277593 - RNA, 19 nt, Homo sapiens
  misc_RNA (1)...(19): siRNA sense strand
aagcagaaccucacgguca

SEQ ID NO: 2277594 - RNA, 19 nt, Homo sapiens
  misc_RNA (1)...(19): siRNA sense strand
gggcgaaguaggagaaauu

SEQ ID NO: 2277595 - RNA, 19 nt, Homo sapiens
  misc_RNA (1)...(19): siRNA sense strand
uggugaagauggagacaaa

SEQ ID NO: 2277596 - RNA, 19 nt, Homo sapiens
  misc_RNA (1)...(19): siRNA sense strand
gaggaaagucgguggaaga

SEQ ID NO: 2277597 - RNA, 19 nt, Homo sapiens
  misc_RNA (1)...(19): siRNA sense strand
cugaagagaagcagcauaa

SEQ ID NO: 2277598 - RNA, 19 nt, Homo sapiens
  misc_RNA (1)...(19): siRNA sense strand
aggagaagcugguggacuu

SEQ ID NO: 2277599 - RNA, 19 nt, Homo sapiens
  misc_RNA (1)...(19): siRNA sense strand
ugaaggacgcagaggcaaa

SEQ ID NO: 2277600 - RNA, 19 nt, Homo sapiens
  misc_RNA (1)...(19): siRNA sense strand
ccaaagcaucaaagauaaa

SEQ ID NO: 2277601 - RNA, 19 nt, Homo sapiens
  misc_RNA (1)...(19): siRNA sense strand
cauuuaagcgugugaggaa

SEQ ID NO: 2277602 - RNA, 19 nt, Homo sapiens
  misc_RNA (1)...(19): siRNA sense strand
ucuucaaauuaguggacaa

SEQ ID NO: 2277603 - RNA, 19 nt, Homo sapiens
  misc_RNA (1)...(19): siRNA sense strand
ggucuugaguauugugaau

SEQ ID NO: 2277604 - RNA, 19 nt, Homo sapiens
  misc_RNA (1)...(19): siRNA sense strand
aggaggagcuggugaagau

SEQ ID NO: 2277605 - RNA, 19 nt, Homo sapiens
  misc_RNA (1)...(19): siRNA sense strand
gugaagagaaugaagauca

SEQ ID NO: 2277606 - RNA, 19 nt, Homo sapiens
  misc_RNA (1)...(19): siRNA sense strand
gcaaguaaccugaagcaga

SEQ ID NO: 2277607 - RNA, 19 nt, Homo sapiens
  misc_RNA (1)...(19): siRNA sense strand
uugaugagcaccagaguaa

SEQ ID NO: 2277608 - RNA, 19 nt, Homo sapiens
  misc_RNA (1)...(19): siRNA sense strand
caaauuuggaucacagaaa

SEQ ID NO: 2277609 - RNA, 19 nt, Homo sapiens
  misc_RNA (1)...(19): siRNA sense strand
ccaacauagaagaaagaau

SEQ ID NO: 2277610 - RNA, 19 nt, Homo sapiens
  misc_RNA (1)...(19): siRNA sense strand
uggaagaaggggugauaaa

SEQ ID NO: 2277611 - RNA, 19 nt, Homo sapiens
  misc_RNA (1)...(19): siRNA sense strand
gcuguuggagugaggaaua

SEQ ID NO: 2277612 - RNA, 19 nt, Homo sapiens
  misc_RNA (1)...(19): siRNA sense strand
gcaaggaugaagugcagaa

SEQ ID NO: 2277613 - RNA, 19 nt, Homo sapiens
  misc_RNA (1)...(19): siRNA sense strand
auccaaagcaucaaagaua

SEQ ID NO: 2277614 - RNA, 19 nt, Homo sapiens
  misc_RNA (1)...(19): siRNA sense strand
agucaacaagagagacaua

SEQ ID NO: 2277615 - RNA, 19 nt, Homo sapiens
  misc_RNA (1)...(19): siRNA sense strand
ggaguuugggcgaggguuu

SEQ ID NO: 2277616 - RNA, 19 nt, Homo sapiens
  misc_RNA (1)...(19): siRNA sense strand
acucggaggagguuggaaa

SEQ ID NO: 2277617 - RNA, 19 nt, Homo sapiens
  misc_RNA (1)...(19): siRNA sense strand
aggagagaaaggagaaaga

SEQ ID NO: 2277618 - RNA, 19 nt, Homo sapiens
  misc_RNA (1)...(19): siRNA sense strand
ugaauacaccauagagaau

SEQ ID NO: 2277619 - RNA, 19 nt, Homo sapiens
  misc_RNA (1)...(19): siRNA sense strand
gcacagaaccauuggcucu

SEQ ID NO: 2277620 - RNA, 19 nt, Homo sapiens
  misc_RNA (1)...(19): siRNA sense strand
cagccaaucuugugggcca

SEQ ID NO: 2277621 - RNA, 19 nt, Homo sapiens
  misc_RNA (1)...(19): siRNA sense strand
ggacaagacagccaggaga

SEQ ID NO: 2277622 - RNA, 19 nt, Homo sapiens
  misc_RNA (1)...(19): siRNA sense strand
aggccaaaugcaagggcua

SEQ ID NO: 2277623 - RNA, 19 nt, Homo sapiens
  misc_RNA (1)...(19): siRNA sense strand
cgaaggaacuugcagggau

SEQ ID NO: 2277624 - RNA, 19 nt, Homo sapiens
  misc_RNA (1)...(19): siRNA sense strand
aggagaaagaggagauguu

SEQ ID NO: 2277625 - RNA, 19 nt, Homo sapiens
  misc_RNA (1)...(19): siRNA sense strand
ugaacaucaaggagguaua

SEQ ID NO: 2277626 - RNA, 19 nt, Homo sapiens
  misc_RNA (1)...(19): siRNA sense strand
gcaucgggccaaaggguau

SEQ ID NO: 2277627 - RNA, 19 nt, Homo sapiens
  misc_RNA (1)...(19): siRNA sense strand
ugggaagaaugguggcuuu

SEQ ID NO: 2277628 - RNA, 19 nt, Homo sapiens
  misc_RNA (1)...(19): siRNA sense strand
ucagagaggcugugcucaa

SEQ ID NO: 2277629 - RNA, 19 nt, Homo sapiens
  misc_RNA (1)...(19): siRNA sense strand
aggcugagcuggaagagau

SEQ ID NO: 2277630 - RNA, 19 nt, Homo sapiens
  misc_RNA (1)...(19): siRNA sense strand
cuggaaagucugacgauga

SEQ ID NO: 2277631 - RNA, 19 nt, Homo sapiens
  misc_RNA (1)...(19): siRNA sense strand
aguccagguguuugagaua

SEQ ID NO: 2277632 - RNA, 19 nt, Homo sapiens
  misc_RNA (1)...(19): siRNA sense strand
cgguggagcucaagcaguu

SEQ ID NO: 2277633 - RNA, 19 nt, Homo sapiens
  misc_RNA (1)...(19): siRNA sense strand
ccaucaacaaaguggucua

SEQ ID NO: 2277634 - RNA, 19 nt, Homo sapiens
  misc_RNA (1)...(19): siRNA sense strand
gaagucaacaagagagaca

SEQ ID NO: 2277635 - RNA, 19 nt, Homo sapiens
  misc_RNA (1)...(19): siRNA sense strand
gaggaggcccagagaguca

SEQ ID NO: 2277636 - RNA, 19 nt, Homo sapiens
  misc_RNA (1)...(19): siRNA sense strand
ccgaauaacguuacuucaa

SEQ ID NO: 2277637 - RNA, 19 nt, Homo sapiens
  misc_RNA (1)...(19): siRNA sense strand
guauggagguuguggugga

SEQ ID NO: 2277638 - RNA, 19 nt, Homo sapiens
  misc_RNA (1)...(19): siRNA sense strand
ugguaagucccuagaugaa

SEQ ID NO: 2277639 - RNA, 19 nt, Homo sapiens
  misc_RNA (1)...(19): siRNA sense strand
gaauauguguucucgguga

SEQ ID NO: 2277640 - RNA, 19 nt, Homo sapiens
  misc_RNA (1)...(19): siRNA sense strand
uggaggaccuggagaaacu

SEQ ID NO: 2277641 - RNA, 19 nt, Homo sapiens
  misc_RNA (1)...(19): siRNA sense strand
uggagaaacugggaagaau

SEQ ID NO: 2277642 - RNA, 19 nt, Homo sapiens
  misc_RNA (1)...(19): siRNA sense strand
caacaggacccaaaggcau

SEQ ID NO: 2277643 - RNA, 19 nt, Homo sapiens
  misc_RNA (1)...(19): siRNA sense strand
ccuuugacuuugacgagua

SEQ ID NO: 2277644 - RNA, 19 nt, Homo sapiens
  misc_RNA (1)...(19): siRNA sense strand
cggagcagcuugacaacau

SEQ ID NO: 2277645 - RNA, 19 nt, Homo sapiens
  misc_RNA (1)...(19): siRNA sense strand
gcccaggagcugaagagaa

SEQ ID NO: 2277646 - RNA, 19 nt, Homo sapiens
  misc_RNA (1)...(19): siRNA sense strand
uggacuaugcacagaggua

SEQ ID NO: 2277647 - RNA, 19 nt, Homo sapiens
  misc_RNA (1)...(19): siRNA sense strand
gugaaaaggacgugguguu

SEQ ID NO: 2277648 - RNA, 19 nt, Homo sapiens
  misc_RNA (1)...(19): siRNA sense strand
gcgagaguucagagagcuu

SEQ ID NO: 2277649 - RNA, 19 nt, Homo sapiens
  misc_RNA (1)...(19): siRNA sense strand
ggguauuccuggagaagac

SEQ ID NO: 2277650 - RNA, 19 nt, Homo sapiens
  misc_RNA (1)...(19): siRNA sense strand
gagucauccugcaggccaa

SEQ ID NO: 2277651 - RNA, 19 nt, Homo sapiens
  misc_RNA (1)...(19): siRNA sense strand
ccucagagcagauccagaa

SEQ ID NO: 2277652 - RNA, 19 nt, Homo sapiens
  misc_RNA (1)...(19): siRNA sense strand
cugaaauaguggacacagu

SEQ ID NO: 2277653 - RNA, 19 nt, Homo sapiens
  misc_RNA (1)...(19): siRNA sense strand
gcgaugaugucaaggugga

SEQ ID NO: 2277654 - RNA, 19 nt, Homo sapiens
  misc_RNA (1)...(19): siRNA sense strand
gaguacguguccaggaaca

SEQ ID NO: 2277655 - RNA, 19 nt, Homo sapiens
  misc_RNA (1)...(19): siRNA sense strand
uggaacaacaggacccaaa

SEQ ID NO: 2277656 - RNA, 19 nt, Homo sapiens
  misc_RNA (1)...(19): siRNA sense strand
ugacacaguugcagggaac

SEQ ID NO: 2277657 - RNA, 19 nt, Homo sapiens
  misc_RNA (1)...(19): siRNA sense strand
aagcagaaccucacgguca

SEQ ID NO: 2277658 - RNA, 19 nt, Homo sapiens
  misc_RNA (1)...(19): siRNA sense strand
gggcgaaguaggagaaauu

SEQ ID NO: 2277659 - RNA, 19 nt, Homo sapiens
  misc_RNA (1)...(19): siRNA sense strand
uggugaagauggagacaaa

SEQ ID NO: 2277660 - RNA, 19 nt, Homo sapiens
  misc_RNA (1)...(19): siRNA sense strand
gaggaaagucgguggaaga

SEQ ID NO: 2277661 - RNA, 19 nt, Homo sapiens
  misc_RNA (1)...(19): siRNA sense strand
cugaagagaagcagcauaa

SEQ ID NO: 2277662 - RNA, 19 nt, Homo sapiens
  misc_RNA (1)...(19): siRNA sense strand
aggagaagcugguggacuu

SEQ ID NO: 2277663 - RNA, 19 nt, Homo sapiens
  misc_RNA (1)...(19): siRNA sense strand
ugaaggacgcagaggcaaa

SEQ ID NO: 2277664 - RNA, 19 nt, Homo sapiens
  misc_RNA (1)...(19): siRNA sense strand
ccaaagcaucaaagauaaa

SEQ ID NO: 2277665 - RNA, 19 nt, Homo sapiens
  misc_RNA (1)...(19): siRNA sense strand
cauuuaagcgugugaggaa

SEQ ID NO: 2277666 - RNA, 19 nt, Homo sapiens
  misc_RNA (1)...(19): siRNA sense strand
ucuucaaauuaguggacaa

SEQ ID NO: 2277667 - RNA, 19 nt, Homo sapiens
  misc_RNA (1)...(19): siRNA sense strand
ggucuugaguauugugaau

SEQ ID NO: 2277668 - RNA, 19 nt, Homo sapiens
  misc_RNA (1)...(19): siRNA sense strand
aggaggagcuggugaagau

SEQ ID NO: 2277669 - RNA, 19 nt, Homo sapiens
  misc_RNA (1)...(19): siRNA sense strand
gugaagagaaugaagauca

SEQ ID NO: 2277670 - RNA, 19 nt, Homo sapiens
  misc_RNA (1)...(19): siRNA sense strand
gcaaguaaccugaagcaga

SEQ ID NO: 2277671 - RNA, 19 nt, Homo sapiens
  misc_RNA (1)...(19): siRNA sense strand
uugaugagcaccagaguaa

SEQ ID NO: 2277672 - RNA, 19 nt, Homo sapiens
  misc_RNA (1)...(19): siRNA sense strand
caaauuuggaucacagaaa

SEQ ID NO: 2277673 - RNA, 19 nt, Homo sapiens
  misc_RNA (1)...(19): siRNA sense strand
ccaacauagaagaaagaau

SEQ ID NO: 2277674 - RNA, 19 nt, Homo sapiens
  misc_RNA (1)...(19): siRNA sense strand
uggaagaaggggugauaaa

SEQ ID NO: 2277675 - RNA, 19 nt, Homo sapiens
  misc_RNA (1)...(19): siRNA sense strand
gcuguuggagugaggaaua

SEQ ID NO: 2277676 - RNA, 19 nt, Homo sapiens
  misc_RNA (1)...(19): siRNA sense strand
gcaaggaugaagugcagaa

SEQ ID NO: 2277677 - RNA, 19 nt, Homo sapiens
  misc_RNA (1)...(19): siRNA sense strand
auccaaagcaucaaagaua

SEQ ID NO: 2277678 - RNA, 19 nt, Homo sapiens
  misc_RNA (1)...(19): siRNA sense strand
agucaacaagagagacaua

SEQ ID NO: 2277679 - RNA, 19 nt, Homo sapiens
  misc_RNA (1)...(19): siRNA sense strand
ggaguuugggcgaggguuu

SEQ ID NO: 2277680 - RNA, 19 nt, Homo sapiens
  misc_RNA (1)...(19): siRNA sense strand
acucggaggagguuggaaa

SEQ ID NO: 2277681 - RNA, 19 nt, Homo sapiens
  misc_RNA (1)...(19): siRNA sense strand
aggagagaaaggagaaaga

SEQ ID NO: 2277682 - RNA, 19 nt, Homo sapiens
  misc_RNA (1)...(19): siRNA sense strand
ugaauacaccauagagaau

SEQ ID NO: 2277683 - RNA, 19 nt, Homo sapiens
  misc_RNA (1)...(19): siRNA sense strand
gcacagaaccauuggcucu

SEQ ID NO: 2277684 - RNA, 19 nt, Homo sapiens
  misc_RNA (1)...(19): siRNA sense strand
cagccaaucuugugggcca

SEQ ID NO: 2277685 - RNA, 19 nt, Homo sapiens
  misc_RNA (1)...(19): siRNA sense strand
ggacaagacagccaggaga

SEQ ID NO: 2277686 - RNA, 19 nt, Homo sapiens
  misc_RNA (1)...(19): siRNA sense strand
aggccaaaugcaagggcua

SEQ ID NO: 2277687 - RNA, 19 nt, Homo sapiens
  misc_RNA (1)...(19): siRNA sense strand
cgaaggaacuugcagggau

SEQ ID NO: 2277688 - RNA, 19 nt, Homo sapiens
  misc_RNA (1)...(19): siRNA sense strand
aggagaaagaggagauguu

SEQ ID NO: 2277689 - RNA, 19 nt, Homo sapiens
  misc_RNA (1)...(19): siRNA sense strand
ugaacaucaaggagguaua

SEQ ID NO: 2277690 - RNA, 19 nt, Homo sapiens
  misc_RNA (1)...(19): siRNA sense strand
gcaucgggccaaaggguau

SEQ ID NO: 2277691 - RNA, 19 nt, Homo sapiens
  misc_RNA (1)...(19): siRNA sense strand
ugggaagaaugguggcuuu

SEQ ID NO: 2277692 - RNA, 19 nt, Homo sapiens
  misc_RNA (1)...(19): siRNA sense strand
ucagagaggcugugcucaa

SEQ ID NO: 2277693 - RNA, 19 nt, Homo sapiens
  misc_RNA (1)...(19): siRNA sense strand
aggcugagcuggaagagau

SEQ ID NO: 2277694 - RNA, 19 nt, Homo sapiens
  misc_RNA (1)...(19): siRNA sense strand
cuggaaagucugacgauga

SEQ ID NO: 2277695 - RNA, 19 nt, Homo sapiens
  misc_RNA (1)...(19): siRNA sense strand
aguccagguguuugagaua

SEQ ID NO: 2277696 - RNA, 19 nt, Homo sapiens
  misc_RNA (1)...(19): siRNA sense strand
cgguggagcucaagcaguu

SEQ ID NO: 2277697 - RNA, 19 nt, Homo sapiens
  misc_RNA (1)...(19): siRNA sense strand
ccaucaacaaaguggucua

SEQ ID NO: 2277698 - RNA, 19 nt, Homo sapiens
  misc_RNA (1)...(19): siRNA sense strand
gaagucaacaagagagaca

SEQ ID NO: 2277699 - RNA, 19 nt, Homo sapiens
  misc_RNA (1)...(19): siRNA sense strand
gaggaggcccagagaguca

SEQ ID NO: 2277700 - RNA, 19 nt, Homo sapiens
  misc_RNA (1)...(19): siRNA sense strand
ccgaauaacguuacuucaa

SEQ ID NO: 2277701 - RNA, 19 nt, Homo sapiens
  misc_RNA (1)...(19): siRNA sense strand
guauggagguuguggugga

SEQ ID NO: 2277702 - RNA, 19 nt, Homo sapiens
  misc_RNA (1)...(19): siRNA sense strand
ugguaagucccuagaugaa

SEQ ID NO: 2277703 - RNA, 19 nt, Homo sapiens
  misc_RNA (1)...(19): siRNA sense strand
gaauauguguucucgguga

SEQ ID NO: 2277704 - RNA, 19 nt, Homo sapiens
  misc_RNA (1)...(19): siRNA sense strand
uggaggaccuggagaaacu

SEQ ID NO: 2277705 - RNA, 19 nt, Homo sapiens
  misc_RNA (1)...(19): siRNA sense strand
uggagaaacugggaagaau

SEQ ID NO: 2277706 - RNA, 19 nt, Homo sapiens
  misc_RNA (1)...(19): siRNA sense strand
caacaggacccaaaggcau

SEQ ID NO: 2277707 - RNA, 19 nt, Homo sapiens
  misc_RNA (1)...(19): siRNA sense strand
ccuuugacuuugacgagua

SEQ ID NO: 2277708 - RNA, 19 nt, Homo sapiens
  misc_RNA (1)...(19): siRNA sense strand
cggagcagcuugacaacau

SEQ ID NO: 2277709 - RNA, 19 nt, Homo sapiens
  misc_RNA (1)...(19): siRNA sense strand
gcccaggagcugaagagaa

SEQ ID NO: 2277710 - RNA, 19 nt, Homo sapiens
  misc_RNA (1)...(19): siRNA sense strand
uggacuaugcacagaggua

SEQ ID NO: 2277711 - RNA, 19 nt, Homo sapiens
  misc_RNA (1)...(19): siRNA sense strand
gugaaaaggacgugguguu

SEQ ID NO: 2277712 - RNA, 19 nt, Homo sapiens
  misc_RNA (1)...(19): siRNA sense strand
gcgagaguucagagagcuu

SEQ ID NO: 2277713 - RNA, 19 nt, Homo sapiens
  misc_RNA (1)...(19): siRNA sense strand
ggguauuccuggagaagac

SEQ ID NO: 2277714 - RNA, 19 nt, Homo sapiens
  misc_RNA (1)...(19): siRNA sense strand
gagucauccugcaggccaa

SEQ ID NO: 2277715 - RNA, 19 nt, Homo sapiens
  misc_RNA (1)...(19): siRNA sense strand
ccucagagcagauccagaa

SEQ ID NO: 2277716 - RNA, 19 nt, Homo sapiens
  misc_RNA (1)...(19): siRNA sense strand
cugaaauaguggacacagu

SEQ ID NO: 2277717 - RNA, 19 nt, Homo sapiens
  misc_RNA (1)...(19): siRNA sense strand
gcgaugaugucaaggugga

SEQ ID NO: 2277718 - RNA, 19 nt, Homo sapiens
  misc_RNA (1)...(19): siRNA sense strand
gaguacguguccaggaaca

SEQ ID NO: 2277719 - RNA, 19 nt, Homo sapiens
  misc_RNA (1)...(19): siRNA sense strand
uggaacaacaggacccaaa

SEQ ID NO: 2277720 - RNA, 19 nt, Homo sapiens
  misc_RNA (1)...(19): siRNA sense strand
ugacacaguugcagggaac

SEQ ID NO: 2277721 - RNA, 19 nt, Homo sapiens
  misc_RNA (1)...(19): siRNA sense strand
aagcagaaccucacgguca

SEQ ID NO: 2277722 - RNA, 19 nt, Homo sapiens
  misc_RNA (1)...(19): siRNA sense strand
gggcgaaguaggagaaauu

SEQ ID NO: 2277723 - RNA, 19 nt, Homo sapiens
  misc_RNA (1)...(19): siRNA sense strand
uggugaagauggagacaaa

SEQ ID NO: 2277724 - RNA, 19 nt, Homo sapiens
  misc_RNA (1)...(19): siRNA sense strand
gaggaaagucgguggaaga

SEQ ID NO: 2277725 - RNA, 19 nt, Homo sapiens
  misc_RNA (1)...(19): siRNA sense strand
cugaagagaagcagcauaa

SEQ ID NO: 2277726 - RNA, 19 nt, Homo sapiens
  misc_RNA (1)...(19): siRNA sense strand
aggagaagcugguggacuu

SEQ ID NO: 2277727 - RNA, 19 nt, Homo sapiens
  misc_RNA (1)...(19): siRNA sense strand
ugaaggacgcagaggcaaa

SEQ ID NO: 2277728 - RNA, 19 nt, Homo sapiens
  misc_RNA (1)...(19): siRNA sense strand
ccaaagcaucaaagauaaa

SEQ ID NO: 2277729 - RNA, 19 nt, Homo sapiens
  misc_RNA (1)...(19): siRNA sense strand
cauuuaagcgugugaggaa

SEQ ID NO: 2277730 - RNA, 19 nt, Homo sapiens
  misc_RNA (1)...(19): siRNA sense strand
ucuucaaauuaguggacaa

SEQ ID NO: 2277731 - RNA, 19 nt, Homo sapiens
  misc_RNA (1)...(19): siRNA sense strand
ggucuugaguauugugaau

SEQ ID NO: 2277732 - RNA, 19 nt, Homo sapiens
  misc_RNA (1)...(19): siRNA sense strand
aggaggagcuggugaagau

SEQ ID NO: 2277733 - RNA, 19 nt, Homo sapiens
  misc_RNA (1)...(19): siRNA sense strand
gugaagagaaugaagauca

SEQ ID NO: 2277734 - RNA, 19 nt, Homo sapiens
  misc_RNA (1)...(19): siRNA sense strand
gcaaguaaccugaagcaga

SEQ ID NO: 2277735 - RNA, 19 nt, Homo sapiens
  misc_RNA (1)...(19): siRNA sense strand
uugaugagcaccagaguaa

SEQ ID NO: 2277736 - RNA, 19 nt, Homo sapiens
  misc_RNA (1)...(19): siRNA sense strand
caaauuuggaucacagaaa

SEQ ID NO: 2277737 - RNA, 19 nt, Homo sapiens
  misc_RNA (1)...(19): siRNA sense strand
ccaacauagaagaaagaau

SEQ ID NO: 2277738 - RNA, 19 nt, Homo sapiens
  misc_RNA (1)...(19): siRNA sense strand
uggaagaaggggugauaaa

SEQ ID NO: 2277739 - RNA, 19 nt, Homo sapiens
  misc_RNA (1)...(19): siRNA sense strand
gcuguuggagugaggaaua

SEQ ID NO: 2277740 - RNA, 19 nt, Homo sapiens
  misc_RNA (1)...(19): siRNA sense strand
gcaaggaugaagugcagaa

SEQ ID NO: 2277741 - RNA, 19 nt, Homo sapiens
  misc_RNA (1)...(19): siRNA sense strand
auccaaagcaucaaagaua

SEQ ID NO: 2277742 - RNA, 19 nt, Homo sapiens
  misc_RNA (1)...(19): siRNA sense strand
agucaacaagagagacaua

SEQ ID NO: 2277743 - RNA, 19 nt, Homo sapiens
  misc_RNA (1)...(19): siRNA sense strand
ggaguuugggcgaggguuu

SEQ ID NO: 2277744 - RNA, 19 nt, Homo sapiens
  misc_RNA (1)...(19): siRNA sense strand
acucggaggagguuggaaa

SEQ ID NO: 2277745 - RNA, 19 nt, Homo sapiens
  misc_RNA (1)...(19): siRNA sense strand
aggagagaaaggagaaaga

SEQ ID NO: 2277746 - RNA, 19 nt, Homo sapiens
  misc_RNA (1)...(19): siRNA sense strand
ugaauacaccauagagaau

SEQ ID NO: 2277747 - RNA, 19 nt, Homo sapiens
  misc_RNA (1)...(19): siRNA sense strand
gcacagaaccauuggcucu

SEQ ID NO: 2277748 - RNA, 19 nt, Homo sapiens
  misc_RNA (1)...(19): siRNA sense strand
cagccaaucuugugggcca

SEQ ID NO: 2277749 - RNA, 19 nt, Homo sapiens
  misc_RNA (1)...(19): siRNA sense strand
ggacaagacagccaggaga

SEQ ID NO: 2277750 - RNA, 19 nt, Homo sapiens
  misc_RNA (1)...(19): siRNA sense strand
aggccaaaugcaagggcua

SEQ ID NO: 2277751 - RNA, 19 nt, Homo sapiens
  misc_RNA (1)...(19): siRNA sense strand
cgaaggaacuugcagggau

SEQ ID NO: 2277752 - RNA, 19 nt, Homo sapiens
  misc_RNA (1)...(19): siRNA sense strand
aggagaaagaggagauguu

SEQ ID NO: 2277753 - RNA, 19 nt, Homo sapiens
  misc_RNA (1)...(19): siRNA sense strand
ugaacaucaaggagguaua

SEQ ID NO: 2277754 - RNA, 19 nt, Homo sapiens
  misc_RNA (1)...(19): siRNA sense strand
gcaucgggccaaaggguau

SEQ ID NO: 2277755 - RNA, 19 nt, Homo sapiens
  misc_RNA (1)...(19): siRNA sense strand
ugggaagaaugguggcuuu

SEQ ID NO: 2277756 - RNA, 19 nt, Homo sapiens
  misc_RNA (1)...(19): siRNA sense strand
ucagagaggcugugcucaa

SEQ ID NO: 2277757 - RNA, 19 nt, Homo sapiens
  misc_RNA (1)...(19): siRNA sense strand
aggcugagcuggaagagau

SEQ ID NO: 2277758 - RNA, 19 nt, Homo sapiens
  misc_RNA (1)...(19): siRNA sense strand
cuggaaagucugacgauga

SEQ ID NO: 2277759 - RNA, 19 nt, Homo sapiens
  misc_RNA (1)...(19): siRNA sense strand
aguccagguguuugagaua

SEQ ID NO: 2277760 - RNA, 19 nt, Homo sapiens
  misc_RNA (1)...(19): siRNA sense strand
cgguggagcucaagcaguu

SEQ ID NO: 2277761 - RNA, 19 nt, Homo sapiens
  misc_RNA (1)...(19): siRNA sense strand
ccaucaacaaaguggucua

SEQ ID NO: 2277762 - RNA, 19 nt, Homo sapiens
  misc_RNA (1)...(19): siRNA sense strand
gaagucaacaagagagaca

SEQ ID NO: 2277763 - RNA, 19 nt, Homo sapiens
  misc_RNA (1)...(19): siRNA sense strand
gaggaggcccagagaguca

SEQ ID NO: 2277764 - RNA, 19 nt, Homo sapiens
  misc_RNA (1)...(19): siRNA sense strand
ccgaauaacguuacuucaa

SEQ ID NO: 2277765 - RNA, 19 nt, Homo sapiens
  misc_RNA (1)...(19): siRNA sense strand
guauggagguuguggugga

SEQ ID NO: 2277766 - RNA, 19 nt, Homo sapiens
  misc_RNA (1)...(19): siRNA sense strand
ugguaagucccuagaugaa

SEQ ID NO: 2277767 - RNA, 19 nt, Homo sapiens
  misc_RNA (1)...(19): siRNA sense strand
gaauauguguucucgguga

SEQ ID NO: 2277768 - RNA, 19 nt, Homo sapiens
  misc_RNA (1)...(19): siRNA sense strand
uggaggaccuggagaaacu

SEQ ID NO: 2277769 - RNA, 19 nt, Homo sapiens
  misc_RNA (1)...(19): siRNA sense strand
uggagaaacugggaagaau

SEQ ID NO: 2277770 - RNA, 19 nt, Homo sapiens
  misc_RNA (1)...(19): siRNA sense strand
caacaggacccaaaggcau

SEQ ID NO: 2277771 - RNA, 19 nt, Homo sapiens
  misc_RNA (1)...(19): siRNA sense strand
ccuuugacuuugacgagua

SEQ ID NO: 2277772 - RNA, 19 nt, Homo sapiens
  misc_RNA (1)...(19): siRNA sense strand
cggagcagcuugacaacau

SEQ ID NO: 2277773 - RNA, 19 nt, Homo sapiens
  misc_RNA (1)...(19): siRNA sense strand
gcccaggagcugaagagaa

SEQ ID NO: 2277774 - RNA, 19 nt, Homo sapiens
  misc_RNA (1)...(19): siRNA sense strand
uggacuaugcacagaggua

SEQ ID NO: 2277775 - RNA, 19 nt, Homo sapiens
  misc_RNA (1)...(19): siRNA sense strand
gugaaaaggacgugguguu

SEQ ID NO: 2277776 - RNA, 19 nt, Homo sapiens
  misc_RNA (1)...(19): siRNA sense strand
gcgagaguucagagagcuu

SEQ ID NO: 2277777 - RNA, 19 nt, Homo sapiens
  misc_RNA (1)...(19): siRNA sense strand
ggguauuccuggagaagac

SEQ ID NO: 2277778 - RNA, 19 nt, Homo sapiens
  misc_RNA (1)...(19): siRNA sense strand
gagucauccugcaggccaa

SEQ ID NO: 2277779 - RNA, 19 nt, Homo sapiens
  misc_RNA (1)...(19): siRNA sense strand
ccucagagcagauccagaa

SEQ ID NO: 2277780 - RNA, 19 nt, Homo sapiens
  misc_RNA (1)...(19): siRNA sense strand
cugaaauaguggacacagu

SEQ ID NO: 2277781 - RNA, 19 nt, Homo sapiens
  misc_RNA (1)...(19): siRNA sense strand
gcgaugaugucaaggugga

SEQ ID NO: 2277782 - RNA, 19 nt, Homo sapiens
  misc_RNA (1)...(19): siRNA sense strand
gaguacguguccaggaaca

SEQ ID NO: 2277783 - RNA, 19 nt, Homo sapiens
  misc_RNA (1)...(19): siRNA sense strand
uggaacaacaggacccaaa

SEQ ID NO: 2277784 - RNA, 19 nt, Homo sapiens
  misc_RNA (1)...(19): siRNA sense strand
ugacacaguugcagggaac

SEQ ID NO: 2277785 - RNA, 19 nt, Homo sapiens
  misc_RNA (1)...(19): siRNA sense strand
aagcagaaccucacgguca

SEQ ID NO: 2277786 - RNA, 19 nt, Homo sapiens
  misc_RNA (1)...(19): siRNA sense strand
gcucauuacugauggaaaa

SEQ ID NO: 2277787 - RNA, 19 nt, Homo sapiens
  misc_RNA (1)...(19): siRNA sense strand
gggaccaugcagagggaaa

SEQ ID NO: 2277788 - RNA, 19 nt, Homo sapiens
  misc_RNA (1)...(19): siRNA sense strand
cuaggagagaugagggaaa

SEQ ID NO: 2277789 - RNA, 19 nt, Homo sapiens
  misc_RNA (1)...(19): siRNA sense strand
ucaaagagguagaggugga

SEQ ID NO: 2277790 - RNA, 19 nt, Homo sapiens
  misc_RNA (1)...(19): siRNA sense strand
ugucaaagguccaggugau

SEQ ID NO: 2277791 - RNA, 19 nt, Homo sapiens
  misc_RNA (1)...(19): siRNA sense strand
aggaggaccuggugcuaaa

SEQ ID NO: 2277792 - RNA, 19 nt, Homo sapiens
  misc_RNA (1)...(19): siRNA sense strand
uugagaagaucgaagacaa

SEQ ID NO: 2277793 - RNA, 19 nt, Homo sapiens
  misc_RNA (1)...(19): siRNA sense strand
guacagaggaggaaacaca

SEQ ID NO: 2277794 - RNA, 19 nt, Homo sapiens
  misc_RNA (1)...(19): siRNA sense strand
caucaaggaagcuggaaau

SEQ ID NO: 2277795 - RNA, 19 nt, Homo sapiens
  misc_RNA (1)...(19): siRNA sense strand
agguuugccaggagagaaa

SEQ ID NO: 2277796 - RNA, 19 nt, Homo sapiens
  misc_RNA (1)...(19): siRNA sense strand
cuauaguagugccaggaaa

SEQ ID NO: 2277797 - RNA, 19 nt, Homo sapiens
  misc_RNA (1)...(19): siRNA sense strand
acucggauggagagggaaa

SEQ ID NO: 2277798 - RNA, 19 nt, Homo sapiens
  misc_RNA (1)...(19): siRNA sense strand
ccaaggaaccugagagucu

SEQ ID NO: 2277799 - RNA, 19 nt, Homo sapiens
  misc_RNA (1)...(19): siRNA sense strand
ggauacauucugugucaaa

SEQ ID NO: 2277800 - RNA, 19 nt, Homo sapiens
  misc_RNA (1)...(19): siRNA sense strand
agaacauaccacugugaaa

SEQ ID NO: 2277801 - RNA, 19 nt, Homo sapiens
  misc_RNA (1)...(19): siRNA sense strand
aggaaaaccuggagaucau

SEQ ID NO: 2277802 - RNA, 19 nt, Homo sapiens
  misc_RNA (1)...(19): siRNA sense strand
cgcaggagccagaggagaa

SEQ ID NO: 2277803 - RNA, 19 nt, Homo sapiens
  misc_RNA (1)...(19): siRNA sense strand
ccugagagucuuuggugaa

SEQ ID NO: 2277804 - RNA, 19 nt, Homo sapiens
  misc_RNA (1)...(19): siRNA sense strand
agaacagaguggcaguuaa

SEQ ID NO: 2277805 - RNA, 19 nt, Homo sapiens
  misc_RNA (1)...(19): siRNA sense strand
agguagagguggacagauc

SEQ ID NO: 2277806 - RNA, 19 nt, Homo sapiens
  misc_RNA (1)...(19): siRNA sense strand
acaucaaggaagcuggaaa

SEQ ID NO: 2277807 - RNA, 19 nt, Homo sapiens
  misc_RNA (1)...(19): siRNA sense strand
cgggaagaggcaagaccaa

SEQ ID NO: 2277808 - RNA, 19 nt, Homo sapiens
  misc_RNA (1)...(19): siRNA sense strand
aggugaugcuggagagcca

SEQ ID NO: 2277809 - RNA, 19 nt, Homo sapiens
  misc_RNA (1)...(19): siRNA sense strand
ggucgugugcagaaauaua

SEQ ID NO: 2277810 - RNA, 19 nt, Homo sapiens
  misc_RNA (1)...(19): siRNA sense strand
gggaaauccucgucaguac

SEQ ID NO: 2277811 - RNA, 19 nt, Homo sapiens
  misc_RNA (1)...(19): siRNA sense strand
ggucccaggaugaggucaa

SEQ ID NO: 2277812 - RNA, 19 nt, Homo sapiens
  misc_RNA (1)...(19): siRNA sense strand
aaguaacaucagaggguuu

SEQ ID NO: 2277813 - RNA, 19 nt, Homo sapiens
  misc_RNA (1)...(19): siRNA sense strand
gcaauaucgcguuguguau

SEQ ID NO: 2277814 - RNA, 19 nt, Homo sapiens
  misc_RNA (1)...(19): siRNA sense strand
gaugaaaggugaugcugga

SEQ ID NO: 2277815 - RNA, 19 nt, Homo sapiens
  misc_RNA (1)...(19): siRNA sense strand
gcgagcaguugcaagacaa

SEQ ID NO: 2277816 - RNA, 19 nt, Homo sapiens
  misc_RNA (1)...(19): siRNA sense strand
gcguaaauauauuguucga

SEQ ID NO: 2277817 - RNA, 19 nt, Homo sapiens
  misc_RNA (1)...(19): siRNA sense strand
accacaaguuggagugauu

SEQ ID NO: 2277818 - RNA, 19 nt, Homo sapiens
  misc_RNA (1)...(19): siRNA sense strand
aguuaaaugcacacagaga

SEQ ID NO: 2277819 - RNA, 19 nt, Homo sapiens
  misc_RNA (1)...(19): siRNA sense strand
gcuguuugcuauugguauu

SEQ ID NO: 2277820 - RNA, 19 nt, Homo sapiens
  misc_RNA (1)...(19): siRNA sense strand
cugacaguguggaucgaua

SEQ ID NO: 2277821 - RNA, 19 nt, Homo sapiens
  misc_RNA (1)...(19): siRNA sense strand
guucagcaguacaggauca

SEQ ID NO: 2277822 - RNA, 19 nt, Homo sapiens
  misc_RNA (1)...(19): siRNA sense strand
agaucaaggcacuacauua

SEQ ID NO: 2277823 - RNA, 19 nt, Homo sapiens
  misc_RNA (1)...(19): siRNA sense strand
agguuucauuugugcaaua

SEQ ID NO: 2277824 - RNA, 19 nt, Homo sapiens
  misc_RNA (1)...(19): siRNA sense strand
gggagagcggcaugaggaa

SEQ ID NO: 2277825 - RNA, 19 nt, Homo sapiens
  misc_RNA (1)...(19): siRNA sense strand
ugagaagaucgaagacaau

SEQ ID NO: 2277826 - RNA, 19 nt, Homo sapiens
  misc_RNA (1)...(19): siRNA sense strand
ucauuuauuuggauggcua

SEQ ID NO: 2277827 - RNA, 19 nt, Homo sapiens
  misc_RNA (1)...(19): siRNA sense strand
aggucaagucugaguucaa

SEQ ID NO: 2277828 - RNA, 19 nt, Homo sapiens
  misc_RNA (1)...(19): siRNA sense strand
agauuuacauugacugcua

SEQ ID NO: 2277829 - RNA, 19 nt, Homo sapiens
  misc_RNA (1)...(19): siRNA sense strand
gagaaaggugaaaggggua

SEQ ID NO: 2277830 - RNA, 19 nt, Homo sapiens
  misc_RNA (1)...(19): siRNA sense strand
ggcagaagaaacaauguaa

SEQ ID NO: 2277831 - RNA, 19 nt, Homo sapiens
  misc_RNA (1)...(19): siRNA sense strand
caucauauaccuuacacaa

SEQ ID NO: 2277832 - RNA, 19 nt, Homo sapiens
  misc_RNA (1)...(19): siRNA sense strand
ggaacaaggggacaagaaa

SEQ ID NO: 2277833 - RNA, 19 nt, Homo sapiens
  misc_RNA (1)...(19): siRNA sense strand
cguuuauacugaaggugau

SEQ ID NO: 2277834 - RNA, 19 nt, Homo sapiens
  misc_RNA (1)...(19): siRNA sense strand
guguggaccaguagagaca

SEQ ID NO: 2277835 - RNA, 19 nt, Homo sapiens
  misc_RNA (1)...(19): siRNA sense strand
cuucaaguguacaaugcaa

SEQ ID NO: 2277836 - RNA, 19 nt, Homo sapiens
  misc_RNA (1)...(19): siRNA sense strand
gcagaagaaacaauguaau

SEQ ID NO: 2277837 - RNA, 19 nt, Homo sapiens
  misc_RNA (1)...(19): siRNA sense strand
gggaagaggcaagaccaaa

SEQ ID NO: 2277838 - RNA, 19 nt, Homo sapiens
  misc_RNA (1)...(19): siRNA sense strand
cauuccaaauccagaguuu

SEQ ID NO: 2277839 - RNA, 19 nt, Homo sapiens
  misc_RNA (1)...(19): siRNA sense strand
ucuaacaggaaauggaaga

SEQ ID NO: 2277840 - RNA, 19 nt, Homo sapiens
  misc_RNA (1)...(19): siRNA sense strand
gcaaaggggccaaggcaga

SEQ ID NO: 2277841 - RNA, 19 nt, Homo sapiens
  misc_RNA (1)...(19): siRNA sense strand
agaggaugucaaagaggua

SEQ ID NO: 2277842 - RNA, 19 nt, Homo sapiens
  misc_RNA (1)...(19): siRNA sense strand
gugucucucuacagaauaa

SEQ ID NO: 2277843 - RNA, 19 nt, Homo sapiens
  misc_RNA (1)...(19): siRNA sense strand
uauacaagauucagggugu

SEQ ID NO: 2277844 - RNA, 19 nt, Homo sapiens
  misc_RNA (1)...(19): siRNA sense strand
gccaagggaugaaagguga

SEQ ID NO: 2277845 - RNA, 19 nt, Homo sapiens
  misc_RNA (1)...(19): siRNA sense strand
gacccaaagaggugcguuu

SEQ ID NO: 2277846 - RNA, 19 nt, Homo sapiens
  misc_RNA (1)...(19): siRNA sense strand
caccagaagaggaugucaa

SEQ ID NO: 2277847 - RNA, 19 nt, Homo sapiens
  misc_RNA (1)...(19): siRNA sense strand
uaccagauugggugggaua

SEQ ID NO: 2277848 - RNA, 19 nt, Homo sapiens
  misc_RNA (1)...(19): siRNA sense strand
aggcagauauuguguucuu

SEQ ID NO: 2277849 - RNA, 19 nt, Homo sapiens
  misc_RNA (1)...(19): siRNA sense strand
ucacguuuaucaaggagaa

SEQ ID NO: 2277850 - RNA, 19 nt, Homo sapiens
  misc_RNA (1)...(19): siRNA sense strand
gagagcggcaugaggaaga

SEQ ID NO: 2277851 - RNA, 19 nt, Homo sapiens
  misc_RNA (1)...(19): siRNA sense strand
gcucauuacugauggaaaa

SEQ ID NO: 2277852 - RNA, 19 nt, Homo sapiens
  misc_RNA (1)...(19): siRNA sense strand
gggaccaugcagagggaaa

SEQ ID NO: 2277853 - RNA, 19 nt, Homo sapiens
  misc_RNA (1)...(19): siRNA sense strand
cuaggagagaugagggaaa

SEQ ID NO: 2277854 - RNA, 19 nt, Homo sapiens
  misc_RNA (1)...(19): siRNA sense strand
ucaaagagguagaggugga

SEQ ID NO: 2277855 - RNA, 19 nt, Homo sapiens
  misc_RNA (1)...(19): siRNA sense strand
ugucaaagguccaggugau

SEQ ID NO: 2277856 - RNA, 19 nt, Homo sapiens
  misc_RNA (1)...(19): siRNA sense strand
aggaggaccuggugcuaaa

SEQ ID NO: 2277857 - RNA, 19 nt, Homo sapiens
  misc_RNA (1)...(19): siRNA sense strand
uugagaagaucgaagacaa

SEQ ID NO: 2277858 - RNA, 19 nt, Homo sapiens
  misc_RNA (1)...(19): siRNA sense strand
guacagaggaggaaacaca

SEQ ID NO: 2277859 - RNA, 19 nt, Homo sapiens
  misc_RNA (1)...(19): siRNA sense strand
caucaaggaagcuggaaau

SEQ ID NO: 2277860 - RNA, 19 nt, Homo sapiens
  misc_RNA (1)...(19): siRNA sense strand
agguuugccaggagagaaa

SEQ ID NO: 2277861 - RNA, 19 nt, Homo sapiens
  misc_RNA (1)...(19): siRNA sense strand
cuauaguagugccaggaaa

SEQ ID NO: 2277862 - RNA, 19 nt, Homo sapiens
  misc_RNA (1)...(19): siRNA sense strand
acucggauggagagggaaa

SEQ ID NO: 2277863 - RNA, 19 nt, Homo sapiens
  misc_RNA (1)...(19): siRNA sense strand
ccaaggaaccugagagucu

SEQ ID NO: 2277864 - RNA, 19 nt, Homo sapiens
  misc_RNA (1)...(19): siRNA sense strand
ggauacauucugugucaaa

SEQ ID NO: 2277865 - RNA, 19 nt, Homo sapiens
  misc_RNA (1)...(19): siRNA sense strand
agaacauaccacugugaaa

SEQ ID NO: 2277866 - RNA, 19 nt, Homo sapiens
  misc_RNA (1)...(19): siRNA sense strand
aggaaaaccuggagaucau

SEQ ID NO: 2277867 - RNA, 19 nt, Homo sapiens
  misc_RNA (1)...(19): siRNA sense strand
cgcaggagccagaggagaa

SEQ ID NO: 2277868 - RNA, 19 nt, Homo sapiens
  misc_RNA (1)...(19): siRNA sense strand
ccugagagucuuuggugaa

SEQ ID NO: 2277869 - RNA, 19 nt, Homo sapiens
  misc_RNA (1)...(19): siRNA sense strand
agaacagaguggcaguuaa

SEQ ID NO: 2277870 - RNA, 19 nt, Homo sapiens
  misc_RNA (1)...(19): siRNA sense strand
agguagagguggacagauc

SEQ ID NO: 2277871 - RNA, 19 nt, Homo sapiens
  misc_RNA (1)...(19): siRNA sense strand
acaucaaggaagcuggaaa

SEQ ID NO: 2277872 - RNA, 19 nt, Homo sapiens
  misc_RNA (1)...(19): siRNA sense strand
cgggaagaggcaagaccaa

SEQ ID NO: 2277873 - RNA, 19 nt, Homo sapiens
  misc_RNA (1)...(19): siRNA sense strand
aggugaugcuggagagcca

SEQ ID NO: 2277874 - RNA, 19 nt, Homo sapiens
  misc_RNA (1)...(19): siRNA sense strand
ggucgugugcagaaauaua

SEQ ID NO: 2277875 - RNA, 19 nt, Homo sapiens
  misc_RNA (1)...(19): siRNA sense strand
gggaaauccucgucaguac

SEQ ID NO: 2277876 - RNA, 19 nt, Homo sapiens
  misc_RNA (1)...(19): siRNA sense strand
ggucccaggaugaggucaa

SEQ ID NO: 2277877 - RNA, 19 nt, Homo sapiens
  misc_RNA (1)...(19): siRNA sense strand
aaguaacaucagaggguuu

SEQ ID NO: 2277878 - RNA, 19 nt, Homo sapiens
  misc_RNA (1)...(19): siRNA sense strand
gcaauaucgcguuguguau

SEQ ID NO: 2277879 - RNA, 19 nt, Homo sapiens
  misc_RNA (1)...(19): siRNA sense strand
gaugaaaggugaugcugga

SEQ ID NO: 2277880 - RNA, 19 nt, Homo sapiens
  misc_RNA (1)...(19): siRNA sense strand
gcgagcaguugcaagacaa

SEQ ID NO: 2277881 - RNA, 19 nt, Homo sapiens
  misc_RNA (1)...(19): siRNA sense strand
gcguaaauauauuguucga

SEQ ID NO: 2277882 - RNA, 19 nt, Homo sapiens
  misc_RNA (1)...(19): siRNA sense strand
accacaaguuggagugauu

SEQ ID NO: 2277883 - RNA, 19 nt, Homo sapiens
  misc_RNA (1)...(19): siRNA sense strand
aguuaaaugcacacagaga

SEQ ID NO: 2277884 - RNA, 19 nt, Homo sapiens
  misc_RNA (1)...(19): siRNA sense strand
gcuguuugcuauugguauu

SEQ ID NO: 2277885 - RNA, 19 nt, Homo sapiens
  misc_RNA (1)...(19): siRNA sense strand
cugacaguguggaucgaua

SEQ ID NO: 2277886 - RNA, 19 nt, Homo sapiens
  misc_RNA (1)...(19): siRNA sense strand
guucagcaguacaggauca

SEQ ID NO: 2277887 - RNA, 19 nt, Homo sapiens
  misc_RNA (1)...(19): siRNA sense strand
agaucaaggcacuacauua

SEQ ID NO: 2277888 - RNA, 19 nt, Homo sapiens
  misc_RNA (1)...(19): siRNA sense strand
agguuucauuugugcaaua

SEQ ID NO: 2277889 - RNA, 19 nt, Homo sapiens
  misc_RNA (1)...(19): siRNA sense strand
gggagagcggcaugaggaa

SEQ ID NO: 2277890 - RNA, 19 nt, Homo sapiens
  misc_RNA (1)...(19): siRNA sense strand
ugagaagaucgaagacaau

SEQ ID NO: 2277891 - RNA, 19 nt, Homo sapiens
  misc_RNA (1)...(19): siRNA sense strand
ucauuuauuuggauggcua

SEQ ID NO: 2277892 - RNA, 19 nt, Homo sapiens
  misc_RNA (1)...(19): siRNA sense strand
aggucaagucugaguucaa

SEQ ID NO: 2277893 - RNA, 19 nt, Homo sapiens
  misc_RNA (1)...(19): siRNA sense strand
agauuuacauugacugcua

SEQ ID NO: 2277894 - RNA, 19 nt, Homo sapiens
  misc_RNA (1)...(19): siRNA sense strand
gagaaaggugaaaggggua

SEQ ID NO: 2277895 - RNA, 19 nt, Homo sapiens
  misc_RNA (1)...(19): siRNA sense strand
ggcagaagaaacaauguaa

SEQ ID NO: 2277896 - RNA, 19 nt, Homo sapiens
  misc_RNA (1)...(19): siRNA sense strand
caucauauaccuuacacaa

SEQ ID NO: 2277897 - RNA, 19 nt, Homo sapiens
  misc_RNA (1)...(19): siRNA sense strand
ggaacaaggggacaagaaa

SEQ ID NO: 2277898 - RNA, 19 nt, Homo sapiens
  misc_RNA (1)...(19): siRNA sense strand
cguuuauacugaaggugau

SEQ ID NO: 2277899 - RNA, 19 nt, Homo sapiens
  misc_RNA (1)...(19): siRNA sense strand
guguggaccaguagagaca

SEQ ID NO: 2277900 - RNA, 19 nt, Homo sapiens
  misc_RNA (1)...(19): siRNA sense strand
cuucaaguguacaaugcaa

SEQ ID NO: 2277901 - RNA, 19 nt, Homo sapiens
  misc_RNA (1)...(19): siRNA sense strand
gcagaagaaacaauguaau

SEQ ID NO: 2277902 - RNA, 19 nt, Homo sapiens
  misc_RNA (1)...(19): siRNA sense strand
gggaagaggcaagaccaaa

SEQ ID NO: 2277903 - RNA, 19 nt, Homo sapiens
  misc_RNA (1)...(19): siRNA sense strand
cauuccaaauccagaguuu

SEQ ID NO: 2277904 - RNA, 19 nt, Homo sapiens
  misc_RNA (1)...(19): siRNA sense strand
ucuaacaggaaauggaaga

SEQ ID NO: 2277905 - RNA, 19 nt, Homo sapiens
  misc_RNA (1)...(19): siRNA sense strand
gcaaaggggccaaggcaga

SEQ ID NO: 2277906 - RNA, 19 nt, Homo sapiens
  misc_RNA (1)...(19): siRNA sense strand
agaggaugucaaagaggua

SEQ ID NO: 2277907 - RNA, 19 nt, Homo sapiens
  misc_RNA (1)...(19): siRNA sense strand
gugucucucuacagaauaa

SEQ ID NO: 2277908 - RNA, 19 nt, Homo sapiens
  misc_RNA (1)...(19): siRNA sense strand
uauacaagauucagggugu

SEQ ID NO: 2277909 - RNA, 19 nt, Homo sapiens
  misc_RNA (1)...(19): siRNA sense strand
gccaagggaugaaagguga

SEQ ID NO: 2277910 - RNA, 19 nt, Homo sapiens
  misc_RNA (1)...(19): siRNA sense strand
gacccaaagaggugcguuu

SEQ ID NO: 2277911 - RNA, 19 nt, Homo sapiens
  misc_RNA (1)...(19): siRNA sense strand
caccagaagaggaugucaa

SEQ ID NO: 2277912 - RNA, 19 nt, Homo sapiens
  misc_RNA (1)...(19): siRNA sense strand
uaccagauugggugggaua

SEQ ID NO: 2277913 - RNA, 19 nt, Homo sapiens
  misc_RNA (1)...(19): siRNA sense strand
aggcagauauuguguucuu

SEQ ID NO: 2277914 - RNA, 19 nt, Homo sapiens
  misc_RNA (1)...(19): siRNA sense strand
ucacguuuaucaaggagaa

SEQ ID NO: 2277915 - RNA, 19 nt, Homo sapiens
  misc_RNA (1)...(19): siRNA sense strand
gagagcggcaugaggaaga

SEQ ID NO: 2277916 - RNA, 19 nt, Homo sapiens
  misc_RNA (1)...(19): siRNA sense strand
ggucaaaucugcaggguca

SEQ ID NO: 2277917 - RNA, 19 nt, Homo sapiens
  misc_RNA (1)...(19): siRNA sense strand
guggaaagccaguagaaaa

SEQ ID NO: 2277918 - RNA, 19 nt, Homo sapiens
  misc_RNA (1)...(19): siRNA sense strand
cuacagaugcaguggugaa

SEQ ID NO: 2277919 - RNA, 19 nt, Homo sapiens
  misc_RNA (1)...(19): siRNA sense strand
gcugagagccuaaaggaga

SEQ ID NO: 2277920 - RNA, 19 nt, Homo sapiens
  misc_RNA (1)...(19): siRNA sense strand
ccacagaagacuugguagu

SEQ ID NO: 2277921 - RNA, 19 nt, Homo sapiens
  misc_RNA (1)...(19): siRNA sense strand
ccgcaaacuggaugcuuua

SEQ ID NO: 2277922 - RNA, 19 nt, Homo sapiens
  misc_RNA (1)...(19): siRNA sense strand
guguggaaacauugagauu

SEQ ID NO: 2277923 - RNA, 19 nt, Homo sapiens
  misc_RNA (1)...(19): siRNA sense strand
caaagaugugauugguuua

SEQ ID NO: 2277924 - RNA, 19 nt, Homo sapiens
  misc_RNA (1)...(19): siRNA sense strand
cagccaaagcacuggauga

SEQ ID NO: 2277925 - RNA, 19 nt, Homo sapiens
  misc_RNA (1)...(19): siRNA sense strand
ccguggagacagaaaggaa

SEQ ID NO: 2277926 - RNA, 19 nt, Homo sapiens
  misc_RNA (1)...(19): siRNA sense strand
ugaucaagaaucugaagaa

SEQ ID NO: 2277927 - RNA, 19 nt, Homo sapiens
  misc_RNA (1)...(19): siRNA sense strand
gaagaagcugagagccuaa

SEQ ID NO: 2277928 - RNA, 19 nt, Homo sapiens
  misc_RNA (1)...(19): siRNA sense strand
gaaucggaugugagaggaa

SEQ ID NO: 2277929 - RNA, 19 nt, Homo sapiens
  misc_RNA (1)...(19): siRNA sense strand
auucugaggacaagaguau

SEQ ID NO: 2277930 - RNA, 19 nt, Homo sapiens
  misc_RNA (1)...(19): siRNA sense strand
ugaugcgccugaagggaaa

SEQ ID NO: 2277931 - RNA, 19 nt, Homo sapiens
  misc_RNA (1)...(19): siRNA sense strand
ccguuugggucgcucgaaa

SEQ ID NO: 2277932 - RNA, 19 nt, Homo sapiens
  misc_RNA (1)...(19): siRNA sense strand
uugaggaggcuguggaaaa

SEQ ID NO: 2277933 - RNA, 19 nt, Homo sapiens
  misc_RNA (1)...(19): siRNA sense strand
gcucaagaacuucaagaca

SEQ ID NO: 2277934 - RNA, 19 nt, Homo sapiens
  misc_RNA (1)...(19): siRNA sense strand
uugacaaguuugaugaaca

SEQ ID NO: 2277935 - RNA, 19 nt, Homo sapiens
  misc_RNA (1)...(19): siRNA sense strand
acccagagaaggagacaau

SEQ ID NO: 2277936 - RNA, 19 nt, Homo sapiens
  misc_RNA (1)...(19): siRNA sense strand
gggaugaugcucuuggcaa

SEQ ID NO: 2277937 - RNA, 19 nt, Homo sapiens
  misc_RNA (1)...(19): siRNA sense strand
guaacauucaugagaacau

SEQ ID NO: 2277938 - RNA, 19 nt, Homo sapiens
  misc_RNA (1)...(19): siRNA sense strand
augaagaagcugagagccu

SEQ ID NO: 2277939 - RNA, 19 nt, Homo sapiens
  misc_RNA (1)...(19): siRNA sense strand
gcaaauuugaggaggcugu

SEQ ID NO: 2277940 - RNA, 19 nt, Homo sapiens
  misc_RNA (1)...(19): siRNA sense strand
cugcuuuguacaagagcua

SEQ ID NO: 2277941 - RNA, 19 nt, Homo sapiens
  misc_RNA (1)...(19): siRNA sense strand
ugacaagaacugcugggaa

SEQ ID NO: 2277942 - RNA, 19 nt, Homo sapiens
  misc_RNA (1)...(19): siRNA sense strand
augaaugaaucaaaggcau

SEQ ID NO: 2277943 - RNA, 19 nt, Homo sapiens
  misc_RNA (1)...(19): siRNA sense strand
gaaaauaugaugagguacu

SEQ ID NO: 2277944 - RNA, 19 nt, Homo sapiens
  misc_RNA (1)...(19): siRNA sense strand
ugucagagcgugugcggau

SEQ ID NO: 2277945 - RNA, 19 nt, Homo sapiens
  misc_RNA (1)...(19): siRNA sense strand
gcucaccacaguuggcaaa

SEQ ID NO: 2277946 - RNA, 19 nt, Homo sapiens
  misc_RNA (1)...(19): siRNA sense strand
ccacaagcaaccacaucaa

SEQ ID NO: 2277947 - RNA, 19 nt, Homo sapiens
  misc_RNA (1)...(19): siRNA sense strand
guggagacagaaaggaaga

SEQ ID NO: 2277948 - RNA, 19 nt, Homo sapiens
  misc_RNA (1)...(19): siRNA sense strand
ucaauuaugacaugcacaa

SEQ ID NO: 2277949 - RNA, 19 nt, Homo sapiens
  misc_RNA (1)...(19): siRNA sense strand
ggacaagaguauucgaguc

SEQ ID NO: 2277950 - RNA, 19 nt, Homo sapiens
  misc_RNA (1)...(19): siRNA sense strand
cuggaggagaugacuauaa

SEQ ID NO: 2277951 - RNA, 19 nt, Homo sapiens
  misc_RNA (1)...(19): siRNA sense strand
agcauguacuagaggguca

SEQ ID NO: 2277952 - RNA, 19 nt, Homo sapiens
  misc_RNA (1)...(19): siRNA sense strand
agaaggagguggcugggau

SEQ ID NO: 2277953 - RNA, 19 nt, Homo sapiens
  misc_RNA (1)...(19): siRNA sense strand
uguuuaagcuggaacggga

SEQ ID NO: 2277954 - RNA, 19 nt, Homo sapiens
  misc_RNA (1)...(19): siRNA sense strand
gugaagggcaacaauguau

SEQ ID NO: 2277955 - RNA, 19 nt, Homo sapiens
  misc_RNA (1)...(19): siRNA sense strand
cuggcaggcucuuucgaaa

SEQ ID NO: 2277956 - RNA, 19 nt, Homo sapiens
  misc_RNA (1)...(19): siRNA sense strand
agugacagagauuggcaaa

SEQ ID NO: 2277957 - RNA, 19 nt, Homo sapiens
  misc_RNA (1)...(19): siRNA sense strand
ucuuugacguacagcagaa

SEQ ID NO: 2277958 - RNA, 19 nt, Homo sapiens
  misc_RNA (1)...(19): siRNA sense strand
gacagaagucccuggccua

SEQ ID NO: 2277959 - RNA, 19 nt, Homo sapiens
  misc_RNA (1)...(19): siRNA sense strand
aggagaugacuauaagauu

SEQ ID NO: 2277960 - RNA, 19 nt, Homo sapiens
  misc_RNA (1)...(19): siRNA sense strand
gggaaaagcugggagaagu

SEQ ID NO: 2277961 - RNA, 19 nt, Homo sapiens
  misc_RNA (1)...(19): siRNA sense strand
cauuugacccagagaagga

SEQ ID NO: 2277962 - RNA, 19 nt, Homo sapiens
  misc_RNA (1)...(19): siRNA sense strand
gggcuauccugaaguggca

SEQ ID NO: 2277963 - RNA, 19 nt, Homo sapiens
  misc_RNA (1)...(19): siRNA sense strand
acucaaaccugcagccugu

SEQ ID NO: 2277964 - RNA, 19 nt, Homo sapiens
  misc_RNA (1)...(19): siRNA sense strand
aagaguugauccucagcaa

SEQ ID NO: 2277965 - RNA, 19 nt, Homo sapiens
  misc_RNA (1)...(19): siRNA sense strand
gaaaugugcuaucagcgua

SEQ ID NO: 2277966 - RNA, 19 nt, Homo sapiens
  misc_RNA (1)...(19): siRNA sense strand
augaugagguacugcacau

SEQ ID NO: 2277967 - RNA, 19 nt, Homo sapiens
  misc_RNA (1)...(19): siRNA sense strand
gggagaggaugcagagcug

SEQ ID NO: 2277968 - RNA, 19 nt, Homo sapiens
  misc_RNA (1)...(19): siRNA sense strand
cugugggccugaagcuuaa

SEQ ID NO: 2277969 - RNA, 19 nt, Homo sapiens
  misc_RNA (1)...(19): siRNA sense strand
cguggaaagccaguagaaa

SEQ ID NO: 2277970 - RNA, 19 nt, Homo sapiens
  misc_RNA (1)...(19): siRNA sense strand
acaugaugguccagugcga

SEQ ID NO: 2277971 - RNA, 19 nt, Homo sapiens
  misc_RNA (1)...(19): siRNA sense strand
cuggcuacgaagaugaaua

SEQ ID NO: 2277972 - RNA, 19 nt, Homo sapiens
  misc_RNA (1)...(19): siRNA sense strand
ccuaagagcucgaacccuu

SEQ ID NO: 2277973 - RNA, 19 nt, Homo sapiens
  misc_RNA (1)...(19): siRNA sense strand
aagcaaaggaagggcacaa

SEQ ID NO: 2277974 - RNA, 19 nt, Homo sapiens
  misc_RNA (1)...(19): siRNA sense strand
gcuuaauccccaagaggaa

SEQ ID NO: 2277975 - RNA, 19 nt, Homo sapiens
  misc_RNA (1)...(19): siRNA sense strand
cagagaggguagagccguu

SEQ ID NO: 2277976 - RNA, 19 nt, Homo sapiens
  misc_RNA (1)...(19): siRNA sense strand
aggccagaguggaguggga

SEQ ID NO: 2277977 - RNA, 19 nt, Homo sapiens
  misc_RNA (1)...(19): siRNA sense strand
gaucagcaguugcagguca

SEQ ID NO: 2277978 - RNA, 19 nt, Homo sapiens
  misc_RNA (1)...(19): siRNA sense strand
agaccucagcaaacagaaa

SEQ ID NO: 2277979 - RNA, 19 nt, Homo sapiens
  misc_RNA (1)...(19): siRNA sense strand
ccucagacaagauugaaaa

SEQ ID NO: 2277980 - RNA, 19 nt, Homo sapiens
  misc_RNA (1)...(19): siRNA sense strand
ggacugagguggcuuggga

SEQ ID NO: 2277981 - RNA, 19 nt, Homo sapiens
  misc_RNA (1)...(19): siRNA sense strand
gccucagacaagauugaaa

SEQ ID NO: 2277982 - RNA, 19 nt, Homo sapiens
  misc_RNA (1)...(19): siRNA sense strand
gcauggaguugcuggccaa

SEQ ID NO: 2277983 - RNA, 19 nt, Homo sapiens
  misc_RNA (1)...(19): siRNA sense strand
uguuggaugaugaggaaua

SEQ ID NO: 2277984 - RNA, 19 nt, Homo sapiens
  misc_RNA (1)...(19): siRNA sense strand
gugaagaaaucaagccugu

SEQ ID NO: 2277985 - RNA, 19 nt, Homo sapiens
  misc_RNA (1)...(19): siRNA sense strand
cucaagucauggugggcaa

SEQ ID NO: 2277986 - RNA, 19 nt, Homo sapiens
  misc_RNA (1)...(19): siRNA sense strand
uggcagacgacguggaguu

SEQ ID NO: 2277987 - RNA, 19 nt, Homo sapiens
  misc_RNA (1)...(19): siRNA sense strand
uguuugagaugcauggcaa

SEQ ID NO: 2277988 - RNA, 19 nt, Homo sapiens
  misc_RNA (1)...(19): siRNA sense strand
gugagugacuggugggaag

SEQ ID NO: 2277989 - RNA, 19 nt, Homo sapiens
  misc_RNA (1)...(19): siRNA sense strand
guuccuaccagguggccaa

SEQ ID NO: 2277990 - RNA, 19 nt, Homo sapiens
  misc_RNA (1)...(19): siRNA sense strand
ggacugagacugugcguuc

SEQ ID NO: 2277991 - RNA, 19 nt, Homo sapiens
  misc_RNA (1)...(19): siRNA sense strand
gaauauuaccgcauggagu

SEQ ID NO: 2277992 - RNA, 19 nt, Homo sapiens
  misc_RNA (1)...(19): siRNA sense strand
agacgaacgcccagcgcuu

SEQ ID NO: 2277993 - RNA, 19 nt, Homo sapiens
  misc_RNA (1)...(19): siRNA sense strand
ggaucaacuccuggaagaa

SEQ ID NO: 2277994 - RNA, 19 nt, Homo sapiens
  misc_RNA (1)...(19): siRNA sense strand
gguggauguuugagaugca

SEQ ID NO: 2277995 - RNA, 19 nt, Homo sapiens
  misc_RNA (1)...(19): siRNA sense strand
agaugcaguuccagaggau

SEQ ID NO: 2277996 - RNA, 19 nt, Homo sapiens
  misc_RNA (1)...(19): siRNA sense strand
cagccacaauucagcggua

SEQ ID NO: 2277997 - RNA, 19 nt, Homo sapiens
  misc_RNA (1)...(19): siRNA sense strand
gccaaagaauuccaggaca

SEQ ID NO: 2277998 - RNA, 19 nt, Homo sapiens
  misc_RNA (1)...(19): siRNA sense strand
gccguaaacuggaccguga

SEQ ID NO: 2277999 - RNA, 19 nt, Homo sapiens
  misc_RNA (1)...(19): siRNA sense strand
agaugauggcuauggaguu

SEQ ID NO: 2278000 - RNA, 19 nt, Homo sapiens
  misc_RNA (1)...(19): siRNA sense strand
gcauggaguugcuggccaa

SEQ ID NO: 2278001 - RNA, 19 nt, Homo sapiens
  misc_RNA (1)...(19): siRNA sense strand
uguuggaugaugaggaaua

SEQ ID NO: 2278002 - RNA, 19 nt, Homo sapiens
  misc_RNA (1)...(19): siRNA sense strand
gugaagaaaucaagccugu

SEQ ID NO: 2278003 - RNA, 19 nt, Homo sapiens
  misc_RNA (1)...(19): siRNA sense strand
cucaagucauggugggcaa

SEQ ID NO: 2278004 - RNA, 19 nt, Homo sapiens
  misc_RNA (1)...(19): siRNA sense strand
uggcagacgacguggaguu

SEQ ID NO: 2278005 - RNA, 19 nt, Homo sapiens
  misc_RNA (1)...(19): siRNA sense strand
uguuugagaugcauggcaa

SEQ ID NO: 2278006 - RNA, 19 nt, Homo sapiens
  misc_RNA (1)...(19): siRNA sense strand
gugagugacuggugggaag

SEQ ID NO: 2278007 - RNA, 19 nt, Homo sapiens
  misc_RNA (1)...(19): siRNA sense strand
guuccuaccagguggccaa

SEQ ID NO: 2278008 - RNA, 19 nt, Homo sapiens
  misc_RNA (1)...(19): siRNA sense strand
ggacugagacugugcguuc

SEQ ID NO: 2278009 - RNA, 19 nt, Homo sapiens
  misc_RNA (1)...(19): siRNA sense strand
gaauauuaccgcauggagu

SEQ ID NO: 2278010 - RNA, 19 nt, Homo sapiens
  misc_RNA (1)...(19): siRNA sense strand
agacgaacgcccagcgcuu

SEQ ID NO: 2278011 - RNA, 19 nt, Homo sapiens
  misc_RNA (1)...(19): siRNA sense strand
ggaucaacuccuggaagaa

SEQ ID NO: 2278012 - RNA, 19 nt, Homo sapiens
  misc_RNA (1)...(19): siRNA sense strand
gguggauguuugagaugca

SEQ ID NO: 2278013 - RNA, 19 nt, Homo sapiens
  misc_RNA (1)...(19): siRNA sense strand
agaugcaguuccagaggau

SEQ ID NO: 2278014 - RNA, 19 nt, Homo sapiens
  misc_RNA (1)...(19): siRNA sense strand
cagccacaauucagcggua

SEQ ID NO: 2278015 - RNA, 19 nt, Homo sapiens
  misc_RNA (1)...(19): siRNA sense strand
gccaaagaauuccaggaca

SEQ ID NO: 2278016 - RNA, 19 nt, Homo sapiens
  misc_RNA (1)...(19): siRNA sense strand
gccguaaacuggaccguga

SEQ ID NO: 2278017 - RNA, 19 nt, Homo sapiens
  misc_RNA (1)...(19): siRNA sense strand
agaugauggcuauggaguu

SEQ ID NO: 2278018 - RNA, 19 nt, Homo sapiens
  misc_RNA (1)...(19): siRNA sense strand
gcauggaguugcuggccaa

SEQ ID NO: 2278019 - RNA, 19 nt, Homo sapiens
  misc_RNA (1)...(19): siRNA sense strand
uguuggaugaugaggaaua

SEQ ID NO: 2278020 - RNA, 19 nt, Homo sapiens
  misc_RNA (1)...(19): siRNA sense strand
gugaagaaaucaagccugu

SEQ ID NO: 2278021 - RNA, 19 nt, Homo sapiens
  misc_RNA (1)...(19): siRNA sense strand
cucaagucauggugggcaa

SEQ ID NO: 2278022 - RNA, 19 nt, Homo sapiens
  misc_RNA (1)...(19): siRNA sense strand
uggcagacgacguggaguu

SEQ ID NO: 2278023 - RNA, 19 nt, Homo sapiens
  misc_RNA (1)...(19): siRNA sense strand
uguuugagaugcauggcaa

SEQ ID NO: 2278024 - RNA, 19 nt, Homo sapiens
  misc_RNA (1)...(19): siRNA sense strand
gugagugacuggugggaag

SEQ ID NO: 2278025 - RNA, 19 nt, Homo sapiens
  misc_RNA (1)...(19): siRNA sense strand
guuccuaccagguggccaa

SEQ ID NO: 2278026 - RNA, 19 nt, Homo sapiens
  misc_RNA (1)...(19): siRNA sense strand
ggacugagacugugcguuc

SEQ ID NO: 2278027 - RNA, 19 nt, Homo sapiens
  misc_RNA (1)...(19): siRNA sense strand
gaauauuaccgcauggagu

SEQ ID NO: 2278028 - RNA, 19 nt, Homo sapiens
  misc_RNA (1)...(19): siRNA sense strand
agacgaacgcccagcgcuu

SEQ ID NO: 2278029 - RNA, 19 nt, Homo sapiens
  misc_RNA (1)...(19): siRNA sense strand
ggaucaacuccuggaagaa

SEQ ID NO: 2278030 - RNA, 19 nt, Homo sapiens
  misc_RNA (1)...(19): siRNA sense strand
gguggauguuugagaugca

SEQ ID NO: 2278031 - RNA, 19 nt, Homo sapiens
  misc_RNA (1)...(19): siRNA sense strand
agaugcaguuccagaggau

SEQ ID NO: 2278032 - RNA, 19 nt, Homo sapiens
  misc_RNA (1)...(19): siRNA sense strand
cagccacaauucagcggua

SEQ ID NO: 2278033 - RNA, 19 nt, Homo sapiens
  misc_RNA (1)...(19): siRNA sense strand
gccaaagaauuccaggaca

SEQ ID NO: 2278034 - RNA, 19 nt, Homo sapiens
  misc_RNA (1)...(19): siRNA sense strand
gccguaaacuggaccguga

SEQ ID NO: 2278035 - RNA, 19 nt, Homo sapiens
  misc_RNA (1)...(19): siRNA sense strand
agaugauggcuauggaguu

SEQ ID NO: 2278036 - RNA, 19 nt, Homo sapiens
  misc_RNA (1)...(19): siRNA sense strand
gcauggaguugcuggccaa

SEQ ID NO: 2278037 - RNA, 19 nt, Homo sapiens
  misc_RNA (1)...(19): siRNA sense strand
uguuggaugaugaggaaua

SEQ ID NO: 2278038 - RNA, 19 nt, Homo sapiens
  misc_RNA (1)...(19): siRNA sense strand
gugaagaaaucaagccugu

SEQ ID NO: 2278039 - RNA, 19 nt, Homo sapiens
  misc_RNA (1)...(19): siRNA sense strand
cucaagucauggugggcaa

SEQ ID NO: 2278040 - RNA, 19 nt, Homo sapiens
  misc_RNA (1)...(19): siRNA sense strand
uggcagacgacguggaguu

SEQ ID NO: 2278041 - RNA, 19 nt, Homo sapiens
  misc_RNA (1)...(19): siRNA sense strand
uguuugagaugcauggcaa

SEQ ID NO: 2278042 - RNA, 19 nt, Homo sapiens
  misc_RNA (1)...(19): siRNA sense strand
gugagugacuggugggaag

SEQ ID NO: 2278043 - RNA, 19 nt, Homo sapiens
  misc_RNA (1)...(19): siRNA sense strand
guuccuaccagguggccaa

SEQ ID NO: 2278044 - RNA, 19 nt, Homo sapiens
  misc_RNA (1)...(19): siRNA sense strand
gaauauuaccgcauggagu

SEQ ID NO: 2278045 - RNA, 19 nt, Homo sapiens
  misc_RNA (1)...(19): siRNA sense strand
ggaucaacuccuggaagaa

SEQ ID NO: 2278046 - RNA, 19 nt, Homo sapiens
  misc_RNA (1)...(19): siRNA sense strand
gguggauguuugagaugca

SEQ ID NO: 2278047 - RNA, 19 nt, Homo sapiens
  misc_RNA (1)...(19): siRNA sense strand
agaugcaguuccagaggau

SEQ ID NO: 2278048 - RNA, 19 nt, Homo sapiens
  misc_RNA (1)...(19): siRNA sense strand
cagccacaauucagcggua

SEQ ID NO: 2278049 - RNA, 19 nt, Homo sapiens
  misc_RNA (1)...(19): siRNA sense strand
gccaaagaauuccaggaca

SEQ ID NO: 2278050 - RNA, 19 nt, Homo sapiens
  misc_RNA (1)...(19): siRNA sense strand
gccguaaacuggaccguga

SEQ ID NO: 2278051 - RNA, 19 nt, Homo sapiens
  misc_RNA (1)...(19): siRNA sense strand
gagaaggcuuugaggagga

SEQ ID NO: 2278052 - RNA, 19 nt, Homo sapiens
  misc_RNA (1)...(19): siRNA sense strand
cuugggagaaugagaacaa

SEQ ID NO: 2278053 - RNA, 19 nt, Homo sapiens
  misc_RNA (1)...(19): siRNA sense strand
cagaauuuauguccgggaa

SEQ ID NO: 2278054 - RNA, 19 nt, Homo sapiens
  misc_RNA (1)...(19): siRNA sense strand
gugcaggaguuuagccacu

SEQ ID NO: 2278055 - RNA, 19 nt, Homo sapiens
  misc_RNA (1)...(19): siRNA sense strand
cggagaaggcuuugaggag

SEQ ID NO: 2278056 - RNA, 19 nt, Homo sapiens
  misc_RNA (1)...(19): siRNA sense strand
agaaugagaacaagaucca

SEQ ID NO: 2278057 - RNA, 19 nt, Homo sapiens
  misc_RNA (1)...(19): siRNA sense strand
aguuuagccacuugggaga

SEQ ID NO: 2278058 - RNA, 19 nt, Homo sapiens
  misc_RNA (1)...(19): siRNA sense strand
cguagaaagaagaaagaau

SEQ ID NO: 2278059 - RNA, 19 nt, Homo sapiens
  misc_RNA (1)...(19): siRNA sense strand
cugaagaagcagcacgaaa

SEQ ID NO: 2278060 - RNA, 19 nt, Homo sapiens
  misc_RNA (1)...(19): siRNA sense strand
agacauugauugaggagcu

SEQ ID NO: 2278061 - RNA, 19 nt, Homo sapiens
  misc_RNA (1)...(19): siRNA sense strand
ccaacaaaugacaguucaa

SEQ ID NO: 2278062 - RNA, 19 nt, Homo sapiens
  misc_RNA (1)...(19): siRNA sense strand
cauugauugaggagcuaaa

SEQ ID NO: 2278063 - RNA, 19 nt, Homo sapiens
  misc_RNA (1)...(19): siRNA sense strand
gagucaguggauaguguaa

SEQ ID NO: 2278064 - RNA, 19 nt, Homo sapiens
  misc_RNA (1)...(19): siRNA sense strand
ccacauuagcccagguauc

SEQ ID NO: 2278065 - RNA, 19 nt, Homo sapiens
  misc_RNA (1)...(19): siRNA sense strand
ccagcagaguggagaugca

SEQ ID NO: 2278066 - RNA, 19 nt, Homo sapiens
  misc_RNA (1)...(19): siRNA sense strand
cuaaugaagaacagggaag

SEQ ID NO: 2278067 - RNA, 19 nt, Homo sapiens
  misc_RNA (1)...(19): siRNA sense strand
aagagaagucugaagagga

SEQ ID NO: 2278068 - RNA, 19 nt, Homo sapiens
  misc_RNA (1)...(19): siRNA sense strand
ggagcaauacagcuggcua

SEQ ID NO: 2278069 - RNA, 19 nt, Homo sapiens
  misc_RNA (1)...(19): siRNA sense strand
aagcagcacgaaagagaga

SEQ ID NO: 2278070 - RNA, 19 nt, Homo sapiens
  misc_RNA (1)...(19): siRNA sense strand
caaggauugaagaagagaa

SEQ ID NO: 2278071 - RNA, 19 nt, Homo sapiens
  misc_RNA (1)...(19): siRNA sense strand
uacccagggaggagcaaua

SEQ ID NO: 2278072 - RNA, 19 nt, Homo sapiens
  misc_RNA (1)...(19): siRNA sense strand
cguagaaagaagaaagaau

SEQ ID NO: 2278073 - RNA, 19 nt, Homo sapiens
  misc_RNA (1)...(19): siRNA sense strand
cugaagaagcagcacgaaa

SEQ ID NO: 2278074 - RNA, 19 nt, Homo sapiens
  misc_RNA (1)...(19): siRNA sense strand
agacauugauugaggagcu

SEQ ID NO: 2278075 - RNA, 19 nt, Homo sapiens
  misc_RNA (1)...(19): siRNA sense strand
ccaacaaaugacaguucaa

SEQ ID NO: 2278076 - RNA, 19 nt, Homo sapiens
  misc_RNA (1)...(19): siRNA sense strand
cauugauugaggagcuaaa

SEQ ID NO: 2278077 - RNA, 19 nt, Homo sapiens
  misc_RNA (1)...(19): siRNA sense strand
gagucaguggauaguguaa

SEQ ID NO: 2278078 - RNA, 19 nt, Homo sapiens
  misc_RNA (1)...(19): siRNA sense strand
ccacauuagcccagguauc

SEQ ID NO: 2278079 - RNA, 19 nt, Homo sapiens
  misc_RNA (1)...(19): siRNA sense strand
ccagcagaguggagaugca

SEQ ID NO: 2278080 - RNA, 19 nt, Homo sapiens
  misc_RNA (1)...(19): siRNA sense strand
cuaaugaagaacagggaag

SEQ ID NO: 2278081 - RNA, 19 nt, Homo sapiens
  misc_RNA (1)...(19): siRNA sense strand
aagagaagucugaagagga

SEQ ID NO: 2278082 - RNA, 19 nt, Homo sapiens
  misc_RNA (1)...(19): siRNA sense strand
ggagcaauacagcuggcua

SEQ ID NO: 2278083 - RNA, 19 nt, Homo sapiens
  misc_RNA (1)...(19): siRNA sense strand
aagcagcacgaaagagaga

SEQ ID NO: 2278084 - RNA, 19 nt, Homo sapiens
  misc_RNA (1)...(19): siRNA sense strand
caaggauugaagaagagaa

SEQ ID NO: 2278085 - RNA, 19 nt, Homo sapiens
  misc_RNA (1)...(19): siRNA sense strand
uacccagggaggagcaaua

SEQ ID NO: 2278086 - RNA, 19 nt, Homo sapiens
  misc_RNA (1)...(19): siRNA sense strand
uagagaacuuccaaggcaa

SEQ ID NO: 2278087 - RNA, 19 nt, Homo sapiens
  misc_RNA (1)...(19): siRNA sense strand
agagaacuuccaaggcaaa

SEQ ID NO: 2278088 - RNA, 19 nt, Homo sapiens
  misc_RNA (1)...(19): siRNA sense strand
gcauuugaguccagggccu

SEQ ID NO: 2278089 - RNA, 19 nt, Homo sapiens
  misc_RNA (1)...(19): siRNA sense strand
ugaaagacauauuggcuga

SEQ ID NO: 2278090 - RNA, 19 nt, Homo sapiens
  misc_RNA (1)...(19): siRNA sense strand
ucaccaacauguuaggcua

SEQ ID NO: 2278091 - RNA, 19 nt, Homo sapiens
  misc_RNA (1)...(19): siRNA sense strand
gcacaggguaucagccgaa

SEQ ID NO: 2278092 - RNA, 19 nt, Homo sapiens
  misc_RNA (1)...(19): siRNA sense strand
cgaaccaaguacugggagu

SEQ ID NO: 2278093 - RNA, 19 nt, Homo sapiens
  misc_RNA (1)...(19): siRNA sense strand
gccaaaucacuguggacau

SEQ ID NO: 2278094 - RNA, 19 nt, Homo sapiens
  misc_RNA (1)...(19): siRNA sense strand
ggaagugcuugucuggcua

SEQ ID NO: 2278095 - RNA, 19 nt, Homo sapiens
  misc_RNA (1)...(19): siRNA sense strand
uauuauggcaugacggaga

SEQ ID NO: 2278096 - RNA, 19 nt, Homo sapiens
  misc_RNA (1)...(19): siRNA sense strand
acauaucccaacagaggaa

SEQ ID NO: 2278097 - RNA, 19 nt, Homo sapiens
  misc_RNA (1)...(19): siRNA sense strand
gaauuaagacuuucaggca

SEQ ID NO: 2278098 - RNA, 19 nt, Homo sapiens
  misc_RNA (1)...(19): siRNA sense strand
aggcuauggccaugcagua

SEQ ID NO: 2278099 - RNA, 19 nt, Homo sapiens
  misc_RNA (1)...(19): siRNA sense strand
aagacugauccgcgauaua

SEQ ID NO: 2278100 - RNA, 19 nt, Homo sapiens
  misc_RNA (1)...(19): siRNA sense strand
gcgauauaccugucagcga

SEQ ID NO: 2278101 - RNA, 19 nt, Homo sapiens
  misc_RNA (1)...(19): siRNA sense strand
ugaugaaguuuguggacuc

SEQ ID NO: 2278102 - RNA, 19 nt, Homo sapiens
  misc_RNA (1)...(19): siRNA sense strand
gggaagaaccccugccuga

SEQ ID NO: 2278103 - RNA, 19 nt, Homo sapiens
  misc_RNA (1)...(19): siRNA sense strand
gaacagguaucuuggcucu

SEQ ID NO: 2278104 - RNA, 19 nt, Homo sapiens
  misc_RNA (1)...(19): siRNA sense strand
gccagaaacugcuacccaa

SEQ ID NO: 2278105 - RNA, 19 nt, Homo sapiens
  misc_RNA (1)...(19): siRNA sense strand
cccucaacagugaaaguaa

SEQ ID NO: 2278106 - RNA, 19 nt, Homo sapiens
  misc_RNA (1)...(19): siRNA sense strand
ugcagaaggaaguuggcaa

SEQ ID NO: 2278107 - RNA, 19 nt, Homo sapiens
  misc_RNA (1)...(19): siRNA sense strand
cagaugagaaguuacgaga

SEQ ID NO: 2278108 - RNA, 19 nt, Homo sapiens
  misc_RNA (1)...(19): siRNA sense strand
cuagaaaggcccaagucca

SEQ ID NO: 2278109 - RNA, 19 nt, Homo sapiens
  misc_RNA (1)...(19): siRNA sense strand
cgagacuacaucuggaaca

SEQ ID NO: 2278110 - RNA, 19 nt, Homo sapiens
  misc_RNA (1)...(19): siRNA sense strand
uguuuaaguugguugcuca

SEQ ID NO: 2278111 - RNA, 19 nt, Homo sapiens
  misc_RNA (1)...(19): siRNA sense strand
ucaccaacauguuaggcua

SEQ ID NO: 2278112 - RNA, 19 nt, Homo sapiens
  misc_RNA (1)...(19): siRNA sense strand
gcacaggguaucagccgaa

SEQ ID NO: 2278113 - RNA, 19 nt, Homo sapiens
  misc_RNA (1)...(19): siRNA sense strand
cgaaccaaguacugggagu

SEQ ID NO: 2278114 - RNA, 19 nt, Homo sapiens
  misc_RNA (1)...(19): siRNA sense strand
ggaagugcuugucuggcua

SEQ ID NO: 2278115 - RNA, 19 nt, Homo sapiens
  misc_RNA (1)...(19): siRNA sense strand
uauuauggcaugacggaga

SEQ ID NO: 2278116 - RNA, 19 nt, Homo sapiens
  misc_RNA (1)...(19): siRNA sense strand
acauaucccaacagaggaa

SEQ ID NO: 2278117 - RNA, 19 nt, Homo sapiens
  misc_RNA (1)...(19): siRNA sense strand
aggcuauggccaugcagua

SEQ ID NO: 2278118 - RNA, 19 nt, Homo sapiens
  misc_RNA (1)...(19): siRNA sense strand
aagacugauccgcgauaua

SEQ ID NO: 2278119 - RNA, 19 nt, Homo sapiens
  misc_RNA (1)...(19): siRNA sense strand
gcgauauaccugucagcga

SEQ ID NO: 2278120 - RNA, 19 nt, Homo sapiens
  misc_RNA (1)...(19): siRNA sense strand
ugaugaaguuuguggacuc

SEQ ID NO: 2278121 - RNA, 19 nt, Homo sapiens
  misc_RNA (1)...(19): siRNA sense strand
gggaagaaccccugccuga

SEQ ID NO: 2278122 - RNA, 19 nt, Homo sapiens
  misc_RNA (1)...(19): siRNA sense strand
gaacagguaucuuggcucu

SEQ ID NO: 2278123 - RNA, 19 nt, Homo sapiens
  misc_RNA (1)...(19): siRNA sense strand
gccagaaacugcuacccaa

SEQ ID NO: 2278124 - RNA, 19 nt, Homo sapiens
  misc_RNA (1)...(19): siRNA sense strand
cccucaacagugaaaguaa

SEQ ID NO: 2278125 - RNA, 19 nt, Homo sapiens
  misc_RNA (1)...(19): siRNA sense strand
ugcagaaggaaguuggcaa

SEQ ID NO: 2278126 - RNA, 19 nt, Homo sapiens
  misc_RNA (1)...(19): siRNA sense strand
cagaugagaaguuacgaga

SEQ ID NO: 2278127 - RNA, 19 nt, Homo sapiens
  misc_RNA (1)...(19): siRNA sense strand
cuagaaaggcccaagucca

SEQ ID NO: 2278128 - RNA, 19 nt, Homo sapiens
  misc_RNA (1)...(19): siRNA sense strand
cgagacuacaucuggaaca

SEQ ID NO: 2278129 - RNA, 19 nt, Homo sapiens
  misc_RNA (1)...(19): siRNA sense strand
uguuuaaguugguugcuca

SEQ ID NO: 2278130 - RNA, 19 nt, Homo sapiens
  misc_RNA (1)...(19): siRNA sense strand
ccgaagagguucagugcga

SEQ ID NO: 2278131 - RNA, 19 nt, Homo sapiens
  misc_RNA (1)...(19): siRNA sense strand
gggcuuugguuuugggcaa

SEQ ID NO: 2278132 - RNA, 19 nt, Homo sapiens
  misc_RNA (1)...(19): siRNA sense strand
ggugauuggugcugggaag

SEQ ID NO: 2278133 - RNA, 19 nt, Homo sapiens
  misc_RNA (1)...(19): siRNA sense strand
cagucuaugcugcggagaa

SEQ ID NO: 2278134 - RNA, 19 nt, Homo sapiens
  misc_RNA (1)...(19): siRNA sense strand
gcaagaaguaugggcccaa

SEQ ID NO: 2278135 - RNA, 19 nt, Homo sapiens
  misc_RNA (1)...(19): siRNA sense strand
ggcccaaaggcuauggcua

SEQ ID NO: 2278136 - RNA, 19 nt, Homo sapiens
  misc_RNA (1)...(19): siRNA sense strand
aguaugggcccaaaggcua

SEQ ID NO: 2278137 - RNA, 19 nt, Homo sapiens
  misc_RNA (1)...(19): siRNA sense strand
ggguaucaagcacgaggaa

SEQ ID NO: 2278138 - RNA, 19 nt, Homo sapiens
  misc_RNA (1)...(19): siRNA sense strand
gcauggucugcaagaagaa

SEQ ID NO: 2278139 - RNA, 19 nt, Homo sapiens
  misc_RNA (1)...(19): siRNA sense strand
ccugcuacggcaagaagua

SEQ ID NO: 2278140 - RNA, 19 nt, Homo sapiens
  misc_RNA (1)...(19): siRNA sense strand
gcaagaagaaucuggacag

SEQ ID NO: 2278141 - RNA, 19 nt, Homo sapiens
  misc_RNA (1)...(19): siRNA sense strand
gcccaaaggcuauggcuac

SEQ ID NO: 2278142 - RNA, 19 nt, Homo sapiens
  misc_RNA (1)...(19): siRNA sense strand
acacgaaggacaaggagca

SEQ ID NO: 2278143 - RNA, 19 nt, Homo sapiens
  misc_RNA (1)...(19): siRNA sense strand
cccuaauggcagccggaaa

SEQ ID NO: 2278144 - RNA, 19 nt, Homo sapiens
  misc_RNA (1)...(19): siRNA sense strand
gccaggagaaggagggcau

SEQ ID NO: 2278145 - RNA, 19 nt, Homo sapiens
  misc_RNA (1)...(19): siRNA sense strand
aaaacuagacuuugggcaa

SEQ ID NO: 2278146 - RNA, 19 nt, Homo sapiens
  misc_RNA (1)...(19): siRNA sense strand
cgaaggacaaggagcagga

SEQ ID NO: 2278147 - RNA, 19 nt, Homo sapiens
  misc_RNA (1)...(19): siRNA sense strand
ccugcauccuacagaguga

SEQ ID NO: 2278148 - RNA, 19 nt, Homo sapiens
  misc_RNA (1)...(19): siRNA sense strand
gguugguucaugaagacua

SEQ ID NO: 2278149 - RNA, 19 nt, Homo sapiens
  misc_RNA (1)...(19): siRNA sense strand
uugaauuucugaagcgcau

SEQ ID NO: 2278150 - RNA, 19 nt, Homo sapiens
  misc_RNA (1)...(19): siRNA sense strand
cugaagcgcaugaggacca

SEQ ID NO: 2278151 - RNA, 19 nt, Homo sapiens
  misc_RNA (1)...(19): siRNA sense strand
caugaagacuauacccuga

SEQ ID NO: 2278152 - RNA, 19 nt, Homo sapiens
  misc_RNA (1)...(19): siRNA sense strand
gcaagaagcggaagggcaa

SEQ ID NO: 2278153 - RNA, 19 nt, Homo sapiens
  misc_RNA (1)...(19): siRNA sense strand
aggccaaguuuguggguga

SEQ ID NO: 2278154 - RNA, 19 nt, Homo sapiens
  misc_RNA (1)...(19): siRNA sense strand
cugcaagguucaaggccaa

SEQ ID NO: 2278155 - RNA, 19 nt, Homo sapiens
  misc_RNA (1)...(19): siRNA sense strand
ucgcugaggaugauggaaa

SEQ ID NO: 2278156 - RNA, 19 nt, Homo sapiens
  misc_RNA (1)...(19): siRNA sense strand
agaagauugccuugguaaa

SEQ ID NO: 2278157 - RNA, 19 nt, Homo sapiens
  misc_RNA (1)...(19): siRNA sense strand
cggcagggaaggaggcuuu

SEQ ID NO: 2278158 - RNA, 19 nt, Homo sapiens
  misc_RNA (1)...(19): siRNA sense strand
ugagaagagcagugaggau

SEQ ID NO: 2278159 - RNA, 19 nt, Homo sapiens
  misc_RNA (1)...(19): siRNA sense strand
aauuagugccgguggugaa

SEQ ID NO: 2278160 - RNA, 19 nt, Homo sapiens
  misc_RNA (1)...(19): siRNA sense strand
gcugucagggacugggaaa

SEQ ID NO: 2278161 - RNA, 19 nt, Homo sapiens
  misc_RNA (1)...(19): siRNA sense strand
gaccgaaacuguagcacca

SEQ ID NO: 2278162 - RNA, 19 nt, Homo sapiens
  misc_RNA (1)...(19): siRNA sense strand
caguacccauggagggcaa

SEQ ID NO: 2278163 - RNA, 19 nt, Homo sapiens
  misc_RNA (1)...(19): siRNA sense strand
accaagaagccacgaguau

SEQ ID NO: 2278164 - RNA, 19 nt, Homo sapiens
  misc_RNA (1)...(19): siRNA sense strand
gaaccauauugacagggua

SEQ ID NO: 2278165 - RNA, 19 nt, Homo sapiens
  misc_RNA (1)...(19): siRNA sense strand
cgcaagaagcggaagggca

SEQ ID NO: 2278166 - RNA, 19 nt, Homo sapiens
  misc_RNA (1)...(19): siRNA sense strand
ugguaaagaaacuggccuu

SEQ ID NO: 2278167 - RNA, 19 nt, Homo sapiens
  misc_RNA (1)...(19): siRNA sense strand
agaagagcagugaggauga

SEQ ID NO: 2278168 - RNA, 19 nt, Homo sapiens
  misc_RNA (1)...(19): siRNA sense strand
ggcgagaaguccuggguac

SEQ ID NO: 2278169 - RNA, 19 nt, Homo sapiens
  misc_RNA (1)...(19): siRNA sense strand
guacaguucaacagcaaca

SEQ ID NO: 2278170 - RNA, 19 nt, Homo sapiens
  misc_RNA (1)...(19): siRNA sense strand
cgcugaggaugauggaaaa

SEQ ID NO: 2278171 - RNA, 19 nt, Homo sapiens
  misc_RNA (1)...(19): siRNA sense strand
aguccuggguacaguucaa

SEQ ID NO: 2278172 - RNA, 19 nt, Homo sapiens
  misc_RNA (1)...(19): siRNA sense strand
acagcagccacgugggcaa

SEQ ID NO: 2278173 - RNA, 19 nt, Homo sapiens
  misc_RNA (1)...(19): siRNA sense strand
ccugcaagguucaaggcca

SEQ ID NO: 2278174 - RNA, 19 nt, Homo sapiens
  misc_RNA (1)...(19): siRNA sense strand
gcucauuucgagugaccau

SEQ ID NO: 2278175 - RNA, 19 nt, Homo sapiens
  misc_RNA (1)...(19): siRNA sense strand
ggaaggaggcuuugccauc

SEQ ID NO: 2278176 - RNA, 19 nt, Homo sapiens
  misc_RNA (1)...(19): siRNA sense strand
caagaugaccccaaagcaa

SEQ ID NO: 2278177 - RNA, 19 nt, Homo sapiens
  misc_RNA (1)...(19): siRNA sense strand
gcgagaaguccuggguaca

SEQ ID NO: 2278178 - RNA, 19 nt, Homo sapiens
  misc_RNA (1)...(19): siRNA sense strand
gcaccaucacccugcagaa

SEQ ID NO: 2278179 - RNA, 19 nt, Homo sapiens
  misc_RNA (1)...(19): siRNA sense strand
caucaagguaucagcggca

SEQ ID NO: 2278180 - RNA, 19 nt, Homo sapiens
  misc_RNA (1)...(19): siRNA sense strand
ccaucgaggucuacccuga

SEQ ID NO: 2278181 - RNA, 19 nt, Homo sapiens
  misc_RNA (1)...(19): siRNA sense strand
gguucaaggccaaguuugu

SEQ ID NO: 2278182 - RNA, 19 nt, Homo sapiens
  misc_RNA (1)...(19): siRNA sense strand
ccccaaaagugguggaaaa

SEQ ID NO: 2278183 - RNA, 19 nt, Homo sapiens
  misc_RNA (1)...(19): siRNA sense strand
ccaucgacgaauagagaaa

SEQ ID NO: 2278184 - RNA, 19 nt, Homo sapiens
  misc_RNA (1)...(19): siRNA sense strand
cagaauaccuugaguggga

SEQ ID NO: 2278185 - RNA, 19 nt, Homo sapiens
  misc_RNA (1)...(19): siRNA sense strand
ggacaaggccugcagguca

SEQ ID NO: 2278186 - RNA, 19 nt, Homo sapiens
  misc_RNA (1)...(19): siRNA sense strand
ggugagaaucugaugaaaa

SEQ ID NO: 2278187 - RNA, 19 nt, Homo sapiens
  misc_RNA (1)...(19): siRNA sense strand
cuguagaaauagaauguga

SEQ ID NO: 2278188 - RNA, 19 nt, Homo sapiens
  misc_RNA (1)...(19): siRNA sense strand
aguauaauccugaagggaa

SEQ ID NO: 2278189 - RNA, 19 nt, Homo sapiens
  misc_RNA (1)...(19): siRNA sense strand
aagacaaucaacagugaaa

SEQ ID NO: 2278190 - RNA, 19 nt, Homo sapiens
  misc_RNA (1)...(19): siRNA sense strand
acaaagaugagaaaggaga

SEQ ID NO: 2278191 - RNA, 19 nt, Homo sapiens
  misc_RNA (1)...(19): siRNA sense strand
gguggaaguuugaagucau

SEQ ID NO: 2278192 - RNA, 19 nt, Homo sapiens
  misc_RNA (1)...(19): siRNA sense strand
gugauggaguacagauaga

SEQ ID NO: 2278193 - RNA, 19 nt, Homo sapiens
  misc_RNA (1)...(19): siRNA sense strand
caugaaaugauggaagaaa

SEQ ID NO: 2278194 - RNA, 19 nt, Homo sapiens
  misc_RNA (1)...(19): siRNA sense strand
uggaguacagauagauuua

SEQ ID NO: 2278195 - RNA, 19 nt, Homo sapiens
  misc_RNA (1)...(19): siRNA sense strand
acgugaaggaugauggaca

SEQ ID NO: 2278196 - RNA, 19 nt, Homo sapiens
  misc_RNA (1)...(19): siRNA sense strand
ugaagaauuccaugguaau

SEQ ID NO: 2278197 - RNA, 19 nt, Homo sapiens
  misc_RNA (1)...(19): siRNA sense strand
acagaaaucauguuggaca

SEQ ID NO: 2278198 - RNA, 19 nt, Homo sapiens
  misc_RNA (1)...(19): siRNA sense strand
cugcauaauaaaugugcuu

SEQ ID NO: 2278199 - RNA, 19 nt, Homo sapiens
  misc_RNA (1)...(19): siRNA sense strand
aguuugaagucauaccuaa

SEQ ID NO: 2278200 - RNA, 19 nt, Homo sapiens
  misc_RNA (1)...(19): siRNA sense strand
aguugaaguuugcaaguca

SEQ ID NO: 2278201 - RNA, 19 nt, Homo sapiens
  misc_RNA (1)...(19): siRNA sense strand
ccuuacaguaucaucaaua

SEQ ID NO: 2278202 - RNA, 19 nt, Homo sapiens
  misc_RNA (1)...(19): siRNA sense strand
augugauggaguacagaua

SEQ ID NO: 2278203 - RNA, 19 nt, Homo sapiens
  misc_RNA (1)...(19): siRNA sense strand
uggaaggagccauggagau

SEQ ID NO: 2278204 - RNA, 19 nt, Homo sapiens
  misc_RNA (1)...(19): siRNA sense strand
cuaaugacaaagaugagaa

SEQ ID NO: 2278205 - RNA, 19 nt, Homo sapiens
  misc_RNA (1)...(19): siRNA sense strand
uuccacaucaugagagaaa

SEQ ID NO: 2278206 - RNA, 19 nt, Homo sapiens
  misc_RNA (1)...(19): siRNA sense strand
auugaaaacagcacagaaa

SEQ ID NO: 2278207 - RNA, 19 nt, Homo sapiens
  misc_RNA (1)...(19): siRNA sense strand
gggaugucacugaacuuaa

SEQ ID NO: 2278208 - RNA, 19 nt, Homo sapiens
  misc_RNA (1)...(19): siRNA sense strand
gcuccugggcuuagaaaau

SEQ ID NO: 2278209 - RNA, 19 nt, Homo sapiens
  misc_RNA (1)...(19): siRNA sense strand
uggaaaacaaggagaacga

SEQ ID NO: 2278210 - RNA, 19 nt, Homo sapiens
  misc_RNA (1)...(19): siRNA sense strand
agguuacgaaggugagaau

SEQ ID NO: 2278211 - RNA, 19 nt, Homo sapiens
  misc_RNA (1)...(19): siRNA sense strand
gaaaauaacgugaaggaug

SEQ ID NO: 2278212 - RNA, 19 nt, Homo sapiens
  misc_RNA (1)...(19): siRNA sense strand
gcauaauaaaugugcuucu

SEQ ID NO: 2278213 - RNA, 19 nt, Homo sapiens
  misc_RNA (1)...(19): siRNA sense strand
ccaaacaaagugauugaca

SEQ ID NO: 2278214 - RNA, 19 nt, Homo sapiens
  misc_RNA (1)...(19): siRNA sense strand
gaaaacaaggagaacgaau

SEQ ID NO: 2278215 - RNA, 19 nt, Homo sapiens
  misc_RNA (1)...(19): siRNA sense strand
ugcccaaccaagugugaua

SEQ ID NO: 2278216 - RNA, 19 nt, Homo sapiens
  misc_RNA (1)...(19): siRNA sense strand
agccaaacaaagugauuga

SEQ ID NO: 2278217 - RNA, 19 nt, Homo sapiens
  misc_RNA (1)...(19): siRNA sense strand
uggaccaaugccaggguua

SEQ ID NO: 2278218 - RNA, 19 nt, Homo sapiens
  misc_RNA (1)...(19): siRNA sense strand
uggggagagucuaagaaaa

SEQ ID NO: 2278219 - RNA, 19 nt, Homo sapiens
  misc_RNA (1)...(19): siRNA sense strand
cgagcaagucucugccaau

SEQ ID NO: 2278220 - RNA, 19 nt, Homo sapiens
  misc_RNA (1)...(19): siRNA sense strand
aagaggaagaccugaggau

SEQ ID NO: 2278221 - RNA, 19 nt, Homo sapiens
  misc_RNA (1)...(19): siRNA sense strand
auuaaauccucgucagguu

SEQ ID NO: 2278222 - RNA, 19 nt, Homo sapiens
  misc_RNA (1)...(19): siRNA sense strand
guuacgaaggugagaaucu

SEQ ID NO: 2278223 - RNA, 19 nt, Homo sapiens
  misc_RNA (1)...(19): siRNA sense strand
gauuccacaucaugagaga

SEQ ID NO: 2278224 - RNA, 19 nt, Homo sapiens
  misc_RNA (1)...(19): siRNA sense strand
gguaauggugugcuugcaa

SEQ ID NO: 2278225 - RNA, 19 nt, Homo sapiens
  misc_RNA (1)...(19): siRNA sense strand
agaggaagaccugaggaua

SEQ ID NO: 2278226 - RNA, 19 nt, Homo sapiens
  misc_RNA (1)...(19): siRNA sense strand
aaacaaagugauugacaag

SEQ ID NO: 2278227 - RNA, 19 nt, Homo sapiens
  misc_RNA (1)...(19): siRNA sense strand
cugcaagaagcuacaugaa

SEQ ID NO: 2278228 - RNA, 19 nt, Homo sapiens
  misc_RNA (1)...(19): siRNA sense strand
aaauagaaugugauggagu

SEQ ID NO: 2278229 - RNA, 19 nt, Homo sapiens
  misc_RNA (1)...(19): siRNA sense strand
ugauggaagaaauugacua

SEQ ID NO: 2278230 - RNA, 19 nt, Homo sapiens
  misc_RNA (1)...(19): siRNA sense strand
augccaaagaguugaaguu

SEQ ID NO: 2278231 - RNA, 19 nt, Homo sapiens
  misc_RNA (1)...(19): siRNA sense strand
auucuaguccaaugguaaa

SEQ ID NO: 2278232 - RNA, 19 nt, Homo sapiens
  misc_RNA (1)...(19): siRNA sense strand
acugaagcacuuuaacaaa

SEQ ID NO: 2278233 - RNA, 19 nt, Homo sapiens
  misc_RNA (1)...(19): siRNA sense strand
gaccaaugccaggguuaaa

SEQ ID NO: 2278234 - RNA, 19 nt, Homo sapiens
  misc_RNA (1)...(19): siRNA sense strand
ccccaaaagugguggaaaa

SEQ ID NO: 2278235 - RNA, 19 nt, Homo sapiens
  misc_RNA (1)...(19): siRNA sense strand
ccaucgacgaauagagaaa

SEQ ID NO: 2278236 - RNA, 19 nt, Homo sapiens
  misc_RNA (1)...(19): siRNA sense strand
cagaauaccuugaguggga

SEQ ID NO: 2278237 - RNA, 19 nt, Homo sapiens
  misc_RNA (1)...(19): siRNA sense strand
ggacaaggccugcagguca

SEQ ID NO: 2278238 - RNA, 19 nt, Homo sapiens
  misc_RNA (1)...(19): siRNA sense strand
ggugagaaucugaugaaaa

SEQ ID NO: 2278239 - RNA, 19 nt, Homo sapiens
  misc_RNA (1)...(19): siRNA sense strand
cuguagaaauagaauguga

SEQ ID NO: 2278240 - RNA, 19 nt, Homo sapiens
  misc_RNA (1)...(19): siRNA sense strand
aguauaauccugaagggaa

SEQ ID NO: 2278241 - RNA, 19 nt, Homo sapiens
  misc_RNA (1)...(19): siRNA sense strand
aagacaaucaacagugaaa

SEQ ID NO: 2278242 - RNA, 19 nt, Homo sapiens
  misc_RNA (1)...(19): siRNA sense strand
acaaagaugagaaaggaga

SEQ ID NO: 2278243 - RNA, 19 nt, Homo sapiens
  misc_RNA (1)...(19): siRNA sense strand
gguggaaguuugaagucau

SEQ ID NO: 2278244 - RNA, 19 nt, Homo sapiens
  misc_RNA (1)...(19): siRNA sense strand
gugauggaguacagauaga

SEQ ID NO: 2278245 - RNA, 19 nt, Homo sapiens
  misc_RNA (1)...(19): siRNA sense strand
caugaaaugauggaagaaa

SEQ ID NO: 2278246 - RNA, 19 nt, Homo sapiens
  misc_RNA (1)...(19): siRNA sense strand
uggaguacagauagauuua

SEQ ID NO: 2278247 - RNA, 19 nt, Homo sapiens
  misc_RNA (1)...(19): siRNA sense strand
acgugaaggaugauggaca

SEQ ID NO: 2278248 - RNA, 19 nt, Homo sapiens
  misc_RNA (1)...(19): siRNA sense strand
ugaagaauuccaugguaau

SEQ ID NO: 2278249 - RNA, 19 nt, Homo sapiens
  misc_RNA (1)...(19): siRNA sense strand
acagaaaucauguuggaca

SEQ ID NO: 2278250 - RNA, 19 nt, Homo sapiens
  misc_RNA (1)...(19): siRNA sense strand
cugcauaauaaaugugcuu

SEQ ID NO: 2278251 - RNA, 19 nt, Homo sapiens
  misc_RNA (1)...(19): siRNA sense strand
aguuugaagucauaccuaa

SEQ ID NO: 2278252 - RNA, 19 nt, Homo sapiens
  misc_RNA (1)...(19): siRNA sense strand
aguugaaguuugcaaguca

SEQ ID NO: 2278253 - RNA, 19 nt, Homo sapiens
  misc_RNA (1)...(19): siRNA sense strand
ccuuacaguaucaucaaua

SEQ ID NO: 2278254 - RNA, 19 nt, Homo sapiens
  misc_RNA (1)...(19): siRNA sense strand
augugauggaguacagaua

SEQ ID NO: 2278255 - RNA, 19 nt, Homo sapiens
  misc_RNA (1)...(19): siRNA sense strand
uggaaggagccauggagau

SEQ ID NO: 2278256 - RNA, 19 nt, Homo sapiens
  misc_RNA (1)...(19): siRNA sense strand
cuaaugacaaagaugagaa

SEQ ID NO: 2278257 - RNA, 19 nt, Homo sapiens
  misc_RNA (1)...(19): siRNA sense strand
uuccacaucaugagagaaa

SEQ ID NO: 2278258 - RNA, 19 nt, Homo sapiens
  misc_RNA (1)...(19): siRNA sense strand
auugaaaacagcacagaaa

SEQ ID NO: 2278259 - RNA, 19 nt, Homo sapiens
  misc_RNA (1)...(19): siRNA sense strand
gggaugucacugaacuuaa

SEQ ID NO: 2278260 - RNA, 19 nt, Homo sapiens
  misc_RNA (1)...(19): siRNA sense strand
gcuccugggcuuagaaaau

SEQ ID NO: 2278261 - RNA, 19 nt, Homo sapiens
  misc_RNA (1)...(19): siRNA sense strand
uggaaaacaaggagaacga

SEQ ID NO: 2278262 - RNA, 19 nt, Homo sapiens
  misc_RNA (1)...(19): siRNA sense strand
agguuacgaaggugagaau

SEQ ID NO: 2278263 - RNA, 19 nt, Homo sapiens
  misc_RNA (1)...(19): siRNA sense strand
gaaaauaacgugaaggaug

SEQ ID NO: 2278264 - RNA, 19 nt, Homo sapiens
  misc_RNA (1)...(19): siRNA sense strand
gcauaauaaaugugcuucu

SEQ ID NO: 2278265 - RNA, 19 nt, Homo sapiens
  misc_RNA (1)...(19): siRNA sense strand
ccaaacaaagugauugaca

SEQ ID NO: 2278266 - RNA, 19 nt, Homo sapiens
  misc_RNA (1)...(19): siRNA sense strand
gaaaacaaggagaacgaau

SEQ ID NO: 2278267 - RNA, 19 nt, Homo sapiens
  misc_RNA (1)...(19): siRNA sense strand
ugcccaaccaagugugaua

SEQ ID NO: 2278268 - RNA, 19 nt, Homo sapiens
  misc_RNA (1)...(19): siRNA sense strand
agccaaacaaagugauuga

SEQ ID NO: 2278269 - RNA, 19 nt, Homo sapiens
  misc_RNA (1)...(19): siRNA sense strand
uggaccaaugccaggguua

SEQ ID NO: 2278270 - RNA, 19 nt, Homo sapiens
  misc_RNA (1)...(19): siRNA sense strand
uggggagagucuaagaaaa

SEQ ID NO: 2278271 - RNA, 19 nt, Homo sapiens
  misc_RNA (1)...(19): siRNA sense strand
cgagcaagucucugccaau

SEQ ID NO: 2278272 - RNA, 19 nt, Homo sapiens
  misc_RNA (1)...(19): siRNA sense strand
aagaggaagaccugaggau

SEQ ID NO: 2278273 - RNA, 19 nt, Homo sapiens
  misc_RNA (1)...(19): siRNA sense strand
auuaaauccucgucagguu

SEQ ID NO: 2278274 - RNA, 19 nt, Homo sapiens
  misc_RNA (1)...(19): siRNA sense strand
guuacgaaggugagaaucu

SEQ ID NO: 2278275 - RNA, 19 nt, Homo sapiens
  misc_RNA (1)...(19): siRNA sense strand
gauuccacaucaugagaga

SEQ ID NO: 2278276 - RNA, 19 nt, Homo sapiens
  misc_RNA (1)...(19): siRNA sense strand
gguaauggugugcuugcaa

SEQ ID NO: 2278277 - RNA, 19 nt, Homo sapiens
  misc_RNA (1)...(19): siRNA sense strand
agaggaagaccugaggaua

SEQ ID NO: 2278278 - RNA, 19 nt, Homo sapiens
  misc_RNA (1)...(19): siRNA sense strand
aaacaaagugauugacaag

SEQ ID NO: 2278279 - RNA, 19 nt, Homo sapiens
  misc_RNA (1)...(19): siRNA sense strand
cugcaagaagcuacaugaa

SEQ ID NO: 2278280 - RNA, 19 nt, Homo sapiens
  misc_RNA (1)...(19): siRNA sense strand
aaauagaaugugauggagu

SEQ ID NO: 2278281 - RNA, 19 nt, Homo sapiens
  misc_RNA (1)...(19): siRNA sense strand
ugauggaagaaauugacua

SEQ ID NO: 2278282 - RNA, 19 nt, Homo sapiens
  misc_RNA (1)...(19): siRNA sense strand
augccaaagaguugaaguu

SEQ ID NO: 2278283 - RNA, 19 nt, Homo sapiens
  misc_RNA (1)...(19): siRNA sense strand
auucuaguccaaugguaaa

SEQ ID NO: 2278284 - RNA, 19 nt, Homo sapiens
  misc_RNA (1)...(19): siRNA sense strand
acugaagcacuuuaacaaa

SEQ ID NO: 2278285 - RNA, 19 nt, Homo sapiens
  misc_RNA (1)...(19): siRNA sense strand
gaccaaugccaggguuaaa

SEQ ID NO: 2278286 - RNA, 19 nt, Homo sapiens
  misc_RNA (1)...(19): siRNA sense strand
acaccaaagaagagaaaga

SEQ ID NO: 2278287 - RNA, 19 nt, Homo sapiens
  misc_RNA (1)...(19): siRNA sense strand
cgaagggaaacuagagacu

SEQ ID NO: 2278288 - RNA, 19 nt, Homo sapiens
  misc_RNA (1)...(19): siRNA sense strand
agaaagacaaggaugacca

SEQ ID NO: 2278289 - RNA, 19 nt, Homo sapiens
  misc_RNA (1)...(19): siRNA sense strand
gaugaccaggaaugggaaa

SEQ ID NO: 2278290 - RNA, 19 nt, Homo sapiens
  misc_RNA (1)...(19): siRNA sense strand
ccgugaaagcugguggaau

SEQ ID NO: 2278291 - RNA, 19 nt, Homo sapiens
  misc_RNA (1)...(19): siRNA sense strand
ggguguuaccagaaggcaa

SEQ ID NO: 2278292 - RNA, 19 nt, Homo sapiens
  misc_RNA (1)...(19): siRNA sense strand
ccagaagauaguaggauca

SEQ ID NO: 2278293 - RNA, 19 nt, Homo sapiens
  misc_RNA (1)...(19): siRNA sense strand
cagugaaagaagugaagau

SEQ ID NO: 2278294 - RNA, 19 nt, Homo sapiens
  misc_RNA (1)...(19): siRNA sense strand
gauacauuuccaugguaaa

SEQ ID NO: 2278295 - RNA, 19 nt, Homo sapiens
  misc_RNA (1)...(19): siRNA sense strand
ggagaaaucuguggaccga

SEQ ID NO: 2278296 - RNA, 19 nt, Homo sapiens
  misc_RNA (1)...(19): siRNA sense strand
cggaauccaaacacugaaa

SEQ ID NO: 2278297 - RNA, 19 nt, Homo sapiens
  misc_RNA (1)...(19): siRNA sense strand
ggaaggaggaggagcggaa

SEQ ID NO: 2278298 - RNA, 19 nt, Homo sapiens
  misc_RNA (1)...(19): siRNA sense strand
cagaagaggaggagggcuu

SEQ ID NO: 2278299 - RNA, 19 nt, Homo sapiens
  misc_RNA (1)...(19): siRNA sense strand
aggaagaagagcugcggaa

SEQ ID NO: 2278300 - RNA, 19 nt, Homo sapiens
  misc_RNA (1)...(19): siRNA sense strand
cggaugcagcuguggaaau

SEQ ID NO: 2278301 - RNA, 19 nt, Homo sapiens
  misc_RNA (1)...(19): siRNA sense strand
aggccaagaaggaagaaga

SEQ ID NO: 2278302 - RNA, 19 nt, Homo sapiens
  misc_RNA (1)...(19): siRNA sense strand
agucagagucggaggugga

SEQ ID NO: 2278303 - RNA, 19 nt, Homo sapiens
  misc_RNA (1)...(19): siRNA sense strand
cggaagagcucugugccaa

SEQ ID NO: 2278304 - RNA, 19 nt, Homo sapiens
  misc_RNA (1)...(19): siRNA sense strand
gguucgagcaggagcggau

SEQ ID NO: 2278305 - RNA, 19 nt, Homo sapiens
  misc_RNA (1)...(19): siRNA sense strand
cgggacacuuugagaacca

SEQ ID NO: 2278306 - RNA, 19 nt, Homo sapiens
  misc_RNA (1)...(19): siRNA sense strand
ccuccacacuccaggguga

SEQ ID NO: 2278307 - RNA, 19 nt, Homo sapiens
  misc_RNA (1)...(19): siRNA sense strand
agacuuuagaagcggaaga

SEQ ID NO: 2278308 - RNA, 19 nt, Homo sapiens
  misc_RNA (1)...(19): siRNA sense strand
uagaagcggaagaggccaa

SEQ ID NO: 2278309 - RNA, 19 nt, Homo sapiens
  misc_RNA (1)...(19): siRNA sense strand
uuugagaaccagaagguga

SEQ ID NO: 2278310 - RNA, 19 nt, Homo sapiens
  misc_RNA (1)...(19): siRNA sense strand
cuguggaaaugaagcggau

SEQ ID NO: 2278311 - RNA, 19 nt, Homo sapiens
  misc_RNA (1)...(19): siRNA sense strand
uggaaaugaagcggauuaa

SEQ ID NO: 2278312 - RNA, 19 nt, Homo sapiens
  misc_RNA (1)...(19): siRNA sense strand
ccaagaaggaagaagagcu

SEQ ID NO: 2278313 - RNA, 19 nt, Homo sapiens
  misc_RNA (1)...(19): siRNA sense strand
ccugacaacccaagggagu

SEQ ID NO: 2278314 - RNA, 19 nt, Homo sapiens
  misc_RNA (1)...(19): siRNA sense strand
agaaggugauguacggcuu

SEQ ID NO: 2278315 - RNA, 19 nt, Homo sapiens
  misc_RNA (1)...(19): siRNA sense strand
ugcaggagcuuucgggaca

SEQ ID NO: 2278316 - RNA, 19 nt, Homo sapiens
  misc_RNA (1)...(19): siRNA sense strand
ccagcagcguggaagacau

SEQ ID NO: 2278317 - RNA, 19 nt, Homo sapiens
  misc_RNA (1)...(19): siRNA sense strand
ugaagaagucagagucgga

SEQ ID NO: 2278318 - RNA, 19 nt, Homo sapiens
  misc_RNA (1)...(19): siRNA sense strand
ggaguuugcccaaucggaa

SEQ ID NO: 2278319 - RNA, 19 nt, Homo sapiens
  misc_RNA (1)...(19): siRNA sense strand
cagaggaaguggaagggga

SEQ ID NO: 2278320 - RNA, 19 nt, Homo sapiens
  misc_RNA (1)...(19): siRNA sense strand
ggaaggaggaggagcggaa

SEQ ID NO: 2278321 - RNA, 19 nt, Homo sapiens
  misc_RNA (1)...(19): siRNA sense strand
cagaagaggaggagggcuu

SEQ ID NO: 2278322 - RNA, 19 nt, Homo sapiens
  misc_RNA (1)...(19): siRNA sense strand
aggaagaagagcugcggaa

SEQ ID NO: 2278323 - RNA, 19 nt, Homo sapiens
  misc_RNA (1)...(19): siRNA sense strand
cggaugcagcuguggaaau

SEQ ID NO: 2278324 - RNA, 19 nt, Homo sapiens
  misc_RNA (1)...(19): siRNA sense strand
aggccaagaaggaagaaga

SEQ ID NO: 2278325 - RNA, 19 nt, Homo sapiens
  misc_RNA (1)...(19): siRNA sense strand
agucagagucggaggugga

SEQ ID NO: 2278326 - RNA, 19 nt, Homo sapiens
  misc_RNA (1)...(19): siRNA sense strand
cggaagagcucugugccaa

SEQ ID NO: 2278327 - RNA, 19 nt, Homo sapiens
  misc_RNA (1)...(19): siRNA sense strand
gguucgagcaggagcggau

SEQ ID NO: 2278328 - RNA, 19 nt, Homo sapiens
  misc_RNA (1)...(19): siRNA sense strand
cgggacacuuugagaacca

SEQ ID NO: 2278329 - RNA, 19 nt, Homo sapiens
  misc_RNA (1)...(19): siRNA sense strand
ccuccacacuccaggguga

SEQ ID NO: 2278330 - RNA, 19 nt, Homo sapiens
  misc_RNA (1)...(19): siRNA sense strand
agacuuuagaagcggaaga

SEQ ID NO: 2278331 - RNA, 19 nt, Homo sapiens
  misc_RNA (1)...(19): siRNA sense strand
uagaagcggaagaggccaa

SEQ ID NO: 2278332 - RNA, 19 nt, Homo sapiens
  misc_RNA (1)...(19): siRNA sense strand
uuugagaaccagaagguga

SEQ ID NO: 2278333 - RNA, 19 nt, Homo sapiens
  misc_RNA (1)...(19): siRNA sense strand
cuguggaaaugaagcggau

SEQ ID NO: 2278334 - RNA, 19 nt, Homo sapiens
  misc_RNA (1)...(19): siRNA sense strand
uggaaaugaagcggauuaa

SEQ ID NO: 2278335 - RNA, 19 nt, Homo sapiens
  misc_RNA (1)...(19): siRNA sense strand
ccaagaaggaagaagagcu

SEQ ID NO: 2278336 - RNA, 19 nt, Homo sapiens
  misc_RNA (1)...(19): siRNA sense strand
ccugacaacccaagggagu

SEQ ID NO: 2278337 - RNA, 19 nt, Homo sapiens
  misc_RNA (1)...(19): siRNA sense strand
agaaggugauguacggcuu

SEQ ID NO: 2278338 - RNA, 19 nt, Homo sapiens
  misc_RNA (1)...(19): siRNA sense strand
ugcaggagcuuucgggaca

SEQ ID NO: 2278339 - RNA, 19 nt, Homo sapiens
  misc_RNA (1)...(19): siRNA sense strand
ccagcagcguggaagacau

SEQ ID NO: 2278340 - RNA, 19 nt, Homo sapiens
  misc_RNA (1)...(19): siRNA sense strand
ugaagaagucagagucgga

SEQ ID NO: 2278341 - RNA, 19 nt, Homo sapiens
  misc_RNA (1)...(19): siRNA sense strand
ggaguuugcccaaucggaa

SEQ ID NO: 2278342 - RNA, 19 nt, Homo sapiens
  misc_RNA (1)...(19): siRNA sense strand
cagaggaaguggaagggga

SEQ ID NO: 2278343 - RNA, 19 nt, Homo sapiens
  misc_RNA (1)...(19): siRNA sense strand
acauaaagcaagugagcga

SEQ ID NO: 2278344 - RNA, 19 nt, Homo sapiens
  misc_RNA (1)...(19): siRNA sense strand
gcugaauauuguagagcau

SEQ ID NO: 2278345 - RNA, 19 nt, Homo sapiens
  misc_RNA (1)...(19): siRNA sense strand
gggcaaaagggguggauuu

SEQ ID NO: 2278346 - RNA, 19 nt, Homo sapiens
  misc_RNA (1)...(19): siRNA sense strand
cuggaaagaaguuuggaaa

SEQ ID NO: 2278347 - RNA, 19 nt, Homo sapiens
  misc_RNA (1)...(19): siRNA sense strand
ggauaugguuggaguggca

SEQ ID NO: 2278348 - RNA, 19 nt, Homo sapiens
  misc_RNA (1)...(19): siRNA sense strand
aauaagaccugauaggcaa

SEQ ID NO: 2278349 - RNA, 19 nt, Homo sapiens
  misc_RNA (1)...(19): siRNA sense strand
acagaagaagcaaggaaau

SEQ ID NO: 2278350 - RNA, 19 nt, Homo sapiens
  misc_RNA (1)...(19): siRNA sense strand
uguuauugcaagacagaau

SEQ ID NO: 2278351 - RNA, 19 nt, Homo sapiens
  misc_RNA (1)...(19): siRNA sense strand
auacagaagaagcaaggaa

SEQ ID NO: 2278352 - RNA, 19 nt, Homo sapiens
  misc_RNA (1)...(19): siRNA sense strand
uggagagagguguggaaau

SEQ ID NO: 2278353 - RNA, 19 nt, Homo sapiens
  misc_RNA (1)...(19): siRNA sense strand
acguagaaaaggaugaaaa

SEQ ID NO: 2278354 - RNA, 19 nt, Homo sapiens
  misc_RNA (1)...(19): siRNA sense strand
auguggaagaugugaaauu

SEQ ID NO: 2278355 - RNA, 19 nt, Homo sapiens
  misc_RNA (1)...(19): siRNA sense strand
agauguggaagaugugaaa

SEQ ID NO: 2278356 - RNA, 19 nt, Homo sapiens
  misc_RNA (1)...(19): siRNA sense strand
uugaugaagcagauagaau

SEQ ID NO: 2278357 - RNA, 19 nt, Homo sapiens
  misc_RNA (1)...(19): siRNA sense strand
ggccaaaagaaguaagaca

SEQ ID NO: 2278358 - RNA, 19 nt, Homo sapiens
  misc_RNA (1)...(19): siRNA sense strand
cagcacaagagguggaaac

SEQ ID NO: 2278359 - RNA, 19 nt, Homo sapiens
  misc_RNA (1)...(19): siRNA sense strand
acuuauucgucuaauggaa

SEQ ID NO: 2278360 - RNA, 19 nt, Homo sapiens
  misc_RNA (1)...(19): siRNA sense strand
accuuuagagacagggaaa

SEQ ID NO: 2278361 - RNA, 19 nt, Homo sapiens
  misc_RNA (1)...(19): siRNA sense strand
uacagaagaagcaaggaaa

SEQ ID NO: 2278362 - RNA, 19 nt, Homo sapiens
  misc_RNA (1)...(19): siRNA sense strand
agcaaggaaauuacaguua

SEQ ID NO: 2278363 - RNA, 19 nt, Homo sapiens
  misc_RNA (1)...(19): siRNA sense strand
aaauaagaccugauaggca

SEQ ID NO: 2278364 - RNA, 19 nt, Homo sapiens
  misc_RNA (1)...(19): siRNA sense strand
gcacagcacaagaggugga

SEQ ID NO: 2278365 - RNA, 19 nt, Homo sapiens
  misc_RNA (1)...(19): siRNA sense strand
ucauauaaacauuggugca

SEQ ID NO: 2278366 - RNA, 19 nt, Homo sapiens
  misc_RNA (1)...(19): siRNA sense strand
uggaagacugauugacuuu

SEQ ID NO: 2278367 - RNA, 19 nt, Homo sapiens
  misc_RNA (1)...(19): siRNA sense strand
gcaaauuacaccaauggga

SEQ ID NO: 2278368 - RNA, 19 nt, Homo sapiens
  misc_RNA (1)...(19): siRNA sense strand
cauggauguuauugcaaga

SEQ ID NO: 2278369 - RNA, 19 nt, Homo sapiens
  misc_RNA (1)...(19): siRNA sense strand
augauagcacucagcaaua

SEQ ID NO: 2278370 - RNA, 19 nt, Homo sapiens
  misc_RNA (1)...(19): siRNA sense strand
ugaauauuguagagcaugu

SEQ ID NO: 2278371 - RNA, 19 nt, Homo sapiens
  misc_RNA (1)...(19): siRNA sense strand
uccuaagggaccacaaaua

SEQ ID NO: 2278372 - RNA, 19 nt, Homo sapiens
  misc_RNA (1)...(19): siRNA sense strand
gucuaauggaagagaucau

SEQ ID NO: 2278373 - RNA, 19 nt, Homo sapiens
  misc_RNA (1)...(19): siRNA sense strand
ggaaauuacaguuagaggu

SEQ ID NO: 2278374 - RNA, 19 nt, Homo sapiens
  misc_RNA (1)...(19): siRNA sense strand
agugagaaggagaauaaaa

SEQ ID NO: 2278375 - RNA, 19 nt, Homo sapiens
  misc_RNA (1)...(19): siRNA sense strand
ccuaauaacauaaagcaag

SEQ ID NO: 2278376 - RNA, 19 nt, Homo sapiens
  misc_RNA (1)...(19): siRNA sense strand
gguaugaaccaacaggcau

SEQ ID NO: 2278377 - RNA, 19 nt, Homo sapiens
  misc_RNA (1)...(19): siRNA sense strand
cuaccuuguccuugaugaa

SEQ ID NO: 2278378 - RNA, 19 nt, Homo sapiens
  misc_RNA (1)...(19): siRNA sense strand
ucaugagugagaaggagaa

SEQ ID NO: 2278379 - RNA, 19 nt, Homo sapiens
  misc_RNA (1)...(19): siRNA sense strand
gcuccuauucugauugcua

SEQ ID NO: 2278380 - RNA, 19 nt, Homo sapiens
  misc_RNA (1)...(19): siRNA sense strand
ccagagggcuagaugugga

SEQ ID NO: 2278381 - RNA, 19 nt, Homo sapiens
  misc_RNA (1)...(19): siRNA sense strand
cuggaagacugauugacuu

SEQ ID NO: 2278382 - RNA, 19 nt, Homo sapiens
  misc_RNA (1)...(19): siRNA sense strand
ccuugaugaagcagauaga

SEQ ID NO: 2278383 - RNA, 19 nt, Homo sapiens
  misc_RNA (1)...(19): siRNA sense strand
uggaaacccuggggagaaa

SEQ ID NO: 2278384 - RNA, 19 nt, Homo sapiens
  misc_RNA (1)...(19): siRNA sense strand
ggcuaggcgcacagcacaa

SEQ ID NO: 2278385 - RNA, 19 nt, Homo sapiens
  misc_RNA (1)...(19): siRNA sense strand
ggaccgaggguuuggugca

SEQ ID NO: 2278386 - RNA, 19 nt, Homo sapiens
  misc_RNA (1)...(19): siRNA sense strand
aaggaugaccgucgggaca

SEQ ID NO: 2278387 - RNA, 19 nt, Homo sapiens
  misc_RNA (1)...(19): siRNA sense strand
gaaaauuaugacagagguu

SEQ ID NO: 2278388 - RNA, 19 nt, Homo sapiens
  misc_RNA (1)...(19): siRNA sense strand
gcuccuaagggaccacaaa

SEQ ID NO: 2278389 - RNA, 19 nt, Homo sapiens
  misc_RNA (1)...(19): siRNA sense strand
agaugauaguauuggauga

SEQ ID NO: 2278390 - RNA, 19 nt, Homo sapiens
  misc_RNA (1)...(19): siRNA sense strand
gccuguagaagaugagaaa

SEQ ID NO: 2278391 - RNA, 19 nt, Homo sapiens
  misc_RNA (1)...(19): siRNA sense strand
ggauauuauucucacgcua

SEQ ID NO: 2278392 - RNA, 19 nt, Homo sapiens
  misc_RNA (1)...(19): siRNA sense strand
uuugaaaugggcugggaaa

SEQ ID NO: 2278393 - RNA, 19 nt, Homo sapiens
  misc_RNA (1)...(19): siRNA sense strand
uuaagaaaggaguagcaaa

SEQ ID NO: 2278394 - RNA, 19 nt, Homo sapiens
  misc_RNA (1)...(19): siRNA sense strand
ugauauacaagcugugaau

SEQ ID NO: 2278395 - RNA, 19 nt, Homo sapiens
  misc_RNA (1)...(19): siRNA sense strand
agauuaaccugauggagga

SEQ ID NO: 2278396 - RNA, 19 nt, Homo sapiens
  misc_RNA (1)...(19): siRNA sense strand
cgaaauggcuuaugccgca

SEQ ID NO: 2278397 - RNA, 19 nt, Homo sapiens
  misc_RNA (1)...(19): siRNA sense strand
gcacagaguaugaccacca

SEQ ID NO: 2278398 - RNA, 19 nt, Homo sapiens
  misc_RNA (1)...(19): siRNA sense strand
cuccaaaggaucuaagaau

SEQ ID NO: 2278399 - RNA, 19 nt, Homo sapiens
  misc_RNA (1)...(19): siRNA sense strand
aggaaaugaguuugaagau

SEQ ID NO: 2278400 - RNA, 19 nt, Homo sapiens
  misc_RNA (1)...(19): siRNA sense strand
ugcagauaauggaggauau

SEQ ID NO: 2278401 - RNA, 19 nt, Homo sapiens
  misc_RNA (1)...(19): siRNA sense strand
uaguauuggaugaggcaga

SEQ ID NO: 2278402 - RNA, 19 nt, Homo sapiens
  misc_RNA (1)...(19): siRNA sense strand
cacaaaaggaaaugaguuu

SEQ ID NO: 2278403 - RNA, 19 nt, Homo sapiens
  misc_RNA (1)...(19): siRNA sense strand
gaguugaauugcuagccaa

SEQ ID NO: 2278404 - RNA, 19 nt, Homo sapiens
  misc_RNA (1)...(19): siRNA sense strand
agauaaaccagucgaucau

SEQ ID NO: 2278405 - RNA, 19 nt, Homo sapiens
  misc_RNA (1)...(19): siRNA sense strand
gugcagauaauggaggaua

SEQ ID NO: 2278406 - RNA, 19 nt, Homo sapiens
  misc_RNA (1)...(19): siRNA sense strand
cuauucaggaggagagcau

SEQ ID NO: 2278407 - RNA, 19 nt, Homo sapiens
  misc_RNA (1)...(19): siRNA sense strand
cauaaugaggcuugaugau

SEQ ID NO: 2278408 - RNA, 19 nt, Homo sapiens
  misc_RNA (1)...(19): siRNA sense strand
caaagcuggcagagaccua

SEQ ID NO: 2278409 - RNA, 19 nt, Homo sapiens
  misc_RNA (1)...(19): siRNA sense strand
ccaucguauuggaagauca

SEQ ID NO: 2278410 - RNA, 19 nt, Homo sapiens
  misc_RNA (1)...(19): siRNA sense strand
aggacaauauacaagcaau

SEQ ID NO: 2278411 - RNA, 19 nt, Homo sapiens
  misc_RNA (1)...(19): siRNA sense strand
agaaacccuaugagauuaa

SEQ ID NO: 2278412 - RNA, 19 nt, Homo sapiens
  misc_RNA (1)...(19): siRNA sense strand
gggcacacagacacagcaa

SEQ ID NO: 2278413 - RNA, 19 nt, Homo sapiens
  misc_RNA (1)...(19): siRNA sense strand
cagaugaaccagcugaaaa

SEQ ID NO: 2278414 - RNA, 19 nt, Homo sapiens
  misc_RNA (1)...(19): siRNA sense strand
aaaccuauuccgagcaaca

SEQ ID NO: 2278415 - RNA, 19 nt, Homo sapiens
  misc_RNA (1)...(19): siRNA sense strand
ugaaaaguauugaggagca

SEQ ID NO: 2278416 - RNA, 19 nt, Homo sapiens
  misc_RNA (1)...(19): siRNA sense strand
cgggaguuacugaugggaa

SEQ ID NO: 2278417 - RNA, 19 nt, Homo sapiens
  misc_RNA (1)...(19): siRNA sense strand
ggaacuaacucugaaggga

SEQ ID NO: 2278418 - RNA, 19 nt, Homo sapiens
  misc_RNA (1)...(19): siRNA sense strand
uggaugaggcagauaaguu

SEQ ID NO: 2278419 - RNA, 19 nt, Homo sapiens
  misc_RNA (1)...(19): siRNA sense strand
cuaaaaugaggcaggaaca

SEQ ID NO: 2278420 - RNA, 19 nt, Homo sapiens
  misc_RNA (1)...(19): siRNA sense strand
auauacaagcugugaaugu

SEQ ID NO: 2278421 - RNA, 19 nt, Homo sapiens
  misc_RNA (1)...(19): siRNA sense strand
ucacauaugaugaucgcuu

SEQ ID NO: 2278422 - RNA, 19 nt, Homo sapiens
  misc_RNA (1)...(19): siRNA sense strand
aaggaaaugaguuugaaga

SEQ ID NO: 2278423 - RNA, 19 nt, Homo sapiens
  misc_RNA (1)...(19): siRNA sense strand
cuuuggucaucuuggcuua

SEQ ID NO: 2278424 - RNA, 19 nt, Homo sapiens
  misc_RNA (1)...(19): siRNA sense strand
auacagugcacguggugau

SEQ ID NO: 2278425 - RNA, 19 nt, Homo sapiens
  misc_RNA (1)...(19): siRNA sense strand
ccaauuuacgagaugacau

SEQ ID NO: 2278426 - RNA, 19 nt, Homo sapiens
  misc_RNA (1)...(19): siRNA sense strand
ccacaaaaggaaaugaguu

SEQ ID NO: 2278427 - RNA, 19 nt, Homo sapiens
  misc_RNA (1)...(19): siRNA sense strand
gguagggauaucuuagcua

SEQ ID NO: 2278428 - RNA, 19 nt, Homo sapiens
  misc_RNA (1)...(19): siRNA sense strand
cuguagaagaugagaaacc

SEQ ID NO: 2278429 - RNA, 19 nt, Homo sapiens
  misc_RNA (1)...(19): siRNA sense strand
agaagaaauggaagagaaa

SEQ ID NO: 2278430 - RNA, 19 nt, Homo sapiens
  misc_RNA (1)...(19): siRNA sense strand
cgauaaaguaauugagcca

SEQ ID NO: 2278431 - RNA, 19 nt, Homo sapiens
  misc_RNA (1)...(19): siRNA sense strand
uggaagagaaacuggcaaa

SEQ ID NO: 2278432 - RNA, 19 nt, Homo sapiens
  misc_RNA (1)...(19): siRNA sense strand
ccgaaaaguaggaaagaau

SEQ ID NO: 2278433 - RNA, 19 nt, Homo sapiens
  misc_RNA (1)...(19): siRNA sense strand
agaaagagcucaaaggugu

SEQ ID NO: 2278434 - RNA, 19 nt, Homo sapiens
  misc_RNA (1)...(19): siRNA sense strand
guaaugaagaacaggaaga

SEQ ID NO: 2278435 - RNA, 19 nt, Homo sapiens
  misc_RNA (1)...(19): siRNA sense strand
caucauugguggaaaggau

SEQ ID NO: 2278436 - RNA, 19 nt, Homo sapiens
  misc_RNA (1)...(19): siRNA sense strand
gguacaaagaggaugguga

SEQ ID NO: 2278437 - RNA, 19 nt, Homo sapiens
  misc_RNA (1)...(19): siRNA sense strand
ggcaaagcaucgggagaaa

SEQ ID NO: 2278438 - RNA, 19 nt, Homo sapiens
  misc_RNA (1)...(19): siRNA sense strand
ccaaugacgaaguggaaga

SEQ ID NO: 2278439 - RNA, 19 nt, Homo sapiens
  misc_RNA (1)...(19): siRNA sense strand
aagaagaagacgaugaaga

SEQ ID NO: 2278440 - RNA, 19 nt, Homo sapiens
  misc_RNA (1)...(19): siRNA sense strand
gggaugaagaagaggagca

SEQ ID NO: 2278441 - RNA, 19 nt, Homo sapiens
  misc_RNA (1)...(19): siRNA sense strand
augaagaagaggagcaaca

SEQ ID NO: 2278442 - RNA, 19 nt, Homo sapiens
  misc_RNA (1)...(19): siRNA sense strand
ccuuugagguucuccgaaa

SEQ ID NO: 2278443 - RNA, 19 nt, Homo sapiens
  misc_RNA (1)...(19): siRNA sense strand
ccacuuuggaacagaacua

SEQ ID NO: 2278444 - RNA, 19 nt, Homo sapiens
  misc_RNA (1)...(19): siRNA sense strand
augaagaacaggaagaaga

SEQ ID NO: 2278445 - RNA, 19 nt, Homo sapiens
  misc_RNA (1)...(19): siRNA sense strand
augaagaagaaauggaaga

SEQ ID NO: 2278446 - RNA, 19 nt, Homo sapiens
  misc_RNA (1)...(19): siRNA sense strand
acagagaugaggaggaaga

SEQ ID NO: 2278447 - RNA, 19 nt, Homo sapiens
  misc_RNA (1)...(19): siRNA sense strand
aagaagaagaagacgauga

SEQ ID NO: 2278448 - RNA, 19 nt, Homo sapiens
  misc_RNA (1)...(19): siRNA sense strand
aagaaauggaagagaaacu

SEQ ID NO: 2278449 - RNA, 19 nt, Homo sapiens
  misc_RNA (1)...(19): siRNA sense strand
ccaacaagagacaagcaaa

SEQ ID NO: 2278450 - RNA, 19 nt, Homo sapiens
  misc_RNA (1)...(19): siRNA sense strand
cagcagcaaaugagaagaa

SEQ ID NO: 2278451 - RNA, 19 nt, Homo sapiens
  misc_RNA (1)...(19): siRNA sense strand
gcucaaagguguuucgucu

SEQ ID NO: 2278452 - RNA, 19 nt, Homo sapiens
  misc_RNA (1)...(19): siRNA sense strand
augacgaaguggaagaauu

SEQ ID NO: 2278453 - RNA, 19 nt, Homo sapiens
  misc_RNA (1)...(19): siRNA sense strand
aagaagacgaugaagaaga

SEQ ID NO: 2278454 - RNA, 19 nt, Homo sapiens
  misc_RNA (1)...(19): siRNA sense strand
agaaaguaccugugaagga

SEQ ID NO: 2278455 - RNA, 19 nt, Homo sapiens
  misc_RNA (1)...(19): siRNA sense strand
agcucaagaucaagauuua

SEQ ID NO: 2278456 - RNA, 19 nt, Homo sapiens
  misc_RNA (1)...(19): siRNA sense strand
aggaagaagaagaagacga

SEQ ID NO: 2278457 - RNA, 19 nt, Homo sapiens
  misc_RNA (1)...(19): siRNA sense strand
ccaacaagucauaacagaa

SEQ ID NO: 2278458 - RNA, 19 nt, Homo sapiens
  misc_RNA (1)...(19): siRNA sense strand
aaguauuugaugugagcaa

SEQ ID NO: 2278459 - RNA, 19 nt, Homo sapiens
  misc_RNA (1)...(19): siRNA sense strand
gcugauuucuugaagguga

SEQ ID NO: 2278460 - RNA, 19 nt, Homo sapiens
  misc_RNA (1)...(19): siRNA sense strand
ucaaggaugcugaggaaga

SEQ ID NO: 2278461 - RNA, 19 nt, Homo sapiens
  misc_RNA (1)...(19): siRNA sense strand
gcaacagugaaguggaaga

SEQ ID NO: 2278462 - RNA, 19 nt, Homo sapiens
  misc_RNA (1)...(19): siRNA sense strand
ugauacugguaaugaagaa

SEQ ID NO: 2278463 - RNA, 19 nt, Homo sapiens
  misc_RNA (1)...(19): siRNA sense strand
agaacaggaagaagaagaa

SEQ ID NO: 2278464 - RNA, 19 nt, Homo sapiens
  misc_RNA (1)...(19): siRNA sense strand
aggucgagcgcgagaguau

SEQ ID NO: 2278465 - RNA, 19 nt, Homo sapiens
  misc_RNA (1)...(19): siRNA sense strand
gaaagaaagggaagccaga

SEQ ID NO: 2278466 - RNA, 19 nt, Homo sapiens
  misc_RNA (1)...(19): siRNA sense strand
ccguaagagagcugcagua

SEQ ID NO: 2278467 - RNA, 19 nt, Homo sapiens
  misc_RNA (1)...(19): siRNA sense strand
cuguauaucugaugaagga

SEQ ID NO: 2278468 - RNA, 19 nt, Homo sapiens
  misc_RNA (1)...(19): siRNA sense strand
ugaagaacaggaagaagaa

SEQ ID NO: 2278469 - RNA, 19 nt, Homo sapiens
  misc_RNA (1)...(19): siRNA sense strand
ggaugaagaagaggagcaa

SEQ ID NO: 2278470 - RNA, 19 nt, Homo sapiens
  misc_RNA (1)...(19): siRNA sense strand
gauagugaagauauggaaa

SEQ ID NO: 2278471 - RNA, 19 nt, Homo sapiens
  misc_RNA (1)...(19): siRNA sense strand
ugaggaagcaacugaagaa

SEQ ID NO: 2278472 - RNA, 19 nt, Homo sapiens
  misc_RNA (1)...(19): siRNA sense strand
aaacacagccauaggcaga

SEQ ID NO: 2278473 - RNA, 19 nt, Homo sapiens
  misc_RNA (1)...(19): siRNA sense strand
aaaagaagcaguugaggaa

SEQ ID NO: 2278474 - RNA, 19 nt, Homo sapiens
  misc_RNA (1)...(19): siRNA sense strand
cgaugaagaagaaauggaa

SEQ ID NO: 2278475 - RNA, 19 nt, Homo sapiens
  misc_RNA (1)...(19): siRNA sense strand
gcacagaagaucaaggaag

SEQ ID NO: 2278476 - RNA, 19 nt, Homo sapiens
  misc_RNA (1)...(19): siRNA sense strand
aggcaaagcaucgggagaa

SEQ ID NO: 2278477 - RNA, 19 nt, Homo sapiens
  misc_RNA (1)...(19): siRNA sense strand
acucccagauccagauaaa

SEQ ID NO: 2278478 - RNA, 19 nt, Homo sapiens
  misc_RNA (1)...(19): siRNA sense strand
aggaagaagaugcugauuu

SEQ ID NO: 2278479 - RNA, 19 nt, Homo sapiens
  misc_RNA (1)...(19): siRNA sense strand
ccagauaaauacagaagcu

SEQ ID NO: 2278480 - RNA, 19 nt, Homo sapiens
  misc_RNA (1)...(19): siRNA sense strand
ccguuuggugacugagaua

SEQ ID NO: 2278481 - RNA, 19 nt, Homo sapiens
  misc_RNA (1)...(19): siRNA sense strand
aagaacaggaagaagaaga

SEQ ID NO: 2278482 - RNA, 19 nt, Homo sapiens
  misc_RNA (1)...(19): siRNA sense strand
acauaaagcaaaggaaaga

SEQ ID NO: 2278483 - RNA, 19 nt, Homo sapiens
  misc_RNA (1)...(19): siRNA sense strand
ggauaugggcuuugcugau

SEQ ID NO: 2278484 - RNA, 19 nt, Homo sapiens
  misc_RNA (1)...(19): siRNA sense strand
ccuucuaaauccagcauca

SEQ ID NO: 2278485 - RNA, 19 nt, Homo sapiens
  misc_RNA (1)...(19): siRNA sense strand
aagggaagccagaagagaa

SEQ ID NO: 2278486 - RNA, 19 nt, Homo sapiens
  misc_RNA (1)...(19): siRNA sense strand
agaagaagaagacgaugaa

SEQ ID NO: 2278487 - RNA, 19 nt, Homo sapiens
  misc_RNA (1)...(19): siRNA sense strand
gaaacuggcaaaagcaaaa

SEQ ID NO: 2278488 - RNA, 19 nt, Homo sapiens
  misc_RNA (1)...(19): siRNA sense strand
ccagaagagaagccaacaa

SEQ ID NO: 2278489 - RNA, 19 nt, Homo sapiens
  misc_RNA (1)...(19): siRNA sense strand
agagacaagcaaaggccaa

SEQ ID NO: 2278490 - RNA, 19 nt, Homo sapiens
  misc_RNA (1)...(19): siRNA sense strand
agcaaaggccaaagaugaa

SEQ ID NO: 2278491 - RNA, 19 nt, Homo sapiens
  misc_RNA (1)...(19): siRNA sense strand
aagaaggccaggugggaca

SEQ ID NO: 2278492 - RNA, 19 nt, Homo sapiens
  misc_RNA (1)...(19): siRNA sense strand
aggaagaagaagaaagaga

SEQ ID NO: 2278493 - RNA, 19 nt, Homo sapiens
  misc_RNA (1)...(19): siRNA sense strand
agaagaaagaagagaggga

SEQ ID NO: 2278494 - RNA, 19 nt, Homo sapiens
  misc_RNA (1)...(19): siRNA sense strand
agaaaggagcugaggagga

SEQ ID NO: 2278495 - RNA, 19 nt, Homo sapiens
  misc_RNA (1)...(19): siRNA sense strand
ccuuacaugaugagaaaga

SEQ ID NO: 2278496 - RNA, 19 nt, Homo sapiens
  misc_RNA (1)...(19): siRNA sense strand
cugaggaggagaagccaaa

SEQ ID NO: 2278497 - RNA, 19 nt, Homo sapiens
  misc_RNA (1)...(19): siRNA sense strand
gggaagcguuugaaggcca

SEQ ID NO: 2278498 - RNA, 19 nt, Homo sapiens
  misc_RNA (1)...(19): siRNA sense strand
gcgcacaaccugaucgaca

SEQ ID NO: 2278499 - RNA, 19 nt, Homo sapiens
  misc_RNA (1)...(19): siRNA sense strand
aagaagaaagagagaaucu

SEQ ID NO: 2278500 - RNA, 19 nt, Homo sapiens
  misc_RNA (1)...(19): siRNA sense strand
acgagagugaugaggagaa

SEQ ID NO: 2278501 - RNA, 19 nt, Homo sapiens
  misc_RNA (1)...(19): siRNA sense strand
gagaagagcaugaucagca

SEQ ID NO: 2278502 - RNA, 19 nt, Homo sapiens
  misc_RNA (1)...(19): siRNA sense strand
ucgccgaauacgagaguga

SEQ ID NO: 2278503 - RNA, 19 nt, Homo sapiens
  misc_RNA (1)...(19): siRNA sense strand
uggagaaauucguggcugu

SEQ ID NO: 2278504 - RNA, 19 nt, Homo sapiens
  misc_RNA (1)...(19): siRNA sense strand
aaagaugagugaagggauc

SEQ ID NO: 2278505 - RNA, 19 nt, Homo sapiens
  misc_RNA (1)...(19): siRNA sense strand
guguggugauggugggcau

SEQ ID NO: 2278506 - RNA, 19 nt, Homo sapiens
  misc_RNA (1)...(19): siRNA sense strand
aggccaagaaccugaugua

SEQ ID NO: 2278507 - RNA, 19 nt, Homo sapiens
  misc_RNA (1)...(19): siRNA sense strand
gagaagaacgccugcagca

SEQ ID NO: 2278508 - RNA, 19 nt, Homo sapiens
  misc_RNA (1)...(19): siRNA sense strand
gaggagaagccaaagagga

SEQ ID NO: 2278509 - RNA, 19 nt, Homo sapiens
  misc_RNA (1)...(19): siRNA sense strand
ccccuuacaugaugagaaa

SEQ ID NO: 2278510 - RNA, 19 nt, Homo sapiens
  misc_RNA (1)...(19): siRNA sense strand
gaaagaugagugaagggau

SEQ ID NO: 2278511 - RNA, 19 nt, Homo sapiens
  misc_RNA (1)...(19): siRNA sense strand
gaagaaaggagcugaggag

SEQ ID NO: 2278512 - RNA, 19 nt, Homo sapiens
  misc_RNA (1)...(19): siRNA sense strand
gcccaaguggugaaggaau

SEQ ID NO: 2278513 - RNA, 19 nt, Homo sapiens
  misc_RNA (1)...(19): siRNA sense strand
aguuugugcaugaggugaa

SEQ ID NO: 2278514 - RNA, 19 nt, Homo sapiens
  misc_RNA (1)...(19): siRNA sense strand
ccaaagaggaggaggcagg

SEQ ID NO: 2278515 - RNA, 19 nt, Homo sapiens
  misc_RNA (1)...(19): siRNA sense strand
ggaagcguuugaaggccaa

SEQ ID NO: 2278516 - RNA, 19 nt, Homo sapiens
  misc_RNA (1)...(19): siRNA sense strand
gcugaggaggagaagccaa

SEQ ID NO: 2278517 - RNA, 19 nt, Homo sapiens
  misc_RNA (1)...(19): siRNA sense strand
gugacuuugaacagaagaa

SEQ ID NO: 2278518 - RNA, 19 nt, Homo sapiens
  misc_RNA (1)...(19): siRNA sense strand
aguuugugcagaagaaaga

SEQ ID NO: 2278519 - RNA, 19 nt, Homo sapiens
  misc_RNA (1)...(19): siRNA sense strand
aggugaaggacauggagca

SEQ ID NO: 2278520 - RNA, 19 nt, Homo sapiens
  misc_RNA (1)...(19): siRNA sense strand
gggauauuugagaguccaa

SEQ ID NO: 2278521 - RNA, 19 nt, Homo sapiens
  misc_RNA (1)...(19): siRNA sense strand
cagggagaugcuagagaca

SEQ ID NO: 2278522 - RNA, 19 nt, Homo sapiens
  misc_RNA (1)...(19): siRNA sense strand
ccaucaggcaccagaagga

SEQ ID NO: 2278523 - RNA, 19 nt, Homo sapiens
  misc_RNA (1)...(19): siRNA sense strand
guuugaaggccaagaaccu

SEQ ID NO: 2278524 - RNA, 19 nt, Homo sapiens
  misc_RNA (1)...(19): siRNA sense strand
ccaggaggaagcagcgaga

SEQ ID NO: 2278525 - RNA, 19 nt, Homo sapiens
  misc_RNA (1)...(19): siRNA sense strand
gggagaugcuagagacagg

SEQ ID NO: 2278526 - RNA, 19 nt, Homo sapiens
  misc_RNA (1)...(19): siRNA sense strand
agaggaggaggcaggagaa

SEQ ID NO: 2278527 - RNA, 19 nt, Homo sapiens
  misc_RNA (1)...(19): siRNA sense strand
gggacggagcugaagacca

SEQ ID NO: 2278528 - RNA, 19 nt, Homo sapiens
  misc_RNA (1)...(19): siRNA sense strand
gauacugugagaagagcau

SEQ ID NO: 2278529 - RNA, 19 nt, Homo sapiens
  misc_RNA (1)...(19): siRNA sense strand
aggaagaagaagaaagaga

SEQ ID NO: 2278530 - RNA, 19 nt, Homo sapiens
  misc_RNA (1)...(19): siRNA sense strand
agaagaaagaagagaggga

SEQ ID NO: 2278531 - RNA, 19 nt, Homo sapiens
  misc_RNA (1)...(19): siRNA sense strand
agaaaggagcugaggagga

SEQ ID NO: 2278532 - RNA, 19 nt, Homo sapiens
  misc_RNA (1)...(19): siRNA sense strand
ccuuacaugaugagaaaga

SEQ ID NO: 2278533 - RNA, 19 nt, Homo sapiens
  misc_RNA (1)...(19): siRNA sense strand
cugaggaggagaagccaaa

SEQ ID NO: 2278534 - RNA, 19 nt, Homo sapiens
  misc_RNA (1)...(19): siRNA sense strand
gggaagcguuugaaggcca

SEQ ID NO: 2278535 - RNA, 19 nt, Homo sapiens
  misc_RNA (1)...(19): siRNA sense strand
gcgcacaaccugaucgaca

SEQ ID NO: 2278536 - RNA, 19 nt, Homo sapiens
  misc_RNA (1)...(19): siRNA sense strand
aagaagaaagagagaaucu

SEQ ID NO: 2278537 - RNA, 19 nt, Homo sapiens
  misc_RNA (1)...(19): siRNA sense strand
acgagagugaugaggagaa

SEQ ID NO: 2278538 - RNA, 19 nt, Homo sapiens
  misc_RNA (1)...(19): siRNA sense strand
gagaagagcaugaucagca

SEQ ID NO: 2278539 - RNA, 19 nt, Homo sapiens
  misc_RNA (1)...(19): siRNA sense strand
ucgccgaauacgagaguga

SEQ ID NO: 2278540 - RNA, 19 nt, Homo sapiens
  misc_RNA (1)...(19): siRNA sense strand
uggagaaauucguggcugu

SEQ ID NO: 2278541 - RNA, 19 nt, Homo sapiens
  misc_RNA (1)...(19): siRNA sense strand
aaagaugagugaagggauc

SEQ ID NO: 2278542 - RNA, 19 nt, Homo sapiens
  misc_RNA (1)...(19): siRNA sense strand
guguggugauggugggcau

SEQ ID NO: 2278543 - RNA, 19 nt, Homo sapiens
  misc_RNA (1)...(19): siRNA sense strand
aggccaagaaccugaugua

SEQ ID NO: 2278544 - RNA, 19 nt, Homo sapiens
  misc_RNA (1)...(19): siRNA sense strand
gagaagaacgccugcagca

SEQ ID NO: 2278545 - RNA, 19 nt, Homo sapiens
  misc_RNA (1)...(19): siRNA sense strand
gaggagaagccaaagagga

SEQ ID NO: 2278546 - RNA, 19 nt, Homo sapiens
  misc_RNA (1)...(19): siRNA sense strand
ccccuuacaugaugagaaa

SEQ ID NO: 2278547 - RNA, 19 nt, Homo sapiens
  misc_RNA (1)...(19): siRNA sense strand
gaaagaugagugaagggau

SEQ ID NO: 2278548 - RNA, 19 nt, Homo sapiens
  misc_RNA (1)...(19): siRNA sense strand
gaagaaaggagcugaggag

SEQ ID NO: 2278549 - RNA, 19 nt, Homo sapiens
  misc_RNA (1)...(19): siRNA sense strand
gcccaaguggugaaggaau

SEQ ID NO: 2278550 - RNA, 19 nt, Homo sapiens
  misc_RNA (1)...(19): siRNA sense strand
aguuugugcaugaggugaa

SEQ ID NO: 2278551 - RNA, 19 nt, Homo sapiens
  misc_RNA (1)...(19): siRNA sense strand
ccaaagaggaggaggcagg

SEQ ID NO: 2278552 - RNA, 19 nt, Homo sapiens
  misc_RNA (1)...(19): siRNA sense strand
ggaagcguuugaaggccaa

SEQ ID NO: 2278553 - RNA, 19 nt, Homo sapiens
  misc_RNA (1)...(19): siRNA sense strand
gcugaggaggagaagccaa

SEQ ID NO: 2278554 - RNA, 19 nt, Homo sapiens
  misc_RNA (1)...(19): siRNA sense strand
gugacuuugaacagaagaa

SEQ ID NO: 2278555 - RNA, 19 nt, Homo sapiens
  misc_RNA (1)...(19): siRNA sense strand
aguuugugcagaagaaaga

SEQ ID NO: 2278556 - RNA, 19 nt, Homo sapiens
  misc_RNA (1)...(19): siRNA sense strand
aggugaaggacauggagca

SEQ ID NO: 2278557 - RNA, 19 nt, Homo sapiens
  misc_RNA (1)...(19): siRNA sense strand
gggauauuugagaguccaa

SEQ ID NO: 2278558 - RNA, 19 nt, Homo sapiens
  misc_RNA (1)...(19): siRNA sense strand
cagggagaugcuagagaca

SEQ ID NO: 2278559 - RNA, 19 nt, Homo sapiens
  misc_RNA (1)...(19): siRNA sense strand
ccaucaggcaccagaagga

SEQ ID NO: 2278560 - RNA, 19 nt, Homo sapiens
  misc_RNA (1)...(19): siRNA sense strand
guuugaaggccaagaaccu

SEQ ID NO: 2278561 - RNA, 19 nt, Homo sapiens
  misc_RNA (1)...(19): siRNA sense strand
ccaggaggaagcagcgaga

SEQ ID NO: 2278562 - RNA, 19 nt, Homo sapiens
  misc_RNA (1)...(19): siRNA sense strand
gggagaugcuagagacagg

SEQ ID NO: 2278563 - RNA, 19 nt, Homo sapiens
  misc_RNA (1)...(19): siRNA sense strand
agaggaggaggcaggagaa

SEQ ID NO: 2278564 - RNA, 19 nt, Homo sapiens
  misc_RNA (1)...(19): siRNA sense strand
gggacggagcugaagacca

SEQ ID NO: 2278565 - RNA, 19 nt, Homo sapiens
  misc_RNA (1)...(19): siRNA sense strand
gauacugugagaagagcau

SEQ ID NO: 2278566 - RNA, 19 nt, Homo sapiens
  misc_RNA (1)...(19): siRNA sense strand
aggaagaagaagaaagaga

SEQ ID NO: 2278567 - RNA, 19 nt, Homo sapiens
  misc_RNA (1)...(19): siRNA sense strand
agaagaaagaagagaggga

SEQ ID NO: 2278568 - RNA, 19 nt, Homo sapiens
  misc_RNA (1)...(19): siRNA sense strand
ccuuacaugaugagaaaga

SEQ ID NO: 2278569 - RNA, 19 nt, Homo sapiens
  misc_RNA (1)...(19): siRNA sense strand
aagaagaaagagagaaucu

SEQ ID NO: 2278570 - RNA, 19 nt, Homo sapiens
  misc_RNA (1)...(19): siRNA sense strand
acgagagugaugaggagaa

SEQ ID NO: 2278571 - RNA, 19 nt, Homo sapiens
  misc_RNA (1)...(19): siRNA sense strand
ucgccgaauacgagaguga

SEQ ID NO: 2278572 - RNA, 19 nt, Homo sapiens
  misc_RNA (1)...(19): siRNA sense strand
gagaagaacgccugcagca

SEQ ID NO: 2278573 - RNA, 19 nt, Homo sapiens
  misc_RNA (1)...(19): siRNA sense strand
ccccuuacaugaugagaaa

SEQ ID NO: 2278574 - RNA, 19 nt, Homo sapiens
  misc_RNA (1)...(19): siRNA sense strand
gugacuuugaacagaagaa

SEQ ID NO: 2278575 - RNA, 19 nt, Homo sapiens
  misc_RNA (1)...(19): siRNA sense strand
aguuugugcagaagaaaga

SEQ ID NO: 2278576 - RNA, 19 nt, Homo sapiens
  misc_RNA (1)...(19): siRNA sense strand
gggauauuugagaguccaa

SEQ ID NO: 2278577 - RNA, 19 nt, Homo sapiens
  misc_RNA (1)...(19): siRNA sense strand
cagggagaugcuagagaca

SEQ ID NO: 2278578 - RNA, 19 nt, Homo sapiens
  misc_RNA (1)...(19): siRNA sense strand
ccaggaggaagcagcgaga

SEQ ID NO: 2278579 - RNA, 19 nt, Homo sapiens
  misc_RNA (1)...(19): siRNA sense strand
gggagaugcuagagacagg

SEQ ID NO: 2278580 - RNA, 19 nt, Homo sapiens
  misc_RNA (1)...(19): siRNA sense strand
aaagagaggaagugcguca

SEQ ID NO: 2278581 - RNA, 19 nt, Homo sapiens
  misc_RNA (1)...(19): siRNA sense strand
aguaaugagaaaugggcau

SEQ ID NO: 2278582 - RNA, 19 nt, Homo sapiens
  misc_RNA (1)...(19): siRNA sense strand
gacauaaagaagacggaga

SEQ ID NO: 2278583 - RNA, 19 nt, Homo sapiens
  misc_RNA (1)...(19): siRNA sense strand
ggaagaauguggccaggca

SEQ ID NO: 2278584 - RNA, 19 nt, Homo sapiens
  misc_RNA (1)...(19): siRNA sense strand
ccuugaacugggacauaaa

SEQ ID NO: 2278585 - RNA, 19 nt, Homo sapiens
  misc_RNA (1)...(19): siRNA sense strand
ccaacaggugcuugaccaa

SEQ ID NO: 2278586 - RNA, 19 nt, Homo sapiens
  misc_RNA (1)...(19): siRNA sense strand
ccauaguggaugaugacga

SEQ ID NO: 2278587 - RNA, 19 nt, Homo sapiens
  misc_RNA (1)...(19): siRNA sense strand
gcuugaccaaagagaggaa

SEQ ID NO: 2278588 - RNA, 19 nt, Homo sapiens
  misc_RNA (1)...(19): siRNA sense strand
caggauuuggaguugguua

SEQ ID NO: 2278589 - RNA, 19 nt, Homo sapiens
  misc_RNA (1)...(19): siRNA sense strand
gugaggagguggaugcagu

SEQ ID NO: 2278590 - RNA, 19 nt, Homo sapiens
  misc_RNA (1)...(19): siRNA sense strand
cuuacugcacugagggaga

SEQ ID NO: 2278591 - RNA, 19 nt, Homo sapiens
  misc_RNA (1)...(19): siRNA sense strand
ccaaagagaggaagugcgu

SEQ ID NO: 2278592 - RNA, 19 nt, Homo sapiens
  misc_RNA (1)...(19): siRNA sense strand
aggaagugcgucaguccaa

SEQ ID NO: 2278593 - RNA, 19 nt, Homo sapiens
  misc_RNA (1)...(19): siRNA sense strand
gcaggguugaaguggaaga

SEQ ID NO: 2278594 - RNA, 19 nt, Homo sapiens
  misc_RNA (1)...(19): siRNA sense strand
uggccaggcagcugaaaga

SEQ ID NO: 2278595 - RNA, 19 nt, Homo sapiens
  misc_RNA (1)...(19): siRNA sense strand
augcaguagacacggguau

SEQ ID NO: 2278596 - RNA, 19 nt, Homo sapiens
  misc_RNA (1)...(19): siRNA sense strand
agacaagguugaagcggaa

SEQ ID NO: 2278597 - RNA, 19 nt, Homo sapiens
  misc_RNA (1)...(19): siRNA sense strand
ggaagcagccugugcggaa

SEQ ID NO: 2278598 - RNA, 19 nt, Homo sapiens
  misc_RNA (1)...(19): siRNA sense strand
gaagagaaguggacuggga

SEQ ID NO: 2278599 - RNA, 19 nt, Homo sapiens
  misc_RNA (1)...(19): siRNA sense strand
cagacaagguugaagcgga

SEQ ID NO: 2278600 - RNA, 19 nt, Homo sapiens
  misc_RNA (1)...(19): siRNA sense strand
ccaucaaccccuacaguaa

SEQ ID NO: 2278601 - RNA, 19 nt, Homo sapiens
  misc_RNA (1)...(19): siRNA sense strand
gugcauuucacgagccaca

SEQ ID NO: 2278602 - RNA, 19 nt, Homo sapiens
  misc_RNA (1)...(19): siRNA sense strand
cagaagcccaagagcguga

SEQ ID NO: 2278603 - RNA, 19 nt, Homo sapiens
  misc_RNA (1)...(19): siRNA sense strand
agucccgauuucagagcaa

SEQ ID NO: 2278604 - RNA, 19 nt, Homo sapiens
  misc_RNA (1)...(19): siRNA sense strand
ucaucgagguagagacuca

SEQ ID NO: 2278605 - RNA, 19 nt, Homo sapiens
  misc_RNA (1)...(19): siRNA sense strand
ugggagaagugcauggaca

SEQ ID NO: 2278606 - RNA, 19 nt, Homo sapiens
  misc_RNA (1)...(19): siRNA sense strand
gaacagacccagaaaucca

SEQ ID NO: 2278607 - RNA, 19 nt, Homo sapiens
  misc_RNA (1)...(19): siRNA sense strand
caucuugaaucgacuggaa

SEQ ID NO: 2278608 - RNA, 19 nt, Homo sapiens
  misc_RNA (1)...(19): siRNA sense strand
ugaacugcguugagcgcuu

SEQ ID NO: 2278609 - RNA, 19 nt, Homo sapiens
  misc_RNA (1)...(19): siRNA sense strand
guugagcgcuucauugaua

SEQ ID NO: 2278610 - RNA, 19 nt, Homo sapiens
  misc_RNA (1)...(19): siRNA sense strand
uggacaagccugggccaaa

SEQ ID NO: 2278611 - RNA, 19 nt, Homo sapiens
  misc_RNA (1)...(19): siRNA sense strand
acugaacuuuguugggaga

SEQ ID NO: 2278612 - RNA, 19 nt, Homo sapiens
  misc_RNA (1)...(19): siRNA sense strand
uugugaaauacgagggcaa

SEQ ID NO: 2278613 - RNA, 19 nt, Homo sapiens
  misc_RNA (1)...(19): siRNA sense strand
ucgagaacaagaagagaau

SEQ ID NO: 2278614 - RNA, 19 nt, Homo sapiens
  misc_RNA (1)...(19): siRNA sense strand
cagacagcuuugagugaca

SEQ ID NO: 2278615 - RNA, 19 nt, Homo sapiens
  misc_RNA (1)...(19): siRNA sense strand
ggaaugagguccugugcgu

SEQ ID NO: 2278616 - RNA, 19 nt, Homo sapiens
  misc_RNA (1)...(19): siRNA sense strand
ggagaagugugguggcauc

SEQ ID NO: 2278617 - RNA, 19 nt, Homo sapiens
  misc_RNA (1)...(19): siRNA sense strand
acgugaaacuggacggcca

SEQ ID NO: 2278618 - RNA, 19 nt, Homo sapiens
  misc_RNA (1)...(19): siRNA sense strand
acugaagucaucugugaaa

SEQ ID NO: 2278619 - RNA, 19 nt, Homo sapiens
  misc_RNA (1)...(19): siRNA sense strand
uuagagaaguugaugcuga

SEQ ID NO: 2278620 - RNA, 19 nt, Homo sapiens
  misc_RNA (1)...(19): siRNA sense strand
acacagaagaucacgacga

SEQ ID NO: 2278621 - RNA, 19 nt, Homo sapiens
  misc_RNA (1)...(19): siRNA sense strand
aagguggcuucgagaacaa

SEQ ID NO: 2278622 - RNA, 19 nt, Homo sapiens
  misc_RNA (1)...(19): siRNA sense strand
ggugcuggaaggaaggaau

SEQ ID NO: 2278623 - RNA, 19 nt, Homo sapiens
  misc_RNA (1)...(19): siRNA sense strand
cauuuggaacccugaggaa

SEQ ID NO: 2278624 - RNA, 19 nt, Homo sapiens
  misc_RNA (1)...(19): siRNA sense strand
uacagaaagguuugggauu

SEQ ID NO: 2278625 - RNA, 19 nt, Homo sapiens
  misc_RNA (1)...(19): siRNA sense strand
ugaggaagcaggaggugga

SEQ ID NO: 2278626 - RNA, 19 nt, Homo sapiens
  misc_RNA (1)...(19): siRNA sense strand
gggaaugucaccaaggacu

SEQ ID NO: 2278627 - RNA, 19 nt, Homo sapiens
  misc_RNA (1)...(19): siRNA sense strand
gcuucuaagucuggugaca

SEQ ID NO: 2278628 - RNA, 19 nt, Homo sapiens
  misc_RNA (1)...(19): siRNA sense strand
ugcuuuaggcagagaacau

SEQ ID NO: 2278629 - RNA, 19 nt, Homo sapiens
  misc_RNA (1)...(19): siRNA sense strand
cugauaaguuacagcuucu

SEQ ID NO: 2278630 - RNA, 19 nt, Homo sapiens
  misc_RNA (1)...(19): siRNA sense strand
acaauaaaucugagaaacc

SEQ ID NO: 2278631 - RNA, 19 nt, Homo sapiens
  misc_RNA (1)...(19): siRNA sense strand
cagcgacggaggaugggaa

SEQ ID NO: 2278632 - RNA, 19 nt, Homo sapiens
  misc_RNA (1)...(19): siRNA sense strand
cugaauggacucugugcuu

SEQ ID NO: 2278633 - RNA, 19 nt, Homo sapiens
  misc_RNA (1)...(19): siRNA sense strand
ugagaaacccugugcucca

SEQ ID NO: 2278634 - RNA, 19 nt, Homo sapiens
  misc_RNA (1)...(19): siRNA sense strand
agguaaacgacuaaagaaa

SEQ ID NO: 2278635 - RNA, 19 nt, Homo sapiens
  misc_RNA (1)...(19): siRNA sense strand
cuauaugagugguggaaca

SEQ ID NO: 2278636 - RNA, 19 nt, Homo sapiens
  misc_RNA (1)...(19): siRNA sense strand
ucuuagaaucccagcaaua

SEQ ID NO: 2278637 - RNA, 19 nt, Homo sapiens
  misc_RNA (1)...(19): siRNA sense strand
gggaauuggaacagaagga

SEQ ID NO: 2278638 - RNA, 19 nt, Homo sapiens
  misc_RNA (1)...(19): siRNA sense strand
acguaaagccucugguaca

SEQ ID NO: 2278639 - RNA, 19 nt, Homo sapiens
  misc_RNA (1)...(19): siRNA sense strand
gaacaaaugaugugcagca

SEQ ID NO: 2278640 - RNA, 19 nt, Homo sapiens
  misc_RNA (1)...(19): siRNA sense strand
cauuguggccagagaguuu

SEQ ID NO: 2278641 - RNA, 19 nt, Homo sapiens
  misc_RNA (1)...(19): siRNA sense strand
agaaaacacccgagaagaa

SEQ ID NO: 2278642 - RNA, 19 nt, Homo sapiens
  misc_RNA (1)...(19): siRNA sense strand
cuauagcaccaaagagaau

SEQ ID NO: 2278643 - RNA, 19 nt, Homo sapiens
  misc_RNA (1)...(19): siRNA sense strand
gguaaacgacuaaagaaaa

SEQ ID NO: 2278644 - RNA, 19 nt, Homo sapiens
  misc_RNA (1)...(19): siRNA sense strand
guuauaacucagugaacau

SEQ ID NO: 2278645 - RNA, 19 nt, Homo sapiens
  misc_RNA (1)...(19): siRNA sense strand
ccaacauagccaagacuuu

SEQ ID NO: 2278646 - RNA, 19 nt, Homo sapiens
  misc_RNA (1)...(19): siRNA sense strand
ucacaguaacuaaaggcaa

SEQ ID NO: 2278647 - RNA, 19 nt, Homo sapiens
  misc_RNA (1)...(19): siRNA sense strand
aagagaguucacaggauua

SEQ ID NO: 2278648 - RNA, 19 nt, Homo sapiens
  misc_RNA (1)...(19): siRNA sense strand
acaggaggccacaggacaa

SEQ ID NO: 2278649 - RNA, 19 nt, Homo sapiens
  misc_RNA (1)...(19): siRNA sense strand
gcuucuguaucgagcauau

SEQ ID NO: 2278650 - RNA, 19 nt, Homo sapiens
  misc_RNA (1)...(19): siRNA sense strand
ccaacagguaaacgacuaa

SEQ ID NO: 2278651 - RNA, 19 nt, Homo sapiens
  misc_RNA (1)...(19): siRNA sense strand
aaacuuuacaucagccaaa

SEQ ID NO: 2278652 - RNA, 19 nt, Homo sapiens
  misc_RNA (1)...(19): siRNA sense strand
caggaaagagaaagcagau

SEQ ID NO: 2278653 - RNA, 19 nt, Homo sapiens
  misc_RNA (1)...(19): siRNA sense strand
uggaacagcuacuggugau

SEQ ID NO: 2278654 - RNA, 19 nt, Homo sapiens
  misc_RNA (1)...(19): siRNA sense strand
gagaagaaaacuggcaaua

SEQ ID NO: 2278655 - RNA, 19 nt, Homo sapiens
  misc_RNA (1)...(19): siRNA sense strand
acaagagaguucacaggau

SEQ ID NO: 2278656 - RNA, 19 nt, Homo sapiens
  misc_RNA (1)...(19): siRNA sense strand
cagagaguuuggugucaau

SEQ ID NO: 2278657 - RNA, 19 nt, Homo sapiens
  misc_RNA (1)...(19): siRNA sense strand
aggcauuuguagagauuuc

SEQ ID NO: 2278658 - RNA, 19 nt, Homo sapiens
  misc_RNA (1)...(19): siRNA sense strand
aggcuuggacaucaggaaa

SEQ ID NO: 2278659 - RNA, 19 nt, Homo sapiens
  misc_RNA (1)...(19): siRNA sense strand
accaacagguaaacgacua

SEQ ID NO: 2278660 - RNA, 19 nt, Homo sapiens
  misc_RNA (1)...(19): siRNA sense strand
cauaaaggaaguagguuuc

SEQ ID NO: 2278661 - RNA, 19 nt, Homo sapiens
  misc_RNA (1)...(19): siRNA sense strand
caucgaggaagcaggcauu

SEQ ID NO: 2278662 - RNA, 19 nt, Homo sapiens
  misc_RNA (1)...(19): siRNA sense strand
cagguaaacgacuaaagaa

SEQ ID NO: 2278663 - RNA, 19 nt, Homo sapiens
  misc_RNA (1)...(19): siRNA sense strand
uggcucuaauguugggaau

SEQ ID NO: 2278664 - RNA, 19 nt, Homo sapiens
  misc_RNA (1)...(19): siRNA sense strand
caggaaaagccuugaagca

SEQ ID NO: 2278665 - RNA, 19 nt, Homo sapiens
  misc_RNA (1)...(19): siRNA sense strand
ccgaaggagucucaugcuu

SEQ ID NO: 2278666 - RNA, 19 nt, Homo sapiens
  misc_RNA (1)...(19): siRNA sense strand
acauccaccaacagguaaa

SEQ ID NO: 2278667 - RNA, 19 nt, Homo sapiens
  misc_RNA (1)...(19): siRNA sense strand
guggaaaaguggugagauc

SEQ ID NO: 2278668 - RNA, 19 nt, Homo sapiens
  misc_RNA (1)...(19): siRNA sense strand
gcagcuaugaccugggcua

SEQ ID NO: 2278669 - RNA, 19 nt, Homo sapiens
  misc_RNA (1)...(19): siRNA sense strand
aggaggaccuugagccuga

SEQ ID NO: 2278670 - RNA, 19 nt, Homo sapiens
  misc_RNA (1)...(19): siRNA sense strand
uucaagaagauguggaaaa

SEQ ID NO: 2278671 - RNA, 19 nt, Homo sapiens
  misc_RNA (1)...(19): siRNA sense strand
cgguccaaguucaagaaga

SEQ ID NO: 2278672 - RNA, 19 nt, Homo sapiens
  misc_RNA (1)...(19): siRNA sense strand
aguucaagaagauguggaa

SEQ ID NO: 2278673 - RNA, 19 nt, Homo sapiens
  misc_RNA (1)...(19): siRNA sense strand
agccaaagaaaguccggaa

SEQ ID NO: 2278674 - RNA, 19 nt, Homo sapiens
  misc_RNA (1)...(19): siRNA sense strand
acgggaagccaaagaaagu

SEQ ID NO: 2278675 - RNA, 19 nt, Homo sapiens
  misc_RNA (1)...(19): siRNA sense strand
gcacguaccaccagcacca

SEQ ID NO: 2278676 - RNA, 19 nt, Homo sapiens
  misc_RNA (1)...(19): siRNA sense strand
uagugaacgggaagccaaa

SEQ ID NO: 2278677 - RNA, 19 nt, Homo sapiens
  misc_RNA (1)...(19): siRNA sense strand
cagccaacaacgagccuga

SEQ ID NO: 2278678 - RNA, 19 nt, Homo sapiens
  misc_RNA (1)...(19): siRNA sense strand
guucaagaagauguggaaa

SEQ ID NO: 2278679 - RNA, 19 nt, Homo sapiens
  misc_RNA (1)...(19): siRNA sense strand
gcuaaguguguuugggaaa

SEQ ID NO: 2278680 - RNA, 19 nt, Homo sapiens
  misc_RNA (1)...(19): siRNA sense strand
gggaaauagaagugaauuc

SEQ ID NO: 2278681 - RNA, 19 nt, Homo sapiens
  misc_RNA (1)...(19): siRNA sense strand
uguaaugauaccaggcaaa

SEQ ID NO: 2278682 - RNA, 19 nt, Homo sapiens
  misc_RNA (1)...(19): siRNA sense strand
ggguggaucccaaggacua

SEQ ID NO: 2278683 - RNA, 19 nt, Homo sapiens
  misc_RNA (1)...(19): siRNA sense strand
cuguaaucaucgugaagau

SEQ ID NO: 2278684 - RNA, 19 nt, Homo sapiens
  misc_RNA (1)...(19): siRNA sense strand
ugugaugacuacugggaca

SEQ ID NO: 2278685 - RNA, 19 nt, Homo sapiens
  misc_RNA (1)...(19): siRNA sense strand
ugugaugacuacugggaca

SEQ ID NO: 2278686 - RNA, 19 nt, Homo sapiens
  misc_RNA (1)...(19): siRNA sense strand
ugugaugacuacugggaca

SEQ ID NO: 2278687 - RNA, 19 nt, Homo sapiens
  misc_RNA (1)...(19): siRNA sense strand
ugugaugacuacugggaca

SEQ ID NO: 2278688 - RNA, 19 nt, Homo sapiens
  misc_RNA (1)...(19): siRNA sense strand
ccauccaggucgaggaagu

SEQ ID NO: 2278689 - RNA, 19 nt, Homo sapiens
  misc_RNA (1)...(19): siRNA sense strand
cuguaaugauaccaggcaa

SEQ ID NO: 2278690 - RNA, 19 nt, Homo sapiens
  misc_RNA (1)...(19): siRNA sense strand
ugguauaacuccuucccaa

SEQ ID NO: 2278691 - RNA, 19 nt, Homo sapiens
  misc_RNA (1)...(19): siRNA sense strand
ccuucaagcaggcagacaa

SEQ ID NO: 2278692 - RNA, 19 nt, Homo sapiens
  misc_RNA (1)...(19): siRNA sense strand
aggaaguccaguauggcaa

SEQ ID NO: 2278693 - RNA, 19 nt, Homo sapiens
  misc_RNA (1)...(19): siRNA sense strand
gggacauugaggugcaaaa

SEQ ID NO: 2278694 - RNA, 19 nt, Homo sapiens
  misc_RNA (1)...(19): siRNA sense strand
auucuaugccagugggaca

SEQ ID NO: 2278695 - RNA, 19 nt, Homo sapiens
  misc_RNA (1)...(19): siRNA sense strand
gccaagugugugugggaca

SEQ ID NO: 2278696 - RNA, 19 nt, Homo sapiens
  misc_RNA (1)...(19): siRNA sense strand
gcgugagggaugacaccua

SEQ ID NO: 2278697 - RNA, 19 nt, Homo sapiens
  misc_RNA (1)...(19): siRNA sense strand
acauugaggugcaaaacaa

SEQ ID NO: 2278698 - RNA, 19 nt, Homo sapiens
  misc_RNA (1)...(19): siRNA sense strand
uggugaagaugcugguguu

SEQ ID NO: 2278699 - RNA, 19 nt, Homo sapiens
  misc_RNA (1)...(19): siRNA sense strand
gaauggagauggcaggugu

SEQ ID NO: 2278700 - RNA, 19 nt, Homo sapiens
  misc_RNA (1)...(19): siRNA sense strand
ugugaugacagcugggaca

SEQ ID NO: 2278701 - RNA, 19 nt, Homo sapiens
  misc_RNA (1)...(19): siRNA sense strand
aguccagacacuuggccaa

SEQ ID NO: 2278702 - RNA, 19 nt, Homo sapiens
  misc_RNA (1)...(19): siRNA sense strand
ugugaugacagcugggaca

SEQ ID NO: 2278703 - RNA, 19 nt, Homo sapiens
  misc_RNA (1)...(19): siRNA sense strand
ccacagcaucacaaggaga

SEQ ID NO: 2278704 - RNA, 19 nt, Homo sapiens
  misc_RNA (1)...(19): siRNA sense strand
gguggugugcagagcguau

SEQ ID NO: 2278705 - RNA, 19 nt, Homo sapiens
  misc_RNA (1)...(19): siRNA sense strand
ccacuuuggcccugagacu

SEQ ID NO: 2278706 - RNA, 19 nt, Homo sapiens
  misc_RNA (1)...(19): siRNA sense strand
ugugaugacuccuggacca

SEQ ID NO: 2278707 - RNA, 19 nt, Homo sapiens
  misc_RNA (1)...(19): siRNA sense strand
caucacaaggagaggguuc

SEQ ID NO: 2278708 - RNA, 19 nt, Homo sapiens
  misc_RNA (1)...(19): siRNA sense strand
gcaccgugugugaugacua

SEQ ID NO: 2278709 - RNA, 19 nt, Homo sapiens
  misc_RNA (1)...(19): siRNA sense strand
gcaccgugugugaugacua

SEQ ID NO: 2278710 - RNA, 19 nt, Homo sapiens
  misc_RNA (1)...(19): siRNA sense strand
gcaccgugugugaugacua

SEQ ID NO: 2278711 - RNA, 19 nt, Homo sapiens
  misc_RNA (1)...(19): siRNA sense strand
gcaccgugugugaugacua

SEQ ID NO: 2278712 - RNA, 19 nt, Homo sapiens
  misc_RNA (1)...(19): siRNA sense strand
aauuggaggcacaccauaa

SEQ ID NO: 2278713 - RNA, 19 nt, Homo sapiens
  misc_RNA (1)...(19): siRNA sense strand
cugcagacagcuagggugu

SEQ ID NO: 2278714 - RNA, 19 nt, Homo sapiens
  misc_RNA (1)...(19): siRNA sense strand
ggugaagaugcugguguua

SEQ ID NO: 2278715 - RNA, 19 nt, Homo sapiens
  misc_RNA (1)...(19): siRNA sense strand
cuucaagcaggcagacaau

SEQ ID NO: 2278716 - RNA, 19 nt, Homo sapiens
  misc_RNA (1)...(19): siRNA sense strand
cuuacuacguggaccugaa

SEQ ID NO: 2278717 - RNA, 19 nt, Homo sapiens
  misc_RNA (1)...(19): siRNA sense strand
cgaagagggaugugggcuc

SEQ ID NO: 2278718 - RNA, 19 nt, Homo sapiens
  misc_RNA (1)...(19): siRNA sense strand
gaauggaggugacaggugu

SEQ ID NO: 2278719 - RNA, 19 nt, Homo sapiens
  misc_RNA (1)...(19): siRNA sense strand
gaauggaggugacaggugu

SEQ ID NO: 2278720 - RNA, 19 nt, Homo sapiens
  misc_RNA (1)...(19): siRNA sense strand
gaauggaggugacaggugu

SEQ ID NO: 2278721 - RNA, 19 nt, Homo sapiens
  misc_RNA (1)...(19): siRNA sense strand
gaauggaggugacaggugu

SEQ ID NO: 2278722 - RNA, 19 nt, Homo sapiens
  misc_RNA (1)...(19): siRNA sense strand
gaauggaggugacaggugu

SEQ ID NO: 2278723 - RNA, 19 nt, Homo sapiens
  misc_RNA (1)...(19): siRNA sense strand
gaauggaggugacaggugu

SEQ ID NO: 2278724 - RNA, 19 nt, Homo sapiens
  misc_RNA (1)...(19): siRNA sense strand
gggaaugaguccuaccugu

SEQ ID NO: 2278725 - RNA, 19 nt, Homo sapiens
  misc_RNA (1)...(19): siRNA sense strand
gggacauucuccagcccau

SEQ ID NO: 2278726 - RNA, 19 nt, Homo sapiens
  misc_RNA (1)...(19): siRNA sense strand
gguuccgggcugaguacua

SEQ ID NO: 2278727 - RNA, 19 nt, Homo sapiens
  misc_RNA (1)...(19): siRNA sense strand
gcuaaguguguuugggaaa

SEQ ID NO: 2278728 - RNA, 19 nt, Homo sapiens
  misc_RNA (1)...(19): siRNA sense strand
gggaaauagaagugaauuc

SEQ ID NO: 2278729 - RNA, 19 nt, Homo sapiens
  misc_RNA (1)...(19): siRNA sense strand
uguaaugauaccaggcaaa

SEQ ID NO: 2278730 - RNA, 19 nt, Homo sapiens
  misc_RNA (1)...(19): siRNA sense strand
ggguggaucccaaggacua

SEQ ID NO: 2278731 - RNA, 19 nt, Homo sapiens
  misc_RNA (1)...(19): siRNA sense strand
cuguaaucaucgugaagau

SEQ ID NO: 2278732 - RNA, 19 nt, Homo sapiens
  misc_RNA (1)...(19): siRNA sense strand
ugugaugacuacugggaca

SEQ ID NO: 2278733 - RNA, 19 nt, Homo sapiens
  misc_RNA (1)...(19): siRNA sense strand
ugugaugacuacugggaca

SEQ ID NO: 2278734 - RNA, 19 nt, Homo sapiens
  misc_RNA (1)...(19): siRNA sense strand
ugugaugacuacugggaca

SEQ ID NO: 2278735 - RNA, 19 nt, Homo sapiens
  misc_RNA (1)...(19): siRNA sense strand
ugugaugacuacugggaca

SEQ ID NO: 2278736 - RNA, 19 nt, Homo sapiens
  misc_RNA (1)...(19): siRNA sense strand
ugugaugacuacugggaca

SEQ ID NO: 2278737 - RNA, 19 nt, Homo sapiens
  misc_RNA (1)...(19): siRNA sense strand
ccauccaggucgaggaagu

SEQ ID NO: 2278738 - RNA, 19 nt, Homo sapiens
  misc_RNA (1)...(19): siRNA sense strand
cuguaaugauaccaggcaa

SEQ ID NO: 2278739 - RNA, 19 nt, Homo sapiens
  misc_RNA (1)...(19): siRNA sense strand
ugguauaacuccuucccaa

SEQ ID NO: 2278740 - RNA, 19 nt, Homo sapiens
  misc_RNA (1)...(19): siRNA sense strand
ccuucaagcaggcagacaa

SEQ ID NO: 2278741 - RNA, 19 nt, Homo sapiens
  misc_RNA (1)...(19): siRNA sense strand
aggaaguccaguauggcaa

SEQ ID NO: 2278742 - RNA, 19 nt, Homo sapiens
  misc_RNA (1)...(19): siRNA sense strand
gggacauugaggugcaaaa

SEQ ID NO: 2278743 - RNA, 19 nt, Homo sapiens
  misc_RNA (1)...(19): siRNA sense strand
auucuaugccagugggaca

SEQ ID NO: 2278744 - RNA, 19 nt, Homo sapiens
  misc_RNA (1)...(19): siRNA sense strand
gccaagugugugugggaca

SEQ ID NO: 2278745 - RNA, 19 nt, Homo sapiens
  misc_RNA (1)...(19): siRNA sense strand
gcgugagggaugacaccua

SEQ ID NO: 2278746 - RNA, 19 nt, Homo sapiens
  misc_RNA (1)...(19): siRNA sense strand
acauugaggugcaaaacaa

SEQ ID NO: 2278747 - RNA, 19 nt, Homo sapiens
  misc_RNA (1)...(19): siRNA sense strand
uggugaagaugcugguguu

SEQ ID NO: 2278748 - RNA, 19 nt, Homo sapiens
  misc_RNA (1)...(19): siRNA sense strand
gaauggagauggcaggugu

SEQ ID NO: 2278749 - RNA, 19 nt, Homo sapiens
  misc_RNA (1)...(19): siRNA sense strand
ugugaugacagcugggaca

SEQ ID NO: 2278750 - RNA, 19 nt, Homo sapiens
  misc_RNA (1)...(19): siRNA sense strand
ugugaugacagcugggaca

SEQ ID NO: 2278751 - RNA, 19 nt, Homo sapiens
  misc_RNA (1)...(19): siRNA sense strand
aguccagacacuuggccaa

SEQ ID NO: 2278752 - RNA, 19 nt, Homo sapiens
  misc_RNA (1)...(19): siRNA sense strand
ugugaugacagcugggaca

SEQ ID NO: 2278753 - RNA, 19 nt, Homo sapiens
  misc_RNA (1)...(19): siRNA sense strand
ccacagcaucacaaggaga

SEQ ID NO: 2278754 - RNA, 19 nt, Homo sapiens
  misc_RNA (1)...(19): siRNA sense strand
gguggugugcagagcguau

SEQ ID NO: 2278755 - RNA, 19 nt, Homo sapiens
  misc_RNA (1)...(19): siRNA sense strand
ccacuuuggcccugagacu

SEQ ID NO: 2278756 - RNA, 19 nt, Homo sapiens
  misc_RNA (1)...(19): siRNA sense strand
ugugaugacuccuggacca

SEQ ID NO: 2278757 - RNA, 19 nt, Homo sapiens
  misc_RNA (1)...(19): siRNA sense strand
caucacaaggagaggguuc

SEQ ID NO: 2278758 - RNA, 19 nt, Homo sapiens
  misc_RNA (1)...(19): siRNA sense strand
gcaccgugugugaugacua

SEQ ID NO: 2278759 - RNA, 19 nt, Homo sapiens
  misc_RNA (1)...(19): siRNA sense strand
gcaccgugugugaugacua

SEQ ID NO: 2278760 - RNA, 19 nt, Homo sapiens
  misc_RNA (1)...(19): siRNA sense strand
gcaccgugugugaugacua

SEQ ID NO: 2278761 - RNA, 19 nt, Homo sapiens
  misc_RNA (1)...(19): siRNA sense strand
gcaccgugugugaugacua

SEQ ID NO: 2278762 - RNA, 19 nt, Homo sapiens
  misc_RNA (1)...(19): siRNA sense strand
gcaccgugugugaugacua

SEQ ID NO: 2278763 - RNA, 19 nt, Homo sapiens
  misc_RNA (1)...(19): siRNA sense strand
aauuggaggcacaccauaa

SEQ ID NO: 2278764 - RNA, 19 nt, Homo sapiens
  misc_RNA (1)...(19): siRNA sense strand
cugcagacagcuagggugu

SEQ ID NO: 2278765 - RNA, 19 nt, Homo sapiens
  misc_RNA (1)...(19): siRNA sense strand
ggugaagaugcugguguua

SEQ ID NO: 2278766 - RNA, 19 nt, Homo sapiens
  misc_RNA (1)...(19): siRNA sense strand
cuucaagcaggcagacaau

SEQ ID NO: 2278767 - RNA, 19 nt, Homo sapiens
  misc_RNA (1)...(19): siRNA sense strand
cuuacuacguggaccugaa

SEQ ID NO: 2278768 - RNA, 19 nt, Homo sapiens
  misc_RNA (1)...(19): siRNA sense strand
cgaagagggaugugggcuc

SEQ ID NO: 2278769 - RNA, 19 nt, Homo sapiens
  misc_RNA (1)...(19): siRNA sense strand
gaauggaggugacaggugu

SEQ ID NO: 2278770 - RNA, 19 nt, Homo sapiens
  misc_RNA (1)...(19): siRNA sense strand
gaauggaggugacaggugu

SEQ ID NO: 2278771 - RNA, 19 nt, Homo sapiens
  misc_RNA (1)...(19): siRNA sense strand
gaauggaggugacaggugu

SEQ ID NO: 2278772 - RNA, 19 nt, Homo sapiens
  misc_RNA (1)...(19): siRNA sense strand
gaauggaggugacaggugu

SEQ ID NO: 2278773 - RNA, 19 nt, Homo sapiens
  misc_RNA (1)...(19): siRNA sense strand
gaauggaggugacaggugu

SEQ ID NO: 2278774 - RNA, 19 nt, Homo sapiens
  misc_RNA (1)...(19): siRNA sense strand
gaauggaggugacaggugu

SEQ ID NO: 2278775 - RNA, 19 nt, Homo sapiens
  misc_RNA (1)...(19): siRNA sense strand
gaauggaggugacaggugu

SEQ ID NO: 2278776 - RNA, 19 nt, Homo sapiens
  misc_RNA (1)...(19): siRNA sense strand
gaauggaggugacaggugu

SEQ ID NO: 2278777 - RNA, 19 nt, Homo sapiens
  misc_RNA (1)...(19): siRNA sense strand
gaauggaggugacaggugu

SEQ ID NO: 2278778 - RNA, 19 nt, Homo sapiens
  misc_RNA (1)...(19): siRNA sense strand
gaauggaggugacaggugu

SEQ ID NO: 2278779 - RNA, 19 nt, Homo sapiens
  misc_RNA (1)...(19): siRNA sense strand
gggaaugaguccuaccugu

SEQ ID NO: 2278780 - RNA, 19 nt, Homo sapiens
  misc_RNA (1)...(19): siRNA sense strand
gggacauucuccagcccau

SEQ ID NO: 2278781 - RNA, 19 nt, Homo sapiens
  misc_RNA (1)...(19): siRNA sense strand
gguuccgggcugaguacua

SEQ ID NO: 2278782 - RNA, 19 nt, Homo sapiens
  misc_RNA (1)...(19): siRNA sense strand
gcuaaguguguuugggaaa

SEQ ID NO: 2278783 - RNA, 19 nt, Homo sapiens
  misc_RNA (1)...(19): siRNA sense strand
gggaaauagaagugaauuc

SEQ ID NO: 2278784 - RNA, 19 nt, Homo sapiens
  misc_RNA (1)...(19): siRNA sense strand
uguaaugauaccaggcaaa

SEQ ID NO: 2278785 - RNA, 19 nt, Homo sapiens
  misc_RNA (1)...(19): siRNA sense strand
ggguggaucccaaggacua

SEQ ID NO: 2278786 - RNA, 19 nt, Homo sapiens
  misc_RNA (1)...(19): siRNA sense strand
cuguaaucaucgugaagau

SEQ ID NO: 2278787 - RNA, 19 nt, Homo sapiens
  misc_RNA (1)...(19): siRNA sense strand
ugugaugacuacugggaca

SEQ ID NO: 2278788 - RNA, 19 nt, Homo sapiens
  misc_RNA (1)...(19): siRNA sense strand
ugugaugacuacugggaca

SEQ ID NO: 2278789 - RNA, 19 nt, Homo sapiens
  misc_RNA (1)...(19): siRNA sense strand
ugugaugacuacugggaca

SEQ ID NO: 2278790 - RNA, 19 nt, Homo sapiens
  misc_RNA (1)...(19): siRNA sense strand
ugugaugacuacugggaca

SEQ ID NO: 2278791 - RNA, 19 nt, Homo sapiens
  misc_RNA (1)...(19): siRNA sense strand
ugugaugacuacugggaca

SEQ ID NO: 2278792 - RNA, 19 nt, Homo sapiens
  misc_RNA (1)...(19): siRNA sense strand
ccauccaggucgaggaagu

SEQ ID NO: 2278793 - RNA, 19 nt, Homo sapiens
  misc_RNA (1)...(19): siRNA sense strand
cuguaaugauaccaggcaa

SEQ ID NO: 2278794 - RNA, 19 nt, Homo sapiens
  misc_RNA (1)...(19): siRNA sense strand
ugguauaacuccuucccaa

SEQ ID NO: 2278795 - RNA, 19 nt, Homo sapiens
  misc_RNA (1)...(19): siRNA sense strand
ccuucaagcaggcagacaa

SEQ ID NO: 2278796 - RNA, 19 nt, Homo sapiens
  misc_RNA (1)...(19): siRNA sense strand
aggaaguccaguauggcaa

SEQ ID NO: 2278797 - RNA, 19 nt, Homo sapiens
  misc_RNA (1)...(19): siRNA sense strand
gggacauugaggugcaaaa

SEQ ID NO: 2278798 - RNA, 19 nt, Homo sapiens
  misc_RNA (1)...(19): siRNA sense strand
auucuaugccagugggaca

SEQ ID NO: 2278799 - RNA, 19 nt, Homo sapiens
  misc_RNA (1)...(19): siRNA sense strand
gccaagugugugugggaca

SEQ ID NO: 2278800 - RNA, 19 nt, Homo sapiens
  misc_RNA (1)...(19): siRNA sense strand
gcgugagggaugacaccua

SEQ ID NO: 2278801 - RNA, 19 nt, Homo sapiens
  misc_RNA (1)...(19): siRNA sense strand
acauugaggugcaaaacaa

SEQ ID NO: 2278802 - RNA, 19 nt, Homo sapiens
  misc_RNA (1)...(19): siRNA sense strand
uggugaagaugcugguguu

SEQ ID NO: 2278803 - RNA, 19 nt, Homo sapiens
  misc_RNA (1)...(19): siRNA sense strand
gaauggagauggcaggugu

SEQ ID NO: 2278804 - RNA, 19 nt, Homo sapiens
  misc_RNA (1)...(19): siRNA sense strand
ugugaugacagcugggaca

SEQ ID NO: 2278805 - RNA, 19 nt, Homo sapiens
  misc_RNA (1)...(19): siRNA sense strand
ugugaugacagcugggaca

SEQ ID NO: 2278806 - RNA, 19 nt, Homo sapiens
  misc_RNA (1)...(19): siRNA sense strand
aguccagacacuuggccaa

SEQ ID NO: 2278807 - RNA, 19 nt, Homo sapiens
  misc_RNA (1)...(19): siRNA sense strand
ugugaugacagcugggaca

SEQ ID NO: 2278808 - RNA, 19 nt, Homo sapiens
  misc_RNA (1)...(19): siRNA sense strand
ccacagcaucacaaggaga

SEQ ID NO: 2278809 - RNA, 19 nt, Homo sapiens
  misc_RNA (1)...(19): siRNA sense strand
gguggugugcagagcguau

SEQ ID NO: 2278810 - RNA, 19 nt, Homo sapiens
  misc_RNA (1)...(19): siRNA sense strand
ccacuuuggcccugagacu

SEQ ID NO: 2278811 - RNA, 19 nt, Homo sapiens
  misc_RNA (1)...(19): siRNA sense strand
ugugaugacuccuggacca

SEQ ID NO: 2278812 - RNA, 19 nt, Homo sapiens
  misc_RNA (1)...(19): siRNA sense strand
caucacaaggagaggguuc

SEQ ID NO: 2278813 - RNA, 19 nt, Homo sapiens
  misc_RNA (1)...(19): siRNA sense strand
gcaccgugugugaugacua

SEQ ID NO: 2278814 - RNA, 19 nt, Homo sapiens
  misc_RNA (1)...(19): siRNA sense strand
gcaccgugugugaugacua

SEQ ID NO: 2278815 - RNA, 19 nt, Homo sapiens
  misc_RNA (1)...(19): siRNA sense strand
gcaccgugugugaugacua

SEQ ID NO: 2278816 - RNA, 19 nt, Homo sapiens
  misc_RNA (1)...(19): siRNA sense strand
gcaccgugugugaugacua

SEQ ID NO: 2278817 - RNA, 19 nt, Homo sapiens
  misc_RNA (1)...(19): siRNA sense strand
gcaccgugugugaugacua

SEQ ID NO: 2278818 - RNA, 19 nt, Homo sapiens
  misc_RNA (1)...(19): siRNA sense strand
aauuggaggcacaccauaa

SEQ ID NO: 2278819 - RNA, 19 nt, Homo sapiens
  misc_RNA (1)...(19): siRNA sense strand
cugcagacagcuagggugu

SEQ ID NO: 2278820 - RNA, 19 nt, Homo sapiens
  misc_RNA (1)...(19): siRNA sense strand
ggugaagaugcugguguua

SEQ ID NO: 2278821 - RNA, 19 nt, Homo sapiens
  misc_RNA (1)...(19): siRNA sense strand
cuucaagcaggcagacaau

SEQ ID NO: 2278822 - RNA, 19 nt, Homo sapiens
  misc_RNA (1)...(19): siRNA sense strand
cuuacuacguggaccugaa

SEQ ID NO: 2278823 - RNA, 19 nt, Homo sapiens
  misc_RNA (1)...(19): siRNA sense strand
cgaagagggaugugggcuc

SEQ ID NO: 2278824 - RNA, 19 nt, Homo sapiens
  misc_RNA (1)...(19): siRNA sense strand
gaauggaggugacaggugu

SEQ ID NO: 2278825 - RNA, 19 nt, Homo sapiens
  misc_RNA (1)...(19): siRNA sense strand
gaauggaggugacaggugu

SEQ ID NO: 2278826 - RNA, 19 nt, Homo sapiens
  misc_RNA (1)...(19): siRNA sense strand
gaauggaggugacaggugu

SEQ ID NO: 2278827 - RNA, 19 nt, Homo sapiens
  misc_RNA (1)...(19): siRNA sense strand
gaauggaggugacaggugu

SEQ ID NO: 2278828 - RNA, 19 nt, Homo sapiens
  misc_RNA (1)...(19): siRNA sense strand
gaauggaggugacaggugu

SEQ ID NO: 2278829 - RNA, 19 nt, Homo sapiens
  misc_RNA (1)...(19): siRNA sense strand
gaauggaggugacaggugu

SEQ ID NO: 2278830 - RNA, 19 nt, Homo sapiens
  misc_RNA (1)...(19): siRNA sense strand
gaauggaggugacaggugu

SEQ ID NO: 2278831 - RNA, 19 nt, Homo sapiens
  misc_RNA (1)...(19): siRNA sense strand
gaauggaggugacaggugu

SEQ ID NO: 2278832 - RNA, 19 nt, Homo sapiens
  misc_RNA (1)...(19): siRNA sense strand
gaauggaggugacaggugu

SEQ ID NO: 2278833 - RNA, 19 nt, Homo sapiens
  misc_RNA (1)...(19): siRNA sense strand
gaauggaggugacaggugu

SEQ ID NO: 2278834 - RNA, 19 nt, Homo sapiens
  misc_RNA (1)...(19): siRNA sense strand
gggaaugaguccuaccugu

SEQ ID NO: 2278835 - RNA, 19 nt, Homo sapiens
  misc_RNA (1)...(19): siRNA sense strand
gggacauucuccagcccau

SEQ ID NO: 2278836 - RNA, 19 nt, Homo sapiens
  misc_RNA (1)...(19): siRNA sense strand
gguuccgggcugaguacua

SEQ ID NO: 2278837 - RNA, 19 nt, Homo sapiens
  misc_RNA (1)...(19): siRNA sense strand
gggaagaaguucaccgcaa

SEQ ID NO: 2278838 - RNA, 19 nt, Homo sapiens
  misc_RNA (1)...(19): siRNA sense strand
ccgcacucccggugaagaa

SEQ ID NO: 2278839 - RNA, 19 nt, Homo sapiens
  misc_RNA (1)...(19): siRNA sense strand
guucgaagauacaugcaga

SEQ ID NO: 2278840 - RNA, 19 nt, Homo sapiens
  misc_RNA (1)...(19): siRNA sense strand
agauacaugcagaagguga

SEQ ID NO: 2278841 - RNA, 19 nt, Homo sapiens
  misc_RNA (1)...(19): siRNA sense strand
agaacgugcugaaggagga

SEQ ID NO: 2278842 - RNA, 19 nt, Homo sapiens
  misc_RNA (1)...(19): siRNA sense strand
gauccaaccucacgggcca

SEQ ID NO: 2278843 - RNA, 19 nt, Homo sapiens
  misc_RNA (1)...(19): siRNA sense strand
cggccuacgauauggacau

SEQ ID NO: 2278844 - RNA, 19 nt, Homo sapiens
  misc_RNA (1)...(19): siRNA sense strand
acauugagaacgugcugaa

SEQ ID NO: 2278845 - RNA, 19 nt, Homo sapiens
  misc_RNA (1)...(19): siRNA sense strand
gggaguggcugaaugagca

SEQ ID NO: 2278846 - RNA, 19 nt, Homo sapiens
  misc_RNA (1)...(19): siRNA sense strand
uagacaacgugcuggcuga

SEQ ID NO: 2278847 - RNA, 19 nt, Homo sapiens
  misc_RNA (1)...(19): siRNA sense strand
gcaagggcaucguguggga

SEQ ID NO: 2278848 - RNA, 19 nt, Homo sapiens
  misc_RNA (1)...(19): siRNA sense strand
gggugugccgcaagaccaa

SEQ ID NO: 2278849 - RNA, 19 nt, Homo sapiens
  misc_RNA (1)...(19): siRNA sense strand
caucaagaaugcuggagga

SEQ ID NO: 2278850 - RNA, 19 nt, Homo sapiens
  misc_RNA (1)...(19): siRNA sense strand
caagaaugcuggaggaagg

SEQ ID NO: 2278851 - RNA, 19 nt, Homo sapiens
  misc_RNA (1)...(19): siRNA sense strand
aggacaaccacaaggcaga

SEQ ID NO: 2278852 - RNA, 19 nt, Homo sapiens
  misc_RNA (1)...(19): siRNA sense strand
gaggaaggguguuugucca

SEQ ID NO: 2278853 - RNA, 19 nt, Homo sapiens
  misc_RNA (1)...(19): siRNA sense strand
cuguggagaucuugcccua

SEQ ID NO: 2278854 - RNA, 19 nt, Homo sapiens
  misc_RNA (1)...(19): siRNA sense strand
gaggaggcuucgacggcuu

SEQ ID NO: 2278855 - RNA, 19 nt, Homo sapiens
  misc_RNA (1)...(19): siRNA sense strand
ucauugacugggugaagaa

SEQ ID NO: 2278856 - RNA, 19 nt, Homo sapiens
  misc_RNA (1)...(19): siRNA sense strand
ccaccaucugucuggcaua

SEQ ID NO: 2278857 - RNA, 19 nt, Homo sapiens
  misc_RNA (1)...(19): siRNA sense strand
cagcagaagcccuguggca

SEQ ID NO: 2278858 - RNA, 19 nt, Homo sapiens
  misc_RNA (1)...(19): siRNA sense strand
agacuuucuacucggaaua

SEQ ID NO: 2278859 - RNA, 19 nt, Homo sapiens
  misc_RNA (1)...(19): siRNA sense strand
gaggcaagguccuggucca

SEQ ID NO: 2278860 - RNA, 19 nt, Homo sapiens
  misc_RNA (1)...(19): siRNA sense strand
ggagcauggucucgcccaa

SEQ ID NO: 2278861 - RNA, 19 nt, Homo sapiens
  misc_RNA (1)...(19): siRNA sense strand
ccauuucacaagagaagau

SEQ ID NO: 2278862 - RNA, 19 nt, Homo sapiens
  misc_RNA (1)...(19): siRNA sense strand
gcagaagcccuguggcaac

SEQ ID NO: 2278863 - RNA, 19 nt, Homo sapiens
  misc_RNA (1)...(19): siRNA sense strand
ggaaggugauggaugccaa

SEQ ID NO: 2278864 - RNA, 19 nt, Homo sapiens
  misc_RNA (1)...(19): siRNA sense strand
gagcgcugccacagggaau

SEQ ID NO: 2278865 - RNA, 19 nt, Homo sapiens
  misc_RNA (1)...(19): siRNA sense strand
uggaguucgaggagggcau

SEQ ID NO: 2278866 - RNA, 19 nt, Homo sapiens
  misc_RNA (1)...(19): siRNA sense strand
gcgaguucuucguggacau

SEQ ID NO: 2278867 - RNA, 19 nt, Homo sapiens
  misc_RNA (1)...(19): siRNA sense strand
cagagugaagggagcaaaa

SEQ ID NO: 2278868 - RNA, 19 nt, Homo sapiens
  misc_RNA (1)...(19): siRNA sense strand
gcgaguucuucguggacau

SEQ ID NO: 2278869 - RNA, 19 nt, Homo sapiens
  misc_RNA (1)...(19): siRNA sense strand
cagagugaagggagcaaaa

SEQ ID NO: 2278870 - RNA, 19 nt, Homo sapiens
  misc_RNA (1)...(19): siRNA sense strand
gcgaguucuucguggacau

SEQ ID NO: 2278871 - RNA, 19 nt, Homo sapiens
  misc_RNA (1)...(19): siRNA sense strand
cagagugaagggagcaaaa

SEQ ID NO: 2278872 - RNA, 19 nt, Homo sapiens
  misc_RNA (1)...(19): siRNA sense strand
gcuauuacgucuucggaga

SEQ ID NO: 2278873 - RNA, 19 nt, Homo sapiens
  misc_RNA (1)...(19): siRNA sense strand
aguacaacuuccuggguau

SEQ ID NO: 2278874 - RNA, 19 nt, Homo sapiens
  misc_RNA (1)...(19): siRNA sense strand
cggcaguggcagugagucu

SEQ ID NO: 2278875 - RNA, 19 nt, Homo sapiens
  misc_RNA (1)...(19): siRNA sense strand
acuuugagaacaugagcaa

SEQ ID NO: 2278876 - RNA, 19 nt, Homo sapiens
  misc_RNA (1)...(19): siRNA sense strand
agucuauggaucaggauuu

SEQ ID NO: 2278877 - RNA, 19 nt, Homo sapiens
  misc_RNA (1)...(19): siRNA sense strand
gagagacagcagugagcau

SEQ ID NO: 2278878 - RNA, 19 nt, Homo sapiens
  misc_RNA (1)...(19): siRNA sense strand
ggguggugaaggaagaaau

SEQ ID NO: 2278879 - RNA, 19 nt, Homo sapiens
  misc_RNA (1)...(19): siRNA sense strand
augagaaucuggagccuga

SEQ ID NO: 2278880 - RNA, 19 nt, Homo sapiens
  misc_RNA (1)...(19): siRNA sense strand
aggugaaugacaugaacuu

SEQ ID NO: 2278881 - RNA, 19 nt, Homo sapiens
  misc_RNA (1)...(19): siRNA sense strand
cggacgaggaggacaccau

SEQ ID NO: 2278882 - RNA, 19 nt, Homo sapiens
  misc_RNA (1)...(19): siRNA sense strand
ccgacaggacugaggacaa

SEQ ID NO: 2278883 - RNA, 19 nt, Homo sapiens
  misc_RNA (1)...(19): siRNA sense strand
ugacugaggacaaggccaa

SEQ ID NO: 2278884 - RNA, 19 nt, Homo sapiens
  misc_RNA (1)...(19): siRNA sense strand
ccaacgugcuggaaggcau

SEQ ID NO: 2278885 - RNA, 19 nt, Homo sapiens
  misc_RNA (1)...(19): siRNA sense strand
cugaaggagcugaugaaca

SEQ ID NO: 2278886 - RNA, 19 nt, Homo sapiens
  misc_RNA (1)...(19): siRNA sense strand
ucauuuaccuccugagcga

SEQ ID NO: 2278887 - RNA, 19 nt, Homo sapiens
  misc_RNA (1)...(19): siRNA sense strand
cgcaagaaggccaagaaca

SEQ ID NO: 2278888 - RNA, 19 nt, Homo sapiens
  misc_RNA (1)...(19): siRNA sense strand
ccuuggaccaggacgacua

SEQ ID NO: 2278889 - RNA, 19 nt, Homo sapiens
  misc_RNA (1)...(19): siRNA sense strand
gcauccagcucauccgcaa

SEQ ID NO: 2278890 - RNA, 19 nt, Homo sapiens
  misc_RNA (1)...(19): siRNA sense strand
uuuaaggagcagacaguga

SEQ ID NO: 2278891 - RNA, 19 nt, Homo sapiens
  misc_RNA (1)...(19): siRNA sense strand
agacagagguggacagcca

SEQ ID NO: 2278892 - RNA, 19 nt, Homo sapiens
  misc_RNA (1)...(19): siRNA sense strand
gcgaggaagaugaggacga

SEQ ID NO: 2278893 - RNA, 19 nt, Homo sapiens
  misc_RNA (1)...(19): siRNA sense strand
ugacagagcagguggccau

SEQ ID NO: 2278894 - RNA, 19 nt, Homo sapiens
  misc_RNA (1)...(19): siRNA sense strand
aggacgugguugucagcaa

SEQ ID NO: 2278895 - RNA, 19 nt, Homo sapiens
  misc_RNA (1)...(19): siRNA sense strand
agacagaccaggaggugca

SEQ ID NO: 2278896 - RNA, 19 nt, Homo sapiens
  misc_RNA (1)...(19): siRNA sense strand
ucaugaagguggugcagca

SEQ ID NO: 2278897 - RNA, 19 nt, Homo sapiens
  misc_RNA (1)...(19): siRNA sense strand
caucagaggacaucgagau

SEQ ID NO: 2278898 - RNA, 19 nt, Homo sapiens
  misc_RNA (1)...(19): siRNA sense strand
gugagaaccugcugcacca

SEQ ID NO: 2278899 - RNA, 19 nt, Homo sapiens
  misc_RNA (1)...(19): siRNA sense strand
cuacaagaccauugcccau

SEQ ID NO: 2278900 - RNA, 19 nt, Homo sapiens
  misc_RNA (1)...(19): siRNA sense strand
gugagcaggcccaggugaa

SEQ ID NO: 2278901 - RNA, 19 nt, Homo sapiens
  misc_RNA (1)...(19): siRNA sense strand
agacacagguggccagcga

SEQ ID NO: 2278902 - RNA, 19 nt, Homo sapiens
  misc_RNA (1)...(19): siRNA sense strand
ccaaguguggcaagcgcua

SEQ ID NO: 2278903 - RNA, 19 nt, Homo sapiens
  misc_RNA (1)...(19): siRNA sense strand
ugcuggagguggaggaguu

SEQ ID NO: 2278904 - RNA, 19 nt, Homo sapiens
  misc_RNA (1)...(19): siRNA sense strand
aggaagaugaggacgaugu

SEQ ID NO: 2278905 - RNA, 19 nt, Homo sapiens
  misc_RNA (1)...(19): siRNA sense strand
cggagaucaucgagggcac

SEQ ID NO: 2278906 - RNA, 19 nt, Homo sapiens
  misc_RNA (1)...(19): siRNA sense strand
acaucgagauccuggagca

SEQ ID NO: 2278907 - RNA, 19 nt, Homo sapiens
  misc_RNA (1)...(19): siRNA sense strand
ggauaaggacggagcagga

SEQ ID NO: 2278908 - RNA, 19 nt, Homo sapiens
  misc_RNA (1)...(19): siRNA sense strand
caaaggaacaccaggcaga

SEQ ID NO: 2278909 - RNA, 19 nt, Homo sapiens
  misc_RNA (1)...(19): siRNA sense strand
ccaaaauugccuaaagaau

SEQ ID NO: 2278910 - RNA, 19 nt, Homo sapiens
  misc_RNA (1)...(19): siRNA sense strand
gugaaacagaagagugcuu

SEQ ID NO: 2278911 - RNA, 19 nt, Homo sapiens
  misc_RNA (1)...(19): siRNA sense strand
gaaaagaccaauaacggaa

SEQ ID NO: 2278912 - RNA, 19 nt, Homo sapiens
  misc_RNA (1)...(19): siRNA sense strand
ucucuacagcaaugggaua

SEQ ID NO: 2278913 - RNA, 19 nt, Homo sapiens
  misc_RNA (1)...(19): siRNA sense strand
gguucguggagaaggaaaa

SEQ ID NO: 2278914 - RNA, 19 nt, Homo sapiens
  misc_RNA (1)...(19): siRNA sense strand
gggaacagccugcaagcga

SEQ ID NO: 2278915 - RNA, 19 nt, Homo sapiens
  misc_RNA (1)...(19): siRNA sense strand
ggacagcguuugugggguu

SEQ ID NO: 2278916 - RNA, 19 nt, Homo sapiens
  misc_RNA (1)...(19): siRNA sense strand
ccuacaaaucuaagcaguu

SEQ ID NO: 2278917 - RNA, 19 nt, Homo sapiens
  misc_RNA (1)...(19): siRNA sense strand
cauaauaauuccaagcaug

SEQ ID NO: 2278918 - RNA, 19 nt, Homo sapiens
  misc_RNA (1)...(19): siRNA sense strand
cagugauaauugacagguu

SEQ ID NO: 2278919 - RNA, 19 nt, Homo sapiens
  misc_RNA (1)...(19): siRNA sense strand
gcguaucaccacacgggua

SEQ ID NO: 2278920 - RNA, 19 nt, Homo sapiens
  misc_RNA (1)...(19): siRNA sense strand
ccguggagaucgagaggac

SEQ ID NO: 2278921 - RNA, 19 nt, Homo sapiens
  misc_RNA (1)...(19): siRNA sense strand
uguaugaaggccaagacaa

SEQ ID NO: 2278922 - RNA, 19 nt, Homo sapiens
  misc_RNA (1)...(19): siRNA sense strand
cagucaauguggauggcca

SEQ ID NO: 2278923 - RNA, 19 nt, Homo sapiens
  misc_RNA (1)...(19): siRNA sense strand
cacacaacaaccaggaaau

SEQ ID NO: 2278924 - RNA, 19 nt, Homo sapiens
  misc_RNA (1)...(19): siRNA sense strand
gcaccagcaccaacgggaa

SEQ ID NO: 2278925 - RNA, 19 nt, Homo sapiens
  misc_RNA (1)...(19): siRNA sense strand
cggaguggaagcagcauga

SEQ ID NO: 2278926 - RNA, 19 nt, Homo sapiens
  misc_RNA (1)...(19): siRNA sense strand
cuggugacccugagcguuu

SEQ ID NO: 2278927 - RNA, 19 nt, Homo sapiens
  misc_RNA (1)...(19): siRNA sense strand
augaaggccaagacaagaa

SEQ ID NO: 2278928 - RNA, 19 nt, Homo sapiens
  misc_RNA (1)...(19): siRNA sense strand
ggaagcagcaugaaggaag

SEQ ID NO: 2278929 - RNA, 19 nt, Homo sapiens
  misc_RNA (1)...(19): siRNA sense strand
ggguucguggagaaggaaa

SEQ ID NO: 2278930 - RNA, 19 nt, Homo sapiens
  misc_RNA (1)...(19): siRNA sense strand
ccacgugacaugcggagau

SEQ ID NO: 2278931 - RNA, 19 nt, Homo sapiens
  misc_RNA (1)...(19): siRNA sense strand
acaacaaccaggaaaucau

SEQ ID NO: 2278932 - RNA, 19 nt, Homo sapiens
  misc_RNA (1)...(19): siRNA sense strand
ggaacagccugcaagcgau

SEQ ID NO: 2278933 - RNA, 19 nt, Homo sapiens
  misc_RNA (1)...(19): siRNA sense strand
gugccaaacuuguguggga

SEQ ID NO: 2278934 - RNA, 19 nt, Homo sapiens
  misc_RNA (1)...(19): siRNA sense strand
ccgccuagagugugccaaa

SEQ ID NO: 2278935 - RNA, 19 nt, Homo sapiens
  misc_RNA (1)...(19): siRNA sense strand
gagggaggcuucacggcua

SEQ ID NO: 2278936 - RNA, 19 nt, Homo sapiens
  misc_RNA (1)...(19): siRNA sense strand
ccuuugagggacagaguca

SEQ ID NO: 2278937 - RNA, 19 nt, Homo sapiens
  misc_RNA (1)...(19): siRNA sense strand
acaucaauuaucugaggaa

SEQ ID NO: 2278938 - RNA, 19 nt, Homo sapiens
  misc_RNA (1)...(19): siRNA sense strand
cugagaacgccaagggcca

SEQ ID NO: 2278939 - RNA, 19 nt, Homo sapiens
  misc_RNA (1)...(19): siRNA sense strand
gcugugcagaggaggagaa

SEQ ID NO: 2278940 - RNA, 19 nt, Homo sapiens
  misc_RNA (1)...(19): siRNA sense strand
ccucaauuuccuggagauu

SEQ ID NO: 2278941 - RNA, 19 nt, Homo sapiens
  misc_RNA (1)...(19): siRNA sense strand
gugccaaacuuguguggga

SEQ ID NO: 2278942 - RNA, 19 nt, Homo sapiens
  misc_RNA (1)...(19): siRNA sense strand
ccgccuagagugugccaaa

SEQ ID NO: 2278943 - RNA, 19 nt, Homo sapiens
  misc_RNA (1)...(19): siRNA sense strand
gagggaggcuucacggcua

SEQ ID NO: 2278944 - RNA, 19 nt, Homo sapiens
  misc_RNA (1)...(19): siRNA sense strand
ccuuugagggacagaguca

SEQ ID NO: 2278945 - RNA, 19 nt, Homo sapiens
  misc_RNA (1)...(19): siRNA sense strand
acaucaauuaucugaggaa

SEQ ID NO: 2278946 - RNA, 19 nt, Homo sapiens
  misc_RNA (1)...(19): siRNA sense strand
cugagaacgccaagggcca

SEQ ID NO: 2278947 - RNA, 19 nt, Homo sapiens
  misc_RNA (1)...(19): siRNA sense strand
gcugugcagaggaggagaa

SEQ ID NO: 2278948 - RNA, 19 nt, Homo sapiens
  misc_RNA (1)...(19): siRNA sense strand
ccucaauuuccuggagauu

SEQ ID NO: 2278949 - RNA, 19 nt, Homo sapiens
  misc_RNA (1)...(19): siRNA sense strand
ccaagaaggcagaagcaga

SEQ ID NO: 2278950 - RNA, 19 nt, Homo sapiens
  misc_RNA (1)...(19): siRNA sense strand
ugguggaggcagugggaau

SEQ ID NO: 2278951 - RNA, 19 nt, Homo sapiens
  misc_RNA (1)...(19): siRNA sense strand
cgggaaaaccccagacauu

SEQ ID NO: 2278952 - RNA, 19 nt, Homo sapiens
  misc_RNA (1)...(19): siRNA sense strand
ggaguguagaggaggugua

SEQ ID NO: 2278953 - RNA, 19 nt, Homo sapiens
  misc_RNA (1)...(19): siRNA sense strand
aagagauugcagaggaauu

SEQ ID NO: 2278954 - RNA, 19 nt, Homo sapiens
  misc_RNA (1)...(19): siRNA sense strand
guguagaggagguguacga

SEQ ID NO: 2278955 - RNA, 19 nt, Homo sapiens
  misc_RNA (1)...(19): siRNA sense strand
agaacuuggcaguaaggaa

SEQ ID NO: 2278956 - RNA, 19 nt, Homo sapiens
  misc_RNA (1)...(19): siRNA sense strand
gcccaaaagucauggacga

SEQ ID NO: 2278957 - RNA, 19 nt, Homo sapiens
  misc_RNA (1)...(19): siRNA sense strand
aguuagauaagaaggcgaa

SEQ ID NO: 2278958 - RNA, 19 nt, Homo sapiens
  misc_RNA (1)...(19): siRNA sense strand
gcagugaacuaguagccuu

SEQ ID NO: 2278959 - RNA, 19 nt, Homo sapiens
  misc_RNA (1)...(19): siRNA sense strand
aggaauggguggugggagc

SEQ ID NO: 2278960 - RNA, 19 nt, Homo sapiens
  misc_RNA (1)...(19): siRNA sense strand
cacaggagauugauggaca

SEQ ID NO: 2278961 - RNA, 19 nt, Homo sapiens
  misc_RNA (1)...(19): siRNA sense strand
ggcagaagcagaugggagu

SEQ ID NO: 2278962 - RNA, 19 nt, Homo sapiens
  misc_RNA (1)...(19): siRNA sense strand
guucaaugcuuccugccaa

SEQ ID NO: 2278963 - RNA, 19 nt, Homo sapiens
  misc_RNA (1)...(19): siRNA sense strand
gguggaggcagugggaaua

SEQ ID NO: 2278964 - RNA, 19 nt, Homo sapiens
  misc_RNA (1)...(19): siRNA sense strand
ggucaggcccuaaaggcuu

SEQ ID NO: 2278965 - RNA, 19 nt, Homo sapiens
  misc_RNA (1)...(19): siRNA sense strand
ucuaagagguucugcucca

SEQ ID NO: 2278966 - RNA, 19 nt, Homo sapiens
  misc_RNA (1)...(19): siRNA sense strand
gccaagagauugcagagga

SEQ ID NO: 2278967 - RNA, 19 nt, Homo sapiens
  misc_RNA (1)...(19): siRNA sense strand
ucaacaggccucagcucaa

SEQ ID NO: 2278968 - RNA, 19 nt, Homo sapiens
  misc_RNA (1)...(19): siRNA sense strand
cugugcacuugccgggaaa

SEQ ID NO: 2278969 - RNA, 19 nt, Homo sapiens
  misc_RNA (1)...(19): siRNA sense strand
caggcuugacugagaauca

SEQ ID NO: 2278970 - RNA, 19 nt, Homo sapiens
  misc_RNA (1)...(19): siRNA sense strand
ccacccaggccucgaucaa

SEQ ID NO: 2278971 - RNA, 19 nt, Homo sapiens
  misc_RNA (1)...(19): siRNA sense strand
agauccaccuccagcagaa

SEQ ID NO: 2278972 - RNA, 19 nt, Homo sapiens
  misc_RNA (1)...(19): siRNA sense strand
agucucaggcccagaugua

SEQ ID NO: 2278973 - RNA, 19 nt, Homo sapiens
  misc_RNA (1)...(19): siRNA sense strand
gcagccagacagaggcaga

SEQ ID NO: 2278974 - RNA, 19 nt, Homo sapiens
  misc_RNA (1)...(19): siRNA sense strand
cugucaaacgcaaggcuga

SEQ ID NO: 2278975 - RNA, 19 nt, Homo sapiens
  misc_RNA (1)...(19): siRNA sense strand
aggcugacucugaggagga

SEQ ID NO: 2278976 - RNA, 19 nt, Homo sapiens
  misc_RNA (1)...(19): siRNA sense strand
aggagaagaaggcggagaa

SEQ ID NO: 2278977 - RNA, 19 nt, Homo sapiens
  misc_RNA (1)...(19): siRNA sense strand
cauuacaaucagauggcua

SEQ ID NO: 2278978 - RNA, 19 nt, Homo sapiens
  misc_RNA (1)...(19): siRNA sense strand
ccgugaccuacuugggaaa

SEQ ID NO: 2278979 - RNA, 19 nt, Homo sapiens
  misc_RNA (1)...(19): siRNA sense strand
cauucaaagacaagcagau

SEQ ID NO: 2278980 - RNA, 19 nt, Homo sapiens
  misc_RNA (1)...(19): siRNA sense strand
ugaccaacgagaagcccaa

SEQ ID NO: 2278981 - RNA, 19 nt, Homo sapiens
  misc_RNA (1)...(19): siRNA sense strand
agggugacguggaggccau

SEQ ID NO: 2278982 - RNA, 19 nt, Homo sapiens
  misc_RNA (1)...(19): siRNA sense strand
acgccaagauccaccucaa

SEQ ID NO: 2278983 - RNA, 19 nt, Homo sapiens
  misc_RNA (1)...(19): siRNA sense strand
cgguaguccauuacaauca

SEQ ID NO: 2278984 - RNA, 19 nt, Homo sapiens
  misc_RNA (1)...(19): siRNA sense strand
acagagaauguaauggaca

SEQ ID NO: 2278985 - RNA, 19 nt, Homo sapiens
  misc_RNA (1)...(19): siRNA sense strand
aaggauuauucgagaacaa

SEQ ID NO: 2278986 - RNA, 19 nt, Homo sapiens
  misc_RNA (1)...(19): siRNA sense strand
ggacaaaauaauagaggau

SEQ ID NO: 2278987 - RNA, 19 nt, Homo sapiens
  misc_RNA (1)...(19): siRNA sense strand
uggaaugggucuaugggua

SEQ ID NO: 2278988 - RNA, 19 nt, Homo sapiens
  misc_RNA (1)...(19): siRNA sense strand
guggaaacuacaagagaca

SEQ ID NO: 2278989 - RNA, 19 nt, Homo sapiens
  misc_RNA (1)...(19): siRNA sense strand
gggaaagaccgaaagcuca

SEQ ID NO: 2278990 - RNA, 19 nt, Homo sapiens
  misc_RNA (1)...(19): siRNA sense strand
gggaaaagguacaaaucga

SEQ ID NO: 2278991 - RNA, 19 nt, Homo sapiens
  misc_RNA (1)...(19): siRNA sense strand
cacgauagcaacaggacaa

SEQ ID NO: 2278992 - RNA, 19 nt, Homo sapiens
  misc_RNA (1)...(19): siRNA sense strand
ggugucgggaggugggaaa

SEQ ID NO: 2278993 - RNA, 19 nt, Homo sapiens
  misc_RNA (1)...(19): siRNA sense strand
gaaagauacugcugugcca

SEQ ID NO: 2278994 - RNA, 19 nt, Homo sapiens
  misc_RNA (1)...(19): siRNA sense strand
gagaacaagaaaagccaaa

SEQ ID NO: 2278995 - RNA, 19 nt, Homo sapiens
  misc_RNA (1)...(19): siRNA sense strand
uauacaacguggaggagca

SEQ ID NO: 2278996 - RNA, 19 nt, Homo sapiens
  misc_RNA (1)...(19): siRNA sense strand
gcagaugugaagugcucua

SEQ ID NO: 2278997 - RNA, 19 nt, Homo sapiens
  misc_RNA (1)...(19): siRNA sense strand
guucuugaccugugggcau

SEQ ID NO: 2278998 - RNA, 19 nt, Homo sapiens
  misc_RNA (1)...(19): siRNA sense strand
gggacuggcagaaagaaga

SEQ ID NO: 2278999 - RNA, 19 nt, Homo sapiens
  misc_RNA (1)...(19): siRNA sense strand
gauuauucgagaacaagaa

SEQ ID NO: 2279000 - RNA, 19 nt, Homo sapiens
  misc_RNA (1)...(19): siRNA sense strand
ccaagagacucaagcugga

SEQ ID NO: 2279001 - RNA, 19 nt, Homo sapiens
  misc_RNA (1)...(19): siRNA sense strand
cgucauuggaauagguuuu

SEQ ID NO: 2279002 - RNA, 19 nt, Homo sapiens
  misc_RNA (1)...(19): siRNA sense strand
aagcaaggauuauucgaga

SEQ ID NO: 2279003 - RNA, 19 nt, Homo sapiens
  misc_RNA (1)...(19): siRNA sense strand
ccguucacacagauggaaa

SEQ ID NO: 2279004 - RNA, 19 nt, Homo sapiens
  misc_RNA (1)...(19): siRNA sense strand
gcaagucguaaguguggaa

SEQ ID NO: 2279005 - RNA, 19 nt, Homo sapiens
  misc_RNA (1)...(19): siRNA sense strand
uguuauacaacguggagga

SEQ ID NO: 2279006 - RNA, 19 nt, Homo sapiens
  misc_RNA (1)...(19): siRNA sense strand
ugggaauuucuuagccaua

SEQ ID NO: 2279007 - RNA, 19 nt, Homo sapiens
  misc_RNA (1)...(19): siRNA sense strand
ccagaaggcucggacggaa

SEQ ID NO: 2279008 - RNA, 19 nt, Homo sapiens
  misc_RNA (1)...(19): siRNA sense strand
auauauggcguuagugaca

SEQ ID NO: 2279009 - RNA, 19 nt, Homo sapiens
  misc_RNA (1)...(19): siRNA sense strand
auaguuacuuguggagaaa

SEQ ID NO: 2279010 - RNA, 19 nt, Homo sapiens
  misc_RNA (1)...(19): siRNA sense strand
ccauaggcucacaugacaa

SEQ ID NO: 2279011 - RNA, 19 nt, Homo sapiens
  misc_RNA (1)...(19): siRNA sense strand
aguaacaucaagaggacca

SEQ ID NO: 2279012 - RNA, 19 nt, Homo sapiens
  misc_RNA (1)...(19): siRNA sense strand
cuuccaaccaagagacuca

SEQ ID NO: 2279013 - RNA, 19 nt, Homo sapiens
  misc_RNA (1)...(19): siRNA sense strand
caucauaguuacuugugga

SEQ ID NO: 2279014 - RNA, 19 nt, Homo sapiens
  misc_RNA (1)...(19): siRNA sense strand
gaggugggaaagaccgaaa

SEQ ID NO: 2279015 - RNA, 19 nt, Homo sapiens
  misc_RNA (1)...(19): siRNA sense strand
aggagcaacugcagaggca

SEQ ID NO: 2279016 - RNA, 19 nt, Homo sapiens
  misc_RNA (1)...(19): siRNA sense strand
aguacacgcgagugggcaa

SEQ ID NO: 2279017 - RNA, 19 nt, Homo sapiens
  misc_RNA (1)...(19): siRNA sense strand
ccguggugguguuauacaa

SEQ ID NO: 2279018 - RNA, 19 nt, Homo sapiens
  misc_RNA (1)...(19): siRNA sense strand
acacagauggaaacgaaca

SEQ ID NO: 2279019 - RNA, 19 nt, Homo sapiens
  misc_RNA (1)...(19): siRNA sense strand
gggucgaagggaaagcaau

SEQ ID NO: 2279020 - RNA, 19 nt, Homo sapiens
  misc_RNA (1)...(19): siRNA sense strand
auauauauggcguuaguga

SEQ ID NO: 2279021 - RNA, 19 nt, Homo sapiens
  misc_RNA (1)...(19): siRNA sense strand
cggacggaaccgacaucaa

SEQ ID NO: 2279022 - RNA, 19 nt, Homo sapiens
  misc_RNA (1)...(19): siRNA sense strand
ggucgaagggaaagcaaug

SEQ ID NO: 2279023 - RNA, 19 nt, Homo sapiens
  misc_RNA (1)...(19): siRNA sense strand
cgugaagugccuagcaguu

SEQ ID NO: 2279024 - RNA, 19 nt, Homo sapiens
  misc_RNA (1)...(19): siRNA sense strand
gauacucaccagaugggaa

SEQ ID NO: 2279025 - RNA, 19 nt, Homo sapiens
  misc_RNA (1)...(19): siRNA sense strand
agcaaggauuauucgagaa

SEQ ID NO: 2279026 - RNA, 19 nt, Homo sapiens
  misc_RNA (1)...(19): siRNA sense strand
ccucaaaaccucaguucuu

SEQ ID NO: 2279027 - RNA, 19 nt, Homo sapiens
  misc_RNA (1)...(19): siRNA sense strand
ggaaugggucuauggguac

SEQ ID NO: 2279028 - RNA, 19 nt, Homo sapiens
  misc_RNA (1)...(19): siRNA sense strand
ggauuauucgagaacaaga

SEQ ID NO: 2279029 - RNA, 19 nt, Homo sapiens
  misc_RNA (1)...(19): siRNA sense strand
caucuuaguauggggaaaa

SEQ ID NO: 2279030 - RNA, 19 nt, Homo sapiens
  misc_RNA (1)...(19): siRNA sense strand
cuuuguauguuaagagaug

SEQ ID NO: 2279031 - RNA, 19 nt, Homo sapiens
  misc_RNA (1)...(19): siRNA sense strand
ggacagaggcugaugggaa

SEQ ID NO: 2279032 - RNA, 19 nt, Homo sapiens
  misc_RNA (1)...(19): siRNA sense strand
gcaccuacgugaugcccaa

SEQ ID NO: 2279033 - RNA, 19 nt, Homo sapiens
  misc_RNA (1)...(19): siRNA sense strand
acguaaaguaccaggucau

SEQ ID NO: 2279034 - RNA, 19 nt, Homo sapiens
  misc_RNA (1)...(19): siRNA sense strand
gcaagaaccacguggcagu

SEQ ID NO: 2279035 - RNA, 19 nt, Homo sapiens
  misc_RNA (1)...(19): siRNA sense strand
gccagaaggccauggacga

SEQ ID NO: 2279036 - RNA, 19 nt, Homo sapiens
  misc_RNA (1)...(19): siRNA sense strand
ccuggaacaaccuggagaa

SEQ ID NO: 2279037 - RNA, 19 nt, Homo sapiens
  misc_RNA (1)...(19): siRNA sense strand
augggaaauccuacguaaa

SEQ ID NO: 2279038 - RNA, 19 nt, Homo sapiens
  misc_RNA (1)...(19): siRNA sense strand
aguaccaggucaucggcaa

SEQ ID NO: 2279039 - RNA, 19 nt, Homo sapiens
  misc_RNA (1)...(19): siRNA sense strand
cuggaacaaccuggagaaa

SEQ ID NO: 2279040 - RNA, 19 nt, Homo sapiens
  misc_RNA (1)...(19): siRNA sense strand
aggcaaagcuaaaggccaa

SEQ ID NO: 2279041 - RNA, 19 nt, Homo sapiens
  misc_RNA (1)...(19): siRNA sense strand
ugagagagcugaagaggca

SEQ ID NO: 2279042 - RNA, 19 nt, Homo sapiens
  misc_RNA (1)...(19): siRNA sense strand
cccagaaacaagaagaaga

SEQ ID NO: 2279043 - RNA, 19 nt, Homo sapiens
  misc_RNA (1)...(19): siRNA sense strand
aagaauaagcagcugccaa

SEQ ID NO: 2279044 - RNA, 19 nt, Homo sapiens
  misc_RNA (1)...(19): siRNA sense strand
aggacacgcaggagaaaga

SEQ ID NO: 2279045 - RNA, 19 nt, Homo sapiens
  misc_RNA (1)...(19): siRNA sense strand
agagagcugaagaggcaaa

SEQ ID NO: 2279046 - RNA, 19 nt, Homo sapiens
  misc_RNA (1)...(19): siRNA sense strand
gagacuacaacauggccaa

SEQ ID NO: 2279047 - RNA, 19 nt, Homo sapiens
  misc_RNA (1)...(19): siRNA sense strand
auacccaagccuaggacaa

SEQ ID NO: 2279048 - RNA, 19 nt, Homo sapiens
  misc_RNA (1)...(19): siRNA sense strand
cgcaggagaaagaagguau

SEQ ID NO: 2279049 - RNA, 19 nt, Homo sapiens
  misc_RNA (1)...(19): siRNA sense strand
ggccaaauacccaagccua

SEQ ID NO: 2279050 - RNA, 19 nt, Homo sapiens
  misc_RNA (1)...(19): siRNA sense strand
gcuaaaggccaaauaccca

SEQ ID NO: 2279051 - RNA, 19 nt, Homo sapiens
  misc_RNA (1)...(19): siRNA sense strand
aggagaccggcgaggagaa

SEQ ID NO: 2279052 - RNA, 19 nt, Homo sapiens
  misc_RNA (1)...(19): siRNA sense strand
gaagaaacguuaauggaca

SEQ ID NO: 2279053 - RNA, 19 nt, Homo sapiens
  misc_RNA (1)...(19): siRNA sense strand
gggaagaagucaguggcua

SEQ ID NO: 2279054 - RNA, 19 nt, Homo sapiens
  misc_RNA (1)...(19): siRNA sense strand
gguacuaugagaaggaaca

SEQ ID NO: 2279055 - RNA, 19 nt, Homo sapiens
  misc_RNA (1)...(19): siRNA sense strand
gcaaugucuucgagcccaa

SEQ ID NO: 2279056 - RNA, 19 nt, Homo sapiens
  misc_RNA (1)...(19): siRNA sense strand
gggaaaucuacguggccau

SEQ ID NO: 2279057 - RNA, 19 nt, Homo sapiens
  misc_RNA (1)...(19): siRNA sense strand
cagauaagucagucaccaa

SEQ ID NO: 2279058 - RNA, 19 nt, Homo sapiens
  misc_RNA (1)...(19): siRNA sense strand
ggaagaagucaguggcuac

SEQ ID NO: 2279059 - RNA, 19 nt, Homo sapiens
  misc_RNA (1)...(19): siRNA sense strand
agucagaccaacacagcaa

SEQ ID NO: 2279060 - RNA, 19 nt, Homo sapiens
  misc_RNA (1)...(19): siRNA sense strand
gcaugaaguaccuggcuga

SEQ ID NO: 2279061 - RNA, 19 nt, Homo sapiens
  misc_RNA (1)...(19): siRNA sense strand
guacaaggggcguuugaaa

SEQ ID NO: 2279062 - RNA, 19 nt, Homo sapiens
  misc_RNA (1)...(19): siRNA sense strand
uagauaagaugauccggaa

SEQ ID NO: 2279063 - RNA, 19 nt, Homo sapiens
  misc_RNA (1)...(19): siRNA sense strand
aggcaggguacucggagaa

SEQ ID NO: 2279064 - RNA, 19 nt, Homo sapiens
  misc_RNA (1)...(19): siRNA sense strand
gauucuuuccucaggcaaa

SEQ ID NO: 2279065 - RNA, 19 nt, Homo sapiens
  misc_RNA (1)...(19): siRNA sense strand
acgcagaggaaguggacgu

SEQ ID NO: 2279066 - RNA, 19 nt, Homo sapiens
  misc_RNA (1)...(19): siRNA sense strand
acuaugagaaggaacacaa

SEQ ID NO: 2279067 - RNA, 19 nt, Homo sapiens
  misc_RNA (1)...(19): siRNA sense strand
uggcaugguauauguggua

SEQ ID NO: 2279068 - RNA, 19 nt, Homo sapiens
  misc_RNA (1)...(19): siRNA sense strand
ggacagcuccagaggccau

SEQ ID NO: 2279069 - RNA, 19 nt, Homo sapiens
  misc_RNA (1)...(19): siRNA sense strand
uggcagaaggaccggaaca

SEQ ID NO: 2279070 - RNA, 19 nt, Homo sapiens
  misc_RNA (1)...(19): siRNA sense strand
gggaguuugccaaggagau

SEQ ID NO: 2279071 - RNA, 19 nt, Homo sapiens
  misc_RNA (1)...(19): siRNA sense strand
gcaugguauaugugguaca

SEQ ID NO: 2279072 - RNA, 19 nt, Homo sapiens
  misc_RNA (1)...(19): siRNA sense strand
cagcaaggauugaugggcu

SEQ ID NO: 2279073 - RNA, 19 nt, Homo sapiens
  misc_RNA (1)...(19): siRNA sense strand
agaagauccugaacagcau

SEQ ID NO: 2279074 - RNA, 19 nt, Homo sapiens
  misc_RNA (1)...(19): siRNA sense strand
agucaguggcuacgaugaa

SEQ ID NO: 2279075 - RNA, 19 nt, Homo sapiens
  misc_RNA (1)...(19): siRNA sense strand
uguauuacuaugagacuga

SEQ ID NO: 2279076 - RNA, 19 nt, Homo sapiens
  misc_RNA (1)...(19): siRNA sense strand
gggauauguccaaccaaga

SEQ ID NO: 2279077 - RNA, 19 nt, Homo sapiens
  misc_RNA (1)...(19): siRNA sense strand
auucaaggccagccaggaa

SEQ ID NO: 2279078 - RNA, 19 nt, Homo sapiens
  misc_RNA (1)...(19): siRNA sense strand
caguguuuccagagacuau

SEQ ID NO: 2279079 - RNA, 19 nt, Homo sapiens
  misc_RNA (1)...(19): siRNA sense strand
caggcaagagggaaaucua

SEQ ID NO: 2279080 - RNA, 19 nt, Homo sapiens
  misc_RNA (1)...(19): siRNA sense strand
cgauggaagaaacguuaau

SEQ ID NO: 2279081 - RNA, 19 nt, Homo sapiens
  misc_RNA (1)...(19): siRNA sense strand
aggaaguggacgugcccau

SEQ ID NO: 2279082 - RNA, 19 nt, Homo sapiens
  misc_RNA (1)...(19): siRNA sense strand
ccaucauucuggaguggca

SEQ ID NO: 2279083 - RNA, 19 nt, Homo sapiens
  misc_RNA (1)...(19): siRNA sense strand
ccuuugacauccaggccau

SEQ ID NO: 2279084 - RNA, 19 nt, Homo sapiens
  misc_RNA (1)...(19): siRNA sense strand
augagaaggaacacaauga

SEQ ID NO: 2279085 - RNA, 19 nt, Homo sapiens
  misc_RNA (1)...(19): siRNA sense strand
aguuuggagaaguguacaa

SEQ ID NO: 2279086 - RNA, 19 nt, Homo sapiens
  misc_RNA (1)...(19): siRNA sense strand
gcgauggaagaaacguuaa

SEQ ID NO: 2279087 - RNA, 19 nt, Homo sapiens
  misc_RNA (1)...(19): siRNA sense strand
ggaccuggcugcuaggaac

SEQ ID NO: 2279088 - RNA, 19 nt, Homo sapiens
  misc_RNA (1)...(19): siRNA sense strand
gguccagauaagucaguca

SEQ ID NO: 2279089 - RNA, 19 nt, Homo sapiens
  misc_RNA (1)...(19): siRNA sense strand
agucagucaccaacggcaa

SEQ ID NO: 2279090 - RNA, 19 nt, Homo sapiens
  misc_RNA (1)...(19): siRNA sense strand
agaacagcguggcaugcaa

SEQ ID NO: 2279091 - RNA, 19 nt, Homo sapiens
  misc_RNA (1)...(19): siRNA sense strand
gggaagaggugaguggcua

SEQ ID NO: 2279092 - RNA, 19 nt, Homo sapiens
  misc_RNA (1)...(19): siRNA sense strand
agaugaugauggaggacau

SEQ ID NO: 2279093 - RNA, 19 nt, Homo sapiens
  misc_RNA (1)...(19): siRNA sense strand
gggaguuugccaaggaaau

SEQ ID NO: 2279094 - RNA, 19 nt, Homo sapiens
  misc_RNA (1)...(19): siRNA sense strand
cuucgaggccguugagaau

SEQ ID NO: 2279095 - RNA, 19 nt, Homo sapiens
  misc_RNA (1)...(19): siRNA sense strand
gcaugaaguaccuggcaga

SEQ ID NO: 2279096 - RNA, 19 nt, Homo sapiens
  misc_RNA (1)...(19): siRNA sense strand
gcuucgaggccguugagaa

SEQ ID NO: 2279097 - RNA, 19 nt, Homo sapiens
  misc_RNA (1)...(19): siRNA sense strand
gcuuuaacacgguggacga

SEQ ID NO: 2279098 - RNA, 19 nt, Homo sapiens
  misc_RNA (1)...(19): siRNA sense strand
gaagaaacgcuaauggacu

SEQ ID NO: 2279099 - RNA, 19 nt, Homo sapiens
  misc_RNA (1)...(19): siRNA sense strand
gagagaucuuuguggccau

SEQ ID NO: 2279100 - RNA, 19 nt, Homo sapiens
  misc_RNA (1)...(19): siRNA sense strand
uggagggugucgugaccaa

SEQ ID NO: 2279101 - RNA, 19 nt, Homo sapiens
  misc_RNA (1)...(19): siRNA sense strand
uagacaagaugauccgcaa

SEQ ID NO: 2279102 - RNA, 19 nt, Homo sapiens
  misc_RNA (1)...(19): siRNA sense strand
ggcaguacaaggagagcuu

SEQ ID NO: 2279103 - RNA, 19 nt, Homo sapiens
  misc_RNA (1)...(19): siRNA sense strand
gaugagaacaugaacacga

SEQ ID NO: 2279104 - RNA, 19 nt, Homo sapiens
  misc_RNA (1)...(19): siRNA sense strand
gugcaacguguuugaguca

SEQ ID NO: 2279105 - RNA, 19 nt, Homo sapiens
  misc_RNA (1)...(19): siRNA sense strand
agauguacuuccagaccau

SEQ ID NO: 2279106 - RNA, 19 nt, Homo sapiens
  misc_RNA (1)...(19): siRNA sense strand
ucauccagcuggugggcau

SEQ ID NO: 2279107 - RNA, 19 nt, Homo sapiens
  misc_RNA (1)...(19): siRNA sense strand
ccaaauugucaacacgcua

SEQ ID NO: 2279108 - RNA, 19 nt, Homo sapiens
  misc_RNA (1)...(19): siRNA sense strand
cgggaguuugccaaggaaa

SEQ ID NO: 2279109 - RNA, 19 nt, Homo sapiens
  misc_RNA (1)...(19): siRNA sense strand
ccuacugggacaugaccaa

SEQ ID NO: 2279110 - RNA, 19 nt, Homo sapiens
  misc_RNA (1)...(19): siRNA sense strand
ccaaccaggauguaaucaa

SEQ ID NO: 2279111 - RNA, 19 nt, Homo sapiens
  misc_RNA (1)...(19): siRNA sense strand
guggcuacgaugagaacau

SEQ ID NO: 2279112 - RNA, 19 nt, Homo sapiens
  misc_RNA (1)...(19): siRNA sense strand
cagacaagcauccaggaga

SEQ ID NO: 2279113 - RNA, 19 nt, Homo sapiens
  misc_RNA (1)...(19): siRNA sense strand
cggaagagguggauguacc

SEQ ID NO: 2279114 - RNA, 19 nt, Homo sapiens
  misc_RNA (1)...(19): siRNA sense strand
gagaauggcucccuggacu

SEQ ID NO: 2279115 - RNA, 19 nt, Homo sapiens
  misc_RNA (1)...(19): siRNA sense strand
gagucaagccagaacaacu

SEQ ID NO: 2279116 - RNA, 19 nt, Homo sapiens
  misc_RNA (1)...(19): siRNA sense strand
gggaagaggugaguggcua

SEQ ID NO: 2279117 - RNA, 19 nt, Homo sapiens
  misc_RNA (1)...(19): siRNA sense strand
agaugaugauggaggacau

SEQ ID NO: 2279118 - RNA, 19 nt, Homo sapiens
  misc_RNA (1)...(19): siRNA sense strand
gaggauucucauaaggaaa

SEQ ID NO: 2279119 - RNA, 19 nt, Homo sapiens
  misc_RNA (1)...(19): siRNA sense strand
gggaguuugccaaggaaau

SEQ ID NO: 2279120 - RNA, 19 nt, Homo sapiens
  misc_RNA (1)...(19): siRNA sense strand
cuucgaggccguugagaau

SEQ ID NO: 2279121 - RNA, 19 nt, Homo sapiens
  misc_RNA (1)...(19): siRNA sense strand
gcaugaaguaccuggcaga

SEQ ID NO: 2279122 - RNA, 19 nt, Homo sapiens
  misc_RNA (1)...(19): siRNA sense strand
gcuucgaggccguugagaa

SEQ ID NO: 2279123 - RNA, 19 nt, Homo sapiens
  misc_RNA (1)...(19): siRNA sense strand
gcuuuaacacgguggacga

SEQ ID NO: 2279124 - RNA, 19 nt, Homo sapiens
  misc_RNA (1)...(19): siRNA sense strand
gaagaaacgcuaauggacu

SEQ ID NO: 2279125 - RNA, 19 nt, Homo sapiens
  misc_RNA (1)...(19): siRNA sense strand
gagagaucuuuguggccau

SEQ ID NO: 2279126 - RNA, 19 nt, Homo sapiens
  misc_RNA (1)...(19): siRNA sense strand
uggagggugucgugaccaa

SEQ ID NO: 2279127 - RNA, 19 nt, Homo sapiens
  misc_RNA (1)...(19): siRNA sense strand
uagacaagaugauccgcaa

SEQ ID NO: 2279128 - RNA, 19 nt, Homo sapiens
  misc_RNA (1)...(19): siRNA sense strand
ggcaguacaaggagagcuu

SEQ ID NO: 2279129 - RNA, 19 nt, Homo sapiens
  misc_RNA (1)...(19): siRNA sense strand
gaugagaacaugaacacga

SEQ ID NO: 2279130 - RNA, 19 nt, Homo sapiens
  misc_RNA (1)...(19): siRNA sense strand
gugcaacguguuugaguca

SEQ ID NO: 2279131 - RNA, 19 nt, Homo sapiens
  misc_RNA (1)...(19): siRNA sense strand
agauguacuuccagaccau

SEQ ID NO: 2279132 - RNA, 19 nt, Homo sapiens
  misc_RNA (1)...(19): siRNA sense strand
ucauccagcuggugggcau

SEQ ID NO: 2279133 - RNA, 19 nt, Homo sapiens
  misc_RNA (1)...(19): siRNA sense strand
ccaaauugucaacacgcua

SEQ ID NO: 2279134 - RNA, 19 nt, Homo sapiens
  misc_RNA (1)...(19): siRNA sense strand
cgggaguuugccaaggaaa

SEQ ID NO: 2279135 - RNA, 19 nt, Homo sapiens
  misc_RNA (1)...(19): siRNA sense strand
ccuacugggacaugaccaa

SEQ ID NO: 2279136 - RNA, 19 nt, Homo sapiens
  misc_RNA (1)...(19): siRNA sense strand
ccaaccaggauguaaucaa

SEQ ID NO: 2279137 - RNA, 19 nt, Homo sapiens
  misc_RNA (1)...(19): siRNA sense strand
guggcuacgaugagaacau

SEQ ID NO: 2279138 - RNA, 19 nt, Homo sapiens
  misc_RNA (1)...(19): siRNA sense strand
cagacaagcauccaggaga

SEQ ID NO: 2279139 - RNA, 19 nt, Homo sapiens
  misc_RNA (1)...(19): siRNA sense strand
cggaagagguggauguacc

SEQ ID NO: 2279140 - RNA, 19 nt, Homo sapiens
  misc_RNA (1)...(19): siRNA sense strand
gagaauggcucccuggacu

SEQ ID NO: 2279141 - RNA, 19 nt, Homo sapiens
  misc_RNA (1)...(19): siRNA sense strand
cgggaaauacaaggaauau

SEQ ID NO: 2279142 - RNA, 19 nt, Homo sapiens
  misc_RNA (1)...(19): siRNA sense strand
gagucaagccagaacaacu

SEQ ID NO: 2279143 - RNA, 19 nt, Homo sapiens
  misc_RNA (1)...(19): siRNA sense strand
gguggugguucgagggcua

SEQ ID NO: 2279144 - RNA, 19 nt, Homo sapiens
  misc_RNA (1)...(19): siRNA sense strand
gagcaaugggagagaagca

SEQ ID NO: 2279145 - RNA, 19 nt, Homo sapiens
  misc_RNA (1)...(19): siRNA sense strand
aagcagaauauucggacaa

SEQ ID NO: 2279146 - RNA, 19 nt, Homo sapiens
  misc_RNA (1)...(19): siRNA sense strand
cguacugggacaugagcaa

SEQ ID NO: 2279147 - RNA, 19 nt, Homo sapiens
  misc_RNA (1)...(19): siRNA sense strand
cuaaugaggcugugaggga

SEQ ID NO: 2279148 - RNA, 19 nt, Homo sapiens
  misc_RNA (1)...(19): siRNA sense strand
acaugaagucccaggccaa

SEQ ID NO: 2279149 - RNA, 19 nt, Homo sapiens
  misc_RNA (1)...(19): siRNA sense strand
gaagcagagcaaugggaga

SEQ ID NO: 2279150 - RNA, 19 nt, Homo sapiens
  misc_RNA (1)...(19): siRNA sense strand
uggacaagaugauccggaa

SEQ ID NO: 2279151 - RNA, 19 nt, Homo sapiens
  misc_RNA (1)...(19): siRNA sense strand
ucauccagcucgugggcau

SEQ ID NO: 2279152 - RNA, 19 nt, Homo sapiens
  misc_RNA (1)...(19): siRNA sense strand
caaugggagagaagcagaa

SEQ ID NO: 2279153 - RNA, 19 nt, Homo sapiens
  misc_RNA (1)...(19): siRNA sense strand
gaagcagaauauucggaca

SEQ ID NO: 2279154 - RNA, 19 nt, Homo sapiens
  misc_RNA (1)...(19): siRNA sense strand
uggcgggacaccagaagaa

SEQ ID NO: 2279155 - RNA, 19 nt, Homo sapiens
  misc_RNA (1)...(19): siRNA sense strand
gaggagaacucuuccgauc

SEQ ID NO: 2279156 - RNA, 19 nt, Homo sapiens
  misc_RNA (1)...(19): siRNA sense strand
caccacugaccgagaggua

SEQ ID NO: 2279157 - RNA, 19 nt, Homo sapiens
  misc_RNA (1)...(19): siRNA sense strand
aggucaaauaccaugagaa

SEQ ID NO: 2279158 - RNA, 19 nt, Homo sapiens
  misc_RNA (1)...(19): siRNA sense strand
gcugaucugaaguggguga

SEQ ID NO: 2279159 - RNA, 19 nt, Homo sapiens
  misc_RNA (1)...(19): siRNA sense strand
gccucaggaagcagagcaa

SEQ ID NO: 2279160 - RNA, 19 nt, Homo sapiens
  misc_RNA (1)...(19): siRNA sense strand
aaugaggcugugagggaau

SEQ ID NO: 2279161 - RNA, 19 nt, Homo sapiens
  misc_RNA (1)...(19): siRNA sense strand
gagaggccguacugggaca

SEQ ID NO: 2279162 - RNA, 19 nt, Homo sapiens
  misc_RNA (1)...(19): siRNA sense strand
cugugagggaauuugcaaa

SEQ ID NO: 2279163 - RNA, 19 nt, Homo sapiens
  misc_RNA (1)...(19): siRNA sense strand
aaggagagcuguguggcaa

SEQ ID NO: 2279164 - RNA, 19 nt, Homo sapiens
  misc_RNA (1)...(19): siRNA sense strand
augcagagccagaggagga

SEQ ID NO: 2279165 - RNA, 19 nt, Homo sapiens
  misc_RNA (1)...(19): siRNA sense strand
agaagaagcugcugcacca

SEQ ID NO: 2279166 - RNA, 19 nt, Homo sapiens
  misc_RNA (1)...(19): siRNA sense strand
ucuucaaugucgugugcaa

SEQ ID NO: 2279167 - RNA, 19 nt, Homo sapiens
  misc_RNA (1)...(19): siRNA sense strand
uggaagagguauugcugga

SEQ ID NO: 2279168 - RNA, 19 nt, Homo sapiens
  misc_RNA (1)...(19): siRNA sense strand
gugaauagccacuuggugu

SEQ ID NO: 2279169 - RNA, 19 nt, Homo sapiens
  misc_RNA (1)...(19): siRNA sense strand
ucuuagaggugcaggcugu

SEQ ID NO: 2279170 - RNA, 19 nt, Homo sapiens
  misc_RNA (1)...(19): siRNA sense strand
gcuacuaugaccaggcaga

SEQ ID NO: 2279171 - RNA, 19 nt, Homo sapiens
  misc_RNA (1)...(19): siRNA sense strand
augcaauagagcaggaguu

SEQ ID NO: 2279172 - RNA, 19 nt, Homo sapiens
  misc_RNA (1)...(19): siRNA sense strand
cgaccagaccaaugggaac

SEQ ID NO: 2279173 - RNA, 19 nt, Homo sapiens
  misc_RNA (1)...(19): siRNA sense strand
gggagcagacuguggccau

SEQ ID NO: 2279174 - RNA, 19 nt, Homo sapiens
  misc_RNA (1)...(19): siRNA sense strand
cauggaaagcauacaacau

SEQ ID NO: 2279175 - RNA, 19 nt, Homo sapiens
  misc_RNA (1)...(19): siRNA sense strand
ggacacaauugcagcagac

SEQ ID NO: 2279176 - RNA, 19 nt, Homo sapiens
  misc_RNA (1)...(19): siRNA sense strand
aggucauugcacauggaaa

SEQ ID NO: 2279177 - RNA, 19 nt, Homo sapiens
  misc_RNA (1)...(19): siRNA sense strand
uugacaagaugauccgcaa

SEQ ID NO: 2279178 - RNA, 19 nt, Homo sapiens
  misc_RNA (1)...(19): siRNA sense strand
gggugaaguauuacaucga

SEQ ID NO: 2279179 - RNA, 19 nt, Homo sapiens
  misc_RNA (1)...(19): siRNA sense strand
ugaggaggucauugggaca

SEQ ID NO: 2279180 - RNA, 19 nt, Homo sapiens
  misc_RNA (1)...(19): siRNA sense strand
cuuacugggacaugaguga

SEQ ID NO: 2279181 - RNA, 19 nt, Homo sapiens
  misc_RNA (1)...(19): siRNA sense strand
gaagagguauugcuggaca

SEQ ID NO: 2279182 - RNA, 19 nt, Homo sapiens
  misc_RNA (1)...(19): siRNA sense strand
aggagguacuaaaugcaau

SEQ ID NO: 2279183 - RNA, 19 nt, Homo sapiens
  misc_RNA (1)...(19): siRNA sense strand
acuaaaugcaauagagcag

SEQ ID NO: 2279184 - RNA, 19 nt, Homo sapiens
  misc_RNA (1)...(19): siRNA sense strand
caguaagcaugaagagcua

SEQ ID NO: 2279185 - RNA, 19 nt, Homo sapiens
  misc_RNA (1)...(19): siRNA sense strand
acacaugcccugagaacaa

SEQ ID NO: 2279186 - RNA, 19 nt, Homo sapiens
  misc_RNA (1)...(19): siRNA sense strand
aggacaaagauaagaagaa

SEQ ID NO: 2279187 - RNA, 19 nt, Homo sapiens
  misc_RNA (1)...(19): siRNA sense strand
gguugggucuugaggcaaa

SEQ ID NO: 2279188 - RNA, 19 nt, Homo sapiens
  misc_RNA (1)...(19): siRNA sense strand
cagaauaccaugacagaga

SEQ ID NO: 2279189 - RNA, 19 nt, Homo sapiens
  misc_RNA (1)...(19): siRNA sense strand
acaucagggucaaaggaaa

SEQ ID NO: 2279190 - RNA, 19 nt, Homo sapiens
  misc_RNA (1)...(19): siRNA sense strand
agaaacaccagaagcgaaa

SEQ ID NO: 2279191 - RNA, 19 nt, Homo sapiens
  misc_RNA (1)...(19): siRNA sense strand
ccacuggagcugaggacaa

SEQ ID NO: 2279192 - RNA, 19 nt, Homo sapiens
  misc_RNA (1)...(19): siRNA sense strand
gguuacaagaucuggcaaa

SEQ ID NO: 2279193 - RNA, 19 nt, Homo sapiens
  misc_RNA (1)...(19): siRNA sense strand
ggcaagaacaguugaaaca

SEQ ID NO: 2279194 - RNA, 19 nt, Homo sapiens
  misc_RNA (1)...(19): siRNA sense strand
augaagaacuccuggcaau

SEQ ID NO: 2279195 - RNA, 19 nt, Homo sapiens
  misc_RNA (1)...(19): siRNA sense strand
uggaagaggcagcggaaga

SEQ ID NO: 2279196 - RNA, 19 nt, Homo sapiens
  misc_RNA (1)...(19): siRNA sense strand
cagacgagauacuggagaa

SEQ ID NO: 2279197 - RNA, 19 nt, Homo sapiens
  misc_RNA (1)...(19): siRNA sense strand
uggaaagauuguucagauu

SEQ ID NO: 2279198 - RNA, 19 nt, Homo sapiens
  misc_RNA (1)...(19): siRNA sense strand
ugacaugaguaguaacaau

SEQ ID NO: 2279199 - RNA, 19 nt, Homo sapiens
  misc_RNA (1)...(19): siRNA sense strand
uugcauuacugaagaaaga

SEQ ID NO: 2279200 - RNA, 19 nt, Homo sapiens
  misc_RNA (1)...(19): siRNA sense strand
ggaaaagaccaaaguagaa

SEQ ID NO: 2279201 - RNA, 19 nt, Homo sapiens
  misc_RNA (1)...(19): siRNA sense strand
cugaaauaggacagaauau

SEQ ID NO: 2279202 - RNA, 19 nt, Homo sapiens
  misc_RNA (1)...(19): siRNA sense strand
ccuacguacucgugaauuu

SEQ ID NO: 2279203 - RNA, 19 nt, Homo sapiens
  misc_RNA (1)...(19): siRNA sense strand
aaaggaagaaagacggaaa

SEQ ID NO: 2279204 - RNA, 19 nt, Homo sapiens
  misc_RNA (1)...(19): siRNA sense strand
ugaugaaguugcugcacaa

SEQ ID NO: 2279205 - RNA, 19 nt, Homo sapiens
  misc_RNA (1)...(19): siRNA sense strand
gcagaauaagccucagaaa

SEQ ID NO: 2279206 - RNA, 19 nt, Homo sapiens
  misc_RNA (1)...(19): siRNA sense strand
uggaagacuuucagaagau

SEQ ID NO: 2279207 - RNA, 19 nt, Homo sapiens
  misc_RNA (1)...(19): siRNA sense strand
aaaugauggccaaaggaaa

SEQ ID NO: 2279208 - RNA, 19 nt, Homo sapiens
  misc_RNA (1)...(19): siRNA sense strand
ggaugauacuccugcugaa

SEQ ID NO: 2279209 - RNA, 19 nt, Homo sapiens
  misc_RNA (1)...(19): siRNA sense strand
caacaagaacaguaagcau

SEQ ID NO: 2279210 - RNA, 19 nt, Homo sapiens
  misc_RNA (1)...(19): siRNA sense strand
uuugauaggaguagaguau

SEQ ID NO: 2279211 - RNA, 19 nt, Homo sapiens
  misc_RNA (1)...(19): siRNA sense strand
gcggagaugggaaagguua

SEQ ID NO: 2279212 - RNA, 19 nt, Homo sapiens
  misc_RNA (1)...(19): siRNA sense strand
ucgaguggcaccugagaaa

SEQ ID NO: 2279213 - RNA, 19 nt, Homo sapiens
  misc_RNA (1)...(19): siRNA sense strand
ccauauaguugcaaggaag

SEQ ID NO: 2279214 - RNA, 19 nt, Homo sapiens
  misc_RNA (1)...(19): siRNA sense strand
gaaacaaaaugauggccaa

SEQ ID NO: 2279215 - RNA, 19 nt, Homo sapiens
  misc_RNA (1)...(19): siRNA sense strand
ugggaaauuuguugagcuu

SEQ ID NO: 2279216 - RNA, 19 nt, Homo sapiens
  misc_RNA (1)...(19): siRNA sense strand
ugguauagucccaaaguuu

SEQ ID NO: 2279217 - RNA, 19 nt, Homo sapiens
  misc_RNA (1)...(19): siRNA sense strand
caucagggucaaaggaaaa

SEQ ID NO: 2279218 - RNA, 19 nt, Homo sapiens
  misc_RNA (1)...(19): siRNA sense strand
ccaaaguagaagccacaaa

SEQ ID NO: 2279219 - RNA, 19 nt, Homo sapiens
  misc_RNA (1)...(19): siRNA sense strand
aaaaugaggcagagacuaa

SEQ ID NO: 2279220 - RNA, 19 nt, Homo sapiens
  misc_RNA (1)...(19): siRNA sense strand
cuggauuauugaagcuuua

SEQ ID NO: 2279221 - RNA, 19 nt, Homo sapiens
  misc_RNA (1)...(19): siRNA sense strand
agaaagcaccaaaggaaga

SEQ ID NO: 2279222 - RNA, 19 nt, Homo sapiens
  misc_RNA (1)...(19): siRNA sense strand
gugcauuagagaaagagaa

SEQ ID NO: 2279223 - RNA, 19 nt, Homo sapiens
  misc_RNA (1)...(19): siRNA sense strand
cucauaugguuguggcuaa

SEQ ID NO: 2279224 - RNA, 19 nt, Homo sapiens
  misc_RNA (1)...(19): siRNA sense strand
gcauaucaaaccagaucaa

SEQ ID NO: 2279225 - RNA, 19 nt, Homo sapiens
  misc_RNA (1)...(19): siRNA sense strand
agcuaaaggcacaguacaa

SEQ ID NO: 2279226 - RNA, 19 nt, Homo sapiens
  misc_RNA (1)...(19): siRNA sense strand
gacuaaacuucaagcuauu

SEQ ID NO: 2279227 - RNA, 19 nt, Homo sapiens
  misc_RNA (1)...(19): siRNA sense strand
agauguagaugcagcugua

SEQ ID NO: 2279228 - RNA, 19 nt, Homo sapiens
  misc_RNA (1)...(19): siRNA sense strand
caaugaaggacuaguagau

SEQ ID NO: 2279229 - RNA, 19 nt, Homo sapiens
  misc_RNA (1)...(19): siRNA sense strand
agaaagacggaaaaggaaa

SEQ ID NO: 2279230 - RNA, 19 nt, Homo sapiens
  misc_RNA (1)...(19): siRNA sense strand
gaaagacggaaaaggaaaa

SEQ ID NO: 2279231 - RNA, 19 nt, Homo sapiens
  misc_RNA (1)...(19): siRNA sense strand
caagaacaguugaaacaga

SEQ ID NO: 2279232 - RNA, 19 nt, Homo sapiens
  misc_RNA (1)...(19): siRNA sense strand
gggaaagguuaccgucaga

SEQ ID NO: 2279233 - RNA, 19 nt, Homo sapiens
  misc_RNA (1)...(19): siRNA sense strand
agaugaaagcagaacguga

SEQ ID NO: 2279234 - RNA, 19 nt, Homo sapiens
  misc_RNA (1)...(19): siRNA sense strand
guguucagguggugauuau

SEQ ID NO: 2279235 - RNA, 19 nt, Homo sapiens
  misc_RNA (1)...(19): siRNA sense strand
acuagauucuggaaagauu

SEQ ID NO: 2279236 - RNA, 19 nt, Homo sapiens
  misc_RNA (1)...(19): siRNA sense strand
aaccaaagcucgaguggca

SEQ ID NO: 2279237 - RNA, 19 nt, Homo sapiens
  misc_RNA (1)...(19): siRNA sense strand
agaugaaagaaguagccaa

SEQ ID NO: 2279238 - RNA, 19 nt, Homo sapiens
  misc_RNA (1)...(19): siRNA sense strand
gggaagccaucaaggacuu

SEQ ID NO: 2279239 - RNA, 19 nt, Homo sapiens
  misc_RNA (1)...(19): siRNA sense strand
ggaaauugacugugaggac

SEQ ID NO: 2279240 - RNA, 19 nt, Homo sapiens
  misc_RNA (1)...(19): siRNA sense strand
aagcugaauauaaggagaa

SEQ ID NO: 2279241 - RNA, 19 nt, Homo sapiens
  misc_RNA (1)...(19): siRNA sense strand
aggaauauaaaccuggaaa

SEQ ID NO: 2279242 - RNA, 19 nt, Homo sapiens
  misc_RNA (1)...(19): siRNA sense strand
ccagagguugcuuggguua

SEQ ID NO: 2279243 - RNA, 19 nt, Homo sapiens
  misc_RNA (1)...(19): siRNA sense strand
agagcugauuuacgagaua

SEQ ID NO: 2279244 - RNA, 19 nt, Homo sapiens
  misc_RNA (1)...(19): siRNA sense strand
ccgcguuagagcugauuua

SEQ ID NO: 2279245 - RNA, 19 nt, Homo sapiens
  misc_RNA (1)...(19): siRNA sense strand
ggaggagaugaaagaagua

SEQ ID NO: 2279246 - RNA, 19 nt, Homo sapiens
  misc_RNA (1)...(19): siRNA sense strand
ggagcugaggacaaagaua

SEQ ID NO: 2279247 - RNA, 19 nt, Homo sapiens
  misc_RNA (1)...(19): siRNA sense strand
gacaaagauaagaagaaga

SEQ ID NO: 2279248 - RNA, 19 nt, Homo sapiens
  misc_RNA (1)...(19): siRNA sense strand
cccaaagaauccugagguu

SEQ ID NO: 2279249 - RNA, 19 nt, Homo sapiens
  misc_RNA (1)...(19): siRNA sense strand
aguaauguauccugcauau

SEQ ID NO: 2279250 - RNA, 19 nt, Homo sapiens
  misc_RNA (1)...(19): siRNA sense strand
uggcaauuccuguuguuaa

SEQ ID NO: 2279251 - RNA, 19 nt, Homo sapiens
  misc_RNA (1)...(19): siRNA sense strand
acuaguagauggaugggau

SEQ ID NO: 2279252 - RNA, 19 nt, Homo sapiens
  misc_RNA (1)...(19): siRNA sense strand
gugcugaugcagagacuuu

SEQ ID NO: 2279253 - RNA, 19 nt, Homo sapiens
  misc_RNA (1)...(19): siRNA sense strand
gggcagagauugaaggucu

SEQ ID NO: 2279254 - RNA, 19 nt, Homo sapiens
  misc_RNA (1)...(19): siRNA sense strand
aguuaagggcagagauuga

SEQ ID NO: 2279255 - RNA, 19 nt, Homo sapiens
  misc_RNA (1)...(19): siRNA sense strand
cagaggaagaggccggaaa

SEQ ID NO: 2279256 - RNA, 19 nt, Homo sapiens
  misc_RNA (1)...(19): siRNA sense strand
cuguaggaguucuggguca

SEQ ID NO: 2279257 - RNA, 19 nt, Homo sapiens
  misc_RNA (1)...(19): siRNA sense strand
cugacagauuccuggcuaa

SEQ ID NO: 2279258 - RNA, 19 nt, Homo sapiens
  misc_RNA (1)...(19): siRNA sense strand
aagaaaacgugcacagaau

SEQ ID NO: 2279259 - RNA, 19 nt, Homo sapiens
  misc_RNA (1)...(19): siRNA sense strand
gucaaaguccagaggaaga

SEQ ID NO: 2279260 - RNA, 19 nt, Homo sapiens
  misc_RNA (1)...(19): siRNA sense strand
acaguuaagggcagagauu

SEQ ID NO: 2279261 - RNA, 19 nt, Homo sapiens
  misc_RNA (1)...(19): siRNA sense strand
acuaggaguaacugcauaa

SEQ ID NO: 2279262 - RNA, 19 nt, Homo sapiens
  misc_RNA (1)...(19): siRNA sense strand
cccuugaacagcagugaaa

SEQ ID NO: 2279263 - RNA, 19 nt, Homo sapiens
  misc_RNA (1)...(19): siRNA sense strand
ggguugacuggaugaggaa

SEQ ID NO: 2279264 - RNA, 19 nt, Homo sapiens
  misc_RNA (1)...(19): siRNA sense strand
ccacuuacgauuugggugu

SEQ ID NO: 2279265 - RNA, 19 nt, Homo sapiens
  misc_RNA (1)...(19): siRNA sense strand
ugagagaaccuguaggagu

SEQ ID NO: 2279266 - RNA, 19 nt, Homo sapiens
  misc_RNA (1)...(19): siRNA sense strand
gacuggagauggagcgcuu

SEQ ID NO: 2279267 - RNA, 19 nt, Homo sapiens
  misc_RNA (1)...(19): siRNA sense strand
acuuaucaguugcaggaau

SEQ ID NO: 2279268 - RNA, 19 nt, Homo sapiens
  misc_RNA (1)...(19): siRNA sense strand
uguuggagguggugauacu

SEQ ID NO: 2279269 - RNA, 19 nt, Homo sapiens
  misc_RNA (1)...(19): siRNA sense strand
gggauuuggaugaaaccau

SEQ ID NO: 2279270 - RNA, 19 nt, Homo sapiens
  misc_RNA (1)...(19): siRNA sense strand
caagacagagaguggacuu

SEQ ID NO: 2279271 - RNA, 19 nt, Homo sapiens
  misc_RNA (1)...(19): siRNA sense strand
acaccuuauucuuaccaaa

SEQ ID NO: 2279272 - RNA, 19 nt, Homo sapiens
  misc_RNA (1)...(19): siRNA sense strand
uaacacagccgauggcaca

SEQ ID NO: 2279273 - RNA, 19 nt, Homo sapiens
  misc_RNA (1)...(19): siRNA sense strand
gaacagcagugaaaccaca

SEQ ID NO: 2279274 - RNA, 19 nt, Homo sapiens
  misc_RNA (1)...(19): siRNA sense strand
caagagggaugccuggcua

SEQ ID NO: 2279275 - RNA, 19 nt, Homo sapiens
  misc_RNA (1)...(19): siRNA sense strand
gaauauuuacagugcaacu

SEQ ID NO: 2279276 - RNA, 19 nt, Homo sapiens
  misc_RNA (1)...(19): siRNA sense strand
augcacagaaguauggcaa

SEQ ID NO: 2279277 - RNA, 19 nt, Homo sapiens
  misc_RNA (1)...(19): siRNA sense strand
ccaggauuuaaaugaacaa

SEQ ID NO: 2279278 - RNA, 19 nt, Homo sapiens
  misc_RNA (1)...(19): siRNA sense strand
ugauaaugggcaggacuua

SEQ ID NO: 2279279 - RNA, 19 nt, Homo sapiens
  misc_RNA (1)...(19): siRNA sense strand
gggcagagauugaaggucu

SEQ ID NO: 2279280 - RNA, 19 nt, Homo sapiens
  misc_RNA (1)...(19): siRNA sense strand
aguuaagggcagagauuga

SEQ ID NO: 2279281 - RNA, 19 nt, Homo sapiens
  misc_RNA (1)...(19): siRNA sense strand
cagaggaagaggccggaaa

SEQ ID NO: 2279282 - RNA, 19 nt, Homo sapiens
  misc_RNA (1)...(19): siRNA sense strand
cuguaggaguucuggguca

SEQ ID NO: 2279283 - RNA, 19 nt, Homo sapiens
  misc_RNA (1)...(19): siRNA sense strand
cugacagauuccuggcuaa

SEQ ID NO: 2279284 - RNA, 19 nt, Homo sapiens
  misc_RNA (1)...(19): siRNA sense strand
cuauacagccuuuggccaa

SEQ ID NO: 2279285 - RNA, 19 nt, Homo sapiens
  misc_RNA (1)...(19): siRNA sense strand
gucaaaguccagaggaaga

SEQ ID NO: 2279286 - RNA, 19 nt, Homo sapiens
  misc_RNA (1)...(19): siRNA sense strand
acaguuaagggcagagauu

SEQ ID NO: 2279287 - RNA, 19 nt, Homo sapiens
  misc_RNA (1)...(19): siRNA sense strand
acuaggaguaacugcauaa

SEQ ID NO: 2279288 - RNA, 19 nt, Homo sapiens
  misc_RNA (1)...(19): siRNA sense strand
cccuugaacagcagugaaa

SEQ ID NO: 2279289 - RNA, 19 nt, Homo sapiens
  misc_RNA (1)...(19): siRNA sense strand
ggguugacuggaugaggaa

SEQ ID NO: 2279290 - RNA, 19 nt, Homo sapiens
  misc_RNA (1)...(19): siRNA sense strand
ccacuuacgauuugggugu

SEQ ID NO: 2279291 - RNA, 19 nt, Homo sapiens
  misc_RNA (1)...(19): siRNA sense strand
ugagagaaccuguaggagu

SEQ ID NO: 2279292 - RNA, 19 nt, Homo sapiens
  misc_RNA (1)...(19): siRNA sense strand
gacuggagauggagcgcuu

SEQ ID NO: 2279293 - RNA, 19 nt, Homo sapiens
  misc_RNA (1)...(19): siRNA sense strand
acuuaucaguugcaggaau

SEQ ID NO: 2279294 - RNA, 19 nt, Homo sapiens
  misc_RNA (1)...(19): siRNA sense strand
gggauuuggaugaaaccau

SEQ ID NO: 2279295 - RNA, 19 nt, Homo sapiens
  misc_RNA (1)...(19): siRNA sense strand
caagacagagaguggacuu

SEQ ID NO: 2279296 - RNA, 19 nt, Homo sapiens
  misc_RNA (1)...(19): siRNA sense strand
acaccuuauucuuaccaaa

SEQ ID NO: 2279297 - RNA, 19 nt, Homo sapiens
  misc_RNA (1)...(19): siRNA sense strand
uaacacagccgauggcaca

SEQ ID NO: 2279298 - RNA, 19 nt, Homo sapiens
  misc_RNA (1)...(19): siRNA sense strand
caagagggaugccuggcua

SEQ ID NO: 2279299 - RNA, 19 nt, Homo sapiens
  misc_RNA (1)...(19): siRNA sense strand
gaacagcagugaaaccaca

SEQ ID NO: 2279300 - RNA, 19 nt, Homo sapiens
  misc_RNA (1)...(19): siRNA sense strand
gaauauuuacagugcaacu

SEQ ID NO: 2279301 - RNA, 19 nt, Homo sapiens
  misc_RNA (1)...(19): siRNA sense strand
augcacagaaguauggcaa

SEQ ID NO: 2279302 - RNA, 19 nt, Homo sapiens
  misc_RNA (1)...(19): siRNA sense strand
ugauaaugggcaggacuua

SEQ ID NO: 2279303 - RNA, 19 nt, Homo sapiens
  misc_RNA (1)...(19): siRNA sense strand
gggcagagauugaaggucu

SEQ ID NO: 2279304 - RNA, 19 nt, Homo sapiens
  misc_RNA (1)...(19): siRNA sense strand
aguuaagggcagagauuga

SEQ ID NO: 2279305 - RNA, 19 nt, Homo sapiens
  misc_RNA (1)...(19): siRNA sense strand
cagaggaagaggccggaaa

SEQ ID NO: 2279306 - RNA, 19 nt, Homo sapiens
  misc_RNA (1)...(19): siRNA sense strand
cuguaggaguucuggguca

SEQ ID NO: 2279307 - RNA, 19 nt, Homo sapiens
  misc_RNA (1)...(19): siRNA sense strand
cugacagauuccuggcuaa

SEQ ID NO: 2279308 - RNA, 19 nt, Homo sapiens
  misc_RNA (1)...(19): siRNA sense strand
cuauacagccuuuggccaa

SEQ ID NO: 2279309 - RNA, 19 nt, Homo sapiens
  misc_RNA (1)...(19): siRNA sense strand
aagaaaacgugcacagaau

SEQ ID NO: 2279310 - RNA, 19 nt, Homo sapiens
  misc_RNA (1)...(19): siRNA sense strand
gucaaaguccagaggaaga

SEQ ID NO: 2279311 - RNA, 19 nt, Homo sapiens
  misc_RNA (1)...(19): siRNA sense strand
acaguuaagggcagagauu

SEQ ID NO: 2279312 - RNA, 19 nt, Homo sapiens
  misc_RNA (1)...(19): siRNA sense strand
acuaggaguaacugcauaa

SEQ ID NO: 2279313 - RNA, 19 nt, Homo sapiens
  misc_RNA (1)...(19): siRNA sense strand
cccuugaacagcagugaaa

SEQ ID NO: 2279314 - RNA, 19 nt, Homo sapiens
  misc_RNA (1)...(19): siRNA sense strand
ggguugacuggaugaggaa

SEQ ID NO: 2279315 - RNA, 19 nt, Homo sapiens
  misc_RNA (1)...(19): siRNA sense strand
ccacuuacgauuugggugu

SEQ ID NO: 2279316 - RNA, 19 nt, Homo sapiens
  misc_RNA (1)...(19): siRNA sense strand
ugagagaaccuguaggagu

SEQ ID NO: 2279317 - RNA, 19 nt, Homo sapiens
  misc_RNA (1)...(19): siRNA sense strand
gacuggagauggagcgcuu

SEQ ID NO: 2279318 - RNA, 19 nt, Homo sapiens
  misc_RNA (1)...(19): siRNA sense strand
acuuaucaguugcaggaau

SEQ ID NO: 2279319 - RNA, 19 nt, Homo sapiens
  misc_RNA (1)...(19): siRNA sense strand
uguuggagguggugauacu

SEQ ID NO: 2279320 - RNA, 19 nt, Homo sapiens
  misc_RNA (1)...(19): siRNA sense strand
gggauuuggaugaaaccau

SEQ ID NO: 2279321 - RNA, 19 nt, Homo sapiens
  misc_RNA (1)...(19): siRNA sense strand
caagacagagaguggacuu

SEQ ID NO: 2279322 - RNA, 19 nt, Homo sapiens
  misc_RNA (1)...(19): siRNA sense strand
acaccuuauucuuaccaaa

SEQ ID NO: 2279323 - RNA, 19 nt, Homo sapiens
  misc_RNA (1)...(19): siRNA sense strand
uaacacagccgauggcaca

SEQ ID NO: 2279324 - RNA, 19 nt, Homo sapiens
  misc_RNA (1)...(19): siRNA sense strand
gaacagcagugaaaccaca

SEQ ID NO: 2279325 - RNA, 19 nt, Homo sapiens
  misc_RNA (1)...(19): siRNA sense strand
caagagggaugccuggcua

SEQ ID NO: 2279326 - RNA, 19 nt, Homo sapiens
  misc_RNA (1)...(19): siRNA sense strand
gaauauuuacagugcaacu

SEQ ID NO: 2279327 - RNA, 19 nt, Homo sapiens
  misc_RNA (1)...(19): siRNA sense strand
augcacagaaguauggcaa

SEQ ID NO: 2279328 - RNA, 19 nt, Homo sapiens
  misc_RNA (1)...(19): siRNA sense strand
ccaggauuuaaaugaacaa

SEQ ID NO: 2279329 - RNA, 19 nt, Homo sapiens
  misc_RNA (1)...(19): siRNA sense strand
ugauaaugggcaggacuua

SEQ ID NO: 2279330 - RNA, 19 nt, Homo sapiens
  misc_RNA (1)...(19): siRNA sense strand
gggcagagauugaaggucu

SEQ ID NO: 2279331 - RNA, 19 nt, Homo sapiens
  misc_RNA (1)...(19): siRNA sense strand
aguuaagggcagagauuga

SEQ ID NO: 2279332 - RNA, 19 nt, Homo sapiens
  misc_RNA (1)...(19): siRNA sense strand
cagaggaagaggccggaaa

SEQ ID NO: 2279333 - RNA, 19 nt, Homo sapiens
  misc_RNA (1)...(19): siRNA sense strand
cuguaggaguucuggguca

SEQ ID NO: 2279334 - RNA, 19 nt, Homo sapiens
  misc_RNA (1)...(19): siRNA sense strand
cugacagauuccuggcuaa

SEQ ID NO: 2279335 - RNA, 19 nt, Homo sapiens
  misc_RNA (1)...(19): siRNA sense strand
aagaaaacgugcacagaau

SEQ ID NO: 2279336 - RNA, 19 nt, Homo sapiens
  misc_RNA (1)...(19): siRNA sense strand
gucaaaguccagaggaaga

SEQ ID NO: 2279337 - RNA, 19 nt, Homo sapiens
  misc_RNA (1)...(19): siRNA sense strand
acaguuaagggcagagauu

SEQ ID NO: 2279338 - RNA, 19 nt, Homo sapiens
  misc_RNA (1)...(19): siRNA sense strand
acuaggaguaacugcauaa

SEQ ID NO: 2279339 - RNA, 19 nt, Homo sapiens
  misc_RNA (1)...(19): siRNA sense strand
cccuugaacagcagugaaa

SEQ ID NO: 2279340 - RNA, 19 nt, Homo sapiens
  misc_RNA (1)...(19): siRNA sense strand
ggguugacuggaugaggaa

SEQ ID NO: 2279341 - RNA, 19 nt, Homo sapiens
  misc_RNA (1)...(19): siRNA sense strand
ccacuuacgauuugggugu

SEQ ID NO: 2279342 - RNA, 19 nt, Homo sapiens
  misc_RNA (1)...(19): siRNA sense strand
ugagagaaccuguaggagu

SEQ ID NO: 2279343 - RNA, 19 nt, Homo sapiens
  misc_RNA (1)...(19): siRNA sense strand
gacuggagauggagcgcuu

SEQ ID NO: 2279344 - RNA, 19 nt, Homo sapiens
  misc_RNA (1)...(19): siRNA sense strand
acuuaucaguugcaggaau

SEQ ID NO: 2279345 - RNA, 19 nt, Homo sapiens
  misc_RNA (1)...(19): siRNA sense strand
uguuggagguggugauacu

SEQ ID NO: 2279346 - RNA, 19 nt, Homo sapiens
  misc_RNA (1)...(19): siRNA sense strand
gggauuuggaugaaaccau

SEQ ID NO: 2279347 - RNA, 19 nt, Homo sapiens
  misc_RNA (1)...(19): siRNA sense strand
caagacagagaguggacuu

SEQ ID NO: 2279348 - RNA, 19 nt, Homo sapiens
  misc_RNA (1)...(19): siRNA sense strand
acaccuuauucuuaccaaa

SEQ ID NO: 2279349 - RNA, 19 nt, Homo sapiens
  misc_RNA (1)...(19): siRNA sense strand
uaacacagccgauggcaca

SEQ ID NO: 2279350 - RNA, 19 nt, Homo sapiens
  misc_RNA (1)...(19): siRNA sense strand
gaacagcagugaaaccaca

SEQ ID NO: 2279351 - RNA, 19 nt, Homo sapiens
  misc_RNA (1)...(19): siRNA sense strand
caagagggaugccuggcua

SEQ ID NO: 2279352 - RNA, 19 nt, Homo sapiens
  misc_RNA (1)...(19): siRNA sense strand
gaauauuuacagugcaacu

SEQ ID NO: 2279353 - RNA, 19 nt, Homo sapiens
  misc_RNA (1)...(19): siRNA sense strand
augcacagaaguauggcaa

SEQ ID NO: 2279354 - RNA, 19 nt, Homo sapiens
  misc_RNA (1)...(19): siRNA sense strand
ccaggauuuaaaugaacaa

SEQ ID NO: 2279355 - RNA, 19 nt, Homo sapiens
  misc_RNA (1)...(19): siRNA sense strand
ugauaaugggcaggacuua

SEQ ID NO: 2279356 - RNA, 19 nt, Homo sapiens
  misc_RNA (1)...(19): siRNA sense strand
ggguauggaaagagcuaua

SEQ ID NO: 2279357 - RNA, 19 nt, Homo sapiens
  misc_RNA (1)...(19): siRNA sense strand
aaguuugauuugagagcaa

SEQ ID NO: 2279358 - RNA, 19 nt, Homo sapiens
  misc_RNA (1)...(19): siRNA sense strand
uaacugaauaugaggacaa

SEQ ID NO: 2279359 - RNA, 19 nt, Homo sapiens
  misc_RNA (1)...(19): siRNA sense strand
ccuuaagggaugacaguau

SEQ ID NO: 2279360 - RNA, 19 nt, Homo sapiens
  misc_RNA (1)...(19): siRNA sense strand
caugaugaugguaguguaa

SEQ ID NO: 2279361 - RNA, 19 nt, Homo sapiens
  misc_RNA (1)...(19): siRNA sense strand
ugaugaugguaguguaaaa

SEQ ID NO: 2279362 - RNA, 19 nt, Homo sapiens
  misc_RNA (1)...(19): siRNA sense strand
gugugugucuaguggagaa

SEQ ID NO: 2279363 - RNA, 19 nt, Homo sapiens
  misc_RNA (1)...(19): siRNA sense strand
ggguguauauggagggaug

SEQ ID NO: 2279364 - RNA, 19 nt, Homo sapiens
  misc_RNA (1)...(19): siRNA sense strand
gauuucgguuacagauaaa

SEQ ID NO: 2279365 - RNA, 19 nt, Homo sapiens
  misc_RNA (1)...(19): siRNA sense strand
uugcacaccuauugaguau

SEQ ID NO: 2279366 - RNA, 19 nt, Homo sapiens
  misc_RNA (1)...(19): siRNA sense strand
ccguggacucugaaacaua

SEQ ID NO: 2279367 - RNA, 19 nt, Homo sapiens
  misc_RNA (1)...(19): siRNA sense strand
cagaagacagauuuggaau

SEQ ID NO: 2279368 - RNA, 19 nt, Homo sapiens
  misc_RNA (1)...(19): siRNA sense strand
agaagacagauuuggaauu

SEQ ID NO: 2279369 - RNA, 19 nt, Homo sapiens
  misc_RNA (1)...(19): siRNA sense strand
ggacaagagaugggaagga

SEQ ID NO: 2279370 - RNA, 19 nt, Homo sapiens
  misc_RNA (1)...(19): siRNA sense strand
cgaacaagcagaagcccuu

SEQ ID NO: 2279371 - RNA, 19 nt, Homo sapiens
  misc_RNA (1)...(19): siRNA sense strand
uggaacaaggugauggauu

SEQ ID NO: 2279372 - RNA, 19 nt, Homo sapiens
  misc_RNA (1)...(19): siRNA sense strand
ccacuaacgauguagggau

SEQ ID NO: 2279373 - RNA, 19 nt, Homo sapiens
  misc_RNA (1)...(19): siRNA sense strand
gaacuggaaaccugggaga

SEQ ID NO: 2279374 - RNA, 19 nt, Homo sapiens
  misc_RNA (1)...(19): siRNA sense strand
cagaagaagcagauguugu

SEQ ID NO: 2279375 - RNA, 19 nt, Homo sapiens
  misc_RNA (1)...(19): siRNA sense strand
ucucaaugaagguggcuuu

SEQ ID NO: 2279376 - RNA, 19 nt, Homo sapiens
  misc_RNA (1)...(19): siRNA sense strand
aggugauggauuucgguua

SEQ ID NO: 2279377 - RNA, 19 nt, Homo sapiens
  misc_RNA (1)...(19): siRNA sense strand
gaaggagugaacauggaaa

SEQ ID NO: 2279378 - RNA, 19 nt, Homo sapiens
  misc_RNA (1)...(19): siRNA sense strand
gccaauucuuccagggcuu

SEQ ID NO: 2279379 - RNA, 19 nt, Homo sapiens
  misc_RNA (1)...(19): siRNA sense strand
acucauggguauggaaaga

SEQ ID NO: 2279380 - RNA, 19 nt, Homo sapiens
  misc_RNA (1)...(19): siRNA sense strand
cggaguacuggguguauau

SEQ ID NO: 2279381 - RNA, 19 nt, Homo sapiens
  misc_RNA (1)...(19): siRNA sense strand
cauggaaagguuugcagaa

SEQ ID NO: 2279382 - RNA, 19 nt, Homo sapiens
  misc_RNA (1)...(19): siRNA sense strand
ugagagaggacuggaacua

SEQ ID NO: 2279383 - RNA, 19 nt, Homo sapiens
  misc_RNA (1)...(19): siRNA sense strand
ccauuuagagaguuccaaa

SEQ ID NO: 2279384 - RNA, 19 nt, Homo sapiens
  misc_RNA (1)...(19): siRNA sense strand
gggauuggacugaaggagu

SEQ ID NO: 2279385 - RNA, 19 nt, Homo sapiens
  misc_RNA (1)...(19): siRNA sense strand
cgggauaaggacaagagau

SEQ ID NO: 2279386 - RNA, 19 nt, Homo sapiens
  misc_RNA (1)...(19): siRNA sense strand
agagaggacuggaacuaca

SEQ ID NO: 2279387 - RNA, 19 nt, Homo sapiens
  misc_RNA (1)...(19): siRNA sense strand
gguuacagauaaaugcuca

SEQ ID NO: 2279388 - RNA, 19 nt, Homo sapiens
  misc_RNA (1)...(19): siRNA sense strand
gaugggaaggagugaacau

SEQ ID NO: 2279389 - RNA, 19 nt, Homo sapiens
  misc_RNA (1)...(19): siRNA sense strand
cauccuagcauucggccaa

SEQ ID NO: 2279390 - RNA, 19 nt, Homo sapiens
  misc_RNA (1)...(19): siRNA sense strand
acuuaacacuccuguaaca

SEQ ID NO: 2279391 - RNA, 19 nt, Homo sapiens
  misc_RNA (1)...(19): siRNA sense strand
aaucaaagacaauaggacu

SEQ ID NO: 2279392 - RNA, 19 nt, Homo sapiens
  misc_RNA (1)...(19): siRNA sense strand
ugugguuggucuagacuau

SEQ ID NO: 2279393 - RNA, 19 nt, Homo sapiens
  misc_RNA (1)...(19): siRNA sense strand
gagcuggaugggcgaacaa

SEQ ID NO: 2279394 - RNA, 19 nt, Homo sapiens
  misc_RNA (1)...(19): siRNA sense strand
uggauuucgguuacagaua

SEQ ID NO: 2279395 - RNA, 19 nt, Homo sapiens
  misc_RNA (1)...(19): siRNA sense strand
gagcaaauugugaaccuca

SEQ ID NO: 2279396 - RNA, 19 nt, Homo sapiens
  misc_RNA (1)...(19): siRNA sense strand
ugaauguucccaagaucaa

SEQ ID NO: 2279397 - RNA, 19 nt, Homo sapiens
  misc_RNA (1)...(19): siRNA sense strand
augaggacaauuugaagaa

SEQ ID NO: 2279398 - RNA, 19 nt, Homo sapiens
  misc_RNA (1)...(19): siRNA sense strand
uacuggauauugagaggaa

SEQ ID NO: 2279399 - RNA, 19 nt, Homo sapiens
  misc_RNA (1)...(19): siRNA sense strand
agcccuugguguugaagua

SEQ ID NO: 2279400 - RNA, 19 nt, Homo sapiens
  misc_RNA (1)...(19): siRNA sense strand
agauaaaugcucagaacug

SEQ ID NO: 2279401 - RNA, 19 nt, Homo sapiens
  misc_RNA (1)...(19): siRNA sense strand
gaaugaaggugaaccccua

SEQ ID NO: 2279402 - RNA, 19 nt, Homo sapiens
  misc_RNA (1)...(19): siRNA sense strand
aauuuguaccuguggaaca

SEQ ID NO: 2279403 - RNA, 19 nt, Homo sapiens
  misc_RNA (1)...(19): siRNA sense strand
gagagcaaauugugaaccu

SEQ ID NO: 2279404 - RNA, 19 nt, Homo sapiens
  misc_RNA (1)...(19): siRNA sense strand
ugaaggaguuauggguuau

SEQ ID NO: 2279405 - RNA, 19 nt, Homo sapiens
  misc_RNA (1)...(19): siRNA sense strand
gagugguacuaaucaugaa

SEQ ID NO: 2279406 - RNA, 19 nt, Homo sapiens
  misc_RNA (1)...(19): siRNA sense strand
uaaagauccaagucagaau

SEQ ID NO: 2279407 - RNA, 19 nt, Homo sapiens
  misc_RNA (1)...(19): siRNA sense strand
gcagaaaugggacgggcaa

SEQ ID NO: 2279408 - RNA, 19 nt, Homo sapiens
  misc_RNA (1)...(19): siRNA sense strand
cuucaagaacacagagauc

SEQ ID NO: 2279409 - RNA, 19 nt, Homo sapiens
  misc_RNA (1)...(19): siRNA sense strand
agaaaugggacgggcaaga

SEQ ID NO: 2279410 - RNA, 19 nt, Homo sapiens
  misc_RNA (1)...(19): siRNA sense strand
cgaugagacaacagcagau

SEQ ID NO: 2279411 - RNA, 19 nt, Homo sapiens
  misc_RNA (1)...(19): siRNA sense strand
ccuggaagcuaguggacag

SEQ ID NO: 2279412 - RNA, 19 nt, Homo sapiens
  misc_RNA (1)...(19): siRNA sense strand
gggacauucucacccuaaa

SEQ ID NO: 2279413 - RNA, 19 nt, Homo sapiens
  misc_RNA (1)...(19): siRNA sense strand
gguuauucuuggacaguau

SEQ ID NO: 2279414 - RNA, 19 nt, Homo sapiens
  misc_RNA (1)...(19): siRNA sense strand
gauuacagauguuggguca

SEQ ID NO: 2279415 - RNA, 19 nt, Homo sapiens
  misc_RNA (1)...(19): siRNA sense strand
gcugaaacgcaaagagcuu

SEQ ID NO: 2279416 - RNA, 19 nt, Homo sapiens
  misc_RNA (1)...(19): siRNA sense strand
aggcggacauugagcgaau

SEQ ID NO: 2279417 - RNA, 19 nt, Homo sapiens
  misc_RNA (1)...(19): siRNA sense strand
ggacaguauaauuggcuuu

SEQ ID NO: 2279418 - RNA, 19 nt, Homo sapiens
  misc_RNA (1)...(19): siRNA sense strand
aaguacaaccaaauggaaa

SEQ ID NO: 2279419 - RNA, 19 nt, Homo sapiens
  misc_RNA (1)...(19): siRNA sense strand
gaaaggacuuaaagggacu

SEQ ID NO: 2279420 - RNA, 19 nt, Homo sapiens
  misc_RNA (1)...(19): siRNA sense strand
ccaucuaccaugaagcuaa

SEQ ID NO: 2279421 - RNA, 19 nt, Homo sapiens
  misc_RNA (1)...(19): siRNA sense strand
cagaacuaggagaggaaga

SEQ ID NO: 2279422 - RNA, 19 nt, Homo sapiens
  misc_RNA (1)...(19): siRNA sense strand
ucgaaagaaaggacuuaaa

SEQ ID NO: 2279423 - RNA, 19 nt, Homo sapiens
  misc_RNA (1)...(19): siRNA sense strand
cggaaaucauggaucggau

SEQ ID NO: 2279424 - RNA, 19 nt, Homo sapiens
  misc_RNA (1)...(19): siRNA sense strand
gucagaaaccaaagaccaa

SEQ ID NO: 2279425 - RNA, 19 nt, Homo sapiens
  misc_RNA (1)...(19): siRNA sense strand
ggacuacaauacuggcaga

SEQ ID NO: 2279426 - RNA, 19 nt, Homo sapiens
  misc_RNA (1)...(19): siRNA sense strand
aguacaaccaaauggaaaa

SEQ ID NO: 2279427 - RNA, 19 nt, Homo sapiens
  misc_RNA (1)...(19): siRNA sense strand
augaaacagaggugaccaa

SEQ ID NO: 2279428 - RNA, 19 nt, Homo sapiens
  misc_RNA (1)...(19): siRNA sense strand
ggaaaaugagguacuuaaa

SEQ ID NO: 2279429 - RNA, 19 nt, Homo sapiens
  misc_RNA (1)...(19): siRNA sense strand
gccaaggccagcauggaaa

SEQ ID NO: 2279430 - RNA, 19 nt, Homo sapiens
  misc_RNA (1)...(19): siRNA sense strand
cuuuaauacugauaagcca

SEQ ID NO: 2279431 - RNA, 19 nt, Homo sapiens
  misc_RNA (1)...(19): siRNA sense strand
uggcagcaguuccggaaau

SEQ ID NO: 2279432 - RNA, 19 nt, Homo sapiens
  misc_RNA (1)...(19): siRNA sense strand
agaugaaguacaaccaaau

SEQ ID NO: 2279433 - RNA, 19 nt, Homo sapiens
  misc_RNA (1)...(19): siRNA sense strand
ccggaaaguucgaagcuug

SEQ ID NO: 2279434 - RNA, 19 nt, Homo sapiens
  misc_RNA (1)...(19): siRNA sense strand
ugaaauggaaaaugaggua

SEQ ID NO: 2279435 - RNA, 19 nt, Homo sapiens
  misc_RNA (1)...(19): siRNA sense strand
agaccagggccgaguggau

SEQ ID NO: 2279436 - RNA, 19 nt, Homo sapiens
  misc_RNA (1)...(19): siRNA sense strand
uaggagaggaagaugucua

SEQ ID NO: 2279437 - RNA, 19 nt, Homo sapiens
  misc_RNA (1)...(19): siRNA sense strand
ccgaagugugggacuacaa

SEQ ID NO: 2279438 - RNA, 19 nt, Homo sapiens
  misc_RNA (1)...(19): siRNA sense strand
aagaaaggacuuaaaggga

SEQ ID NO: 2279439 - RNA, 19 nt, Homo sapiens
  misc_RNA (1)...(19): siRNA sense strand
cuugggaggagcuguguaa

SEQ ID NO: 2279440 - RNA, 19 nt, Homo sapiens
  misc_RNA (1)...(19): siRNA sense strand
gaauuaaagcaaagccugu

SEQ ID NO: 2279441 - RNA, 19 nt, Homo sapiens
  misc_RNA (1)...(19): siRNA sense strand
ugggauggcagaaaggauu

SEQ ID NO: 2279442 - RNA, 19 nt, Homo sapiens
  misc_RNA (1)...(19): siRNA sense strand
ugaaacgcaaagagcuuaa

SEQ ID NO: 2279443 - RNA, 19 nt, Homo sapiens
  misc_RNA (1)...(19): siRNA sense strand
acagauguugggucagaaa

SEQ ID NO: 2279444 - RNA, 19 nt, Homo sapiens
  misc_RNA (1)...(19): siRNA sense strand
uccagaacuaggagaggaa

SEQ ID NO: 2279445 - RNA, 19 nt, Homo sapiens
  misc_RNA (1)...(19): siRNA sense strand
uggcagagugggagcacca

SEQ ID NO: 2279446 - RNA, 19 nt, Homo sapiens
  misc_RNA (1)...(19): siRNA sense strand
ggaagaugaaguacaacca

SEQ ID NO: 2279447 - RNA, 19 nt, Homo sapiens
  misc_RNA (1)...(19): siRNA sense strand
aaaggaacuaacugaacua

SEQ ID NO: 2279448 - RNA, 19 nt, Homo sapiens
  misc_RNA (1)...(19): siRNA sense strand
aaacauaccaucaacccua

SEQ ID NO: 2279449 - RNA, 19 nt, Homo sapiens
  misc_RNA (1)...(19): siRNA sense strand
ugucuuuguucgagccuuu

SEQ ID NO: 2279450 - RNA, 19 nt, Homo sapiens
  misc_RNA (1)...(19): siRNA sense strand
ggauacgggcucacugaau

SEQ ID NO: 2279451 - RNA, 19 nt, Homo sapiens
  misc_RNA (1)...(19): siRNA sense strand
uggaaaaugagguacuuaa

SEQ ID NO: 2279452 - RNA, 19 nt, Homo sapiens
  misc_RNA (1)...(19): siRNA sense strand
gaaacagaggugaccaaca

SEQ ID NO: 2279453 - RNA, 19 nt, Homo sapiens
  misc_RNA (1)...(19): siRNA sense strand
aaaccauugcccucagaua

SEQ ID NO: 2279454 - RNA, 19 nt, Homo sapiens
  misc_RNA (1)...(19): siRNA sense strand
ugggaggagcuguguaaca

SEQ ID NO: 2279455 - RNA, 19 nt, Homo sapiens
  misc_RNA (1)...(19): siRNA sense strand
gggauauuggagaguuuga

SEQ ID NO: 2279456 - RNA, 19 nt, Homo sapiens
  misc_RNA (1)...(19): siRNA sense strand
gguuauucuuggacaguau

SEQ ID NO: 2279457 - RNA, 19 nt, Homo sapiens
  misc_RNA (1)...(19): siRNA sense strand
gauuacagauguuggguca

SEQ ID NO: 2279458 - RNA, 19 nt, Homo sapiens
  misc_RNA (1)...(19): siRNA sense strand
gcugaaacgcaaagagcuu

SEQ ID NO: 2279459 - RNA, 19 nt, Homo sapiens
  misc_RNA (1)...(19): siRNA sense strand
aggcggacauugagcgaau

SEQ ID NO: 2279460 - RNA, 19 nt, Homo sapiens
  misc_RNA (1)...(19): siRNA sense strand
ggacaguauaauuggcuuu

SEQ ID NO: 2279461 - RNA, 19 nt, Homo sapiens
  misc_RNA (1)...(19): siRNA sense strand
aaguacaaccaaauggaaa

SEQ ID NO: 2279462 - RNA, 19 nt, Homo sapiens
  misc_RNA (1)...(19): siRNA sense strand
gaaaggacuuaaagggacu

SEQ ID NO: 2279463 - RNA, 19 nt, Homo sapiens
  misc_RNA (1)...(19): siRNA sense strand
ccaucuaccaugaagcuaa

SEQ ID NO: 2279464 - RNA, 19 nt, Homo sapiens
  misc_RNA (1)...(19): siRNA sense strand
cagaacuaggagaggaaga

SEQ ID NO: 2279465 - RNA, 19 nt, Homo sapiens
  misc_RNA (1)...(19): siRNA sense strand
ucgaaagaaaggacuuaaa

SEQ ID NO: 2279466 - RNA, 19 nt, Homo sapiens
  misc_RNA (1)...(19): siRNA sense strand
cggaaaucauggaucggau

SEQ ID NO: 2279467 - RNA, 19 nt, Homo sapiens
  misc_RNA (1)...(19): siRNA sense strand
gucagaaaccaaagaccaa

SEQ ID NO: 2279468 - RNA, 19 nt, Homo sapiens
  misc_RNA (1)...(19): siRNA sense strand
ggacuacaauacuggcaga

SEQ ID NO: 2279469 - RNA, 19 nt, Homo sapiens
  misc_RNA (1)...(19): siRNA sense strand
aguacaaccaaauggaaaa

SEQ ID NO: 2279470 - RNA, 19 nt, Homo sapiens
  misc_RNA (1)...(19): siRNA sense strand
augaaacagaggugaccaa

SEQ ID NO: 2279471 - RNA, 19 nt, Homo sapiens
  misc_RNA (1)...(19): siRNA sense strand
ggaaaaugagguacuuaaa

SEQ ID NO: 2279472 - RNA, 19 nt, Homo sapiens
  misc_RNA (1)...(19): siRNA sense strand
gccaaggccagcauggaaa

SEQ ID NO: 2279473 - RNA, 19 nt, Homo sapiens
  misc_RNA (1)...(19): siRNA sense strand
cuuuaauacugauaagcca

SEQ ID NO: 2279474 - RNA, 19 nt, Homo sapiens
  misc_RNA (1)...(19): siRNA sense strand
uggcagcaguuccggaaau

SEQ ID NO: 2279475 - RNA, 19 nt, Homo sapiens
  misc_RNA (1)...(19): siRNA sense strand
agaugaaguacaaccaaau

SEQ ID NO: 2279476 - RNA, 19 nt, Homo sapiens
  misc_RNA (1)...(19): siRNA sense strand
ccggaaaguucgaagcuug

SEQ ID NO: 2279477 - RNA, 19 nt, Homo sapiens
  misc_RNA (1)...(19): siRNA sense strand
ugaaauggaaaaugaggua

SEQ ID NO: 2279478 - RNA, 19 nt, Homo sapiens
  misc_RNA (1)...(19): siRNA sense strand
agaccagggccgaguggau

SEQ ID NO: 2279479 - RNA, 19 nt, Homo sapiens
  misc_RNA (1)...(19): siRNA sense strand
uaggagaggaagaugucua

SEQ ID NO: 2279480 - RNA, 19 nt, Homo sapiens
  misc_RNA (1)...(19): siRNA sense strand
ccgaagugugggacuacaa

SEQ ID NO: 2279481 - RNA, 19 nt, Homo sapiens
  misc_RNA (1)...(19): siRNA sense strand
aagaaaggacuuaaaggga

SEQ ID NO: 2279482 - RNA, 19 nt, Homo sapiens
  misc_RNA (1)...(19): siRNA sense strand
cuugggaggagcuguguaa

SEQ ID NO: 2279483 - RNA, 19 nt, Homo sapiens
  misc_RNA (1)...(19): siRNA sense strand
gaauuaaagcaaagccugu

SEQ ID NO: 2279484 - RNA, 19 nt, Homo sapiens
  misc_RNA (1)...(19): siRNA sense strand
ugggauggcagaaaggauu

SEQ ID NO: 2279485 - RNA, 19 nt, Homo sapiens
  misc_RNA (1)...(19): siRNA sense strand
ugaaacgcaaagagcuuaa

SEQ ID NO: 2279486 - RNA, 19 nt, Homo sapiens
  misc_RNA (1)...(19): siRNA sense strand
acagauguugggucagaaa

SEQ ID NO: 2279487 - RNA, 19 nt, Homo sapiens
  misc_RNA (1)...(19): siRNA sense strand
uccagaacuaggagaggaa

SEQ ID NO: 2279488 - RNA, 19 nt, Homo sapiens
  misc_RNA (1)...(19): siRNA sense strand
uggcagagugggagcacca

SEQ ID NO: 2279489 - RNA, 19 nt, Homo sapiens
  misc_RNA (1)...(19): siRNA sense strand
ggaagaugaaguacaacca

SEQ ID NO: 2279490 - RNA, 19 nt, Homo sapiens
  misc_RNA (1)...(19): siRNA sense strand
aaaggaacuaacugaacua

SEQ ID NO: 2279491 - RNA, 19 nt, Homo sapiens
  misc_RNA (1)...(19): siRNA sense strand
aaacauaccaucaacccua

SEQ ID NO: 2279492 - RNA, 19 nt, Homo sapiens
  misc_RNA (1)...(19): siRNA sense strand
ugucuuuguucgagccuuu

SEQ ID NO: 2279493 - RNA, 19 nt, Homo sapiens
  misc_RNA (1)...(19): siRNA sense strand
ggauacgggcucacugaau

SEQ ID NO: 2279494 - RNA, 19 nt, Homo sapiens
  misc_RNA (1)...(19): siRNA sense strand
uggaaaaugagguacuuaa

SEQ ID NO: 2279495 - RNA, 19 nt, Homo sapiens
  misc_RNA (1)...(19): siRNA sense strand
gaaacagaggugaccaaca

SEQ ID NO: 2279496 - RNA, 19 nt, Homo sapiens
  misc_RNA (1)...(19): siRNA sense strand
aaaccauugcccucagaua

SEQ ID NO: 2279497 - RNA, 19 nt, Homo sapiens
  misc_RNA (1)...(19): siRNA sense strand
ugggaggagcuguguaaca

SEQ ID NO: 2279498 - RNA, 19 nt, Homo sapiens
  misc_RNA (1)...(19): siRNA sense strand
gggauauuggagaguuuga

SEQ ID NO: 2279499 - RNA, 19 nt, Homo sapiens
  misc_RNA (1)...(19): siRNA sense strand
ccaugaaauuggagcgauu

SEQ ID NO: 2279500 - RNA, 19 nt, Homo sapiens
  misc_RNA (1)...(19): siRNA sense strand
cggaaaucauggauagaau

SEQ ID NO: 2279501 - RNA, 19 nt, Homo sapiens
  misc_RNA (1)...(19): siRNA sense strand
guuacaagcaggagaguau

SEQ ID NO: 2279502 - RNA, 19 nt, Homo sapiens
  misc_RNA (1)...(19): siRNA sense strand
gcaaaguccaagagaugaa

SEQ ID NO: 2279503 - RNA, 19 nt, Homo sapiens
  misc_RNA (1)...(19): siRNA sense strand
agaacugacagcagagaua

SEQ ID NO: 2279504 - RNA, 19 nt, Homo sapiens
  misc_RNA (1)...(19): siRNA sense strand
gguuauggacugacagaau

SEQ ID NO: 2279505 - RNA, 19 nt, Homo sapiens
  misc_RNA (1)...(19): siRNA sense strand
gggaauuauaaauggauga

SEQ ID NO: 2279506 - RNA, 19 nt, Homo sapiens
  misc_RNA (1)...(19): siRNA sense strand
acaaauuggaacagaucaa

SEQ ID NO: 2279507 - RNA, 19 nt, Homo sapiens
  misc_RNA (1)...(19): siRNA sense strand
caauuaaugacaagccaaa

SEQ ID NO: 2279508 - RNA, 19 nt, Homo sapiens
  misc_RNA (1)...(19): siRNA sense strand
cguaauugguggacagaac

SEQ ID NO: 2279509 - RNA, 19 nt, Homo sapiens
  misc_RNA (1)...(19): siRNA sense strand
agaacaucuccaugggaua

SEQ ID NO: 2279510 - RNA, 19 nt, Homo sapiens
  misc_RNA (1)...(19): siRNA sense strand
augacaggccagugugaaa

SEQ ID NO: 2279511 - RNA, 19 nt, Homo sapiens
  misc_RNA (1)...(19): siRNA sense strand
aggccagugugaaagaaua

SEQ ID NO: 2279512 - RNA, 19 nt, Homo sapiens
  misc_RNA (1)...(19): siRNA sense strand
gcccaauuggccaggguua

SEQ ID NO: 2279513 - RNA, 19 nt, Homo sapiens
  misc_RNA (1)...(19): siRNA sense strand
agcaguaguucaugggcua

SEQ ID NO: 2279514 - RNA, 19 nt, Homo sapiens
  misc_RNA (1)...(19): siRNA sense strand
agaaaacagcagaagauua

SEQ ID NO: 2279515 - RNA, 19 nt, Homo sapiens
  misc_RNA (1)...(19): siRNA sense strand
aaaggaaggagcugaggaa

SEQ ID NO: 2279516 - RNA, 19 nt, Homo sapiens
  misc_RNA (1)...(19): siRNA sense strand
ggacugggaccgaaggaca

SEQ ID NO: 2279517 - RNA, 19 nt, Homo sapiens
  misc_RNA (1)...(19): siRNA sense strand
cccugaaggauuugagauu

SEQ ID NO: 2279518 - RNA, 19 nt, Homo sapiens
  misc_RNA (1)...(19): siRNA sense strand
caguagaagaguugggauc

SEQ ID NO: 2279519 - RNA, 19 nt, Homo sapiens
  misc_RNA (1)...(19): siRNA sense strand
agugaaucgcagagugaau

SEQ ID NO: 2279520 - RNA, 19 nt, Homo sapiens
  misc_RNA (1)...(19): siRNA sense strand
uggcaaagaagcaguaguu

SEQ ID NO: 2279521 - RNA, 19 nt, Homo sapiens
  misc_RNA (1)...(19): siRNA sense strand
ugacuauacuacuggcaga

SEQ ID NO: 2279522 - RNA, 19 nt, Homo sapiens
  misc_RNA (1)...(19): siRNA sense strand
aaaaugaaaugcagccaaa

SEQ ID NO: 2279523 - RNA, 19 nt, Homo sapiens
  misc_RNA (1)...(19): siRNA sense strand
ggacuaaaaccaaagaaca

SEQ ID NO: 2279524 - RNA, 19 nt, Homo sapiens
  misc_RNA (1)...(19): siRNA sense strand
acugaaagaaauucgagaa

SEQ ID NO: 2279525 - RNA, 19 nt, Homo sapiens
  misc_RNA (1)...(19): siRNA sense strand
agccuugggaccagggaaa

SEQ ID NO: 2279526 - RNA, 19 nt, Homo sapiens
  misc_RNA (1)...(19): siRNA sense strand
guccaagagaugaauuaua

SEQ ID NO: 2279527 - RNA, 19 nt, Homo sapiens
  misc_RNA (1)...(19): siRNA sense strand
uggcagaguuggagcaccu

SEQ ID NO: 2279528 - RNA, 19 nt, Homo sapiens
  misc_RNA (1)...(19): siRNA sense strand
aagauuauucuguggauga

SEQ ID NO: 2279529 - RNA, 19 nt, Homo sapiens
  misc_RNA (1)...(19): siRNA sense strand
aaaugcagccaaauggaaa

SEQ ID NO: 2279530 - RNA, 19 nt, Homo sapiens
  misc_RNA (1)...(19): siRNA sense strand
aagaauaccuggacuggga

SEQ ID NO: 2279531 - RNA, 19 nt, Homo sapiens
  misc_RNA (1)...(19): siRNA sense strand
ugcuauggaagcugaaaua

SEQ ID NO: 2279532 - RNA, 19 nt, Homo sapiens
  misc_RNA (1)...(19): siRNA sense strand
gguagaaggaacuuggguu

SEQ ID NO: 2279533 - RNA, 19 nt, Homo sapiens
  misc_RNA (1)...(19): siRNA sense strand
ucgauuaagcccagagcca

SEQ ID NO: 2279534 - RNA, 19 nt, Homo sapiens
  misc_RNA (1)...(19): siRNA sense strand
cagcaugcaaucaguagaa

SEQ ID NO: 2279535 - RNA, 19 nt, Homo sapiens
  misc_RNA (1)...(19): siRNA sense strand
agagaaaacagcagaagau

SEQ ID NO: 2279536 - RNA, 19 nt, Homo sapiens
  misc_RNA (1)...(19): siRNA sense strand
ccaaagaacaccauugcca

SEQ ID NO: 2279537 - RNA, 19 nt, Homo sapiens
  misc_RNA (1)...(19): siRNA sense strand
agauaggguaugauuacaa

SEQ ID NO: 2279538 - RNA, 19 nt, Homo sapiens
  misc_RNA (1)...(19): siRNA sense strand
agaccugcuuuaaguacaa

SEQ ID NO: 2279539 - RNA, 19 nt, Homo sapiens
  misc_RNA (1)...(19): siRNA sense strand
cguaagaaagaucuaguga

SEQ ID NO: 2279540 - RNA, 19 nt, Homo sapiens
  misc_RNA (1)...(19): siRNA sense strand
cagggaaauccuaagugaa

SEQ ID NO: 2279541 - RNA, 19 nt, Homo sapiens
  misc_RNA (1)...(19): siRNA sense strand
guguugaacuucuggaaag

SEQ ID NO: 2279542 - RNA, 19 nt, Homo sapiens
  misc_RNA (1)...(19): siRNA sense strand
agaccaacgccuucagaca

SEQ ID NO: 2279543 - RNA, 19 nt, Homo sapiens
  misc_RNA (1)...(19): siRNA sense strand
uguuaugagcaaaguccaa

SEQ ID NO: 2279544 - RNA, 19 nt, Homo sapiens
  misc_RNA (1)...(19): siRNA sense strand
ugagcaaaguccaagagau

SEQ ID NO: 2279545 - RNA, 19 nt, Homo sapiens
  misc_RNA (1)...(19): siRNA sense strand
aaguccaagagaugaauua

SEQ ID NO: 2279546 - RNA, 19 nt, Homo sapiens
  misc_RNA (1)...(19): siRNA sense strand
ggaagcugaaauacugaaa

SEQ ID NO: 2279547 - RNA, 19 nt, Homo sapiens
  misc_RNA (1)...(19): siRNA sense strand
gggaaauccuaagugaaga

SEQ ID NO: 2279548 - RNA, 19 nt, Homo sapiens
  misc_RNA (1)...(19): siRNA sense strand
ggacaauaaggcuaucaau

SEQ ID NO: 2279549 - RNA, 19 nt, Homo sapiens
  misc_RNA (1)...(19): siRNA sense strand
ccaugaaauuggagcgauu

SEQ ID NO: 2279550 - RNA, 19 nt, Homo sapiens
  misc_RNA (1)...(19): siRNA sense strand
cggaaaucauggauagaau

SEQ ID NO: 2279551 - RNA, 19 nt, Homo sapiens
  misc_RNA (1)...(19): siRNA sense strand
guuacaagcaggagaguau

SEQ ID NO: 2279552 - RNA, 19 nt, Homo sapiens
  misc_RNA (1)...(19): siRNA sense strand
gcaaaguccaagagaugaa

SEQ ID NO: 2279553 - RNA, 19 nt, Homo sapiens
  misc_RNA (1)...(19): siRNA sense strand
agaacugacagcagagaua

SEQ ID NO: 2279554 - RNA, 19 nt, Homo sapiens
  misc_RNA (1)...(19): siRNA sense strand
gguuauggacugacagaau

SEQ ID NO: 2279555 - RNA, 19 nt, Homo sapiens
  misc_RNA (1)...(19): siRNA sense strand
gggaauuauaaauggauga

SEQ ID NO: 2279556 - RNA, 19 nt, Homo sapiens
  misc_RNA (1)...(19): siRNA sense strand
gcuauggcaaagagaauaa

SEQ ID NO: 2279557 - RNA, 19 nt, Homo sapiens
  misc_RNA (1)...(19): siRNA sense strand
acaaauuggaacagaucaa

SEQ ID NO: 2279558 - RNA, 19 nt, Homo sapiens
  misc_RNA (1)...(19): siRNA sense strand
caauuaaugacaagccaaa

SEQ ID NO: 2279559 - RNA, 19 nt, Homo sapiens
  misc_RNA (1)...(19): siRNA sense strand
cguaauugguggacagaac

SEQ ID NO: 2279560 - RNA, 19 nt, Homo sapiens
  misc_RNA (1)...(19): siRNA sense strand
agaacaucuccaugggaua

SEQ ID NO: 2279561 - RNA, 19 nt, Homo sapiens
  misc_RNA (1)...(19): siRNA sense strand
acgcuauggcaaagagaau

SEQ ID NO: 2279562 - RNA, 19 nt, Homo sapiens
  misc_RNA (1)...(19): siRNA sense strand
augacaggccagugugaaa

SEQ ID NO: 2279563 - RNA, 19 nt, Homo sapiens
  misc_RNA (1)...(19): siRNA sense strand
aggccagugugaaagaaua

SEQ ID NO: 2279564 - RNA, 19 nt, Homo sapiens
  misc_RNA (1)...(19): siRNA sense strand
gcccaauuggccaggguua

SEQ ID NO: 2279565 - RNA, 19 nt, Homo sapiens
  misc_RNA (1)...(19): siRNA sense strand
agcaguaguucaugggcua

SEQ ID NO: 2279566 - RNA, 19 nt, Homo sapiens
  misc_RNA (1)...(19): siRNA sense strand
agaaaacagcagaagauua

SEQ ID NO: 2279567 - RNA, 19 nt, Homo sapiens
  misc_RNA (1)...(19): siRNA sense strand
aaaggaaggagcugaggaa

SEQ ID NO: 2279568 - RNA, 19 nt, Homo sapiens
  misc_RNA (1)...(19): siRNA sense strand
ggacugggaccgaaggaca

SEQ ID NO: 2279569 - RNA, 19 nt, Homo sapiens
  misc_RNA (1)...(19): siRNA sense strand
cccugaaggauuugagauu

SEQ ID NO: 2279570 - RNA, 19 nt, Homo sapiens
  misc_RNA (1)...(19): siRNA sense strand
caguagaagaguugggauc

SEQ ID NO: 2279571 - RNA, 19 nt, Homo sapiens
  misc_RNA (1)...(19): siRNA sense strand
agugaaucgcagagugaau

SEQ ID NO: 2279572 - RNA, 19 nt, Homo sapiens
  misc_RNA (1)...(19): siRNA sense strand
uggcaaagaagcaguaguu

SEQ ID NO: 2279573 - RNA, 19 nt, Homo sapiens
  misc_RNA (1)...(19): siRNA sense strand
ugacuauacuacuggcaga

SEQ ID NO: 2279574 - RNA, 19 nt, Homo sapiens
  misc_RNA (1)...(19): siRNA sense strand
aaaaugaaaugcagccaaa

SEQ ID NO: 2279575 - RNA, 19 nt, Homo sapiens
  misc_RNA (1)...(19): siRNA sense strand
ggacuaaaaccaaagaaca

SEQ ID NO: 2279576 - RNA, 19 nt, Homo sapiens
  misc_RNA (1)...(19): siRNA sense strand
acugaaagaaauucgagaa

SEQ ID NO: 2279577 - RNA, 19 nt, Homo sapiens
  misc_RNA (1)...(19): siRNA sense strand
agccuugggaccagggaaa

SEQ ID NO: 2279578 - RNA, 19 nt, Homo sapiens
  misc_RNA (1)...(19): siRNA sense strand
guccaagagaugaauuaua

SEQ ID NO: 2279579 - RNA, 19 nt, Homo sapiens
  misc_RNA (1)...(19): siRNA sense strand
uggcagaguuggagcaccu

SEQ ID NO: 2279580 - RNA, 19 nt, Homo sapiens
  misc_RNA (1)...(19): siRNA sense strand
aagauuauucuguggauga

SEQ ID NO: 2279581 - RNA, 19 nt, Homo sapiens
  misc_RNA (1)...(19): siRNA sense strand
aaaugcagccaaauggaaa

SEQ ID NO: 2279582 - RNA, 19 nt, Homo sapiens
  misc_RNA (1)...(19): siRNA sense strand
aagaauaccuggacuggga

SEQ ID NO: 2279583 - RNA, 19 nt, Homo sapiens
  misc_RNA (1)...(19): siRNA sense strand
ugcuauggaagcugaaaua

SEQ ID NO: 2279584 - RNA, 19 nt, Homo sapiens
  misc_RNA (1)...(19): siRNA sense strand
gguagaaggaacuuggguu

SEQ ID NO: 2279585 - RNA, 19 nt, Homo sapiens
  misc_RNA (1)...(19): siRNA sense strand
ucgauuaagcccagagcca

SEQ ID NO: 2279586 - RNA, 19 nt, Homo sapiens
  misc_RNA (1)...(19): siRNA sense strand
cagcaugcaaucaguagaa

SEQ ID NO: 2279587 - RNA, 19 nt, Homo sapiens
  misc_RNA (1)...(19): siRNA sense strand
agagaaaacagcagaagau

SEQ ID NO: 2279588 - RNA, 19 nt, Homo sapiens
  misc_RNA (1)...(19): siRNA sense strand
ccaaagaacaccauugcca

SEQ ID NO: 2279589 - RNA, 19 nt, Homo sapiens
  misc_RNA (1)...(19): siRNA sense strand
agauaggguaugauuacaa

SEQ ID NO: 2279590 - RNA, 19 nt, Homo sapiens
  misc_RNA (1)...(19): siRNA sense strand
agaccugcuuuaaguacaa

SEQ ID NO: 2279591 - RNA, 19 nt, Homo sapiens
  misc_RNA (1)...(19): siRNA sense strand
cguaagaaagaucuaguga

SEQ ID NO: 2279592 - RNA, 19 nt, Homo sapiens
  misc_RNA (1)...(19): siRNA sense strand
cagggaaauccuaagugaa

SEQ ID NO: 2279593 - RNA, 19 nt, Homo sapiens
  misc_RNA (1)...(19): siRNA sense strand
guguugaacuucuggaaag

SEQ ID NO: 2279594 - RNA, 19 nt, Homo sapiens
  misc_RNA (1)...(19): siRNA sense strand
agaccaacgccuucagaca

SEQ ID NO: 2279595 - RNA, 19 nt, Homo sapiens
  misc_RNA (1)...(19): siRNA sense strand
uguuaugagcaaaguccaa

SEQ ID NO: 2279596 - RNA, 19 nt, Homo sapiens
  misc_RNA (1)...(19): siRNA sense strand
ugagcaaaguccaagagau

SEQ ID NO: 2279597 - RNA, 19 nt, Homo sapiens
  misc_RNA (1)...(19): siRNA sense strand
aaguccaagagaugaauua

SEQ ID NO: 2279598 - RNA, 19 nt, Homo sapiens
  misc_RNA (1)...(19): siRNA sense strand
ggaagcugaaauacugaaa

SEQ ID NO: 2279599 - RNA, 19 nt, Homo sapiens
  misc_RNA (1)...(19): siRNA sense strand
gggaaauccuaagugaaga

SEQ ID NO: 2279600 - RNA, 19 nt, Homo sapiens
  misc_RNA (1)...(19): siRNA sense strand
aaauauugcucgagaggaa

SEQ ID NO: 2279601 - RNA, 19 nt, Homo sapiens
  misc_RNA (1)...(19): siRNA sense strand
gauagaagucggaggaaau

SEQ ID NO: 2279602 - RNA, 19 nt, Homo sapiens
  misc_RNA (1)...(19): siRNA sense strand
cuguaaaggagcagagcaa

SEQ ID NO: 2279603 - RNA, 19 nt, Homo sapiens
  misc_RNA (1)...(19): siRNA sense strand
cucuaaagaugcugagaaa

SEQ ID NO: 2279604 - RNA, 19 nt, Homo sapiens
  misc_RNA (1)...(19): siRNA sense strand
agacaaagauuauugggaa

SEQ ID NO: 2279605 - RNA, 19 nt, Homo sapiens
  misc_RNA (1)...(19): siRNA sense strand
ggugaagaguacagaguga

SEQ ID NO: 2279606 - RNA, 19 nt, Homo sapiens
  misc_RNA (1)...(19): siRNA sense strand
aagaaaggacagagaacaa

SEQ ID NO: 2279607 - RNA, 19 nt, Homo sapiens
  misc_RNA (1)...(19): siRNA sense strand
caauggacuuugaaggaaa

SEQ ID NO: 2279608 - RNA, 19 nt, Homo sapiens
  misc_RNA (1)...(19): siRNA sense strand
ccucagaaguuaagaaagu

SEQ ID NO: 2279609 - RNA, 19 nt, Homo sapiens
  misc_RNA (1)...(19): siRNA sense strand
cagaagaagaacuggaauu

SEQ ID NO: 2279610 - RNA, 19 nt, Homo sapiens
  misc_RNA (1)...(19): siRNA sense strand
aguaguaauucaaggacaa

SEQ ID NO: 2279611 - RNA, 19 nt, Homo sapiens
  misc_RNA (1)...(19): siRNA sense strand
gcgaggaggaggaggaaga

SEQ ID NO: 2279612 - RNA, 19 nt, Homo sapiens
  misc_RNA (1)...(19): siRNA sense strand
gcgagaaucuuuaggacau

SEQ ID NO: 2279613 - RNA, 19 nt, Homo sapiens
  misc_RNA (1)...(19): siRNA sense strand
ucuaauagcacuuuggaaa

SEQ ID NO: 2279614 - RNA, 19 nt, Homo sapiens
  misc_RNA (1)...(19): siRNA sense strand
cagcaagcgacauggguaa

SEQ ID NO: 2279615 - RNA, 19 nt, Homo sapiens
  misc_RNA (1)...(19): siRNA sense strand
gggacuacacggacagaaa

SEQ ID NO: 2279616 - RNA, 19 nt, Homo sapiens
  misc_RNA (1)...(19): siRNA sense strand
gagaagaauuugaagacca

SEQ ID NO: 2279617 - RNA, 19 nt, Homo sapiens
  misc_RNA (1)...(19): siRNA sense strand
cugagagaguggagaaaga

SEQ ID NO: 2279618 - RNA, 19 nt, Homo sapiens
  misc_RNA (1)...(19): siRNA sense strand
ugauagaagucggaggaaa

SEQ ID NO: 2279619 - RNA, 19 nt, Homo sapiens
  misc_RNA (1)...(19): siRNA sense strand
aggcaauacuaaugugaau

SEQ ID NO: 2279620 - RNA, 19 nt, Homo sapiens
  misc_RNA (1)...(19): siRNA sense strand
cugaaagagaagagaauca

SEQ ID NO: 2279621 - RNA, 19 nt, Homo sapiens
  misc_RNA (1)...(19): siRNA sense strand
agguagaagauauggaaau

SEQ ID NO: 2279622 - RNA, 19 nt, Homo sapiens
  misc_RNA (1)...(19): siRNA sense strand
gaacuggaauugugggaga

SEQ ID NO: 2279623 - RNA, 19 nt, Homo sapiens
  misc_RNA (1)...(19): siRNA sense strand
agaagaaaugcgugaagaa

SEQ ID NO: 2279624 - RNA, 19 nt, Homo sapiens
  misc_RNA (1)...(19): siRNA sense strand
gugaacaaaggcagaguaa

SEQ ID NO: 2279625 - RNA, 19 nt, Homo sapiens
  misc_RNA (1)...(19): siRNA sense strand
caguagagaacaagaucaa

SEQ ID NO: 2279626 - RNA, 19 nt, Homo sapiens
  misc_RNA (1)...(19): siRNA sense strand
guacagagugacaggauau

SEQ ID NO: 2279627 - RNA, 19 nt, Homo sapiens
  misc_RNA (1)...(19): siRNA sense strand
guaaaggagcagagcaaaa

SEQ ID NO: 2279628 - RNA, 19 nt, Homo sapiens
  misc_RNA (1)...(19): siRNA sense strand
cagcagaagccgacaguga

SEQ ID NO: 2279629 - RNA, 19 nt, Homo sapiens
  misc_RNA (1)...(19): siRNA sense strand
ccagaaacgcccaagcaaa

SEQ ID NO: 2279630 - RNA, 19 nt, Homo sapiens
  misc_RNA (1)...(19): siRNA sense strand
acaugaaccuauuggauau

SEQ ID NO: 2279631 - RNA, 19 nt, Homo sapiens
  misc_RNA (1)...(19): siRNA sense strand
agaagaaacaggaagaaga

SEQ ID NO: 2279632 - RNA, 19 nt, Homo sapiens
  misc_RNA (1)...(19): siRNA sense strand
accaagaggcagaggacua

SEQ ID NO: 2279633 - RNA, 19 nt, Homo sapiens
  misc_RNA (1)...(19): siRNA sense strand
aaauugaagugcaggaaga

SEQ ID NO: 2279634 - RNA, 19 nt, Homo sapiens
  misc_RNA (1)...(19): siRNA sense strand
ggcacaagcaguugagcaa

SEQ ID NO: 2279635 - RNA, 19 nt, Homo sapiens
  misc_RNA (1)...(19): siRNA sense strand
ggauagcagugaagaagau

SEQ ID NO: 2279636 - RNA, 19 nt, Homo sapiens
  misc_RNA (1)...(19): siRNA sense strand
ucuacuaccucaaaggaaa

SEQ ID NO: 2279637 - RNA, 19 nt, Homo sapiens
  misc_RNA (1)...(19): siRNA sense strand
aaacagagucacauguaaa

SEQ ID NO: 2279638 - RNA, 19 nt, Homo sapiens
  misc_RNA (1)...(19): siRNA sense strand
agacaagaacagagcccaa

SEQ ID NO: 2279639 - RNA, 19 nt, Homo sapiens
  misc_RNA (1)...(19): siRNA sense strand
aaauaaucccugagaauga

SEQ ID NO: 2279640 - RNA, 19 nt, Homo sapiens
  misc_RNA (1)...(19): siRNA sense strand
caucuaugacugugagcaa

SEQ ID NO: 2279641 - RNA, 19 nt, Homo sapiens
  misc_RNA (1)...(19): siRNA sense strand
aaacuaagaaggacacaaa

SEQ ID NO: 2279642 - RNA, 19 nt, Homo sapiens
  misc_RNA (1)...(19): siRNA sense strand
caauggaaguagacgauga

SEQ ID NO: 2279643 - RNA, 19 nt, Homo sapiens
  misc_RNA (1)...(19): siRNA sense strand
ucuaaggacuaguuacaaa

SEQ ID NO: 2279644 - RNA, 19 nt, Homo sapiens
  misc_RNA (1)...(19): siRNA sense strand
acagagaagaccaugauaa

SEQ ID NO: 2279645 - RNA, 19 nt, Homo sapiens
  misc_RNA (1)...(19): siRNA sense strand
cuaccaauauggcgagaau

SEQ ID NO: 2279646 - RNA, 19 nt, Homo sapiens
  misc_RNA (1)...(19): siRNA sense strand
caaagauuacugagaagaa

SEQ ID NO: 2279647 - RNA, 19 nt, Homo sapiens
  misc_RNA (1)...(19): siRNA sense strand
caguaauaacgaaagcaaa

SEQ ID NO: 2279648 - RNA, 19 nt, Homo sapiens
  misc_RNA (1)...(19): siRNA sense strand
gggcauuugcugagagagu

SEQ ID NO: 2279649 - RNA, 19 nt, Homo sapiens
  misc_RNA (1)...(19): siRNA sense strand
gagagaguggagaaagaaa

SEQ ID NO: 2279650 - RNA, 19 nt, Homo sapiens
  misc_RNA (1)...(19): siRNA sense strand
ggacauaacugaagaccug

SEQ ID NO: 2279651 - RNA, 19 nt, Homo sapiens
  misc_RNA (1)...(19): siRNA sense strand
ggucaauguuagugagggu

SEQ ID NO: 2279652 - RNA, 19 nt, Homo sapiens
  misc_RNA (1)...(19): siRNA sense strand
aggaaagacuucuacaaau

SEQ ID NO: 2279653 - RNA, 19 nt, Homo sapiens
  misc_RNA (1)...(19): siRNA sense strand
uccaaaagaucgaguguua

SEQ ID NO: 2279654 - RNA, 19 nt, Homo sapiens
  misc_RNA (1)...(19): siRNA sense strand
aagaaaugcgugaagaaau

SEQ ID NO: 2279655 - RNA, 19 nt, Homo sapiens
  misc_RNA (1)...(19): siRNA sense strand
agaaacaggaagaagaaga

SEQ ID NO: 2279656 - RNA, 19 nt, Homo sapiens
  misc_RNA (1)...(19): siRNA sense strand
cuauaaggccauucauuaa

SEQ ID NO: 2279657 - RNA, 19 nt, Homo sapiens
  misc_RNA (1)...(19): siRNA sense strand
uggaagaggacgacgauga

SEQ ID NO: 2279658 - RNA, 19 nt, Homo sapiens
  misc_RNA (1)...(19): siRNA sense strand
gugaagaaauccaccgaca

SEQ ID NO: 2279659 - RNA, 19 nt, Homo sapiens
  misc_RNA (1)...(19): siRNA sense strand
auucagggauguucagaaa

SEQ ID NO: 2279660 - RNA, 19 nt, Homo sapiens
  misc_RNA (1)...(19): siRNA sense strand
gugaaugcuugaaagaaau

SEQ ID NO: 2279661 - RNA, 19 nt, Homo sapiens
  misc_RNA (1)...(19): siRNA sense strand
acaaagugguguacgauga

SEQ ID NO: 2279662 - RNA, 19 nt, Homo sapiens
  misc_RNA (1)...(19): siRNA sense strand
ccagaaacaccaaaagaaa

SEQ ID NO: 2279663 - RNA, 19 nt, Homo sapiens
  misc_RNA (1)...(19): siRNA sense strand
aggaaaggccuucgaucaa

SEQ ID NO: 2279664 - RNA, 19 nt, Homo sapiens
  misc_RNA (1)...(19): siRNA sense strand
aaauauugcucgagaggaa

SEQ ID NO: 2279665 - RNA, 19 nt, Homo sapiens
  misc_RNA (1)...(19): siRNA sense strand
gauagaagucggaggaaau

SEQ ID NO: 2279666 - RNA, 19 nt, Homo sapiens
  misc_RNA (1)...(19): siRNA sense strand
cuguaaaggagcagagcaa

SEQ ID NO: 2279667 - RNA, 19 nt, Homo sapiens
  misc_RNA (1)...(19): siRNA sense strand
cucuaaagaugcugagaaa

SEQ ID NO: 2279668 - RNA, 19 nt, Homo sapiens
  misc_RNA (1)...(19): siRNA sense strand
agacaaagauuauugggaa

SEQ ID NO: 2279669 - RNA, 19 nt, Homo sapiens
  misc_RNA (1)...(19): siRNA sense strand
ggugaagaguacagaguga

SEQ ID NO: 2279670 - RNA, 19 nt, Homo sapiens
  misc_RNA (1)...(19): siRNA sense strand
aagaaaggacagagaacaa

SEQ ID NO: 2279671 - RNA, 19 nt, Homo sapiens
  misc_RNA (1)...(19): siRNA sense strand
caauggacuuugaaggaaa

SEQ ID NO: 2279672 - RNA, 19 nt, Homo sapiens
  misc_RNA (1)...(19): siRNA sense strand
ccucagaaguuaagaaagu

SEQ ID NO: 2279673 - RNA, 19 nt, Homo sapiens
  misc_RNA (1)...(19): siRNA sense strand
cagaagaagaacuggaauu

SEQ ID NO: 2279674 - RNA, 19 nt, Homo sapiens
  misc_RNA (1)...(19): siRNA sense strand
aguaguaauucaaggacaa

SEQ ID NO: 2279675 - RNA, 19 nt, Homo sapiens
  misc_RNA (1)...(19): siRNA sense strand
gcgaggaggaggaggaaga

SEQ ID NO: 2279676 - RNA, 19 nt, Homo sapiens
  misc_RNA (1)...(19): siRNA sense strand
gcgagaaucuuuaggacau

SEQ ID NO: 2279677 - RNA, 19 nt, Homo sapiens
  misc_RNA (1)...(19): siRNA sense strand
ucuaauagcacuuuggaaa

SEQ ID NO: 2279678 - RNA, 19 nt, Homo sapiens
  misc_RNA (1)...(19): siRNA sense strand
cagcaagcgacauggguaa

SEQ ID NO: 2279679 - RNA, 19 nt, Homo sapiens
  misc_RNA (1)...(19): siRNA sense strand
gggacuacacggacagaaa

SEQ ID NO: 2279680 - RNA, 19 nt, Homo sapiens
  misc_RNA (1)...(19): siRNA sense strand
gagaagaauuugaagacca

SEQ ID NO: 2279681 - RNA, 19 nt, Homo sapiens
  misc_RNA (1)...(19): siRNA sense strand
cugagagaguggagaaaga

SEQ ID NO: 2279682 - RNA, 19 nt, Homo sapiens
  misc_RNA (1)...(19): siRNA sense strand
ugauagaagucggaggaaa

SEQ ID NO: 2279683 - RNA, 19 nt, Homo sapiens
  misc_RNA (1)...(19): siRNA sense strand
aggcaauacuaaugugaau

SEQ ID NO: 2279684 - RNA, 19 nt, Homo sapiens
  misc_RNA (1)...(19): siRNA sense strand
cugaaagagaagagaauca

SEQ ID NO: 2279685 - RNA, 19 nt, Homo sapiens
  misc_RNA (1)...(19): siRNA sense strand
agguagaagauauggaaau

SEQ ID NO: 2279686 - RNA, 19 nt, Homo sapiens
  misc_RNA (1)...(19): siRNA sense strand
gaacuggaauugugggaga

SEQ ID NO: 2279687 - RNA, 19 nt, Homo sapiens
  misc_RNA (1)...(19): siRNA sense strand
agaagaaaugcgugaagaa

SEQ ID NO: 2279688 - RNA, 19 nt, Homo sapiens
  misc_RNA (1)...(19): siRNA sense strand
gugaacaaaggcagaguaa

SEQ ID NO: 2279689 - RNA, 19 nt, Homo sapiens
  misc_RNA (1)...(19): siRNA sense strand
caguagagaacaagaucaa

SEQ ID NO: 2279690 - RNA, 19 nt, Homo sapiens
  misc_RNA (1)...(19): siRNA sense strand
guacagagugacaggauau

SEQ ID NO: 2279691 - RNA, 19 nt, Homo sapiens
  misc_RNA (1)...(19): siRNA sense strand
guaaaggagcagagcaaaa

SEQ ID NO: 2279692 - RNA, 19 nt, Homo sapiens
  misc_RNA (1)...(19): siRNA sense strand
cagcagaagccgacaguga

SEQ ID NO: 2279693 - RNA, 19 nt, Homo sapiens
  misc_RNA (1)...(19): siRNA sense strand
ccagaaacgcccaagcaaa

SEQ ID NO: 2279694 - RNA, 19 nt, Homo sapiens
  misc_RNA (1)...(19): siRNA sense strand
acaugaaccuauuggauau

SEQ ID NO: 2279695 - RNA, 19 nt, Homo sapiens
  misc_RNA (1)...(19): siRNA sense strand
agaagaaacaggaagaaga

SEQ ID NO: 2279696 - RNA, 19 nt, Homo sapiens
  misc_RNA (1)...(19): siRNA sense strand
accaagaggcagaggacua

SEQ ID NO: 2279697 - RNA, 19 nt, Homo sapiens
  misc_RNA (1)...(19): siRNA sense strand
aaauugaagugcaggaaga

SEQ ID NO: 2279698 - RNA, 19 nt, Homo sapiens
  misc_RNA (1)...(19): siRNA sense strand
ggcacaagcaguugagcaa

SEQ ID NO: 2279699 - RNA, 19 nt, Homo sapiens
  misc_RNA (1)...(19): siRNA sense strand
ggauagcagugaagaagau

SEQ ID NO: 2279700 - RNA, 19 nt, Homo sapiens
  misc_RNA (1)...(19): siRNA sense strand
ucuacuaccucaaaggaaa

SEQ ID NO: 2279701 - RNA, 19 nt, Homo sapiens
  misc_RNA (1)...(19): siRNA sense strand
aaacagagucacauguaaa

SEQ ID NO: 2279702 - RNA, 19 nt, Homo sapiens
  misc_RNA (1)...(19): siRNA sense strand
agacaagaacagagcccaa

SEQ ID NO: 2279703 - RNA, 19 nt, Homo sapiens
  misc_RNA (1)...(19): siRNA sense strand
aaauaaucccugagaauga

SEQ ID NO: 2279704 - RNA, 19 nt, Homo sapiens
  misc_RNA (1)...(19): siRNA sense strand
caucuaugacugugagcaa

SEQ ID NO: 2279705 - RNA, 19 nt, Homo sapiens
  misc_RNA (1)...(19): siRNA sense strand
aaacuaagaaggacacaaa

SEQ ID NO: 2279706 - RNA, 19 nt, Homo sapiens
  misc_RNA (1)...(19): siRNA sense strand
caauggaaguagacgauga

SEQ ID NO: 2279707 - RNA, 19 nt, Homo sapiens
  misc_RNA (1)...(19): siRNA sense strand
ucuaaggacuaguuacaaa

SEQ ID NO: 2279708 - RNA, 19 nt, Homo sapiens
  misc_RNA (1)...(19): siRNA sense strand
acagagaagaccaugauaa

SEQ ID NO: 2279709 - RNA, 19 nt, Homo sapiens
  misc_RNA (1)...(19): siRNA sense strand
cuaccaauauggcgagaau

SEQ ID NO: 2279710 - RNA, 19 nt, Homo sapiens
  misc_RNA (1)...(19): siRNA sense strand
caaagauuacugagaagaa

SEQ ID NO: 2279711 - RNA, 19 nt, Homo sapiens
  misc_RNA (1)...(19): siRNA sense strand
caguaauaacgaaagcaaa

SEQ ID NO: 2279712 - RNA, 19 nt, Homo sapiens
  misc_RNA (1)...(19): siRNA sense strand
gggcauuugcugagagagu

SEQ ID NO: 2279713 - RNA, 19 nt, Homo sapiens
  misc_RNA (1)...(19): siRNA sense strand
gagagaguggagaaagaaa

SEQ ID NO: 2279714 - RNA, 19 nt, Homo sapiens
  misc_RNA (1)...(19): siRNA sense strand
ggacauaacugaagaccug

SEQ ID NO: 2279715 - RNA, 19 nt, Homo sapiens
  misc_RNA (1)...(19): siRNA sense strand
ggucaauguuagugagggu

SEQ ID NO: 2279716 - RNA, 19 nt, Homo sapiens
  misc_RNA (1)...(19): siRNA sense strand
aggaaagacuucuacaaau

SEQ ID NO: 2279717 - RNA, 19 nt, Homo sapiens
  misc_RNA (1)...(19): siRNA sense strand
uccaaaagaucgaguguua

SEQ ID NO: 2279718 - RNA, 19 nt, Homo sapiens
  misc_RNA (1)...(19): siRNA sense strand
aagaaaugcgugaagaaau

SEQ ID NO: 2279719 - RNA, 19 nt, Homo sapiens
  misc_RNA (1)...(19): siRNA sense strand
agaaacaggaagaagaaga

SEQ ID NO: 2279720 - RNA, 19 nt, Homo sapiens
  misc_RNA (1)...(19): siRNA sense strand
cuauaaggccauucauuaa

SEQ ID NO: 2279721 - RNA, 19 nt, Homo sapiens
  misc_RNA (1)...(19): siRNA sense strand
uggaagaggacgacgauga

SEQ ID NO: 2279722 - RNA, 19 nt, Homo sapiens
  misc_RNA (1)...(19): siRNA sense strand
gugaagaaauccaccgaca

SEQ ID NO: 2279723 - RNA, 19 nt, Homo sapiens
  misc_RNA (1)...(19): siRNA sense strand
auucagggauguucagaaa

SEQ ID NO: 2279724 - RNA, 19 nt, Homo sapiens
  misc_RNA (1)...(19): siRNA sense strand
gugaaugcuugaaagaaau

SEQ ID NO: 2279725 - RNA, 19 nt, Homo sapiens
  misc_RNA (1)...(19): siRNA sense strand
acaaagugguguacgauga

SEQ ID NO: 2279726 - RNA, 19 nt, Homo sapiens
  misc_RNA (1)...(19): siRNA sense strand
ccagaaacaccaaaagaaa

SEQ ID NO: 2279727 - RNA, 19 nt, Homo sapiens
  misc_RNA (1)...(19): siRNA sense strand
aggaaaggccuucgaucaa

SEQ ID NO: 2279728 - RNA, 19 nt, Homo sapiens
  misc_RNA (1)...(19): siRNA sense strand
ggguuuaugaagaggaaau

SEQ ID NO: 2279729 - RNA, 19 nt, Homo sapiens
  misc_RNA (1)...(19): siRNA sense strand
gguggauggucgaggaaca

SEQ ID NO: 2279730 - RNA, 19 nt, Homo sapiens
  misc_RNA (1)...(19): siRNA sense strand
ucaaagacacuguggaaaa

SEQ ID NO: 2279731 - RNA, 19 nt, Homo sapiens
  misc_RNA (1)...(19): siRNA sense strand
cggaacagcagaugauaau

SEQ ID NO: 2279732 - RNA, 19 nt, Homo sapiens
  misc_RNA (1)...(19): siRNA sense strand
gcauauagaagaaagcaga

SEQ ID NO: 2279733 - RNA, 19 nt, Homo sapiens
  misc_RNA (1)...(19): siRNA sense strand
ggagaauuuguaagaggaa

SEQ ID NO: 2279734 - RNA, 19 nt, Homo sapiens
  misc_RNA (1)...(19): siRNA sense strand
uguaagaggaaaugagcuu

SEQ ID NO: 2279735 - RNA, 19 nt, Homo sapiens
  misc_RNA (1)...(19): siRNA sense strand
cuauuauggcgaugaacaa

SEQ ID NO: 2279736 - RNA, 19 nt, Homo sapiens
  misc_RNA (1)...(19): siRNA sense strand
gguuaaugcacaaguggau

SEQ ID NO: 2279737 - RNA, 19 nt, Homo sapiens
  misc_RNA (1)...(19): siRNA sense strand
uugcuaaagcucugguuaa

SEQ ID NO: 2279738 - RNA, 19 nt, Homo sapiens
  misc_RNA (1)...(19): siRNA sense strand
acgcacugaucaagaaauu

SEQ ID NO: 2279739 - RNA, 19 nt, Homo sapiens
  misc_RNA (1)...(19): siRNA sense strand
ccuuauuggugaugugcau

SEQ ID NO: 2279740 - RNA, 19 nt, Homo sapiens
  misc_RNA (1)...(19): siRNA sense strand
aggaaagaaaggugccaau

SEQ ID NO: 2279741 - RNA, 19 nt, Homo sapiens
  misc_RNA (1)...(19): siRNA sense strand
gaguaauagaaccaugaaa

SEQ ID NO: 2279742 - RNA, 19 nt, Homo sapiens
  misc_RNA (1)...(19): siRNA sense strand
acaaagaccaggagaucca

SEQ ID NO: 2279743 - RNA, 19 nt, Homo sapiens
  misc_RNA (1)...(19): siRNA sense strand
uggaagaaaacaaggaauu

SEQ ID NO: 2279744 - RNA, 19 nt, Homo sapiens
  misc_RNA (1)...(19): siRNA sense strand
agauuacagcugucagaaa

SEQ ID NO: 2279745 - RNA, 19 nt, Homo sapiens
  misc_RNA (1)...(19): siRNA sense strand
ccagcugccuaaagaggaa

SEQ ID NO: 2279746 - RNA, 19 nt, Homo sapiens
  misc_RNA (1)...(19): siRNA sense strand
uggcaagagcagaauauuu

SEQ ID NO: 2279747 - RNA, 19 nt, Homo sapiens
  misc_RNA (1)...(19): siRNA sense strand
guauguuugcaguggcuaa

SEQ ID NO: 2279748 - RNA, 19 nt, Homo sapiens
  misc_RNA (1)...(19): siRNA sense strand
acggaacagcagaugauaa

SEQ ID NO: 2279749 - RNA, 19 nt, Homo sapiens
  misc_RNA (1)...(19): siRNA sense strand
ugugauggcaagagcagaa

SEQ ID NO: 2279750 - RNA, 19 nt, Homo sapiens
  misc_RNA (1)...(19): siRNA sense strand
gaaaacaaggaauuggaaa

SEQ ID NO: 2279751 - RNA, 19 nt, Homo sapiens
  misc_RNA (1)...(19): siRNA sense strand
ugccuaaagaggaaauuaa

SEQ ID NO: 2279752 - RNA, 19 nt, Homo sapiens
  misc_RNA (1)...(19): siRNA sense strand
ggauuucaggacaagaaua

SEQ ID NO: 2279753 - RNA, 19 nt, Homo sapiens
  misc_RNA (1)...(19): siRNA sense strand
ccacggaacagcagaugau

SEQ ID NO: 2279754 - RNA, 19 nt, Homo sapiens
  misc_RNA (1)...(19): siRNA sense strand
ugaccuuagcaauggagaa

SEQ ID NO: 2279755 - RNA, 19 nt, Homo sapiens
  misc_RNA (1)...(19): siRNA sense strand
augauagccucaagugauu

SEQ ID NO: 2279756 - RNA, 19 nt, Homo sapiens
  misc_RNA (1)...(19): siRNA sense strand
ggaugauaaucuugagcac

SEQ ID NO: 2279757 - RNA, 19 nt, Homo sapiens
  misc_RNA (1)...(19): siRNA sense strand
ugccaauauuacacagcaa

SEQ ID NO: 2279758 - RNA, 19 nt, Homo sapiens
  misc_RNA (1)...(19): siRNA sense strand
cagagagauucaugggucu

SEQ ID NO: 2279759 - RNA, 19 nt, Homo sapiens
  misc_RNA (1)...(19): siRNA sense strand
guccaaagacccaggagca

SEQ ID NO: 2279760 - RNA, 19 nt, Homo sapiens
  misc_RNA (1)...(19): siRNA sense strand
ggaauuuaaugauacggau

SEQ ID NO: 2279761 - RNA, 19 nt, Homo sapiens
  misc_RNA (1)...(19): siRNA sense strand
gaucaaagaaguaucccuu

SEQ ID NO: 2279762 - RNA, 19 nt, Homo sapiens
  misc_RNA (1)...(19): siRNA sense strand
agggaagacuggcagacau

SEQ ID NO: 2279763 - RNA, 19 nt, Homo sapiens
  misc_RNA (1)...(19): siRNA sense strand
cauauagaagaaagcagaa

SEQ ID NO: 2279764 - RNA, 19 nt, Homo sapiens
  misc_RNA (1)...(19): siRNA sense strand
aagcagaacuggaugggcu

SEQ ID NO: 2279765 - RNA, 19 nt, Homo sapiens
  misc_RNA (1)...(19): siRNA sense strand
gaacagcuuuccaagguga

SEQ ID NO: 2279766 - RNA, 19 nt, Homo sapiens
  misc_RNA (1)...(19): siRNA sense strand
ccuaaagaggaaauuaaga

SEQ ID NO: 2279767 - RNA, 19 nt, Homo sapiens
  misc_RNA (1)...(19): siRNA sense strand
ccuauuauggcgaugaaca

SEQ ID NO: 2279768 - RNA, 19 nt, Homo sapiens
  misc_RNA (1)...(19): siRNA sense strand
acuuuaugguacaagauga

SEQ ID NO: 2279769 - RNA, 19 nt, Homo sapiens
  misc_RNA (1)...(19): siRNA sense strand
caaacuggauuucaggaca

SEQ ID NO: 2279770 - RNA, 19 nt, Homo sapiens
  misc_RNA (1)...(19): siRNA sense strand
guaaggaagggauggucau

SEQ ID NO: 2279771 - RNA, 19 nt, Homo sapiens
  misc_RNA (1)...(19): siRNA sense strand
cagcaacauauuacaucua

SEQ ID NO: 2279772 - RNA, 19 nt, Homo sapiens
  misc_RNA (1)...(19): siRNA sense strand
ggguguuuaugaaguugaa

SEQ ID NO: 2279773 - RNA, 19 nt, Homo sapiens
  misc_RNA (1)...(19): siRNA sense strand
uuuaugaaguugaagacca

SEQ ID NO: 2279774 - RNA, 19 nt, Homo sapiens
  misc_RNA (1)...(19): siRNA sense strand
gauggcaagagcagaauau

SEQ ID NO: 2279775 - RNA, 19 nt, Homo sapiens
  misc_RNA (1)...(19): siRNA sense strand
cccaaaggcuggagcuaag

SEQ ID NO: 2279776 - RNA, 19 nt, Homo sapiens
  misc_RNA (1)...(19): siRNA sense strand
gaaaauacaaugagagcac

SEQ ID NO: 2279777 - RNA, 19 nt, Homo sapiens
  misc_RNA (1)...(19): siRNA sense strand
cugaagaccuacuggguga

SEQ ID NO: 2279778 - RNA, 19 nt, Homo sapiens
  misc_RNA (1)...(19): siRNA sense strand
agaggaagcuguuggcuga

SEQ ID NO: 2279779 - RNA, 19 nt, Homo sapiens
  misc_RNA (1)...(19): siRNA sense strand
cgacagaucuuccuggaga

SEQ ID NO: 2279780 - RNA, 19 nt, Homo sapiens
  misc_RNA (1)...(19): siRNA sense strand
agaccuacugggugagcaa

SEQ ID NO: 2279781 - RNA, 19 nt, Homo sapiens
  misc_RNA (1)...(19): siRNA sense strand
gcauggaggaugaggugca

SEQ ID NO: 2279782 - RNA, 19 nt, Homo sapiens
  misc_RNA (1)...(19): siRNA sense strand
gcgaggucaucgaggcuga

SEQ ID NO: 2279783 - RNA, 19 nt, Homo sapiens
  misc_RNA (1)...(19): siRNA sense strand
gggagaaggagaggagcga

SEQ ID NO: 2279784 - RNA, 19 nt, Homo sapiens
  misc_RNA (1)...(19): siRNA sense strand
aggagcgagcugaggaaga

SEQ ID NO: 2279785 - RNA, 19 nt, Homo sapiens
  misc_RNA (1)...(19): siRNA sense strand
ccuacaacuucuuggccca

SEQ ID NO: 2279786 - RNA, 19 nt, Homo sapiens
  misc_RNA (1)...(19): siRNA sense strand
ggguacaaguauaacugga

SEQ ID NO: 2279787 - RNA, 19 nt, Homo sapiens
  misc_RNA (1)...(19): siRNA sense strand
aguggguggaggucggaaa

SEQ ID NO: 2279788 - RNA, 19 nt, Homo sapiens
  misc_RNA (1)...(19): siRNA sense strand
cagagaugcugcugcccau

SEQ ID NO: 2279789 - RNA, 19 nt, Homo sapiens
  misc_RNA (1)...(19): siRNA sense strand
ugucaaugaaccugggaaa

SEQ ID NO: 2279790 - RNA, 19 nt, Homo sapiens
  misc_RNA (1)...(19): siRNA sense strand
ggaugaaauguguuggaau

SEQ ID NO: 2279791 - RNA, 19 nt, Homo sapiens
  misc_RNA (1)...(19): siRNA sense strand
ccaccaaagaugcgugaau

SEQ ID NO: 2279792 - RNA, 19 nt, Homo sapiens
  misc_RNA (1)...(19): siRNA sense strand
cugugaagacauugaugaa

SEQ ID NO: 2279793 - RNA, 19 nt, Homo sapiens
  misc_RNA (1)...(19): siRNA sense strand
gagaaguagaacaugucaa

SEQ ID NO: 2279794 - RNA, 19 nt, Homo sapiens
  misc_RNA (1)...(19): siRNA sense strand
cgaaaacagcccagauuau

SEQ ID NO: 2279795 - RNA, 19 nt, Homo sapiens
  misc_RNA (1)...(19): siRNA sense strand
caacuguagagcagaccaa

SEQ ID NO: 2279796 - RNA, 19 nt, Homo sapiens
  misc_RNA (1)...(19): siRNA sense strand
cgugaauacaccaggcuca

SEQ ID NO: 2279797 - RNA, 19 nt, Homo sapiens
  misc_RNA (1)...(19): siRNA sense strand
ccacaacuauuuaugccaa

SEQ ID NO: 2279798 - RNA, 19 nt, Homo sapiens
  misc_RNA (1)...(19): siRNA sense strand
auaccugcguagauauaaa

SEQ ID NO: 2279799 - RNA, 19 nt, Homo sapiens
  misc_RNA (1)...(19): siRNA sense strand
augcagacuggccgaaaua

SEQ ID NO: 2279800 - RNA, 19 nt, Homo sapiens
  misc_RNA (1)...(19): siRNA sense strand
augaaugccgggaggauga

SEQ ID NO: 2279801 - RNA, 19 nt, Homo sapiens
  misc_RNA (1)...(19): siRNA sense strand
uuguaaagguggaaugaag

SEQ ID NO: 2279802 - RNA, 19 nt, Homo sapiens
  misc_RNA (1)...(19): siRNA sense strand
gguggaaugaaguguguca

SEQ ID NO: 2279803 - RNA, 19 nt, Homo sapiens
  misc_RNA (1)...(19): siRNA sense strand
aaguagaacaugucaagau

SEQ ID NO: 2279804 - RNA, 19 nt, Homo sapiens
  misc_RNA (1)...(19): siRNA sense strand
guggugagaaguagaacau

SEQ ID NO: 2279805 - RNA, 19 nt, Homo sapiens
  misc_RNA (1)...(19): siRNA sense strand
ucuacaaauacaugagcau

SEQ ID NO: 2279806 - RNA, 19 nt, Homo sapiens
  misc_RNA (1)...(19): siRNA sense strand
gugcaaugcuugugcucgu

SEQ ID NO: 2279807 - RNA, 19 nt, Homo sapiens
  misc_RNA (1)...(19): siRNA sense strand
gagaacauaucguggaccu

SEQ ID NO: 2279808 - RNA, 19 nt, Homo sapiens
  misc_RNA (1)...(19): siRNA sense strand
acagcaaugcaaagauauu

SEQ ID NO: 2279809 - RNA, 19 nt, Homo sapiens
  misc_RNA (1)...(19): siRNA sense strand
ugucaauaucaauguguca

SEQ ID NO: 2279810 - RNA, 19 nt, Homo sapiens
  misc_RNA (1)...(19): siRNA sense strand
agugggauccugugagaca

SEQ ID NO: 2279811 - RNA, 19 nt, Homo sapiens
  misc_RNA (1)...(19): siRNA sense strand
acgcacaacuguagagcag

SEQ ID NO: 2279812 - RNA, 19 nt, Homo sapiens
  misc_RNA (1)...(19): siRNA sense strand
aaaugaaaauggagaguuc

SEQ ID NO: 2279813 - RNA, 19 nt, Homo sapiens
  misc_RNA (1)...(19): siRNA sense strand
ugucaaugaaccugggaaa

SEQ ID NO: 2279814 - RNA, 19 nt, Homo sapiens
  misc_RNA (1)...(19): siRNA sense strand
ggaugaaauguguuggaau

SEQ ID NO: 2279815 - RNA, 19 nt, Homo sapiens
  misc_RNA (1)...(19): siRNA sense strand
ccaccaaagaugcgugaau

SEQ ID NO: 2279816 - RNA, 19 nt, Homo sapiens
  misc_RNA (1)...(19): siRNA sense strand
cugugaagacauugaugaa

SEQ ID NO: 2279817 - RNA, 19 nt, Homo sapiens
  misc_RNA (1)...(19): siRNA sense strand
gagaaguagaacaugucaa

SEQ ID NO: 2279818 - RNA, 19 nt, Homo sapiens
  misc_RNA (1)...(19): siRNA sense strand
cgaaaacagcccagauuau

SEQ ID NO: 2279819 - RNA, 19 nt, Homo sapiens
  misc_RNA (1)...(19): siRNA sense strand
caacuguagagcagaccaa

SEQ ID NO: 2279820 - RNA, 19 nt, Homo sapiens
  misc_RNA (1)...(19): siRNA sense strand
cgugaauacaccaggcuca

SEQ ID NO: 2279821 - RNA, 19 nt, Homo sapiens
  misc_RNA (1)...(19): siRNA sense strand
ccacaacuauuuaugccaa

SEQ ID NO: 2279822 - RNA, 19 nt, Homo sapiens
  misc_RNA (1)...(19): siRNA sense strand
auaccugcguagauauaaa

SEQ ID NO: 2279823 - RNA, 19 nt, Homo sapiens
  misc_RNA (1)...(19): siRNA sense strand
augcagacuggccgaaaua

SEQ ID NO: 2279824 - RNA, 19 nt, Homo sapiens
  misc_RNA (1)...(19): siRNA sense strand
augaaugccgggaggauga

SEQ ID NO: 2279825 - RNA, 19 nt, Homo sapiens
  misc_RNA (1)...(19): siRNA sense strand
uuguaaagguggaaugaag

SEQ ID NO: 2279826 - RNA, 19 nt, Homo sapiens
  misc_RNA (1)...(19): siRNA sense strand
gguggaaugaaguguguca

SEQ ID NO: 2279827 - RNA, 19 nt, Homo sapiens
  misc_RNA (1)...(19): siRNA sense strand
aaguagaacaugucaagau

SEQ ID NO: 2279828 - RNA, 19 nt, Homo sapiens
  misc_RNA (1)...(19): siRNA sense strand
guggugagaaguagaacau

SEQ ID NO: 2279829 - RNA, 19 nt, Homo sapiens
  misc_RNA (1)...(19): siRNA sense strand
ucuacaaauacaugagcau

SEQ ID NO: 2279830 - RNA, 19 nt, Homo sapiens
  misc_RNA (1)...(19): siRNA sense strand
gugcaaugcuugugcucgu

SEQ ID NO: 2279831 - RNA, 19 nt, Homo sapiens
  misc_RNA (1)...(19): siRNA sense strand
gagaacauaucguggaccu

SEQ ID NO: 2279832 - RNA, 19 nt, Homo sapiens
  misc_RNA (1)...(19): siRNA sense strand
acagcaaugcaaagauauu

SEQ ID NO: 2279833 - RNA, 19 nt, Homo sapiens
  misc_RNA (1)...(19): siRNA sense strand
ugucaauaucaauguguca

SEQ ID NO: 2279834 - RNA, 19 nt, Homo sapiens
  misc_RNA (1)...(19): siRNA sense strand
agugggauccugugagaca

SEQ ID NO: 2279835 - RNA, 19 nt, Homo sapiens
  misc_RNA (1)...(19): siRNA sense strand
acgcacaacuguagagcag

SEQ ID NO: 2279836 - RNA, 19 nt, Homo sapiens
  misc_RNA (1)...(19): siRNA sense strand
aaaugaaaauggagaguuc

SEQ ID NO: 2279837 - RNA, 19 nt, Homo sapiens
  misc_RNA (1)...(19): siRNA sense strand
ugaagauccaagugcgaaa

SEQ ID NO: 2279838 - RNA, 19 nt, Homo sapiens
  misc_RNA (1)...(19): siRNA sense strand
gauccaagugcgaaaggca

SEQ ID NO: 2279839 - RNA, 19 nt, Homo sapiens
  misc_RNA (1)...(19): siRNA sense strand
gacucugaagcaugagaaa

SEQ ID NO: 2279840 - RNA, 19 nt, Homo sapiens
  misc_RNA (1)...(19): siRNA sense strand
ugguggacuuugaggacaa

SEQ ID NO: 2279841 - RNA, 19 nt, Homo sapiens
  misc_RNA (1)...(19): siRNA sense strand
cauucaagguggccgacga

SEQ ID NO: 2279842 - RNA, 19 nt, Homo sapiens
  misc_RNA (1)...(19): siRNA sense strand
ugguggacuuugaggacaa

SEQ ID NO: 2279843 - RNA, 19 nt, Homo sapiens
  misc_RNA (1)...(19): siRNA sense strand
cauucaagguggccgacga

SEQ ID NO: 2279844 - RNA, 19 nt, Homo sapiens
  misc_RNA (1)...(19): siRNA sense strand
cugaaagaccuguggcaaa

SEQ ID NO: 2279845 - RNA, 19 nt, Homo sapiens
  misc_RNA (1)...(19): siRNA sense strand
gagacaaaguaaaggcuca

SEQ ID NO: 2279846 - RNA, 19 nt, Homo sapiens
  misc_RNA (1)...(19): siRNA sense strand
ggacaguacaccugggaca

SEQ ID NO: 2279847 - RNA, 19 nt, Homo sapiens
  misc_RNA (1)...(19): siRNA sense strand
acgacaaugaggaggguuu

SEQ ID NO: 2279848 - RNA, 19 nt, Homo sapiens
  misc_RNA (1)...(19): siRNA sense strand
gaagaauuacuguggccua

SEQ ID NO: 2279849 - RNA, 19 nt, Homo sapiens
  misc_RNA (1)...(19): siRNA sense strand
caucaguggagguggcuau

SEQ ID NO: 2279850 - RNA, 19 nt, Homo sapiens
  misc_RNA (1)...(19): siRNA sense strand
caaccaacacagaugggaa

SEQ ID NO: 2279851 - RNA, 19 nt, Homo sapiens
  misc_RNA (1)...(19): siRNA sense strand
auaaacagggauuuggaaa

SEQ ID NO: 2279852 - RNA, 19 nt, Homo sapiens
  misc_RNA (1)...(19): siRNA sense strand
ugauagaaauggaggacug

SEQ ID NO: 2279853 - RNA, 19 nt, Homo sapiens
  misc_RNA (1)...(19): siRNA sense strand
uggccuaccaggugaauau

SEQ ID NO: 2279854 - RNA, 19 nt, Homo sapiens
  misc_RNA (1)...(19): siRNA sense strand
uagaaauggaggacuggaa

SEQ ID NO: 2279855 - RNA, 19 nt, Homo sapiens
  misc_RNA (1)...(19): siRNA sense strand
acaccugggacauggcaaa

SEQ ID NO: 2279856 - RNA, 19 nt, Homo sapiens
  misc_RNA (1)...(19): siRNA sense strand
uaucaggaaaggaggugaa

SEQ ID NO: 2279857 - RNA, 19 nt, Homo sapiens
  misc_RNA (1)...(19): siRNA sense strand
ccucagaacuggaaaagca

SEQ ID NO: 2279858 - RNA, 19 nt, Homo sapiens
  misc_RNA (1)...(19): siRNA sense strand
cuacaacaggaaaggccaa

SEQ ID NO: 2279859 - RNA, 19 nt, Homo sapiens
  misc_RNA (1)...(19): siRNA sense strand
agaaaauggaggauggaca

SEQ ID NO: 2279860 - RNA, 19 nt, Homo sapiens
  misc_RNA (1)...(19): siRNA sense strand
ugaauauuggcuuggaaau

SEQ ID NO: 2279861 - RNA, 19 nt, Homo sapiens
  misc_RNA (1)...(19): siRNA sense strand
cuucagugcccguggucau

SEQ ID NO: 2279862 - RNA, 19 nt, Homo sapiens
  misc_RNA (1)...(19): siRNA sense strand
gcugaaagaccuguggcaa

SEQ ID NO: 2279863 - RNA, 19 nt, Homo sapiens
  misc_RNA (1)...(19): siRNA sense strand
cagaaugaagccaacaaau

SEQ ID NO: 2279864 - RNA, 19 nt, Homo sapiens
  misc_RNA (1)...(19): siRNA sense strand
ccuucuucccacagcaaua

SEQ ID NO: 2279865 - RNA, 19 nt, Homo sapiens
  misc_RNA (1)...(19): siRNA sense strand
uaaagaagacgguggugga

SEQ ID NO: 2279866 - RNA, 19 nt, Homo sapiens
  misc_RNA (1)...(19): siRNA sense strand
aagaugaguaugaagauca

SEQ ID NO: 2279867 - RNA, 19 nt, Homo sapiens
  misc_RNA (1)...(19): siRNA sense strand
gaggaaauuaucaggaaag

SEQ ID NO: 2279868 - RNA, 19 nt, Homo sapiens
  misc_RNA (1)...(19): siRNA sense strand
ugugacaugaauacagaaa

SEQ ID NO: 2279869 - RNA, 19 nt, Homo sapiens
  misc_RNA (1)...(19): siRNA sense strand
cuguacagaaugaagccaa

SEQ ID NO: 2279870 - RNA, 19 nt, Homo sapiens
  misc_RNA (1)...(19): siRNA sense strand
cugagaagcaaaauacaaa

SEQ ID NO: 2279871 - RNA, 19 nt, Homo sapiens
  misc_RNA (1)...(19): siRNA sense strand
guauacugugacaugaaua

SEQ ID NO: 2279872 - RNA, 19 nt, Homo sapiens
  misc_RNA (1)...(19): siRNA sense strand
ugauaaaauuagccagcuu

SEQ ID NO: 2279873 - RNA, 19 nt, Homo sapiens
  misc_RNA (1)...(19): siRNA sense strand
cguaugacagagacaauga

SEQ ID NO: 2279874 - RNA, 19 nt, Homo sapiens
  misc_RNA (1)...(19): siRNA sense strand
caagaagagagaagaggcu

SEQ ID NO: 2279875 - RNA, 19 nt, Homo sapiens
  misc_RNA (1)...(19): siRNA sense strand
gagaagaacgggaagguca

SEQ ID NO: 2279876 - RNA, 19 nt, Homo sapiens
  misc_RNA (1)...(19): siRNA sense strand
aggagaggauagaggaaaa

SEQ ID NO: 2279877 - RNA, 19 nt, Homo sapiens
  misc_RNA (1)...(19): siRNA sense strand
acagaaaacacgaaggaaa

SEQ ID NO: 2279878 - RNA, 19 nt, Homo sapiens
  misc_RNA (1)...(19): siRNA sense strand
uccaaggagaggacagaaa

SEQ ID NO: 2279879 - RNA, 19 nt, Homo sapiens
  misc_RNA (1)...(19): siRNA sense strand
gacuguaagcugaaggaga

SEQ ID NO: 2279880 - RNA, 19 nt, Homo sapiens
  misc_RNA (1)...(19): siRNA sense strand
agauugagaagaacgggaa

SEQ ID NO: 2279881 - RNA, 19 nt, Homo sapiens
  misc_RNA (1)...(19): siRNA sense strand
ccaugaacaagaaggggaa

SEQ ID NO: 2279882 - RNA, 19 nt, Homo sapiens
  misc_RNA (1)...(19): siRNA sense strand
aggcaugugcggagcuaca

SEQ ID NO: 2279883 - RNA, 19 nt, Homo sapiens
  misc_RNA (1)...(19): siRNA sense strand
aguagaaaucggaguuguu

SEQ ID NO: 2279884 - RNA, 19 nt, Homo sapiens
  misc_RNA (1)...(19): siRNA sense strand
cguacagcauccuggagau

SEQ ID NO: 2279885 - RNA, 19 nt, Homo sapiens
  misc_RNA (1)...(19): siRNA sense strand
auuacuuagccaugaacaa

SEQ ID NO: 2279886 - RNA, 19 nt, Homo sapiens
  misc_RNA (1)...(19): siRNA sense strand
aaggagaggauagaggaaa

SEQ ID NO: 2279887 - RNA, 19 nt, Homo sapiens
  misc_RNA (1)...(19): siRNA sense strand
ccaugaaugcugagggacu

SEQ ID NO: 2279888 - RNA, 19 nt, Homo sapiens
  misc_RNA (1)...(19): siRNA sense strand
guuucuaccuccaggcgaa

SEQ ID NO: 2279889 - RNA, 19 nt, Homo sapiens
  misc_RNA (1)...(19): siRNA sense strand
agggaaaccgaguuaagaa

SEQ ID NO: 2279890 - RNA, 19 nt, Homo sapiens
  misc_RNA (1)...(19): siRNA sense strand
ggccaugaaugcugaggga

SEQ ID NO: 2279891 - RNA, 19 nt, Homo sapiens
  misc_RNA (1)...(19): siRNA sense strand
acaaagaaggagagaucau

SEQ ID NO: 2279892 - RNA, 19 nt, Homo sapiens
  misc_RNA (1)...(19): siRNA sense strand
gagagaucaugaaaggcaa

SEQ ID NO: 2279893 - RNA, 19 nt, Homo sapiens
  misc_RNA (1)...(19): siRNA sense strand
cgugcugaacggaggcaaa

SEQ ID NO: 2279894 - RNA, 19 nt, Homo sapiens
  misc_RNA (1)...(19): siRNA sense strand
ggagagaucaugaaaggca

SEQ ID NO: 2279895 - RNA, 19 nt, Homo sapiens
  misc_RNA (1)...(19): siRNA sense strand
gcaccaaagaugaggacag

SEQ ID NO: 2279896 - RNA, 19 nt, Homo sapiens
  misc_RNA (1)...(19): siRNA sense strand
ggcaaugaacagugaggga

SEQ ID NO: 2279897 - RNA, 19 nt, Homo sapiens
  misc_RNA (1)...(19): siRNA sense strand
aaggcaaccaugugaagaa

SEQ ID NO: 2279898 - RNA, 19 nt, Homo sapiens
  misc_RNA (1)...(19): siRNA sense strand
ggcaaauccaugagccaca

SEQ ID NO: 2279899 - RNA, 19 nt, Homo sapiens
  misc_RNA (1)...(19): siRNA sense strand
gaggcaaauccaugagcca

SEQ ID NO: 2279900 - RNA, 19 nt, Homo sapiens
  misc_RNA (1)...(19): siRNA sense strand
gguaucugggucugaacaa

SEQ ID NO: 2279901 - RNA, 19 nt, Homo sapiens
  misc_RNA (1)...(19): siRNA sense strand
ccaaagaugaggacagcac

SEQ ID NO: 2279902 - RNA, 19 nt, Homo sapiens
  misc_RNA (1)...(19): siRNA sense strand
acaaagaaggagagaucau

SEQ ID NO: 2279903 - RNA, 19 nt, Homo sapiens
  misc_RNA (1)...(19): siRNA sense strand
gagagaucaugaaaggcaa

SEQ ID NO: 2279904 - RNA, 19 nt, Homo sapiens
  misc_RNA (1)...(19): siRNA sense strand
cgugcugaacggaggcaaa

SEQ ID NO: 2279905 - RNA, 19 nt, Homo sapiens
  misc_RNA (1)...(19): siRNA sense strand
ggagagaucaugaaaggca

SEQ ID NO: 2279906 - RNA, 19 nt, Homo sapiens
  misc_RNA (1)...(19): siRNA sense strand
gcaccaaagaugaggacag

SEQ ID NO: 2279907 - RNA, 19 nt, Homo sapiens
  misc_RNA (1)...(19): siRNA sense strand
ggcaaugaacagugaggga

SEQ ID NO: 2279908 - RNA, 19 nt, Homo sapiens
  misc_RNA (1)...(19): siRNA sense strand
aaggcaaccaugugaagaa

SEQ ID NO: 2279909 - RNA, 19 nt, Homo sapiens
  misc_RNA (1)...(19): siRNA sense strand
ggcaaauccaugagccaca

SEQ ID NO: 2279910 - RNA, 19 nt, Homo sapiens
  misc_RNA (1)...(19): siRNA sense strand
gaggcaaauccaugagcca

SEQ ID NO: 2279911 - RNA, 19 nt, Homo sapiens
  misc_RNA (1)...(19): siRNA sense strand
gguaucugggucugaacaa

SEQ ID NO: 2279912 - RNA, 19 nt, Homo sapiens
  misc_RNA (1)...(19): siRNA sense strand
ccaaagaugaggacagcac

SEQ ID NO: 2279913 - RNA, 19 nt, Homo sapiens
  misc_RNA (1)...(19): siRNA sense strand
augaaagggaacagaguaa

SEQ ID NO: 2279914 - RNA, 19 nt, Homo sapiens
  misc_RNA (1)...(19): siRNA sense strand
agggaacagaguaaagaaa

SEQ ID NO: 2279915 - RNA, 19 nt, Homo sapiens
  misc_RNA (1)...(19): siRNA sense strand
auuaaauaaggaagggcaa

SEQ ID NO: 2279916 - RNA, 19 nt, Homo sapiens
  misc_RNA (1)...(19): siRNA sense strand
gauuaaauaaggaagggca

SEQ ID NO: 2279917 - RNA, 19 nt, Homo sapiens
  misc_RNA (1)...(19): siRNA sense strand
gggcaagcuaugaaaggga

SEQ ID NO: 2279918 - RNA, 19 nt, Homo sapiens
  misc_RNA (1)...(19): siRNA sense strand
cauccauguuguacagaca

SEQ ID NO: 2279919 - RNA, 19 nt, Homo sapiens
  misc_RNA (1)...(19): siRNA sense strand
gugaaaacaggguuguaua

SEQ ID NO: 2279920 - RNA, 19 nt, Homo sapiens
  misc_RNA (1)...(19): siRNA sense strand
ggaacagaguaaagaaaac

SEQ ID NO: 2279921 - RNA, 19 nt, Homo sapiens
  misc_RNA (1)...(19): siRNA sense strand
caauaaugaauggaggcaa

SEQ ID NO: 2279922 - RNA, 19 nt, Homo sapiens
  misc_RNA (1)...(19): siRNA sense strand
gcucaaggguauagugacc

SEQ ID NO: 2279923 - RNA, 19 nt, Homo sapiens
  misc_RNA (1)...(19): siRNA sense strand
ggggugacgccaaguaaaa

SEQ ID NO: 2279924 - RNA, 19 nt, Homo sapiens
  misc_RNA (1)...(19): siRNA sense strand
gucaacaagaguaagacaa

SEQ ID NO: 2279925 - RNA, 19 nt, Homo sapiens
  misc_RNA (1)...(19): siRNA sense strand
aaccagucaacaagaguaa

SEQ ID NO: 2279926 - RNA, 19 nt, Homo sapiens
  misc_RNA (1)...(19): siRNA sense strand
gaaccaaggaugacagcac

SEQ ID NO: 2279927 - RNA, 19 nt, Homo sapiens
  misc_RNA (1)...(19): siRNA sense strand
augaaagggaacagaguaa

SEQ ID NO: 2279928 - RNA, 19 nt, Homo sapiens
  misc_RNA (1)...(19): siRNA sense strand
agggaacagaguaaagaaa

SEQ ID NO: 2279929 - RNA, 19 nt, Homo sapiens
  misc_RNA (1)...(19): siRNA sense strand
auuaaauaaggaagggcaa

SEQ ID NO: 2279930 - RNA, 19 nt, Homo sapiens
  misc_RNA (1)...(19): siRNA sense strand
gauuaaauaaggaagggca

SEQ ID NO: 2279931 - RNA, 19 nt, Homo sapiens
  misc_RNA (1)...(19): siRNA sense strand
gggcaagcuaugaaaggga

SEQ ID NO: 2279932 - RNA, 19 nt, Homo sapiens
  misc_RNA (1)...(19): siRNA sense strand
cauccauguuguacagaca

SEQ ID NO: 2279933 - RNA, 19 nt, Homo sapiens
  misc_RNA (1)...(19): siRNA sense strand
gugaaaacaggguuguaua

SEQ ID NO: 2279934 - RNA, 19 nt, Homo sapiens
  misc_RNA (1)...(19): siRNA sense strand
ggaacagaguaaagaaaac

SEQ ID NO: 2279935 - RNA, 19 nt, Homo sapiens
  misc_RNA (1)...(19): siRNA sense strand
caauaaugaauggaggcaa

SEQ ID NO: 2279936 - RNA, 19 nt, Homo sapiens
  misc_RNA (1)...(19): siRNA sense strand
gcucaaggguauagugacc

SEQ ID NO: 2279937 - RNA, 19 nt, Homo sapiens
  misc_RNA (1)...(19): siRNA sense strand
ggggugacgccaaguaaaa

SEQ ID NO: 2279938 - RNA, 19 nt, Homo sapiens
  misc_RNA (1)...(19): siRNA sense strand
gucaacaagaguaagacaa

SEQ ID NO: 2279939 - RNA, 19 nt, Homo sapiens
  misc_RNA (1)...(19): siRNA sense strand
aaccagucaacaagaguaa

SEQ ID NO: 2279940 - RNA, 19 nt, Homo sapiens
  misc_RNA (1)...(19): siRNA sense strand
gaaccaaggaugacagcac

SEQ ID NO: 2279941 - RNA, 19 nt, Homo sapiens
  misc_RNA (1)...(19): siRNA sense strand
agucaaagucaaaggaauu

SEQ ID NO: 2279942 - RNA, 19 nt, Homo sapiens
  misc_RNA (1)...(19): siRNA sense strand
cuggaauggagaagauaua

SEQ ID NO: 2279943 - RNA, 19 nt, Homo sapiens
  misc_RNA (1)...(19): siRNA sense strand
gggaucaggaaguggagaa

SEQ ID NO: 2279944 - RNA, 19 nt, Homo sapiens
  misc_RNA (1)...(19): siRNA sense strand
aagucaaagucaaaggaau

SEQ ID NO: 2279945 - RNA, 19 nt, Homo sapiens
  misc_RNA (1)...(19): siRNA sense strand
gaacauacgacauuggaca

SEQ ID NO: 2279946 - RNA, 19 nt, Homo sapiens
  misc_RNA (1)...(19): siRNA sense strand
caucaaacaagcagaaaau

SEQ ID NO: 2279947 - RNA, 19 nt, Homo sapiens
  misc_RNA (1)...(19): siRNA sense strand
cuggaaauccugaagucaa

SEQ ID NO: 2279948 - RNA, 19 nt, Homo sapiens
  misc_RNA (1)...(19): siRNA sense strand
ggaacagguaaauaggauu

SEQ ID NO: 2279949 - RNA, 19 nt, Homo sapiens
  misc_RNA (1)...(19): siRNA sense strand
guauuuauuuggugcggau

SEQ ID NO: 2279950 - RNA, 19 nt, Homo sapiens
  misc_RNA (1)...(19): siRNA sense strand
gugaagagacgcuugccaa

SEQ ID NO: 2279951 - RNA, 19 nt, Homo sapiens
  misc_RNA (1)...(19): siRNA sense strand
cgcacauggcggagcuuaa

SEQ ID NO: 2279952 - RNA, 19 nt, Homo sapiens
  misc_RNA (1)...(19): siRNA sense strand
cugcuggaauggagaagau

SEQ ID NO: 2279953 - RNA, 19 nt, Homo sapiens
  misc_RNA (1)...(19): siRNA sense strand
guggagaagucaagaggac

SEQ ID NO: 2279954 - RNA, 19 nt, Homo sapiens
  misc_RNA (1)...(19): siRNA sense strand
cuauggaggucuagcugau

SEQ ID NO: 2279955 - RNA, 19 nt, Homo sapiens
  misc_RNA (1)...(19): siRNA sense strand
agacacaacaggagcagga

SEQ ID NO: 2279956 - RNA, 19 nt, Homo sapiens
  misc_RNA (1)...(19): siRNA sense strand
gcgacugaaucuaugacau

SEQ ID NO: 2279957 - RNA, 19 nt, Homo sapiens
  misc_RNA (1)...(19): siRNA sense strand
ccaggaagauggaggagag

SEQ ID NO: 2279958 - RNA, 19 nt, Homo sapiens
  misc_RNA (1)...(19): siRNA sense strand
acauguugcaccaggaaga

SEQ ID NO: 2279959 - RNA, 19 nt, Homo sapiens
  misc_RNA (1)...(19): siRNA sense strand
uggaauacucagaaugcau

SEQ ID NO: 2279960 - RNA, 19 nt, Homo sapiens
  misc_RNA (1)...(19): siRNA sense strand
gcuggaauggagaagauau

SEQ ID NO: 2279961 - RNA, 19 nt, Homo sapiens
  misc_RNA (1)...(19): siRNA sense strand
ugcaguaccuacaggaaca

SEQ ID NO: 2279962 - RNA, 19 nt, Homo sapiens
  misc_RNA (1)...(19): siRNA sense strand
cugaagaauuuguaaacag

SEQ ID NO: 2279963 - RNA, 19 nt, Homo sapiens
  misc_RNA (1)...(19): siRNA sense strand
uguaagaacacccacacaa

SEQ ID NO: 2279964 - RNA, 19 nt, Homo sapiens
  misc_RNA (1)...(19): siRNA sense strand
gggacugugaugaugaaga

SEQ ID NO: 2279965 - RNA, 19 nt, Homo sapiens
  misc_RNA (1)...(19): siRNA sense strand
ggagaagucaagaggacac

SEQ ID NO: 2279966 - RNA, 19 nt, Homo sapiens
  misc_RNA (1)...(19): siRNA sense strand
guucaguuguuacagggua

SEQ ID NO: 2279967 - RNA, 19 nt, Homo sapiens
  misc_RNA (1)...(19): siRNA sense strand
ugaucagcuuugugcuaau

SEQ ID NO: 2279968 - RNA, 19 nt, Homo sapiens
  misc_RNA (1)...(19): siRNA sense strand
caggaaguggagaagucaa

SEQ ID NO: 2279969 - RNA, 19 nt, Homo sapiens
  misc_RNA (1)...(19): siRNA sense strand
acgcuugccaacagaagaa

SEQ ID NO: 2279970 - RNA, 19 nt, Homo sapiens
  misc_RNA (1)...(19): siRNA sense strand
gcaccaggaagauggagga

SEQ ID NO: 2279971 - RNA, 19 nt, Homo sapiens
  misc_RNA (1)...(19): siRNA sense strand
cugacaaugggcagggaaa

SEQ ID NO: 2279972 - RNA, 19 nt, Homo sapiens
  misc_RNA (1)...(19): siRNA sense strand
gugaauauuggcugggcaa

SEQ ID NO: 2279973 - RNA, 19 nt, Homo sapiens
  misc_RNA (1)...(19): siRNA sense strand
cuuuaacagaggauggaaa

SEQ ID NO: 2279974 - RNA, 19 nt, Homo sapiens
  misc_RNA (1)...(19): siRNA sense strand
ugaaaauggcuuuggaaau

SEQ ID NO: 2279975 - RNA, 19 nt, Homo sapiens
  misc_RNA (1)...(19): siRNA sense strand
gggacagagaucaugacaa

SEQ ID NO: 2279976 - RNA, 19 nt, Homo sapiens
  misc_RNA (1)...(19): siRNA sense strand
cgaucugauggcagugaaa

SEQ ID NO: 2279977 - RNA, 19 nt, Homo sapiens
  misc_RNA (1)...(19): siRNA sense strand
gaggugcaguggugggcua

SEQ ID NO: 2279978 - RNA, 19 nt, Homo sapiens
  misc_RNA (1)...(19): siRNA sense strand
cugcaaaccugaauggugu

SEQ ID NO: 2279979 - RNA, 19 nt, Homo sapiens
  misc_RNA (1)...(19): siRNA sense strand
gcaagaggcaguaugcaga

SEQ ID NO: 2279980 - RNA, 19 nt, Homo sapiens
  misc_RNA (1)...(19): siRNA sense strand
aguccaguuccuugauaaa

SEQ ID NO: 2279981 - RNA, 19 nt, Homo sapiens
  misc_RNA (1)...(19): siRNA sense strand
uugauaaaggagaugagaa

SEQ ID NO: 2279982 - RNA, 19 nt, Homo sapiens
  misc_RNA (1)...(19): siRNA sense strand
auaaaggagaugagaauac

SEQ ID NO: 2279983 - RNA, 19 nt, Homo sapiens
  misc_RNA (1)...(19): siRNA sense strand
ggagaugagaauacuguca

SEQ ID NO: 2279984 - RNA, 19 nt, Homo sapiens
  misc_RNA (1)...(19): siRNA sense strand
aaauucagcacgugggaca

SEQ ID NO: 2279985 - RNA, 19 nt, Homo sapiens
  misc_RNA (1)...(19): siRNA sense strand
cgauggaggaggauggacu

SEQ ID NO: 2279986 - RNA, 19 nt, Homo sapiens
  misc_RNA (1)...(19): siRNA sense strand
cgaguugaauauuggggaa

SEQ ID NO: 2279987 - RNA, 19 nt, Homo sapiens
  misc_RNA (1)...(19): siRNA sense strand
augaaaauggcuuuggaaa

SEQ ID NO: 2279988 - RNA, 19 nt, Homo sapiens
  misc_RNA (1)...(19): siRNA sense strand
gacaaugggcagggaaauu

SEQ ID NO: 2279989 - RNA, 19 nt, Homo sapiens
  misc_RNA (1)...(19): siRNA sense strand
augacaacuaugaagggaa

SEQ ID NO: 2279990 - RNA, 19 nt, Homo sapiens
  misc_RNA (1)...(19): siRNA sense strand
gcucaguggauuuuacaaa

SEQ ID NO: 2279991 - RNA, 19 nt, Homo sapiens
  misc_RNA (1)...(19): siRNA sense strand
ugacaaugggcagggaaau

SEQ ID NO: 2279992 - RNA, 19 nt, Homo sapiens
  misc_RNA (1)...(19): siRNA sense strand
agggaacugcgcagaagaa

SEQ ID NO: 2279993 - RNA, 19 nt, Homo sapiens
  misc_RNA (1)...(19): siRNA sense strand
gagacgaucugauggcagu

SEQ ID NO: 2279994 - RNA, 19 nt, Homo sapiens
  misc_RNA (1)...(19): siRNA sense strand
ugacaacuaugaagggaac

SEQ ID NO: 2279995 - RNA, 19 nt, Homo sapiens
  misc_RNA (1)...(19): siRNA sense strand
aguuggagaugaaaagaau

SEQ ID NO: 2279996 - RNA, 19 nt, Homo sapiens
  misc_RNA (1)...(19): siRNA sense strand
guuaugaaaauuaggccaa

SEQ ID NO: 2279997 - RNA, 19 nt, Homo sapiens
  misc_RNA (1)...(19): siRNA sense strand
cugacaaugggcagggaaa

SEQ ID NO: 2279998 - RNA, 19 nt, Homo sapiens
  misc_RNA (1)...(19): siRNA sense strand
gugaauauuggcugggcaa

SEQ ID NO: 2279999 - RNA, 19 nt, Homo sapiens
  misc_RNA (1)...(19): siRNA sense strand
cuuuaacagaggauggaaa

SEQ ID NO: 2280000 - RNA, 19 nt, Homo sapiens
  misc_RNA (1)...(19): siRNA sense strand
ugaaaauggcuuuggaaau

SEQ ID NO: 2280001 - RNA, 19 nt, Homo sapiens
  misc_RNA (1)...(19): siRNA sense strand
gggacagagaucaugacaa

SEQ ID NO: 2280002 - RNA, 19 nt, Homo sapiens
  misc_RNA (1)...(19): siRNA sense strand
cgaucugauggcagugaaa

SEQ ID NO: 2280003 - RNA, 19 nt, Homo sapiens
  misc_RNA (1)...(19): siRNA sense strand
gaggugcaguggugggcua

SEQ ID NO: 2280004 - RNA, 19 nt, Homo sapiens
  misc_RNA (1)...(19): siRNA sense strand
cugcaaaccugaauggugu

SEQ ID NO: 2280005 - RNA, 19 nt, Homo sapiens
  misc_RNA (1)...(19): siRNA sense strand
gcaagaggcaguaugcaga

SEQ ID NO: 2280006 - RNA, 19 nt, Homo sapiens
  misc_RNA (1)...(19): siRNA sense strand
aguccaguuccuugauaaa

SEQ ID NO: 2280007 - RNA, 19 nt, Homo sapiens
  misc_RNA (1)...(19): siRNA sense strand
uugauaaaggagaugagaa

SEQ ID NO: 2280008 - RNA, 19 nt, Homo sapiens
  misc_RNA (1)...(19): siRNA sense strand
auaaaggagaugagaauac

SEQ ID NO: 2280009 - RNA, 19 nt, Homo sapiens
  misc_RNA (1)...(19): siRNA sense strand
ggagaugagaauacuguca

SEQ ID NO: 2280010 - RNA, 19 nt, Homo sapiens
  misc_RNA (1)...(19): siRNA sense strand
aaauucagcacgugggaca

SEQ ID NO: 2280011 - RNA, 19 nt, Homo sapiens
  misc_RNA (1)...(19): siRNA sense strand
cgauggaggaggauggacu

SEQ ID NO: 2280012 - RNA, 19 nt, Homo sapiens
  misc_RNA (1)...(19): siRNA sense strand
cgaguugaauauuggggaa

SEQ ID NO: 2280013 - RNA, 19 nt, Homo sapiens
  misc_RNA (1)...(19): siRNA sense strand
augaaaauggcuuuggaaa

SEQ ID NO: 2280014 - RNA, 19 nt, Homo sapiens
  misc_RNA (1)...(19): siRNA sense strand
gacaaugggcagggaaauu

SEQ ID NO: 2280015 - RNA, 19 nt, Homo sapiens
  misc_RNA (1)...(19): siRNA sense strand
augacaacuaugaagggaa

SEQ ID NO: 2280016 - RNA, 19 nt, Homo sapiens
  misc_RNA (1)...(19): siRNA sense strand
gcucaguggauuuuacaaa

SEQ ID NO: 2280017 - RNA, 19 nt, Homo sapiens
  misc_RNA (1)...(19): siRNA sense strand
ugacaaugggcagggaaau

SEQ ID NO: 2280018 - RNA, 19 nt, Homo sapiens
  misc_RNA (1)...(19): siRNA sense strand
agggaacugcgcagaagaa

SEQ ID NO: 2280019 - RNA, 19 nt, Homo sapiens
  misc_RNA (1)...(19): siRNA sense strand
gagacgaucugauggcagu

SEQ ID NO: 2280020 - RNA, 19 nt, Homo sapiens
  misc_RNA (1)...(19): siRNA sense strand
ugacaacuaugaagggaac

SEQ ID NO: 2280021 - RNA, 19 nt, Homo sapiens
  misc_RNA (1)...(19): siRNA sense strand
aguuggagaugaaaagaau

SEQ ID NO: 2280022 - RNA, 19 nt, Homo sapiens
  misc_RNA (1)...(19): siRNA sense strand
guuaugaaaauuaggccaa

SEQ ID NO: 2280023 - RNA, 19 nt, Homo sapiens
  misc_RNA (1)...(19): siRNA sense strand
cugacaaugggcagggaaa

SEQ ID NO: 2280024 - RNA, 19 nt, Homo sapiens
  misc_RNA (1)...(19): siRNA sense strand
gugaauauuggcugggcaa

SEQ ID NO: 2280025 - RNA, 19 nt, Homo sapiens
  misc_RNA (1)...(19): siRNA sense strand
cuuuaacagaggauggaaa

SEQ ID NO: 2280026 - RNA, 19 nt, Homo sapiens
  misc_RNA (1)...(19): siRNA sense strand
ugaaaauggcuuuggaaau

SEQ ID NO: 2280027 - RNA, 19 nt, Homo sapiens
  misc_RNA (1)...(19): siRNA sense strand
gggacagagaucaugacaa

SEQ ID NO: 2280028 - RNA, 19 nt, Homo sapiens
  misc_RNA (1)...(19): siRNA sense strand
cgaucugauggcagugaaa

SEQ ID NO: 2280029 - RNA, 19 nt, Homo sapiens
  misc_RNA (1)...(19): siRNA sense strand
gaggugcaguggugggcua

SEQ ID NO: 2280030 - RNA, 19 nt, Homo sapiens
  misc_RNA (1)...(19): siRNA sense strand
cugcaaaccugaauggugu

SEQ ID NO: 2280031 - RNA, 19 nt, Homo sapiens
  misc_RNA (1)...(19): siRNA sense strand
gcaagaggcaguaugcaga

SEQ ID NO: 2280032 - RNA, 19 nt, Homo sapiens
  misc_RNA (1)...(19): siRNA sense strand
aguccaguuccuugauaaa

SEQ ID NO: 2280033 - RNA, 19 nt, Homo sapiens
  misc_RNA (1)...(19): siRNA sense strand
uugauaaaggagaugagaa

SEQ ID NO: 2280034 - RNA, 19 nt, Homo sapiens
  misc_RNA (1)...(19): siRNA sense strand
auaaaggagaugagaauac

SEQ ID NO: 2280035 - RNA, 19 nt, Homo sapiens
  misc_RNA (1)...(19): siRNA sense strand
ggagaugagaauacuguca

SEQ ID NO: 2280036 - RNA, 19 nt, Homo sapiens
  misc_RNA (1)...(19): siRNA sense strand
aaauucagcacgugggaca

SEQ ID NO: 2280037 - RNA, 19 nt, Homo sapiens
  misc_RNA (1)...(19): siRNA sense strand
cgauggaggaggauggacu

SEQ ID NO: 2280038 - RNA, 19 nt, Homo sapiens
  misc_RNA (1)...(19): siRNA sense strand
cgaguugaauauuggggaa

SEQ ID NO: 2280039 - RNA, 19 nt, Homo sapiens
  misc_RNA (1)...(19): siRNA sense strand
augaaaauggcuuuggaaa

SEQ ID NO: 2280040 - RNA, 19 nt, Homo sapiens
  misc_RNA (1)...(19): siRNA sense strand
gacaaugggcagggaaauu

SEQ ID NO: 2280041 - RNA, 19 nt, Homo sapiens
  misc_RNA (1)...(19): siRNA sense strand
augacaacuaugaagggaa

SEQ ID NO: 2280042 - RNA, 19 nt, Homo sapiens
  misc_RNA (1)...(19): siRNA sense strand
gcucaguggauuuuacaaa

SEQ ID NO: 2280043 - RNA, 19 nt, Homo sapiens
  misc_RNA (1)...(19): siRNA sense strand
ugacaaugggcagggaaau

SEQ ID NO: 2280044 - RNA, 19 nt, Homo sapiens
  misc_RNA (1)...(19): siRNA sense strand
agggaacugcgcagaagaa

SEQ ID NO: 2280045 - RNA, 19 nt, Homo sapiens
  misc_RNA (1)...(19): siRNA sense strand
gagacgaucugauggcagu

SEQ ID NO: 2280046 - RNA, 19 nt, Homo sapiens
  misc_RNA (1)...(19): siRNA sense strand
ugacaacuaugaagggaac

SEQ ID NO: 2280047 - RNA, 19 nt, Homo sapiens
  misc_RNA (1)...(19): siRNA sense strand
aguuggagaugaaaagaau

SEQ ID NO: 2280048 - RNA, 19 nt, Homo sapiens
  misc_RNA (1)...(19): siRNA sense strand
guuaugaaaauuaggccaa

SEQ ID NO: 2280049 - RNA, 19 nt, Homo sapiens
  misc_RNA (1)...(19): siRNA sense strand
cugacaaugggcagggaaa

SEQ ID NO: 2280050 - RNA, 19 nt, Homo sapiens
  misc_RNA (1)...(19): siRNA sense strand
gugaauauuggcugggcaa

SEQ ID NO: 2280051 - RNA, 19 nt, Homo sapiens
  misc_RNA (1)...(19): siRNA sense strand
cuuuaacagaggauggaaa

SEQ ID NO: 2280052 - RNA, 19 nt, Homo sapiens
  misc_RNA (1)...(19): siRNA sense strand
ugaaaauggcuuuggaaau

SEQ ID NO: 2280053 - RNA, 19 nt, Homo sapiens
  misc_RNA (1)...(19): siRNA sense strand
gggacagagaucaugacaa

SEQ ID NO: 2280054 - RNA, 19 nt, Homo sapiens
  misc_RNA (1)...(19): siRNA sense strand
cgaucugauggcagugaaa

SEQ ID NO: 2280055 - RNA, 19 nt, Homo sapiens
  misc_RNA (1)...(19): siRNA sense strand
gaggugcaguggugggcua

SEQ ID NO: 2280056 - RNA, 19 nt, Homo sapiens
  misc_RNA (1)...(19): siRNA sense strand
cugcaaaccugaauggugu

SEQ ID NO: 2280057 - RNA, 19 nt, Homo sapiens
  misc_RNA (1)...(19): siRNA sense strand
gcaagaggcaguaugcaga

SEQ ID NO: 2280058 - RNA, 19 nt, Homo sapiens
  misc_RNA (1)...(19): siRNA sense strand
aguccaguuccuugauaaa

SEQ ID NO: 2280059 - RNA, 19 nt, Homo sapiens
  misc_RNA (1)...(19): siRNA sense strand
uugauaaaggagaugagaa

SEQ ID NO: 2280060 - RNA, 19 nt, Homo sapiens
  misc_RNA (1)...(19): siRNA sense strand
auaaaggagaugagaauac

SEQ ID NO: 2280061 - RNA, 19 nt, Homo sapiens
  misc_RNA (1)...(19): siRNA sense strand
ggagaugagaauacuguca

SEQ ID NO: 2280062 - RNA, 19 nt, Homo sapiens
  misc_RNA (1)...(19): siRNA sense strand
aaauucagcacgugggaca

SEQ ID NO: 2280063 - RNA, 19 nt, Homo sapiens
  misc_RNA (1)...(19): siRNA sense strand
cgauggaggaggauggacu

SEQ ID NO: 2280064 - RNA, 19 nt, Homo sapiens
  misc_RNA (1)...(19): siRNA sense strand
cgaguugaauauuggggaa

SEQ ID NO: 2280065 - RNA, 19 nt, Homo sapiens
  misc_RNA (1)...(19): siRNA sense strand
augaaaauggcuuuggaaa

SEQ ID NO: 2280066 - RNA, 19 nt, Homo sapiens
  misc_RNA (1)...(19): siRNA sense strand
gacaaugggcagggaaauu

SEQ ID NO: 2280067 - RNA, 19 nt, Homo sapiens
  misc_RNA (1)...(19): siRNA sense strand
augacaacuaugaagggaa

SEQ ID NO: 2280068 - RNA, 19 nt, Homo sapiens
  misc_RNA (1)...(19): siRNA sense strand
gcucaguggauuuuacaaa

SEQ ID NO: 2280069 - RNA, 19 nt, Homo sapiens
  misc_RNA (1)...(19): siRNA sense strand
ugacaaugggcagggaaau

SEQ ID NO: 2280070 - RNA, 19 nt, Homo sapiens
  misc_RNA (1)...(19): siRNA sense strand
agggaacugcgcagaagaa

SEQ ID NO: 2280071 - RNA, 19 nt, Homo sapiens
  misc_RNA (1)...(19): siRNA sense strand
gagacgaucugauggcagu

SEQ ID NO: 2280072 - RNA, 19 nt, Homo sapiens
  misc_RNA (1)...(19): siRNA sense strand
ugacaacuaugaagggaac

SEQ ID NO: 2280073 - RNA, 19 nt, Homo sapiens
  misc_RNA (1)...(19): siRNA sense strand
aguuggagaugaaaagaau

SEQ ID NO: 2280074 - RNA, 19 nt, Homo sapiens
  misc_RNA (1)...(19): siRNA sense strand
guuaugaaaauuaggccaa

SEQ ID NO: 2280075 - RNA, 19 nt, Homo sapiens
  misc_RNA (1)...(19): siRNA sense strand
auccagagacagaaacaaa

SEQ ID NO: 2280076 - RNA, 19 nt, Homo sapiens
  misc_RNA (1)...(19): siRNA sense strand
uuugauucauccagagaca

SEQ ID NO: 2280077 - RNA, 19 nt, Homo sapiens
  misc_RNA (1)...(19): siRNA sense strand
auccagagacagaaacaaa

SEQ ID NO: 2280078 - RNA, 19 nt, Homo sapiens
  misc_RNA (1)...(19): siRNA sense strand
uuugauucauccagagaca

SEQ ID NO: 2280079 - RNA, 19 nt, Homo sapiens
  misc_RNA (1)...(19): siRNA sense strand
ccaauaaagcaaugggcaa

SEQ ID NO: 2280080 - RNA, 19 nt, Homo sapiens
  misc_RNA (1)...(19): siRNA sense strand
ccggagaaccaaacggaaa

SEQ ID NO: 2280081 - RNA, 19 nt, Homo sapiens
  misc_RNA (1)...(19): siRNA sense strand
gccaaagaauccugggaga

SEQ ID NO: 2280082 - RNA, 19 nt, Homo sapiens
  misc_RNA (1)...(19): siRNA sense strand
agcaauggaagaagagaaa

SEQ ID NO: 2280083 - RNA, 19 nt, Homo sapiens
  misc_RNA (1)...(19): siRNA sense strand
ugucuuuagucuuggcaaa

SEQ ID NO: 2280084 - RNA, 19 nt, Homo sapiens
  misc_RNA (1)...(19): siRNA sense strand
aagcaauggaagaagagaa

SEQ ID NO: 2280085 - RNA, 19 nt, Homo sapiens
  misc_RNA (1)...(19): siRNA sense strand
auuugaagauggaggcauu

SEQ ID NO: 2280086 - RNA, 19 nt, Homo sapiens
  misc_RNA (1)...(19): siRNA sense strand
aagagaaaccugagggcca

SEQ ID NO: 2280087 - RNA, 19 nt, Homo sapiens
  misc_RNA (1)...(19): siRNA sense strand
gaaccaaacggaaaggaga

SEQ ID NO: 2280088 - RNA, 19 nt, Homo sapiens
  misc_RNA (1)...(19): siRNA sense strand
augccaaggaagaggccaa

SEQ ID NO: 2280089 - RNA, 19 nt, Homo sapiens
  misc_RNA (1)...(19): siRNA sense strand
aacggaaaggagagggaua

SEQ ID NO: 2280090 - RNA, 19 nt, Homo sapiens
  misc_RNA (1)...(19): siRNA sense strand
acacuuaagagcuucgaaa

SEQ ID NO: 2280091 - RNA, 19 nt, Homo sapiens
  misc_RNA (1)...(19): siRNA sense strand
ccugguuagagauggaaua

SEQ ID NO: 2280092 - RNA, 19 nt, Homo sapiens
  misc_RNA (1)...(19): siRNA sense strand
gcaaauacaugcaggcggu

SEQ ID NO: 2280093 - RNA, 19 nt, Homo sapiens
  misc_RNA (1)...(19): siRNA sense strand
augaaggugccaagaacaa

SEQ ID NO: 2280094 - RNA, 19 nt, Homo sapiens
  misc_RNA (1)...(19): siRNA sense strand
uugacaaagcucuggagaa

SEQ ID NO: 2280095 - RNA, 19 nt, Homo sapiens
  misc_RNA (1)...(19): siRNA sense strand
gccaagaacaaugaagaaa

SEQ ID NO: 2280096 - RNA, 19 nt, Homo sapiens
  misc_RNA (1)...(19): siRNA sense strand
ugucaaauggaaagaaguu

SEQ ID NO: 2280097 - RNA, 19 nt, Homo sapiens
  misc_RNA (1)...(19): siRNA sense strand
auuucaaaggagaggauuu

SEQ ID NO: 2280098 - RNA, 19 nt, Homo sapiens
  misc_RNA (1)...(19): siRNA sense strand
cgggaagaacaauguauuu

SEQ ID NO: 2280099 - RNA, 19 nt, Homo sapiens
  misc_RNA (1)...(19): siRNA sense strand
ccaaagaauccugggagau

SEQ ID NO: 2280100 - RNA, 19 nt, Homo sapiens
  misc_RNA (1)...(19): siRNA sense strand
uugagaaagugcuggaagu

SEQ ID NO: 2280101 - RNA, 19 nt, Homo sapiens
  misc_RNA (1)...(19): siRNA sense strand
ccugaagcuuagagaauac

SEQ ID NO: 2280102 - RNA, 19 nt, Homo sapiens
  misc_RNA (1)...(19): siRNA sense strand
aggagaagaccacgacauu

SEQ ID NO: 2280103 - RNA, 19 nt, Homo sapiens
  misc_RNA (1)...(19): siRNA sense strand
cugagcagggagaggauau

SEQ ID NO: 2280104 - RNA, 19 nt, Homo sapiens
  misc_RNA (1)...(19): siRNA sense strand
uugcagagcaggaugccaa

SEQ ID NO: 2280105 - RNA, 19 nt, Homo sapiens
  misc_RNA (1)...(19): siRNA sense strand
uaccugaagcuuagagaau

SEQ ID NO: 2280106 - RNA, 19 nt, Homo sapiens
  misc_RNA (1)...(19): siRNA sense strand
acgccaacauguucaagaa

SEQ ID NO: 2280107 - RNA, 19 nt, Homo sapiens
  misc_RNA (1)...(19): siRNA sense strand
gugccaagaacaaugaaga

SEQ ID NO: 2280108 - RNA, 19 nt, Homo sapiens
  misc_RNA (1)...(19): siRNA sense strand
cggaaaggagagggauauu

SEQ ID NO: 2280109 - RNA, 19 nt, Homo sapiens
  misc_RNA (1)...(19): siRNA sense strand
agaauaaggcugcaagacu

SEQ ID NO: 2280110 - RNA, 19 nt, Homo sapiens
  misc_RNA (1)...(19): siRNA sense strand
ggcauuauccggagaacca

SEQ ID NO: 2280111 - RNA, 19 nt, Homo sapiens
  misc_RNA (1)...(19): siRNA sense strand
ugccaagaacaaugaagaa

SEQ ID NO: 2280112 - RNA, 19 nt, Homo sapiens
  misc_RNA (1)...(19): siRNA sense strand
ugaagaaaggagagauaug

SEQ ID NO: 2280113 - RNA, 19 nt, Homo sapiens
  misc_RNA (1)...(19): siRNA sense strand
ccagaauaaggcugcaaga

SEQ ID NO: 2280114 - RNA, 19 nt, Homo sapiens
  misc_RNA (1)...(19): siRNA sense strand
gaauaaggcugcaagacug

SEQ ID NO: 2280115 - RNA, 19 nt, Homo sapiens
  misc_RNA (1)...(19): siRNA sense strand
caaacggaaaggagaggga

SEQ ID NO: 2280116 - RNA, 19 nt, Homo sapiens
  misc_RNA (1)...(19): siRNA sense strand
cagucaagcaauggaagaa

SEQ ID NO: 2280117 - RNA, 19 nt, Homo sapiens
  misc_RNA (1)...(19): siRNA sense strand
acggaaaggagagggauau

SEQ ID NO: 2280118 - RNA, 19 nt, Homo sapiens
  misc_RNA (1)...(19): siRNA sense strand
gcgaaggagaagaccacga

SEQ ID NO: 2280119 - RNA, 19 nt, Homo sapiens
  misc_RNA (1)...(19): siRNA sense strand
caguaugggaagauagugu

SEQ ID NO: 2280120 - RNA, 19 nt, Homo sapiens
  misc_RNA (1)...(19): siRNA sense strand
cugccauugucaaagagaa

SEQ ID NO: 2280121 - RNA, 19 nt, Homo sapiens
  misc_RNA (1)...(19): siRNA sense strand
auuccagucaugauagaaa

SEQ ID NO: 2280122 - RNA, 19 nt, Homo sapiens
  misc_RNA (1)...(19): siRNA sense strand
uggcauucacugugggcga

SEQ ID NO: 2280123 - RNA, 19 nt, Homo sapiens
  misc_RNA (1)...(19): siRNA sense strand
ccaagaacaaugaagaaag

SEQ ID NO: 2280124 - RNA, 19 nt, Homo sapiens
  misc_RNA (1)...(19): siRNA sense strand
ccguauacuucaagggagg

SEQ ID NO: 2280125 - RNA, 19 nt, Homo sapiens
  misc_RNA (1)...(19): siRNA sense strand
aaggagagggauauucaaa

SEQ ID NO: 2280126 - RNA, 19 nt, Homo sapiens
  misc_RNA (1)...(19): siRNA sense strand
gaugaaggugccaagaaca

SEQ ID NO: 2280127 - RNA, 19 nt, Homo sapiens
  misc_RNA (1)...(19): siRNA sense strand
gagaauacaccaaagcugu

SEQ ID NO: 2280128 - RNA, 19 nt, Homo sapiens
  misc_RNA (1)...(19): siRNA sense strand
ugauuggagacaaaguuua

SEQ ID NO: 2280129 - RNA, 19 nt, Homo sapiens
  misc_RNA (1)...(19): siRNA sense strand
ucaagaaguuugcagagca

SEQ ID NO: 2280130 - RNA, 19 nt, Homo sapiens
  misc_RNA (1)...(19): siRNA sense strand
uggaagaagagaaaccuga

SEQ ID NO: 2280131 - RNA, 19 nt, Homo sapiens
  misc_RNA (1)...(19): siRNA sense strand
gggagauggauaccaaaga

SEQ ID NO: 2280132 - RNA, 19 nt, Homo sapiens
  misc_RNA (1)...(19): siRNA sense strand
cggugauucaguaugggaa

SEQ ID NO: 2280133 - RNA, 19 nt, Homo sapiens
  misc_RNA (1)...(19): siRNA sense strand
acgaagaagacgaggaaga

SEQ ID NO: 2280134 - RNA, 19 nt, Homo sapiens
  misc_RNA (1)...(19): siRNA sense strand
aggaagaggaggacgacga

SEQ ID NO: 2280135 - RNA, 19 nt, Homo sapiens
  misc_RNA (1)...(19): siRNA sense strand
acgaggaagaggaggacga

SEQ ID NO: 2280136 - RNA, 19 nt, Homo sapiens
  misc_RNA (1)...(19): siRNA sense strand
uggaggaucuggaggagga

SEQ ID NO: 2280137 - RNA, 19 nt, Homo sapiens
  misc_RNA (1)...(19): siRNA sense strand
uggaggaggaggaggacga

SEQ ID NO: 2280138 - RNA, 19 nt, Homo sapiens
  misc_RNA (1)...(19): siRNA sense strand
aggaggaggacgacgauga

SEQ ID NO: 2280139 - RNA, 19 nt, Homo sapiens
  misc_RNA (1)...(19): siRNA sense strand
aagacgaggaagaggagga

SEQ ID NO: 2280140 - RNA, 19 nt, Homo sapiens
  misc_RNA (1)...(19): siRNA sense strand
gccaagaacccgcugguga

SEQ ID NO: 2280141 - RNA, 19 nt, Homo sapiens
  misc_RNA (1)...(19): siRNA sense strand
aagaagacgaggaagagga

SEQ ID NO: 2280142 - RNA, 19 nt, Homo sapiens
  misc_RNA (1)...(19): siRNA sense strand
gcgaggacgaagaagacga

SEQ ID NO: 2280143 - RNA, 19 nt, Homo sapiens
  misc_RNA (1)...(19): siRNA sense strand
agggcgaggacgaagaaga

SEQ ID NO: 2280144 - RNA, 19 nt, Homo sapiens
  misc_RNA (1)...(19): siRNA sense strand
aggaggaggaggacgacga

SEQ ID NO: 2280145 - RNA, 19 nt, Homo sapiens
  misc_RNA (1)...(19): siRNA sense strand
gcggaggacauguucgaga

SEQ ID NO: 2280146 - RNA, 19 nt, Homo sapiens
  misc_RNA (1)...(19): siRNA sense strand
cggcugacguugagcgaga

SEQ ID NO: 2280147 - RNA, 19 nt, Homo sapiens
  misc_RNA (1)...(19): siRNA sense strand
cagacuuagccgaggacga

SEQ ID NO: 2280148 - RNA, 19 nt, Homo sapiens
  misc_RNA (1)...(19): siRNA sense strand
uagccgaggacgaggagga

SEQ ID NO: 2280149 - RNA, 19 nt, Homo sapiens
  misc_RNA (1)...(19): siRNA sense strand
gggccaugccagccaguau

SEQ ID NO: 2280150 - RNA, 19 nt, Homo sapiens
  misc_RNA (1)...(19): siRNA sense strand
ggaugaagcucaaggcaga

SEQ ID NO: 2280151 - RNA, 19 nt, Homo sapiens
  misc_RNA (1)...(19): siRNA sense strand
aggcagaggcugagcggau

SEQ ID NO: 2280152 - RNA, 19 nt, Homo sapiens
  misc_RNA (1)...(19): siRNA sense strand
gugaagaucaugacggaga

SEQ ID NO: 2280153 - RNA, 19 nt, Homo sapiens
  misc_RNA (1)...(19): siRNA sense strand
gguaagaaugugcaggaca

SEQ ID NO: 2280154 - RNA, 19 nt, Homo sapiens
  misc_RNA (1)...(19): siRNA sense strand
gcugagugcaagaaggaga

SEQ ID NO: 2280155 - RNA, 19 nt, Homo sapiens
  misc_RNA (1)...(19): siRNA sense strand
ggagacaacaguaagguca

SEQ ID NO: 2280156 - RNA, 19 nt, Homo sapiens
  misc_RNA (1)...(19): siRNA sense strand
ccuucagugaggagguuaa

SEQ ID NO: 2280157 - RNA, 19 nt, Homo sapiens
  misc_RNA (1)...(19): siRNA sense strand
ccgcaugggcauugagauc

SEQ ID NO: 2280158 - RNA, 19 nt, Homo sapiens
  misc_RNA (1)...(19): siRNA sense strand
uguaugacaaaguggacua

SEQ ID NO: 2280159 - RNA, 19 nt, Homo sapiens
  misc_RNA (1)...(19): siRNA sense strand
uggcacaggcagaggcuga

SEQ ID NO: 2280160 - RNA, 19 nt, Homo sapiens
  misc_RNA (1)...(19): siRNA sense strand
caucagaagugaaccgacu

SEQ ID NO: 2280161 - RNA, 19 nt, Homo sapiens
  misc_RNA (1)...(19): siRNA sense strand
ccguggaggcacaggagau

SEQ ID NO: 2280162 - RNA, 19 nt, Homo sapiens
  misc_RNA (1)...(19): siRNA sense strand
gcaagaaggagaugcugga

SEQ ID NO: 2280163 - RNA, 19 nt, Homo sapiens
  misc_RNA (1)...(19): siRNA sense strand
gcugagaagauccgcaaaa

SEQ ID NO: 2280164 - RNA, 19 nt, Homo sapiens
  misc_RNA (1)...(19): siRNA sense strand
ugggcaaggcagaggcuga

SEQ ID NO: 2280165 - RNA, 19 nt, Homo sapiens
  misc_RNA (1)...(19): siRNA sense strand
caguaaggucacaucagaa

SEQ ID NO: 2280166 - RNA, 19 nt, Homo sapiens
  misc_RNA (1)...(19): siRNA sense strand
agaagauccggcaggaaga

SEQ ID NO: 2280167 - RNA, 19 nt, Homo sapiens
  misc_RNA (1)...(19): siRNA sense strand
aggugaagaucaugacgga

SEQ ID NO: 2280168 - RNA, 19 nt, Homo sapiens
  misc_RNA (1)...(19): siRNA sense strand
gugaaaaggugaagcaggu

SEQ ID NO: 2280169 - RNA, 19 nt, Homo sapiens
  misc_RNA (1)...(19): siRNA sense strand
uugccaagcuggugcggga

SEQ ID NO: 2280170 - RNA, 19 nt, Homo sapiens
  misc_RNA (1)...(19): siRNA sense strand
agaucaugacggagaagga

SEQ ID NO: 2280171 - RNA, 19 nt, Homo sapiens
  misc_RNA (1)...(19): siRNA sense strand
cgggaagcugagugcaaga

SEQ ID NO: 2280172 - RNA, 19 nt, Homo sapiens
  misc_RNA (1)...(19): siRNA sense strand
cggcaggaagagauugaga

SEQ ID NO: 2280173 - RNA, 19 nt, Homo sapiens
  misc_RNA (1)...(19): siRNA sense strand
gguugugcagcgcaagaaa

SEQ ID NO: 2280174 - RNA, 19 nt, Homo sapiens
  misc_RNA (1)...(19): siRNA sense strand
agagauugagauugagguu

SEQ ID NO: 2280175 - RNA, 19 nt, Homo sapiens
  misc_RNA (1)...(19): siRNA sense strand
ggaaucugguggacaguaa

SEQ ID NO: 2280176 - RNA, 19 nt, Homo sapiens
  misc_RNA (1)...(19): siRNA sense strand
cagcaggagaagaagaaau

SEQ ID NO: 2280177 - RNA, 19 nt, Homo sapiens
  misc_RNA (1)...(19): siRNA sense strand
acgaagaguaagaagaaaa

SEQ ID NO: 2280178 - RNA, 19 nt, Homo sapiens
  misc_RNA (1)...(19): siRNA sense strand
ggauaagggaaccuauaua

SEQ ID NO: 2280179 - RNA, 19 nt, Homo sapiens
  misc_RNA (1)...(19): siRNA sense strand
ugguauaaauucagaugga

SEQ ID NO: 2280180 - RNA, 19 nt, Homo sapiens
  misc_RNA (1)...(19): siRNA sense strand
aaguaaaacagcaggagaa

SEQ ID NO: 2280181 - RNA, 19 nt, Homo sapiens
  misc_RNA (1)...(19): siRNA sense strand
guauaaauucagauggacu

SEQ ID NO: 2280182 - RNA, 19 nt, Homo sapiens
  misc_RNA (1)...(19): siRNA sense strand
guuuacggcugucaaauua

SEQ ID NO: 2280183 - RNA, 19 nt, Homo sapiens
  misc_RNA (1)...(19): siRNA sense strand
caggagaagaagaaaugau

SEQ ID NO: 2280184 - RNA, 19 nt, Homo sapiens
  misc_RNA (1)...(19): siRNA sense strand
cauuccagaagaagacaaa

SEQ ID NO: 2280185 - RNA, 19 nt, Homo sapiens
  misc_RNA (1)...(19): siRNA sense strand
aagacgaagaguaagaaga

SEQ ID NO: 2280186 - RNA, 19 nt, Homo sapiens
  misc_RNA (1)...(19): siRNA sense strand
gcuugauauuguuggaauc

SEQ ID NO: 2280187 - RNA, 19 nt, Homo sapiens
  misc_RNA (1)...(19): siRNA sense strand
augaagaaacccagcuuga

SEQ ID NO: 2280188 - RNA, 19 nt, Homo sapiens
  misc_RNA (1)...(19): siRNA sense strand
gagccaaauugaaagccga

SEQ ID NO: 2280189 - RNA, 19 nt, Homo sapiens
  misc_RNA (1)...(19): siRNA sense strand
accaagacgaagaguaaga

SEQ ID NO: 2280190 - RNA, 19 nt, Homo sapiens
  misc_RNA (1)...(19): siRNA sense strand
uugaaauggauaagggaac

SEQ ID NO: 2280191 - RNA, 19 nt, Homo sapiens
  misc_RNA (1)...(19): siRNA sense strand
ccaagagaacaaugggaac

SEQ ID NO: 2280192 - RNA, 19 nt, Homo sapiens
  misc_RNA (1)...(19): siRNA sense strand
gauccugugcugaaagaga

SEQ ID NO: 2280193 - RNA, 19 nt, Homo sapiens
  misc_RNA (1)...(19): siRNA sense strand
auugaaauggauaagggaa

SEQ ID NO: 2280194 - RNA, 19 nt, Homo sapiens
  misc_RNA (1)...(19): siRNA sense strand
accaagagaacaaugggaa

SEQ ID NO: 2280195 - RNA, 19 nt, Homo sapiens
  misc_RNA (1)...(19): siRNA sense strand
gcaguuuacggcugucaaa

SEQ ID NO: 2280196 - RNA, 19 nt, Homo sapiens
  misc_RNA (1)...(19): siRNA sense strand
guaaagaaauuucagagcu

SEQ ID NO: 2280197 - RNA, 19 nt, Homo sapiens
  misc_RNA (1)...(19): siRNA sense strand
gggaacagaucgagggcaa

SEQ ID NO: 2280198 - RNA, 19 nt, Homo sapiens
  misc_RNA (1)...(19): siRNA sense strand
aggaaugggccuugacgaa

SEQ ID NO: 2280199 - RNA, 19 nt, Homo sapiens
  misc_RNA (1)...(19): siRNA sense strand
uggaaaggguggcggagga

SEQ ID NO: 2280200 - RNA, 19 nt, Homo sapiens
  misc_RNA (1)...(19): siRNA sense strand
uggagaagagaaagcacaa

SEQ ID NO: 2280201 - RNA, 19 nt, Homo sapiens
  misc_RNA (1)...(19): siRNA sense strand
agauuggagcuuaggaaga

SEQ ID NO: 2280202 - RNA, 19 nt, Homo sapiens
  misc_RNA (1)...(19): siRNA sense strand
aaaugacagcagacagaaa

SEQ ID NO: 2280203 - RNA, 19 nt, Homo sapiens
  misc_RNA (1)...(19): siRNA sense strand
aggagaagucggugaagca

SEQ ID NO: 2280204 - RNA, 19 nt, Homo sapiens
  misc_RNA (1)...(19): siRNA sense strand
agaaaugggaacagaucga

SEQ ID NO: 2280205 - RNA, 19 nt, Homo sapiens
  misc_RNA (1)...(19): siRNA sense strand
ggaacuaacugccucgaca

SEQ ID NO: 2280206 - RNA, 19 nt, Homo sapiens
  misc_RNA (1)...(19): siRNA sense strand
uuauaaagcugcagggcug

SEQ ID NO: 2280207 - RNA, 19 nt, Homo sapiens
  misc_RNA (1)...(19): siRNA sense strand
aagagaaagcacaaagcau

SEQ ID NO: 2280208 - RNA, 19 nt, Homo sapiens
  misc_RNA (1)...(19): siRNA sense strand
gggcuguuugugauggaua

SEQ ID NO: 2280209 - RNA, 19 nt, Homo sapiens
  misc_RNA (1)...(19): siRNA sense strand
cagcagacagaaaugggaa

SEQ ID NO: 2280210 - RNA, 19 nt, Homo sapiens
  misc_RNA (1)...(19): siRNA sense strand
acgaaggagaagucgguga

SEQ ID NO: 2280211 - RNA, 19 nt, Homo sapiens
  misc_RNA (1)...(19): siRNA sense strand
uggugugguuggaguuuau

SEQ ID NO: 2280212 - RNA, 19 nt, Homo sapiens
  misc_RNA (1)...(19): siRNA sense strand
aggagagaaccuagagauc

SEQ ID NO: 2280213 - RNA, 19 nt, Homo sapiens
  misc_RNA (1)...(19): siRNA sense strand
gagaagucggugaagcaca

SEQ ID NO: 2280214 - RNA, 19 nt, Homo sapiens
  misc_RNA (1)...(19): siRNA sense strand
aggaagaaacucagcugca

SEQ ID NO: 2280215 - RNA, 19 nt, Homo sapiens
  misc_RNA (1)...(19): siRNA sense strand
ucuuagaaaugaucgacga

SEQ ID NO: 2280216 - RNA, 19 nt, Homo sapiens
  misc_RNA (1)...(19): siRNA sense strand
caguggaaguucacgcuca

SEQ ID NO: 2280217 - RNA, 19 nt, Homo sapiens
  misc_RNA (1)...(19): siRNA sense strand
ggaaaaggaacguggggaa

SEQ ID NO: 2280218 - RNA, 19 nt, Homo sapiens
  misc_RNA (1)...(19): siRNA sense strand
aaacaaucaaggaggcaaa

SEQ ID NO: 2280219 - RNA, 19 nt, Homo sapiens
  misc_RNA (1)...(19): siRNA sense strand
cauugaugcuggugagaga

SEQ ID NO: 2280220 - RNA, 19 nt, Homo sapiens
  misc_RNA (1)...(19): siRNA sense strand
agucagacaaagagaaaga

SEQ ID NO: 2280221 - RNA, 19 nt, Homo sapiens
  misc_RNA (1)...(19): siRNA sense strand
gaggaaucaaggauggaaa

SEQ ID NO: 2280222 - RNA, 19 nt, Homo sapiens
  misc_RNA (1)...(19): siRNA sense strand
uuuaaguguugaagagcaa

SEQ ID NO: 2280223 - RNA, 19 nt, Homo sapiens
  misc_RNA (1)...(19): siRNA sense strand
uugaagagcaaaaggaaaa

SEQ ID NO: 2280224 - RNA, 19 nt, Homo sapiens
  misc_RNA (1)...(19): siRNA sense strand
ugagaagcaaagaaggaaa

SEQ ID NO: 2280225 - RNA, 19 nt, Homo sapiens
  misc_RNA (1)...(19): siRNA sense strand
gcaccgagaucuuggacca

SEQ ID NO: 2280226 - RNA, 19 nt, Homo sapiens
  misc_RNA (1)...(19): siRNA sense strand
auggaugaauacaaggaaa

SEQ ID NO: 2280227 - RNA, 19 nt, Homo sapiens
  misc_RNA (1)...(19): siRNA sense strand
uggaugaauacaaggaaau

SEQ ID NO: 2280228 - RNA, 19 nt, Homo sapiens
  misc_RNA (1)...(19): siRNA sense strand
ccuaaagcgacuaguaaaa

SEQ ID NO: 2280229 - RNA, 19 nt, Homo sapiens
  misc_RNA (1)...(19): siRNA sense strand
cugcaauacugcugaagga

SEQ ID NO: 2280230 - RNA, 19 nt, Homo sapiens
  misc_RNA (1)...(19): siRNA sense strand
cagacaaagagaaagaaaa

SEQ ID NO: 2280231 - RNA, 19 nt, Homo sapiens
  misc_RNA (1)...(19): siRNA sense strand
aaauacagaugcagcaaaa

SEQ ID NO: 2280232 - RNA, 19 nt, Homo sapiens
  misc_RNA (1)...(19): siRNA sense strand
ucagacaaagagaaagaaa

SEQ ID NO: 2280233 - RNA, 19 nt, Homo sapiens
  misc_RNA (1)...(19): siRNA sense strand
acauuuauccagaggugua

SEQ ID NO: 2280234 - RNA, 19 nt, Homo sapiens
  misc_RNA (1)...(19): siRNA sense strand
ugguaaagcauucaagaca

SEQ ID NO: 2280235 - RNA, 19 nt, Homo sapiens
  misc_RNA (1)...(19): siRNA sense strand
caugagaagcaaagaagga

SEQ ID NO: 2280236 - RNA, 19 nt, Homo sapiens
  misc_RNA (1)...(19): siRNA sense strand
uaaccauaaccguggaaau

SEQ ID NO: 2280237 - RNA, 19 nt, Homo sapiens
  misc_RNA (1)...(19): siRNA sense strand
uuacaugguaucugaacaa

SEQ ID NO: 2280238 - RNA, 19 nt, Homo sapiens
  misc_RNA (1)...(19): siRNA sense strand
ggagagcagauaugggaga

SEQ ID NO: 2280239 - RNA, 19 nt, Homo sapiens
  misc_RNA (1)...(19): siRNA sense strand
cuggaagcuuggugcagua

SEQ ID NO: 2280240 - RNA, 19 nt, Homo sapiens
  misc_RNA (1)...(19): siRNA sense strand
aagagaaguaaguguucaa

SEQ ID NO: 2280241 - RNA, 19 nt, Homo sapiens
  misc_RNA (1)...(19): siRNA sense strand
guugaagagcaaaaggaaa

SEQ ID NO: 2280242 - RNA, 19 nt, Homo sapiens
  misc_RNA (1)...(19): siRNA sense strand
ugcuagaagcuguaaacaa

SEQ ID NO: 2280243 - RNA, 19 nt, Homo sapiens
  misc_RNA (1)...(19): siRNA sense strand
cagcagaauugaagccugu

SEQ ID NO: 2280244 - RNA, 19 nt, Homo sapiens
  misc_RNA (1)...(19): siRNA sense strand
auagucagacaaagagaaa

SEQ ID NO: 2280245 - RNA, 19 nt, Homo sapiens
  misc_RNA (1)...(19): siRNA sense strand
gagaaauacagaugcagca

SEQ ID NO: 2280246 - RNA, 19 nt, Homo sapiens
  misc_RNA (1)...(19): siRNA sense strand
acaacauccagaaggaauu

SEQ ID NO: 2280247 - RNA, 19 nt, Homo sapiens
  misc_RNA (1)...(19): siRNA sense strand
aaauggauacuuagccaaa

SEQ ID NO: 2280248 - RNA, 19 nt, Homo sapiens
  misc_RNA (1)...(19): siRNA sense strand
uccugaauguauugaacaa

SEQ ID NO: 2280249 - RNA, 19 nt, Homo sapiens
  misc_RNA (1)...(19): siRNA sense strand
gugggcaguuggagauuau

SEQ ID NO: 2280250 - RNA, 19 nt, Homo sapiens
  misc_RNA (1)...(19): siRNA sense strand
caacaugaaauucggcaca

SEQ ID NO: 2280251 - RNA, 19 nt, Homo sapiens
  misc_RNA (1)...(19): siRNA sense strand
accuaaagcgacuaguaaa

SEQ ID NO: 2280252 - RNA, 19 nt, Homo sapiens
  misc_RNA (1)...(19): siRNA sense strand
auggaaaggaacaugaaaa

SEQ ID NO: 2280253 - RNA, 19 nt, Homo sapiens
  misc_RNA (1)...(19): siRNA sense strand
augucuggauguuggagaa

SEQ ID NO: 2280254 - RNA, 19 nt, Homo sapiens
  misc_RNA (1)...(19): siRNA sense strand
cuuuaaugcuuucgcaagu

SEQ ID NO: 2280255 - RNA, 19 nt, Homo sapiens
  misc_RNA (1)...(19): siRNA sense strand
cacaacauccagaaggaau

SEQ ID NO: 2280256 - RNA, 19 nt, Homo sapiens
  misc_RNA (1)...(19): siRNA sense strand
ucaaggauggaaaggaaca

SEQ ID NO: 2280257 - RNA, 19 nt, Homo sapiens
  misc_RNA (1)...(19): siRNA sense strand
ggauuuaaugcuagaagcu

SEQ ID NO: 2280258 - RNA, 19 nt, Homo sapiens
  misc_RNA (1)...(19): siRNA sense strand
ggccagaauagcugagaac

SEQ ID NO: 2280259 - RNA, 19 nt, Homo sapiens
  misc_RNA (1)...(19): siRNA sense strand
ugaguauauuggaagcuau

SEQ ID NO: 2280260 - RNA, 19 nt, Homo sapiens
  misc_RNA (1)...(19): siRNA sense strand
uauuggaagcuaugaugaa

SEQ ID NO: 2280261 - RNA, 19 nt, Homo sapiens
  misc_RNA (1)...(19): siRNA sense strand
ggaggugaaaauauagaaa

SEQ ID NO: 2280262 - RNA, 19 nt, Homo sapiens
  misc_RNA (1)...(19): siRNA sense strand
agauaugggagauccagaa

SEQ ID NO: 2280263 - RNA, 19 nt, Homo sapiens
  misc_RNA (1)...(19): siRNA sense strand
uuaaggaugccaugccaaa

SEQ ID NO: 2280264 - RNA, 19 nt, Homo sapiens
  misc_RNA (1)...(19): siRNA sense strand
cauaaugaagcguggucca

SEQ ID NO: 2280265 - RNA, 19 nt, Homo sapiens
  misc_RNA (1)...(19): siRNA sense strand
cuagaagcuguaaacaaua

SEQ ID NO: 2280266 - RNA, 19 nt, Homo sapiens
  misc_RNA (1)...(19): siRNA sense strand
ccaauuuaaguguugaaga

SEQ ID NO: 2280267 - RNA, 19 nt, Homo sapiens
  misc_RNA (1)...(19): siRNA sense strand
augcuaguguagaugagua

SEQ ID NO: 2280268 - RNA, 19 nt, Homo sapiens
  misc_RNA (1)...(19): siRNA sense strand
uaggagaaauacagaugca

SEQ ID NO: 2280269 - RNA, 19 nt, Homo sapiens
  misc_RNA (1)...(19): siRNA sense strand
auauuauacagcagcagaa

SEQ ID NO: 2280270 - RNA, 19 nt, Homo sapiens
  misc_RNA (1)...(19): siRNA sense strand
ggaaaucuggggaggugaa

SEQ ID NO: 2280271 - RNA, 19 nt, Homo sapiens
  misc_RNA (1)...(19): siRNA sense strand
agaaaauguuggaggaaau

SEQ ID NO: 2280272 - RNA, 19 nt, Homo sapiens
  misc_RNA (1)...(19): siRNA sense strand
gagaagauggagagggaca

SEQ ID NO: 2280273 - RNA, 19 nt, Homo sapiens
  misc_RNA (1)...(19): siRNA sense strand
cugagaagauggagaggga

SEQ ID NO: 2280274 - RNA, 19 nt, Homo sapiens
  misc_RNA (1)...(19): siRNA sense strand
aguuaauggcagagcaaga

SEQ ID NO: 2280275 - RNA, 19 nt, Homo sapiens
  misc_RNA (1)...(19): siRNA sense strand
gagauauagagaaggguga

SEQ ID NO: 2280276 - RNA, 19 nt, Homo sapiens
  misc_RNA (1)...(19): siRNA sense strand
ugaacaagcuggcugggaa

SEQ ID NO: 2280277 - RNA, 19 nt, Homo sapiens
  misc_RNA (1)...(19): siRNA sense strand
aagcagaauuccaaagcau

SEQ ID NO: 2280278 - RNA, 19 nt, Homo sapiens
  misc_RNA (1)...(19): siRNA sense strand
ccaaggaggauguggcuga

SEQ ID NO: 2280279 - RNA, 19 nt, Homo sapiens
  misc_RNA (1)...(19): siRNA sense strand
ccaguuaauggcagagcaa

SEQ ID NO: 2280280 - RNA, 19 nt, Homo sapiens
  misc_RNA (1)...(19): siRNA sense strand
cuuuagaagaagaugucaa

SEQ ID NO: 2280281 - RNA, 19 nt, Homo sapiens
  misc_RNA (1)...(19): siRNA sense strand
ccucuaucgcacaggcaaa

SEQ ID NO: 2280282 - RNA, 19 nt, Homo sapiens
  misc_RNA (1)...(19): siRNA sense strand
aggagaugauggaacagaa

SEQ ID NO: 2280283 - RNA, 19 nt, Homo sapiens
  misc_RNA (1)...(19): siRNA sense strand
agaagaaugaggagaugau

SEQ ID NO: 2280284 - RNA, 19 nt, Homo sapiens
  misc_RNA (1)...(19): siRNA sense strand
agaugauggaacagaaaga

SEQ ID NO: 2280285 - RNA, 19 nt, Homo sapiens
  misc_RNA (1)...(19): siRNA sense strand
cucuuaaacuucaggaaca

SEQ ID NO: 2280286 - RNA, 19 nt, Homo sapiens
  misc_RNA (1)...(19): siRNA sense strand
augaggagaugauggaaca

SEQ ID NO: 2280287 - RNA, 19 nt, Homo sapiens
  misc_RNA (1)...(19): siRNA sense strand
gagaagaguuaucaggaac

SEQ ID NO: 2280288 - RNA, 19 nt, Homo sapiens
  misc_RNA (1)...(19): siRNA sense strand
gggacagggcccaguuaau

SEQ ID NO: 2280289 - RNA, 19 nt, Homo sapiens
  misc_RNA (1)...(19): siRNA sense strand
aggaagagcugaacccuga

SEQ ID NO: 2280290 - RNA, 19 nt, Homo sapiens
  misc_RNA (1)...(19): siRNA sense strand
aggccaaagaggugcugaa

SEQ ID NO: 2280291 - RNA, 19 nt, Homo sapiens
  misc_RNA (1)...(19): siRNA sense strand
aagaaaauguuggaggaaa

SEQ ID NO: 2280292 - RNA, 19 nt, Homo sapiens
  misc_RNA (1)...(19): siRNA sense strand
caaagaaaauguuggagga

SEQ ID NO: 2280293 - RNA, 19 nt, Homo sapiens
  misc_RNA (1)...(19): siRNA sense strand
ugggauauccagaugagaa

SEQ ID NO: 2280294 - RNA, 19 nt, Homo sapiens
  misc_RNA (1)...(19): siRNA sense strand
acacugagggccugggaga

SEQ ID NO: 2280295 - RNA, 19 nt, Homo sapiens
  misc_RNA (1)...(19): siRNA sense strand
ugauggaacagaaagagaa

SEQ ID NO: 2280296 - RNA, 19 nt, Homo sapiens
  misc_RNA (1)...(19): siRNA sense strand
ggaaguagauggagaaccc

SEQ ID NO: 2280297 - RNA, 19 nt, Homo sapiens
  misc_RNA (1)...(19): siRNA sense strand
ggaaggggauacaggccaa

SEQ ID NO: 2280298 - RNA, 19 nt, Homo sapiens
  misc_RNA (1)...(19): siRNA sense strand
acugagggccugggagaua

SEQ ID NO: 2280299 - RNA, 19 nt, Homo sapiens
  misc_RNA (1)...(19): siRNA sense strand
ucauagaacaaguugcaga

SEQ ID NO: 2280300 - RNA, 19 nt, Homo sapiens
  misc_RNA (1)...(19): siRNA sense strand
acuggaaguagauggagaa

SEQ ID NO: 2280301 - RNA, 19 nt, Homo sapiens
  misc_RNA (1)...(19): siRNA sense strand
cagaaagagaagaguuauc

SEQ ID NO: 2280302 - RNA, 19 nt, Homo sapiens
  misc_RNA (1)...(19): siRNA sense strand
gggcccaguuaauggcaga

SEQ ID NO: 2280303 - RNA, 19 nt, Homo sapiens
  misc_RNA (1)...(19): siRNA sense strand
ccugggagauauagagaag

SEQ ID NO: 2280304 - RNA, 19 nt, Homo sapiens
  misc_RNA (1)...(19): siRNA sense strand
gugcagcugcccacggaaa

SEQ ID NO: 2280305 - RNA, 19 nt, Homo sapiens
  misc_RNA (1)...(19): siRNA sense strand
cuuucaaggauguggacca

SEQ ID NO: 2280306 - RNA, 19 nt, Homo sapiens
  misc_RNA (1)...(19): siRNA sense strand
uggcagagcaagagaagac

SEQ ID NO: 2280307 - RNA, 19 nt, Homo sapiens
  misc_RNA (1)...(19): siRNA sense strand
cgagaaugagagcaagaga

SEQ ID NO: 2280308 - RNA, 19 nt, Homo sapiens
  misc_RNA (1)...(19): siRNA sense strand
agaaugagagcaagagacu

SEQ ID NO: 2280309 - RNA, 19 nt, Homo sapiens
  misc_RNA (1)...(19): siRNA sense strand
aaaagaagaaugaggagau

SEQ ID NO: 2280310 - RNA, 19 nt, Homo sapiens
  misc_RNA (1)...(19): siRNA sense strand
gaagaugucaagcagggaa

SEQ ID NO: 2280311 - RNA, 19 nt, Homo sapiens
  misc_RNA (1)...(19): siRNA sense strand
agaagaguuaucaggaaca

SEQ ID NO: 2280312 - RNA, 19 nt, Homo sapiens
  misc_RNA (1)...(19): siRNA sense strand
agggugacaaugagaauga

SEQ ID NO: 2280313 - RNA, 19 nt, Homo sapiens
  misc_RNA (1)...(19): siRNA sense strand
guguacaauagcaugggaa

SEQ ID NO: 2280314 - RNA, 19 nt, Homo sapiens
  misc_RNA (1)...(19): siRNA sense strand
cccuggaacuggaaguaga

SEQ ID NO: 2280315 - RNA, 19 nt, Homo sapiens
  misc_RNA (1)...(19): siRNA sense strand
aacaauugacugagaagau

SEQ ID NO: 2280316 - RNA, 19 nt, Homo sapiens
  misc_RNA (1)...(19): siRNA sense strand
aagaaaagguacugauaag

SEQ ID NO: 2280317 - RNA, 19 nt, Homo sapiens
  misc_RNA (1)...(19): siRNA sense strand
cugcacagggacagugaga

SEQ ID NO: 2280318 - RNA, 19 nt, Homo sapiens
  misc_RNA (1)...(19): siRNA sense strand
acagggacagugagagaga

SEQ ID NO: 2280319 - RNA, 19 nt, Homo sapiens
  misc_RNA (1)...(19): siRNA sense strand
aagcaaggcgagaugacuu

SEQ ID NO: 2280320 - RNA, 19 nt, Homo sapiens
  misc_RNA (1)...(19): siRNA sense strand
uagaagaagaugucaagca

SEQ ID NO: 2280321 - RNA, 19 nt, Homo sapiens
  misc_RNA (1)...(19): siRNA sense strand
uuaucaggaacaugugaaa

SEQ ID NO: 2280322 - RNA, 19 nt, Homo sapiens
  misc_RNA (1)...(19): siRNA sense strand
ccaucaaccagcaggccau

SEQ ID NO: 2280323 - RNA, 19 nt, Homo sapiens
  misc_RNA (1)...(19): siRNA sense strand
agaaugaggagaugaugga

SEQ ID NO: 2280324 - RNA, 19 nt, Homo sapiens
  misc_RNA (1)...(19): siRNA sense strand
ccagaugagaagcaaauca

SEQ ID NO: 2280325 - RNA, 19 nt, Homo sapiens
  misc_RNA (1)...(19): siRNA sense strand
cuaagaaaagguacugaua

SEQ ID NO: 2280326 - RNA, 19 nt, Homo sapiens
  misc_RNA (1)...(19): siRNA sense strand
augugaaacaauugacuga

SEQ ID NO: 2280327 - RNA, 19 nt, Homo sapiens
  misc_RNA (1)...(19): siRNA sense strand
agucucacaccaagggaau

SEQ ID NO: 2280328 - RNA, 19 nt, Homo sapiens
  misc_RNA (1)...(19): siRNA sense strand
guaacaauucuguagacga

SEQ ID NO: 2280329 - RNA, 19 nt, Homo sapiens
  misc_RNA (1)...(19): siRNA sense strand
ggauauuggacgagccauc

SEQ ID NO: 2280330 - RNA, 19 nt, Homo sapiens
  misc_RNA (1)...(19): siRNA sense strand
guguggaguacgagcccaa

SEQ ID NO: 2280331 - RNA, 19 nt, Homo sapiens
  misc_RNA (1)...(19): siRNA sense strand
agaugcugguggaggacau

SEQ ID NO: 2280332 - RNA, 19 nt, Homo sapiens
  misc_RNA (1)...(19): siRNA sense strand
ggccagaaccagacccaga

SEQ ID NO: 2280333 - RNA, 19 nt, Homo sapiens
  misc_RNA (1)...(19): siRNA sense strand
ucgucaacccucagagcau

SEQ ID NO: 2280334 - RNA, 19 nt, Homo sapiens
  misc_RNA (1)...(19): siRNA sense strand
aggccugaagggaggguga

SEQ ID NO: 2280335 - RNA, 19 nt, Homo sapiens
  misc_RNA (1)...(19): siRNA sense strand
ccugaaaguauuugggaau

SEQ ID NO: 2280336 - RNA, 19 nt, Homo sapiens
  misc_RNA (1)...(19): siRNA sense strand
agguagaguucuggauaaa

SEQ ID NO: 2280337 - RNA, 19 nt, Homo sapiens
  misc_RNA (1)...(19): siRNA sense strand
ggaaacagucagcaggcaa

SEQ ID NO: 2280338 - RNA, 19 nt, Homo sapiens
  misc_RNA (1)...(19): siRNA sense strand
cugcaaguauggagcucaa

SEQ ID NO: 2280339 - RNA, 19 nt, Homo sapiens
  misc_RNA (1)...(19): siRNA sense strand
ccuugaagaacuugugaau

SEQ ID NO: 2280340 - RNA, 19 nt, Homo sapiens
  misc_RNA (1)...(19): siRNA sense strand
ccaaaaggcagcaaggaau

SEQ ID NO: 2280341 - RNA, 19 nt, Homo sapiens
  misc_RNA (1)...(19): siRNA sense strand
aggcaacuccgaaggacaa

SEQ ID NO: 2280342 - RNA, 19 nt, Homo sapiens
  misc_RNA (1)...(19): siRNA sense strand
uggcaggugugguggagau

SEQ ID NO: 2280343 - RNA, 19 nt, Homo sapiens
  misc_RNA (1)...(19): siRNA sense strand
uugacaaacugaagcacau

SEQ ID NO: 2280344 - RNA, 19 nt, Homo sapiens
  misc_RNA (1)...(19): siRNA sense strand
ggcucugaaucuuggaauu

SEQ ID NO: 2280345 - RNA, 19 nt, Homo sapiens
  misc_RNA (1)...(19): siRNA sense strand
agggacugaugaugguuaa

SEQ ID NO: 2280346 - RNA, 19 nt, Homo sapiens
  misc_RNA (1)...(19): siRNA sense strand
gcaaggaauggaaugaaaa

SEQ ID NO: 2280347 - RNA, 19 nt, Homo sapiens
  misc_RNA (1)...(19): siRNA sense strand
gacaagaacucguggagag

SEQ ID NO: 2280348 - RNA, 19 nt, Homo sapiens
  misc_RNA (1)...(19): siRNA sense strand
ccaauauagaucugcuuau

SEQ ID NO: 2280349 - RNA, 19 nt, Homo sapiens
  misc_RNA (1)...(19): siRNA sense strand
gcuuggacuucccgggaca

SEQ ID NO: 2280350 - RNA, 19 nt, Homo sapiens
  misc_RNA (1)...(19): siRNA sense strand
gccaaaaggcagcaaggaa

SEQ ID NO: 2280351 - RNA, 19 nt, Homo sapiens
  misc_RNA (1)...(19): siRNA sense strand
uccaagaggccuuugaaau

SEQ ID NO: 2280352 - RNA, 19 nt, Homo sapiens
  misc_RNA (1)...(19): siRNA sense strand
cuuuugaguuuguggguga

SEQ ID NO: 2280353 - RNA, 19 nt, Homo sapiens
  misc_RNA (1)...(19): siRNA sense strand
gaaccaugucuaugcccaa

SEQ ID NO: 2280354 - RNA, 19 nt, Homo sapiens
  misc_RNA (1)...(19): siRNA sense strand
ugaaauuguuguucgccau

SEQ ID NO: 2280355 - RNA, 19 nt, Homo sapiens
  misc_RNA (1)...(19): siRNA sense strand
accugaaaguauuugggaa

SEQ ID NO: 2280356 - RNA, 19 nt, Homo sapiens
  misc_RNA (1)...(19): siRNA sense strand
cagccgaagaagggaacua

SEQ ID NO: 2280357 - RNA, 19 nt, Homo sapiens
  misc_RNA (1)...(19): siRNA sense strand
uccagaagaaugcaggaaa

SEQ ID NO: 2280358 - RNA, 19 nt, Homo sapiens
  misc_RNA (1)...(19): siRNA sense strand
cugcaagucacuaggaucu

SEQ ID NO: 2280359 - RNA, 19 nt, Homo sapiens
  misc_RNA (1)...(19): siRNA sense strand
gcaggaaagcugaccacca

SEQ ID NO: 2280360 - RNA, 19 nt, Homo sapiens
  misc_RNA (1)...(19): siRNA sense strand
ccgaaggacaacgagauaa

SEQ ID NO: 2280361 - RNA, 19 nt, Homo sapiens
  misc_RNA (1)...(19): siRNA sense strand
cgaaggacaacgagauaag

SEQ ID NO: 2280362 - RNA, 19 nt, Homo sapiens
  misc_RNA (1)...(19): siRNA sense strand
agauaagcaccuuucacaa

SEQ ID NO: 2280363 - RNA, 19 nt, Homo sapiens
  misc_RNA (1)...(19): siRNA sense strand
acaccaaugccauguucaa

SEQ ID NO: 2280364 - RNA, 19 nt, Homo sapiens
  misc_RNA (1)...(19): siRNA sense strand
caggcaacuccgaaggaca

SEQ ID NO: 2280365 - RNA, 19 nt, Homo sapiens
  misc_RNA (1)...(19): siRNA sense strand
ggcccaacaugcugcucaa

SEQ ID NO: 2280366 - RNA, 19 nt, Homo sapiens
  misc_RNA (1)...(19): siRNA sense strand
ggacaagaacucguggaga

SEQ ID NO: 2280367 - RNA, 19 nt, Homo sapiens
  misc_RNA (1)...(19): siRNA sense strand
acacacuacaagaggugaa

SEQ ID NO: 2280368 - RNA, 19 nt, Homo sapiens
  misc_RNA (1)...(19): siRNA sense strand
cagugcaggaagaucgaaa

SEQ ID NO: 2280369 - RNA, 19 nt, Homo sapiens
  misc_RNA (1)...(19): siRNA sense strand
guacacuggauaaagaaaa

SEQ ID NO: 2280370 - RNA, 19 nt, Homo sapiens
  misc_RNA (1)...(19): siRNA sense strand
gccuauaauccuaagaacu

SEQ ID NO: 2280371 - RNA, 19 nt, Homo sapiens
  misc_RNA (1)...(19): siRNA sense strand
agagaaaggccaagcggac

SEQ ID NO: 2280372 - RNA, 19 nt, Homo sapiens
  misc_RNA (1)...(19): siRNA sense strand
gggaaaacacucacacaca

SEQ ID NO: 2280373 - RNA, 19 nt, Homo sapiens
  misc_RNA (1)...(19): siRNA sense strand
aggaagaucgaaagugcga

SEQ ID NO: 2280374 - RNA, 19 nt, Homo sapiens
  misc_RNA (1)...(19): siRNA sense strand
cggcauaagcggagaucca

SEQ ID NO: 2280375 - RNA, 19 nt, Homo sapiens
  misc_RNA (1)...(19): siRNA sense strand
cugagauagcagagaggaa

SEQ ID NO: 2280376 - RNA, 19 nt, Homo sapiens
  misc_RNA (1)...(19): siRNA sense strand
caaaauacgugcaaggaca

SEQ ID NO: 2280377 - RNA, 19 nt, Homo sapiens
  misc_RNA (1)...(19): siRNA sense strand
cuguggaaagacugagaua

SEQ ID NO: 2280378 - RNA, 19 nt, Homo sapiens
  misc_RNA (1)...(19): siRNA sense strand
uuucaugagcagagcuuua

SEQ ID NO: 2280379 - RNA, 19 nt, Homo sapiens
  misc_RNA (1)...(19): siRNA sense strand
ugggaauaagugucagaaa

SEQ ID NO: 2280380 - RNA, 19 nt, Homo sapiens
  misc_RNA (1)...(19): siRNA sense strand
gguacuacacugaggacca

SEQ ID NO: 2280381 - RNA, 19 nt, Homo sapiens
  misc_RNA (1)...(19): siRNA sense strand
gagauagcagagaggaaga

SEQ ID NO: 2280382 - RNA, 19 nt, Homo sapiens
  misc_RNA (1)...(19): siRNA sense strand
auuacagcuacgaggauua

SEQ ID NO: 2280383 - RNA, 19 nt, Homo sapiens
  misc_RNA (1)...(19): siRNA sense strand
cuacucuuaccgagggaaa

SEQ ID NO: 2280384 - RNA, 19 nt, Homo sapiens
  misc_RNA (1)...(19): siRNA sense strand
ugacaaggugaaaugggaa

SEQ ID NO: 2280385 - RNA, 19 nt, Homo sapiens
  misc_RNA (1)...(19): siRNA sense strand
ggaucaaagccaccaucaa

SEQ ID NO: 2280386 - RNA, 19 nt, Homo sapiens
  misc_RNA (1)...(19): siRNA sense strand
ccuacuacgucuaugggau

SEQ ID NO: 2280387 - RNA, 19 nt, Homo sapiens
  misc_RNA (1)...(19): siRNA sense strand
aagaagaauuucaugagca

SEQ ID NO: 2280388 - RNA, 19 nt, Homo sapiens
  misc_RNA (1)...(19): siRNA sense strand
cugaugucuuuauuggaaa

SEQ ID NO: 2280389 - RNA, 19 nt, Homo sapiens
  misc_RNA (1)...(19): siRNA sense strand
ugcugaaacccaugggauu

SEQ ID NO: 2280390 - RNA, 19 nt, Homo sapiens
  misc_RNA (1)...(19): siRNA sense strand
gcagaaacccagaugcgga

SEQ ID NO: 2280391 - RNA, 19 nt, Homo sapiens
  misc_RNA (1)...(19): siRNA sense strand
gacaaggugaaaugggaau

SEQ ID NO: 2280392 - RNA, 19 nt, Homo sapiens
  misc_RNA (1)...(19): siRNA sense strand
aagucaagcugauugccaa

SEQ ID NO: 2280393 - RNA, 19 nt, Homo sapiens
  misc_RNA (1)...(19): siRNA sense strand
acgugaagacugugugcuu

SEQ ID NO: 2280394 - RNA, 19 nt, Homo sapiens
  misc_RNA (1)...(19): siRNA sense strand
acaacauguuuauggagga

SEQ ID NO: 2280395 - RNA, 19 nt, Homo sapiens
  misc_RNA (1)...(19): siRNA sense strand
ccgaccaguucaaggggaa

SEQ ID NO: 2280396 - RNA, 19 nt, Homo sapiens
  misc_RNA (1)...(19): siRNA sense strand
caguaugaucugugcagga

SEQ ID NO: 2280397 - RNA, 19 nt, Homo sapiens
  misc_RNA (1)...(19): siRNA sense strand
uuaccaaugacaaggugaa

SEQ ID NO: 2280398 - RNA, 19 nt, Homo sapiens
  misc_RNA (1)...(19): siRNA sense strand
ugucagaaagugcaaaaua

SEQ ID NO: 2280399 - RNA, 19 nt, Homo sapiens
  misc_RNA (1)...(19): siRNA sense strand
aguuaaagccaguggaugg

SEQ ID NO: 2280400 - RNA, 19 nt, Homo sapiens
  misc_RNA (1)...(19): siRNA sense strand
augccaaagucaagcugau

SEQ ID NO: 2280401 - RNA, 19 nt, Homo sapiens
  misc_RNA (1)...(19): siRNA sense strand
cugaauuggaucaaagcca

SEQ ID NO: 2280402 - RNA, 19 nt, Homo sapiens
  misc_RNA (1)...(19): siRNA sense strand
ggauggucacugugcucua

SEQ ID NO: 2280403 - RNA, 19 nt, Homo sapiens
  misc_RNA (1)...(19): siRNA sense strand
guaugaucugugcaggaaa

SEQ ID NO: 2280404 - RNA, 19 nt, Homo sapiens
  misc_RNA (1)...(19): siRNA sense strand
ccucgagauacuugugcaa

SEQ ID NO: 2280405 - RNA, 19 nt, Homo sapiens
  misc_RNA (1)...(19): siRNA sense strand
ccucgagauacuugugcaa

SEQ ID NO: 2280406 - RNA, 19 nt, Homo sapiens
  misc_RNA (1)...(19): siRNA sense strand
ccucgagauacuugugcaa

SEQ ID NO: 2280407 - RNA, 19 nt, Homo sapiens
  misc_RNA (1)...(19): siRNA sense strand
ccucgagauacuugugcaa

SEQ ID NO: 2280408 - RNA, 19 nt, Homo sapiens
  misc_RNA (1)...(19): siRNA sense strand
ccucgagauacuugugcaa

SEQ ID NO: 2280409 - RNA, 19 nt, Homo sapiens
  misc_RNA (1)...(19): siRNA sense strand
ccucgagauacuugugcaa

SEQ ID NO: 2280410 - RNA, 19 nt, Homo sapiens
  misc_RNA (1)...(19): siRNA sense strand
ccucgagauacuugugcaa

SEQ ID NO: 2280411 - RNA, 19 nt, Homo sapiens
  misc_RNA (1)...(19): siRNA sense strand
ccucgagauacuugugcaa

SEQ ID NO: 2280412 - RNA, 19 nt, Homo sapiens
  misc_RNA (1)...(19): siRNA sense strand
ccucgagauacuugugcaa

SEQ ID NO: 2280413 - RNA, 19 nt, Homo sapiens
  misc_RNA (1)...(19): siRNA sense strand
aggaaaagcaggugugaaa

SEQ ID NO: 2280414 - RNA, 19 nt, Homo sapiens
  misc_RNA (1)...(19): siRNA sense strand
cuggaaaguugaaaggaga

SEQ ID NO: 2280415 - RNA, 19 nt, Homo sapiens
  misc_RNA (1)...(19): siRNA sense strand
aaaagugaaccgaggaaaa

SEQ ID NO: 2280416 - RNA, 19 nt, Homo sapiens
  misc_RNA (1)...(19): siRNA sense strand
cugaggaaggagaggauga

SEQ ID NO: 2280417 - RNA, 19 nt, Homo sapiens
  misc_RNA (1)...(19): siRNA sense strand
aagcaguagagaugaagaa

SEQ ID NO: 2280418 - RNA, 19 nt, Homo sapiens
  misc_RNA (1)...(19): siRNA sense strand
ggagaggaugacagagaca

SEQ ID NO: 2280419 - RNA, 19 nt, Homo sapiens
  misc_RNA (1)...(19): siRNA sense strand
gagaugaccuucaggccau

SEQ ID NO: 2280420 - RNA, 19 nt, Homo sapiens
  misc_RNA (1)...(19): siRNA sense strand
cagaagaggagcagagcag

SEQ ID NO: 2280421 - RNA, 19 nt, Homo sapiens
  misc_RNA (1)...(19): siRNA sense strand
gaagaggagcagagcagca

SEQ ID NO: 2280422 - RNA, 19 nt, Homo sapiens
  misc_RNA (1)...(19): siRNA sense strand
gcagaaugauugcuggcca

SEQ ID NO: 2280423 - RNA, 19 nt, Homo sapiens
  misc_RNA (1)...(19): siRNA sense strand
cgugaagaaagaugagacu

SEQ ID NO: 2280424 - RNA, 19 nt, Homo sapiens
  misc_RNA (1)...(19): siRNA sense strand
aggagcugacccagauaaa

SEQ ID NO: 2280425 - RNA, 19 nt, Homo sapiens
  misc_RNA (1)...(19): siRNA sense strand
acuggaugaugaugauaau

SEQ ID NO: 2280426 - RNA, 19 nt, Homo sapiens
  misc_RNA (1)...(19): siRNA sense strand
aggcaaucuuuucgaagua

SEQ ID NO: 2280427 - RNA, 19 nt, Homo sapiens
  misc_RNA (1)...(19): siRNA sense strand
agaggauggcagaaugauu

SEQ ID NO: 2280428 - RNA, 19 nt, Homo sapiens
  misc_RNA (1)...(19): siRNA sense strand
ccaaaagugaaccgaggaa

SEQ ID NO: 2280429 - RNA, 19 nt, Homo sapiens
  misc_RNA (1)...(19): siRNA sense strand
caggagaggauggcagaau

SEQ ID NO: 2280430 - RNA, 19 nt, Homo sapiens
  misc_RNA (1)...(19): siRNA sense strand
ggcugaggaaggagaggau

SEQ ID NO: 2280431 - RNA, 19 nt, Homo sapiens
  misc_RNA (1)...(19): siRNA sense strand
aggaaaagcaggugugaaa

SEQ ID NO: 2280432 - RNA, 19 nt, Homo sapiens
  misc_RNA (1)...(19): siRNA sense strand
cuggaaaguugaaaggaga

SEQ ID NO: 2280433 - RNA, 19 nt, Homo sapiens
  misc_RNA (1)...(19): siRNA sense strand
aaaagugaaccgaggaaaa

SEQ ID NO: 2280434 - RNA, 19 nt, Homo sapiens
  misc_RNA (1)...(19): siRNA sense strand
cugaggaaggagaggauga

SEQ ID NO: 2280435 - RNA, 19 nt, Homo sapiens
  misc_RNA (1)...(19): siRNA sense strand
aagcaguagagaugaagaa

SEQ ID NO: 2280436 - RNA, 19 nt, Homo sapiens
  misc_RNA (1)...(19): siRNA sense strand
ggagaggaugacagagaca

SEQ ID NO: 2280437 - RNA, 19 nt, Homo sapiens
  misc_RNA (1)...(19): siRNA sense strand
gagaugaccuucaggccau

SEQ ID NO: 2280438 - RNA, 19 nt, Homo sapiens
  misc_RNA (1)...(19): siRNA sense strand
cagaagaggagcagagcag

SEQ ID NO: 2280439 - RNA, 19 nt, Homo sapiens
  misc_RNA (1)...(19): siRNA sense strand
gaagaggagcagagcagca

SEQ ID NO: 2280440 - RNA, 19 nt, Homo sapiens
  misc_RNA (1)...(19): siRNA sense strand
gcagaaugauugcuggcca

SEQ ID NO: 2280441 - RNA, 19 nt, Homo sapiens
  misc_RNA (1)...(19): siRNA sense strand
cgugaagaaagaugagacu

SEQ ID NO: 2280442 - RNA, 19 nt, Homo sapiens
  misc_RNA (1)...(19): siRNA sense strand
aggagcugacccagauaaa

SEQ ID NO: 2280443 - RNA, 19 nt, Homo sapiens
  misc_RNA (1)...(19): siRNA sense strand
acuggaugaugaugauaau

SEQ ID NO: 2280444 - RNA, 19 nt, Homo sapiens
  misc_RNA (1)...(19): siRNA sense strand
aggcaaucuuuucgaagua

SEQ ID NO: 2280445 - RNA, 19 nt, Homo sapiens
  misc_RNA (1)...(19): siRNA sense strand
agaggauggcagaaugauu

SEQ ID NO: 2280446 - RNA, 19 nt, Homo sapiens
  misc_RNA (1)...(19): siRNA sense strand
ccaaaagugaaccgaggaa

SEQ ID NO: 2280447 - RNA, 19 nt, Homo sapiens
  misc_RNA (1)...(19): siRNA sense strand
caggagaggauggcagaau

SEQ ID NO: 2280448 - RNA, 19 nt, Homo sapiens
  misc_RNA (1)...(19): siRNA sense strand
ggcugaggaaggagaggau

SEQ ID NO: 2280449 - RNA, 19 nt, Homo sapiens
  misc_RNA (1)...(19): siRNA sense strand
gggcugaagcagaggagga

SEQ ID NO: 2280450 - RNA, 19 nt, Homo sapiens
  misc_RNA (1)...(19): siRNA sense strand
cugaagcagaggaggaaga

SEQ ID NO: 2280451 - RNA, 19 nt, Homo sapiens
  misc_RNA (1)...(19): siRNA sense strand
acggaaagacagaucaaga

SEQ ID NO: 2280452 - RNA, 19 nt, Homo sapiens
  misc_RNA (1)...(19): siRNA sense strand
aagcagaggaggaagagga

SEQ ID NO: 2280453 - RNA, 19 nt, Homo sapiens
  misc_RNA (1)...(19): siRNA sense strand
gccaaggagcagagggacu

SEQ ID NO: 2280454 - RNA, 19 nt, Homo sapiens
  misc_RNA (1)...(19): siRNA sense strand
ucacggaaagacagaucaa

SEQ ID NO: 2280455 - RNA, 19 nt, Homo sapiens
  misc_RNA (1)...(19): siRNA sense strand
cggcgcaugaaguggaaaa

SEQ ID NO: 2280456 - RNA, 19 nt, Homo sapiens
  misc_RNA (1)...(19): siRNA sense strand
guucauuguauuaugcgaa

SEQ ID NO: 2280457 - RNA, 19 nt, Homo sapiens
  misc_RNA (1)...(19): siRNA sense strand
gagcagagggacucggacu

SEQ ID NO: 2280458 - RNA, 19 nt, Homo sapiens
  misc_RNA (1)...(19): siRNA sense strand
gggaagagacagaagagga

SEQ ID NO: 2280459 - RNA, 19 nt, Homo sapiens
  misc_RNA (1)...(19): siRNA sense strand
ggaaaagcgggaagagaca

SEQ ID NO: 2280460 - RNA, 19 nt, Homo sapiens
  misc_RNA (1)...(19): siRNA sense strand
uggaacuggagaaggaauu

SEQ ID NO: 2280461 - RNA, 19 nt, Homo sapiens
  misc_RNA (1)...(19): siRNA sense strand
aagagacagaagaggagaa

SEQ ID NO: 2280462 - RNA, 19 nt, Homo sapiens
  misc_RNA (1)...(19): siRNA sense strand
gaaaagaggaaaagcggga

SEQ ID NO: 2280463 - RNA, 19 nt, Homo sapiens
  misc_RNA (1)...(19): siRNA sense strand
ccuaugauccagugaggca

SEQ ID NO: 2280464 - RNA, 19 nt, Homo sapiens
  misc_RNA (1)...(19): siRNA sense strand
ggacauaacacacagaccu

SEQ ID NO: 2280465 - RNA, 19 nt, Homo sapiens
  misc_RNA (1)...(19): siRNA sense strand
acaaaacaccuuaggacau

SEQ ID NO: 2280466 - RNA, 19 nt, Homo sapiens
  misc_RNA (1)...(19): siRNA sense strand
acagaagaggagaagcaga

SEQ ID NO: 2280467 - RNA, 19 nt, Homo sapiens
  misc_RNA (1)...(19): siRNA sense strand
ggaagagacagaagaggag

SEQ ID NO: 2280468 - RNA, 19 nt, Homo sapiens
  misc_RNA (1)...(19): siRNA sense strand
gggaagagacagaagagga

SEQ ID NO: 2280469 - RNA, 19 nt, Homo sapiens
  misc_RNA (1)...(19): siRNA sense strand
ggaaaagcgggaagagaca

SEQ ID NO: 2280470 - RNA, 19 nt, Homo sapiens
  misc_RNA (1)...(19): siRNA sense strand
uggaacuggagaaggaauu

SEQ ID NO: 2280471 - RNA, 19 nt, Homo sapiens
  misc_RNA (1)...(19): siRNA sense strand
aagagacagaagaggagaa

SEQ ID NO: 2280472 - RNA, 19 nt, Homo sapiens
  misc_RNA (1)...(19): siRNA sense strand
gaaaagaggaaaagcggga

SEQ ID NO: 2280473 - RNA, 19 nt, Homo sapiens
  misc_RNA (1)...(19): siRNA sense strand
ggacauaacacacagaccu

SEQ ID NO: 2280474 - RNA, 19 nt, Homo sapiens
  misc_RNA (1)...(19): siRNA sense strand
acaaaacaccuuaggacau

SEQ ID NO: 2280475 - RNA, 19 nt, Homo sapiens
  misc_RNA (1)...(19): siRNA sense strand
acagaagaggagaagcaga

SEQ ID NO: 2280476 - RNA, 19 nt, Homo sapiens
  misc_RNA (1)...(19): siRNA sense strand
ggaagagacagaagaggag

SEQ ID NO: 2280477 - RNA, 19 nt, Homo sapiens
  misc_RNA (1)...(19): siRNA sense strand
ggacauuacaggaggccaa

SEQ ID NO: 2280478 - RNA, 19 nt, Homo sapiens
  misc_RNA (1)...(19): siRNA sense strand
ccagcgaggaagugaacaa

SEQ ID NO: 2280479 - RNA, 19 nt, Homo sapiens
  misc_RNA (1)...(19): siRNA sense strand
cugaagaagacauggcuca

SEQ ID NO: 2280480 - RNA, 19 nt, Homo sapiens
  misc_RNA (1)...(19): siRNA sense strand
ggaacaaggauguggacuc

SEQ ID NO: 2280481 - RNA, 19 nt, Homo sapiens
  misc_RNA (1)...(19): siRNA sense strand
caacauucugggagggcuu

SEQ ID NO: 2280482 - RNA, 19 nt, Homo sapiens
  misc_RNA (1)...(19): siRNA sense strand
ggacacaucgauagggaac

SEQ ID NO: 2280483 - RNA, 19 nt, Homo sapiens
  misc_RNA (1)...(19): siRNA sense strand
acggaagauccaggagaaa

SEQ ID NO: 2280484 - RNA, 19 nt, Homo sapiens
  misc_RNA (1)...(19): siRNA sense strand
gcuugggccaugagcgaau

SEQ ID NO: 2280485 - RNA, 19 nt, Homo sapiens
  misc_RNA (1)...(19): siRNA sense strand
gaacggaagauccaggaga

SEQ ID NO: 2280486 - RNA, 19 nt, Homo sapiens
  misc_RNA (1)...(19): siRNA sense strand
ccagcaggguggagaaccu

SEQ ID NO: 2280487 - RNA, 19 nt, Homo sapiens
  misc_RNA (1)...(19): siRNA sense strand
acuacaaggauccgagcau

SEQ ID NO: 2280488 - RNA, 19 nt, Homo sapiens
  misc_RNA (1)...(19): siRNA sense strand
ccagagaacggcaucguga

SEQ ID NO: 2280489 - RNA, 19 nt, Homo sapiens
  misc_RNA (1)...(19): siRNA sense strand
gcuuaggcagcaagggcuu

SEQ ID NO: 2280490 - RNA, 19 nt, Homo sapiens
  misc_RNA (1)...(19): siRNA sense strand
aggaagacacagccaccaa

SEQ ID NO: 2280491 - RNA, 19 nt, Homo sapiens
  misc_RNA (1)...(19): siRNA sense strand
ggacauuacaggaggccaa

SEQ ID NO: 2280492 - RNA, 19 nt, Homo sapiens
  misc_RNA (1)...(19): siRNA sense strand
ccagcgaggaagugaacaa

SEQ ID NO: 2280493 - RNA, 19 nt, Homo sapiens
  misc_RNA (1)...(19): siRNA sense strand
cugaagaagacauggcuca

SEQ ID NO: 2280494 - RNA, 19 nt, Homo sapiens
  misc_RNA (1)...(19): siRNA sense strand
ggaacaaggauguggacuc

SEQ ID NO: 2280495 - RNA, 19 nt, Homo sapiens
  misc_RNA (1)...(19): siRNA sense strand
caacauucugggagggcuu

SEQ ID NO: 2280496 - RNA, 19 nt, Homo sapiens
  misc_RNA (1)...(19): siRNA sense strand
ggacacaucgauagggaac

SEQ ID NO: 2280497 - RNA, 19 nt, Homo sapiens
  misc_RNA (1)...(19): siRNA sense strand
acggaagauccaggagaaa

SEQ ID NO: 2280498 - RNA, 19 nt, Homo sapiens
  misc_RNA (1)...(19): siRNA sense strand
gcuugggccaugagcgaau

SEQ ID NO: 2280499 - RNA, 19 nt, Homo sapiens
  misc_RNA (1)...(19): siRNA sense strand
gaacggaagauccaggaga

SEQ ID NO: 2280500 - RNA, 19 nt, Homo sapiens
  misc_RNA (1)...(19): siRNA sense strand
ccagcaggguggagaaccu

SEQ ID NO: 2280501 - RNA, 19 nt, Homo sapiens
  misc_RNA (1)...(19): siRNA sense strand
acuacaaggauccgagcau

SEQ ID NO: 2280502 - RNA, 19 nt, Homo sapiens
  misc_RNA (1)...(19): siRNA sense strand
ccagagaacggcaucguga

SEQ ID NO: 2280503 - RNA, 19 nt, Homo sapiens
  misc_RNA (1)...(19): siRNA sense strand
gcuuaggcagcaagggcuu

SEQ ID NO: 2280504 - RNA, 19 nt, Homo sapiens
  misc_RNA (1)...(19): siRNA sense strand
aggaagacacagccaccaa

SEQ ID NO: 2280505 - RNA, 19 nt, Homo sapiens
  misc_RNA (1)...(19): siRNA sense strand
cugaagaugcugcgggaca

SEQ ID NO: 2280506 - RNA, 19 nt, Homo sapiens
  misc_RNA (1)...(19): siRNA sense strand
aggagaagcaccugaagau

SEQ ID NO: 2280507 - RNA, 19 nt, Homo sapiens
  misc_RNA (1)...(19): siRNA sense strand
cagcaggagaagaagcaau

SEQ ID NO: 2280508 - RNA, 19 nt, Homo sapiens
  misc_RNA (1)...(19): siRNA sense strand
aguaaaguuucaacgaaca

SEQ ID NO: 2280509 - RNA, 19 nt, Homo sapiens
  misc_RNA (1)...(19): siRNA sense strand
uggcagaacuagacagcgu

SEQ ID NO: 2280510 - RNA, 19 nt, Homo sapiens
  misc_RNA (1)...(19): siRNA sense strand
guaaaguuucaacgaacaa

SEQ ID NO: 2280511 - RNA, 19 nt, Homo sapiens
  misc_RNA (1)...(19): siRNA sense strand
gaccaaugccagaggagca

SEQ ID NO: 2280512 - RNA, 19 nt, Homo sapiens
  misc_RNA (1)...(19): siRNA sense strand
cuuugggaccacagguaaa

SEQ ID NO: 2280513 - RNA, 19 nt, Homo sapiens
  misc_RNA (1)...(19): siRNA sense strand
uggaaaugaagucuguaaa

SEQ ID NO: 2280514 - RNA, 19 nt, Homo sapiens
  misc_RNA (1)...(19): siRNA sense strand
agcggaagcaggaggagaa

SEQ ID NO: 2280515 - RNA, 19 nt, Homo sapiens
  misc_RNA (1)...(19): siRNA sense strand
aguuguaggucguucucaa

SEQ ID NO: 2280516 - RNA, 19 nt, Homo sapiens
  misc_RNA (1)...(19): siRNA sense strand
ccaaacuacagguggaagu

SEQ ID NO: 2280517 - RNA, 19 nt, Homo sapiens
  misc_RNA (1)...(19): siRNA sense strand
agguggaagugcugcauca

SEQ ID NO: 2280518 - RNA, 19 nt, Homo sapiens
  misc_RNA (1)...(19): siRNA sense strand
auggaaaugaagucuguaa

SEQ ID NO: 2280519 - RNA, 19 nt, Homo sapiens
  misc_RNA (1)...(19): siRNA sense strand
gcccaauggugcagguuuu

SEQ ID NO: 2280520 - RNA, 19 nt, Homo sapiens
  misc_RNA (1)...(19): siRNA sense strand
agucuagugguucgaguaa

SEQ ID NO: 2280521 - RNA, 19 nt, Homo sapiens
  misc_RNA (1)...(19): siRNA sense strand
guuuacagacugcagacaa

SEQ ID NO: 2280522 - RNA, 19 nt, Homo sapiens
  misc_RNA (1)...(19): siRNA sense strand
uaguaaaguuucaacgaac

SEQ ID NO: 2280523 - RNA, 19 nt, Homo sapiens
  misc_RNA (1)...(19): siRNA sense strand
ggaaguggcuuugggacca

SEQ ID NO: 2280524 - RNA, 19 nt, Homo sapiens
  misc_RNA (1)...(19): siRNA sense strand
gcaagguggugaucaggga

SEQ ID NO: 2280525 - RNA, 19 nt, Homo sapiens
  misc_RNA (1)...(19): siRNA sense strand
ugaucagggaaguggcuuu

SEQ ID NO: 2280526 - RNA, 19 nt, Homo sapiens
  misc_RNA (1)...(19): siRNA sense strand
cauucacacaacaggaaau

SEQ ID NO: 2280527 - RNA, 19 nt, Homo sapiens
  misc_RNA (1)...(19): siRNA sense strand
ggcuaggauuauuugauga

SEQ ID NO: 2280528 - RNA, 19 nt, Homo sapiens
  misc_RNA (1)...(19): siRNA sense strand
agguaaagcuccuguuggu

SEQ ID NO: 2280529 - RNA, 19 nt, Homo sapiens
  misc_RNA (1)...(19): siRNA sense strand
gggaaguggcuuugggacc

SEQ ID NO: 2280530 - RNA, 19 nt, Homo sapiens
  misc_RNA (1)...(19): siRNA sense strand
gcuuugggaccacagguaa

SEQ ID NO: 2280531 - RNA, 19 nt, Homo sapiens
  misc_RNA (1)...(19): siRNA sense strand
gguuuaaagccaagggaga

SEQ ID NO: 2280532 - RNA, 19 nt, Homo sapiens
  misc_RNA (1)...(19): siRNA sense strand
ugauaaugcagaugaagaa

SEQ ID NO: 2280533 - RNA, 19 nt, Homo sapiens
  misc_RNA (1)...(19): siRNA sense strand
ugacaaugaagaugaguau

SEQ ID NO: 2280534 - RNA, 19 nt, Homo sapiens
  misc_RNA (1)...(19): siRNA sense strand
uuguaaagcaagaaagaga

SEQ ID NO: 2280535 - RNA, 19 nt, Homo sapiens
  misc_RNA (1)...(19): siRNA sense strand
acaucaaucuuuugggaaa

SEQ ID NO: 2280536 - RNA, 19 nt, Homo sapiens
  misc_RNA (1)...(19): siRNA sense strand
aggaugacuuguuggagaa

SEQ ID NO: 2280537 - RNA, 19 nt, Homo sapiens
  misc_RNA (1)...(19): siRNA sense strand
aagccaagggagaggauuu

SEQ ID NO: 2280538 - RNA, 19 nt, Homo sapiens
  misc_RNA (1)...(19): siRNA sense strand
caggaugacuuguuggaga

SEQ ID NO: 2280539 - RNA, 19 nt, Homo sapiens
  misc_RNA (1)...(19): siRNA sense strand
aggaagacaauuuagcaua

SEQ ID NO: 2280540 - RNA, 19 nt, Homo sapiens
  misc_RNA (1)...(19): siRNA sense strand
cagaagauccagugaccau

SEQ ID NO: 2280541 - RNA, 19 nt, Homo sapiens
  misc_RNA (1)...(19): siRNA sense strand
ugaugauaaugcagaugaa

SEQ ID NO: 2280542 - RNA, 19 nt, Homo sapiens
  misc_RNA (1)...(19): siRNA sense strand
ccauagaaguugaugagcu

SEQ ID NO: 2280543 - RNA, 19 nt, Homo sapiens
  misc_RNA (1)...(19): siRNA sense strand
uggcaagcuuugugaggca

SEQ ID NO: 2280544 - RNA, 19 nt, Homo sapiens
  misc_RNA (1)...(19): siRNA sense strand
gugucagaauuacgagcaa

SEQ ID NO: 2280545 - RNA, 19 nt, Homo sapiens
  misc_RNA (1)...(19): siRNA sense strand
cuggaauuguaaagcaaga

SEQ ID NO: 2280546 - RNA, 19 nt, Homo sapiens
  misc_RNA (1)...(19): siRNA sense strand
ucaaacaaggacaggauga

SEQ ID NO: 2280547 - RNA, 19 nt, Homo sapiens
  misc_RNA (1)...(19): siRNA sense strand
aaacacuaauggagcccaa

SEQ ID NO: 2280548 - RNA, 19 nt, Homo sapiens
  misc_RNA (1)...(19): siRNA sense strand
cuucaaacaaggacaggau

SEQ ID NO: 2280549 - RNA, 19 nt, Homo sapiens
  misc_RNA (1)...(19): siRNA sense strand
acuauugaguccaggcuuu

SEQ ID NO: 2280550 - RNA, 19 nt, Homo sapiens
  misc_RNA (1)...(19): siRNA sense strand
uggaaggaggugucagaau

SEQ ID NO: 2280551 - RNA, 19 nt, Homo sapiens
  misc_RNA (1)...(19): siRNA sense strand
agcaacaaguuauucgaaa

SEQ ID NO: 2280552 - RNA, 19 nt, Homo sapiens
  misc_RNA (1)...(19): siRNA sense strand
guugaugagcuucuggaua

SEQ ID NO: 2280553 - RNA, 19 nt, Homo sapiens
  misc_RNA (1)...(19): siRNA sense strand
gcagaaugaaccagccaga

SEQ ID NO: 2280554 - RNA, 19 nt, Homo sapiens
  misc_RNA (1)...(19): siRNA sense strand
agaaugaaccagccagaga

SEQ ID NO: 2280555 - RNA, 19 nt, Homo sapiens
  misc_RNA (1)...(19): siRNA sense strand
uagaaacuaccaagaacaa

SEQ ID NO: 2280556 - RNA, 19 nt, Homo sapiens
  misc_RNA (1)...(19): siRNA sense strand
acauaucgacucuggaauu

SEQ ID NO: 2280557 - RNA, 19 nt, Homo sapiens
  misc_RNA (1)...(19): siRNA sense strand
cgucaggaagauuuaacaa

SEQ ID NO: 2280558 - RNA, 19 nt, Homo sapiens
  misc_RNA (1)...(19): siRNA sense strand
acugaagguuuaaagccaa

SEQ ID NO: 2280559 - RNA, 19 nt, Homo sapiens
  misc_RNA (1)...(19): siRNA sense strand
gacugaagguuuaaagcca

SEQ ID NO: 2280560 - RNA, 19 nt, Homo sapiens
  misc_RNA (1)...(19): siRNA sense strand
aagcacaauaauauggcaa

SEQ ID NO: 2280561 - RNA, 19 nt, Homo sapiens
  misc_RNA (1)...(19): siRNA sense strand
guugaacaggcgaguacaa

SEQ ID NO: 2280562 - RNA, 19 nt, Homo sapiens
  misc_RNA (1)...(19): siRNA sense strand
uggaggaaacccacacuaa

SEQ ID NO: 2280563 - RNA, 19 nt, Homo sapiens
  misc_RNA (1)...(19): siRNA sense strand
uccagaaacuaaugaggau

SEQ ID NO: 2280564 - RNA, 19 nt, Homo sapiens
  misc_RNA (1)...(19): siRNA sense strand
cagccuagacccagaacca

SEQ ID NO: 2280565 - RNA, 19 nt, Homo sapiens
  misc_RNA (1)...(19): siRNA sense strand
ggauuagaaacuaccaaga

SEQ ID NO: 2280566 - RNA, 19 nt, Homo sapiens
  misc_RNA (1)...(19): siRNA sense strand
ucuaaauccaaaccagaua

SEQ ID NO: 2280567 - RNA, 19 nt, Homo sapiens
  misc_RNA (1)...(19): siRNA sense strand
ggauagcagccuagaccca

SEQ ID NO: 2280568 - RNA, 19 nt, Homo sapiens
  misc_RNA (1)...(19): siRNA sense strand
ugucagaauuacgagcaaa

SEQ ID NO: 2280569 - RNA, 19 nt, Homo sapiens
  misc_RNA (1)...(19): siRNA sense strand
augauaaugcagaugaaga

SEQ ID NO: 2280570 - RNA, 19 nt, Homo sapiens
  misc_RNA (1)...(19): siRNA sense strand
cucuggaauuguaaagcaa

SEQ ID NO: 2280571 - RNA, 19 nt, Homo sapiens
  misc_RNA (1)...(19): siRNA sense strand
agaauuacgagcaaagcau

SEQ ID NO: 2280572 - RNA, 19 nt, Homo sapiens
  misc_RNA (1)...(19): siRNA sense strand
ggccaugcuaucaggaaga

SEQ ID NO: 2280573 - RNA, 19 nt, Homo sapiens
  misc_RNA (1)...(19): siRNA sense strand
gcaagaaagagaugguccu

SEQ ID NO: 2280574 - RNA, 19 nt, Homo sapiens
  misc_RNA (1)...(19): siRNA sense strand
gucaggaagauuuaacaaa

SEQ ID NO: 2280575 - RNA, 19 nt, Homo sapiens
  misc_RNA (1)...(19): siRNA sense strand
ugaagaugacaaugaagau

SEQ ID NO: 2280576 - RNA, 19 nt, Homo sapiens
  misc_RNA (1)...(19): siRNA sense strand
caugcuaucaggaagacaa

SEQ ID NO: 2280577 - RNA, 19 nt, Homo sapiens
  misc_RNA (1)...(19): siRNA sense strand
caauaauauggcaagcuuu

SEQ ID NO: 2280578 - RNA, 19 nt, Homo sapiens
  misc_RNA (1)...(19): siRNA sense strand
ccguaaaguaguacauauc

SEQ ID NO: 2280579 - RNA, 19 nt, Homo sapiens
  misc_RNA (1)...(19): siRNA sense strand
uggagaacauuaaaaggaa

SEQ ID NO: 2280580 - RNA, 19 nt, Homo sapiens
  misc_RNA (1)...(19): siRNA sense strand
cccaaauauuucaagcaca

SEQ ID NO: 2280581 - RNA, 19 nt, Homo sapiens
  misc_RNA (1)...(19): siRNA sense strand
caggaagacaauuuagcau

SEQ ID NO: 2280582 - RNA, 19 nt, Homo sapiens
  misc_RNA (1)...(19): siRNA sense strand
gauaaugcagaugaagaaa

SEQ ID NO: 2280583 - RNA, 19 nt, Homo sapiens
  misc_RNA (1)...(19): siRNA sense strand
cagaaacuaaugaggaugu

SEQ ID NO: 2280584 - RNA, 19 nt, Homo sapiens
  misc_RNA (1)...(19): siRNA sense strand
ucguugaagaugacaauga

SEQ ID NO: 2280585 - RNA, 19 nt, Homo sapiens
  misc_RNA (1)...(19): siRNA sense strand
augacaaugaagaugagua

SEQ ID NO: 2280586 - RNA, 19 nt, Homo sapiens
  misc_RNA (1)...(19): siRNA sense strand
aagcaaaccuagauggaga

SEQ ID NO: 2280587 - RNA, 19 nt, Homo sapiens
  misc_RNA (1)...(19): siRNA sense strand
gcacauagauauuaggaag

SEQ ID NO: 2280588 - RNA, 19 nt, Homo sapiens
  misc_RNA (1)...(19): siRNA sense strand
aggaaauuguggaaggacu

SEQ ID NO: 2280589 - RNA, 19 nt, Homo sapiens
  misc_RNA (1)...(19): siRNA sense strand
ggugugagcuggaacagga

SEQ ID NO: 2280590 - RNA, 19 nt, Homo sapiens
  misc_RNA (1)...(19): siRNA sense strand
cuaauggaggagugagcau

SEQ ID NO: 2280591 - RNA, 19 nt, Homo sapiens
  misc_RNA (1)...(19): siRNA sense strand
ccuagauggagaauugaau

SEQ ID NO: 2280592 - RNA, 19 nt, Homo sapiens
  misc_RNA (1)...(19): siRNA sense strand
acaguuucuugcuggacaa

SEQ ID NO: 2280593 - RNA, 19 nt, Homo sapiens
  misc_RNA (1)...(19): siRNA sense strand
ccauaaaggugauuccuag

SEQ ID NO: 2280594 - RNA, 19 nt, Homo sapiens
  misc_RNA (1)...(19): siRNA sense strand
acacauggcugaagugcac

SEQ ID NO: 2280595 - RNA, 19 nt, Homo sapiens
  misc_RNA (1)...(19): siRNA sense strand
gggagaacacagagggcga

SEQ ID NO: 2280596 - RNA, 19 nt, Homo sapiens
  misc_RNA (1)...(19): siRNA sense strand
cugaagggcaacaucgaaa

SEQ ID NO: 2280597 - RNA, 19 nt, Homo sapiens
  misc_RNA (1)...(19): siRNA sense strand
ccaauaagaacaucgccaa

SEQ ID NO: 2280598 - RNA, 19 nt, Homo sapiens
  misc_RNA (1)...(19): siRNA sense strand
gaaacugggcgaugggcuu

SEQ ID NO: 2280599 - RNA, 19 nt, Homo sapiens
  misc_RNA (1)...(19): siRNA sense strand
augaagaggacauucgcaa

SEQ ID NO: 2280600 - RNA, 19 nt, Homo sapiens
  misc_RNA (1)...(19): siRNA sense strand
agggcaacaucgaaaccaa

SEQ ID NO: 2280601 - RNA, 19 nt, Homo sapiens
  misc_RNA (1)...(19): siRNA sense strand
gcacaacaucugaagccau

SEQ ID NO: 2280602 - RNA, 19 nt, Homo sapiens
  misc_RNA (1)...(19): siRNA sense strand
cggcacaaggacauagaca

SEQ ID NO: 2280603 - RNA, 19 nt, Homo sapiens
  misc_RNA (1)...(19): siRNA sense strand
ccuucaagcuggcgcagga

SEQ ID NO: 2280604 - RNA, 19 nt, Homo sapiens
  misc_RNA (1)...(19): siRNA sense strand
gcaagaaagugacggccgu

SEQ ID NO: 2280605 - RNA, 19 nt, Homo sapiens
  misc_RNA (1)...(19): siRNA sense strand
aggccaacaucaugaaacu

SEQ ID NO: 2280606 - RNA, 19 nt, Homo sapiens
  misc_RNA (1)...(19): siRNA sense strand
ggccagagcucaugcugca

SEQ ID NO: 2280607 - RNA, 19 nt, Homo sapiens
  misc_RNA (1)...(19): siRNA sense strand
agaucaccuucgagaacau

SEQ ID NO: 2280608 - RNA, 19 nt, Homo sapiens
  misc_RNA (1)...(19): siRNA sense strand
uugaaacagcuacgaggaa

SEQ ID NO: 2280609 - RNA, 19 nt, Homo sapiens
  misc_RNA (1)...(19): siRNA sense strand
cauccauggacaaugagaa

SEQ ID NO: 2280610 - RNA, 19 nt, Homo sapiens
  misc_RNA (1)...(19): siRNA sense strand
gccuggagcaugagagugu

SEQ ID NO: 2280611 - RNA, 19 nt, Homo sapiens
  misc_RNA (1)...(19): siRNA sense strand
aggccaagucccugcgcau

SEQ ID NO: 2280612 - RNA, 19 nt, Homo sapiens
  misc_RNA (1)...(19): siRNA sense strand
gggagaacacagagggcga

SEQ ID NO: 2280613 - RNA, 19 nt, Homo sapiens
  misc_RNA (1)...(19): siRNA sense strand
cugaagggcaacaucgaaa

SEQ ID NO: 2280614 - RNA, 19 nt, Homo sapiens
  misc_RNA (1)...(19): siRNA sense strand
ccaauaagaacaucgccaa

SEQ ID NO: 2280615 - RNA, 19 nt, Homo sapiens
  misc_RNA (1)...(19): siRNA sense strand
gaaacugggcgaugggcuu

SEQ ID NO: 2280616 - RNA, 19 nt, Homo sapiens
  misc_RNA (1)...(19): siRNA sense strand
augaagaggacauucgcaa

SEQ ID NO: 2280617 - RNA, 19 nt, Homo sapiens
  misc_RNA (1)...(19): siRNA sense strand
agggcaacaucgaaaccaa

SEQ ID NO: 2280618 - RNA, 19 nt, Homo sapiens
  misc_RNA (1)...(19): siRNA sense strand
cggcacaaggacauagaca

SEQ ID NO: 2280619 - RNA, 19 nt, Homo sapiens
  misc_RNA (1)...(19): siRNA sense strand
ccuucaagcuggcgcagga

SEQ ID NO: 2280620 - RNA, 19 nt, Homo sapiens
  misc_RNA (1)...(19): siRNA sense strand
gcaagaaagugacggccgu

SEQ ID NO: 2280621 - RNA, 19 nt, Homo sapiens
  misc_RNA (1)...(19): siRNA sense strand
aggccaacaucaugaaacu

SEQ ID NO: 2280622 - RNA, 19 nt, Homo sapiens
  misc_RNA (1)...(19): siRNA sense strand
ggccagagcucaugcugca

SEQ ID NO: 2280623 - RNA, 19 nt, Homo sapiens
  misc_RNA (1)...(19): siRNA sense strand
agaucaccuucgagaacau

SEQ ID NO: 2280624 - RNA, 19 nt, Homo sapiens
  misc_RNA (1)...(19): siRNA sense strand
uugaaacagcuacgaggaa

SEQ ID NO: 2280625 - RNA, 19 nt, Homo sapiens
  misc_RNA (1)...(19): siRNA sense strand
cauccauggacaaugagaa

SEQ ID NO: 2280626 - RNA, 19 nt, Homo sapiens
  misc_RNA (1)...(19): siRNA sense strand
gccuggagcaugagagugu

SEQ ID NO: 2280627 - RNA, 19 nt, Homo sapiens
  misc_RNA (1)...(19): siRNA sense strand
aggccaagucccugcgcau

SEQ ID NO: 2280628 - RNA, 19 nt, Homo sapiens
  misc_RNA (1)...(19): siRNA sense strand
guuuguugaccaugagaaa

SEQ ID NO: 2280629 - RNA, 19 nt, Homo sapiens
  misc_RNA (1)...(19): siRNA sense strand
caguggugaaauuaagaua

SEQ ID NO: 2280630 - RNA, 19 nt, Homo sapiens
  misc_RNA (1)...(19): siRNA sense strand
agaucagaugcuaagauua

SEQ ID NO: 2280631 - RNA, 19 nt, Homo sapiens
  misc_RNA (1)...(19): siRNA sense strand
guuaugugucaaaggaaga

SEQ ID NO: 2280632 - RNA, 19 nt, Homo sapiens
  misc_RNA (1)...(19): siRNA sense strand
gaaauuaagauaacgccau

SEQ ID NO: 2280633 - RNA, 19 nt, Homo sapiens
  misc_RNA (1)...(19): siRNA sense strand
acauuuuguuggugaggaa

SEQ ID NO: 2280634 - RNA, 19 nt, Homo sapiens
  misc_RNA (1)...(19): siRNA sense strand
ggaagaacuaaaagaacuu

SEQ ID NO: 2280635 - RNA, 19 nt, Homo sapiens
  misc_RNA (1)...(19): siRNA sense strand
ucgacaagcaacagguuca

SEQ ID NO: 2280636 - RNA, 19 nt, Homo sapiens
  misc_RNA (1)...(19): siRNA sense strand
aggaagaacuaaaagaacu

SEQ ID NO: 2280637 - RNA, 19 nt, Homo sapiens
  misc_RNA (1)...(19): siRNA sense strand
ggauuauugcaucgagcuu

SEQ ID NO: 2280638 - RNA, 19 nt, Homo sapiens
  misc_RNA (1)...(19): siRNA sense strand
agaacauugagaaaggauu

SEQ ID NO: 2280639 - RNA, 19 nt, Homo sapiens
  misc_RNA (1)...(19): siRNA sense strand
gagaaaggauuauugcauc

SEQ ID NO: 2280640 - RNA, 19 nt, Homo sapiens
  misc_RNA (1)...(19): siRNA sense strand
agacaagaaaggaaagaaa

SEQ ID NO: 2280641 - RNA, 19 nt, Homo sapiens
  misc_RNA (1)...(19): siRNA sense strand
gcaaagaacuggaaacgga

SEQ ID NO: 2280642 - RNA, 19 nt, Homo sapiens
  misc_RNA (1)...(19): siRNA sense strand
cuucagacaagaaaggaaa

SEQ ID NO: 2280643 - RNA, 19 nt, Homo sapiens
  misc_RNA (1)...(19): siRNA sense strand
augccagagauaagagaua

SEQ ID NO: 2280644 - RNA, 19 nt, Homo sapiens
  misc_RNA (1)...(19): siRNA sense strand
ccaaaaggcaagaacuaaa

SEQ ID NO: 2280645 - RNA, 19 nt, Homo sapiens
  misc_RNA (1)...(19): siRNA sense strand
ggaaaaggaaggaacgcaa

SEQ ID NO: 2280646 - RNA, 19 nt, Homo sapiens
  misc_RNA (1)...(19): siRNA sense strand
ccaucaucacuaagagaau

SEQ ID NO: 2280647 - RNA, 19 nt, Homo sapiens
  misc_RNA (1)...(19): siRNA sense strand
uauccagaguggugcacaa

SEQ ID NO: 2280648 - RNA, 19 nt, Homo sapiens
  misc_RNA (1)...(19): siRNA sense strand
auuugaagucgaaggaaaa

SEQ ID NO: 2280649 - RNA, 19 nt, Homo sapiens
  misc_RNA (1)...(19): siRNA sense strand
auugauggcacuucagaaa

SEQ ID NO: 2280650 - RNA, 19 nt, Homo sapiens
  misc_RNA (1)...(19): siRNA sense strand
gccagagauaagagauaau

SEQ ID NO: 2280651 - RNA, 19 nt, Homo sapiens
  misc_RNA (1)...(19): siRNA sense strand
guccaaaaggcaagaacua

SEQ ID NO: 2280652 - RNA, 19 nt, Homo sapiens
  misc_RNA (1)...(19): siRNA sense strand
aagaacuggaaacggaaua

SEQ ID NO: 2280653 - RNA, 19 nt, Homo sapiens
  misc_RNA (1)...(19): siRNA sense strand
gagauaaagaagacccuca

SEQ ID NO: 2280654 - RNA, 19 nt, Homo sapiens
  misc_RNA (1)...(19): siRNA sense strand
ccgaagaggaaaacccaaa

SEQ ID NO: 2280655 - RNA, 19 nt, Homo sapiens
  misc_RNA (1)...(19): siRNA sense strand
cuucagugaccaaugacaa

SEQ ID NO: 2280656 - RNA, 19 nt, Homo sapiens
  misc_RNA (1)...(19): siRNA sense strand
uggugaggcgaaagggauu

SEQ ID NO: 2280657 - RNA, 19 nt, Homo sapiens
  misc_RNA (1)...(19): siRNA sense strand
gacaagaaaggaaagaaaa

SEQ ID NO: 2280658 - RNA, 19 nt, Homo sapiens
  misc_RNA (1)...(19): siRNA sense strand
agucgagaucagaggagau

SEQ ID NO: 2280659 - RNA, 19 nt, Homo sapiens
  misc_RNA (1)...(19): siRNA sense strand
gcacaacauucucacccaa

SEQ ID NO: 2280660 - RNA, 19 nt, Homo sapiens
  misc_RNA (1)...(19): siRNA sense strand
ccagcaaagcgaugagauc

SEQ ID NO: 2280661 - RNA, 19 nt, Homo sapiens
  misc_RNA (1)...(19): siRNA sense strand
gugcaaguggccagugaca

SEQ ID NO: 2280662 - RNA, 19 nt, Homo sapiens
  misc_RNA (1)...(19): siRNA sense strand
caaagaacuggaaacggaa

SEQ ID NO: 2280663 - RNA, 19 nt, Homo sapiens
  misc_RNA (1)...(19): siRNA sense strand
cuucaaacguguuggugcu

SEQ ID NO: 2280664 - RNA, 19 nt, Homo sapiens
  misc_RNA (1)...(19): siRNA sense strand
gccaagagucagugagccu

SEQ ID NO: 2280665 - RNA, 19 nt, Homo sapiens
  misc_RNA (1)...(19): siRNA sense strand
agucagugagccuggaaca

SEQ ID NO: 2280666 - RNA, 19 nt, Homo sapiens
  misc_RNA (1)...(19): siRNA sense strand
caggaaggaagaagcacuu

SEQ ID NO: 2280667 - RNA, 19 nt, Homo sapiens
  misc_RNA (1)...(19): siRNA sense strand
cccaaauaagagauaaaga

SEQ ID NO: 2280668 - RNA, 19 nt, Homo sapiens
  misc_RNA (1)...(19): siRNA sense strand
agauaaagaagacccucaa

SEQ ID NO: 2280669 - RNA, 19 nt, Homo sapiens
  misc_RNA (1)...(19): siRNA sense strand
ccuggaacucagaggucau

SEQ ID NO: 2280670 - RNA, 19 nt, Homo sapiens
  misc_RNA (1)...(19): siRNA sense strand
agacaagaaaggaaagaaa

SEQ ID NO: 2280671 - RNA, 19 nt, Homo sapiens
  misc_RNA (1)...(19): siRNA sense strand
gcaaagaacuggaaacgga

SEQ ID NO: 2280672 - RNA, 19 nt, Homo sapiens
  misc_RNA (1)...(19): siRNA sense strand
cuucagacaagaaaggaaa

SEQ ID NO: 2280673 - RNA, 19 nt, Homo sapiens
  misc_RNA (1)...(19): siRNA sense strand
augccagagauaagagaua

SEQ ID NO: 2280674 - RNA, 19 nt, Homo sapiens
  misc_RNA (1)...(19): siRNA sense strand
ccaaaaggcaagaacuaaa

SEQ ID NO: 2280675 - RNA, 19 nt, Homo sapiens
  misc_RNA (1)...(19): siRNA sense strand
ggaaaaggaaggaacgcaa

SEQ ID NO: 2280676 - RNA, 19 nt, Homo sapiens
  misc_RNA (1)...(19): siRNA sense strand
ccaucaucacuaagagaau

SEQ ID NO: 2280677 - RNA, 19 nt, Homo sapiens
  misc_RNA (1)...(19): siRNA sense strand
uauccagaguggugcacaa

SEQ ID NO: 2280678 - RNA, 19 nt, Homo sapiens
  misc_RNA (1)...(19): siRNA sense strand
auuugaagucgaaggaaaa

SEQ ID NO: 2280679 - RNA, 19 nt, Homo sapiens
  misc_RNA (1)...(19): siRNA sense strand
auugauggcacuucagaaa

SEQ ID NO: 2280680 - RNA, 19 nt, Homo sapiens
  misc_RNA (1)...(19): siRNA sense strand
gccagagauaagagauaau

SEQ ID NO: 2280681 - RNA, 19 nt, Homo sapiens
  misc_RNA (1)...(19): siRNA sense strand
guccaaaaggcaagaacua

SEQ ID NO: 2280682 - RNA, 19 nt, Homo sapiens
  misc_RNA (1)...(19): siRNA sense strand
aagaacuggaaacggaaua

SEQ ID NO: 2280683 - RNA, 19 nt, Homo sapiens
  misc_RNA (1)...(19): siRNA sense strand
gagauaaagaagacccuca

SEQ ID NO: 2280684 - RNA, 19 nt, Homo sapiens
  misc_RNA (1)...(19): siRNA sense strand
ccgaagaggaaaacccaaa

SEQ ID NO: 2280685 - RNA, 19 nt, Homo sapiens
  misc_RNA (1)...(19): siRNA sense strand
cuucagugaccaaugacaa

SEQ ID NO: 2280686 - RNA, 19 nt, Homo sapiens
  misc_RNA (1)...(19): siRNA sense strand
uggugaggcgaaagggauu

SEQ ID NO: 2280687 - RNA, 19 nt, Homo sapiens
  misc_RNA (1)...(19): siRNA sense strand
gacaagaaaggaaagaaaa

SEQ ID NO: 2280688 - RNA, 19 nt, Homo sapiens
  misc_RNA (1)...(19): siRNA sense strand
agucgagaucagaggagau

SEQ ID NO: 2280689 - RNA, 19 nt, Homo sapiens
  misc_RNA (1)...(19): siRNA sense strand
gcacaacauucucacccaa

SEQ ID NO: 2280690 - RNA, 19 nt, Homo sapiens
  misc_RNA (1)...(19): siRNA sense strand
ccagcaaagcgaugagauc

SEQ ID NO: 2280691 - RNA, 19 nt, Homo sapiens
  misc_RNA (1)...(19): siRNA sense strand
gugcaaguggccagugaca

SEQ ID NO: 2280692 - RNA, 19 nt, Homo sapiens
  misc_RNA (1)...(19): siRNA sense strand
caaagaacuggaaacggaa

SEQ ID NO: 2280693 - RNA, 19 nt, Homo sapiens
  misc_RNA (1)...(19): siRNA sense strand
cuucaaacguguuggugcu

SEQ ID NO: 2280694 - RNA, 19 nt, Homo sapiens
  misc_RNA (1)...(19): siRNA sense strand
gccaagagucagugagccu

SEQ ID NO: 2280695 - RNA, 19 nt, Homo sapiens
  misc_RNA (1)...(19): siRNA sense strand
agucagugagccuggaaca

SEQ ID NO: 2280696 - RNA, 19 nt, Homo sapiens
  misc_RNA (1)...(19): siRNA sense strand
caggaaggaagaagcacuu

SEQ ID NO: 2280697 - RNA, 19 nt, Homo sapiens
  misc_RNA (1)...(19): siRNA sense strand
cccaaauaagagauaaaga

SEQ ID NO: 2280698 - RNA, 19 nt, Homo sapiens
  misc_RNA (1)...(19): siRNA sense strand
agauaaagaagacccucaa

SEQ ID NO: 2280699 - RNA, 19 nt, Homo sapiens
  misc_RNA (1)...(19): siRNA sense strand
ccuggaacucagaggucau

SEQ ID NO: 2280700 - RNA, 19 nt, Homo sapiens
  misc_RNA (1)...(19): siRNA sense strand
agacaagaaaggaaagaaa

SEQ ID NO: 2280701 - RNA, 19 nt, Homo sapiens
  misc_RNA (1)...(19): siRNA sense strand
gcaaagaacuggaaacgga

SEQ ID NO: 2280702 - RNA, 19 nt, Homo sapiens
  misc_RNA (1)...(19): siRNA sense strand
cuucagacaagaaaggaaa

SEQ ID NO: 2280703 - RNA, 19 nt, Homo sapiens
  misc_RNA (1)...(19): siRNA sense strand
augccagagauaagagaua

SEQ ID NO: 2280704 - RNA, 19 nt, Homo sapiens
  misc_RNA (1)...(19): siRNA sense strand
ccaaaaggcaagaacuaaa

SEQ ID NO: 2280705 - RNA, 19 nt, Homo sapiens
  misc_RNA (1)...(19): siRNA sense strand
ggaaaaggaaggaacgcaa

SEQ ID NO: 2280706 - RNA, 19 nt, Homo sapiens
  misc_RNA (1)...(19): siRNA sense strand
ccaucaucacuaagagaau

SEQ ID NO: 2280707 - RNA, 19 nt, Homo sapiens
  misc_RNA (1)...(19): siRNA sense strand
uauccagaguggugcacaa

SEQ ID NO: 2280708 - RNA, 19 nt, Homo sapiens
  misc_RNA (1)...(19): siRNA sense strand
auuugaagucgaaggaaaa

SEQ ID NO: 2280709 - RNA, 19 nt, Homo sapiens
  misc_RNA (1)...(19): siRNA sense strand
auugauggcacuucagaaa

SEQ ID NO: 2280710 - RNA, 19 nt, Homo sapiens
  misc_RNA (1)...(19): siRNA sense strand
gccagagauaagagauaau

SEQ ID NO: 2280711 - RNA, 19 nt, Homo sapiens
  misc_RNA (1)...(19): siRNA sense strand
guccaaaaggcaagaacua

SEQ ID NO: 2280712 - RNA, 19 nt, Homo sapiens
  misc_RNA (1)...(19): siRNA sense strand
aagaacuggaaacggaaua

SEQ ID NO: 2280713 - RNA, 19 nt, Homo sapiens
  misc_RNA (1)...(19): siRNA sense strand
gagauaaagaagacccuca

SEQ ID NO: 2280714 - RNA, 19 nt, Homo sapiens
  misc_RNA (1)...(19): siRNA sense strand
ccgaagaggaaaacccaaa

SEQ ID NO: 2280715 - RNA, 19 nt, Homo sapiens
  misc_RNA (1)...(19): siRNA sense strand
cuucagugaccaaugacaa

SEQ ID NO: 2280716 - RNA, 19 nt, Homo sapiens
  misc_RNA (1)...(19): siRNA sense strand
uggugaggcgaaagggauu

SEQ ID NO: 2280717 - RNA, 19 nt, Homo sapiens
  misc_RNA (1)...(19): siRNA sense strand
gacaagaaaggaaagaaaa

SEQ ID NO: 2280718 - RNA, 19 nt, Homo sapiens
  misc_RNA (1)...(19): siRNA sense strand
agucgagaucagaggagau

SEQ ID NO: 2280719 - RNA, 19 nt, Homo sapiens
  misc_RNA (1)...(19): siRNA sense strand
gcacaacauucucacccaa

SEQ ID NO: 2280720 - RNA, 19 nt, Homo sapiens
  misc_RNA (1)...(19): siRNA sense strand
ccagcaaagcgaugagauc

SEQ ID NO: 2280721 - RNA, 19 nt, Homo sapiens
  misc_RNA (1)...(19): siRNA sense strand
gugcaaguggccagugaca

SEQ ID NO: 2280722 - RNA, 19 nt, Homo sapiens
  misc_RNA (1)...(19): siRNA sense strand
caaagaacuggaaacggaa

SEQ ID NO: 2280723 - RNA, 19 nt, Homo sapiens
  misc_RNA (1)...(19): siRNA sense strand
cuucaaacguguuggugcu

SEQ ID NO: 2280724 - RNA, 19 nt, Homo sapiens
  misc_RNA (1)...(19): siRNA sense strand
gccaagagucagugagccu

SEQ ID NO: 2280725 - RNA, 19 nt, Homo sapiens
  misc_RNA (1)...(19): siRNA sense strand
agucagugagccuggaaca

SEQ ID NO: 2280726 - RNA, 19 nt, Homo sapiens
  misc_RNA (1)...(19): siRNA sense strand
caggaaggaagaagcacuu

SEQ ID NO: 2280727 - RNA, 19 nt, Homo sapiens
  misc_RNA (1)...(19): siRNA sense strand
cccaaauaagagauaaaga

SEQ ID NO: 2280728 - RNA, 19 nt, Homo sapiens
  misc_RNA (1)...(19): siRNA sense strand
agauaaagaagacccucaa

SEQ ID NO: 2280729 - RNA, 19 nt, Homo sapiens
  misc_RNA (1)...(19): siRNA sense strand
ccuggaacucagaggucau

SEQ ID NO: 2280730 - RNA, 19 nt, Homo sapiens
  misc_RNA (1)...(19): siRNA sense strand
cugaggagcuccaagccaa

SEQ ID NO: 2280731 - RNA, 19 nt, Homo sapiens
  misc_RNA (1)...(19): siRNA sense strand
ccgggaaucuugacgguga

SEQ ID NO: 2280732 - RNA, 19 nt, Homo sapiens
  misc_RNA (1)...(19): siRNA sense strand
cagaagacggcgagggcau

SEQ ID NO: 2280733 - RNA, 19 nt, Homo sapiens
  misc_RNA (1)...(19): siRNA sense strand
aaaggaagcuucaggugga

SEQ ID NO: 2280734 - RNA, 19 nt, Homo sapiens
  misc_RNA (1)...(19): siRNA sense strand
augaagaagcgcucgguga

SEQ ID NO: 2280735 - RNA, 19 nt, Homo sapiens
  misc_RNA (1)...(19): siRNA sense strand
ggagacagcccgaaggaug

SEQ ID NO: 2280736 - RNA, 19 nt, Homo sapiens
  misc_RNA (1)...(19): siRNA sense strand
acuacaggacugcggacaa

SEQ ID NO: 2280737 - RNA, 19 nt, Homo sapiens
  misc_RNA (1)...(19): siRNA sense strand
ggguauucguggacggcgu

SEQ ID NO: 2280738 - RNA, 19 nt, Homo sapiens
  misc_RNA (1)...(19): siRNA sense strand
gagagaagcaggaggcguc

SEQ ID NO: 2280739 - RNA, 19 nt, Homo sapiens
  misc_RNA (1)...(19): siRNA sense strand
aaaggaagcuucaggugga

SEQ ID NO: 2280740 - RNA, 19 nt, Homo sapiens
  misc_RNA (1)...(19): siRNA sense strand
augaagaagcgcucgguga

SEQ ID NO: 2280741 - RNA, 19 nt, Homo sapiens
  misc_RNA (1)...(19): siRNA sense strand
ggagacagcccgaaggaug

SEQ ID NO: 2280742 - RNA, 19 nt, Homo sapiens
  misc_RNA (1)...(19): siRNA sense strand
acuacaggacugcggacaa

SEQ ID NO: 2280743 - RNA, 19 nt, Homo sapiens
  misc_RNA (1)...(19): siRNA sense strand
ggguauucguggacggcgu

SEQ ID NO: 2280744 - RNA, 19 nt, Homo sapiens
  misc_RNA (1)...(19): siRNA sense strand
gagagaagcaggaggcguc

SEQ ID NO: 2280745 - RNA, 19 nt, Homo sapiens
  misc_RNA (1)...(19): siRNA sense strand
aaaggaagcuucaggugga

SEQ ID NO: 2280746 - RNA, 19 nt, Homo sapiens
  misc_RNA (1)...(19): siRNA sense strand
augaagaagcgcucgguga

SEQ ID NO: 2280747 - RNA, 19 nt, Homo sapiens
  misc_RNA (1)...(19): siRNA sense strand
ggagacagcccgaaggaug

SEQ ID NO: 2280748 - RNA, 19 nt, Homo sapiens
  misc_RNA (1)...(19): siRNA sense strand
acuacaggacugcggacaa

SEQ ID NO: 2280749 - RNA, 19 nt, Homo sapiens
  misc_RNA (1)...(19): siRNA sense strand
ggguauucguggacggcgu

SEQ ID NO: 2280750 - RNA, 19 nt, Homo sapiens
  misc_RNA (1)...(19): siRNA sense strand
gagagaagcaggaggcguc

SEQ ID NO: 2280751 - RNA, 19 nt, Homo sapiens
  misc_RNA (1)...(19): siRNA sense strand
gggcagagaagaugggcca

SEQ ID NO: 2280752 - RNA, 19 nt, Homo sapiens
  misc_RNA (1)...(19): siRNA sense strand
aguacaaggcagacaucaa

SEQ ID NO: 2280753 - RNA, 19 nt, Homo sapiens
  misc_RNA (1)...(19): siRNA sense strand
acaucaaugcagugaauga

SEQ ID NO: 2280754 - RNA, 19 nt, Homo sapiens
  misc_RNA (1)...(19): siRNA sense strand
ccaauuucgucguggacca

SEQ ID NO: 2280755 - RNA, 19 nt, Homo sapiens
  misc_RNA (1)...(19): siRNA sense strand
guguaaugauugaugagga

SEQ ID NO: 2280756 - RNA, 19 nt, Homo sapiens
  misc_RNA (1)...(19): siRNA sense strand
acucaauagccguagugua

SEQ ID NO: 2280757 - RNA, 19 nt, Homo sapiens
  misc_RNA (1)...(19): siRNA sense strand
uguaacaaguauggagaga

SEQ ID NO: 2280758 - RNA, 19 nt, Homo sapiens
  misc_RNA (1)...(19): siRNA sense strand
uggacaacacggagaacga

SEQ ID NO: 2280759 - RNA, 19 nt, Homo sapiens
  misc_RNA (1)...(19): siRNA sense strand
ugguugagauguugaucau

SEQ ID NO: 2280760 - RNA, 19 nt, Homo sapiens
  misc_RNA (1)...(19): siRNA sense strand
acaaggaagagcagggacu

SEQ ID NO: 2280761 - RNA, 19 nt, Homo sapiens
  misc_RNA (1)...(19): siRNA sense strand
guguguaagcucaugaaga

SEQ ID NO: 2280762 - RNA, 19 nt, Homo sapiens
  misc_RNA (1)...(19): siRNA sense strand
ccucauguguguaagcuca

SEQ ID NO: 2280763 - RNA, 19 nt, Homo sapiens
  misc_RNA (1)...(19): siRNA sense strand
gagagcgggcagagaagau

SEQ ID NO: 2280764 - RNA, 19 nt, Homo sapiens
  misc_RNA (1)...(19): siRNA sense strand
gacuggaguacaaggaaga

SEQ ID NO: 2280765 - RNA, 19 nt, Homo sapiens
  misc_RNA (1)...(19): siRNA sense strand
agaagaagccugaagacac

SEQ ID NO: 2280766 - RNA, 19 nt, Homo sapiens
  misc_RNA (1)...(19): siRNA sense strand
cuugagaagaugcaggaca

SEQ ID NO: 2280767 - RNA, 19 nt, Homo sapiens
  misc_RNA (1)...(19): siRNA sense strand
agaagcuauugcaguacaa

SEQ ID NO: 2280768 - RNA, 19 nt, Homo sapiens
  misc_RNA (1)...(19): siRNA sense strand
guacagaagcuauugcagu

SEQ ID NO: 2280769 - RNA, 19 nt, Homo sapiens
  misc_RNA (1)...(19): siRNA sense strand
gcaccaauuucgucgugga

SEQ ID NO: 2280770 - RNA, 19 nt, Homo sapiens
  misc_RNA (1)...(19): siRNA sense strand
aggaggagcugaagggcaa

SEQ ID NO: 2280771 - RNA, 19 nt, Homo sapiens
  misc_RNA (1)...(19): siRNA sense strand
ucgccauggugaagagcaa

SEQ ID NO: 2280772 - RNA, 19 nt, Homo sapiens
  misc_RNA (1)...(19): siRNA sense strand
gggaccaggaggagcugaa

SEQ ID NO: 2280773 - RNA, 19 nt, Homo sapiens
  misc_RNA (1)...(19): siRNA sense strand
gagccaaauuccaagagca

SEQ ID NO: 2280774 - RNA, 19 nt, Homo sapiens
  misc_RNA (1)...(19): siRNA sense strand
ccaaauuccaagagcagca

SEQ ID NO: 2280775 - RNA, 19 nt, Homo sapiens
  misc_RNA (1)...(19): siRNA sense strand
gggagagacacgagcccuu

SEQ ID NO: 2280776 - RNA, 19 nt, Homo sapiens
  misc_RNA (1)...(19): siRNA sense strand
guggagaaggucagagcca

SEQ ID NO: 2280777 - RNA, 19 nt, Homo sapiens
  misc_RNA (1)...(19): siRNA sense strand
ccagaagcggggagagaca

SEQ ID NO: 2280778 - RNA, 19 nt, Homo sapiens
  misc_RNA (1)...(19): siRNA sense strand
uggaguacuucgugcggau

SEQ ID NO: 2280779 - RNA, 19 nt, Homo sapiens
  misc_RNA (1)...(19): siRNA sense strand
aggcagaagcacuuugaga

SEQ ID NO: 2280780 - RNA, 19 nt, Homo sapiens
  misc_RNA (1)...(19): siRNA sense strand
gagaagaagcugaaggugg

SEQ ID NO: 2280781 - RNA, 19 nt, Homo sapiens
  misc_RNA (1)...(19): siRNA sense strand
cccucuacauccuggaaau

SEQ ID NO: 2280782 - RNA, 19 nt, Homo sapiens
  misc_RNA (1)...(19): siRNA sense strand
uggaguacuucgugcggau

SEQ ID NO: 2280783 - RNA, 19 nt, Homo sapiens
  misc_RNA (1)...(19): siRNA sense strand
aggcagaagcacuuugaga

SEQ ID NO: 2280784 - RNA, 19 nt, Homo sapiens
  misc_RNA (1)...(19): siRNA sense strand
gagaagaagcugaaggugg

SEQ ID NO: 2280785 - RNA, 19 nt, Homo sapiens
  misc_RNA (1)...(19): siRNA sense strand
cccucuacauccuggaaau

SEQ ID NO: 2280786 - RNA, 19 nt, Homo sapiens
  misc_RNA (1)...(19): siRNA sense strand
uggaguacuucgugcggau

SEQ ID NO: 2280787 - RNA, 19 nt, Homo sapiens
  misc_RNA (1)...(19): siRNA sense strand
aggcagaagcacuuugaga

SEQ ID NO: 2280788 - RNA, 19 nt, Homo sapiens
  misc_RNA (1)...(19): siRNA sense strand
gagaagaagcugaaggugg

SEQ ID NO: 2280789 - RNA, 19 nt, Homo sapiens
  misc_RNA (1)...(19): siRNA sense strand
cccucuacauccuggaaau

SEQ ID NO: 2280790 - RNA, 19 nt, Homo sapiens
  misc_RNA (1)...(19): siRNA sense strand
uggaguacuucgugcggau

SEQ ID NO: 2280791 - RNA, 19 nt, Homo sapiens
  misc_RNA (1)...(19): siRNA sense strand
aggcagaagcacuuugaga

SEQ ID NO: 2280792 - RNA, 19 nt, Homo sapiens
  misc_RNA (1)...(19): siRNA sense strand
gagaagaagcugaaggugg

SEQ ID NO: 2280793 - RNA, 19 nt, Homo sapiens
  misc_RNA (1)...(19): siRNA sense strand
cccucuacauccuggaaau

SEQ ID NO: 2280794 - RNA, 19 nt, Homo sapiens
  misc_RNA (1)...(19): siRNA sense strand
uggaguacuucgugcggau

SEQ ID NO: 2280795 - RNA, 19 nt, Homo sapiens
  misc_RNA (1)...(19): siRNA sense strand
aggcagaagcacuuugaga

SEQ ID NO: 2280796 - RNA, 19 nt, Homo sapiens
  misc_RNA (1)...(19): siRNA sense strand
gagaagaagcugaaggugg

SEQ ID NO: 2280797 - RNA, 19 nt, Homo sapiens
  misc_RNA (1)...(19): siRNA sense strand
cccucuacauccuggaaau

SEQ ID NO: 2280798 - RNA, 19 nt, Homo sapiens
  misc_RNA (1)...(19): siRNA sense strand
caucagaaaucgaagacca

SEQ ID NO: 2280799 - RNA, 19 nt, Homo sapiens
  misc_RNA (1)...(19): siRNA sense strand
ggaugagggagaagcggua

SEQ ID NO: 2280800 - RNA, 19 nt, Homo sapiens
  misc_RNA (1)...(19): siRNA sense strand
uguagaugccauagaagaa

SEQ ID NO: 2280801 - RNA, 19 nt, Homo sapiens
  misc_RNA (1)...(19): siRNA sense strand
cagugguugcugugggaaa

SEQ ID NO: 2280802 - RNA, 19 nt, Homo sapiens
  misc_RNA (1)...(19): siRNA sense strand
agaugaaagaggaguuuga

SEQ ID NO: 2280803 - RNA, 19 nt, Homo sapiens
  misc_RNA (1)...(19): siRNA sense strand
uggacuuccucguggauau

SEQ ID NO: 2280804 - RNA, 19 nt, Homo sapiens
  misc_RNA (1)...(19): siRNA sense strand
cuggaaagguucaggcaac

SEQ ID NO: 2280805 - RNA, 19 nt, Homo sapiens
  misc_RNA (1)...(19): siRNA sense strand
cacaaggagaggagaugaa

SEQ ID NO: 2280806 - RNA, 19 nt, Homo sapiens
  misc_RNA (1)...(19): siRNA sense strand
gagaggagaugaaagagga

SEQ ID NO: 2280807 - RNA, 19 nt, Homo sapiens
  misc_RNA (1)...(19): siRNA sense strand
gguagcaauacuaaaggaa

SEQ ID NO: 2280808 - RNA, 19 nt, Homo sapiens
  misc_RNA (1)...(19): siRNA sense strand
caauacuaaaggaaagcua

SEQ ID NO: 2280809 - RNA, 19 nt, Homo sapiens
  misc_RNA (1)...(19): siRNA sense strand
agacaggggcuaugggaau

SEQ ID NO: 2280810 - RNA, 19 nt, Homo sapiens
  misc_RNA (1)...(19): siRNA sense strand
aagcagagaagaaggagga

SEQ ID NO: 2280811 - RNA, 19 nt, Homo sapiens
  misc_RNA (1)...(19): siRNA sense strand
aggagaugaaagaggaguu

SEQ ID NO: 2280812 - RNA, 19 nt, Homo sapiens
  misc_RNA (1)...(19): siRNA sense strand
augugaaggaugugauuga

SEQ ID NO: 2280813 - RNA, 19 nt, Homo sapiens
  misc_RNA (1)...(19): siRNA sense strand
agaccauccacaucagaaa

SEQ ID NO: 2280814 - RNA, 19 nt, Homo sapiens
  misc_RNA (1)...(19): siRNA sense strand
cuaaagaaccaaagccugu

SEQ ID NO: 2280815 - RNA, 19 nt, Homo sapiens
  misc_RNA (1)...(19): siRNA sense strand
acgaggagcuggagagguc

SEQ ID NO: 2280816 - RNA, 19 nt, Homo sapiens
  misc_RNA (1)...(19): siRNA sense strand
gcagagaagaaggaggaca

SEQ ID NO: 2280817 - RNA, 19 nt, Homo sapiens
  misc_RNA (1)...(19): siRNA sense strand
gcaacaacguauguggaga

SEQ ID NO: 2280818 - RNA, 19 nt, Homo sapiens
  misc_RNA (1)...(19): siRNA sense strand
ucuaccugguugagaaaga

SEQ ID NO: 2280819 - RNA, 19 nt, Homo sapiens
  misc_RNA (1)...(19): siRNA sense strand
gaguuugcuuugaggaucu

SEQ ID NO: 2280820 - RNA, 19 nt, Homo sapiens
  misc_RNA (1)...(19): siRNA sense strand
ggugagacggacacagaca

SEQ ID NO: 2280821 - RNA, 19 nt, Homo sapiens
  misc_RNA (1)...(19): siRNA sense strand
ucaaggugcaggagcaaca

SEQ ID NO: 2280822 - RNA, 19 nt, Homo sapiens
  misc_RNA (1)...(19): siRNA sense strand
ccucaaggugcaggagcaa

SEQ ID NO: 2280823 - RNA, 19 nt, Homo sapiens
  misc_RNA (1)...(19): siRNA sense strand
ucccagagguggaugcaca

SEQ ID NO: 2280824 - RNA, 19 nt, Homo sapiens
  misc_RNA (1)...(19): siRNA sense strand
cuuaaacaauaaagagcgu

SEQ ID NO: 2280825 - RNA, 19 nt, Homo sapiens
  misc_RNA (1)...(19): siRNA sense strand
aggugcaggucacggagua

SEQ ID NO: 2280826 - RNA, 19 nt, Homo sapiens
  misc_RNA (1)...(19): siRNA sense strand
augcacaaggagaggagau

SEQ ID NO: 2280827 - RNA, 19 nt, Homo sapiens
  misc_RNA (1)...(19): siRNA sense strand
ucugaauguagaugccaua

SEQ ID NO: 2280828 - RNA, 19 nt, Homo sapiens
  misc_RNA (1)...(19): siRNA sense strand
aaggaggacaacagguauu

SEQ ID NO: 2280829 - RNA, 19 nt, Homo sapiens
  misc_RNA (1)...(19): siRNA sense strand
cccucaaggugcaggagca

SEQ ID NO: 2280830 - RNA, 19 nt, Homo sapiens
  misc_RNA (1)...(19): siRNA sense strand
cuuacgaugugaaggaugu

SEQ ID NO: 2280831 - RNA, 19 nt, Homo sapiens
  misc_RNA (1)...(19): siRNA sense strand
cgaugugaaggaugugauu

SEQ ID NO: 2280832 - RNA, 19 nt, Homo sapiens
  misc_RNA (1)...(19): siRNA sense strand
cgaagaagaaagaggagaa

SEQ ID NO: 2280833 - RNA, 19 nt, Homo sapiens
  misc_RNA (1)...(19): siRNA sense strand
ugacaagagcucaaggaaa

SEQ ID NO: 2280834 - RNA, 19 nt, Homo sapiens
  misc_RNA (1)...(19): siRNA sense strand
gguugaagaaucugugaaa

SEQ ID NO: 2280835 - RNA, 19 nt, Homo sapiens
  misc_RNA (1)...(19): siRNA sense strand
cgauaagauagaagaucaa

SEQ ID NO: 2280836 - RNA, 19 nt, Homo sapiens
  misc_RNA (1)...(19): siRNA sense strand
cugauaaacucaauggcaa

SEQ ID NO: 2280837 - RNA, 19 nt, Homo sapiens
  misc_RNA (1)...(19): siRNA sense strand
acaacaaagaagagacaau

SEQ ID NO: 2280838 - RNA, 19 nt, Homo sapiens
  misc_RNA (1)...(19): siRNA sense strand
ggaagaaacuacagagcac

SEQ ID NO: 2280839 - RNA, 19 nt, Homo sapiens
  misc_RNA (1)...(19): siRNA sense strand
agucaugaguggaaaauua

SEQ ID NO: 2280840 - RNA, 19 nt, Homo sapiens
  misc_RNA (1)...(19): siRNA sense strand
uggaaaguacugaggagaa

SEQ ID NO: 2280841 - RNA, 19 nt, Homo sapiens
  misc_RNA (1)...(19): siRNA sense strand
agaaagaggagaaggggaa

SEQ ID NO: 2280842 - RNA, 19 nt, Homo sapiens
  misc_RNA (1)...(19): siRNA sense strand
augcagaagcucaggauau

SEQ ID NO: 2280843 - RNA, 19 nt, Homo sapiens
  misc_RNA (1)...(19): siRNA sense strand
guacaaaauugguugaaga

SEQ ID NO: 2280844 - RNA, 19 nt, Homo sapiens
  misc_RNA (1)...(19): siRNA sense strand
gcuuaacacaguugaagaa

SEQ ID NO: 2280845 - RNA, 19 nt, Homo sapiens
  misc_RNA (1)...(19): siRNA sense strand
uugaagaaucugugaaaca

SEQ ID NO: 2280846 - RNA, 19 nt, Homo sapiens
  misc_RNA (1)...(19): siRNA sense strand
cauuagcagcagaaaguaa

SEQ ID NO: 2280847 - RNA, 19 nt, Homo sapiens
  misc_RNA (1)...(19): siRNA sense strand
ugugaaacacucugauaaa

SEQ ID NO: 2280848 - RNA, 19 nt, Homo sapiens
  misc_RNA (1)...(19): siRNA sense strand
cuucuaaguucacuggaaa

SEQ ID NO: 2280849 - RNA, 19 nt, Homo sapiens
  misc_RNA (1)...(19): siRNA sense strand
acaacaaggaugaagucua

SEQ ID NO: 2280850 - RNA, 19 nt, Homo sapiens
  misc_RNA (1)...(19): siRNA sense strand
guuaaugaaucuuuggaca

SEQ ID NO: 2280851 - RNA, 19 nt, Homo sapiens
  misc_RNA (1)...(19): siRNA sense strand
gcggaaagcuagcgcccau

SEQ ID NO: 2280852 - RNA, 19 nt, Homo sapiens
  misc_RNA (1)...(19): siRNA sense strand
aggaugaagucuaucaaau

SEQ ID NO: 2280853 - RNA, 19 nt, Homo sapiens
  misc_RNA (1)...(19): siRNA sense strand
acugaagaccugaagacaa

SEQ ID NO: 2280854 - RNA, 19 nt, Homo sapiens
  misc_RNA (1)...(19): siRNA sense strand
aggaaaauauacagcagaa

SEQ ID NO: 2280855 - RNA, 19 nt, Homo sapiens
  misc_RNA (1)...(19): siRNA sense strand
caaagaaaacagaggcauu

SEQ ID NO: 2280856 - RNA, 19 nt, Homo sapiens
  misc_RNA (1)...(19): siRNA sense strand
uggagaagagcuuguuaaa

SEQ ID NO: 2280857 - RNA, 19 nt, Homo sapiens
  misc_RNA (1)...(19): siRNA sense strand
cugaagaaccucuaaguca

SEQ ID NO: 2280858 - RNA, 19 nt, Homo sapiens
  misc_RNA (1)...(19): siRNA sense strand
cguacaagaacaucuauaa

SEQ ID NO: 2280859 - RNA, 19 nt, Homo sapiens
  misc_RNA (1)...(19): siRNA sense strand
gaggagcugaauaggguua

SEQ ID NO: 2280860 - RNA, 19 nt, Homo sapiens
  misc_RNA (1)...(19): siRNA sense strand
augaaguuauuaugggcua

SEQ ID NO: 2280861 - RNA, 19 nt, Homo sapiens
  misc_RNA (1)...(19): siRNA sense strand
ggaggaaaagugugaaaau

SEQ ID NO: 2280862 - RNA, 19 nt, Homo sapiens
  misc_RNA (1)...(19): siRNA sense strand
gaagauaaauugauagcac

SEQ ID NO: 2280863 - RNA, 19 nt, Homo sapiens
  misc_RNA (1)...(19): siRNA sense strand
aaacaacaaagaagagaca

SEQ ID NO: 2280864 - RNA, 19 nt, Homo sapiens
  misc_RNA (1)...(19): siRNA sense strand
ccaaacuggcacuggaaaa

SEQ ID NO: 2280865 - RNA, 19 nt, Homo sapiens
  misc_RNA (1)...(19): siRNA sense strand
guacgacaccacagaggaa

SEQ ID NO: 2280866 - RNA, 19 nt, Homo sapiens
  misc_RNA (1)...(19): siRNA sense strand
acaagagaggagugauaau

SEQ ID NO: 2280867 - RNA, 19 nt, Homo sapiens
  misc_RNA (1)...(19): siRNA sense strand
aaacagaggcauuaacaca

SEQ ID NO: 2280868 - RNA, 19 nt, Homo sapiens
  misc_RNA (1)...(19): siRNA sense strand
gguuacaaagagcagauua

SEQ ID NO: 2280869 - RNA, 19 nt, Homo sapiens
  misc_RNA (1)...(19): siRNA sense strand
uaagaaggcaguugaccaa

SEQ ID NO: 2280870 - RNA, 19 nt, Homo sapiens
  misc_RNA (1)...(19): siRNA sense strand
gcucaaagcaaaaggccau

SEQ ID NO: 2280871 - RNA, 19 nt, Homo sapiens
  misc_RNA (1)...(19): siRNA sense strand
gcucaugagaaacagcaua

SEQ ID NO: 2280872 - RNA, 19 nt, Homo sapiens
  misc_RNA (1)...(19): siRNA sense strand
gagaggagugauaauuaaa

SEQ ID NO: 2280873 - RNA, 19 nt, Homo sapiens
  misc_RNA (1)...(19): siRNA sense strand
guucuggagcuguugauaa

SEQ ID NO: 2280874 - RNA, 19 nt, Homo sapiens
  misc_RNA (1)...(19): siRNA sense strand
guaagaaggcaguugacca

SEQ ID NO: 2280875 - RNA, 19 nt, Homo sapiens
  misc_RNA (1)...(19): siRNA sense strand
acaauaaagcagacccauu

SEQ ID NO: 2280876 - RNA, 19 nt, Homo sapiens
  misc_RNA (1)...(19): siRNA sense strand
agcagaaaucuaaggauau

SEQ ID NO: 2280877 - RNA, 19 nt, Homo sapiens
  misc_RNA (1)...(19): siRNA sense strand
ucucacaggaacucagaaa

SEQ ID NO: 2280878 - RNA, 19 nt, Homo sapiens
  misc_RNA (1)...(19): siRNA sense strand
gauugauggagaagagcuu

SEQ ID NO: 2280879 - RNA, 19 nt, Homo sapiens
  misc_RNA (1)...(19): siRNA sense strand
ugauaagagagcucgggaa

SEQ ID NO: 2280880 - RNA, 19 nt, Homo sapiens
  misc_RNA (1)...(19): siRNA sense strand
cugaauaggguuacagagu

SEQ ID NO: 2280881 - RNA, 19 nt, Homo sapiens
  misc_RNA (1)...(19): siRNA sense strand
cugugaaacacucugauaa

SEQ ID NO: 2280882 - RNA, 19 nt, Homo sapiens
  misc_RNA (1)...(19): siRNA sense strand
gggaacaggaacuucacaa

SEQ ID NO: 2280883 - RNA, 19 nt, Homo sapiens
  misc_RNA (1)...(19): siRNA sense strand
ccacagaggaaaaguuauu

SEQ ID NO: 2280884 - RNA, 19 nt, Homo sapiens
  misc_RNA (1)...(19): siRNA sense strand
gguaagaacugaaccacgu

SEQ ID NO: 2280885 - RNA, 19 nt, Homo sapiens
  misc_RNA (1)...(19): siRNA sense strand
ggugagaugcagaccauuu

SEQ ID NO: 2280886 - RNA, 19 nt, Homo sapiens
  misc_RNA (1)...(19): siRNA sense strand
gcguacaagaacaucuaua

SEQ ID NO: 2280887 - RNA, 19 nt, Homo sapiens
  misc_RNA (1)...(19): siRNA sense strand
uuaauuuggcagagcggaa

SEQ ID NO: 2280888 - RNA, 19 nt, Homo sapiens
  misc_RNA (1)...(19): siRNA sense strand
aggaguauacggaggagau

SEQ ID NO: 2280889 - RNA, 19 nt, Homo sapiens
  misc_RNA (1)...(19): siRNA sense strand
aaaugaaagggaacaggaa

SEQ ID NO: 2280890 - RNA, 19 nt, Homo sapiens
  misc_RNA (1)...(19): siRNA sense strand
aauggaaggugaaagguca

SEQ ID NO: 2280891 - RNA, 19 nt, Homo sapiens
  misc_RNA (1)...(19): siRNA sense strand
cuguugaggaggagcugaa

SEQ ID NO: 2280892 - RNA, 19 nt, Homo sapiens
  misc_RNA (1)...(19): siRNA sense strand
agaaaguacuggagagcag

SEQ ID NO: 2280893 - RNA, 19 nt, Homo sapiens
  misc_RNA (1)...(19): siRNA sense strand
aggugauguuuaaggguga

SEQ ID NO: 2280894 - RNA, 19 nt, Homo sapiens
  misc_RNA (1)...(19): siRNA sense strand
agguaaaaguggaacugaa

SEQ ID NO: 2280895 - RNA, 19 nt, Homo sapiens
  misc_RNA (1)...(19): siRNA sense strand
ugauuauagcuuaguggaa

SEQ ID NO: 2280896 - RNA, 19 nt, Homo sapiens
  misc_RNA (1)...(19): siRNA sense strand
ccgacaagggacugcagua

SEQ ID NO: 2280897 - RNA, 19 nt, Homo sapiens
  misc_RNA (1)...(19): siRNA sense strand
gcagguggaaggugcgcaa

SEQ ID NO: 2280898 - RNA, 19 nt, Homo sapiens
  misc_RNA (1)...(19): siRNA sense strand
gccaguuacaacagagauu

SEQ ID NO: 2280899 - RNA, 19 nt, Homo sapiens
  misc_RNA (1)...(19): siRNA sense strand
aggaaggauaucugaacuu

SEQ ID NO: 2280900 - RNA, 19 nt, Homo sapiens
  misc_RNA (1)...(19): siRNA sense strand
agguggacaugucgggaga

SEQ ID NO: 2280901 - RNA, 19 nt, Homo sapiens
  misc_RNA (1)...(19): siRNA sense strand
aggaaagguaaaaguggaa

SEQ ID NO: 2280902 - RNA, 19 nt, Homo sapiens
  misc_RNA (1)...(19): siRNA sense strand
cagcaagaucacuggguuc

SEQ ID NO: 2280903 - RNA, 19 nt, Homo sapiens
  misc_RNA (1)...(19): siRNA sense strand
cugcagauccauaaggacu

SEQ ID NO: 2280904 - RNA, 19 nt, Homo sapiens
  misc_RNA (1)...(19): siRNA sense strand
gcgagaagcucaagcagga

SEQ ID NO: 2280905 - RNA, 19 nt, Homo sapiens
  misc_RNA (1)...(19): siRNA sense strand
caucagaauuugaacgcuu

SEQ ID NO: 2280906 - RNA, 19 nt, Homo sapiens
  misc_RNA (1)...(19): siRNA sense strand
gagaagaaccugaggaacc

SEQ ID NO: 2280907 - RNA, 19 nt, Homo sapiens
  misc_RNA (1)...(19): siRNA sense strand
uuacaggauccgagaguca

SEQ ID NO: 2280908 - RNA, 19 nt, Homo sapiens
  misc_RNA (1)...(19): siRNA sense strand
caaagauucucauuggcua

SEQ ID NO: 2280909 - RNA, 19 nt, Homo sapiens
  misc_RNA (1)...(19): siRNA sense strand
uggcagaagacgaggccca

SEQ ID NO: 2280910 - RNA, 19 nt, Homo sapiens
  misc_RNA (1)...(19): siRNA sense strand
guggaagaugugaaggauu

SEQ ID NO: 2280911 - RNA, 19 nt, Homo sapiens
  misc_RNA (1)...(19): siRNA sense strand
ucaacaagacuguggagca

SEQ ID NO: 2280912 - RNA, 19 nt, Homo sapiens
  misc_RNA (1)...(19): siRNA sense strand
ugagaagcggccugagcaa

SEQ ID NO: 2280913 - RNA, 19 nt, Homo sapiens
  misc_RNA (1)...(19): siRNA sense strand
gggacgucacaguggaaga

SEQ ID NO: 2280914 - RNA, 19 nt, Homo sapiens
  misc_RNA (1)...(19): siRNA sense strand
caguggaagaugugaagga

SEQ ID NO: 2280915 - RNA, 19 nt, Homo sapiens
  misc_RNA (1)...(19): siRNA sense strand
aggugagcgcgaagaccaa

SEQ ID NO: 2280916 - RNA, 19 nt, Homo sapiens
  misc_RNA (1)...(19): siRNA sense strand
ggaugaaguggaagcgugu

SEQ ID NO: 2280917 - RNA, 19 nt, Homo sapiens
  misc_RNA (1)...(19): siRNA sense strand
gagacagagaagaaaucau

SEQ ID NO: 2280918 - RNA, 19 nt, Homo sapiens
  misc_RNA (1)...(19): siRNA sense strand
aaugagacagagaagaaau

SEQ ID NO: 2280919 - RNA, 19 nt, Homo sapiens
  misc_RNA (1)...(19): siRNA sense strand
aagaaaucauccaggcgga

SEQ ID NO: 2280920 - RNA, 19 nt, Homo sapiens
  misc_RNA (1)...(19): siRNA sense strand
ggaugaaguggaagcgugu

SEQ ID NO: 2280921 - RNA, 19 nt, Homo sapiens
  misc_RNA (1)...(19): siRNA sense strand
gagacagagaagaaaucau

SEQ ID NO: 2280922 - RNA, 19 nt, Homo sapiens
  misc_RNA (1)...(19): siRNA sense strand
aaugagacagagaagaaau

SEQ ID NO: 2280923 - RNA, 19 nt, Homo sapiens
  misc_RNA (1)...(19): siRNA sense strand
aagaaaucauccaggcgga

SEQ ID NO: 2280924 - RNA, 19 nt, Homo sapiens
  misc_RNA (1)...(19): siRNA sense strand
acuuauaagaagagagcua

SEQ ID NO: 2280925 - RNA, 19 nt, Homo sapiens
  misc_RNA (1)...(19): siRNA sense strand
aggagaaggaugagaggaa

SEQ ID NO: 2280926 - RNA, 19 nt, Homo sapiens
  misc_RNA (1)...(19): siRNA sense strand
acaagaaggacguggaaga

SEQ ID NO: 2280927 - RNA, 19 nt, Homo sapiens
  misc_RNA (1)...(19): siRNA sense strand
ggaagauccacgugggcua

SEQ ID NO: 2280928 - RNA, 19 nt, Homo sapiens
  misc_RNA (1)...(19): siRNA sense strand
cagaagagaaggagaggga

SEQ ID NO: 2280929 - RNA, 19 nt, Homo sapiens
  misc_RNA (1)...(19): siRNA sense strand
gcccaaggguucaggaaaa

SEQ ID NO: 2280930 - RNA, 19 nt, Homo sapiens
  misc_RNA (1)...(19): siRNA sense strand
cggagagcgaagugcgaaa

SEQ ID NO: 2280931 - RNA, 19 nt, Homo sapiens
  misc_RNA (1)...(19): siRNA sense strand
cggagaagcagaaggcaga

SEQ ID NO: 2280932 - RNA, 19 nt, Homo sapiens
  misc_RNA (1)...(19): siRNA sense strand
gaagagagcuacaggccga

SEQ ID NO: 2280933 - RNA, 19 nt, Homo sapiens
  misc_RNA (1)...(19): siRNA sense strand
aagugaagauggaggagau

SEQ ID NO: 2280934 - RNA, 19 nt, Homo sapiens
  misc_RNA (1)...(19): siRNA sense strand
cugaaggugaagcgagaaa

SEQ ID NO: 2280935 - RNA, 19 nt, Homo sapiens
  misc_RNA (1)...(19): siRNA sense strand
ugaagauagacaagaggaa

SEQ ID NO: 2280936 - RNA, 19 nt, Homo sapiens
  misc_RNA (1)...(19): siRNA sense strand
ccgagaaguucaggagcaa

SEQ ID NO: 2280937 - RNA, 19 nt, Homo sapiens
  misc_RNA (1)...(19): siRNA sense strand
ccaucaaggaggagaagga

SEQ ID NO: 2280938 - RNA, 19 nt, Homo sapiens
  misc_RNA (1)...(19): siRNA sense strand
ccaucaaguacgugcauau

SEQ ID NO: 2280939 - RNA, 19 nt, Homo sapiens
  misc_RNA (1)...(19): siRNA sense strand
agcuggagcaggaggaaua

SEQ ID NO: 2280940 - RNA, 19 nt, Homo sapiens
  misc_RNA (1)...(19): siRNA sense strand
uggcaaggucucugaagaa

SEQ ID NO: 2280941 - RNA, 19 nt, Homo sapiens
  misc_RNA (1)...(19): siRNA sense strand
acgugaagauguaugagaa

SEQ ID NO: 2280942 - RNA, 19 nt, Homo sapiens
  misc_RNA (1)...(19): siRNA sense strand
gcauaaaaccaaggauaaa

SEQ ID NO: 2280943 - RNA, 19 nt, Homo sapiens
  misc_RNA (1)...(19): siRNA sense strand
gaggcaaagggaagaagaa

SEQ ID NO: 2280944 - RNA, 19 nt, Homo sapiens
  misc_RNA (1)...(19): siRNA sense strand
cgcaagagcuucagccaga

SEQ ID NO: 2280945 - RNA, 19 nt, Homo sapiens
  misc_RNA (1)...(19): siRNA sense strand
gaagagaaggagagggaag

SEQ ID NO: 2280946 - RNA, 19 nt, Homo sapiens
  misc_RNA (1)...(19): siRNA sense strand
cugcauaaaaccaaggaua

SEQ ID NO: 2280947 - RNA, 19 nt, Homo sapiens
  misc_RNA (1)...(19): siRNA sense strand
gagaaguucaggagcaaca

SEQ ID NO: 2280948 - RNA, 19 nt, Homo sapiens
  misc_RNA (1)...(19): siRNA sense strand
aggugaaauaucagaucaa

SEQ ID NO: 2280949 - RNA, 19 nt, Homo sapiens
  misc_RNA (1)...(19): siRNA sense strand
ccgaaaaggcugcagguau

SEQ ID NO: 2280950 - RNA, 19 nt, Homo sapiens
  misc_RNA (1)...(19): siRNA sense strand
gagaaaaugaagauagaca

SEQ ID NO: 2280951 - RNA, 19 nt, Homo sapiens
  misc_RNA (1)...(19): siRNA sense strand
ucguagagacggaggcuga

SEQ ID NO: 2280952 - RNA, 19 nt, Homo sapiens
  misc_RNA (1)...(19): siRNA sense strand
aggaucugauggagaacua

SEQ ID NO: 2280953 - RNA, 19 nt, Homo sapiens
  misc_RNA (1)...(19): siRNA sense strand
aggaggagaaggaggacau

SEQ ID NO: 2280954 - RNA, 19 nt, Homo sapiens
  misc_RNA (1)...(19): siRNA sense strand
agggcaaccuccugaagaa

SEQ ID NO: 2280955 - RNA, 19 nt, Homo sapiens
  misc_RNA (1)...(19): siRNA sense strand
ccacgcagauccagcggua

SEQ ID NO: 2280956 - RNA, 19 nt, Homo sapiens
  misc_RNA (1)...(19): siRNA sense strand
accaaaugaucaagagcau

SEQ ID NO: 2280957 - RNA, 19 nt, Homo sapiens
  misc_RNA (1)...(19): siRNA sense strand
cugaaagucacgagaaagu

SEQ ID NO: 2280958 - RNA, 19 nt, Homo sapiens
  misc_RNA (1)...(19): siRNA sense strand
agcuacaggccgagaggaa

SEQ ID NO: 2280959 - RNA, 19 nt, Homo sapiens
  misc_RNA (1)...(19): siRNA sense strand
ggaacuaccagaucgggaa

SEQ ID NO: 2280960 - RNA, 19 nt, Homo sapiens
  misc_RNA (1)...(19): siRNA sense strand
gagaaggaugagaggaacu

SEQ ID NO: 2280961 - RNA, 19 nt, Homo sapiens
  misc_RNA (1)...(19): siRNA sense strand
gagaaaucuugguggaggu

SEQ ID NO: 2280962 - RNA, 19 nt, Homo sapiens
  misc_RNA (1)...(19): siRNA sense strand
gagcguggccagaaggaca

SEQ ID NO: 2280963 - RNA, 19 nt, Homo sapiens
  misc_RNA (1)...(19): siRNA sense strand
auaucuggcucauggacaa

SEQ ID NO: 2280964 - RNA, 19 nt, Homo sapiens
  misc_RNA (1)...(19): siRNA sense strand
agcagaaggcagaagagaa

SEQ ID NO: 2280965 - RNA, 19 nt, Homo sapiens
  misc_RNA (1)...(19): siRNA sense strand
gggaagaagaaccgaaaug

SEQ ID NO: 2280966 - RNA, 19 nt, Homo sapiens
  misc_RNA (1)...(19): siRNA sense strand
aauacaaagugaagaugga

SEQ ID NO: 2280967 - RNA, 19 nt, Homo sapiens
  misc_RNA (1)...(19): siRNA sense strand
caccagaaacagagcauca

SEQ ID NO: 2280968 - RNA, 19 nt, Homo sapiens
  misc_RNA (1)...(19): siRNA sense strand
gcucagaagaagaagcgga

SEQ ID NO: 2280969 - RNA, 19 nt, Homo sapiens
  misc_RNA (1)...(19): siRNA sense strand
ugggcaagcuggagccaca

SEQ ID NO: 2280970 - RNA, 19 nt, Homo sapiens
  misc_RNA (1)...(19): siRNA sense strand
uggagaaaaugaagauaga

SEQ ID NO: 2280971 - RNA, 19 nt, Homo sapiens
  misc_RNA (1)...(19): siRNA sense strand
gcaucgugaucucggguga

SEQ ID NO: 2280972 - RNA, 19 nt, Homo sapiens
  misc_RNA (1)...(19): siRNA sense strand
gcuggaggcuuuuggaaau

SEQ ID NO: 2280973 - RNA, 19 nt, Homo sapiens
  misc_RNA (1)...(19): siRNA sense strand
gaggaagagcgccaagaau

SEQ ID NO: 2280974 - RNA, 19 nt, Homo sapiens
  misc_RNA (1)...(19): siRNA sense strand
ucuucaagcuggagcagga

SEQ ID NO: 2280975 - RNA, 19 nt, Homo sapiens
  misc_RNA (1)...(19): siRNA sense strand
cugaagaaacugagaagac

SEQ ID NO: 2280976 - RNA, 19 nt, Homo sapiens
  misc_RNA (1)...(19): siRNA sense strand
ggcaagacccagagcacca

SEQ ID NO: 2280977 - RNA, 19 nt, Homo sapiens
  misc_RNA (1)...(19): siRNA sense strand
ugaagauguaugagaacca

SEQ ID NO: 2280978 - RNA, 19 nt, Homo sapiens
  misc_RNA (1)...(19): siRNA sense strand
aaggagcagaugaggaaau

SEQ ID NO: 2280979 - RNA, 19 nt, Homo sapiens
  misc_RNA (1)...(19): siRNA sense strand
gggacauccaggaggagga

SEQ ID NO: 2280980 - RNA, 19 nt, Homo sapiens
  misc_RNA (1)...(19): siRNA sense strand
aggaagaggaagaggaaga

SEQ ID NO: 2280981 - RNA, 19 nt, Homo sapiens
  misc_RNA (1)...(19): siRNA sense strand
aggaugaagaagaggaaga

SEQ ID NO: 2280982 - RNA, 19 nt, Homo sapiens
  misc_RNA (1)...(19): siRNA sense strand
aggaagaggaggaggagga

SEQ ID NO: 2280983 - RNA, 19 nt, Homo sapiens
  misc_RNA (1)...(19): siRNA sense strand
aggaagaggaagaggagga

SEQ ID NO: 2280984 - RNA, 19 nt, Homo sapiens
  misc_RNA (1)...(19): siRNA sense strand
aggaagaggaagaggagga

SEQ ID NO: 2280985 - RNA, 19 nt, Homo sapiens
  misc_RNA (1)...(19): siRNA sense strand
aggaagaggaggaggagga

SEQ ID NO: 2280986 - RNA, 19 nt, Homo sapiens
  misc_RNA (1)...(19): siRNA sense strand
aggaagaggaagaggagga

SEQ ID NO: 2280987 - RNA, 19 nt, Homo sapiens
  misc_RNA (1)...(19): siRNA sense strand
aggaagaggaagaggagga

SEQ ID NO: 2280988 - RNA, 19 nt, Homo sapiens
  misc_RNA (1)...(19): siRNA sense strand
aggaagaggaggaggagga

SEQ ID NO: 2280989 - RNA, 19 nt, Homo sapiens
  misc_RNA (1)...(19): siRNA sense strand
cugagaagcgugagaucaa

SEQ ID NO: 2280990 - RNA, 19 nt, Homo sapiens
  misc_RNA (1)...(19): siRNA sense strand
aggaggaggaggaggaaga

SEQ ID NO: 2280991 - RNA, 19 nt, Homo sapiens
  misc_RNA (1)...(19): siRNA sense strand
aggaggaggaagaggaaga

SEQ ID NO: 2280992 - RNA, 19 nt, Homo sapiens
  misc_RNA (1)...(19): siRNA sense strand
aggaggaggaagaggaaga

SEQ ID NO: 2280993 - RNA, 19 nt, Homo sapiens
  misc_RNA (1)...(19): siRNA sense strand
aggaggaggaagaggaaga

SEQ ID NO: 2280994 - RNA, 19 nt, Homo sapiens
  misc_RNA (1)...(19): siRNA sense strand
acaucgaggaggagaacaa

SEQ ID NO: 2280995 - RNA, 19 nt, Homo sapiens
  misc_RNA (1)...(19): siRNA sense strand
aggaggaggaggaggauga

SEQ ID NO: 2280996 - RNA, 19 nt, Homo sapiens
  misc_RNA (1)...(19): siRNA sense strand
ugaagaacaucgaggagga

SEQ ID NO: 2280997 - RNA, 19 nt, Homo sapiens
  misc_RNA (1)...(19): siRNA sense strand
uggaagaggacuugggcca

SEQ ID NO: 2280998 - RNA, 19 nt, Homo sapiens
  misc_RNA (1)...(19): siRNA sense strand
aggaagugucggaagagaa

SEQ ID NO: 2280999 - RNA, 19 nt, Homo sapiens
  misc_RNA (1)...(19): siRNA sense strand
agaacaucgaggaggagaa

SEQ ID NO: 2281000 - RNA, 19 nt, Homo sapiens
  misc_RNA (1)...(19): siRNA sense strand
gcuuagaaaaugaagacaa

SEQ ID NO: 2281001 - RNA, 19 nt, Homo sapiens
  misc_RNA (1)...(19): siRNA sense strand
aggaggaggaugaagaaga

SEQ ID NO: 2281002 - RNA, 19 nt, Homo sapiens
  misc_RNA (1)...(19): siRNA sense strand
uggccaaggagcuggagaa

SEQ ID NO: 2281003 - RNA, 19 nt, Homo sapiens
  misc_RNA (1)...(19): siRNA sense strand
gugaggacacugaggugaa

SEQ ID NO: 2281004 - RNA, 19 nt, Homo sapiens
  misc_RNA (1)...(19): siRNA sense strand
agucggagaugcaggacau

SEQ ID NO: 2281005 - RNA, 19 nt, Homo sapiens
  misc_RNA (1)...(19): siRNA sense strand
ccuggaagucccugaagaa

SEQ ID NO: 2281006 - RNA, 19 nt, Homo sapiens
  misc_RNA (1)...(19): siRNA sense strand
uggagaaugaugaggagau

SEQ ID NO: 2281007 - RNA, 19 nt, Homo sapiens
  misc_RNA (1)...(19): siRNA sense strand
aggaggaggaggaggagga

SEQ ID NO: 2281008 - RNA, 19 nt, Homo sapiens
  misc_RNA (1)...(19): siRNA sense strand
aggaggaggaagaggagga

SEQ ID NO: 2281009 - RNA, 19 nt, Homo sapiens
  misc_RNA (1)...(19): siRNA sense strand
aggaggaagaggaggagga

SEQ ID NO: 2281010 - RNA, 19 nt, Homo sapiens
  misc_RNA (1)...(19): siRNA sense strand
aggaggaggaggaugaaga

SEQ ID NO: 2281011 - RNA, 19 nt, Homo sapiens
  misc_RNA (1)...(19): siRNA sense strand
gcacgaagccacaggaccu

SEQ ID NO: 2281012 - RNA, 19 nt, Homo sapiens
  misc_RNA (1)...(19): siRNA sense strand
cuguggauaucgagguaga

SEQ ID NO: 2281013 - RNA, 19 nt, Homo sapiens
  misc_RNA (1)...(19): siRNA sense strand
cggucacaucagcgggaaa

SEQ ID NO: 2281014 - RNA, 19 nt, Homo sapiens
  misc_RNA (1)...(19): siRNA sense strand
auaucgagguagacgaaaa

SEQ ID NO: 2281015 - RNA, 19 nt, Homo sapiens
  misc_RNA (1)...(19): siRNA sense strand
gggagaugccugagaaccu

SEQ ID NO: 2281016 - RNA, 19 nt, Homo sapiens
  misc_RNA (1)...(19): siRNA sense strand
caggacaggacgagauuca

SEQ ID NO: 2281017 - RNA, 19 nt, Homo sapiens
  misc_RNA (1)...(19): siRNA sense strand
acgaagaggaggacgagga

SEQ ID NO: 2281018 - RNA, 19 nt, Homo sapiens
  misc_RNA (1)...(19): siRNA sense strand
aagaggaggacgaggagga

SEQ ID NO: 2281019 - RNA, 19 nt, Homo sapiens
  misc_RNA (1)...(19): siRNA sense strand
aggacgaggaggaggagga

SEQ ID NO: 2281020 - RNA, 19 nt, Homo sapiens
  misc_RNA (1)...(19): siRNA sense strand
acgaggaggaggaggagga

SEQ ID NO: 2281021 - RNA, 19 nt, Homo sapiens
  misc_RNA (1)...(19): siRNA sense strand
aagaggaggaggaggagga

SEQ ID NO: 2281022 - RNA, 19 nt, Homo sapiens
  misc_RNA (1)...(19): siRNA sense strand
aagaggaagaggaggagga

SEQ ID NO: 2281023 - RNA, 19 nt, Homo sapiens
  misc_RNA (1)...(19): siRNA sense strand
aagaggaagaggaggagga

SEQ ID NO: 2281024 - RNA, 19 nt, Homo sapiens
  misc_RNA (1)...(19): siRNA sense strand
aagaggaagaggaggagga

SEQ ID NO: 2281025 - RNA, 19 nt, Homo sapiens
  misc_RNA (1)...(19): siRNA sense strand
aagaggaagaggaggagga

SEQ ID NO: 2281026 - RNA, 19 nt, Homo sapiens
  misc_RNA (1)...(19): siRNA sense strand
cgugagaucaaguguccaa

SEQ ID NO: 2281027 - RNA, 19 nt, Homo sapiens
  misc_RNA (1)...(19): siRNA sense strand
uugcuggaaagaagggaaa

SEQ ID NO: 2281028 - RNA, 19 nt, Homo sapiens
  misc_RNA (1)...(19): siRNA sense strand
gggaaaacugucaggggau

SEQ ID NO: 2281029 - RNA, 19 nt, Homo sapiens
  misc_RNA (1)...(19): siRNA sense strand
augaagaagaggaagagga

SEQ ID NO: 2281030 - RNA, 19 nt, Homo sapiens
  misc_RNA (1)...(19): siRNA sense strand
cggaugaugacaaggacga

SEQ ID NO: 2281031 - RNA, 19 nt, Homo sapiens
  misc_RNA (1)...(19): siRNA sense strand
aagauucagaccagcgaaa

SEQ ID NO: 2281032 - RNA, 19 nt, Homo sapiens
  misc_RNA (1)...(19): siRNA sense strand
ccaaggacgacaaggagga

SEQ ID NO: 2281033 - RNA, 19 nt, Homo sapiens
  misc_RNA (1)...(19): siRNA sense strand
accaggacccggagaacaa

SEQ ID NO: 2281034 - RNA, 19 nt, Homo sapiens
  misc_RNA (1)...(19): siRNA sense strand
cggaugaaucggaaggaac

SEQ ID NO: 2281035 - RNA, 19 nt, Homo sapiens
  misc_RNA (1)...(19): siRNA sense strand
agaucaagcagcugaacca

SEQ ID NO: 2281036 - RNA, 19 nt, Homo sapiens
  misc_RNA (1)...(19): siRNA sense strand
ccagcaagcagaaaggcau

SEQ ID NO: 2281037 - RNA, 19 nt, Homo sapiens
  misc_RNA (1)...(19): siRNA sense strand
aagcagaugaccaggaagu

SEQ ID NO: 2281038 - RNA, 19 nt, Homo sapiens
  misc_RNA (1)...(19): siRNA sense strand
cugaagagacccuggugga

SEQ ID NO: 2281039 - RNA, 19 nt, Homo sapiens
  misc_RNA (1)...(19): siRNA sense strand
agaggaggaggaagaggaa

SEQ ID NO: 2281040 - RNA, 19 nt, Homo sapiens
  misc_RNA (1)...(19): siRNA sense strand
agaggaggaggaagaggaa

SEQ ID NO: 2281041 - RNA, 19 nt, Homo sapiens
  misc_RNA (1)...(19): siRNA sense strand
ucuccaaggacauaaagaa

SEQ ID NO: 2281042 - RNA, 19 nt, Homo sapiens
  misc_RNA (1)...(19): siRNA sense strand
aggaggacgaggaggagga

SEQ ID NO: 2281043 - RNA, 19 nt, Homo sapiens
  misc_RNA (1)...(19): siRNA sense strand
ucaaauugcugaagagacc

SEQ ID NO: 2281044 - RNA, 19 nt, Homo sapiens
  misc_RNA (1)...(19): siRNA sense strand
aggauaauguaaagagcua

SEQ ID NO: 2281045 - RNA, 19 nt, Homo sapiens
  misc_RNA (1)...(19): siRNA sense strand
ucacaagauuacagaggaa

SEQ ID NO: 2281046 - RNA, 19 nt, Homo sapiens
  misc_RNA (1)...(19): siRNA sense strand
acaaagagucauuggagaa

SEQ ID NO: 2281047 - RNA, 19 nt, Homo sapiens
  misc_RNA (1)...(19): siRNA sense strand
gagcagaaggagcgagcaa

SEQ ID NO: 2281048 - RNA, 19 nt, Homo sapiens
  misc_RNA (1)...(19): siRNA sense strand
uguaagaaacucacagaaa

SEQ ID NO: 2281049 - RNA, 19 nt, Homo sapiens
  misc_RNA (1)...(19): siRNA sense strand
ugacauaacgggagaacau

SEQ ID NO: 2281050 - RNA, 19 nt, Homo sapiens
  misc_RNA (1)...(19): siRNA sense strand
cagaaauggcacaggguga

SEQ ID NO: 2281051 - RNA, 19 nt, Homo sapiens
  misc_RNA (1)...(19): siRNA sense strand
cuggaaaccacaagugaaa

SEQ ID NO: 2281052 - RNA, 19 nt, Homo sapiens
  misc_RNA (1)...(19): siRNA sense strand
ugaaugaaugggagcgaaa

SEQ ID NO: 2281053 - RNA, 19 nt, Homo sapiens
  misc_RNA (1)...(19): siRNA sense strand
uagaagaagaggagcagaa

SEQ ID NO: 2281054 - RNA, 19 nt, Homo sapiens
  misc_RNA (1)...(19): siRNA sense strand
uggaggguguuuagagaaa

SEQ ID NO: 2281055 - RNA, 19 nt, Homo sapiens
  misc_RNA (1)...(19): siRNA sense strand
ggcaaaggaacuagaagaa

SEQ ID NO: 2281056 - RNA, 19 nt, Homo sapiens
  misc_RNA (1)...(19): siRNA sense strand
aggcaaagaaucugaauga

SEQ ID NO: 2281057 - RNA, 19 nt, Homo sapiens
  misc_RNA (1)...(19): siRNA sense strand
cuguggaucuggagggcaa

SEQ ID NO: 2281058 - RNA, 19 nt, Homo sapiens
  misc_RNA (1)...(19): siRNA sense strand
cagaggaaggauacagaaa

SEQ ID NO: 2281059 - RNA, 19 nt, Homo sapiens
  misc_RNA (1)...(19): siRNA sense strand
agaaauggcaggaagguga

SEQ ID NO: 2281060 - RNA, 19 nt, Homo sapiens
  misc_RNA (1)...(19): siRNA sense strand
caacuauagaucaggacua

SEQ ID NO: 2281061 - RNA, 19 nt, Homo sapiens
  misc_RNA (1)...(19): siRNA sense strand
cuccaaucauucagaaaua

SEQ ID NO: 2281062 - RNA, 19 nt, Homo sapiens
  misc_RNA (1)...(19): siRNA sense strand
ugaccagcuccuagagaaa

SEQ ID NO: 2281063 - RNA, 19 nt, Homo sapiens
  misc_RNA (1)...(19): siRNA sense strand
ccaaauuucagcugaguau

SEQ ID NO: 2281064 - RNA, 19 nt, Homo sapiens
  misc_RNA (1)...(19): siRNA sense strand
acauaagggugaagaaucu

SEQ ID NO: 2281065 - RNA, 19 nt, Homo sapiens
  misc_RNA (1)...(19): siRNA sense strand
ugguggauguuuaggaaau

SEQ ID NO: 2281066 - RNA, 19 nt, Homo sapiens
  misc_RNA (1)...(19): siRNA sense strand
agaccauucuagagaucaa

SEQ ID NO: 2281067 - RNA, 19 nt, Homo sapiens
  misc_RNA (1)...(19): siRNA sense strand
gaaauugggaagaaggaga

SEQ ID NO: 2281068 - RNA, 19 nt, Homo sapiens
  misc_RNA (1)...(19): siRNA sense strand
gcugaaauucucaaagcaa

SEQ ID NO: 2281069 - RNA, 19 nt, Homo sapiens
  misc_RNA (1)...(19): siRNA sense strand
gcagaaggagcgagcaaaa

SEQ ID NO: 2281070 - RNA, 19 nt, Homo sapiens
  misc_RNA (1)...(19): siRNA sense strand
auucaaagcuacaagggau

SEQ ID NO: 2281071 - RNA, 19 nt, Homo sapiens
  misc_RNA (1)...(19): siRNA sense strand
uggcaaaggaacuagaaga

SEQ ID NO: 2281072 - RNA, 19 nt, Homo sapiens
  misc_RNA (1)...(19): siRNA sense strand
gggugaagcuggaagugga

SEQ ID NO: 2281073 - RNA, 19 nt, Homo sapiens
  misc_RNA (1)...(19): siRNA sense strand
gggaaucagcugugggagu

SEQ ID NO: 2281074 - RNA, 19 nt, Homo sapiens
  misc_RNA (1)...(19): siRNA sense strand
agcagaggcuuuauagaaa

SEQ ID NO: 2281075 - RNA, 19 nt, Homo sapiens
  misc_RNA (1)...(19): siRNA sense strand
gggagaacauuuugugaau

SEQ ID NO: 2281076 - RNA, 19 nt, Homo sapiens
  misc_RNA (1)...(19): siRNA sense strand
agauuacagaggaaggaua

SEQ ID NO: 2281077 - RNA, 19 nt, Homo sapiens
  misc_RNA (1)...(19): siRNA sense strand
aagaagaggagcagaagga

SEQ ID NO: 2281078 - RNA, 19 nt, Homo sapiens
  misc_RNA (1)...(19): siRNA sense strand
caggcugagaggagguaaa

SEQ ID NO: 2281079 - RNA, 19 nt, Homo sapiens
  misc_RNA (1)...(19): siRNA sense strand
acaaacagggccagggaca

SEQ ID NO: 2281080 - RNA, 19 nt, Homo sapiens
  misc_RNA (1)...(19): siRNA sense strand
gucuagaagucgaugugaa

SEQ ID NO: 2281081 - RNA, 19 nt, Homo sapiens
  misc_RNA (1)...(19): siRNA sense strand
uauuaaaucuugaaggcca

SEQ ID NO: 2281082 - RNA, 19 nt, Homo sapiens
  misc_RNA (1)...(19): siRNA sense strand
cgacauaagggugaagaau

SEQ ID NO: 2281083 - RNA, 19 nt, Homo sapiens
  misc_RNA (1)...(19): siRNA sense strand
gugaagaaucugaagagca

SEQ ID NO: 2281084 - RNA, 19 nt, Homo sapiens
  misc_RNA (1)...(19): siRNA sense strand
ccuuugaaccuaugaauga

SEQ ID NO: 2281085 - RNA, 19 nt, Homo sapiens
  misc_RNA (1)...(19): siRNA sense strand
gaauuuaucgaguggccaa

SEQ ID NO: 2281086 - RNA, 19 nt, Homo sapiens
  misc_RNA (1)...(19): siRNA sense strand
gcaggaaggugaugaccca

SEQ ID NO: 2281087 - RNA, 19 nt, Homo sapiens
  misc_RNA (1)...(19): siRNA sense strand
acuuaaagcaccagccaga

SEQ ID NO: 2281088 - RNA, 19 nt, Homo sapiens
  misc_RNA (1)...(19): siRNA sense strand
ggaaauaagacaucaccca

SEQ ID NO: 2281089 - RNA, 19 nt, Homo sapiens
  misc_RNA (1)...(19): siRNA sense strand
augacagcgugguggaaau

SEQ ID NO: 2281090 - RNA, 19 nt, Homo sapiens
  misc_RNA (1)...(19): siRNA sense strand
aagagucauuggagaauau

SEQ ID NO: 2281091 - RNA, 19 nt, Homo sapiens
  misc_RNA (1)...(19): siRNA sense strand
acacagguauaaaggacau

SEQ ID NO: 2281092 - RNA, 19 nt, Homo sapiens
  misc_RNA (1)...(19): siRNA sense strand
gccgauaccuagagaccau

SEQ ID NO: 2281093 - RNA, 19 nt, Homo sapiens
  misc_RNA (1)...(19): siRNA sense strand
ccauuuaguggauaacaaa

SEQ ID NO: 2281094 - RNA, 19 nt, Homo sapiens
  misc_RNA (1)...(19): siRNA sense strand
uagaagaccacaagagguu

SEQ ID NO: 2281095 - RNA, 19 nt, Homo sapiens
  misc_RNA (1)...(19): siRNA sense strand
aggauaugcuugagauucu

SEQ ID NO: 2281096 - RNA, 19 nt, Homo sapiens
  misc_RNA (1)...(19): siRNA sense strand
ucauguguguggaggguga

SEQ ID NO: 2281097 - RNA, 19 nt, Homo sapiens
  misc_RNA (1)...(19): siRNA sense strand
agacgguccuccugaagaa

SEQ ID NO: 2281098 - RNA, 19 nt, Homo sapiens
  misc_RNA (1)...(19): siRNA sense strand
ucuagaagucgaugugaau

SEQ ID NO: 2281099 - RNA, 19 nt, Homo sapiens
  misc_RNA (1)...(19): siRNA sense strand
ucuugaagucucagggaca

SEQ ID NO: 2281100 - RNA, 19 nt, Homo sapiens
  misc_RNA (1)...(19): siRNA sense strand
aggaaauuacccaguauau

SEQ ID NO: 2281101 - RNA, 19 nt, Homo sapiens
  misc_RNA (1)...(19): siRNA sense strand
ggguugaugaagaugaaga

SEQ ID NO: 2281102 - RNA, 19 nt, Homo sapiens
  misc_RNA (1)...(19): siRNA sense strand
ccguacagcucauggauac

SEQ ID NO: 2281103 - RNA, 19 nt, Homo sapiens
  misc_RNA (1)...(19): siRNA sense strand
cuuaaggaacaaagcgaca

SEQ ID NO: 2281104 - RNA, 19 nt, Homo sapiens
  misc_RNA (1)...(19): siRNA sense strand
cuucaaaacacaucagcaa

SEQ ID NO: 2281105 - RNA, 19 nt, Homo sapiens
  misc_RNA (1)...(19): siRNA sense strand
ucagcaaaccugugcaaga

SEQ ID NO: 2281106 - RNA, 19 nt, Homo sapiens
  misc_RNA (1)...(19): siRNA sense strand
uagaagucgaugugaauga

SEQ ID NO: 2281107 - RNA, 19 nt, Homo sapiens
  misc_RNA (1)...(19): siRNA sense strand
caguauauucaaagcuaca

SEQ ID NO: 2281108 - RNA, 19 nt, Homo sapiens
  misc_RNA (1)...(19): siRNA sense strand
gguccuauagugccagaaa

SEQ ID NO: 2281109 - RNA, 19 nt, Homo sapiens
  misc_RNA (1)...(19): siRNA sense strand
caaagaaucugaaugagca

SEQ ID NO: 2281110 - RNA, 19 nt, Homo sapiens
  misc_RNA (1)...(19): siRNA sense strand
agaccuuaguacuggcuau

SEQ ID NO: 2281111 - RNA, 19 nt, Homo sapiens
  misc_RNA (1)...(19): siRNA sense strand
agguaaaggcagaugauaa

SEQ ID NO: 2281112 - RNA, 19 nt, Homo sapiens
  misc_RNA (1)...(19): siRNA sense strand
aguuagaaaucgugugcaa

SEQ ID NO: 2281113 - RNA, 19 nt, Homo sapiens
  misc_RNA (1)...(19): siRNA sense strand
aagaaauuccugagguaaa

SEQ ID NO: 2281114 - RNA, 19 nt, Homo sapiens
  misc_RNA (1)...(19): siRNA sense strand
ccuuagagggugaggaaga

SEQ ID NO: 2281115 - RNA, 19 nt, Homo sapiens
  misc_RNA (1)...(19): siRNA sense strand
gugcaagcgcuuagaaaca

SEQ ID NO: 2281116 - RNA, 19 nt, Homo sapiens
  misc_RNA (1)...(19): siRNA sense strand
aggugaaagcugaagagaa

SEQ ID NO: 2281117 - RNA, 19 nt, Homo sapiens
  misc_RNA (1)...(19): siRNA sense strand
aagaaauuccugaggugaa

SEQ ID NO: 2281118 - RNA, 19 nt, Homo sapiens
  misc_RNA (1)...(19): siRNA sense strand
gggaaauugaagauugcaa

SEQ ID NO: 2281119 - RNA, 19 nt, Homo sapiens
  misc_RNA (1)...(19): siRNA sense strand
gagaagacccuaaaggcau

SEQ ID NO: 2281120 - RNA, 19 nt, Homo sapiens
  misc_RNA (1)...(19): siRNA sense strand
gcaacagaggcuaaggcaa

SEQ ID NO: 2281121 - RNA, 19 nt, Homo sapiens
  misc_RNA (1)...(19): siRNA sense strand
gaggaaaggcuucaggaca

SEQ ID NO: 2281122 - RNA, 19 nt, Homo sapiens
  misc_RNA (1)...(19): siRNA sense strand
auucagaggaugaggaguu

SEQ ID NO: 2281123 - RNA, 19 nt, Homo sapiens
  misc_RNA (1)...(19): siRNA sense strand
aggugaaggaugaagaaaa

SEQ ID NO: 2281124 - RNA, 19 nt, Homo sapiens
  misc_RNA (1)...(19): siRNA sense strand
cuuuaguccuccugagauu

SEQ ID NO: 2281125 - RNA, 19 nt, Homo sapiens
  misc_RNA (1)...(19): siRNA sense strand
aagaaaacccagaggugaa

SEQ ID NO: 2281126 - RNA, 19 nt, Homo sapiens
  misc_RNA (1)...(19): siRNA sense strand
aguaagagagacucauaaa

SEQ ID NO: 2281127 - RNA, 19 nt, Homo sapiens
  misc_RNA (1)...(19): siRNA sense strand
augauaaagaacagccuaa

SEQ ID NO: 2281128 - RNA, 19 nt, Homo sapiens
  misc_RNA (1)...(19): siRNA sense strand
caacagaggcuaaggcaag

SEQ ID NO: 2281129 - RNA, 19 nt, Homo sapiens
  misc_RNA (1)...(19): siRNA sense strand
aagaagaaugugaauggaa

SEQ ID NO: 2281130 - RNA, 19 nt, Homo sapiens
  misc_RNA (1)...(19): siRNA sense strand
aggcaaaaccagaucacaa

SEQ ID NO: 2281131 - RNA, 19 nt, Homo sapiens
  misc_RNA (1)...(19): siRNA sense strand
gcuuagaaacauucaagau

SEQ ID NO: 2281132 - RNA, 19 nt, Homo sapiens
  misc_RNA (1)...(19): siRNA sense strand
agaacagccuaaagcaaca

SEQ ID NO: 2281133 - RNA, 19 nt, Homo sapiens
  misc_RNA (1)...(19): siRNA sense strand
aggcagaugauaaagaaca

SEQ ID NO: 2281134 - RNA, 19 nt, Homo sapiens
  misc_RNA (1)...(19): siRNA sense strand
aggaaaggcuucaggacag

SEQ ID NO: 2281135 - RNA, 19 nt, Homo sapiens
  misc_RNA (1)...(19): siRNA sense strand
aggugcuggugaagacaua

SEQ ID NO: 2281136 - RNA, 19 nt, Homo sapiens
  misc_RNA (1)...(19): siRNA sense strand
ugauaaugucauccugaaa

SEQ ID NO: 2281137 - RNA, 19 nt, Homo sapiens
  misc_RNA (1)...(19): siRNA sense strand
uuggcaaacauuauggaaa

SEQ ID NO: 2281138 - RNA, 19 nt, Homo sapiens
  misc_RNA (1)...(19): siRNA sense strand
uauagaaagaagaggguac

SEQ ID NO: 2281139 - RNA, 19 nt, Homo sapiens
  misc_RNA (1)...(19): siRNA sense strand
gggaagaaucugacagcag

SEQ ID NO: 2281140 - RNA, 19 nt, Homo sapiens
  misc_RNA (1)...(19): siRNA sense strand
gagaagaggaaaagauguu

SEQ ID NO: 2281141 - RNA, 19 nt, Homo sapiens
  misc_RNA (1)...(19): siRNA sense strand
uggaugaggacuuugaaau

SEQ ID NO: 2281142 - RNA, 19 nt, Homo sapiens
  misc_RNA (1)...(19): siRNA sense strand
caguaagagagacucauaa

SEQ ID NO: 2281143 - RNA, 19 nt, Homo sapiens
  misc_RNA (1)...(19): siRNA sense strand
agggaaagccuaaaagaga

SEQ ID NO: 2281144 - RNA, 19 nt, Homo sapiens
  misc_RNA (1)...(19): siRNA sense strand
gggaugggaaauugaagau

SEQ ID NO: 2281145 - RNA, 19 nt, Homo sapiens
  misc_RNA (1)...(19): siRNA sense strand
aggacaguguagaucuuaa

SEQ ID NO: 2281146 - RNA, 19 nt, Homo sapiens
  misc_RNA (1)...(19): siRNA sense strand
gugugcaagcgcuuagaaa

SEQ ID NO: 2281147 - RNA, 19 nt, Homo sapiens
  misc_RNA (1)...(19): siRNA sense strand
ccuacuaucaauuuggcaa

SEQ ID NO: 2281148 - RNA, 19 nt, Homo sapiens
  misc_RNA (1)...(19): siRNA sense strand
agggugaggaagaagaaaa

SEQ ID NO: 2281149 - RNA, 19 nt, Homo sapiens
  misc_RNA (1)...(19): siRNA sense strand
cuaaaagagaagacccuaa

SEQ ID NO: 2281150 - RNA, 19 nt, Homo sapiens
  misc_RNA (1)...(19): siRNA sense strand
acagaagaagaaugugaau

SEQ ID NO: 2281151 - RNA, 19 nt, Homo sapiens
  misc_RNA (1)...(19): siRNA sense strand
gugaugaggaggugcagga

SEQ ID NO: 2281152 - RNA, 19 nt, Homo sapiens
  misc_RNA (1)...(19): siRNA sense strand
agagaagacccuaaaggca

SEQ ID NO: 2281153 - RNA, 19 nt, Homo sapiens
  misc_RNA (1)...(19): siRNA sense strand
ccgaagaggagauggcuag

SEQ ID NO: 2281154 - RNA, 19 nt, Homo sapiens
  misc_RNA (1)...(19): siRNA sense strand
gaaagaagaggguaccuga

SEQ ID NO: 2281155 - RNA, 19 nt, Homo sapiens
  misc_RNA (1)...(19): siRNA sense strand
aauggaauucagaggauga

SEQ ID NO: 2281156 - RNA, 19 nt, Homo sapiens
  misc_RNA (1)...(19): siRNA sense strand
agaaaugaggugcugguga

SEQ ID NO: 2281157 - RNA, 19 nt, Homo sapiens
  misc_RNA (1)...(19): siRNA sense strand
ucaaaucaucaaugcagaa

SEQ ID NO: 2281158 - RNA, 19 nt, Homo sapiens
  misc_RNA (1)...(19): siRNA sense strand
cuuagagggugaggaagaa

SEQ ID NO: 2281159 - RNA, 19 nt, Homo sapiens
  misc_RNA (1)...(19): siRNA sense strand
aagcugaagagaaggaagu

SEQ ID NO: 2281160 - RNA, 19 nt, Homo sapiens
  misc_RNA (1)...(19): siRNA sense strand
gccgaagaggagauggcua

SEQ ID NO: 2281161 - RNA, 19 nt, Homo sapiens
  misc_RNA (1)...(19): siRNA sense strand
cugcaguaagagagacuca

SEQ ID NO: 2281162 - RNA, 19 nt, Homo sapiens
  misc_RNA (1)...(19): siRNA sense strand
agaaguaugaugagcccau

SEQ ID NO: 2281163 - RNA, 19 nt, Homo sapiens
  misc_RNA (1)...(19): siRNA sense strand
gcuacuggagaaauugaaa

SEQ ID NO: 2281164 - RNA, 19 nt, Homo sapiens
  misc_RNA (1)...(19): siRNA sense strand
agucaaugguaccuacuau

SEQ ID NO: 2281165 - RNA, 19 nt, Homo sapiens
  misc_RNA (1)...(19): siRNA sense strand
augaaugugacaagguaga

SEQ ID NO: 2281166 - RNA, 19 nt, Homo sapiens
  misc_RNA (1)...(19): siRNA sense strand
agaagaaaacccuaaagaa

SEQ ID NO: 2281167 - RNA, 19 nt, Homo sapiens
  misc_RNA (1)...(19): siRNA sense strand
acccagaggugaaagcuga

SEQ ID NO: 2281168 - RNA, 19 nt, Homo sapiens
  misc_RNA (1)...(19): siRNA sense strand
ggugaaggaugaagaaaag

SEQ ID NO: 2281169 - RNA, 19 nt, Homo sapiens
  misc_RNA (1)...(19): siRNA sense strand
gugcuggugaagacauaua

SEQ ID NO: 2281170 - RNA, 19 nt, Homo sapiens
  misc_RNA (1)...(19): siRNA sense strand
gggaaaagaaagaggcaga

SEQ ID NO: 2281171 - RNA, 19 nt, Homo sapiens
  misc_RNA (1)...(19): siRNA sense strand
gcgagaugguacagguuau

SEQ ID NO: 2281172 - RNA, 19 nt, Homo sapiens
  misc_RNA (1)...(19): siRNA sense strand
gcauagugcaugagcucaa

SEQ ID NO: 2281173 - RNA, 19 nt, Homo sapiens
  misc_RNA (1)...(19): siRNA sense strand
agaaggauauagaggccaa

SEQ ID NO: 2281174 - RNA, 19 nt, Homo sapiens
  misc_RNA (1)...(19): siRNA sense strand
uggaagaagcaaagaagau

SEQ ID NO: 2281175 - RNA, 19 nt, Homo sapiens
  misc_RNA (1)...(19): siRNA sense strand
caugaugauccgaggagaa

SEQ ID NO: 2281176 - RNA, 19 nt, Homo sapiens
  misc_RNA (1)...(19): siRNA sense strand
gagaaaagaaccuggaaga

SEQ ID NO: 2281177 - RNA, 19 nt, Homo sapiens
  misc_RNA (1)...(19): siRNA sense strand
uuugaugacaguagggaaa

SEQ ID NO: 2281178 - RNA, 19 nt, Homo sapiens
  misc_RNA (1)...(19): siRNA sense strand
cuaugaauuuggagaagau

SEQ ID NO: 2281179 - RNA, 19 nt, Homo sapiens
  misc_RNA (1)...(19): siRNA sense strand
aagagugaaucccgggaaa

SEQ ID NO: 2281180 - RNA, 19 nt, Homo sapiens
  misc_RNA (1)...(19): siRNA sense strand
gcgcaggcaaggaaagaau

SEQ ID NO: 2281181 - RNA, 19 nt, Homo sapiens
  misc_RNA (1)...(19): siRNA sense strand
agaaauacuggcagguuau

SEQ ID NO: 2281182 - RNA, 19 nt, Homo sapiens
  misc_RNA (1)...(19): siRNA sense strand
aggcaaggaaagaauuuaa

SEQ ID NO: 2281183 - RNA, 19 nt, Homo sapiens
  misc_RNA (1)...(19): siRNA sense strand
ggagauggaaccaaggaga

SEQ ID NO: 2281184 - RNA, 19 nt, Homo sapiens
  misc_RNA (1)...(19): siRNA sense strand
agauggaaccaaggagaaa

SEQ ID NO: 2281185 - RNA, 19 nt, Homo sapiens
  misc_RNA (1)...(19): siRNA sense strand
gugaugugguagaucgaau

SEQ ID NO: 2281186 - RNA, 19 nt, Homo sapiens
  misc_RNA (1)...(19): siRNA sense strand
uuauaaaagggaagggauu

SEQ ID NO: 2281187 - RNA, 19 nt, Homo sapiens
  misc_RNA (1)...(19): siRNA sense strand
gaggauauggcuugggcuu

SEQ ID NO: 2281188 - RNA, 19 nt, Homo sapiens
  misc_RNA (1)...(19): siRNA sense strand
gaguaaagguguuuggcug

SEQ ID NO: 2281189 - RNA, 19 nt, Homo sapiens
  misc_RNA (1)...(19): siRNA sense strand
aaagaaagaagauggaacu

SEQ ID NO: 2281190 - RNA, 19 nt, Homo sapiens
  misc_RNA (1)...(19): siRNA sense strand
agauaguuuacgaagagaa

SEQ ID NO: 2281191 - RNA, 19 nt, Homo sapiens
  misc_RNA (1)...(19): siRNA sense strand
agugcaaacacaaguagaa

SEQ ID NO: 2281192 - RNA, 19 nt, Homo sapiens
  misc_RNA (1)...(19): siRNA sense strand
caguguauggaaugcuaaa

SEQ ID NO: 2281193 - RNA, 19 nt, Homo sapiens
  misc_RNA (1)...(19): siRNA sense strand
aaaucacaguugaagaaca

SEQ ID NO: 2281194 - RNA, 19 nt, Homo sapiens
  misc_RNA (1)...(19): siRNA sense strand
aagaaagaggcagaagaua

SEQ ID NO: 2281195 - RNA, 19 nt, Homo sapiens
  misc_RNA (1)...(19): siRNA sense strand
gaaaaugagagguggaaug

SEQ ID NO: 2281196 - RNA, 19 nt, Homo sapiens
  misc_RNA (1)...(19): siRNA sense strand
uaaagaaagaagauggaac

SEQ ID NO: 2281197 - RNA, 19 nt, Homo sapiens
  misc_RNA (1)...(19): siRNA sense strand
aauacuggcagguuauaaa

SEQ ID NO: 2281198 - RNA, 19 nt, Homo sapiens
  misc_RNA (1)...(19): siRNA sense strand
uguaaagaaagaagaugga

SEQ ID NO: 2281199 - RNA, 19 nt, Homo sapiens
  misc_RNA (1)...(19): siRNA sense strand
cagaagcuccugagagacu

SEQ ID NO: 2281200 - RNA, 19 nt, Homo sapiens
  misc_RNA (1)...(19): siRNA sense strand
gcuugggcuuggaacgauu

SEQ ID NO: 2281201 - RNA, 19 nt, Homo sapiens
  misc_RNA (1)...(19): siRNA sense strand
ucuaaaucacaguugaaga

SEQ ID NO: 2281202 - RNA, 19 nt, Homo sapiens
  misc_RNA (1)...(19): siRNA sense strand
ggccaaagaguaaaggugu

SEQ ID NO: 2281203 - RNA, 19 nt, Homo sapiens
  misc_RNA (1)...(19): siRNA sense strand
guguugcaguguauggaau

SEQ ID NO: 2281204 - RNA, 19 nt, Homo sapiens
  misc_RNA (1)...(19): siRNA sense strand
ugaugugguagaucgaaua

SEQ ID NO: 2281205 - RNA, 19 nt, Homo sapiens
  misc_RNA (1)...(19): siRNA sense strand
cuuugaugacaguagggaa

SEQ ID NO: 2281206 - RNA, 19 nt, Homo sapiens
  misc_RNA (1)...(19): siRNA sense strand
cacuggagucugauggaaa

SEQ ID NO: 2281207 - RNA, 19 nt, Homo sapiens
  misc_RNA (1)...(19): siRNA sense strand
acuaugugucaaaggguuu

SEQ ID NO: 2281208 - RNA, 19 nt, Homo sapiens
  misc_RNA (1)...(19): siRNA sense strand
gcguacauccacagguuca

SEQ ID NO: 2281209 - RNA, 19 nt, Homo sapiens
  misc_RNA (1)...(19): siRNA sense strand
ggacauggucagugagaaa

SEQ ID NO: 2281210 - RNA, 19 nt, Homo sapiens
  misc_RNA (1)...(19): siRNA sense strand
gggaauacaagaagggaua

SEQ ID NO: 2281211 - RNA, 19 nt, Homo sapiens
  misc_RNA (1)...(19): siRNA sense strand
cgaagaagacagaggcaaa

SEQ ID NO: 2281212 - RNA, 19 nt, Homo sapiens
  misc_RNA (1)...(19): siRNA sense strand
gggaagaagcuuugaagaa

SEQ ID NO: 2281213 - RNA, 19 nt, Homo sapiens
  misc_RNA (1)...(19): siRNA sense strand
caggaaagaucuagaggaa

SEQ ID NO: 2281214 - RNA, 19 nt, Homo sapiens
  misc_RNA (1)...(19): siRNA sense strand
gggaagacaccaaggauaa

SEQ ID NO: 2281215 - RNA, 19 nt, Homo sapiens
  misc_RNA (1)...(19): siRNA sense strand
ccacagaauuacagaguau

SEQ ID NO: 2281216 - RNA, 19 nt, Homo sapiens
  misc_RNA (1)...(19): siRNA sense strand
agacaaaggcaaagaguau

SEQ ID NO: 2281217 - RNA, 19 nt, Homo sapiens
  misc_RNA (1)...(19): siRNA sense strand
gaagaaagucagugagauu

SEQ ID NO: 2281218 - RNA, 19 nt, Homo sapiens
  misc_RNA (1)...(19): siRNA sense strand
acaaagagaacaugagaaa

SEQ ID NO: 2281219 - RNA, 19 nt, Homo sapiens
  misc_RNA (1)...(19): siRNA sense strand
ugaacaagccaaagggaaa

SEQ ID NO: 2281220 - RNA, 19 nt, Homo sapiens
  misc_RNA (1)...(19): siRNA sense strand
ccaaauaaauacaaggaga

SEQ ID NO: 2281221 - RNA, 19 nt, Homo sapiens
  misc_RNA (1)...(19): siRNA sense strand
ugaaaaggcuaaagggaaa

SEQ ID NO: 2281222 - RNA, 19 nt, Homo sapiens
  misc_RNA (1)...(19): siRNA sense strand
aaagaaagcaggagagauu

SEQ ID NO: 2281223 - RNA, 19 nt, Homo sapiens
  misc_RNA (1)...(19): siRNA sense strand
gcacagugucagaggcaaa

SEQ ID NO: 2281224 - RNA, 19 nt, Homo sapiens
  misc_RNA (1)...(19): siRNA sense strand
caagaagggauaugagaaa

SEQ ID NO: 2281225 - RNA, 19 nt, Homo sapiens
  misc_RNA (1)...(19): siRNA sense strand
ggaauaaagauaagaccaa

SEQ ID NO: 2281226 - RNA, 19 nt, Homo sapiens
  misc_RNA (1)...(19): siRNA sense strand
augaggagcugaagagaaa

SEQ ID NO: 2281227 - RNA, 19 nt, Homo sapiens
  misc_RNA (1)...(19): siRNA sense strand
acacagaagaagugguuua

SEQ ID NO: 2281228 - RNA, 19 nt, Homo sapiens
  misc_RNA (1)...(19): siRNA sense strand
gcugaaauacugagugaua

SEQ ID NO: 2281229 - RNA, 19 nt, Homo sapiens
  misc_RNA (1)...(19): siRNA sense strand
aggcaaagaguaugaauua

SEQ ID NO: 2281230 - RNA, 19 nt, Homo sapiens
  misc_RNA (1)...(19): siRNA sense strand
guacaaagcuggcugggaa

SEQ ID NO: 2281231 - RNA, 19 nt, Homo sapiens
  misc_RNA (1)...(19): siRNA sense strand
gaaacaaauacaaggcaaa

SEQ ID NO: 2281232 - RNA, 19 nt, Homo sapiens
  misc_RNA (1)...(19): siRNA sense strand
ggaaacaaauacaaggcaa

SEQ ID NO: 2281233 - RNA, 19 nt, Homo sapiens
  misc_RNA (1)...(19): siRNA sense strand
gcaaauauaaggaggccua

SEQ ID NO: 2281234 - RNA, 19 nt, Homo sapiens
  misc_RNA (1)...(19): siRNA sense strand
ucaugaagacuuugagaaa

SEQ ID NO: 2281235 - RNA, 19 nt, Homo sapiens
  misc_RNA (1)...(19): siRNA sense strand
gccuauaaucugagugaua

SEQ ID NO: 2281236 - RNA, 19 nt, Homo sapiens
  misc_RNA (1)...(19): siRNA sense strand
auacaaggcuaaaggagaa

SEQ ID NO: 2281237 - RNA, 19 nt, Homo sapiens
  misc_RNA (1)...(19): siRNA sense strand
gcuaaagcuucaagagaca

SEQ ID NO: 2281238 - RNA, 19 nt, Homo sapiens
  misc_RNA (1)...(19): siRNA sense strand
agacauugcuagugauuau

SEQ ID NO: 2281239 - RNA, 19 nt, Homo sapiens
  misc_RNA (1)...(19): siRNA sense strand
ggacaucuucagugagaaa

SEQ ID NO: 2281240 - RNA, 19 nt, Homo sapiens
  misc_RNA (1)...(19): siRNA sense strand
cuacaauaucagugagaau

SEQ ID NO: 2281241 - RNA, 19 nt, Homo sapiens
  misc_RNA (1)...(19): siRNA sense strand
caagguagagggagagaaa

SEQ ID NO: 2281242 - RNA, 19 nt, Homo sapiens
  misc_RNA (1)...(19): siRNA sense strand
ccgaaacaccagaguauaa

SEQ ID NO: 2281243 - RNA, 19 nt, Homo sapiens
  misc_RNA (1)...(19): siRNA sense strand
ggagaaauccugagugaca

SEQ ID NO: 2281244 - RNA, 19 nt, Homo sapiens
  misc_RNA (1)...(19): siRNA sense strand
ggagaagagcaaagccaaa

SEQ ID NO: 2281245 - RNA, 19 nt, Homo sapiens
  misc_RNA (1)...(19): siRNA sense strand
gcuaagaaaucucaggcaa

SEQ ID NO: 2281246 - RNA, 19 nt, Homo sapiens
  misc_RNA (1)...(19): siRNA sense strand
cagccaaggcaucgagaaa

SEQ ID NO: 2281247 - RNA, 19 nt, Homo sapiens
  misc_RNA (1)...(19): siRNA sense strand
cuauaaacuuggaugggaa

SEQ ID NO: 2281248 - RNA, 19 nt, Homo sapiens
  misc_RNA (1)...(19): siRNA sense strand
uagaagaagccaagaggaa

SEQ ID NO: 2281249 - RNA, 19 nt, Homo sapiens
  misc_RNA (1)...(19): siRNA sense strand
ccgcaagguuaaagaugaa

SEQ ID NO: 2281250 - RNA, 19 nt, Homo sapiens
  misc_RNA (1)...(19): siRNA sense strand
agggaaagcauguggguuu

SEQ ID NO: 2281251 - RNA, 19 nt, Homo sapiens
  misc_RNA (1)...(19): siRNA sense strand
uggaagaagccaagaaaga

SEQ ID NO: 2281252 - RNA, 19 nt, Homo sapiens
  misc_RNA (1)...(19): siRNA sense strand
cuguagaggucgagaaagu

SEQ ID NO: 2281253 - RNA, 19 nt, Homo sapiens
  misc_RNA (1)...(19): siRNA sense strand
cauuaaugccagugaggua

SEQ ID NO: 2281254 - RNA, 19 nt, Homo sapiens
  misc_RNA (1)...(19): siRNA sense strand
agaaguaugagaagaguaa

SEQ ID NO: 2281255 - RNA, 19 nt, Homo sapiens
  misc_RNA (1)...(19): siRNA sense strand
gcugauaacauuagcacaa

SEQ ID NO: 2281256 - RNA, 19 nt, Homo sapiens
  misc_RNA (1)...(19): siRNA sense strand
augagaagucaaagggaaa

SEQ ID NO: 2281257 - RNA, 19 nt, Homo sapiens
  misc_RNA (1)...(19): siRNA sense strand
acaaagaagcauaucguaa

SEQ ID NO: 2281258 - RNA, 19 nt, Homo sapiens
  misc_RNA (1)...(19): siRNA sense strand
ggagaauuacuuagugaua

SEQ ID NO: 2281259 - RNA, 19 nt, Homo sapiens
  misc_RNA (1)...(19): siRNA sense strand
ggacaaagucagauuucaa

SEQ ID NO: 2281260 - RNA, 19 nt, Homo sapiens
  misc_RNA (1)...(19): siRNA sense strand
ugaaaaggaacgaggaaaa

SEQ ID NO: 2281261 - RNA, 19 nt, Homo sapiens
  misc_RNA (1)...(19): siRNA sense strand
ugaaaagagcaaagggaaa

SEQ ID NO: 2281262 - RNA, 19 nt, Homo sapiens
  misc_RNA (1)...(19): siRNA sense strand
gugaauacaagaagaacua

SEQ ID NO: 2281263 - RNA, 19 nt, Homo sapiens
  misc_RNA (1)...(19): siRNA sense strand
cuaaagacgugaaggacau

SEQ ID NO: 2281264 - RNA, 19 nt, Homo sapiens
  misc_RNA (1)...(19): siRNA sense strand
gcuuaaauacaaagagaca

SEQ ID NO: 2281265 - RNA, 19 nt, Homo sapiens
  misc_RNA (1)...(19): siRNA sense strand
gggaaagaauauaggaaag

SEQ ID NO: 2281266 - RNA, 19 nt, Homo sapiens
  misc_RNA (1)...(19): siRNA sense strand
caguuaugguccaggcaaa

SEQ ID NO: 2281267 - RNA, 19 nt, Homo sapiens
  misc_RNA (1)...(19): siRNA sense strand
gggaagaggaaaagaagaa

SEQ ID NO: 2281268 - RNA, 19 nt, Homo sapiens
  misc_RNA (1)...(19): siRNA sense strand
gcaaaagccucccgggaaa

SEQ ID NO: 2281269 - RNA, 19 nt, Homo sapiens
  misc_RNA (1)...(19): siRNA sense strand
gccaaggcuucaagagaua

SEQ ID NO: 2281270 - RNA, 19 nt, Homo sapiens
  misc_RNA (1)...(19): siRNA sense strand
acuccaaagacaugggaaa

SEQ ID NO: 2281271 - RNA, 19 nt, Homo sapiens
  misc_RNA (1)...(19): siRNA sense strand
cugacaagcuccagaauga

SEQ ID NO: 2281272 - RNA, 19 nt, Homo sapiens
  misc_RNA (1)...(19): siRNA sense strand
augaagacuuugagaaaca

SEQ ID NO: 2281273 - RNA, 19 nt, Homo sapiens
  misc_RNA (1)...(19): siRNA sense strand
cggaaauuguccuagcaaa

SEQ ID NO: 2281274 - RNA, 19 nt, Homo sapiens
  misc_RNA (1)...(19): siRNA sense strand
gcaccaaggccuauggcua

SEQ ID NO: 2281275 - RNA, 19 nt, Homo sapiens
  misc_RNA (1)...(19): siRNA sense strand
ucaaaagaccaaagggaaa

SEQ ID NO: 2281276 - RNA, 19 nt, Homo sapiens
  misc_RNA (1)...(19): siRNA sense strand
gguuaaauaccgagaaaau

SEQ ID NO: 2281277 - RNA, 19 nt, Homo sapiens
  misc_RNA (1)...(19): siRNA sense strand
uaaaauagcaagcgagaaa

SEQ ID NO: 2281278 - RNA, 19 nt, Homo sapiens
  misc_RNA (1)...(19): siRNA sense strand
gcacaaagucaaugccuau

SEQ ID NO: 2281279 - RNA, 19 nt, Homo sapiens
  misc_RNA (1)...(19): siRNA sense strand
ccugagaacugaugcgauu

SEQ ID NO: 2281280 - RNA, 19 nt, Homo sapiens
  misc_RNA (1)...(19): siRNA sense strand
gcacuuaacaagaguaaca

SEQ ID NO: 2281281 - RNA, 19 nt, Homo sapiens
  misc_RNA (1)...(19): siRNA sense strand
gccaaggcuuccagagaua

SEQ ID NO: 2281282 - RNA, 19 nt, Homo sapiens
  misc_RNA (1)...(19): siRNA sense strand
gugauaaacucuaccgaau

SEQ ID NO: 2281283 - RNA, 19 nt, Homo sapiens
  misc_RNA (1)...(19): siRNA sense strand
gggagaugcgagacaaaua

SEQ ID NO: 2281284 - RNA, 19 nt, Homo sapiens
  misc_RNA (1)...(19): siRNA sense strand
ggcagaagcuucagaguca

SEQ ID NO: 2281285 - RNA, 19 nt, Homo sapiens
  misc_RNA (1)...(19): siRNA sense strand
gcagaugcagagugggaaa

SEQ ID NO: 2281286 - RNA, 19 nt, Homo sapiens
  misc_RNA (1)...(19): siRNA sense strand
ugauauuggcagaaagaau

SEQ ID NO: 2281287 - RNA, 19 nt, Homo sapiens
  misc_RNA (1)...(19): siRNA sense strand
agaugagaguguuaguaaa

SEQ ID NO: 2281288 - RNA, 19 nt, Homo sapiens
  misc_RNA (1)...(19): siRNA sense strand
acaaauguuuauugggaca

SEQ ID NO: 2281289 - RNA, 19 nt, Homo sapiens
  misc_RNA (1)...(19): siRNA sense strand
agguagaagggaagauaau

SEQ ID NO: 2281290 - RNA, 19 nt, Homo sapiens
  misc_RNA (1)...(19): siRNA sense strand
cugcagaucuugagccaga

SEQ ID NO: 2281291 - RNA, 19 nt, Homo sapiens
  misc_RNA (1)...(19): siRNA sense strand
uugugaagcuccugggcua

SEQ ID NO: 2281292 - RNA, 19 nt, Homo sapiens
  misc_RNA (1)...(19): siRNA sense strand
cugcaagccaagagauaau

SEQ ID NO: 2281293 - RNA, 19 nt, Homo sapiens
  misc_RNA (1)...(19): siRNA sense strand
gcucagacccagaggccuu

SEQ ID NO: 2281294 - RNA, 19 nt, Homo sapiens
  misc_RNA (1)...(19): siRNA sense strand
agugggagguagaagggaa

SEQ ID NO: 2281295 - RNA, 19 nt, Homo sapiens
  misc_RNA (1)...(19): siRNA sense strand
gcauuaaaccugaaccaga

SEQ ID NO: 2281296 - RNA, 19 nt, Homo sapiens
  misc_RNA (1)...(19): siRNA sense strand
gaaugaagcugcagcccga

SEQ ID NO: 2281297 - RNA, 19 nt, Homo sapiens
  misc_RNA (1)...(19): siRNA sense strand
gggaagugugacagaagau

SEQ ID NO: 2281298 - RNA, 19 nt, Homo sapiens
  misc_RNA (1)...(19): siRNA sense strand
guagaagggaagauaauca

SEQ ID NO: 2281299 - RNA, 19 nt, Homo sapiens
  misc_RNA (1)...(19): siRNA sense strand
ggaagauaaucagggaaaa

SEQ ID NO: 2281300 - RNA, 19 nt, Homo sapiens
  misc_RNA (1)...(19): siRNA sense strand
uguagagaugagaguguua

SEQ ID NO: 2281301 - RNA, 19 nt, Homo sapiens
  misc_RNA (1)...(19): siRNA sense strand
cuacaaauguuuauuggga

SEQ ID NO: 2281302 - RNA, 19 nt, Homo sapiens
  misc_RNA (1)...(19): siRNA sense strand
ugcaauggcaagaggaaaa

SEQ ID NO: 2281303 - RNA, 19 nt, Homo sapiens
  misc_RNA (1)...(19): siRNA sense strand
cugccauacuaccaggaaa

SEQ ID NO: 2281304 - RNA, 19 nt, Homo sapiens
  misc_RNA (1)...(19): siRNA sense strand
agaaacugauauuggcaga

SEQ ID NO: 2281305 - RNA, 19 nt, Homo sapiens
  misc_RNA (1)...(19): siRNA sense strand
agaacacagagaagagauu

SEQ ID NO: 2281306 - RNA, 19 nt, Homo sapiens
  misc_RNA (1)...(19): siRNA sense strand
uguaaauggaggucaugaa

SEQ ID NO: 2281307 - RNA, 19 nt, Homo sapiens
  misc_RNA (1)...(19): siRNA sense strand
cagauauagaacuucgaaa

SEQ ID NO: 2281308 - RNA, 19 nt, Homo sapiens
  misc_RNA (1)...(19): siRNA sense strand
gguugugacuggaucuaau

SEQ ID NO: 2281309 - RNA, 19 nt, Homo sapiens
  misc_RNA (1)...(19): siRNA sense strand
cgaaaaggagaaacugaua

SEQ ID NO: 2281310 - RNA, 19 nt, Homo sapiens
  misc_RNA (1)...(19): siRNA sense strand
auugagaaguacaguauca

SEQ ID NO: 2281311 - RNA, 19 nt, Homo sapiens
  misc_RNA (1)...(19): siRNA sense strand
gagaaguacaguaucaaca

SEQ ID NO: 2281312 - RNA, 19 nt, Homo sapiens
  misc_RNA (1)...(19): siRNA sense strand
ucacauuguccuugaaguu

SEQ ID NO: 2281313 - RNA, 19 nt, Homo sapiens
  misc_RNA (1)...(19): siRNA sense strand
gagcauuaaaccugaacca

SEQ ID NO: 2281314 - RNA, 19 nt, Homo sapiens
  misc_RNA (1)...(19): siRNA sense strand
acgacgagcucgacuucaa

SEQ ID NO: 2281315 - RNA, 19 nt, Homo sapiens
  misc_RNA (1)...(19): siRNA sense strand
ccuugaaguuccuccauau

SEQ ID NO: 2281316 - RNA, 19 nt, Homo sapiens
  misc_RNA (1)...(19): siRNA sense strand
uggaaaggccuucuagaga

SEQ ID NO: 2281317 - RNA, 19 nt, Homo sapiens
  misc_RNA (1)...(19): siRNA sense strand
cauacuaccaggaaaauua

SEQ ID NO: 2281318 - RNA, 19 nt, Homo sapiens
  misc_RNA (1)...(19): siRNA sense strand
cguuucagcuccaaaguca

SEQ ID NO: 2281319 - RNA, 19 nt, Homo sapiens
  misc_RNA (1)...(19): siRNA sense strand
cgaaaagccaauaaaucua

SEQ ID NO: 2281320 - RNA, 19 nt, Homo sapiens
  misc_RNA (1)...(19): siRNA sense strand
gaaaauaauaugucagcca

SEQ ID NO: 2281321 - RNA, 19 nt, Homo sapiens
  misc_RNA (1)...(19): siRNA sense strand
caucgagcccauuaugaaa

SEQ ID NO: 2281322 - RNA, 19 nt, Homo sapiens
  misc_RNA (1)...(19): siRNA sense strand
ccuuaauaugucacaguuu

SEQ ID NO: 2281323 - RNA, 19 nt, Homo sapiens
  misc_RNA (1)...(19): siRNA sense strand
ccauuggucugcaggacau

SEQ ID NO: 2281324 - RNA, 19 nt, Homo sapiens
  misc_RNA (1)...(19): siRNA sense strand
ucuccuagauccaguguca

SEQ ID NO: 2281325 - RNA, 19 nt, Homo sapiens
  misc_RNA (1)...(19): siRNA sense strand
ggacaaugugaacugaaaa

SEQ ID NO: 2281326 - RNA, 19 nt, Homo sapiens
  misc_RNA (1)...(19): siRNA sense strand
gcuccaucccacaaacaua

SEQ ID NO: 2281327 - RNA, 19 nt, Homo sapiens
  misc_RNA (1)...(19): siRNA sense strand
acauaugcauccaugguga

SEQ ID NO: 2281328 - RNA, 19 nt, Homo sapiens
  misc_RNA (1)...(19): siRNA sense strand
gugcccaaguauucaaauu

SEQ ID NO: 2281329 - RNA, 19 nt, Homo sapiens
  misc_RNA (1)...(19): siRNA sense strand
acagaagauacguggcuca

SEQ ID NO: 2281330 - RNA, 19 nt, Homo sapiens
  misc_RNA (1)...(19): siRNA sense strand
aguacuguguagagacuga

SEQ ID NO: 2281331 - RNA, 19 nt, Homo sapiens
  misc_RNA (1)...(19): siRNA sense strand
ccucucaaaacaaggaaaa

SEQ ID NO: 2281332 - RNA, 19 nt, Homo sapiens
  misc_RNA (1)...(19): siRNA sense strand
gaaagauucauguggugau

SEQ ID NO: 2281333 - RNA, 19 nt, Homo sapiens
  misc_RNA (1)...(19): siRNA sense strand
gcaucaacaguauggacuu

SEQ ID NO: 2281334 - RNA, 19 nt, Homo sapiens
  misc_RNA (1)...(19): siRNA sense strand
acuccgcaauucagauaua

SEQ ID NO: 2281335 - RNA, 19 nt, Homo sapiens
  misc_RNA (1)...(19): siRNA sense strand
aagcaagaacacagagaag

SEQ ID NO: 2281336 - RNA, 19 nt, Homo sapiens
  misc_RNA (1)...(19): siRNA sense strand
gaugcaucuucuugugaau

SEQ ID NO: 2281337 - RNA, 19 nt, Homo sapiens
  misc_RNA (1)...(19): siRNA sense strand
ggagaagaaacuuggcauc

SEQ ID NO: 2281338 - RNA, 19 nt, Homo sapiens
  misc_RNA (1)...(19): siRNA sense strand
acugauauuggcagaaaga

SEQ ID NO: 2281339 - RNA, 19 nt, Homo sapiens
  misc_RNA (1)...(19): siRNA sense strand
acugaaaauagaagugcaa

SEQ ID NO: 2281340 - RNA, 19 nt, Homo sapiens
  misc_RNA (1)...(19): siRNA sense strand
aauagaagugcaaccuaaa

SEQ ID NO: 2281341 - RNA, 19 nt, Homo sapiens
  misc_RNA (1)...(19): siRNA sense strand
cuccugggcuauaacgaaa

SEQ ID NO: 2281342 - RNA, 19 nt, Homo sapiens
  misc_RNA (1)...(19): siRNA sense strand
ugccauacuaccaggaaaa

SEQ ID NO: 2281343 - RNA, 19 nt, Homo sapiens
  misc_RNA (1)...(19): siRNA sense strand
aauuagaugcacaugaaga

SEQ ID NO: 2281344 - RNA, 19 nt, Homo sapiens
  misc_RNA (1)...(19): siRNA sense strand
caguauugauugugcaggu

SEQ ID NO: 2281345 - RNA, 19 nt, Homo sapiens
  misc_RNA (1)...(19): siRNA sense strand
ccgcaauucagauauagaa

SEQ ID NO: 2281346 - RNA, 19 nt, Homo sapiens
  misc_RNA (1)...(19): siRNA sense strand
uagaguacgacuuguguuu

SEQ ID NO: 2281347 - RNA, 19 nt, Homo sapiens
  misc_RNA (1)...(19): siRNA sense strand
ugauauuggcagaaagaau

SEQ ID NO: 2281348 - RNA, 19 nt, Homo sapiens
  misc_RNA (1)...(19): siRNA sense strand
agaugagaguguuaguaaa

SEQ ID NO: 2281349 - RNA, 19 nt, Homo sapiens
  misc_RNA (1)...(19): siRNA sense strand
acaaauguuuauugggaca

SEQ ID NO: 2281350 - RNA, 19 nt, Homo sapiens
  misc_RNA (1)...(19): siRNA sense strand
agguagaagggaagauaau

SEQ ID NO: 2281351 - RNA, 19 nt, Homo sapiens
  misc_RNA (1)...(19): siRNA sense strand
cugcagaucuugagccaga

SEQ ID NO: 2281352 - RNA, 19 nt, Homo sapiens
  misc_RNA (1)...(19): siRNA sense strand
uugugaagcuccugggcua

SEQ ID NO: 2281353 - RNA, 19 nt, Homo sapiens
  misc_RNA (1)...(19): siRNA sense strand
cugcaagccaagagauaau

SEQ ID NO: 2281354 - RNA, 19 nt, Homo sapiens
  misc_RNA (1)...(19): siRNA sense strand
gcucagacccagaggccuu

SEQ ID NO: 2281355 - RNA, 19 nt, Homo sapiens
  misc_RNA (1)...(19): siRNA sense strand
agugggagguagaagggaa

SEQ ID NO: 2281356 - RNA, 19 nt, Homo sapiens
  misc_RNA (1)...(19): siRNA sense strand
gcauuaaaccugaaccaga

SEQ ID NO: 2281357 - RNA, 19 nt, Homo sapiens
  misc_RNA (1)...(19): siRNA sense strand
gaaugaagcugcagcccga

SEQ ID NO: 2281358 - RNA, 19 nt, Homo sapiens
  misc_RNA (1)...(19): siRNA sense strand
gggaagugugacagaagau

SEQ ID NO: 2281359 - RNA, 19 nt, Homo sapiens
  misc_RNA (1)...(19): siRNA sense strand
guagaagggaagauaauca

SEQ ID NO: 2281360 - RNA, 19 nt, Homo sapiens
  misc_RNA (1)...(19): siRNA sense strand
ggaagauaaucagggaaaa

SEQ ID NO: 2281361 - RNA, 19 nt, Homo sapiens
  misc_RNA (1)...(19): siRNA sense strand
uguagagaugagaguguua

SEQ ID NO: 2281362 - RNA, 19 nt, Homo sapiens
  misc_RNA (1)...(19): siRNA sense strand
cuacaaauguuuauuggga

SEQ ID NO: 2281363 - RNA, 19 nt, Homo sapiens
  misc_RNA (1)...(19): siRNA sense strand
ugcaauggcaagaggaaaa

SEQ ID NO: 2281364 - RNA, 19 nt, Homo sapiens
  misc_RNA (1)...(19): siRNA sense strand
cugccauacuaccaggaaa

SEQ ID NO: 2281365 - RNA, 19 nt, Homo sapiens
  misc_RNA (1)...(19): siRNA sense strand
agaaacugauauuggcaga

SEQ ID NO: 2281366 - RNA, 19 nt, Homo sapiens
  misc_RNA (1)...(19): siRNA sense strand
agaacacagagaagagauu

SEQ ID NO: 2281367 - RNA, 19 nt, Homo sapiens
  misc_RNA (1)...(19): siRNA sense strand
uguaaauggaggucaugaa

SEQ ID NO: 2281368 - RNA, 19 nt, Homo sapiens
  misc_RNA (1)...(19): siRNA sense strand
cagauauagaacuucgaaa

SEQ ID NO: 2281369 - RNA, 19 nt, Homo sapiens
  misc_RNA (1)...(19): siRNA sense strand
gguugugacuggaucuaau

SEQ ID NO: 2281370 - RNA, 19 nt, Homo sapiens
  misc_RNA (1)...(19): siRNA sense strand
cgaaaaggagaaacugaua

SEQ ID NO: 2281371 - RNA, 19 nt, Homo sapiens
  misc_RNA (1)...(19): siRNA sense strand
auugagaaguacaguauca

SEQ ID NO: 2281372 - RNA, 19 nt, Homo sapiens
  misc_RNA (1)...(19): siRNA sense strand
gagaaguacaguaucaaca

SEQ ID NO: 2281373 - RNA, 19 nt, Homo sapiens
  misc_RNA (1)...(19): siRNA sense strand
ucacauuguccuugaaguu

SEQ ID NO: 2281374 - RNA, 19 nt, Homo sapiens
  misc_RNA (1)...(19): siRNA sense strand
gagcauuaaaccugaacca

SEQ ID NO: 2281375 - RNA, 19 nt, Homo sapiens
  misc_RNA (1)...(19): siRNA sense strand
acgacgagcucgacuucaa

SEQ ID NO: 2281376 - RNA, 19 nt, Homo sapiens
  misc_RNA (1)...(19): siRNA sense strand
ccuugaaguuccuccauau

SEQ ID NO: 2281377 - RNA, 19 nt, Homo sapiens
  misc_RNA (1)...(19): siRNA sense strand
uggaaaggccuucuagaga
